United States Patent Application Publication US 2014/0004565 A1 - sequence listing, part 123

SEQ ID NO: 3088818 - RNA, 19 nt, Artificial Sequence
  Description of Artificial Sequence: Synthetic oligonucleotide
gcccacuguacagauauuu

SEQ ID NO: 3088819 - RNA, 19 nt, Artificial Sequence
  Description of Artificial Sequence: Synthetic oligonucleotide
ccacuaaguggagaagucu

SEQ ID NO: 3088820 - RNA, 19 nt, Artificial Sequence
  Description of Artificial Sequence: Synthetic oligonucleotide
gggcagcccacuguacaga

SEQ ID NO: 3088821 - RNA, 19 nt, Artificial Sequence
  Description of Artificial Sequence: Synthetic oligonucleotide
cccaccucgccagacccuc

SEQ ID NO: 3088822 - RNA, 19 nt, Artificial Sequence
  Description of Artificial Sequence: Synthetic oligonucleotide
cccuugccccucccaauuc

SEQ ID NO: 3088823 - RNA, 19 nt, Artificial Sequence
  Description of Artificial Sequence: Synthetic oligonucleotide
cugcuagcccuggauggcu

SEQ ID NO: 3088824 - RNA, 19 nt, Artificial Sequence
  Description of Artificial Sequence: Synthetic oligonucleotide
ggcugagccuuuggaccac

SEQ ID NO: 3088825 - RNA, 19 nt, Artificial Sequence
  Description of Artificial Sequence: Synthetic oligonucleotide
ccaaauccguugccuuuaa

SEQ ID NO: 3088826 - RNA, 19 nt, Artificial Sequence
  Description of Artificial Sequence: Synthetic oligonucleotide
cccaaauccguugccuuua

SEQ ID NO: 3088827 - RNA, 19 nt, Artificial Sequence
  Description of Artificial Sequence: Synthetic oligonucleotide
gaaggccaagagggcugcu

SEQ ID NO: 3088828 - RNA, 19 nt, Artificial Sequence
  Description of Artificial Sequence: Synthetic oligonucleotide
agcccacuguacagauauu

SEQ ID NO: 3088829 - RNA, 19 nt, Artificial Sequence
  Description of Artificial Sequence: Synthetic oligonucleotide
ccucgccagacccucuucu

SEQ ID NO: 3088830 - RNA, 19 nt, Artificial Sequence
  Description of Artificial Sequence: Synthetic oligonucleotide
cucccaccccaaauccguu

SEQ ID NO: 3088831 - RNA, 19 nt, Artificial Sequence
  Description of Artificial Sequence: Synthetic oligonucleotide
cccuggauggcugagccuu

SEQ ID NO: 3088832 - RNA, 19 nt, Artificial Sequence
  Description of Artificial Sequence: Synthetic oligonucleotide
caccucgccagacccucuu

SEQ ID NO: 3088833 - RNA, 19 nt, Artificial Sequence
  Description of Artificial Sequence: Synthetic oligonucleotide
ccguugccuuuaacuacaa

SEQ ID NO: 3088834 - RNA, 19 nt, Artificial Sequence
  Description of Artificial Sequence: Synthetic oligonucleotide
ccccaaauccguugccuuu

SEQ ID NO: 3088835 - RNA, 19 nt, Artificial Sequence
  Description of Artificial Sequence: Synthetic oligonucleotide
cccucccaauucccaccuc

SEQ ID NO: 3088836 - RNA, 19 nt, Artificial Sequence
  Description of Artificial Sequence: Synthetic oligonucleotide
gccacagcucugugccccu

SEQ ID NO: 3088837 - RNA, 19 nt, Artificial Sequence
  Description of Artificial Sequence: Synthetic oligonucleotide
gcagcccacuguacagaua

SEQ ID NO: 3088838 - RNA, 19 nt, Artificial Sequence
  Description of Artificial Sequence: Synthetic oligonucleotide
gcccuggauggcugagccu

SEQ ID NO: 3088839 - RNA, 19 nt, Artificial Sequence
  Description of Artificial Sequence: Synthetic oligonucleotide
ccccucccaauucccaccu

SEQ ID NO: 3088840 - RNA, 19 nt, Artificial Sequence
  Description of Artificial Sequence: Synthetic oligonucleotide
ccccugccacagcucugug

SEQ ID NO: 3088841 - RNA, 19 nt, Artificial Sequence
  Description of Artificial Sequence: Synthetic oligonucleotide
gccccuugccccucccaau

SEQ ID NO: 3088842 - RNA, 19 nt, Artificial Sequence
  Description of Artificial Sequence: Synthetic oligonucleotide
ggccuggggcagagcagaa

SEQ ID NO: 3088843 - RNA, 19 nt, Artificial Sequence
  Description of Artificial Sequence: Synthetic oligonucleotide
ccccuugccccucccaauu

SEQ ID NO: 3088844 - RNA, 19 nt, Artificial Sequence
  Description of Artificial Sequence: Synthetic oligonucleotide
cguugccuuuaacuacaau

SEQ ID NO: 3088845 - RNA, 19 nt, Artificial Sequence
  Description of Artificial Sequence: Synthetic oligonucleotide
ccuggauggcugagccuuu

SEQ ID NO: 3088846 - RNA, 19 nt, Artificial Sequence
  Description of Artificial Sequence: Synthetic oligonucleotide
ccaccucgccagacccucu

SEQ ID NO: 3088847 - RNA, 19 nt, Artificial Sequence
  Description of Artificial Sequence: Synthetic oligonucleotide
ccacagcucugugccccuu

SEQ ID NO: 3088848 - RNA, 19 nt, Artificial Sequence
  Description of Artificial Sequence: Synthetic oligonucleotide
aaaauuagaaaggaaaacc

SEQ ID NO: 3088849 - RNA, 19 nt, Artificial Sequence
  Description of Artificial Sequence: Synthetic oligonucleotide
aaggaaaaccaguaaaguc

SEQ ID NO: 3088850 - RNA, 19 nt, Artificial Sequence
  Description of Artificial Sequence: Synthetic oligonucleotide
accaguaaagucuacagag

SEQ ID NO: 3088851 - RNA, 19 nt, Artificial Sequence
  Description of Artificial Sequence: Synthetic oligonucleotide
aaaccaguaaagucuacag

SEQ ID NO: 3088852 - RNA, 19 nt, Artificial Sequence
  Description of Artificial Sequence: Synthetic oligonucleotide
gaaguguucagcuggacag

SEQ ID NO: 3088853 - RNA, 19 nt, Artificial Sequence
  Description of Artificial Sequence: Synthetic oligonucleotide
gucugggaaaauuagaaag

SEQ ID NO: 3088854 - RNA, 19 nt, Artificial Sequence
  Description of Artificial Sequence: Synthetic oligonucleotide
auagguggccaccacaccc

SEQ ID NO: 3088855 - RNA, 19 nt, Artificial Sequence
  Description of Artificial Sequence: Synthetic oligonucleotide
aauuagaaaggaaaaccag

SEQ ID NO: 3088856 - RNA, 19 nt, Artificial Sequence
  Description of Artificial Sequence: Synthetic oligonucleotide
uuccaaagcaaucaggagu

SEQ ID NO: 3088857 - RNA, 19 nt, Artificial Sequence
  Description of Artificial Sequence: Synthetic oligonucleotide
uggacagucaccaagcuuc

SEQ ID NO: 3088858 - RNA, 19 nt, Artificial Sequence
  Description of Artificial Sequence: Synthetic oligonucleotide
gaaaggaaaaccaguaaag

SEQ ID NO: 3088859 - RNA, 19 nt, Artificial Sequence
  Description of Artificial Sequence: Synthetic oligonucleotide
guaaagucuacagagagug

SEQ ID NO: 3088860 - RNA, 19 nt, Artificial Sequence
  Description of Artificial Sequence: Synthetic oligonucleotide
uuagaaaggaaaaccagua

SEQ ID NO: 3088861 - RNA, 19 nt, Artificial Sequence
  Description of Artificial Sequence: Synthetic oligonucleotide
acagagaguggucugcagc

SEQ ID NO: 3088862 - RNA, 19 nt, Artificial Sequence
  Description of Artificial Sequence: Synthetic oligonucleotide
ugcucuuuguuccccaacg

SEQ ID NO: 3088863 - RNA, 19 nt, Artificial Sequence
  Description of Artificial Sequence: Synthetic oligonucleotide
agaaaggaaaaccaguaaa

SEQ ID NO: 3088864 - RNA, 19 nt, Artificial Sequence
  Description of Artificial Sequence: Synthetic oligonucleotide
aagaggaaauccuggggag

SEQ ID NO: 3088865 - RNA, 19 nt, Artificial Sequence
  Description of Artificial Sequence: Synthetic oligonucleotide
ucuuuguuccccaacgcug

SEQ ID NO: 3088866 - RNA, 19 nt, Artificial Sequence
  Description of Artificial Sequence: Synthetic oligonucleotide
aaagucuacagagaguggu

SEQ ID NO: 3088867 - RNA, 19 nt, Artificial Sequence
  Description of Artificial Sequence: Synthetic oligonucleotide
aaaggaaaaccaguaaagu

SEQ ID NO: 3088868 - RNA, 19 nt, Artificial Sequence
  Description of Artificial Sequence: Synthetic oligonucleotide
aauccuggggagcaucuuc

SEQ ID NO: 3088869 - RNA, 19 nt, Artificial Sequence
  Description of Artificial Sequence: Synthetic oligonucleotide
uccaaagcaaucaggaguc

SEQ ID NO: 3088870 - RNA, 19 nt, Artificial Sequence
  Description of Artificial Sequence: Synthetic oligonucleotide
aagcaaucaggagucacac

SEQ ID NO: 3088871 - RNA, 19 nt, Artificial Sequence
  Description of Artificial Sequence: Synthetic oligonucleotide
aggaaaaccaguaaagucu

SEQ ID NO: 3088872 - RNA, 19 nt, Artificial Sequence
  Description of Artificial Sequence: Synthetic oligonucleotide
gaagaggaaauccugggga

SEQ ID NO: 3088873 - RNA, 19 nt, Artificial Sequence
  Description of Artificial Sequence: Synthetic oligonucleotide
acucccuucucuuggaccg

SEQ ID NO: 3088874 - RNA, 19 nt, Artificial Sequence
  Description of Artificial Sequence: Synthetic oligonucleotide
caguaaagucuacagagag

SEQ ID NO: 3088875 - RNA, 19 nt, Artificial Sequence
  Description of Artificial Sequence: Synthetic oligonucleotide
aaaaccaguaaagucuaca

SEQ ID NO: 3088876 - RNA, 19 nt, Artificial Sequence
  Description of Artificial Sequence: Synthetic oligonucleotide
uucacauugcucuuuguuc

SEQ ID NO: 3088877 - RNA, 19 nt, Artificial Sequence
  Description of Artificial Sequence: Synthetic oligonucleotide
cuuccaaaccccaagccac

SEQ ID NO: 3088878 - RNA, 19 nt, Artificial Sequence
  Description of Artificial Sequence: Synthetic oligonucleotide
ucaggagucacacucgaau

SEQ ID NO: 3088879 - RNA, 19 nt, Artificial Sequence
  Description of Artificial Sequence: Synthetic oligonucleotide
ucuuggaccgcuuccaaac

SEQ ID NO: 3088880 - RNA, 19 nt, Artificial Sequence
  Description of Artificial Sequence: Synthetic oligonucleotide
uaaagucuacagagagugg

SEQ ID NO: 3088881 - RNA, 19 nt, Artificial Sequence
  Description of Artificial Sequence: Synthetic oligonucleotide
auuagaaaggaaaaccagu

SEQ ID NO: 3088882 - RNA, 19 nt, Artificial Sequence
  Description of Artificial Sequence: Synthetic oligonucleotide
uggggagcaggacaggaag

SEQ ID NO: 3088883 - RNA, 19 nt, Artificial Sequence
  Description of Artificial Sequence: Synthetic oligonucleotide
aagcuuccaaagcaaucag

SEQ ID NO: 3088884 - RNA, 19 nt, Artificial Sequence
  Description of Artificial Sequence: Synthetic oligonucleotide
cuuuguuccccaacgcugc

SEQ ID NO: 3088885 - RNA, 19 nt, Artificial Sequence
  Description of Artificial Sequence: Synthetic oligonucleotide
uagaaaggaaaaccaguaa

SEQ ID NO: 3088886 - RNA, 19 nt, Artificial Sequence
  Description of Artificial Sequence: Synthetic oligonucleotide
aaucaggagucacacucga

SEQ ID NO: 3088887 - RNA, 19 nt, Artificial Sequence
  Description of Artificial Sequence: Synthetic oligonucleotide
ucacacucgaaucuugcaa

SEQ ID NO: 3088888 - RNA, 19 nt, Artificial Sequence
  Description of Artificial Sequence: Synthetic oligonucleotide
aagacucacucccuucucu

SEQ ID NO: 3088889 - RNA, 19 nt, Artificial Sequence
  Description of Artificial Sequence: Synthetic oligonucleotide
aaagcaaucaggagucaca

SEQ ID NO: 3088890 - RNA, 19 nt, Artificial Sequence
  Description of Artificial Sequence: Synthetic oligonucleotide
agggugggaagacucacuc

SEQ ID NO: 3088891 - RNA, 19 nt, Artificial Sequence
  Description of Artificial Sequence: Synthetic oligonucleotide
cagagaguggucugcagcc

SEQ ID NO: 3088892 - RNA, 19 nt, Artificial Sequence
  Description of Artificial Sequence: Synthetic oligonucleotide
gauguggggagcaggacag

SEQ ID NO: 3088893 - RNA, 19 nt, Artificial Sequence
  Description of Artificial Sequence: Synthetic oligonucleotide
ggugggaagacucacuccc

SEQ ID NO: 3088894 - RNA, 19 nt, Artificial Sequence
  Description of Artificial Sequence: Synthetic oligonucleotide
caaucaggagucacacucg

SEQ ID NO: 3088895 - RNA, 19 nt, Artificial Sequence
  Description of Artificial Sequence: Synthetic oligonucleotide
ugggaaaauuagaaaggaa

SEQ ID NO: 3088896 - RNA, 19 nt, Artificial Sequence
  Description of Artificial Sequence: Synthetic oligonucleotide
acucgaaucuugcaauugu

SEQ ID NO: 3088897 - RNA, 19 nt, Artificial Sequence
  Description of Artificial Sequence: Synthetic oligonucleotide
ucuacagagaguggucugc

SEQ ID NO: 3088898 - RNA, 19 nt, Artificial Sequence
  Description of Artificial Sequence: Synthetic oligonucleotide
agaggaaauccuggggagc

SEQ ID NO: 3088899 - RNA, 19 nt, Artificial Sequence
  Description of Artificial Sequence: Synthetic oligonucleotide
cuuccaaagcaaucaggag

SEQ ID NO: 3088900 - RNA, 19 nt, Artificial Sequence
  Description of Artificial Sequence: Synthetic oligonucleotide
aagucuacagagagugguc

SEQ ID NO: 3088901 - RNA, 19 nt, Artificial Sequence
  Description of Artificial Sequence: Synthetic oligonucleotide
gcaaucaggagucacacuc

SEQ ID NO: 3088902 - RNA, 19 nt, Artificial Sequence
  Description of Artificial Sequence: Synthetic oligonucleotide
acacccagcagcuggaagu

SEQ ID NO: 3088903 - RNA, 19 nt, Artificial Sequence
  Description of Artificial Sequence: Synthetic oligonucleotide
aggagucacacucgaaucu

SEQ ID NO: 3088904 - RNA, 19 nt, Artificial Sequence
  Description of Artificial Sequence: Synthetic oligonucleotide
gucaccaagcuuccaaagc

SEQ ID NO: 3088905 - RNA, 19 nt, Artificial Sequence
  Description of Artificial Sequence: Synthetic oligonucleotide
uuggaccgcuuccaaaccc

SEQ ID NO: 3088906 - RNA, 19 nt, Artificial Sequence
  Description of Artificial Sequence: Synthetic oligonucleotide
agucaccaagcuuccaaag

SEQ ID NO: 3088907 - RNA, 19 nt, Artificial Sequence
  Description of Artificial Sequence: Synthetic oligonucleotide
uccccaacgcugcagugag

SEQ ID NO: 3088908 - RNA, 19 nt, Artificial Sequence
  Description of Artificial Sequence: Synthetic oligonucleotide
uuuucugauguggggagca

SEQ ID NO: 3088909 - RNA, 19 nt, Artificial Sequence
  Description of Artificial Sequence: Synthetic oligonucleotide
agucacacucgaaucuugc

SEQ ID NO: 3088910 - RNA, 19 nt, Artificial Sequence
  Description of Artificial Sequence: Synthetic oligonucleotide
agugagggugggaagacuc

SEQ ID NO: 3088911 - RNA, 19 nt, Artificial Sequence
  Description of Artificial Sequence: Synthetic oligonucleotide
gggaaaauuagaaaggaaa

SEQ ID NO: 3088912 - RNA, 19 nt, Artificial Sequence
  Description of Artificial Sequence: Synthetic oligonucleotide
uggaccgcuuccaaacccc

SEQ ID NO: 3088913 - RNA, 19 nt, Artificial Sequence
  Description of Artificial Sequence: Synthetic oligonucleotide
uguuccccaacgcugcagu

SEQ ID NO: 3088914 - RNA, 19 nt, Artificial Sequence
  Description of Artificial Sequence: Synthetic oligonucleotide
accgcuuccaaaccccaag

SEQ ID NO: 3088915 - RNA, 19 nt, Artificial Sequence
  Description of Artificial Sequence: Synthetic oligonucleotide
agucugggaaaauuagaaa

SEQ ID NO: 3088916 - RNA, 19 nt, Artificial Sequence
  Description of Artificial Sequence: Synthetic oligonucleotide
caagccaccagucugggaa

SEQ ID NO: 3088917 - RNA, 19 nt, Artificial Sequence
  Description of Artificial Sequence: Synthetic oligonucleotide
acagucaccaagcuuccaa

SEQ ID NO: 3088918 - RNA, 19 nt, Artificial Sequence
  Description of Artificial Sequence: Synthetic oligonucleotide
caagcuuccaaagcaauca

SEQ ID NO: 3088919 - RNA, 19 nt, Artificial Sequence
  Description of Artificial Sequence: Synthetic oligonucleotide
uuccaaaccccaagccacc

SEQ ID NO: 3088920 - RNA, 19 nt, Artificial Sequence
  Description of Artificial Sequence: Synthetic oligonucleotide
acauugcucuuuguucccc

SEQ ID NO: 3088921 - RNA, 19 nt, Artificial Sequence
  Description of Artificial Sequence: Synthetic oligonucleotide
aguguucagcuggacaguc

SEQ ID NO: 3088922 - RNA, 19 nt, Artificial Sequence
  Description of Artificial Sequence: Synthetic oligonucleotide
cuucucuuggaccgcuucc

SEQ ID NO: 3088923 - RNA, 19 nt, Artificial Sequence
  Description of Artificial Sequence: Synthetic oligonucleotide
cagucugggaaaauuagaa

SEQ ID NO: 3088924 - RNA, 19 nt, Artificial Sequence
  Description of Artificial Sequence: Synthetic oligonucleotide
aaaccccaagccaccaguc

SEQ ID NO: 3088925 - RNA, 19 nt, Artificial Sequence
  Description of Artificial Sequence: Synthetic oligonucleotide
ggaaaauuagaaaggaaaa

SEQ ID NO: 3088926 - RNA, 19 nt, Artificial Sequence
  Description of Artificial Sequence: Synthetic oligonucleotide
aaccccaagccaccagucu

SEQ ID NO: 3088927 - RNA, 19 nt, Artificial Sequence
  Description of Artificial Sequence: Synthetic oligonucleotide
gauagguggccaccacacc

SEQ ID NO: 3088928 - RNA, 19 nt, Artificial Sequence
  Description of Artificial Sequence: Synthetic oligonucleotide
ugcagugagggugggaaga

SEQ ID NO: 3088929 - RNA, 19 nt, Artificial Sequence
  Description of Artificial Sequence: Synthetic oligonucleotide
acaggaagaggaaauccug

SEQ ID NO: 3088930 - RNA, 19 nt, Artificial Sequence
  Description of Artificial Sequence: Synthetic oligonucleotide
uagguggccaccacaccca

SEQ ID NO: 3088931 - RNA, 19 nt, Artificial Sequence
  Description of Artificial Sequence: Synthetic oligonucleotide
gagaguggucugcagccgc

SEQ ID NO: 3088932 - RNA, 19 nt, Artificial Sequence
  Description of Artificial Sequence: Synthetic oligonucleotide
ucugcagccgccagggaua

SEQ ID NO: 3088933 - RNA, 19 nt, Artificial Sequence
  Description of Artificial Sequence: Synthetic oligonucleotide
aguaaagucuacagagagu

SEQ ID NO: 3088934 - RNA, 19 nt, Artificial Sequence
  Description of Artificial Sequence: Synthetic oligonucleotide
caggagucacacucgaauc

SEQ ID NO: 3088935 - RNA, 19 nt, Artificial Sequence
  Description of Artificial Sequence: Synthetic oligonucleotide
accagucugggaaaauuag

SEQ ID NO: 3088936 - RNA, 19 nt, Artificial Sequence
  Description of Artificial Sequence: Synthetic oligonucleotide
agcuuccaaagcaaucagg

SEQ ID NO: 3088937 - RNA, 19 nt, Artificial Sequence
  Description of Artificial Sequence: Synthetic oligonucleotide
cacauugcucuuuguuccc

SEQ ID NO: 3088938 - RNA, 19 nt, Artificial Sequence
  Description of Artificial Sequence: Synthetic oligonucleotide
agucuacagagaguggucu

SEQ ID NO: 3088939 - RNA, 19 nt, Artificial Sequence
  Description of Artificial Sequence: Synthetic oligonucleotide
cuuggaccgcuuccaaacc

SEQ ID NO: 3088940 - RNA, 19 nt, Artificial Sequence
  Description of Artificial Sequence: Synthetic oligonucleotide
cacucccuucucuuggacc

SEQ ID NO: 3088941 - RNA, 19 nt, Artificial Sequence
  Description of Artificial Sequence: Synthetic oligonucleotide
uucucuuggaccgcuucca

SEQ ID NO: 3088942 - RNA, 19 nt, Artificial Sequence
  Description of Artificial Sequence: Synthetic oligonucleotide
caaagcaaucaggagucac

SEQ ID NO: 3088943 - RNA, 19 nt, Artificial Sequence
  Description of Artificial Sequence: Synthetic oligonucleotide
gacucacucccuucucuug

SEQ ID NO: 3088944 - RNA, 19 nt, Artificial Sequence
  Description of Artificial Sequence: Synthetic oligonucleotide
cagcuggacagucaccaag

SEQ ID NO: 3088945 - RNA, 19 nt, Artificial Sequence
  Description of Artificial Sequence: Synthetic oligonucleotide
cugggaaaauuagaaagga

SEQ ID NO: 3088946 - RNA, 19 nt, Artificial Sequence
  Description of Artificial Sequence: Synthetic oligonucleotide
gaggaaauccuggggagca

SEQ ID NO: 3088947 - RNA, 19 nt, Artificial Sequence
  Description of Artificial Sequence: Synthetic oligonucleotide
agcagcuggaaguguucag

SEQ ID NO: 3088948 - RNA, 19 nt, Artificial Sequence
  Description of Artificial Sequence: Synthetic oligonucleotide
agggauagguggccaccac

SEQ ID NO: 3088949 - RNA, 19 nt, Artificial Sequence
  Description of Artificial Sequence: Synthetic oligonucleotide
agcuggaaguguucagcug

SEQ ID NO: 3088950 - RNA, 19 nt, Artificial Sequence
  Description of Artificial Sequence: Synthetic oligonucleotide
uguggggagcaggacagga

SEQ ID NO: 3088951 - RNA, 19 nt, Artificial Sequence
  Description of Artificial Sequence: Synthetic oligonucleotide
gucuacagagaguggucug

SEQ ID NO: 3088952 - RNA, 19 nt, Artificial Sequence
  Description of Artificial Sequence: Synthetic oligonucleotide
aaguguucagcuggacagu

SEQ ID NO: 3088953 - RNA, 19 nt, Artificial Sequence
  Description of Artificial Sequence: Synthetic oligonucleotide
gcuuccaaagcaaucagga

SEQ ID NO: 3088954 - RNA, 19 nt, Artificial Sequence
  Description of Artificial Sequence: Synthetic oligonucleotide
uugcucuuuguuccccaac

SEQ ID NO: 3088955 - RNA, 19 nt, Artificial Sequence
  Description of Artificial Sequence: Synthetic oligonucleotide
agaguggucugcagccgcc

SEQ ID NO: 3088956 - RNA, 19 nt, Artificial Sequence
  Description of Artificial Sequence: Synthetic oligonucleotide
agagaguggucugcagccg

SEQ ID NO: 3088957 - RNA, 19 nt, Artificial Sequence
  Description of Artificial Sequence: Synthetic oligonucleotide
gaagacucacucccuucuc

SEQ ID NO: 3088958 - RNA, 19 nt, Artificial Sequence
  Description of Artificial Sequence: Synthetic oligonucleotide
ggacaggaagaggaaaucc

SEQ ID NO: 3088959 - RNA, 19 nt, Artificial Sequence
  Description of Artificial Sequence: Synthetic oligonucleotide
ggaaguguucagcuggaca

SEQ ID NO: 3088960 - RNA, 19 nt, Artificial Sequence
  Description of Artificial Sequence: Synthetic oligonucleotide
uuucugauguggggagcag

SEQ ID NO: 3088961 - RNA, 19 nt, Artificial Sequence
  Description of Artificial Sequence: Synthetic oligonucleotide
gacaggaagaggaaauccu

SEQ ID NO: 3088962 - RNA, 19 nt, Artificial Sequence
  Description of Artificial Sequence: Synthetic oligonucleotide
ucuucacauugcucuuugu

SEQ ID NO: 3088963 - RNA, 19 nt, Artificial Sequence
  Description of Artificial Sequence: Synthetic oligonucleotide
uuccccaacgcugcaguga

SEQ ID NO: 3088964 - RNA, 19 nt, Artificial Sequence
  Description of Artificial Sequence: Synthetic oligonucleotide
ucucuuggaccgcuuccaa

SEQ ID NO: 3088965 - RNA, 19 nt, Artificial Sequence
  Description of Artificial Sequence: Synthetic oligonucleotide
agcaaucaggagucacacu

SEQ ID NO: 3088966 - RNA, 19 nt, Artificial Sequence
  Description of Artificial Sequence: Synthetic oligonucleotide
ugggaagacucacucccuu

SEQ ID NO: 3088967 - RNA, 19 nt, Artificial Sequence
  Description of Artificial Sequence: Synthetic oligonucleotide
guggucugcagccgccagg

SEQ ID NO: 3088968 - RNA, 19 nt, Artificial Sequence
  Description of Artificial Sequence: Synthetic oligonucleotide
aguggucugcagccgccag

SEQ ID NO: 3088969 - RNA, 19 nt, Artificial Sequence
  Description of Artificial Sequence: Synthetic oligonucleotide
gagucacacucgaaucuug

SEQ ID NO: 3088970 - RNA, 19 nt, Artificial Sequence
  Description of Artificial Sequence: Synthetic oligonucleotide
gcuuccaaaccccaagcca

SEQ ID NO: 3088971 - RNA, 19 nt, Artificial Sequence
  Description of Artificial Sequence: Synthetic oligonucleotide
aagccaccagucugggaaa

SEQ ID NO: 3088972 - RNA, 19 nt, Artificial Sequence
  Description of Artificial Sequence: Synthetic oligonucleotide
gucacacucgaaucuugca

SEQ ID NO: 3088973 - RNA, 19 nt, Artificial Sequence
  Description of Artificial Sequence: Synthetic oligonucleotide
ucacucccuucucuuggac

SEQ ID NO: 3088974 - RNA, 19 nt, Artificial Sequence
  Description of Artificial Sequence: Synthetic oligonucleotide
gaaaaccaguaaagucuac

SEQ ID NO: 3088975 - RNA, 19 nt, Artificial Sequence
  Description of Artificial Sequence: Synthetic oligonucleotide
cacucgaaucuugcaauug

SEQ ID NO: 3088976 - RNA, 19 nt, Artificial Sequence
  Description of Artificial Sequence: Synthetic oligonucleotide
auugcucuuuguuccccaa

SEQ ID NO: 3088977 - RNA, 19 nt, Artificial Sequence
  Description of Artificial Sequence: Synthetic oligonucleotide
agacucacucccuucucuu

SEQ ID NO: 3088978 - RNA, 19 nt, Artificial Sequence
  Description of Artificial Sequence: Synthetic oligonucleotide
acacucgaaucuugcaauu

SEQ ID NO: 3088979 - RNA, 19 nt, Artificial Sequence
  Description of Artificial Sequence: Synthetic oligonucleotide
ggauagguggccaccacac

SEQ ID NO: 3088980 - RNA, 19 nt, Artificial Sequence
  Description of Artificial Sequence: Synthetic oligonucleotide
cccaacgcugcagugaggg

SEQ ID NO: 3088981 - RNA, 19 nt, Artificial Sequence
  Description of Artificial Sequence: Synthetic oligonucleotide
cuggggagcaucuucacau

SEQ ID NO: 3088982 - RNA, 19 nt, Artificial Sequence
  Description of Artificial Sequence: Synthetic oligonucleotide
uccaaaccccaagccacca

SEQ ID NO: 3088983 - RNA, 19 nt, Artificial Sequence
  Description of Artificial Sequence: Synthetic oligonucleotide
cacacccagcagcuggaag

SEQ ID NO: 3088984 - RNA, 19 nt, Artificial Sequence
  Description of Artificial Sequence: Synthetic oligonucleotide
gggagcaggacaggaagag

SEQ ID NO: 3088985 - RNA, 19 nt, Artificial Sequence
  Description of Artificial Sequence: Synthetic oligonucleotide
ggggagcaucuucacauug

SEQ ID NO: 3088986 - RNA, 19 nt, Artificial Sequence
  Description of Artificial Sequence: Synthetic oligonucleotide
ggccaccacacccagcagc

SEQ ID NO: 3088987 - RNA, 19 nt, Artificial Sequence
  Description of Artificial Sequence: Synthetic oligonucleotide
cugcagugagggugggaag

SEQ ID NO: 3088988 - RNA, 19 nt, Artificial Sequence
  Description of Artificial Sequence: Synthetic oligonucleotide
gcucuuuguuccccaacgc

SEQ ID NO: 3088989 - RNA, 19 nt, Artificial Sequence
  Description of Artificial Sequence: Synthetic oligonucleotide
ucagcuggacagucaccaa

SEQ ID NO: 3088990 - RNA, 19 nt, Artificial Sequence
  Description of Artificial Sequence: Synthetic oligonucleotide
uccuggggagcaucuucac

SEQ ID NO: 3088991 - RNA, 19 nt, Artificial Sequence
  Description of Artificial Sequence: Synthetic oligonucleotide
gggagcaucuucacauugc

SEQ ID NO: 3088992 - RNA, 19 nt, Artificial Sequence
  Description of Artificial Sequence: Synthetic oligonucleotide
caccagucugggaaaauua

SEQ ID NO: 3088993 - RNA, 19 nt, Artificial Sequence
  Description of Artificial Sequence: Synthetic oligonucleotide
auccuggggagcaucuuca

SEQ ID NO: 3088994 - RNA, 19 nt, Artificial Sequence
  Description of Artificial Sequence: Synthetic oligonucleotide
guuccccaacgcugcagug

SEQ ID NO: 3088995 - RNA, 19 nt, Artificial Sequence
  Description of Artificial Sequence: Synthetic oligonucleotide
cuggaaguguucagcugga

SEQ ID NO: 3088996 - RNA, 19 nt, Artificial Sequence
  Description of Artificial Sequence: Synthetic oligonucleotide
ggaaaaccaguaaagucua

SEQ ID NO: 3088997 - RNA, 19 nt, Artificial Sequence
  Description of Artificial Sequence: Synthetic oligonucleotide
cacacucgaaucuugcaau

SEQ ID NO: 3088998 - RNA, 19 nt, Artificial Sequence
  Description of Artificial Sequence: Synthetic oligonucleotide
aaauccuggggagcaucuu

SEQ ID NO: 3088999 - RNA, 19 nt, Artificial Sequence
  Description of Artificial Sequence: Synthetic oligonucleotide
cucuuuguuccccaacgcu

SEQ ID NO: 3089000 - RNA, 19 nt, Artificial Sequence
  Description of Artificial Sequence: Synthetic oligonucleotide
cuucacauugcucuuuguu

SEQ ID NO: 3089001 - RNA, 19 nt, Artificial Sequence
  Description of Artificial Sequence: Synthetic oligonucleotide
caccaagcuuccaaagcaa

SEQ ID NO: 3089002 - RNA, 19 nt, Artificial Sequence
  Description of Artificial Sequence: Synthetic oligonucleotide
gaaauccuggggagcaucu

SEQ ID NO: 3089003 - RNA, 19 nt, Artificial Sequence
  Description of Artificial Sequence: Synthetic oligonucleotide
uggaaguguucagcuggac

SEQ ID NO: 3089004 - RNA, 19 nt, Artificial Sequence
  Description of Artificial Sequence: Synthetic oligonucleotide
cagucaccaagcuuccaaa

SEQ ID NO: 3089005 - RNA, 19 nt, Artificial Sequence
  Description of Artificial Sequence: Synthetic oligonucleotide
accaagcuuccaaagcaau

SEQ ID NO: 3089006 - RNA, 19 nt, Artificial Sequence
  Description of Artificial Sequence: Synthetic oligonucleotide
gggugggaagacucacucc

SEQ ID NO: 3089007 - RNA, 19 nt, Artificial Sequence
  Description of Artificial Sequence: Synthetic oligonucleotide
caggacaggaagaggaaau

SEQ ID NO: 3089008 - RNA, 19 nt, Artificial Sequence
  Description of Artificial Sequence: Synthetic oligonucleotide
uggggagcaucuucacauu

SEQ ID NO: 3089009 - RNA, 19 nt, Artificial Sequence
  Description of Artificial Sequence: Synthetic oligonucleotide
cacccagcagcuggaagug

SEQ ID NO: 3089010 - RNA, 19 nt, Artificial Sequence
  Description of Artificial Sequence: Synthetic oligonucleotide
caaaccccaagccaccagu

SEQ ID NO: 3089011 - RNA, 19 nt, Artificial Sequence
  Description of Artificial Sequence: Synthetic oligonucleotide
gggauagguggccaccaca

SEQ ID NO: 3089012 - RNA, 19 nt, Artificial Sequence
  Description of Artificial Sequence: Synthetic oligonucleotide
cucacucccuucucuugga

SEQ ID NO: 3089013 - RNA, 19 nt, Artificial Sequence
  Description of Artificial Sequence: Synthetic oligonucleotide
cuacagagaguggucugca

SEQ ID NO: 3089014 - RNA, 19 nt, Artificial Sequence
  Description of Artificial Sequence: Synthetic oligonucleotide
gggaagacucacucccuuc

SEQ ID NO: 3089015 - RNA, 19 nt, Artificial Sequence
  Description of Artificial Sequence: Synthetic oligonucleotide
ccagucugggaaaauuaga

SEQ ID NO: 3089016 - RNA, 19 nt, Artificial Sequence
  Description of Artificial Sequence: Synthetic oligonucleotide
cucuuggaccgcuuccaaa

SEQ ID NO: 3089017 - RNA, 19 nt, Artificial Sequence
  Description of Artificial Sequence: Synthetic oligonucleotide
auguggggagcaggacagg

SEQ ID NO: 3089018 - RNA, 19 nt, Artificial Sequence
  Description of Artificial Sequence: Synthetic oligonucleotide
ggaaauccuggggagcauc

SEQ ID NO: 3089019 - RNA, 19 nt, Artificial Sequence
  Description of Artificial Sequence: Synthetic oligonucleotide
cagcuggaaguguucagcu

SEQ ID NO: 3089020 - RNA, 19 nt, Artificial Sequence
  Description of Artificial Sequence: Synthetic oligonucleotide
gugagggugggaagacuca

SEQ ID NO: 3089021 - RNA, 19 nt, Artificial Sequence
  Description of Artificial Sequence: Synthetic oligonucleotide
ccgcuuccaaaccccaagc

SEQ ID NO: 3089022 - RNA, 19 nt, Artificial Sequence
  Description of Artificial Sequence: Synthetic oligonucleotide
ggacagucaccaagcuucc

SEQ ID NO: 3089023 - RNA, 19 nt, Artificial Sequence
  Description of Artificial Sequence: Synthetic oligonucleotide
gacagucaccaagcuucca

SEQ ID NO: 3089024 - RNA, 19 nt, Artificial Sequence
  Description of Artificial Sequence: Synthetic oligonucleotide
guguucagcuggacaguca

SEQ ID NO: 3089025 - RNA, 19 nt, Artificial Sequence
  Description of Artificial Sequence: Synthetic oligonucleotide
cugcagccgccagggauag

SEQ ID NO: 3089026 - RNA, 19 nt, Artificial Sequence
  Description of Artificial Sequence: Synthetic oligonucleotide
gaguggucugcagccgcca

SEQ ID NO: 3089027 - RNA, 19 nt, Artificial Sequence
  Description of Artificial Sequence: Synthetic oligonucleotide
cucccuucucuuggaccgc

SEQ ID NO: 3089028 - RNA, 19 nt, Artificial Sequence
  Description of Artificial Sequence: Synthetic oligonucleotide
cagggauagguggccacca

SEQ ID NO: 3089029 - RNA, 19 nt, Artificial Sequence
  Description of Artificial Sequence: Synthetic oligonucleotide
ccaaaccccaagccaccag

SEQ ID NO: 3089030 - RNA, 19 nt, Artificial Sequence
  Description of Artificial Sequence: Synthetic oligonucleotide
aucaggagucacacucgaa

SEQ ID NO: 3089031 - RNA, 19 nt, Artificial Sequence
  Description of Artificial Sequence: Synthetic oligonucleotide
cagccgccagggauaggug

SEQ ID NO: 3089032 - RNA, 19 nt, Artificial Sequence
  Description of Artificial Sequence: Synthetic oligonucleotide
aggaaauccuggggagcau

SEQ ID NO: 3089033 - RNA, 19 nt, Artificial Sequence
  Description of Artificial Sequence: Synthetic oligonucleotide
ccagggauagguggccacc

SEQ ID NO: 3089034 - RNA, 19 nt, Artificial Sequence
  Description of Artificial Sequence: Synthetic oligonucleotide
gcagugagggugggaagac

SEQ ID NO: 3089035 - RNA, 19 nt, Artificial Sequence
  Description of Artificial Sequence: Synthetic oligonucleotide
gccgccagggauagguggc

SEQ ID NO: 3089036 - RNA, 19 nt, Artificial Sequence
  Description of Artificial Sequence: Synthetic oligonucleotide
gccagggauagguggccac

SEQ ID NO: 3089037 - RNA, 19 nt, Artificial Sequence
  Description of Artificial Sequence: Synthetic oligonucleotide
gcaggacaggaagaggaaa

SEQ ID NO: 3089038 - RNA, 19 nt, Artificial Sequence
  Description of Artificial Sequence: Synthetic oligonucleotide
guggggagcaggacaggaa

SEQ ID NO: 3089039 - RNA, 19 nt, Artificial Sequence
  Description of Artificial Sequence: Synthetic oligonucleotide
agccaccagucugggaaaa

SEQ ID NO: 3089040 - RNA, 19 nt, Artificial Sequence
  Description of Artificial Sequence: Synthetic oligonucleotide
cuggacagucaccaagcuu

SEQ ID NO: 3089041 - RNA, 19 nt, Artificial Sequence
  Description of Artificial Sequence: Synthetic oligonucleotide
gaccgcuuccaaaccccaa

SEQ ID NO: 3089042 - RNA, 19 nt, Artificial Sequence
  Description of Artificial Sequence: Synthetic oligonucleotide
ugcagccgccagggauagg

SEQ ID NO: 3089043 - RNA, 19 nt, Artificial Sequence
  Description of Artificial Sequence: Synthetic oligonucleotide
gcagccgccagggauaggu

SEQ ID NO: 3089044 - RNA, 19 nt, Artificial Sequence
  Description of Artificial Sequence: Synthetic oligonucleotide
acccagcagcuggaagugu

SEQ ID NO: 3089045 - RNA, 19 nt, Artificial Sequence
  Description of Artificial Sequence: Synthetic oligonucleotide
ccuggggagcaucuucaca

SEQ ID NO: 3089046 - RNA, 19 nt, Artificial Sequence
  Description of Artificial Sequence: Synthetic oligonucleotide
gugggaagacucacucccu

SEQ ID NO: 3089047 - RNA, 19 nt, Artificial Sequence
  Description of Artificial Sequence: Synthetic oligonucleotide
gcuggacagucaccaagcu

SEQ ID NO: 3089048 - RNA, 19 nt, Artificial Sequence
  Description of Artificial Sequence: Synthetic oligonucleotide
ggagucacacucgaaucuu

SEQ ID NO: 3089049 - RNA, 19 nt, Artificial Sequence
  Description of Artificial Sequence: Synthetic oligonucleotide
ggaccgcuuccaaacccca

SEQ ID NO: 3089050 - RNA, 19 nt, Artificial Sequence
  Description of Artificial Sequence: Synthetic oligonucleotide
gguggccaccacacccagc

SEQ ID NO: 3089051 - RNA, 19 nt, Artificial Sequence
  Description of Artificial Sequence: Synthetic oligonucleotide
gccaccacacccagcagcu

SEQ ID NO: 3089052 - RNA, 19 nt, Artificial Sequence
  Description of Artificial Sequence: Synthetic oligonucleotide
ccccaacgcugcagugagg

SEQ ID NO: 3089053 - RNA, 19 nt, Artificial Sequence
  Description of Artificial Sequence: Synthetic oligonucleotide
ccgccagggauagguggcc

SEQ ID NO: 3089054 - RNA, 19 nt, Artificial Sequence
  Description of Artificial Sequence: Synthetic oligonucleotide
ccaaagcaaucaggaguca

SEQ ID NO: 3089055 - RNA, 19 nt, Artificial Sequence
  Description of Artificial Sequence: Synthetic oligonucleotide
ccaagccaccagucuggga

SEQ ID NO: 3089056 - RNA, 19 nt, Artificial Sequence
  Description of Artificial Sequence: Synthetic oligonucleotide
ggucugcagccgccaggga

SEQ ID NO: 3089057 - RNA, 19 nt, Artificial Sequence
  Description of Artificial Sequence: Synthetic oligonucleotide
cccagcagcuggaaguguu

SEQ ID NO: 3089058 - RNA, 19 nt, Artificial Sequence
  Description of Artificial Sequence: Synthetic oligonucleotide
ccaccagucugggaaaauu

SEQ ID NO: 3089059 - RNA, 19 nt, Artificial Sequence
  Description of Artificial Sequence: Synthetic oligonucleotide
ccaacgcugcagugagggu

SEQ ID NO: 3089060 - RNA, 19 nt, Artificial Sequence
  Description of Artificial Sequence: Synthetic oligonucleotide
gccaccagucugggaaaau

SEQ ID NO: 3089061 - RNA, 19 nt, Artificial Sequence
  Description of Artificial Sequence: Synthetic oligonucleotide
cgccagggauagguggcca

SEQ ID NO: 3089062 - RNA, 19 nt, Artificial Sequence
  Description of Artificial Sequence: Synthetic oligonucleotide
uguuuugggaaccucaagc

SEQ ID NO: 3089063 - RNA, 19 nt, Artificial Sequence
  Description of Artificial Sequence: Synthetic oligonucleotide
uuugggaaccucaagcuga

SEQ ID NO: 3089064 - RNA, 19 nt, Artificial Sequence
  Description of Artificial Sequence: Synthetic oligonucleotide
ugucuugcaaaguuggccc

SEQ ID NO: 3089065 - RNA, 19 nt, Artificial Sequence
  Description of Artificial Sequence: Synthetic oligonucleotide
cacaccauuccucacauag

SEQ ID NO: 3089066 - RNA, 19 nt, Artificial Sequence
  Description of Artificial Sequence: Synthetic oligonucleotide
caagcuaacacaccauucc

SEQ ID NO: 3089067 - RNA, 19 nt, Artificial Sequence
  Description of Artificial Sequence: Synthetic oligonucleotide
ucuaucagcagccaagcua

SEQ ID NO: 3089068 - RNA, 19 nt, Artificial Sequence
  Description of Artificial Sequence: Synthetic oligonucleotide
ucagcagccaagcuaacac

SEQ ID NO: 3089069 - RNA, 19 nt, Artificial Sequence
  Description of Artificial Sequence: Synthetic oligonucleotide
augucuugcaaaguuggcc

SEQ ID NO: 3089070 - RNA, 19 nt, Artificial Sequence
  Description of Artificial Sequence: Synthetic oligonucleotide
uuuugggaaccucaagcug

SEQ ID NO: 3089071 - RNA, 19 nt, Artificial Sequence
  Description of Artificial Sequence: Synthetic oligonucleotide
caccauuccucacauaggg

SEQ ID NO: 3089072 - RNA, 19 nt, Artificial Sequence
  Description of Artificial Sequence: Synthetic oligonucleotide
agcugacucuaucagcagc

SEQ ID NO: 3089073 - RNA, 19 nt, Artificial Sequence
  Description of Artificial Sequence: Synthetic oligonucleotide
uaacacaccauuccucaca

SEQ ID NO: 3089074 - RNA, 19 nt, Artificial Sequence
  Description of Artificial Sequence: Synthetic oligonucleotide
aagcuaacacaccauuccu

SEQ ID NO: 3089075 - RNA, 19 nt, Artificial Sequence
  Description of Artificial Sequence: Synthetic oligonucleotide
ucaagcugacucuaucagc

SEQ ID NO: 3089076 - RNA, 19 nt, Artificial Sequence
  Description of Artificial Sequence: Synthetic oligonucleotide
guucccaugucuugcaaag

SEQ ID NO: 3089077 - RNA, 19 nt, Artificial Sequence
  Description of Artificial Sequence: Synthetic oligonucleotide
acucuaucagcagccaagc

SEQ ID NO: 3089078 - RNA, 19 nt, Artificial Sequence
  Description of Artificial Sequence: Synthetic oligonucleotide
gacucuaucagcagccaag

SEQ ID NO: 3089079 - RNA, 19 nt, Artificial Sequence
  Description of Artificial Sequence: Synthetic oligonucleotide
caagcugacucuaucagca

SEQ ID NO: 3089080 - RNA, 19 nt, Artificial Sequence
  Description of Artificial Sequence: Synthetic oligonucleotide
ucaucauccucuuguucag

SEQ ID NO: 3089081 - RNA, 19 nt, Artificial Sequence
  Description of Artificial Sequence: Synthetic oligonucleotide
cauccucuuguucaguagc

SEQ ID NO: 3089082 - RNA, 19 nt, Artificial Sequence
  Description of Artificial Sequence: Synthetic oligonucleotide
cucaagcugacucuaucag

SEQ ID NO: 3089083 - RNA, 19 nt, Artificial Sequence
  Description of Artificial Sequence: Synthetic oligonucleotide
aaguuggcccaguacuuca

SEQ ID NO: 3089084 - RNA, 19 nt, Artificial Sequence
  Description of Artificial Sequence: Synthetic oligonucleotide
cuaucagcagccaagcuaa

SEQ ID NO: 3089085 - RNA, 19 nt, Artificial Sequence
  Description of Artificial Sequence: Synthetic oligonucleotide
ucauccucuuguucaguag

SEQ ID NO: 3089086 - RNA, 19 nt, Artificial Sequence
  Description of Artificial Sequence: Synthetic oligonucleotide
uguucaguagcuccuccuc

SEQ ID NO: 3089087 - RNA, 19 nt, Artificial Sequence
  Description of Artificial Sequence: Synthetic oligonucleotide
cauuccucacauagggccc

SEQ ID NO: 3089088 - RNA, 19 nt, Artificial Sequence
  Description of Artificial Sequence: Synthetic oligonucleotide
agcagccaagcuaacacac

SEQ ID NO: 3089089 - RNA, 19 nt, Artificial Sequence
  Description of Artificial Sequence: Synthetic oligonucleotide
ccauuccucacauagggcc

SEQ ID NO: 3089090 - RNA, 19 nt, Artificial Sequence
  Description of Artificial Sequence: Synthetic oligonucleotide
aagcugacucuaucagcag

SEQ ID NO: 3089091 - RNA, 19 nt, Artificial Sequence
  Description of Artificial Sequence: Synthetic oligonucleotide
accucaagcugacucuauc

SEQ ID NO: 3089092 - RNA, 19 nt, Artificial Sequence
  Description of Artificial Sequence: Synthetic oligonucleotide
uuggcccaguacuucauca

SEQ ID NO: 3089093 - RNA, 19 nt, Artificial Sequence
  Description of Artificial Sequence: Synthetic oligonucleotide
auguuuugggaaccucaag

SEQ ID NO: 3089094 - RNA, 19 nt, Artificial Sequence
  Description of Artificial Sequence: Synthetic oligonucleotide
caugucuugcaaaguuggc

SEQ ID NO: 3089095 - RNA, 19 nt, Artificial Sequence
  Description of Artificial Sequence: Synthetic oligonucleotide
ccaugucuugcaaaguugg

SEQ ID NO: 3089096 - RNA, 19 nt, Artificial Sequence
  Description of Artificial Sequence: Synthetic oligonucleotide
uuguucaguagcuccuccu

SEQ ID NO: 3089097 - RNA, 19 nt, Artificial Sequence
  Description of Artificial Sequence: Synthetic oligonucleotide
cuuguucaguagcuccucc

SEQ ID NO: 3089098 - RNA, 19 nt, Artificial Sequence
  Description of Artificial Sequence: Synthetic oligonucleotide
agcuaacacaccauuccuc

SEQ ID NO: 3089099 - RNA, 19 nt, Artificial Sequence
  Description of Artificial Sequence: Synthetic oligonucleotide
guuuugggaaccucaagcu

SEQ ID NO: 3089100 - RNA, 19 nt, Artificial Sequence
  Description of Artificial Sequence: Synthetic oligonucleotide
accauuccucacauagggc

SEQ ID NO: 3089101 - RNA, 19 nt, Artificial Sequence
  Description of Artificial Sequence: Synthetic oligonucleotide
gcuaacacaccauuccuca

SEQ ID NO: 3089102 - RNA, 19 nt, Artificial Sequence
  Description of Artificial Sequence: Synthetic oligonucleotide
uugggaaccucaagcugac

SEQ ID NO: 3089103 - RNA, 19 nt, Artificial Sequence
  Description of Artificial Sequence: Synthetic oligonucleotide
ugacucuaucagcagccaa

SEQ ID NO: 3089104 - RNA, 19 nt, Artificial Sequence
  Description of Artificial Sequence: Synthetic oligonucleotide
uugggguucccaugucuug

SEQ ID NO: 3089105 - RNA, 19 nt, Artificial Sequence
  Description of Artificial Sequence: Synthetic oligonucleotide
ccucuuguucaguagcucc

SEQ ID NO: 3089106 - RNA, 19 nt, Artificial Sequence
  Description of Artificial Sequence: Synthetic oligonucleotide
ugggguucccaugucuugc

SEQ ID NO: 3089107 - RNA, 19 nt, Artificial Sequence
  Description of Artificial Sequence: Synthetic oligonucleotide
aucauccucuuguucagua

SEQ ID NO: 3089108 - RNA, 19 nt, Artificial Sequence
  Description of Artificial Sequence: Synthetic oligonucleotide
acaccauuccucacauagg

SEQ ID NO: 3089109 - RNA, 19 nt, Artificial Sequence
  Description of Artificial Sequence: Synthetic oligonucleotide
gggaaccucaagcugacuc

SEQ ID NO: 3089110 - RNA, 19 nt, Artificial Sequence
  Description of Artificial Sequence: Synthetic oligonucleotide
gcaaaguuggcccaguacu

SEQ ID NO: 3089111 - RNA, 19 nt, Artificial Sequence
  Description of Artificial Sequence: Synthetic oligonucleotide
cagccaagcuaacacacca

SEQ ID NO: 3089112 - RNA, 19 nt, Artificial Sequence
  Description of Artificial Sequence: Synthetic oligonucleotide
gcugacucuaucagcagcc

SEQ ID NO: 3089113 - RNA, 19 nt, Artificial Sequence
  Description of Artificial Sequence: Synthetic oligonucleotide
aucagcagccaagcuaaca

SEQ ID NO: 3089114 - RNA, 19 nt, Artificial Sequence
  Description of Artificial Sequence: Synthetic oligonucleotide
uugcaaaguuggcccagua

SEQ ID NO: 3089115 - RNA, 19 nt, Artificial Sequence
  Description of Artificial Sequence: Synthetic oligonucleotide
ccaagcuaacacaccauuc

SEQ ID NO: 3089116 - RNA, 19 nt, Artificial Sequence
  Description of Artificial Sequence: Synthetic oligonucleotide
uggcccaguacuucaucau

SEQ ID NO: 3089117 - RNA, 19 nt, Artificial Sequence
  Description of Artificial Sequence: Synthetic oligonucleotide
uccucuuguucaguagcuc

SEQ ID NO: 3089118 - RNA, 19 nt, Artificial Sequence
  Description of Artificial Sequence: Synthetic oligonucleotide
auccucuuguucaguagcu

SEQ ID NO: 3089119 - RNA, 19 nt, Artificial Sequence
  Description of Artificial Sequence: Synthetic oligonucleotide
gucuugcaaaguuggccca

SEQ ID NO: 3089120 - RNA, 19 nt, Artificial Sequence
  Description of Artificial Sequence: Synthetic oligonucleotide
uaucagcagccaagcuaac

SEQ ID NO: 3089121 - RNA, 19 nt, Artificial Sequence
  Description of Artificial Sequence: Synthetic oligonucleotide
gcccaguacuucaucaucc

SEQ ID NO: 3089122 - RNA, 19 nt, Artificial Sequence
  Description of Artificial Sequence: Synthetic oligonucleotide
uucccaugucuugcaaagu

SEQ ID NO: 3089123 - RNA, 19 nt, Artificial Sequence
  Description of Artificial Sequence: Synthetic oligonucleotide
guuggcccaguacuucauc

SEQ ID NO: 3089124 - RNA, 19 nt, Artificial Sequence
  Description of Artificial Sequence: Synthetic oligonucleotide
ucgcuguugggguucccau

SEQ ID NO: 3089125 - RNA, 19 nt, Artificial Sequence
  Description of Artificial Sequence: Synthetic oligonucleotide
cagcagccaagcuaacaca

SEQ ID NO: 3089126 - RNA, 19 nt, Artificial Sequence
  Description of Artificial Sequence: Synthetic oligonucleotide
cucuuguucaguagcuccu

SEQ ID NO: 3089127 - RNA, 19 nt, Artificial Sequence
  Description of Artificial Sequence: Synthetic oligonucleotide
ggaaccucaagcugacucu

SEQ ID NO: 3089128 - RNA, 19 nt, Artificial Sequence
  Description of Artificial Sequence: Synthetic oligonucleotide
gaaccucaagcugacucua

SEQ ID NO: 3089129 - RNA, 19 nt, Artificial Sequence
  Description of Artificial Sequence: Synthetic oligonucleotide
ccucaagcugacucuauca

SEQ ID NO: 3089130 - RNA, 19 nt, Artificial Sequence
  Description of Artificial Sequence: Synthetic oligonucleotide
aaccucaagcugacucuau

SEQ ID NO: 3089131 - RNA, 19 nt, Artificial Sequence
  Description of Artificial Sequence: Synthetic oligonucleotide
gguucccaugucuugcaaa

SEQ ID NO: 3089132 - RNA, 19 nt, Artificial Sequence
  Description of Artificial Sequence: Synthetic oligonucleotide
caaaguuggcccaguacuu

SEQ ID NO: 3089133 - RNA, 19 nt, Artificial Sequence
  Description of Artificial Sequence: Synthetic oligonucleotide
gcuguugggguucccaugu

SEQ ID NO: 3089134 - RNA, 19 nt, Artificial Sequence
  Description of Artificial Sequence: Synthetic oligonucleotide
ccaguacuucaucauccuc

SEQ ID NO: 3089135 - RNA, 19 nt, Artificial Sequence
  Description of Artificial Sequence: Synthetic oligonucleotide
agccaagcuaacacaccau

SEQ ID NO: 3089136 - RNA, 19 nt, Artificial Sequence
  Description of Artificial Sequence: Synthetic oligonucleotide
cugacucuaucagcagcca

SEQ ID NO: 3089137 - RNA, 19 nt, Artificial Sequence
  Description of Artificial Sequence: Synthetic oligonucleotide
aguuggcccaguacuucau

SEQ ID NO: 3089138 - RNA, 19 nt, Artificial Sequence
  Description of Artificial Sequence: Synthetic oligonucleotide
cucgcuguugggguuccca

SEQ ID NO: 3089139 - RNA, 19 nt, Artificial Sequence
  Description of Artificial Sequence: Synthetic oligonucleotide
ugggaaccucaagcugacu

SEQ ID NO: 3089140 - RNA, 19 nt, Artificial Sequence
  Description of Artificial Sequence: Synthetic oligonucleotide
gggguucccaugucuugca

SEQ ID NO: 3089141 - RNA, 19 nt, Artificial Sequence
  Description of Artificial Sequence: Synthetic oligonucleotide
acacaccauuccucacaua

SEQ ID NO: 3089142 - RNA, 19 nt, Artificial Sequence
  Description of Artificial Sequence: Synthetic oligonucleotide
cucuaucagcagccaagcu

SEQ ID NO: 3089143 - RNA, 19 nt, Artificial Sequence
  Description of Artificial Sequence: Synthetic oligonucleotide
gccaagcuaacacaccauu

SEQ ID NO: 3089144 - RNA, 19 nt, Artificial Sequence
  Description of Artificial Sequence: Synthetic oligonucleotide
cuugcaaaguuggcccagu

SEQ ID NO: 3089145 - RNA, 19 nt, Artificial Sequence
  Description of Artificial Sequence: Synthetic oligonucleotide
cgcuguugggguucccaug

SEQ ID NO: 3089146 - RNA, 19 nt, Artificial Sequence
  Description of Artificial Sequence: Synthetic oligonucleotide
ggguucccaugucuugcaa

SEQ ID NO: 3089147 - RNA, 19 nt, Artificial Sequence
  Description of Artificial Sequence: Synthetic oligonucleotide
cccaguacuucaucauccu

SEQ ID NO: 3089148 - RNA, 19 nt, Artificial Sequence
  Description of Artificial Sequence: Synthetic oligonucleotide
ucauuggagacaaugaucc

SEQ ID NO: 3089149 - RNA, 19 nt, Artificial Sequence
  Description of Artificial Sequence: Synthetic oligonucleotide
ucaucugggaccaugaaga

SEQ ID NO: 3089150 - RNA, 19 nt, Artificial Sequence
  Description of Artificial Sequence: Synthetic oligonucleotide
aaaggugaagggcagcagg

SEQ ID NO: 3089151 - RNA, 19 nt, Artificial Sequence
  Description of Artificial Sequence: Synthetic oligonucleotide
ucugggaccaugaagaggu

SEQ ID NO: 3089152 - RNA, 19 nt, Artificial Sequence
  Description of Artificial Sequence: Synthetic oligonucleotide
uuucccacaaaggugaagg

SEQ ID NO: 3089153 - RNA, 19 nt, Artificial Sequence
  Description of Artificial Sequence: Synthetic oligonucleotide
gagacaaugaucccauccg

SEQ ID NO: 3089154 - RNA, 19 nt, Artificial Sequence
  Description of Artificial Sequence: Synthetic oligonucleotide
ucaucauaggaagaaaucc

SEQ ID NO: 3089155 - RNA, 19 nt, Artificial Sequence
  Description of Artificial Sequence: Synthetic oligonucleotide
gaagagguuucccacaaag

SEQ ID NO: 3089156 - RNA, 19 nt, Artificial Sequence
  Description of Artificial Sequence: Synthetic oligonucleotide
aacucauccaggguggggc

SEQ ID NO: 3089157 - RNA, 19 nt, Artificial Sequence
  Description of Artificial Sequence: Synthetic oligonucleotide
aaccugucaucauaggaag

SEQ ID NO: 3089158 - RNA, 19 nt, Artificial Sequence
  Description of Artificial Sequence: Synthetic oligonucleotide
uucaccaugaaccugucau

SEQ ID NO: 3089159 - RNA, 19 nt, Artificial Sequence
  Description of Artificial Sequence: Synthetic oligonucleotide
uaggaagaaauccucuugc

SEQ ID NO: 3089160 - RNA, 19 nt, Artificial Sequence
  Description of Artificial Sequence: Synthetic oligonucleotide
agacuccuccgccagaucc

SEQ ID NO: 3089161 - RNA, 19 nt, Artificial Sequence
  Description of Artificial Sequence: Synthetic oligonucleotide
agagguuucccacaaaggu

SEQ ID NO: 3089162 - RNA, 19 nt, Artificial Sequence
  Description of Artificial Sequence: Synthetic oligonucleotide
aggaagaaauccucuugcc

SEQ ID NO: 3089163 - RNA, 19 nt, Artificial Sequence
  Description of Artificial Sequence: Synthetic oligonucleotide
ugaaccugucaucauagga

SEQ ID NO: 3089164 - RNA, 19 nt, Artificial Sequence
  Description of Artificial Sequence: Synthetic oligonucleotide
auaggaagaaauccucuug

SEQ ID NO: 3089165 - RNA, 19 nt, Artificial Sequence
  Description of Artificial Sequence: Synthetic oligonucleotide
ucucugaugaucgccaucc

SEQ ID NO: 3089166 - RNA, 19 nt, Artificial Sequence
  Description of Artificial Sequence: Synthetic oligonucleotide
caugaaccugucaucauag

SEQ ID NO: 3089167 - RNA, 19 nt, Artificial Sequence
  Description of Artificial Sequence: Synthetic oligonucleotide
ugucaucauaggaagaaau

SEQ ID NO: 3089168 - RNA, 19 nt, Artificial Sequence
  Description of Artificial Sequence: Synthetic oligonucleotide
aucgccauccacuugucag

SEQ ID NO: 3089169 - RNA, 19 nt, Artificial Sequence
  Description of Artificial Sequence: Synthetic oligonucleotide
ucauaggaagaaauccucu

SEQ ID NO: 3089170 - RNA, 19 nt, Artificial Sequence
  Description of Artificial Sequence: Synthetic oligonucleotide
aaugaucccauccgucucu

SEQ ID NO: 3089171 - RNA, 19 nt, Artificial Sequence
  Description of Artificial Sequence: Synthetic oligonucleotide
acuugucagacuccuccgc

SEQ ID NO: 3089172 - RNA, 19 nt, Artificial Sequence
  Description of Artificial Sequence: Synthetic oligonucleotide
acaaugaucccauccgucu

SEQ ID NO: 3089173 - RNA, 19 nt, Artificial Sequence
  Description of Artificial Sequence: Synthetic oligonucleotide
cuuagcagagcccuguuuc

SEQ ID NO: 3089174 - RNA, 19 nt, Artificial Sequence
  Description of Artificial Sequence: Synthetic oligonucleotide
aagagguuucccacaaagg

SEQ ID NO: 3089175 - RNA, 19 nt, Artificial Sequence
  Description of Artificial Sequence: Synthetic oligonucleotide
augaucgccauccacuugu

SEQ ID NO: 3089176 - RNA, 19 nt, Artificial Sequence
  Description of Artificial Sequence: Synthetic oligonucleotide
agaaauccucuugccaucc

SEQ ID NO: 3089177 - RNA, 19 nt, Artificial Sequence
  Description of Artificial Sequence: Synthetic oligonucleotide
aucauaggaagaaauccuc

SEQ ID NO: 3089178 - RNA, 19 nt, Artificial Sequence
  Description of Artificial Sequence: Synthetic oligonucleotide
ucugaugaucgccauccac

SEQ ID NO: 3089179 - RNA, 19 nt, Artificial Sequence
  Description of Artificial Sequence: Synthetic oligonucleotide
gucaucugggaccaugaag

SEQ ID NO: 3089180 - RNA, 19 nt, Artificial Sequence
  Description of Artificial Sequence: Synthetic oligonucleotide
auuggagacaaugauccca

SEQ ID NO: 3089181 - RNA, 19 nt, Artificial Sequence
  Description of Artificial Sequence: Synthetic oligonucleotide
uuagcagagcccuguuucc

SEQ ID NO: 3089182 - RNA, 19 nt, Artificial Sequence
  Description of Artificial Sequence: Synthetic oligonucleotide
cauccaugacucgugaggg

SEQ ID NO: 3089183 - RNA, 19 nt, Artificial Sequence
  Description of Artificial Sequence: Synthetic oligonucleotide
aaauccucuugccauccau

SEQ ID NO: 3089184 - RNA, 19 nt, Artificial Sequence
  Description of Artificial Sequence: Synthetic oligonucleotide
ggagacaaugaucccaucc

SEQ ID NO: 3089185 - RNA, 19 nt, Artificial Sequence
  Description of Artificial Sequence: Synthetic oligonucleotide
uuggagacaaugaucccau

SEQ ID NO: 3089186 - RNA, 19 nt, Artificial Sequence
  Description of Artificial Sequence: Synthetic oligonucleotide
acucgugagggugucaggg

SEQ ID NO: 3089187 - RNA, 19 nt, Artificial Sequence
  Description of Artificial Sequence: Synthetic oligonucleotide
gagguuucccacaaaggug

SEQ ID NO: 3089188 - RNA, 19 nt, Artificial Sequence
  Description of Artificial Sequence: Synthetic oligonucleotide
cuugucagacuccuccgcc

SEQ ID NO: 3089189 - RNA, 19 nt, Artificial Sequence
  Description of Artificial Sequence: Synthetic oligonucleotide
gaaccugucaucauaggaa

SEQ ID NO: 3089190 - RNA, 19 nt, Artificial Sequence
  Description of Artificial Sequence: Synthetic oligonucleotide
gaucccauccgucucuuca

SEQ ID NO: 3089191 - RNA, 19 nt, Artificial Sequence
  Description of Artificial Sequence: Synthetic oligonucleotide
cagugggucaucugggacc

SEQ ID NO: 3089192 - RNA, 19 nt, Artificial Sequence
  Description of Artificial Sequence: Synthetic oligonucleotide
uccaugacucgugagggug

SEQ ID NO: 3089193 - RNA, 19 nt, Artificial Sequence
  Description of Artificial Sequence: Synthetic oligonucleotide
cuggucauuggagacaaug

SEQ ID NO: 3089194 - RNA, 19 nt, Artificial Sequence
  Description of Artificial Sequence: Synthetic oligonucleotide
gccauuucgccccaguggg

SEQ ID NO: 3089195 - RNA, 19 nt, Artificial Sequence
  Description of Artificial Sequence: Synthetic oligonucleotide
augaaccugucaucauagg

SEQ ID NO: 3089196 - RNA, 19 nt, Artificial Sequence
  Description of Artificial Sequence: Synthetic oligonucleotide
agacaaugaucccauccgu

SEQ ID NO: 3089197 - RNA, 19 nt, Artificial Sequence
  Description of Artificial Sequence: Synthetic oligonucleotide
aauccucuugccauccaug

SEQ ID NO: 3089198 - RNA, 19 nt, Artificial Sequence
  Description of Artificial Sequence: Synthetic oligonucleotide
aggguggggccauuucgcc

SEQ ID NO: 3089199 - RNA, 19 nt, Artificial Sequence
  Description of Artificial Sequence: Synthetic oligonucleotide
ucccacaaaggugaagggc

SEQ ID NO: 3089200 - RNA, 19 nt, Artificial Sequence
  Description of Artificial Sequence: Synthetic oligonucleotide
ugacucgugagggugucag

SEQ ID NO: 3089201 - RNA, 19 nt, Artificial Sequence
  Description of Artificial Sequence: Synthetic oligonucleotide
agguuucccacaaagguga

SEQ ID NO: 3089202 - RNA, 19 nt, Artificial Sequence
  Description of Artificial Sequence: Synthetic oligonucleotide
cacuugucagacuccuccg

SEQ ID NO: 3089203 - RNA, 19 nt, Artificial Sequence
  Description of Artificial Sequence: Synthetic oligonucleotide
aacuggucauuggagacaa

SEQ ID NO: 3089204 - RNA, 19 nt, Artificial Sequence
  Description of Artificial Sequence: Synthetic oligonucleotide
aagggcagcaggcgcucuc

SEQ ID NO: 3089205 - RNA, 19 nt, Artificial Sequence
  Description of Artificial Sequence: Synthetic oligonucleotide
augaagagguuucccacaa

SEQ ID NO: 3089206 - RNA, 19 nt, Artificial Sequence
  Description of Artificial Sequence: Synthetic oligonucleotide
aggaacucauccagggugg

SEQ ID NO: 3089207 - RNA, 19 nt, Artificial Sequence
  Description of Artificial Sequence: Synthetic oligonucleotide
uugccauccaugacucgug

SEQ ID NO: 3089208 - RNA, 19 nt, Artificial Sequence
  Description of Artificial Sequence: Synthetic oligonucleotide
gucauuggagacaaugauc

SEQ ID NO: 3089209 - RNA, 19 nt, Artificial Sequence
  Description of Artificial Sequence: Synthetic oligonucleotide
cauccgucucuucagccag

SEQ ID NO: 3089210 - RNA, 19 nt, Artificial Sequence
  Description of Artificial Sequence: Synthetic oligonucleotide
agggcuggggagucuuagc

SEQ ID NO: 3089211 - RNA, 19 nt, Artificial Sequence
  Description of Artificial Sequence: Synthetic oligonucleotide
uugucagacuccuccgcca

SEQ ID NO: 3089212 - RNA, 19 nt, Artificial Sequence
  Description of Artificial Sequence: Synthetic oligonucleotide
cauuggagacaaugauccc

SEQ ID NO: 3089213 - RNA, 19 nt, Artificial Sequence
  Description of Artificial Sequence: Synthetic oligonucleotide
ugaugaucgccauccacuu

SEQ ID NO: 3089214 - RNA, 19 nt, Artificial Sequence
  Description of Artificial Sequence: Synthetic oligonucleotide
ccauccaugacucgugagg

SEQ ID NO: 3089215 - RNA, 19 nt, Artificial Sequence
  Description of Artificial Sequence: Synthetic oligonucleotide
ucaccaugaaccugucauc

SEQ ID NO: 3089216 - RNA, 19 nt, Artificial Sequence
  Description of Artificial Sequence: Synthetic oligonucleotide
caucauaggaagaaauccu

SEQ ID NO: 3089217 - RNA, 19 nt, Artificial Sequence
  Description of Artificial Sequence: Synthetic oligonucleotide
ggaagaaauccucuugcca

SEQ ID NO: 3089218 - RNA, 19 nt, Artificial Sequence
  Description of Artificial Sequence: Synthetic oligonucleotide
aucugggaccaugaagagg

SEQ ID NO: 3089219 - RNA, 19 nt, Artificial Sequence
  Description of Artificial Sequence: Synthetic oligonucleotide
gaugaucgccauccacuug

SEQ ID NO: 3089220 - RNA, 19 nt, Artificial Sequence
  Description of Artificial Sequence: Synthetic oligonucleotide
cucuugccauccaugacuc

SEQ ID NO: 3089221 - RNA, 19 nt, Artificial Sequence
  Description of Artificial Sequence: Synthetic oligonucleotide
ggccauuucgccccagugg

SEQ ID NO: 3089222 - RNA, 19 nt, Artificial Sequence
  Description of Artificial Sequence: Synthetic oligonucleotide
ggaacuggucauuggagac

SEQ ID NO: 3089223 - RNA, 19 nt, Artificial Sequence
  Description of Artificial Sequence: Synthetic oligonucleotide
ucgccauccacuugucaga

SEQ ID NO: 3089224 - RNA, 19 nt, Artificial Sequence
  Description of Artificial Sequence: Synthetic oligonucleotide
gacaaugaucccauccguc

SEQ ID NO: 3089225 - RNA, 19 nt, Artificial Sequence
  Description of Artificial Sequence: Synthetic oligonucleotide
caggguggggccauuucgc

SEQ ID NO: 3089226 - RNA, 19 nt, Artificial Sequence
  Description of Artificial Sequence: Synthetic oligonucleotide
ccacuugucagacuccucc

SEQ ID NO: 3089227 - RNA, 19 nt, Artificial Sequence
  Description of Artificial Sequence: Synthetic oligonucleotide
ucuugccauccaugacucg

SEQ ID NO: 3089228 - RNA, 19 nt, Artificial Sequence
  Description of Artificial Sequence: Synthetic oligonucleotide
caucugggaccaugaagag

SEQ ID NO: 3089229 - RNA, 19 nt, Artificial Sequence
  Description of Artificial Sequence: Synthetic oligonucleotide
cuguggggccccuggaggg

SEQ ID NO: 3089230 - RNA, 19 nt, Artificial Sequence
  Description of Artificial Sequence: Synthetic oligonucleotide
ucuuagcagagcccuguuu

SEQ ID NO: 3089231 - RNA, 19 nt, Artificial Sequence
  Description of Artificial Sequence: Synthetic oligonucleotide
gaacucauccagggugggg

SEQ ID NO: 3089232 - RNA, 19 nt, Artificial Sequence
  Description of Artificial Sequence: Synthetic oligonucleotide
uccugacugucuucuucag

SEQ ID NO: 3089233 - RNA, 19 nt, Artificial Sequence
  Description of Artificial Sequence: Synthetic oligonucleotide
cugaugaucgccauccacu

SEQ ID NO: 3089234 - RNA, 19 nt, Artificial Sequence
  Description of Artificial Sequence: Synthetic oligonucleotide
ucccauccgucucuucagc

SEQ ID NO: 3089235 - RNA, 19 nt, Artificial Sequence
  Description of Artificial Sequence: Synthetic oligonucleotide
uccucuugccauccaugac

SEQ ID NO: 3089236 - RNA, 19 nt, Artificial Sequence
  Description of Artificial Sequence: Synthetic oligonucleotide
gaccaugaagagguuuccc

SEQ ID NO: 3089237 - RNA, 19 nt, Artificial Sequence
  Description of Artificial Sequence: Synthetic oligonucleotide
cauccacuugucagacucc

SEQ ID NO: 3089238 - RNA, 19 nt, Artificial Sequence
  Description of Artificial Sequence: Synthetic oligonucleotide
caaugaucccauccgucuc

SEQ ID NO: 3089239 - RNA, 19 nt, Artificial Sequence
  Description of Artificial Sequence: Synthetic oligonucleotide
gguggggccauuucgcccc

SEQ ID NO: 3089240 - RNA, 19 nt, Artificial Sequence
  Description of Artificial Sequence: Synthetic oligonucleotide
gacucgugagggugucagg

SEQ ID NO: 3089241 - RNA, 19 nt, Artificial Sequence
  Description of Artificial Sequence: Synthetic oligonucleotide
agucuuagcagagcccugu

SEQ ID NO: 3089242 - RNA, 19 nt, Artificial Sequence
  Description of Artificial Sequence: Synthetic oligonucleotide
ugccauccaugacucguga

SEQ ID NO: 3089243 - RNA, 19 nt, Artificial Sequence
  Description of Artificial Sequence: Synthetic oligonucleotide
ggugaagggcagcaggcgc

SEQ ID NO: 3089244 - RNA, 19 nt, Artificial Sequence
  Description of Artificial Sequence: Synthetic oligonucleotide
ucccggaacuggucauugg

SEQ ID NO: 3089245 - RNA, 19 nt, Artificial Sequence
  Description of Artificial Sequence: Synthetic oligonucleotide
cuggggagucuuagcagag

SEQ ID NO: 3089246 - RNA, 19 nt, Artificial Sequence
  Description of Artificial Sequence: Synthetic oligonucleotide
ccauccacuugucagacuc

SEQ ID NO: 3089247 - RNA, 19 nt, Artificial Sequence
  Description of Artificial Sequence: Synthetic oligonucleotide
aggugaagggcagcaggcg

SEQ ID NO: 3089248 - RNA, 19 nt, Artificial Sequence
  Description of Artificial Sequence: Synthetic oligonucleotide
gaacuggucauuggagaca

SEQ ID NO: 3089249 - RNA, 19 nt, Artificial Sequence
  Description of Artificial Sequence: Synthetic oligonucleotide
ugggucaucugggaccaug

SEQ ID NO: 3089250 - RNA, 19 nt, Artificial Sequence
  Description of Artificial Sequence: Synthetic oligonucleotide
aggcgcucucugaugaucg

SEQ ID NO: 3089251 - RNA, 19 nt, Artificial Sequence
  Description of Artificial Sequence: Synthetic oligonucleotide
agugggucaucugggacca

SEQ ID NO: 3089252 - RNA, 19 nt, Artificial Sequence
  Description of Artificial Sequence: Synthetic oligonucleotide
ugacugucuucuucaggaa

SEQ ID NO: 3089253 - RNA, 19 nt, Artificial Sequence
  Description of Artificial Sequence: Synthetic oligonucleotide
gccccagugggucaucugg

SEQ ID NO: 3089254 - RNA, 19 nt, Artificial Sequence
  Description of Artificial Sequence: Synthetic oligonucleotide
uccuccgccagaucccgga

SEQ ID NO: 3089255 - RNA, 19 nt, Artificial Sequence
  Description of Artificial Sequence: Synthetic oligonucleotide
ucagacuccuccgccagau

SEQ ID NO: 3089256 - RNA, 19 nt, Artificial Sequence
  Description of Artificial Sequence: Synthetic oligonucleotide
ugucuucuucaggaacuca

SEQ ID NO: 3089257 - RNA, 19 nt, Artificial Sequence
  Description of Artificial Sequence: Synthetic oligonucleotide
cccacaaaggugaagggca

SEQ ID NO: 3089258 - RNA, 19 nt, Artificial Sequence
  Description of Artificial Sequence: Synthetic oligonucleotide
cauuucgccccaguggguc

SEQ ID NO: 3089259 - RNA, 19 nt, Artificial Sequence
  Description of Artificial Sequence: Synthetic oligonucleotide
caccaugaaccugucauca

SEQ ID NO: 3089260 - RNA, 19 nt, Artificial Sequence
  Description of Artificial Sequence: Synthetic oligonucleotide
auccacuugucagacuccu

SEQ ID NO: 3089261 - RNA, 19 nt, Artificial Sequence
  Description of Artificial Sequence: Synthetic oligonucleotide
guuucccacaaaggugaag

SEQ ID NO: 3089262 - RNA, 19 nt, Artificial Sequence
  Description of Artificial Sequence: Synthetic oligonucleotide
gacuccuccgccagauccc

SEQ ID NO: 3089263 - RNA, 19 nt, Artificial Sequence
  Description of Artificial Sequence: Synthetic oligonucleotide
gagggcuggggagucuuag

SEQ ID NO: 3089264 - RNA, 19 nt, Artificial Sequence
  Description of Artificial Sequence: Synthetic oligonucleotide
gaaauccucuugccaucca

SEQ ID NO: 3089265 - RNA, 19 nt, Artificial Sequence
  Description of Artificial Sequence: Synthetic oligonucleotide
acuccuccgccagaucccg

SEQ ID NO: 3089266 - RNA, 19 nt, Artificial Sequence
  Description of Artificial Sequence: Synthetic oligonucleotide
cagaucccggaacugguca

SEQ ID NO: 3089267 - RNA, 19 nt, Artificial Sequence
  Description of Artificial Sequence: Synthetic oligonucleotide
cgucucuucagccagcuuc

SEQ ID NO: 3089268 - RNA, 19 nt, Artificial Sequence
  Description of Artificial Sequence: Synthetic oligonucleotide
agaucccggaacuggucau

SEQ ID NO: 3089269 - RNA, 19 nt, Artificial Sequence
  Description of Artificial Sequence: Synthetic oligonucleotide
accaugaaccugucaucau

SEQ ID NO: 3089270 - RNA, 19 nt, Artificial Sequence
  Description of Artificial Sequence: Synthetic oligonucleotide
uggggagucuuagcagagc

SEQ ID NO: 3089271 - RNA, 19 nt, Artificial Sequence
  Description of Artificial Sequence: Synthetic oligonucleotide
ccaggguggggccauuucg

SEQ ID NO: 3089272 - RNA, 19 nt, Artificial Sequence
  Description of Artificial Sequence: Synthetic oligonucleotide
uagcagagcccuguuuccu

SEQ ID NO: 3089273 - RNA, 19 nt, Artificial Sequence
  Description of Artificial Sequence: Synthetic oligonucleotide
agcccuguuuccugacugu

SEQ ID NO: 3089274 - RNA, 19 nt, Artificial Sequence
  Description of Artificial Sequence: Synthetic oligonucleotide
uccaggguggggccauuuc

SEQ ID NO: 3089275 - RNA, 19 nt, Artificial Sequence
  Description of Artificial Sequence: Synthetic oligonucleotide
gaucgccauccacuuguca

SEQ ID NO: 3089276 - RNA, 19 nt, Artificial Sequence
  Description of Artificial Sequence: Synthetic oligonucleotide
gcuggggagucuuagcaga

SEQ ID NO: 3089277 - RNA, 19 nt, Artificial Sequence
  Description of Artificial Sequence: Synthetic oligonucleotide
uccacuugucagacuccuc

SEQ ID NO: 3089278 - RNA, 19 nt, Artificial Sequence
  Description of Artificial Sequence: Synthetic oligonucleotide
ggcuggggagucuuagcag

SEQ ID NO: 3089279 - RNA, 19 nt, Artificial Sequence
  Description of Artificial Sequence: Synthetic oligonucleotide
cauaggaagaaauccucuu

SEQ ID NO: 3089280 - RNA, 19 nt, Artificial Sequence
  Description of Artificial Sequence: Synthetic oligonucleotide
ugaucgccauccacuuguc

SEQ ID NO: 3089281 - RNA, 19 nt, Artificial Sequence
  Description of Artificial Sequence: Synthetic oligonucleotide
ccugacugucuucuucagg

SEQ ID NO: 3089282 - RNA, 19 nt, Artificial Sequence
  Description of Artificial Sequence: Synthetic oligonucleotide
uccgucucuucagccagcu

SEQ ID NO: 3089283 - RNA, 19 nt, Artificial Sequence
  Description of Artificial Sequence: Synthetic oligonucleotide
gggaccaugaagagguuuc

SEQ ID NO: 3089284 - RNA, 19 nt, Artificial Sequence
  Description of Artificial Sequence: Synthetic oligonucleotide
aucccggaacuggucauug

SEQ ID NO: 3089285 - RNA, 19 nt, Artificial Sequence
  Description of Artificial Sequence: Synthetic oligonucleotide
ccggaacuggucauuggag

SEQ ID NO: 3089286 - RNA, 19 nt, Artificial Sequence
  Description of Artificial Sequence: Synthetic oligonucleotide
cugucuucuucaggaacuc

SEQ ID NO: 3089287 - RNA, 19 nt, Artificial Sequence
  Description of Artificial Sequence: Synthetic oligonucleotide
cuugccauccaugacucgu

SEQ ID NO: 3089288 - RNA, 19 nt, Artificial Sequence
  Description of Artificial Sequence: Synthetic oligonucleotide
ugggaccaugaagagguuu

SEQ ID NO: 3089289 - RNA, 19 nt, Artificial Sequence
  Description of Artificial Sequence: Synthetic oligonucleotide
gagucuuagcagagcccug

SEQ ID NO: 3089290 - RNA, 19 nt, Artificial Sequence
  Description of Artificial Sequence: Synthetic oligonucleotide
ggucauuggagacaaugau

SEQ ID NO: 3089291 - RNA, 19 nt, Artificial Sequence
  Description of Artificial Sequence: Synthetic oligonucleotide
auccgucucuucagccagc

SEQ ID NO: 3089292 - RNA, 19 nt, Artificial Sequence
  Description of Artificial Sequence: Synthetic oligonucleotide
ccacaaaggugaagggcag

SEQ ID NO: 3089293 - RNA, 19 nt, Artificial Sequence
  Description of Artificial Sequence: Synthetic oligonucleotide
uggagacaaugaucccauc

SEQ ID NO: 3089294 - RNA, 19 nt, Artificial Sequence
  Description of Artificial Sequence: Synthetic oligonucleotide
gggcuggggagucuuagca

SEQ ID NO: 3089295 - RNA, 19 nt, Artificial Sequence
  Description of Artificial Sequence: Synthetic oligonucleotide
uguggggccccuggagggc

SEQ ID NO: 3089296 - RNA, 19 nt, Artificial Sequence
  Description of Artificial Sequence: Synthetic oligonucleotide
ggagucuuagcagagcccu

SEQ ID NO: 3089297 - RNA, 19 nt, Artificial Sequence
  Description of Artificial Sequence: Synthetic oligonucleotide
ggaccaugaagagguuucc

SEQ ID NO: 3089298 - RNA, 19 nt, Artificial Sequence
  Description of Artificial Sequence: Synthetic oligonucleotide
caugacucgugaggguguc

SEQ ID NO: 3089299 - RNA, 19 nt, Artificial Sequence
  Description of Artificial Sequence: Synthetic oligonucleotide
ggaacucauccaggguggg

SEQ ID NO: 3089300 - RNA, 19 nt, Artificial Sequence
  Description of Artificial Sequence: Synthetic oligonucleotide
accugucaucauaggaaga

SEQ ID NO: 3089301 - RNA, 19 nt, Artificial Sequence
  Description of Artificial Sequence: Synthetic oligonucleotide
gccauccaugacucgugag

SEQ ID NO: 3089302 - RNA, 19 nt, Artificial Sequence
  Description of Artificial Sequence: Synthetic oligonucleotide
ggguggggccauuucgccc

SEQ ID NO: 3089303 - RNA, 19 nt, Artificial Sequence
  Description of Artificial Sequence: Synthetic oligonucleotide
cccauccgucucuucagcc

SEQ ID NO: 3089304 - RNA, 19 nt, Artificial Sequence
  Description of Artificial Sequence: Synthetic oligonucleotide
ugaucccauccgucucuuc

SEQ ID NO: 3089305 - RNA, 19 nt, Artificial Sequence
  Description of Artificial Sequence: Synthetic oligonucleotide
ccccagugggucaucuggg

SEQ ID NO: 3089306 - RNA, 19 nt, Artificial Sequence
  Description of Artificial Sequence: Synthetic oligonucleotide
gggccauuucgccccagug

SEQ ID NO: 3089307 - RNA, 19 nt, Artificial Sequence
  Description of Artificial Sequence: Synthetic oligonucleotide
gggagucuuagcagagccc

SEQ ID NO: 3089308 - RNA, 19 nt, Artificial Sequence
  Description of Artificial Sequence: Synthetic oligonucleotide
ccugucaucauaggaagaa

SEQ ID NO: 3089309 - RNA, 19 nt, Artificial Sequence
  Description of Artificial Sequence: Synthetic oligonucleotide
caggcgcucucugaugauc

SEQ ID NO: 3089310 - RNA, 19 nt, Artificial Sequence
  Description of Artificial Sequence: Synthetic oligonucleotide
ccagugggucaucugggac

SEQ ID NO: 3089311 - RNA, 19 nt, Artificial Sequence
  Description of Artificial Sequence: Synthetic oligonucleotide
uuucgccccagugggucau

SEQ ID NO: 3089312 - RNA, 19 nt, Artificial Sequence
  Description of Artificial Sequence: Synthetic oligonucleotide
ccucuugccauccaugacu

SEQ ID NO: 3089313 - RNA, 19 nt, Artificial Sequence
  Description of Artificial Sequence: Synthetic oligonucleotide
agggcagcaggcgcucucu

SEQ ID NO: 3089314 - RNA, 19 nt, Artificial Sequence
  Description of Artificial Sequence: Synthetic oligonucleotide
cuccuccgccagaucccgg

SEQ ID NO: 3089315 - RNA, 19 nt, Artificial Sequence
  Description of Artificial Sequence: Synthetic oligonucleotide
uggagggcuggggagucuu

SEQ ID NO: 3089316 - RNA, 19 nt, Artificial Sequence
  Description of Artificial Sequence: Synthetic oligonucleotide
gucagacuccuccgccaga

SEQ ID NO: 3089317 - RNA, 19 nt, Artificial Sequence
  Description of Artificial Sequence: Synthetic oligonucleotide
ggcgcucucugaugaucgc

SEQ ID NO: 3089318 - RNA, 19 nt, Artificial Sequence
  Description of Artificial Sequence: Synthetic oligonucleotide
ccaugaaccugucaucaua

SEQ ID NO: 3089319 - RNA, 19 nt, Artificial Sequence
  Description of Artificial Sequence: Synthetic oligonucleotide
gugaagggcagcaggcgcu

SEQ ID NO: 3089320 - RNA, 19 nt, Artificial Sequence
  Description of Artificial Sequence: Synthetic oligonucleotide
augacucgugaggguguca

SEQ ID NO: 3089321 - RNA, 19 nt, Artificial Sequence
  Description of Artificial Sequence: Synthetic oligonucleotide
ccagaucccggaacugguc

SEQ ID NO: 3089322 - RNA, 19 nt, Artificial Sequence
  Description of Artificial Sequence: Synthetic oligonucleotide
cccggaacuggucauugga

SEQ ID NO: 3089323 - RNA, 19 nt, Artificial Sequence
  Description of Artificial Sequence: Synthetic oligonucleotide
ucgccccagugggucaucu

SEQ ID NO: 3089324 - RNA, 19 nt, Artificial Sequence
  Description of Artificial Sequence: Synthetic oligonucleotide
gggucaucugggaccauga

SEQ ID NO: 3089325 - RNA, 19 nt, Artificial Sequence
  Description of Artificial Sequence: Synthetic oligonucleotide
gcgcucucugaugaucgcc

SEQ ID NO: 3089326 - RNA, 19 nt, Artificial Sequence
  Description of Artificial Sequence: Synthetic oligonucleotide
cagacuccuccgccagauc

SEQ ID NO: 3089327 - RNA, 19 nt, Artificial Sequence
  Description of Artificial Sequence: Synthetic oligonucleotide
augaucccauccgucucuu

SEQ ID NO: 3089328 - RNA, 19 nt, Artificial Sequence
  Description of Artificial Sequence: Synthetic oligonucleotide
cgccagaucccggaacugg

SEQ ID NO: 3089329 - RNA, 19 nt, Artificial Sequence
  Description of Artificial Sequence: Synthetic oligonucleotide
cgcucucugaugaucgcca

SEQ ID NO: 3089330 - RNA, 19 nt, Artificial Sequence
  Description of Artificial Sequence: Synthetic oligonucleotide
uggggccauuucgccccag

SEQ ID NO: 3089331 - RNA, 19 nt, Artificial Sequence
  Description of Artificial Sequence: Synthetic oligonucleotide
gccccuggagggcugggga

SEQ ID NO: 3089332 - RNA, 19 nt, Artificial Sequence
  Description of Artificial Sequence: Synthetic oligonucleotide
cuucagccagcuucaccau

SEQ ID NO: 3089333 - RNA, 19 nt, Artificial Sequence
  Description of Artificial Sequence: Synthetic oligonucleotide
ggccccuggagggcugggg

SEQ ID NO: 3089334 - RNA, 19 nt, Artificial Sequence
  Description of Artificial Sequence: Synthetic oligonucleotide
gaucccggaacuggucauu

SEQ ID NO: 3089335 - RNA, 19 nt, Artificial Sequence
  Description of Artificial Sequence: Synthetic oligonucleotide
gcccuguuuccugacuguc

SEQ ID NO: 3089336 - RNA, 19 nt, Artificial Sequence
  Description of Artificial Sequence: Synthetic oligonucleotide
gucuuagcagagcccuguu

SEQ ID NO: 3089337 - RNA, 19 nt, Artificial Sequence
  Description of Artificial Sequence: Synthetic oligonucleotide
auccaggguggggccauuu

SEQ ID NO: 3089338 - RNA, 19 nt, Artificial Sequence
  Description of Artificial Sequence: Synthetic oligonucleotide
gggcagcaggcgcucucug

SEQ ID NO: 3089339 - RNA, 19 nt, Artificial Sequence
  Description of Artificial Sequence: Synthetic oligonucleotide
uucgccccagugggucauc

SEQ ID NO: 3089340 - RNA, 19 nt, Artificial Sequence
  Description of Artificial Sequence: Synthetic oligonucleotide
guggggccauuucgcccca

SEQ ID NO: 3089341 - RNA, 19 nt, Artificial Sequence
  Description of Artificial Sequence: Synthetic oligonucleotide
acuggucauuggagacaau

SEQ ID NO: 3089342 - RNA, 19 nt, Artificial Sequence
  Description of Artificial Sequence: Synthetic oligonucleotide
gguuucccacaaaggugaa

SEQ ID NO: 3089343 - RNA, 19 nt, Artificial Sequence
  Description of Artificial Sequence: Synthetic oligonucleotide
gaagggcagcaggcgcucu

SEQ ID NO: 3089344 - RNA, 19 nt, Artificial Sequence
  Description of Artificial Sequence: Synthetic oligonucleotide
cgccauccacuugucagac

SEQ ID NO: 3089345 - RNA, 19 nt, Artificial Sequence
  Description of Artificial Sequence: Synthetic oligonucleotide
ccaugacucgugagggugu

SEQ ID NO: 3089346 - RNA, 19 nt, Artificial Sequence
  Description of Artificial Sequence: Synthetic oligonucleotide
gcucucugaugaucgccau

SEQ ID NO: 3089347 - RNA, 19 nt, Artificial Sequence
  Description of Artificial Sequence: Synthetic oligonucleotide
ggggccauuucgccccagu

SEQ ID NO: 3089348 - RNA, 19 nt, Artificial Sequence
  Description of Artificial Sequence: Synthetic oligonucleotide
gccauccacuugucagacu

SEQ ID NO: 3089349 - RNA, 19 nt, Artificial Sequence
  Description of Artificial Sequence: Synthetic oligonucleotide
cugggaccaugaagagguu

SEQ ID NO: 3089350 - RNA, 19 nt, Artificial Sequence
  Description of Artificial Sequence: Synthetic oligonucleotide
ccauuucgccccagugggu

SEQ ID NO: 3089351 - RNA, 19 nt, Artificial Sequence
  Description of Artificial Sequence: Synthetic oligonucleotide
cgccccagugggucaucug

SEQ ID NO: 3089352 - RNA, 19 nt, Artificial Sequence
  Description of Artificial Sequence: Synthetic oligonucleotide
ggagggcuggggagucuua

SEQ ID NO: 3089353 - RNA, 19 nt, Artificial Sequence
  Description of Artificial Sequence: Synthetic oligonucleotide
ccuccgccagaucccggaa

SEQ ID NO: 3089354 - RNA, 19 nt, Artificial Sequence
  Description of Artificial Sequence: Synthetic oligonucleotide
cuggagggcuggggagucu

SEQ ID NO: 3089355 - RNA, 19 nt, Artificial Sequence
  Description of Artificial Sequence: Synthetic oligonucleotide
cauccaggguggggccauu

SEQ ID NO: 3089356 - RNA, 19 nt, Artificial Sequence
  Description of Artificial Sequence: Synthetic oligonucleotide
ccgucucuucagccagcuu

SEQ ID NO: 3089357 - RNA, 19 nt, Artificial Sequence
  Description of Artificial Sequence: Synthetic oligonucleotide
  modified_base (8)..(8): a, c, u, g, unknown or other
auuaccanacaauagacac

SEQ ID NO: 3089358 - RNA, 19 nt, Artificial Sequence
  Description of Artificial Sequence: Synthetic oligonucleotide
auaaaaucuagcuuauugc

SEQ ID NO: 3089359 - RNA, 19 nt, Artificial Sequence
  Description of Artificial Sequence: Synthetic oligonucleotide
acaauucuugcauagaugg

SEQ ID NO: 3089360 - RNA, 19 nt, Artificial Sequence
  Description of Artificial Sequence: Synthetic oligonucleotide
aguucaauaagaacgaucc

SEQ ID NO: 3089361 - RNA, 19 nt, Artificial Sequence
  Description of Artificial Sequence: Synthetic oligonucleotide
ugaaauucauccaugauac

SEQ ID NO: 3089362 - RNA, 19 nt, Artificial Sequence
  Description of Artificial Sequence: Synthetic oligonucleotide
augaaguucaauaagaacg

SEQ ID NO: 3089363 - RNA, 19 nt, Artificial Sequence
  Description of Artificial Sequence: Synthetic oligonucleotide
  modified_base (2)..(2): a, c, u, g, unknown or other
anacaauagacacagcaug

SEQ ID NO: 3089364 - RNA, 19 nt, Artificial Sequence
  Description of Artificial Sequence: Synthetic oligonucleotide
auaagaacgauccauucuc

SEQ ID NO: 3089365 - RNA, 19 nt, Artificial Sequence
  Description of Artificial Sequence: Synthetic oligonucleotide
  modified_base (11)..(11): a, c, u, g, unknown or other
uucauuaccanacaauaga

SEQ ID NO: 3089366 - RNA, 19 nt, Artificial Sequence
  Description of Artificial Sequence: Synthetic oligonucleotide
uuugugaucagcauaaaau

SEQ ID NO: 3089367 - RNA, 19 nt, Artificial Sequence
  Description of Artificial Sequence: Synthetic oligonucleotide
gauacugaaauguauacuc

SEQ ID NO: 3089368 - RNA, 19 nt, Artificial Sequence
  Description of Artificial Sequence: Synthetic oligonucleotide
ucuagcuuauugcacaccg

SEQ ID NO: 3089369 - RNA, 19 nt, Artificial Sequence
  Description of Artificial Sequence: Synthetic oligonucleotide
uacaugaugacaauucuug

SEQ ID NO: 3089370 - RNA, 19 nt, Artificial Sequence
  Description of Artificial Sequence: Synthetic oligonucleotide
aauucuugcauagaugguc

SEQ ID NO: 3089371 - RNA, 19 nt, Artificial Sequence
  Description of Artificial Sequence: Synthetic oligonucleotide
ucauccaugauacugaaau

SEQ ID NO: 3089372 - RNA, 19 nt, Artificial Sequence
  Description of Artificial Sequence: Synthetic oligonucleotide
aaaucuagcuuauugcaca

SEQ ID NO: 3089373 - RNA, 19 nt, Artificial Sequence
  Description of Artificial Sequence: Synthetic oligonucleotide
uaaaaucuagcuuauugca

SEQ ID NO: 3089374 - RNA, 19 nt, Artificial Sequence
  Description of Artificial Sequence: Synthetic oligonucleotide
aaauucauccaugauacug

SEQ ID NO: 3089375 - RNA, 19 nt, Artificial Sequence
  Description of Artificial Sequence: Synthetic oligonucleotide
aauaagaacgauccauucu

SEQ ID NO: 3089376 - RNA, 19 nt, Artificial Sequence
  Description of Artificial Sequence: Synthetic oligonucleotide
cauaaaaucuagcuuauug

SEQ ID NO: 3089377 - RNA, 19 nt, Artificial Sequence
  Description of Artificial Sequence: Synthetic oligonucleotide
aauguauacucaugucugg

SEQ ID NO: 3089378 - RNA, 19 nt, Artificial Sequence
  Description of Artificial Sequence: Synthetic oligonucleotide
  modified_base (12)..(12): a, c, u, g, unknown or other
uuucauuaccanacaauag

SEQ ID NO: 3089379 - RNA, 19 nt, Artificial Sequence
  Description of Artificial Sequence: Synthetic oligonucleotide
uauuacaugaugacaauuc

SEQ ID NO: 3089380 - RNA, 19 nt, Artificial Sequence
  Description of Artificial Sequence: Synthetic oligonucleotide
  modified_base (13)..(13): a, c, u, g, unknown or other
uuuucauuaccanacaaua

SEQ ID NO: 3089381 - RNA, 19 nt, Artificial Sequence
  Description of Artificial Sequence: Synthetic oligonucleotide
  modified_base (10)..(10): a, c, u, g, unknown or other
ucauuaccanacaauagac

SEQ ID NO: 3089382 - RNA, 19 nt, Artificial Sequence
  Description of Artificial Sequence: Synthetic oligonucleotide
augauacugaaauguauac

SEQ ID NO: 3089383 - RNA, 19 nt, Artificial Sequence
  Description of Artificial Sequence: Synthetic oligonucleotide
ugaaguucaauaagaacga

SEQ ID NO: 3089384 - RNA, 19 nt, Artificial Sequence
  Description of Artificial Sequence: Synthetic oligonucleotide
aaaaucuagcuuauugcac

SEQ ID NO: 3089385 - RNA, 19 nt, Artificial Sequence
  Description of Artificial Sequence: Synthetic oligonucleotide
  modified_base (6)..(6): a, c, u, g, unknown or other
uaccanacaauagacacag

SEQ ID NO: 3089386 - RNA, 19 nt, Artificial Sequence
  Description of Artificial Sequence: Synthetic oligonucleotide
gaugacaauucuugcauag

SEQ ID NO: 3089387 - RNA, 19 nt, Artificial Sequence
  Description of Artificial Sequence: Synthetic oligonucleotide
aaauguauacucaugucug

SEQ ID NO: 3089388 - RNA, 19 nt, Artificial Sequence
  Description of Artificial Sequence: Synthetic oligonucleotide
aaucuagcuuauugcacac

SEQ ID NO: 3089389 - RNA, 19 nt, Artificial Sequence
  Description of Artificial Sequence: Synthetic oligonucleotide
aucagcauaaaaucuagcu

SEQ ID NO: 3089390 - RNA, 19 nt, Artificial Sequence
  Description of Artificial Sequence: Synthetic oligonucleotide
ugugaucagcauaaaaucu

SEQ ID NO: 3089391 - RNA, 19 nt, Artificial Sequence
  Description of Artificial Sequence: Synthetic oligonucleotide
ucuuucaggguucuguuug

SEQ ID NO: 3089392 - RNA, 19 nt, Artificial Sequence
  Description of Artificial Sequence: Synthetic oligonucleotide
uauugcacaccgcacagcc

SEQ ID NO: 3089393 - RNA, 19 nt, Artificial Sequence
  Description of Artificial Sequence: Synthetic oligonucleotide
ugaucagcauaaaaucuag

SEQ ID NO: 3089394 - RNA, 19 nt, Artificial Sequence
  Description of Artificial Sequence: Synthetic oligonucleotide
ucuggcuauuacaugauga

SEQ ID NO: 3089395 - RNA, 19 nt, Artificial Sequence
  Description of Artificial Sequence: Synthetic oligonucleotide
acaugaugacaauucuugc

SEQ ID NO: 3089396 - RNA, 19 nt, Artificial Sequence
  Description of Artificial Sequence: Synthetic oligonucleotide
auagguaacuauuucuucu

SEQ ID NO: 3089397 - RNA, 19 nt, Artificial Sequence
  Description of Artificial Sequence: Synthetic oligonucleotide
uaugaaguucaauaagaac

SEQ ID NO: 3089398 - RNA, 19 nt, Artificial Sequence
  Description of Artificial Sequence: Synthetic oligonucleotide
aacgauccauucuccagac

SEQ ID NO: 3089399 - RNA, 19 nt, Artificial Sequence
  Description of Artificial Sequence: Synthetic oligonucleotide
aauagacacagcauggugu

SEQ ID NO: 3089400 - RNA, 19 nt, Artificial Sequence
  Description of Artificial Sequence: Synthetic oligonucleotide
ugcauagauggucauaggu

SEQ ID NO: 3089401 - RNA, 19 nt, Artificial Sequence
  Description of Artificial Sequence: Synthetic oligonucleotide
aaguucaauaagaacgauc

SEQ ID NO: 3089402 - RNA, 19 nt, Artificial Sequence
  Description of Artificial Sequence: Synthetic oligonucleotide
  modified_base (7)..(7): a, c, u, g, unknown or other
uuaccanacaauagacaca

SEQ ID NO: 3089403 - RNA, 19 nt, Artificial Sequence
  Description of Artificial Sequence: Synthetic oligonucleotide
uugugaucagcauaaaauc

SEQ ID NO: 3089404 - RNA, 19 nt, Artificial Sequence
  Description of Artificial Sequence: Synthetic oligonucleotide
gaaauguauacucaugucu

SEQ ID NO: 3089405 - RNA, 19 nt, Artificial Sequence
  Description of Artificial Sequence: Synthetic oligonucleotide
aauucauccaugauacuga

SEQ ID NO: 3089406 - RNA, 19 nt, Artificial Sequence
  Description of Artificial Sequence: Synthetic oligonucleotide
uucaauaagaacgauccau

SEQ ID NO: 3089407 - RNA, 19 nt, Artificial Sequence
  Description of Artificial Sequence: Synthetic oligonucleotide
cuugcauagauggucauag

SEQ ID NO: 3089408 - RNA, 19 nt, Artificial Sequence
  Description of Artificial Sequence: Synthetic oligonucleotide
guacuccugaaauucaucc

SEQ ID NO: 3089409 - RNA, 19 nt, Artificial Sequence
  Description of Artificial Sequence: Synthetic oligonucleotide
agguaacuauuucuucucc

SEQ ID NO: 3089410 - RNA, 19 nt, Artificial Sequence
  Description of Artificial Sequence: Synthetic oligonucleotide
ucagcauaaaaucuagcuu

SEQ ID NO: 3089411 - RNA, 19 nt, Artificial Sequence
  Description of Artificial Sequence: Synthetic oligonucleotide
ugacaauucuugcauagau

SEQ ID NO: 3089412 - RNA, 19 nt, Artificial Sequence
  Description of Artificial Sequence: Synthetic oligonucleotide
ucaauaagaacgauccauu

SEQ ID NO: 3089413 - RNA, 19 nt, Artificial Sequence
  Description of Artificial Sequence: Synthetic oligonucleotide
ucacacacgucccacacac

SEQ ID NO: 3089414 - RNA, 19 nt, Artificial Sequence
  Description of Artificial Sequence: Synthetic oligonucleotide
augucuggcuauuacauga

SEQ ID NO: 3089415 - RNA, 19 nt, Artificial Sequence
  Description of Artificial Sequence: Synthetic oligonucleotide
ucauagguaacuauuucuu

SEQ ID NO: 3089416 - RNA, 19 nt, Artificial Sequence
  Description of Artificial Sequence: Synthetic oligonucleotide
agaacgauccauucuccag

SEQ ID NO: 3089417 - RNA, 19 nt, Artificial Sequence
  Description of Artificial Sequence: Synthetic oligonucleotide
ucaugucuggcuauuacau

SEQ ID NO: 3089418 - RNA, 19 nt, Artificial Sequence
  Description of Artificial Sequence: Synthetic oligonucleotide
ucuguuugugaucagcaua

SEQ ID NO: 3089419 - RNA, 19 nt, Artificial Sequence
  Description of Artificial Sequence: Synthetic oligonucleotide
acucaugucuggcuauuac

SEQ ID NO: 3089420 - RNA, 19 nt, Artificial Sequence
  Description of Artificial Sequence: Synthetic oligonucleotide
uaagaacgauccauucucc

SEQ ID NO: 3089421 - RNA, 19 nt, Artificial Sequence
  Description of Artificial Sequence: Synthetic oligonucleotide
ugaaauguauacucauguc

SEQ ID NO: 3089422 - RNA, 19 nt, Artificial Sequence
  Description of Artificial Sequence: Synthetic oligonucleotide
auguauacucaugucuggc

SEQ ID NO: 3089423 - RNA, 19 nt, Artificial Sequence
  Description of Artificial Sequence: Synthetic oligonucleotide
auugggguacuccuucuuc

SEQ ID NO: 3089424 - RNA, 19 nt, Artificial Sequence
  Description of Artificial Sequence: Synthetic oligonucleotide
uguauacucaugucuggcu

SEQ ID NO: 3089425 - RNA, 19 nt, Artificial Sequence
  Description of Artificial Sequence: Synthetic oligonucleotide
uacuccuucuucacacacg

SEQ ID NO: 3089426 - RNA, 19 nt, Artificial Sequence
  Description of Artificial Sequence: Synthetic oligonucleotide
aagaacgauccauucucca

SEQ ID NO: 3089427 - RNA, 19 nt, Artificial Sequence
  Description of Artificial Sequence: Synthetic oligonucleotide
cuuauugcacaccgcacag

SEQ ID NO: 3089428 - RNA, 19 nt, Artificial Sequence
  Description of Artificial Sequence: Synthetic oligonucleotide
uccugaaauucauccauga

SEQ ID NO: 3089429 - RNA, 19 nt, Artificial Sequence
  Description of Artificial Sequence: Synthetic oligonucleotide
cuggcuauuacaugaugac

SEQ ID NO: 3089430 - RNA, 19 nt, Artificial Sequence
  Description of Artificial Sequence: Synthetic oligonucleotide
ugauacugaaauguauacu

SEQ ID NO: 3089431 - RNA, 19 nt, Artificial Sequence
  Description of Artificial Sequence: Synthetic oligonucleotide
cauagauggucauagguaa

SEQ ID NO: 3089432 - RNA, 19 nt, Artificial Sequence
  Description of Artificial Sequence: Synthetic oligonucleotide
cugaaauucauccaugaua

SEQ ID NO: 3089433 - RNA, 19 nt, Artificial Sequence
  Description of Artificial Sequence: Synthetic oligonucleotide
acuccuucuucacacacgu

SEQ ID NO: 3089434 - RNA, 19 nt, Artificial Sequence
  Description of Artificial Sequence: Synthetic oligonucleotide
uacugaaauguauacucau

SEQ ID NO: 3089435 - RNA, 19 nt, Artificial Sequence
  Description of Artificial Sequence: Synthetic oligonucleotide
uuacaugaugacaauucuu

SEQ ID NO: 3089436 - RNA, 19 nt, Artificial Sequence
  Description of Artificial Sequence: Synthetic oligonucleotide
caugaugacaauucuugca

SEQ ID NO: 3089437 - RNA, 19 nt, Artificial Sequence
  Description of Artificial Sequence: Synthetic oligonucleotide
cagcauaaaaucuagcuua

SEQ ID NO: 3089438 - RNA, 19 nt, Artificial Sequence
  Description of Artificial Sequence: Synthetic oligonucleotide
caauaagaacgauccauuc

SEQ ID NO: 3089439 - RNA, 19 nt, Artificial Sequence
  Description of Artificial Sequence: Synthetic oligonucleotide
acuccugaaauucauccau

SEQ ID NO: 3089440 - RNA, 19 nt, Artificial Sequence
  Description of Artificial Sequence: Synthetic oligonucleotide
gacaauucuugcauagaug

SEQ ID NO: 3089441 - RNA, 19 nt, Artificial Sequence
  Description of Artificial Sequence: Synthetic oligonucleotide
cauagguaacuauuucuuc

SEQ ID NO: 3089442 - RNA, 19 nt, Artificial Sequence
  Description of Artificial Sequence: Synthetic oligonucleotide
gaacgauccauucuccaga

SEQ ID NO: 3089443 - RNA, 19 nt, Artificial Sequence
  Description of Artificial Sequence: Synthetic oligonucleotide
uaacuauuucuucuccauc

SEQ ID NO: 3089444 - RNA, 19 nt, Artificial Sequence
  Description of Artificial Sequence: Synthetic oligonucleotide
uagguaacuauuucuucuc

SEQ ID NO: 3089445 - RNA, 19 nt, Artificial Sequence
  Description of Artificial Sequence: Synthetic oligonucleotide
ucaggguucuguuugugau

SEQ ID NO: 3089446 - RNA, 19 nt, Artificial Sequence
  Description of Artificial Sequence: Synthetic oligonucleotide
caauagacacagcauggug

SEQ ID NO: 3089447 - RNA, 19 nt, Artificial Sequence
  Description of Artificial Sequence: Synthetic oligonucleotide
uccaugauacugaaaugua

SEQ ID NO: 3089448 - RNA, 19 nt, Artificial Sequence
  Description of Artificial Sequence: Synthetic oligonucleotide
uguacuccugaaauucauc

SEQ ID NO: 3089449 - RNA, 19 nt, Artificial Sequence
  Description of Artificial Sequence: Synthetic oligonucleotide
uagauggucauagguaacu

SEQ ID NO: 3089450 - RNA, 19 nt, Artificial Sequence
  Description of Artificial Sequence: Synthetic oligonucleotide
  modified_base (9)..(9): a, c, u, g, unknown or other
cauuaccanacaauagaca

SEQ ID NO: 3089451 - RNA, 19 nt, Artificial Sequence
  Description of Artificial Sequence: Synthetic oligonucleotide
uacuccugaaauucaucca

SEQ ID NO: 3089452 - RNA, 19 nt, Artificial Sequence
  Description of Artificial Sequence: Synthetic oligonucleotide
ugguguacuccugaaauuc

SEQ ID NO: 3089453 - RNA, 19 nt, Artificial Sequence
  Description of Artificial Sequence: Synthetic oligonucleotide
gauccauucuccagacagg

SEQ ID NO: 3089454 - RNA, 19 nt, Artificial Sequence
  Description of Artificial Sequence: Synthetic oligonucleotide
cuaugaaguucaauaagaa

SEQ ID NO: 3089455 - RNA, 19 nt, Artificial Sequence
  Description of Artificial Sequence: Synthetic oligonucleotide
caccgcacagccuaugaag

SEQ ID NO: 3089456 - RNA, 19 nt, Artificial Sequence
  Description of Artificial Sequence: Synthetic oligonucleotide
uggucauagguaacuauuu

SEQ ID NO: 3089457 - RNA, 19 nt, Artificial Sequence
  Description of Artificial Sequence: Synthetic oligonucleotide
  modified_base (4)..(4): a, c, u, g, unknown or other
ccanacaauagacacagca

SEQ ID NO: 3089458 - RNA, 19 nt, Artificial Sequence
  Description of Artificial Sequence: Synthetic oligonucleotide
agccuaugaaguucaauaa

SEQ ID NO: 3089459 - RNA, 19 nt, Artificial Sequence
  Description of Artificial Sequence: Synthetic oligonucleotide
uugcauagauggucauagg

SEQ ID NO: 3089460 - RNA, 19 nt, Artificial Sequence
  Description of Artificial Sequence: Synthetic oligonucleotide
uauacucaugucuggcuau

SEQ ID NO: 3089461 - RNA, 19 nt, Artificial Sequence
  Description of Artificial Sequence: Synthetic oligonucleotide
uugcacaccgcacagccua

SEQ ID NO: 3089462 - RNA, 19 nt, Artificial Sequence
  Description of Artificial Sequence: Synthetic oligonucleotide
acugaaauguauacucaug

SEQ ID NO: 3089463 - RNA, 19 nt, Artificial Sequence
  Description of Artificial Sequence: Synthetic oligonucleotide
auagacacagcauggugua

SEQ ID NO: 3089464 - RNA, 19 nt, Artificial Sequence
  Description of Artificial Sequence: Synthetic oligonucleotide
cuguuugugaucagcauaa

SEQ ID NO: 3089465 - RNA, 19 nt, Artificial Sequence
  Description of Artificial Sequence: Synthetic oligonucleotide
cuagcuuauugcacaccgc

SEQ ID NO: 3089466 - RNA, 19 nt, Artificial Sequence
  Description of Artificial Sequence: Synthetic oligonucleotide
acacacgucccacacacau

SEQ ID NO: 3089467 - RNA, 19 nt, Artificial Sequence
  Description of Artificial Sequence: Synthetic oligonucleotide
cauccaugauacugaaaug

SEQ ID NO: 3089468 - RNA, 19 nt, Artificial Sequence
  Description of Artificial Sequence: Synthetic oligonucleotide
gucauagguaacuauuucu

SEQ ID NO: 3089469 - RNA, 19 nt, Artificial Sequence
  Description of Artificial Sequence: Synthetic oligonucleotide
auagauggucauagguaac

SEQ ID NO: 3089470 - RNA, 19 nt, Artificial Sequence
  Description of Artificial Sequence: Synthetic oligonucleotide
uggcuauuacaugaugaca

SEQ ID NO: 3089471 - RNA, 19 nt, Artificial Sequence
  Description of Artificial Sequence: Synthetic oligonucleotide
cagccuaugaaguucaaua

SEQ ID NO: 3089472 - RNA, 19 nt, Artificial Sequence
  Description of Artificial Sequence: Synthetic oligonucleotide
ccuaugaaguucaauaaga

SEQ ID NO: 3089473 - RNA, 19 nt, Artificial Sequence
  Description of Artificial Sequence: Synthetic oligonucleotide
ucuuccucuuucaggguuc

SEQ ID NO: 3089474 - RNA, 19 nt, Artificial Sequence
  Description of Artificial Sequence: Synthetic oligonucleotide
gaucagcauaaaaucuagc

SEQ ID NO: 3089475 - RNA, 19 nt, Artificial Sequence
  Description of Artificial Sequence: Synthetic oligonucleotide
ucuccaucuuccucuuuca

SEQ ID NO: 3089476 - RNA, 19 nt, Artificial Sequence
  Description of Artificial Sequence: Synthetic oligonucleotide
gccuaugaaguucaauaag

SEQ ID NO: 3089477 - RNA, 19 nt, Artificial Sequence
  Description of Artificial Sequence: Synthetic oligonucleotide
aucuagcuuauugcacacc

SEQ ID NO: 3089478 - RNA, 19 nt, Artificial Sequence
  Description of Artificial Sequence: Synthetic oligonucleotide
caugucuggcuauuacaug

SEQ ID NO: 3089479 - RNA, 19 nt, Artificial Sequence
  Description of Artificial Sequence: Synthetic oligonucleotide
ucuucacacacgucccaca

SEQ ID NO: 3089480 - RNA, 19 nt, Artificial Sequence
  Description of Artificial Sequence: Synthetic oligonucleotide
aggguucuguuugugauca

SEQ ID NO: 3089481 - RNA, 19 nt, Artificial Sequence
  Description of Artificial Sequence: Synthetic oligonucleotide
cuucacacacgucccacac

SEQ ID NO: 3089482 - RNA, 19 nt, Artificial Sequence
  Description of Artificial Sequence: Synthetic oligonucleotide
ucuccagacagguguuccc

SEQ ID NO: 3089483 - RNA, 19 nt, Artificial Sequence
  Description of Artificial Sequence: Synthetic oligonucleotide
auucuugcauagaugguca

SEQ ID NO: 3089484 - RNA, 19 nt, Artificial Sequence
  Description of Artificial Sequence: Synthetic oligonucleotide
guuugugaucagcauaaaa

SEQ ID NO: 3089485 - RNA, 19 nt, Artificial Sequence
  Description of Artificial Sequence: Synthetic oligonucleotide
auacugaaauguauacuca

SEQ ID NO: 3089486 - RNA, 19 nt, Artificial Sequence
  Description of Artificial Sequence: Synthetic oligonucleotide
cucaugucuggcuauuaca

SEQ ID NO: 3089487 - RNA, 19 nt, Artificial Sequence
  Description of Artificial Sequence: Synthetic oligonucleotide
uucuccagacagguguucc

SEQ ID NO: 3089488 - RNA, 19 nt, Artificial Sequence
  Description of Artificial Sequence: Synthetic oligonucleotide
uucuguuugugaucagcau

SEQ ID NO: 3089489 - RNA, 19 nt, Artificial Sequence
  Description of Artificial Sequence: Synthetic oligonucleotide
ugaugacaauucuugcaua

SEQ ID NO: 3089490 - RNA, 19 nt, Artificial Sequence
  Description of Artificial Sequence: Synthetic oligonucleotide
uucacacacgucccacaca

SEQ ID NO: 3089491 - RNA, 19 nt, Artificial Sequence
  Description of Artificial Sequence: Synthetic oligonucleotide
agcuuauugcacaccgcac

SEQ ID NO: 3089492 - RNA, 19 nt, Artificial Sequence
  Description of Artificial Sequence: Synthetic oligonucleotide
cuccugaaauucauccaug

SEQ ID NO: 3089493 - RNA, 19 nt, Artificial Sequence
  Description of Artificial Sequence: Synthetic oligonucleotide
auucauccaugauacugaa

SEQ ID NO: 3089494 - RNA, 19 nt, Artificial Sequence
  Description of Artificial Sequence: Synthetic oligonucleotide
agacacagcaugguguacu

SEQ ID NO: 3089495 - RNA, 19 nt, Artificial Sequence
  Description of Artificial Sequence: Synthetic oligonucleotide
ggcuauuacaugaugacaa

SEQ ID NO: 3089496 - RNA, 19 nt, Artificial Sequence
  Description of Artificial Sequence: Synthetic oligonucleotide
cgauccauucuccagacag

SEQ ID NO: 3089497 - RNA, 19 nt, Artificial Sequence
  Description of Artificial Sequence: Synthetic oligonucleotide
uccauucuccagacaggug

SEQ ID NO: 3089498 - RNA, 19 nt, Artificial Sequence
  Description of Artificial Sequence: Synthetic oligonucleotide
auccauucuccagacaggu

SEQ ID NO: 3089499 - RNA, 19 nt, Artificial Sequence
  Description of Artificial Sequence: Synthetic oligonucleotide
  modified_base (3)..(3): a, c, u, g, unknown or other
canacaauagacacagcau

SEQ ID NO: 3089500 - RNA, 19 nt, Artificial Sequence
  Description of Artificial Sequence: Synthetic oligonucleotide
guucuguuugugaucagca

SEQ ID NO: 3089501 - RNA, 19 nt, Artificial Sequence
  Description of Artificial Sequence: Synthetic oligonucleotide
guacuccuucuucacacac

SEQ ID NO: 3089502 - RNA, 19 nt, Artificial Sequence
  Description of Artificial Sequence: Synthetic oligonucleotide
acuauuucuucuccaucuu

SEQ ID NO: 3089503 - RNA, 19 nt, Artificial Sequence
  Description of Artificial Sequence: Synthetic oligonucleotide
guauacucaugucuggcua

SEQ ID NO: 3089504 - RNA, 19 nt, Artificial Sequence
  Description of Artificial Sequence: Synthetic oligonucleotide
gguaacuauuucuucucca

SEQ ID NO: 3089505 - RNA, 19 nt, Artificial Sequence
  Description of Artificial Sequence: Synthetic oligonucleotide
uuauugcacaccgcacagc

SEQ ID NO: 3089506 - RNA, 19 nt, Artificial Sequence
  Description of Artificial Sequence: Synthetic oligonucleotide
ugucuggcuauuacaugau

SEQ ID NO: 3089507 - RNA, 19 nt, Artificial Sequence
  Description of Artificial Sequence: Synthetic oligonucleotide
gacacagcaugguguacuc

SEQ ID NO: 3089508 - RNA, 19 nt, Artificial Sequence
  Description of Artificial Sequence: Synthetic oligonucleotide
guaacuauuucuucuccau

SEQ ID NO: 3089509 - RNA, 19 nt, Artificial Sequence
  Description of Artificial Sequence: Synthetic oligonucleotide
acacagcaugguguacucc

SEQ ID NO: 3089510 - RNA, 19 nt, Artificial Sequence
  Description of Artificial Sequence: Synthetic oligonucleotide
guucaauaagaacgaucca

SEQ ID NO: 3089511 - RNA, 19 nt, Artificial Sequence
  Description of Artificial Sequence: Synthetic oligonucleotide
uucauccaugauacugaaa

SEQ ID NO: 3089512 - RNA, 19 nt, Artificial Sequence
  Description of Artificial Sequence: Synthetic oligonucleotide
gcuuauugcacaccgcaca

SEQ ID NO: 3089513 - RNA, 19 nt, Artificial Sequence
  Description of Artificial Sequence: Synthetic oligonucleotide
ggguacuccuucuucacac

SEQ ID NO: 3089514 - RNA, 19 nt, Artificial Sequence
  Description of Artificial Sequence: Synthetic oligonucleotide
caugguguacuccugaaau

SEQ ID NO: 3089515 - RNA, 19 nt, Artificial Sequence
  Description of Artificial Sequence: Synthetic oligonucleotide
auggucauagguaacuauu

SEQ ID NO: 3089516 - RNA, 19 nt, Artificial Sequence
  Description of Artificial Sequence: Synthetic oligonucleotide
ggucauagguaacuauuuc

SEQ ID NO: 3089517 - RNA, 19 nt, Artificial Sequence
  Description of Artificial Sequence: Synthetic oligonucleotide
gugaucagcauaaaaucua

SEQ ID NO: 3089518 - RNA, 19 nt, Artificial Sequence
  Description of Artificial Sequence: Synthetic oligonucleotide
uuucaggguucuguuugug

SEQ ID NO: 3089519 - RNA, 19 nt, Artificial Sequence
  Description of Artificial Sequence: Synthetic oligonucleotide
augacaauucuugcauaga

SEQ ID NO: 3089520 - RNA, 19 nt, Artificial Sequence
  Description of Artificial Sequence: Synthetic oligonucleotide
gguucuguuugugaucagc

SEQ ID NO: 3089521 - RNA, 19 nt, Artificial Sequence
  Description of Artificial Sequence: Synthetic oligonucleotide
gucuggcuauuacaugaug

SEQ ID NO: 3089522 - RNA, 19 nt, Artificial Sequence
  Description of Artificial Sequence: Synthetic oligonucleotide
augguguacuccugaaauu

SEQ ID NO: 3089523 - RNA, 19 nt, Artificial Sequence
  Description of Artificial Sequence: Synthetic oligonucleotide
gauggucauagguaacuau

SEQ ID NO: 3089524 - RNA, 19 nt, Artificial Sequence
  Description of Artificial Sequence: Synthetic oligonucleotide
ccuucuucacacacguccc

SEQ ID NO: 3089525 - RNA, 19 nt, Artificial Sequence
  Description of Artificial Sequence: Synthetic oligonucleotide
cuccagacagguguucccc

SEQ ID NO: 3089526 - RNA, 19 nt, Artificial Sequence
  Description of Artificial Sequence: Synthetic oligonucleotide
  modified_base (5)..(5): a, c, u, g, unknown or other
accanacaauagacacagc

SEQ ID NO: 3089527 - RNA, 19 nt, Artificial Sequence
  Description of Artificial Sequence: Synthetic oligonucleotide
ucuugcauagauggucaua

SEQ ID NO: 3089528 - RNA, 19 nt, Artificial Sequence
  Description of Artificial Sequence: Synthetic oligonucleotide
agcauaaaaucuagcuuau

SEQ ID NO: 3089529 - RNA, 19 nt, Artificial Sequence
  Description of Artificial Sequence: Synthetic oligonucleotide
agcaugguguacuccugaa

SEQ ID NO: 3089530 - RNA, 19 nt, Artificial Sequence
  Description of Artificial Sequence: Synthetic oligonucleotide
accgcacagccuaugaagu

SEQ ID NO: 3089531 - RNA, 19 nt, Artificial Sequence
  Description of Artificial Sequence: Synthetic oligonucleotide
uucuugcauagauggucau

SEQ ID NO: 3089532 - RNA, 19 nt, Artificial Sequence
  Description of Artificial Sequence: Synthetic oligonucleotide
cacagcaugguguacuccu

SEQ ID NO: 3089533 - RNA, 19 nt, Artificial Sequence
  Description of Artificial Sequence: Synthetic oligonucleotide
cacacgucccacacacauc

SEQ ID NO: 3089534 - RNA, 19 nt, Artificial Sequence
  Description of Artificial Sequence: Synthetic oligonucleotide
acaccgcacagccuaugaa

SEQ ID NO: 3089535 - RNA, 19 nt, Artificial Sequence
  Description of Artificial Sequence: Synthetic oligonucleotide
uguuugugaucagcauaaa

SEQ ID NO: 3089536 - RNA, 19 nt, Artificial Sequence
  Description of Artificial Sequence: Synthetic oligonucleotide
acagccuaugaaguucaau

SEQ ID NO: 3089537 - RNA, 19 nt, Artificial Sequence
  Description of Artificial Sequence: Synthetic oligonucleotide
agauggucauagguaacua

SEQ ID NO: 3089538 - RNA, 19 nt, Artificial Sequence
  Description of Artificial Sequence: Synthetic oligonucleotide
cuucuucacacacguccca

SEQ ID NO: 3089539 - RNA, 19 nt, Artificial Sequence
  Description of Artificial Sequence: Synthetic oligonucleotide
gcauagauggucauaggua

SEQ ID NO: 3089540 - RNA, 19 nt, Artificial Sequence
  Description of Artificial Sequence: Synthetic oligonucleotide
uagacacagcaugguguac

SEQ ID NO: 3089541 - RNA, 19 nt, Artificial Sequence
  Description of Artificial Sequence: Synthetic oligonucleotide
acagcaugguguacuccug

SEQ ID NO: 3089542 - RNA, 19 nt, Artificial Sequence
  Description of Artificial Sequence: Synthetic oligonucleotide
acgauccauucuccagaca

SEQ ID NO: 3089543 - RNA, 19 nt, Artificial Sequence
  Description of Artificial Sequence: Synthetic oligonucleotide
ccauucuccagacaggugu

SEQ ID NO: 3089544 - RNA, 19 nt, Artificial Sequence
  Description of Artificial Sequence: Synthetic oligonucleotide
uacucaugucuggcuauua

SEQ ID NO: 3089545 - RNA, 19 nt, Artificial Sequence
  Description of Artificial Sequence: Synthetic oligonucleotide
caauucuugcauagauggu

SEQ ID NO: 3089546 - RNA, 19 nt, Artificial Sequence
  Description of Artificial Sequence: Synthetic oligonucleotide
ugcacaccgcacagccuau

SEQ ID NO: 3089547 - RNA, 19 nt, Artificial Sequence
  Description of Artificial Sequence: Synthetic oligonucleotide
gguacuccuucuucacaca

SEQ ID NO: 3089548 - RNA, 19 nt, Artificial Sequence
  Description of Artificial Sequence: Synthetic oligonucleotide
gaaguucaauaagaacgau

SEQ ID NO: 3089549 - RNA, 19 nt, Artificial Sequence
  Description of Artificial Sequence: Synthetic oligonucleotide
cacaccgcacagccuauga

SEQ ID NO: 3089550 - RNA, 19 nt, Artificial Sequence
  Description of Artificial Sequence: Synthetic oligonucleotide
cagcaugguguacuccuga

SEQ ID NO: 3089551 - RNA, 19 nt, Artificial Sequence
  Description of Artificial Sequence: Synthetic oligonucleotide
auacucaugucuggcuauu

SEQ ID NO: 3089552 - RNA, 19 nt, Artificial Sequence
  Description of Artificial Sequence: Synthetic oligonucleotide
auugcacaccgcacagccu

SEQ ID NO: 3089553 - RNA, 19 nt, Artificial Sequence
  Description of Artificial Sequence: Synthetic oligonucleotide
cuauuacaugaugacaauu

SEQ ID NO: 3089554 - RNA, 19 nt, Artificial Sequence
  Description of Artificial Sequence: Synthetic oligonucleotide
ccgauugggguacuccuuc

SEQ ID NO: 3089555 - RNA, 19 nt, Artificial Sequence
  Description of Artificial Sequence: Synthetic oligonucleotide
gcuauuacaugaugacaau

SEQ ID NO: 3089556 - RNA, 19 nt, Artificial Sequence
  Description of Artificial Sequence: Synthetic oligonucleotide
gcaugguguacuccugaaa

SEQ ID NO: 3089557 - RNA, 19 nt, Artificial Sequence
  Description of Artificial Sequence: Synthetic oligonucleotide
gcacagccuaugaaguuca

SEQ ID NO: 3089558 - RNA, 19 nt, Artificial Sequence
  Description of Artificial Sequence: Synthetic oligonucleotide
ccaugauacugaaauguau

SEQ ID NO: 3089559 - RNA, 19 nt, Artificial Sequence
  Description of Artificial Sequence: Synthetic oligonucleotide
guguacuccugaaauucau

SEQ ID NO: 3089560 - RNA, 19 nt, Artificial Sequence
  Description of Artificial Sequence: Synthetic oligonucleotide
cauucuccagacagguguu

SEQ ID NO: 3089561 - RNA, 19 nt, Artificial Sequence
  Description of Artificial Sequence: Synthetic oligonucleotide
ggguucuguuugugaucag

SEQ ID NO: 3089562 - RNA, 19 nt, Artificial Sequence
  Description of Artificial Sequence: Synthetic oligonucleotide
cacacacgucccacacaca

SEQ ID NO: 3089563 - RNA, 19 nt, Artificial Sequence
  Description of Artificial Sequence: Synthetic oligonucleotide
caucuuccucuuucagggu

SEQ ID NO: 3089564 - RNA, 19 nt, Artificial Sequence
  Description of Artificial Sequence: Synthetic oligonucleotide
cacagccuaugaaguucaa

SEQ ID NO: 3089565 - RNA, 19 nt, Artificial Sequence
  Description of Artificial Sequence: Synthetic oligonucleotide
ccugaaauucauccaugau

SEQ ID NO: 3089566 - RNA, 19 nt, Artificial Sequence
  Description of Artificial Sequence: Synthetic oligonucleotide
cuuccucuuucaggguucu

SEQ ID NO: 3089567 - RNA, 19 nt, Artificial Sequence
  Description of Artificial Sequence: Synthetic oligonucleotide
gcacaccgcacagccuaug

SEQ ID NO: 3089568 - RNA, 19 nt, Artificial Sequence
  Description of Artificial Sequence: Synthetic oligonucleotide
ccccgauugggguacuccu

SEQ ID NO: 3089569 - RNA, 19 nt, Artificial Sequence
  Description of Artificial Sequence: Synthetic oligonucleotide
gcauaaaaucuagcuuauu

SEQ ID NO: 3089570 - RNA, 19 nt, Artificial Sequence
  Description of Artificial Sequence: Synthetic oligonucleotide
cccgauugggguacuccuu

SEQ ID NO: 3089571 - RNA, 19 nt, Artificial Sequence
  Description of Artificial Sequence: Synthetic oligonucleotide
ccgcacagccuaugaaguu

SEQ ID NO: 3089572 - RNA, 19 nt, Artificial Sequence
  Description of Artificial Sequence: Synthetic oligonucleotide
  modified_base (1)..(1): a, c, u, g, unknown or other
nacaauagacacagcaugg

SEQ ID NO: 3089573 - RNA, 19 nt, Artificial Sequence
  Description of Artificial Sequence: Synthetic oligonucleotide
aaugcagcaccacuguggc

SEQ ID NO: 3089574 - RNA, 19 nt, Artificial Sequence
  Description of Artificial Sequence: Synthetic oligonucleotide
agaggaauaugucuggggc

SEQ ID NO: 3089575 - RNA, 19 nt, Artificial Sequence
  Description of Artificial Sequence: Synthetic oligonucleotide
accaugacaaccugcaucc

SEQ ID NO: 3089576 - RNA, 19 nt, Artificial Sequence
  Description of Artificial Sequence: Synthetic oligonucleotide
ucaaagacgaggcacaugu

SEQ ID NO: 3089577 - RNA, 19 nt, Artificial Sequence
  Description of Artificial Sequence: Synthetic oligonucleotide
aauuccuugugccugcagg

SEQ ID NO: 3089578 - RNA, 19 nt, Artificial Sequence
  Description of Artificial Sequence: Synthetic oligonucleotide
auugggagcaucuucaaag

SEQ ID NO: 3089579 - RNA, 19 nt, Artificial Sequence
  Description of Artificial Sequence: Synthetic oligonucleotide
aaccaugacaaccugcauc

SEQ ID NO: 3089580 - RNA, 19 nt, Artificial Sequence
  Description of Artificial Sequence: Synthetic oligonucleotide
aacagcucaggcuugaagu

SEQ ID NO: 3089581 - RNA, 19 nt, Artificial Sequence
  Description of Artificial Sequence: Synthetic oligonucleotide
ucgacucagguuuucaucg

SEQ ID NO: 3089582 - RNA, 19 nt, Artificial Sequence
  Description of Artificial Sequence: Synthetic oligonucleotide
aaagacgaggcacaugucu

SEQ ID NO: 3089583 - RNA, 19 nt, Artificial Sequence
  Description of Artificial Sequence: Synthetic oligonucleotide
aagaauuccuugugccugc

SEQ ID NO: 3089584 - RNA, 19 nt, Artificial Sequence
  Description of Artificial Sequence: Synthetic oligonucleotide
aggaucaucucccagcacg

SEQ ID NO: 3089585 - RNA, 19 nt, Artificial Sequence
  Description of Artificial Sequence: Synthetic oligonucleotide
uaagucucgacucagguuu

SEQ ID NO: 3089586 - RNA, 19 nt, Artificial Sequence
  Description of Artificial Sequence: Synthetic oligonucleotide
gaugugguugaacaacccg

SEQ ID NO: 3089587 - RNA, 19 nt, Artificial Sequence
  Description of Artificial Sequence: Synthetic oligonucleotide
uuuucaucgggaaccauga

SEQ ID NO: 3089588 - RNA, 19 nt, Artificial Sequence
  Description of Artificial Sequence: Synthetic oligonucleotide
ugguugaacaacccgaaga

SEQ ID NO: 3089589 - RNA, 19 nt, Artificial Sequence
  Description of Artificial Sequence: Synthetic oligonucleotide
uucuuguuaagucucgacu

SEQ ID NO: 3089590 - RNA, 19 nt, Artificial Sequence
  Description of Artificial Sequence: Synthetic oligonucleotide
ucaucgggaaccaugacaa

SEQ ID NO: 3089591 - RNA, 19 nt, Artificial Sequence
  Description of Artificial Sequence: Synthetic oligonucleotide
ugaaccuccgugcacagga

SEQ ID NO: 3089592 - RNA, 19 nt, Artificial Sequence
  Description of Artificial Sequence: Synthetic oligonucleotide
ucuuguuaagucucgacuc

SEQ ID NO: 3089593 - RNA, 19 nt, Artificial Sequence
  Description of Artificial Sequence: Synthetic oligonucleotide
ucuucaaagacgaggcaca

SEQ ID NO: 3089594 - RNA, 19 nt, Artificial Sequence
  Description of Artificial Sequence: Synthetic oligonucleotide
uugaacaacccgaagaauu

SEQ ID NO: 3089595 - RNA, 19 nt, Artificial Sequence
  Description of Artificial Sequence: Synthetic oligonucleotide
agcaucuucaaagacgagg

SEQ ID NO: 3089596 - RNA, 19 nt, Artificial Sequence
  Description of Artificial Sequence: Synthetic oligonucleotide
uucaucgggaaccaugaca

SEQ ID NO: 3089597 - RNA, 19 nt, Artificial Sequence
  Description of Artificial Sequence: Synthetic oligonucleotide
aucgggaaccaugacaacc

SEQ ID NO: 3089598 - RNA, 19 nt, Artificial Sequence
  Description of Artificial Sequence: Synthetic oligonucleotide
uccauugggagcaucuuca

SEQ ID NO: 3089599 - RNA, 19 nt, Artificial Sequence
  Description of Artificial Sequence: Synthetic oligonucleotide
uguuaagucucgacucagg

SEQ ID NO: 3089600 - RNA, 19 nt, Artificial Sequence
  Description of Artificial Sequence: Synthetic oligonucleotide
gaaugcagcaccacugugg

SEQ ID NO: 3089601 - RNA, 19 nt, Artificial Sequence
  Description of Artificial Sequence: Synthetic oligonucleotide
aaacagcucaggcuugaag

SEQ ID NO: 3089602 - RNA, 19 nt, Artificial Sequence
  Description of Artificial Sequence: Synthetic oligonucleotide
agcacgaugugguugaaca

SEQ ID NO: 3089603 - RNA, 19 nt, Artificial Sequence
  Description of Artificial Sequence: Synthetic oligonucleotide
ugaacaacccgaagaauuc

SEQ ID NO: 3089604 - RNA, 19 nt, Artificial Sequence
  Description of Artificial Sequence: Synthetic oligonucleotide
gagaggaauaugucugggg

SEQ ID NO: 3089605 - RNA, 19 nt, Artificial Sequence
  Description of Artificial Sequence: Synthetic oligonucleotide
ugggauugaaccuccgugc

SEQ ID NO: 3089606 - RNA, 19 nt, Artificial Sequence
  Description of Artificial Sequence: Synthetic oligonucleotide
acaggagaggaauaugucu

SEQ ID NO: 3089607 - RNA, 19 nt, Artificial Sequence
  Description of Artificial Sequence: Synthetic oligonucleotide
gaagaauuccuugugccug

SEQ ID NO: 3089608 - RNA, 19 nt, Artificial Sequence
  Description of Artificial Sequence: Synthetic oligonucleotide
aacccgaagaauuccuugu

SEQ ID NO: 3089609 - RNA, 19 nt, Artificial Sequence
  Description of Artificial Sequence: Synthetic oligonucleotide
cucaggaucaucucccagc

SEQ ID NO: 3089610 - RNA, 19 nt, Artificial Sequence
  Description of Artificial Sequence: Synthetic oligonucleotide
aggcagaccaaacagcuca

SEQ ID NO: 3089611 - RNA, 19 nt, Artificial Sequence
  Description of Artificial Sequence: Synthetic oligonucleotide
ucaggaucaucucccagca

SEQ ID NO: 3089612 - RNA, 19 nt, Artificial Sequence
  Description of Artificial Sequence: Synthetic oligonucleotide
caggagaggaauaugucug

SEQ ID NO: 3089613 - RNA, 19 nt, Artificial Sequence
  Description of Artificial Sequence: Synthetic oligonucleotide
ugaccucaggaucaucucc

SEQ ID NO: 3089614 - RNA, 19 nt, Artificial Sequence
  Description of Artificial Sequence: Synthetic oligonucleotide
ucucccagcacgauguggu

SEQ ID NO: 3089615 - RNA, 19 nt, Artificial Sequence
  Description of Artificial Sequence: Synthetic oligonucleotide
agaccaaacagcucaggcu

SEQ ID NO: 3089616 - RNA, 19 nt, Artificial Sequence
  Description of Artificial Sequence: Synthetic oligonucleotide
acagcucaggcuugaaguc

SEQ ID NO: 3089617 - RNA, 19 nt, Artificial Sequence
  Description of Artificial Sequence: Synthetic oligonucleotide
aggagaggaauaugucugg

SEQ ID NO: 3089618 - RNA, 19 nt, Artificial Sequence
  Description of Artificial Sequence: Synthetic oligonucleotide
ucgggaaccaugacaaccu

SEQ ID NO: 3089619 - RNA, 19 nt, Artificial Sequence
  Description of Artificial Sequence: Synthetic oligonucleotide
uuucuuguuaagucucgac

SEQ ID NO: 3089620 - RNA, 19 nt, Artificial Sequence
  Description of Artificial Sequence: Synthetic oligonucleotide
gcaggagugggauugaacc

SEQ ID NO: 3089621 - RNA, 19 nt, Artificial Sequence
  Description of Artificial Sequence: Synthetic oligonucleotide
gacucagguuuucaucggg

SEQ ID NO: 3089622 - RNA, 19 nt, Artificial Sequence
  Description of Artificial Sequence: Synthetic oligonucleotide
caaccugcaucccagcugc

SEQ ID NO: 3089623 - RNA, 19 nt, Artificial Sequence
  Description of Artificial Sequence: Synthetic oligonucleotide
acgaugugguugaacaacc

SEQ ID NO: 3089624 - RNA, 19 nt, Artificial Sequence
  Description of Artificial Sequence: Synthetic oligonucleotide
ucagguuuucaucgggaac

SEQ ID NO: 3089625 - RNA, 19 nt, Artificial Sequence
  Description of Artificial Sequence: Synthetic oligonucleotide
ugugguugaacaacccgaa

SEQ ID NO: 3089626 - RNA, 19 nt, Artificial Sequence
  Description of Artificial Sequence: Synthetic oligonucleotide
cagaccaaacagcucaggc

SEQ ID NO: 3089627 - RNA, 19 nt, Artificial Sequence
  Description of Artificial Sequence: Synthetic oligonucleotide
gugggauugaaccuccgug

SEQ ID NO: 3089628 - RNA, 19 nt, Artificial Sequence
  Description of Artificial Sequence: Synthetic oligonucleotide
agacgaggcacaugucugg

SEQ ID NO: 3089629 - RNA, 19 nt, Artificial Sequence
  Description of Artificial Sequence: Synthetic oligonucleotide
acaaccugcaucccagcug

SEQ ID NO: 3089630 - RNA, 19 nt, Artificial Sequence
  Description of Artificial Sequence: Synthetic oligonucleotide
aagacgaggcacaugucug

SEQ ID NO: 3089631 - RNA, 19 nt, Artificial Sequence
  Description of Artificial Sequence: Synthetic oligonucleotide
uugggagcaucuucaaaga

SEQ ID NO: 3089632 - RNA, 19 nt, Artificial Sequence
  Description of Artificial Sequence: Synthetic oligonucleotide
aggcuugaaguccuccagg

SEQ ID NO: 3089633 - RNA, 19 nt, Artificial Sequence
  Description of Artificial Sequence: Synthetic oligonucleotide
cuugaaguccuccagggaa

SEQ ID NO: 3089634 - RNA, 19 nt, Artificial Sequence
  Description of Artificial Sequence: Synthetic oligonucleotide
auuccuugugccugcaggu

SEQ ID NO: 3089635 - RNA, 19 nt, Artificial Sequence
  Description of Artificial Sequence: Synthetic oligonucleotide
caugucuggggcaggagug

SEQ ID NO: 3089636 - RNA, 19 nt, Artificial Sequence
  Description of Artificial Sequence: Synthetic oligonucleotide
ucaggcuugaaguccucca

SEQ ID NO: 3089637 - RNA, 19 nt, Artificial Sequence
  Description of Artificial Sequence: Synthetic oligonucleotide
aggaauaugucuggggcug

SEQ ID NO: 3089638 - RNA, 19 nt, Artificial Sequence
  Description of Artificial Sequence: Synthetic oligonucleotide
aucaucucccagcacgaug

SEQ ID NO: 3089639 - RNA, 19 nt, Artificial Sequence
  Description of Artificial Sequence: Synthetic oligonucleotide
uuguuaagucucgacucag

SEQ ID NO: 3089640 - RNA, 19 nt, Artificial Sequence
  Description of Artificial Sequence: Synthetic oligonucleotide
gggagcaucuucaaagacg

SEQ ID NO: 3089641 - RNA, 19 nt, Artificial Sequence
  Description of Artificial Sequence: Synthetic oligonucleotide
uuaagucucgacucagguu

SEQ ID NO: 3089642 - RNA, 19 nt, Artificial Sequence
  Description of Artificial Sequence: Synthetic oligonucleotide
uccuugugccugcaggucu

SEQ ID NO: 3089643 - RNA, 19 nt, Artificial Sequence
  Description of Artificial Sequence: Synthetic oligonucleotide
gaacaacccgaagaauucc

SEQ ID NO: 3089644 - RNA, 19 nt, Artificial Sequence
  Description of Artificial Sequence: Synthetic oligonucleotide
acaugucuggggcaggagu

SEQ ID NO: 3089645 - RNA, 19 nt, Artificial Sequence
  Description of Artificial Sequence: Synthetic oligonucleotide
uugaaguccuccagggaau

SEQ ID NO: 3089646 - RNA, 19 nt, Artificial Sequence
  Description of Artificial Sequence: Synthetic oligonucleotide
aacaacccgaagaauuccu

SEQ ID NO: 3089647 - RNA, 19 nt, Artificial Sequence
  Description of Artificial Sequence: Synthetic oligonucleotide
gaccucaggaucaucuccc

SEQ ID NO: 3089648 - RNA, 19 nt, Artificial Sequence
  Description of Artificial Sequence: Synthetic oligonucleotide
acuguugaccucaggauca

SEQ ID NO: 3089649 - RNA, 19 nt, Artificial Sequence
  Description of Artificial Sequence: Synthetic oligonucleotide
aaguccuccagggaaugca

SEQ ID NO: 3089650 - RNA, 19 nt, Artificial Sequence
  Description of Artificial Sequence: Synthetic oligonucleotide
cacuguugaccucaggauc

SEQ ID NO: 3089651 - RNA, 19 nt, Artificial Sequence
  Description of Artificial Sequence: Synthetic oligonucleotide
augacaaccugcaucccag

SEQ ID NO: 3089652 - RNA, 19 nt, Artificial Sequence
  Description of Artificial Sequence: Synthetic oligonucleotide
gcaucuucaaagacgaggc

SEQ ID NO: 3089653 - RNA, 19 nt, Artificial Sequence
  Description of Artificial Sequence: Synthetic oligonucleotide
caacccgaagaauuccuug

SEQ ID NO: 3089654 - RNA, 19 nt, Artificial Sequence
  Description of Artificial Sequence: Synthetic oligonucleotide
ugggagcaucuucaaagac

SEQ ID NO: 3089655 - RNA, 19 nt, Artificial Sequence
  Description of Artificial Sequence: Synthetic oligonucleotide
cacgaugugguugaacaac

SEQ ID NO: 3089656 - RNA, 19 nt, Artificial Sequence
  Description of Artificial Sequence: Synthetic oligonucleotide
cuuguuaagucucgacuca

SEQ ID NO: 3089657 - RNA, 19 nt, Artificial Sequence
  Description of Artificial Sequence: Synthetic oligonucleotide
cuccagggaaugcagcacc

SEQ ID NO: 3089658 - RNA, 19 nt, Artificial Sequence
  Description of Artificial Sequence: Synthetic oligonucleotide
cucgacucagguuuucauc

SEQ ID NO: 3089659 - RNA, 19 nt, Artificial Sequence
  Description of Artificial Sequence: Synthetic oligonucleotide
uggggcaggagugggauug

SEQ ID NO: 3089660 - RNA, 19 nt, Artificial Sequence
  Description of Artificial Sequence: Synthetic oligonucleotide
uaugucuggggcuggcuuc

SEQ ID NO: 3089661 - RNA, 19 nt, Artificial Sequence
  Description of Artificial Sequence: Synthetic oligonucleotide
auugaaccuccgugcacag

SEQ ID NO: 3089662 - RNA, 19 nt, Artificial Sequence
  Description of Artificial Sequence: Synthetic oligonucleotide
augugguugaacaacccga

SEQ ID NO: 3089663 - RNA, 19 nt, Artificial Sequence
  Description of Artificial Sequence: Synthetic oligonucleotide
ugcaucccagcugcgagag

SEQ ID NO: 3089664 - RNA, 19 nt, Artificial Sequence
  Description of Artificial Sequence: Synthetic oligonucleotide
aauaugucuggggcuggcu

SEQ ID NO: 3089665 - RNA, 19 nt, Artificial Sequence
  Description of Artificial Sequence: Synthetic oligonucleotide
gcugccuccacuccauugg

SEQ ID NO: 3089666 - RNA, 19 nt, Artificial Sequence
  Description of Artificial Sequence: Synthetic oligonucleotide
cacaggagaggaauauguc

SEQ ID NO: 3089667 - RNA, 19 nt, Artificial Sequence
  Description of Artificial Sequence: Synthetic oligonucleotide
gguugaacaacccgaagaa

SEQ ID NO: 3089668 - RNA, 19 nt, Artificial Sequence
  Description of Artificial Sequence: Synthetic oligonucleotide
agugggauugaaccuccgu

SEQ ID NO: 3089669 - RNA, 19 nt, Artificial Sequence
  Description of Artificial Sequence: Synthetic oligonucleotide
ccgaagaauuccuugugcc

SEQ ID NO: 3089670 - RNA, 19 nt, Artificial Sequence
  Description of Artificial Sequence: Synthetic oligonucleotide
aaccuccgugcacaggaga

SEQ ID NO: 3089671 - RNA, 19 nt, Artificial Sequence
  Description of Artificial Sequence: Synthetic oligonucleotide
uccagggaaugcagcacca

SEQ ID NO: 3089672 - RNA, 19 nt, Artificial Sequence
  Description of Artificial Sequence: Synthetic oligonucleotide
acccgaagaauuccuugug

SEQ ID NO: 3089673 - RNA, 19 nt, Artificial Sequence
  Description of Artificial Sequence: Synthetic oligonucleotide
augucuggggcuggcuucc

SEQ ID NO: 3089674 - RNA, 19 nt, Artificial Sequence
  Description of Artificial Sequence: Synthetic oligonucleotide
ugcgagagcugccuccacu

SEQ ID NO: 3089675 - RNA, 19 nt, Artificial Sequence
  Description of Artificial Sequence: Synthetic oligonucleotide
agggaaugcagcaccacug

SEQ ID NO: 3089676 - RNA, 19 nt, Artificial Sequence
  Description of Artificial Sequence: Synthetic oligonucleotide
ggagcaucuucaaagacga

SEQ ID NO: 3089677 - RNA, 19 nt, Artificial Sequence
  Description of Artificial Sequence: Synthetic oligonucleotide
gacgaggcacaugucuggg

SEQ ID NO: 3089678 - RNA, 19 nt, Artificial Sequence
  Description of Artificial Sequence: Synthetic oligonucleotide
gaccaaacagcucaggcuu

SEQ ID NO: 3089679 - RNA, 19 nt, Artificial Sequence
  Description of Artificial Sequence: Synthetic oligonucleotide
guuaagucucgacucaggu

SEQ ID NO: 3089680 - RNA, 19 nt, Artificial Sequence
  Description of Artificial Sequence: Synthetic oligonucleotide
ugcacaggagaggaauaug

SEQ ID NO: 3089681 - RNA, 19 nt, Artificial Sequence
  Description of Artificial Sequence: Synthetic oligonucleotide
gaauuccuugugccugcag

SEQ ID NO: 3089682 - RNA, 19 nt, Artificial Sequence
  Description of Artificial Sequence: Synthetic oligonucleotide
uuucaucgggaaccaugac

SEQ ID NO: 3089683 - RNA, 19 nt, Artificial Sequence
  Description of Artificial Sequence: Synthetic oligonucleotide
uugaccucaggaucaucuc

SEQ ID NO: 3089684 - RNA, 19 nt, Artificial Sequence
  Description of Artificial Sequence: Synthetic oligonucleotide
acgaggcacaugucugggg

SEQ ID NO: 3089685 - RNA, 19 nt, Artificial Sequence
  Description of Artificial Sequence: Synthetic oligonucleotide
acuguggccuuucuuguua

SEQ ID NO: 3089686 - RNA, 19 nt, Artificial Sequence
  Description of Artificial Sequence: Synthetic oligonucleotide
caugacaaccugcauccca

SEQ ID NO: 3089687 - RNA, 19 nt, Artificial Sequence
  Description of Artificial Sequence: Synthetic oligonucleotide
auaugucuggggcuggcuu

SEQ ID NO: 3089688 - RNA, 19 nt, Artificial Sequence
  Description of Artificial Sequence: Synthetic oligonucleotide
ucucgacucagguuuucau

SEQ ID NO: 3089689 - RNA, 19 nt, Artificial Sequence
  Description of Artificial Sequence: Synthetic oligonucleotide
gugguugaacaacccgaag

SEQ ID NO: 3089690 - RNA, 19 nt, Artificial Sequence
  Description of Artificial Sequence: Synthetic oligonucleotide
ugucuggggcaggaguggg

SEQ ID NO: 3089691 - RNA, 19 nt, Artificial Sequence
  Description of Artificial Sequence: Synthetic oligonucleotide
gaggaauaugucuggggcu

SEQ ID NO: 3089692 - RNA, 19 nt, Artificial Sequence
  Description of Artificial Sequence: Synthetic oligonucleotide
cuccauugggagcaucuuc

SEQ ID NO: 3089693 - RNA, 19 nt, Artificial Sequence
  Description of Artificial Sequence: Synthetic oligonucleotide
gaauaugucuggggcuggc

SEQ ID NO: 3089694 - RNA, 19 nt, Artificial Sequence
  Description of Artificial Sequence: Synthetic oligonucleotide
ggaaccaugacaaccugca

SEQ ID NO: 3089695 - RNA, 19 nt, Artificial Sequence
  Description of Artificial Sequence: Synthetic oligonucleotide
ccuuucuuguuaagucucg

SEQ ID NO: 3089696 - RNA, 19 nt, Artificial Sequence
  Description of Artificial Sequence: Synthetic oligonucleotide
gagagcugccuccacucca

SEQ ID NO: 3089697 - RNA, 19 nt, Artificial Sequence
  Description of Artificial Sequence: Synthetic oligonucleotide
ugacaaccugcaucccagc

SEQ ID NO: 3089698 - RNA, 19 nt, Artificial Sequence
  Description of Artificial Sequence: Synthetic oligonucleotide
aucucccagcacgaugugg

SEQ ID NO: 3089699 - RNA, 19 nt, Artificial Sequence
  Description of Artificial Sequence: Synthetic oligonucleotide
guugaccucaggaucaucu

SEQ ID NO: 3089700 - RNA, 19 nt, Artificial Sequence
  Description of Artificial Sequence: Synthetic oligonucleotide
augucuggggcaggagugg

SEQ ID NO: 3089701 - RNA, 19 nt, Artificial Sequence
  Description of Artificial Sequence: Synthetic oligonucleotide
ggagaggaauaugucuggg

SEQ ID NO: 3089702 - RNA, 19 nt, Artificial Sequence
  Description of Artificial Sequence: Synthetic oligonucleotide
uggggcuggcuucccacug

SEQ ID NO: 3089703 - RNA, 19 nt, Artificial Sequence
  Description of Artificial Sequence: Synthetic oligonucleotide
gccuccacuccauugggag

SEQ ID NO: 3089704 - RNA, 19 nt, Artificial Sequence
  Description of Artificial Sequence: Synthetic oligonucleotide
uugaaccuccgugcacagg

SEQ ID NO: 3089705 - RNA, 19 nt, Artificial Sequence
  Description of Artificial Sequence: Synthetic oligonucleotide
ucccagcacgaugugguug

SEQ ID NO: 3089706 - RNA, 19 nt, Artificial Sequence
  Description of Artificial Sequence: Synthetic oligonucleotide
cugccuccacuccauuggg

SEQ ID NO: 3089707 - RNA, 19 nt, Artificial Sequence
  Description of Artificial Sequence: Synthetic oligonucleotide
accuccgugcacaggagag

SEQ ID NO: 3089708 - RNA, 19 nt, Artificial Sequence
  Description of Artificial Sequence: Synthetic oligonucleotide
gaaguccuccagggaaugc

SEQ ID NO: 3089709 - RNA, 19 nt, Artificial Sequence
  Description of Artificial Sequence: Synthetic oligonucleotide
cuucccacuguugaccuca

SEQ ID NO: 3089710 - RNA, 19 nt, Artificial Sequence
  Description of Artificial Sequence: Synthetic oligonucleotide
ucccacuguugaccucagg

SEQ ID NO: 3089711 - RNA, 19 nt, Artificial Sequence
  Description of Artificial Sequence: Synthetic oligonucleotide
ugccuccacuccauuggga

SEQ ID NO: 3089712 - RNA, 19 nt, Artificial Sequence
  Description of Artificial Sequence: Synthetic oligonucleotide
cucagguuuucaucgggaa

SEQ ID NO: 3089713 - RNA, 19 nt, Artificial Sequence
  Description of Artificial Sequence: Synthetic oligonucleotide
aggcacaugucuggggcag

SEQ ID NO: 3089714 - RNA, 19 nt, Artificial Sequence
  Description of Artificial Sequence: Synthetic oligonucleotide
aguccuccagggaaugcag

SEQ ID NO: 3089715 - RNA, 19 nt, Artificial Sequence
  Description of Artificial Sequence: Synthetic oligonucleotide
cucaggcuugaaguccucc

SEQ ID NO: 3089716 - RNA, 19 nt, Artificial Sequence
  Description of Artificial Sequence: Synthetic oligonucleotide
acucagguuuucaucggga

SEQ ID NO: 3089717 - RNA, 19 nt, Artificial Sequence
  Description of Artificial Sequence: Synthetic oligonucleotide
cuccacuccauugggagca

SEQ ID NO: 3089718 - RNA, 19 nt, Artificial Sequence
  Description of Artificial Sequence: Synthetic oligonucleotide
caaagacgaggcacauguc

SEQ ID NO: 3089719 - RNA, 19 nt, Artificial Sequence
  Description of Artificial Sequence: Synthetic oligonucleotide
ggaaugcagcaccacugug

SEQ ID NO: 3089720 - RNA, 19 nt, Artificial Sequence
  Description of Artificial Sequence: Synthetic oligonucleotide
gaggcacaugucuggggca

SEQ ID NO: 3089721 - RNA, 19 nt, Artificial Sequence
  Description of Artificial Sequence: Synthetic oligonucleotide
gcuggcuucccacuguuga

SEQ ID NO: 3089722 - RNA, 19 nt, Artificial Sequence
  Description of Artificial Sequence: Synthetic oligonucleotide
agcaccacuguggccuuuc

SEQ ID NO: 3089723 - RNA, 19 nt, Artificial Sequence
  Description of Artificial Sequence: Synthetic oligonucleotide
uucccacuguugaccucag

SEQ ID NO: 3089724 - RNA, 19 nt, Artificial Sequence
  Description of Artificial Sequence: Synthetic oligonucleotide
gacaaccugcaucccagcu

SEQ ID NO: 3089725 - RNA, 19 nt, Artificial Sequence
  Description of Artificial Sequence: Synthetic oligonucleotide
accucaggaucaucuccca

SEQ ID NO: 3089726 - RNA, 19 nt, Artificial Sequence
  Description of Artificial Sequence: Synthetic oligonucleotide
cuuucuuguuaagucucga

SEQ ID NO: 3089727 - RNA, 19 nt, Artificial Sequence
  Description of Artificial Sequence: Synthetic oligonucleotide
agucucgacucagguuuuc

SEQ ID NO: 3089728 - RNA, 19 nt, Artificial Sequence
  Description of Artificial Sequence: Synthetic oligonucleotide
agguuuucaucgggaacca

SEQ ID NO: 3089729 - RNA, 19 nt, Artificial Sequence
  Description of Artificial Sequence: Synthetic oligonucleotide
gaaccuccgugcacaggag

SEQ ID NO: 3089730 - RNA, 19 nt, Artificial Sequence
  Description of Artificial Sequence: Synthetic oligonucleotide
gagugggauugaaccuccg

SEQ ID NO: 3089731 - RNA, 19 nt, Artificial Sequence
  Description of Artificial Sequence: Synthetic oligonucleotide
gggauugaaccuccgugca

SEQ ID NO: 3089732 - RNA, 19 nt, Artificial Sequence
  Description of Artificial Sequence: Synthetic oligonucleotide
agcucaggcuugaaguccu

SEQ ID NO: 3089733 - RNA, 19 nt, Artificial Sequence
  Description of Artificial Sequence: Synthetic oligonucleotide
ucccagcugcgagagcugc

SEQ ID NO: 3089734 - RNA, 19 nt, Artificial Sequence
  Description of Artificial Sequence: Synthetic oligonucleotide
ggauugaaccuccgugcac

SEQ ID NO: 3089735 - RNA, 19 nt, Artificial Sequence
  Description of Artificial Sequence: Synthetic oligonucleotide
cccacuguugaccucagga

SEQ ID NO: 3089736 - RNA, 19 nt, Artificial Sequence
  Description of Artificial Sequence: Synthetic oligonucleotide
caggcagaccaaacagcuc

SEQ ID NO: 3089737 - RNA, 19 nt, Artificial Sequence
  Description of Artificial Sequence: Synthetic oligonucleotide
ggaauaugucuggggcugg

SEQ ID NO: 3089738 - RNA, 19 nt, Artificial Sequence
  Description of Artificial Sequence: Synthetic oligonucleotide
uuccuugugccugcagguc

SEQ ID NO: 3089739 - RNA, 19 nt, Artificial Sequence
  Description of Artificial Sequence: Synthetic oligonucleotide
caucgggaaccaugacaac

SEQ ID NO: 3089740 - RNA, 19 nt, Artificial Sequence
  Description of Artificial Sequence: Synthetic oligonucleotide
ccugcaucccagcugcgag

SEQ ID NO: 3089741 - RNA, 19 nt, Artificial Sequence
  Description of Artificial Sequence: Synthetic oligonucleotide
cgaggcacaugucuggggc

SEQ ID NO: 3089742 - RNA, 19 nt, Artificial Sequence
  Description of Artificial Sequence: Synthetic oligonucleotide
cauugggagcaucuucaaa

SEQ ID NO: 3089743 - RNA, 19 nt, Artificial Sequence
  Description of Artificial Sequence: Synthetic oligonucleotide
gggaaccaugacaaccugc

SEQ ID NO: 3089744 - RNA, 19 nt, Artificial Sequence
  Description of Artificial Sequence: Synthetic oligonucleotide
ggagugggauugaaccucc

SEQ ID NO: 3089745 - RNA, 19 nt, Artificial Sequence
  Description of Artificial Sequence: Synthetic oligonucleotide
accaaacagcucaggcuug

SEQ ID NO: 3089746 - RNA, 19 nt, Artificial Sequence
  Description of Artificial Sequence: Synthetic oligonucleotide
gagcaucuucaaagacgag

SEQ ID NO: 3089747 - RNA, 19 nt, Artificial Sequence
  Description of Artificial Sequence: Synthetic oligonucleotide
caucccagcugcgagagcu

SEQ ID NO: 3089748 - RNA, 19 nt, Artificial Sequence
  Description of Artificial Sequence: Synthetic oligonucleotide
uccgugcacaggagaggaa

SEQ ID NO: 3089749 - RNA, 19 nt, Artificial Sequence
  Description of Artificial Sequence: Synthetic oligonucleotide
agaauuccuugugccugca

SEQ ID NO: 3089750 - RNA, 19 nt, Artificial Sequence
  Description of Artificial Sequence: Synthetic oligonucleotide
cuccgugcacaggagagga

SEQ ID NO: 3089751 - RNA, 19 nt, Artificial Sequence
  Description of Artificial Sequence: Synthetic oligonucleotide
cacuccauugggagcaucu

SEQ ID NO: 3089752 - RNA, 19 nt, Artificial Sequence
  Description of Artificial Sequence: Synthetic oligonucleotide
gccuuucuuguuaagucuc

SEQ ID NO: 3089753 - RNA, 19 nt, Artificial Sequence
  Description of Artificial Sequence: Synthetic oligonucleotide
ggccuuucuuguuaagucu

SEQ ID NO: 3089754 - RNA, 19 nt, Artificial Sequence
  Description of Artificial Sequence: Synthetic oligonucleotide
aaccugcaucccagcugcg

SEQ ID NO: 3089755 - RNA, 19 nt, Artificial Sequence
  Description of Artificial Sequence: Synthetic oligonucleotide
cacaugucuggggcaggag

SEQ ID NO: 3089756 - RNA, 19 nt, Artificial Sequence
  Description of Artificial Sequence: Synthetic oligonucleotide
guccuccagggaaugcagc

SEQ ID NO: 3089757 - RNA, 19 nt, Artificial Sequence
  Description of Artificial Sequence: Synthetic oligonucleotide
acaacccgaagaauuccuu

SEQ ID NO: 3089758 - RNA, 19 nt, Artificial Sequence
  Description of Artificial Sequence: Synthetic oligonucleotide
gcagaccaaacagcucagg

SEQ ID NO: 3089759 - RNA, 19 nt, Artificial Sequence
  Description of Artificial Sequence: Synthetic oligonucleotide
caggagugggauugaaccu

SEQ ID NO: 3089760 - RNA, 19 nt, Artificial Sequence
  Description of Artificial Sequence: Synthetic oligonucleotide
uguugaccucaggaucauc

SEQ ID NO: 3089761 - RNA, 19 nt, Artificial Sequence
  Description of Artificial Sequence: Synthetic oligonucleotide
caggaucaucucccagcac

SEQ ID NO: 3089762 - RNA, 19 nt, Artificial Sequence
  Description of Artificial Sequence: Synthetic oligonucleotide
accugcaucccagcugcga

SEQ ID NO: 3089763 - RNA, 19 nt, Artificial Sequence
  Description of Artificial Sequence: Synthetic oligonucleotide
ccuccacuccauugggagc

SEQ ID NO: 3089764 - RNA, 19 nt, Artificial Sequence
  Description of Artificial Sequence: Synthetic oligonucleotide
gcgagagcugccuccacuc

SEQ ID NO: 3089765 - RNA, 19 nt, Artificial Sequence
  Description of Artificial Sequence: Synthetic oligonucleotide
cugcaucccagcugcgaga

SEQ ID NO: 3089766 - RNA, 19 nt, Artificial Sequence
  Description of Artificial Sequence: Synthetic oligonucleotide
cgaugugguugaacaaccc

SEQ ID NO: 3089767 - RNA, 19 nt, Artificial Sequence
  Description of Artificial Sequence: Synthetic oligonucleotide
ggaucaucucccagcacga

SEQ ID NO: 3089768 - RNA, 19 nt, Artificial Sequence
  Description of Artificial Sequence: Synthetic oligonucleotide
aagucucgacucagguuuu

SEQ ID NO: 3089769 - RNA, 19 nt, Artificial Sequence
  Description of Artificial Sequence: Synthetic oligonucleotide
cagggaaugcagcaccacu

SEQ ID NO: 3089770 - RNA, 19 nt, Artificial Sequence
  Description of Artificial Sequence: Synthetic oligonucleotide
gucucgacucagguuuuca

SEQ ID NO: 3089771 - RNA, 19 nt, Artificial Sequence
  Description of Artificial Sequence: Synthetic oligonucleotide
gcacaggagaggaauaugu

SEQ ID NO: 3089772 - RNA, 19 nt, Artificial Sequence
  Description of Artificial Sequence: Synthetic oligonucleotide
ggcagaccaaacagcucag

SEQ ID NO: 3089773 - RNA, 19 nt, Artificial Sequence
  Description of Artificial Sequence: Synthetic oligonucleotide
acuccauugggagcaucuu

SEQ ID NO: 3089774 - RNA, 19 nt, Artificial Sequence
  Description of Artificial Sequence: Synthetic oligonucleotide
guugaacaacccgaagaau

SEQ ID NO: 3089775 - RNA, 19 nt, Artificial Sequence
  Description of Artificial Sequence: Synthetic oligonucleotide
gaaccaugacaaccugcau

SEQ ID NO: 3089776 - RNA, 19 nt, Artificial Sequence
  Description of Artificial Sequence: Synthetic oligonucleotide
cagcacgaugugguugaac

SEQ ID NO: 3089777 - RNA, 19 nt, Artificial Sequence
  Description of Artificial Sequence: Synthetic oligonucleotide
cgacucagguuuucaucgg

SEQ ID NO: 3089778 - RNA, 19 nt, Artificial Sequence
  Description of Artificial Sequence: Synthetic oligonucleotide
ggcaggagugggauugaac

SEQ ID NO: 3089779 - RNA, 19 nt, Artificial Sequence
  Description of Artificial Sequence: Synthetic oligonucleotide
cccagcacgaugugguuga

SEQ ID NO: 3089780 - RNA, 19 nt, Artificial Sequence
  Description of Artificial Sequence: Synthetic oligonucleotide
ccucaggaucaucucccag

SEQ ID NO: 3089781 - RNA, 19 nt, Artificial Sequence
  Description of Artificial Sequence: Synthetic oligonucleotide
gggaaugcagcaccacugu

SEQ ID NO: 3089782 - RNA, 19 nt, Artificial Sequence
  Description of Artificial Sequence: Synthetic oligonucleotide
ugucuggggcuggcuuccc

SEQ ID NO: 3089783 - RNA, 19 nt, Artificial Sequence
  Description of Artificial Sequence: Synthetic oligonucleotide
gcacgaugugguugaacaa

SEQ ID NO: 3089784 - RNA, 19 nt, Artificial Sequence
  Description of Artificial Sequence: Synthetic oligonucleotide
ggcacaugucuggggcagg

SEQ ID NO: 3089785 - RNA, 19 nt, Artificial Sequence
  Description of Artificial Sequence: Synthetic oligonucleotide
aucccagcugcgagagcug

SEQ ID NO: 3089786 - RNA, 19 nt, Artificial Sequence
  Description of Artificial Sequence: Synthetic oligonucleotide
gugcacaggagaggaauau

SEQ ID NO: 3089787 - RNA, 19 nt, Artificial Sequence
  Description of Artificial Sequence: Synthetic oligonucleotide
ggcuucccacuguugaccu

SEQ ID NO: 3089788 - RNA, 19 nt, Artificial Sequence
  Description of Artificial Sequence: Synthetic oligonucleotide
cugcgagagcugccuccac

SEQ ID NO: 3089789 - RNA, 19 nt, Artificial Sequence
  Description of Artificial Sequence: Synthetic oligonucleotide
cagcugcgagagcugccuc

SEQ ID NO: 3089790 - RNA, 19 nt, Artificial Sequence
  Description of Artificial Sequence: Synthetic oligonucleotide
ccuccagggaaugcagcac

SEQ ID NO: 3089791 - RNA, 19 nt, Artificial Sequence
  Description of Artificial Sequence: Synthetic oligonucleotide
uccacuccauugggagcau

SEQ ID NO: 3089792 - RNA, 19 nt, Artificial Sequence
  Description of Artificial Sequence: Synthetic oligonucleotide
caaacagcucaggcuugaa

SEQ ID NO: 3089793 - RNA, 19 nt, Artificial Sequence
  Description of Artificial Sequence: Synthetic oligonucleotide
gaucaucucccagcacgau

SEQ ID NO: 3089794 - RNA, 19 nt, Artificial Sequence
  Description of Artificial Sequence: Synthetic oligonucleotide
gcugcgagagcugccucca

SEQ ID NO: 3089795 - RNA, 19 nt, Artificial Sequence
  Description of Artificial Sequence: Synthetic oligonucleotide
cgagagcugccuccacucc

SEQ ID NO: 3089796 - RNA, 19 nt, Artificial Sequence
  Description of Artificial Sequence: Synthetic oligonucleotide
cgaagaauuccuugugccu

SEQ ID NO: 3089797 - RNA, 19 nt, Artificial Sequence
  Description of Artificial Sequence: Synthetic oligonucleotide
gcacaugucuggggcagga

SEQ ID NO: 3089798 - RNA, 19 nt, Artificial Sequence
  Description of Artificial Sequence: Synthetic oligonucleotide
ccagggaaugcagcaccac

SEQ ID NO: 3089799 - RNA, 19 nt, Artificial Sequence
  Description of Artificial Sequence: Synthetic oligonucleotide
ccacuguugaccucaggau

SEQ ID NO: 3089800 - RNA, 19 nt, Artificial Sequence
  Description of Artificial Sequence: Synthetic oligonucleotide
ccaugacaaccugcauccc

SEQ ID NO: 3089801 - RNA, 19 nt, Artificial Sequence
  Description of Artificial Sequence: Synthetic oligonucleotide
ccaaacagcucaggcuuga

SEQ ID NO: 3089802 - RNA, 19 nt, Artificial Sequence
  Description of Artificial Sequence: Synthetic oligonucleotide
ccauugggagcaucuucaa

SEQ ID NO: 3089803 - RNA, 19 nt, Artificial Sequence
  Description of Artificial Sequence: Synthetic oligonucleotide
gcuucccacuguugaccuc

SEQ ID NO: 3089804 - RNA, 19 nt, Artificial Sequence
  Description of Artificial Sequence: Synthetic oligonucleotide
ggcuggcuucccacuguug

SEQ ID NO: 3089805 - RNA, 19 nt, Artificial Sequence
  Description of Artificial Sequence: Synthetic oligonucleotide
gcaucccagcugcgagagc

SEQ ID NO: 3089806 - RNA, 19 nt, Artificial Sequence
  Description of Artificial Sequence: Synthetic oligonucleotide
cgggaaccaugacaaccug

SEQ ID NO: 3089807 - RNA, 19 nt, Artificial Sequence
  Description of Artificial Sequence: Synthetic oligonucleotide
cacuguggccuuucuuguu

SEQ ID NO: 3089808 - RNA, 19 nt, Artificial Sequence
  Description of Artificial Sequence: Synthetic oligonucleotide
ccacuguggccuuucuugu

SEQ ID NO: 3089809 - RNA, 19 nt, Artificial Sequence
  Description of Artificial Sequence: Synthetic oligonucleotide
cgugcacaggagaggaaua

SEQ ID NO: 3089810 - RNA, 19 nt, Artificial Sequence
  Description of Artificial Sequence: Synthetic oligonucleotide
ggggcuggcuucccacugu

SEQ ID NO: 3089811 - RNA, 19 nt, Artificial Sequence
  Description of Artificial Sequence: Synthetic oligonucleotide
caccacuguggccuuucuu

SEQ ID NO: 3089812 - RNA, 19 nt, Artificial Sequence
  Description of Artificial Sequence: Synthetic oligonucleotide
cuguugaccucaggaucau

SEQ ID NO: 3089813 - RNA, 19 nt, Artificial Sequence
  Description of Artificial Sequence: Synthetic oligonucleotide
cucccagcacgaugugguu

SEQ ID NO: 3089814 - RNA, 19 nt, Artificial Sequence
  Description of Artificial Sequence: Synthetic oligonucleotide
ggggcaggagugggauuga

SEQ ID NO: 3089815 - RNA, 19 nt, Artificial Sequence
  Description of Artificial Sequence: Synthetic oligonucleotide
gagcugccuccacuccauu

SEQ ID NO: 3089816 - RNA, 19 nt, Artificial Sequence
  Description of Artificial Sequence: Synthetic oligonucleotide
ccagcugcgagagcugccu

SEQ ID NO: 3089817 - RNA, 19 nt, Artificial Sequence
  Description of Artificial Sequence: Synthetic oligonucleotide
gguuuucaucgggaaccau

SEQ ID NO: 3089818 - RNA, 19 nt, Artificial Sequence
  Description of Artificial Sequence: Synthetic oligonucleotide
gcucaggcuugaaguccuc

SEQ ID NO: 3089819 - RNA, 19 nt, Artificial Sequence
  Description of Artificial Sequence: Synthetic oligonucleotide
ccgugcacaggagaggaau

SEQ ID NO: 3089820 - RNA, 19 nt, Artificial Sequence
  Description of Artificial Sequence: Synthetic oligonucleotide
ccacuccauugggagcauc

SEQ ID NO: 3089821 - RNA, 19 nt, Artificial Sequence
  Description of Artificial Sequence: Synthetic oligonucleotide
ccuugugccugcaggucuu

SEQ ID NO: 3089822 - RNA, 19 nt, Artificial Sequence
  Description of Artificial Sequence: Synthetic oligonucleotide
cuggggcaggagugggauu

SEQ ID NO: 3089823 - RNA, 19 nt, Artificial Sequence
  Description of Artificial Sequence: Synthetic oligonucleotide
gcaccacuguggccuuucu

SEQ ID NO: 3089824 - RNA, 19 nt, Artificial Sequence
  Description of Artificial Sequence: Synthetic oligonucleotide
gggcuggcuucccacuguu

SEQ ID NO: 3089825 - RNA, 19 nt, Artificial Sequence
  Description of Artificial Sequence: Synthetic oligonucleotide
gcagcaccacuguggccuu

SEQ ID NO: 3089826 - RNA, 19 nt, Artificial Sequence
  Description of Artificial Sequence: Synthetic oligonucleotide
ccagcacgaugugguugaa

SEQ ID NO: 3089827 - RNA, 19 nt, Artificial Sequence
  Description of Artificial Sequence: Synthetic oligonucleotide
cagcaccacuguggccuuu

SEQ ID NO: 3089828 - RNA, 19 nt, Artificial Sequence
  Description of Artificial Sequence: Synthetic oligonucleotide
uucuucagguccaagaccg

SEQ ID NO: 3089829 - RNA, 19 nt, Artificial Sequence
  Description of Artificial Sequence: Synthetic oligonucleotide
gauaaggaaccucaucucg

SEQ ID NO: 3089830 - RNA, 19 nt, Artificial Sequence
  Description of Artificial Sequence: Synthetic oligonucleotide
aaugccuccuucccgcucc

SEQ ID NO: 3089831 - RNA, 19 nt, Artificial Sequence
  Description of Artificial Sequence: Synthetic oligonucleotide
uucuugauaaggaaccuca

SEQ ID NO: 3089832 - RNA, 19 nt, Artificial Sequence
  Description of Artificial Sequence: Synthetic oligonucleotide
aggaaccucaucucgauuc

SEQ ID NO: 3089833 - RNA, 19 nt, Artificial Sequence
  Description of Artificial Sequence: Synthetic oligonucleotide
uucuguacgacgaccacag

SEQ ID NO: 3089834 - RNA, 19 nt, Artificial Sequence
  Description of Artificial Sequence: Synthetic oligonucleotide
gaugccauaaucccugagc

SEQ ID NO: 3089835 - RNA, 19 nt, Artificial Sequence
  Description of Artificial Sequence: Synthetic oligonucleotide
uguacgacgaccacaggca

SEQ ID NO: 3089836 - RNA, 19 nt, Artificial Sequence
  Description of Artificial Sequence: Synthetic oligonucleotide
ucuccauccaucuugcaca

SEQ ID NO: 3089837 - RNA, 19 nt, Artificial Sequence
  Description of Artificial Sequence: Synthetic oligonucleotide
agcuucuugauaaggaacc

SEQ ID NO: 3089838 - RNA, 19 nt, Artificial Sequence
  Description of Artificial Sequence: Synthetic oligonucleotide
aggcauuaccucuccaucc

SEQ ID NO: 3089839 - RNA, 19 nt, Artificial Sequence
  Description of Artificial Sequence: Synthetic oligonucleotide
uccucugugagccuucucc

SEQ ID NO: 3089840 - RNA, 19 nt, Artificial Sequence
  Description of Artificial Sequence: Synthetic oligonucleotide
acauaugaccagcugaugu

SEQ ID NO: 3089841 - RNA, 19 nt, Artificial Sequence
  Description of Artificial Sequence: Synthetic oligonucleotide
uccgccacacauaugacca

SEQ ID NO: 3089842 - RNA, 19 nt, Artificial Sequence
  Description of Artificial Sequence: Synthetic oligonucleotide
auuccggaugccauaaucc

SEQ ID NO: 3089843 - RNA, 19 nt, Artificial Sequence
  Description of Artificial Sequence: Synthetic oligonucleotide
gaagucagaugguacgucc

SEQ ID NO: 3089844 - RNA, 19 nt, Artificial Sequence
  Description of Artificial Sequence: Synthetic oligonucleotide
uucagguccaagaccgugg

SEQ ID NO: 3089845 - RNA, 19 nt, Artificial Sequence
  Description of Artificial Sequence: Synthetic oligonucleotide
aagcuucuugauaaggaac

SEQ ID NO: 3089846 - RNA, 19 nt, Artificial Sequence
  Description of Artificial Sequence: Synthetic oligonucleotide
gaccguggcauucuguacg

SEQ ID NO: 3089847 - RNA, 19 nt, Artificial Sequence
  Description of Artificial Sequence: Synthetic oligonucleotide
ugcauguaucucuggauag

SEQ ID NO: 3089848 - RNA, 19 nt, Artificial Sequence
  Description of Artificial Sequence: Synthetic oligonucleotide
auaugaccagcugaugugc

SEQ ID NO: 3089849 - RNA, 19 nt, Artificial Sequence
  Description of Artificial Sequence: Synthetic oligonucleotide
ugccuaagcuucuugauaa

SEQ ID NO: 3089850 - RNA, 19 nt, Artificial Sequence
  Description of Artificial Sequence: Synthetic oligonucleotide
agucagaugguacguccgc

SEQ ID NO: 3089851 - RNA, 19 nt, Artificial Sequence
  Description of Artificial Sequence: Synthetic oligonucleotide
auuaccucuccauccaucu

SEQ ID NO: 3089852 - RNA, 19 nt, Artificial Sequence
  Description of Artificial Sequence: Synthetic oligonucleotide
ucuuccuguccucugugag

SEQ ID NO: 3089853 - RNA, 19 nt, Artificial Sequence
  Description of Artificial Sequence: Synthetic oligonucleotide
cuguacgacgaccacaggc

SEQ ID NO: 3089854 - RNA, 19 nt, Artificial Sequence
  Description of Artificial Sequence: Synthetic oligonucleotide
cauaugaccagcugaugug

SEQ ID NO: 3089855 - RNA, 19 nt, Artificial Sequence
  Description of Artificial Sequence: Synthetic oligonucleotide
acguccgccacacauauga

SEQ ID NO: 3089856 - RNA, 19 nt, Artificial Sequence
  Description of Artificial Sequence: Synthetic oligonucleotide
augccauaaucccugagcu

SEQ ID NO: 3089857 - RNA, 19 nt, Artificial Sequence
  Description of Artificial Sequence: Synthetic oligonucleotide
uucacuucugccuaagcuu

SEQ ID NO: 3089858 - RNA, 19 nt, Artificial Sequence
  Description of Artificial Sequence: Synthetic oligonucleotide
ugagcugcauguaucucug

SEQ ID NO: 3089859 - RNA, 19 nt, Artificial Sequence
  Description of Artificial Sequence: Synthetic oligonucleotide
gcugaagucagaugguacg

SEQ ID NO: 3089860 - RNA, 19 nt, Artificial Sequence
  Description of Artificial Sequence: Synthetic oligonucleotide
uguaucucuggauagccuu

SEQ ID NO: 3089861 - RNA, 19 nt, Artificial Sequence
  Description of Artificial Sequence: Synthetic oligonucleotide
cugaaugccuccuucccgc

SEQ ID NO: 3089862 - RNA, 19 nt, Artificial Sequence
  Description of Artificial Sequence: Synthetic oligonucleotide
cuggauagccuucuucagg

SEQ ID NO: 3089863 - RNA, 19 nt, Artificial Sequence
  Description of Artificial Sequence: Synthetic oligonucleotide
uuccggaugccauaauccc

SEQ ID NO: 3089864 - RNA, 19 nt, Artificial Sequence
  Description of Artificial Sequence: Synthetic oligonucleotide
ucaucucgauuccggaugc

SEQ ID NO: 3089865 - RNA, 19 nt, Artificial Sequence
  Description of Artificial Sequence: Synthetic oligonucleotide
ucuggauagccuucuucag

SEQ ID NO: 3089866 - RNA, 19 nt, Artificial Sequence
  Description of Artificial Sequence: Synthetic oligonucleotide
cuaagcuucuugauaagga

SEQ ID NO: 3089867 - RNA, 19 nt, Artificial Sequence
  Description of Artificial Sequence: Synthetic oligonucleotide
aagaccguggcauucugua

SEQ ID NO: 3089868 - RNA, 19 nt, Artificial Sequence
  Description of Artificial Sequence: Synthetic oligonucleotide
gauuccggaugccauaauc

SEQ ID NO: 3089869 - RNA, 19 nt, Artificial Sequence
  Description of Artificial Sequence: Synthetic oligonucleotide
uccugcuugagcugcaugu

SEQ ID NO: 3089870 - RNA, 19 nt, Artificial Sequence
  Description of Artificial Sequence: Synthetic oligonucleotide
ugauaaggaaccucaucuc

SEQ ID NO: 3089871 - RNA, 19 nt, Artificial Sequence
  Description of Artificial Sequence: Synthetic oligonucleotide
cuucuucagguccaagacc

SEQ ID NO: 3089872 - RNA, 19 nt, Artificial Sequence
  Description of Artificial Sequence: Synthetic oligonucleotide
aaucccugagcuucuuccu

SEQ ID NO: 3089873 - RNA, 19 nt, Artificial Sequence
  Description of Artificial Sequence: Synthetic oligonucleotide
cauugccuggccauauucc

SEQ ID NO: 3089874 - RNA, 19 nt, Artificial Sequence
  Description of Artificial Sequence: Synthetic oligonucleotide
cucaucucgauuccggaug

SEQ ID NO: 3089875 - RNA, 19 nt, Artificial Sequence
  Description of Artificial Sequence: Synthetic oligonucleotide
auccaucuugcacacucgg

SEQ ID NO: 3089876 - RNA, 19 nt, Artificial Sequence
  Description of Artificial Sequence: Synthetic oligonucleotide
ucugugagccuucucccca

SEQ ID NO: 3089877 - RNA, 19 nt, Artificial Sequence
  Description of Artificial Sequence: Synthetic oligonucleotide
cauguaucucuggauagcc

SEQ ID NO: 3089878 - RNA, 19 nt, Artificial Sequence
  Description of Artificial Sequence: Synthetic oligonucleotide
aagucagaugguacguccg

SEQ ID NO: 3089879 - RNA, 19 nt, Artificial Sequence
  Description of Artificial Sequence: Synthetic oligonucleotide
agcugaugugcugaaugcc

SEQ ID NO: 3089880 - RNA, 19 nt, Artificial Sequence
  Description of Artificial Sequence: Synthetic oligonucleotide
ugcugaaugccuccuuccc

SEQ ID NO: 3089881 - RNA, 19 nt, Artificial Sequence
  Description of Artificial Sequence: Synthetic oligonucleotide
ucauugccuggccauauuc

SEQ ID NO: 3089882 - RNA, 19 nt, Artificial Sequence
  Description of Artificial Sequence: Synthetic oligonucleotide
uuccuguccucugugagcc

SEQ ID NO: 3089883 - RNA, 19 nt, Artificial Sequence
  Description of Artificial Sequence: Synthetic oligonucleotide
ugugcugaaugccuccuuc

SEQ ID NO: 3089884 - RNA, 19 nt, Artificial Sequence
  Description of Artificial Sequence: Synthetic oligonucleotide
uucugccuaagcuucuuga

SEQ ID NO: 3089885 - RNA, 19 nt, Artificial Sequence
  Description of Artificial Sequence: Synthetic oligonucleotide
aaccucaucucgauuccgg

SEQ ID NO: 3089886 - RNA, 19 nt, Artificial Sequence
  Description of Artificial Sequence: Synthetic oligonucleotide
auugccuggccauauucca

SEQ ID NO: 3089887 - RNA, 19 nt, Artificial Sequence
  Description of Artificial Sequence: Synthetic oligonucleotide
ucugggguucacuucugcc

SEQ ID NO: 3089888 - RNA, 19 nt, Artificial Sequence
  Description of Artificial Sequence: Synthetic oligonucleotide
aucuugcacacucggacug

SEQ ID NO: 3089889 - RNA, 19 nt, Artificial Sequence
  Description of Artificial Sequence: Synthetic oligonucleotide
ucagguccaagaccguggc

SEQ ID NO: 3089890 - RNA, 19 nt, Artificial Sequence
  Description of Artificial Sequence: Synthetic oligonucleotide
ucagaugguacguccgcca

SEQ ID NO: 3089891 - RNA, 19 nt, Artificial Sequence
  Description of Artificial Sequence: Synthetic oligonucleotide
ugaugugcugaaugccucc

SEQ ID NO: 3089892 - RNA, 19 nt, Artificial Sequence
  Description of Artificial Sequence: Synthetic oligonucleotide
ugagccuucuccccagcug

SEQ ID NO: 3089893 - RNA, 19 nt, Artificial Sequence
  Description of Artificial Sequence: Synthetic oligonucleotide
cacacauaugaccagcuga

SEQ ID NO: 3089894 - RNA, 19 nt, Artificial Sequence
  Description of Artificial Sequence: Synthetic oligonucleotide
cucuggauagccuucuuca

SEQ ID NO: 3089895 - RNA, 19 nt, Artificial Sequence
  Description of Artificial Sequence: Synthetic oligonucleotide
cucuccauccaucuugcac

SEQ ID NO: 3089896 - RNA, 19 nt, Artificial Sequence
  Description of Artificial Sequence: Synthetic oligonucleotide
ugguacguccgccacacau

SEQ ID NO: 3089897 - RNA, 19 nt, Artificial Sequence
  Description of Artificial Sequence: Synthetic oligonucleotide
cauauuccagugcaaucug

SEQ ID NO: 3089898 - RNA, 19 nt, Artificial Sequence
  Description of Artificial Sequence: Synthetic oligonucleotide
ucucuggauagccuucuuc

SEQ ID NO: 3089899 - RNA, 19 nt, Artificial Sequence
  Description of Artificial Sequence: Synthetic oligonucleotide
cagcugaugugcugaaugc

SEQ ID NO: 3089900 - RNA, 19 nt, Artificial Sequence
  Description of Artificial Sequence: Synthetic oligonucleotide
agaccguggcauucuguac

SEQ ID NO: 3089901 - RNA, 19 nt, Artificial Sequence
  Description of Artificial Sequence: Synthetic oligonucleotide
gaugguacguccgccacac

SEQ ID NO: 3089902 - RNA, 19 nt, Artificial Sequence
  Description of Artificial Sequence: Synthetic oligonucleotide
cuuccuguccucugugagc

SEQ ID NO: 3089903 - RNA, 19 nt, Artificial Sequence
  Description of Artificial Sequence: Synthetic oligonucleotide
uugccuggccauauuccag

SEQ ID NO: 3089904 - RNA, 19 nt, Artificial Sequence
  Description of Artificial Sequence: Synthetic oligonucleotide
ugcuugagcugcauguauc

SEQ ID NO: 3089905 - RNA, 19 nt, Artificial Sequence
  Description of Artificial Sequence: Synthetic oligonucleotide
cacacucggacugucauug

SEQ ID NO: 3089906 - RNA, 19 nt, Artificial Sequence
  Description of Artificial Sequence: Synthetic oligonucleotide
acaggcauuaccucuccau

SEQ ID NO: 3089907 - RNA, 19 nt, Artificial Sequence
  Description of Artificial Sequence: Synthetic oligonucleotide
uaugaccagcugaugugcu

SEQ ID NO: 3089908 - RNA, 19 nt, Artificial Sequence
  Description of Artificial Sequence: Synthetic oligonucleotide
acugucauugccuggccau

SEQ ID NO: 3089909 - RNA, 19 nt, Artificial Sequence
  Description of Artificial Sequence: Synthetic oligonucleotide
gacgaccacaggcauuacc

SEQ ID NO: 3089910 - RNA, 19 nt, Artificial Sequence
  Description of Artificial Sequence: Synthetic oligonucleotide
uccggaugccauaaucccu

SEQ ID NO: 3089911 - RNA, 19 nt, Artificial Sequence
  Description of Artificial Sequence: Synthetic oligonucleotide
uccaucuugcacacucgga

SEQ ID NO: 3089912 - RNA, 19 nt, Artificial Sequence
  Description of Artificial Sequence: Synthetic oligonucleotide
cauccaucuugcacacucg

SEQ ID NO: 3089913 - RNA, 19 nt, Artificial Sequence
  Description of Artificial Sequence: Synthetic oligonucleotide
ucugccuaagcuucuugau

SEQ ID NO: 3089914 - RNA, 19 nt, Artificial Sequence
  Description of Artificial Sequence: Synthetic oligonucleotide
agcugcauguaucucugga

SEQ ID NO: 3089915 - RNA, 19 nt, Artificial Sequence
  Description of Artificial Sequence: Synthetic oligonucleotide
agcugaagucagaugguac

SEQ ID NO: 3089916 - RNA, 19 nt, Artificial Sequence
  Description of Artificial Sequence: Synthetic oligonucleotide
ugcacacucggacugucau

SEQ ID NO: 3089917 - RNA, 19 nt, Artificial Sequence
  Description of Artificial Sequence: Synthetic oligonucleotide
acgaccacaggcauuaccu

SEQ ID NO: 3089918 - RNA, 19 nt, Artificial Sequence
  Description of Artificial Sequence: Synthetic oligonucleotide
cuggccauauuccagugca

SEQ ID NO: 3089919 - RNA, 19 nt, Artificial Sequence
  Description of Artificial Sequence: Synthetic oligonucleotide
ugaccagcugaugugcuga

SEQ ID NO: 3089920 - RNA, 19 nt, Artificial Sequence
  Description of Artificial Sequence: Synthetic oligonucleotide
ucucgauuccggaugccau

SEQ ID NO: 3089921 - RNA, 19 nt, Artificial Sequence
  Description of Artificial Sequence: Synthetic oligonucleotide
guccgccacacauaugacc

SEQ ID NO: 3089922 - RNA, 19 nt, Artificial Sequence
  Description of Artificial Sequence: Synthetic oligonucleotide
cauuaccucuccauccauc

SEQ ID NO: 3089923 - RNA, 19 nt, Artificial Sequence
  Description of Artificial Sequence: Synthetic oligonucleotide
ucuccccagcugaagucag

SEQ ID NO: 3089924 - RNA, 19 nt, Artificial Sequence
  Description of Artificial Sequence: Synthetic oligonucleotide
cacucggacugucauugcc

SEQ ID NO: 3089925 - RNA, 19 nt, Artificial Sequence
  Description of Artificial Sequence: Synthetic oligonucleotide
auucuguacgacgaccaca

SEQ ID NO: 3089926 - RNA, 19 nt, Artificial Sequence
  Description of Artificial Sequence: Synthetic oligonucleotide
ugggguucacuucugccua

SEQ ID NO: 3089927 - RNA, 19 nt, Artificial Sequence
  Description of Artificial Sequence: Synthetic oligonucleotide
ugccuggccauauuccagu

SEQ ID NO: 3089928 - RNA, 19 nt, Artificial Sequence
  Description of Artificial Sequence: Synthetic oligonucleotide
ucuguacgacgaccacagg

SEQ ID NO: 3089929 - RNA, 19 nt, Artificial Sequence
  Description of Artificial Sequence: Synthetic oligonucleotide
gaaccucaucucgauuccg

SEQ ID NO: 3089930 - RNA, 19 nt, Artificial Sequence
  Description of Artificial Sequence: Synthetic oligonucleotide
accucuccauccaucuugc

SEQ ID NO: 3089931 - RNA, 19 nt, Artificial Sequence
  Description of Artificial Sequence: Synthetic oligonucleotide
cugaugugcugaaugccuc

SEQ ID NO: 3089932 - RNA, 19 nt, Artificial Sequence
  Description of Artificial Sequence: Synthetic oligonucleotide
gcugaaugccuccuucccg

SEQ ID NO: 3089933 - RNA, 19 nt, Artificial Sequence
  Description of Artificial Sequence: Synthetic oligonucleotide
guucacuucugccuaagcu

SEQ ID NO: 3089934 - RNA, 19 nt, Artificial Sequence
  Description of Artificial Sequence: Synthetic oligonucleotide
acacauaugaccagcugau

SEQ ID NO: 3089935 - RNA, 19 nt, Artificial Sequence
  Description of Artificial Sequence: Synthetic oligonucleotide
acacucggacugucauugc

SEQ ID NO: 3089936 - RNA, 19 nt, Artificial Sequence
  Description of Artificial Sequence: Synthetic oligonucleotide
cucugugagccuucucccc

SEQ ID NO: 3089937 - RNA, 19 nt, Artificial Sequence
  Description of Artificial Sequence: Synthetic oligonucleotide
ucggacugucauugccugg

SEQ ID NO: 3089938 - RNA, 19 nt, Artificial Sequence
  Description of Artificial Sequence: Synthetic oligonucleotide
agguccaagaccguggcau

SEQ ID NO: 3089939 - RNA, 19 nt, Artificial Sequence
  Description of Artificial Sequence: Synthetic oligonucleotide
uucuuccuguccucuguga

SEQ ID NO: 3089940 - RNA, 19 nt, Artificial Sequence
  Description of Artificial Sequence: Synthetic oligonucleotide
augaccagcugaugugcug

SEQ ID NO: 3089941 - RNA, 19 nt, Artificial Sequence
  Description of Artificial Sequence: Synthetic oligonucleotide
caggcauuaccucuccauc

SEQ ID NO: 3089942 - RNA, 19 nt, Artificial Sequence
  Description of Artificial Sequence: Synthetic oligonucleotide
cucggacugucauugccug

SEQ ID NO: 3089943 - RNA, 19 nt, Artificial Sequence
  Description of Artificial Sequence: Synthetic oligonucleotide
cuucuugauaaggaaccuc

SEQ ID NO: 3089944 - RNA, 19 nt, Artificial Sequence
  Description of Artificial Sequence: Synthetic oligonucleotide
accacaggcauuaccucuc

SEQ ID NO: 3089945 - RNA, 19 nt, Artificial Sequence
  Description of Artificial Sequence: Synthetic oligonucleotide
ccaucuugcacacucggac

SEQ ID NO: 3089946 - RNA, 19 nt, Artificial Sequence
  Description of Artificial Sequence: Synthetic oligonucleotide
gugcugaaugccuccuucc

SEQ ID NO: 3089947 - RNA, 19 nt, Artificial Sequence
  Description of Artificial Sequence: Synthetic oligonucleotide
ucccugagcuucuuccugu

SEQ ID NO: 3089948 - RNA, 19 nt, Artificial Sequence
  Description of Artificial Sequence: Synthetic oligonucleotide
ugaagucagaugguacguc

SEQ ID NO: 3089949 - RNA, 19 nt, Artificial Sequence
  Description of Artificial Sequence: Synthetic oligonucleotide
uaucucuggauagccuucu

SEQ ID NO: 3089950 - RNA, 19 nt, Artificial Sequence
  Description of Artificial Sequence: Synthetic oligonucleotide
uccuucccgcuccugcuug

SEQ ID NO: 3089951 - RNA, 19 nt, Artificial Sequence
  Description of Artificial Sequence: Synthetic oligonucleotide
guggcauucuguacgacga

SEQ ID NO: 3089952 - RNA, 19 nt, Artificial Sequence
  Description of Artificial Sequence: Synthetic oligonucleotide
cauucuguacgacgaccac

SEQ ID NO: 3089953 - RNA, 19 nt, Artificial Sequence
  Description of Artificial Sequence: Synthetic oligonucleotide
cuucuccccagcugaaguc

SEQ ID NO: 3089954 - RNA, 19 nt, Artificial Sequence
  Description of Artificial Sequence: Synthetic oligonucleotide
aaggaaccucaucucgauu

SEQ ID NO: 3089955 - RNA, 19 nt, Artificial Sequence
  Description of Artificial Sequence: Synthetic oligonucleotide
ccuaagcuucuugauaagg

SEQ ID NO: 3089956 - RNA, 19 nt, Artificial Sequence
  Description of Artificial Sequence: Synthetic oligonucleotide
ggaaccucaucucgauucc

SEQ ID NO: 3089957 - RNA, 19 nt, Artificial Sequence
  Description of Artificial Sequence: Synthetic oligonucleotide
ccuucuucagguccaagac

SEQ ID NO: 3089958 - RNA, 19 nt, Artificial Sequence
  Description of Artificial Sequence: Synthetic oligonucleotide
accucaucucgauuccgga

SEQ ID NO: 3089959 - RNA, 19 nt, Artificial Sequence
  Description of Artificial Sequence: Synthetic oligonucleotide
agaugguacguccgccaca

SEQ ID NO: 3089960 - RNA, 19 nt, Artificial Sequence
  Description of Artificial Sequence: Synthetic oligonucleotide
ccagcugaugugcugaaug

SEQ ID NO: 3089961 - RNA, 19 nt, Artificial Sequence
  Description of Artificial Sequence: Synthetic oligonucleotide
cuucagguccaagaccgug

SEQ ID NO: 3089962 - RNA, 19 nt, Artificial Sequence
  Description of Artificial Sequence: Synthetic oligonucleotide
ucgauuccggaugccauaa

SEQ ID NO: 3089963 - RNA, 19 nt, Artificial Sequence
  Description of Artificial Sequence: Synthetic oligonucleotide
gagcugcauguaucucugg

SEQ ID NO: 3089964 - RNA, 19 nt, Artificial Sequence
  Description of Artificial Sequence: Synthetic oligonucleotide
uugcacacucggacuguca

SEQ ID NO: 3089965 - RNA, 19 nt, Artificial Sequence
  Description of Artificial Sequence: Synthetic oligonucleotide
ccauccaucuugcacacuc

SEQ ID NO: 3089966 - RNA, 19 nt, Artificial Sequence
  Description of Artificial Sequence: Synthetic oligonucleotide
gaccacaggcauuaccucu

SEQ ID NO: 3089967 - RNA, 19 nt, Artificial Sequence
  Description of Artificial Sequence: Synthetic oligonucleotide
uccaagaccguggcauucu

SEQ ID NO: 3089968 - RNA, 19 nt, Artificial Sequence
  Description of Artificial Sequence: Synthetic oligonucleotide
cuccauccaucuugcacac

SEQ ID NO: 3089969 - RNA, 19 nt, Artificial Sequence
  Description of Artificial Sequence: Synthetic oligonucleotide
aucucgauuccggaugcca

SEQ ID NO: 3089970 - RNA, 19 nt, Artificial Sequence
  Description of Artificial Sequence: Synthetic oligonucleotide
gacugucauugccuggcca

SEQ ID NO: 3089971 - RNA, 19 nt, Artificial Sequence
  Description of Artificial Sequence: Synthetic oligonucleotide
ucuucagguccaagaccgu

SEQ ID NO: 3089972 - RNA, 19 nt, Artificial Sequence
  Description of Artificial Sequence: Synthetic oligonucleotide
ugugagccuucuccccagc

SEQ ID NO: 3089973 - RNA, 19 nt, Artificial Sequence
  Description of Artificial Sequence: Synthetic oligonucleotide
uggcauucuguacgacgac

SEQ ID NO: 3089974 - RNA, 19 nt, Artificial Sequence
  Description of Artificial Sequence: Synthetic oligonucleotide
cagaugguacguccgccac

SEQ ID NO: 3089975 - RNA, 19 nt, Artificial Sequence
  Description of Artificial Sequence: Synthetic oligonucleotide
accguggcauucuguacga

SEQ ID NO: 3089976 - RNA, 19 nt, Artificial Sequence
  Description of Artificial Sequence: Synthetic oligonucleotide
cugcauguaucucuggaua

SEQ ID NO: 3089977 - RNA, 19 nt, Artificial Sequence
  Description of Artificial Sequence: Synthetic oligonucleotide
acgacgaccacaggcauua

SEQ ID NO: 3089978 - RNA, 19 nt, Artificial Sequence
  Description of Artificial Sequence: Synthetic oligonucleotide
gucagaugguacguccgcc

SEQ ID NO: 3089979 - RNA, 19 nt, Artificial Sequence
  Description of Artificial Sequence: Synthetic oligonucleotide
ugaaugccuccuucccgcu

SEQ ID NO: 3089980 - RNA, 19 nt, Artificial Sequence
  Description of Artificial Sequence: Synthetic oligonucleotide
cguggcauucuguacgacg

SEQ ID NO: 3089981 - RNA, 19 nt, Artificial Sequence
  Description of Artificial Sequence: Synthetic oligonucleotide
cugugagccuucuccccag

SEQ ID NO: 3089982 - RNA, 19 nt, Artificial Sequence
  Description of Artificial Sequence: Synthetic oligonucleotide
acucggacugucauugccu

SEQ ID NO: 3089983 - RNA, 19 nt, Artificial Sequence
  Description of Artificial Sequence: Synthetic oligonucleotide
ugucauugccuggccauau

SEQ ID NO: 3089984 - RNA, 19 nt, Artificial Sequence
  Description of Artificial Sequence: Synthetic oligonucleotide
uucccgcuccugcuugagc

SEQ ID NO: 3089985 - RNA, 19 nt, Artificial Sequence
  Description of Artificial Sequence: Synthetic oligonucleotide
ggcauuaccucuccaucca

SEQ ID NO: 3089986 - RNA, 19 nt, Artificial Sequence
  Description of Artificial Sequence: Synthetic oligonucleotide
ucuugcacacucggacugu

SEQ ID NO: 3089987 - RNA, 19 nt, Artificial Sequence
  Description of Artificial Sequence: Synthetic oligonucleotide
ggcauucuguacgacgacc

SEQ ID NO: 3089988 - RNA, 19 nt, Artificial Sequence
  Description of Artificial Sequence: Synthetic oligonucleotide
ugccauaaucccugagcuu

SEQ ID NO: 3089989 - RNA, 19 nt, Artificial Sequence
  Description of Artificial Sequence: Synthetic oligonucleotide
ccggaugccauaaucccug

SEQ ID NO: 3089990 - RNA, 19 nt, Artificial Sequence
  Description of Artificial Sequence: Synthetic oligonucleotide
guaucucuggauagccuuc

SEQ ID NO: 3089991 - RNA, 19 nt, Artificial Sequence
  Description of Artificial Sequence: Synthetic oligonucleotide
uacgacgaccacaggcauu

SEQ ID NO: 3089992 - RNA, 19 nt, Artificial Sequence
  Description of Artificial Sequence: Synthetic oligonucleotide
ccucugugagccuucuccc

SEQ ID NO: 3089993 - RNA, 19 nt, Artificial Sequence
  Description of Artificial Sequence: Synthetic oligonucleotide
cacauaugaccagcugaug

SEQ ID NO: 3089994 - RNA, 19 nt, Artificial Sequence
  Description of Artificial Sequence: Synthetic oligonucleotide
auguaucucuggauagccu

SEQ ID NO: 3089995 - RNA, 19 nt, Artificial Sequence
  Description of Artificial Sequence: Synthetic oligonucleotide
uccccagcugaagucagau

SEQ ID NO: 3089996 - RNA, 19 nt, Artificial Sequence
  Description of Artificial Sequence: Synthetic oligonucleotide
uggccauauuccagugcaa

SEQ ID NO: 3089997 - RNA, 19 nt, Artificial Sequence
  Description of Artificial Sequence: Synthetic oligonucleotide
gaaugccuccuucccgcuc

SEQ ID NO: 3089998 - RNA, 19 nt, Artificial Sequence
  Description of Artificial Sequence: Synthetic oligonucleotide
cuugagcugcauguaucuc

SEQ ID NO: 3089999 - RNA, 19 nt, Artificial Sequence
  Description of Artificial Sequence: Synthetic oligonucleotide
gccauauuccagugcaauc

SEQ ID NO: 3090000 - RNA, 19 nt, Artificial Sequence
  Description of Artificial Sequence: Synthetic oligonucleotide
gcauguaucucuggauagc

SEQ ID NO: 3090001 - RNA, 19 nt, Artificial Sequence
  Description of Artificial Sequence: Synthetic oligonucleotide
gguucacuucugccuaagc

SEQ ID NO: 3090002 - RNA, 19 nt, Artificial Sequence
  Description of Artificial Sequence: Synthetic oligonucleotide
ggaugccauaaucccugag

SEQ ID NO: 3090003 - RNA, 19 nt, Artificial Sequence
  Description of Artificial Sequence: Synthetic oligonucleotide
uacguccgccacacauaug

SEQ ID NO: 3090004 - RNA, 19 nt, Artificial Sequence
  Description of Artificial Sequence: Synthetic oligonucleotide
cugccuaagcuucuugaua

SEQ ID NO: 3090005 - RNA, 19 nt, Artificial Sequence
  Description of Artificial Sequence: Synthetic oligonucleotide
caucuugcacacucggacu

SEQ ID NO: 3090006 - RNA, 19 nt, Artificial Sequence
  Description of Artificial Sequence: Synthetic oligonucleotide
gcauucuguacgacgacca

SEQ ID NO: 3090007 - RNA, 19 nt, Artificial Sequence
  Description of Artificial Sequence: Synthetic oligonucleotide
cuugcacacucggacuguc

SEQ ID NO: 3090008 - RNA, 19 nt, Artificial Sequence
  Description of Artificial Sequence: Synthetic oligonucleotide
gccuaagcuucuugauaag

SEQ ID NO: 3090009 - RNA, 19 nt, Artificial Sequence
  Description of Artificial Sequence: Synthetic oligonucleotide
cuccugcuugagcugcaug

SEQ ID NO: 3090010 - RNA, 19 nt, Artificial Sequence
  Description of Artificial Sequence: Synthetic oligonucleotide
guacguccgccacacauau

SEQ ID NO: 3090011 - RNA, 19 nt, Artificial Sequence
  Description of Artificial Sequence: Synthetic oligonucleotide
gaugugcugaaugccuccu

SEQ ID NO: 3090012 - RNA, 19 nt, Artificial Sequence
  Description of Artificial Sequence: Synthetic oligonucleotide
cucgauuccggaugccaua

SEQ ID NO: 3090013 - RNA, 19 nt, Artificial Sequence
  Description of Artificial Sequence: Synthetic oligonucleotide
cuguccucugugagccuuc

SEQ ID NO: 3090014 - RNA, 19 nt, Artificial Sequence
  Description of Artificial Sequence: Synthetic oligonucleotide
augugcugaaugccuccuu

SEQ ID NO: 3090015 - RNA, 19 nt, Artificial Sequence
  Description of Artificial Sequence: Synthetic oligonucleotide
gcuugagcugcauguaucu

SEQ ID NO: 3090016 - RNA, 19 nt, Artificial Sequence
  Description of Artificial Sequence: Synthetic oligonucleotide
caucucgauuccggaugcc

SEQ ID NO: 3090017 - RNA, 19 nt, Artificial Sequence
  Description of Artificial Sequence: Synthetic oligonucleotide
ccuggccauauuccagugc

SEQ ID NO: 3090018 - RNA, 19 nt, Artificial Sequence
  Description of Artificial Sequence: Synthetic oligonucleotide
ggacugucauugccuggcc

SEQ ID NO: 3090019 - RNA, 19 nt, Artificial Sequence
  Description of Artificial Sequence: Synthetic oligonucleotide
ccacacauaugaccagcug

SEQ ID NO: 3090020 - RNA, 19 nt, Artificial Sequence
  Description of Artificial Sequence: Synthetic oligonucleotide
ccauauuccagugcaaucu

SEQ ID NO: 3090021 - RNA, 19 nt, Artificial Sequence
  Description of Artificial Sequence: Synthetic oligonucleotide
guccaagaccguggcauuc

SEQ ID NO: 3090022 - RNA, 19 nt, Artificial Sequence
  Description of Artificial Sequence: Synthetic oligonucleotide
cugaagucagaugguacgu

SEQ ID NO: 3090023 - RNA, 19 nt, Artificial Sequence
  Description of Artificial Sequence: Synthetic oligonucleotide
aucucuggauagccuucuu

SEQ ID NO: 3090024 - RNA, 19 nt, Artificial Sequence
  Description of Artificial Sequence: Synthetic oligonucleotide
cuucccgcuccugcuugag

SEQ ID NO: 3090025 - RNA, 19 nt, Artificial Sequence
  Description of Artificial Sequence: Synthetic oligonucleotide
gcugaugugcugaaugccu

SEQ ID NO: 3090026 - RNA, 19 nt, Artificial Sequence
  Description of Artificial Sequence: Synthetic oligonucleotide
agccuucuucagguccaag

SEQ ID NO: 3090027 - RNA, 19 nt, Artificial Sequence
  Description of Artificial Sequence: Synthetic oligonucleotide
uccuguccucugugagccu

SEQ ID NO: 3090028 - RNA, 19 nt, Artificial Sequence
  Description of Artificial Sequence: Synthetic oligonucleotide
uccauccaucuugcacacu

SEQ ID NO: 3090029 - RNA, 19 nt, Artificial Sequence
  Description of Artificial Sequence: Synthetic oligonucleotide
gcugcauguaucucuggau

SEQ ID NO: 3090030 - RNA, 19 nt, Artificial Sequence
  Description of Artificial Sequence: Synthetic oligonucleotide
cacaggcauuaccucucca

SEQ ID NO: 3090031 - RNA, 19 nt, Artificial Sequence
  Description of Artificial Sequence: Synthetic oligonucleotide
caagaccguggcauucugu

SEQ ID NO: 3090032 - RNA, 19 nt, Artificial Sequence
  Description of Artificial Sequence: Synthetic oligonucleotide
uagccuucuucagguccaa

SEQ ID NO: 3090033 - RNA, 19 nt, Artificial Sequence
  Description of Artificial Sequence: Synthetic oligonucleotide
gccuggccauauuccagug

SEQ ID NO: 3090034 - RNA, 19 nt, Artificial Sequence
  Description of Artificial Sequence: Synthetic oligonucleotide
cagcugaagucagauggua

SEQ ID NO: 3090035 - RNA, 19 nt, Artificial Sequence
  Description of Artificial Sequence: Synthetic oligonucleotide
guacgacgaccacaggcau

SEQ ID NO: 3090036 - RNA, 19 nt, Artificial Sequence
  Description of Artificial Sequence: Synthetic oligonucleotide
accagcugaugugcugaau

SEQ ID NO: 3090037 - RNA, 19 nt, Artificial Sequence
  Description of Artificial Sequence: Synthetic oligonucleotide
gguacguccgccacacaua

SEQ ID NO: 3090038 - RNA, 19 nt, Artificial Sequence
  Description of Artificial Sequence: Synthetic oligonucleotide
ccaagaccguggcauucug

SEQ ID NO: 3090039 - RNA, 19 nt, Artificial Sequence
  Description of Artificial Sequence: Synthetic oligonucleotide
augguacguccgccacaca

SEQ ID NO: 3090040 - RNA, 19 nt, Artificial Sequence
  Description of Artificial Sequence: Synthetic oligonucleotide
augccuccuucccgcuccu

SEQ ID NO: 3090041 - RNA, 19 nt, Artificial Sequence
  Description of Artificial Sequence: Synthetic oligonucleotide
cugcuugagcugcauguau

SEQ ID NO: 3090042 - RNA, 19 nt, Artificial Sequence
  Description of Artificial Sequence: Synthetic oligonucleotide
cuccccagcugaagucaga

SEQ ID NO: 3090043 - RNA, 19 nt, Artificial Sequence
  Description of Artificial Sequence: Synthetic oligonucleotide
gugagccuucuccccagcu

SEQ ID NO: 3090044 - RNA, 19 nt, Artificial Sequence
  Description of Artificial Sequence: Synthetic oligonucleotide
cagguccaagaccguggca

SEQ ID NO: 3090045 - RNA, 19 nt, Artificial Sequence
  Description of Artificial Sequence: Synthetic oligonucleotide
guccucugugagccuucuc

SEQ ID NO: 3090046 - RNA, 19 nt, Artificial Sequence
  Description of Artificial Sequence: Synthetic oligonucleotide
gcuucuugauaaggaaccu

SEQ ID NO: 3090047 - RNA, 19 nt, Artificial Sequence
  Description of Artificial Sequence: Synthetic oligonucleotide
ccgccacacauaugaccag

SEQ ID NO: 3090048 - RNA, 19 nt, Artificial Sequence
  Description of Artificial Sequence: Synthetic oligonucleotide
ggccauauuccagugcaau

SEQ ID NO: 3090049 - RNA, 19 nt, Artificial Sequence
  Description of Artificial Sequence: Synthetic oligonucleotide
ccccagcugaagucagaug

SEQ ID NO: 3090050 - RNA, 19 nt, Artificial Sequence
  Description of Artificial Sequence: Synthetic oligonucleotide
cugucauugccuggccaua

SEQ ID NO: 3090051 - RNA, 19 nt, Artificial Sequence
  Description of Artificial Sequence: Synthetic oligonucleotide
cgaccacaggcauuaccuc

SEQ ID NO: 3090052 - RNA, 19 nt, Artificial Sequence
  Description of Artificial Sequence: Synthetic oligonucleotide
cccugagcuucuuccuguc

SEQ ID NO: 3090053 - RNA, 19 nt, Artificial Sequence
  Description of Artificial Sequence: Synthetic oligonucleotide
gucauugccuggccauauu

SEQ ID NO: 3090054 - RNA, 19 nt, Artificial Sequence
  Description of Artificial Sequence: Synthetic oligonucleotide
ccuucuccccagcugaagu

SEQ ID NO: 3090055 - RNA, 19 nt, Artificial Sequence
  Description of Artificial Sequence: Synthetic oligonucleotide
gggguucacuucugccuaa

SEQ ID NO: 3090056 - RNA, 19 nt, Artificial Sequence
  Description of Artificial Sequence: Synthetic oligonucleotide
cccgcuccugcuugagcug

SEQ ID NO: 3090057 - RNA, 19 nt, Artificial Sequence
  Description of Artificial Sequence: Synthetic oligonucleotide
ccagcugaagucagauggu

SEQ ID NO: 3090058 - RNA, 19 nt, Artificial Sequence
  Description of Artificial Sequence: Synthetic oligonucleotide
gccacacauaugaccagcu

SEQ ID NO: 3090059 - RNA, 19 nt, Artificial Sequence
  Description of Artificial Sequence: Synthetic oligonucleotide
cguccgccacacauaugac

SEQ ID NO: 3090060 - RNA, 19 nt, Artificial Sequence
  Description of Artificial Sequence: Synthetic oligonucleotide
gcauuaccucuccauccau

SEQ ID NO: 3090061 - RNA, 19 nt, Artificial Sequence
  Description of Artificial Sequence: Synthetic oligonucleotide
gguccaagaccguggcauu

SEQ ID NO: 3090062 - RNA, 19 nt, Artificial Sequence
  Description of Artificial Sequence: Synthetic oligonucleotide
ccucaucucgauuccggau

SEQ ID NO: 3090063 - RNA, 19 nt, Artificial Sequence
  Description of Artificial Sequence: Synthetic oligonucleotide
cauaaucccugagcuucuu

SEQ ID NO: 3090064 - RNA, 19 nt, Artificial Sequence
  Description of Artificial Sequence: Synthetic oligonucleotide
ccugcuugagcugcaugua

SEQ ID NO: 3090065 - RNA, 19 nt, Artificial Sequence
  Description of Artificial Sequence: Synthetic oligonucleotide
gcacacucggacugucauu

SEQ ID NO: 3090066 - RNA, 19 nt, Artificial Sequence
  Description of Artificial Sequence: Synthetic oligonucleotide
ccuucccgcuccugcuuga

SEQ ID NO: 3090067 - RNA, 19 nt, Artificial Sequence
  Description of Artificial Sequence: Synthetic oligonucleotide
cuccuucccgcuccugcuu

SEQ ID NO: 3090068 - RNA, 19 nt, Artificial Sequence
  Description of Artificial Sequence: Synthetic oligonucleotide
ccucuccauccaucuugca

SEQ ID NO: 3090069 - RNA, 19 nt, Artificial Sequence
  Description of Artificial Sequence: Synthetic oligonucleotide
ccguggcauucuguacgac

SEQ ID NO: 3090070 - RNA, 19 nt, Artificial Sequence
  Description of Artificial Sequence: Synthetic oligonucleotide
ccuguccucugugagccuu

SEQ ID NO: 3090071 - RNA, 19 nt, Artificial Sequence
  Description of Artificial Sequence: Synthetic oligonucleotide
cgacgaccacaggcauuac

SEQ ID NO: 3090072 - RNA, 19 nt, Artificial Sequence
  Description of Artificial Sequence: Synthetic oligonucleotide
cgauuccggaugccauaau

SEQ ID NO: 3090073 - RNA, 19 nt, Artificial Sequence
  Description of Artificial Sequence: Synthetic oligonucleotide
acagaagugucauuaaagg

SEQ ID NO: 3090074 - RNA, 19 nt, Artificial Sequence
  Description of Artificial Sequence: Synthetic oligonucleotide
uguuguauagagcugugcc

SEQ ID NO: 3090075 - RNA, 19 nt, Artificial Sequence
  Description of Artificial Sequence: Synthetic oligonucleotide
uuaaagguguccauguagc

SEQ ID NO: 3090076 - RNA, 19 nt, Artificial Sequence
  Description of Artificial Sequence: Synthetic oligonucleotide
aagguguccauguagcgug

SEQ ID NO: 3090077 - RNA, 19 nt, Artificial Sequence
  Description of Artificial Sequence: Synthetic oligonucleotide
agcagauuguuguauagag

SEQ ID NO: 3090078 - RNA, 19 nt, Artificial Sequence
  Description of Artificial Sequence: Synthetic oligonucleotide
agaagugucauuaaaggug

SEQ ID NO: 3090079 - RNA, 19 nt, Artificial Sequence
  Description of Artificial Sequence: Synthetic oligonucleotide
agugucauuaaaggugucc

SEQ ID NO: 3090080 - RNA, 19 nt, Artificial Sequence
  Description of Artificial Sequence: Synthetic oligonucleotide
ucauuaaagguguccaugu

SEQ ID NO: 3090081 - RNA, 19 nt, Artificial Sequence
  Description of Artificial Sequence: Synthetic oligonucleotide
gacagaagugucauuaaag

SEQ ID NO: 3090082 - RNA, 19 nt, Artificial Sequence
  Description of Artificial Sequence: Synthetic oligonucleotide
gauacuguccugcuaugcc

SEQ ID NO: 3090083 - RNA, 19 nt, Artificial Sequence
  Description of Artificial Sequence: Synthetic oligonucleotide
ugagaugccccacagguuc

SEQ ID NO: 3090084 - RNA, 19 nt, Artificial Sequence
  Description of Artificial Sequence: Synthetic oligonucleotide
uccuccaugaugaccaccc

SEQ ID NO: 3090085 - RNA, 19 nt, Artificial Sequence
  Description of Artificial Sequence: Synthetic oligonucleotide
augaugaccacccuggaaa

SEQ ID NO: 3090086 - RNA, 19 nt, Artificial Sequence
  Description of Artificial Sequence: Synthetic oligonucleotide
ucuauggaccaguugcucc

SEQ ID NO: 3090087 - RNA, 19 nt, Artificial Sequence
  Description of Artificial Sequence: Synthetic oligonucleotide
aacuccuccaugaugacca

SEQ ID NO: 3090088 - RNA, 19 nt, Artificial Sequence
  Description of Artificial Sequence: Synthetic oligonucleotide
cuggaaagggcgucuaugg

SEQ ID NO: 3090089 - RNA, 19 nt, Artificial Sequence
  Description of Artificial Sequence: Synthetic oligonucleotide
cugguagucagguucuucc

SEQ ID NO: 3090090 - RNA, 19 nt, Artificial Sequence
  Description of Artificial Sequence: Synthetic oligonucleotide
agcuucagcagagggaacc

SEQ ID NO: 3090091 - RNA, 19 nt, Artificial Sequence
  Description of Artificial Sequence: Synthetic oligonucleotide
uguagcguggagucugcgg

SEQ ID NO: 3090092 - RNA, 19 nt, Artificial Sequence
  Description of Artificial Sequence: Synthetic oligonucleotide
gaaagggcgucuauggacc

SEQ ID NO: 3090093 - RNA, 19 nt, Artificial Sequence
  Description of Artificial Sequence: Synthetic oligonucleotide
uuguauagagcugugccac

SEQ ID NO: 3090094 - RNA, 19 nt, Artificial Sequence
  Description of Artificial Sequence: Synthetic oligonucleotide
acagcagauuguuguauag

SEQ ID NO: 3090095 - RNA, 19 nt, Artificial Sequence
  Description of Artificial Sequence: Synthetic oligonucleotide
agugggaacuccuccauga

SEQ ID NO: 3090096 - RNA, 19 nt, Artificial Sequence
  Description of Artificial Sequence: Synthetic oligonucleotide
agcagagggaaccagugga

SEQ ID NO: 3090097 - RNA, 19 nt, Artificial Sequence
  Description of Artificial Sequence: Synthetic oligonucleotide
guugcuccacagcagauug

SEQ ID NO: 3090098 - RNA, 19 nt, Artificial Sequence
  Description of Artificial Sequence: Synthetic oligonucleotide
cagauuguuguauagagcu

SEQ ID NO: 3090099 - RNA, 19 nt, Artificial Sequence
  Description of Artificial Sequence: Synthetic oligonucleotide
aaagguguccauguagcgu

SEQ ID NO: 3090100 - RNA, 19 nt, Artificial Sequence
  Description of Artificial Sequence: Synthetic oligonucleotide
acagguuccugggaagucc

SEQ ID NO: 3090101 - RNA, 19 nt, Artificial Sequence
  Description of Artificial Sequence: Synthetic oligonucleotide
agauacuguccugcuaugc

SEQ ID NO: 3090102 - RNA, 19 nt, Artificial Sequence
  Description of Artificial Sequence: Synthetic oligonucleotide
guagcguggagucugcggc

SEQ ID NO: 3090103 - RNA, 19 nt, Artificial Sequence
  Description of Artificial Sequence: Synthetic oligonucleotide
agcucagccugucuguuuc

SEQ ID NO: 3090104 - RNA, 19 nt, Artificial Sequence
  Description of Artificial Sequence: Synthetic oligonucleotide
augaccacccuggaaaggg

SEQ ID NO: 3090105 - RNA, 19 nt, Artificial Sequence
  Description of Artificial Sequence: Synthetic oligonucleotide
uacuguccugcuaugccag

SEQ ID NO: 3090106 - RNA, 19 nt, Artificial Sequence
  Description of Artificial Sequence: Synthetic oligonucleotide
ugaugaccacccuggaaag

SEQ ID NO: 3090107 - RNA, 19 nt, Artificial Sequence
  Description of Artificial Sequence: Synthetic oligonucleotide
uggagucugcggcaguggg

SEQ ID NO: 3090108 - RNA, 19 nt, Artificial Sequence
  Description of Artificial Sequence: Synthetic oligonucleotide
gcgucuauggaccaguugc

SEQ ID NO: 3090109 - RNA, 19 nt, Artificial Sequence
  Description of Artificial Sequence: Synthetic oligonucleotide
aaccaguggacagaagugu

SEQ ID NO: 3090110 - RNA, 19 nt, Artificial Sequence
  Description of Artificial Sequence: Synthetic oligonucleotide
guuguauagagcugugcca

SEQ ID NO: 3090111 - RNA, 19 nt, Artificial Sequence
  Description of Artificial Sequence: Synthetic oligonucleotide
gucauuaaagguguccaug

SEQ ID NO: 3090112 - RNA, 19 nt, Artificial Sequence
  Description of Artificial Sequence: Synthetic oligonucleotide
uucagcagagggaaccagu

SEQ ID NO: 3090113 - RNA, 19 nt, Artificial Sequence
  Description of Artificial Sequence: Synthetic oligonucleotide
cagguucuuccugagaugc

SEQ ID NO: 3090114 - RNA, 19 nt, Artificial Sequence
  Description of Artificial Sequence: Synthetic oligonucleotide
gaaccaguggacagaagug

SEQ ID NO: 3090115 - RNA, 19 nt, Artificial Sequence
  Description of Artificial Sequence: Synthetic oligonucleotide
gauuguuguauagagcugu

SEQ ID NO: 3090116 - RNA, 19 nt, Artificial Sequence
  Description of Artificial Sequence: Synthetic oligonucleotide
ucagguucuuccugagaug

SEQ ID NO: 3090117 - RNA, 19 nt, Artificial Sequence
  Description of Artificial Sequence: Synthetic oligonucleotide
uggaaagggcgucuaugga

SEQ ID NO: 3090118 - RNA, 19 nt, Artificial Sequence
  Description of Artificial Sequence: Synthetic oligonucleotide
uguccauguagcguggagu

SEQ ID NO: 3090119 - RNA, 19 nt, Artificial Sequence
  Description of Artificial Sequence: Synthetic oligonucleotide
uccugagaugccccacagg

SEQ ID NO: 3090120 - RNA, 19 nt, Artificial Sequence
  Description of Artificial Sequence: Synthetic oligonucleotide
ggaaagggcgucuauggac

SEQ ID NO: 3090121 - RNA, 19 nt, Artificial Sequence
  Description of Artificial Sequence: Synthetic oligonucleotide
uguccugcuaugccagcug

SEQ ID NO: 3090122 - RNA, 19 nt, Artificial Sequence
  Description of Artificial Sequence: Synthetic oligonucleotide
guagucagguucuuccuga

SEQ ID NO: 3090123 - RNA, 19 nt, Artificial Sequence
  Description of Artificial Sequence: Synthetic oligonucleotide
uuguuguauagagcugugc

SEQ ID NO: 3090124 - RNA, 19 nt, Artificial Sequence
  Description of Artificial Sequence: Synthetic oligonucleotide
gaagugucauuaaaggugu

SEQ ID NO: 3090125 - RNA, 19 nt, Artificial Sequence
  Description of Artificial Sequence: Synthetic oligonucleotide
uguauagagcugugccaca

SEQ ID NO: 3090126 - RNA, 19 nt, Artificial Sequence
  Description of Artificial Sequence: Synthetic oligonucleotide
ugucauuaaagguguccau

SEQ ID NO: 3090127 - RNA, 19 nt, Artificial Sequence
  Description of Artificial Sequence: Synthetic oligonucleotide
ugcuaugccagcugagcuc

SEQ ID NO: 3090128 - RNA, 19 nt, Artificial Sequence
  Description of Artificial Sequence: Synthetic oligonucleotide
ucgcaguccugguagucag

SEQ ID NO: 3090129 - RNA, 19 nt, Artificial Sequence
  Description of Artificial Sequence: Synthetic oligonucleotide
ugccccacagguuccuggg

SEQ ID NO: 3090130 - RNA, 19 nt, Artificial Sequence
  Description of Artificial Sequence: Synthetic oligonucleotide
acuguccugcuaugccagc

SEQ ID NO: 3090131 - RNA, 19 nt, Artificial Sequence
  Description of Artificial Sequence: Synthetic oligonucleotide
gaugaccacccuggaaagg

SEQ ID NO: 3090132 - RNA, 19 nt, Artificial Sequence
  Description of Artificial Sequence: Synthetic oligonucleotide
aaagggcgucuauggacca

SEQ ID NO: 3090133 - RNA, 19 nt, Artificial Sequence
  Description of Artificial Sequence: Synthetic oligonucleotide
guuccugggaagucccucc

SEQ ID NO: 3090134 - RNA, 19 nt, Artificial Sequence
  Description of Artificial Sequence: Synthetic oligonucleotide
guccauguagcguggaguc

SEQ ID NO: 3090135 - RNA, 19 nt, Artificial Sequence
  Description of Artificial Sequence: Synthetic oligonucleotide
gugucauuaaaggugucca

SEQ ID NO: 3090136 - RNA, 19 nt, Artificial Sequence
  Description of Artificial Sequence: Synthetic oligonucleotide
ugaucuccagguccucgca

SEQ ID NO: 3090137 - RNA, 19 nt, Artificial Sequence
  Description of Artificial Sequence: Synthetic oligonucleotide
uagucagguucuuccugag

SEQ ID NO: 3090138 - RNA, 19 nt, Artificial Sequence
  Description of Artificial Sequence: Synthetic oligonucleotide
cuauggaccaguugcucca

SEQ ID NO: 3090139 - RNA, 19 nt, Artificial Sequence
  Description of Artificial Sequence: Synthetic oligonucleotide
guggcagauacuguccugc

SEQ ID NO: 3090140 - RNA, 19 nt, Artificial Sequence
  Description of Artificial Sequence: Synthetic oligonucleotide
ugguagucagguucuuccu

SEQ ID NO: 3090141 - RNA, 19 nt, Artificial Sequence
  Description of Artificial Sequence: Synthetic oligonucleotide
ugucuguuuccugaugauc

SEQ ID NO: 3090142 - RNA, 19 nt, Artificial Sequence
  Description of Artificial Sequence: Synthetic oligonucleotide
gaacuccuccaugaugacc

SEQ ID NO: 3090143 - RNA, 19 nt, Artificial Sequence
  Description of Artificial Sequence: Synthetic oligonucleotide
gaccacccuggaaagggcg

SEQ ID NO: 3090144 - RNA, 19 nt, Artificial Sequence
  Description of Artificial Sequence: Synthetic oligonucleotide
ugaccacccuggaaagggc

SEQ ID NO: 3090145 - RNA, 19 nt, Artificial Sequence
  Description of Artificial Sequence: Synthetic oligonucleotide
uggacagaagugucauuaa

SEQ ID NO: 3090146 - RNA, 19 nt, Artificial Sequence
  Description of Artificial Sequence: Synthetic oligonucleotide
uccugcuaugccagcugag

SEQ ID NO: 3090147 - RNA, 19 nt, Artificial Sequence
  Description of Artificial Sequence: Synthetic oligonucleotide
augccccacagguuccugg

SEQ ID NO: 3090148 - RNA, 19 nt, Artificial Sequence
  Description of Artificial Sequence: Synthetic oligonucleotide
accaguggacagaaguguc

SEQ ID NO: 3090149 - RNA, 19 nt, Artificial Sequence
  Description of Artificial Sequence: Synthetic oligonucleotide
cagguuccugggaaguccc

SEQ ID NO: 3090150 - RNA, 19 nt, Artificial Sequence
  Description of Artificial Sequence: Synthetic oligonucleotide
ggaaccaguggacagaagu

SEQ ID NO: 3090151 - RNA, 19 nt, Artificial Sequence
  Description of Artificial Sequence: Synthetic oligonucleotide
aucuccagguccucgcagu

SEQ ID NO: 3090152 - RNA, 19 nt, Artificial Sequence
  Description of Artificial Sequence: Synthetic oligonucleotide
ucagccugucuguuuccug

SEQ ID NO: 3090153 - RNA, 19 nt, Artificial Sequence
  Description of Artificial Sequence: Synthetic oligonucleotide
cagcagagggaaccagugg

SEQ ID NO: 3090154 - RNA, 19 nt, Artificial Sequence
  Description of Artificial Sequence: Synthetic oligonucleotide
gguucuuccugagaugccc

SEQ ID NO: 3090155 - RNA, 19 nt, Artificial Sequence
  Description of Artificial Sequence: Synthetic oligonucleotide
gguagucagguucuuccug

SEQ ID NO: 3090156 - RNA, 19 nt, Artificial Sequence
  Description of Artificial Sequence: Synthetic oligonucleotide
gucagguucuuccugagau

SEQ ID NO: 3090157 - RNA, 19 nt, Artificial Sequence
  Description of Artificial Sequence: Synthetic oligonucleotide
agauuguuguauagagcug

SEQ ID NO: 3090158 - RNA, 19 nt, Artificial Sequence
  Description of Artificial Sequence: Synthetic oligonucleotide
uccugggaagucccuccag

SEQ ID NO: 3090159 - RNA, 19 nt, Artificial Sequence
  Description of Artificial Sequence: Synthetic oligonucleotide
cauguagcguggagucugc

SEQ ID NO: 3090160 - RNA, 19 nt, Artificial Sequence
  Description of Artificial Sequence: Synthetic oligonucleotide
guggacagaagugucauua

SEQ ID NO: 3090161 - RNA, 19 nt, Artificial Sequence
  Description of Artificial Sequence: Synthetic oligonucleotide
aagugucauuaaagguguc

SEQ ID NO: 3090162 - RNA, 19 nt, Artificial Sequence
  Description of Artificial Sequence: Synthetic oligonucleotide
auuguuguauagagcugug

SEQ ID NO: 3090163 - RNA, 19 nt, Artificial Sequence
  Description of Artificial Sequence: Synthetic oligonucleotide
cagaagugucauuaaaggu

SEQ ID NO: 3090164 - RNA, 19 nt, Artificial Sequence
  Description of Artificial Sequence: Synthetic oligonucleotide
gcugagcucagccugucug

SEQ ID NO: 3090165 - RNA, 19 nt, Artificial Sequence
  Description of Artificial Sequence: Synthetic oligonucleotide
uuccugggaagucccucca

SEQ ID NO: 3090166 - RNA, 19 nt, Artificial Sequence
  Description of Artificial Sequence: Synthetic oligonucleotide
agucagguucuuccugaga

SEQ ID NO: 3090167 - RNA, 19 nt, Artificial Sequence
  Description of Artificial Sequence: Synthetic oligonucleotide
guguccauguagcguggag

SEQ ID NO: 3090168 - RNA, 19 nt, Artificial Sequence
  Description of Artificial Sequence: Synthetic oligonucleotide
cuccacagcagauuguugu

SEQ ID NO: 3090169 - RNA, 19 nt, Artificial Sequence
  Description of Artificial Sequence: Synthetic oligonucleotide
gcagcauggcuccuggccc

SEQ ID NO: 3090170 - RNA, 19 nt, Artificial Sequence
  Description of Artificial Sequence: Synthetic oligonucleotide
agguucuuccugagaugcc

SEQ ID NO: 3090171 - RNA, 19 nt, Artificial Sequence
  Description of Artificial Sequence: Synthetic oligonucleotide
ugcuccacagcagauuguu

SEQ ID NO: 3090172 - RNA, 19 nt, Artificial Sequence
  Description of Artificial Sequence: Synthetic oligonucleotide
ucccuccagcuucagcaga

SEQ ID NO: 3090173 - RNA, 19 nt, Artificial Sequence
  Description of Artificial Sequence: Synthetic oligonucleotide
ugggaagucccuccagcuu

SEQ ID NO: 3090174 - RNA, 19 nt, Artificial Sequence
  Description of Artificial Sequence: Synthetic oligonucleotide
gagucugcggcagugggaa

SEQ ID NO: 3090175 - RNA, 19 nt, Artificial Sequence
  Description of Artificial Sequence: Synthetic oligonucleotide
cagauacuguccugcuaug

SEQ ID NO: 3090176 - RNA, 19 nt, Artificial Sequence
  Description of Artificial Sequence: Synthetic oligonucleotide
uggcagauacuguccugcu

SEQ ID NO: 3090177 - RNA, 19 nt, Artificial Sequence
  Description of Artificial Sequence: Synthetic oligonucleotide
guucuuccugagaugcccc

SEQ ID NO: 3090178 - RNA, 19 nt, Artificial Sequence
  Description of Artificial Sequence: Synthetic oligonucleotide
gcagauuguuguauagagc

SEQ ID NO: 3090179 - RNA, 19 nt, Artificial Sequence
  Description of Artificial Sequence: Synthetic oligonucleotide
aagggcgucuauggaccag

SEQ ID NO: 3090180 - RNA, 19 nt, Artificial Sequence
  Description of Artificial Sequence: Synthetic oligonucleotide
uagcguggagucugcggca

SEQ ID NO: 3090181 - RNA, 19 nt, Artificial Sequence
  Description of Artificial Sequence: Synthetic oligonucleotide
cagccugucuguuuccuga

SEQ ID NO: 3090182 - RNA, 19 nt, Artificial Sequence
  Description of Artificial Sequence: Synthetic oligonucleotide
ugccagcugagcucagccu

SEQ ID NO: 3090183 - RNA, 19 nt, Artificial Sequence
  Description of Artificial Sequence: Synthetic oligonucleotide
ccagguggcagauacuguc

SEQ ID NO: 3090184 - RNA, 19 nt, Artificial Sequence
  Description of Artificial Sequence: Synthetic oligonucleotide
uugcuccacagcagauugu

SEQ ID NO: 3090185 - RNA, 19 nt, Artificial Sequence
  Description of Artificial Sequence: Synthetic oligonucleotide
ucuuccugagaugccccac

SEQ ID NO: 3090186 - RNA, 19 nt, Artificial Sequence
  Description of Artificial Sequence: Synthetic oligonucleotide
cuucagcagagggaaccag

SEQ ID NO: 3090187 - RNA, 19 nt, Artificial Sequence
  Description of Artificial Sequence: Synthetic oligonucleotide
gagggaaccaguggacaga

SEQ ID NO: 3090188 - RNA, 19 nt, Artificial Sequence
  Description of Artificial Sequence: Synthetic oligonucleotide
cagguccucgcaguccugg

SEQ ID NO: 3090189 - RNA, 19 nt, Artificial Sequence
  Description of Artificial Sequence: Synthetic oligonucleotide
uccauguagcguggagucu

SEQ ID NO: 3090190 - RNA, 19 nt, Artificial Sequence
  Description of Artificial Sequence: Synthetic oligonucleotide
caugaugaccacccuggaa

SEQ ID NO: 3090191 - RNA, 19 nt, Artificial Sequence
  Description of Artificial Sequence: Synthetic oligonucleotide
cugaugaucuccagguccu

SEQ ID NO: 3090192 - RNA, 19 nt, Artificial Sequence
  Description of Artificial Sequence: Synthetic oligonucleotide
gagaugccccacagguucc

SEQ ID NO: 3090193 - RNA, 19 nt, Artificial Sequence
  Description of Artificial Sequence: Synthetic oligonucleotide
agucugcggcagugggaac

SEQ ID NO: 3090194 - RNA, 19 nt, Artificial Sequence
  Description of Artificial Sequence: Synthetic oligonucleotide
cuuccugagaugccccaca

SEQ ID NO: 3090195 - RNA, 19 nt, Artificial Sequence
  Description of Artificial Sequence: Synthetic oligonucleotide
ggaccaguugcuccacagc

SEQ ID NO: 3090196 - RNA, 19 nt, Artificial Sequence
  Description of Artificial Sequence: Synthetic oligonucleotide
ggacagaagugucauuaaa

SEQ ID NO: 3090197 - RNA, 19 nt, Artificial Sequence
  Description of Artificial Sequence: Synthetic oligonucleotide
uauggaccaguugcuccac

SEQ ID NO: 3090198 - RNA, 19 nt, Artificial Sequence
  Description of Artificial Sequence: Synthetic oligonucleotide
gcagauacuguccugcuau

SEQ ID NO: 3090199 - RNA, 19 nt, Artificial Sequence
  Description of Artificial Sequence: Synthetic oligonucleotide
aguugcuccacagcagauu

SEQ ID NO: 3090200 - RNA, 19 nt, Artificial Sequence
  Description of Artificial Sequence: Synthetic oligonucleotide
cauuaaagguguccaugua

SEQ ID NO: 3090201 - RNA, 19 nt, Artificial Sequence
  Description of Artificial Sequence: Synthetic oligonucleotide
guggagucugcggcagugg

SEQ ID NO: 3090202 - RNA, 19 nt, Artificial Sequence
  Description of Artificial Sequence: Synthetic oligonucleotide
ccugggaagucccuccagc

SEQ ID NO: 3090203 - RNA, 19 nt, Artificial Sequence
  Description of Artificial Sequence: Synthetic oligonucleotide
cacagcagauuguuguaua

SEQ ID NO: 3090204 - RNA, 19 nt, Artificial Sequence
  Description of Artificial Sequence: Synthetic oligonucleotide
agcguggagucugcggcag

SEQ ID NO: 3090205 - RNA, 19 nt, Artificial Sequence
  Description of Artificial Sequence: Synthetic oligonucleotide
gucuauggaccaguugcuc

SEQ ID NO: 3090206 - RNA, 19 nt, Artificial Sequence
  Description of Artificial Sequence: Synthetic oligonucleotide
guccugcuaugccagcuga

SEQ ID NO: 3090207 - RNA, 19 nt, Artificial Sequence
  Description of Artificial Sequence: Synthetic oligonucleotide
auguagcguggagucugcg

SEQ ID NO: 3090208 - RNA, 19 nt, Artificial Sequence
  Description of Artificial Sequence: Synthetic oligonucleotide
aguggacagaagugucauu

SEQ ID NO: 3090209 - RNA, 19 nt, Artificial Sequence
  Description of Artificial Sequence: Synthetic oligonucleotide
agggaaccaguggacagaa

SEQ ID NO: 3090210 - RNA, 19 nt, Artificial Sequence
  Description of Artificial Sequence: Synthetic oligonucleotide
auggcuccuggcccaggug

SEQ ID NO: 3090211 - RNA, 19 nt, Artificial Sequence
  Description of Artificial Sequence: Synthetic oligonucleotide
ccugcuaugccagcugagc

SEQ ID NO: 3090212 - RNA, 19 nt, Artificial Sequence
  Description of Artificial Sequence: Synthetic oligonucleotide
agggcgucuauggaccagu

SEQ ID NO: 3090213 - RNA, 19 nt, Artificial Sequence
  Description of Artificial Sequence: Synthetic oligonucleotide
gguggcagauacuguccug

SEQ ID NO: 3090214 - RNA, 19 nt, Artificial Sequence
  Description of Artificial Sequence: Synthetic oligonucleotide
cagcagauuguuguauaga

SEQ ID NO: 3090215 - RNA, 19 nt, Artificial Sequence
  Description of Artificial Sequence: Synthetic oligonucleotide
ccauguagcguggagucug

SEQ ID NO: 3090216 - RNA, 19 nt, Artificial Sequence
  Description of Artificial Sequence: Synthetic oligonucleotide
gcuaugccagcugagcuca

SEQ ID NO: 3090217 - RNA, 19 nt, Artificial Sequence
  Description of Artificial Sequence: Synthetic oligonucleotide
ccugagaugccccacaggu

SEQ ID NO: 3090218 - RNA, 19 nt, Artificial Sequence
  Description of Artificial Sequence: Synthetic oligonucleotide
uccucgcaguccugguagu

SEQ ID NO: 3090219 - RNA, 19 nt, Artificial Sequence
  Description of Artificial Sequence: Synthetic oligonucleotide
gcccagguggcagauacug

SEQ ID NO: 3090220 - RNA, 19 nt, Artificial Sequence
  Description of Artificial Sequence: Synthetic oligonucleotide
agguguccauguagcgugg

SEQ ID NO: 3090221 - RNA, 19 nt, Artificial Sequence
  Description of Artificial Sequence: Synthetic oligonucleotide
ugagcucagccugucuguu

SEQ ID NO: 3090222 - RNA, 19 nt, Artificial Sequence
  Description of Artificial Sequence: Synthetic oligonucleotide
agccugucuguuuccugau

SEQ ID NO: 3090223 - RNA, 19 nt, Artificial Sequence
  Description of Artificial Sequence: Synthetic oligonucleotide
cuccuccaugaugaccacc

SEQ ID NO: 3090224 - RNA, 19 nt, Artificial Sequence
  Description of Artificial Sequence: Synthetic oligonucleotide
ggcgucuauggaccaguug

SEQ ID NO: 3090225 - RNA, 19 nt, Artificial Sequence
  Description of Artificial Sequence: Synthetic oligonucleotide
cagagggaaccaguggaca

SEQ ID NO: 3090226 - RNA, 19 nt, Artificial Sequence
  Description of Artificial Sequence: Synthetic oligonucleotide
ccuggaaagggcgucuaug

SEQ ID NO: 3090227 - RNA, 19 nt, Artificial Sequence
  Description of Artificial Sequence: Synthetic oligonucleotide
cacagguuccugggaaguc

SEQ ID NO: 3090228 - RNA, 19 nt, Artificial Sequence
  Description of Artificial Sequence: Synthetic oligonucleotide
gaugccccacagguuccug

SEQ ID NO: 3090229 - RNA, 19 nt, Artificial Sequence
  Description of Artificial Sequence: Synthetic oligonucleotide
cugcuaugccagcugagcu

SEQ ID NO: 3090230 - RNA, 19 nt, Artificial Sequence
  Description of Artificial Sequence: Synthetic oligonucleotide
cugggaagucccuccagcu

SEQ ID NO: 3090231 - RNA, 19 nt, Artificial Sequence
  Description of Artificial Sequence: Synthetic oligonucleotide
cuaugccagcugagcucag

SEQ ID NO: 3090232 - RNA, 19 nt, Artificial Sequence
  Description of Artificial Sequence: Synthetic oligonucleotide
ccagcuucagcagagggaa

SEQ ID NO: 3090233 - RNA, 19 nt, Artificial Sequence
  Description of Artificial Sequence: Synthetic oligonucleotide
cccacagguuccugggaag

SEQ ID NO: 3090234 - RNA, 19 nt, Artificial Sequence
  Description of Artificial Sequence: Synthetic oligonucleotide
accacccuggaaagggcgu

SEQ ID NO: 3090235 - RNA, 19 nt, Artificial Sequence
  Description of Artificial Sequence: Synthetic oligonucleotide
cagcuucagcagagggaac

SEQ ID NO: 3090236 - RNA, 19 nt, Artificial Sequence
  Description of Artificial Sequence: Synthetic oligonucleotide
cuccuggcccagguggcag

SEQ ID NO: 3090237 - RNA, 19 nt, Artificial Sequence
  Description of Artificial Sequence: Synthetic oligonucleotide
cagcauggcuccuggccca

SEQ ID NO: 3090238 - RNA, 19 nt, Artificial Sequence
  Description of Artificial Sequence: Synthetic oligonucleotide
gcagagggaaccaguggac

SEQ ID NO: 3090239 - RNA, 19 nt, Artificial Sequence
  Description of Artificial Sequence: Synthetic oligonucleotide
agaugccccacagguuccu

SEQ ID NO: 3090240 - RNA, 19 nt, Artificial Sequence
  Description of Artificial Sequence: Synthetic oligonucleotide
cugagcucagccugucugu

SEQ ID NO: 3090241 - RNA, 19 nt, Artificial Sequence
  Description of Artificial Sequence: Synthetic oligonucleotide
agcauggcuccuggcccag

SEQ ID NO: 3090242 - RNA, 19 nt, Artificial Sequence
  Description of Artificial Sequence: Synthetic oligonucleotide
gccugucuguuuccugaug

SEQ ID NO: 3090243 - RNA, 19 nt, Artificial Sequence
  Description of Artificial Sequence: Synthetic oligonucleotide
gucugcggcagugggaacu

SEQ ID NO: 3090244 - RNA, 19 nt, Artificial Sequence
  Description of Artificial Sequence: Synthetic oligonucleotide
gcucagccugucuguuucc

SEQ ID NO: 3090245 - RNA, 19 nt, Artificial Sequence
  Description of Artificial Sequence: Synthetic oligonucleotide
ggcagauacuguccugcua

SEQ ID NO: 3090246 - RNA, 19 nt, Artificial Sequence
  Description of Artificial Sequence: Synthetic oligonucleotide
gcuucagcagagggaacca

SEQ ID NO: 3090247 - RNA, 19 nt, Artificial Sequence
  Description of Artificial Sequence: Synthetic oligonucleotide
guccugguagucagguucu

SEQ ID NO: 3090248 - RNA, 19 nt, Artificial Sequence
  Description of Artificial Sequence: Synthetic oligonucleotide
cugucuguuuccugaugau

SEQ ID NO: 3090249 - RNA, 19 nt, Artificial Sequence
  Description of Artificial Sequence: Synthetic oligonucleotide
ggaagucccuccagcuuca

SEQ ID NO: 3090250 - RNA, 19 nt, Artificial Sequence
  Description of Artificial Sequence: Synthetic oligonucleotide
gcuccacagcagauuguug

SEQ ID NO: 3090251 - RNA, 19 nt, Artificial Sequence
  Description of Artificial Sequence: Synthetic oligonucleotide
cauggcuccuggcccaggu

SEQ ID NO: 3090252 - RNA, 19 nt, Artificial Sequence
  Description of Artificial Sequence: Synthetic oligonucleotide
caguggacagaagugucau

SEQ ID NO: 3090253 - RNA, 19 nt, Artificial Sequence
  Description of Artificial Sequence: Synthetic oligonucleotide
gugggaacuccuccaugau

SEQ ID NO: 3090254 - RNA, 19 nt, Artificial Sequence
  Description of Artificial Sequence: Synthetic oligonucleotide
ggagucugcggcaguggga

SEQ ID NO: 3090255 - RNA, 19 nt, Artificial Sequence
  Description of Artificial Sequence: Synthetic oligonucleotide
cugcggcagugggaacucc

SEQ ID NO: 3090256 - RNA, 19 nt, Artificial Sequence
  Description of Artificial Sequence: Synthetic oligonucleotide
agguuccugggaagucccu

SEQ ID NO: 3090257 - RNA, 19 nt, Artificial Sequence
  Description of Artificial Sequence: Synthetic oligonucleotide
uccugguagucagguucuu

SEQ ID NO: 3090258 - RNA, 19 nt, Artificial Sequence
  Description of Artificial Sequence: Synthetic oligonucleotide
cugagaugccccacagguu

SEQ ID NO: 3090259 - RNA, 19 nt, Artificial Sequence
  Description of Artificial Sequence: Synthetic oligonucleotide
cggcagugggaacuccucc

SEQ ID NO: 3090260 - RNA, 19 nt, Artificial Sequence
  Description of Artificial Sequence: Synthetic oligonucleotide
cagcugagcucagccuguc

SEQ ID NO: 3090261 - RNA, 19 nt, Artificial Sequence
  Description of Artificial Sequence: Synthetic oligonucleotide
gagcucagccugucuguuu

SEQ ID NO: 3090262 - RNA, 19 nt, Artificial Sequence
  Description of Artificial Sequence: Synthetic oligonucleotide
gcaguccugguagucaggu

SEQ ID NO: 3090263 - RNA, 19 nt, Artificial Sequence
  Description of Artificial Sequence: Synthetic oligonucleotide
cuguccugcuaugccagcu

SEQ ID NO: 3090264 - RNA, 19 nt, Artificial Sequence
  Description of Artificial Sequence: Synthetic oligonucleotide
acccuggaaagggcgucua

SEQ ID NO: 3090265 - RNA, 19 nt, Artificial Sequence
  Description of Artificial Sequence: Synthetic oligonucleotide
cguggagucugcggcagug

SEQ ID NO: 3090266 - RNA, 19 nt, Artificial Sequence
  Description of Artificial Sequence: Synthetic oligonucleotide
caguugcuccacagcagau

SEQ ID NO: 3090267 - RNA, 19 nt, Artificial Sequence
  Description of Artificial Sequence: Synthetic oligonucleotide
gguguccauguagcgugga

SEQ ID NO: 3090268 - RNA, 19 nt, Artificial Sequence
  Description of Artificial Sequence: Synthetic oligonucleotide
cucagccugucuguuuccu

SEQ ID NO: 3090269 - RNA, 19 nt, Artificial Sequence
  Description of Artificial Sequence: Synthetic oligonucleotide
gcggcagugggaacuccuc

SEQ ID NO: 3090270 - RNA, 19 nt, Artificial Sequence
  Description of Artificial Sequence: Synthetic oligonucleotide
ccacccuggaaagggcguc

SEQ ID NO: 3090271 - RNA, 19 nt, Artificial Sequence
  Description of Artificial Sequence: Synthetic oligonucleotide
ccucgcaguccugguaguc

SEQ ID NO: 3090272 - RNA, 19 nt, Artificial Sequence
  Description of Artificial Sequence: Synthetic oligonucleotide
gcauggcuccuggcccagg

SEQ ID NO: 3090273 - RNA, 19 nt, Artificial Sequence
  Description of Artificial Sequence: Synthetic oligonucleotide
gccccacagguuccuggga

SEQ ID NO: 3090274 - RNA, 19 nt, Artificial Sequence
  Description of Artificial Sequence: Synthetic oligonucleotide
cgucuauggaccaguugcu

SEQ ID NO: 3090275 - RNA, 19 nt, Artificial Sequence
  Description of Artificial Sequence: Synthetic oligonucleotide
cacccuggaaagggcgucu

SEQ ID NO: 3090276 - RNA, 19 nt, Artificial Sequence
  Description of Artificial Sequence: Synthetic oligonucleotide
ccagcugagcucagccugu

SEQ ID NO: 3090277 - RNA, 19 nt, Artificial Sequence
  Description of Artificial Sequence: Synthetic oligonucleotide
caguccugguagucagguu

SEQ ID NO: 3090278 - RNA, 19 nt, Artificial Sequence
  Description of Artificial Sequence: Synthetic oligonucleotide
cccagguggcagauacugu

SEQ ID NO: 3090279 - RNA, 19 nt, Artificial Sequence
  Description of Artificial Sequence: Synthetic oligonucleotide
ccacagcagauuguuguau

SEQ ID NO: 3090280 - RNA, 19 nt, Artificial Sequence
  Description of Artificial Sequence: Synthetic oligonucleotide
ccacagguuccugggaagu

SEQ ID NO: 3090281 - RNA, 19 nt, Artificial Sequence
  Description of Artificial Sequence: Synthetic oligonucleotide
gcguggagucugcggcagu

SEQ ID NO: 3090282 - RNA, 19 nt, Artificial Sequence
  Description of Artificial Sequence: Synthetic oligonucleotide
cccuggaaagggcgucuau

SEQ ID NO: 3090283 - RNA, 19 nt, Artificial Sequence
  Description of Artificial Sequence: Synthetic oligonucleotide
ggucugcagcauggcuccu

SEQ ID NO: 3090284 - RNA, 19 nt, Artificial Sequence
  Description of Artificial Sequence: Synthetic oligonucleotide
gggcgucuauggaccaguu

SEQ ID NO: 3090285 - RNA, 19 nt, Artificial Sequence
  Description of Artificial Sequence: Synthetic oligonucleotide
gaaguaucgauccacaagg

SEQ ID NO: 3090286 - RNA, 19 nt, Artificial Sequence
  Description of Artificial Sequence: Synthetic oligonucleotide
agagcagugaaucuuacac

SEQ ID NO: 3090287 - RNA, 19 nt, Artificial Sequence
  Description of Artificial Sequence: Synthetic oligonucleotide
uaggaaauacuuuuaauag

SEQ ID NO: 3090288 - RNA, 19 nt, Artificial Sequence
  Description of Artificial Sequence: Synthetic oligonucleotide
uuugccacuuugaagaacg

SEQ ID NO: 3090289 - RNA, 19 nt, Artificial Sequence
  Description of Artificial Sequence: Synthetic oligonucleotide
agcgugaugacacauauuc

SEQ ID NO: 3090290 - RNA, 19 nt, Artificial Sequence
  Description of Artificial Sequence: Synthetic oligonucleotide
uauacagugguccucacug

SEQ ID NO: 3090291 - RNA, 19 nt, Artificial Sequence
  Description of Artificial Sequence: Synthetic oligonucleotide
aguguuguaguauacagug

SEQ ID NO: 3090292 - RNA, 19 nt, Artificial Sequence
  Description of Artificial Sequence: Synthetic oligonucleotide
guugguacugaucugauag

SEQ ID NO: 3090293 - RNA, 19 nt, Artificial Sequence
  Description of Artificial Sequence: Synthetic oligonucleotide
gaaucuuacacagaggugc

SEQ ID NO: 3090294 - RNA, 19 nt, Artificial Sequence
  Description of Artificial Sequence: Synthetic oligonucleotide
aaauuucccagauacuuug

SEQ ID NO: 3090295 - RNA, 19 nt, Artificial Sequence
  Description of Artificial Sequence: Synthetic oligonucleotide
uuugacauccgcuuuauac

SEQ ID NO: 3090296 - RNA, 19 nt, Artificial Sequence
  Description of Artificial Sequence: Synthetic oligonucleotide
auacuuuuaauaguuuugc

SEQ ID NO: 3090297 - RNA, 19 nt, Artificial Sequence
  Description of Artificial Sequence: Synthetic oligonucleotide
acuuuuaauaguuuugcca

SEQ ID NO: 3090298 - RNA, 19 nt, Artificial Sequence
  Description of Artificial Sequence: Synthetic oligonucleotide
uguuguaguauacaguggu

SEQ ID NO: 3090299 - RNA, 19 nt, Artificial Sequence
  Description of Artificial Sequence: Synthetic oligonucleotide
ugaaguaucgauccacaag

SEQ ID NO: 3090300 - RNA, 19 nt, Artificial Sequence
  Description of Artificial Sequence: Synthetic oligonucleotide
aauacuuuuaauaguuuug

SEQ ID NO: 3090301 - RNA, 19 nt, Artificial Sequence
  Description of Artificial Sequence: Synthetic oligonucleotide
auaggaaauacuuuuaaua

SEQ ID NO: 3090302 - RNA, 19 nt, Artificial Sequence
  Description of Artificial Sequence: Synthetic oligonucleotide
agauacuuuguucugaagu

SEQ ID NO: 3090303 - RNA, 19 nt, Artificial Sequence
  Description of Artificial Sequence: Synthetic oligonucleotide
uaucgauccacaagggagg

SEQ ID NO: 3090304 - RNA, 19 nt, Artificial Sequence
  Description of Artificial Sequence: Synthetic oligonucleotide
ucugauaggaaauacuuuu

SEQ ID NO: 3090305 - RNA, 19 nt, Artificial Sequence
  Description of Artificial Sequence: Synthetic oligonucleotide
gaugacacauauucgguug

SEQ ID NO: 3090306 - RNA, 19 nt, Artificial Sequence
  Description of Artificial Sequence: Synthetic oligonucleotide
uccgcuuuauaccagcgag

SEQ ID NO: 3090307 - RNA, 19 nt, Artificial Sequence
  Description of Artificial Sequence: Synthetic oligonucleotide
uugacauccgcuuuauacc

SEQ ID NO: 3090308 - RNA, 19 nt, Artificial Sequence
  Description of Artificial Sequence: Synthetic oligonucleotide
aacggggugagauccugcc

SEQ ID NO: 3090309 - RNA, 19 nt, Artificial Sequence
  Description of Artificial Sequence: Synthetic oligonucleotide
gauacuuuguucugaaguc

SEQ ID NO: 3090310 - RNA, 19 nt, Artificial Sequence
  Description of Artificial Sequence: Synthetic oligonucleotide
uaauaguuuugccacuuug

SEQ ID NO: 3090311 - RNA, 19 nt, Artificial Sequence
  Description of Artificial Sequence: Synthetic oligonucleotide
uuaaauuucccagauacuu

SEQ ID NO: 3090312 - RNA, 19 nt, Artificial Sequence
  Description of Artificial Sequence: Synthetic oligonucleotide
gcuuaaauuucccagauac

SEQ ID NO: 3090313 - RNA, 19 nt, Artificial Sequence
  Description of Artificial Sequence: Synthetic oligonucleotide
cacauauucgguuggagug

SEQ ID NO: 3090314 - RNA, 19 nt, Artificial Sequence
  Description of Artificial Sequence: Synthetic oligonucleotide
cagugaaucuuacacagag

SEQ ID NO: 3090315 - RNA, 19 nt, Artificial Sequence
  Description of Artificial Sequence: Synthetic oligonucleotide
uuuuccuuugacauccgcu

SEQ ID NO: 3090316 - RNA, 19 nt, Artificial Sequence
  Description of Artificial Sequence: Synthetic oligonucleotide
uuguaguauacaguggucc

SEQ ID NO: 3090317 - RNA, 19 nt, Artificial Sequence
  Description of Artificial Sequence: Synthetic oligonucleotide
ugauaggaaauacuuuuaa

SEQ ID NO: 3090318 - RNA, 19 nt, Artificial Sequence
  Description of Artificial Sequence: Synthetic oligonucleotide
ugaucugauaggaaauacu

SEQ ID NO: 3090319 - RNA, 19 nt, Artificial Sequence
  Description of Artificial Sequence: Synthetic oligonucleotide
ucugaagucugcuacaguu

SEQ ID NO: 3090320 - RNA, 19 nt, Artificial Sequence
  Description of Artificial Sequence: Synthetic oligonucleotide
guaucgauccacaagggag

SEQ ID NO: 3090321 - RNA, 19 nt, Artificial Sequence
  Description of Artificial Sequence: Synthetic oligonucleotide
uuguucugaagucugcuac

SEQ ID NO: 3090322 - RNA, 19 nt, Artificial Sequence
  Description of Artificial Sequence: Synthetic oligonucleotide
aauaguuuugccacuuuga

SEQ ID NO: 3090323 - RNA, 19 nt, Artificial Sequence
  Description of Artificial Sequence: Synthetic oligonucleotide
uucccagauacuuuguucu

SEQ ID NO: 3090324 - RNA, 19 nt, Artificial Sequence
  Description of Artificial Sequence: Synthetic oligonucleotide
aggaaauacuuuuaauagu

SEQ ID NO: 3090325 - RNA, 19 nt, Artificial Sequence
  Description of Artificial Sequence: Synthetic oligonucleotide
uacuuuuaauaguuuugcc

SEQ ID NO: 3090326 - RNA, 19 nt, Artificial Sequence
  Description of Artificial Sequence: Synthetic oligonucleotide
uaguuuugccacuuugaag

SEQ ID NO: 3090327 - RNA, 19 nt, Artificial Sequence
  Description of Artificial Sequence: Synthetic oligonucleotide
uacagugguccucacuggg

SEQ ID NO: 3090328 - RNA, 19 nt, Artificial Sequence
  Description of Artificial Sequence: Synthetic oligonucleotide
acauccgcuuuauaccagc

SEQ ID NO: 3090329 - RNA, 19 nt, Artificial Sequence
  Description of Artificial Sequence: Synthetic oligonucleotide
uacuuuguucugaagucug

SEQ ID NO: 3090330 - RNA, 19 nt, Artificial Sequence
  Description of Artificial Sequence: Synthetic oligonucleotide
uguaguauacagugguccu

SEQ ID NO: 3090331 - RNA, 19 nt, Artificial Sequence
  Description of Artificial Sequence: Synthetic oligonucleotide
ugaaucuuacacagaggug

SEQ ID NO: 3090332 - RNA, 19 nt, Artificial Sequence
  Description of Artificial Sequence: Synthetic oligonucleotide
aaucuuacacagaggugcg

SEQ ID NO: 3090333 - RNA, 19 nt, Artificial Sequence
  Description of Artificial Sequence: Synthetic oligonucleotide
ugacauccgcuuuauacca

SEQ ID NO: 3090334 - RNA, 19 nt, Artificial Sequence
  Description of Artificial Sequence: Synthetic oligonucleotide
uuuuaauaguuuugccacu

SEQ ID NO: 3090335 - RNA, 19 nt, Artificial Sequence
  Description of Artificial Sequence: Synthetic oligonucleotide
augacacauauucgguugg

SEQ ID NO: 3090336 - RNA, 19 nt, Artificial Sequence
  Description of Artificial Sequence: Synthetic oligonucleotide
gauccugccagcgugauga

SEQ ID NO: 3090337 - RNA, 19 nt, Artificial Sequence
  Description of Artificial Sequence: Synthetic oligonucleotide
uucgguuggaguguuguag

SEQ ID NO: 3090338 - RNA, 19 nt, Artificial Sequence
  Description of Artificial Sequence: Synthetic oligonucleotide
ucugcuacaguugguacug

SEQ ID NO: 3090339 - RNA, 19 nt, Artificial Sequence
  Description of Artificial Sequence: Synthetic oligonucleotide
uugguacugaucugauagg

SEQ ID NO: 3090340 - RNA, 19 nt, Artificial Sequence
  Description of Artificial Sequence: Synthetic oligonucleotide
uaaauuucccagauacuuu

SEQ ID NO: 3090341 - RNA, 19 nt, Artificial Sequence
  Description of Artificial Sequence: Synthetic oligonucleotide
uuuauaccagcgagugaag

SEQ ID NO: 3090342 - RNA, 19 nt, Artificial Sequence
  Description of Artificial Sequence: Synthetic oligonucleotide
acacauauucgguuggagu

SEQ ID NO: 3090343 - RNA, 19 nt, Artificial Sequence
  Description of Artificial Sequence: Synthetic oligonucleotide
auaguuuugccacuuugaa

SEQ ID NO: 3090344 - RNA, 19 nt, Artificial Sequence
  Description of Artificial Sequence: Synthetic oligonucleotide
ggaguguuguaguauacag

SEQ ID NO: 3090345 - RNA, 19 nt, Artificial Sequence
  Description of Artificial Sequence: Synthetic oligonucleotide
cuuuauaccagcgagugaa

SEQ ID NO: 3090346 - RNA, 19 nt, Artificial Sequence
  Description of Artificial Sequence: Synthetic oligonucleotide
gugaaucuuacacagaggu

SEQ ID NO: 3090347 - RNA, 19 nt, Artificial Sequence
  Description of Artificial Sequence: Synthetic oligonucleotide
uuuccuuugacauccgcuu

SEQ ID NO: 3090348 - RNA, 19 nt, Artificial Sequence
  Description of Artificial Sequence: Synthetic oligonucleotide
agucugcuacaguugguac

SEQ ID NO: 3090349 - RNA, 19 nt, Artificial Sequence
  Description of Artificial Sequence: Synthetic oligonucleotide
uuucccagauacuuuguuc

SEQ ID NO: 3090350 - RNA, 19 nt, Artificial Sequence
  Description of Artificial Sequence: Synthetic oligonucleotide
uguucugaagucugcuaca

SEQ ID NO: 3090351 - RNA, 19 nt, Artificial Sequence
  Description of Artificial Sequence: Synthetic oligonucleotide
aguaucgauccacaaggga

SEQ ID NO: 3090352 - RNA, 19 nt, Artificial Sequence
  Description of Artificial Sequence: Synthetic oligonucleotide
uugaagaacggggugagau

SEQ ID NO: 3090353 - RNA, 19 nt, Artificial Sequence
  Description of Artificial Sequence: Synthetic oligonucleotide
uacugaucugauaggaaau

SEQ ID NO: 3090354 - RNA, 19 nt, Artificial Sequence
  Description of Artificial Sequence: Synthetic oligonucleotide
cgugaugacacauauucgg

SEQ ID NO: 3090355 - RNA, 19 nt, Artificial Sequence
  Description of Artificial Sequence: Synthetic oligonucleotide
uauaccagcgagugaagua

SEQ ID NO: 3090356 - RNA, 19 nt, Artificial Sequence
  Description of Artificial Sequence: Synthetic oligonucleotide
acuggguuuuccuuugaca

SEQ ID NO: 3090357 - RNA, 19 nt, Artificial Sequence
  Description of Artificial Sequence: Synthetic oligonucleotide
aaguaucgauccacaaggg

SEQ ID NO: 3090358 - RNA, 19 nt, Artificial Sequence
  Description of Artificial Sequence: Synthetic oligonucleotide
uuuaauaguuuugccacuu

SEQ ID NO: 3090359 - RNA, 19 nt, Artificial Sequence
  Description of Artificial Sequence: Synthetic oligonucleotide
guacugaucugauaggaaa

SEQ ID NO: 3090360 - RNA, 19 nt, Artificial Sequence
  Description of Artificial Sequence: Synthetic oligonucleotide
gccacuuugaagaacgggg

SEQ ID NO: 3090361 - RNA, 19 nt, Artificial Sequence
  Description of Artificial Sequence: Synthetic oligonucleotide
uaguauacagugguccuca

SEQ ID NO: 3090362 - RNA, 19 nt, Artificial Sequence
  Description of Artificial Sequence: Synthetic oligonucleotide
auacagugguccucacugg

SEQ ID NO: 3090363 - RNA, 19 nt, Artificial Sequence
  Description of Artificial Sequence: Synthetic oligonucleotide
uauucgguuggaguguugu

SEQ ID NO: 3090364 - RNA, 19 nt, Artificial Sequence
  Description of Artificial Sequence: Synthetic oligonucleotide
ugguacugaucugauagga

SEQ ID NO: 3090365 - RNA, 19 nt, Artificial Sequence
  Description of Artificial Sequence: Synthetic oligonucleotide
gugagauccugccagcgug

SEQ ID NO: 3090366 - RNA, 19 nt, Artificial Sequence
  Description of Artificial Sequence: Synthetic oligonucleotide
acaguugguacugaucuga

SEQ ID NO: 3090367 - RNA, 19 nt, Artificial Sequence
  Description of Artificial Sequence: Synthetic oligonucleotide
ugccacuuugaagaacggg

SEQ ID NO: 3090368 - RNA, 19 nt, Artificial Sequence
  Description of Artificial Sequence: Synthetic oligonucleotide
cugaagucugcuacaguug

SEQ ID NO: 3090369 - RNA, 19 nt, Artificial Sequence
  Description of Artificial Sequence: Synthetic oligonucleotide
gcgagugaaguaucgaucc

SEQ ID NO: 3090370 - RNA, 19 nt, Artificial Sequence
  Description of Artificial Sequence: Synthetic oligonucleotide
uuuguucugaagucugcua

SEQ ID NO: 3090371 - RNA, 19 nt, Artificial Sequence
  Description of Artificial Sequence: Synthetic oligonucleotide
ugaugacacauauucgguu

SEQ ID NO: 3090372 - RNA, 19 nt, Artificial Sequence
  Description of Artificial Sequence: Synthetic oligonucleotide
agugaaucuuacacagagg

SEQ ID NO: 3090373 - RNA, 19 nt, Artificial Sequence
  Description of Artificial Sequence: Synthetic oligonucleotide
agcgagugaaguaucgauc

SEQ ID NO: 3090374 - RNA, 19 nt, Artificial Sequence
  Description of Artificial Sequence: Synthetic oligonucleotide
cuacaguugguacugaucu

SEQ ID NO: 3090375 - RNA, 19 nt, Artificial Sequence
  Description of Artificial Sequence: Synthetic oligonucleotide
gauaggaaauacuuuuaau

SEQ ID NO: 3090376 - RNA, 19 nt, Artificial Sequence
  Description of Artificial Sequence: Synthetic oligonucleotide
gagcagugaaucuuacaca

SEQ ID NO: 3090377 - RNA, 19 nt, Artificial Sequence
  Description of Artificial Sequence: Synthetic oligonucleotide
uuggaguguuguaguauac

SEQ ID NO: 3090378 - RNA, 19 nt, Artificial Sequence
  Description of Artificial Sequence: Synthetic oligonucleotide
gagugaaguaucgauccac

SEQ ID NO: 3090379 - RNA, 19 nt, Artificial Sequence
  Description of Artificial Sequence: Synthetic oligonucleotide
aguauacagugguccucac

SEQ ID NO: 3090380 - RNA, 19 nt, Artificial Sequence
  Description of Artificial Sequence: Synthetic oligonucleotide
gacacauauucgguuggag

SEQ ID NO: 3090381 - RNA, 19 nt, Artificial Sequence
  Description of Artificial Sequence: Synthetic oligonucleotide
auacuuuguucugaagucu

SEQ ID NO: 3090382 - RNA, 19 nt, Artificial Sequence
  Description of Artificial Sequence: Synthetic oligonucleotide
cuuugaagaacggggugag

SEQ ID NO: 3090383 - RNA, 19 nt, Artificial Sequence
  Description of Artificial Sequence: Synthetic oligonucleotide
uuauaccagcgagugaagu

SEQ ID NO: 3090384 - RNA, 19 nt, Artificial Sequence
  Description of Artificial Sequence: Synthetic oligonucleotide
ggguuuuccuuugacaucc

SEQ ID NO: 3090385 - RNA, 19 nt, Artificial Sequence
  Description of Artificial Sequence: Synthetic oligonucleotide
ucgguuggaguguuguagu

SEQ ID NO: 3090386 - RNA, 19 nt, Artificial Sequence
  Description of Artificial Sequence: Synthetic oligonucleotide
agaggugcgaguucuguua

SEQ ID NO: 3090387 - RNA, 19 nt, Artificial Sequence
  Description of Artificial Sequence: Synthetic oligonucleotide
uuaauaguuuugccacuuu

SEQ ID NO: 3090388 - RNA, 19 nt, Artificial Sequence
  Description of Artificial Sequence: Synthetic oligonucleotide
uacaguugguacugaucug

SEQ ID NO: 3090389 - RNA, 19 nt, Artificial Sequence
  Description of Artificial Sequence: Synthetic oligonucleotide
uggaguguuguaguauaca

SEQ ID NO: 3090390 - RNA, 19 nt, Artificial Sequence
  Description of Artificial Sequence: Synthetic oligonucleotide
cauccgcuuuauaccagcg

SEQ ID NO: 3090391 - RNA, 19 nt, Artificial Sequence
  Description of Artificial Sequence: Synthetic oligonucleotide
uugccacuuugaagaacgg

SEQ ID NO: 3090392 - RNA, 19 nt, Artificial Sequence
  Description of Artificial Sequence: Synthetic oligonucleotide
aagucugcuacaguuggua

SEQ ID NO: 3090393 - RNA, 19 nt, Artificial Sequence
  Description of Artificial Sequence: Synthetic oligonucleotide
aagggagggcgccgcgggc

SEQ ID NO: 3090394 - RNA, 19 nt, Artificial Sequence
  Description of Artificial Sequence: Synthetic oligonucleotide
auaccagcgagugaaguau

SEQ ID NO: 3090395 - RNA, 19 nt, Artificial Sequence
  Description of Artificial Sequence: Synthetic oligonucleotide
uccuuugacauccgcuuua

SEQ ID NO: 3090396 - RNA, 19 nt, Artificial Sequence
  Description of Artificial Sequence: Synthetic oligonucleotide
gaucugauaggaaauacuu

SEQ ID NO: 3090397 - RNA, 19 nt, Artificial Sequence
  Description of Artificial Sequence: Synthetic oligonucleotide
guguuguaguauacagugg

SEQ ID NO: 3090398 - RNA, 19 nt, Artificial Sequence
  Description of Artificial Sequence: Synthetic oligonucleotide
guuuuccuuugacauccgc

SEQ ID NO: 3090399 - RNA, 19 nt, Artificial Sequence
  Description of Artificial Sequence: Synthetic oligonucleotide
ucccagauacuuuguucug

SEQ ID NO: 3090400 - RNA, 19 nt, Artificial Sequence
  Description of Artificial Sequence: Synthetic oligonucleotide
aauuucccagauacuuugu

SEQ ID NO: 3090401 - RNA, 19 nt, Artificial Sequence
  Description of Artificial Sequence: Synthetic oligonucleotide
guuggaguguuguaguaua

SEQ ID NO: 3090402 - RNA, 19 nt, Artificial Sequence
  Description of Artificial Sequence: Synthetic oligonucleotide
acauauucgguuggagugu

SEQ ID NO: 3090403 - RNA, 19 nt, Artificial Sequence
  Description of Artificial Sequence: Synthetic oligonucleotide
auuucccagauacuuuguu

SEQ ID NO: 3090404 - RNA, 19 nt, Artificial Sequence
  Description of Artificial Sequence: Synthetic oligonucleotide
agugaaguaucgauccaca

SEQ ID NO: 3090405 - RNA, 19 nt, Artificial Sequence
  Description of Artificial Sequence: Synthetic oligonucleotide
uucugaagucugcuacagu

SEQ ID NO: 3090406 - RNA, 19 nt, Artificial Sequence
  Description of Artificial Sequence: Synthetic oligonucleotide
uuacacagaggugcgaguu

SEQ ID NO: 3090407 - RNA, 19 nt, Artificial Sequence
  Description of Artificial Sequence: Synthetic oligonucleotide
uacacagaggugcgaguuc

SEQ ID NO: 3090408 - RNA, 19 nt, Artificial Sequence
  Description of Artificial Sequence: Synthetic oligonucleotide
uggguuuuccuuugacauc

SEQ ID NO: 3090409 - RNA, 19 nt, Artificial Sequence
  Description of Artificial Sequence: Synthetic oligonucleotide
uuuugccacuuugaagaac

SEQ ID NO: 3090410 - RNA, 19 nt, Artificial Sequence
  Description of Artificial Sequence: Synthetic oligonucleotide
cagauacuuuguucugaag

SEQ ID NO: 3090411 - RNA, 19 nt, Artificial Sequence
  Description of Artificial Sequence: Synthetic oligonucleotide
aucgauccacaagggaggg

SEQ ID NO: 3090412 - RNA, 19 nt, Artificial Sequence
  Description of Artificial Sequence: Synthetic oligonucleotide
ccugccagcgugaugacac

SEQ ID NO: 3090413 - RNA, 19 nt, Artificial Sequence
  Description of Artificial Sequence: Synthetic oligonucleotide
uccacaagggagggcgccg

SEQ ID NO: 3090414 - RNA, 19 nt, Artificial Sequence
  Description of Artificial Sequence: Synthetic oligonucleotide
acacagaggugcgaguucu

SEQ ID NO: 3090415 - RNA, 19 nt, Artificial Sequence
  Description of Artificial Sequence: Synthetic oligonucleotide
accagcgagugaaguaucg

SEQ ID NO: 3090416 - RNA, 19 nt, Artificial Sequence
  Description of Artificial Sequence: Synthetic oligonucleotide
cuggguuuuccuuugacau

SEQ ID NO: 3090417 - RNA, 19 nt, Artificial Sequence
  Description of Artificial Sequence: Synthetic oligonucleotide
auccgcuuuauaccagcga

SEQ ID NO: 3090418 - RNA, 19 nt, Artificial Sequence
  Description of Artificial Sequence: Synthetic oligonucleotide
caagggagggcgccgcggg

SEQ ID NO: 3090419 - RNA, 19 nt, Artificial Sequence
  Description of Artificial Sequence: Synthetic oligonucleotide
ugacacauauucgguugga

SEQ ID NO: 3090420 - RNA, 19 nt, Artificial Sequence
  Description of Artificial Sequence: Synthetic oligonucleotide
ggaaauacuuuuaauaguu

SEQ ID NO: 3090421 - RNA, 19 nt, Artificial Sequence
  Description of Artificial Sequence: Synthetic oligonucleotide
cugauaggaaauacuuuua

SEQ ID NO: 3090422 - RNA, 19 nt, Artificial Sequence
  Description of Artificial Sequence: Synthetic oligonucleotide
uuccuuugacauccgcuuu

SEQ ID NO: 3090423 - RNA, 19 nt, Artificial Sequence
  Description of Artificial Sequence: Synthetic oligonucleotide
acugaucugauaggaaaua

SEQ ID NO: 3090424 - RNA, 19 nt, Artificial Sequence
  Description of Artificial Sequence: Synthetic oligonucleotide
guagccacggcuaccucug

SEQ ID NO: 3090425 - RNA, 19 nt, Artificial Sequence
  Description of Artificial Sequence: Synthetic oligonucleotide
guuguaguauacagugguc

SEQ ID NO: 3090426 - RNA, 19 nt, Artificial Sequence
  Description of Artificial Sequence: Synthetic oligonucleotide
ucgguagccacggcuaccu

SEQ ID NO: 3090427 - RNA, 19 nt, Artificial Sequence
  Description of Artificial Sequence: Synthetic oligonucleotide
gacauccgcuuuauaccag

SEQ ID NO: 3090428 - RNA, 19 nt, Artificial Sequence
  Description of Artificial Sequence: Synthetic oligonucleotide
guaguauacagugguccuc

SEQ ID NO: 3090429 - RNA, 19 nt, Artificial Sequence
  Description of Artificial Sequence: Synthetic oligonucleotide
uuugaagaacggggugaga

SEQ ID NO: 3090430 - RNA, 19 nt, Artificial Sequence
  Description of Artificial Sequence: Synthetic oligonucleotide
aguugguacugaucugaua

SEQ ID NO: 3090431 - RNA, 19 nt, Artificial Sequence
  Description of Artificial Sequence: Synthetic oligonucleotide
aucugauaggaaauacuuu

SEQ ID NO: 3090432 - RNA, 19 nt, Artificial Sequence
  Description of Artificial Sequence: Synthetic oligonucleotide
gugaaguaucgauccacaa

SEQ ID NO: 3090433 - RNA, 19 nt, Artificial Sequence
  Description of Artificial Sequence: Synthetic oligonucleotide
uaccagcgagugaaguauc

SEQ ID NO: 3090434 - RNA, 19 nt, Artificial Sequence
  Description of Artificial Sequence: Synthetic oligonucleotide
cacuggguuuuccuuugac

SEQ ID NO: 3090435 - RNA, 19 nt, Artificial Sequence
  Description of Artificial Sequence: Synthetic oligonucleotide
cgauccacaagggagggcg

SEQ ID NO: 3090436 - RNA, 19 nt, Artificial Sequence
  Description of Artificial Sequence: Synthetic oligonucleotide
agaacggggugagauccug

SEQ ID NO: 3090437 - RNA, 19 nt, Artificial Sequence
  Description of Artificial Sequence: Synthetic oligonucleotide
acaagggagggcgccgcgg

SEQ ID NO: 3090438 - RNA, 19 nt, Artificial Sequence
  Description of Artificial Sequence: Synthetic oligonucleotide
acagaggugcgaguucugu

SEQ ID NO: 3090439 - RNA, 19 nt, Artificial Sequence
  Description of Artificial Sequence: Synthetic oligonucleotide
gaguguuguaguauacagu

SEQ ID NO: 3090440 - RNA, 19 nt, Artificial Sequence
  Description of Artificial Sequence: Synthetic oligonucleotide
ccccgcuuaaauuucccag

SEQ ID NO: 3090441 - RNA, 19 nt, Artificial Sequence
  Description of Artificial Sequence: Synthetic oligonucleotide
gaggugcgaguucuguuaa

SEQ ID NO: 3090442 - RNA, 19 nt, Artificial Sequence
  Description of Artificial Sequence: Synthetic oligonucleotide
aucagagcagugaaucuua

SEQ ID NO: 3090443 - RNA, 19 nt, Artificial Sequence
  Description of Artificial Sequence: Synthetic oligonucleotide
guuuugccacuuugaagaa

SEQ ID NO: 3090444 - RNA, 19 nt, Artificial Sequence
  Description of Artificial Sequence: Synthetic oligonucleotide
agauccugccagcgugaug

SEQ ID NO: 3090445 - RNA, 19 nt, Artificial Sequence
  Description of Artificial Sequence: Synthetic oligonucleotide
gucugcuacaguugguacu

SEQ ID NO: 3090446 - RNA, 19 nt, Artificial Sequence
  Description of Artificial Sequence: Synthetic oligonucleotide
gaacggggugagauccugc

SEQ ID NO: 3090447 - RNA, 19 nt, Artificial Sequence
  Description of Artificial Sequence: Synthetic oligonucleotide
gcgugaugacacauauucg

SEQ ID NO: 3090448 - RNA, 19 nt, Artificial Sequence
  Description of Artificial Sequence: Synthetic oligonucleotide
cagagcagugaaucuuaca

SEQ ID NO: 3090449 - RNA, 19 nt, Artificial Sequence
  Description of Artificial Sequence: Synthetic oligonucleotide
gauccacaagggagggcgc

SEQ ID NO: 3090450 - RNA, 19 nt, Artificial Sequence
  Description of Artificial Sequence: Synthetic oligonucleotide
auucgguuggaguguugua

SEQ ID NO: 3090451 - RNA, 19 nt, Artificial Sequence
  Description of Artificial Sequence: Synthetic oligonucleotide
aagaacggggugagauccu

SEQ ID NO: 3090452 - RNA, 19 nt, Artificial Sequence
  Description of Artificial Sequence: Synthetic oligonucleotide
auccugccagcgugaugac

SEQ ID NO: 3090453 - RNA, 19 nt, Artificial Sequence
  Description of Artificial Sequence: Synthetic oligonucleotide
agugguccucacuggguuu

SEQ ID NO: 3090454 - RNA, 19 nt, Artificial Sequence
  Description of Artificial Sequence: Synthetic oligonucleotide
acggggugagauccugcca

SEQ ID NO: 3090455 - RNA, 19 nt, Artificial Sequence
  Description of Artificial Sequence: Synthetic oligonucleotide
cacaagggagggcgccgcg

SEQ ID NO: 3090456 - RNA, 19 nt, Artificial Sequence
  Description of Artificial Sequence: Synthetic oligonucleotide
guauacagugguccucacu

SEQ ID NO: 3090457 - RNA, 19 nt, Artificial Sequence
  Description of Artificial Sequence: Synthetic oligonucleotide
acagugguccucacugggu

SEQ ID NO: 3090458 - RNA, 19 nt, Artificial Sequence
  Description of Artificial Sequence: Synthetic oligonucleotide
ucgauccacaagggagggc

SEQ ID NO: 3090459 - RNA, 19 nt, Artificial Sequence
  Description of Artificial Sequence: Synthetic oligonucleotide
gcuacaguugguacugauc

SEQ ID NO: 3090460 - RNA, 19 nt, Artificial Sequence
  Description of Artificial Sequence: Synthetic oligonucleotide
cacagaggugcgaguucug

SEQ ID NO: 3090461 - RNA, 19 nt, Artificial Sequence
  Description of Artificial Sequence: Synthetic oligonucleotide
aucuuacacagaggugcga

SEQ ID NO: 3090462 - RNA, 19 nt, Artificial Sequence
  Description of Artificial Sequence: Synthetic oligonucleotide
ggcgccgcgggcucgguag

SEQ ID NO: 3090463 - RNA, 19 nt, Artificial Sequence
  Description of Artificial Sequence: Synthetic oligonucleotide
cucgguagccacggcuacc

SEQ ID NO: 3090464 - RNA, 19 nt, Artificial Sequence
  Description of Artificial Sequence: Synthetic oligonucleotide
ggugcgaguucuguuaaaa

SEQ ID NO: 3090465 - RNA, 19 nt, Artificial Sequence
  Description of Artificial Sequence: Synthetic oligonucleotide
gggugagauccugccagcg

SEQ ID NO: 3090466 - RNA, 19 nt, Artificial Sequence
  Description of Artificial Sequence: Synthetic oligonucleotide
cgcuuuauaccagcgagug

SEQ ID NO: 3090467 - RNA, 19 nt, Artificial Sequence
  Description of Artificial Sequence: Synthetic oligonucleotide
cuuacacagaggugcgagu

SEQ ID NO: 3090468 - RNA, 19 nt, Artificial Sequence
  Description of Artificial Sequence: Synthetic oligonucleotide
uccugccagcgugaugaca

SEQ ID NO: 3090469 - RNA, 19 nt, Artificial Sequence
  Description of Artificial Sequence: Synthetic oligonucleotide
cggggugagauccugccag

SEQ ID NO: 3090470 - RNA, 19 nt, Artificial Sequence
  Description of Artificial Sequence: Synthetic oligonucleotide
gguacugaucugauaggaa

SEQ ID NO: 3090471 - RNA, 19 nt, Artificial Sequence
  Description of Artificial Sequence: Synthetic oligonucleotide
cccgcuuaaauuucccaga

SEQ ID NO: 3090472 - RNA, 19 nt, Artificial Sequence
  Description of Artificial Sequence: Synthetic oligonucleotide
auauucgguuggaguguug

SEQ ID NO: 3090473 - RNA, 19 nt, Artificial Sequence
  Description of Artificial Sequence: Synthetic oligonucleotide
ugccagcgugaugacacau

SEQ ID NO: 3090474 - RNA, 19 nt, Artificial Sequence
  Description of Artificial Sequence: Synthetic oligonucleotide
gguagccacggcuaccucu

SEQ ID NO: 3090475 - RNA, 19 nt, Artificial Sequence
  Description of Artificial Sequence: Synthetic oligonucleotide
gguuuuccuuugacauccg

SEQ ID NO: 3090476 - RNA, 19 nt, Artificial Sequence
  Description of Artificial Sequence: Synthetic oligonucleotide
ggggugagauccugccagc

SEQ ID NO: 3090477 - RNA, 19 nt, Artificial Sequence
  Description of Artificial Sequence: Synthetic oligonucleotide
ccagauacuuuguucugaa

SEQ ID NO: 3090478 - RNA, 19 nt, Artificial Sequence
  Description of Artificial Sequence: Synthetic oligonucleotide
cagcgagugaaguaucgau

SEQ ID NO: 3090479 - RNA, 19 nt, Artificial Sequence
  Description of Artificial Sequence: Synthetic oligonucleotide
aggugcgaguucuguuaaa

SEQ ID NO: 3090480 - RNA, 19 nt, Artificial Sequence
  Description of Artificial Sequence: Synthetic oligonucleotide
gaagucugcuacaguuggu

SEQ ID NO: 3090481 - RNA, 19 nt, Artificial Sequence
  Description of Artificial Sequence: Synthetic oligonucleotide
caucagagcagugaaucuu

SEQ ID NO: 3090482 - RNA, 19 nt, Artificial Sequence
  Description of Artificial Sequence: Synthetic oligonucleotide
ggugagauccugccagcgu

SEQ ID NO: 3090483 - RNA, 19 nt, Artificial Sequence
  Description of Artificial Sequence: Synthetic oligonucleotide
gagggcgccgcgggcucgg

SEQ ID NO: 3090484 - RNA, 19 nt, Artificial Sequence
  Description of Artificial Sequence: Synthetic oligonucleotide
cuuugacauccgcuuuaua

SEQ ID NO: 3090485 - RNA, 19 nt, Artificial Sequence
  Description of Artificial Sequence: Synthetic oligonucleotide
gguccucacuggguuuucc

SEQ ID NO: 3090486 - RNA, 19 nt, Artificial Sequence
  Description of Artificial Sequence: Synthetic oligonucleotide
ccacuuugaagaacggggu

SEQ ID NO: 3090487 - RNA, 19 nt, Artificial Sequence
  Description of Artificial Sequence: Synthetic oligonucleotide
gcagugaaucuuacacaga

SEQ ID NO: 3090488 - RNA, 19 nt, Artificial Sequence
  Description of Artificial Sequence: Synthetic oligonucleotide
gcucgguagccacggcuac

SEQ ID NO: 3090489 - RNA, 19 nt, Artificial Sequence
  Description of Artificial Sequence: Synthetic oligonucleotide
cugccagcgugaugacaca

SEQ ID NO: 3090490 - RNA, 19 nt, Artificial Sequence
  Description of Artificial Sequence: Synthetic oligonucleotide
ugguccucacuggguuuuc

SEQ ID NO: 3090491 - RNA, 19 nt, Artificial Sequence
  Description of Artificial Sequence: Synthetic oligonucleotide
cccagauacuuuguucuga

SEQ ID NO: 3090492 - RNA, 19 nt, Artificial Sequence
  Description of Artificial Sequence: Synthetic oligonucleotide
gguuggaguguuguaguau

SEQ ID NO: 3090493 - RNA, 19 nt, Artificial Sequence
  Description of Artificial Sequence: Synthetic oligonucleotide
caguugguacugaucugau

SEQ ID NO: 3090494 - RNA, 19 nt, Artificial Sequence
  Description of Artificial Sequence: Synthetic oligonucleotide
cagugguccucacuggguu

SEQ ID NO: 3090495 - RNA, 19 nt, Artificial Sequence
  Description of Artificial Sequence: Synthetic oligonucleotide
cauauucgguuggaguguu

SEQ ID NO: 3090496 - RNA, 19 nt, Artificial Sequence
  Description of Artificial Sequence: Synthetic oligonucleotide
cagaggugcgaguucuguu

SEQ ID NO: 3090497 - RNA, 19 nt, Artificial Sequence
  Description of Artificial Sequence: Synthetic oligonucleotide
ccagcgugaugacacauau

SEQ ID NO: 3090498 - RNA, 19 nt, Artificial Sequence
  Description of Artificial Sequence: Synthetic oligonucleotide
ccacaagggagggcgccgc

SEQ ID NO: 3090499 - RNA, 19 nt, Artificial Sequence
  Description of Artificial Sequence: Synthetic oligonucleotide
ggcucgguagccacggcua

SEQ ID NO: 3090500 - RNA, 19 nt, Artificial Sequence
  Description of Artificial Sequence: Synthetic oligonucleotide
gagauccugccagcgugau

SEQ ID NO: 3090501 - RNA, 19 nt, Artificial Sequence
  Description of Artificial Sequence: Synthetic oligonucleotide
gggcucgguagccacggcu

SEQ ID NO: 3090502 - RNA, 19 nt, Artificial Sequence
  Description of Artificial Sequence: Synthetic oligonucleotide
ccagcgagugaaguaucga

SEQ ID NO: 3090503 - RNA, 19 nt, Artificial Sequence
  Description of Artificial Sequence: Synthetic oligonucleotide
cgagugaaguaucgaucca

SEQ ID NO: 3090504 - RNA, 19 nt, Artificial Sequence
  Description of Artificial Sequence: Synthetic oligonucleotide
gugguccucacuggguuuu

SEQ ID NO: 3090505 - RNA, 19 nt, Artificial Sequence
  Description of Artificial Sequence: Synthetic oligonucleotide
ggagggcgccgcgggcucg

SEQ ID NO: 3090506 - RNA, 19 nt, Artificial Sequence
  Description of Artificial Sequence: Synthetic oligonucleotide
ccgcuuaaauuucccagau

SEQ ID NO: 3090507 - RNA, 19 nt, Artificial Sequence
  Description of Artificial Sequence: Synthetic oligonucleotide
ccgcuuuauaccagcgagu

SEQ ID NO: 3090508 - RNA, 19 nt, Artificial Sequence
  Description of Artificial Sequence: Synthetic oligonucleotide
ccucacuggguuuuccuuu

SEQ ID NO: 3090509 - RNA, 19 nt, Artificial Sequence
  Description of Artificial Sequence: Synthetic oligonucleotide
gccagcgugaugacacaua

SEQ ID NO: 3090510 - RNA, 19 nt, Artificial Sequence
  Description of Artificial Sequence: Synthetic oligonucleotide
cagcgugaugacacauauu

SEQ ID NO: 3090511 - RNA, 19 nt, Artificial Sequence
  Description of Artificial Sequence: Synthetic oligonucleotide
gggagggcgccgcgggcuc

SEQ ID NO: 3090512 - RNA, 19 nt, Artificial Sequence
  Description of Artificial Sequence: Synthetic oligonucleotide
cgcgggcucgguagccacg

SEQ ID NO: 3090513 - RNA, 19 nt, Artificial Sequence
  Description of Artificial Sequence: Synthetic oligonucleotide
ccgcgggcucgguagccac

SEQ ID NO: 3090514 - RNA, 19 nt, Artificial Sequence
  Description of Artificial Sequence: Synthetic oligonucleotide
cgcuuaaauuucccagaua

SEQ ID NO: 3090515 - RNA, 19 nt, Artificial Sequence
  Description of Artificial Sequence: Synthetic oligonucleotide
gcgccgcgggcucgguagc

SEQ ID NO: 3090516 - RNA, 19 nt, Artificial Sequence
  Description of Artificial Sequence: Synthetic oligonucleotide
cgguuggaguguuguagua

SEQ ID NO: 3090517 - RNA, 19 nt, Artificial Sequence
  Description of Artificial Sequence: Synthetic oligonucleotide
gccgcgggcucgguagcca

SEQ ID NO: 3090518 - RNA, 19 nt, Artificial Sequence
  Description of Artificial Sequence: Synthetic oligonucleotide
agggcgccgcgggcucggu

SEQ ID NO: 3090519 - RNA, 19 nt, Artificial Sequence
  Description of Artificial Sequence: Synthetic oligonucleotide
cgggcucgguagccacggc

SEQ ID NO: 3090520 - RNA, 19 nt, Artificial Sequence
  Description of Artificial Sequence: Synthetic oligonucleotide
cgguagccacggcuaccuc

SEQ ID NO: 3090521 - RNA, 19 nt, Artificial Sequence
  Description of Artificial Sequence: Synthetic oligonucleotide
cgccgcgggcucgguagcc

SEQ ID NO: 3090522 - RNA, 19 nt, Artificial Sequence
  Description of Artificial Sequence: Synthetic oligonucleotide
gggcgccgcgggcucggua

SEQ ID NO: 3090523 - RNA, 19 nt, Artificial Sequence
  Description of Artificial Sequence: Synthetic oligonucleotide
agaauagcuguauagaucc

SEQ ID NO: 3090524 - RNA, 19 nt, Artificial Sequence
  Description of Artificial Sequence: Synthetic oligonucleotide
aagaguagcugguuuaacc

SEQ ID NO: 3090525 - RNA, 19 nt, Artificial Sequence
  Description of Artificial Sequence: Synthetic oligonucleotide
uuuaaauuauuuauuuucu

SEQ ID NO: 3090526 - RNA, 19 nt, Artificial Sequence
  Description of Artificial Sequence: Synthetic oligonucleotide
aaugcgucgauggagaccg

SEQ ID NO: 3090527 - RNA, 19 nt, Artificial Sequence
  Description of Artificial Sequence: Synthetic oligonucleotide
agaguagcugguuuaaccc

SEQ ID NO: 3090528 - RNA, 19 nt, Artificial Sequence
  Description of Artificial Sequence: Synthetic oligonucleotide
ucuagcauagaauagcugu

SEQ ID NO: 3090529 - RNA, 19 nt, Artificial Sequence
  Description of Artificial Sequence: Synthetic oligonucleotide
uuaaaauuuaaauuauuua

SEQ ID NO: 3090530 - RNA, 19 nt, Artificial Sequence
  Description of Artificial Sequence: Synthetic oligonucleotide
aguaacaugaaaaugucuc

SEQ ID NO: 3090531 - RNA, 19 nt, Artificial Sequence
  Description of Artificial Sequence: Synthetic oligonucleotide
uuauuuauuuucuucuagc

SEQ ID NO: 3090532 - RNA, 19 nt, Artificial Sequence
  Description of Artificial Sequence: Synthetic oligonucleotide
uuauuuucuucuagcauag

SEQ ID NO: 3090533 - RNA, 19 nt, Artificial Sequence
  Description of Artificial Sequence: Synthetic oligonucleotide
uaagucaugauaaucuccu

SEQ ID NO: 3090534 - RNA, 19 nt, Artificial Sequence
  Description of Artificial Sequence: Synthetic oligonucleotide
augauaaucuccuucuguc

SEQ ID NO: 3090535 - RNA, 19 nt, Artificial Sequence
  Description of Artificial Sequence: Synthetic oligonucleotide
uauuuauuuucuucuagca

SEQ ID NO: 3090536 - RNA, 19 nt, Artificial Sequence
  Description of Artificial Sequence: Synthetic oligonucleotide
auuuccagaaaaugcgucg

SEQ ID NO: 3090537 - RNA, 19 nt, Artificial Sequence
  Description of Artificial Sequence: Synthetic oligonucleotide
aagguuaagaacacccgcc

SEQ ID NO: 3090538 - RNA, 19 nt, Artificial Sequence
  Description of Artificial Sequence: Synthetic oligonucleotide
aauucuuugcagaauuggg

SEQ ID NO: 3090539 - RNA, 19 nt, Artificial Sequence
  Description of Artificial Sequence: Synthetic oligonucleotide
uuaagucaugauaaucucc

SEQ ID NO: 3090540 - RNA, 19 nt, Artificial Sequence
  Description of Artificial Sequence: Synthetic oligonucleotide
aagaacacccgccagagau

SEQ ID NO: 3090541 - RNA, 19 nt, Artificial Sequence
  Description of Artificial Sequence: Synthetic oligonucleotide
aaugucuccaguucaggug

SEQ ID NO: 3090542 - RNA, 19 nt, Artificial Sequence
  Description of Artificial Sequence: Synthetic oligonucleotide
ugaaaaugucuccaguuca

SEQ ID NO: 3090543 - RNA, 19 nt, Artificial Sequence
  Description of Artificial Sequence: Synthetic oligonucleotide
uaauucuuugcagaauugg

SEQ ID NO: 3090544 - RNA, 19 nt, Artificial Sequence
  Description of Artificial Sequence: Synthetic oligonucleotide
agucaugauaaucuccuuc

SEQ ID NO: 3090545 - RNA, 19 nt, Artificial Sequence
  Description of Artificial Sequence: Synthetic oligonucleotide
uuucuucuagcauagaaua

SEQ ID NO: 3090546 - RNA, 19 nt, Artificial Sequence
  Description of Artificial Sequence: Synthetic oligonucleotide
uuggauuaauucuuugcag

SEQ ID NO: 3090547 - RNA, 19 nt, Artificial Sequence
  Description of Artificial Sequence: Synthetic oligonucleotide
uggauuaauucuuugcaga

SEQ ID NO: 3090548 - RNA, 19 nt, Artificial Sequence
  Description of Artificial Sequence: Synthetic oligonucleotide
ucccagaagaacuuguccc

SEQ ID NO: 3090549 - RNA, 19 nt, Artificial Sequence
  Description of Artificial Sequence: Synthetic oligonucleotide
aaaugucuccaguucaggu

SEQ ID NO: 3090550 - RNA, 19 nt, Artificial Sequence
  Description of Artificial Sequence: Synthetic oligonucleotide
aaaaugcgucgauggagac

SEQ ID NO: 3090551 - RNA, 19 nt, Artificial Sequence
  Description of Artificial Sequence: Synthetic oligonucleotide
agugccaagguuaagaaca

SEQ ID NO: 3090552 - RNA, 19 nt, Artificial Sequence
  Description of Artificial Sequence: Synthetic oligonucleotide
guaacaugaaaaugucucc

SEQ ID NO: 3090553 - RNA, 19 nt, Artificial Sequence
  Description of Artificial Sequence: Synthetic oligonucleotide
auagaauagcuguauagau

SEQ ID NO: 3090554 - RNA, 19 nt, Artificial Sequence
  Description of Artificial Sequence: Synthetic oligonucleotide
gaucuuuaagucaugauaa

SEQ ID NO: 3090555 - RNA, 19 nt, Artificial Sequence
  Description of Artificial Sequence: Synthetic oligonucleotide
uuuaagucaugauaaucuc

SEQ ID NO: 3090556 - RNA, 19 nt, Artificial Sequence
  Description of Artificial Sequence: Synthetic oligonucleotide
auugaggcuucccagaaga

SEQ ID NO: 3090557 - RNA, 19 nt, Artificial Sequence
  Description of Artificial Sequence: Synthetic oligonucleotide
aaaugcgucgauggagacc

SEQ ID NO: 3090558 - RNA, 19 nt, Artificial Sequence
  Description of Artificial Sequence: Synthetic oligonucleotide
uagaauagcuguauagauc

SEQ ID NO: 3090559 - RNA, 19 nt, Artificial Sequence
  Description of Artificial Sequence: Synthetic oligonucleotide
uuuaaccccauuuccagaa

SEQ ID NO: 3090560 - RNA, 19 nt, Artificial Sequence
  Description of Artificial Sequence: Synthetic oligonucleotide
uuaagaacacccgccagag

SEQ ID NO: 3090561 - RNA, 19 nt, Artificial Sequence
  Description of Artificial Sequence: Synthetic oligonucleotide
aaaaugucuccaguucagg

SEQ ID NO: 3090562 - RNA, 19 nt, Artificial Sequence
  Description of Artificial Sequence: Synthetic oligonucleotide
auuuucuucuagcauagaa

SEQ ID NO: 3090563 - RNA, 19 nt, Artificial Sequence
  Description of Artificial Sequence: Synthetic oligonucleotide
ugauaaucuccuucugucc

SEQ ID NO: 3090564 - RNA, 19 nt, Artificial Sequence
  Description of Artificial Sequence: Synthetic oligonucleotide
auucuuugcagaauugggg

SEQ ID NO: 3090565 - RNA, 19 nt, Artificial Sequence
  Description of Artificial Sequence: Synthetic oligonucleotide
gauaaucuccuucugucca

SEQ ID NO: 3090566 - RNA, 19 nt, Artificial Sequence
  Description of Artificial Sequence: Synthetic oligonucleotide
agaaaaugcgucgauggag

SEQ ID NO: 3090567 - RNA, 19 nt, Artificial Sequence
  Description of Artificial Sequence: Synthetic oligonucleotide
cuuuaagucaugauaaucu

SEQ ID NO: 3090568 - RNA, 19 nt, Artificial Sequence
  Description of Artificial Sequence: Synthetic oligonucleotide
ucuccuucuguccaguaac

SEQ ID NO: 3090569 - RNA, 19 nt, Artificial Sequence
  Description of Artificial Sequence: Synthetic oligonucleotide
uuaaauuauuuauuuucuu

SEQ ID NO: 3090570 - RNA, 19 nt, Artificial Sequence
  Description of Artificial Sequence: Synthetic oligonucleotide
ucaggugaacggcacuugg

SEQ ID NO: 3090571 - RNA, 19 nt, Artificial Sequence
  Description of Artificial Sequence: Synthetic oligonucleotide
ugguuuaaccccauuucca

SEQ ID NO: 3090572 - RNA, 19 nt, Artificial Sequence
  Description of Artificial Sequence: Synthetic oligonucleotide
gauggagaccgccagugcc

SEQ ID NO: 3090573 - RNA, 19 nt, Artificial Sequence
  Description of Artificial Sequence: Synthetic oligonucleotide
caagguuaagaacacccgc

SEQ ID NO: 3090574 - RNA, 19 nt, Artificial Sequence
  Description of Artificial Sequence: Synthetic oligonucleotide
cuuggauuaauucuuugca

SEQ ID NO: 3090575 - RNA, 19 nt, Artificial Sequence
  Description of Artificial Sequence: Synthetic oligonucleotide
ugaauugaggcuucccaga

SEQ ID NO: 3090576 - RNA, 19 nt, Artificial Sequence
  Description of Artificial Sequence: Synthetic oligonucleotide
uucccagaagaacuugucc

SEQ ID NO: 3090577 - RNA, 19 nt, Artificial Sequence
  Description of Artificial Sequence: Synthetic oligonucleotide
aauugaggcuucccagaag

SEQ ID NO: 3090578 - RNA, 19 nt, Artificial Sequence
  Description of Artificial Sequence: Synthetic oligonucleotide
uaacaugaaaaugucucca

SEQ ID NO: 3090579 - RNA, 19 nt, Artificial Sequence
  Description of Artificial Sequence: Synthetic oligonucleotide
aagaacuuguccccaggcu

SEQ ID NO: 3090580 - RNA, 19 nt, Artificial Sequence
  Description of Artificial Sequence: Synthetic oligonucleotide
cugguuuaaccccauuucc

SEQ ID NO: 3090581 - RNA, 19 nt, Artificial Sequence
  Description of Artificial Sequence: Synthetic oligonucleotide
uguccaguaacaugaaaau

SEQ ID NO: 3090582 - RNA, 19 nt, Artificial Sequence
  Description of Artificial Sequence: Synthetic oligonucleotide
ucuuuaagucaugauaauc

SEQ ID NO: 3090583 - RNA, 19 nt, Artificial Sequence
  Description of Artificial Sequence: Synthetic oligonucleotide
gugaauugaggcuucccag

SEQ ID NO: 3090584 - RNA, 19 nt, Artificial Sequence
  Description of Artificial Sequence: Synthetic oligonucleotide
gaagaacuuguccccaggc

SEQ ID NO: 3090585 - RNA, 19 nt, Artificial Sequence
  Description of Artificial Sequence: Synthetic oligonucleotide
gcauagaauagcuguauag

SEQ ID NO: 3090586 - RNA, 19 nt, Artificial Sequence
  Description of Artificial Sequence: Synthetic oligonucleotide
cccauuuccagaaaaugcg

SEQ ID NO: 3090587 - RNA, 19 nt, Artificial Sequence
  Description of Artificial Sequence: Synthetic oligonucleotide
ccagaaaaugcgucgaugg

SEQ ID NO: 3090588 - RNA, 19 nt, Artificial Sequence
  Description of Artificial Sequence: Synthetic oligonucleotide
uguauagauccugggaucu

SEQ ID NO: 3090589 - RNA, 19 nt, Artificial Sequence
  Description of Artificial Sequence: Synthetic oligonucleotide
agauccugggaucuuuaag

SEQ ID NO: 3090590 - RNA, 19 nt, Artificial Sequence
  Description of Artificial Sequence: Synthetic oligonucleotide
auagcuguauagauccugg

SEQ ID NO: 3090591 - RNA, 19 nt, Artificial Sequence
  Description of Artificial Sequence: Synthetic oligonucleotide
auccugggaucuuuaaguc

SEQ ID NO: 3090592 - RNA, 19 nt, Artificial Sequence
  Description of Artificial Sequence: Synthetic oligonucleotide
gaguagcugguuuaacccc

SEQ ID NO: 3090593 - RNA, 19 nt, Artificial Sequence
  Description of Artificial Sequence: Synthetic oligonucleotide
ucugccaagaguagcuggu

SEQ ID NO: 3090594 - RNA, 19 nt, Artificial Sequence
  Description of Artificial Sequence: Synthetic oligonucleotide
gauccugggaucuuuaagu

SEQ ID NO: 3090595 - RNA, 19 nt, Artificial Sequence
  Description of Artificial Sequence: Synthetic oligonucleotide
auaaucuccuucuguccag

SEQ ID NO: 3090596 - RNA, 19 nt, Artificial Sequence
  Description of Artificial Sequence: Synthetic oligonucleotide
augucuccaguucagguga

SEQ ID NO: 3090597 - RNA, 19 nt, Artificial Sequence
  Description of Artificial Sequence: Synthetic oligonucleotide
gaaaaugcgucgauggaga

SEQ ID NO: 3090598 - RNA, 19 nt, Artificial Sequence
  Description of Artificial Sequence: Synthetic oligonucleotide
uucuagcauagaauagcug

SEQ ID NO: 3090599 - RNA, 19 nt, Artificial Sequence
  Description of Artificial Sequence: Synthetic oligonucleotide
gguuuaaccccauuuccag

SEQ ID NO: 3090600 - RNA, 19 nt, Artificial Sequence
  Description of Artificial Sequence: Synthetic oligonucleotide
acaugaaaaugucuccagu

SEQ ID NO: 3090601 - RNA, 19 nt, Artificial Sequence
  Description of Artificial Sequence: Synthetic oligonucleotide
guuaagaacacccgccaga

SEQ ID NO: 3090602 - RNA, 19 nt, Artificial Sequence
  Description of Artificial Sequence: Synthetic oligonucleotide
agcuguauagauccuggga

SEQ ID NO: 3090603 - RNA, 19 nt, Artificial Sequence
  Description of Artificial Sequence: Synthetic oligonucleotide
aggugaacggcacuuggug

SEQ ID NO: 3090604 - RNA, 19 nt, Artificial Sequence
  Description of Artificial Sequence: Synthetic oligonucleotide
cauuuccagaaaaugcguc

SEQ ID NO: 3090605 - RNA, 19 nt, Artificial Sequence
  Description of Artificial Sequence: Synthetic oligonucleotide
cauagaauagcuguauaga

SEQ ID NO: 3090606 - RNA, 19 nt, Artificial Sequence
  Description of Artificial Sequence: Synthetic oligonucleotide
uccaguucaggugaacggc

SEQ ID NO: 3090607 - RNA, 19 nt, Artificial Sequence
  Description of Artificial Sequence: Synthetic oligonucleotide
cuguccaguaacaugaaaa

SEQ ID NO: 3090608 - RNA, 19 nt, Artificial Sequence
  Description of Artificial Sequence: Synthetic oligonucleotide
gagaccgccagugccaagg

SEQ ID NO: 3090609 - RNA, 19 nt, Artificial Sequence
  Description of Artificial Sequence: Synthetic oligonucleotide
aacggcacuuggugaauug

SEQ ID NO: 3090610 - RNA, 19 nt, Artificial Sequence
  Description of Artificial Sequence: Synthetic oligonucleotide
agaacuuguccccaggcuu

SEQ ID NO: 3090611 - RNA, 19 nt, Artificial Sequence
  Description of Artificial Sequence: Synthetic oligonucleotide
uuuccagaaaaugcgucga

SEQ ID NO: 3090612 - RNA, 19 nt, Artificial Sequence
  Description of Artificial Sequence: Synthetic oligonucleotide
uagcuguauagauccuggg

SEQ ID NO: 3090613 - RNA, 19 nt, Artificial Sequence
  Description of Artificial Sequence: Synthetic oligonucleotide
agguuaagaacacccgcca

SEQ ID NO: 3090614 - RNA, 19 nt, Artificial Sequence
  Description of Artificial Sequence: Synthetic oligonucleotide
ggaucuuuaagucaugaua

SEQ ID NO: 3090615 - RNA, 19 nt, Artificial Sequence
  Description of Artificial Sequence: Synthetic oligonucleotide
uaaccccauuuccagaaaa

SEQ ID NO: 3090616 - RNA, 19 nt, Artificial Sequence
  Description of Artificial Sequence: Synthetic oligonucleotide
uccagaaaaugcgucgaug

SEQ ID NO: 3090617 - RNA, 19 nt, Artificial Sequence
  Description of Artificial Sequence: Synthetic oligonucleotide
gaacacccgccagagaucc

SEQ ID NO: 3090618 - RNA, 19 nt, Artificial Sequence
  Description of Artificial Sequence: Synthetic oligonucleotide
uccugggaucuuuaaguca

SEQ ID NO: 3090619 - RNA, 19 nt, Artificial Sequence
  Description of Artificial Sequence: Synthetic oligonucleotide
cuguauagauccugggauc

SEQ ID NO: 3090620 - RNA, 19 nt, Artificial Sequence
  Description of Artificial Sequence: Synthetic oligonucleotide
cucugccaagaguagcugg

SEQ ID NO: 3090621 - RNA, 19 nt, Artificial Sequence
  Description of Artificial Sequence: Synthetic oligonucleotide
gucaugauaaucuccuucu

SEQ ID NO: 3090622 - RNA, 19 nt, Artificial Sequence
  Description of Artificial Sequence: Synthetic oligonucleotide
ucgauggagaccgccagug

SEQ ID NO: 3090623 - RNA, 19 nt, Artificial Sequence
  Description of Artificial Sequence: Synthetic oligonucleotide
gaacuuguccccaggcuug

SEQ ID NO: 3090624 - RNA, 19 nt, Artificial Sequence
  Description of Artificial Sequence: Synthetic oligonucleotide
gaauugaggcuucccagaa

SEQ ID NO: 3090625 - RNA, 19 nt, Artificial Sequence
  Description of Artificial Sequence: Synthetic oligonucleotide
ucuguccaguaacaugaaa

SEQ ID NO: 3090626 - RNA, 19 nt, Artificial Sequence
  Description of Artificial Sequence: Synthetic oligonucleotide
aucuuuaagucaugauaau

SEQ ID NO: 3090627 - RNA, 19 nt, Artificial Sequence
  Description of Artificial Sequence: Synthetic oligonucleotide
ugggaucuuuaagucauga

SEQ ID NO: 3090628 - RNA, 19 nt, Artificial Sequence
  Description of Artificial Sequence: Synthetic oligonucleotide
ccccauuuccagaaaaugc

SEQ ID NO: 3090629 - RNA, 19 nt, Artificial Sequence
  Description of Artificial Sequence: Synthetic oligonucleotide
gaacucugccaagaguagc

SEQ ID NO: 3090630 - RNA, 19 nt, Artificial Sequence
  Description of Artificial Sequence: Synthetic oligonucleotide
ccaagguuaagaacacccg

SEQ ID NO: 3090631 - RNA, 19 nt, Artificial Sequence
  Description of Artificial Sequence: Synthetic oligonucleotide
gccaagguuaagaacaccc

SEQ ID NO: 3090632 - RNA, 19 nt, Artificial Sequence
  Description of Artificial Sequence: Synthetic oligonucleotide
agcugguuuaaccccauuu

SEQ ID NO: 3090633 - RNA, 19 nt, Artificial Sequence
  Description of Artificial Sequence: Synthetic oligonucleotide
ggugaauugaggcuuccca

SEQ ID NO: 3090634 - RNA, 19 nt, Artificial Sequence
  Description of Artificial Sequence: Synthetic oligonucleotide
aacuuguccccaggcuugg

SEQ ID NO: 3090635 - RNA, 19 nt, Artificial Sequence
  Description of Artificial Sequence: Synthetic oligonucleotide
acccgccagagauccauac

SEQ ID NO: 3090636 - RNA, 19 nt, Artificial Sequence
  Description of Artificial Sequence: Synthetic oligonucleotide
cuucccagaagaacuuguc

SEQ ID NO: 3090637 - RNA, 19 nt, Artificial Sequence
  Description of Artificial Sequence: Synthetic oligonucleotide
cagaagaacuuguccccag

SEQ ID NO: 3090638 - RNA, 19 nt, Artificial Sequence
  Description of Artificial Sequence: Synthetic oligonucleotide
accccauuuccagaaaaug

SEQ ID NO: 3090639 - RNA, 19 nt, Artificial Sequence
  Description of Artificial Sequence: Synthetic oligonucleotide
guuuaaccccauuuccaga

SEQ ID NO: 3090640 - RNA, 19 nt, Artificial Sequence
  Description of Artificial Sequence: Synthetic oligonucleotide
uagcauagaauagcuguau

SEQ ID NO: 3090641 - RNA, 19 nt, Artificial Sequence
  Description of Artificial Sequence: Synthetic oligonucleotide
ggauuaauucuuugcagaa

SEQ ID NO: 3090642 - RNA, 19 nt, Artificial Sequence
  Description of Artificial Sequence: Synthetic oligonucleotide
uauagauccugggaucuuu

SEQ ID NO: 3090643 - RNA, 19 nt, Artificial Sequence
  Description of Artificial Sequence: Synthetic oligonucleotide
cuuggugaauugaggcuuc

SEQ ID NO: 3090644 - RNA, 19 nt, Artificial Sequence
  Description of Artificial Sequence: Synthetic oligonucleotide
uuaaccccauuuccagaaa

SEQ ID NO: 3090645 - RNA, 19 nt, Artificial Sequence
  Description of Artificial Sequence: Synthetic oligonucleotide
gguuaagaacacccgccag

SEQ ID NO: 3090646 - RNA, 19 nt, Artificial Sequence
  Description of Artificial Sequence: Synthetic oligonucleotide
agcauagaauagcuguaua

SEQ ID NO: 3090647 - RNA, 19 nt, Artificial Sequence
  Description of Artificial Sequence: Synthetic oligonucleotide
gcugguuuaaccccauuuc

SEQ ID NO: 3090648 - RNA, 19 nt, Artificial Sequence
  Description of Artificial Sequence: Synthetic oligonucleotide
aguucaggugaacggcacu

SEQ ID NO: 3090649 - RNA, 19 nt, Artificial Sequence
  Description of Artificial Sequence: Synthetic oligonucleotide
aguagcugguuuaacccca

SEQ ID NO: 3090650 - RNA, 19 nt, Artificial Sequence
  Description of Artificial Sequence: Synthetic oligonucleotide
gaggcuucccagaagaacu

SEQ ID NO: 3090651 - RNA, 19 nt, Artificial Sequence
  Description of Artificial Sequence: Synthetic oligonucleotide
uuccagaaaaugcgucgau

SEQ ID NO: 3090652 - RNA, 19 nt, Artificial Sequence
  Description of Artificial Sequence: Synthetic oligonucleotide
uguccccaggcuuggauua

SEQ ID NO: 3090653 - RNA, 19 nt, Artificial Sequence
  Description of Artificial Sequence: Synthetic oligonucleotide
cuagcauagaauagcugua

SEQ ID NO: 3090654 - RNA, 19 nt, Artificial Sequence
  Description of Artificial Sequence: Synthetic oligonucleotide
cagugccaagguuaagaac

SEQ ID NO: 3090655 - RNA, 19 nt, Artificial Sequence
  Description of Artificial Sequence: Synthetic oligonucleotide
cuucuagcauagaauagcu

SEQ ID NO: 3090656 - RNA, 19 nt, Artificial Sequence
  Description of Artificial Sequence: Synthetic oligonucleotide
caugauaaucuccuucugu

SEQ ID NO: 3090657 - RNA, 19 nt, Artificial Sequence
  Description of Artificial Sequence: Synthetic oligonucleotide
ggcacuuggugaauugagg

SEQ ID NO: 3090658 - RNA, 19 nt, Artificial Sequence
  Description of Artificial Sequence: Synthetic oligonucleotide
ccaguaacaugaaaauguc

SEQ ID NO: 3090659 - RNA, 19 nt, Artificial Sequence
  Description of Artificial Sequence: Synthetic oligonucleotide
uucaggugaacggcacuug

SEQ ID NO: 3090660 - RNA, 19 nt, Artificial Sequence
  Description of Artificial Sequence: Synthetic oligonucleotide
ugccaagaguagcugguuu

SEQ ID NO: 3090661 - RNA, 19 nt, Artificial Sequence
  Description of Artificial Sequence: Synthetic oligonucleotide
uagauccugggaucuuuaa

SEQ ID NO: 3090662 - RNA, 19 nt, Artificial Sequence
  Description of Artificial Sequence: Synthetic oligonucleotide
caugaaaaugucuccaguu

SEQ ID NO: 3090663 - RNA, 19 nt, Artificial Sequence
  Description of Artificial Sequence: Synthetic oligonucleotide
gugaacggcacuuggugaa

SEQ ID NO: 3090664 - RNA, 19 nt, Artificial Sequence
  Description of Artificial Sequence: Synthetic oligonucleotide
aaccccauuuccagaaaau

SEQ ID NO: 3090665 - RNA, 19 nt, Artificial Sequence
  Description of Artificial Sequence: Synthetic oligonucleotide
cccagaagaacuugucccc

SEQ ID NO: 3090666 - RNA, 19 nt, Artificial Sequence
  Description of Artificial Sequence: Synthetic oligonucleotide
agaacacccgccagagauc

SEQ ID NO: 3090667 - RNA, 19 nt, Artificial Sequence
  Description of Artificial Sequence: Synthetic oligonucleotide
caguucaggugaacggcac

SEQ ID NO: 3090668 - RNA, 19 nt, Artificial Sequence
  Description of Artificial Sequence: Synthetic oligonucleotide
uugaggcuucccagaagaa

SEQ ID NO: 3090669 - RNA, 19 nt, Artificial Sequence
  Description of Artificial Sequence: Synthetic oligonucleotide
aaucuccuucuguccagua

SEQ ID NO: 3090670 - RNA, 19 nt, Artificial Sequence
  Description of Artificial Sequence: Synthetic oligonucleotide
uggugaauugaggcuuccc

SEQ ID NO: 3090671 - RNA, 19 nt, Artificial Sequence
  Description of Artificial Sequence: Synthetic oligonucleotide
uauuuucuucuagcauaga

SEQ ID NO: 3090672 - RNA, 19 nt, Artificial Sequence
  Description of Artificial Sequence: Synthetic oligonucleotide
cagaaaaugcgucgaugga

SEQ ID NO: 3090673 - RNA, 19 nt, Artificial Sequence
  Description of Artificial Sequence: Synthetic oligonucleotide
ugcgucgauggagaccgcc

SEQ ID NO: 3090674 - RNA, 19 nt, Artificial Sequence
  Description of Artificial Sequence: Synthetic oligonucleotide
uuguccccaggcuuggauu

SEQ ID NO: 3090675 - RNA, 19 nt, Artificial Sequence
  Description of Artificial Sequence: Synthetic oligonucleotide
gcuguauagauccugggau

SEQ ID NO: 3090676 - RNA, 19 nt, Artificial Sequence
  Description of Artificial Sequence: Synthetic oligonucleotide
uuggugaauugaggcuucc

SEQ ID NO: 3090677 - RNA, 19 nt, Artificial Sequence
  Description of Artificial Sequence: Synthetic oligonucleotide
ggugaacggcacuugguga

SEQ ID NO: 3090678 - RNA, 19 nt, Artificial Sequence
  Description of Artificial Sequence: Synthetic oligonucleotide
gggaacucugccaagagua

SEQ ID NO: 3090679 - RNA, 19 nt, Artificial Sequence
  Description of Artificial Sequence: Synthetic oligonucleotide
caagaguagcugguuuaac

SEQ ID NO: 3090680 - RNA, 19 nt, Artificial Sequence
  Description of Artificial Sequence: Synthetic oligonucleotide
ggcuuggauuaauucuuug

SEQ ID NO: 3090681 - RNA, 19 nt, Artificial Sequence
  Description of Artificial Sequence: Synthetic oligonucleotide
ggaacucugccaagaguag

SEQ ID NO: 3090682 - RNA, 19 nt, Artificial Sequence
  Description of Artificial Sequence: Synthetic oligonucleotide
uccuucuguccaguaacau

SEQ ID NO: 3090683 - RNA, 19 nt, Artificial Sequence
  Description of Artificial Sequence: Synthetic oligonucleotide
accgccagugccaagguua

SEQ ID NO: 3090684 - RNA, 19 nt, Artificial Sequence
  Description of Artificial Sequence: Synthetic oligonucleotide
auggagaccgccagugcca

SEQ ID NO: 3090685 - RNA, 19 nt, Artificial Sequence
  Description of Artificial Sequence: Synthetic oligonucleotide
cugggaucuuuaagucaug

SEQ ID NO: 3090686 - RNA, 19 nt, Artificial Sequence
  Description of Artificial Sequence: Synthetic oligonucleotide
ugucuccaguucaggugaa

SEQ ID NO: 3090687 - RNA, 19 nt, Artificial Sequence
  Description of Artificial Sequence: Synthetic oligonucleotide
cuccuucuguccaguaaca

SEQ ID NO: 3090688 - RNA, 19 nt, Artificial Sequence
  Description of Artificial Sequence: Synthetic oligonucleotide
cacuuggugaauugaggcu

SEQ ID NO: 3090689 - RNA, 19 nt, Artificial Sequence
  Description of Artificial Sequence: Synthetic oligonucleotide
caggcuuggauuaauucuu

SEQ ID NO: 3090690 - RNA, 19 nt, Artificial Sequence
  Description of Artificial Sequence: Synthetic oligonucleotide
acggcacuuggugaauuga

SEQ ID NO: 3090691 - RNA, 19 nt, Artificial Sequence
  Description of Artificial Sequence: Synthetic oligonucleotide
ugaacggcacuuggugaau

SEQ ID NO: 3090692 - RNA, 19 nt, Artificial Sequence
  Description of Artificial Sequence: Synthetic oligonucleotide
gccagugccaagguuaaga

SEQ ID NO: 3090693 - RNA, 19 nt, Artificial Sequence
  Description of Artificial Sequence: Synthetic oligonucleotide
acacccgccagagauccau

SEQ ID NO: 3090694 - RNA, 19 nt, Artificial Sequence
  Description of Artificial Sequence: Synthetic oligonucleotide
agaccgccagugccaaggu

SEQ ID NO: 3090695 - RNA, 19 nt, Artificial Sequence
  Description of Artificial Sequence: Synthetic oligonucleotide
cccaggcuuggauuaauuc

SEQ ID NO: 3090696 - RNA, 19 nt, Artificial Sequence
  Description of Artificial Sequence: Synthetic oligonucleotide
auagauccugggaucuuua

SEQ ID NO: 3090697 - RNA, 19 nt, Artificial Sequence
  Description of Artificial Sequence: Synthetic oligonucleotide
ccaggcuuggauuaauucu

SEQ ID NO: 3090698 - RNA, 19 nt, Artificial Sequence
  Description of Artificial Sequence: Synthetic oligonucleotide
uggagaccgccagugccaa

SEQ ID NO: 3090699 - RNA, 19 nt, Artificial Sequence
  Description of Artificial Sequence: Synthetic oligonucleotide
gccaagaguagcugguuua

SEQ ID NO: 3090700 - RNA, 19 nt, Artificial Sequence
  Description of Artificial Sequence: Synthetic oligonucleotide
ccugggaucuuuaagucau

SEQ ID NO: 3090701 - RNA, 19 nt, Artificial Sequence
  Description of Artificial Sequence: Synthetic oligonucleotide
ccaguucaggugaacggca

SEQ ID NO: 3090702 - RNA, 19 nt, Artificial Sequence
  Description of Artificial Sequence: Synthetic oligonucleotide
cggcacuuggugaauugag

SEQ ID NO: 3090703 - RNA, 19 nt, Artificial Sequence
  Description of Artificial Sequence: Synthetic oligonucleotide
cccgccagagauccauacc

SEQ ID NO: 3090704 - RNA, 19 nt, Artificial Sequence
  Description of Artificial Sequence: Synthetic oligonucleotide
caggugaacggcacuuggu

SEQ ID NO: 3090705 - RNA, 19 nt, Artificial Sequence
  Description of Artificial Sequence: Synthetic oligonucleotide
aggcuuggauuaauucuuu

SEQ ID NO: 3090706 - RNA, 19 nt, Artificial Sequence
  Description of Artificial Sequence: Synthetic oligonucleotide
ccagugccaagguuaagaa

SEQ ID NO: 3090707 - RNA, 19 nt, Artificial Sequence
  Description of Artificial Sequence: Synthetic oligonucleotide
guucaggugaacggcacuu

SEQ ID NO: 3090708 - RNA, 19 nt, Artificial Sequence
  Description of Artificial Sequence: Synthetic oligonucleotide
uccccaggcuuggauuaau

SEQ ID NO: 3090709 - RNA, 19 nt, Artificial Sequence
  Description of Artificial Sequence: Synthetic oligonucleotide
gggaucuuuaagucaugau

SEQ ID NO: 3090710 - RNA, 19 nt, Artificial Sequence
  Description of Artificial Sequence: Synthetic oligonucleotide
cgucgauggagaccgccag

SEQ ID NO: 3090711 - RNA, 19 nt, Artificial Sequence
  Description of Artificial Sequence: Synthetic oligonucleotide
aggcuucccagaagaacuu

SEQ ID NO: 3090712 - RNA, 19 nt, Artificial Sequence
  Description of Artificial Sequence: Synthetic oligonucleotide
cuuguccccaggcuuggau

SEQ ID NO: 3090713 - RNA, 19 nt, Artificial Sequence
  Description of Artificial Sequence: Synthetic oligonucleotide
aacacccgccagagaucca

SEQ ID NO: 3090714 - RNA, 19 nt, Artificial Sequence
  Description of Artificial Sequence: Synthetic oligonucleotide
ggggaacucugccaagagu

SEQ ID NO: 3090715 - RNA, 19 nt, Artificial Sequence
  Description of Artificial Sequence: Synthetic oligonucleotide
ccgccagagauccauaccu

SEQ ID NO: 3090716 - RNA, 19 nt, Artificial Sequence
  Description of Artificial Sequence: Synthetic oligonucleotide
acuuguccccaggcuugga

SEQ ID NO: 3090717 - RNA, 19 nt, Artificial Sequence
  Description of Artificial Sequence: Synthetic oligonucleotide
ccagaagaacuugucccca

SEQ ID NO: 3090718 - RNA, 19 nt, Artificial Sequence
  Description of Artificial Sequence: Synthetic oligonucleotide
augcgucgauggagaccgc

SEQ ID NO: 3090719 - RNA, 19 nt, Artificial Sequence
  Description of Artificial Sequence: Synthetic oligonucleotide
cgccagagauccauaccug

SEQ ID NO: 3090720 - RNA, 19 nt, Artificial Sequence
  Description of Artificial Sequence: Synthetic oligonucleotide
cgauggagaccgccagugc

SEQ ID NO: 3090721 - RNA, 19 nt, Artificial Sequence
  Description of Artificial Sequence: Synthetic oligonucleotide
ggagaccgccagugccaag

SEQ ID NO: 3090722 - RNA, 19 nt, Artificial Sequence
  Description of Artificial Sequence: Synthetic oligonucleotide
ccaagaguagcugguuuaa

SEQ ID NO: 3090723 - RNA, 19 nt, Artificial Sequence
  Description of Artificial Sequence: Synthetic oligonucleotide
gaacggcacuuggugaauu

SEQ ID NO: 3090724 - RNA, 19 nt, Artificial Sequence
  Description of Artificial Sequence: Synthetic oligonucleotide
gcgucgauggagaccgcca

SEQ ID NO: 3090725 - RNA, 19 nt, Artificial Sequence
  Description of Artificial Sequence: Synthetic oligonucleotide
guauagauccugggaucuu

SEQ ID NO: 3090726 - RNA, 19 nt, Artificial Sequence
  Description of Artificial Sequence: Synthetic oligonucleotide
guagcugguuuaaccccau

SEQ ID NO: 3090727 - RNA, 19 nt, Artificial Sequence
  Description of Artificial Sequence: Synthetic oligonucleotide
gaccgccagugccaagguu

SEQ ID NO: 3090728 - RNA, 19 nt, Artificial Sequence
  Description of Artificial Sequence: Synthetic oligonucleotide
guccccaggcuuggauuaa

SEQ ID NO: 3090729 - RNA, 19 nt, Artificial Sequence
  Description of Artificial Sequence: Synthetic oligonucleotide
cacccgccagagauccaua

SEQ ID NO: 3090730 - RNA, 19 nt, Artificial Sequence
  Description of Artificial Sequence: Synthetic oligonucleotide
ccgccagugccaagguuaa

SEQ ID NO: 3090731 - RNA, 19 nt, Artificial Sequence
  Description of Artificial Sequence: Synthetic oligonucleotide
cugccaagaguagcugguu

SEQ ID NO: 3090732 - RNA, 19 nt, Artificial Sequence
  Description of Artificial Sequence: Synthetic oligonucleotide
cgccagugccaagguuaag

SEQ ID NO: 3090733 - RNA, 19 nt, Artificial Sequence
  Description of Artificial Sequence: Synthetic oligonucleotide
ccccaggcuuggauuaauu

SEQ ID NO: 3090734 - RNA, 19 nt, Artificial Sequence
  Description of Artificial Sequence: Synthetic oligonucleotide
uauauuuucacuaauaucu

SEQ ID NO: 3090735 - RNA, 19 nt, Artificial Sequence
  Description of Artificial Sequence: Synthetic oligonucleotide
agauacauaaaauacaagc

SEQ ID NO: 3090736 - RNA, 19 nt, Artificial Sequence
  Description of Artificial Sequence: Synthetic oligonucleotide
aaagcuaugagauacauaa

SEQ ID NO: 3090737 - RNA, 19 nt, Artificial Sequence
  Description of Artificial Sequence: Synthetic oligonucleotide
aaaauugagcuguuggugc

SEQ ID NO: 3090738 - RNA, 19 nt, Artificial Sequence
  Description of Artificial Sequence: Synthetic oligonucleotide
ugaauuacgaguauaaugu

SEQ ID NO: 3090739 - RNA, 19 nt, Artificial Sequence
  Description of Artificial Sequence: Synthetic oligonucleotide
ugacaugacaaaauaaagg

SEQ ID NO: 3090740 - RNA, 19 nt, Artificial Sequence
  Description of Artificial Sequence: Synthetic oligonucleotide
uaugagauacauaaaauac

SEQ ID NO: 3090741 - RNA, 19 nt, Artificial Sequence
  Description of Artificial Sequence: Synthetic oligonucleotide
uaaaauacaagcuaucagu

SEQ ID NO: 3090742 - RNA, 19 nt, Artificial Sequence
  Description of Artificial Sequence: Synthetic oligonucleotide
ucuuuguucucuaagauga

SEQ ID NO: 3090743 - RNA, 19 nt, Artificial Sequence
  Description of Artificial Sequence: Synthetic oligonucleotide
aaaauaaaggaaugggucu

SEQ ID NO: 3090744 - RNA, 19 nt, Artificial Sequence
  Description of Artificial Sequence: Synthetic oligonucleotide
acgaguauaauguugguag

SEQ ID NO: 3090745 - RNA, 19 nt, Artificial Sequence
  Description of Artificial Sequence: Synthetic oligonucleotide
uauaauguugguaggagca

SEQ ID NO: 3090746 - RNA, 19 nt, Artificial Sequence
  Description of Artificial Sequence: Synthetic oligonucleotide
aaauugagcuguuggugcc

SEQ ID NO: 3090747 - RNA, 19 nt, Artificial Sequence
  Description of Artificial Sequence: Synthetic oligonucleotide
gacaugacaaaauaaagga

SEQ ID NO: 3090748 - RNA, 19 nt, Artificial Sequence
  Description of Artificial Sequence: Synthetic oligonucleotide
gacaaaauaaaggaauggg

SEQ ID NO: 3090749 - RNA, 19 nt, Artificial Sequence
  Description of Artificial Sequence: Synthetic oligonucleotide
uugacuaagaaguaagcug

SEQ ID NO: 3090750 - RNA, 19 nt, Artificial Sequence
  Description of Artificial Sequence: Synthetic oligonucleotide
ugagauacauaaaauacaa

SEQ ID NO: 3090751 - RNA, 19 nt, Artificial Sequence
  Description of Artificial Sequence: Synthetic oligonucleotide
ucuaagaugaucuugccau

SEQ ID NO: 3090752 - RNA, 19 nt, Artificial Sequence
  Description of Artificial Sequence: Synthetic oligonucleotide
aaaggaaugggucuagaca

SEQ ID NO: 3090753 - RNA, 19 nt, Artificial Sequence
  Description of Artificial Sequence: Synthetic oligonucleotide
ugacuaagaaguaagcuga

SEQ ID NO: 3090754 - RNA, 19 nt, Artificial Sequence
  Description of Artificial Sequence: Synthetic oligonucleotide
aacuauucaggcuacccag

SEQ ID NO: 3090755 - RNA, 19 nt, Artificial Sequence
  Description of Artificial Sequence: Synthetic oligonucleotide
aguaguaguaguuugcaug

SEQ ID NO: 3090756 - RNA, 19 nt, Artificial Sequence
  Description of Artificial Sequence: Synthetic oligonucleotide
uugacaugacaaaauaaag

SEQ ID NO: 3090757 - RNA, 19 nt, Artificial Sequence
  Description of Artificial Sequence: Synthetic oligonucleotide
caaaauaaaggaauggguc

SEQ ID NO: 3090758 - RNA, 19 nt, Artificial Sequence
  Description of Artificial Sequence: Synthetic oligonucleotide
aagaaguaagcugaucuac

SEQ ID NO: 3090759 - RNA, 19 nt, Artificial Sequence
  Description of Artificial Sequence: Synthetic oligonucleotide
aauacaagcuaucaguguu

SEQ ID NO: 3090760 - RNA, 19 nt, Artificial Sequence
  Description of Artificial Sequence: Synthetic oligonucleotide
aaggaaugggucuagacaa

SEQ ID NO: 3090761 - RNA, 19 nt, Artificial Sequence
  Description of Artificial Sequence: Synthetic oligonucleotide
uucucuaagaugaucuugc

SEQ ID NO: 3090762 - RNA, 19 nt, Artificial Sequence
  Description of Artificial Sequence: Synthetic oligonucleotide
guaguaguaguuugcaugg

SEQ ID NO: 3090763 - RNA, 19 nt, Artificial Sequence
  Description of Artificial Sequence: Synthetic oligonucleotide
auuacgaguauaauguugg

SEQ ID NO: 3090764 - RNA, 19 nt, Artificial Sequence
  Description of Artificial Sequence: Synthetic oligonucleotide
uuguugacuaagaaguaag

SEQ ID NO: 3090765 - RNA, 19 nt, Artificial Sequence
  Description of Artificial Sequence: Synthetic oligonucleotide
uacauaaaauacaagcuau

SEQ ID NO: 3090766 - RNA, 19 nt, Artificial Sequence
  Description of Artificial Sequence: Synthetic oligonucleotide
gugaauuacgaguauaaug

SEQ ID NO: 3090767 - RNA, 19 nt, Artificial Sequence
  Description of Artificial Sequence: Synthetic oligonucleotide
aaaauacaagcuaucagug

SEQ ID NO: 3090768 - RNA, 19 nt, Artificial Sequence
  Description of Artificial Sequence: Synthetic oligonucleotide
uagacaacuauucaggcua

SEQ ID NO: 3090769 - RNA, 19 nt, Artificial Sequence
  Description of Artificial Sequence: Synthetic oligonucleotide
uuguucucuaagaugaucu

SEQ ID NO: 3090770 - RNA, 19 nt, Artificial Sequence
  Description of Artificial Sequence: Synthetic oligonucleotide
aucgucuugucacacaagg

SEQ ID NO: 3090771 - RNA, 19 nt, Artificial Sequence
  Description of Artificial Sequence: Synthetic oligonucleotide
ucacuaauaucuuucuuug

SEQ ID NO: 3090772 - RNA, 19 nt, Artificial Sequence
  Description of Artificial Sequence: Synthetic oligonucleotide
uguaguaguaguaguuugc

SEQ ID NO: 3090773 - RNA, 19 nt, Artificial Sequence
  Description of Artificial Sequence: Synthetic oligonucleotide
ugacaaaauaaaggaaugg

SEQ ID NO: 3090774 - RNA, 19 nt, Artificial Sequence
  Description of Artificial Sequence: Synthetic oligonucleotide
caagcuaucaguguuguag

SEQ ID NO: 3090775 - RNA, 19 nt, Artificial Sequence
  Description of Artificial Sequence: Synthetic oligonucleotide
aaauacaagcuaucagugu

SEQ ID NO: 3090776 - RNA, 19 nt, Artificial Sequence
  Description of Artificial Sequence: Synthetic oligonucleotide
auuuucacuaauaucuuuc

SEQ ID NO: 3090777 - RNA, 19 nt, Artificial Sequence
  Description of Artificial Sequence: Synthetic oligonucleotide
ugcauggugaauuacgagu

SEQ ID NO: 3090778 - RNA, 19 nt, Artificial Sequence
  Description of Artificial Sequence: Synthetic oligonucleotide
guaggagcaaagcaaauug

SEQ ID NO: 3090779 - RNA, 19 nt, Artificial Sequence
  Description of Artificial Sequence: Synthetic oligonucleotide
uuugcauggugaauuacga

SEQ ID NO: 3090780 - RNA, 19 nt, Artificial Sequence
  Description of Artificial Sequence: Synthetic oligonucleotide
auacauaaaauacaagcua

SEQ ID NO: 3090781 - RNA, 19 nt, Artificial Sequence
  Description of Artificial Sequence: Synthetic oligonucleotide
aauuacgaguauaauguug

SEQ ID NO: 3090782 - RNA, 19 nt, Artificial Sequence
  Description of Artificial Sequence: Synthetic oligonucleotide
uguugguaggagcaaagca

SEQ ID NO: 3090783 - RNA, 19 nt, Artificial Sequence
  Description of Artificial Sequence: Synthetic oligonucleotide
aguaagcugaucuacaauu

SEQ ID NO: 3090784 - RNA, 19 nt, Artificial Sequence
  Description of Artificial Sequence: Synthetic oligonucleotide
agcuaugagauacauaaaa

SEQ ID NO: 3090785 - RNA, 19 nt, Artificial Sequence
  Description of Artificial Sequence: Synthetic oligonucleotide
uguugacuaagaaguaagc

SEQ ID NO: 3090786 - RNA, 19 nt, Artificial Sequence
  Description of Artificial Sequence: Synthetic oligonucleotide
acuaauaucuuucuuuguu

SEQ ID NO: 3090787 - RNA, 19 nt, Artificial Sequence
  Description of Artificial Sequence: Synthetic oligonucleotide
ucuagacaacuauucaggc

SEQ ID NO: 3090788 - RNA, 19 nt, Artificial Sequence
  Description of Artificial Sequence: Synthetic oligonucleotide
aaugggucuagacaacuau

SEQ ID NO: 3090789 - RNA, 19 nt, Artificial Sequence
  Description of Artificial Sequence: Synthetic oligonucleotide
aaaucgucuugucacacaa

SEQ ID NO: 3090790 - RNA, 19 nt, Artificial Sequence
  Description of Artificial Sequence: Synthetic oligonucleotide
aagcauguauauuuucacu

SEQ ID NO: 3090791 - RNA, 19 nt, Artificial Sequence
  Description of Artificial Sequence: Synthetic oligonucleotide
acaacuauucaggcuaccc

SEQ ID NO: 3090792 - RNA, 19 nt, Artificial Sequence
  Description of Artificial Sequence: Synthetic oligonucleotide
cuaauaucuuucuuuguuc

SEQ ID NO: 3090793 - RNA, 19 nt, Artificial Sequence
  Description of Artificial Sequence: Synthetic oligonucleotide
gucuagacaacuauucagg

SEQ ID NO: 3090794 - RNA, 19 nt, Artificial Sequence
  Description of Artificial Sequence: Synthetic oligonucleotide
uuuucacuaauaucuuucu

SEQ ID NO: 3090795 - RNA, 19 nt, Artificial Sequence
  Description of Artificial Sequence: Synthetic oligonucleotide
guauauuuucacuaauauc

SEQ ID NO: 3090796 - RNA, 19 nt, Artificial Sequence
  Description of Artificial Sequence: Synthetic oligonucleotide
guuugcauggugaauuacg

SEQ ID NO: 3090797 - RNA, 19 nt, Artificial Sequence
  Description of Artificial Sequence: Synthetic oligonucleotide
aauaaaggaaugggucuag

SEQ ID NO: 3090798 - RNA, 19 nt, Artificial Sequence
  Description of Artificial Sequence: Synthetic oligonucleotide
augaucuugccauuguuga

SEQ ID NO: 3090799 - RNA, 19 nt, Artificial Sequence
  Description of Artificial Sequence: Synthetic oligonucleotide
aguauaauguugguaggag

SEQ ID NO: 3090800 - RNA, 19 nt, Artificial Sequence
  Description of Artificial Sequence: Synthetic oligonucleotide
gauacauaaaauacaagcu

SEQ ID NO: 3090801 - RNA, 19 nt, Artificial Sequence
  Description of Artificial Sequence: Synthetic oligonucleotide
aguaguaguuugcauggug

SEQ ID NO: 3090802 - RNA, 19 nt, Artificial Sequence
  Description of Artificial Sequence: Synthetic oligonucleotide
guauaauguugguaggagc

SEQ ID NO: 3090803 - RNA, 19 nt, Artificial Sequence
  Description of Artificial Sequence: Synthetic oligonucleotide
uacccagaaagcuaugaga

SEQ ID NO: 3090804 - RNA, 19 nt, Artificial Sequence
  Description of Artificial Sequence: Synthetic oligonucleotide
agcauguauauuuucacua

SEQ ID NO: 3090805 - RNA, 19 nt, Artificial Sequence
  Description of Artificial Sequence: Synthetic oligonucleotide
ucaguguuguaguaguagu

SEQ ID NO: 3090806 - RNA, 19 nt, Artificial Sequence
  Description of Artificial Sequence: Synthetic oligonucleotide
agcaaagcaaauuguaaaa

SEQ ID NO: 3090807 - RNA, 19 nt, Artificial Sequence
  Description of Artificial Sequence: Synthetic oligonucleotide
uggugaauuacgaguauaa

SEQ ID NO: 3090808 - RNA, 19 nt, Artificial Sequence
  Description of Artificial Sequence: Synthetic oligonucleotide
gaugaucuugccauuguug

SEQ ID NO: 3090809 - RNA, 19 nt, Artificial Sequence
  Description of Artificial Sequence: Synthetic oligonucleotide
uguuguaguaguaguaguu

SEQ ID NO: 3090810 - RNA, 19 nt, Artificial Sequence
  Description of Artificial Sequence: Synthetic oligonucleotide
aaaaucgucuugucacaca

SEQ ID NO: 3090811 - RNA, 19 nt, Artificial Sequence
  Description of Artificial Sequence: Synthetic oligonucleotide
caagcauguauauuuucac

SEQ ID NO: 3090812 - RNA, 19 nt, Artificial Sequence
  Description of Artificial Sequence: Synthetic oligonucleotide
aauguugguaggagcaaag

SEQ ID NO: 3090813 - RNA, 19 nt, Artificial Sequence
  Description of Artificial Sequence: Synthetic oligonucleotide
cuaugagauacauaaaaua

SEQ ID NO: 3090814 - RNA, 19 nt, Artificial Sequence
  Description of Artificial Sequence: Synthetic oligonucleotide
ugggucuagacaacuauuc

SEQ ID NO: 3090815 - RNA, 19 nt, Artificial Sequence
  Description of Artificial Sequence: Synthetic oligonucleotide
cuuucuuuguucucuaaga

SEQ ID NO: 3090816 - RNA, 19 nt, Artificial Sequence
  Description of Artificial Sequence: Synthetic oligonucleotide
ggucuagacaacuauucag

SEQ ID NO: 3090817 - RNA, 19 nt, Artificial Sequence
  Description of Artificial Sequence: Synthetic oligonucleotide
gagcaaagcaaauuguaaa

SEQ ID NO: 3090818 - RNA, 19 nt, Artificial Sequence
  Description of Artificial Sequence: Synthetic oligonucleotide
uugguaggagcaaagcaaa

SEQ ID NO: 3090819 - RNA, 19 nt, Artificial Sequence
  Description of Artificial Sequence: Synthetic oligonucleotide
cuaagaaguaagcugaucu

SEQ ID NO: 3090820 - RNA, 19 nt, Artificial Sequence
  Description of Artificial Sequence: Synthetic oligonucleotide
acauaaaauacaagcuauc

SEQ ID NO: 3090821 - RNA, 19 nt, Artificial Sequence
  Description of Artificial Sequence: Synthetic oligonucleotide
cauaaaauacaagcuauca

SEQ ID NO: 3090822 - RNA, 19 nt, Artificial Sequence
  Description of Artificial Sequence: Synthetic oligonucleotide
augagauacauaaaauaca

SEQ ID NO: 3090823 - RNA, 19 nt, Artificial Sequence
  Description of Artificial Sequence: Synthetic oligonucleotide
cuugccauuguugacuaag

SEQ ID NO: 3090824 - RNA, 19 nt, Artificial Sequence
  Description of Artificial Sequence: Synthetic oligonucleotide
auaucuuucuuuguucucu

SEQ ID NO: 3090825 - RNA, 19 nt, Artificial Sequence
  Description of Artificial Sequence: Synthetic oligonucleotide
aaauaaaggaaugggucua

SEQ ID NO: 3090826 - RNA, 19 nt, Artificial Sequence
  Description of Artificial Sequence: Synthetic oligonucleotide
augacaaaauaaaggaaug

SEQ ID NO: 3090827 - RNA, 19 nt, Artificial Sequence
  Description of Artificial Sequence: Synthetic oligonucleotide
caugacaaaauaaaggaau

SEQ ID NO: 3090828 - RNA, 19 nt, Artificial Sequence
  Description of Artificial Sequence: Synthetic oligonucleotide
uaagaaguaagcugaucua

SEQ ID NO: 3090829 - RNA, 19 nt, Artificial Sequence
  Description of Artificial Sequence: Synthetic oligonucleotide
aaguaagcugaucuacaau

SEQ ID NO: 3090830 - RNA, 19 nt, Artificial Sequence
  Description of Artificial Sequence: Synthetic oligonucleotide
agcuguuggugccaugcac

SEQ ID NO: 3090831 - RNA, 19 nt, Artificial Sequence
  Description of Artificial Sequence: Synthetic oligonucleotide
uaggagcaaagcaaauugu

SEQ ID NO: 3090832 - RNA, 19 nt, Artificial Sequence
  Description of Artificial Sequence: Synthetic oligonucleotide
aucaguguuguaguaguag

SEQ ID NO: 3090833 - RNA, 19 nt, Artificial Sequence
  Description of Artificial Sequence: Synthetic oligonucleotide
agcccaagcauguauauuu

SEQ ID NO: 3090834 - RNA, 19 nt, Artificial Sequence
  Description of Artificial Sequence: Synthetic oligonucleotide
ugagcuguuggugccaugc

SEQ ID NO: 3090835 - RNA, 19 nt, Artificial Sequence
  Description of Artificial Sequence: Synthetic oligonucleotide
uugucacacaaggugauga

SEQ ID NO: 3090836 - RNA, 19 nt, Artificial Sequence
  Description of Artificial Sequence: Synthetic oligonucleotide
gagauacauaaaauacaag

SEQ ID NO: 3090837 - RNA, 19 nt, Artificial Sequence
  Description of Artificial Sequence: Synthetic oligonucleotide
gccauuguugacuaagaag

SEQ ID NO: 3090838 - RNA, 19 nt, Artificial Sequence
  Description of Artificial Sequence: Synthetic oligonucleotide
uauuuucacuaauaucuuu

SEQ ID NO: 3090839 - RNA, 19 nt, Artificial Sequence
  Description of Artificial Sequence: Synthetic oligonucleotide
auguugguaggagcaaagc

SEQ ID NO: 3090840 - RNA, 19 nt, Artificial Sequence
  Description of Artificial Sequence: Synthetic oligonucleotide
uugcauggugaauuacgag

SEQ ID NO: 3090841 - RNA, 19 nt, Artificial Sequence
  Description of Artificial Sequence: Synthetic oligonucleotide
gaaguaagcugaucuacaa

SEQ ID NO: 3090842 - RNA, 19 nt, Artificial Sequence
  Description of Artificial Sequence: Synthetic oligonucleotide
uaagcugaucuacaauuuu

SEQ ID NO: 3090843 - RNA, 19 nt, Artificial Sequence
  Description of Artificial Sequence: Synthetic oligonucleotide
ucucuaagaugaucuugcc

SEQ ID NO: 3090844 - RNA, 19 nt, Artificial Sequence
  Description of Artificial Sequence: Synthetic oligonucleotide
acuaagaaguaagcugauc

SEQ ID NO: 3090845 - RNA, 19 nt, Artificial Sequence
  Description of Artificial Sequence: Synthetic oligonucleotide
cuacccagaaagcuaugag

SEQ ID NO: 3090846 - RNA, 19 nt, Artificial Sequence
  Description of Artificial Sequence: Synthetic oligonucleotide
ucaggcuacccagaaagcu

SEQ ID NO: 3090847 - RNA, 19 nt, Artificial Sequence
  Description of Artificial Sequence: Synthetic oligonucleotide
ugcacaagucagcccaagc

SEQ ID NO: 3090848 - RNA, 19 nt, Artificial Sequence
  Description of Artificial Sequence: Synthetic oligonucleotide
uuuguucucuaagaugauc

SEQ ID NO: 3090849 - RNA, 19 nt, Artificial Sequence
  Description of Artificial Sequence: Synthetic oligonucleotide
auuguugacuaagaaguaa

SEQ ID NO: 3090850 - RNA, 19 nt, Artificial Sequence
  Description of Artificial Sequence: Synthetic oligonucleotide
uugccauuguugacuaaga

SEQ ID NO: 3090851 - RNA, 19 nt, Artificial Sequence
  Description of Artificial Sequence: Synthetic oligonucleotide
ucuugucacacaaggugau

SEQ ID NO: 3090852 - RNA, 19 nt, Artificial Sequence
  Description of Artificial Sequence: Synthetic oligonucleotide
uucaggcuacccagaaagc

SEQ ID NO: 3090853 - RNA, 19 nt, Artificial Sequence
  Description of Artificial Sequence: Synthetic oligonucleotide
guugguaggagcaaagcaa

SEQ ID NO: 3090854 - RNA, 19 nt, Artificial Sequence
  Description of Artificial Sequence: Synthetic oligonucleotide
aguuugcauggugaauuac

SEQ ID NO: 3090855 - RNA, 19 nt, Artificial Sequence
  Description of Artificial Sequence: Synthetic oligonucleotide
ccagaaagcuaugagauac

SEQ ID NO: 3090856 - RNA, 19 nt, Artificial Sequence
  Description of Artificial Sequence: Synthetic oligonucleotide
guuggugccaugcacaagu

SEQ ID NO: 3090857 - RNA, 19 nt, Artificial Sequence
  Description of Artificial Sequence: Synthetic oligonucleotide
gaguauaauguugguagga

SEQ ID NO: 3090858 - RNA, 19 nt, Artificial Sequence
  Description of Artificial Sequence: Synthetic oligonucleotide
ggugccaugcacaagucag

SEQ ID NO: 3090859 - RNA, 19 nt, Artificial Sequence
  Description of Artificial Sequence: Synthetic oligonucleotide
ugaucuugccauuguugac

SEQ ID NO: 3090860 - RNA, 19 nt, Artificial Sequence
  Description of Artificial Sequence: Synthetic oligonucleotide
ugccauuguugacuaagaa

SEQ ID NO: 3090861 - RNA, 19 nt, Artificial Sequence
  Description of Artificial Sequence: Synthetic oligonucleotide
guaguaguuugcaugguga

SEQ ID NO: 3090862 - RNA, 19 nt, Artificial Sequence
  Description of Artificial Sequence: Synthetic oligonucleotide
ucgucuugucacacaaggu

SEQ ID NO: 3090863 - RNA, 19 nt, Artificial Sequence
  Description of Artificial Sequence: Synthetic oligonucleotide
ugccaugcacaagucagcc

SEQ ID NO: 3090864 - RNA, 19 nt, Artificial Sequence
  Description of Artificial Sequence: Synthetic oligonucleotide
acccagaaagcuaugagau

SEQ ID NO: 3090865 - RNA, 19 nt, Artificial Sequence
  Description of Artificial Sequence: Synthetic oligonucleotide
ccauuguugacuaagaagu

SEQ ID NO: 3090866 - RNA, 19 nt, Artificial Sequence
  Description of Artificial Sequence: Synthetic oligonucleotide
agaaguaagcugaucuaca

SEQ ID NO: 3090867 - RNA, 19 nt, Artificial Sequence
  Description of Artificial Sequence: Synthetic oligonucleotide
uuacgaguauaauguuggu

SEQ ID NO: 3090868 - RNA, 19 nt, Artificial Sequence
  Description of Artificial Sequence: Synthetic oligonucleotide
uacgaguauaauguuggua

SEQ ID NO: 3090869 - RNA, 19 nt, Artificial Sequence
  Description of Artificial Sequence: Synthetic oligonucleotide
uaauguugguaggagcaaa

SEQ ID NO: 3090870 - RNA, 19 nt, Artificial Sequence
  Description of Artificial Sequence: Synthetic oligonucleotide
aauugagcuguuggugcca

SEQ ID NO: 3090871 - RNA, 19 nt, Artificial Sequence
  Description of Artificial Sequence: Synthetic oligonucleotide
guaguaguaguaguuugca

SEQ ID NO: 3090872 - RNA, 19 nt, Artificial Sequence
  Description of Artificial Sequence: Synthetic oligonucleotide
auacaagcuaucaguguug

SEQ ID NO: 3090873 - RNA, 19 nt, Artificial Sequence
  Description of Artificial Sequence: Synthetic oligonucleotide
caacuauucaggcuaccca

SEQ ID NO: 3090874 - RNA, 19 nt, Artificial Sequence
  Description of Artificial Sequence: Synthetic oligonucleotide
agaaagcuaugagauacau

SEQ ID NO: 3090875 - RNA, 19 nt, Artificial Sequence
  Description of Artificial Sequence: Synthetic oligonucleotide
uaguaguaguaguuugcau

SEQ ID NO: 3090876 - RNA, 19 nt, Artificial Sequence
  Description of Artificial Sequence: Synthetic oligonucleotide
acaagucagcccaagcaug

SEQ ID NO: 3090877 - RNA, 19 nt, Artificial Sequence
  Description of Artificial Sequence: Synthetic oligonucleotide
uguucucuaagaugaucuu

SEQ ID NO: 3090878 - RNA, 19 nt, Artificial Sequence
  Description of Artificial Sequence: Synthetic oligonucleotide
uggugccaugcacaaguca

SEQ ID NO: 3090879 - RNA, 19 nt, Artificial Sequence
  Description of Artificial Sequence: Synthetic oligonucleotide
aaucgucuugucacacaag

SEQ ID NO: 3090880 - RNA, 19 nt, Artificial Sequence
  Description of Artificial Sequence: Synthetic oligonucleotide
cucuaagaugaucuugcca

SEQ ID NO: 3090881 - RNA, 19 nt, Artificial Sequence
  Description of Artificial Sequence: Synthetic oligonucleotide
gcuaucaguguuguaguag

SEQ ID NO: 3090882 - RNA, 19 nt, Artificial Sequence
  Description of Artificial Sequence: Synthetic oligonucleotide
auguauauuuucacuaaua

SEQ ID NO: 3090883 - RNA, 19 nt, Artificial Sequence
  Description of Artificial Sequence: Synthetic oligonucleotide
guugacuaagaaguaagcu

SEQ ID NO: 3090884 - RNA, 19 nt, Artificial Sequence
  Description of Artificial Sequence: Synthetic oligonucleotide
ucagcccaagcauguauau

SEQ ID NO: 3090885 - RNA, 19 nt, Artificial Sequence
  Description of Artificial Sequence: Synthetic oligonucleotide
agacaacuauucaggcuac

SEQ ID NO: 3090886 - RNA, 19 nt, Artificial Sequence
  Description of Artificial Sequence: Synthetic oligonucleotide
gucuugucacacaagguga

SEQ ID NO: 3090887 - RNA, 19 nt, Artificial Sequence
  Description of Artificial Sequence: Synthetic oligonucleotide
uaucaguguuguaguagua

SEQ ID NO: 3090888 - RNA, 19 nt, Artificial Sequence
  Description of Artificial Sequence: Synthetic oligonucleotide
agucagcccaagcauguau

SEQ ID NO: 3090889 - RNA, 19 nt, Artificial Sequence
  Description of Artificial Sequence: Synthetic oligonucleotide
cuaucaguguuguaguagu

SEQ ID NO: 3090890 - RNA, 19 nt, Artificial Sequence
  Description of Artificial Sequence: Synthetic oligonucleotide
uaguuugcauggugaauua

SEQ ID NO: 3090891 - RNA, 19 nt, Artificial Sequence
  Description of Artificial Sequence: Synthetic oligonucleotide
aggaaugggucuagacaac

SEQ ID NO: 3090892 - RNA, 19 nt, Artificial Sequence
  Description of Artificial Sequence: Synthetic oligonucleotide
auaauguugguaggagcaa

SEQ ID NO: 3090893 - RNA, 19 nt, Artificial Sequence
  Description of Artificial Sequence: Synthetic oligonucleotide
cgucuugucacacaaggug

SEQ ID NO: 3090894 - RNA, 19 nt, Artificial Sequence
  Description of Artificial Sequence: Synthetic oligonucleotide
ccaagcauguauauuuuca

SEQ ID NO: 3090895 - RNA, 19 nt, Artificial Sequence
  Description of Artificial Sequence: Synthetic oligonucleotide
ugguaggagcaaagcaaau

SEQ ID NO: 3090896 - RNA, 19 nt, Artificial Sequence
  Description of Artificial Sequence: Synthetic oligonucleotide
gcacaagucagcccaagca

SEQ ID NO: 3090897 - RNA, 19 nt, Artificial Sequence
  Description of Artificial Sequence: Synthetic oligonucleotide
auaaaggaaugggucuaga

SEQ ID NO: 3090898 - RNA, 19 nt, Artificial Sequence
  Description of Artificial Sequence: Synthetic oligonucleotide
cuagacaacuauucaggcu

SEQ ID NO: 3090899 - RNA, 19 nt, Artificial Sequence
  Description of Artificial Sequence: Synthetic oligonucleotide
aggagcaaagcaaauugua

SEQ ID NO: 3090900 - RNA, 19 nt, Artificial Sequence
  Description of Artificial Sequence: Synthetic oligonucleotide
guaguuugcauggugaauu

SEQ ID NO: 3090901 - RNA, 19 nt, Artificial Sequence
  Description of Artificial Sequence: Synthetic oligonucleotide
gacaacuauucaggcuacc

SEQ ID NO: 3090902 - RNA, 19 nt, Artificial Sequence
  Description of Artificial Sequence: Synthetic oligonucleotide
aucuugccauuguugacua

SEQ ID NO: 3090903 - RNA, 19 nt, Artificial Sequence
  Description of Artificial Sequence: Synthetic oligonucleotide
gcauguauauuuucacuaa

SEQ ID NO: 3090904 - RNA, 19 nt, Artificial Sequence
  Description of Artificial Sequence: Synthetic oligonucleotide
cuugucacacaaggugaug

SEQ ID NO: 3090905 - RNA, 19 nt, Artificial Sequence
  Description of Artificial Sequence: Synthetic oligonucleotide
ccaugcacaagucagccca

SEQ ID NO: 3090906 - RNA, 19 nt, Artificial Sequence
  Description of Artificial Sequence: Synthetic oligonucleotide
acuauucaggcuacccaga

SEQ ID NO: 3090907 - RNA, 19 nt, Artificial Sequence
  Description of Artificial Sequence: Synthetic oligonucleotide
cauuguugacuaagaagua

SEQ ID NO: 3090908 - RNA, 19 nt, Artificial Sequence
  Description of Artificial Sequence: Synthetic oligonucleotide
gaauuacgaguauaauguu

SEQ ID NO: 3090909 - RNA, 19 nt, Artificial Sequence
  Description of Artificial Sequence: Synthetic oligonucleotide
gaaagcuaugagauacaua

SEQ ID NO: 3090910 - RNA, 19 nt, Artificial Sequence
  Description of Artificial Sequence: Synthetic oligonucleotide
cagaaagcuaugagauaca

SEQ ID NO: 3090911 - RNA, 19 nt, Artificial Sequence
  Description of Artificial Sequence: Synthetic oligonucleotide
cuauucaggcuacccagaa

SEQ ID NO: 3090912 - RNA, 19 nt, Artificial Sequence
  Description of Artificial Sequence: Synthetic oligonucleotide
auggugaauuacgaguaua

SEQ ID NO: 3090913 - RNA, 19 nt, Artificial Sequence
  Description of Artificial Sequence: Synthetic oligonucleotide
aagcuaugagauacauaaa

SEQ ID NO: 3090914 - RNA, 19 nt, Artificial Sequence
  Description of Artificial Sequence: Synthetic oligonucleotide
agcuaucaguguuguagua

SEQ ID NO: 3090915 - RNA, 19 nt, Artificial Sequence
  Description of Artificial Sequence: Synthetic oligonucleotide
gggucuagacaacuauuca

SEQ ID NO: 3090916 - RNA, 19 nt, Artificial Sequence
  Description of Artificial Sequence: Synthetic oligonucleotide
ggagcaaagcaaauuguaa

SEQ ID NO: 3090917 - RNA, 19 nt, Artificial Sequence
  Description of Artificial Sequence: Synthetic oligonucleotide
uaguaguaguuugcauggu

SEQ ID NO: 3090918 - RNA, 19 nt, Artificial Sequence
  Description of Artificial Sequence: Synthetic oligonucleotide
caguguuguaguaguagua

SEQ ID NO: 3090919 - RNA, 19 nt, Artificial Sequence
  Description of Artificial Sequence: Synthetic oligonucleotide
guguuguaguaguaguagu

SEQ ID NO: 3090920 - RNA, 19 nt, Artificial Sequence
  Description of Artificial Sequence: Synthetic oligonucleotide
cauguauauuuucacuaau

SEQ ID NO: 3090921 - RNA, 19 nt, Artificial Sequence
  Description of Artificial Sequence: Synthetic oligonucleotide
caggcuacccagaaagcua

SEQ ID NO: 3090922 - RNA, 19 nt, Artificial Sequence
  Description of Artificial Sequence: Synthetic oligonucleotide
caagucagcccaagcaugu

SEQ ID NO: 3090923 - RNA, 19 nt, Artificial Sequence
  Description of Artificial Sequence: Synthetic oligonucleotide
gugccaugcacaagucagc

SEQ ID NO: 3090924 - RNA, 19 nt, Artificial Sequence
  Description of Artificial Sequence: Synthetic oligonucleotide
aggcuacccagaaagcuau

SEQ ID NO: 3090925 - RNA, 19 nt, Artificial Sequence
  Description of Artificial Sequence: Synthetic oligonucleotide
gaaugggucuagacaacua

SEQ ID NO: 3090926 - RNA, 19 nt, Artificial Sequence
  Description of Artificial Sequence: Synthetic oligonucleotide
cacaagucagcccaagcau

SEQ ID NO: 3090927 - RNA, 19 nt, Artificial Sequence
  Description of Artificial Sequence: Synthetic oligonucleotide
augcacaagucagcccaag

SEQ ID NO: 3090928 - RNA, 19 nt, Artificial Sequence
  Description of Artificial Sequence: Synthetic oligonucleotide
uugagcuguuggugccaug

SEQ ID NO: 3090929 - RNA, 19 nt, Artificial Sequence
  Description of Artificial Sequence: Synthetic oligonucleotide
gagcuguuggugccaugca

SEQ ID NO: 3090930 - RNA, 19 nt, Artificial Sequence
  Description of Artificial Sequence: Synthetic oligonucleotide
augggucuagacaacuauu

SEQ ID NO: 3090931 - RNA, 19 nt, Artificial Sequence
  Description of Artificial Sequence: Synthetic oligonucleotide
ucuugccauuguugacuaa

SEQ ID NO: 3090932 - RNA, 19 nt, Artificial Sequence
  Description of Artificial Sequence: Synthetic oligonucleotide
auugagcuguuggugccau

SEQ ID NO: 3090933 - RNA, 19 nt, Artificial Sequence
  Description of Artificial Sequence: Synthetic oligonucleotide
gcuguuggugccaugcaca

SEQ ID NO: 3090934 - RNA, 19 nt, Artificial Sequence
  Description of Artificial Sequence: Synthetic oligonucleotide
acaagcuaucaguguugua

SEQ ID NO: 3090935 - RNA, 19 nt, Artificial Sequence
  Description of Artificial Sequence: Synthetic oligonucleotide
gcuaugagauacauaaaau

SEQ ID NO: 3090936 - RNA, 19 nt, Artificial Sequence
  Description of Artificial Sequence: Synthetic oligonucleotide
guaagcugaucuacaauuu

SEQ ID NO: 3090937 - RNA, 19 nt, Artificial Sequence
  Description of Artificial Sequence: Synthetic oligonucleotide
gcuacccagaaagcuauga

SEQ ID NO: 3090938 - RNA, 19 nt, Artificial Sequence
  Description of Artificial Sequence: Synthetic oligonucleotide
gccaugcacaagucagccc

SEQ ID NO: 3090939 - RNA, 19 nt, Artificial Sequence
  Description of Artificial Sequence: Synthetic oligonucleotide
aagucagcccaagcaugua

SEQ ID NO: 3090940 - RNA, 19 nt, Artificial Sequence
  Description of Artificial Sequence: Synthetic oligonucleotide
gucagcccaagcauguaua

SEQ ID NO: 3090941 - RNA, 19 nt, Artificial Sequence
  Description of Artificial Sequence: Synthetic oligonucleotide
caugcacaagucagcccaa

SEQ ID NO: 3090942 - RNA, 19 nt, Artificial Sequence
  Description of Artificial Sequence: Synthetic oligonucleotide
gacuaagaaguaagcugau

SEQ ID NO: 3090943 - RNA, 19 nt, Artificial Sequence
  Description of Artificial Sequence: Synthetic oligonucleotide
cuaagaugaucuugccauu

SEQ ID NO: 3090944 - RNA, 19 nt, Artificial Sequence
  Description of Artificial Sequence: Synthetic oligonucleotide
cuuuguucucuaagaugau

SEQ ID NO: 3090945 - RNA, 19 nt, Artificial Sequence
  Description of Artificial Sequence: Synthetic oligonucleotide
ggaaugggucuagacaacu

SEQ ID NO: 3090946 - RNA, 19 nt, Artificial Sequence
  Description of Artificial Sequence: Synthetic oligonucleotide
cauggugaauuacgaguau

SEQ ID NO: 3090947 - RNA, 19 nt, Artificial Sequence
  Description of Artificial Sequence: Synthetic oligonucleotide
gguaggagcaaagcaaauu

SEQ ID NO: 3090948 - RNA, 19 nt, Artificial Sequence
  Description of Artificial Sequence: Synthetic oligonucleotide
ggugaauuacgaguauaau

SEQ ID NO: 3090949 - RNA, 19 nt, Artificial Sequence
  Description of Artificial Sequence: Synthetic oligonucleotide
cccagaaagcuaugagaua

SEQ ID NO: 3090950 - RNA, 19 nt, Artificial Sequence
  Description of Artificial Sequence: Synthetic oligonucleotide
ggcuacccagaaagcuaug

SEQ ID NO: 3090951 - RNA, 19 nt, Artificial Sequence
  Description of Artificial Sequence: Synthetic oligonucleotide
cagcccaagcauguauauu

SEQ ID NO: 3090952 - RNA, 19 nt, Artificial Sequence
  Description of Artificial Sequence: Synthetic oligonucleotide
gcccaagcauguauauuuu

SEQ ID NO: 3090953 - RNA, 19 nt, Artificial Sequence
  Description of Artificial Sequence: Synthetic oligonucleotide
uguucaaugaggucucugg

SEQ ID NO: 3090954 - RNA, 19 nt, Artificial Sequence
  Description of Artificial Sequence: Synthetic oligonucleotide
ugagggacaaucacagccg

SEQ ID NO: 3090955 - RNA, 19 nt, Artificial Sequence
  Description of Artificial Sequence: Synthetic oligonucleotide
uucaaugaggucucugggg

SEQ ID NO: 3090956 - RNA, 19 nt, Artificial Sequence
  Description of Artificial Sequence: Synthetic oligonucleotide
uuugguauugccucagcca

SEQ ID NO: 3090957 - RNA, 19 nt, Artificial Sequence
  Description of Artificial Sequence: Synthetic oligonucleotide
uugguguucaaugaggucu

SEQ ID NO: 3090958 - RNA, 19 nt, Artificial Sequence
  Description of Artificial Sequence: Synthetic oligonucleotide
gugagggacaaucacagcc

SEQ ID NO: 3090959 - RNA, 19 nt, Artificial Sequence
  Description of Artificial Sequence: Synthetic oligonucleotide
accuguuugguauugccuc

SEQ ID NO: 3090960 - RNA, 19 nt, Artificial Sequence
  Description of Artificial Sequence: Synthetic oligonucleotide
uucagggucacacugggaa

SEQ ID NO: 3090961 - RNA, 19 nt, Artificial Sequence
  Description of Artificial Sequence: Synthetic oligonucleotide
ugcucugugucucccaggg

SEQ ID NO: 3090962 - RNA, 19 nt, Artificial Sequence
  Description of Artificial Sequence: Synthetic oligonucleotide
ucgauucagggucacacug

SEQ ID NO: 3090963 - RNA, 19 nt, Artificial Sequence
  Description of Artificial Sequence: Synthetic oligonucleotide
aaugaggucucuggggagg

SEQ ID NO: 3090964 - RNA, 19 nt, Artificial Sequence
  Description of Artificial Sequence: Synthetic oligonucleotide
uguugguguucaaugaggu

SEQ ID NO: 3090965 - RNA, 19 nt, Artificial Sequence
  Description of Artificial Sequence: Synthetic oligonucleotide
aaucacagccgcucuagcu

SEQ ID NO: 3090966 - RNA, 19 nt, Artificial Sequence
  Description of Artificial Sequence: Synthetic oligonucleotide
accuggacuucucacggcc

SEQ ID NO: 3090967 - RNA, 19 nt, Artificial Sequence
  Description of Artificial Sequence: Synthetic oligonucleotide
ugagcagagaccuccaguc

SEQ ID NO: 3090968 - RNA, 19 nt, Artificial Sequence
  Description of Artificial Sequence: Synthetic oligonucleotide
cugucugaggcucagugcc

SEQ ID NO: 3090969 - RNA, 19 nt, Artificial Sequence
  Description of Artificial Sequence: Synthetic oligonucleotide
accuccaguccuuccaugc

SEQ ID NO: 3090970 - RNA, 19 nt, Artificial Sequence
  Description of Artificial Sequence: Synthetic oligonucleotide
cuguugguguucaaugagg

SEQ ID NO: 3090971 - RNA, 19 nt, Artificial Sequence
  Description of Artificial Sequence: Synthetic oligonucleotide
uugguauugccucagccau

SEQ ID NO: 3090972 - RNA, 19 nt, Artificial Sequence
  Description of Artificial Sequence: Synthetic oligonucleotide
uauugccucagccaucgcu

SEQ ID NO: 3090973 - RNA, 19 nt, Artificial Sequence
  Description of Artificial Sequence: Synthetic oligonucleotide
gagugagggacaaucacag

SEQ ID NO: 3090974 - RNA, 19 nt, Artificial Sequence
  Description of Artificial Sequence: Synthetic oligonucleotide
uuaccuguuugguauugcc

SEQ ID NO: 3090975 - RNA, 19 nt, Artificial Sequence
  Description of Artificial Sequence: Synthetic oligonucleotide
gaggcuggucgauucaggg

SEQ ID NO: 3090976 - RNA, 19 nt, Artificial Sequence
  Description of Artificial Sequence: Synthetic oligonucleotide
uucucucuggcuuuggauc

SEQ ID NO: 3090977 - RNA, 19 nt, Artificial Sequence
  Description of Artificial Sequence: Synthetic oligonucleotide
aucacagccgcucuagcug

SEQ ID NO: 3090978 - RNA, 19 nt, Artificial Sequence
  Description of Artificial Sequence: Synthetic oligonucleotide
uagcuguugguguucaaug

SEQ ID NO: 3090979 - RNA, 19 nt, Artificial Sequence
  Description of Artificial Sequence: Synthetic oligonucleotide
guuugguauugccucagcc

SEQ ID NO: 3090980 - RNA, 19 nt, Artificial Sequence
  Description of Artificial Sequence: Synthetic oligonucleotide
uccaccuucuccuuaccug

SEQ ID NO: 3090981 - RNA, 19 nt, Artificial Sequence
  Description of Artificial Sequence: Synthetic oligonucleotide
cuuuggaucagcugcucug

SEQ ID NO: 3090982 - RNA, 19 nt, Artificial Sequence
  Description of Artificial Sequence: Synthetic oligonucleotide
cuuccaugccaucaaggcc

SEQ ID NO: 3090983 - RNA, 19 nt, Artificial Sequence
  Description of Artificial Sequence: Synthetic oligonucleotide
agugagggacaaucacagc

SEQ ID NO: 3090984 - RNA, 19 nt, Artificial Sequence
  Description of Artificial Sequence: Synthetic oligonucleotide
uggagugagggacaaucac

SEQ ID NO: 3090985 - RNA, 19 nt, Artificial Sequence
  Description of Artificial Sequence: Synthetic oligonucleotide
ucucucuggcuuuggauca

SEQ ID NO: 3090986 - RNA, 19 nt, Artificial Sequence
  Description of Artificial Sequence: Synthetic oligonucleotide
uggcagucgcuccugagca

SEQ ID NO: 3090987 - RNA, 19 nt, Artificial Sequence
  Description of Artificial Sequence: Synthetic oligonucleotide
cuucucacggcccugucug

SEQ ID NO: 3090988 - RNA, 19 nt, Artificial Sequence
  Description of Artificial Sequence: Synthetic oligonucleotide
uaccuguuugguauugccu

SEQ ID NO: 3090989 - RNA, 19 nt, Artificial Sequence
  Description of Artificial Sequence: Synthetic oligonucleotide
ucuuccaccuucuccuuac

SEQ ID NO: 3090990 - RNA, 19 nt, Artificial Sequence
  Description of Artificial Sequence: Synthetic oligonucleotide
cucugugucucccaggguc

SEQ ID NO: 3090991 - RNA, 19 nt, Artificial Sequence
  Description of Artificial Sequence: Synthetic oligonucleotide
agcagagaccuccaguccu

SEQ ID NO: 3090992 - RNA, 19 nt, Artificial Sequence
  Description of Artificial Sequence: Synthetic oligonucleotide
agagaccuccaguccuucc

SEQ ID NO: 3090993 - RNA, 19 nt, Artificial Sequence
  Description of Artificial Sequence: Synthetic oligonucleotide
ucagggucacacugggaag

SEQ ID NO: 3090994 - RNA, 19 nt, Artificial Sequence
  Description of Artificial Sequence: Synthetic oligonucleotide
cuucuccuuaccuguuugg

SEQ ID NO: 3090995 - RNA, 19 nt, Artificial Sequence
  Description of Artificial Sequence: Synthetic oligonucleotide
ucuggcuuuggaucagcug

SEQ ID NO: 3090996 - RNA, 19 nt, Artificial Sequence
  Description of Artificial Sequence: Synthetic oligonucleotide
acacugggaagcuggcgac

SEQ ID NO: 3090997 - RNA, 19 nt, Artificial Sequence
  Description of Artificial Sequence: Synthetic oligonucleotide
gguauugccucagccaucg

SEQ ID NO: 3090998 - RNA, 19 nt, Artificial Sequence
  Description of Artificial Sequence: Synthetic oligonucleotide
ugggaagcuggcgacaagc

SEQ ID NO: 3090999 - RNA, 19 nt, Artificial Sequence
  Description of Artificial Sequence: Synthetic oligonucleotide
acaaucacagccgcucuag

SEQ ID NO: 3091000 - RNA, 19 nt, Artificial Sequence
  Description of Artificial Sequence: Synthetic oligonucleotide
uguuugguauugccucagc

SEQ ID NO: 3091001 - RNA, 19 nt, Artificial Sequence
  Description of Artificial Sequence: Synthetic oligonucleotide
agcuguugguguucaauga

SEQ ID NO: 3091002 - RNA, 19 nt, Artificial Sequence
  Description of Artificial Sequence: Synthetic oligonucleotide
ucacggcccugucugaggc

SEQ ID NO: 3091003 - RNA, 19 nt, Artificial Sequence
  Description of Artificial Sequence: Synthetic oligonucleotide
auugccucagccaucgcug

SEQ ID NO: 3091004 - RNA, 19 nt, Artificial Sequence
  Description of Artificial Sequence: Synthetic oligonucleotide
uuuggaucagcugcucugu

SEQ ID NO: 3091005 - RNA, 19 nt, Artificial Sequence
  Description of Artificial Sequence: Synthetic oligonucleotide
ucagccaucgcuggcggcc

SEQ ID NO: 3091006 - RNA, 19 nt, Artificial Sequence
  Description of Artificial Sequence: Synthetic oligonucleotide
gacaagcucuuccaccuuc

SEQ ID NO: 3091007 - RNA, 19 nt, Artificial Sequence
  Description of Artificial Sequence: Synthetic oligonucleotide
gagggacaaucacagccgc

SEQ ID NO: 3091008 - RNA, 19 nt, Artificial Sequence
  Description of Artificial Sequence: Synthetic oligonucleotide
ugguguucaaugaggucuc

SEQ ID NO: 3091009 - RNA, 19 nt, Artificial Sequence
  Description of Artificial Sequence: Synthetic oligonucleotide
augccaucaaggcccugcg

SEQ ID NO: 3091010 - RNA, 19 nt, Artificial Sequence
  Description of Artificial Sequence: Synthetic oligonucleotide
agccgguggagugagggac

SEQ ID NO: 3091011 - RNA, 19 nt, Artificial Sequence
  Description of Artificial Sequence: Synthetic oligonucleotide
cuggcagucgcuccugagc

SEQ ID NO: 3091012 - RNA, 19 nt, Artificial Sequence
  Description of Artificial Sequence: Synthetic oligonucleotide
gaagcuggcgacaagcucu

SEQ ID NO: 3091013 - RNA, 19 nt, Artificial Sequence
  Description of Artificial Sequence: Synthetic oligonucleotide
ucuccuuaccuguuuggua

SEQ ID NO: 3091014 - RNA, 19 nt, Artificial Sequence
  Description of Artificial Sequence: Synthetic oligonucleotide
gaggcucagugcccggugg

SEQ ID NO: 3091015 - RNA, 19 nt, Artificial Sequence
  Description of Artificial Sequence: Synthetic oligonucleotide
uugccucagccaucgcugg

SEQ ID NO: 3091016 - RNA, 19 nt, Artificial Sequence
  Description of Artificial Sequence: Synthetic oligonucleotide
ugucugaggcucagugccc

SEQ ID NO: 3091017 - RNA, 19 nt, Artificial Sequence
  Description of Artificial Sequence: Synthetic oligonucleotide
gcuguugguguucaaugag

SEQ ID NO: 3091018 - RNA, 19 nt, Artificial Sequence
  Description of Artificial Sequence: Synthetic oligonucleotide
gagaccuccaguccuucca

SEQ ID NO: 3091019 - RNA, 19 nt, Artificial Sequence
  Description of Artificial Sequence: Synthetic oligonucleotide
ucucccagggucccuggca

SEQ ID NO: 3091020 - RNA, 19 nt, Artificial Sequence
  Description of Artificial Sequence: Synthetic oligonucleotide
aaggcccugcgaccuggac

SEQ ID NO: 3091021 - RNA, 19 nt, Artificial Sequence
  Description of Artificial Sequence: Synthetic oligonucleotide
aucgcuggcggccuucucu

SEQ ID NO: 3091022 - RNA, 19 nt, Artificial Sequence
  Description of Artificial Sequence: Synthetic oligonucleotide
cuccugagcagagaccucc

SEQ ID NO: 3091023 - RNA, 19 nt, Artificial Sequence
  Description of Artificial Sequence: Synthetic oligonucleotide
gagcagagaccuccagucc

SEQ ID NO: 3091024 - RNA, 19 nt, Artificial Sequence
  Description of Artificial Sequence: Synthetic oligonucleotide
ggucacacugggaagcugg

SEQ ID NO: 3091025 - RNA, 19 nt, Artificial Sequence
  Description of Artificial Sequence: Synthetic oligonucleotide
uucuccuuaccuguuuggu

SEQ ID NO: 3091026 - RNA, 19 nt, Artificial Sequence
  Description of Artificial Sequence: Synthetic oligonucleotide
gucgcuccugagcagagac

SEQ ID NO: 3091027 - RNA, 19 nt, Artificial Sequence
  Description of Artificial Sequence: Synthetic oligonucleotide
ucacagccgcucuagcugu

SEQ ID NO: 3091028 - RNA, 19 nt, Artificial Sequence
  Description of Artificial Sequence: Synthetic oligonucleotide
uggcuuuggaucagcugcu

SEQ ID NO: 3091029 - RNA, 19 nt, Artificial Sequence
  Description of Artificial Sequence: Synthetic oligonucleotide
ucaaggcccugcgaccugg

SEQ ID NO: 3091030 - RNA, 19 nt, Artificial Sequence
  Description of Artificial Sequence: Synthetic oligonucleotide
caaugaggucucuggggag

SEQ ID NO: 3091031 - RNA, 19 nt, Artificial Sequence
  Description of Artificial Sequence: Synthetic oligonucleotide
ugaggcucagugcccggug

SEQ ID NO: 3091032 - RNA, 19 nt, Artificial Sequence
  Description of Artificial Sequence: Synthetic oligonucleotide
uuggaucagcugcucugug

SEQ ID NO: 3091033 - RNA, 19 nt, Artificial Sequence
  Description of Artificial Sequence: Synthetic oligonucleotide
acuucucacggcccugucu

SEQ ID NO: 3091034 - RNA, 19 nt, Artificial Sequence
  Description of Artificial Sequence: Synthetic oligonucleotide
cuuaccuguuugguauugc

SEQ ID NO: 3091035 - RNA, 19 nt, Artificial Sequence
  Description of Artificial Sequence: Synthetic oligonucleotide
ugcgaccuggacuucucac

SEQ ID NO: 3091036 - RNA, 19 nt, Artificial Sequence
  Description of Artificial Sequence: Synthetic oligonucleotide
ucagcugcucugugucucc

SEQ ID NO: 3091037 - RNA, 19 nt, Artificial Sequence
  Description of Artificial Sequence: Synthetic oligonucleotide
ggcuggucgauucaggguc

SEQ ID NO: 3091038 - RNA, 19 nt, Artificial Sequence
  Description of Artificial Sequence: Synthetic oligonucleotide
guugguguucaaugagguc

SEQ ID NO: 3091039 - RNA, 19 nt, Artificial Sequence
  Description of Artificial Sequence: Synthetic oligonucleotide
gcgaccuggacuucucacg

SEQ ID NO: 3091040 - RNA, 19 nt, Artificial Sequence
  Description of Artificial Sequence: Synthetic oligonucleotide
ucugaggcucagugcccgg

SEQ ID NO: 3091041 - RNA, 19 nt, Artificial Sequence
  Description of Artificial Sequence: Synthetic oligonucleotide
cucagugcccgguggaguc

SEQ ID NO: 3091042 - RNA, 19 nt, Artificial Sequence
  Description of Artificial Sequence: Synthetic oligonucleotide
ggcgacaagcucuuccacc

SEQ ID NO: 3091043 - RNA, 19 nt, Artificial Sequence
  Description of Artificial Sequence: Synthetic oligonucleotide
uccaguccuuccaugccau

SEQ ID NO: 3091044 - RNA, 19 nt, Artificial Sequence
  Description of Artificial Sequence: Synthetic oligonucleotide
gguggagugagggacaauc

SEQ ID NO: 3091045 - RNA, 19 nt, Artificial Sequence
  Description of Artificial Sequence: Synthetic oligonucleotide
gccaucaaggcccugcgac

SEQ ID NO: 3091046 - RNA, 19 nt, Artificial Sequence
  Description of Artificial Sequence: Synthetic oligonucleotide
cucacggcccugucugagg

SEQ ID NO: 3091047 - RNA, 19 nt, Artificial Sequence
  Description of Artificial Sequence: Synthetic oligonucleotide
gucugaggcucagugcccg

SEQ ID NO: 3091048 - RNA, 19 nt, Artificial Sequence
  Description of Artificial Sequence: Synthetic oligonucleotide
cuggcggccuucucucugg

SEQ ID NO: 3091049 - RNA, 19 nt, Artificial Sequence
  Description of Artificial Sequence: Synthetic oligonucleotide
ggucgauucagggucacac

SEQ ID NO: 3091050 - RNA, 19 nt, Artificial Sequence
  Description of Artificial Sequence: Synthetic oligonucleotide
ucucacggcccugucugag

SEQ ID NO: 3091051 - RNA, 19 nt, Artificial Sequence
  Description of Artificial Sequence: Synthetic oligonucleotide
caaucacagccgcucuagc

SEQ ID NO: 3091052 - RNA, 19 nt, Artificial Sequence
  Description of Artificial Sequence: Synthetic oligonucleotide
gaggucucuggggaggcug

SEQ ID NO: 3091053 - RNA, 19 nt, Artificial Sequence
  Description of Artificial Sequence: Synthetic oligonucleotide
ucgcuccugagcagagacc

SEQ ID NO: 3091054 - RNA, 19 nt, Artificial Sequence
  Description of Artificial Sequence: Synthetic oligonucleotide
gcuggcgacaagcucuucc

SEQ ID NO: 3091055 - RNA, 19 nt, Artificial Sequence
  Description of Artificial Sequence: Synthetic oligonucleotide
cuggcgacaagcucuucca

SEQ ID NO: 3091056 - RNA, 19 nt, Artificial Sequence
  Description of Artificial Sequence: Synthetic oligonucleotide
ucagugcccgguggagucg

SEQ ID NO: 3091057 - RNA, 19 nt, Artificial Sequence
  Description of Artificial Sequence: Synthetic oligonucleotide
ugucucccagggucccugg

SEQ ID NO: 3091058 - RNA, 19 nt, Artificial Sequence
  Description of Artificial Sequence: Synthetic oligonucleotide
aggcuggucgauucagggu

SEQ ID NO: 3091059 - RNA, 19 nt, Artificial Sequence
  Description of Artificial Sequence: Synthetic oligonucleotide
ugguauugccucagccauc

SEQ ID NO: 3091060 - RNA, 19 nt, Artificial Sequence
  Description of Artificial Sequence: Synthetic oligonucleotide
uggggaggcuggucgauuc

SEQ ID NO: 3091061 - RNA, 19 nt, Artificial Sequence
  Description of Artificial Sequence: Synthetic oligonucleotide
guccuuccaugccaucaag

SEQ ID NO: 3091062 - RNA, 19 nt, Artificial Sequence
  Description of Artificial Sequence: Synthetic oligonucleotide
gaccuggacuucucacggc

SEQ ID NO: 3091063 - RNA, 19 nt, Artificial Sequence
  Description of Artificial Sequence: Synthetic oligonucleotide
cuccuuaccuguuugguau

SEQ ID NO: 3091064 - RNA, 19 nt, Artificial Sequence
  Description of Artificial Sequence: Synthetic oligonucleotide
uggcgacaagcucuuccac

SEQ ID NO: 3091065 - RNA, 19 nt, Artificial Sequence
  Description of Artificial Sequence: Synthetic oligonucleotide
acggcccugucugaggcuc

SEQ ID NO: 3091066 - RNA, 19 nt, Artificial Sequence
  Description of Artificial Sequence: Synthetic oligonucleotide
ugccaucaaggcccugcga

SEQ ID NO: 3091067 - RNA, 19 nt, Artificial Sequence
  Description of Artificial Sequence: Synthetic oligonucleotide
ggagugagggacaaucaca

SEQ ID NO: 3091068 - RNA, 19 nt, Artificial Sequence
  Description of Artificial Sequence: Synthetic oligonucleotide
agaccuccaguccuuccau

SEQ ID NO: 3091069 - RNA, 19 nt, Artificial Sequence
  Description of Artificial Sequence: Synthetic oligonucleotide
ugccucagccaucgcuggc

SEQ ID NO: 3091070 - RNA, 19 nt, Artificial Sequence
  Description of Artificial Sequence: Synthetic oligonucleotide
gacaaucacagccgcucua

SEQ ID NO: 3091071 - RNA, 19 nt, Artificial Sequence
  Description of Artificial Sequence: Synthetic oligonucleotide
gggacaaucacagccgcuc

SEQ ID NO: 3091072 - RNA, 19 nt, Artificial Sequence
  Description of Artificial Sequence: Synthetic oligonucleotide
guguucaaugaggucucug

SEQ ID NO: 3091073 - RNA, 19 nt, Artificial Sequence
  Description of Artificial Sequence: Synthetic oligonucleotide
cuuccaccuucuccuuacc

SEQ ID NO: 3091074 - RNA, 19 nt, Artificial Sequence
  Description of Artificial Sequence: Synthetic oligonucleotide
cagccgcucuagcuguugg

SEQ ID NO: 3091075 - RNA, 19 nt, Artificial Sequence
  Description of Artificial Sequence: Synthetic oligonucleotide
ccugucugaggcucagugc

SEQ ID NO: 3091076 - RNA, 19 nt, Artificial Sequence
  Description of Artificial Sequence: Synthetic oligonucleotide
acaagcucuuccaccuucu

SEQ ID NO: 3091077 - RNA, 19 nt, Artificial Sequence
  Description of Artificial Sequence: Synthetic oligonucleotide
ucgcuggcggccuucucuc

SEQ ID NO: 3091078 - RNA, 19 nt, Artificial Sequence
  Description of Artificial Sequence: Synthetic oligonucleotide
cgauucagggucacacugg

SEQ ID NO: 3091079 - RNA, 19 nt, Artificial Sequence
  Description of Artificial Sequence: Synthetic oligonucleotide
uucucacggcccugucuga

SEQ ID NO: 3091080 - RNA, 19 nt, Artificial Sequence
  Description of Artificial Sequence: Synthetic oligonucleotide
ucuagcuguugguguucaa

SEQ ID NO: 3091081 - RNA, 19 nt, Artificial Sequence
  Description of Artificial Sequence: Synthetic oligonucleotide
ggaagcuggcgacaagcuc

SEQ ID NO: 3091082 - RNA, 19 nt, Artificial Sequence
  Description of Artificial Sequence: Synthetic oligonucleotide
acugggaagcuggcgacaa

SEQ ID NO: 3091083 - RNA, 19 nt, Artificial Sequence
  Description of Artificial Sequence: Synthetic oligonucleotide
aucaaggcccugcgaccug

SEQ ID NO: 3091084 - RNA, 19 nt, Artificial Sequence
  Description of Artificial Sequence: Synthetic oligonucleotide
uggacuucucacggcccug

SEQ ID NO: 3091085 - RNA, 19 nt, Artificial Sequence
  Description of Artificial Sequence: Synthetic oligonucleotide
caguccuuccaugccauca

SEQ ID NO: 3091086 - RNA, 19 nt, Artificial Sequence
  Description of Artificial Sequence: Synthetic oligonucleotide
uccuuaccuguuugguauu

SEQ ID NO: 3091087 - RNA, 19 nt, Artificial Sequence
  Description of Artificial Sequence: Synthetic oligonucleotide
cagucgcuccugagcagag

SEQ ID NO: 3091088 - RNA, 19 nt, Artificial Sequence
  Description of Artificial Sequence: Synthetic oligonucleotide
accuucuccuuaccuguuu

SEQ ID NO: 3091089 - RNA, 19 nt, Artificial Sequence
  Description of Artificial Sequence: Synthetic oligonucleotide
guggagugagggacaauca

SEQ ID NO: 3091090 - RNA, 19 nt, Artificial Sequence
  Description of Artificial Sequence: Synthetic oligonucleotide
cgaccuggacuucucacgg

SEQ ID NO: 3091091 - RNA, 19 nt, Artificial Sequence
  Description of Artificial Sequence: Synthetic oligonucleotide
gucacacugggaagcuggc

SEQ ID NO: 3091092 - RNA, 19 nt, Artificial Sequence
  Description of Artificial Sequence: Synthetic oligonucleotide
caagcucuuccaccuucuc

SEQ ID NO: 3091093 - RNA, 19 nt, Artificial Sequence
  Description of Artificial Sequence: Synthetic oligonucleotide
agccgcucuagcuguuggu

SEQ ID NO: 3091094 - RNA, 19 nt, Artificial Sequence
  Description of Artificial Sequence: Synthetic oligonucleotide
aggcucagugcccggugga

SEQ ID NO: 3091095 - RNA, 19 nt, Artificial Sequence
  Description of Artificial Sequence: Synthetic oligonucleotide
gccucagccaucgcuggcg

SEQ ID NO: 3091096 - RNA, 19 nt, Artificial Sequence
  Description of Artificial Sequence: Synthetic oligonucleotide
ggaggcuggucgauucagg

SEQ ID NO: 3091097 - RNA, 19 nt, Artificial Sequence
  Description of Artificial Sequence: Synthetic oligonucleotide
cucagccaucgcuggcggc

SEQ ID NO: 3091098 - RNA, 19 nt, Artificial Sequence
  Description of Artificial Sequence: Synthetic oligonucleotide
cccugucugaggcucagug

SEQ ID NO: 3091099 - RNA, 19 nt, Artificial Sequence
  Description of Artificial Sequence: Synthetic oligonucleotide
cugggaagcuggcgacaag

SEQ ID NO: 3091100 - RNA, 19 nt, Artificial Sequence
  Description of Artificial Sequence: Synthetic oligonucleotide
gucgauucagggucacacu

SEQ ID NO: 3091101 - RNA, 19 nt, Artificial Sequence
  Description of Artificial Sequence: Synthetic oligonucleotide
cucucuggcuuuggaucag

SEQ ID NO: 3091102 - RNA, 19 nt, Artificial Sequence
  Description of Artificial Sequence: Synthetic oligonucleotide
cuucucucuggcuuuggau

SEQ ID NO: 3091103 - RNA, 19 nt, Artificial Sequence
  Description of Artificial Sequence: Synthetic oligonucleotide
agggucacacugggaagcu

SEQ ID NO: 3091104 - RNA, 19 nt, Artificial Sequence
  Description of Artificial Sequence: Synthetic oligonucleotide
uggcggccuucucucuggc

SEQ ID NO: 3091105 - RNA, 19 nt, Artificial Sequence
  Description of Artificial Sequence: Synthetic oligonucleotide
gacuucucacggcccuguc

SEQ ID NO: 3091106 - RNA, 19 nt, Artificial Sequence
  Description of Artificial Sequence: Synthetic oligonucleotide
cugugucucccaggguccc

SEQ ID NO: 3091107 - RNA, 19 nt, Artificial Sequence
  Description of Artificial Sequence: Synthetic oligonucleotide
cugagcagagaccuccagu

SEQ ID NO: 3091108 - RNA, 19 nt, Artificial Sequence
  Description of Artificial Sequence: Synthetic oligonucleotide
cagugcccgguggagucgg

SEQ ID NO: 3091109 - RNA, 19 nt, Artificial Sequence
  Description of Artificial Sequence: Synthetic oligonucleotide
ccuggacuucucacggccc

SEQ ID NO: 3091110 - RNA, 19 nt, Artificial Sequence
  Description of Artificial Sequence: Synthetic oligonucleotide
gcgacaagcucuuccaccu

SEQ ID NO: 3091111 - RNA, 19 nt, Artificial Sequence
  Description of Artificial Sequence: Synthetic oligonucleotide
ggucccuggcagucgcucc

SEQ ID NO: 3091112 - RNA, 19 nt, Artificial Sequence
  Description of Artificial Sequence: Synthetic oligonucleotide
uggucgauucagggucaca

SEQ ID NO: 3091113 - RNA, 19 nt, Artificial Sequence
  Description of Artificial Sequence: Synthetic oligonucleotide
gugucucccagggucccug

SEQ ID NO: 3091114 - RNA, 19 nt, Artificial Sequence
  Description of Artificial Sequence: Synthetic oligonucleotide
ucuggggaggcuggucgau

SEQ ID NO: 3091115 - RNA, 19 nt, Artificial Sequence
  Description of Artificial Sequence: Synthetic oligonucleotide
ugugucucccagggucccu

SEQ ID NO: 3091116 - RNA, 19 nt, Artificial Sequence
  Description of Artificial Sequence: Synthetic oligonucleotide
aagcuggcgacaagcucuu

SEQ ID NO: 3091117 - RNA, 19 nt, Artificial Sequence
  Description of Artificial Sequence: Synthetic oligonucleotide
auucagggucacacuggga

SEQ ID NO: 3091118 - RNA, 19 nt, Artificial Sequence
  Description of Artificial Sequence: Synthetic oligonucleotide
guauugccucagccaucgc

SEQ ID NO: 3091119 - RNA, 19 nt, Artificial Sequence
  Description of Artificial Sequence: Synthetic oligonucleotide
ugaggucucuggggaggcu

SEQ ID NO: 3091120 - RNA, 19 nt, Artificial Sequence
  Description of Artificial Sequence: Synthetic oligonucleotide
ucccagggucccuggcagu

SEQ ID NO: 3091121 - RNA, 19 nt, Artificial Sequence
  Description of Artificial Sequence: Synthetic oligonucleotide
cucuagcuguugguguuca

SEQ ID NO: 3091122 - RNA, 19 nt, Artificial Sequence
  Description of Artificial Sequence: Synthetic oligonucleotide
gccgcucuagcuguuggug

SEQ ID NO: 3091123 - RNA, 19 nt, Artificial Sequence
  Description of Artificial Sequence: Synthetic oligonucleotide
ggcagucgcuccugagcag

SEQ ID NO: 3091124 - RNA, 19 nt, Artificial Sequence
  Description of Artificial Sequence: Synthetic oligonucleotide
agggacaaucacagccgcu

SEQ ID NO: 3091125 - RNA, 19 nt, Artificial Sequence
  Description of Artificial Sequence: Synthetic oligonucleotide
cuagcuguugguguucaau

SEQ ID NO: 3091126 - RNA, 19 nt, Artificial Sequence
  Description of Artificial Sequence: Synthetic oligonucleotide
ccuguuugguauugccuca

SEQ ID NO: 3091127 - RNA, 19 nt, Artificial Sequence
  Description of Artificial Sequence: Synthetic oligonucleotide
cucuggggaggcuggucga

SEQ ID NO: 3091128 - RNA, 19 nt, Artificial Sequence
  Description of Artificial Sequence: Synthetic oligonucleotide
cagcugcucugugucuccc

SEQ ID NO: 3091129 - RNA, 19 nt, Artificial Sequence
  Description of Artificial Sequence: Synthetic oligonucleotide
agucgcuccugagcagaga

SEQ ID NO: 3091130 - RNA, 19 nt, Artificial Sequence
  Description of Artificial Sequence: Synthetic oligonucleotide
ccuuaccuguuugguauug

SEQ ID NO: 3091131 - RNA, 19 nt, Artificial Sequence
  Description of Artificial Sequence: Synthetic oligonucleotide
cuggucgauucagggucac

SEQ ID NO: 3091132 - RNA, 19 nt, Artificial Sequence
  Description of Artificial Sequence: Synthetic oligonucleotide
ccucagccaucgcuggcgg

SEQ ID NO: 3091133 - RNA, 19 nt, Artificial Sequence
  Description of Artificial Sequence: Synthetic oligonucleotide
caucaaggcccugcgaccu

SEQ ID NO: 3091134 - RNA, 19 nt, Artificial Sequence
  Description of Artificial Sequence: Synthetic oligonucleotide
cuggacuucucacggcccu

SEQ ID NO: 3091135 - RNA, 19 nt, Artificial Sequence
  Description of Artificial Sequence: Synthetic oligonucleotide
cagagaccuccaguccuuc

SEQ ID NO: 3091136 - RNA, 19 nt, Artificial Sequence
  Description of Artificial Sequence: Synthetic oligonucleotide
agugcccgguggagucggc

SEQ ID NO: 3091137 - RNA, 19 nt, Artificial Sequence
  Description of Artificial Sequence: Synthetic oligonucleotide
ggcucagugcccgguggag

SEQ ID NO: 3091138 - RNA, 19 nt, Artificial Sequence
  Description of Artificial Sequence: Synthetic oligonucleotide
gcagucgcuccugagcaga

SEQ ID NO: 3091139 - RNA, 19 nt, Artificial Sequence
  Description of Artificial Sequence: Synthetic oligonucleotide
cucuggcuuuggaucagcu

SEQ ID NO: 3091140 - RNA, 19 nt, Artificial Sequence
  Description of Artificial Sequence: Synthetic oligonucleotide
cugcgaccuggacuucuca

SEQ ID NO: 3091141 - RNA, 19 nt, Artificial Sequence
  Description of Artificial Sequence: Synthetic oligonucleotide
ggacaaucacagccgcucu

SEQ ID NO: 3091142 - RNA, 19 nt, Artificial Sequence
  Description of Artificial Sequence: Synthetic oligonucleotide
gucucuggggaggcugguc

SEQ ID NO: 3091143 - RNA, 19 nt, Artificial Sequence
  Description of Artificial Sequence: Synthetic oligonucleotide
ggcccugcgaccuggacuu

SEQ ID NO: 3091144 - RNA, 19 nt, Artificial Sequence
  Description of Artificial Sequence: Synthetic oligonucleotide
ccaccuucuccuuaccugu

SEQ ID NO: 3091145 - RNA, 19 nt, Artificial Sequence
  Description of Artificial Sequence: Synthetic oligonucleotide
gucccuggcagucgcuccu

SEQ ID NO: 3091146 - RNA, 19 nt, Artificial Sequence
  Description of Artificial Sequence: Synthetic oligonucleotide
agcuggcgacaagcucuuc

SEQ ID NO: 3091147 - RNA, 19 nt, Artificial Sequence
  Description of Artificial Sequence: Synthetic oligonucleotide
cacugggaagcuggcgaca

SEQ ID NO: 3091148 - RNA, 19 nt, Artificial Sequence
  Description of Artificial Sequence: Synthetic oligonucleotide
ccugcgaccuggacuucuc

SEQ ID NO: 3091149 - RNA, 19 nt, Artificial Sequence
  Description of Artificial Sequence: Synthetic oligonucleotide
ggggaggcuggucgauuca

SEQ ID NO: 3091150 - RNA, 19 nt, Artificial Sequence
  Description of Artificial Sequence: Synthetic oligonucleotide
ccuucucucuggcuuugga

SEQ ID NO: 3091151 - RNA, 19 nt, Artificial Sequence
  Description of Artificial Sequence: Synthetic oligonucleotide
caucgcuggcggccuucuc

SEQ ID NO: 3091152 - RNA, 19 nt, Artificial Sequence
  Description of Artificial Sequence: Synthetic oligonucleotide
gggucacacugggaagcug

SEQ ID NO: 3091153 - RNA, 19 nt, Artificial Sequence
  Description of Artificial Sequence: Synthetic oligonucleotide
gcucuagcuguugguguuc

SEQ ID NO: 3091154 - RNA, 19 nt, Artificial Sequence
  Description of Artificial Sequence: Synthetic oligonucleotide
gcuggucgauucaggguca

SEQ ID NO: 3091155 - RNA, 19 nt, Artificial Sequence
  Description of Artificial Sequence: Synthetic oligonucleotide
ggcuuuggaucagcugcuc

SEQ ID NO: 3091156 - RNA, 19 nt, Artificial Sequence
  Description of Artificial Sequence: Synthetic oligonucleotide
gcggccuucucucuggcuu

SEQ ID NO: 3091157 - RNA, 19 nt, Artificial Sequence
  Description of Artificial Sequence: Synthetic oligonucleotide
ggcccugucugaggcucag

SEQ ID NO: 3091158 - RNA, 19 nt, Artificial Sequence
  Description of Artificial Sequence: Synthetic oligonucleotide
gggaagcuggcgacaagcu

SEQ ID NO: 3091159 - RNA, 19 nt, Artificial Sequence
  Description of Artificial Sequence: Synthetic oligonucleotide
gggucccuggcagucgcuc

SEQ ID NO: 3091160 - RNA, 19 nt, Artificial Sequence
  Description of Artificial Sequence: Synthetic oligonucleotide
ccaguccuuccaugccauc

SEQ ID NO: 3091161 - RNA, 19 nt, Artificial Sequence
  Description of Artificial Sequence: Synthetic oligonucleotide
agggucccuggcagucgcu

SEQ ID NO: 3091162 - RNA, 19 nt, Artificial Sequence
  Description of Artificial Sequence: Synthetic oligonucleotide
gccgguggagugagggaca

SEQ ID NO: 3091163 - RNA, 19 nt, Artificial Sequence
  Description of Artificial Sequence: Synthetic oligonucleotide
cugaggcucagugcccggu

SEQ ID NO: 3091164 - RNA, 19 nt, Artificial Sequence
  Description of Artificial Sequence: Synthetic oligonucleotide
agccaucgcuggcggccuu

SEQ ID NO: 3091165 - RNA, 19 nt, Artificial Sequence
  Description of Artificial Sequence: Synthetic oligonucleotide
ggacuucucacggcccugu

SEQ ID NO: 3091166 - RNA, 19 nt, Artificial Sequence
  Description of Artificial Sequence: Synthetic oligonucleotide
gguguucaaugaggucucu

SEQ ID NO: 3091167 - RNA, 19 nt, Artificial Sequence
  Description of Artificial Sequence: Synthetic oligonucleotide
caccuucuccuuaccuguu

SEQ ID NO: 3091168 - RNA, 19 nt, Artificial Sequence
  Description of Artificial Sequence: Synthetic oligonucleotide
ccgcucuagcuguuggugu

SEQ ID NO: 3091169 - RNA, 19 nt, Artificial Sequence
  Description of Artificial Sequence: Synthetic oligonucleotide
gcuccugagcagagaccuc

SEQ ID NO: 3091170 - RNA, 19 nt, Artificial Sequence
  Description of Artificial Sequence: Synthetic oligonucleotide
cacggcccugucugaggcu

SEQ ID NO: 3091171 - RNA, 19 nt, Artificial Sequence
  Description of Artificial Sequence: Synthetic oligonucleotide
gcucagugcccgguggagu

SEQ ID NO: 3091172 - RNA, 19 nt, Artificial Sequence
  Description of Artificial Sequence: Synthetic oligonucleotide
gccaucgcuggcggccuuc

SEQ ID NO: 3091173 - RNA, 19 nt, Artificial Sequence
  Description of Artificial Sequence: Synthetic oligonucleotide
gcagagaccuccaguccuu

SEQ ID NO: 3091174 - RNA, 19 nt, Artificial Sequence
  Description of Artificial Sequence: Synthetic oligonucleotide
ggcggccuucucucuggcu

SEQ ID NO: 3091175 - RNA, 19 nt, Artificial Sequence
  Description of Artificial Sequence: Synthetic oligonucleotide
cagccaucgcuggcggccu

SEQ ID NO: 3091176 - RNA, 19 nt, Artificial Sequence
  Description of Artificial Sequence: Synthetic oligonucleotide
cacagccgcucuagcuguu

SEQ ID NO: 3091177 - RNA, 19 nt, Artificial Sequence
  Description of Artificial Sequence: Synthetic oligonucleotide
cuggggaggcuggucgauu

SEQ ID NO: 3091178 - RNA, 19 nt, Artificial Sequence
  Description of Artificial Sequence: Synthetic oligonucleotide
ccgguggagugagggacaa

SEQ ID NO: 3091179 - RNA, 19 nt, Artificial Sequence
  Description of Artificial Sequence: Synthetic oligonucleotide
ggucucuggggaggcuggu

SEQ ID NO: 3091180 - RNA, 19 nt, Artificial Sequence
  Description of Artificial Sequence: Synthetic oligonucleotide
cccuggcagucgcuccuga

SEQ ID NO: 3091181 - RNA, 19 nt, Artificial Sequence
  Description of Artificial Sequence: Synthetic oligonucleotide
cgcucuagcuguugguguu

SEQ ID NO: 3091182 - RNA, 19 nt, Artificial Sequence
  Description of Artificial Sequence: Synthetic oligonucleotide
ccaugccaucaaggcccug

SEQ ID NO: 3091183 - RNA, 19 nt, Artificial Sequence
  Description of Artificial Sequence: Synthetic oligonucleotide
cccugcgaccuggacuucu

SEQ ID NO: 3091184 - RNA, 19 nt, Artificial Sequence
  Description of Artificial Sequence: Synthetic oligonucleotide
cggcccugucugaggcuca

SEQ ID NO: 3091185 - RNA, 19 nt, Artificial Sequence
  Description of Artificial Sequence: Synthetic oligonucleotide
ccaucgcuggcggccuucu

SEQ ID NO: 3091186 - RNA, 19 nt, Artificial Sequence
  Description of Artificial Sequence: Synthetic oligonucleotide
gcccugucugaggcucagu

SEQ ID NO: 3091187 - RNA, 19 nt, Artificial Sequence
  Description of Artificial Sequence: Synthetic oligonucleotide
cgacaagcucuuccaccuu

SEQ ID NO: 3091188 - RNA, 19 nt, Artificial Sequence
  Description of Artificial Sequence: Synthetic oligonucleotide
cgguggagugagggacaau

SEQ ID NO: 3091189 - RNA, 19 nt, Artificial Sequence
  Description of Artificial Sequence: Synthetic oligonucleotide
ucgaggaagaucuugagga

SEQ ID NO: 3091190 - RNA, 19 nt, Artificial Sequence
  Description of Artificial Sequence: Synthetic oligonucleotide
uagacgacguccauggcgg

SEQ ID NO: 3091191 - RNA, 19 nt, Artificial Sequence
  Description of Artificial Sequence: Synthetic oligonucleotide
auagacgacguccauggcg

SEQ ID NO: 3091192 - RNA, 19 nt, Artificial Sequence
  Description of Artificial Sequence: Synthetic oligonucleotide
aagaucuugaggacgccgc

SEQ ID NO: 3091193 - RNA, 19 nt, Artificial Sequence
  Description of Artificial Sequence: Synthetic oligonucleotide
gauguugucgcggaggacc

SEQ ID NO: 3091194 - RNA, 19 nt, Artificial Sequence
  Description of Artificial Sequence: Synthetic oligonucleotide
ucguagaugagcccggaga

SEQ ID NO: 3091195 - RNA, 19 nt, Artificial Sequence
  Description of Artificial Sequence: Synthetic oligonucleotide
aggaagaucuugaggacgc

SEQ ID NO: 3091196 - RNA, 19 nt, Artificial Sequence
  Description of Artificial Sequence: Synthetic oligonucleotide
uucucgaggaagaucuuga

SEQ ID NO: 3091197 - RNA, 19 nt, Artificial Sequence
  Description of Artificial Sequence: Synthetic oligonucleotide
gaugacguucucgaggaag

SEQ ID NO: 3091198 - RNA, 19 nt, Artificial Sequence
  Description of Artificial Sequence: Synthetic oligonucleotide
augcccuggauguugucgc

SEQ ID NO: 3091199 - RNA, 19 nt, Artificial Sequence
  Description of Artificial Sequence: Synthetic oligonucleotide
gaggaagaucuugaggacg

SEQ ID NO: 3091200 - RNA, 19 nt, Artificial Sequence
  Description of Artificial Sequence: Synthetic oligonucleotide
gcauagacgacguccaugg

SEQ ID NO: 3091201 - RNA, 19 nt, Artificial Sequence
  Description of Artificial Sequence: Synthetic oligonucleotide
cuuccuguggcgcuuggcg

SEQ ID NO: 3091202 - RNA, 19 nt, Artificial Sequence
  Description of Artificial Sequence: Synthetic oligonucleotide
gaagaucuugaggacgccg

SEQ ID NO: 3091203 - RNA, 19 nt, Artificial Sequence
  Description of Artificial Sequence: Synthetic oligonucleotide
gaugcccuggauguugucg

SEQ ID NO: 3091204 - RNA, 19 nt, Artificial Sequence
  Description of Artificial Sequence: Synthetic oligonucleotide
aagccguagagggugcggc

SEQ ID NO: 3091205 - RNA, 19 nt, Artificial Sequence
  Description of Artificial Sequence: Synthetic oligonucleotide
cucgaggaagaucuugagg

SEQ ID NO: 3091206 - RNA, 19 nt, Artificial Sequence
  Description of Artificial Sequence: Synthetic oligonucleotide
acguccauggcggugacgg

SEQ ID NO: 3091207 - RNA, 19 nt, Artificial Sequence
  Description of Artificial Sequence: Synthetic oligonucleotide
uggauguugucgcggagga

SEQ ID NO: 3091208 - RNA, 19 nt, Artificial Sequence
  Description of Artificial Sequence: Synthetic oligonucleotide
agaucuugaggacgccgcg

SEQ ID NO: 3091209 - RNA, 19 nt, Artificial Sequence
  Description of Artificial Sequence: Synthetic oligonucleotide
acguucucgaggaagaucu

SEQ ID NO: 3091210 - RNA, 19 nt, Artificial Sequence
  Description of Artificial Sequence: Synthetic oligonucleotide
ugcucgguguaggugacgg

SEQ ID NO: 3091211 - RNA, 19 nt, Artificial Sequence
  Description of Artificial Sequence: Synthetic oligonucleotide
cucgguguaggugacggcg

SEQ ID NO: 3091212 - RNA, 19 nt, Artificial Sequence
  Description of Artificial Sequence: Synthetic oligonucleotide
auggcggugacggucuugc

SEQ ID NO: 3091213 - RNA, 19 nt, Artificial Sequence
  Description of Artificial Sequence: Synthetic oligonucleotide
ucucgaggaagaucuugag

SEQ ID NO: 3091214 - RNA, 19 nt, Artificial Sequence
  Description of Artificial Sequence: Synthetic oligonucleotide
cuuggcgccgcccuugccg

SEQ ID NO: 3091215 - RNA, 19 nt, Artificial Sequence
  Description of Artificial Sequence: Synthetic oligonucleotide
gagggugcggcccuggcgc

SEQ ID NO: 3091216 - RNA, 19 nt, Artificial Sequence
  Description of Artificial Sequence: Synthetic oligonucleotide
cuugagcgcauagacgacg

SEQ ID NO: 3091217 - RNA, 19 nt, Artificial Sequence
  Description of Artificial Sequence: Synthetic oligonucleotide
gagcgcauagacgacgucc

SEQ ID NO: 3091218 - RNA, 19 nt, Artificial Sequence
  Description of Artificial Sequence: Synthetic oligonucleotide
gacgccgcgggucuccucg

SEQ ID NO: 3091219 - RNA, 19 nt, Artificial Sequence
  Description of Artificial Sequence: Synthetic oligonucleotide
aucgccggcuuggugaugc

SEQ ID NO: 3091220 - RNA, 19 nt, Artificial Sequence
  Description of Artificial Sequence: Synthetic oligonucleotide
uccucguagaugagcccgg

SEQ ID NO: 3091221 - RNA, 19 nt, Artificial Sequence
  Description of Artificial Sequence: Synthetic oligonucleotide
uugacgccgccccuccugg

SEQ ID NO: 3091222 - RNA, 19 nt, Artificial Sequence
  Description of Artificial Sequence: Synthetic oligonucleotide
uugagcgcauagacgacgu

SEQ ID NO: 3091223 - RNA, 19 nt, Artificial Sequence
  Description of Artificial Sequence: Synthetic oligonucleotide
cuccucguagaugagcccg

SEQ ID NO: 3091224 - RNA, 19 nt, Artificial Sequence
  Description of Artificial Sequence: Synthetic oligonucleotide
ucgcggaugacguucucga

SEQ ID NO: 3091225 - RNA, 19 nt, Artificial Sequence
  Description of Artificial Sequence: Synthetic oligonucleotide
guaggugacggcgucgcgg

SEQ ID NO: 3091226 - RNA, 19 nt, Artificial Sequence
  Description of Artificial Sequence: Synthetic oligonucleotide
cuggauguugucgcggagg

SEQ ID NO: 3091227 - RNA, 19 nt, Artificial Sequence
  Description of Artificial Sequence: Synthetic oligonucleotide
gacggcgucgcggaugacg

SEQ ID NO: 3091228 - RNA, 19 nt, Artificial Sequence
  Description of Artificial Sequence: Synthetic oligonucleotide
cuugcggcgggcgugcucg

SEQ ID NO: 3091229 - RNA, 19 nt, Artificial Sequence
  Description of Artificial Sequence: Synthetic oligonucleotide
gucuccucguagaugagcc

SEQ ID NO: 3091230 - RNA, 19 nt, Artificial Sequence
  Description of Artificial Sequence: Synthetic oligonucleotide
uuccuguggcgcuuggcgc

SEQ ID NO: 3091231 - RNA, 19 nt, Artificial Sequence
  Description of Artificial Sequence: Synthetic oligonucleotide
uccuguggcgcuuggcgcc

SEQ ID NO: 3091232 - RNA, 19 nt, Artificial Sequence
  Description of Artificial Sequence: Synthetic oligonucleotide
ucgcggaggaccuuccugu

SEQ ID NO: 3091233 - RNA, 19 nt, Artificial Sequence
  Description of Artificial Sequence: Synthetic oligonucleotide
uguaggugacggcgucgcg

SEQ ID NO: 3091234 - RNA, 19 nt, Artificial Sequence
  Description of Artificial Sequence: Synthetic oligonucleotide
gcggaugacguucucgagg

SEQ ID NO: 3091235 - RNA, 19 nt, Artificial Sequence
  Description of Artificial Sequence: Synthetic oligonucleotide
uaggugacggcgucgcgga

SEQ ID NO: 3091236 - RNA, 19 nt, Artificial Sequence
  Description of Artificial Sequence: Synthetic oligonucleotide
uugaggacgccgcgggucu

SEQ ID NO: 3091237 - RNA, 19 nt, Artificial Sequence
  Description of Artificial Sequence: Synthetic oligonucleotide
ggagaugcgcuugacgccg

SEQ ID NO: 3091238 - RNA, 19 nt, Artificial Sequence
  Description of Artificial Sequence: Synthetic oligonucleotide
gaugagcccggagaugcgc

SEQ ID NO: 3091239 - RNA, 19 nt, Artificial Sequence
  Description of Artificial Sequence: Synthetic oligonucleotide
agccccuugccucccuuac

SEQ ID NO: 3091240 - RNA, 19 nt, Artificial Sequence
  Description of Artificial Sequence: Synthetic oligonucleotide
guucucgaggaagaucuug

SEQ ID NO: 3091241 - RNA, 19 nt, Artificial Sequence
  Description of Artificial Sequence: Synthetic oligonucleotide
gaagccguagagggugcgg

SEQ ID NO: 3091242 - RNA, 19 nt, Artificial Sequence
  Description of Artificial Sequence: Synthetic oligonucleotide
ggcgcuugagcgcauagac

SEQ ID NO: 3091243 - RNA, 19 nt, Artificial Sequence
  Description of Artificial Sequence: Synthetic oligonucleotide
ucuccucguagaugagccc

SEQ ID NO: 3091244 - RNA, 19 nt, Artificial Sequence
  Description of Artificial Sequence: Synthetic oligonucleotide
agaugcgcuugacgccgcc

SEQ ID NO: 3091245 - RNA, 19 nt, Artificial Sequence
  Description of Artificial Sequence: Synthetic oligonucleotide
ucccuuaccgcguccggac

SEQ ID NO: 3091246 - RNA, 19 nt, Artificial Sequence
  Description of Artificial Sequence: Synthetic oligonucleotide
ggcggugacggucuugcgg

SEQ ID NO: 3091247 - RNA, 19 nt, Artificial Sequence
  Description of Artificial Sequence: Synthetic oligonucleotide
ucgguguaggugacggcgu

SEQ ID NO: 3091248 - RNA, 19 nt, Artificial Sequence
  Description of Artificial Sequence: Synthetic oligonucleotide
augacguucucgaggaaga

SEQ ID NO: 3091249 - RNA, 19 nt, Artificial Sequence
  Description of Artificial Sequence: Synthetic oligonucleotide
ugcccuggauguugucgcg

SEQ ID NO: 3091250 - RNA, 19 nt, Artificial Sequence
  Description of Artificial Sequence: Synthetic oligonucleotide
gucgcggaugacguucucg

SEQ ID NO: 3091251 - RNA, 19 nt, Artificial Sequence
  Description of Artificial Sequence: Synthetic oligonucleotide
gugacggucuugcggcggg

SEQ ID NO: 3091252 - RNA, 19 nt, Artificial Sequence
  Description of Artificial Sequence: Synthetic oligonucleotide
cuugacgccgccccuccug

SEQ ID NO: 3091253 - RNA, 19 nt, Artificial Sequence
  Description of Artificial Sequence: Synthetic oligonucleotide
aggaccuuccuguggcgcu

SEQ ID NO: 3091254 - RNA, 19 nt, Artificial Sequence
  Description of Artificial Sequence: Synthetic oligonucleotide
ccgccgaagccguagaggg

SEQ ID NO: 3091255 - RNA, 19 nt, Artificial Sequence
  Description of Artificial Sequence: Synthetic oligonucleotide
gcggugacggucuugcggc

SEQ ID NO: 3091256 - RNA, 19 nt, Artificial Sequence
  Description of Artificial Sequence: Synthetic oligonucleotide
gacguucucgaggaagauc

SEQ ID NO: 3091257 - RNA, 19 nt, Artificial Sequence
  Description of Artificial Sequence: Synthetic oligonucleotide
gucgcggaggaccuuccug

SEQ ID NO: 3091258 - RNA, 19 nt, Artificial Sequence
  Description of Artificial Sequence: Synthetic oligonucleotide
gaggaccuuccuguggcgc

SEQ ID NO: 3091259 - RNA, 19 nt, Artificial Sequence
  Description of Artificial Sequence: Synthetic oligonucleotide
cuugaggacgccgcggguc

SEQ ID NO: 3091260 - RNA, 19 nt, Artificial Sequence
  Description of Artificial Sequence: Synthetic oligonucleotide
ucuugaggacgccgcgggu

SEQ ID NO: 3091261 - RNA, 19 nt, Artificial Sequence
  Description of Artificial Sequence: Synthetic oligonucleotide
agcgcauagacgacgucca

SEQ ID NO: 3091262 - RNA, 19 nt, Artificial Sequence
  Description of Artificial Sequence: Synthetic oligonucleotide
uugucgcggaggaccuucc

SEQ ID NO: 3091263 - RNA, 19 nt, Artificial Sequence
  Description of Artificial Sequence: Synthetic oligonucleotide
cauagacgacguccauggc

SEQ ID NO: 3091264 - RNA, 19 nt, Artificial Sequence
  Description of Artificial Sequence: Synthetic oligonucleotide
guagaugagcccggagaug

SEQ ID NO: 3091265 - RNA, 19 nt, Artificial Sequence
  Description of Artificial Sequence: Synthetic oligonucleotide
cucguagaugagcccggag

SEQ ID NO: 3091266 - RNA, 19 nt, Artificial Sequence
  Description of Artificial Sequence: Synthetic oligonucleotide
gacggucuugcggcgggcg

SEQ ID NO: 3091267 - RNA, 19 nt, Artificial Sequence
  Description of Artificial Sequence: Synthetic oligonucleotide
guguaggugacggcgucgc

SEQ ID NO: 3091268 - RNA, 19 nt, Artificial Sequence
  Description of Artificial Sequence: Synthetic oligonucleotide
gacgccgccccuccuggcc

SEQ ID NO: 3091269 - RNA, 19 nt, Artificial Sequence
  Description of Artificial Sequence: Synthetic oligonucleotide
ccuugccucccuuaccgcg

SEQ ID NO: 3091270 - RNA, 19 nt, Artificial Sequence
  Description of Artificial Sequence: Synthetic oligonucleotide
uuggcgccgcccuugccga

SEQ ID NO: 3091271 - RNA, 19 nt, Artificial Sequence
  Description of Artificial Sequence: Synthetic oligonucleotide
acgacguccauggcgguga

SEQ ID NO: 3091272 - RNA, 19 nt, Artificial Sequence
  Description of Artificial Sequence: Synthetic oligonucleotide
ccccuugccucccuuaccg

SEQ ID NO: 3091273 - RNA, 19 nt, Artificial Sequence
  Description of Artificial Sequence: Synthetic oligonucleotide
ugccgagccccuugccucc

SEQ ID NO: 3091274 - RNA, 19 nt, Artificial Sequence
  Description of Artificial Sequence: Synthetic oligonucleotide
gaugcgcuugacgccgccc

SEQ ID NO: 3091275 - RNA, 19 nt, Artificial Sequence
  Description of Artificial Sequence: Synthetic oligonucleotide
gugacggcgucgcggauga

SEQ ID NO: 3091276 - RNA, 19 nt, Artificial Sequence
  Description of Artificial Sequence: Synthetic oligonucleotide
ugagcgcauagacgacguc

SEQ ID NO: 3091277 - RNA, 19 nt, Artificial Sequence
  Description of Artificial Sequence: Synthetic oligonucleotide
guugucgcggaggaccuuc

SEQ ID NO: 3091278 - RNA, 19 nt, Artificial Sequence
  Description of Artificial Sequence: Synthetic oligonucleotide
gacgacguccauggcggug

SEQ ID NO: 3091279 - RNA, 19 nt, Artificial Sequence
  Description of Artificial Sequence: Synthetic oligonucleotide
ugucgcggaggaccuuccu

SEQ ID NO: 3091280 - RNA, 19 nt, Artificial Sequence
  Description of Artificial Sequence: Synthetic oligonucleotide
cgcuugagcgcauagacga

SEQ ID NO: 3091281 - RNA, 19 nt, Artificial Sequence
  Description of Artificial Sequence: Synthetic oligonucleotide
gccgaagccguagagggug

SEQ ID NO: 3091282 - RNA, 19 nt, Artificial Sequence
  Description of Artificial Sequence: Synthetic oligonucleotide
gguguaggugacggcgucg

SEQ ID NO: 3091283 - RNA, 19 nt, Artificial Sequence
  Description of Artificial Sequence: Synthetic oligonucleotide
ugcgcuugacgccgccccu

SEQ ID NO: 3091284 - RNA, 19 nt, Artificial Sequence
  Description of Artificial Sequence: Synthetic oligonucleotide
agccgccgaagccguagag

SEQ ID NO: 3091285 - RNA, 19 nt, Artificial Sequence
  Description of Artificial Sequence: Synthetic oligonucleotide
uggcgcuuggcgccgcccu

SEQ ID NO: 3091286 - RNA, 19 nt, Artificial Sequence
  Description of Artificial Sequence: Synthetic oligonucleotide
ggaggaccuuccuguggcg

SEQ ID NO: 3091287 - RNA, 19 nt, Artificial Sequence
  Description of Artificial Sequence: Synthetic oligonucleotide
uggcgcuugagcgcauaga

SEQ ID NO: 3091288 - RNA, 19 nt, Artificial Sequence
  Description of Artificial Sequence: Synthetic oligonucleotide
uagccgccgaagccguaga

SEQ ID NO: 3091289 - RNA, 19 nt, Artificial Sequence
  Description of Artificial Sequence: Synthetic oligonucleotide
ggucuccucguagaugagc

SEQ ID NO: 3091290 - RNA, 19 nt, Artificial Sequence
  Description of Artificial Sequence: Synthetic oligonucleotide
uggcggugacggucuugcg

SEQ ID NO: 3091291 - RNA, 19 nt, Artificial Sequence
  Description of Artificial Sequence: Synthetic oligonucleotide
guccauggcggugacgguc

SEQ ID NO: 3091292 - RNA, 19 nt, Artificial Sequence
  Description of Artificial Sequence: Synthetic oligonucleotide
gcgugcucgguguagguga

SEQ ID NO: 3091293 - RNA, 19 nt, Artificial Sequence
  Description of Artificial Sequence: Synthetic oligonucleotide
ugacguucucgaggaagau

SEQ ID NO: 3091294 - RNA, 19 nt, Artificial Sequence
  Description of Artificial Sequence: Synthetic oligonucleotide
accuuccuguggcgcuugg

SEQ ID NO: 3091295 - RNA, 19 nt, Artificial Sequence
  Description of Artificial Sequence: Synthetic oligonucleotide
gcggaggaccuuccugugg

SEQ ID NO: 3091296 - RNA, 19 nt, Artificial Sequence
  Description of Artificial Sequence: Synthetic oligonucleotide
uugccucccuuaccgcguc

SEQ ID NO: 3091297 - RNA, 19 nt, Artificial Sequence
  Description of Artificial Sequence: Synthetic oligonucleotide
uguggcgcuuggcgccgcc

SEQ ID NO: 3091298 - RNA, 19 nt, Artificial Sequence
  Description of Artificial Sequence: Synthetic oligonucleotide
acggcgucgcggaugacgu

SEQ ID NO: 3091299 - RNA, 19 nt, Artificial Sequence
  Description of Artificial Sequence: Synthetic oligonucleotide
gacguccauggcggugacg

SEQ ID NO: 3091300 - RNA, 19 nt, Artificial Sequence
  Description of Artificial Sequence: Synthetic oligonucleotide
ucuugcggcgggcgugcuc

SEQ ID NO: 3091301 - RNA, 19 nt, Artificial Sequence
  Description of Artificial Sequence: Synthetic oligonucleotide
gagcccggagaugcgcuug

SEQ ID NO: 3091302 - RNA, 19 nt, Artificial Sequence
  Description of Artificial Sequence: Synthetic oligonucleotide
acggucuugcggcgggcgu

SEQ ID NO: 3091303 - RNA, 19 nt, Artificial Sequence
  Description of Artificial Sequence: Synthetic oligonucleotide
gcgcuugagcgcauagacg

SEQ ID NO: 3091304 - RNA, 19 nt, Artificial Sequence
  Description of Artificial Sequence: Synthetic oligonucleotide
ggugacggucuugcggcgg

SEQ ID NO: 3091305 - RNA, 19 nt, Artificial Sequence
  Description of Artificial Sequence: Synthetic oligonucleotide
ugaugcccuggauguuguc

SEQ ID NO: 3091306 - RNA, 19 nt, Artificial Sequence
  Description of Artificial Sequence: Synthetic oligonucleotide
agcccggagaugcgcuuga

SEQ ID NO: 3091307 - RNA, 19 nt, Artificial Sequence
  Description of Artificial Sequence: Synthetic oligonucleotide
gaggacgccgcgggucucc

SEQ ID NO: 3091308 - RNA, 19 nt, Artificial Sequence
  Description of Artificial Sequence: Synthetic oligonucleotide
cggaggaccuuccuguggc

SEQ ID NO: 3091309 - RNA, 19 nt, Artificial Sequence
  Description of Artificial Sequence: Synthetic oligonucleotide
cccggagaugcgcuugacg

SEQ ID NO: 3091310 - RNA, 19 nt, Artificial Sequence
  Description of Artificial Sequence: Synthetic oligonucleotide
augagcccggagaugcgcu

SEQ ID NO: 3091311 - RNA, 19 nt, Artificial Sequence
  Description of Artificial Sequence: Synthetic oligonucleotide
gccgccgaagccguagagg

SEQ ID NO: 3091312 - RNA, 19 nt, Artificial Sequence
  Description of Artificial Sequence: Synthetic oligonucleotide
ugagcccggagaugcgcuu

SEQ ID NO: 3091313 - RNA, 19 nt, Artificial Sequence
  Description of Artificial Sequence: Synthetic oligonucleotide
cuugccgagccccuugccu

SEQ ID NO: 3091314 - RNA, 19 nt, Artificial Sequence
  Description of Artificial Sequence: Synthetic oligonucleotide
ugccucccuuaccgcgucc

SEQ ID NO: 3091315 - RNA, 19 nt, Artificial Sequence
  Description of Artificial Sequence: Synthetic oligonucleotide
ggugacggcgucgcggaug

SEQ ID NO: 3091316 - RNA, 19 nt, Artificial Sequence
  Description of Artificial Sequence: Synthetic oligonucleotide
ccaggcgccggaucgccgg

SEQ ID NO: 3091317 - RNA, 19 nt, Artificial Sequence
  Description of Artificial Sequence: Synthetic oligonucleotide
cgaggaagaucuugaggac

SEQ ID NO: 3091318 - RNA, 19 nt, Artificial Sequence
  Description of Artificial Sequence: Synthetic oligonucleotide
cuugccucccuuaccgcgu

SEQ ID NO: 3091319 - RNA, 19 nt, Artificial Sequence
  Description of Artificial Sequence: Synthetic oligonucleotide
gagaugcgcuugacgccgc

SEQ ID NO: 3091320 - RNA, 19 nt, Artificial Sequence
  Description of Artificial Sequence: Synthetic oligonucleotide
cgggucuccucguagauga

SEQ ID NO: 3091321 - RNA, 19 nt, Artificial Sequence
  Description of Artificial Sequence: Synthetic oligonucleotide
ggcccuggcgcuugagcgc

SEQ ID NO: 3091322 - RNA, 19 nt, Artificial Sequence
  Description of Artificial Sequence: Synthetic oligonucleotide
ugacgccgccccuccuggc

SEQ ID NO: 3091323 - RNA, 19 nt, Artificial Sequence
  Description of Artificial Sequence: Synthetic oligonucleotide
agacgacguccauggcggu

SEQ ID NO: 3091324 - RNA, 19 nt, Artificial Sequence
  Description of Artificial Sequence: Synthetic oligonucleotide
cggaugacguucucgagga

SEQ ID NO: 3091325 - RNA, 19 nt, Artificial Sequence
  Description of Artificial Sequence: Synthetic oligonucleotide
gaccuuccuguggcgcuug

SEQ ID NO: 3091326 - RNA, 19 nt, Artificial Sequence
  Description of Artificial Sequence: Synthetic oligonucleotide
ggcgucgcggaugacguuc

SEQ ID NO: 3091327 - RNA, 19 nt, Artificial Sequence
  Description of Artificial Sequence: Synthetic oligonucleotide
cauggcggugacggucuug

SEQ ID NO: 3091328 - RNA, 19 nt, Artificial Sequence
  Description of Artificial Sequence: Synthetic oligonucleotide
acgccgccccuccuggcca

SEQ ID NO: 3091329 - RNA, 19 nt, Artificial Sequence
  Description of Artificial Sequence: Synthetic oligonucleotide
cggagaugcgcuugacgcc

SEQ ID NO: 3091330 - RNA, 19 nt, Artificial Sequence
  Description of Artificial Sequence: Synthetic oligonucleotide
gugcucgguguaggugacg

SEQ ID NO: 3091331 - RNA, 19 nt, Artificial Sequence
  Description of Artificial Sequence: Synthetic oligonucleotide
uugcggcgggcgugcucgg

SEQ ID NO: 3091332 - RNA, 19 nt, Artificial Sequence
  Description of Artificial Sequence: Synthetic oligonucleotide
gccucccuuaccgcguccg

SEQ ID NO: 3091333 - RNA, 19 nt, Artificial Sequence
  Description of Artificial Sequence: Synthetic oligonucleotide
gccccuccuggccaggcgc

SEQ ID NO: 3091334 - RNA, 19 nt, Artificial Sequence
  Description of Artificial Sequence: Synthetic oligonucleotide
gccguagagggugcggccc

SEQ ID NO: 3091335 - RNA, 19 nt, Artificial Sequence
  Description of Artificial Sequence: Synthetic oligonucleotide
uggccaggcgccggaucgc

SEQ ID NO: 3091336 - RNA, 19 nt, Artificial Sequence
  Description of Artificial Sequence: Synthetic oligonucleotide
gcccuggauguugucgcgg

SEQ ID NO: 3091337 - RNA, 19 nt, Artificial Sequence
  Description of Artificial Sequence: Synthetic oligonucleotide
gccgcgggucuccucguag

SEQ ID NO: 3091338 - RNA, 19 nt, Artificial Sequence
  Description of Artificial Sequence: Synthetic oligonucleotide
ggcgugcucgguguaggug

SEQ ID NO: 3091339 - RNA, 19 nt, Artificial Sequence
  Description of Artificial Sequence: Synthetic oligonucleotide
cucccuuaccgcguccgga

SEQ ID NO: 3091340 - RNA, 19 nt, Artificial Sequence
  Description of Artificial Sequence: Synthetic oligonucleotide
ccuggauguugucgcggag

SEQ ID NO: 3091341 - RNA, 19 nt, Artificial Sequence
  Description of Artificial Sequence: Synthetic oligonucleotide
agggugcggcccuggcgcu

SEQ ID NO: 3091342 - RNA, 19 nt, Artificial Sequence
  Description of Artificial Sequence: Synthetic oligonucleotide
ggucuugcggcgggcgugc

SEQ ID NO: 3091343 - RNA, 19 nt, Artificial Sequence
  Description of Artificial Sequence: Synthetic oligonucleotide
caggcgccggaucgccggc

SEQ ID NO: 3091344 - RNA, 19 nt, Artificial Sequence
  Description of Artificial Sequence: Synthetic oligonucleotide
gcucgguguaggugacggc

SEQ ID NO: 3091345 - RNA, 19 nt, Artificial Sequence
  Description of Artificial Sequence: Synthetic oligonucleotide
uggugaugcccuggauguu

SEQ ID NO: 3091346 - RNA, 19 nt, Artificial Sequence
  Description of Artificial Sequence: Synthetic oligonucleotide
gagccccuugccucccuua

SEQ ID NO: 3091347 - RNA, 19 nt, Artificial Sequence
  Description of Artificial Sequence: Synthetic oligonucleotide
cgcauagacgacguccaug

SEQ ID NO: 3091348 - RNA, 19 nt, Artificial Sequence
  Description of Artificial Sequence: Synthetic oligonucleotide
gcggcccuggcgcuugagc

SEQ ID NO: 3091349 - RNA, 19 nt, Artificial Sequence
  Description of Artificial Sequence: Synthetic oligonucleotide
ccgaagccguagagggugc

SEQ ID NO: 3091350 - RNA, 19 nt, Artificial Sequence
  Description of Artificial Sequence: Synthetic oligonucleotide
gccccuugccucccuuacc

SEQ ID NO: 3091351 - RNA, 19 nt, Artificial Sequence
  Description of Artificial Sequence: Synthetic oligonucleotide
gcuugagcgcauagacgac

SEQ ID NO: 3091352 - RNA, 19 nt, Artificial Sequence
  Description of Artificial Sequence: Synthetic oligonucleotide
gaucgccggcuuggugaug

SEQ ID NO: 3091353 - RNA, 19 nt, Artificial Sequence
  Description of Artificial Sequence: Synthetic oligonucleotide
uggcgccgcccuugccgag

SEQ ID NO: 3091354 - RNA, 19 nt, Artificial Sequence
  Description of Artificial Sequence: Synthetic oligonucleotide
ccucccuuaccgcguccgg

SEQ ID NO: 3091355 - RNA, 19 nt, Artificial Sequence
  Description of Artificial Sequence: Synthetic oligonucleotide
ugcggcccuggcgcuugag

SEQ ID NO: 3091356 - RNA, 19 nt, Artificial Sequence
  Description of Artificial Sequence: Synthetic oligonucleotide
gccgcccuugccgagcccc

SEQ ID NO: 3091357 - RNA, 19 nt, Artificial Sequence
  Description of Artificial Sequence: Synthetic oligonucleotide
uguugucgcggaggaccuu

SEQ ID NO: 3091358 - RNA, 19 nt, Artificial Sequence
  Description of Artificial Sequence: Synthetic oligonucleotide
ggauguugucgcggaggac

SEQ ID NO: 3091359 - RNA, 19 nt, Artificial Sequence
  Description of Artificial Sequence: Synthetic oligonucleotide
ugaggacgccgcgggucuc

SEQ ID NO: 3091360 - RNA, 19 nt, Artificial Sequence
  Description of Artificial Sequence: Synthetic oligonucleotide
cccuugccucccuuaccgc

SEQ ID NO: 3091361 - RNA, 19 nt, Artificial Sequence
  Description of Artificial Sequence: Synthetic oligonucleotide
gugaugcccuggauguugu

SEQ ID NO: 3091362 - RNA, 19 nt, Artificial Sequence
  Description of Artificial Sequence: Synthetic oligonucleotide
gcgggucuccucguagaug

SEQ ID NO: 3091363 - RNA, 19 nt, Artificial Sequence
  Description of Artificial Sequence: Synthetic oligonucleotide
cccuugccgagccccuugc

SEQ ID NO: 3091364 - RNA, 19 nt, Artificial Sequence
  Description of Artificial Sequence: Synthetic oligonucleotide
guggcgcuuggcgccgccc

SEQ ID NO: 3091365 - RNA, 19 nt, Artificial Sequence
  Description of Artificial Sequence: Synthetic oligonucleotide
ccuugccgagccccuugcc

SEQ ID NO: 3091366 - RNA, 19 nt, Artificial Sequence
  Description of Artificial Sequence: Synthetic oligonucleotide
ggugcggcccuggcgcuug

SEQ ID NO: 3091367 - RNA, 19 nt, Artificial Sequence
  Description of Artificial Sequence: Synthetic oligonucleotide
gcggcgggcgugcucggug

SEQ ID NO: 3091368 - RNA, 19 nt, Artificial Sequence
  Description of Artificial Sequence: Synthetic oligonucleotide
cccuggauguugucgcgga

SEQ ID NO: 3091369 - RNA, 19 nt, Artificial Sequence
  Description of Artificial Sequence: Synthetic oligonucleotide
ccuguggcgcuuggcgccg

SEQ ID NO: 3091370 - RNA, 19 nt, Artificial Sequence
  Description of Artificial Sequence: Synthetic oligonucleotide
ccuuccuguggcgcuuggc

SEQ ID NO: 3091371 - RNA, 19 nt, Artificial Sequence
  Description of Artificial Sequence: Synthetic oligonucleotide
aggugacggcgucgcggau

SEQ ID NO: 3091372 - RNA, 19 nt, Artificial Sequence
  Description of Artificial Sequence: Synthetic oligonucleotide
acgccgcgggucuccucgu

SEQ ID NO: 3091373 - RNA, 19 nt, Artificial Sequence
  Description of Artificial Sequence: Synthetic oligonucleotide
cgcggaugacguucucgag

SEQ ID NO: 3091374 - RNA, 19 nt, Artificial Sequence
  Description of Artificial Sequence: Synthetic oligonucleotide
ccccuccuggccaggcgcc

SEQ ID NO: 3091375 - RNA, 19 nt, Artificial Sequence
  Description of Artificial Sequence: Synthetic oligonucleotide
cuccuggccaggcgccgga

SEQ ID NO: 3091376 - RNA, 19 nt, Artificial Sequence
  Description of Artificial Sequence: Synthetic oligonucleotide
cguagaugagcccggagau

SEQ ID NO: 3091377 - RNA, 19 nt, Artificial Sequence
  Description of Artificial Sequence: Synthetic oligonucleotide
cgugcucgguguaggugac

SEQ ID NO: 3091378 - RNA, 19 nt, Artificial Sequence
  Description of Artificial Sequence: Synthetic oligonucleotide
ccggcuuggugaugcccug

SEQ ID NO: 3091379 - RNA, 19 nt, Artificial Sequence
  Description of Artificial Sequence: Synthetic oligonucleotide
ugcggcgggcgugcucggu

SEQ ID NO: 3091380 - RNA, 19 nt, Artificial Sequence
  Description of Artificial Sequence: Synthetic oligonucleotide
ggccaggcgccggaucgcc

SEQ ID NO: 3091381 - RNA, 19 nt, Artificial Sequence
  Description of Artificial Sequence: Synthetic oligonucleotide
aggacgccgcgggucuccu

SEQ ID NO: 3091382 - RNA, 19 nt, Artificial Sequence
  Description of Artificial Sequence: Synthetic oligonucleotide
ggaugacguucucgaggaa

SEQ ID NO: 3091383 - RNA, 19 nt, Artificial Sequence
  Description of Artificial Sequence: Synthetic oligonucleotide
uccuggccaggcgccggau

SEQ ID NO: 3091384 - RNA, 19 nt, Artificial Sequence
  Description of Artificial Sequence: Synthetic oligonucleotide
cgaagccguagagggugcg

SEQ ID NO: 3091385 - RNA, 19 nt, Artificial Sequence
  Description of Artificial Sequence: Synthetic oligonucleotide
cgcuugacgccgccccucc

SEQ ID NO: 3091386 - RNA, 19 nt, Artificial Sequence
  Description of Artificial Sequence: Synthetic oligonucleotide
ggaucgccggcuuggugau

SEQ ID NO: 3091387 - RNA, 19 nt, Artificial Sequence
  Description of Artificial Sequence: Synthetic oligonucleotide
gcgggcgugcucgguguag

SEQ ID NO: 3091388 - RNA, 19 nt, Artificial Sequence
  Description of Artificial Sequence: Synthetic oligonucleotide
ggcgccgcccuugccgagc

SEQ ID NO: 3091389 - RNA, 19 nt, Artificial Sequence
  Description of Artificial Sequence: Synthetic oligonucleotide
cuguggcgcuuggcgccgc

SEQ ID NO: 3091390 - RNA, 19 nt, Artificial Sequence
  Description of Artificial Sequence: Synthetic oligonucleotide
gcccuggcgcuugagcgca

SEQ ID NO: 3091391 - RNA, 19 nt, Artificial Sequence
  Description of Artificial Sequence: Synthetic oligonucleotide
gccaggcgccggaucgccg

SEQ ID NO: 3091392 - RNA, 19 nt, Artificial Sequence
  Description of Artificial Sequence: Synthetic oligonucleotide
gccggcuuggugaugcccu

SEQ ID NO: 3091393 - RNA, 19 nt, Artificial Sequence
  Description of Artificial Sequence: Synthetic oligonucleotide
cggugacggucuugcggcg

SEQ ID NO: 3091394 - RNA, 19 nt, Artificial Sequence
  Description of Artificial Sequence: Synthetic oligonucleotide
gcgccgcccuugccgagcc

SEQ ID NO: 3091395 - RNA, 19 nt, Artificial Sequence
  Description of Artificial Sequence: Synthetic oligonucleotide
aggcgccggaucgccggcu

SEQ ID NO: 3091396 - RNA, 19 nt, Artificial Sequence
  Description of Artificial Sequence: Synthetic oligonucleotide
ccuccuggccaggcgccgg

SEQ ID NO: 3091397 - RNA, 19 nt, Artificial Sequence
  Description of Artificial Sequence: Synthetic oligonucleotide
cgcggaggaccuuccugug

SEQ ID NO: 3091398 - RNA, 19 nt, Artificial Sequence
  Description of Artificial Sequence: Synthetic oligonucleotide
cgccggaucgccggcuugg

SEQ ID NO: 3091399 - RNA, 19 nt, Artificial Sequence
  Description of Artificial Sequence: Synthetic oligonucleotide
cgggcgugcucgguguagg

SEQ ID NO: 3091400 - RNA, 19 nt, Artificial Sequence
  Description of Artificial Sequence: Synthetic oligonucleotide
cgguguaggugacggcguc

SEQ ID NO: 3091401 - RNA, 19 nt, Artificial Sequence
  Description of Artificial Sequence: Synthetic oligonucleotide
gcgccggaucgccggcuug

SEQ ID NO: 3091402 - RNA, 19 nt, Artificial Sequence
  Description of Artificial Sequence: Synthetic oligonucleotide
ccgcgggucuccucguaga

SEQ ID NO: 3091403 - RNA, 19 nt, Artificial Sequence
  Description of Artificial Sequence: Synthetic oligonucleotide
ugacggcgucgcggaugac

SEQ ID NO: 3091404 - RNA, 19 nt, Artificial Sequence
  Description of Artificial Sequence: Synthetic oligonucleotide
cccuccuggccaggcgccg

SEQ ID NO: 3091405 - RNA, 19 nt, Artificial Sequence
  Description of Artificial Sequence: Synthetic oligonucleotide
cggcuuggugaugcccugg

SEQ ID NO: 3091406 - RNA, 19 nt, Artificial Sequence
  Description of Artificial Sequence: Synthetic oligonucleotide
cccuuaccgcguccggaca

SEQ ID NO: 3091407 - RNA, 19 nt, Artificial Sequence
  Description of Artificial Sequence: Synthetic oligonucleotide
gcgcuugacgccgccccuc

SEQ ID NO: 3091408 - RNA, 19 nt, Artificial Sequence
  Description of Artificial Sequence: Synthetic oligonucleotide
ccucguagaugagcccgga

SEQ ID NO: 3091409 - RNA, 19 nt, Artificial Sequence
  Description of Artificial Sequence: Synthetic oligonucleotide
cggucuugcggcgggcgug

SEQ ID NO: 3091410 - RNA, 19 nt, Artificial Sequence
  Description of Artificial Sequence: Synthetic oligonucleotide
ccuuaccgcguccggacau

SEQ ID NO: 3091411 - RNA, 19 nt, Artificial Sequence
  Description of Artificial Sequence: Synthetic oligonucleotide
cgccggcuuggugaugccc

SEQ ID NO: 3091412 - RNA, 19 nt, Artificial Sequence
  Description of Artificial Sequence: Synthetic oligonucleotide
gggcgugcucgguguaggu

SEQ ID NO: 3091413 - RNA, 19 nt, Artificial Sequence
  Description of Artificial Sequence: Synthetic oligonucleotide
gccgagccccuugccuccc

SEQ ID NO: 3091414 - RNA, 19 nt, Artificial Sequence
  Description of Artificial Sequence: Synthetic oligonucleotide
ggacgccgcgggucuccuc

SEQ ID NO: 3091415 - RNA, 19 nt, Artificial Sequence
  Description of Artificial Sequence: Synthetic oligonucleotide
gcccggagaugcgcuugac

SEQ ID NO: 3091416 - RNA, 19 nt, Artificial Sequence
  Description of Artificial Sequence: Synthetic oligonucleotide
gugcggcccuggcgcuuga

SEQ ID NO: 3091417 - RNA, 19 nt, Artificial Sequence
  Description of Artificial Sequence: Synthetic oligonucleotide
gcgcauagacgacguccau

SEQ ID NO: 3091418 - RNA, 19 nt, Artificial Sequence
  Description of Artificial Sequence: Synthetic oligonucleotide
cgacguccauggcggugac

SEQ ID NO: 3091419 - RNA, 19 nt, Artificial Sequence
  Description of Artificial Sequence: Synthetic oligonucleotide
gccgccccuccuggccagg

SEQ ID NO: 3091420 - RNA, 19 nt, Artificial Sequence
  Description of Artificial Sequence: Synthetic oligonucleotide
gcuugacgccgccccuccu

SEQ ID NO: 3091421 - RNA, 19 nt, Artificial Sequence
  Description of Artificial Sequence: Synthetic oligonucleotide
ggaccuuccuguggcgcuu

SEQ ID NO: 3091422 - RNA, 19 nt, Artificial Sequence
  Description of Artificial Sequence: Synthetic oligonucleotide
ggcgggcgugcucggugua

SEQ ID NO: 3091423 - RNA, 19 nt, Artificial Sequence
  Description of Artificial Sequence: Synthetic oligonucleotide
gcgucgcggaugacguucu

SEQ ID NO: 3091424 - RNA, 19 nt, Artificial Sequence
  Description of Artificial Sequence: Synthetic oligonucleotide
ccguagagggugcggcccu

SEQ ID NO: 3091425 - RNA, 19 nt, Artificial Sequence
  Description of Artificial Sequence: Synthetic oligonucleotide
ccgccccuccuggccaggc

SEQ ID NO: 3091426 - RNA, 19 nt, Artificial Sequence
  Description of Artificial Sequence: Synthetic oligonucleotide
cgucgcggaugacguucuc

SEQ ID NO: 3091427 - RNA, 19 nt, Artificial Sequence
  Description of Artificial Sequence: Synthetic oligonucleotide
cgccgccccuccuggccag

SEQ ID NO: 3091428 - RNA, 19 nt, Artificial Sequence
  Description of Artificial Sequence: Synthetic oligonucleotide
gucuugcggcgggcgugcu

SEQ ID NO: 3091429 - RNA, 19 nt, Artificial Sequence
  Description of Artificial Sequence: Synthetic oligonucleotide
ggcgcuuggcgccgcccuu

SEQ ID NO: 3091430 - RNA, 19 nt, Artificial Sequence
  Description of Artificial Sequence: Synthetic oligonucleotide
ggcgccggaucgccggcuu

SEQ ID NO: 3091431 - RNA, 19 nt, Artificial Sequence
  Description of Artificial Sequence: Synthetic oligonucleotide
ccuggcgcuugagcgcaua

SEQ ID NO: 3091432 - RNA, 19 nt, Artificial Sequence
  Description of Artificial Sequence: Synthetic oligonucleotide
cgccgaagccguagagggu

SEQ ID NO: 3091433 - RNA, 19 nt, Artificial Sequence
  Description of Artificial Sequence: Synthetic oligonucleotide
cgcgggucuccucguagau

SEQ ID NO: 3091434 - RNA, 19 nt, Artificial Sequence
  Description of Artificial Sequence: Synthetic oligonucleotide
cguccauggcggugacggu

SEQ ID NO: 3091435 - RNA, 19 nt, Artificial Sequence
  Description of Artificial Sequence: Synthetic oligonucleotide
cgccgcccuugccgagccc

SEQ ID NO: 3091436 - RNA, 19 nt, Artificial Sequence
  Description of Artificial Sequence: Synthetic oligonucleotide
ccgcccuugccgagccccu

SEQ ID NO: 3091437 - RNA, 19 nt, Artificial Sequence
  Description of Artificial Sequence: Synthetic oligonucleotide
cggcgggcgugcucggugu

SEQ ID NO: 3091438 - RNA, 19 nt, Artificial Sequence
  Description of Artificial Sequence: Synthetic oligonucleotide
gggugcggcccuggcgcuu

SEQ ID NO: 3091439 - RNA, 19 nt, Artificial Sequence
  Description of Artificial Sequence: Synthetic oligonucleotide
ccgagccccuugccucccu

SEQ ID NO: 3091440 - RNA, 19 nt, Artificial Sequence
  Description of Artificial Sequence: Synthetic oligonucleotide
cgagccccuugccucccuu

SEQ ID NO: 3091441 - RNA, 19 nt, Artificial Sequence
  Description of Artificial Sequence: Synthetic oligonucleotide
cgccgcgggucuccucgua

SEQ ID NO: 3091442 - RNA, 19 nt, Artificial Sequence
  Description of Artificial Sequence: Synthetic oligonucleotide
cccuggcgcuugagcgcau

SEQ ID NO: 3091443 - RNA, 19 nt, Artificial Sequence
  Description of Artificial Sequence: Synthetic oligonucleotide
cggcgucgcggaugacguu

SEQ ID NO: 3091444 - RNA, 19 nt, Artificial Sequence
  Description of Artificial Sequence: Synthetic oligonucleotide
cgcccuugccgagccccuu

SEQ ID NO: 3091445 - RNA, 19 nt, Artificial Sequence
  Description of Artificial Sequence: Synthetic oligonucleotide
uuuuacaugacuacuauug

SEQ ID NO: 3091446 - RNA, 19 nt, Artificial Sequence
  Description of Artificial Sequence: Synthetic oligonucleotide
uaaacuugaacauuucggg

SEQ ID NO: 3091447 - RNA, 19 nt, Artificial Sequence
  Description of Artificial Sequence: Synthetic oligonucleotide
aacuugaacauuucgggag

SEQ ID NO: 3091448 - RNA, 19 nt, Artificial Sequence
  Description of Artificial Sequence: Synthetic oligonucleotide
aacauuucgggagacauuc

SEQ ID NO: 3091449 - RNA, 19 nt, Artificial Sequence
  Description of Artificial Sequence: Synthetic oligonucleotide
uacaugacuacuauugcug

SEQ ID NO: 3091450 - RNA, 19 nt, Artificial Sequence
  Description of Artificial Sequence: Synthetic oligonucleotide
gaucaucuucuauaggugg

SEQ ID NO: 3091451 - RNA, 19 nt, Artificial Sequence
  Description of Artificial Sequence: Synthetic oligonucleotide
augaucaucuucuauaggu

SEQ ID NO: 3091452 - RNA, 19 nt, Artificial Sequence
  Description of Artificial Sequence: Synthetic oligonucleotide
aauacacuuugggaaacgc

SEQ ID NO: 3091453 - RNA, 19 nt, Artificial Sequence
  Description of Artificial Sequence: Synthetic oligonucleotide
guaaacuugaacauuucgg

SEQ ID NO: 3091454 - RNA, 19 nt, Artificial Sequence
  Description of Artificial Sequence: Synthetic oligonucleotide
uugagaacacaguaggugc

SEQ ID NO: 3091455 - RNA, 19 nt, Artificial Sequence
  Description of Artificial Sequence: Synthetic oligonucleotide
uuuacaugacuacuauugc

SEQ ID NO: 3091456 - RNA, 19 nt, Artificial Sequence
  Description of Artificial Sequence: Synthetic oligonucleotide
cuuuggguaaacuugaaca

SEQ ID NO: 3091457 - RNA, 19 nt, Artificial Sequence
  Description of Artificial Sequence: Synthetic oligonucleotide
uuucgggagacauucaagc

SEQ ID NO: 3091458 - RNA, 19 nt, Artificial Sequence
  Description of Artificial Sequence: Synthetic oligonucleotide
uugggaaacgcucuuccgg

SEQ ID NO: 3091459 - RNA, 19 nt, Artificial Sequence
  Description of Artificial Sequence: Synthetic oligonucleotide
ucuucuauagguggcacgg

SEQ ID NO: 3091460 - RNA, 19 nt, Artificial Sequence
  Description of Artificial Sequence: Synthetic oligonucleotide
guguugagaacacaguagg

SEQ ID NO: 3091461 - RNA, 19 nt, Artificial Sequence
  Description of Artificial Sequence: Synthetic oligonucleotide
aaacuugaacauuucggga

SEQ ID NO: 3091462 - RNA, 19 nt, Artificial Sequence
  Description of Artificial Sequence: Synthetic oligonucleotide
cacaguaggugcuaguucc

SEQ ID NO: 3091463 - RNA, 19 nt, Artificial Sequence
  Description of Artificial Sequence: Synthetic oligonucleotide
uacacuuugggaaacgcuc

SEQ ID NO: 3091464 - RNA, 19 nt, Artificial Sequence
  Description of Artificial Sequence: Synthetic oligonucleotide
ucauuaguguuccagcggu

SEQ ID NO: 3091465 - RNA, 19 nt, Artificial Sequence
  Description of Artificial Sequence: Synthetic oligonucleotide
ucgggagacauucaagcag

SEQ ID NO: 3091466 - RNA, 19 nt, Artificial Sequence
  Description of Artificial Sequence: Synthetic oligonucleotide
ugaucaucuucuauaggug

SEQ ID NO: 3091467 - RNA, 19 nt, Artificial Sequence
  Description of Artificial Sequence: Synthetic oligonucleotide
auuaguguuccagcggugc

SEQ ID NO: 3091468 - RNA, 19 nt, Artificial Sequence
  Description of Artificial Sequence: Synthetic oligonucleotide
uuuucggcagccauuuccc

SEQ ID NO: 3091469 - RNA, 19 nt, Artificial Sequence
  Description of Artificial Sequence: Synthetic oligonucleotide
cucucuuuggguaaacuug

SEQ ID NO: 3091470 - RNA, 19 nt, Artificial Sequence
  Description of Artificial Sequence: Synthetic oligonucleotide
uuacaugacuacuauugcu

SEQ ID NO: 3091471 - RNA, 19 nt, Artificial Sequence
  Description of Artificial Sequence: Synthetic oligonucleotide
ucucuuuggguaaacuuga

SEQ ID NO: 3091472 - RNA, 19 nt, Artificial Sequence
  Description of Artificial Sequence: Synthetic oligonucleotide
uuuggguaaacuugaacau

SEQ ID NO: 3091473 - RNA, 19 nt, Artificial Sequence
  Description of Artificial Sequence: Synthetic oligonucleotide
auugcuguucccaugauca

SEQ ID NO: 3091474 - RNA, 19 nt, Artificial Sequence
  Description of Artificial Sequence: Synthetic oligonucleotide
gguaaacuugaacauuucg

SEQ ID NO: 3091475 - RNA, 19 nt, Artificial Sequence
  Description of Artificial Sequence: Synthetic oligonucleotide
acuauugcuguucccauga

SEQ ID NO: 3091476 - RNA, 19 nt, Artificial Sequence
  Description of Artificial Sequence: Synthetic oligonucleotide
guuuucggcagccauuucc

SEQ ID NO: 3091477 - RNA, 19 nt, Artificial Sequence
  Description of Artificial Sequence: Synthetic oligonucleotide
uuugggaaacgcucuuccg

SEQ ID NO: 3091478 - RNA, 19 nt, Artificial Sequence
  Description of Artificial Sequence: Synthetic oligonucleotide
uuccgcagaauacacuuug

SEQ ID NO: 3091479 - RNA, 19 nt, Artificial Sequence
  Description of Artificial Sequence: Synthetic oligonucleotide
augacuacuauugcuguuc

SEQ ID NO: 3091480 - RNA, 19 nt, Artificial Sequence
  Description of Artificial Sequence: Synthetic oligonucleotide
uucuauagguggcacggug

SEQ ID NO: 3091481 - RNA, 19 nt, Artificial Sequence
  Description of Artificial Sequence: Synthetic oligonucleotide
guugagaacacaguaggug

SEQ ID NO: 3091482 - RNA, 19 nt, Artificial Sequence
  Description of Artificial Sequence: Synthetic oligonucleotide
ucuuuggguaaacuugaac

SEQ ID NO: 3091483 - RNA, 19 nt, Artificial Sequence
  Description of Artificial Sequence: Synthetic oligonucleotide
acuacuauugcuguuccca

SEQ ID NO: 3091484 - RNA, 19 nt, Artificial Sequence
  Description of Artificial Sequence: Synthetic oligonucleotide
ucuauagguggcacggugu

SEQ ID NO: 3091485 - RNA, 19 nt, Artificial Sequence
  Description of Artificial Sequence: Synthetic oligonucleotide
cuuugggaaacgcucuucc

SEQ ID NO: 3091486 - RNA, 19 nt, Artificial Sequence
  Description of Artificial Sequence: Synthetic oligonucleotide
cacgguguugagaacacag

SEQ ID NO: 3091487 - RNA, 19 nt, Artificial Sequence
  Description of Artificial Sequence: Synthetic oligonucleotide
agccauuuccccuccgcgc

SEQ ID NO: 3091488 - RNA, 19 nt, Artificial Sequence
  Description of Artificial Sequence: Synthetic oligonucleotide
aucaucuucuauagguggc

SEQ ID NO: 3091489 - RNA, 19 nt, Artificial Sequence
  Description of Artificial Sequence: Synthetic oligonucleotide
cucauuaguguuccagcgg

SEQ ID NO: 3091490 - RNA, 19 nt, Artificial Sequence
  Description of Artificial Sequence: Synthetic oligonucleotide
ugaacauuucgggagacau

SEQ ID NO: 3091491 - RNA, 19 nt, Artificial Sequence
  Description of Artificial Sequence: Synthetic oligonucleotide
aucuucuauagguggcacg

SEQ ID NO: 3091492 - RNA, 19 nt, Artificial Sequence
  Description of Artificial Sequence: Synthetic oligonucleotide
ugagaacacaguaggugcu

SEQ ID NO: 3091493 - RNA, 19 nt, Artificial Sequence
  Description of Artificial Sequence: Synthetic oligonucleotide
agaauacacuuugggaaac

SEQ ID NO: 3091494 - RNA, 19 nt, Artificial Sequence
  Description of Artificial Sequence: Synthetic oligonucleotide
uguugagaacacaguaggu

SEQ ID NO: 3091495 - RNA, 19 nt, Artificial Sequence
  Description of Artificial Sequence: Synthetic oligonucleotide
aguuccgcagaauacacuu

SEQ ID NO: 3091496 - RNA, 19 nt, Artificial Sequence
  Description of Artificial Sequence: Synthetic oligonucleotide
ugacuacuauugcuguucc

SEQ ID NO: 3091497 - RNA, 19 nt, Artificial Sequence
  Description of Artificial Sequence: Synthetic oligonucleotide
ugggaaacgcucuuccggc

SEQ ID NO: 3091498 - RNA, 19 nt, Artificial Sequence
  Description of Artificial Sequence: Synthetic oligonucleotide
acacaguaggugcuaguuc

SEQ ID NO: 3091499 - RNA, 19 nt, Artificial Sequence
  Description of Artificial Sequence: Synthetic oligonucleotide
uccgcagaauacacuuugg

SEQ ID NO: 3091500 - RNA, 19 nt, Artificial Sequence
  Description of Artificial Sequence: Synthetic oligonucleotide
uuaguguuccagcggugcc

SEQ ID NO: 3091501 - RNA, 19 nt, Artificial Sequence
  Description of Artificial Sequence: Synthetic oligonucleotide
gaauacacuuugggaaacg

SEQ ID NO: 3091502 - RNA, 19 nt, Artificial Sequence
  Description of Artificial Sequence: Synthetic oligonucleotide
ugcuaguuccgcagaauac

SEQ ID NO: 3091503 - RNA, 19 nt, Artificial Sequence
  Description of Artificial Sequence: Synthetic oligonucleotide
guaggugcuaguuccgcag

SEQ ID NO: 3091504 - RNA, 19 nt, Artificial Sequence
  Description of Artificial Sequence: Synthetic oligonucleotide
acuugaacauuucgggaga

SEQ ID NO: 3091505 - RNA, 19 nt, Artificial Sequence
  Description of Artificial Sequence: Synthetic oligonucleotide
cuaguuccgcagaauacac

SEQ ID NO: 3091506 - RNA, 19 nt, Artificial Sequence
  Description of Artificial Sequence: Synthetic oligonucleotide
uauugcuguucccaugauc

SEQ ID NO: 3091507 - RNA, 19 nt, Artificial Sequence
  Description of Artificial Sequence: Synthetic oligonucleotide
caugaucaucuucuauagg

SEQ ID NO: 3091508 - RNA, 19 nt, Artificial Sequence
  Description of Artificial Sequence: Synthetic oligonucleotide
ucuuccggcuuguuuucgg

SEQ ID NO: 3091509 - RNA, 19 nt, Artificial Sequence
  Description of Artificial Sequence: Synthetic oligonucleotide
uucgggagacauucaagca

SEQ ID NO: 3091510 - RNA, 19 nt, Artificial Sequence
  Description of Artificial Sequence: Synthetic oligonucleotide
acaugacuacuauugcugu

SEQ ID NO: 3091511 - RNA, 19 nt, Artificial Sequence
  Description of Artificial Sequence: Synthetic oligonucleotide
agcggugccucucuuuggg

SEQ ID NO: 3091512 - RNA, 19 nt, Artificial Sequence
  Description of Artificial Sequence: Synthetic oligonucleotide
uccggcuuguuuucggcag

SEQ ID NO: 3091513 - RNA, 19 nt, Artificial Sequence
  Description of Artificial Sequence: Synthetic oligonucleotide
gagacauucaagcagcuuu

SEQ ID NO: 3091514 - RNA, 19 nt, Artificial Sequence
  Description of Artificial Sequence: Synthetic oligonucleotide
aacacaguaggugcuaguu

SEQ ID NO: 3091515 - RNA, 19 nt, Artificial Sequence
  Description of Artificial Sequence: Synthetic oligonucleotide
uacuauugcuguucccaug

SEQ ID NO: 3091516 - RNA, 19 nt, Artificial Sequence
  Description of Artificial Sequence: Synthetic oligonucleotide
ucaucuucuauagguggca

SEQ ID NO: 3091517 - RNA, 19 nt, Artificial Sequence
  Description of Artificial Sequence: Synthetic oligonucleotide
uguucccaugaucaucuuc

SEQ ID NO: 3091518 - RNA, 19 nt, Artificial Sequence
  Description of Artificial Sequence: Synthetic oligonucleotide
gguguugagaacacaguag

SEQ ID NO: 3091519 - RNA, 19 nt, Artificial Sequence
  Description of Artificial Sequence: Synthetic oligonucleotide
auagguggcacgguguuga

SEQ ID NO: 3091520 - RNA, 19 nt, Artificial Sequence
  Description of Artificial Sequence: Synthetic oligonucleotide
gaaacgcucuuccggcuug

SEQ ID NO: 3091521 - RNA, 19 nt, Artificial Sequence
  Description of Artificial Sequence: Synthetic oligonucleotide
auuucgggagacauucaag

SEQ ID NO: 3091522 - RNA, 19 nt, Artificial Sequence
  Description of Artificial Sequence: Synthetic oligonucleotide
aguaggugcuaguuccgca

SEQ ID NO: 3091523 - RNA, 19 nt, Artificial Sequence
  Description of Artificial Sequence: Synthetic oligonucleotide
uucggcagccauuuccccu

SEQ ID NO: 3091524 - RNA, 19 nt, Artificial Sequence
  Description of Artificial Sequence: Synthetic oligonucleotide
acuuugggaaacgcucuuc

SEQ ID NO: 3091525 - RNA, 19 nt, Artificial Sequence
  Description of Artificial Sequence: Synthetic oligonucleotide
uggcacgguguugagaaca

SEQ ID NO: 3091526 - RNA, 19 nt, Artificial Sequence
  Description of Artificial Sequence: Synthetic oligonucleotide
uaguuccgcagaauacacu

SEQ ID NO: 3091527 - RNA, 19 nt, Artificial Sequence
  Description of Artificial Sequence: Synthetic oligonucleotide
gacuacuauugcuguuccc

SEQ ID NO: 3091528 - RNA, 19 nt, Artificial Sequence
  Description of Artificial Sequence: Synthetic oligonucleotide
agaacacaguaggugcuag

SEQ ID NO: 3091529 - RNA, 19 nt, Artificial Sequence
  Description of Artificial Sequence: Synthetic oligonucleotide
cuuccggcuuguuuucggc

SEQ ID NO: 3091530 - RNA, 19 nt, Artificial Sequence
  Description of Artificial Sequence: Synthetic oligonucleotide
uuguuuucggcagccauuu

SEQ ID NO: 3091531 - RNA, 19 nt, Artificial Sequence
  Description of Artificial Sequence: Synthetic oligonucleotide
cagccauuuccccuccgcg

SEQ ID NO: 3091532 - RNA, 19 nt, Artificial Sequence
  Description of Artificial Sequence: Synthetic oligonucleotide
aguguuccagcggugccuc

SEQ ID NO: 3091533 - RNA, 19 nt, Artificial Sequence
  Description of Artificial Sequence: Synthetic oligonucleotide
gguggcacgguguugagaa

SEQ ID NO: 3091534 - RNA, 19 nt, Artificial Sequence
  Description of Artificial Sequence: Synthetic oligonucleotide
ucccaugaucaucuucuau

SEQ ID NO: 3091535 - RNA, 19 nt, Artificial Sequence
  Description of Artificial Sequence: Synthetic oligonucleotide
uuucggcagccauuucccc

SEQ ID NO: 3091536 - RNA, 19 nt, Artificial Sequence
  Description of Artificial Sequence: Synthetic oligonucleotide
uugaacauuucgggagaca

SEQ ID NO: 3091537 - RNA, 19 nt, Artificial Sequence
  Description of Artificial Sequence: Synthetic oligonucleotide
cauuaguguuccagcggug

SEQ ID NO: 3091538 - RNA, 19 nt, Artificial Sequence
  Description of Artificial Sequence: Synthetic oligonucleotide
auacacuuugggaaacgcu

SEQ ID NO: 3091539 - RNA, 19 nt, Artificial Sequence
  Description of Artificial Sequence: Synthetic oligonucleotide
gccauuuccccuccgcgcg

SEQ ID NO: 3091540 - RNA, 19 nt, Artificial Sequence
  Description of Artificial Sequence: Synthetic oligonucleotide
uauagguggcacgguguug

SEQ ID NO: 3091541 - RNA, 19 nt, Artificial Sequence
  Description of Artificial Sequence: Synthetic oligonucleotide
uuccggcuuguuuucggca

SEQ ID NO: 3091542 - RNA, 19 nt, Artificial Sequence
  Description of Artificial Sequence: Synthetic oligonucleotide
ucggcagccauuuccccuc

SEQ ID NO: 3091543 - RNA, 19 nt, Artificial Sequence
  Description of Artificial Sequence: Synthetic oligonucleotide
acaguaggugcuaguuccg

SEQ ID NO: 3091544 - RNA, 19 nt, Artificial Sequence
  Description of Artificial Sequence: Synthetic oligonucleotide
cuugaacauuucgggagac

SEQ ID NO: 3091545 - RNA, 19 nt, Artificial Sequence
  Description of Artificial Sequence: Synthetic oligonucleotide
ugcuguucccaugaucauc

SEQ ID NO: 3091546 - RNA, 19 nt, Artificial Sequence
  Description of Artificial Sequence: Synthetic oligonucleotide
uaguguuccagcggugccu

SEQ ID NO: 3091547 - RNA, 19 nt, Artificial Sequence
  Description of Artificial Sequence: Synthetic oligonucleotide
cauuucgggagacauucaa

SEQ ID NO: 3091548 - RNA, 19 nt, Artificial Sequence
  Description of Artificial Sequence: Synthetic oligonucleotide
gaccgggaccccgagcgcg

SEQ ID NO: 3091549 - RNA, 19 nt, Artificial Sequence
  Description of Artificial Sequence: Synthetic oligonucleotide
acacuuugggaaacgcucu

SEQ ID NO: 3091550 - RNA, 19 nt, Artificial Sequence
  Description of Artificial Sequence: Synthetic oligonucleotide
cuccucgcgaccgggaccc

SEQ ID NO: 3091551 - RNA, 19 nt, Artificial Sequence
  Description of Artificial Sequence: Synthetic oligonucleotide
uccuccuccucgcgaccgg

SEQ ID NO: 3091552 - RNA, 19 nt, Artificial Sequence
  Description of Artificial Sequence: Synthetic oligonucleotide
caucuucuauagguggcac

SEQ ID NO: 3091553 - RNA, 19 nt, Artificial Sequence
  Description of Artificial Sequence: Synthetic oligonucleotide
ccgcagaauacacuuuggg

SEQ ID NO: 3091554 - RNA, 19 nt, Artificial Sequence
  Description of Artificial Sequence: Synthetic oligonucleotide
gcuaguuccgcagaauaca

SEQ ID NO: 3091555 - RNA, 19 nt, Artificial Sequence
  Description of Artificial Sequence: Synthetic oligonucleotide
uccuccucgcgaccgggac

SEQ ID NO: 3091556 - RNA, 19 nt, Artificial Sequence
  Description of Artificial Sequence: Synthetic oligonucleotide
gugcuaguuccgcagaaua

SEQ ID NO: 3091557 - RNA, 19 nt, Artificial Sequence
  Description of Artificial Sequence: Synthetic oligonucleotide
caguaggugcuaguuccgc

SEQ ID NO: 3091558 - RNA, 19 nt, Artificial Sequence
  Description of Artificial Sequence: Synthetic oligonucleotide
agacauucaagcagcuuuu

SEQ ID NO: 3091559 - RNA, 19 nt, Artificial Sequence
  Description of Artificial Sequence: Synthetic oligonucleotide
uccgcgcgccacauccucc

SEQ ID NO: 3091560 - RNA, 19 nt, Artificial Sequence
  Description of Artificial Sequence: Synthetic oligonucleotide
uguuuucggcagccauuuc

SEQ ID NO: 3091561 - RNA, 19 nt, Artificial Sequence
  Description of Artificial Sequence: Synthetic oligonucleotide
uagguggcacgguguugag

SEQ ID NO: 3091562 - RNA, 19 nt, Artificial Sequence
  Description of Artificial Sequence: Synthetic oligonucleotide
cauccuccuccuccucgcg

SEQ ID NO: 3091563 - RNA, 19 nt, Artificial Sequence
  Description of Artificial Sequence: Synthetic oligonucleotide
aggugcuaguuccgcagaa

SEQ ID NO: 3091564 - RNA, 19 nt, Artificial Sequence
  Description of Artificial Sequence: Synthetic oligonucleotide
uugcuguucccaugaucau

SEQ ID NO: 3091565 - RNA, 19 nt, Artificial Sequence
  Description of Artificial Sequence: Synthetic oligonucleotide
acgguguugagaacacagu

SEQ ID NO: 3091566 - RNA, 19 nt, Artificial Sequence
  Description of Artificial Sequence: Synthetic oligonucleotide
cagcggugccucucuuugg

SEQ ID NO: 3091567 - RNA, 19 nt, Artificial Sequence
  Description of Artificial Sequence: Synthetic oligonucleotide
cucuuccggcuuguuuucg

SEQ ID NO: 3091568 - RNA, 19 nt, Artificial Sequence
  Description of Artificial Sequence: Synthetic oligonucleotide
cuccuccuccucgcgaccg

SEQ ID NO: 3091569 - RNA, 19 nt, Artificial Sequence
  Description of Artificial Sequence: Synthetic oligonucleotide
gaacacaguaggugcuagu

SEQ ID NO: 3091570 - RNA, 19 nt, Artificial Sequence
  Description of Artificial Sequence: Synthetic oligonucleotide
accccgagcgcgcgccucg

SEQ ID NO: 3091571 - RNA, 19 nt, Artificial Sequence
  Description of Artificial Sequence: Synthetic oligonucleotide
gagaacacaguaggugcua

SEQ ID NO: 3091572 - RNA, 19 nt, Artificial Sequence
  Description of Artificial Sequence: Synthetic oligonucleotide
gcagccauuuccccuccgc

SEQ ID NO: 3091573 - RNA, 19 nt, Artificial Sequence
  Description of Artificial Sequence: Synthetic oligonucleotide
uuccccuccgcgcgccaca

SEQ ID NO: 3091574 - RNA, 19 nt, Artificial Sequence
  Description of Artificial Sequence: Synthetic oligonucleotide
cauuuccccuccgcgcgcc

SEQ ID NO: 3091575 - RNA, 19 nt, Artificial Sequence
  Description of Artificial Sequence: Synthetic oligonucleotide
cgcagaauacacuuuggga

SEQ ID NO: 3091576 - RNA, 19 nt, Artificial Sequence
  Description of Artificial Sequence: Synthetic oligonucleotide
cuuguuuucggcagccauu

SEQ ID NO: 3091577 - RNA, 19 nt, Artificial Sequence
  Description of Artificial Sequence: Synthetic oligonucleotide
uccagcggugccucucuuu

SEQ ID NO: 3091578 - RNA, 19 nt, Artificial Sequence
  Description of Artificial Sequence: Synthetic oligonucleotide
ccagcggugccucucuuug

SEQ ID NO: 3091579 - RNA, 19 nt, Artificial Sequence
  Description of Artificial Sequence: Synthetic oligonucleotide
ggcccagccaucccgccgc

SEQ ID NO: 3091580 - RNA, 19 nt, Artificial Sequence
  Description of Artificial Sequence: Synthetic oligonucleotide
cucuuuggguaaacuugaa

SEQ ID NO: 3091581 - RNA, 19 nt, Artificial Sequence
  Description of Artificial Sequence: Synthetic oligonucleotide
ggugccucucuuuggguaa

SEQ ID NO: 3091582 - RNA, 19 nt, Artificial Sequence
  Description of Artificial Sequence: Synthetic oligonucleotide
gcuguucccaugaucaucu

SEQ ID NO: 3091583 - RNA, 19 nt, Artificial Sequence
  Description of Artificial Sequence: Synthetic oligonucleotide
cuacuauugcuguucccau

SEQ ID NO: 3091584 - RNA, 19 nt, Artificial Sequence
  Description of Artificial Sequence: Synthetic oligonucleotide
accgggaccccgagcgcgc

SEQ ID NO: 3091585 - RNA, 19 nt, Artificial Sequence
  Description of Artificial Sequence: Synthetic oligonucleotide
agcgcgcgccucguaccgc

SEQ ID NO: 3091586 - RNA, 19 nt, Artificial Sequence
  Description of Artificial Sequence: Synthetic oligonucleotide
ccucguaccgccgccgccg

SEQ ID NO: 3091587 - RNA, 19 nt, Artificial Sequence
  Description of Artificial Sequence: Synthetic oligonucleotide
cucguaccgccgccgccgc

SEQ ID NO: 3091588 - RNA, 19 nt, Artificial Sequence
  Description of Artificial Sequence: Synthetic oligonucleotide
uuuccccuccgcgcgccac

SEQ ID NO: 3091589 - RNA, 19 nt, Artificial Sequence
  Description of Artificial Sequence: Synthetic oligonucleotide
ggguaaacuugaacauuuc

SEQ ID NO: 3091590 - RNA, 19 nt, Artificial Sequence
  Description of Artificial Sequence: Synthetic oligonucleotide
cuccgcgcgccacauccuc

SEQ ID NO: 3091591 - RNA, 19 nt, Artificial Sequence
  Description of Artificial Sequence: Synthetic oligonucleotide
cuauagguggcacgguguu

SEQ ID NO: 3091592 - RNA, 19 nt, Artificial Sequence
  Description of Artificial Sequence: Synthetic oligonucleotide
ugccucucuuuggguaaac

SEQ ID NO: 3091593 - RNA, 19 nt, Artificial Sequence
  Description of Artificial Sequence: Synthetic oligonucleotide
auuuccccuccgcgcgcca

SEQ ID NO: 3091594 - RNA, 19 nt, Artificial Sequence
  Description of Artificial Sequence: Synthetic oligonucleotide
guggcacgguguugagaac

SEQ ID NO: 3091595 - RNA, 19 nt, Artificial Sequence
  Description of Artificial Sequence: Synthetic oligonucleotide
agguggcacgguguugaga

SEQ ID NO: 3091596 - RNA, 19 nt, Artificial Sequence
  Description of Artificial Sequence: Synthetic oligonucleotide
caugacuacuauugcuguu

SEQ ID NO: 3091597 - RNA, 19 nt, Artificial Sequence
  Description of Artificial Sequence: Synthetic oligonucleotide
gaacauuucgggagacauu

SEQ ID NO: 3091598 - RNA, 19 nt, Artificial Sequence
  Description of Artificial Sequence: Synthetic oligonucleotide
ggcacgguguugagaacac

SEQ ID NO: 3091599 - RNA, 19 nt, Artificial Sequence
  Description of Artificial Sequence: Synthetic oligonucleotide
cucgcgaccgggaccccga

SEQ ID NO: 3091600 - RNA, 19 nt, Artificial Sequence
  Description of Artificial Sequence: Synthetic oligonucleotide
gcucuuccggcuuguuuuc

SEQ ID NO: 3091601 - RNA, 19 nt, Artificial Sequence
  Description of Artificial Sequence: Synthetic oligonucleotide
ucguaccgccgccgccgcc

SEQ ID NO: 3091602 - RNA, 19 nt, Artificial Sequence
  Description of Artificial Sequence: Synthetic oligonucleotide
guuccagcggugccucucu

SEQ ID NO: 3091603 - RNA, 19 nt, Artificial Sequence
  Description of Artificial Sequence: Synthetic oligonucleotide
gcuuguuuucggcagccau

SEQ ID NO: 3091604 - RNA, 19 nt, Artificial Sequence
  Description of Artificial Sequence: Synthetic oligonucleotide
uuccagcggugccucucuu

SEQ ID NO: 3091605 - RNA, 19 nt, Artificial Sequence
  Description of Artificial Sequence: Synthetic oligonucleotide
gcgcgccacauccuccucc

SEQ ID NO: 3091606 - RNA, 19 nt, Artificial Sequence
  Description of Artificial Sequence: Synthetic oligonucleotide
aacgcucuuccggcuuguu

SEQ ID NO: 3091607 - RNA, 19 nt, Artificial Sequence
  Description of Artificial Sequence: Synthetic oligonucleotide
ccggcuuguuuucggcagc

SEQ ID NO: 3091608 - RNA, 19 nt, Artificial Sequence
  Description of Artificial Sequence: Synthetic oligonucleotide
ccuccucgcgaccgggacc

SEQ ID NO: 3091609 - RNA, 19 nt, Artificial Sequence
  Description of Artificial Sequence: Synthetic oligonucleotide
ccauuuccccuccgcgcgc

SEQ ID NO: 3091610 - RNA, 19 nt, Artificial Sequence
  Description of Artificial Sequence: Synthetic oligonucleotide
cuccuccucgcgaccggga

SEQ ID NO: 3091611 - RNA, 19 nt, Artificial Sequence
  Description of Artificial Sequence: Synthetic oligonucleotide
ccgagcgcgcgccucguac

SEQ ID NO: 3091612 - RNA, 19 nt, Artificial Sequence
  Description of Artificial Sequence: Synthetic oligonucleotide
cguaccgccgccgccgccg

SEQ ID NO: 3091613 - RNA, 19 nt, Artificial Sequence
  Description of Artificial Sequence: Synthetic oligonucleotide
ccucucuuuggguaaacuu

SEQ ID NO: 3091614 - RNA, 19 nt, Artificial Sequence
  Description of Artificial Sequence: Synthetic oligonucleotide
cuucuauagguggcacggu

SEQ ID NO: 3091615 - RNA, 19 nt, Artificial Sequence
  Description of Artificial Sequence: Synthetic oligonucleotide
gcgcgcgccucguaccgcc

SEQ ID NO: 3091616 - RNA, 19 nt, Artificial Sequence
  Description of Artificial Sequence: Synthetic oligonucleotide
ggaaacgcucuuccggcuu

SEQ ID NO: 3091617 - RNA, 19 nt, Artificial Sequence
  Description of Artificial Sequence: Synthetic oligonucleotide
cgagcgcgcgccucguacc

SEQ ID NO: 3091618 - RNA, 19 nt, Artificial Sequence
  Description of Artificial Sequence: Synthetic oligonucleotide
gggaaacgcucuuccggcu

SEQ ID NO: 3091619 - RNA, 19 nt, Artificial Sequence
  Description of Artificial Sequence: Synthetic oligonucleotide
cacuuugggaaacgcucuu

SEQ ID NO: 3091620 - RNA, 19 nt, Artificial Sequence
  Description of Artificial Sequence: Synthetic oligonucleotide
gccucguaccgccgccgcc

SEQ ID NO: 3091621 - RNA, 19 nt, Artificial Sequence
  Description of Artificial Sequence: Synthetic oligonucleotide
uccccuccgcgcgccacau

SEQ ID NO: 3091622 - RNA, 19 nt, Artificial Sequence
  Description of Artificial Sequence: Synthetic oligonucleotide
gugccucucuuuggguaaa

SEQ ID NO: 3091623 - RNA, 19 nt, Artificial Sequence
  Description of Artificial Sequence: Synthetic oligonucleotide
guuccgcagaauacacuuu

SEQ ID NO: 3091624 - RNA, 19 nt, Artificial Sequence
  Description of Artificial Sequence: Synthetic oligonucleotide
ccuccuccucgcgaccggg

SEQ ID NO: 3091625 - RNA, 19 nt, Artificial Sequence
  Description of Artificial Sequence: Synthetic oligonucleotide
gccgccggcccagccaucc

SEQ ID NO: 3091626 - RNA, 19 nt, Artificial Sequence
  Description of Artificial Sequence: Synthetic oligonucleotide
ggcuuguuuucggcagcca

SEQ ID NO: 3091627 - RNA, 19 nt, Artificial Sequence
  Description of Artificial Sequence: Synthetic oligonucleotide
ggugcuaguuccgcagaau

SEQ ID NO: 3091628 - RNA, 19 nt, Artificial Sequence
  Description of Artificial Sequence: Synthetic oligonucleotide
cggcuuguuuucggcagcc

SEQ ID NO: 3091629 - RNA, 19 nt, Artificial Sequence
  Description of Artificial Sequence: Synthetic oligonucleotide
cgccggcccagccaucccg

SEQ ID NO: 3091630 - RNA, 19 nt, Artificial Sequence
  Description of Artificial Sequence: Synthetic oligonucleotide
ccucgcgaccgggaccccg

SEQ ID NO: 3091631 - RNA, 19 nt, Artificial Sequence
  Description of Artificial Sequence: Synthetic oligonucleotide
gcgccucguaccgccgccg

SEQ ID NO: 3091632 - RNA, 19 nt, Artificial Sequence
  Description of Artificial Sequence: Synthetic oligonucleotide
gccggcccagccaucccgc

SEQ ID NO: 3091633 - RNA, 19 nt, Artificial Sequence
  Description of Artificial Sequence: Synthetic oligonucleotide
gcacgguguugagaacaca

SEQ ID NO: 3091634 - RNA, 19 nt, Artificial Sequence
  Description of Artificial Sequence: Synthetic oligonucleotide
ggagacauucaagcagcuu

SEQ ID NO: 3091635 - RNA, 19 nt, Artificial Sequence
  Description of Artificial Sequence: Synthetic oligonucleotide
uccucgcgaccgggacccc

SEQ ID NO: 3091636 - RNA, 19 nt, Artificial Sequence
  Description of Artificial Sequence: Synthetic oligonucleotide
cggcccagccaucccgccg

SEQ ID NO: 3091637 - RNA, 19 nt, Artificial Sequence
  Description of Artificial Sequence: Synthetic oligonucleotide
ccggcccagccaucccgcc

SEQ ID NO: 3091638 - RNA, 19 nt, Artificial Sequence
  Description of Artificial Sequence: Synthetic oligonucleotide
gccucucuuuggguaaacu

SEQ ID NO: 3091639 - RNA, 19 nt, Artificial Sequence
  Description of Artificial Sequence: Synthetic oligonucleotide
cgcgccucguaccgccgcc

SEQ ID NO: 3091640 - RNA, 19 nt, Artificial Sequence
  Description of Artificial Sequence: Synthetic oligonucleotide
cggugccucucuuugggua

SEQ ID NO: 3091641 - RNA, 19 nt, Artificial Sequence
  Description of Artificial Sequence: Synthetic oligonucleotide
gcccagccaucccgccgcc

SEQ ID NO: 3091642 - RNA, 19 nt, Artificial Sequence
  Description of Artificial Sequence: Synthetic oligonucleotide
cgccucguaccgccgccgc

SEQ ID NO: 3091643 - RNA, 19 nt, Artificial Sequence
  Description of Artificial Sequence: Synthetic oligonucleotide
gcggugccucucuuugggu

SEQ ID NO: 3091644 - RNA, 19 nt, Artificial Sequence
  Description of Artificial Sequence: Synthetic oligonucleotide
cuguucccaugaucaucuu

SEQ ID NO: 3091645 - RNA, 19 nt, Artificial Sequence
  Description of Artificial Sequence: Synthetic oligonucleotide
cgaccgggaccccgagcgc

SEQ ID NO: 3091646 - RNA, 19 nt, Artificial Sequence
  Description of Artificial Sequence: Synthetic oligonucleotide
cggcagccauuuccccucc

SEQ ID NO: 3091647 - RNA, 19 nt, Artificial Sequence
  Description of Artificial Sequence: Synthetic oligonucleotide
cgcgcgccucguaccgccg

SEQ ID NO: 3091648 - RNA, 19 nt, Artificial Sequence
  Description of Artificial Sequence: Synthetic oligonucleotide
ccgggaccccgagcgcgcg

SEQ ID NO: 3091649 - RNA, 19 nt, Artificial Sequence
  Description of Artificial Sequence: Synthetic oligonucleotide
ccgccggcccagccauccc

SEQ ID NO: 3091650 - RNA, 19 nt, Artificial Sequence
  Description of Artificial Sequence: Synthetic oligonucleotide
cgcgccacauccuccuccu

SEQ ID NO: 3091651 - RNA, 19 nt, Artificial Sequence
  Description of Artificial Sequence: Synthetic oligonucleotide
ccgcgcgccacauccuccu

SEQ ID NO: 3091652 - RNA, 19 nt, Artificial Sequence
  Description of Artificial Sequence: Synthetic oligonucleotide
ggaccccgagcgcgcgccu

SEQ ID NO: 3091653 - RNA, 19 nt, Artificial Sequence
  Description of Artificial Sequence: Synthetic oligonucleotide
cgcgcgccacauccuccuc

SEQ ID NO: 3091654 - RNA, 19 nt, Artificial Sequence
  Description of Artificial Sequence: Synthetic oligonucleotide
ccuccgcgcgccacauccu

SEQ ID NO: 3091655 - RNA, 19 nt, Artificial Sequence
  Description of Artificial Sequence: Synthetic oligonucleotide
ccccuccgcgcgccacauc

SEQ ID NO: 3091656 - RNA, 19 nt, Artificial Sequence
  Description of Artificial Sequence: Synthetic oligonucleotide
cccgagcgcgcgccucgua

SEQ ID NO: 3091657 - RNA, 19 nt, Artificial Sequence
  Description of Artificial Sequence: Synthetic oligonucleotide
cgccgccggcccagccauc

SEQ ID NO: 3091658 - RNA, 19 nt, Artificial Sequence
  Description of Artificial Sequence: Synthetic oligonucleotide
ccccgagcgcgcgccucgu

SEQ ID NO: 3091659 - RNA, 19 nt, Artificial Sequence
  Description of Artificial Sequence: Synthetic oligonucleotide
uccacuuucauuaugaugg

SEQ ID NO: 3091660 - RNA, 19 nt, Artificial Sequence
  Description of Artificial Sequence: Synthetic oligonucleotide
gagaagaugaagcacaagg

SEQ ID NO: 3091661 - RNA, 19 nt, Artificial Sequence
  Description of Artificial Sequence: Synthetic oligonucleotide
aaggauaggacacccugcc

SEQ ID NO: 3091662 - RNA, 19 nt, Artificial Sequence
  Description of Artificial Sequence: Synthetic oligonucleotide
cuguagaucacaaaucugg

SEQ ID NO: 3091663 - RNA, 19 nt, Artificial Sequence
  Description of Artificial Sequence: Synthetic oligonucleotide
aaacauucuggauuucuuc

SEQ ID NO: 3091664 - RNA, 19 nt, Artificial Sequence
  Description of Artificial Sequence: Synthetic oligonucleotide
uagaucacaaaucugggcu

SEQ ID NO: 3091665 - RNA, 19 nt, Artificial Sequence
  Description of Artificial Sequence: Synthetic oligonucleotide
uaugauggcugcauugucg

SEQ ID NO: 3091666 - RNA, 19 nt, Artificial Sequence
  Description of Artificial Sequence: Synthetic oligonucleotide
aaagcggaauuuccucagc

SEQ ID NO: 3091667 - RNA, 19 nt, Artificial Sequence
  Description of Artificial Sequence: Synthetic oligonucleotide
uacuuguagcuguagauca

SEQ ID NO: 3091668 - RNA, 19 nt, Artificial Sequence
  Description of Artificial Sequence: Synthetic oligonucleotide
ugaagcacaaggauaggac

SEQ ID NO: 3091669 - RNA, 19 nt, Artificial Sequence
  Description of Artificial Sequence: Synthetic oligonucleotide
uucuggggaaacauucugg

SEQ ID NO: 3091670 - RNA, 19 nt, Artificial Sequence
  Description of Artificial Sequence: Synthetic oligonucleotide
ucaugcaaguacuuguagc

SEQ ID NO: 3091671 - RNA, 19 nt, Artificial Sequence
  Description of Artificial Sequence: Synthetic oligonucleotide
agaugaagcacaaggauag

SEQ ID NO: 3091672 - RNA, 19 nt, Artificial Sequence
  Description of Artificial Sequence: Synthetic oligonucleotide
uccagcaccaccaucuggc

SEQ ID NO: 3091673 - RNA, 19 nt, Artificial Sequence
  Description of Artificial Sequence: Synthetic oligonucleotide
uuguccacuuucauuauga

SEQ ID NO: 3091674 - RNA, 19 nt, Artificial Sequence
  Description of Artificial Sequence: Synthetic oligonucleotide
uuucgaaagcggaauuucc

SEQ ID NO: 3091675 - RNA, 19 nt, Artificial Sequence
  Description of Artificial Sequence: Synthetic oligonucleotide
aagcacaaggauaggacac

SEQ ID NO: 3091676 - RNA, 19 nt, Artificial Sequence
  Description of Artificial Sequence: Synthetic oligonucleotide
agcuguagaucacaaaucu

SEQ ID NO: 3091677 - RNA, 19 nt, Artificial Sequence
  Description of Artificial Sequence: Synthetic oligonucleotide
cuuucauuaugauggcugc

SEQ ID NO: 3091678 - RNA, 19 nt, Artificial Sequence
  Description of Artificial Sequence: Synthetic oligonucleotide
uuuccuuuagcuccggguc

SEQ ID NO: 3091679 - RNA, 19 nt, Artificial Sequence
  Description of Artificial Sequence: Synthetic oligonucleotide
ucuggcaacuccaaccuga

SEQ ID NO: 3091680 - RNA, 19 nt, Artificial Sequence
  Description of Artificial Sequence: Synthetic oligonucleotide
agcaccaccaucuggcggg

SEQ ID NO: 3091681 - RNA, 19 nt, Artificial Sequence
  Description of Artificial Sequence: Synthetic oligonucleotide
acaaggauaggacacccug

SEQ ID NO: 3091682 - RNA, 19 nt, Artificial Sequence
  Description of Artificial Sequence: Synthetic oligonucleotide
  modified_base (6)..(6): a, c, u, g, unknown or other
ucaucnguugcucaggcuu

SEQ ID NO: 3091683 - RNA, 19 nt, Artificial Sequence
  Description of Artificial Sequence: Synthetic oligonucleotide
augauggcugcauugucgg

SEQ ID NO: 3091684 - RNA, 19 nt, Artificial Sequence
  Description of Artificial Sequence: Synthetic oligonucleotide
cuggauuucuucuuccagc

SEQ ID NO: 3091685 - RNA, 19 nt, Artificial Sequence
  Description of Artificial Sequence: Synthetic oligonucleotide
uggggaaacauucuggauu

SEQ ID NO: 3091686 - RNA, 19 nt, Artificial Sequence
  Description of Artificial Sequence: Synthetic oligonucleotide
cucucuggcaacuccaacc

SEQ ID NO: 3091687 - RNA, 19 nt, Artificial Sequence
  Description of Artificial Sequence: Synthetic oligonucleotide
uuuuccuuuagcuccgggu

SEQ ID NO: 3091688 - RNA, 19 nt, Artificial Sequence
  Description of Artificial Sequence: Synthetic oligonucleotide
gaaagcggaauuuccucag

SEQ ID NO: 3091689 - RNA, 19 nt, Artificial Sequence
  Description of Artificial Sequence: Synthetic oligonucleotide
aguacuuguagcuguagau

SEQ ID NO: 3091690 - RNA, 19 nt, Artificial Sequence
  Description of Artificial Sequence: Synthetic oligonucleotide
aaguacuuguagcuguaga

SEQ ID NO: 3091691 - RNA, 19 nt, Artificial Sequence
  Description of Artificial Sequence: Synthetic oligonucleotide
uggauuucuucuuccagca

SEQ ID NO: 3091692 - RNA, 19 nt, Artificial Sequence
  Description of Artificial Sequence: Synthetic oligonucleotide
cauuaugauggcugcauug

SEQ ID NO: 3091693 - RNA, 19 nt, Artificial Sequence
  Description of Artificial Sequence: Synthetic oligonucleotide
uucgaaagcggaauuuccu

SEQ ID NO: 3091694 - RNA, 19 nt, Artificial Sequence
  Description of Artificial Sequence: Synthetic oligonucleotide
ucuggggaaacauucugga

SEQ ID NO: 3091695 - RNA, 19 nt, Artificial Sequence
  Description of Artificial Sequence: Synthetic oligonucleotide
acuuucauuaugauggcug

SEQ ID NO: 3091696 - RNA, 19 nt, Artificial Sequence
  Description of Artificial Sequence: Synthetic oligonucleotide
ucagcuuuuccuuuagcuc

SEQ ID NO: 3091697 - RNA, 19 nt, Artificial Sequence
  Description of Artificial Sequence: Synthetic oligonucleotide
ugcaaguacuuguagcugu

SEQ ID NO: 3091698 - RNA, 19 nt, Artificial Sequence
  Description of Artificial Sequence: Synthetic oligonucleotide
gaagcacaaggauaggaca

SEQ ID NO: 3091699 - RNA, 19 nt, Artificial Sequence
  Description of Artificial Sequence: Synthetic oligonucleotide
aaccugaguucuucugggg

SEQ ID NO: 3091700 - RNA, 19 nt, Artificial Sequence
  Description of Artificial Sequence: Synthetic oligonucleotide
guagaucacaaaucugggc

SEQ ID NO: 3091701 - RNA, 19 nt, Artificial Sequence
  Description of Artificial Sequence: Synthetic oligonucleotide
ucucuggcaacuccaaccu

SEQ ID NO: 3091702 - RNA, 19 nt, Artificial Sequence
  Description of Artificial Sequence: Synthetic oligonucleotide
uuuguccacuuucauuaug

SEQ ID NO: 3091703 - RNA, 19 nt, Artificial Sequence
  Description of Artificial Sequence: Synthetic oligonucleotide
aagcggaauuuccucagcu

SEQ ID NO: 3091704 - RNA, 19 nt, Artificial Sequence
  Description of Artificial Sequence: Synthetic oligonucleotide
ucgucaugcaaguacuugu

SEQ ID NO: 3091705 - RNA, 19 nt, Artificial Sequence
  Description of Artificial Sequence: Synthetic oligonucleotide
ugcauugucggucucuuuu

SEQ ID NO: 3091706 - RNA, 19 nt, Artificial Sequence
  Description of Artificial Sequence: Synthetic oligonucleotide
caaccugaguucuucuggg

SEQ ID NO: 3091707 - RNA, 19 nt, Artificial Sequence
  Description of Artificial Sequence: Synthetic oligonucleotide
agaucacaaaucugggcug

SEQ ID NO: 3091708 - RNA, 19 nt, Artificial Sequence
  Description of Artificial Sequence: Synthetic oligonucleotide
auuaugauggcugcauugu

SEQ ID NO: 3091709 - RNA, 19 nt, Artificial Sequence
  Description of Artificial Sequence: Synthetic oligonucleotide
aagaugaagcacaaggaua

SEQ ID NO: 3091710 - RNA, 19 nt, Artificial Sequence
  Description of Artificial Sequence: Synthetic oligonucleotide
agcacaaggauaggacacc

SEQ ID NO: 3091711 - RNA, 19 nt, Artificial Sequence
  Description of Artificial Sequence: Synthetic oligonucleotide
uuuucgaaagcggaauuuc

SEQ ID NO: 3091712 - RNA, 19 nt, Artificial Sequence
  Description of Artificial Sequence: Synthetic oligonucleotide
acuucacacacugccaggg

SEQ ID NO: 3091713 - RNA, 19 nt, Artificial Sequence
  Description of Artificial Sequence: Synthetic oligonucleotide
ugggcugucucucuggcaa

SEQ ID NO: 3091714 - RNA, 19 nt, Artificial Sequence
  Description of Artificial Sequence: Synthetic oligonucleotide
uuccuuuagcuccgggucc

SEQ ID NO: 3091715 - RNA, 19 nt, Artificial Sequence
  Description of Artificial Sequence: Synthetic oligonucleotide
ucucuuuucgaaagcggaa

SEQ ID NO: 3091716 - RNA, 19 nt, Artificial Sequence
  Description of Artificial Sequence: Synthetic oligonucleotide
ucuucuggggaaacauucu

SEQ ID NO: 3091717 - RNA, 19 nt, Artificial Sequence
  Description of Artificial Sequence: Synthetic oligonucleotide
caaggauaggacacccugc

SEQ ID NO: 3091718 - RNA, 19 nt, Artificial Sequence
  Description of Artificial Sequence: Synthetic oligonucleotide
caggcuugcagcccgacag

SEQ ID NO: 3091719 - RNA, 19 nt, Artificial Sequence
  Description of Artificial Sequence: Synthetic oligonucleotide
uagcuguagaucacaaauc

SEQ ID NO: 3091720 - RNA, 19 nt, Artificial Sequence
  Description of Artificial Sequence: Synthetic oligonucleotide
ugucucucuggcaacucca

SEQ ID NO: 3091721 - RNA, 19 nt, Artificial Sequence
  Description of Artificial Sequence: Synthetic oligonucleotide
agaagaugaagcacaagga

SEQ ID NO: 3091722 - RNA, 19 nt, Artificial Sequence
  Description of Artificial Sequence: Synthetic oligonucleotide
uucacacacugccagggaa

SEQ ID NO: 3091723 - RNA, 19 nt, Artificial Sequence
  Description of Artificial Sequence: Synthetic oligonucleotide
caucuggcgggcuuugucc

SEQ ID NO: 3091724 - RNA, 19 nt, Artificial Sequence
  Description of Artificial Sequence: Synthetic oligonucleotide
gucggucucuuuucgaaag

SEQ ID NO: 3091725 - RNA, 19 nt, Artificial Sequence
  Description of Artificial Sequence: Synthetic oligonucleotide
guagcuguagaucacaaau

SEQ ID NO: 3091726 - RNA, 19 nt, Artificial Sequence
  Description of Artificial Sequence: Synthetic oligonucleotide
aaaucugggcugucucucu

SEQ ID NO: 3091727 - RNA, 19 nt, Artificial Sequence
  Description of Artificial Sequence: Synthetic oligonucleotide
uccacuucacacacugcca

SEQ ID NO: 3091728 - RNA, 19 nt, Artificial Sequence
  Description of Artificial Sequence: Synthetic oligonucleotide
uucauuaugauggcugcau

SEQ ID NO: 3091729 - RNA, 19 nt, Artificial Sequence
  Description of Artificial Sequence: Synthetic oligonucleotide
aaucugggcugucucucug

SEQ ID NO: 3091730 - RNA, 19 nt, Artificial Sequence
  Description of Artificial Sequence: Synthetic oligonucleotide
ucgaaagcggaauuuccuc

SEQ ID NO: 3091731 - RNA, 19 nt, Artificial Sequence
  Description of Artificial Sequence: Synthetic oligonucleotide
gaagaugaagcacaaggau

SEQ ID NO: 3091732 - RNA, 19 nt, Artificial Sequence
  Description of Artificial Sequence: Synthetic oligonucleotide
cauugucggucucuuuucg

SEQ ID NO: 3091733 - RNA, 19 nt, Artificial Sequence
  Description of Artificial Sequence: Synthetic oligonucleotide
guccacuuucauuaugaug

SEQ ID NO: 3091734 - RNA, 19 nt, Artificial Sequence
  Description of Artificial Sequence: Synthetic oligonucleotide
acaaaucugggcugucucu

SEQ ID NO: 3091735 - RNA, 19 nt, Artificial Sequence
  Description of Artificial Sequence: Synthetic oligonucleotide
uuccagcaccaccaucugg

SEQ ID NO: 3091736 - RNA, 19 nt, Artificial Sequence
  Description of Artificial Sequence: Synthetic oligonucleotide
uuaugauggcugcauuguc

SEQ ID NO: 3091737 - RNA, 19 nt, Artificial Sequence
  Description of Artificial Sequence: Synthetic oligonucleotide
uucuggauuucuucuucca

SEQ ID NO: 3091738 - RNA, 19 nt, Artificial Sequence
  Description of Artificial Sequence: Synthetic oligonucleotide
cacccugccaucgucaugc

SEQ ID NO: 3091739 - RNA, 19 nt, Artificial Sequence
  Description of Artificial Sequence: Synthetic oligonucleotide
gucaugcaaguacuuguag

SEQ ID NO: 3091740 - RNA, 19 nt, Artificial Sequence
  Description of Artificial Sequence: Synthetic oligonucleotide
cacacugccagggaauccg

SEQ ID NO: 3091741 - RNA, 19 nt, Artificial Sequence
  Description of Artificial Sequence: Synthetic oligonucleotide
  modified_base (8)..(8): a, c, u, g, unknown or other
caucaucnguugcucaggc

SEQ ID NO: 3091742 - RNA, 19 nt, Artificial Sequence
  Description of Artificial Sequence: Synthetic oligonucleotide
  modified_base (9)..(9): a, c, u, g, unknown or other
acaucaucnguugcucagg

SEQ ID NO: 3091743 - RNA, 19 nt, Artificial Sequence
  Description of Artificial Sequence: Synthetic oligonucleotide
cuucuggggaaacauucug

SEQ ID NO: 3091744 - RNA, 19 nt, Artificial Sequence
  Description of Artificial Sequence: Synthetic oligonucleotide
ucuuuucgaaagcggaauu

SEQ ID NO: 3091745 - RNA, 19 nt, Artificial Sequence
  Description of Artificial Sequence: Synthetic oligonucleotide
uugucggucucuuuucgaa

SEQ ID NO: 3091746 - RNA, 19 nt, Artificial Sequence
  Description of Artificial Sequence: Synthetic oligonucleotide
gcuuuguccacuuucauua

SEQ ID NO: 3091747 - RNA, 19 nt, Artificial Sequence
  Description of Artificial Sequence: Synthetic oligonucleotide
  modified_base (4)..(4): a, c, u, g, unknown or other
aucnguugcucaggcuugc

SEQ ID NO: 3091748 - RNA, 19 nt, Artificial Sequence
  Description of Artificial Sequence: Synthetic oligonucleotide
uguagcuguagaucacaaa

SEQ ID NO: 3091749 - RNA, 19 nt, Artificial Sequence
  Description of Artificial Sequence: Synthetic oligonucleotide
gaugaagcacaaggauagg

SEQ ID NO: 3091750 - RNA, 19 nt, Artificial Sequence
  Description of Artificial Sequence: Synthetic oligonucleotide
  modified_base (5)..(5): a, c, u, g, unknown or other
caucnguugcucaggcuug

SEQ ID NO: 3091751 - RNA, 19 nt, Artificial Sequence
  Description of Artificial Sequence: Synthetic oligonucleotide
ucugggcugucucucuggc

SEQ ID NO: 3091752 - RNA, 19 nt, Artificial Sequence
  Description of Artificial Sequence: Synthetic oligonucleotide
augaagcacaaggauagga

SEQ ID NO: 3091753 - RNA, 19 nt, Artificial Sequence
  Description of Artificial Sequence: Synthetic oligonucleotide
gauaggacacccugccauc

SEQ ID NO: 3091754 - RNA, 19 nt, Artificial Sequence
  Description of Artificial Sequence: Synthetic oligonucleotide
ucggucucuuuucgaaagc

SEQ ID NO: 3091755 - RNA, 19 nt, Artificial Sequence
  Description of Artificial Sequence: Synthetic oligonucleotide
auaggacacccugccaucg

SEQ ID NO: 3091756 - RNA, 19 nt, Artificial Sequence
  Description of Artificial Sequence: Synthetic oligonucleotide
uccucagcuuuuccuuuag

SEQ ID NO: 3091757 - RNA, 19 nt, Artificial Sequence
  Description of Artificial Sequence: Synthetic oligonucleotide
accugaguucuucugggga

SEQ ID NO: 3091758 - RNA, 19 nt, Artificial Sequence
  Description of Artificial Sequence: Synthetic oligonucleotide
acuccaaccugaguucuuc

SEQ ID NO: 3091759 - RNA, 19 nt, Artificial Sequence
  Description of Artificial Sequence: Synthetic oligonucleotide
gauggcugcauugucgguc

SEQ ID NO: 3091760 - RNA, 19 nt, Artificial Sequence
  Description of Artificial Sequence: Synthetic oligonucleotide
ucacacacugccagggaau

SEQ ID NO: 3091761 - RNA, 19 nt, Artificial Sequence
  Description of Artificial Sequence: Synthetic oligonucleotide
uccggguccacuucacaca

SEQ ID NO: 3091762 - RNA, 19 nt, Artificial Sequence
  Description of Artificial Sequence: Synthetic oligonucleotide
acugccagggaauccgaca

SEQ ID NO: 3091763 - RNA, 19 nt, Artificial Sequence
  Description of Artificial Sequence: Synthetic oligonucleotide
ucauuaugauggcugcauu

SEQ ID NO: 3091764 - RNA, 19 nt, Artificial Sequence
  Description of Artificial Sequence: Synthetic oligonucleotide
  modified_base (7)..(7): a, c, u, g, unknown or other
aucaucnguugcucaggcu

SEQ ID NO: 3091765 - RNA, 19 nt, Artificial Sequence
  Description of Artificial Sequence: Synthetic oligonucleotide
aguucuucuggggaaacau

SEQ ID NO: 3091766 - RNA, 19 nt, Artificial Sequence
  Description of Artificial Sequence: Synthetic oligonucleotide
acuuguagcuguagaucac

SEQ ID NO: 3091767 - RNA, 19 nt, Artificial Sequence
  Description of Artificial Sequence: Synthetic oligonucleotide
guacuuguagcuguagauc

SEQ ID NO: 3091768 - RNA, 19 nt, Artificial Sequence
  Description of Artificial Sequence: Synthetic oligonucleotide
aggacacccugccaucguc

SEQ ID NO: 3091769 - RNA, 19 nt, Artificial Sequence
  Description of Artificial Sequence: Synthetic oligonucleotide
aucgucaugcaaguacuug

SEQ ID NO: 3091770 - RNA, 19 nt, Artificial Sequence
  Description of Artificial Sequence: Synthetic oligonucleotide
auugucggucucuuuucga

SEQ ID NO: 3091771 - RNA, 19 nt, Artificial Sequence
  Description of Artificial Sequence: Synthetic oligonucleotide
cacaaaucugggcugucuc

SEQ ID NO: 3091772 - RNA, 19 nt, Artificial Sequence
  Description of Artificial Sequence: Synthetic oligonucleotide
cacuucacacacugccagg

SEQ ID NO: 3091773 - RNA, 19 nt, Artificial Sequence
  Description of Artificial Sequence: Synthetic oligonucleotide
auggcugcauugucggucu

SEQ ID NO: 3091774 - RNA, 19 nt, Artificial Sequence
  Description of Artificial Sequence: Synthetic oligonucleotide
ccaaccugaguucuucugg

SEQ ID NO: 3091775 - RNA, 19 nt, Artificial Sequence
  Description of Artificial Sequence: Synthetic oligonucleotide
cuccggguccacuucacac

SEQ ID NO: 3091776 - RNA, 19 nt, Artificial Sequence
  Description of Artificial Sequence: Synthetic oligonucleotide
gccaucgucaugcaaguac

SEQ ID NO: 3091777 - RNA, 19 nt, Artificial Sequence
  Description of Artificial Sequence: Synthetic oligonucleotide
cugucucucuggcaacucc

SEQ ID NO: 3091778 - RNA, 19 nt, Artificial Sequence
  Description of Artificial Sequence: Synthetic oligonucleotide
ucucucuggcaacuccaac

SEQ ID NO: 3091779 - RNA, 19 nt, Artificial Sequence
  Description of Artificial Sequence: Synthetic oligonucleotide
ucacaaaucugggcugucu

SEQ ID NO: 3091780 - RNA, 19 nt, Artificial Sequence
  Description of Artificial Sequence: Synthetic oligonucleotide
uuagcuccggguccacuuc

SEQ ID NO: 3091781 - RNA, 19 nt, Artificial Sequence
  Description of Artificial Sequence: Synthetic oligonucleotide
ugucggucucuuuucgaaa

SEQ ID NO: 3091782 - RNA, 19 nt, Artificial Sequence
  Description of Artificial Sequence: Synthetic oligonucleotide
acacacugccagggaaucc

SEQ ID NO: 3091783 - RNA, 19 nt, Artificial Sequence
  Description of Artificial Sequence: Synthetic oligonucleotide
cuggcaacuccaaccugag

SEQ ID NO: 3091784 - RNA, 19 nt, Artificial Sequence
  Description of Artificial Sequence: Synthetic oligonucleotide
agcuuuuccuuuagcuccg

SEQ ID NO: 3091785 - RNA, 19 nt, Artificial Sequence
  Description of Artificial Sequence: Synthetic oligonucleotide
ucaggcuugcagcccgaca

SEQ ID NO: 3091786 - RNA, 19 nt, Artificial Sequence
  Description of Artificial Sequence: Synthetic oligonucleotide
  modified_base (2)..(2): a, c, u, g, unknown or other
cnguugcucaggcuugcag

SEQ ID NO: 3091787 - RNA, 19 nt, Artificial Sequence
  Description of Artificial Sequence: Synthetic oligonucleotide
caaaucugggcugucucuc

SEQ ID NO: 3091788 - RNA, 19 nt, Artificial Sequence
  Description of Artificial Sequence: Synthetic oligonucleotide
augcaaguacuuguagcug

SEQ ID NO: 3091789 - RNA, 19 nt, Artificial Sequence
  Description of Artificial Sequence: Synthetic oligonucleotide
gacagggcuggagaagaug

SEQ ID NO: 3091790 - RNA, 19 nt, Artificial Sequence
  Description of Artificial Sequence: Synthetic oligonucleotide
aucuggcgggcuuugucca

SEQ ID NO: 3091791 - RNA, 19 nt, Artificial Sequence
  Description of Artificial Sequence: Synthetic oligonucleotide
uccuuuagcuccgggucca

SEQ ID NO: 3091792 - RNA, 19 nt, Artificial Sequence
  Description of Artificial Sequence: Synthetic oligonucleotide
cuuguagcuguagaucaca

SEQ ID NO: 3091793 - RNA, 19 nt, Artificial Sequence
  Description of Artificial Sequence: Synthetic oligonucleotide
ugcagcccgacagggcugg

SEQ ID NO: 3091794 - RNA, 19 nt, Artificial Sequence
  Description of Artificial Sequence: Synthetic oligonucleotide
caaguacuuguagcuguag

SEQ ID NO: 3091795 - RNA, 19 nt, Artificial Sequence
  Description of Artificial Sequence: Synthetic oligonucleotide
agcccgacagggcuggaga

SEQ ID NO: 3091796 - RNA, 19 nt, Artificial Sequence
  Description of Artificial Sequence: Synthetic oligonucleotide
agcggaauuuccucagcuu

SEQ ID NO: 3091797 - RNA, 19 nt, Artificial Sequence
  Description of Artificial Sequence: Synthetic oligonucleotide
uagcuccggguccacuuca

SEQ ID NO: 3091798 - RNA, 19 nt, Artificial Sequence
  Description of Artificial Sequence: Synthetic oligonucleotide
aggauaggacacccugcca

SEQ ID NO: 3091799 - RNA, 19 nt, Artificial Sequence
  Description of Artificial Sequence: Synthetic oligonucleotide
ugaguucuucuggggaaac

SEQ ID NO: 3091800 - RNA, 19 nt, Artificial Sequence
  Description of Artificial Sequence: Synthetic oligonucleotide
ggcaacuccaaccugaguu

SEQ ID NO: 3091801 - RNA, 19 nt, Artificial Sequence
  Description of Artificial Sequence: Synthetic oligonucleotide
cagcaccaccaucuggcgg

SEQ ID NO: 3091802 - RNA, 19 nt, Artificial Sequence
  Description of Artificial Sequence: Synthetic oligonucleotide
aucacaaaucugggcuguc

SEQ ID NO: 3091803 - RNA, 19 nt, Artificial Sequence
  Description of Artificial Sequence: Synthetic oligonucleotide
uugcagcccgacagggcug

SEQ ID NO: 3091804 - RNA, 19 nt, Artificial Sequence
  Description of Artificial Sequence: Synthetic oligonucleotide
ccacuucacacacugccag

SEQ ID NO: 3091805 - RNA, 19 nt, Artificial Sequence
  Description of Artificial Sequence: Synthetic oligonucleotide
cuugcagcccgacagggcu

SEQ ID NO: 3091806 - RNA, 19 nt, Artificial Sequence
  Description of Artificial Sequence: Synthetic oligonucleotide
ugauggcugcauugucggu

SEQ ID NO: 3091807 - RNA, 19 nt, Artificial Sequence
  Description of Artificial Sequence: Synthetic oligonucleotide
gaaacauucuggauuucuu

SEQ ID NO: 3091808 - RNA, 19 nt, Artificial Sequence
  Description of Artificial Sequence: Synthetic oligonucleotide
gcuguagaucacaaaucug

SEQ ID NO: 3091809 - RNA, 19 nt, Artificial Sequence
  Description of Artificial Sequence: Synthetic oligonucleotide
uggcaacuccaaccugagu

SEQ ID NO: 3091810 - RNA, 19 nt, Artificial Sequence
  Description of Artificial Sequence: Synthetic oligonucleotide
gaucacaaaucugggcugu

SEQ ID NO: 3091811 - RNA, 19 nt, Artificial Sequence
  Description of Artificial Sequence: Synthetic oligonucleotide
  modified_base (3)..(3): a, c, u, g, unknown or other
ucnguugcucaggcuugca

SEQ ID NO: 3091812 - RNA, 19 nt, Artificial Sequence
  Description of Artificial Sequence: Synthetic oligonucleotide
ucuggcgggcuuuguccac

SEQ ID NO: 3091813 - RNA, 19 nt, Artificial Sequence
  Description of Artificial Sequence: Synthetic oligonucleotide
gaguucuucuggggaaaca

SEQ ID NO: 3091814 - RNA, 19 nt, Artificial Sequence
  Description of Artificial Sequence: Synthetic oligonucleotide
ggauaggacacccugccau

SEQ ID NO: 3091815 - RNA, 19 nt, Artificial Sequence
  Description of Artificial Sequence: Synthetic oligonucleotide
cacacacugccagggaauc

SEQ ID NO: 3091816 - RNA, 19 nt, Artificial Sequence
  Description of Artificial Sequence: Synthetic oligonucleotide
ggagaagaugaagcacaag

SEQ ID NO: 3091817 - RNA, 19 nt, Artificial Sequence
  Description of Artificial Sequence: Synthetic oligonucleotide
ccacuuucauuaugauggc

SEQ ID NO: 3091818 - RNA, 19 nt, Artificial Sequence
  Description of Artificial Sequence: Synthetic oligonucleotide
gcauugucggucucuuuuc

SEQ ID NO: 3091819 - RNA, 19 nt, Artificial Sequence
  Description of Artificial Sequence: Synthetic oligonucleotide
cacugccagggaauccgac

SEQ ID NO: 3091820 - RNA, 19 nt, Artificial Sequence
  Description of Artificial Sequence: Synthetic oligonucleotide
cucuggcaacuccaaccug

SEQ ID NO: 3091821 - RNA, 19 nt, Artificial Sequence
  Description of Artificial Sequence: Synthetic oligonucleotide
gcacaaggauaggacaccc

SEQ ID NO: 3091822 - RNA, 19 nt, Artificial Sequence
  Description of Artificial Sequence: Synthetic oligonucleotide
ggauuucuucuuccagcac

SEQ ID NO: 3091823 - RNA, 19 nt, Artificial Sequence
  Description of Artificial Sequence: Synthetic oligonucleotide
cuucacacacugccaggga

SEQ ID NO: 3091824 - RNA, 19 nt, Artificial Sequence
  Description of Artificial Sequence: Synthetic oligonucleotide
ggaaacauucuggauuucu

SEQ ID NO: 3091825 - RNA, 19 nt, Artificial Sequence
  Description of Artificial Sequence: Synthetic oligonucleotide
ggggaaacauucuggauuu

SEQ ID NO: 3091826 - RNA, 19 nt, Artificial Sequence
  Description of Artificial Sequence: Synthetic oligonucleotide
agcuccggguccacuucac

SEQ ID NO: 3091827 - RNA, 19 nt, Artificial Sequence
  Description of Artificial Sequence: Synthetic oligonucleotide
ccagcaccaccaucuggcg

SEQ ID NO: 3091828 - RNA, 19 nt, Artificial Sequence
  Description of Artificial Sequence: Synthetic oligonucleotide
cucuuuucgaaagcggaau

SEQ ID NO: 3091829 - RNA, 19 nt, Artificial Sequence
  Description of Artificial Sequence: Synthetic oligonucleotide
cuuuucgaaagcggaauuu

SEQ ID NO: 3091830 - RNA, 19 nt, Artificial Sequence
  Description of Artificial Sequence: Synthetic oligonucleotide
cgaaagcggaauuuccuca

SEQ ID NO: 3091831 - RNA, 19 nt, Artificial Sequence
  Description of Artificial Sequence: Synthetic oligonucleotide
cggucucuuuucgaaagcg

SEQ ID NO: 3091832 - RNA, 19 nt, Artificial Sequence
  Description of Artificial Sequence: Synthetic oligonucleotide
cugaguucuucuggggaaa

SEQ ID NO: 3091833 - RNA, 19 nt, Artificial Sequence
  Description of Artificial Sequence: Synthetic oligonucleotide
ccugaguucuucuggggaa

SEQ ID NO: 3091834 - RNA, 19 nt, Artificial Sequence
  Description of Artificial Sequence: Synthetic oligonucleotide
cugccagggaauccgacau

SEQ ID NO: 3091835 - RNA, 19 nt, Artificial Sequence
  Description of Artificial Sequence: Synthetic oligonucleotide
ccggguccacuucacacac

SEQ ID NO: 3091836 - RNA, 19 nt, Artificial Sequence
  Description of Artificial Sequence: Synthetic oligonucleotide
gacacccugccaucgucau

SEQ ID NO: 3091837 - RNA, 19 nt, Artificial Sequence
  Description of Artificial Sequence: Synthetic oligonucleotide
ccucagcuuuuccuuuagc

SEQ ID NO: 3091838 - RNA, 19 nt, Artificial Sequence
  Description of Artificial Sequence: Synthetic oligonucleotide
cacaaggauaggacacccu

SEQ ID NO: 3091839 - RNA, 19 nt, Artificial Sequence
  Description of Artificial Sequence: Synthetic oligonucleotide
gcggaauuuccucagcuuu

SEQ ID NO: 3091840 - RNA, 19 nt, Artificial Sequence
  Description of Artificial Sequence: Synthetic oligonucleotide
cuuuguccacuuucauuau

SEQ ID NO: 3091841 - RNA, 19 nt, Artificial Sequence
  Description of Artificial Sequence: Synthetic oligonucleotide
cugggcugucucucuggca

SEQ ID NO: 3091842 - RNA, 19 nt, Artificial Sequence
  Description of Artificial Sequence: Synthetic oligonucleotide
ccaucgucaugcaaguacu

SEQ ID NO: 3091843 - RNA, 19 nt, Artificial Sequence
  Description of Artificial Sequence: Synthetic oligonucleotide
ccaucuggcgggcuuuguc

SEQ ID NO: 3091844 - RNA, 19 nt, Artificial Sequence
  Description of Artificial Sequence: Synthetic oligonucleotide
ggcuuuguccacuuucauu

SEQ ID NO: 3091845 - RNA, 19 nt, Artificial Sequence
  Description of Artificial Sequence: Synthetic oligonucleotide
cuggggaaacauucuggau

SEQ ID NO: 3091846 - RNA, 19 nt, Artificial Sequence
  Description of Artificial Sequence: Synthetic oligonucleotide
acacugccagggaauccga

SEQ ID NO: 3091847 - RNA, 19 nt, Artificial Sequence
  Description of Artificial Sequence: Synthetic oligonucleotide
cagcccgacagggcuggag

SEQ ID NO: 3091848 - RNA, 19 nt, Artificial Sequence
  Description of Artificial Sequence: Synthetic oligonucleotide
cucaggcuugcagcccgac

SEQ ID NO: 3091849 - RNA, 19 nt, Artificial Sequence
  Description of Artificial Sequence: Synthetic oligonucleotide
cacuuucauuaugauggcu

SEQ ID NO: 3091850 - RNA, 19 nt, Artificial Sequence
  Description of Artificial Sequence: Synthetic oligonucleotide
caacuccaaccugaguucu

SEQ ID NO: 3091851 - RNA, 19 nt, Artificial Sequence
  Description of Artificial Sequence: Synthetic oligonucleotide
ugccaucgucaugcaagua

SEQ ID NO: 3091852 - RNA, 19 nt, Artificial Sequence
  Description of Artificial Sequence: Synthetic oligonucleotide
ggacacccugccaucguca

SEQ ID NO: 3091853 - RNA, 19 nt, Artificial Sequence
  Description of Artificial Sequence: Synthetic oligonucleotide
uggcugcauugucggucuc

SEQ ID NO: 3091854 - RNA, 19 nt, Artificial Sequence
  Description of Artificial Sequence: Synthetic oligonucleotide
cuccaaccugaguucuucu

SEQ ID NO: 3091855 - RNA, 19 nt, Artificial Sequence
  Description of Artificial Sequence: Synthetic oligonucleotide
caccaucuggcgggcuuug

SEQ ID NO: 3091856 - RNA, 19 nt, Artificial Sequence
  Description of Artificial Sequence: Synthetic oligonucleotide
accaucuggcgggcuuugu

SEQ ID NO: 3091857 - RNA, 19 nt, Artificial Sequence
  Description of Artificial Sequence: Synthetic oligonucleotide
uggcgggcuuuguccacuu

SEQ ID NO: 3091858 - RNA, 19 nt, Artificial Sequence
  Description of Artificial Sequence: Synthetic oligonucleotide
guucuucuggggaaacauu

SEQ ID NO: 3091859 - RNA, 19 nt, Artificial Sequence
  Description of Artificial Sequence: Synthetic oligonucleotide
acccugccaucgucaugca

SEQ ID NO: 3091860 - RNA, 19 nt, Artificial Sequence
  Description of Artificial Sequence: Synthetic oligonucleotide
gggcugucucucuggcaac

SEQ ID NO: 3091861 - RNA, 19 nt, Artificial Sequence
  Description of Artificial Sequence: Synthetic oligonucleotide
gcaaguacuuguagcugua

SEQ ID NO: 3091862 - RNA, 19 nt, Artificial Sequence
  Description of Artificial Sequence: Synthetic oligonucleotide
caucgucaugcaaguacuu

SEQ ID NO: 3091863 - RNA, 19 nt, Artificial Sequence
  Description of Artificial Sequence: Synthetic oligonucleotide
cgucaugcaaguacuugua

SEQ ID NO: 3091864 - RNA, 19 nt, Artificial Sequence
  Description of Artificial Sequence: Synthetic oligonucleotide
gggaaacauucuggauuuc

SEQ ID NO: 3091865 - RNA, 19 nt, Artificial Sequence
  Description of Artificial Sequence: Synthetic oligonucleotide
gcugucucucuggcaacuc

SEQ ID NO: 3091866 - RNA, 19 nt, Artificial Sequence
  Description of Artificial Sequence: Synthetic oligonucleotide
gcccgacagggcuggagaa

SEQ ID NO: 3091867 - RNA, 19 nt, Artificial Sequence
  Description of Artificial Sequence: Synthetic oligonucleotide
ggcugcauugucggucucu

SEQ ID NO: 3091868 - RNA, 19 nt, Artificial Sequence
  Description of Artificial Sequence: Synthetic oligonucleotide
cuggcgggcuuuguccacu

SEQ ID NO: 3091869 - RNA, 19 nt, Artificial Sequence
  Description of Artificial Sequence: Synthetic oligonucleotide
gcugcauugucggucucuu

SEQ ID NO: 3091870 - RNA, 19 nt, Artificial Sequence
  Description of Artificial Sequence: Synthetic oligonucleotide
ccuuuagcuccggguccac

SEQ ID NO: 3091871 - RNA, 19 nt, Artificial Sequence
  Description of Artificial Sequence: Synthetic oligonucleotide
cugcauugucggucucuuu

SEQ ID NO: 3091872 - RNA, 19 nt, Artificial Sequence
  Description of Artificial Sequence: Synthetic oligonucleotide
cccugccaucgucaugcaa

SEQ ID NO: 3091873 - RNA, 19 nt, Artificial Sequence
  Description of Artificial Sequence: Synthetic oligonucleotide
caccaccaucuggcgggcu

SEQ ID NO: 3091874 - RNA, 19 nt, Artificial Sequence
  Description of Artificial Sequence: Synthetic oligonucleotide
gcagcccgacagggcugga

SEQ ID NO: 3091875 - RNA, 19 nt, Artificial Sequence
  Description of Artificial Sequence: Synthetic oligonucleotide
ccaccaucuggcgggcuuu

SEQ ID NO: 3091876 - RNA, 19 nt, Artificial Sequence
  Description of Artificial Sequence: Synthetic oligonucleotide
  modified_base (1)..(1): a, c, u, g, unknown or other
nguugcucaggcuugcagc

SEQ ID NO: 3091877 - RNA, 19 nt, Artificial Sequence
  Description of Artificial Sequence: Synthetic oligonucleotide
aaguucauguggaauagcc

SEQ ID NO: 3091878 - RNA, 19 nt, Artificial Sequence
  Description of Artificial Sequence: Synthetic oligonucleotide
uguggaauagccacucugg

SEQ ID NO: 3091879 - RNA, 19 nt, Artificial Sequence
  Description of Artificial Sequence: Synthetic oligonucleotide
uauaguuucuuguucuugc

SEQ ID NO: 3091880 - RNA, 19 nt, Artificial Sequence
  Description of Artificial Sequence: Synthetic oligonucleotide
ucugagucuggcuucaggg

SEQ ID NO: 3091881 - RNA, 19 nt, Artificial Sequence
  Description of Artificial Sequence: Synthetic oligonucleotide
cuuguucuugcuuagccgg

SEQ ID NO: 3091882 - RNA, 19 nt, Artificial Sequence
  Description of Artificial Sequence: Synthetic oligonucleotide
ucuuguucuugcuuagccg

SEQ ID NO: 3091883 - RNA, 19 nt, Artificial Sequence
  Description of Artificial Sequence: Synthetic oligonucleotide
acuuauaguuucuuguucu

SEQ ID NO: 3091884 - RNA, 19 nt, Artificial Sequence
  Description of Artificial Sequence: Synthetic oligonucleotide
acucuggguacucugaguc

SEQ ID NO: 3091885 - RNA, 19 nt, Artificial Sequence
  Description of Artificial Sequence: Synthetic oligonucleotide
uucugcuugcgcaacagcc

SEQ ID NO: 3091886 - RNA, 19 nt, Artificial Sequence
  Description of Artificial Sequence: Synthetic oligonucleotide
uccuuguagauguucaccc

SEQ ID NO: 3091887 - RNA, 19 nt, Artificial Sequence
  Description of Artificial Sequence: Synthetic oligonucleotide
uucuuguucuugcuuagcc

SEQ ID NO: 3091888 - RNA, 19 nt, Artificial Sequence
  Description of Artificial Sequence: Synthetic oligonucleotide
guucauguggaauagccac

SEQ ID NO: 3091889 - RNA, 19 nt, Artificial Sequence
  Description of Artificial Sequence: Synthetic oligonucleotide
ugagucuggcuucagggcc

SEQ ID NO: 3091890 - RNA, 19 nt, Artificial Sequence
  Description of Artificial Sequence: Synthetic oligonucleotide
agggucugugcauaccucc

SEQ ID NO: 3091891 - RNA, 19 nt, Artificial Sequence
  Description of Artificial Sequence: Synthetic oligonucleotide
ugugugguuagcugggcag

SEQ ID NO: 3091892 - RNA, 19 nt, Artificial Sequence
  Description of Artificial Sequence: Synthetic oligonucleotide
ugugcauaccuccgggucc

SEQ ID NO: 3091893 - RNA, 19 nt, Artificial Sequence
  Description of Artificial Sequence: Synthetic oligonucleotide
ugaggugucccauccacgc

SEQ ID NO: 3091894 - RNA, 19 nt, Artificial Sequence
  Description of Artificial Sequence: Synthetic oligonucleotide
uggccuuccuuguagaugu

SEQ ID NO: 3091895 - RNA, 19 nt, Artificial Sequence
  Description of Artificial Sequence: Synthetic oligonucleotide
ugugaggugucccauccac

SEQ ID NO: 3091896 - RNA, 19 nt, Artificial Sequence
  Description of Artificial Sequence: Synthetic oligonucleotide
aggugucccauccacgcac

SEQ ID NO: 3091897 - RNA, 19 nt, Artificial Sequence
  Description of Artificial Sequence: Synthetic oligonucleotide
ucaguggccacacuacccu

SEQ ID NO: 3091898 - RNA, 19 nt, Artificial Sequence
  Description of Artificial Sequence: Synthetic oligonucleotide
auguggaauagccacucug

SEQ ID NO: 3091899 - RNA, 19 nt, Artificial Sequence
  Description of Artificial Sequence: Synthetic oligonucleotide
ugcuuagccgguugugacg

SEQ ID NO: 3091900 - RNA, 19 nt, Artificial Sequence
  Description of Artificial Sequence: Synthetic oligonucleotide
uucauguggaauagccacu

SEQ ID NO: 3091901 - RNA, 19 nt, Artificial Sequence
  Description of Artificial Sequence: Synthetic oligonucleotide
guggaauagccacucuggg

SEQ ID NO: 3091902 - RNA, 19 nt, Artificial Sequence
  Description of Artificial Sequence: Synthetic oligonucleotide
guuucuuguucuugcuuag

SEQ ID NO: 3091903 - RNA, 19 nt, Artificial Sequence
  Description of Artificial Sequence: Synthetic oligonucleotide
uuccuuguagauguucacc

SEQ ID NO: 3091904 - RNA, 19 nt, Artificial Sequence
  Description of Artificial Sequence: Synthetic oligonucleotide
acucuggggauucggguuc

SEQ ID NO: 3091905 - RNA, 19 nt, Artificial Sequence
  Description of Artificial Sequence: Synthetic oligonucleotide
uucagggccacauccuggc

SEQ ID NO: 3091906 - RNA, 19 nt, Artificial Sequence
  Description of Artificial Sequence: Synthetic oligonucleotide
ucuggguacucugagucug

SEQ ID NO: 3091907 - RNA, 19 nt, Artificial Sequence
  Description of Artificial Sequence: Synthetic oligonucleotide
ugugacgccagauguucug

SEQ ID NO: 3091908 - RNA, 19 nt, Artificial Sequence
  Description of Artificial Sequence: Synthetic oligonucleotide
cucaguggccacacuaccc

SEQ ID NO: 3091909 - RNA, 19 nt, Artificial Sequence
  Description of Artificial Sequence: Synthetic oligonucleotide
cacuuauaguuucuuguuc

SEQ ID NO: 3091910 - RNA, 19 nt, Artificial Sequence
  Description of Artificial Sequence: Synthetic oligonucleotide
uucggguuccagcuccucc

SEQ ID NO: 3091911 - RNA, 19 nt, Artificial Sequence
  Description of Artificial Sequence: Synthetic oligonucleotide
uggggauucggguuccagc

SEQ ID NO: 3091912 - RNA, 19 nt, Artificial Sequence
  Description of Artificial Sequence: Synthetic oligonucleotide
cugagucuggcuucagggc

SEQ ID NO: 3091913 - RNA, 19 nt, Artificial Sequence
  Description of Artificial Sequence: Synthetic oligonucleotide
aguacucuggggauucggg

SEQ ID NO: 3091914 - RNA, 19 nt, Artificial Sequence
  Description of Artificial Sequence: Synthetic oligonucleotide
ugugguuagcugggcaggg

SEQ ID NO: 3091915 - RNA, 19 nt, Artificial Sequence
  Description of Artificial Sequence: Synthetic oligonucleotide
ggaauagccacucugggua

SEQ ID NO: 3091916 - RNA, 19 nt, Artificial Sequence
  Description of Artificial Sequence: Synthetic oligonucleotide
uguucugcuugcgcaacag

SEQ ID NO: 3091917 - RNA, 19 nt, Artificial Sequence
  Description of Artificial Sequence: Synthetic oligonucleotide
ggcgugugugguuagcugg

SEQ ID NO: 3091918 - RNA, 19 nt, Artificial Sequence
  Description of Artificial Sequence: Synthetic oligonucleotide
uugcuuagccgguugugac

SEQ ID NO: 3091919 - RNA, 19 nt, Artificial Sequence
  Description of Artificial Sequence: Synthetic oligonucleotide
uccacgcacuuauaguuuc

SEQ ID NO: 3091920 - RNA, 19 nt, Artificial Sequence
  Description of Artificial Sequence: Synthetic oligonucleotide
ucggguuccagcuccucca

SEQ ID NO: 3091921 - RNA, 19 nt, Artificial Sequence
  Description of Artificial Sequence: Synthetic oligonucleotide
ucauguggaauagccacuc

SEQ ID NO: 3091922 - RNA, 19 nt, Artificial Sequence
  Description of Artificial Sequence: Synthetic oligonucleotide
cacauccuggccuuccuug

SEQ ID NO: 3091923 - RNA, 19 nt, Artificial Sequence
  Description of Artificial Sequence: Synthetic oligonucleotide
cuuccuuguagauguucac

SEQ ID NO: 3091924 - RNA, 19 nt, Artificial Sequence
  Description of Artificial Sequence: Synthetic oligonucleotide
ugguuagcugggcaggguc

SEQ ID NO: 3091925 - RNA, 19 nt, Artificial Sequence
  Description of Artificial Sequence: Synthetic oligonucleotide
gaauagccacucuggguac

SEQ ID NO: 3091926 - RNA, 19 nt, Artificial Sequence
  Description of Artificial Sequence: Synthetic oligonucleotide
acgccagauguucugcuug

SEQ ID NO: 3091927 - RNA, 19 nt, Artificial Sequence
  Description of Artificial Sequence: Synthetic oligonucleotide
uucuugcuuagccgguugu

SEQ ID NO: 3091928 - RNA, 19 nt, Artificial Sequence
  Description of Artificial Sequence: Synthetic oligonucleotide
auccuggccuuccuuguag

SEQ ID NO: 3091929 - RNA, 19 nt, Artificial Sequence
  Description of Artificial Sequence: Synthetic oligonucleotide
cuccggguccuucagggcc

SEQ ID NO: 3091930 - RNA, 19 nt, Artificial Sequence
  Description of Artificial Sequence: Synthetic oligonucleotide
gggacccaaguucaugugg

SEQ ID NO: 3091931 - RNA, 19 nt, Artificial Sequence
  Description of Artificial Sequence: Synthetic oligonucleotide
acgcacuuauaguuucuug

SEQ ID NO: 3091932 - RNA, 19 nt, Artificial Sequence
  Description of Artificial Sequence: Synthetic oligonucleotide
agauguucugcuugcgcaa

SEQ ID NO: 3091933 - RNA, 19 nt, Artificial Sequence
  Description of Artificial Sequence: Synthetic oligonucleotide
ucugugcauaccuccgggu

SEQ ID NO: 3091934 - RNA, 19 nt, Artificial Sequence
  Description of Artificial Sequence: Synthetic oligonucleotide
cucugagucuggcuucagg

SEQ ID NO: 3091935 - RNA, 19 nt, Artificial Sequence
  Description of Artificial Sequence: Synthetic oligonucleotide
acagccgccaguacucugg

SEQ ID NO: 3091936 - RNA, 19 nt, Artificial Sequence
  Description of Artificial Sequence: Synthetic oligonucleotide
uuguucuugcuuagccggu

SEQ ID NO: 3091937 - RNA, 19 nt, Artificial Sequence
  Description of Artificial Sequence: Synthetic oligonucleotide
ggauucggguuccagcucc

SEQ ID NO: 3091938 - RNA, 19 nt, Artificial Sequence
  Description of Artificial Sequence: Synthetic oligonucleotide
aacagccgccaguacucug

SEQ ID NO: 3091939 - RNA, 19 nt, Artificial Sequence
  Description of Artificial Sequence: Synthetic oligonucleotide
aguucauguggaauagcca

SEQ ID NO: 3091940 - RNA, 19 nt, Artificial Sequence
  Description of Artificial Sequence: Synthetic oligonucleotide
ucuugcuuagccgguugug

SEQ ID NO: 3091941 - RNA, 19 nt, Artificial Sequence
  Description of Artificial Sequence: Synthetic oligonucleotide
uucagggccucaguggcca

SEQ ID NO: 3091942 - RNA, 19 nt, Artificial Sequence
  Description of Artificial Sequence: Synthetic oligonucleotide
uacucuggggauucggguu

SEQ ID NO: 3091943 - RNA, 19 nt, Artificial Sequence
  Description of Artificial Sequence: Synthetic oligonucleotide
cugugcauaccuccggguc

SEQ ID NO: 3091944 - RNA, 19 nt, Artificial Sequence
  Description of Artificial Sequence: Synthetic oligonucleotide
aauagccacucuggguacu

SEQ ID NO: 3091945 - RNA, 19 nt, Artificial Sequence
  Description of Artificial Sequence: Synthetic oligonucleotide
guucuugcuuagccgguug

SEQ ID NO: 3091946 - RNA, 19 nt, Artificial Sequence
  Description of Artificial Sequence: Synthetic oligonucleotide
uaccuccggguccuucagg

SEQ ID NO: 3091947 - RNA, 19 nt, Artificial Sequence
  Description of Artificial Sequence: Synthetic oligonucleotide
cuggguacucugagucugg

SEQ ID NO: 3091948 - RNA, 19 nt, Artificial Sequence
  Description of Artificial Sequence: Synthetic oligonucleotide
uugugacgccagauguucu

SEQ ID NO: 3091949 - RNA, 19 nt, Artificial Sequence
  Description of Artificial Sequence: Synthetic oligonucleotide
uggcgugugugguuagcug

SEQ ID NO: 3091950 - RNA, 19 nt, Artificial Sequence
  Description of Artificial Sequence: Synthetic oligonucleotide
ucuggcuucagggccacau

SEQ ID NO: 3091951 - RNA, 19 nt, Artificial Sequence
  Description of Artificial Sequence: Synthetic oligonucleotide
gauguucugcuugcgcaac

SEQ ID NO: 3091952 - RNA, 19 nt, Artificial Sequence
  Description of Artificial Sequence: Synthetic oligonucleotide
caaguucauguggaauagc

SEQ ID NO: 3091953 - RNA, 19 nt, Artificial Sequence
  Description of Artificial Sequence: Synthetic oligonucleotide
auagccacucuggguacuc

SEQ ID NO: 3091954 - RNA, 19 nt, Artificial Sequence
  Description of Artificial Sequence: Synthetic oligonucleotide
uugcgcaacagccgccagu

SEQ ID NO: 3091955 - RNA, 19 nt, Artificial Sequence
  Description of Artificial Sequence: Synthetic oligonucleotide
uagccgguugugacgccag

SEQ ID NO: 3091956 - RNA, 19 nt, Artificial Sequence
  Description of Artificial Sequence: Synthetic oligonucleotide
ugacgccagauguucugcu

SEQ ID NO: 3091957 - RNA, 19 nt, Artificial Sequence
  Description of Artificial Sequence: Synthetic oligonucleotide
auaccuccggguccuucag

SEQ ID NO: 3091958 - RNA, 19 nt, Artificial Sequence
  Description of Artificial Sequence: Synthetic oligonucleotide
guacucugagucuggcuuc

SEQ ID NO: 3091959 - RNA, 19 nt, Artificial Sequence
  Description of Artificial Sequence: Synthetic oligonucleotide
ugcgcaacagccgccagua

SEQ ID NO: 3091960 - RNA, 19 nt, Artificial Sequence
  Description of Artificial Sequence: Synthetic oligonucleotide
agccacucuggguacucug

SEQ ID NO: 3091961 - RNA, 19 nt, Artificial Sequence
  Description of Artificial Sequence: Synthetic oligonucleotide
cuucagggccucaguggcc

SEQ ID NO: 3091962 - RNA, 19 nt, Artificial Sequence
  Description of Artificial Sequence: Synthetic oligonucleotide
gugaggugucccauccacg

SEQ ID NO: 3091963 - RNA, 19 nt, Artificial Sequence
  Description of Artificial Sequence: Synthetic oligonucleotide
uacucugagucuggcuuca

SEQ ID NO: 3091964 - RNA, 19 nt, Artificial Sequence
  Description of Artificial Sequence: Synthetic oligonucleotide
ugcuugcgcaacagccgcc

SEQ ID NO: 3091965 - RNA, 19 nt, Artificial Sequence
  Description of Artificial Sequence: Synthetic oligonucleotide
cuuccugugagguguccca

SEQ ID NO: 3091966 - RNA, 19 nt, Artificial Sequence
  Description of Artificial Sequence: Synthetic oligonucleotide
uccggguccuucagggccu

SEQ ID NO: 3091967 - RNA, 19 nt, Artificial Sequence
  Description of Artificial Sequence: Synthetic oligonucleotide
cuggccuuccuuguagaug

SEQ ID NO: 3091968 - RNA, 19 nt, Artificial Sequence
  Description of Artificial Sequence: Synthetic oligonucleotide
cuugcuuagccgguuguga

SEQ ID NO: 3091969 - RNA, 19 nt, Artificial Sequence
  Description of Artificial Sequence: Synthetic oligonucleotide
caguacucuggggauucgg

SEQ ID NO: 3091970 - RNA, 19 nt, Artificial Sequence
  Description of Artificial Sequence: Synthetic oligonucleotide
ccuuguagauguucacccc

SEQ ID NO: 3091971 - RNA, 19 nt, Artificial Sequence
  Description of Artificial Sequence: Synthetic oligonucleotide
auguucugcuugcgcaaca

SEQ ID NO: 3091972 - RNA, 19 nt, Artificial Sequence
  Description of Artificial Sequence: Synthetic oligonucleotide
ccugugaggugucccaucc

SEQ ID NO: 3091973 - RNA, 19 nt, Artificial Sequence
  Description of Artificial Sequence: Synthetic oligonucleotide
uccuggccuuccuuguaga

SEQ ID NO: 3091974 - RNA, 19 nt, Artificial Sequence
  Description of Artificial Sequence: Synthetic oligonucleotide
agggccucaguggccacac

SEQ ID NO: 3091975 - RNA, 19 nt, Artificial Sequence
  Description of Artificial Sequence: Synthetic oligonucleotide
guuagcugggcagggucug

SEQ ID NO: 3091976 - RNA, 19 nt, Artificial Sequence
  Description of Artificial Sequence: Synthetic oligonucleotide
gcuuagccgguugugacgc

SEQ ID NO: 3091977 - RNA, 19 nt, Artificial Sequence
  Description of Artificial Sequence: Synthetic oligonucleotide
ccaaguucauguggaauag

SEQ ID NO: 3091978 - RNA, 19 nt, Artificial Sequence
  Description of Artificial Sequence: Synthetic oligonucleotide
aguggccacacuacccuug

SEQ ID NO: 3091979 - RNA, 19 nt, Artificial Sequence
  Description of Artificial Sequence: Synthetic oligonucleotide
uggguacucugagucuggc

SEQ ID NO: 3091980 - RNA, 19 nt, Artificial Sequence
  Description of Artificial Sequence: Synthetic oligonucleotide
ccagauguucugcuugcgc

SEQ ID NO: 3091981 - RNA, 19 nt, Artificial Sequence
  Description of Artificial Sequence: Synthetic oligonucleotide
gguacucugagucuggcuu

SEQ ID NO: 3091982 - RNA, 19 nt, Artificial Sequence
  Description of Artificial Sequence: Synthetic oligonucleotide
auggcgugugugguuagcu

SEQ ID NO: 3091983 - RNA, 19 nt, Artificial Sequence
  Description of Artificial Sequence: Synthetic oligonucleotide
gugacgccagauguucugc

SEQ ID NO: 3091984 - RNA, 19 nt, Artificial Sequence
  Description of Artificial Sequence: Synthetic oligonucleotide
gccgccaguacucugggga

SEQ ID NO: 3091985 - RNA, 19 nt, Artificial Sequence
  Description of Artificial Sequence: Synthetic oligonucleotide
gaggugucccauccacgca

SEQ ID NO: 3091986 - RNA, 19 nt, Artificial Sequence
  Description of Artificial Sequence: Synthetic oligonucleotide
gugugugguuagcugggca

SEQ ID NO: 3091987 - RNA, 19 nt, Artificial Sequence
  Description of Artificial Sequence: Synthetic oligonucleotide
uguucuugcuuagccgguu

SEQ ID NO: 3091988 - RNA, 19 nt, Artificial Sequence
  Description of Artificial Sequence: Synthetic oligonucleotide
ccuuccuuguagauguuca

SEQ ID NO: 3091989 - RNA, 19 nt, Artificial Sequence
  Description of Artificial Sequence: Synthetic oligonucleotide
cagggucugugcauaccuc

SEQ ID NO: 3091990 - RNA, 19 nt, Artificial Sequence
  Description of Artificial Sequence: Synthetic oligonucleotide
ugucccauccacgcacuua

SEQ ID NO: 3091991 - RNA, 19 nt, Artificial Sequence
  Description of Artificial Sequence: Synthetic oligonucleotide
gggucugugcauaccuccg

SEQ ID NO: 3091992 - RNA, 19 nt, Artificial Sequence
  Description of Artificial Sequence: Synthetic oligonucleotide
cuuagccgguugugacgcc

SEQ ID NO: 3091993 - RNA, 19 nt, Artificial Sequence
  Description of Artificial Sequence: Synthetic oligonucleotide
gagucuggcuucagggcca

SEQ ID NO: 3091994 - RNA, 19 nt, Artificial Sequence
  Description of Artificial Sequence: Synthetic oligonucleotide
cauggcgugugugguuagc

SEQ ID NO: 3091995 - RNA, 19 nt, Artificial Sequence
  Description of Artificial Sequence: Synthetic oligonucleotide
guacucuggggauucgggu

SEQ ID NO: 3091996 - RNA, 19 nt, Artificial Sequence
  Description of Artificial Sequence: Synthetic oligonucleotide
cuuauaguuucuuguucuu

SEQ ID NO: 3091997 - RNA, 19 nt, Artificial Sequence
  Description of Artificial Sequence: Synthetic oligonucleotide
cccaaguucauguggaaua

SEQ ID NO: 3091998 - RNA, 19 nt, Artificial Sequence
  Description of Artificial Sequence: Synthetic oligonucleotide
gucccauccacgcacuuau

SEQ ID NO: 3091999 - RNA, 19 nt, Artificial Sequence
  Description of Artificial Sequence: Synthetic oligonucleotide
agccgccaguacucugggg

SEQ ID NO: 3092000 - RNA, 19 nt, Artificial Sequence
  Description of Artificial Sequence: Synthetic oligonucleotide
uagcugggcagggucugug

SEQ ID NO: 3092001 - RNA, 19 nt, Artificial Sequence
  Description of Artificial Sequence: Synthetic oligonucleotide
cuugcgcaacagccgccag

SEQ ID NO: 3092002 - RNA, 19 nt, Artificial Sequence
  Description of Artificial Sequence: Synthetic oligonucleotide
cagccgccaguacucuggg

SEQ ID NO: 3092003 - RNA, 19 nt, Artificial Sequence
  Description of Artificial Sequence: Synthetic oligonucleotide
auucggguuccagcuccuc

SEQ ID NO: 3092004 - RNA, 19 nt, Artificial Sequence
  Description of Artificial Sequence: Synthetic oligonucleotide
gcaacagccgccaguacuc

SEQ ID NO: 3092005 - RNA, 19 nt, Artificial Sequence
  Description of Artificial Sequence: Synthetic oligonucleotide
cuggcuucagggccacauc

SEQ ID NO: 3092006 - RNA, 19 nt, Artificial Sequence
  Description of Artificial Sequence: Synthetic oligonucleotide
ggggauucggguuccagcu

SEQ ID NO: 3092007 - RNA, 19 nt, Artificial Sequence
  Description of Artificial Sequence: Synthetic oligonucleotide
ugggcagggucugugcaua

SEQ ID NO: 3092008 - RNA, 19 nt, Artificial Sequence
  Description of Artificial Sequence: Synthetic oligonucleotide
uuagcugggcagggucugu

SEQ ID NO: 3092009 - RNA, 19 nt, Artificial Sequence
  Description of Artificial Sequence: Synthetic oligonucleotide
ccucaguggccacacuacc

SEQ ID NO: 3092010 - RNA, 19 nt, Artificial Sequence
  Description of Artificial Sequence: Synthetic oligonucleotide
cuggggauucggguuccag

SEQ ID NO: 3092011 - RNA, 19 nt, Artificial Sequence
  Description of Artificial Sequence: Synthetic oligonucleotide
gcgugugugguuagcuggg

SEQ ID NO: 3092012 - RNA, 19 nt, Artificial Sequence
  Description of Artificial Sequence: Synthetic oligonucleotide
ggcagcuuccugugaggug

SEQ ID NO: 3092013 - RNA, 19 nt, Artificial Sequence
  Description of Artificial Sequence: Synthetic oligonucleotide
cucuggggauucggguucc

SEQ ID NO: 3092014 - RNA, 19 nt, Artificial Sequence
  Description of Artificial Sequence: Synthetic oligonucleotide
ggggacccaaguucaugug

SEQ ID NO: 3092015 - RNA, 19 nt, Artificial Sequence
  Description of Artificial Sequence: Synthetic oligonucleotide
ccacucuggguacucugag

SEQ ID NO: 3092016 - RNA, 19 nt, Artificial Sequence
  Description of Artificial Sequence: Synthetic oligonucleotide
ccgguugugacgccagaug

SEQ ID NO: 3092017 - RNA, 19 nt, Artificial Sequence
  Description of Artificial Sequence: Synthetic oligonucleotide
gcagcuuccugugaggugu

SEQ ID NO: 3092018 - RNA, 19 nt, Artificial Sequence
  Description of Artificial Sequence: Synthetic oligonucleotide
gcuuccugugagguguccc

SEQ ID NO: 3092019 - RNA, 19 nt, Artificial Sequence
  Description of Artificial Sequence: Synthetic oligonucleotide
uagccacucuggguacucu

SEQ ID NO: 3092020 - RNA, 19 nt, Artificial Sequence
  Description of Artificial Sequence: Synthetic oligonucleotide
gcacuuauaguuucuuguu

SEQ ID NO: 3092021 - RNA, 19 nt, Artificial Sequence
  Description of Artificial Sequence: Synthetic oligonucleotide
gccagauguucugcuugcg

SEQ ID NO: 3092022 - RNA, 19 nt, Artificial Sequence
  Description of Artificial Sequence: Synthetic oligonucleotide
ucccauccacgcacuuaua

SEQ ID NO: 3092023 - RNA, 19 nt, Artificial Sequence
  Description of Artificial Sequence: Synthetic oligonucleotide
acucugagucuggcuucag

SEQ ID NO: 3092024 - RNA, 19 nt, Artificial Sequence
  Description of Artificial Sequence: Synthetic oligonucleotide
ucuggggauucggguucca

SEQ ID NO: 3092025 - RNA, 19 nt, Artificial Sequence
  Description of Artificial Sequence: Synthetic oligonucleotide
cgcacuuauaguuucuugu

SEQ ID NO: 3092026 - RNA, 19 nt, Artificial Sequence
  Description of Artificial Sequence: Synthetic oligonucleotide
ggccucaguggccacacua

SEQ ID NO: 3092027 - RNA, 19 nt, Artificial Sequence
  Description of Artificial Sequence: Synthetic oligonucleotide
agccgguugugacgccaga

SEQ ID NO: 3092028 - RNA, 19 nt, Artificial Sequence
  Description of Artificial Sequence: Synthetic oligonucleotide
gccucaguggccacacuac

SEQ ID NO: 3092029 - RNA, 19 nt, Artificial Sequence
  Description of Artificial Sequence: Synthetic oligonucleotide
gacgccagauguucugcuu

SEQ ID NO: 3092030 - RNA, 19 nt, Artificial Sequence
  Description of Artificial Sequence: Synthetic oligonucleotide
cucuggguacucugagucu

SEQ ID NO: 3092031 - RNA, 19 nt, Artificial Sequence
  Description of Artificial Sequence: Synthetic oligonucleotide
cugugaggugucccaucca

SEQ ID NO: 3092032 - RNA, 19 nt, Artificial Sequence
  Description of Artificial Sequence: Synthetic oligonucleotide
gccaguacucuggggauuc

SEQ ID NO: 3092033 - RNA, 19 nt, Artificial Sequence
  Description of Artificial Sequence: Synthetic oligonucleotide
gggauucggguuccagcuc

SEQ ID NO: 3092034 - RNA, 19 nt, Artificial Sequence
  Description of Artificial Sequence: Synthetic oligonucleotide
cgccagauguucugcuugc

SEQ ID NO: 3092035 - RNA, 19 nt, Artificial Sequence
  Description of Artificial Sequence: Synthetic oligonucleotide
cagcuuccugugagguguc

SEQ ID NO: 3092036 - RNA, 19 nt, Artificial Sequence
  Description of Artificial Sequence: Synthetic oligonucleotide
cacucuggguacucugagu

SEQ ID NO: 3092037 - RNA, 19 nt, Artificial Sequence
  Description of Artificial Sequence: Synthetic oligonucleotide
cauguggaauagccacucu

SEQ ID NO: 3092038 - RNA, 19 nt, Artificial Sequence
  Description of Artificial Sequence: Synthetic oligonucleotide
cauccuggccuuccuugua

SEQ ID NO: 3092039 - RNA, 19 nt, Artificial Sequence
  Description of Artificial Sequence: Synthetic oligonucleotide
gugcauaccuccggguccu

SEQ ID NO: 3092040 - RNA, 19 nt, Artificial Sequence
  Description of Artificial Sequence: Synthetic oligonucleotide
ggccacauccuggccuucc

SEQ ID NO: 3092041 - RNA, 19 nt, Artificial Sequence
  Description of Artificial Sequence: Synthetic oligonucleotide
gccuuccuuguagauguuc

SEQ ID NO: 3092042 - RNA, 19 nt, Artificial Sequence
  Description of Artificial Sequence: Synthetic oligonucleotide
gauucggguuccagcuccu

SEQ ID NO: 3092043 - RNA, 19 nt, Artificial Sequence
  Description of Artificial Sequence: Synthetic oligonucleotide
ccauccacgcacuuauagu

SEQ ID NO: 3092044 - RNA, 19 nt, Artificial Sequence
  Description of Artificial Sequence: Synthetic oligonucleotide
ccuccggguccuucagggc

SEQ ID NO: 3092045 - RNA, 19 nt, Artificial Sequence
  Description of Artificial Sequence: Synthetic oligonucleotide
gccacucuggguacucuga

SEQ ID NO: 3092046 - RNA, 19 nt, Artificial Sequence
  Description of Artificial Sequence: Synthetic oligonucleotide
gguuagcugggcagggucu

SEQ ID NO: 3092047 - RNA, 19 nt, Artificial Sequence
  Description of Artificial Sequence: Synthetic oligonucleotide
ccaguacucuggggauucg

SEQ ID NO: 3092048 - RNA, 19 nt, Artificial Sequence
  Description of Artificial Sequence: Synthetic oligonucleotide
ccauggcgugugugguuag

SEQ ID NO: 3092049 - RNA, 19 nt, Artificial Sequence
  Description of Artificial Sequence: Synthetic oligonucleotide
ggguacucugagucuggcu

SEQ ID NO: 3092050 - RNA, 19 nt, Artificial Sequence
  Description of Artificial Sequence: Synthetic oligonucleotide
cugggcagggucugugcau

SEQ ID NO: 3092051 - RNA, 19 nt, Artificial Sequence
  Description of Artificial Sequence: Synthetic oligonucleotide
gugguuagcugggcagggu

SEQ ID NO: 3092052 - RNA, 19 nt, Artificial Sequence
  Description of Artificial Sequence: Synthetic oligonucleotide
cgugugugguuagcugggc

SEQ ID NO: 3092053 - RNA, 19 nt, Artificial Sequence
  Description of Artificial Sequence: Synthetic oligonucleotide
cgguugugacgccagaugu

SEQ ID NO: 3092054 - RNA, 19 nt, Artificial Sequence
  Description of Artificial Sequence: Synthetic oligonucleotide
cacgcacuuauaguuucuu

SEQ ID NO: 3092055 - RNA, 19 nt, Artificial Sequence
  Description of Artificial Sequence: Synthetic oligonucleotide
gcauaccuccggguccuuc

SEQ ID NO: 3092056 - RNA, 19 nt, Artificial Sequence
  Description of Artificial Sequence: Synthetic oligonucleotide
gguugugacgccagauguu

SEQ ID NO: 3092057 - RNA, 19 nt, Artificial Sequence
  Description of Artificial Sequence: Synthetic oligonucleotide
cgcaacagccgccaguacu

SEQ ID NO: 3092058 - RNA, 19 nt, Artificial Sequence
  Description of Artificial Sequence: Synthetic oligonucleotide
cggguuccagcuccuccag

SEQ ID NO: 3092059 - RNA, 19 nt, Artificial Sequence
  Description of Artificial Sequence: Synthetic oligonucleotide
ugcauaccuccggguccuu

SEQ ID NO: 3092060 - RNA, 19 nt, Artificial Sequence
  Description of Artificial Sequence: Synthetic oligonucleotide
caacagccgccaguacucu

SEQ ID NO: 3092061 - RNA, 19 nt, Artificial Sequence
  Description of Artificial Sequence: Synthetic oligonucleotide
cccauggcgugugugguua

SEQ ID NO: 3092062 - RNA, 19 nt, Artificial Sequence
  Description of Artificial Sequence: Synthetic oligonucleotide
ggugucccauccacgcacu

SEQ ID NO: 3092063 - RNA, 19 nt, Artificial Sequence
  Description of Artificial Sequence: Synthetic oligonucleotide
gcgcaacagccgccaguac

SEQ ID NO: 3092064 - RNA, 19 nt, Artificial Sequence
  Description of Artificial Sequence: Synthetic oligonucleotide
caguggccacacuacccuu

SEQ ID NO: 3092065 - RNA, 19 nt, Artificial Sequence
  Description of Artificial Sequence: Synthetic oligonucleotide
ccacgcacuuauaguuucu

SEQ ID NO: 3092066 - RNA, 19 nt, Artificial Sequence
  Description of Artificial Sequence: Synthetic oligonucleotide
ggguuccagcuccuccagu

SEQ ID NO: 3092067 - RNA, 19 nt, Artificial Sequence
  Description of Artificial Sequence: Synthetic oligonucleotide
gugucccauccacgcacuu

SEQ ID NO: 3092068 - RNA, 19 nt, Artificial Sequence
  Description of Artificial Sequence: Synthetic oligonucleotide
gccgguugugacgccagau

SEQ ID NO: 3092069 - RNA, 19 nt, Artificial Sequence
  Description of Artificial Sequence: Synthetic oligonucleotide
ccuggccuuccuuguagau

SEQ ID NO: 3092070 - RNA, 19 nt, Artificial Sequence
  Description of Artificial Sequence: Synthetic oligonucleotide
gucuggcuucagggccaca

SEQ ID NO: 3092071 - RNA, 19 nt, Artificial Sequence
  Description of Artificial Sequence: Synthetic oligonucleotide
ccgccaguacucuggggau

SEQ ID NO: 3092072 - RNA, 19 nt, Artificial Sequence
  Description of Artificial Sequence: Synthetic oligonucleotide
ccggguccuucagggccuc

SEQ ID NO: 3092073 - RNA, 19 nt, Artificial Sequence
  Description of Artificial Sequence: Synthetic oligonucleotide
gggccucaguggccacacu

SEQ ID NO: 3092074 - RNA, 19 nt, Artificial Sequence
  Description of Artificial Sequence: Synthetic oligonucleotide
ccccauggcgugugugguu

SEQ ID NO: 3092075 - RNA, 19 nt, Artificial Sequence
  Description of Artificial Sequence: Synthetic oligonucleotide
ggccuuccuuguagauguu

SEQ ID NO: 3092076 - RNA, 19 nt, Artificial Sequence
  Description of Artificial Sequence: Synthetic oligonucleotide
cgccaguacucuggggauu

SEQ ID NO: 3092077 - RNA, 19 nt, Artificial Sequence
  Description of Artificial Sequence: Synthetic oligonucleotide
auaagucuuauguucaacc

SEQ ID NO: 3092078 - RNA, 19 nt, Artificial Sequence
  Description of Artificial Sequence: Synthetic oligonucleotide
uuuagauugcaacugagca

SEQ ID NO: 3092079 - RNA, 19 nt, Artificial Sequence
  Description of Artificial Sequence: Synthetic oligonucleotide
aagucuuauguucaaccac

SEQ ID NO: 3092080 - RNA, 19 nt, Artificial Sequence
  Description of Artificial Sequence: Synthetic oligonucleotide
uagauugcaacugagcagg

SEQ ID NO: 3092081 - RNA, 19 nt, Artificial Sequence
  Description of Artificial Sequence: Synthetic oligonucleotide
aaagaaggguaggugaagc

SEQ ID NO: 3092082 - RNA, 19 nt, Artificial Sequence
  Description of Artificial Sequence: Synthetic oligonucleotide
uguucaaccaccucuuuag

SEQ ID NO: 3092083 - RNA, 19 nt, Artificial Sequence
  Description of Artificial Sequence: Synthetic oligonucleotide
ucugcagaggacuugguag

SEQ ID NO: 3092084 - RNA, 19 nt, Artificial Sequence
  Description of Artificial Sequence: Synthetic oligonucleotide
aguaaagaaggguagguga

SEQ ID NO: 3092085 - RNA, 19 nt, Artificial Sequence
  Description of Artificial Sequence: Synthetic oligonucleotide
uggaauaagucuuauguuc

SEQ ID NO: 3092086 - RNA, 19 nt, Artificial Sequence
  Description of Artificial Sequence: Synthetic oligonucleotide
uuagauugcaacugagcag

SEQ ID NO: 3092087 - RNA, 19 nt, Artificial Sequence
  Description of Artificial Sequence: Synthetic oligonucleotide
ugguugacuaguaaagaag

SEQ ID NO: 3092088 - RNA, 19 nt, Artificial Sequence
  Description of Artificial Sequence: Synthetic oligonucleotide
aauaagucuuauguucaac

SEQ ID NO: 3092089 - RNA, 19 nt, Artificial Sequence
  Description of Artificial Sequence: Synthetic oligonucleotide
agucuuauguucaaccacc

SEQ ID NO: 3092090 - RNA, 19 nt, Artificial Sequence
  Description of Artificial Sequence: Synthetic oligonucleotide
ucucuugaagcgcaugccg

SEQ ID NO: 3092091 - RNA, 19 nt, Artificial Sequence
  Description of Artificial Sequence: Synthetic oligonucleotide
aagaaggguaggugaagcg

SEQ ID NO: 3092092 - RNA, 19 nt, Artificial Sequence
  Description of Artificial Sequence: Synthetic oligonucleotide
uuucucuugaagcgcaugc

SEQ ID NO: 3092093 - RNA, 19 nt, Artificial Sequence
  Description of Artificial Sequence: Synthetic oligonucleotide
ugugcaucagccaucuggc

SEQ ID NO: 3092094 - RNA, 19 nt, Artificial Sequence
  Description of Artificial Sequence: Synthetic oligonucleotide
auuugugaguuuccacugc

SEQ ID NO: 3092095 - RNA, 19 nt, Artificial Sequence
  Description of Artificial Sequence: Synthetic oligonucleotide
cugugcaucagccaucugg

SEQ ID NO: 3092096 - RNA, 19 nt, Artificial Sequence
  Description of Artificial Sequence: Synthetic oligonucleotide
ugaguuuccacugcgaacu

SEQ ID NO: 3092097 - RNA, 19 nt, Artificial Sequence
  Description of Artificial Sequence: Synthetic oligonucleotide
ucuuuagauugcaacugag

SEQ ID NO: 3092098 - RNA, 19 nt, Artificial Sequence
  Description of Artificial Sequence: Synthetic oligonucleotide
cuuuagauugcaacugagc

SEQ ID NO: 3092099 - RNA, 19 nt, Artificial Sequence
  Description of Artificial Sequence: Synthetic oligonucleotide
ugacuaguaaagaagggua

SEQ ID NO: 3092100 - RNA, 19 nt, Artificial Sequence
  Description of Artificial Sequence: Synthetic oligonucleotide
uaagucuuauguucaacca

SEQ ID NO: 3092101 - RNA, 19 nt, Artificial Sequence
  Description of Artificial Sequence: Synthetic oligonucleotide
aaagcuuccauagguagcu

SEQ ID NO: 3092102 - RNA, 19 nt, Artificial Sequence
  Description of Artificial Sequence: Synthetic oligonucleotide
ugggaaagcuuccauaggu

SEQ ID NO: 3092103 - RNA, 19 nt, Artificial Sequence
  Description of Artificial Sequence: Synthetic oligonucleotide
aguccacacacacauggcg

SEQ ID NO: 3092104 - RNA, 19 nt, Artificial Sequence
  Description of Artificial Sequence: Synthetic oligonucleotide
auugcaacugagcaggagu

SEQ ID NO: 3092105 - RNA, 19 nt, Artificial Sequence
  Description of Artificial Sequence: Synthetic oligonucleotide
uugacuaguaaagaagggu

SEQ ID NO: 3092106 - RNA, 19 nt, Artificial Sequence
  Description of Artificial Sequence: Synthetic oligonucleotide
acuaguaaagaaggguagg

SEQ ID NO: 3092107 - RNA, 19 nt, Artificial Sequence
  Description of Artificial Sequence: Synthetic oligonucleotide
acacacauggcgucgcugg

SEQ ID NO: 3092108 - RNA, 19 nt, Artificial Sequence
  Description of Artificial Sequence: Synthetic oligonucleotide
gguugacuaguaaagaagg

SEQ ID NO: 3092109 - RNA, 19 nt, Artificial Sequence
  Description of Artificial Sequence: Synthetic oligonucleotide
accucuuuagauugcaacu

SEQ ID NO: 3092110 - RNA, 19 nt, Artificial Sequence
  Description of Artificial Sequence: Synthetic oligonucleotide
ugaagcggcgcccacaguc

SEQ ID NO: 3092111 - RNA, 19 nt, Artificial Sequence
  Description of Artificial Sequence: Synthetic oligonucleotide
gacuaguaaagaaggguag

SEQ ID NO: 3092112 - RNA, 19 nt, Artificial Sequence
  Description of Artificial Sequence: Synthetic oligonucleotide
agaaggguaggugaagcgg

SEQ ID NO: 3092113 - RNA, 19 nt, Artificial Sequence
  Description of Artificial Sequence: Synthetic oligonucleotide
uuccauagguagcuguacc

SEQ ID NO: 3092114 - RNA, 19 nt, Artificial Sequence
  Description of Artificial Sequence: Synthetic oligonucleotide
ugcaucagccaucuggccu

SEQ ID NO: 3092115 - RNA, 19 nt, Artificial Sequence
  Description of Artificial Sequence: Synthetic oligonucleotide
ugugaguuuccacugcgaa

SEQ ID NO: 3092116 - RNA, 19 nt, Artificial Sequence
  Description of Artificial Sequence: Synthetic oligonucleotide
uguaccucugcagaggacu

SEQ ID NO: 3092117 - RNA, 19 nt, Artificial Sequence
  Description of Artificial Sequence: Synthetic oligonucleotide
ucaaccaccucuuuagauu

SEQ ID NO: 3092118 - RNA, 19 nt, Artificial Sequence
  Description of Artificial Sequence: Synthetic oligonucleotide
uuauguucaaccaccucuu

SEQ ID NO: 3092119 - RNA, 19 nt, Artificial Sequence
  Description of Artificial Sequence: Synthetic oligonucleotide
cuuauguucaaccaccucu

SEQ ID NO: 3092120 - RNA, 19 nt, Artificial Sequence
  Description of Artificial Sequence: Synthetic oligonucleotide
guugacuaguaaagaaggg

SEQ ID NO: 3092121 - RNA, 19 nt, Artificial Sequence
  Description of Artificial Sequence: Synthetic oligonucleotide
uagucguggaauaagucuu

SEQ ID NO: 3092122 - RNA, 19 nt, Artificial Sequence
  Description of Artificial Sequence: Synthetic oligonucleotide
caaccaccucuuuagauug

SEQ ID NO: 3092123 - RNA, 19 nt, Artificial Sequence
  Description of Artificial Sequence: Synthetic oligonucleotide
ggaaagcuuccauagguag

SEQ ID NO: 3092124 - RNA, 19 nt, Artificial Sequence
  Description of Artificial Sequence: Synthetic oligonucleotide
uaguaaagaaggguaggug

SEQ ID NO: 3092125 - RNA, 19 nt, Artificial Sequence
  Description of Artificial Sequence: Synthetic oligonucleotide
uaaagaaggguaggugaag

SEQ ID NO: 3092126 - RNA, 19 nt, Artificial Sequence
  Description of Artificial Sequence: Synthetic oligonucleotide
uccauagguagcuguaccu

SEQ ID NO: 3092127 - RNA, 19 nt, Artificial Sequence
  Description of Artificial Sequence: Synthetic oligonucleotide
ugguagucguggaauaagu

SEQ ID NO: 3092128 - RNA, 19 nt, Artificial Sequence
  Description of Artificial Sequence: Synthetic oligonucleotide
gaaagcuuccauagguagc

SEQ ID NO: 3092129 - RNA, 19 nt, Artificial Sequence
  Description of Artificial Sequence: Synthetic oligonucleotide
cucuugaagcgcaugccgc

SEQ ID NO: 3092130 - RNA, 19 nt, Artificial Sequence
  Description of Artificial Sequence: Synthetic oligonucleotide
aggaagcugugcaucagcc

SEQ ID NO: 3092131 - RNA, 19 nt, Artificial Sequence
  Description of Artificial Sequence: Synthetic oligonucleotide
gaaggguaggugaagcggc

SEQ ID NO: 3092132 - RNA, 19 nt, Artificial Sequence
  Description of Artificial Sequence: Synthetic oligonucleotide
caccucuuuagauugcaac

SEQ ID NO: 3092133 - RNA, 19 nt, Artificial Sequence
  Description of Artificial Sequence: Synthetic oligonucleotide
gcgaacuuucucuugaagc

SEQ ID NO: 3092134 - RNA, 19 nt, Artificial Sequence
  Description of Artificial Sequence: Synthetic oligonucleotide
guagcuguaccucugcaga

SEQ ID NO: 3092135 - RNA, 19 nt, Artificial Sequence
  Description of Artificial Sequence: Synthetic oligonucleotide
uugguagucguggaauaag

SEQ ID NO: 3092136 - RNA, 19 nt, Artificial Sequence
  Description of Artificial Sequence: Synthetic oligonucleotide
ucacccgagugugagagcc

SEQ ID NO: 3092137 - RNA, 19 nt, Artificial Sequence
  Description of Artificial Sequence: Synthetic oligonucleotide
ucuugaagcgcaugccgca

SEQ ID NO: 3092138 - RNA, 19 nt, Artificial Sequence
  Description of Artificial Sequence: Synthetic oligonucleotide
gaacuuucucuugaagcgc

SEQ ID NO: 3092139 - RNA, 19 nt, Artificial Sequence
  Description of Artificial Sequence: Synthetic oligonucleotide
uugcaacugagcaggaguc

SEQ ID NO: 3092140 - RNA, 19 nt, Artificial Sequence
  Description of Artificial Sequence: Synthetic oligonucleotide
uucaaccaccucuuuagau

SEQ ID NO: 3092141 - RNA, 19 nt, Artificial Sequence
  Description of Artificial Sequence: Synthetic oligonucleotide
ugagcaggagucucugcug

SEQ ID NO: 3092142 - RNA, 19 nt, Artificial Sequence
  Description of Artificial Sequence: Synthetic oligonucleotide
ugguaccugggcaggaagc

SEQ ID NO: 3092143 - RNA, 19 nt, Artificial Sequence
  Description of Artificial Sequence: Synthetic oligonucleotide
aagcgcaugccgcacucug

SEQ ID NO: 3092144 - RNA, 19 nt, Artificial Sequence
  Description of Artificial Sequence: Synthetic oligonucleotide
guagucguggaauaagucu

SEQ ID NO: 3092145 - RNA, 19 nt, Artificial Sequence
  Description of Artificial Sequence: Synthetic oligonucleotide
ucuuauguucaaccaccuc

SEQ ID NO: 3092146 - RNA, 19 nt, Artificial Sequence
  Description of Artificial Sequence: Synthetic oligonucleotide
uaccugggcaggaagcugu

SEQ ID NO: 3092147 - RNA, 19 nt, Artificial Sequence
  Description of Artificial Sequence: Synthetic oligonucleotide
uucucuugaagcgcaugcc

SEQ ID NO: 3092148 - RNA, 19 nt, Artificial Sequence
  Description of Artificial Sequence: Synthetic oligonucleotide
uagcuguaccucugcagag

SEQ ID NO: 3092149 - RNA, 19 nt, Artificial Sequence
  Description of Artificial Sequence: Synthetic oligonucleotide
ccugggaaagcuuccauag

SEQ ID NO: 3092150 - RNA, 19 nt, Artificial Sequence
  Description of Artificial Sequence: Synthetic oligonucleotide
gucgcugguaccugggcag

SEQ ID NO: 3092151 - RNA, 19 nt, Artificial Sequence
  Description of Artificial Sequence: Synthetic oligonucleotide
uagguagcuguaccucugc

SEQ ID NO: 3092152 - RNA, 19 nt, Artificial Sequence
  Description of Artificial Sequence: Synthetic oligonucleotide
gaauaagucuuauguucaa

SEQ ID NO: 3092153 - RNA, 19 nt, Artificial Sequence
  Description of Artificial Sequence: Synthetic oligonucleotide
uugugaguuuccacugcga

SEQ ID NO: 3092154 - RNA, 19 nt, Artificial Sequence
  Description of Artificial Sequence: Synthetic oligonucleotide
aaggguaggugaagcggcg

SEQ ID NO: 3092155 - RNA, 19 nt, Artificial Sequence
  Description of Artificial Sequence: Synthetic oligonucleotide
ucguggaauaagucuuaug

SEQ ID NO: 3092156 - RNA, 19 nt, Artificial Sequence
  Description of Artificial Sequence: Synthetic oligonucleotide
gugguugacuaguaaagaa

SEQ ID NO: 3092157 - RNA, 19 nt, Artificial Sequence
  Description of Artificial Sequence: Synthetic oligonucleotide
ucagccaucuggccuggga

SEQ ID NO: 3092158 - RNA, 19 nt, Artificial Sequence
  Description of Artificial Sequence: Synthetic oligonucleotide
cugggcaggggaagggucg

SEQ ID NO: 3092159 - RNA, 19 nt, Artificial Sequence
  Description of Artificial Sequence: Synthetic oligonucleotide
gauugcaacugagcaggag

SEQ ID NO: 3092160 - RNA, 19 nt, Artificial Sequence
  Description of Artificial Sequence: Synthetic oligonucleotide
gguagcuguaccucugcag

SEQ ID NO: 3092161 - RNA, 19 nt, Artificial Sequence
  Description of Artificial Sequence: Synthetic oligonucleotide
cugggaaagcuuccauagg

SEQ ID NO: 3092162 - RNA, 19 nt, Artificial Sequence
  Description of Artificial Sequence: Synthetic oligonucleotide
ugugagagccggugguuga

SEQ ID NO: 3092163 - RNA, 19 nt, Artificial Sequence
  Description of Artificial Sequence: Synthetic oligonucleotide
aaccaccucuuuagauugc

SEQ ID NO: 3092164 - RNA, 19 nt, Artificial Sequence
  Description of Artificial Sequence: Synthetic oligonucleotide
accucugcagaggacuugg

SEQ ID NO: 3092165 - RNA, 19 nt, Artificial Sequence
  Description of Artificial Sequence: Synthetic oligonucleotide
agcuuccauagguagcugu

SEQ ID NO: 3092166 - RNA, 19 nt, Artificial Sequence
  Description of Artificial Sequence: Synthetic oligonucleotide
gugaguuuccacugcgaac

SEQ ID NO: 3092167 - RNA, 19 nt, Artificial Sequence
  Description of Artificial Sequence: Synthetic oligonucleotide
ggaauaagucuuauguuca

SEQ ID NO: 3092168 - RNA, 19 nt, Artificial Sequence
  Description of Artificial Sequence: Synthetic oligonucleotide
guuuccacugcgaacuuuc

SEQ ID NO: 3092169 - RNA, 19 nt, Artificial Sequence
  Description of Artificial Sequence: Synthetic oligonucleotide
caggaagcugugcaucagc

SEQ ID NO: 3092170 - RNA, 19 nt, Artificial Sequence
  Description of Artificial Sequence: Synthetic oligonucleotide
auguucaaccaccucuuua

SEQ ID NO: 3092171 - RNA, 19 nt, Artificial Sequence
  Description of Artificial Sequence: Synthetic oligonucleotide
cucuuuagauugcaacuga

SEQ ID NO: 3092172 - RNA, 19 nt, Artificial Sequence
  Description of Artificial Sequence: Synthetic oligonucleotide
uuccacugcgaacuuucuc

SEQ ID NO: 3092173 - RNA, 19 nt, Artificial Sequence
  Description of Artificial Sequence: Synthetic oligonucleotide
cacauggcgucgcugguac

SEQ ID NO: 3092174 - RNA, 19 nt, Artificial Sequence
  Description of Artificial Sequence: Synthetic oligonucleotide
uuuccacugcgaacuuucu

SEQ ID NO: 3092175 - RNA, 19 nt, Artificial Sequence
  Description of Artificial Sequence: Synthetic oligonucleotide
caugccgcacucugggcag

SEQ ID NO: 3092176 - RNA, 19 nt, Artificial Sequence
  Description of Artificial Sequence: Synthetic oligonucleotide
guaaagaaggguaggugaa

SEQ ID NO: 3092177 - RNA, 19 nt, Artificial Sequence
  Description of Artificial Sequence: Synthetic oligonucleotide
agagccggugguugacuag

SEQ ID NO: 3092178 - RNA, 19 nt, Artificial Sequence
  Description of Artificial Sequence: Synthetic oligonucleotide
acuugguagucguggaaua

SEQ ID NO: 3092179 - RNA, 19 nt, Artificial Sequence
  Description of Artificial Sequence: Synthetic oligonucleotide
ggugaagcggcgcccacag

SEQ ID NO: 3092180 - RNA, 19 nt, Artificial Sequence
  Description of Artificial Sequence: Synthetic oligonucleotide
cuuccauagguagcuguac

SEQ ID NO: 3092181 - RNA, 19 nt, Artificial Sequence
  Description of Artificial Sequence: Synthetic oligonucleotide
aggguaggugaagcggcgc

SEQ ID NO: 3092182 - RNA, 19 nt, Artificial Sequence
  Description of Artificial Sequence: Synthetic oligonucleotide
uauguucaaccaccucuuu

SEQ ID NO: 3092183 - RNA, 19 nt, Artificial Sequence
  Description of Artificial Sequence: Synthetic oligonucleotide
aggagucucugcugaccuc

SEQ ID NO: 3092184 - RNA, 19 nt, Artificial Sequence
  Description of Artificial Sequence: Synthetic oligonucleotide
gaagcggcgcccacagucc

SEQ ID NO: 3092185 - RNA, 19 nt, Artificial Sequence
  Description of Artificial Sequence: Synthetic oligonucleotide
auagguagcuguaccucug

SEQ ID NO: 3092186 - RNA, 19 nt, Artificial Sequence
  Description of Artificial Sequence: Synthetic oligonucleotide
ggaagggucgcucacccga

SEQ ID NO: 3092187 - RNA, 19 nt, Artificial Sequence
  Description of Artificial Sequence: Synthetic oligonucleotide
gcaucagccaucuggccug

SEQ ID NO: 3092188 - RNA, 19 nt, Artificial Sequence
  Description of Artificial Sequence: Synthetic oligonucleotide
cugguaccugggcaggaag

SEQ ID NO: 3092189 - RNA, 19 nt, Artificial Sequence
  Description of Artificial Sequence: Synthetic oligonucleotide
agggucgcucacccgagug

SEQ ID NO: 3092190 - RNA, 19 nt, Artificial Sequence
  Description of Artificial Sequence: Synthetic oligonucleotide
ugcaacugagcaggagucu

SEQ ID NO: 3092191 - RNA, 19 nt, Artificial Sequence
  Description of Artificial Sequence: Synthetic oligonucleotide
cuggccugggaaagcuucc

SEQ ID NO: 3092192 - RNA, 19 nt, Artificial Sequence
  Description of Artificial Sequence: Synthetic oligonucleotide
acauggcgucgcugguacc

SEQ ID NO: 3092193 - RNA, 19 nt, Artificial Sequence
  Description of Artificial Sequence: Synthetic oligonucleotide
acccgagugugagagccgg

SEQ ID NO: 3092194 - RNA, 19 nt, Artificial Sequence
  Description of Artificial Sequence: Synthetic oligonucleotide
ucgcucacccgagugugag

SEQ ID NO: 3092195 - RNA, 19 nt, Artificial Sequence
  Description of Artificial Sequence: Synthetic oligonucleotide
cuuucucuugaagcgcaug

SEQ ID NO: 3092196 - RNA, 19 nt, Artificial Sequence
  Description of Artificial Sequence: Synthetic oligonucleotide
gaagggucgcucacccgag

SEQ ID NO: 3092197 - RNA, 19 nt, Artificial Sequence
  Description of Artificial Sequence: Synthetic oligonucleotide
agguagcuguaccucugca

SEQ ID NO: 3092198 - RNA, 19 nt, Artificial Sequence
  Description of Artificial Sequence: Synthetic oligonucleotide
uggcgucgcugguaccugg

SEQ ID NO: 3092199 - RNA, 19 nt, Artificial Sequence
  Description of Artificial Sequence: Synthetic oligonucleotide
guucaaccaccucuuuaga

SEQ ID NO: 3092200 - RNA, 19 nt, Artificial Sequence
  Description of Artificial Sequence: Synthetic oligonucleotide
ugggcaggaagcugugcau

SEQ ID NO: 3092201 - RNA, 19 nt, Artificial Sequence
  Description of Artificial Sequence: Synthetic oligonucleotide
cauagguagcuguaccucu

SEQ ID NO: 3092202 - RNA, 19 nt, Artificial Sequence
  Description of Artificial Sequence: Synthetic oligonucleotide
cguggaauaagucuuaugu

SEQ ID NO: 3092203 - RNA, 19 nt, Artificial Sequence
  Description of Artificial Sequence: Synthetic oligonucleotide
agcugugcaucagccaucu

SEQ ID NO: 3092204 - RNA, 19 nt, Artificial Sequence
  Description of Artificial Sequence: Synthetic oligonucleotide
ccucuuuagauugcaacug

SEQ ID NO: 3092205 - RNA, 19 nt, Artificial Sequence
  Description of Artificial Sequence: Synthetic oligonucleotide
cuaguaaagaaggguaggu

SEQ ID NO: 3092206 - RNA, 19 nt, Artificial Sequence
  Description of Artificial Sequence: Synthetic oligonucleotide
cuugaagcgcaugccgcac

SEQ ID NO: 3092207 - RNA, 19 nt, Artificial Sequence
  Description of Artificial Sequence: Synthetic oligonucleotide
cacugcgaacuuucucuug

SEQ ID NO: 3092208 - RNA, 19 nt, Artificial Sequence
  Description of Artificial Sequence: Synthetic oligonucleotide
gcucacccgagugugagag

SEQ ID NO: 3092209 - RNA, 19 nt, Artificial Sequence
  Description of Artificial Sequence: Synthetic oligonucleotide
aagcggcgcccacagucca

SEQ ID NO: 3092210 - RNA, 19 nt, Artificial Sequence
  Description of Artificial Sequence: Synthetic oligonucleotide
agccaucuggccugggaaa

SEQ ID NO: 3092211 - RNA, 19 nt, Artificial Sequence
  Description of Artificial Sequence: Synthetic oligonucleotide
aagggucgcucacccgagu

SEQ ID NO: 3092212 - RNA, 19 nt, Artificial Sequence
  Description of Artificial Sequence: Synthetic oligonucleotide
accaccucuuuagauugca

SEQ ID NO: 3092213 - RNA, 19 nt, Artificial Sequence
  Description of Artificial Sequence: Synthetic oligonucleotide
agucucugcugaccucucu

SEQ ID NO: 3092214 - RNA, 19 nt, Artificial Sequence
  Description of Artificial Sequence: Synthetic oligonucleotide
guggaauaagucuuauguu

SEQ ID NO: 3092215 - RNA, 19 nt, Artificial Sequence
  Description of Artificial Sequence: Synthetic oligonucleotide
cacacacacauggcgucgc

SEQ ID NO: 3092216 - RNA, 19 nt, Artificial Sequence
  Description of Artificial Sequence: Synthetic oligonucleotide
cggugguugacuaguaaag

SEQ ID NO: 3092217 - RNA, 19 nt, Artificial Sequence
  Description of Artificial Sequence: Synthetic oligonucleotide
aagcuuccauagguagcug

SEQ ID NO: 3092218 - RNA, 19 nt, Artificial Sequence
  Description of Artificial Sequence: Synthetic oligonucleotide
ggugguugacuaguaaaga

SEQ ID NO: 3092219 - RNA, 19 nt, Artificial Sequence
  Description of Artificial Sequence: Synthetic oligonucleotide
gugugagagccggugguug

SEQ ID NO: 3092220 - RNA, 19 nt, Artificial Sequence
  Description of Artificial Sequence: Synthetic oligonucleotide
gagugugagagccgguggu

SEQ ID NO: 3092221 - RNA, 19 nt, Artificial Sequence
  Description of Artificial Sequence: Synthetic oligonucleotide
ucgcugguaccugggcagg

SEQ ID NO: 3092222 - RNA, 19 nt, Artificial Sequence
  Description of Artificial Sequence: Synthetic oligonucleotide
ggggaagggucgcucaccc

SEQ ID NO: 3092223 - RNA, 19 nt, Artificial Sequence
  Description of Artificial Sequence: Synthetic oligonucleotide
gcgcaugccgcacucuggg

SEQ ID NO: 3092224 - RNA, 19 nt, Artificial Sequence
  Description of Artificial Sequence: Synthetic oligonucleotide
gcgcccacaguccacacac

SEQ ID NO: 3092225 - RNA, 19 nt, Artificial Sequence
  Description of Artificial Sequence: Synthetic oligonucleotide
gugcaucagccaucuggcc

SEQ ID NO: 3092226 - RNA, 19 nt, Artificial Sequence
  Description of Artificial Sequence: Synthetic oligonucleotide
gcagaggacuugguagucg

SEQ ID NO: 3092227 - RNA, 19 nt, Artificial Sequence
  Description of Artificial Sequence: Synthetic oligonucleotide
ugcagaggacuugguaguc

SEQ ID NO: 3092228 - RNA, 19 nt, Artificial Sequence
  Description of Artificial Sequence: Synthetic oligonucleotide
ggguaggugaagcggcgcc

SEQ ID NO: 3092229 - RNA, 19 nt, Artificial Sequence
  Description of Artificial Sequence: Synthetic oligonucleotide
gguagucguggaauaaguc

SEQ ID NO: 3092230 - RNA, 19 nt, Artificial Sequence
  Description of Artificial Sequence: Synthetic oligonucleotide
cugagcaggagucucugcu

SEQ ID NO: 3092231 - RNA, 19 nt, Artificial Sequence
  Description of Artificial Sequence: Synthetic oligonucleotide
uaccucugcagaggacuug

SEQ ID NO: 3092232 - RNA, 19 nt, Artificial Sequence
  Description of Artificial Sequence: Synthetic oligonucleotide
cacaguccacacacacaug

SEQ ID NO: 3092233 - RNA, 19 nt, Artificial Sequence
  Description of Artificial Sequence: Synthetic oligonucleotide
ugagagccggugguugacu

SEQ ID NO: 3092234 - RNA, 19 nt, Artificial Sequence
  Description of Artificial Sequence: Synthetic oligonucleotide
agcgcaugccgcacucugg

SEQ ID NO: 3092235 - RNA, 19 nt, Artificial Sequence
  Description of Artificial Sequence: Synthetic oligonucleotide
cacccgagugugagagccg

SEQ ID NO: 3092236 - RNA, 19 nt, Artificial Sequence
  Description of Artificial Sequence: Synthetic oligonucleotide
gacuugguagucguggaau

SEQ ID NO: 3092237 - RNA, 19 nt, Artificial Sequence
  Description of Artificial Sequence: Synthetic oligonucleotide
cuguaccucugcagaggac

SEQ ID NO: 3092238 - RNA, 19 nt, Artificial Sequence
  Description of Artificial Sequence: Synthetic oligonucleotide
acacacacauggcgucgcu

SEQ ID NO: 3092239 - RNA, 19 nt, Artificial Sequence
  Description of Artificial Sequence: Synthetic oligonucleotide
cuugguagucguggaauaa

SEQ ID NO: 3092240 - RNA, 19 nt, Artificial Sequence
  Description of Artificial Sequence: Synthetic oligonucleotide
cucacccgagugugagagc

SEQ ID NO: 3092241 - RNA, 19 nt, Artificial Sequence
  Description of Artificial Sequence: Synthetic oligonucleotide
ggaagcugugcaucagcca

SEQ ID NO: 3092242 - RNA, 19 nt, Artificial Sequence
  Description of Artificial Sequence: Synthetic oligonucleotide
ggcaggaagcugugcauca

SEQ ID NO: 3092243 - RNA, 19 nt, Artificial Sequence
  Description of Artificial Sequence: Synthetic oligonucleotide
guaccugggcaggaagcug

SEQ ID NO: 3092244 - RNA, 19 nt, Artificial Sequence
  Description of Artificial Sequence: Synthetic oligonucleotide
uaggugaagcggcgcccac

SEQ ID NO: 3092245 - RNA, 19 nt, Artificial Sequence
  Description of Artificial Sequence: Synthetic oligonucleotide
gcuguaccucugcagagga

SEQ ID NO: 3092246 - RNA, 19 nt, Artificial Sequence
  Description of Artificial Sequence: Synthetic oligonucleotide
uggccugggaaagcuucca

SEQ ID NO: 3092247 - RNA, 19 nt, Artificial Sequence
  Description of Artificial Sequence: Synthetic oligonucleotide
gagagccggugguugacua

SEQ ID NO: 3092248 - RNA, 19 nt, Artificial Sequence
  Description of Artificial Sequence: Synthetic oligonucleotide
caggggaagggucgcucac

SEQ ID NO: 3092249 - RNA, 19 nt, Artificial Sequence
  Description of Artificial Sequence: Synthetic oligonucleotide
cacacacauggcgucgcug

SEQ ID NO: 3092250 - RNA, 19 nt, Artificial Sequence
  Description of Artificial Sequence: Synthetic oligonucleotide
cugcagaggacuugguagu

SEQ ID NO: 3092251 - RNA, 19 nt, Artificial Sequence
  Description of Artificial Sequence: Synthetic oligonucleotide
guaggugaagcggcgccca

SEQ ID NO: 3092252 - RNA, 19 nt, Artificial Sequence
  Description of Artificial Sequence: Synthetic oligonucleotide
agugugagagccggugguu

SEQ ID NO: 3092253 - RNA, 19 nt, Artificial Sequence
  Description of Artificial Sequence: Synthetic oligonucleotide
cucugcagaggacuuggua

SEQ ID NO: 3092254 - RNA, 19 nt, Artificial Sequence
  Description of Artificial Sequence: Synthetic oligonucleotide
ggucgcucacccgagugug

SEQ ID NO: 3092255 - RNA, 19 nt, Artificial Sequence
  Description of Artificial Sequence: Synthetic oligonucleotide
gcaacugagcaggagucuc

SEQ ID NO: 3092256 - RNA, 19 nt, Artificial Sequence
  Description of Artificial Sequence: Synthetic oligonucleotide
cagccaucuggccugggaa

SEQ ID NO: 3092257 - RNA, 19 nt, Artificial Sequence
  Description of Artificial Sequence: Synthetic oligonucleotide
agucguggaauaagucuua

SEQ ID NO: 3092258 - RNA, 19 nt, Artificial Sequence
  Description of Artificial Sequence: Synthetic oligonucleotide
aguuuccacugcgaacuuu

SEQ ID NO: 3092259 - RNA, 19 nt, Artificial Sequence
  Description of Artificial Sequence: Synthetic oligonucleotide
gccaucuggccugggaaag

SEQ ID NO: 3092260 - RNA, 19 nt, Artificial Sequence
  Description of Artificial Sequence: Synthetic oligonucleotide
gcaggagucucugcugacc

SEQ ID NO: 3092261 - RNA, 19 nt, Artificial Sequence
  Description of Artificial Sequence: Synthetic oligonucleotide
guccacacacacauggcgu

SEQ ID NO: 3092262 - RNA, 19 nt, Artificial Sequence
  Description of Artificial Sequence: Synthetic oligonucleotide
ccauagguagcuguaccuc

SEQ ID NO: 3092263 - RNA, 19 nt, Artificial Sequence
  Description of Artificial Sequence: Synthetic oligonucleotide
caucagccaucuggccugg

SEQ ID NO: 3092264 - RNA, 19 nt, Artificial Sequence
  Description of Artificial Sequence: Synthetic oligonucleotide
caggagucucugcugaccu

SEQ ID NO: 3092265 - RNA, 19 nt, Artificial Sequence
  Description of Artificial Sequence: Synthetic oligonucleotide
cgagugugagagccggugg

SEQ ID NO: 3092266 - RNA, 19 nt, Artificial Sequence
  Description of Artificial Sequence: Synthetic oligonucleotide
aggugaagcggcgcccaca

SEQ ID NO: 3092267 - RNA, 19 nt, Artificial Sequence
  Description of Artificial Sequence: Synthetic oligonucleotide
gucuuauguucaaccaccu

SEQ ID NO: 3092268 - RNA, 19 nt, Artificial Sequence
  Description of Artificial Sequence: Synthetic oligonucleotide
agauugcaacugagcagga

SEQ ID NO: 3092269 - RNA, 19 nt, Artificial Sequence
  Description of Artificial Sequence: Synthetic oligonucleotide
auggcgucgcugguaccug

SEQ ID NO: 3092270 - RNA, 19 nt, Artificial Sequence
  Description of Artificial Sequence: Synthetic oligonucleotide
ccacacacacauggcgucg

SEQ ID NO: 3092271 - RNA, 19 nt, Artificial Sequence
  Description of Artificial Sequence: Synthetic oligonucleotide
gagccggugguugacuagu

SEQ ID NO: 3092272 - RNA, 19 nt, Artificial Sequence
  Description of Artificial Sequence: Synthetic oligonucleotide
acuuucucuugaagcgcau

SEQ ID NO: 3092273 - RNA, 19 nt, Artificial Sequence
  Description of Artificial Sequence: Synthetic oligonucleotide
acacauggcgucgcuggua

SEQ ID NO: 3092274 - RNA, 19 nt, Artificial Sequence
  Description of Artificial Sequence: Synthetic oligonucleotide
ggacuugguagucguggaa

SEQ ID NO: 3092275 - RNA, 19 nt, Artificial Sequence
  Description of Artificial Sequence: Synthetic oligonucleotide
gcaggaagcugugcaucag

SEQ ID NO: 3092276 - RNA, 19 nt, Artificial Sequence
  Description of Artificial Sequence: Synthetic oligonucleotide
ccggugguugacuaguaaa

SEQ ID NO: 3092277 - RNA, 19 nt, Artificial Sequence
  Description of Artificial Sequence: Synthetic oligonucleotide
cauggcgucgcugguaccu

SEQ ID NO: 3092278 - RNA, 19 nt, Artificial Sequence
  Description of Artificial Sequence: Synthetic oligonucleotide
ccacaguccacacacacau

SEQ ID NO: 3092279 - RNA, 19 nt, Artificial Sequence
  Description of Artificial Sequence: Synthetic oligonucleotide
agcggcgcccacaguccac

SEQ ID NO: 3092280 - RNA, 19 nt, Artificial Sequence
  Description of Artificial Sequence: Synthetic oligonucleotide
ccgagugugagagccggug

SEQ ID NO: 3092281 - RNA, 19 nt, Artificial Sequence
  Description of Artificial Sequence: Synthetic oligonucleotide
ggcgucgcugguaccuggg

SEQ ID NO: 3092282 - RNA, 19 nt, Artificial Sequence
  Description of Artificial Sequence: Synthetic oligonucleotide
gagucucugcugaccucuc

SEQ ID NO: 3092283 - RNA, 19 nt, Artificial Sequence
  Description of Artificial Sequence: Synthetic oligonucleotide
gccugggaaagcuuccaua

SEQ ID NO: 3092284 - RNA, 19 nt, Artificial Sequence
  Description of Artificial Sequence: Synthetic oligonucleotide
aucagccaucuggccuggg

SEQ ID NO: 3092285 - RNA, 19 nt, Artificial Sequence
  Description of Artificial Sequence: Synthetic oligonucleotide
gggcaggaagcugugcauc

SEQ ID NO: 3092286 - RNA, 19 nt, Artificial Sequence
  Description of Artificial Sequence: Synthetic oligonucleotide
gguaccugggcaggaagcu

SEQ ID NO: 3092287 - RNA, 19 nt, Artificial Sequence
  Description of Artificial Sequence: Synthetic oligonucleotide
gcuuccauagguagcugua

SEQ ID NO: 3092288 - RNA, 19 nt, Artificial Sequence
  Description of Artificial Sequence: Synthetic oligonucleotide
accugggcaggaagcugug

SEQ ID NO: 3092289 - RNA, 19 nt, Artificial Sequence
  Description of Artificial Sequence: Synthetic oligonucleotide
ccaucuggccugggaaagc

SEQ ID NO: 3092290 - RNA, 19 nt, Artificial Sequence
  Description of Artificial Sequence: Synthetic oligonucleotide
gcgucgcugguaccugggc

SEQ ID NO: 3092291 - RNA, 19 nt, Artificial Sequence
  Description of Artificial Sequence: Synthetic oligonucleotide
gaagcgcaugccgcacucu

SEQ ID NO: 3092292 - RNA, 19 nt, Artificial Sequence
  Description of Artificial Sequence: Synthetic oligonucleotide
gucguggaauaagucuuau

SEQ ID NO: 3092293 - RNA, 19 nt, Artificial Sequence
  Description of Artificial Sequence: Synthetic oligonucleotide
gaguuuccacugcgaacuu

SEQ ID NO: 3092294 - RNA, 19 nt, Artificial Sequence
  Description of Artificial Sequence: Synthetic oligonucleotide
ggcgcccacaguccacaca

SEQ ID NO: 3092295 - RNA, 19 nt, Artificial Sequence
  Description of Artificial Sequence: Synthetic oligonucleotide
gucgcucacccgaguguga

SEQ ID NO: 3092296 - RNA, 19 nt, Artificial Sequence
  Description of Artificial Sequence: Synthetic oligonucleotide
gccggugguugacuaguaa

SEQ ID NO: 3092297 - RNA, 19 nt, Artificial Sequence
  Description of Artificial Sequence: Synthetic oligonucleotide
cacacauggcgucgcuggu

SEQ ID NO: 3092298 - RNA, 19 nt, Artificial Sequence
  Description of Artificial Sequence: Synthetic oligonucleotide
gggucgcucacccgagugu

SEQ ID NO: 3092299 - RNA, 19 nt, Artificial Sequence
  Description of Artificial Sequence: Synthetic oligonucleotide
gcugguaccugggcaggaa

SEQ ID NO: 3092300 - RNA, 19 nt, Artificial Sequence
  Description of Artificial Sequence: Synthetic oligonucleotide
agccggugguugacuagua

SEQ ID NO: 3092301 - RNA, 19 nt, Artificial Sequence
  Description of Artificial Sequence: Synthetic oligonucleotide
cgcaugccgcacucugggc

SEQ ID NO: 3092302 - RNA, 19 nt, Artificial Sequence
  Description of Artificial Sequence: Synthetic oligonucleotide
ccaccucuuuagauugcaa

SEQ ID NO: 3092303 - RNA, 19 nt, Artificial Sequence
  Description of Artificial Sequence: Synthetic oligonucleotide
cgucgcugguaccugggca

SEQ ID NO: 3092304 - RNA, 19 nt, Artificial Sequence
  Description of Artificial Sequence: Synthetic oligonucleotide
gcggcgcccacaguccaca

SEQ ID NO: 3092305 - RNA, 19 nt, Artificial Sequence
  Description of Artificial Sequence: Synthetic oligonucleotide
gugaagcggcgcccacagu

SEQ ID NO: 3092306 - RNA, 19 nt, Artificial Sequence
  Description of Artificial Sequence: Synthetic oligonucleotide
ggccugggaaagcuuccau

SEQ ID NO: 3092307 - RNA, 19 nt, Artificial Sequence
  Description of Artificial Sequence: Synthetic oligonucleotide
ccacugcgaacuuucucuu

SEQ ID NO: 3092308 - RNA, 19 nt, Artificial Sequence
  Description of Artificial Sequence: Synthetic oligonucleotide
cgcucacccgagugugaga

SEQ ID NO: 3092309 - RNA, 19 nt, Artificial Sequence
  Description of Artificial Sequence: Synthetic oligonucleotide
ccucugcagaggacuuggu

SEQ ID NO: 3092310 - RNA, 19 nt, Artificial Sequence
  Description of Artificial Sequence: Synthetic oligonucleotide
cggcgcccacaguccacac

SEQ ID NO: 3092311 - RNA, 19 nt, Artificial Sequence
  Description of Artificial Sequence: Synthetic oligonucleotide
cccgagugugagagccggu

SEQ ID NO: 3092312 - RNA, 19 nt, Artificial Sequence
  Description of Artificial Sequence: Synthetic oligonucleotide
cucaaaugcacauagacug

SEQ ID NO: 3092313 - RNA, 19 nt, Artificial Sequence
  Description of Artificial Sequence: Synthetic oligonucleotide
uuccuuauuaaauagucca

SEQ ID NO: 3092314 - RNA, 19 nt, Artificial Sequence
  Description of Artificial Sequence: Synthetic oligonucleotide
uuaaauaguccacugcugu

SEQ ID NO: 3092315 - RNA, 19 nt, Artificial Sequence
  Description of Artificial Sequence: Synthetic oligonucleotide
cuuggugauacucagggcc

SEQ ID NO: 3092316 - RNA, 19 nt, Artificial Sequence
  Description of Artificial Sequence: Synthetic oligonucleotide
ugaaugggagucaaguucc

SEQ ID NO: 3092317 - RNA, 19 nt, Artificial Sequence
  Description of Artificial Sequence: Synthetic oligonucleotide
ugaagaaucauggugaauc

SEQ ID NO: 3092318 - RNA, 19 nt, Artificial Sequence
  Description of Artificial Sequence: Synthetic oligonucleotide
aauaguccacugcuguaac

SEQ ID NO: 3092319 - RNA, 19 nt, Artificial Sequence
  Description of Artificial Sequence: Synthetic oligonucleotide
uccucaaaugcacauagac

SEQ ID NO: 3092320 - RNA, 19 nt, Artificial Sequence
  Description of Artificial Sequence: Synthetic oligonucleotide
ucuuaucuuguccacgaag

SEQ ID NO: 3092321 - RNA, 19 nt, Artificial Sequence
  Description of Artificial Sequence: Synthetic oligonucleotide
aaucauggugaaucucugg

SEQ ID NO: 3092322 - RNA, 19 nt, Artificial Sequence
  Description of Artificial Sequence: Synthetic oligonucleotide
acgaagaaguuucugaaug

SEQ ID NO: 3092323 - RNA, 19 nt, Artificial Sequence
  Description of Artificial Sequence: Synthetic oligonucleotide
cuuauuaaauaguccacug

SEQ ID NO: 3092324 - RNA, 19 nt, Artificial Sequence
  Description of Artificial Sequence: Synthetic oligonucleotide
uuuguacucucuuaucuug

SEQ ID NO: 3092325 - RNA, 19 nt, Artificial Sequence
  Description of Artificial Sequence: Synthetic oligonucleotide
acugcuguaaccccaaugu

SEQ ID NO: 3092326 - RNA, 19 nt, Artificial Sequence
  Description of Artificial Sequence: Synthetic oligonucleotide
cucuuggugauacucaggg

SEQ ID NO: 3092327 - RNA, 19 nt, Artificial Sequence
  Description of Artificial Sequence: Synthetic oligonucleotide
uuuaccaaacaucuguuuu

SEQ ID NO: 3092328 - RNA, 19 nt, Artificial Sequence
  Description of Artificial Sequence: Synthetic oligonucleotide
aaguuucugaaugggaguc

SEQ ID NO: 3092329 - RNA, 19 nt, Artificial Sequence
  Description of Artificial Sequence: Synthetic oligonucleotide
aguuccuuauuaaauaguc

SEQ ID NO: 3092330 - RNA, 19 nt, Artificial Sequence
  Description of Artificial Sequence: Synthetic oligonucleotide
ugaagguaggaacguaucc

SEQ ID NO: 3092331 - RNA, 19 nt, Artificial Sequence
  Description of Artificial Sequence: Synthetic oligonucleotide
caaguuccuuauuaaauag

SEQ ID NO: 3092332 - RNA, 19 nt, Artificial Sequence
  Description of Artificial Sequence: Synthetic oligonucleotide
gaagaaguuucugaauggg

SEQ ID NO: 3092333 - RNA, 19 nt, Artificial Sequence
  Description of Artificial Sequence: Synthetic oligonucleotide
ucaaguuccuuauuaaaua

SEQ ID NO: 3092334 - RNA, 19 nt, Artificial Sequence
  Description of Artificial Sequence: Synthetic oligonucleotide
uugauuuguacucucuuau

SEQ ID NO: 3092335 - RNA, 19 nt, Artificial Sequence
  Description of Artificial Sequence: Synthetic oligonucleotide
uuguccacgaagaaguuuc

SEQ ID NO: 3092336 - RNA, 19 nt, Artificial Sequence
  Description of Artificial Sequence: Synthetic oligonucleotide
ucaaauuugaagguaggaa

SEQ ID NO: 3092337 - RNA, 19 nt, Artificial Sequence
  Description of Artificial Sequence: Synthetic oligonucleotide
aaaagcucucucuccagcu

SEQ ID NO: 3092338 - RNA, 19 nt, Artificial Sequence
  Description of Artificial Sequence: Synthetic oligonucleotide
aaugcacauagacugccga

SEQ ID NO: 3092339 - RNA, 19 nt, Artificial Sequence
  Description of Artificial Sequence: Synthetic oligonucleotide
agaaguuucugaaugggag

SEQ ID NO: 3092340 - RNA, 19 nt, Artificial Sequence
  Description of Artificial Sequence: Synthetic oligonucleotide
uguuugucgcuuuugauuu

SEQ ID NO: 3092341 - RNA, 19 nt, Artificial Sequence
  Description of Artificial Sequence: Synthetic oligonucleotide
ugucucuuuaccaaacauc

SEQ ID NO: 3092342 - RNA, 19 nt, Artificial Sequence
  Description of Artificial Sequence: Synthetic oligonucleotide
uuugaagguaggaacguau

SEQ ID NO: 3092343 - RNA, 19 nt, Artificial Sequence
  Description of Artificial Sequence: Synthetic oligonucleotide
ccaaacaucuguuuuaagc

SEQ ID NO: 3092344 - RNA, 19 nt, Artificial Sequence
  Description of Artificial Sequence: Synthetic oligonucleotide
uccacgaagaaguuucuga

SEQ ID NO: 3092345 - RNA, 19 nt, Artificial Sequence
  Description of Artificial Sequence: Synthetic oligonucleotide
ucaaaugcacauagacugc

SEQ ID NO: 3092346 - RNA, 19 nt, Artificial Sequence
  Description of Artificial Sequence: Synthetic oligonucleotide
uacucucuuaucuugucca

SEQ ID NO: 3092347 - RNA, 19 nt, Artificial Sequence
  Description of Artificial Sequence: Synthetic oligonucleotide
guauccaugucucuuuacc

SEQ ID NO: 3092348 - RNA, 19 nt, Artificial Sequence
  Description of Artificial Sequence: Synthetic oligonucleotide
auagacugccgaccgaagg

SEQ ID NO: 3092349 - RNA, 19 nt, Artificial Sequence
  Description of Artificial Sequence: Synthetic oligonucleotide
ugcuguaaccccaauguuc

SEQ ID NO: 3092350 - RNA, 19 nt, Artificial Sequence
  Description of Artificial Sequence: Synthetic oligonucleotide
caacagguccuccagauug

SEQ ID NO: 3092351 - RNA, 19 nt, Artificial Sequence
  Description of Artificial Sequence: Synthetic oligonucleotide
ucucuuaucuuguccacga

SEQ ID NO: 3092352 - RNA, 19 nt, Artificial Sequence
  Description of Artificial Sequence: Synthetic oligonucleotide
uguuccuccucaaaugcac

SEQ ID NO: 3092353 - RNA, 19 nt, Artificial Sequence
  Description of Artificial Sequence: Synthetic oligonucleotide
cuuaucuuguccacgaaga

SEQ ID NO: 3092354 - RNA, 19 nt, Artificial Sequence
  Description of Artificial Sequence: Synthetic oligonucleotide
cauggugaaucucugguac

SEQ ID NO: 3092355 - RNA, 19 nt, Artificial Sequence
  Description of Artificial Sequence: Synthetic oligonucleotide
cugaaugggagucaaguuc

SEQ ID NO: 3092356 - RNA, 19 nt, Artificial Sequence
  Description of Artificial Sequence: Synthetic oligonucleotide
uauccaugucucuuuacca

SEQ ID NO: 3092357 - RNA, 19 nt, Artificial Sequence
  Description of Artificial Sequence: Synthetic oligonucleotide
uccuuauuaaauaguccac

SEQ ID NO: 3092358 - RNA, 19 nt, Artificial Sequence
  Description of Artificial Sequence: Synthetic oligonucleotide
aaacaucuguuuuaagcuu

SEQ ID NO: 3092359 - RNA, 19 nt, Artificial Sequence
  Description of Artificial Sequence: Synthetic oligonucleotide
cucugaagaaucaugguga

SEQ ID NO: 3092360 - RNA, 19 nt, Artificial Sequence
  Description of Artificial Sequence: Synthetic oligonucleotide
agguccuccagauuguuug

SEQ ID NO: 3092361 - RNA, 19 nt, Artificial Sequence
  Description of Artificial Sequence: Synthetic oligonucleotide
auaguccacugcuguaacc

SEQ ID NO: 3092362 - RNA, 19 nt, Artificial Sequence
  Description of Artificial Sequence: Synthetic oligonucleotide
uuugauuuguacucucuua

SEQ ID NO: 3092363 - RNA, 19 nt, Artificial Sequence
  Description of Artificial Sequence: Synthetic oligonucleotide
uccuccagauuguuugucg

SEQ ID NO: 3092364 - RNA, 19 nt, Artificial Sequence
  Description of Artificial Sequence: Synthetic oligonucleotide
gauuuguacucucuuaucu

SEQ ID NO: 3092365 - RNA, 19 nt, Artificial Sequence
  Description of Artificial Sequence: Synthetic oligonucleotide
gauacucagggccaguauc

SEQ ID NO: 3092366 - RNA, 19 nt, Artificial Sequence
  Description of Artificial Sequence: Synthetic oligonucleotide
aagguaggaacguauccau

SEQ ID NO: 3092367 - RNA, 19 nt, Artificial Sequence
  Description of Artificial Sequence: Synthetic oligonucleotide
caauguuccuccucaaaug

SEQ ID NO: 3092368 - RNA, 19 nt, Artificial Sequence
  Description of Artificial Sequence: Synthetic oligonucleotide
uuguuugucgcuuuugauu

SEQ ID NO: 3092369 - RNA, 19 nt, Artificial Sequence
  Description of Artificial Sequence: Synthetic oligonucleotide
aguaucaacagguccucca

SEQ ID NO: 3092370 - RNA, 19 nt, Artificial Sequence
  Description of Artificial Sequence: Synthetic oligonucleotide
aaauaguccacugcuguaa

SEQ ID NO: 3092371 - RNA, 19 nt, Artificial Sequence
  Description of Artificial Sequence: Synthetic oligonucleotide
gauuguuugucgcuuuuga

SEQ ID NO: 3092372 - RNA, 19 nt, Artificial Sequence
  Description of Artificial Sequence: Synthetic oligonucleotide
ucgcuuuugauuuguacuc

SEQ ID NO: 3092373 - RNA, 19 nt, Artificial Sequence
  Description of Artificial Sequence: Synthetic oligonucleotide
aucuuguccacgaagaagu

SEQ ID NO: 3092374 - RNA, 19 nt, Artificial Sequence
  Description of Artificial Sequence: Synthetic oligonucleotide
agaaucauggugaaucucu

SEQ ID NO: 3092375 - RNA, 19 nt, Artificial Sequence
  Description of Artificial Sequence: Synthetic oligonucleotide
uuuugauuuguacucucuu

SEQ ID NO: 3092376 - RNA, 19 nt, Artificial Sequence
  Description of Artificial Sequence: Synthetic oligonucleotide
uuaccaaacaucuguuuua

SEQ ID NO: 3092377 - RNA, 19 nt, Artificial Sequence
  Description of Artificial Sequence: Synthetic oligonucleotide
auccucugaagaaucaugg

SEQ ID NO: 3092378 - RNA, 19 nt, Artificial Sequence
  Description of Artificial Sequence: Synthetic oligonucleotide
uagacugccgaccgaagga

SEQ ID NO: 3092379 - RNA, 19 nt, Artificial Sequence
  Description of Artificial Sequence: Synthetic oligonucleotide
uaguccacugcuguaaccc

SEQ ID NO: 3092380 - RNA, 19 nt, Artificial Sequence
  Description of Artificial Sequence: Synthetic oligonucleotide
uaggaacguauccaugucu

SEQ ID NO: 3092381 - RNA, 19 nt, Artificial Sequence
  Description of Artificial Sequence: Synthetic oligonucleotide
augcacauagacugccgac

SEQ ID NO: 3092382 - RNA, 19 nt, Artificial Sequence
  Description of Artificial Sequence: Synthetic oligonucleotide
aguccacugcuguaacccc

SEQ ID NO: 3092383 - RNA, 19 nt, Artificial Sequence
  Description of Artificial Sequence: Synthetic oligonucleotide
aaaugcacauagacugccg

SEQ ID NO: 3092384 - RNA, 19 nt, Artificial Sequence
  Description of Artificial Sequence: Synthetic oligonucleotide
uuggugauacucagggcca

SEQ ID NO: 3092385 - RNA, 19 nt, Artificial Sequence
  Description of Artificial Sequence: Synthetic oligonucleotide
aaggacagaggagagccug

SEQ ID NO: 3092386 - RNA, 19 nt, Artificial Sequence
  Description of Artificial Sequence: Synthetic oligonucleotide
guaucaacagguccuccag

SEQ ID NO: 3092387 - RNA, 19 nt, Artificial Sequence
  Description of Artificial Sequence: Synthetic oligonucleotide
acucucuuaucuuguccac

SEQ ID NO: 3092388 - RNA, 19 nt, Artificial Sequence
  Description of Artificial Sequence: Synthetic oligonucleotide
caaacaucuguuuuaagcu

SEQ ID NO: 3092389 - RNA, 19 nt, Artificial Sequence
  Description of Artificial Sequence: Synthetic oligonucleotide
ugcacauagacugccgacc

SEQ ID NO: 3092390 - RNA, 19 nt, Artificial Sequence
  Description of Artificial Sequence: Synthetic oligonucleotide
guaaccccaauguuccucc

SEQ ID NO: 3092391 - RNA, 19 nt, Artificial Sequence
  Description of Artificial Sequence: Synthetic oligonucleotide
auuaaauaguccacugcug

SEQ ID NO: 3092392 - RNA, 19 nt, Artificial Sequence
  Description of Artificial Sequence: Synthetic oligonucleotide
uugaagguaggaacguauc

SEQ ID NO: 3092393 - RNA, 19 nt, Artificial Sequence
  Description of Artificial Sequence: Synthetic oligonucleotide
aaccccaauguuccuccuc

SEQ ID NO: 3092394 - RNA, 19 nt, Artificial Sequence
  Description of Artificial Sequence: Synthetic oligonucleotide
uuaucuuguccacgaagaa

SEQ ID NO: 3092395 - RNA, 19 nt, Artificial Sequence
  Description of Artificial Sequence: Synthetic oligonucleotide
gaagguaggaacguaucca

SEQ ID NO: 3092396 - RNA, 19 nt, Artificial Sequence
  Description of Artificial Sequence: Synthetic oligonucleotide
agcucuuggugauacucag

SEQ ID NO: 3092397 - RNA, 19 nt, Artificial Sequence
  Description of Artificial Sequence: Synthetic oligonucleotide
aacguauccaugucucuuu

SEQ ID NO: 3092398 - RNA, 19 nt, Artificial Sequence
  Description of Artificial Sequence: Synthetic oligonucleotide
agucaaguuccuuauuaaa

SEQ ID NO: 3092399 - RNA, 19 nt, Artificial Sequence
  Description of Artificial Sequence: Synthetic oligonucleotide
ucuuuaccaaacaucuguu

SEQ ID NO: 3092400 - RNA, 19 nt, Artificial Sequence
  Description of Artificial Sequence: Synthetic oligonucleotide
aagaaguuucugaauggga

SEQ ID NO: 3092401 - RNA, 19 nt, Artificial Sequence
  Description of Artificial Sequence: Synthetic oligonucleotide
ucucuuuaccaaacaucug

SEQ ID NO: 3092402 - RNA, 19 nt, Artificial Sequence
  Description of Artificial Sequence: Synthetic oligonucleotide
guuccuuauuaaauagucc

SEQ ID NO: 3092403 - RNA, 19 nt, Artificial Sequence
  Description of Artificial Sequence: Synthetic oligonucleotide
uuguacucucuuaucuugu

SEQ ID NO: 3092404 - RNA, 19 nt, Artificial Sequence
  Description of Artificial Sequence: Synthetic oligonucleotide
cucagggccaguaucaaca

SEQ ID NO: 3092405 - RNA, 19 nt, Artificial Sequence
  Description of Artificial Sequence: Synthetic oligonucleotide
gauccucugaagaaucaug

SEQ ID NO: 3092406 - RNA, 19 nt, Artificial Sequence
  Description of Artificial Sequence: Synthetic oligonucleotide
caaaugcacauagacugcc

SEQ ID NO: 3092407 - RNA, 19 nt, Artificial Sequence
  Description of Artificial Sequence: Synthetic oligonucleotide
ugauuuguacucucuuauc

SEQ ID NO: 3092408 - RNA, 19 nt, Artificial Sequence
  Description of Artificial Sequence: Synthetic oligonucleotide
ugucgcuuuugauuuguac

SEQ ID NO: 3092409 - RNA, 19 nt, Artificial Sequence
  Description of Artificial Sequence: Synthetic oligonucleotide
ucugaagaaucauggugaa

SEQ ID NO: 3092410 - RNA, 19 nt, Artificial Sequence
  Description of Artificial Sequence: Synthetic oligonucleotide
auuuguacucucuuaucuu

SEQ ID NO: 3092411 - RNA, 19 nt, Artificial Sequence
  Description of Artificial Sequence: Synthetic oligonucleotide
aggaacguauccaugucuc

SEQ ID NO: 3092412 - RNA, 19 nt, Artificial Sequence
  Description of Artificial Sequence: Synthetic oligonucleotide
aaguuccuuauuaaauagu

SEQ ID NO: 3092413 - RNA, 19 nt, Artificial Sequence
  Description of Artificial Sequence: Synthetic oligonucleotide
uaucaacagguccuccaga

SEQ ID NO: 3092414 - RNA, 19 nt, Artificial Sequence
  Description of Artificial Sequence: Synthetic oligonucleotide
aucaacagguccuccagau

SEQ ID NO: 3092415 - RNA, 19 nt, Artificial Sequence
  Description of Artificial Sequence: Synthetic oligonucleotide
uaaauaguccacugcugua

SEQ ID NO: 3092416 - RNA, 19 nt, Artificial Sequence
  Description of Artificial Sequence: Synthetic oligonucleotide
uuucugaaugggagucaag

SEQ ID NO: 3092417 - RNA, 19 nt, Artificial Sequence
  Description of Artificial Sequence: Synthetic oligonucleotide
auuguuugucgcuuuugau

SEQ ID NO: 3092418 - RNA, 19 nt, Artificial Sequence
  Description of Artificial Sequence: Synthetic oligonucleotide
gaagauccucugaagaauc

SEQ ID NO: 3092419 - RNA, 19 nt, Artificial Sequence
  Description of Artificial Sequence: Synthetic oligonucleotide
acucagggccaguaucaac

SEQ ID NO: 3092420 - RNA, 19 nt, Artificial Sequence
  Description of Artificial Sequence: Synthetic oligonucleotide
ucagggccaguaucaacag

SEQ ID NO: 3092421 - RNA, 19 nt, Artificial Sequence
  Description of Artificial Sequence: Synthetic oligonucleotide
aacaucuguuuuaagcuua

SEQ ID NO: 3092422 - RNA, 19 nt, Artificial Sequence
  Description of Artificial Sequence: Synthetic oligonucleotide
augucucuuuaccaaacau

SEQ ID NO: 3092423 - RNA, 19 nt, Artificial Sequence
  Description of Artificial Sequence: Synthetic oligonucleotide
gaaucauggugaaucucug

SEQ ID NO: 3092424 - RNA, 19 nt, Artificial Sequence
  Description of Artificial Sequence: Synthetic oligonucleotide
uuugucgcuuuugauuugu

SEQ ID NO: 3092425 - RNA, 19 nt, Artificial Sequence
  Description of Artificial Sequence: Synthetic oligonucleotide
agagccugaagauccucug

SEQ ID NO: 3092426 - RNA, 19 nt, Artificial Sequence
  Description of Artificial Sequence: Synthetic oligonucleotide
auccaugucucuuuaccaa

SEQ ID NO: 3092427 - RNA, 19 nt, Artificial Sequence
  Description of Artificial Sequence: Synthetic oligonucleotide
agggccaguaucaacaggu

SEQ ID NO: 3092428 - RNA, 19 nt, Artificial Sequence
  Description of Artificial Sequence: Synthetic oligonucleotide
ucucucuccagcucuuggu

SEQ ID NO: 3092429 - RNA, 19 nt, Artificial Sequence
  Description of Artificial Sequence: Synthetic oligonucleotide
gucgcuuuugauuuguacu

SEQ ID NO: 3092430 - RNA, 19 nt, Artificial Sequence
  Description of Artificial Sequence: Synthetic oligonucleotide
gucucuuuaccaaacaucu

SEQ ID NO: 3092431 - RNA, 19 nt, Artificial Sequence
  Description of Artificial Sequence: Synthetic oligonucleotide
gcuguaaccccaauguucc

SEQ ID NO: 3092432 - RNA, 19 nt, Artificial Sequence
  Description of Artificial Sequence: Synthetic oligonucleotide
gagucaaguuccuuauuaa

SEQ ID NO: 3092433 - RNA, 19 nt, Artificial Sequence
  Description of Artificial Sequence: Synthetic oligonucleotide
augggagucaaguuccuua

SEQ ID NO: 3092434 - RNA, 19 nt, Artificial Sequence
  Description of Artificial Sequence: Synthetic oligonucleotide
accccaauguuccuccuca

SEQ ID NO: 3092435 - RNA, 19 nt, Artificial Sequence
  Description of Artificial Sequence: Synthetic oligonucleotide
ucauggugaaucucuggua

SEQ ID NO: 3092436 - RNA, 19 nt, Artificial Sequence
  Description of Artificial Sequence: Synthetic oligonucleotide
gaagaaucauggugaaucu

SEQ ID NO: 3092437 - RNA, 19 nt, Artificial Sequence
  Description of Artificial Sequence: Synthetic oligonucleotide
uccucugaagaaucauggu

SEQ ID NO: 3092438 - RNA, 19 nt, Artificial Sequence
  Description of Artificial Sequence: Synthetic oligonucleotide
cucucuuaucuuguccacg

SEQ ID NO: 3092439 - RNA, 19 nt, Artificial Sequence
  Description of Artificial Sequence: Synthetic oligonucleotide
uguaaccccaauguuccuc

SEQ ID NO: 3092440 - RNA, 19 nt, Artificial Sequence
  Description of Artificial Sequence: Synthetic oligonucleotide
uaccaaacaucuguuuuaa

SEQ ID NO: 3092441 - RNA, 19 nt, Artificial Sequence
  Description of Artificial Sequence: Synthetic oligonucleotide
agacugccgaccgaaggac

SEQ ID NO: 3092442 - RNA, 19 nt, Artificial Sequence
  Description of Artificial Sequence: Synthetic oligonucleotide
ugggagucaaguuccuuau

SEQ ID NO: 3092443 - RNA, 19 nt, Artificial Sequence
  Description of Artificial Sequence: Synthetic oligonucleotide
ccucugaagaaucauggug

SEQ ID NO: 3092444 - RNA, 19 nt, Artificial Sequence
  Description of Artificial Sequence: Synthetic oligonucleotide
gacagaggagagccugaag

SEQ ID NO: 3092445 - RNA, 19 nt, Artificial Sequence
  Description of Artificial Sequence: Synthetic oligonucleotide
gcacauagacugccgaccg

SEQ ID NO: 3092446 - RNA, 19 nt, Artificial Sequence
  Description of Artificial Sequence: Synthetic oligonucleotide
ugauacucagggccaguau

SEQ ID NO: 3092447 - RNA, 19 nt, Artificial Sequence
  Description of Artificial Sequence: Synthetic oligonucleotide
agccugaagauccucugaa

SEQ ID NO: 3092448 - RNA, 19 nt, Artificial Sequence
  Description of Artificial Sequence: Synthetic oligonucleotide
accaaacaucuguuuuaag

SEQ ID NO: 3092449 - RNA, 19 nt, Artificial Sequence
  Description of Artificial Sequence: Synthetic oligonucleotide
aagauccucugaagaauca

SEQ ID NO: 3092450 - RNA, 19 nt, Artificial Sequence
  Description of Artificial Sequence: Synthetic oligonucleotide
cucucucuccagcucuugg

SEQ ID NO: 3092451 - RNA, 19 nt, Artificial Sequence
  Description of Artificial Sequence: Synthetic oligonucleotide
auacucagggccaguauca

SEQ ID NO: 3092452 - RNA, 19 nt, Artificial Sequence
  Description of Artificial Sequence: Synthetic oligonucleotide
cucucuccagcucuuggug

SEQ ID NO: 3092453 - RNA, 19 nt, Artificial Sequence
  Description of Artificial Sequence: Synthetic oligonucleotide
auggugaaucucugguacu

SEQ ID NO: 3092454 - RNA, 19 nt, Artificial Sequence
  Description of Artificial Sequence: Synthetic oligonucleotide
agauuguuugucgcuuuug

SEQ ID NO: 3092455 - RNA, 19 nt, Artificial Sequence
  Description of Artificial Sequence: Synthetic oligonucleotide
ccuccucaaaugcacauag

SEQ ID NO: 3092456 - RNA, 19 nt, Artificial Sequence
  Description of Artificial Sequence: Synthetic oligonucleotide
cauagacugccgaccgaag

SEQ ID NO: 3092457 - RNA, 19 nt, Artificial Sequence
  Description of Artificial Sequence: Synthetic oligonucleotide
cgaagaaguuucugaaugg

SEQ ID NO: 3092458 - RNA, 19 nt, Artificial Sequence
  Description of Artificial Sequence: Synthetic oligonucleotide
uguccacgaagaaguuucu

SEQ ID NO: 3092459 - RNA, 19 nt, Artificial Sequence
  Description of Artificial Sequence: Synthetic oligonucleotide
cacugcuguaaccccaaug

SEQ ID NO: 3092460 - RNA, 19 nt, Artificial Sequence
  Description of Artificial Sequence: Synthetic oligonucleotide
ggagucaaguuccuuauua

SEQ ID NO: 3092461 - RNA, 19 nt, Artificial Sequence
  Description of Artificial Sequence: Synthetic oligonucleotide
ugccgaccgaaggacagag

SEQ ID NO: 3092462 - RNA, 19 nt, Artificial Sequence
  Description of Artificial Sequence: Synthetic oligonucleotide
acauagacugccgaccgaa

SEQ ID NO: 3092463 - RNA, 19 nt, Artificial Sequence
  Description of Artificial Sequence: Synthetic oligonucleotide
gguaggaacguauccaugu

SEQ ID NO: 3092464 - RNA, 19 nt, Artificial Sequence
  Description of Artificial Sequence: Synthetic oligonucleotide
uccacugcuguaaccccaa

SEQ ID NO: 3092465 - RNA, 19 nt, Artificial Sequence
  Description of Artificial Sequence: Synthetic oligonucleotide
ggccaguaucaacaggucc

SEQ ID NO: 3092466 - RNA, 19 nt, Artificial Sequence
  Description of Artificial Sequence: Synthetic oligonucleotide
guuugucgcuuuugauuug

SEQ ID NO: 3092467 - RNA, 19 nt, Artificial Sequence
  Description of Artificial Sequence: Synthetic oligonucleotide
caugucucuuuaccaaaca

SEQ ID NO: 3092468 - RNA, 19 nt, Artificial Sequence
  Description of Artificial Sequence: Synthetic oligonucleotide
cgaaggacagaggagagcc

SEQ ID NO: 3092469 - RNA, 19 nt, Artificial Sequence
  Description of Artificial Sequence: Synthetic oligonucleotide
acugccgaccgaaggacag

SEQ ID NO: 3092470 - RNA, 19 nt, Artificial Sequence
  Description of Artificial Sequence: Synthetic oligonucleotide
aguuucugaaugggaguca

SEQ ID NO: 3092471 - RNA, 19 nt, Artificial Sequence
  Description of Artificial Sequence: Synthetic oligonucleotide
gucaaguuccuuauuaaau

SEQ ID NO: 3092472 - RNA, 19 nt, Artificial Sequence
  Description of Artificial Sequence: Synthetic oligonucleotide
gagccugaagauccucuga

SEQ ID NO: 3092473 - RNA, 19 nt, Artificial Sequence
  Description of Artificial Sequence: Synthetic oligonucleotide
cuuuugauuuguacucucu

SEQ ID NO: 3092474 - RNA, 19 nt, Artificial Sequence
  Description of Artificial Sequence: Synthetic oligonucleotide
uggugauacucagggccag

SEQ ID NO: 3092475 - RNA, 19 nt, Artificial Sequence
  Description of Artificial Sequence: Synthetic oligonucleotide
ucuuguccacgaagaaguu

SEQ ID NO: 3092476 - RNA, 19 nt, Artificial Sequence
  Description of Artificial Sequence: Synthetic oligonucleotide
aaugggagucaaguuccuu

SEQ ID NO: 3092477 - RNA, 19 nt, Artificial Sequence
  Description of Artificial Sequence: Synthetic oligonucleotide
agauccucugaagaaucau

SEQ ID NO: 3092478 - RNA, 19 nt, Artificial Sequence
  Description of Artificial Sequence: Synthetic oligonucleotide
ccugaagauccucugaaga

SEQ ID NO: 3092479 - RNA, 19 nt, Artificial Sequence
  Description of Artificial Sequence: Synthetic oligonucleotide
cagggccaguaucaacagg

SEQ ID NO: 3092480 - RNA, 19 nt, Artificial Sequence
  Description of Artificial Sequence: Synthetic oligonucleotide
auuugaagguaggaacgua

SEQ ID NO: 3092481 - RNA, 19 nt, Artificial Sequence
  Description of Artificial Sequence: Synthetic oligonucleotide
ccuccagauuguuugucgc

SEQ ID NO: 3092482 - RNA, 19 nt, Artificial Sequence
  Description of Artificial Sequence: Synthetic oligonucleotide
gcuuuugauuuguacucuc

SEQ ID NO: 3092483 - RNA, 19 nt, Artificial Sequence
  Description of Artificial Sequence: Synthetic oligonucleotide
accgaaggacagaggagag

SEQ ID NO: 3092484 - RNA, 19 nt, Artificial Sequence
  Description of Artificial Sequence: Synthetic oligonucleotide
cagcucuuggugauacuca

SEQ ID NO: 3092485 - RNA, 19 nt, Artificial Sequence
  Description of Artificial Sequence: Synthetic oligonucleotide
cuccagcucuuggugauac

SEQ ID NO: 3092486 - RNA, 19 nt, Artificial Sequence
  Description of Artificial Sequence: Synthetic oligonucleotide
agguaggaacguauccaug

SEQ ID NO: 3092487 - RNA, 19 nt, Artificial Sequence
  Description of Artificial Sequence: Synthetic oligonucleotide
caguaucaacagguccucc

SEQ ID NO: 3092488 - RNA, 19 nt, Artificial Sequence
  Description of Artificial Sequence: Synthetic oligonucleotide
acguauccaugucucuuua

SEQ ID NO: 3092489 - RNA, 19 nt, Artificial Sequence
  Description of Artificial Sequence: Synthetic oligonucleotide
uaaccccaauguuccuccu

SEQ ID NO: 3092490 - RNA, 19 nt, Artificial Sequence
  Description of Artificial Sequence: Synthetic oligonucleotide
uccuccucaaaugcacaua

SEQ ID NO: 3092491 - RNA, 19 nt, Artificial Sequence
  Description of Artificial Sequence: Synthetic oligonucleotide
guccacgaagaaguuucug

SEQ ID NO: 3092492 - RNA, 19 nt, Artificial Sequence
  Description of Artificial Sequence: Synthetic oligonucleotide
uugucgcuuuugauuugua

SEQ ID NO: 3092493 - RNA, 19 nt, Artificial Sequence
  Description of Artificial Sequence: Synthetic oligonucleotide
acaucuguuuuaagcuuaa

SEQ ID NO: 3092494 - RNA, 19 nt, Artificial Sequence
  Description of Artificial Sequence: Synthetic oligonucleotide
ccgaccgaaggacagagga

SEQ ID NO: 3092495 - RNA, 19 nt, Artificial Sequence
  Description of Artificial Sequence: Synthetic oligonucleotide
cuuuaccaaacaucuguuu

SEQ ID NO: 3092496 - RNA, 19 nt, Artificial Sequence
  Description of Artificial Sequence: Synthetic oligonucleotide
uccagcucuuggugauacu

SEQ ID NO: 3092497 - RNA, 19 nt, Artificial Sequence
  Description of Artificial Sequence: Synthetic oligonucleotide
gaacguauccaugucucuu

SEQ ID NO: 3092498 - RNA, 19 nt, Artificial Sequence
  Description of Artificial Sequence: Synthetic oligonucleotide
cuccucaaaugcacauaga

SEQ ID NO: 3092499 - RNA, 19 nt, Artificial Sequence
  Description of Artificial Sequence: Synthetic oligonucleotide
gcucuuggugauacucagg

SEQ ID NO: 3092500 - RNA, 19 nt, Artificial Sequence
  Description of Artificial Sequence: Synthetic oligonucleotide
ccacgaagaaguuucugaa

SEQ ID NO: 3092501 - RNA, 19 nt, Artificial Sequence
  Description of Artificial Sequence: Synthetic oligonucleotide
gccaguaucaacagguccu

SEQ ID NO: 3092502 - RNA, 19 nt, Artificial Sequence
  Description of Artificial Sequence: Synthetic oligonucleotide
ccagcucuuggugauacuc

SEQ ID NO: 3092503 - RNA, 19 nt, Artificial Sequence
  Description of Artificial Sequence: Synthetic oligonucleotide
ccucaaaugcacauagacu

SEQ ID NO: 3092504 - RNA, 19 nt, Artificial Sequence
  Description of Artificial Sequence: Synthetic oligonucleotide
cacgaagaaguuucugaau

SEQ ID NO: 3092505 - RNA, 19 nt, Artificial Sequence
  Description of Artificial Sequence: Synthetic oligonucleotide
aggacagaggagagccuga

SEQ ID NO: 3092506 - RNA, 19 nt, Artificial Sequence
  Description of Artificial Sequence: Synthetic oligonucleotide
guccacugcuguaacccca

SEQ ID NO: 3092507 - RNA, 19 nt, Artificial Sequence
  Description of Artificial Sequence: Synthetic oligonucleotide
cuccagauuguuugucgcu

SEQ ID NO: 3092508 - RNA, 19 nt, Artificial Sequence
  Description of Artificial Sequence: Synthetic oligonucleotide
gacugccgaccgaaggaca

SEQ ID NO: 3092509 - RNA, 19 nt, Artificial Sequence
  Description of Artificial Sequence: Synthetic oligonucleotide
cacauagacugccgaccga

SEQ ID NO: 3092510 - RNA, 19 nt, Artificial Sequence
  Description of Artificial Sequence: Synthetic oligonucleotide
gugauacucagggccagua

SEQ ID NO: 3092511 - RNA, 19 nt, Artificial Sequence
  Description of Artificial Sequence: Synthetic oligonucleotide
ccuuauuaaauaguccacu

SEQ ID NO: 3092512 - RNA, 19 nt, Artificial Sequence
  Description of Artificial Sequence: Synthetic oligonucleotide
cucuuaucuuguccacgaa

SEQ ID NO: 3092513 - RNA, 19 nt, Artificial Sequence
  Description of Artificial Sequence: Synthetic oligonucleotide
guccuccagauuguuuguc

SEQ ID NO: 3092514 - RNA, 19 nt, Artificial Sequence
  Description of Artificial Sequence: Synthetic oligonucleotide
ccaauguuccuccucaaau

SEQ ID NO: 3092515 - RNA, 19 nt, Artificial Sequence
  Description of Artificial Sequence: Synthetic oligonucleotide
ggaacguauccaugucucu

SEQ ID NO: 3092516 - RNA, 19 nt, Artificial Sequence
  Description of Artificial Sequence: Synthetic oligonucleotide
cgaccgaaggacagaggag

SEQ ID NO: 3092517 - RNA, 19 nt, Artificial Sequence
  Description of Artificial Sequence: Synthetic oligonucleotide
gaaugggagucaaguuccu

SEQ ID NO: 3092518 - RNA, 19 nt, Artificial Sequence
  Description of Artificial Sequence: Synthetic oligonucleotide
ccaguaucaacagguccuc

SEQ ID NO: 3092519 - RNA, 19 nt, Artificial Sequence
  Description of Artificial Sequence: Synthetic oligonucleotide
cguauccaugucucuuuac

SEQ ID NO: 3092520 - RNA, 19 nt, Artificial Sequence
  Description of Artificial Sequence: Synthetic oligonucleotide
gaaggacagaggagagccu

SEQ ID NO: 3092521 - RNA, 19 nt, Artificial Sequence
  Description of Artificial Sequence: Synthetic oligonucleotide
ccgaaggacagaggagagc

SEQ ID NO: 3092522 - RNA, 19 nt, Artificial Sequence
  Description of Artificial Sequence: Synthetic oligonucleotide
caucuguuuuaagcuuaaa

SEQ ID NO: 3092523 - RNA, 19 nt, Artificial Sequence
  Description of Artificial Sequence: Synthetic oligonucleotide
cuuguccacgaagaaguuu

SEQ ID NO: 3092524 - RNA, 19 nt, Artificial Sequence
  Description of Artificial Sequence: Synthetic oligonucleotide
gguccuccagauuguuugu

SEQ ID NO: 3092525 - RNA, 19 nt, Artificial Sequence
  Description of Artificial Sequence: Synthetic oligonucleotide
cagauuguuugucgcuuuu

SEQ ID NO: 3092526 - RNA, 19 nt, Artificial Sequence
  Description of Artificial Sequence: Synthetic oligonucleotide
ggacagaggagagccugaa

SEQ ID NO: 3092527 - RNA, 19 nt, Artificial Sequence
  Description of Artificial Sequence: Synthetic oligonucleotide
gggccaguaucaacagguc

SEQ ID NO: 3092528 - RNA, 19 nt, Artificial Sequence
  Description of Artificial Sequence: Synthetic oligonucleotide
gccgaccgaaggacagagg

SEQ ID NO: 3092529 - RNA, 19 nt, Artificial Sequence
  Description of Artificial Sequence: Synthetic oligonucleotide
cugcuguaaccccaauguu

SEQ ID NO: 3092530 - RNA, 19 nt, Artificial Sequence
  Description of Artificial Sequence: Synthetic oligonucleotide
cccaauguuccuccucaaa

SEQ ID NO: 3092531 - RNA, 19 nt, Artificial Sequence
  Description of Artificial Sequence: Synthetic oligonucleotide
cuguaaccccaauguuccu

SEQ ID NO: 3092532 - RNA, 19 nt, Artificial Sequence
  Description of Artificial Sequence: Synthetic oligonucleotide
cugaagaaucauggugaau

SEQ ID NO: 3092533 - RNA, 19 nt, Artificial Sequence
  Description of Artificial Sequence: Synthetic oligonucleotide
cugccgaccgaaggacaga

SEQ ID NO: 3092534 - RNA, 19 nt, Artificial Sequence
  Description of Artificial Sequence: Synthetic oligonucleotide
gcucucucuccagcucuug

SEQ ID NO: 3092535 - RNA, 19 nt, Artificial Sequence
  Description of Artificial Sequence: Synthetic oligonucleotide
cagguccuccagauuguuu

SEQ ID NO: 3092536 - RNA, 19 nt, Artificial Sequence
  Description of Artificial Sequence: Synthetic oligonucleotide
ggugauacucagggccagu

SEQ ID NO: 3092537 - RNA, 19 nt, Artificial Sequence
  Description of Artificial Sequence: Synthetic oligonucleotide
gggagucaaguuccuuauu

SEQ ID NO: 3092538 - RNA, 19 nt, Artificial Sequence
  Description of Artificial Sequence: Synthetic oligonucleotide
ccagauuguuugucgcuuu

SEQ ID NO: 3092539 - RNA, 19 nt, Artificial Sequence
  Description of Artificial Sequence: Synthetic oligonucleotide
cgcuuuugauuuguacucu

SEQ ID NO: 3092540 - RNA, 19 nt, Artificial Sequence
  Description of Artificial Sequence: Synthetic oligonucleotide
ccacugcuguaaccccaau

SEQ ID NO: 3092541 - RNA, 19 nt, Artificial Sequence
  Description of Artificial Sequence: Synthetic oligonucleotide
aagacaagaagaaucagcc

SEQ ID NO: 3092542 - RNA, 19 nt, Artificial Sequence
  Description of Artificial Sequence: Synthetic oligonucleotide
aagaaucgcacugagauac

SEQ ID NO: 3092543 - RNA, 19 nt, Artificial Sequence
  Description of Artificial Sequence: Synthetic oligonucleotide
agaagaaucagcccaacac

SEQ ID NO: 3092544 - RNA, 19 nt, Artificial Sequence
  Description of Artificial Sequence: Synthetic oligonucleotide
acugaguccaaucagguuc

SEQ ID NO: 3092545 - RNA, 19 nt, Artificial Sequence
  Description of Artificial Sequence: Synthetic oligonucleotide
ucaagaaucgcacugagau

SEQ ID NO: 3092546 - RNA, 19 nt, Artificial Sequence
  Description of Artificial Sequence: Synthetic oligonucleotide
aacacagccgaguucaggg

SEQ ID NO: 3092547 - RNA, 19 nt, Artificial Sequence
  Description of Artificial Sequence: Synthetic oligonucleotide
aaggucuuuacauugacau

SEQ ID NO: 3092548 - RNA, 19 nt, Artificial Sequence
  Description of Artificial Sequence: Synthetic oligonucleotide
uugacauagacucuugaug

SEQ ID NO: 3092549 - RNA, 19 nt, Artificial Sequence
  Description of Artificial Sequence: Synthetic oligonucleotide
uucaagacaagaagaauca

SEQ ID NO: 3092550 - RNA, 19 nt, Artificial Sequence
  Description of Artificial Sequence: Synthetic oligonucleotide
uuuagcauggcugaucucc

SEQ ID NO: 3092551 - RNA, 19 nt, Artificial Sequence
  Description of Artificial Sequence: Synthetic oligonucleotide
ugacauagacucuugaugu

SEQ ID NO: 3092552 - RNA, 19 nt, Artificial Sequence
  Description of Artificial Sequence: Synthetic oligonucleotide
guagaugccagucucuugg

SEQ ID NO: 3092553 - RNA, 19 nt, Artificial Sequence
  Description of Artificial Sequence: Synthetic oligonucleotide
gaagagauggaggugaugc

SEQ ID NO: 3092554 - RNA, 19 nt, Artificial Sequence
  Description of Artificial Sequence: Synthetic oligonucleotide
cuugauguguccauuguag

SEQ ID NO: 3092555 - RNA, 19 nt, Artificial Sequence
  Description of Artificial Sequence: Synthetic oligonucleotide
gauacugaguccaaucagg

SEQ ID NO: 3092556 - RNA, 19 nt, Artificial Sequence
  Description of Artificial Sequence: Synthetic oligonucleotide
aguccaaucagguucaaga

SEQ ID NO: 3092557 - RNA, 19 nt, Artificial Sequence
  Description of Artificial Sequence: Synthetic oligonucleotide
uucuccaucaagaaucgca

SEQ ID NO: 3092558 - RNA, 19 nt, Artificial Sequence
  Description of Artificial Sequence: Synthetic oligonucleotide
uguccugggguccuaaagg

SEQ ID NO: 3092559 - RNA, 19 nt, Artificial Sequence
  Description of Artificial Sequence: Synthetic oligonucleotide
cuugguacacuuuagcaug

SEQ ID NO: 3092560 - RNA, 19 nt, Artificial Sequence
  Description of Artificial Sequence: Synthetic oligonucleotide
gaaucagcccaacacagcc

SEQ ID NO: 3092561 - RNA, 19 nt, Artificial Sequence
  Description of Artificial Sequence: Synthetic oligonucleotide
uccaucaagaaucgcacug

SEQ ID NO: 3092562 - RNA, 19 nt, Artificial Sequence
  Description of Artificial Sequence: Synthetic oligonucleotide
aguccuguucucuugauca

SEQ ID NO: 3092563 - RNA, 19 nt, Artificial Sequence
  Description of Artificial Sequence: Synthetic oligonucleotide
agacaagaagaaucagccc

SEQ ID NO: 3092564 - RNA, 19 nt, Artificial Sequence
  Description of Artificial Sequence: Synthetic oligonucleotide
uacacuuuagcauggcuga

SEQ ID NO: 3092565 - RNA, 19 nt, Artificial Sequence
  Description of Artificial Sequence: Synthetic oligonucleotide
uggcugaucucccuguugg

SEQ ID NO: 3092566 - RNA, 19 nt, Artificial Sequence
  Description of Artificial Sequence: Synthetic oligonucleotide
aagaaucagcccaacacag

SEQ ID NO: 3092567 - RNA, 19 nt, Artificial Sequence
  Description of Artificial Sequence: Synthetic oligonucleotide
gaagaaucagcccaacaca

SEQ ID NO: 3092568 - RNA, 19 nt, Artificial Sequence
  Description of Artificial Sequence: Synthetic oligonucleotide
auagacucuugaugugucc

SEQ ID NO: 3092569 - RNA, 19 nt, Artificial Sequence
  Description of Artificial Sequence: Synthetic oligonucleotide
uguucucuugaucagccac

SEQ ID NO: 3092570 - RNA, 19 nt, Artificial Sequence
  Description of Artificial Sequence: Synthetic oligonucleotide
ggucuuuacauugacauag

SEQ ID NO: 3092571 - RNA, 19 nt, Artificial Sequence
  Description of Artificial Sequence: Synthetic oligonucleotide
ucuccaucaagaaucgcac

SEQ ID NO: 3092572 - RNA, 19 nt, Artificial Sequence
  Description of Artificial Sequence: Synthetic oligonucleotide
ucuugguacacuuuagcau

SEQ ID NO: 3092573 - RNA, 19 nt, Artificial Sequence
  Description of Artificial Sequence: Synthetic oligonucleotide
uucagggccaaccuaugcc

SEQ ID NO: 3092574 - RNA, 19 nt, Artificial Sequence
  Description of Artificial Sequence: Synthetic oligonucleotide
agauacugaguccaaucag

SEQ ID NO: 3092575 - RNA, 19 nt, Artificial Sequence
  Description of Artificial Sequence: Synthetic oligonucleotide
uccaaucagguucaagaca

SEQ ID NO: 3092576 - RNA, 19 nt, Artificial Sequence
  Description of Artificial Sequence: Synthetic oligonucleotide
ucucuugguacacuuuagc

SEQ ID NO: 3092577 - RNA, 19 nt, Artificial Sequence
  Description of Artificial Sequence: Synthetic oligonucleotide
gaugccagucucuugguac

SEQ ID NO: 3092578 - RNA, 19 nt, Artificial Sequence
  Description of Artificial Sequence: Synthetic oligonucleotide
acuuuagcauggcugaucu

SEQ ID NO: 3092579 - RNA, 19 nt, Artificial Sequence
  Description of Artificial Sequence: Synthetic oligonucleotide
guucaagacaagaagaauc

SEQ ID NO: 3092580 - RNA, 19 nt, Artificial Sequence
  Description of Artificial Sequence: Synthetic oligonucleotide
agugugggcacugacuggc

SEQ ID NO: 3092581 - RNA, 19 nt, Artificial Sequence
  Description of Artificial Sequence: Synthetic oligonucleotide
ucuuuacauugacauagac

SEQ ID NO: 3092582 - RNA, 19 nt, Artificial Sequence
  Description of Artificial Sequence: Synthetic oligonucleotide
aucgcacugagauacugag

SEQ ID NO: 3092583 - RNA, 19 nt, Artificial Sequence
  Description of Artificial Sequence: Synthetic oligonucleotide
uugguacacuuuagcaugg

SEQ ID NO: 3092584 - RNA, 19 nt, Artificial Sequence
  Description of Artificial Sequence: Synthetic oligonucleotide
uaaaggucuuuacauugac

SEQ ID NO: 3092585 - RNA, 19 nt, Artificial Sequence
  Description of Artificial Sequence: Synthetic oligonucleotide
ugaucagccacaccgugcu

SEQ ID NO: 3092586 - RNA, 19 nt, Artificial Sequence
  Description of Artificial Sequence: Synthetic oligonucleotide
uguugguucaguccuguuc

SEQ ID NO: 3092587 - RNA, 19 nt, Artificial Sequence
  Description of Artificial Sequence: Synthetic oligonucleotide
ugagauacugaguccaauc

SEQ ID NO: 3092588 - RNA, 19 nt, Artificial Sequence
  Description of Artificial Sequence: Synthetic oligonucleotide
aagaagaaucagcccaaca

SEQ ID NO: 3092589 - RNA, 19 nt, Artificial Sequence
  Description of Artificial Sequence: Synthetic oligonucleotide
agagauggaggugaugcac

SEQ ID NO: 3092590 - RNA, 19 nt, Artificial Sequence
  Description of Artificial Sequence: Synthetic oligonucleotide
auugacauagacucuugau

SEQ ID NO: 3092591 - RNA, 19 nt, Artificial Sequence
  Description of Artificial Sequence: Synthetic oligonucleotide
gagauacugaguccaauca

SEQ ID NO: 3092592 - RNA, 19 nt, Artificial Sequence
  Description of Artificial Sequence: Synthetic oligonucleotide
aaucagguucaagacaaga

SEQ ID NO: 3092593 - RNA, 19 nt, Artificial Sequence
  Description of Artificial Sequence: Synthetic oligonucleotide
gguuucuccaucaagaauc

SEQ ID NO: 3092594 - RNA, 19 nt, Artificial Sequence
  Description of Artificial Sequence: Synthetic oligonucleotide
aaccuaugccagugugggc

SEQ ID NO: 3092595 - RNA, 19 nt, Artificial Sequence
  Description of Artificial Sequence: Synthetic oligonucleotide
caaccuaugccaguguggg

SEQ ID NO: 3092596 - RNA, 19 nt, Artificial Sequence
  Description of Artificial Sequence: Synthetic oligonucleotide
acacuuguguccugggguc

SEQ ID NO: 3092597 - RNA, 19 nt, Artificial Sequence
  Description of Artificial Sequence: Synthetic oligonucleotide
guacacuuuagcauggcug

SEQ ID NO: 3092598 - RNA, 19 nt, Artificial Sequence
  Description of Artificial Sequence: Synthetic oligonucleotide
uuagcauggcugaucuccc

SEQ ID NO: 3092599 - RNA, 19 nt, Artificial Sequence
  Description of Artificial Sequence: Synthetic oligonucleotide
uucgauuggugguuucucc

SEQ ID NO: 3092600 - RNA, 19 nt, Artificial Sequence
  Description of Artificial Sequence: Synthetic oligonucleotide
ucccuguugguucaguccu

SEQ ID NO: 3092601 - RNA, 19 nt, Artificial Sequence
  Description of Artificial Sequence: Synthetic oligonucleotide
uugaucagccacaccgugc

SEQ ID NO: 3092602 - RNA, 19 nt, Artificial Sequence
  Description of Artificial Sequence: Synthetic oligonucleotide
ucagggccaaccuaugcca

SEQ ID NO: 3092603 - RNA, 19 nt, Artificial Sequence
  Description of Artificial Sequence: Synthetic oligonucleotide
auuggugguuucuccauca

SEQ ID NO: 3092604 - RNA, 19 nt, Artificial Sequence
  Description of Artificial Sequence: Synthetic oligonucleotide
aagagauggaggugaugca

SEQ ID NO: 3092605 - RNA, 19 nt, Artificial Sequence
  Description of Artificial Sequence: Synthetic oligonucleotide
ucaagacaagaagaaucag

SEQ ID NO: 3092606 - RNA, 19 nt, Artificial Sequence
  Description of Artificial Sequence: Synthetic oligonucleotide
uuacauugacauagacucu

SEQ ID NO: 3092607 - RNA, 19 nt, Artificial Sequence
  Description of Artificial Sequence: Synthetic oligonucleotide
uggugguuucuccaucaag

SEQ ID NO: 3092608 - RNA, 19 nt, Artificial Sequence
  Description of Artificial Sequence: Synthetic oligonucleotide
gacauagacucuugaugug

SEQ ID NO: 3092609 - RNA, 19 nt, Artificial Sequence
  Description of Artificial Sequence: Synthetic oligonucleotide
acucuugauguguccauug

SEQ ID NO: 3092610 - RNA, 19 nt, Artificial Sequence
  Description of Artificial Sequence: Synthetic oligonucleotide
agccacaccgugcuuuucg

SEQ ID NO: 3092611 - RNA, 19 nt, Artificial Sequence
  Description of Artificial Sequence: Synthetic oligonucleotide
aaucagcccaacacagccg

SEQ ID NO: 3092612 - RNA, 19 nt, Artificial Sequence
  Description of Artificial Sequence: Synthetic oligonucleotide
acaccgugcuuuucgauug

SEQ ID NO: 3092613 - RNA, 19 nt, Artificial Sequence
  Description of Artificial Sequence: Synthetic oligonucleotide
ucuugaucagccacaccgu

SEQ ID NO: 3092614 - RNA, 19 nt, Artificial Sequence
  Description of Artificial Sequence: Synthetic oligonucleotide
acacagccgaguucagggc

SEQ ID NO: 3092615 - RNA, 19 nt, Artificial Sequence
  Description of Artificial Sequence: Synthetic oligonucleotide
ccuaaaggucuuuacauug

SEQ ID NO: 3092616 - RNA, 19 nt, Artificial Sequence
  Description of Artificial Sequence: Synthetic oligonucleotide
ucuugauguguccauugua

SEQ ID NO: 3092617 - RNA, 19 nt, Artificial Sequence
  Description of Artificial Sequence: Synthetic oligonucleotide
guuucuccaucaagaaucg

SEQ ID NO: 3092618 - RNA, 19 nt, Artificial Sequence
  Description of Artificial Sequence: Synthetic oligonucleotide
ucgauuggugguuucucca

SEQ ID NO: 3092619 - RNA, 19 nt, Artificial Sequence
  Description of Artificial Sequence: Synthetic oligonucleotide
agaaucagcccaacacagc

SEQ ID NO: 3092620 - RNA, 19 nt, Artificial Sequence
  Description of Artificial Sequence: Synthetic oligonucleotide
uacauugacauagacucuu

SEQ ID NO: 3092621 - RNA, 19 nt, Artificial Sequence
  Description of Artificial Sequence: Synthetic oligonucleotide
aaaggucuuuacauugaca

SEQ ID NO: 3092622 - RNA, 19 nt, Artificial Sequence
  Description of Artificial Sequence: Synthetic oligonucleotide
uguagaugccagucucuug

SEQ ID NO: 3092623 - RNA, 19 nt, Artificial Sequence
  Description of Artificial Sequence: Synthetic oligonucleotide
cucuugguacacuuuagca

SEQ ID NO: 3092624 - RNA, 19 nt, Artificial Sequence
  Description of Artificial Sequence: Synthetic oligonucleotide
aucagcccaacacagccga

SEQ ID NO: 3092625 - RNA, 19 nt, Artificial Sequence
  Description of Artificial Sequence: Synthetic oligonucleotide
accuaugccagugugggca

SEQ ID NO: 3092626 - RNA, 19 nt, Artificial Sequence
  Description of Artificial Sequence: Synthetic oligonucleotide
caucaagaaucgcacugag

SEQ ID NO: 3092627 - RNA, 19 nt, Artificial Sequence
  Description of Artificial Sequence: Synthetic oligonucleotide
uagacucuugaugugucca

SEQ ID NO: 3092628 - RNA, 19 nt, Artificial Sequence
  Description of Artificial Sequence: Synthetic oligonucleotide
gugaugcacacuugugucc

SEQ ID NO: 3092629 - RNA, 19 nt, Artificial Sequence
  Description of Artificial Sequence: Synthetic oligonucleotide
cauagacucuugauguguc

SEQ ID NO: 3092630 - RNA, 19 nt, Artificial Sequence
  Description of Artificial Sequence: Synthetic oligonucleotide
cugaucucccuguugguuc

SEQ ID NO: 3092631 - RNA, 19 nt, Artificial Sequence
  Description of Artificial Sequence: Synthetic oligonucleotide
cuaaaggucuuuacauuga

SEQ ID NO: 3092632 - RNA, 19 nt, Artificial Sequence
  Description of Artificial Sequence: Synthetic oligonucleotide
uuuucgauuggugguuucu

SEQ ID NO: 3092633 - RNA, 19 nt, Artificial Sequence
  Description of Artificial Sequence: Synthetic oligonucleotide
agucucuugguacacuuua

SEQ ID NO: 3092634 - RNA, 19 nt, Artificial Sequence
  Description of Artificial Sequence: Synthetic oligonucleotide
guugguucaguccuguucu

SEQ ID NO: 3092635 - RNA, 19 nt, Artificial Sequence
  Description of Artificial Sequence: Synthetic oligonucleotide
acauagacucuugaugugu

SEQ ID NO: 3092636 - RNA, 19 nt, Artificial Sequence
  Description of Artificial Sequence: Synthetic oligonucleotide
cucccuguugguucagucc

SEQ ID NO: 3092637 - RNA, 19 nt, Artificial Sequence
  Description of Artificial Sequence: Synthetic oligonucleotide
ugaugcacacuuguguccu

SEQ ID NO: 3092638 - RNA, 19 nt, Artificial Sequence
  Description of Artificial Sequence: Synthetic oligonucleotide
uccuaaaggucuuuacauu

SEQ ID NO: 3092639 - RNA, 19 nt, Artificial Sequence
  Description of Artificial Sequence: Synthetic oligonucleotide
ugguuucuccaucaagaau

SEQ ID NO: 3092640 - RNA, 19 nt, Artificial Sequence
  Description of Artificial Sequence: Synthetic oligonucleotide
cuugaucagccacaccgug

SEQ ID NO: 3092641 - RNA, 19 nt, Artificial Sequence
  Description of Artificial Sequence: Synthetic oligonucleotide
cgugcuuuucgauuggugg

SEQ ID NO: 3092642 - RNA, 19 nt, Artificial Sequence
  Description of Artificial Sequence: Synthetic oligonucleotide
ugaucucccuguugguuca

SEQ ID NO: 3092643 - RNA, 19 nt, Artificial Sequence
  Description of Artificial Sequence: Synthetic oligonucleotide
ugcacacuuguguccuggg

SEQ ID NO: 3092644 - RNA, 19 nt, Artificial Sequence
  Description of Artificial Sequence: Synthetic oligonucleotide
aaucgcacugagauacuga

SEQ ID NO: 3092645 - RNA, 19 nt, Artificial Sequence
  Description of Artificial Sequence: Synthetic oligonucleotide
gaaucgcacugagauacug

SEQ ID NO: 3092646 - RNA, 19 nt, Artificial Sequence
  Description of Artificial Sequence: Synthetic oligonucleotide
cacagccgaguucagggcc

SEQ ID NO: 3092647 - RNA, 19 nt, Artificial Sequence
  Description of Artificial Sequence: Synthetic oligonucleotide
ggugaugcacacuuguguc

SEQ ID NO: 3092648 - RNA, 19 nt, Artificial Sequence
  Description of Artificial Sequence: Synthetic oligonucleotide
gauuggugguuucuccauc

SEQ ID NO: 3092649 - RNA, 19 nt, Artificial Sequence
  Description of Artificial Sequence: Synthetic oligonucleotide
agcauggcugaucucccug

SEQ ID NO: 3092650 - RNA, 19 nt, Artificial Sequence
  Description of Artificial Sequence: Synthetic oligonucleotide
ggugguuucuccaucaaga

SEQ ID NO: 3092651 - RNA, 19 nt, Artificial Sequence
  Description of Artificial Sequence: Synthetic oligonucleotide
cacugacuggcaucugggg

SEQ ID NO: 3092652 - RNA, 19 nt, Artificial Sequence
  Description of Artificial Sequence: Synthetic oligonucleotide
ggcacugacuggcaucugg

SEQ ID NO: 3092653 - RNA, 19 nt, Artificial Sequence
  Description of Artificial Sequence: Synthetic oligonucleotide
uccuguucucuugaucagc

SEQ ID NO: 3092654 - RNA, 19 nt, Artificial Sequence
  Description of Artificial Sequence: Synthetic oligonucleotide
guucagggccaaccuaugc

SEQ ID NO: 3092655 - RNA, 19 nt, Artificial Sequence
  Description of Artificial Sequence: Synthetic oligonucleotide
guucaguccuguucucuug

SEQ ID NO: 3092656 - RNA, 19 nt, Artificial Sequence
  Description of Artificial Sequence: Synthetic oligonucleotide
guguccugggguccuaaag

SEQ ID NO: 3092657 - RNA, 19 nt, Artificial Sequence
  Description of Artificial Sequence: Synthetic oligonucleotide
aucagguucaagacaagaa

SEQ ID NO: 3092658 - RNA, 19 nt, Artificial Sequence
  Description of Artificial Sequence: Synthetic oligonucleotide
gguccuaaaggucuuuaca

SEQ ID NO: 3092659 - RNA, 19 nt, Artificial Sequence
  Description of Artificial Sequence: Synthetic oligonucleotide
uucucuugaucagccacac

SEQ ID NO: 3092660 - RNA, 19 nt, Artificial Sequence
  Description of Artificial Sequence: Synthetic oligonucleotide
auacugaguccaaucaggu

SEQ ID NO: 3092661 - RNA, 19 nt, Artificial Sequence
  Description of Artificial Sequence: Synthetic oligonucleotide
ccuguucucuugaucagcc

SEQ ID NO: 3092662 - RNA, 19 nt, Artificial Sequence
  Description of Artificial Sequence: Synthetic oligonucleotide
augccagucucuugguaca

SEQ ID NO: 3092663 - RNA, 19 nt, Artificial Sequence
  Description of Artificial Sequence: Synthetic oligonucleotide
uuucgauuggugguuucuc

SEQ ID NO: 3092664 - RNA, 19 nt, Artificial Sequence
  Description of Artificial Sequence: Synthetic oligonucleotide
ucucuugaucagccacacc

SEQ ID NO: 3092665 - RNA, 19 nt, Artificial Sequence
  Description of Artificial Sequence: Synthetic oligonucleotide
agguucaagacaagaagaa

SEQ ID NO: 3092666 - RNA, 19 nt, Artificial Sequence
  Description of Artificial Sequence: Synthetic oligonucleotide
ugggcacugacuggcaucu

SEQ ID NO: 3092667 - RNA, 19 nt, Artificial Sequence
  Description of Artificial Sequence: Synthetic oligonucleotide
guccuaaaggucuuuacau

SEQ ID NO: 3092668 - RNA, 19 nt, Artificial Sequence
  Description of Artificial Sequence: Synthetic oligonucleotide
uggaggugaugcacacuug

SEQ ID NO: 3092669 - RNA, 19 nt, Artificial Sequence
  Description of Artificial Sequence: Synthetic oligonucleotide
auggcugaucucccuguug

SEQ ID NO: 3092670 - RNA, 19 nt, Artificial Sequence
  Description of Artificial Sequence: Synthetic oligonucleotide
augcacacuuguguccugg

SEQ ID NO: 3092671 - RNA, 19 nt, Artificial Sequence
  Description of Artificial Sequence: Synthetic oligonucleotide
ccaaucagguucaagacaa

SEQ ID NO: 3092672 - RNA, 19 nt, Artificial Sequence
  Description of Artificial Sequence: Synthetic oligonucleotide
gaggugaugcacacuugug

SEQ ID NO: 3092673 - RNA, 19 nt, Artificial Sequence
  Description of Artificial Sequence: Synthetic oligonucleotide
uaugccagugugggcacug

SEQ ID NO: 3092674 - RNA, 19 nt, Artificial Sequence
  Description of Artificial Sequence: Synthetic oligonucleotide
cgcacugagauacugaguc

SEQ ID NO: 3092675 - RNA, 19 nt, Artificial Sequence
  Description of Artificial Sequence: Synthetic oligonucleotide
ucucccuguugguucaguc

SEQ ID NO: 3092676 - RNA, 19 nt, Artificial Sequence
  Description of Artificial Sequence: Synthetic oligonucleotide
caaucagguucaagacaag

SEQ ID NO: 3092677 - RNA, 19 nt, Artificial Sequence
  Description of Artificial Sequence: Synthetic oligonucleotide
cacugagauacugagucca

SEQ ID NO: 3092678 - RNA, 19 nt, Artificial Sequence
  Description of Artificial Sequence: Synthetic oligonucleotide
ccaaccuaugccagugugg

SEQ ID NO: 3092679 - RNA, 19 nt, Artificial Sequence
  Description of Artificial Sequence: Synthetic oligonucleotide
guccuguucucuugaucag

SEQ ID NO: 3092680 - RNA, 19 nt, Artificial Sequence
  Description of Artificial Sequence: Synthetic oligonucleotide
cauugacauagacucuuga

SEQ ID NO: 3092681 - RNA, 19 nt, Artificial Sequence
  Description of Artificial Sequence: Synthetic oligonucleotide
ucgcacugagauacugagu

SEQ ID NO: 3092682 - RNA, 19 nt, Artificial Sequence
  Description of Artificial Sequence: Synthetic oligonucleotide
acaagaagaaucagcccaa

SEQ ID NO: 3092683 - RNA, 19 nt, Artificial Sequence
  Description of Artificial Sequence: Synthetic oligonucleotide
agacucuugauguguccau

SEQ ID NO: 3092684 - RNA, 19 nt, Artificial Sequence
  Description of Artificial Sequence: Synthetic oligonucleotide
gucucuugguacacuuuag

SEQ ID NO: 3092685 - RNA, 19 nt, Artificial Sequence
  Description of Artificial Sequence: Synthetic oligonucleotide
ccagugugggcacugacug

SEQ ID NO: 3092686 - RNA, 19 nt, Artificial Sequence
  Description of Artificial Sequence: Synthetic oligonucleotide
ugugggcacugacuggcau

SEQ ID NO: 3092687 - RNA, 19 nt, Artificial Sequence
  Description of Artificial Sequence: Synthetic oligonucleotide
cuuuucgauuggugguuuc

SEQ ID NO: 3092688 - RNA, 19 nt, Artificial Sequence
  Description of Artificial Sequence: Synthetic oligonucleotide
uacugaguccaaucagguu

SEQ ID NO: 3092689 - RNA, 19 nt, Artificial Sequence
  Description of Artificial Sequence: Synthetic oligonucleotide
uccugggguccuaaagguc

SEQ ID NO: 3092690 - RNA, 19 nt, Artificial Sequence
  Description of Artificial Sequence: Synthetic oligonucleotide
uagaugccagucucuuggu

SEQ ID NO: 3092691 - RNA, 19 nt, Artificial Sequence
  Description of Artificial Sequence: Synthetic oligonucleotide
cagugugggcacugacugg

SEQ ID NO: 3092692 - RNA, 19 nt, Artificial Sequence
  Description of Artificial Sequence: Synthetic oligonucleotide
gaguccaaucagguucaag

SEQ ID NO: 3092693 - RNA, 19 nt, Artificial Sequence
  Description of Artificial Sequence: Synthetic oligonucleotide
uuggugguuucuccaucaa

SEQ ID NO: 3092694 - RNA, 19 nt, Artificial Sequence
  Description of Artificial Sequence: Synthetic oligonucleotide
aggucuuuacauugacaua

SEQ ID NO: 3092695 - RNA, 19 nt, Artificial Sequence
  Description of Artificial Sequence: Synthetic oligonucleotide
gaugcacacuuguguccug

SEQ ID NO: 3092696 - RNA, 19 nt, Artificial Sequence
  Description of Artificial Sequence: Synthetic oligonucleotide
ugcuuuucgauuggugguu

SEQ ID NO: 3092697 - RNA, 19 nt, Artificial Sequence
  Description of Artificial Sequence: Synthetic oligonucleotide
ugguucaguccuguucucu

SEQ ID NO: 3092698 - RNA, 19 nt, Artificial Sequence
  Description of Artificial Sequence: Synthetic oligonucleotide
guucucuugaucagccaca

SEQ ID NO: 3092699 - RNA, 19 nt, Artificial Sequence
  Description of Artificial Sequence: Synthetic oligonucleotide
ucagcccaacacagccgag

SEQ ID NO: 3092700 - RNA, 19 nt, Artificial Sequence
  Description of Artificial Sequence: Synthetic oligonucleotide
acauugacauagacucuug

SEQ ID NO: 3092701 - RNA, 19 nt, Artificial Sequence
  Description of Artificial Sequence: Synthetic oligonucleotide
cacuuuagcauggcugauc

SEQ ID NO: 3092702 - RNA, 19 nt, Artificial Sequence
  Description of Artificial Sequence: Synthetic oligonucleotide
aucaagaaucgcacugaga

SEQ ID NO: 3092703 - RNA, 19 nt, Artificial Sequence
  Description of Artificial Sequence: Synthetic oligonucleotide
cagggccaaccuaugccag

SEQ ID NO: 3092704 - RNA, 19 nt, Artificial Sequence
  Description of Artificial Sequence: Synthetic oligonucleotide
caagaagaaucagcccaac

SEQ ID NO: 3092705 - RNA, 19 nt, Artificial Sequence
  Description of Artificial Sequence: Synthetic oligonucleotide
ugguacacuuuagcauggc

SEQ ID NO: 3092706 - RNA, 19 nt, Artificial Sequence
  Description of Artificial Sequence: Synthetic oligonucleotide
gcacacuuguguccugggg

SEQ ID NO: 3092707 - RNA, 19 nt, Artificial Sequence
  Description of Artificial Sequence: Synthetic oligonucleotide
ugccagugugggcacugac

SEQ ID NO: 3092708 - RNA, 19 nt, Artificial Sequence
  Description of Artificial Sequence: Synthetic oligonucleotide
ggggaagagauggagguga

SEQ ID NO: 3092709 - RNA, 19 nt, Artificial Sequence
  Description of Artificial Sequence: Synthetic oligonucleotide
gugcuuuucgauugguggu

SEQ ID NO: 3092710 - RNA, 19 nt, Artificial Sequence
  Description of Artificial Sequence: Synthetic oligonucleotide
ucaguccuguucucuugau

SEQ ID NO: 3092711 - RNA, 19 nt, Artificial Sequence
  Description of Artificial Sequence: Synthetic oligonucleotide
uagcauggcugaucucccu

SEQ ID NO: 3092712 - RNA, 19 nt, Artificial Sequence
  Description of Artificial Sequence: Synthetic oligonucleotide
cacacuuguguccuggggu

SEQ ID NO: 3092713 - RNA, 19 nt, Artificial Sequence
  Description of Artificial Sequence: Synthetic oligonucleotide
agcccaacacagccgaguu

SEQ ID NO: 3092714 - RNA, 19 nt, Artificial Sequence
  Description of Artificial Sequence: Synthetic oligonucleotide
caguccuguucucuugauc

SEQ ID NO: 3092715 - RNA, 19 nt, Artificial Sequence
  Description of Artificial Sequence: Synthetic oligonucleotide
aucagccacaccgugcuuu

SEQ ID NO: 3092716 - RNA, 19 nt, Artificial Sequence
  Description of Artificial Sequence: Synthetic oligonucleotide
cuuuagcauggcugaucuc

SEQ ID NO: 3092717 - RNA, 19 nt, Artificial Sequence
  Description of Artificial Sequence: Synthetic oligonucleotide
ucagccacaccgugcuuuu

SEQ ID NO: 3092718 - RNA, 19 nt, Artificial Sequence
  Description of Artificial Sequence: Synthetic oligonucleotide
caccgugcuuuucgauugg

SEQ ID NO: 3092719 - RNA, 19 nt, Artificial Sequence
  Description of Artificial Sequence: Synthetic oligonucleotide
agaugccagucucuuggua

SEQ ID NO: 3092720 - RNA, 19 nt, Artificial Sequence
  Description of Artificial Sequence: Synthetic oligonucleotide
uugguucaguccuguucuc

SEQ ID NO: 3092721 - RNA, 19 nt, Artificial Sequence
  Description of Artificial Sequence: Synthetic oligonucleotide
gcacugacuggcaucuggg

SEQ ID NO: 3092722 - RNA, 19 nt, Artificial Sequence
  Description of Artificial Sequence: Synthetic oligonucleotide
caagaaucgcacugagaua

SEQ ID NO: 3092723 - RNA, 19 nt, Artificial Sequence
  Description of Artificial Sequence: Synthetic oligonucleotide
gcacugagauacugagucc

SEQ ID NO: 3092724 - RNA, 19 nt, Artificial Sequence
  Description of Artificial Sequence: Synthetic oligonucleotide
uguguccugggguccuaaa

SEQ ID NO: 3092725 - RNA, 19 nt, Artificial Sequence
  Description of Artificial Sequence: Synthetic oligonucleotide
gaguucagggccaaccuau

SEQ ID NO: 3092726 - RNA, 19 nt, Artificial Sequence
  Description of Artificial Sequence: Synthetic oligonucleotide
ggguccuaaaggucuuuac

SEQ ID NO: 3092727 - RNA, 19 nt, Artificial Sequence
  Description of Artificial Sequence: Synthetic oligonucleotide
gucuuuacauugacauaga

SEQ ID NO: 3092728 - RNA, 19 nt, Artificial Sequence
  Description of Artificial Sequence: Synthetic oligonucleotide
aguucagggccaaccuaug

SEQ ID NO: 3092729 - RNA, 19 nt, Artificial Sequence
  Description of Artificial Sequence: Synthetic oligonucleotide
ggaggugaugcacacuugu

SEQ ID NO: 3092730 - RNA, 19 nt, Artificial Sequence
  Description of Artificial Sequence: Synthetic oligonucleotide
guccugggguccuaaaggu

SEQ ID NO: 3092731 - RNA, 19 nt, Artificial Sequence
  Description of Artificial Sequence: Synthetic oligonucleotide
gccgaguucagggccaacc

SEQ ID NO: 3092732 - RNA, 19 nt, Artificial Sequence
  Description of Artificial Sequence: Synthetic oligonucleotide
cuguucucuugaucagcca

SEQ ID NO: 3092733 - RNA, 19 nt, Artificial Sequence
  Description of Artificial Sequence: Synthetic oligonucleotide
acugagauacugaguccaa

SEQ ID NO: 3092734 - RNA, 19 nt, Artificial Sequence
  Description of Artificial Sequence: Synthetic oligonucleotide
ugccagucucuugguacac

SEQ ID NO: 3092735 - RNA, 19 nt, Artificial Sequence
  Description of Artificial Sequence: Synthetic oligonucleotide
agaaucgcacugagauacu

SEQ ID NO: 3092736 - RNA, 19 nt, Artificial Sequence
  Description of Artificial Sequence: Synthetic oligonucleotide
gguacacuuuagcauggcu

SEQ ID NO: 3092737 - RNA, 19 nt, Artificial Sequence
  Description of Artificial Sequence: Synthetic oligonucleotide
gaucucccuguugguucag

SEQ ID NO: 3092738 - RNA, 19 nt, Artificial Sequence
  Description of Artificial Sequence: Synthetic oligonucleotide
acacuuuagcauggcugau

SEQ ID NO: 3092739 - RNA, 19 nt, Artificial Sequence
  Description of Artificial Sequence: Synthetic oligonucleotide
accgugcuuuucgauuggu

SEQ ID NO: 3092740 - RNA, 19 nt, Artificial Sequence
  Description of Artificial Sequence: Synthetic oligonucleotide
cacaccgugcuuuucgauu

SEQ ID NO: 3092741 - RNA, 19 nt, Artificial Sequence
  Description of Artificial Sequence: Synthetic oligonucleotide
uuguguccugggguccuaa

SEQ ID NO: 3092742 - RNA, 19 nt, Artificial Sequence
  Description of Artificial Sequence: Synthetic oligonucleotide
ccugggguccuaaaggucu

SEQ ID NO: 3092743 - RNA, 19 nt, Artificial Sequence
  Description of Artificial Sequence: Synthetic oligonucleotide
ccgugcuuuucgauuggug

SEQ ID NO: 3092744 - RNA, 19 nt, Artificial Sequence
  Description of Artificial Sequence: Synthetic oligonucleotide
cuccaucaagaaucgcacu

SEQ ID NO: 3092745 - RNA, 19 nt, Artificial Sequence
  Description of Artificial Sequence: Synthetic oligonucleotide
ccuaugccagugugggcac

SEQ ID NO: 3092746 - RNA, 19 nt, Artificial Sequence
  Description of Artificial Sequence: Synthetic oligonucleotide
ccaucaagaaucgcacuga

SEQ ID NO: 3092747 - RNA, 19 nt, Artificial Sequence
  Description of Artificial Sequence: Synthetic oligonucleotide
ugaguccaaucagguucaa

SEQ ID NO: 3092748 - RNA, 19 nt, Artificial Sequence
  Description of Artificial Sequence: Synthetic oligonucleotide
aucucccuguugguucagu

SEQ ID NO: 3092749 - RNA, 19 nt, Artificial Sequence
  Description of Artificial Sequence: Synthetic oligonucleotide
agccgaguucagggccaac

SEQ ID NO: 3092750 - RNA, 19 nt, Artificial Sequence
  Description of Artificial Sequence: Synthetic oligonucleotide
gguucaguccuguucucuu

SEQ ID NO: 3092751 - RNA, 19 nt, Artificial Sequence
  Description of Artificial Sequence: Synthetic oligonucleotide
gccacaccgugcuuuucga

SEQ ID NO: 3092752 - RNA, 19 nt, Artificial Sequence
  Description of Artificial Sequence: Synthetic oligonucleotide
augccagugugggcacuga

SEQ ID NO: 3092753 - RNA, 19 nt, Artificial Sequence
  Description of Artificial Sequence: Synthetic oligonucleotide
ugggguccuaaaggucuuu

SEQ ID NO: 3092754 - RNA, 19 nt, Artificial Sequence
  Description of Artificial Sequence: Synthetic oligonucleotide
guguagaugccagucucuu

SEQ ID NO: 3092755 - RNA, 19 nt, Artificial Sequence
  Description of Artificial Sequence: Synthetic oligonucleotide
cugagauacugaguccaau

SEQ ID NO: 3092756 - RNA, 19 nt, Artificial Sequence
  Description of Artificial Sequence: Synthetic oligonucleotide
cccuguugguucaguccug

SEQ ID NO: 3092757 - RNA, 19 nt, Artificial Sequence
  Description of Artificial Sequence: Synthetic oligonucleotide
gcccaacacagccgaguuc

SEQ ID NO: 3092758 - RNA, 19 nt, Artificial Sequence
  Description of Artificial Sequence: Synthetic oligonucleotide
gugugggcacugacuggca

SEQ ID NO: 3092759 - RNA, 19 nt, Artificial Sequence
  Description of Artificial Sequence: Synthetic oligonucleotide
cagcccaacacagccgagu

SEQ ID NO: 3092760 - RNA, 19 nt, Artificial Sequence
  Description of Artificial Sequence: Synthetic oligonucleotide
cagucucuugguacacuuu

SEQ ID NO: 3092761 - RNA, 19 nt, Artificial Sequence
  Description of Artificial Sequence: Synthetic oligonucleotide
gccagugugggcacugacu

SEQ ID NO: 3092762 - RNA, 19 nt, Artificial Sequence
  Description of Artificial Sequence: Synthetic oligonucleotide
cauggcugaucucccuguu

SEQ ID NO: 3092763 - RNA, 19 nt, Artificial Sequence
  Description of Artificial Sequence: Synthetic oligonucleotide
gaucagccacaccgugcuu

SEQ ID NO: 3092764 - RNA, 19 nt, Artificial Sequence
  Description of Artificial Sequence: Synthetic oligonucleotide
cagccacaccgugcuuuuc

SEQ ID NO: 3092765 - RNA, 19 nt, Artificial Sequence
  Description of Artificial Sequence: Synthetic oligonucleotide
ggcugaucucccuguuggu

SEQ ID NO: 3092766 - RNA, 19 nt, Artificial Sequence
  Description of Artificial Sequence: Synthetic oligonucleotide
ccagucucuugguacacuu

SEQ ID NO: 3092767 - RNA, 19 nt, Artificial Sequence
  Description of Artificial Sequence: Synthetic oligonucleotide
gcugaucucccuguugguu

SEQ ID NO: 3092768 - RNA, 19 nt, Artificial Sequence
  Description of Artificial Sequence: Synthetic oligonucleotide
cugggguccuaaaggucuu

SEQ ID NO: 3092769 - RNA, 19 nt, Artificial Sequence
  Description of Artificial Sequence: Synthetic oligonucleotide
ccgaguucagggccaaccu

SEQ ID NO: 3092770 - RNA, 19 nt, Artificial Sequence
  Description of Artificial Sequence: Synthetic oligonucleotide
cuuguguccugggguccua

SEQ ID NO: 3092771 - RNA, 19 nt, Artificial Sequence
  Description of Artificial Sequence: Synthetic oligonucleotide
cuguugguucaguccuguu

SEQ ID NO: 3092772 - RNA, 19 nt, Artificial Sequence
  Description of Artificial Sequence: Synthetic oligonucleotide
ggccaaccuaugccagugu

SEQ ID NO: 3092773 - RNA, 19 nt, Artificial Sequence
  Description of Artificial Sequence: Synthetic oligonucleotide
cgaguucagggccaaccua

SEQ ID NO: 3092774 - RNA, 19 nt, Artificial Sequence
  Description of Artificial Sequence: Synthetic oligonucleotide
cuaugccagugugggcacu

SEQ ID NO: 3092775 - RNA, 19 nt, Artificial Sequence
  Description of Artificial Sequence: Synthetic oligonucleotide
gcuuuucgauuggugguuu

SEQ ID NO: 3092776 - RNA, 19 nt, Artificial Sequence
  Description of Artificial Sequence: Synthetic oligonucleotide
ccuguugguucaguccugu

SEQ ID NO: 3092777 - RNA, 19 nt, Artificial Sequence
  Description of Artificial Sequence: Synthetic oligonucleotide
cgauuggugguuucuccau

SEQ ID NO: 3092778 - RNA, 19 nt, Artificial Sequence
  Description of Artificial Sequence: Synthetic oligonucleotide
cagccgaguucagggccaa

SEQ ID NO: 3092779 - RNA, 19 nt, Artificial Sequence
  Description of Artificial Sequence: Synthetic oligonucleotide
gggcacugacuggcaucug

SEQ ID NO: 3092780 - RNA, 19 nt, Artificial Sequence
  Description of Artificial Sequence: Synthetic oligonucleotide
gccagucucuugguacacu

SEQ ID NO: 3092781 - RNA, 19 nt, Artificial Sequence
  Description of Artificial Sequence: Synthetic oligonucleotide
ccacaccgugcuuuucgau

SEQ ID NO: 3092782 - RNA, 19 nt, Artificial Sequence
  Description of Artificial Sequence: Synthetic oligonucleotide
uuuaauuccuacaaaacca

SEQ ID NO: 3092783 - RNA, 19 nt, Artificial Sequence
  Description of Artificial Sequence: Synthetic oligonucleotide
cuuuaauuccuacaaaacc

SEQ ID NO: 3092784 - RNA, 19 nt, Artificial Sequence
  Description of Artificial Sequence: Synthetic oligonucleotide
aaaccaggccuauugaggg

SEQ ID NO: 3092785 - RNA, 19 nt, Artificial Sequence
  Description of Artificial Sequence: Synthetic oligonucleotide
uacuguaccacuuuaauuc

SEQ ID NO: 3092786 - RNA, 19 nt, Artificial Sequence
  Description of Artificial Sequence: Synthetic oligonucleotide
auuccuacaaaaccaggcc

SEQ ID NO: 3092787 - RNA, 19 nt, Artificial Sequence
  Description of Artificial Sequence: Synthetic oligonucleotide
uuaauuccuacaaaaccag

SEQ ID NO: 3092788 - RNA, 19 nt, Artificial Sequence
  Description of Artificial Sequence: Synthetic oligonucleotide
uacaaaaccaggccuauug

SEQ ID NO: 3092789 - RNA, 19 nt, Artificial Sequence
  Description of Artificial Sequence: Synthetic oligonucleotide
aguacacccagccaucacc

SEQ ID NO: 3092790 - RNA, 19 nt, Artificial Sequence
  Description of Artificial Sequence: Synthetic oligonucleotide
uccgggaugaaguacuugg

SEQ ID NO: 3092791 - RNA, 19 nt, Artificial Sequence
  Description of Artificial Sequence: Synthetic oligonucleotide
aaaaccaggccuauugagg

SEQ ID NO: 3092792 - RNA, 19 nt, Artificial Sequence
  Description of Artificial Sequence: Synthetic oligonucleotide
uaaugagugacuucuugcc

SEQ ID NO: 3092793 - RNA, 19 nt, Artificial Sequence
  Description of Artificial Sequence: Synthetic oligonucleotide
acuguaccacuuuaauucc

SEQ ID NO: 3092794 - RNA, 19 nt, Artificial Sequence
  Description of Artificial Sequence: Synthetic oligonucleotide
uugaaguacacccagccau

SEQ ID NO: 3092795 - RNA, 19 nt, Artificial Sequence
  Description of Artificial Sequence: Synthetic oligonucleotide
cagugugucuuccagaggg

SEQ ID NO: 3092796 - RNA, 19 nt, Artificial Sequence
  Description of Artificial Sequence: Synthetic oligonucleotide
uaauuccuacaaaaccagg

SEQ ID NO: 3092797 - RNA, 19 nt, Artificial Sequence
  Description of Artificial Sequence: Synthetic oligonucleotide
aucagugugucuuccagag

SEQ ID NO: 3092798 - RNA, 19 nt, Artificial Sequence
  Description of Artificial Sequence: Synthetic oligonucleotide
aaugagugacuucuugcca

SEQ ID NO: 3092799 - RNA, 19 nt, Artificial Sequence
  Description of Artificial Sequence: Synthetic oligonucleotide
uucuccagaggccugagcu

SEQ ID NO: 3092800 - RNA, 19 nt, Artificial Sequence
  Description of Artificial Sequence: Synthetic oligonucleotide
guaaugagugacuucuugc

SEQ ID NO: 3092801 - RNA, 19 nt, Artificial Sequence
  Description of Artificial Sequence: Synthetic oligonucleotide
aguaaugagugacuucuug

SEQ ID NO: 3092802 - RNA, 19 nt, Artificial Sequence
  Description of Artificial Sequence: Synthetic oligonucleotide
aucgauguccccaagccgc

SEQ ID NO: 3092803 - RNA, 19 nt, Artificial Sequence
  Description of Artificial Sequence: Synthetic oligonucleotide
aguacuugggcugccaugg

SEQ ID NO: 3092804 - RNA, 19 nt, Artificial Sequence
  Description of Artificial Sequence: Synthetic oligonucleotide
accacuuuaauuccuacaa

SEQ ID NO: 3092805 - RNA, 19 nt, Artificial Sequence
  Description of Artificial Sequence: Synthetic oligonucleotide
augagugacuucuugccag

SEQ ID NO: 3092806 - RNA, 19 nt, Artificial Sequence
  Description of Artificial Sequence: Synthetic oligonucleotide
ugcaccuccacccaucagu

SEQ ID NO: 3092807 - RNA, 19 nt, Artificial Sequence
  Description of Artificial Sequence: Synthetic oligonucleotide
uuccuacaaaaccaggccu

SEQ ID NO: 3092808 - RNA, 19 nt, Artificial Sequence
  Description of Artificial Sequence: Synthetic oligonucleotide
caaaaccaggccuauugag

SEQ ID NO: 3092809 - RNA, 19 nt, Artificial Sequence
  Description of Artificial Sequence: Synthetic oligonucleotide
aaccaggccuauugagggc

SEQ ID NO: 3092810 - RNA, 19 nt, Artificial Sequence
  Description of Artificial Sequence: Synthetic oligonucleotide
uguggcugcaucgaugucc

SEQ ID NO: 3092811 - RNA, 19 nt, Artificial Sequence
  Description of Artificial Sequence: Synthetic oligonucleotide
uugagggcagcacugcacc

SEQ ID NO: 3092812 - RNA, 19 nt, Artificial Sequence
  Description of Artificial Sequence: Synthetic oligonucleotide
ucuguggcugcaucgaugu

SEQ ID NO: 3092813 - RNA, 19 nt, Artificial Sequence
  Description of Artificial Sequence: Synthetic oligonucleotide
aaguacacccagccaucac

SEQ ID NO: 3092814 - RNA, 19 nt, Artificial Sequence
  Description of Artificial Sequence: Synthetic oligonucleotide
aaguacuugggcugccaug

SEQ ID NO: 3092815 - RNA, 19 nt, Artificial Sequence
  Description of Artificial Sequence: Synthetic oligonucleotide
agugacuucuugccagagg

SEQ ID NO: 3092816 - RNA, 19 nt, Artificial Sequence
  Description of Artificial Sequence: Synthetic oligonucleotide
ugugcgaagggucucccgu

SEQ ID NO: 3092817 - RNA, 19 nt, Artificial Sequence
  Description of Artificial Sequence: Synthetic oligonucleotide
ugauacuguaccacuuuaa

SEQ ID NO: 3092818 - RNA, 19 nt, Artificial Sequence
  Description of Artificial Sequence: Synthetic oligonucleotide
ucacccuccgggaugaagu

SEQ ID NO: 3092819 - RNA, 19 nt, Artificial Sequence
  Description of Artificial Sequence: Synthetic oligonucleotide
ugcaucgauguccccaagc

SEQ ID NO: 3092820 - RNA, 19 nt, Artificial Sequence
  Description of Artificial Sequence: Synthetic oligonucleotide
gguugaaguacacccagcc

SEQ ID NO: 3092821 - RNA, 19 nt, Artificial Sequence
  Description of Artificial Sequence: Synthetic oligonucleotide
uaccacuuuaauuccuaca

SEQ ID NO: 3092822 - RNA, 19 nt, Artificial Sequence
  Description of Artificial Sequence: Synthetic oligonucleotide
gaugaaguacuugggcugc

SEQ ID NO: 3092823 - RNA, 19 nt, Artificial Sequence
  Description of Artificial Sequence: Synthetic oligonucleotide
ugggcugccauggugugcg

SEQ ID NO: 3092824 - RNA, 19 nt, Artificial Sequence
  Description of Artificial Sequence: Synthetic oligonucleotide
uguaccacuuuaauuccua

SEQ ID NO: 3092825 - RNA, 19 nt, Artificial Sequence
  Description of Artificial Sequence: Synthetic oligonucleotide
ucuugccagagguuccggg

SEQ ID NO: 3092826 - RNA, 19 nt, Artificial Sequence
  Description of Artificial Sequence: Synthetic oligonucleotide
accuccacccaucagugug

SEQ ID NO: 3092827 - RNA, 19 nt, Artificial Sequence
  Description of Artificial Sequence: Synthetic oligonucleotide
ucagugugucuuccagagg

SEQ ID NO: 3092828 - RNA, 19 nt, Artificial Sequence
  Description of Artificial Sequence: Synthetic oligonucleotide
acaaaaccaggccuauuga

SEQ ID NO: 3092829 - RNA, 19 nt, Artificial Sequence
  Description of Artificial Sequence: Synthetic oligonucleotide
uuuccguuccuccauccuc

SEQ ID NO: 3092830 - RNA, 19 nt, Artificial Sequence
  Description of Artificial Sequence: Synthetic oligonucleotide
uccuacaaaaccaggccua

SEQ ID NO: 3092831 - RNA, 19 nt, Artificial Sequence
  Description of Artificial Sequence: Synthetic oligonucleotide
ugaaguacacccagccauc

SEQ ID NO: 3092832 - RNA, 19 nt, Artificial Sequence
  Description of Artificial Sequence: Synthetic oligonucleotide
uugauacuguaccacuuua

SEQ ID NO: 3092833 - RNA, 19 nt, Artificial Sequence
  Description of Artificial Sequence: Synthetic oligonucleotide
auacuguaccacuuuaauu

SEQ ID NO: 3092834 - RNA, 19 nt, Artificial Sequence
  Description of Artificial Sequence: Synthetic oligonucleotide
uauugagggcagcacugca

SEQ ID NO: 3092835 - RNA, 19 nt, Artificial Sequence
  Description of Artificial Sequence: Synthetic oligonucleotide
uuccgggacuccaugggcc

SEQ ID NO: 3092836 - RNA, 19 nt, Artificial Sequence
  Description of Artificial Sequence: Synthetic oligonucleotide
uuccguuccuccauccucu

SEQ ID NO: 3092837 - RNA, 19 nt, Artificial Sequence
  Description of Artificial Sequence: Synthetic oligonucleotide
ggaugaaguacuugggcug

SEQ ID NO: 3092838 - RNA, 19 nt, Artificial Sequence
  Description of Artificial Sequence: Synthetic oligonucleotide
cagcacugcaccuccaccc

SEQ ID NO: 3092839 - RNA, 19 nt, Artificial Sequence
  Description of Artificial Sequence: Synthetic oligonucleotide
caucgauguccccaagccg

SEQ ID NO: 3092840 - RNA, 19 nt, Artificial Sequence
  Description of Artificial Sequence: Synthetic oligonucleotide
auugagggcagcacugcac

SEQ ID NO: 3092841 - RNA, 19 nt, Artificial Sequence
  Description of Artificial Sequence: Synthetic oligonucleotide
acuucuugccagagguucc

SEQ ID NO: 3092842 - RNA, 19 nt, Artificial Sequence
  Description of Artificial Sequence: Synthetic oligonucleotide
uacuugggcugccauggug

SEQ ID NO: 3092843 - RNA, 19 nt, Artificial Sequence
  Description of Artificial Sequence: Synthetic oligonucleotide
acacccagccaucacccuc

SEQ ID NO: 3092844 - RNA, 19 nt, Artificial Sequence
  Description of Artificial Sequence: Synthetic oligonucleotide
gacuucuugccagagguuc

SEQ ID NO: 3092845 - RNA, 19 nt, Artificial Sequence
  Description of Artificial Sequence: Synthetic oligonucleotide
augcucuguggcugcaucg

SEQ ID NO: 3092846 - RNA, 19 nt, Artificial Sequence
  Description of Artificial Sequence: Synthetic oligonucleotide
guuuaugcucuguggcugc

SEQ ID NO: 3092847 - RNA, 19 nt, Artificial Sequence
  Description of Artificial Sequence: Synthetic oligonucleotide
gauacuguaccacuuuaau

SEQ ID NO: 3092848 - RNA, 19 nt, Artificial Sequence
  Description of Artificial Sequence: Synthetic oligonucleotide
caaguaaugagugacuucu

SEQ ID NO: 3092849 - RNA, 19 nt, Artificial Sequence
  Description of Artificial Sequence: Synthetic oligonucleotide
gauguccccaagccgcaag

SEQ ID NO: 3092850 - RNA, 19 nt, Artificial Sequence
  Description of Artificial Sequence: Synthetic oligonucleotide
uaugcucuguggcugcauc

SEQ ID NO: 3092851 - RNA, 19 nt, Artificial Sequence
  Description of Artificial Sequence: Synthetic oligonucleotide
aagccgcaaguaaugagug

SEQ ID NO: 3092852 - RNA, 19 nt, Artificial Sequence
  Description of Artificial Sequence: Synthetic oligonucleotide
ugccauggugugcgaaggg

SEQ ID NO: 3092853 - RNA, 19 nt, Artificial Sequence
  Description of Artificial Sequence: Synthetic oligonucleotide
gugacuucuugccagaggu

SEQ ID NO: 3092854 - RNA, 19 nt, Artificial Sequence
  Description of Artificial Sequence: Synthetic oligonucleotide
ugagugacuucuugccaga

SEQ ID NO: 3092855 - RNA, 19 nt, Artificial Sequence
  Description of Artificial Sequence: Synthetic oligonucleotide
gaagggucucccguuuccg

SEQ ID NO: 3092856 - RNA, 19 nt, Artificial Sequence
  Description of Artificial Sequence: Synthetic oligonucleotide
uugccagagguuccgggac

SEQ ID NO: 3092857 - RNA, 19 nt, Artificial Sequence
  Description of Artificial Sequence: Synthetic oligonucleotide
guugaaguacacccagcca

SEQ ID NO: 3092858 - RNA, 19 nt, Artificial Sequence
  Description of Artificial Sequence: Synthetic oligonucleotide
uccccaagccgcaaguaau

SEQ ID NO: 3092859 - RNA, 19 nt, Artificial Sequence
  Description of Artificial Sequence: Synthetic oligonucleotide
aagggucucccguuuccgu

SEQ ID NO: 3092860 - RNA, 19 nt, Artificial Sequence
  Description of Artificial Sequence: Synthetic oligonucleotide
gcaucgauguccccaagcc

SEQ ID NO: 3092861 - RNA, 19 nt, Artificial Sequence
  Description of Artificial Sequence: Synthetic oligonucleotide
cugcuucuccuccaggcgc

SEQ ID NO: 3092862 - RNA, 19 nt, Artificial Sequence
  Description of Artificial Sequence: Synthetic oligonucleotide
cuucuugccagagguuccg

SEQ ID NO: 3092863 - RNA, 19 nt, Artificial Sequence
  Description of Artificial Sequence: Synthetic oligonucleotide
gccguuuaugcucuguggc

SEQ ID NO: 3092864 - RNA, 19 nt, Artificial Sequence
  Description of Artificial Sequence: Synthetic oligonucleotide
cuauugagggcagcacugc

SEQ ID NO: 3092865 - RNA, 19 nt, Artificial Sequence
  Description of Artificial Sequence: Synthetic oligonucleotide
guacacccagccaucaccc

SEQ ID NO: 3092866 - RNA, 19 nt, Artificial Sequence
  Description of Artificial Sequence: Synthetic oligonucleotide
gggguugaaguacacccag

SEQ ID NO: 3092867 - RNA, 19 nt, Artificial Sequence
  Description of Artificial Sequence: Synthetic oligonucleotide
augaaguacuugggcugcc

SEQ ID NO: 3092868 - RNA, 19 nt, Artificial Sequence
  Description of Artificial Sequence: Synthetic oligonucleotide
uccauccucugcuucuccu

SEQ ID NO: 3092869 - RNA, 19 nt, Artificial Sequence
  Description of Artificial Sequence: Synthetic oligonucleotide
cucuguggcugcaucgaug

SEQ ID NO: 3092870 - RNA, 19 nt, Artificial Sequence
  Description of Artificial Sequence: Synthetic oligonucleotide
gguuccgggacuccauggg

SEQ ID NO: 3092871 - RNA, 19 nt, Artificial Sequence
  Description of Artificial Sequence: Synthetic oligonucleotide
guaccacuuuaauuccuac

SEQ ID NO: 3092872 - RNA, 19 nt, Artificial Sequence
  Description of Artificial Sequence: Synthetic oligonucleotide
guuccgggacuccaugggc

SEQ ID NO: 3092873 - RNA, 19 nt, Artificial Sequence
  Description of Artificial Sequence: Synthetic oligonucleotide
acuugggcugccauggugu

SEQ ID NO: 3092874 - RNA, 19 nt, Artificial Sequence
  Description of Artificial Sequence: Synthetic oligonucleotide
caagccgcaaguaaugagu

SEQ ID NO: 3092875 - RNA, 19 nt, Artificial Sequence
  Description of Artificial Sequence: Synthetic oligonucleotide
cucccguuuccguuccucc

SEQ ID NO: 3092876 - RNA, 19 nt, Artificial Sequence
  Description of Artificial Sequence: Synthetic oligonucleotide
ugaaguacuugggcugcca

SEQ ID NO: 3092877 - RNA, 19 nt, Artificial Sequence
  Description of Artificial Sequence: Synthetic oligonucleotide
ccuauugagggcagcacug

SEQ ID NO: 3092878 - RNA, 19 nt, Artificial Sequence
  Description of Artificial Sequence: Synthetic oligonucleotide
uccgggacuccaugggccc

SEQ ID NO: 3092879 - RNA, 19 nt, Artificial Sequence
  Description of Artificial Sequence: Synthetic oligonucleotide
cuugccagagguuccggga

SEQ ID NO: 3092880 - RNA, 19 nt, Artificial Sequence
  Description of Artificial Sequence: Synthetic oligonucleotide
agugugucuuccagagggg

SEQ ID NO: 3092881 - RNA, 19 nt, Artificial Sequence
  Description of Artificial Sequence: Synthetic oligonucleotide
ucgauguccccaagccgca

SEQ ID NO: 3092882 - RNA, 19 nt, Artificial Sequence
  Description of Artificial Sequence: Synthetic oligonucleotide
acugcaccuccacccauca

SEQ ID NO: 3092883 - RNA, 19 nt, Artificial Sequence
  Description of Artificial Sequence: Synthetic oligonucleotide
ucccguuuccguuccucca

SEQ ID NO: 3092884 - RNA, 19 nt, Artificial Sequence
  Description of Artificial Sequence: Synthetic oligonucleotide
ugcucuguggcugcaucga

SEQ ID NO: 3092885 - RNA, 19 nt, Artificial Sequence
  Description of Artificial Sequence: Synthetic oligonucleotide
guggcugcaucgauguccc

SEQ ID NO: 3092886 - RNA, 19 nt, Artificial Sequence
  Description of Artificial Sequence: Synthetic oligonucleotide
cugccauggugugcgaagg

SEQ ID NO: 3092887 - RNA, 19 nt, Artificial Sequence
  Description of Artificial Sequence: Synthetic oligonucleotide
ugccagagguuccgggacu

SEQ ID NO: 3092888 - RNA, 19 nt, Artificial Sequence
  Description of Artificial Sequence: Synthetic oligonucleotide
accaggccuauugagggca

SEQ ID NO: 3092889 - RNA, 19 nt, Artificial Sequence
  Description of Artificial Sequence: Synthetic oligonucleotide
uuuaugcucuguggcugca

SEQ ID NO: 3092890 - RNA, 19 nt, Artificial Sequence
  Description of Artificial Sequence: Synthetic oligonucleotide
caucagugugucuuccaga

SEQ ID NO: 3092891 - RNA, 19 nt, Artificial Sequence
  Description of Artificial Sequence: Synthetic oligonucleotide
uucuugccagagguuccgg

SEQ ID NO: 3092892 - RNA, 19 nt, Artificial Sequence
  Description of Artificial Sequence: Synthetic oligonucleotide
auguccccaagccgcaagu

SEQ ID NO: 3092893 - RNA, 19 nt, Artificial Sequence
  Description of Artificial Sequence: Synthetic oligonucleotide
gagugacuucuugccagag

SEQ ID NO: 3092894 - RNA, 19 nt, Artificial Sequence
  Description of Artificial Sequence: Synthetic oligonucleotide
gcugccauggugugcgaag

SEQ ID NO: 3092895 - RNA, 19 nt, Artificial Sequence
  Description of Artificial Sequence: Synthetic oligonucleotide
gccgcaaguaaugagugac

SEQ ID NO: 3092896 - RNA, 19 nt, Artificial Sequence
  Description of Artificial Sequence: Synthetic oligonucleotide
gggaugaaguacuugggcu

SEQ ID NO: 3092897 - RNA, 19 nt, Artificial Sequence
  Description of Artificial Sequence: Synthetic oligonucleotide
ucuccagaggccugagcuu

SEQ ID NO: 3092898 - RNA, 19 nt, Artificial Sequence
  Description of Artificial Sequence: Synthetic oligonucleotide
ugagggcagcacugcaccu

SEQ ID NO: 3092899 - RNA, 19 nt, Artificial Sequence
  Description of Artificial Sequence: Synthetic oligonucleotide
ugacuucuugccagagguu

SEQ ID NO: 3092900 - RNA, 19 nt, Artificial Sequence
  Description of Artificial Sequence: Synthetic oligonucleotide
gugugcgaagggucucccg

SEQ ID NO: 3092901 - RNA, 19 nt, Artificial Sequence
  Description of Artificial Sequence: Synthetic oligonucleotide
uggugugcgaagggucucc

SEQ ID NO: 3092902 - RNA, 19 nt, Artificial Sequence
  Description of Artificial Sequence: Synthetic oligonucleotide
agccgcaaguaaugaguga

SEQ ID NO: 3092903 - RNA, 19 nt, Artificial Sequence
  Description of Artificial Sequence: Synthetic oligonucleotide
gcaaguaaugagugacuuc

SEQ ID NO: 3092904 - RNA, 19 nt, Artificial Sequence
  Description of Artificial Sequence: Synthetic oligonucleotide
cuucuccagaggccugagc

SEQ ID NO: 3092905 - RNA, 19 nt, Artificial Sequence
  Description of Artificial Sequence: Synthetic oligonucleotide
ugcgaagggucucccguuu

SEQ ID NO: 3092906 - RNA, 19 nt, Artificial Sequence
  Description of Artificial Sequence: Synthetic oligonucleotide
auggugugcgaagggucuc

SEQ ID NO: 3092907 - RNA, 19 nt, Artificial Sequence
  Description of Artificial Sequence: Synthetic oligonucleotide
aucacccuccgggaugaag

SEQ ID NO: 3092908 - RNA, 19 nt, Artificial Sequence
  Description of Artificial Sequence: Synthetic oligonucleotide
ccaagccgcaaguaaugag

SEQ ID NO: 3092909 - RNA, 19 nt, Artificial Sequence
  Description of Artificial Sequence: Synthetic oligonucleotide
aaguaaugagugacuucuu

SEQ ID NO: 3092910 - RNA, 19 nt, Artificial Sequence
  Description of Artificial Sequence: Synthetic oligonucleotide
aggccuauugagggcagca

SEQ ID NO: 3092911 - RNA, 19 nt, Artificial Sequence
  Description of Artificial Sequence: Synthetic oligonucleotide
uacacccagccaucacccu

SEQ ID NO: 3092912 - RNA, 19 nt, Artificial Sequence
  Description of Artificial Sequence: Synthetic oligonucleotide
ccgggaugaaguacuuggg

SEQ ID NO: 3092913 - RNA, 19 nt, Artificial Sequence
  Description of Artificial Sequence: Synthetic oligonucleotide
cauggugugcgaagggucu

SEQ ID NO: 3092914 - RNA, 19 nt, Artificial Sequence
  Description of Artificial Sequence: Synthetic oligonucleotide
gacuccaugggccccugcu

SEQ ID NO: 3092915 - RNA, 19 nt, Artificial Sequence
  Description of Artificial Sequence: Synthetic oligonucleotide
uccguuccuccauccucug

SEQ ID NO: 3092916 - RNA, 19 nt, Artificial Sequence
  Description of Artificial Sequence: Synthetic oligonucleotide
agggucucccguuuccguu

SEQ ID NO: 3092917 - RNA, 19 nt, Artificial Sequence
  Description of Artificial Sequence: Synthetic oligonucleotide
ugggccccugcuucuccag

SEQ ID NO: 3092918 - RNA, 19 nt, Artificial Sequence
  Description of Artificial Sequence: Synthetic oligonucleotide
gaaguacuugggcugccau

SEQ ID NO: 3092919 - RNA, 19 nt, Artificial Sequence
  Description of Artificial Sequence: Synthetic oligonucleotide
guccccaagccgcaaguaa

SEQ ID NO: 3092920 - RNA, 19 nt, Artificial Sequence
  Description of Artificial Sequence: Synthetic oligonucleotide
gagggcagcacugcaccuc

SEQ ID NO: 3092921 - RNA, 19 nt, Artificial Sequence
  Description of Artificial Sequence: Synthetic oligonucleotide
cacccaucagugugucuuc

SEQ ID NO: 3092922 - RNA, 19 nt, Artificial Sequence
  Description of Artificial Sequence: Synthetic oligonucleotide
cgggaugaaguacuugggc

SEQ ID NO: 3092923 - RNA, 19 nt, Artificial Sequence
  Description of Artificial Sequence: Synthetic oligonucleotide
gcagcacugcaccuccacc

SEQ ID NO: 3092924 - RNA, 19 nt, Artificial Sequence
  Description of Artificial Sequence: Synthetic oligonucleotide
uccuccaggcgccguuuau

SEQ ID NO: 3092925 - RNA, 19 nt, Artificial Sequence
  Description of Artificial Sequence: Synthetic oligonucleotide
ccauggugugcgaaggguc

SEQ ID NO: 3092926 - RNA, 19 nt, Artificial Sequence
  Description of Artificial Sequence: Synthetic oligonucleotide
gccaucacccuccgggaug

SEQ ID NO: 3092927 - RNA, 19 nt, Artificial Sequence
  Description of Artificial Sequence: Synthetic oligonucleotide
uuaugcucuguggcugcau

SEQ ID NO: 3092928 - RNA, 19 nt, Artificial Sequence
  Description of Artificial Sequence: Synthetic oligonucleotide
agccaucacccuccgggau

SEQ ID NO: 3092929 - RNA, 19 nt, Artificial Sequence
  Description of Artificial Sequence: Synthetic oligonucleotide
augggccccugcuucucca

SEQ ID NO: 3092930 - RNA, 19 nt, Artificial Sequence
  Description of Artificial Sequence: Synthetic oligonucleotide
ggccccugcuucuccagag

SEQ ID NO: 3092931 - RNA, 19 nt, Artificial Sequence
  Description of Artificial Sequence: Synthetic oligonucleotide
uccacccaucagugugucu

SEQ ID NO: 3092932 - RNA, 19 nt, Artificial Sequence
  Description of Artificial Sequence: Synthetic oligonucleotide
acccagccaucacccuccg

SEQ ID NO: 3092933 - RNA, 19 nt, Artificial Sequence
  Description of Artificial Sequence: Synthetic oligonucleotide
cguuuaugcucuguggcug

SEQ ID NO: 3092934 - RNA, 19 nt, Artificial Sequence
  Description of Artificial Sequence: Synthetic oligonucleotide
guuuccguuccuccauccu

SEQ ID NO: 3092935 - RNA, 19 nt, Artificial Sequence
  Description of Artificial Sequence: Synthetic oligonucleotide
uguccccaagccgcaagua

SEQ ID NO: 3092936 - RNA, 19 nt, Artificial Sequence
  Description of Artificial Sequence: Synthetic oligonucleotide
cuguaccacuuuaauuccu

SEQ ID NO: 3092937 - RNA, 19 nt, Artificial Sequence
  Description of Artificial Sequence: Synthetic oligonucleotide
ggcugcaucgaugucccca

SEQ ID NO: 3092938 - RNA, 19 nt, Artificial Sequence
  Description of Artificial Sequence: Synthetic oligonucleotide
cuccgggaugaaguacuug

SEQ ID NO: 3092939 - RNA, 19 nt, Artificial Sequence
  Description of Artificial Sequence: Synthetic oligonucleotide
ggucucccguuuccguucc

SEQ ID NO: 3092940 - RNA, 19 nt, Artificial Sequence
  Description of Artificial Sequence: Synthetic oligonucleotide
gcaccuccacccaucagug

SEQ ID NO: 3092941 - RNA, 19 nt, Artificial Sequence
  Description of Artificial Sequence: Synthetic oligonucleotide
cgccguuuaugcucugugg

SEQ ID NO: 3092942 - RNA, 19 nt, Artificial Sequence
  Description of Artificial Sequence: Synthetic oligonucleotide
ccccaagccgcaaguaaug

SEQ ID NO: 3092943 - RNA, 19 nt, Artificial Sequence
  Description of Artificial Sequence: Synthetic oligonucleotide
ccccugcuucuccagaggc

SEQ ID NO: 3092944 - RNA, 19 nt, Artificial Sequence
  Description of Artificial Sequence: Synthetic oligonucleotide
ggcagcacugcaccuccac

SEQ ID NO: 3092945 - RNA, 19 nt, Artificial Sequence
  Description of Artificial Sequence: Synthetic oligonucleotide
gcugcaucgauguccccaa

SEQ ID NO: 3092946 - RNA, 19 nt, Artificial Sequence
  Description of Artificial Sequence: Synthetic oligonucleotide
ggguugaaguacacccagc

SEQ ID NO: 3092947 - RNA, 19 nt, Artificial Sequence
  Description of Artificial Sequence: Synthetic oligonucleotide
cagccaucacccuccggga

SEQ ID NO: 3092948 - RNA, 19 nt, Artificial Sequence
  Description of Artificial Sequence: Synthetic oligonucleotide
agagguuccgggacuccau

SEQ ID NO: 3092949 - RNA, 19 nt, Artificial Sequence
  Description of Artificial Sequence: Synthetic oligonucleotide
cugcaucgauguccccaag

SEQ ID NO: 3092950 - RNA, 19 nt, Artificial Sequence
  Description of Artificial Sequence: Synthetic oligonucleotide
gggucucccguuuccguuc

SEQ ID NO: 3092951 - RNA, 19 nt, Artificial Sequence
  Description of Artificial Sequence: Synthetic oligonucleotide
caggccuauugagggcagc

SEQ ID NO: 3092952 - RNA, 19 nt, Artificial Sequence
  Description of Artificial Sequence: Synthetic oligonucleotide
gccuauugagggcagcacu

SEQ ID NO: 3092953 - RNA, 19 nt, Artificial Sequence
  Description of Artificial Sequence: Synthetic oligonucleotide
ccauccucugcuucuccuc

SEQ ID NO: 3092954 - RNA, 19 nt, Artificial Sequence
  Description of Artificial Sequence: Synthetic oligonucleotide
cagagguuccgggacucca

SEQ ID NO: 3092955 - RNA, 19 nt, Artificial Sequence
  Description of Artificial Sequence: Synthetic oligonucleotide
cguuuccguuccuccaucc

SEQ ID NO: 3092956 - RNA, 19 nt, Artificial Sequence
  Description of Artificial Sequence: Synthetic oligonucleotide
cuccacccaucaguguguc

SEQ ID NO: 3092957 - RNA, 19 nt, Artificial Sequence
  Description of Artificial Sequence: Synthetic oligonucleotide
ggugugcgaagggucuccc

SEQ ID NO: 3092958 - RNA, 19 nt, Artificial Sequence
  Description of Artificial Sequence: Synthetic oligonucleotide
ccacuuuaauuccuacaaa

SEQ ID NO: 3092959 - RNA, 19 nt, Artificial Sequence
  Description of Artificial Sequence: Synthetic oligonucleotide
ggccuauugagggcagcac

SEQ ID NO: 3092960 - RNA, 19 nt, Artificial Sequence
  Description of Artificial Sequence: Synthetic oligonucleotide
uggcugcaucgaugucccc

SEQ ID NO: 3092961 - RNA, 19 nt, Artificial Sequence
  Description of Artificial Sequence: Synthetic oligonucleotide
cuguggcugcaucgauguc

SEQ ID NO: 3092962 - RNA, 19 nt, Artificial Sequence
  Description of Artificial Sequence: Synthetic oligonucleotide
ccaggccuauugagggcag

SEQ ID NO: 3092963 - RNA, 19 nt, Artificial Sequence
  Description of Artificial Sequence: Synthetic oligonucleotide
cacccuccgggaugaagua

SEQ ID NO: 3092964 - RNA, 19 nt, Artificial Sequence
  Description of Artificial Sequence: Synthetic oligonucleotide
gcgaagggucucccguuuc

SEQ ID NO: 3092965 - RNA, 19 nt, Artificial Sequence
  Description of Artificial Sequence: Synthetic oligonucleotide
gcuucuccagaggccugag

SEQ ID NO: 3092966 - RNA, 19 nt, Artificial Sequence
  Description of Artificial Sequence: Synthetic oligonucleotide
ccguuuaugcucuguggcu

SEQ ID NO: 3092967 - RNA, 19 nt, Artificial Sequence
  Description of Artificial Sequence: Synthetic oligonucleotide
guacuugggcugccauggu

SEQ ID NO: 3092968 - RNA, 19 nt, Artificial Sequence
  Description of Artificial Sequence: Synthetic oligonucleotide
ccguuccuccauccucugc

SEQ ID NO: 3092969 - RNA, 19 nt, Artificial Sequence
  Description of Artificial Sequence: Synthetic oligonucleotide
gccagagguuccgggacuc

SEQ ID NO: 3092970 - RNA, 19 nt, Artificial Sequence
  Description of Artificial Sequence: Synthetic oligonucleotide
ccguuuccguuccuccauc

SEQ ID NO: 3092971 - RNA, 19 nt, Artificial Sequence
  Description of Artificial Sequence: Synthetic oligonucleotide
ggacuccaugggccccugc

SEQ ID NO: 3092972 - RNA, 19 nt, Artificial Sequence
  Description of Artificial Sequence: Synthetic oligonucleotide
gugcgaagggucucccguu

SEQ ID NO: 3092973 - RNA, 19 nt, Artificial Sequence
  Description of Artificial Sequence: Synthetic oligonucleotide
ccagagguuccgggacucc

SEQ ID NO: 3092974 - RNA, 19 nt, Artificial Sequence
  Description of Artificial Sequence: Synthetic oligonucleotide
gccauggugugcgaagggu

SEQ ID NO: 3092975 - RNA, 19 nt, Artificial Sequence
  Description of Artificial Sequence: Synthetic oligonucleotide
ccaucacccuccgggauga

SEQ ID NO: 3092976 - RNA, 19 nt, Artificial Sequence
  Description of Artificial Sequence: Synthetic oligonucleotide
cccaagccgcaaguaauga

SEQ ID NO: 3092977 - RNA, 19 nt, Artificial Sequence
  Description of Artificial Sequence: Synthetic oligonucleotide
aggcgccguuuaugcucug

SEQ ID NO: 3092978 - RNA, 19 nt, Artificial Sequence
  Description of Artificial Sequence: Synthetic oligonucleotide
ccacccaucagugugucuu

SEQ ID NO: 3092979 - RNA, 19 nt, Artificial Sequence
  Description of Artificial Sequence: Synthetic oligonucleotide
gggccccugcuucuccaga

SEQ ID NO: 3092980 - RNA, 19 nt, Artificial Sequence
  Description of Artificial Sequence: Synthetic oligonucleotide
cuacaaaaccaggccuauu

SEQ ID NO: 3092981 - RNA, 19 nt, Artificial Sequence
  Description of Artificial Sequence: Synthetic oligonucleotide
ccgcaaguaaugagugacu

SEQ ID NO: 3092982 - RNA, 19 nt, Artificial Sequence
  Description of Artificial Sequence: Synthetic oligonucleotide
caccuccacccaucagugu

SEQ ID NO: 3092983 - RNA, 19 nt, Artificial Sequence
  Description of Artificial Sequence: Synthetic oligonucleotide
cccagccaucacccuccgg

SEQ ID NO: 3092984 - RNA, 19 nt, Artificial Sequence
  Description of Artificial Sequence: Synthetic oligonucleotide
cuccuccaggcgccguuua

SEQ ID NO: 3092985 - RNA, 19 nt, Artificial Sequence
  Description of Artificial Sequence: Synthetic oligonucleotide
ccuccacccaucagugugu

SEQ ID NO: 3092986 - RNA, 19 nt, Artificial Sequence
  Description of Artificial Sequence: Synthetic oligonucleotide
ccuacaaaaccaggccuau

SEQ ID NO: 3092987 - RNA, 19 nt, Artificial Sequence
  Description of Artificial Sequence: Synthetic oligonucleotide
ggcugccauggugugcgaa

SEQ ID NO: 3092988 - RNA, 19 nt, Artificial Sequence
  Description of Artificial Sequence: Synthetic oligonucleotide
gcucuguggcugcaucgau

SEQ ID NO: 3092989 - RNA, 19 nt, Artificial Sequence
  Description of Artificial Sequence: Synthetic oligonucleotide
ccgggacuccaugggcccc

SEQ ID NO: 3092990 - RNA, 19 nt, Artificial Sequence
  Description of Artificial Sequence: Synthetic oligonucleotide
cgcaaguaaugagugacuu

SEQ ID NO: 3092991 - RNA, 19 nt, Artificial Sequence
  Description of Artificial Sequence: Synthetic oligonucleotide
cccguuuccguuccuccau

SEQ ID NO: 3092992 - RNA, 19 nt, Artificial Sequence
  Description of Artificial Sequence: Synthetic oligonucleotide
ggcgccguuuaugcucugu

SEQ ID NO: 3092993 - RNA, 19 nt, Artificial Sequence
  Description of Artificial Sequence: Synthetic oligonucleotide
cuucuccuccaggcgccgu

SEQ ID NO: 3092994 - RNA, 19 nt, Artificial Sequence
  Description of Artificial Sequence: Synthetic oligonucleotide
gcacugcaccuccacccau

SEQ ID NO: 3092995 - RNA, 19 nt, Artificial Sequence
  Description of Artificial Sequence: Synthetic oligonucleotide
caucacccuccgggaugaa

SEQ ID NO: 3092996 - RNA, 19 nt, Artificial Sequence
  Description of Artificial Sequence: Synthetic oligonucleotide
ccuccgggaugaaguacuu

SEQ ID NO: 3092997 - RNA, 19 nt, Artificial Sequence
  Description of Artificial Sequence: Synthetic oligonucleotide
cgauguccccaagccgcaa

SEQ ID NO: 3092998 - RNA, 19 nt, Artificial Sequence
  Description of Artificial Sequence: Synthetic oligonucleotide
cgggacuccaugggccccu

SEQ ID NO: 3092999 - RNA, 19 nt, Artificial Sequence
  Description of Artificial Sequence: Synthetic oligonucleotide
uuucugauaacacauaaug

SEQ ID NO: 3093000 - RNA, 19 nt, Artificial Sequence
  Description of Artificial Sequence: Synthetic oligonucleotide
ucugauaacacauaaugac

SEQ ID NO: 3093001 - RNA, 19 nt, Artificial Sequence
  Description of Artificial Sequence: Synthetic oligonucleotide
ugauaacacauaaugaccc

SEQ ID NO: 3093002 - RNA, 19 nt, Artificial Sequence
  Description of Artificial Sequence: Synthetic oligonucleotide
ucugugaucacaaacugac

SEQ ID NO: 3093003 - RNA, 19 nt, Artificial Sequence
  Description of Artificial Sequence: Synthetic oligonucleotide
ugugaucacaaacugaccu

SEQ ID NO: 3093004 - RNA, 19 nt, Artificial Sequence
  Description of Artificial Sequence: Synthetic oligonucleotide
ugugaugauauacugugug

SEQ ID NO: 3093005 - RNA, 19 nt, Artificial Sequence
  Description of Artificial Sequence: Synthetic oligonucleotide
guugugaugauauacugug

SEQ ID NO: 3093006 - RNA, 19 nt, Artificial Sequence
  Description of Artificial Sequence: Synthetic oligonucleotide
acugucugugaucacaaac

SEQ ID NO: 3093007 - RNA, 19 nt, Artificial Sequence
  Description of Artificial Sequence: Synthetic oligonucleotide
cugauaacacauaaugacc

SEQ ID NO: 3093008 - RNA, 19 nt, Artificial Sequence
  Description of Artificial Sequence: Synthetic oligonucleotide
agaggcuugcuuuuccucc

SEQ ID NO: 3093009 - RNA, 19 nt, Artificial Sequence
  Description of Artificial Sequence: Synthetic oligonucleotide
gauaacacauaaugacccg

SEQ ID NO: 3093010 - RNA, 19 nt, Artificial Sequence
  Description of Artificial Sequence: Synthetic oligonucleotide
uucugauaacacauaauga

SEQ ID NO: 3093011 - RNA, 19 nt, Artificial Sequence
  Description of Artificial Sequence: Synthetic oligonucleotide
agugguugugaugauauac

SEQ ID NO: 3093012 - RNA, 19 nt, Artificial Sequence
  Description of Artificial Sequence: Synthetic oligonucleotide
uugacuuucugauaacaca

SEQ ID NO: 3093013 - RNA, 19 nt, Artificial Sequence
  Description of Artificial Sequence: Synthetic oligonucleotide
cacauaaugacccggaguc

SEQ ID NO: 3093014 - RNA, 19 nt, Artificial Sequence
  Description of Artificial Sequence: Synthetic oligonucleotide
aucauuugaauuucagaug

SEQ ID NO: 3093015 - RNA, 19 nt, Artificial Sequence
  Description of Artificial Sequence: Synthetic oligonucleotide
agugucaucauuugaauuu

SEQ ID NO: 3093016 - RNA, 19 nt, Artificial Sequence
  Description of Artificial Sequence: Synthetic oligonucleotide
agucacugugugcagaggg

SEQ ID NO: 3093017 - RNA, 19 nt, Artificial Sequence
  Description of Artificial Sequence: Synthetic oligonucleotide
ugacuuucugauaacacau

SEQ ID NO: 3093018 - RNA, 19 nt, Artificial Sequence
  Description of Artificial Sequence: Synthetic oligonucleotide
augugcacuucacugcucc

SEQ ID NO: 3093019 - RNA, 19 nt, Artificial Sequence
  Description of Artificial Sequence: Synthetic oligonucleotide
ucaucauuugaauuucaga

SEQ ID NO: 3093020 - RNA, 19 nt, Artificial Sequence
  Description of Artificial Sequence: Synthetic oligonucleotide
ugaucacaaacugaccugg

SEQ ID NO: 3093021 - RNA, 19 nt, Artificial Sequence
  Description of Artificial Sequence: Synthetic oligonucleotide
uugguagugguugugauga

SEQ ID NO: 3093022 - RNA, 19 nt, Artificial Sequence
  Description of Artificial Sequence: Synthetic oligonucleotide
aacacauaaugacccggag

SEQ ID NO: 3093023 - RNA, 19 nt, Artificial Sequence
  Description of Artificial Sequence: Synthetic oligonucleotide
gugaugauauacugugugg

SEQ ID NO: 3093024 - RNA, 19 nt, Artificial Sequence
  Description of Artificial Sequence: Synthetic oligonucleotide
aagugacaggaguugccac

SEQ ID NO: 3093025 - RNA, 19 nt, Artificial Sequence
  Description of Artificial Sequence: Synthetic oligonucleotide
uuucacuugcccagaagug

SEQ ID NO: 3093026 - RNA, 19 nt, Artificial Sequence
  Description of Artificial Sequence: Synthetic oligonucleotide
auaacacauaaugacccgg

SEQ ID NO: 3093027 - RNA, 19 nt, Artificial Sequence
  Description of Artificial Sequence: Synthetic oligonucleotide
aauucugguugacuuucug

SEQ ID NO: 3093028 - RNA, 19 nt, Artificial Sequence
  Description of Artificial Sequence: Synthetic oligonucleotide
uaacacauaaugacccgga

SEQ ID NO: 3093029 - RNA, 19 nt, Artificial Sequence
  Description of Artificial Sequence: Synthetic oligonucleotide
ugaugauauacuguguggu

SEQ ID NO: 3093030 - RNA, 19 nt, Artificial Sequence
  Description of Artificial Sequence: Synthetic oligonucleotide
cucccauucccauugguag

SEQ ID NO: 3093031 - RNA, 19 nt, Artificial Sequence
  Description of Artificial Sequence: Synthetic oligonucleotide
uucugguugacuuucugau

SEQ ID NO: 3093032 - RNA, 19 nt, Artificial Sequence
  Description of Artificial Sequence: Synthetic oligonucleotide
ugguugugaugauauacug

SEQ ID NO: 3093033 - RNA, 19 nt, Artificial Sequence
  Description of Artificial Sequence: Synthetic oligonucleotide
uggacugcgccggagaggg

SEQ ID NO: 3093034 - RNA, 19 nt, Artificial Sequence
  Description of Artificial Sequence: Synthetic oligonucleotide
gaugauauacugugugguc

SEQ ID NO: 3093035 - RNA, 19 nt, Artificial Sequence
  Description of Artificial Sequence: Synthetic oligonucleotide
ggugaugugcacuucacug

SEQ ID NO: 3093036 - RNA, 19 nt, Artificial Sequence
  Description of Artificial Sequence: Synthetic oligonucleotide
ugaugugcacuucacugcu

SEQ ID NO: 3093037 - RNA, 19 nt, Artificial Sequence
  Description of Artificial Sequence: Synthetic oligonucleotide
ugaaccuggacugcgccgg

SEQ ID NO: 3093038 - RNA, 19 nt, Artificial Sequence
  Description of Artificial Sequence: Synthetic oligonucleotide
caucauuugaauuucagau

SEQ ID NO: 3093039 - RNA, 19 nt, Artificial Sequence
  Description of Artificial Sequence: Synthetic oligonucleotide
acuucacugcucccauucc

SEQ ID NO: 3093040 - RNA, 19 nt, Artificial Sequence
  Description of Artificial Sequence: Synthetic oligonucleotide
auugguagugguugugaug

SEQ ID NO: 3093041 - RNA, 19 nt, Artificial Sequence
  Description of Artificial Sequence: Synthetic oligonucleotide
agaagugacaggaguugcc

SEQ ID NO: 3093042 - RNA, 19 nt, Artificial Sequence
  Description of Artificial Sequence: Synthetic oligonucleotide
uacggcuuggugaugugca

SEQ ID NO: 3093043 - RNA, 19 nt, Artificial Sequence
  Description of Artificial Sequence: Synthetic oligonucleotide
ugcagagggcugaaccugg

SEQ ID NO: 3093044 - RNA, 19 nt, Artificial Sequence
  Description of Artificial Sequence: Synthetic oligonucleotide
uucacugcucccauuccca

SEQ ID NO: 3093045 - RNA, 19 nt, Artificial Sequence
  Description of Artificial Sequence: Synthetic oligonucleotide
acacauaaugacccggagu

SEQ ID NO: 3093046 - RNA, 19 nt, Artificial Sequence
  Description of Artificial Sequence: Synthetic oligonucleotide
uucacuugcccagaaguga

SEQ ID NO: 3093047 - RNA, 19 nt, Artificial Sequence
  Description of Artificial Sequence: Synthetic oligonucleotide
gugaugugcacuucacugc

SEQ ID NO: 3093048 - RNA, 19 nt, Artificial Sequence
  Description of Artificial Sequence: Synthetic oligonucleotide
ugugcagagggcugaaccu

SEQ ID NO: 3093049 - RNA, 19 nt, Artificial Sequence
  Description of Artificial Sequence: Synthetic oligonucleotide
aguccagggagucacugug

SEQ ID NO: 3093050 - RNA, 19 nt, Artificial Sequence
  Description of Artificial Sequence: Synthetic oligonucleotide
ucugcuguuggcuggggcu

SEQ ID NO: 3093051 - RNA, 19 nt, Artificial Sequence
  Description of Artificial Sequence: Synthetic oligonucleotide
uugcccagaagugacagga

SEQ ID NO: 3093052 - RNA, 19 nt, Artificial Sequence
  Description of Artificial Sequence: Synthetic oligonucleotide
uguuggcuggggcucgugg

SEQ ID NO: 3093053 - RNA, 19 nt, Artificial Sequence
  Description of Artificial Sequence: Synthetic oligonucleotide
ucacuugcccagaagugac

SEQ ID NO: 3093054 - RNA, 19 nt, Artificial Sequence
  Description of Artificial Sequence: Synthetic oligonucleotide
agagggcugaaccuggacu

SEQ ID NO: 3093055 - RNA, 19 nt, Artificial Sequence
  Description of Artificial Sequence: Synthetic oligonucleotide
gugaucacaaacugaccug

SEQ ID NO: 3093056 - RNA, 19 nt, Artificial Sequence
  Description of Artificial Sequence: Synthetic oligonucleotide
agugacaggaguugccaca

SEQ ID NO: 3093057 - RNA, 19 nt, Artificial Sequence
  Description of Artificial Sequence: Synthetic oligonucleotide
uguggucugcuguuggcug

SEQ ID NO: 3093058 - RNA, 19 nt, Artificial Sequence
  Description of Artificial Sequence: Synthetic oligonucleotide
acuacugucugugaucaca

SEQ ID NO: 3093059 - RNA, 19 nt, Artificial Sequence
  Description of Artificial Sequence: Synthetic oligonucleotide
cauaaugacccggagucac

SEQ ID NO: 3093060 - RNA, 19 nt, Artificial Sequence
  Description of Artificial Sequence: Synthetic oligonucleotide
ugucaucauuugaauuuca

SEQ ID NO: 3093061 - RNA, 19 nt, Artificial Sequence
  Description of Artificial Sequence: Synthetic oligonucleotide
uccagggagucacugugug

SEQ ID NO: 3093062 - RNA, 19 nt, Artificial Sequence
  Description of Artificial Sequence: Synthetic oligonucleotide
uugugaugauauacugugu

SEQ ID NO: 3093063 - RNA, 19 nt, Artificial Sequence
  Description of Artificial Sequence: Synthetic oligonucleotide
guugacuuucugauaacac

SEQ ID NO: 3093064 - RNA, 19 nt, Artificial Sequence
  Description of Artificial Sequence: Synthetic oligonucleotide
auacuguguggucugcugu

SEQ ID NO: 3093065 - RNA, 19 nt, Artificial Sequence
  Description of Artificial Sequence: Synthetic oligonucleotide
cugguugacuuucugauaa

SEQ ID NO: 3093066 - RNA, 19 nt, Artificial Sequence
  Description of Artificial Sequence: Synthetic oligonucleotide
acacuacugucugugauca

SEQ ID NO: 3093067 - RNA, 19 nt, Artificial Sequence
  Description of Artificial Sequence: Synthetic oligonucleotide
uuggugaugugcacuucac

SEQ ID NO: 3093068 - RNA, 19 nt, Artificial Sequence
  Description of Artificial Sequence: Synthetic oligonucleotide
cacacuacugucugugauc

SEQ ID NO: 3093069 - RNA, 19 nt, Artificial Sequence
  Description of Artificial Sequence: Synthetic oligonucleotide
uguguggucugcuguuggc

SEQ ID NO: 3093070 - RNA, 19 nt, Artificial Sequence
  Description of Artificial Sequence: Synthetic oligonucleotide
gaucacaaacugaccuggg

SEQ ID NO: 3093071 - RNA, 19 nt, Artificial Sequence
  Description of Artificial Sequence: Synthetic oligonucleotide
gaagugacaggaguugcca

SEQ ID NO: 3093072 - RNA, 19 nt, Artificial Sequence
  Description of Artificial Sequence: Synthetic oligonucleotide
acaggaguugccacacuac

SEQ ID NO: 3093073 - RNA, 19 nt, Artificial Sequence
  Description of Artificial Sequence: Synthetic oligonucleotide
cugugaucacaaacugacc

SEQ ID NO: 3093074 - RNA, 19 nt, Artificial Sequence
  Description of Artificial Sequence: Synthetic oligonucleotide
acuugcccagaagugacag

SEQ ID NO: 3093075 - RNA, 19 nt, Artificial Sequence
  Description of Artificial Sequence: Synthetic oligonucleotide
ugccacacuacugucugug

SEQ ID NO: 3093076 - RNA, 19 nt, Artificial Sequence
  Description of Artificial Sequence: Synthetic oligonucleotide
cuuucacuugcccagaagu

SEQ ID NO: 3093077 - RNA, 19 nt, Artificial Sequence
  Description of Artificial Sequence: Synthetic oligonucleotide
uggugaugugcacuucacu

SEQ ID NO: 3093078 - RNA, 19 nt, Artificial Sequence
  Description of Artificial Sequence: Synthetic oligonucleotide
ucacugcuuucacuugccc

SEQ ID NO: 3093079 - RNA, 19 nt, Artificial Sequence
  Description of Artificial Sequence: Synthetic oligonucleotide
cugaaccuggacugcgccg

SEQ ID NO: 3093080 - RNA, 19 nt, Artificial Sequence
  Description of Artificial Sequence: Synthetic oligonucleotide
gauauacuguguggucugc

SEQ ID NO: 3093081 - RNA, 19 nt, Artificial Sequence
  Description of Artificial Sequence: Synthetic oligonucleotide
ucacugugugcagagggcu

SEQ ID NO: 3093082 - RNA, 19 nt, Artificial Sequence
  Description of Artificial Sequence: Synthetic oligonucleotide
ucugguugacuuucugaua

SEQ ID NO: 3093083 - RNA, 19 nt, Artificial Sequence
  Description of Artificial Sequence: Synthetic oligonucleotide
uccaauucugguugacuuu

SEQ ID NO: 3093084 - RNA, 19 nt, Artificial Sequence
  Description of Artificial Sequence: Synthetic oligonucleotide
cugucugugaucacaaacu

SEQ ID NO: 3093085 - RNA, 19 nt, Artificial Sequence
  Description of Artificial Sequence: Synthetic oligonucleotide
augacccggagucacugcu

SEQ ID NO: 3093086 - RNA, 19 nt, Artificial Sequence
  Description of Artificial Sequence: Synthetic oligonucleotide
cagaagugacaggaguugc

SEQ ID NO: 3093087 - RNA, 19 nt, Artificial Sequence
  Description of Artificial Sequence: Synthetic oligonucleotide
guggucugcuguuggcugg

SEQ ID NO: 3093088 - RNA, 19 nt, Artificial Sequence
  Description of Artificial Sequence: Synthetic oligonucleotide
cuugcccagaagugacagg

SEQ ID NO: 3093089 - RNA, 19 nt, Artificial Sequence
  Description of Artificial Sequence: Synthetic oligonucleotide
acggcuuggugaugugcac

SEQ ID NO: 3093090 - RNA, 19 nt, Artificial Sequence
  Description of Artificial Sequence: Synthetic oligonucleotide
ucccauucccauugguagu

SEQ ID NO: 3093091 - RNA, 19 nt, Artificial Sequence
  Description of Artificial Sequence: Synthetic oligonucleotide
cuguguggucugcuguugg

SEQ ID NO: 3093092 - RNA, 19 nt, Artificial Sequence
  Description of Artificial Sequence: Synthetic oligonucleotide
ugcccagaagugacaggag

SEQ ID NO: 3093093 - RNA, 19 nt, Artificial Sequence
  Description of Artificial Sequence: Synthetic oligonucleotide
ugcacuucacugcucccau

SEQ ID NO: 3093094 - RNA, 19 nt, Artificial Sequence
  Description of Artificial Sequence: Synthetic oligonucleotide
gacaggaguugccacacua

SEQ ID NO: 3093095 - RNA, 19 nt, Artificial Sequence
  Description of Artificial Sequence: Synthetic oligonucleotide
ggagucacugugugcagag

SEQ ID NO: 3093096 - RNA, 19 nt, Artificial Sequence
  Description of Artificial Sequence: Synthetic oligonucleotide
uagaggcuugcuuuuccuc

SEQ ID NO: 3093097 - RNA, 19 nt, Artificial Sequence
  Description of Artificial Sequence: Synthetic oligonucleotide
gcucguggaguccagggag

SEQ ID NO: 3093098 - RNA, 19 nt, Artificial Sequence
  Description of Artificial Sequence: Synthetic oligonucleotide
ugugcacuucacugcuccc

SEQ ID NO: 3093099 - RNA, 19 nt, Artificial Sequence
  Description of Artificial Sequence: Synthetic oligonucleotide
agaggguagaggcuugcuu

SEQ ID NO: 3093100 - RNA, 19 nt, Artificial Sequence
  Description of Artificial Sequence: Synthetic oligonucleotide
gguagaggcuugcuuuucc

SEQ ID NO: 3093101 - RNA, 19 nt, Artificial Sequence
  Description of Artificial Sequence: Synthetic oligonucleotide
cagggagucacugugugca

SEQ ID NO: 3093102 - RNA, 19 nt, Artificial Sequence
  Description of Artificial Sequence: Synthetic oligonucleotide
agggcugaaccuggacugc

SEQ ID NO: 3093103 - RNA, 19 nt, Artificial Sequence
  Description of Artificial Sequence: Synthetic oligonucleotide
gugucaucauuugaauuuc

SEQ ID NO: 3093104 - RNA, 19 nt, Artificial Sequence
  Description of Artificial Sequence: Synthetic oligonucleotide
ugguugacuuucugauaac

SEQ ID NO: 3093105 - RNA, 19 nt, Artificial Sequence
  Description of Artificial Sequence: Synthetic oligonucleotide
aggaguugccacacuacug

SEQ ID NO: 3093106 - RNA, 19 nt, Artificial Sequence
  Description of Artificial Sequence: Synthetic oligonucleotide
gaggguagaggcuugcuuu

SEQ ID NO: 3093107 - RNA, 19 nt, Artificial Sequence
  Description of Artificial Sequence: Synthetic oligonucleotide
guggaguccagggagucac

SEQ ID NO: 3093108 - RNA, 19 nt, Artificial Sequence
  Description of Artificial Sequence: Synthetic oligonucleotide
gucacugugugcagagggc

SEQ ID NO: 3093109 - RNA, 19 nt, Artificial Sequence
  Description of Artificial Sequence: Synthetic oligonucleotide
uacuguguggucugcuguu

SEQ ID NO: 3093110 - RNA, 19 nt, Artificial Sequence
  Description of Artificial Sequence: Synthetic oligonucleotide
cacugcuuucacuugccca

SEQ ID NO: 3093111 - RNA, 19 nt, Artificial Sequence
  Description of Artificial Sequence: Synthetic oligonucleotide
cuacugucugugaucacaa

SEQ ID NO: 3093112 - RNA, 19 nt, Artificial Sequence
  Description of Artificial Sequence: Synthetic oligonucleotide
aguugccacacuacugucu

SEQ ID NO: 3093113 - RNA, 19 nt, Artificial Sequence
  Description of Artificial Sequence: Synthetic oligonucleotide
uggucugcuguuggcuggg

SEQ ID NO: 3093114 - RNA, 19 nt, Artificial Sequence
  Description of Artificial Sequence: Synthetic oligonucleotide
ucccauugguagugguugu

SEQ ID NO: 3093115 - RNA, 19 nt, Artificial Sequence
  Description of Artificial Sequence: Synthetic oligonucleotide
ugcuuucacuugcccagaa

SEQ ID NO: 3093116 - RNA, 19 nt, Artificial Sequence
  Description of Artificial Sequence: Synthetic oligonucleotide
gaguugccacacuacuguc

SEQ ID NO: 3093117 - RNA, 19 nt, Artificial Sequence
  Description of Artificial Sequence: Synthetic oligonucleotide
cuacggcuuggugaugugc

SEQ ID NO: 3093118 - RNA, 19 nt, Artificial Sequence
  Description of Artificial Sequence: Synthetic oligonucleotide
acauaaugacccggaguca

SEQ ID NO: 3093119 - RNA, 19 nt, Artificial Sequence
  Description of Artificial Sequence: Synthetic oligonucleotide
guagugguugugaugauau

SEQ ID NO: 3093120 - RNA, 19 nt, Artificial Sequence
  Description of Artificial Sequence: Synthetic oligonucleotide
ggaguugccacacuacugu

SEQ ID NO: 3093121 - RNA, 19 nt, Artificial Sequence
  Description of Artificial Sequence: Synthetic oligonucleotide
gagucacugugugcagagg

SEQ ID NO: 3093122 - RNA, 19 nt, Artificial Sequence
  Description of Artificial Sequence: Synthetic oligonucleotide
acugugugcagagggcuga

SEQ ID NO: 3093123 - RNA, 19 nt, Artificial Sequence
  Description of Artificial Sequence: Synthetic oligonucleotide
cacugugugcagagggcug

SEQ ID NO: 3093124 - RNA, 19 nt, Artificial Sequence
  Description of Artificial Sequence: Synthetic oligonucleotide
gugacaggaguugccacac

SEQ ID NO: 3093125 - RNA, 19 nt, Artificial Sequence
  Description of Artificial Sequence: Synthetic oligonucleotide
agggagucacugugugcag

SEQ ID NO: 3093126 - RNA, 19 nt, Artificial Sequence
  Description of Artificial Sequence: Synthetic oligonucleotide
guuggcuggggcucgugga

SEQ ID NO: 3093127 - RNA, 19 nt, Artificial Sequence
  Description of Artificial Sequence: Synthetic oligonucleotide
gucugugaucacaaacuga

SEQ ID NO: 3093128 - RNA, 19 nt, Artificial Sequence
  Description of Artificial Sequence: Synthetic oligonucleotide
gguugacuuucugauaaca

SEQ ID NO: 3093129 - RNA, 19 nt, Artificial Sequence
  Description of Artificial Sequence: Synthetic oligonucleotide
uuccuccaauucugguuga

SEQ ID NO: 3093130 - RNA, 19 nt, Artificial Sequence
  Description of Artificial Sequence: Synthetic oligonucleotide
gugcagagggcugaaccug

SEQ ID NO: 3093131 - RNA, 19 nt, Artificial Sequence
  Description of Artificial Sequence: Synthetic oligonucleotide
gcugaaccuggacugcgcc

SEQ ID NO: 3093132 - RNA, 19 nt, Artificial Sequence
  Description of Artificial Sequence: Synthetic oligonucleotide
gcuuuuccuccaauucugg

SEQ ID NO: 3093133 - RNA, 19 nt, Artificial Sequence
  Description of Artificial Sequence: Synthetic oligonucleotide
uacugucugugaucacaaa

SEQ ID NO: 3093134 - RNA, 19 nt, Artificial Sequence
  Description of Artificial Sequence: Synthetic oligonucleotide
gucugcuguuggcuggggc

SEQ ID NO: 3093135 - RNA, 19 nt, Artificial Sequence
  Description of Artificial Sequence: Synthetic oligonucleotide
ugacaggaguugccacacu

SEQ ID NO: 3093136 - RNA, 19 nt, Artificial Sequence
  Description of Artificial Sequence: Synthetic oligonucleotide
gcuuucacuugcccagaag

SEQ ID NO: 3093137 - RNA, 19 nt, Artificial Sequence
  Description of Artificial Sequence: Synthetic oligonucleotide
gggcucguggaguccaggg

SEQ ID NO: 3093138 - RNA, 19 nt, Artificial Sequence
  Description of Artificial Sequence: Synthetic oligonucleotide
accuggacugcgccggaga

SEQ ID NO: 3093139 - RNA, 19 nt, Artificial Sequence
  Description of Artificial Sequence: Synthetic oligonucleotide
auaaugacccggagucacu

SEQ ID NO: 3093140 - RNA, 19 nt, Artificial Sequence
  Description of Artificial Sequence: Synthetic oligonucleotide
ggggcagugucaucauuug

SEQ ID NO: 3093141 - RNA, 19 nt, Artificial Sequence
  Description of Artificial Sequence: Synthetic oligonucleotide
uagugguugugaugauaua

SEQ ID NO: 3093142 - RNA, 19 nt, Artificial Sequence
  Description of Artificial Sequence: Synthetic oligonucleotide
ccaauucugguugacuuuc

SEQ ID NO: 3093143 - RNA, 19 nt, Artificial Sequence
  Description of Artificial Sequence: Synthetic oligonucleotide
aaccuggacugcgccggag

SEQ ID NO: 3093144 - RNA, 19 nt, Artificial Sequence
  Description of Artificial Sequence: Synthetic oligonucleotide
gacuuucugauaacacaua

SEQ ID NO: 3093145 - RNA, 19 nt, Artificial Sequence
  Description of Artificial Sequence: Synthetic oligonucleotide
cuccaauucugguugacuu

SEQ ID NO: 3093146 - RNA, 19 nt, Artificial Sequence
  Description of Artificial Sequence: Synthetic oligonucleotide
cuggacugcgccggagagg

SEQ ID NO: 3093147 - RNA, 19 nt, Artificial Sequence
  Description of Artificial Sequence: Synthetic oligonucleotide
ccagaagugacaggaguug

SEQ ID NO: 3093148 - RNA, 19 nt, Artificial Sequence
  Description of Artificial Sequence: Synthetic oligonucleotide
acccggagucacugcuuuc

SEQ ID NO: 3093149 - RNA, 19 nt, Artificial Sequence
  Description of Artificial Sequence: Synthetic oligonucleotide
guagaggcuugcuuuuccu

SEQ ID NO: 3093150 - RNA, 19 nt, Artificial Sequence
  Description of Artificial Sequence: Synthetic oligonucleotide
cagagggcugaaccuggac

SEQ ID NO: 3093151 - RNA, 19 nt, Artificial Sequence
  Description of Artificial Sequence: Synthetic oligonucleotide
uggaguccagggagucacu

SEQ ID NO: 3093152 - RNA, 19 nt, Artificial Sequence
  Description of Artificial Sequence: Synthetic oligonucleotide
uccuccaauucugguugac

SEQ ID NO: 3093153 - RNA, 19 nt, Artificial Sequence
  Description of Artificial Sequence: Synthetic oligonucleotide
ugcgccggagaggguagag

SEQ ID NO: 3093154 - RNA, 19 nt, Artificial Sequence
  Description of Artificial Sequence: Synthetic oligonucleotide
uugccacacuacugucugu

SEQ ID NO: 3093155 - RNA, 19 nt, Artificial Sequence
  Description of Artificial Sequence: Synthetic oligonucleotide
ugacccggagucacugcuu

SEQ ID NO: 3093156 - RNA, 19 nt, Artificial Sequence
  Description of Artificial Sequence: Synthetic oligonucleotide
gaugugcacuucacugcuc

SEQ ID NO: 3093157 - RNA, 19 nt, Artificial Sequence
  Description of Artificial Sequence: Synthetic oligonucleotide
ugugugcagagggcugaac

SEQ ID NO: 3093158 - RNA, 19 nt, Artificial Sequence
  Description of Artificial Sequence: Synthetic oligonucleotide
gugcacuucacugcuccca

SEQ ID NO: 3093159 - RNA, 19 nt, Artificial Sequence
  Description of Artificial Sequence: Synthetic oligonucleotide
uggggcucguggaguccag

SEQ ID NO: 3093160 - RNA, 19 nt, Artificial Sequence
  Description of Artificial Sequence: Synthetic oligonucleotide
ucguggaguccagggaguc

SEQ ID NO: 3093161 - RNA, 19 nt, Artificial Sequence
  Description of Artificial Sequence: Synthetic oligonucleotide
gacugcgccggagagggua

SEQ ID NO: 3093162 - RNA, 19 nt, Artificial Sequence
  Description of Artificial Sequence: Synthetic oligonucleotide
caggaguugccacacuacu

SEQ ID NO: 3093163 - RNA, 19 nt, Artificial Sequence
  Description of Artificial Sequence: Synthetic oligonucleotide
gguugugaugauauacugu

SEQ ID NO: 3093164 - RNA, 19 nt, Artificial Sequence
  Description of Artificial Sequence: Synthetic oligonucleotide
ggaguccagggagucacug

SEQ ID NO: 3093165 - RNA, 19 nt, Artificial Sequence
  Description of Artificial Sequence: Synthetic oligonucleotide
gaguccagggagucacugu

SEQ ID NO: 3093166 - RNA, 19 nt, Artificial Sequence
  Description of Artificial Sequence: Synthetic oligonucleotide
acugcgccggagaggguag

SEQ ID NO: 3093167 - RNA, 19 nt, Artificial Sequence
  Description of Artificial Sequence: Synthetic oligonucleotide
cugcuguuggcuggggcuc

SEQ ID NO: 3093168 - RNA, 19 nt, Artificial Sequence
  Description of Artificial Sequence: Synthetic oligonucleotide
cauugguagugguugugau

SEQ ID NO: 3093169 - RNA, 19 nt, Artificial Sequence
  Description of Artificial Sequence: Synthetic oligonucleotide
ugguagugguugugaugau

SEQ ID NO: 3093170 - RNA, 19 nt, Artificial Sequence
  Description of Artificial Sequence: Synthetic oligonucleotide
cacuacugucugugaucac

SEQ ID NO: 3093171 - RNA, 19 nt, Artificial Sequence
  Description of Artificial Sequence: Synthetic oligonucleotide
cacuugcccagaagugaca

SEQ ID NO: 3093172 - RNA, 19 nt, Artificial Sequence
  Description of Artificial Sequence: Synthetic oligonucleotide
gggcugaaccuggacugcg

SEQ ID NO: 3093173 - RNA, 19 nt, Artificial Sequence
  Description of Artificial Sequence: Synthetic oligonucleotide
ccuggacugcgccggagag

SEQ ID NO: 3093174 - RNA, 19 nt, Artificial Sequence
  Description of Artificial Sequence: Synthetic oligonucleotide
uggcuggggcucguggagu

SEQ ID NO: 3093175 - RNA, 19 nt, Artificial Sequence
  Description of Artificial Sequence: Synthetic oligonucleotide
cccauucccauugguagug

SEQ ID NO: 3093176 - RNA, 19 nt, Artificial Sequence
  Description of Artificial Sequence: Synthetic oligonucleotide
gaaccuggacugcgccgga

SEQ ID NO: 3093177 - RNA, 19 nt, Artificial Sequence
  Description of Artificial Sequence: Synthetic oligonucleotide
cauucccauugguaguggu

SEQ ID NO: 3093178 - RNA, 19 nt, Artificial Sequence
  Description of Artificial Sequence: Synthetic oligonucleotide
ggcucguggaguccaggga

SEQ ID NO: 3093179 - RNA, 19 nt, Artificial Sequence
  Description of Artificial Sequence: Synthetic oligonucleotide
ggagaggguagaggcuugc

SEQ ID NO: 3093180 - RNA, 19 nt, Artificial Sequence
  Description of Artificial Sequence: Synthetic oligonucleotide
gggcagugucaucauuuga

SEQ ID NO: 3093181 - RNA, 19 nt, Artificial Sequence
  Description of Artificial Sequence: Synthetic oligonucleotide
gguagugguugugaugaua

SEQ ID NO: 3093182 - RNA, 19 nt, Artificial Sequence
  Description of Artificial Sequence: Synthetic oligonucleotide
caauucugguugacuuucu

SEQ ID NO: 3093183 - RNA, 19 nt, Artificial Sequence
  Description of Artificial Sequence: Synthetic oligonucleotide
gcagugucaucauuugaau

SEQ ID NO: 3093184 - RNA, 19 nt, Artificial Sequence
  Description of Artificial Sequence: Synthetic oligonucleotide
gacccggagucacugcuuu

SEQ ID NO: 3093185 - RNA, 19 nt, Artificial Sequence
  Description of Artificial Sequence: Synthetic oligonucleotide
ggcugaaccuggacugcgc

SEQ ID NO: 3093186 - RNA, 19 nt, Artificial Sequence
  Description of Artificial Sequence: Synthetic oligonucleotide
guguggucugcuguuggcu

SEQ ID NO: 3093187 - RNA, 19 nt, Artificial Sequence
  Description of Artificial Sequence: Synthetic oligonucleotide
gcccagaagugacaggagu

SEQ ID NO: 3093188 - RNA, 19 nt, Artificial Sequence
  Description of Artificial Sequence: Synthetic oligonucleotide
cucguggaguccagggagu

SEQ ID NO: 3093189 - RNA, 19 nt, Artificial Sequence
  Description of Artificial Sequence: Synthetic oligonucleotide
ccauucccauugguagugg

SEQ ID NO: 3093190 - RNA, 19 nt, Artificial Sequence
  Description of Artificial Sequence: Synthetic oligonucleotide
ccauugguagugguuguga

SEQ ID NO: 3093191 - RNA, 19 nt, Artificial Sequence
  Description of Artificial Sequence: Synthetic oligonucleotide
gccacacuacugucuguga

SEQ ID NO: 3093192 - RNA, 19 nt, Artificial Sequence
  Description of Artificial Sequence: Synthetic oligonucleotide
gagaggguagaggcuugcu

SEQ ID NO: 3093193 - RNA, 19 nt, Artificial Sequence
  Description of Artificial Sequence: Synthetic oligonucleotide
cuggggcucguggagucca

SEQ ID NO: 3093194 - RNA, 19 nt, Artificial Sequence
  Description of Artificial Sequence: Synthetic oligonucleotide
gcgccggagaggguagagg

SEQ ID NO: 3093195 - RNA, 19 nt, Artificial Sequence
  Description of Artificial Sequence: Synthetic oligonucleotide
ggcuggggcucguggaguc

SEQ ID NO: 3093196 - RNA, 19 nt, Artificial Sequence
  Description of Artificial Sequence: Synthetic oligonucleotide
gcucccauucccauuggua

SEQ ID NO: 3093197 - RNA, 19 nt, Artificial Sequence
  Description of Artificial Sequence: Synthetic oligonucleotide
cugcuuucacuugcccaga

SEQ ID NO: 3093198 - RNA, 19 nt, Artificial Sequence
  Description of Artificial Sequence: Synthetic oligonucleotide
cccauugguagugguugug

SEQ ID NO: 3093199 - RNA, 19 nt, Artificial Sequence
  Description of Artificial Sequence: Synthetic oligonucleotide
ccggagucacugcuuucac

SEQ ID NO: 3093200 - RNA, 19 nt, Artificial Sequence
  Description of Artificial Sequence: Synthetic oligonucleotide
ggucugcuguuggcugggg

SEQ ID NO: 3093201 - RNA, 19 nt, Artificial Sequence
  Description of Artificial Sequence: Synthetic oligonucleotide
ggguagaggcuugcuuuuc

SEQ ID NO: 3093202 - RNA, 19 nt, Artificial Sequence
  Description of Artificial Sequence: Synthetic oligonucleotide
cccggagucacugcuuuca

SEQ ID NO: 3093203 - RNA, 19 nt, Artificial Sequence
  Description of Artificial Sequence: Synthetic oligonucleotide
cuguuggcuggggcucgug

SEQ ID NO: 3093204 - RNA, 19 nt, Artificial Sequence
  Description of Artificial Sequence: Synthetic oligonucleotide
guccagggagucacugugu

SEQ ID NO: 3093205 - RNA, 19 nt, Artificial Sequence
  Description of Artificial Sequence: Synthetic oligonucleotide
gcuggggcucguggagucc

SEQ ID NO: 3093206 - RNA, 19 nt, Artificial Sequence
  Description of Artificial Sequence: Synthetic oligonucleotide
cugugugcagagggcugaa

SEQ ID NO: 3093207 - RNA, 19 nt, Artificial Sequence
  Description of Artificial Sequence: Synthetic oligonucleotide
cggagaggguagaggcuug

SEQ ID NO: 3093208 - RNA, 19 nt, Artificial Sequence
  Description of Artificial Sequence: Synthetic oligonucleotide
ccacacuacugucugugau

SEQ ID NO: 3093209 - RNA, 19 nt, Artificial Sequence
  Description of Artificial Sequence: Synthetic oligonucleotide
gcagagggcugaaccugga

SEQ ID NO: 3093210 - RNA, 19 nt, Artificial Sequence
  Description of Artificial Sequence: Synthetic oligonucleotide
ccuccaauucugguugacu

SEQ ID NO: 3093211 - RNA, 19 nt, Artificial Sequence
  Description of Artificial Sequence: Synthetic oligonucleotide
ggcuugcuuuuccuccaau

SEQ ID NO: 3093212 - RNA, 19 nt, Artificial Sequence
  Description of Artificial Sequence: Synthetic oligonucleotide
cugcgccggagaggguaga

SEQ ID NO: 3093213 - RNA, 19 nt, Artificial Sequence
  Description of Artificial Sequence: Synthetic oligonucleotide
gccggagaggguagaggcu

SEQ ID NO: 3093214 - RNA, 19 nt, Artificial Sequence
  Description of Artificial Sequence: Synthetic oligonucleotide
ccggagaggguagaggcuu

SEQ ID NO: 3093215 - RNA, 19 nt, Artificial Sequence
  Description of Artificial Sequence: Synthetic oligonucleotide
cggagucacugcuuucacu

SEQ ID NO: 3093216 - RNA, 19 nt, Artificial Sequence
  Description of Artificial Sequence: Synthetic oligonucleotide
gcacuucacugcucccauu

SEQ ID NO: 3093217 - RNA, 19 nt, Artificial Sequence
  Description of Artificial Sequence: Synthetic oligonucleotide
gcuguuggcuggggcucgu

SEQ ID NO: 3093218 - RNA, 19 nt, Artificial Sequence
  Description of Artificial Sequence: Synthetic oligonucleotide
ggacugcgccggagagggu

SEQ ID NO: 3093219 - RNA, 19 nt, Artificial Sequence
  Description of Artificial Sequence: Synthetic oligonucleotide
aauguacuuagauaggucc

SEQ ID NO: 3093220 - RNA, 19 nt, Artificial Sequence
  Description of Artificial Sequence: Synthetic oligonucleotide
aaugguuccauccagcacc

SEQ ID NO: 3093221 - RNA, 19 nt, Artificial Sequence
  Description of Artificial Sequence: Synthetic oligonucleotide
uuagauagguccaagaugc

SEQ ID NO: 3093222 - RNA, 19 nt, Artificial Sequence
  Description of Artificial Sequence: Synthetic oligonucleotide
ugucaauguacuuagauag

SEQ ID NO: 3093223 - RNA, 19 nt, Artificial Sequence
  Description of Artificial Sequence: Synthetic oligonucleotide
uggaacuucacucggaugg

SEQ ID NO: 3093224 - RNA, 19 nt, Artificial Sequence
  Description of Artificial Sequence: Synthetic oligonucleotide
augagcaccacugaggugc

SEQ ID NO: 3093225 - RNA, 19 nt, Artificial Sequence
  Description of Artificial Sequence: Synthetic oligonucleotide
cuucuuuucucuuuguccg

SEQ ID NO: 3093226 - RNA, 19 nt, Artificial Sequence
  Description of Artificial Sequence: Synthetic oligonucleotide
ucuucugucagcuuguacu

SEQ ID NO: 3093227 - RNA, 19 nt, Artificial Sequence
  Description of Artificial Sequence: Synthetic oligonucleotide
ucucucauguacucaaugg

SEQ ID NO: 3093228 - RNA, 19 nt, Artificial Sequence
  Description of Artificial Sequence: Synthetic oligonucleotide
aucagggucucucauguac

SEQ ID NO: 3093229 - RNA, 19 nt, Artificial Sequence
  Description of Artificial Sequence: Synthetic oligonucleotide
cuuagauagguccaagaug

SEQ ID NO: 3093230 - RNA, 19 nt, Artificial Sequence
  Description of Artificial Sequence: Synthetic oligonucleotide
uuggggauagccuccaugc

SEQ ID NO: 3093231 - RNA, 19 nt, Artificial Sequence
  Description of Artificial Sequence: Synthetic oligonucleotide
aacccuuucaggaucccgc

SEQ ID NO: 3093232 - RNA, 19 nt, Artificial Sequence
  Description of Artificial Sequence: Synthetic oligonucleotide
ucaucagggucucucaugu

SEQ ID NO: 3093233 - RNA, 19 nt, Artificial Sequence
  Description of Artificial Sequence: Synthetic oligonucleotide
uguacuggucaucaggguc

SEQ ID NO: 3093234 - RNA, 19 nt, Artificial Sequence
  Description of Artificial Sequence: Synthetic oligonucleotide
ucaauguacuuagauaggu

SEQ ID NO: 3093235 - RNA, 19 nt, Artificial Sequence
  Description of Artificial Sequence: Synthetic oligonucleotide
gucuugucaauguacuuag

SEQ ID NO: 3093236 - RNA, 19 nt, Artificial Sequence
  Description of Artificial Sequence: Synthetic oligonucleotide
ugggucaaacccuuucagg

SEQ ID NO: 3093237 - RNA, 19 nt, Artificial Sequence
  Description of Artificial Sequence: Synthetic oligonucleotide
ucauguacucaaugguucc

SEQ ID NO: 3093238 - RNA, 19 nt, Artificial Sequence
  Description of Artificial Sequence: Synthetic oligonucleotide
acuuagauagguccaagau

SEQ ID NO: 3093239 - RNA, 19 nt, Artificial Sequence
  Description of Artificial Sequence: Synthetic oligonucleotide
cagaugagcaccacugagg

SEQ ID NO: 3093240 - RNA, 19 nt, Artificial Sequence
  Description of Artificial Sequence: Synthetic oligonucleotide
uacucaaugguuccaucca

SEQ ID NO: 3093241 - RNA, 19 nt, Artificial Sequence
  Description of Artificial Sequence: Synthetic oligonucleotide
agaugagcaccacugaggu

SEQ ID NO: 3093242 - RNA, 19 nt, Artificial Sequence
  Description of Artificial Sequence: Synthetic oligonucleotide
guacucaaugguuccaucc

SEQ ID NO: 3093243 - RNA, 19 nt, Artificial Sequence
  Description of Artificial Sequence: Synthetic oligonucleotide
ucaaacccuuucaggaucc

SEQ ID NO: 3093244 - RNA, 19 nt, Artificial Sequence
  Description of Artificial Sequence: Synthetic oligonucleotide
ucaaugguuccauccagca

SEQ ID NO: 3093245 - RNA, 19 nt, Artificial Sequence
  Description of Artificial Sequence: Synthetic oligonucleotide
uugucaauguacuuagaua

SEQ ID NO: 3093246 - RNA, 19 nt, Artificial Sequence
  Description of Artificial Sequence: Synthetic oligonucleotide
ucucauguacucaaugguu

SEQ ID NO: 3093247 - RNA, 19 nt, Artificial Sequence
  Description of Artificial Sequence: Synthetic oligonucleotide
uccaagaugcuuucuuucu

SEQ ID NO: 3093248 - RNA, 19 nt, Artificial Sequence
  Description of Artificial Sequence: Synthetic oligonucleotide
ugcacgaagggguugggga

SEQ ID NO: 3093249 - RNA, 19 nt, Artificial Sequence
  Description of Artificial Sequence: Synthetic oligonucleotide
agggguuggggauagccuc

SEQ ID NO: 3093250 - RNA, 19 nt, Artificial Sequence
  Description of Artificial Sequence: Synthetic oligonucleotide
uacuuagauagguccaaga

SEQ ID NO: 3093251 - RNA, 19 nt, Artificial Sequence
  Description of Artificial Sequence: Synthetic oligonucleotide
ugucagcuuguacugguca

SEQ ID NO: 3093252 - RNA, 19 nt, Artificial Sequence
  Description of Artificial Sequence: Synthetic oligonucleotide
uccugcugcugcacgaagg

SEQ ID NO: 3093253 - RNA, 19 nt, Artificial Sequence
  Description of Artificial Sequence: Synthetic oligonucleotide
gauggucuugucaauguac

SEQ ID NO: 3093254 - RNA, 19 nt, Artificial Sequence
  Description of Artificial Sequence: Synthetic oligonucleotide
auagguccaagaugcuuuc

SEQ ID NO: 3093255 - RNA, 19 nt, Artificial Sequence
  Description of Artificial Sequence: Synthetic oligonucleotide
acucaaugguuccauccag

SEQ ID NO: 3093256 - RNA, 19 nt, Artificial Sequence
  Description of Artificial Sequence: Synthetic oligonucleotide
aaacccuuucaggaucccg

SEQ ID NO: 3093257 - RNA, 19 nt, Artificial Sequence
  Description of Artificial Sequence: Synthetic oligonucleotide
cucaaugguuccauccagc

SEQ ID NO: 3093258 - RNA, 19 nt, Artificial Sequence
  Description of Artificial Sequence: Synthetic oligonucleotide
uccugugggcagaugagca

SEQ ID NO: 3093259 - RNA, 19 nt, Artificial Sequence
  Description of Artificial Sequence: Synthetic oligonucleotide
cuucugucagcuuguacug

SEQ ID NO: 3093260 - RNA, 19 nt, Artificial Sequence
  Description of Artificial Sequence: Synthetic oligonucleotide
caagaugcuuucuuucuuc

SEQ ID NO: 3093261 - RNA, 19 nt, Artificial Sequence
  Description of Artificial Sequence: Synthetic oligonucleotide
uugagcagugggucaaacc

SEQ ID NO: 3093262 - RNA, 19 nt, Artificial Sequence
  Description of Artificial Sequence: Synthetic oligonucleotide
ucugucagcuuguacuggu

SEQ ID NO: 3093263 - RNA, 19 nt, Artificial Sequence
  Description of Artificial Sequence: Synthetic oligonucleotide
uucccggccacccuggaac

SEQ ID NO: 3093264 - RNA, 19 nt, Artificial Sequence
  Description of Artificial Sequence: Synthetic oligonucleotide
acucggauggucuugucaa

SEQ ID NO: 3093265 - RNA, 19 nt, Artificial Sequence
  Description of Artificial Sequence: Synthetic oligonucleotide
cacccuggaacuucacucg

SEQ ID NO: 3093266 - RNA, 19 nt, Artificial Sequence
  Description of Artificial Sequence: Synthetic oligonucleotide
gaagggguuggggauagcc

SEQ ID NO: 3093267 - RNA, 19 nt, Artificial Sequence
  Description of Artificial Sequence: Synthetic oligonucleotide
caauguacuuagauagguc

SEQ ID NO: 3093268 - RNA, 19 nt, Artificial Sequence
  Description of Artificial Sequence: Synthetic oligonucleotide
cucuuuguccgccaucuug

SEQ ID NO: 3093269 - RNA, 19 nt, Artificial Sequence
  Description of Artificial Sequence: Synthetic oligonucleotide
ucagggucucucauguacu

SEQ ID NO: 3093270 - RNA, 19 nt, Artificial Sequence
  Description of Artificial Sequence: Synthetic oligonucleotide
gucaauguacuuagauagg

SEQ ID NO: 3093271 - RNA, 19 nt, Artificial Sequence
  Description of Artificial Sequence: Synthetic oligonucleotide
caccacaagccccagcugc

SEQ ID NO: 3093272 - RNA, 19 nt, Artificial Sequence
  Description of Artificial Sequence: Synthetic oligonucleotide
ucuuuucucuuuguccgcc

SEQ ID NO: 3093273 - RNA, 19 nt, Artificial Sequence
  Description of Artificial Sequence: Synthetic oligonucleotide
accacugaggugccucggc

SEQ ID NO: 3093274 - RNA, 19 nt, Artificial Sequence
  Description of Artificial Sequence: Synthetic oligonucleotide
gaucccgcuggcuucccgg

SEQ ID NO: 3093275 - RNA, 19 nt, Artificial Sequence
  Description of Artificial Sequence: Synthetic oligonucleotide
gguuccauccagcaccagg

SEQ ID NO: 3093276 - RNA, 19 nt, Artificial Sequence
  Description of Artificial Sequence: Synthetic oligonucleotide
uguacuuagauagguccaa

SEQ ID NO: 3093277 - RNA, 19 nt, Artificial Sequence
  Description of Artificial Sequence: Synthetic oligonucleotide
uucaggaucccgcuggcuu

SEQ ID NO: 3093278 - RNA, 19 nt, Artificial Sequence
  Description of Artificial Sequence: Synthetic oligonucleotide
gauagccuccaugccaucc

SEQ ID NO: 3093279 - RNA, 19 nt, Artificial Sequence
  Description of Artificial Sequence: Synthetic oligonucleotide
auccugugggcagaugagc

SEQ ID NO: 3093280 - RNA, 19 nt, Artificial Sequence
  Description of Artificial Sequence: Synthetic oligonucleotide
aacuucacucggauggucu

SEQ ID NO: 3093281 - RNA, 19 nt, Artificial Sequence
  Description of Artificial Sequence: Synthetic oligonucleotide
cucggcacaccacaagccc

SEQ ID NO: 3093282 - RNA, 19 nt, Artificial Sequence
  Description of Artificial Sequence: Synthetic oligonucleotide
ucggcacaccacaagcccc

SEQ ID NO: 3093283 - RNA, 19 nt, Artificial Sequence
  Description of Artificial Sequence: Synthetic oligonucleotide
gucucucauguacucaaug

SEQ ID NO: 3093284 - RNA, 19 nt, Artificial Sequence
  Description of Artificial Sequence: Synthetic oligonucleotide
gucaaacccuuucaggauc

SEQ ID NO: 3093285 - RNA, 19 nt, Artificial Sequence
  Description of Artificial Sequence: Synthetic oligonucleotide
gugggucaaacccuuucag

SEQ ID NO: 3093286 - RNA, 19 nt, Artificial Sequence
  Description of Artificial Sequence: Synthetic oligonucleotide
guuggggauagccuccaug

SEQ ID NO: 3093287 - RNA, 19 nt, Artificial Sequence
  Description of Artificial Sequence: Synthetic oligonucleotide
caccagguugagcaguggg

SEQ ID NO: 3093288 - RNA, 19 nt, Artificial Sequence
  Description of Artificial Sequence: Synthetic oligonucleotide
ugcugcacgaagggguugg

SEQ ID NO: 3093289 - RNA, 19 nt, Artificial Sequence
  Description of Artificial Sequence: Synthetic oligonucleotide
gggucaaacccuuucagga

SEQ ID NO: 3093290 - RNA, 19 nt, Artificial Sequence
  Description of Artificial Sequence: Synthetic oligonucleotide
uucugucagcuuguacugg

SEQ ID NO: 3093291 - RNA, 19 nt, Artificial Sequence
  Description of Artificial Sequence: Synthetic oligonucleotide
gucaucagggucucucaug

SEQ ID NO: 3093292 - RNA, 19 nt, Artificial Sequence
  Description of Artificial Sequence: Synthetic oligonucleotide
ugugggcagaugagcacca

SEQ ID NO: 3093293 - RNA, 19 nt, Artificial Sequence
  Description of Artificial Sequence: Synthetic oligonucleotide
uguacucaaugguuccauc

SEQ ID NO: 3093294 - RNA, 19 nt, Artificial Sequence
  Description of Artificial Sequence: Synthetic oligonucleotide
ugccgugugucuucuguca

SEQ ID NO: 3093295 - RNA, 19 nt, Artificial Sequence
  Description of Artificial Sequence: Synthetic oligonucleotide
auagccuccaugccauccu

SEQ ID NO: 3093296 - RNA, 19 nt, Artificial Sequence
  Description of Artificial Sequence: Synthetic oligonucleotide
ucuugucaauguacuuaga

SEQ ID NO: 3093297 - RNA, 19 nt, Artificial Sequence
  Description of Artificial Sequence: Synthetic oligonucleotide
acccuggaacuucacucgg

SEQ ID NO: 3093298 - RNA, 19 nt, Artificial Sequence
  Description of Artificial Sequence: Synthetic oligonucleotide
ucggauggucuugucaaug

SEQ ID NO: 3093299 - RNA, 19 nt, Artificial Sequence
  Description of Artificial Sequence: Synthetic oligonucleotide
ccuuucaggaucccgcugg

SEQ ID NO: 3093300 - RNA, 19 nt, Artificial Sequence
  Description of Artificial Sequence: Synthetic oligonucleotide
uggggauagccuccaugcc

SEQ ID NO: 3093301 - RNA, 19 nt, Artificial Sequence
  Description of Artificial Sequence: Synthetic oligonucleotide
guccaagaugcuuucuuuc

SEQ ID NO: 3093302 - RNA, 19 nt, Artificial Sequence
  Description of Artificial Sequence: Synthetic oligonucleotide
auggucuugucaauguacu

SEQ ID NO: 3093303 - RNA, 19 nt, Artificial Sequence
  Description of Artificial Sequence: Synthetic oligonucleotide
ugggcagaugagcaccacu

SEQ ID NO: 3093304 - RNA, 19 nt, Artificial Sequence
  Description of Artificial Sequence: Synthetic oligonucleotide
accacaagccccagcugcc

SEQ ID NO: 3093305 - RNA, 19 nt, Artificial Sequence
  Description of Artificial Sequence: Synthetic oligonucleotide
acugaggugccucggcaca

SEQ ID NO: 3093306 - RNA, 19 nt, Artificial Sequence
  Description of Artificial Sequence: Synthetic oligonucleotide
agcaccacugaggugccuc

SEQ ID NO: 3093307 - RNA, 19 nt, Artificial Sequence
  Description of Artificial Sequence: Synthetic oligonucleotide
uggucaucagggucucuca

SEQ ID NO: 3093308 - RNA, 19 nt, Artificial Sequence
  Description of Artificial Sequence: Synthetic oligonucleotide
caaugguuccauccagcac

SEQ ID NO: 3093309 - RNA, 19 nt, Artificial Sequence
  Description of Artificial Sequence: Synthetic oligonucleotide
cugugggcagaugagcacc

SEQ ID NO: 3093310 - RNA, 19 nt, Artificial Sequence
  Description of Artificial Sequence: Synthetic oligonucleotide
ucaggaucccgcuggcuuc

SEQ ID NO: 3093311 - RNA, 19 nt, Artificial Sequence
  Description of Artificial Sequence: Synthetic oligonucleotide
auguacuuagauaggucca

SEQ ID NO: 3093312 - RNA, 19 nt, Artificial Sequence
  Description of Artificial Sequence: Synthetic oligonucleotide
aucccgcuggcuucccggc

SEQ ID NO: 3093313 - RNA, 19 nt, Artificial Sequence
  Description of Artificial Sequence: Synthetic oligonucleotide
cuugucaauguacuuagau

SEQ ID NO: 3093314 - RNA, 19 nt, Artificial Sequence
  Description of Artificial Sequence: Synthetic oligonucleotide
aagggguuggggauagccu

SEQ ID NO: 3093315 - RNA, 19 nt, Artificial Sequence
  Description of Artificial Sequence: Synthetic oligonucleotide
guacuuagauagguccaag

SEQ ID NO: 3093316 - RNA, 19 nt, Artificial Sequence
  Description of Artificial Sequence: Synthetic oligonucleotide
cuuucaggaucccgcuggc

SEQ ID NO: 3093317 - RNA, 19 nt, Artificial Sequence
  Description of Artificial Sequence: Synthetic oligonucleotide
uagauagguccaagaugcu

SEQ ID NO: 3093318 - RNA, 19 nt, Artificial Sequence
  Description of Artificial Sequence: Synthetic oligonucleotide
ugccucggcacaccacaag

SEQ ID NO: 3093319 - RNA, 19 nt, Artificial Sequence
  Description of Artificial Sequence: Synthetic oligonucleotide
gauagguccaagaugcuuu

SEQ ID NO: 3093320 - RNA, 19 nt, Artificial Sequence
  Description of Artificial Sequence: Synthetic oligonucleotide
agguccaagaugcuuucuu

SEQ ID NO: 3093321 - RNA, 19 nt, Artificial Sequence
  Description of Artificial Sequence: Synthetic oligonucleotide
uucacucggauggucuugu

SEQ ID NO: 3093322 - RNA, 19 nt, Artificial Sequence
  Description of Artificial Sequence: Synthetic oligonucleotide
cuggaacuucacucggaug

SEQ ID NO: 3093323 - RNA, 19 nt, Artificial Sequence
  Description of Artificial Sequence: Synthetic oligonucleotide
ugagcaccacugaggugcc

SEQ ID NO: 3093324 - RNA, 19 nt, Artificial Sequence
  Description of Artificial Sequence: Synthetic oligonucleotide
ucagcuuguacuggucauc

SEQ ID NO: 3093325 - RNA, 19 nt, Artificial Sequence
  Description of Artificial Sequence: Synthetic oligonucleotide
uagccuccaugccauccug

SEQ ID NO: 3093326 - RNA, 19 nt, Artificial Sequence
  Description of Artificial Sequence: Synthetic oligonucleotide
agcuuguacuggucaucag

SEQ ID NO: 3093327 - RNA, 19 nt, Artificial Sequence
  Description of Artificial Sequence: Synthetic oligonucleotide
acaagccccagcugccgug

SEQ ID NO: 3093328 - RNA, 19 nt, Artificial Sequence
  Description of Artificial Sequence: Synthetic oligonucleotide
cacugaggugccucggcac

SEQ ID NO: 3093329 - RNA, 19 nt, Artificial Sequence
  Description of Artificial Sequence: Synthetic oligonucleotide
cuggucaucagggucucuc

SEQ ID NO: 3093330 - RNA, 19 nt, Artificial Sequence
  Description of Artificial Sequence: Synthetic oligonucleotide
cagugggucaaacccuuuc

SEQ ID NO: 3093331 - RNA, 19 nt, Artificial Sequence
  Description of Artificial Sequence: Synthetic oligonucleotide
uccaugccauccugugggc

SEQ ID NO: 3093332 - RNA, 19 nt, Artificial Sequence
  Description of Artificial Sequence: Synthetic oligonucleotide
acccuuucaggaucccgcu

SEQ ID NO: 3093333 - RNA, 19 nt, Artificial Sequence
  Description of Artificial Sequence: Synthetic oligonucleotide
cucucauguacucaauggu

SEQ ID NO: 3093334 - RNA, 19 nt, Artificial Sequence
  Description of Artificial Sequence: Synthetic oligonucleotide
agaugcuuucuuucuucuu

SEQ ID NO: 3093335 - RNA, 19 nt, Artificial Sequence
  Description of Artificial Sequence: Synthetic oligonucleotide
ggggauagccuccaugcca

SEQ ID NO: 3093336 - RNA, 19 nt, Artificial Sequence
  Description of Artificial Sequence: Synthetic oligonucleotide
uggucuugucaauguacuu

SEQ ID NO: 3093337 - RNA, 19 nt, Artificial Sequence
  Description of Artificial Sequence: Synthetic oligonucleotide
acuucacucggauggucuu

SEQ ID NO: 3093338 - RNA, 19 nt, Artificial Sequence
  Description of Artificial Sequence: Synthetic oligonucleotide
ccugcugcugcacgaaggg

SEQ ID NO: 3093339 - RNA, 19 nt, Artificial Sequence
  Description of Artificial Sequence: Synthetic oligonucleotide
ccacccuggaacuucacuc

SEQ ID NO: 3093340 - RNA, 19 nt, Artificial Sequence
  Description of Artificial Sequence: Synthetic oligonucleotide
cacaccacaagccccagcu

SEQ ID NO: 3093341 - RNA, 19 nt, Artificial Sequence
  Description of Artificial Sequence: Synthetic oligonucleotide
cagggucucucauguacuc

SEQ ID NO: 3093342 - RNA, 19 nt, Artificial Sequence
  Description of Artificial Sequence: Synthetic oligonucleotide
auguacucaaugguuccau

SEQ ID NO: 3093343 - RNA, 19 nt, Artificial Sequence
  Description of Artificial Sequence: Synthetic oligonucleotide
acaccacaagccccagcug

SEQ ID NO: 3093344 - RNA, 19 nt, Artificial Sequence
  Description of Artificial Sequence: Synthetic oligonucleotide
ggugccucggcacaccaca

SEQ ID NO: 3093345 - RNA, 19 nt, Artificial Sequence
  Description of Artificial Sequence: Synthetic oligonucleotide
guuccauccagcaccaggu

SEQ ID NO: 3093346 - RNA, 19 nt, Artificial Sequence
  Description of Artificial Sequence: Synthetic oligonucleotide
acgaagggguuggggauag

SEQ ID NO: 3093347 - RNA, 19 nt, Artificial Sequence
  Description of Artificial Sequence: Synthetic oligonucleotide
cacucggauggucuuguca

SEQ ID NO: 3093348 - RNA, 19 nt, Artificial Sequence
  Description of Artificial Sequence: Synthetic oligonucleotide
gaacuucacucggaugguc

SEQ ID NO: 3093349 - RNA, 19 nt, Artificial Sequence
  Description of Artificial Sequence: Synthetic oligonucleotide
cuuuucucuuuguccgcca

SEQ ID NO: 3093350 - RNA, 19 nt, Artificial Sequence
  Description of Artificial Sequence: Synthetic oligonucleotide
gccucggcacaccacaagc

SEQ ID NO: 3093351 - RNA, 19 nt, Artificial Sequence
  Description of Artificial Sequence: Synthetic oligonucleotide
cuucacucggauggucuug

SEQ ID NO: 3093352 - RNA, 19 nt, Artificial Sequence
  Description of Artificial Sequence: Synthetic oligonucleotide
cugucagcuuguacugguc

SEQ ID NO: 3093353 - RNA, 19 nt, Artificial Sequence
  Description of Artificial Sequence: Synthetic oligonucleotide
ggucuugucaauguacuua

SEQ ID NO: 3093354 - RNA, 19 nt, Artificial Sequence
  Description of Artificial Sequence: Synthetic oligonucleotide
guacuggucaucagggucu

SEQ ID NO: 3093355 - RNA, 19 nt, Artificial Sequence
  Description of Artificial Sequence: Synthetic oligonucleotide
uuucaggaucccgcuggcu

SEQ ID NO: 3093356 - RNA, 19 nt, Artificial Sequence
  Description of Artificial Sequence: Synthetic oligonucleotide
ugaggugccucggcacacc

SEQ ID NO: 3093357 - RNA, 19 nt, Artificial Sequence
  Description of Artificial Sequence: Synthetic oligonucleotide
cauguacucaaugguucca

SEQ ID NO: 3093358 - RNA, 19 nt, Artificial Sequence
  Description of Artificial Sequence: Synthetic oligonucleotide
cugcacgaagggguugggg

SEQ ID NO: 3093359 - RNA, 19 nt, Artificial Sequence
  Description of Artificial Sequence: Synthetic oligonucleotide
cagguugagcaguggguca

SEQ ID NO: 3093360 - RNA, 19 nt, Artificial Sequence
  Description of Artificial Sequence: Synthetic oligonucleotide
agcaccagguugagcagug

SEQ ID NO: 3093361 - RNA, 19 nt, Artificial Sequence
  Description of Artificial Sequence: Synthetic oligonucleotide
cugccgugugucuucuguc

SEQ ID NO: 3093362 - RNA, 19 nt, Artificial Sequence
  Description of Artificial Sequence: Synthetic oligonucleotide
uuccauccagcaccagguu

SEQ ID NO: 3093363 - RNA, 19 nt, Artificial Sequence
  Description of Artificial Sequence: Synthetic oligonucleotide
cagcuuguacuggucauca

SEQ ID NO: 3093364 - RNA, 19 nt, Artificial Sequence
  Description of Artificial Sequence: Synthetic oligonucleotide
agggucucucauguacuca

SEQ ID NO: 3093365 - RNA, 19 nt, Artificial Sequence
  Description of Artificial Sequence: Synthetic oligonucleotide
ccucggcacaccacaagcc

SEQ ID NO: 3093366 - RNA, 19 nt, Artificial Sequence
  Description of Artificial Sequence: Synthetic oligonucleotide
cugcugcugcacgaagggg

SEQ ID NO: 3093367 - RNA, 19 nt, Artificial Sequence
  Description of Artificial Sequence: Synthetic oligonucleotide
gggucucucauguacucaa

SEQ ID NO: 3093368 - RNA, 19 nt, Artificial Sequence
  Description of Artificial Sequence: Synthetic oligonucleotide
gcaccacugaggugccucg

SEQ ID NO: 3093369 - RNA, 19 nt, Artificial Sequence
  Description of Artificial Sequence: Synthetic oligonucleotide
agguugagcagugggucaa

SEQ ID NO: 3093370 - RNA, 19 nt, Artificial Sequence
  Description of Artificial Sequence: Synthetic oligonucleotide
ucccgcuggcuucccggcc

SEQ ID NO: 3093371 - RNA, 19 nt, Artificial Sequence
  Description of Artificial Sequence: Synthetic oligonucleotide
uagguccaagaugcuuucu

SEQ ID NO: 3093372 - RNA, 19 nt, Artificial Sequence
  Description of Artificial Sequence: Synthetic oligonucleotide
caaacccuuucaggauccc

SEQ ID NO: 3093373 - RNA, 19 nt, Artificial Sequence
  Description of Artificial Sequence: Synthetic oligonucleotide
gaggugccucggcacacca

SEQ ID NO: 3093374 - RNA, 19 nt, Artificial Sequence
  Description of Artificial Sequence: Synthetic oligonucleotide
gccgugugucuucugucag

SEQ ID NO: 3093375 - RNA, 19 nt, Artificial Sequence
  Description of Artificial Sequence: Synthetic oligonucleotide
caggaucccgcuggcuucc

SEQ ID NO: 3093376 - RNA, 19 nt, Artificial Sequence
  Description of Artificial Sequence: Synthetic oligonucleotide
ucucuuuguccgccaucuu

SEQ ID NO: 3093377 - RNA, 19 nt, Artificial Sequence
  Description of Artificial Sequence: Synthetic oligonucleotide
ucccggccacccuggaacu

SEQ ID NO: 3093378 - RNA, 19 nt, Artificial Sequence
  Description of Artificial Sequence: Synthetic oligonucleotide
gccuccaugccauccugug

SEQ ID NO: 3093379 - RNA, 19 nt, Artificial Sequence
  Description of Artificial Sequence: Synthetic oligonucleotide
agcagugggucaaacccuu

SEQ ID NO: 3093380 - RNA, 19 nt, Artificial Sequence
  Description of Artificial Sequence: Synthetic oligonucleotide
uacuggucaucagggucuc

SEQ ID NO: 3093381 - RNA, 19 nt, Artificial Sequence
  Description of Artificial Sequence: Synthetic oligonucleotide
cugaggugccucggcacac

SEQ ID NO: 3093382 - RNA, 19 nt, Artificial Sequence
  Description of Artificial Sequence: Synthetic oligonucleotide
ccugugggcagaugagcac

SEQ ID NO: 3093383 - RNA, 19 nt, Artificial Sequence
  Description of Artificial Sequence: Synthetic oligonucleotide
gucagcuuguacuggucau

SEQ ID NO: 3093384 - RNA, 19 nt, Artificial Sequence
  Description of Artificial Sequence: Synthetic oligonucleotide
caccacugaggugccucgg

SEQ ID NO: 3093385 - RNA, 19 nt, Artificial Sequence
  Description of Artificial Sequence: Synthetic oligonucleotide
ucacucggauggucuuguc

SEQ ID NO: 3093386 - RNA, 19 nt, Artificial Sequence
  Description of Artificial Sequence: Synthetic oligonucleotide
gagcagugggucaaacccu

SEQ ID NO: 3093387 - RNA, 19 nt, Artificial Sequence
  Description of Artificial Sequence: Synthetic oligonucleotide
ugucuucugucagcuugua

SEQ ID NO: 3093388 - RNA, 19 nt, Artificial Sequence
  Description of Artificial Sequence: Synthetic oligonucleotide
aggugccucggcacaccac

SEQ ID NO: 3093389 - RNA, 19 nt, Artificial Sequence
  Description of Artificial Sequence: Synthetic oligonucleotide
ggauggucuugucaaugua

SEQ ID NO: 3093390 - RNA, 19 nt, Artificial Sequence
  Description of Artificial Sequence: Synthetic oligonucleotide
aggaucccgcuggcuuccc

SEQ ID NO: 3093391 - RNA, 19 nt, Artificial Sequence
  Description of Artificial Sequence: Synthetic oligonucleotide
ggucaaacccuuucaggau

SEQ ID NO: 3093392 - RNA, 19 nt, Artificial Sequence
  Description of Artificial Sequence: Synthetic oligonucleotide
ggaucccgcuggcuucccg

SEQ ID NO: 3093393 - RNA, 19 nt, Artificial Sequence
  Description of Artificial Sequence: Synthetic oligonucleotide
gggguuggggauagccucc

SEQ ID NO: 3093394 - RNA, 19 nt, Artificial Sequence
  Description of Artificial Sequence: Synthetic oligonucleotide
gcuggcuucccggccaccc

SEQ ID NO: 3093395 - RNA, 19 nt, Artificial Sequence
  Description of Artificial Sequence: Synthetic oligonucleotide
gguccaagaugcuuucuuu

SEQ ID NO: 3093396 - RNA, 19 nt, Artificial Sequence
  Description of Artificial Sequence: Synthetic oligonucleotide
ugguuccauccagcaccag

SEQ ID NO: 3093397 - RNA, 19 nt, Artificial Sequence
  Description of Artificial Sequence: Synthetic oligonucleotide
gcugccgugugucuucugu

SEQ ID NO: 3093398 - RNA, 19 nt, Artificial Sequence
  Description of Artificial Sequence: Synthetic oligonucleotide
agccuccaugccauccugu

SEQ ID NO: 3093399 - RNA, 19 nt, Artificial Sequence
  Description of Artificial Sequence: Synthetic oligonucleotide
agcugccgugugucuucug

SEQ ID NO: 3093400 - RNA, 19 nt, Artificial Sequence
  Description of Artificial Sequence: Synthetic oligonucleotide
gcacaccacaagccccagc

SEQ ID NO: 3093401 - RNA, 19 nt, Artificial Sequence
  Description of Artificial Sequence: Synthetic oligonucleotide
ggcuucccggccacccugg

SEQ ID NO: 3093402 - RNA, 19 nt, Artificial Sequence
  Description of Artificial Sequence: Synthetic oligonucleotide
ugccauccugugggcagau

SEQ ID NO: 3093403 - RNA, 19 nt, Artificial Sequence
  Description of Artificial Sequence: Synthetic oligonucleotide
acuggucaucagggucucu

SEQ ID NO: 3093404 - RNA, 19 nt, Artificial Sequence
  Description of Artificial Sequence: Synthetic oligonucleotide
cccuuucaggaucccgcug

SEQ ID NO: 3093405 - RNA, 19 nt, Artificial Sequence
  Description of Artificial Sequence: Synthetic oligonucleotide
gcugcacgaagggguuggg

SEQ ID NO: 3093406 - RNA, 19 nt, Artificial Sequence
  Description of Artificial Sequence: Synthetic oligonucleotide
caucagggucucucaugua

SEQ ID NO: 3093407 - RNA, 19 nt, Artificial Sequence
  Description of Artificial Sequence: Synthetic oligonucleotide
gugggcagaugagcaccac

SEQ ID NO: 3093408 - RNA, 19 nt, Artificial Sequence
  Description of Artificial Sequence: Synthetic oligonucleotide
cacgaagggguuggggaua

SEQ ID NO: 3093409 - RNA, 19 nt, Artificial Sequence
  Description of Artificial Sequence: Synthetic oligonucleotide
gggauagccuccaugccau

SEQ ID NO: 3093410 - RNA, 19 nt, Artificial Sequence
  Description of Artificial Sequence: Synthetic oligonucleotide
cuucccggccacccuggaa

SEQ ID NO: 3093411 - RNA, 19 nt, Artificial Sequence
  Description of Artificial Sequence: Synthetic oligonucleotide
ggucaucagggucucucau

SEQ ID NO: 3093412 - RNA, 19 nt, Artificial Sequence
  Description of Artificial Sequence: Synthetic oligonucleotide
ggaacuucacucggauggu

SEQ ID NO: 3093413 - RNA, 19 nt, Artificial Sequence
  Description of Artificial Sequence: Synthetic oligonucleotide
ccacugaggugccucggca

SEQ ID NO: 3093414 - RNA, 19 nt, Artificial Sequence
  Description of Artificial Sequence: Synthetic oligonucleotide
ggauagccuccaugccauc

SEQ ID NO: 3093415 - RNA, 19 nt, Artificial Sequence
  Description of Artificial Sequence: Synthetic oligonucleotide
cucggauggucuugucaau

SEQ ID NO: 3093416 - RNA, 19 nt, Artificial Sequence
  Description of Artificial Sequence: Synthetic oligonucleotide
gcacgaagggguuggggau

SEQ ID NO: 3093417 - RNA, 19 nt, Artificial Sequence
  Description of Artificial Sequence: Synthetic oligonucleotide
ggcacaccacaagccccag

SEQ ID NO: 3093418 - RNA, 19 nt, Artificial Sequence
  Description of Artificial Sequence: Synthetic oligonucleotide
cacaagccccagcugccgu

SEQ ID NO: 3093419 - RNA, 19 nt, Artificial Sequence
  Description of Artificial Sequence: Synthetic oligonucleotide
ggguuggggauagccucca

SEQ ID NO: 3093420 - RNA, 19 nt, Artificial Sequence
  Description of Artificial Sequence: Synthetic oligonucleotide
cagcaccagguugagcagu

SEQ ID NO: 3093421 - RNA, 19 nt, Artificial Sequence
  Description of Artificial Sequence: Synthetic oligonucleotide
gugccucggcacaccacaa

SEQ ID NO: 3093422 - RNA, 19 nt, Artificial Sequence
  Description of Artificial Sequence: Synthetic oligonucleotide
ccaagaugcuuucuuucuu

SEQ ID NO: 3093423 - RNA, 19 nt, Artificial Sequence
  Description of Artificial Sequence: Synthetic oligonucleotide
cuggcuucccggccacccu

SEQ ID NO: 3093424 - RNA, 19 nt, Artificial Sequence
  Description of Artificial Sequence: Synthetic oligonucleotide
caagccccagcugccgugu

SEQ ID NO: 3093425 - RNA, 19 nt, Artificial Sequence
  Description of Artificial Sequence: Synthetic oligonucleotide
cggcacaccacaagcccca

SEQ ID NO: 3093426 - RNA, 19 nt, Artificial Sequence
  Description of Artificial Sequence: Synthetic oligonucleotide
cccgcuggcuucccggcca

SEQ ID NO: 3093427 - RNA, 19 nt, Artificial Sequence
  Description of Artificial Sequence: Synthetic oligonucleotide
cggauggucuugucaaugu

SEQ ID NO: 3093428 - RNA, 19 nt, Artificial Sequence
  Description of Artificial Sequence: Synthetic oligonucleotide
cgugugucuucugucagcu

SEQ ID NO: 3093429 - RNA, 19 nt, Artificial Sequence
  Description of Artificial Sequence: Synthetic oligonucleotide
ccaugccauccugugggca

SEQ ID NO: 3093430 - RNA, 19 nt, Artificial Sequence
  Description of Artificial Sequence: Synthetic oligonucleotide
gccauccugugggcagaug

SEQ ID NO: 3093431 - RNA, 19 nt, Artificial Sequence
  Description of Artificial Sequence: Synthetic oligonucleotide
ggucucucauguacucaau

SEQ ID NO: 3093432 - RNA, 19 nt, Artificial Sequence
  Description of Artificial Sequence: Synthetic oligonucleotide
gcuucccggccacccugga

SEQ ID NO: 3093433 - RNA, 19 nt, Artificial Sequence
  Description of Artificial Sequence: Synthetic oligonucleotide
gcugcugcacgaagggguu

SEQ ID NO: 3093434 - RNA, 19 nt, Artificial Sequence
  Description of Artificial Sequence: Synthetic oligonucleotide
ggccacccuggaacuucac

SEQ ID NO: 3093435 - RNA, 19 nt, Artificial Sequence
  Description of Artificial Sequence: Synthetic oligonucleotide
ccgcuggcuucccggccac

SEQ ID NO: 3093436 - RNA, 19 nt, Artificial Sequence
  Description of Artificial Sequence: Synthetic oligonucleotide
gguuggggauagccuccau

SEQ ID NO: 3093437 - RNA, 19 nt, Artificial Sequence
  Description of Artificial Sequence: Synthetic oligonucleotide
cagcugccgugugucuucu

SEQ ID NO: 3093438 - RNA, 19 nt, Artificial Sequence
  Description of Artificial Sequence: Synthetic oligonucleotide
cggccacccuggaacuuca

SEQ ID NO: 3093439 - RNA, 19 nt, Artificial Sequence
  Description of Artificial Sequence: Synthetic oligonucleotide
gcagugggucaaacccuuu

SEQ ID NO: 3093440 - RNA, 19 nt, Artificial Sequence
  Description of Artificial Sequence: Synthetic oligonucleotide
cccagcugccgugugucuu

SEQ ID NO: 3093441 - RNA, 19 nt, Artificial Sequence
  Description of Artificial Sequence: Synthetic oligonucleotide
cgcuggcuucccggccacc

SEQ ID NO: 3093442 - RNA, 19 nt, Artificial Sequence
  Description of Artificial Sequence: Synthetic oligonucleotide
cccggccacccuggaacuu

SEQ ID NO: 3093443 - RNA, 19 nt, Artificial Sequence
  Description of Artificial Sequence: Synthetic oligonucleotide
agagaugccaaacugcucc

SEQ ID NO: 3093444 - RNA, 19 nt, Artificial Sequence
  Description of Artificial Sequence: Synthetic oligonucleotide
uuggcuacaacauucaaag

SEQ ID NO: 3093445 - RNA, 19 nt, Artificial Sequence
  Description of Artificial Sequence: Synthetic oligonucleotide
aggcuauucaguuggaacc

SEQ ID NO: 3093446 - RNA, 19 nt, Artificial Sequence
  Description of Artificial Sequence: Synthetic oligonucleotide
gaagaugaggcuuugucgc

SEQ ID NO: 3093447 - RNA, 19 nt, Artificial Sequence
  Description of Artificial Sequence: Synthetic oligonucleotide
agaagaugaggcuuugucg

SEQ ID NO: 3093448 - RNA, 19 nt, Artificial Sequence
  Description of Artificial Sequence: Synthetic oligonucleotide
aacacaccuagcugggagc

SEQ ID NO: 3093449 - RNA, 19 nt, Artificial Sequence
  Description of Artificial Sequence: Synthetic oligonucleotide
uucaguuggaaccuggccu

SEQ ID NO: 3093450 - RNA, 19 nt, Artificial Sequence
  Description of Artificial Sequence: Synthetic oligonucleotide
uuccuguagaagaugaggc

SEQ ID NO: 3093451 - RNA, 19 nt, Artificial Sequence
  Description of Artificial Sequence: Synthetic oligonucleotide
uucaaagugguauuuccug

SEQ ID NO: 3093452 - RNA, 19 nt, Artificial Sequence
  Description of Artificial Sequence: Synthetic oligonucleotide
auucaguuggaaccuggcc

SEQ ID NO: 3093453 - RNA, 19 nt, Artificial Sequence
  Description of Artificial Sequence: Synthetic oligonucleotide
cauucaaagugguauuucc

SEQ ID NO: 3093454 - RNA, 19 nt, Artificial Sequence
  Description of Artificial Sequence: Synthetic oligonucleotide
aucucauuccuguagaaga

SEQ ID NO: 3093455 - RNA, 19 nt, Artificial Sequence
  Description of Artificial Sequence: Synthetic oligonucleotide
ucagagaugccaaacugcu

SEQ ID NO: 3093456 - RNA, 19 nt, Artificial Sequence
  Description of Artificial Sequence: Synthetic oligonucleotide
ugguauuuccugcugaggu

SEQ ID NO: 3093457 - RNA, 19 nt, Artificial Sequence
  Description of Artificial Sequence: Synthetic oligonucleotide
ucauuccuguagaagauga

SEQ ID NO: 3093458 - RNA, 19 nt, Artificial Sequence
  Description of Artificial Sequence: Synthetic oligonucleotide
uguacucauagcuggcccg

SEQ ID NO: 3093459 - RNA, 19 nt, Artificial Sequence
  Description of Artificial Sequence: Synthetic oligonucleotide
ucccaagacagccaggggc

SEQ ID NO: 3093460 - RNA, 19 nt, Artificial Sequence
  Description of Artificial Sequence: Synthetic oligonucleotide
auguacucauagcuggccc

SEQ ID NO: 3093461 - RNA, 19 nt, Artificial Sequence
  Description of Artificial Sequence: Synthetic oligonucleotide
ggcuacaacauucaaagug

SEQ ID NO: 3093462 - RNA, 19 nt, Artificial Sequence
  Description of Artificial Sequence: Synthetic oligonucleotide
guccaacacaccuagcugg

SEQ ID NO: 3093463 - RNA, 19 nt, Artificial Sequence
  Description of Artificial Sequence: Synthetic oligonucleotide
auuccuguagaagaugagg

SEQ ID NO: 3093464 - RNA, 19 nt, Artificial Sequence
  Description of Artificial Sequence: Synthetic oligonucleotide
gccaguacaagucugcucg

SEQ ID NO: 3093465 - RNA, 19 nt, Artificial Sequence
  Description of Artificial Sequence: Synthetic oligonucleotide
aaagugguauuuccugcug

SEQ ID NO: 3093466 - RNA, 19 nt, Artificial Sequence
  Description of Artificial Sequence: Synthetic oligonucleotide
aagucugcucgucucuagg

SEQ ID NO: 3093467 - RNA, 19 nt, Artificial Sequence
  Description of Artificial Sequence: Synthetic oligonucleotide
acugcucuuggcuacaaca

SEQ ID NO: 3093468 - RNA, 19 nt, Artificial Sequence
  Description of Artificial Sequence: Synthetic oligonucleotide
agucugcucgucucuaggc

SEQ ID NO: 3093469 - RNA, 19 nt, Artificial Sequence
  Description of Artificial Sequence: Synthetic oligonucleotide
gcuacaacauucaaagugg

SEQ ID NO: 3093470 - RNA, 19 nt, Artificial Sequence
  Description of Artificial Sequence: Synthetic oligonucleotide
uauucaguuggaaccuggc

SEQ ID NO: 3093471 - RNA, 19 nt, Artificial Sequence
  Description of Artificial Sequence: Synthetic oligonucleotide
uccaacacaccuagcuggg

SEQ ID NO: 3093472 - RNA, 19 nt, Artificial Sequence
  Description of Artificial Sequence: Synthetic oligonucleotide
augccaaacugcuccaagg

SEQ ID NO: 3093473 - RNA, 19 nt, Artificial Sequence
  Description of Artificial Sequence: Synthetic oligonucleotide
agugguauuuccugcugag

SEQ ID NO: 3093474 - RNA, 19 nt, Artificial Sequence
  Description of Artificial Sequence: Synthetic oligonucleotide
cuauucaguuggaaccugg

SEQ ID NO: 3093475 - RNA, 19 nt, Artificial Sequence
  Description of Artificial Sequence: Synthetic oligonucleotide
gaaccuggccuccucagag

SEQ ID NO: 3093476 - RNA, 19 nt, Artificial Sequence
  Description of Artificial Sequence: Synthetic oligonucleotide
gucaguccaacacaccuag

SEQ ID NO: 3093477 - RNA, 19 nt, Artificial Sequence
  Description of Artificial Sequence: Synthetic oligonucleotide
uugucgcauguacucauag

SEQ ID NO: 3093478 - RNA, 19 nt, Artificial Sequence
  Description of Artificial Sequence: Synthetic oligonucleotide
gaggcuuugucgcauguac

SEQ ID NO: 3093479 - RNA, 19 nt, Artificial Sequence
  Description of Artificial Sequence: Synthetic oligonucleotide
aagugguauuuccugcuga

SEQ ID NO: 3093480 - RNA, 19 nt, Artificial Sequence
  Description of Artificial Sequence: Synthetic oligonucleotide
ucugcucgucucuaggcag

SEQ ID NO: 3093481 - RNA, 19 nt, Artificial Sequence
  Description of Artificial Sequence: Synthetic oligonucleotide
aggucaguccaacacaccu

SEQ ID NO: 3093482 - RNA, 19 nt, Artificial Sequence
  Description of Artificial Sequence: Synthetic oligonucleotide
acagccaggggcccaaggg

SEQ ID NO: 3093483 - RNA, 19 nt, Artificial Sequence
  Description of Artificial Sequence: Synthetic oligonucleotide
gaucucauuccuguagaag

SEQ ID NO: 3093484 - RNA, 19 nt, Artificial Sequence
  Description of Artificial Sequence: Synthetic oligonucleotide
aguacaagucugcucgucu

SEQ ID NO: 3093485 - RNA, 19 nt, Artificial Sequence
  Description of Artificial Sequence: Synthetic oligonucleotide
aguccaacacaccuagcug

SEQ ID NO: 3093486 - RNA, 19 nt, Artificial Sequence
  Description of Artificial Sequence: Synthetic oligonucleotide
aagggaaggucaguccaac

SEQ ID NO: 3093487 - RNA, 19 nt, Artificial Sequence
  Description of Artificial Sequence: Synthetic oligonucleotide
uuccugaucucauuccugu

SEQ ID NO: 3093488 - RNA, 19 nt, Artificial Sequence
  Description of Artificial Sequence: Synthetic oligonucleotide
ucgcauguacucauagcug

SEQ ID NO: 3093489 - RNA, 19 nt, Artificial Sequence
  Description of Artificial Sequence: Synthetic oligonucleotide
acauucaaagugguauuuc

SEQ ID NO: 3093490 - RNA, 19 nt, Artificial Sequence
  Description of Artificial Sequence: Synthetic oligonucleotide
uccucagagaugccaaacu

SEQ ID NO: 3093491 - RNA, 19 nt, Artificial Sequence
  Description of Artificial Sequence: Synthetic oligonucleotide
cugaggucuuccacgaagc

SEQ ID NO: 3093492 - RNA, 19 nt, Artificial Sequence
  Description of Artificial Sequence: Synthetic oligonucleotide
ucucauuccuguagaagau

SEQ ID NO: 3093493 - RNA, 19 nt, Artificial Sequence
  Description of Artificial Sequence: Synthetic oligonucleotide
aaacugcuccaaggggucc

SEQ ID NO: 3093494 - RNA, 19 nt, Artificial Sequence
  Description of Artificial Sequence: Synthetic oligonucleotide
aagaugaggcuuugucgca

SEQ ID NO: 3093495 - RNA, 19 nt, Artificial Sequence
  Description of Artificial Sequence: Synthetic oligonucleotide
ucaguuggaaccuggccuc

SEQ ID NO: 3093496 - RNA, 19 nt, Artificial Sequence
  Description of Artificial Sequence: Synthetic oligonucleotide
cucuaggcaggcuauucag

SEQ ID NO: 3093497 - RNA, 19 nt, Artificial Sequence
  Description of Artificial Sequence: Synthetic oligonucleotide
uccuguagaagaugaggcu

SEQ ID NO: 3093498 - RNA, 19 nt, Artificial Sequence
  Description of Artificial Sequence: Synthetic oligonucleotide
cuagcugggagccaguaca

SEQ ID NO: 3093499 - RNA, 19 nt, Artificial Sequence
  Description of Artificial Sequence: Synthetic oligonucleotide
gaaggucaguccaacacac

SEQ ID NO: 3093500 - RNA, 19 nt, Artificial Sequence
  Description of Artificial Sequence: Synthetic oligonucleotide
ucuaggcaggcuauucagu

SEQ ID NO: 3093501 - RNA, 19 nt, Artificial Sequence
  Description of Artificial Sequence: Synthetic oligonucleotide
ugucgcauguacucauagc

SEQ ID NO: 3093502 - RNA, 19 nt, Artificial Sequence
  Description of Artificial Sequence: Synthetic oligonucleotide
acacaccuagcugggagcc

SEQ ID NO: 3093503 - RNA, 19 nt, Artificial Sequence
  Description of Artificial Sequence: Synthetic oligonucleotide
caacacaccuagcugggag

SEQ ID NO: 3093504 - RNA, 19 nt, Artificial Sequence
  Description of Artificial Sequence: Synthetic oligonucleotide
uccaagggguccuugccug

SEQ ID NO: 3093505 - RNA, 19 nt, Artificial Sequence
  Description of Artificial Sequence: Synthetic oligonucleotide
uacaagucugcucgucucu

SEQ ID NO: 3093506 - RNA, 19 nt, Artificial Sequence
  Description of Artificial Sequence: Synthetic oligonucleotide
aggucuuccacgaagcuga

SEQ ID NO: 3093507 - RNA, 19 nt, Artificial Sequence
  Description of Artificial Sequence: Synthetic oligonucleotide
aacauucaaagugguauuu

SEQ ID NO: 3093508 - RNA, 19 nt, Artificial Sequence
  Description of Artificial Sequence: Synthetic oligonucleotide
aaggucaguccaacacacc

SEQ ID NO: 3093509 - RNA, 19 nt, Artificial Sequence
  Description of Artificial Sequence: Synthetic oligonucleotide
gucgcauguacucauagcu

SEQ ID NO: 3093510 - RNA, 19 nt, Artificial Sequence
  Description of Artificial Sequence: Synthetic oligonucleotide
uacaacauucaaaguggua

SEQ ID NO: 3093511 - RNA, 19 nt, Artificial Sequence
  Description of Artificial Sequence: Synthetic oligonucleotide
acucauagcuggcccggcg

SEQ ID NO: 3093512 - RNA, 19 nt, Artificial Sequence
  Description of Artificial Sequence: Synthetic oligonucleotide
agccaguacaagucugcuc

SEQ ID NO: 3093513 - RNA, 19 nt, Artificial Sequence
  Description of Artificial Sequence: Synthetic oligonucleotide
cuuggcuacaacauucaaa

SEQ ID NO: 3093514 - RNA, 19 nt, Artificial Sequence
  Description of Artificial Sequence: Synthetic oligonucleotide
cugggagccaguacaaguc

SEQ ID NO: 3093515 - RNA, 19 nt, Artificial Sequence
  Description of Artificial Sequence: Synthetic oligonucleotide
cauuccuguagaagaugag

SEQ ID NO: 3093516 - RNA, 19 nt, Artificial Sequence
  Description of Artificial Sequence: Synthetic oligonucleotide
cauguacucauagcuggcc

SEQ ID NO: 3093517 - RNA, 19 nt, Artificial Sequence
  Description of Artificial Sequence: Synthetic oligonucleotide
auucaaagugguauuuccu

SEQ ID NO: 3093518 - RNA, 19 nt, Artificial Sequence
  Description of Artificial Sequence: Synthetic oligonucleotide
ugggagccaguacaagucu

SEQ ID NO: 3093519 - RNA, 19 nt, Artificial Sequence
  Description of Artificial Sequence: Synthetic oligonucleotide
uuuccugcugaggucuucc

SEQ ID NO: 3093520 - RNA, 19 nt, Artificial Sequence
  Description of Artificial Sequence: Synthetic oligonucleotide
caaacugcuccaagggguc

SEQ ID NO: 3093521 - RNA, 19 nt, Artificial Sequence
  Description of Artificial Sequence: Synthetic oligonucleotide
gaugaggcuuugucgcaug

SEQ ID NO: 3093522 - RNA, 19 nt, Artificial Sequence
  Description of Artificial Sequence: Synthetic oligonucleotide
ugaggucuuccacgaagcu

SEQ ID NO: 3093523 - RNA, 19 nt, Artificial Sequence
  Description of Artificial Sequence: Synthetic oligonucleotide
gaggucuuccacgaagcug

SEQ ID NO: 3093524 - RNA, 19 nt, Artificial Sequence
  Description of Artificial Sequence: Synthetic oligonucleotide
uguagaagaugaggcuuug

SEQ ID NO: 3093525 - RNA, 19 nt, Artificial Sequence
  Description of Artificial Sequence: Synthetic oligonucleotide
ugacacugcucuuggcuac

SEQ ID NO: 3093526 - RNA, 19 nt, Artificial Sequence
  Description of Artificial Sequence: Synthetic oligonucleotide
ugaucucauuccuguagaa

SEQ ID NO: 3093527 - RNA, 19 nt, Artificial Sequence
  Description of Artificial Sequence: Synthetic oligonucleotide
ccugcugaggucuuccacg

SEQ ID NO: 3093528 - RNA, 19 nt, Artificial Sequence
  Description of Artificial Sequence: Synthetic oligonucleotide
uuggaaccuggccuccuca

SEQ ID NO: 3093529 - RNA, 19 nt, Artificial Sequence
  Description of Artificial Sequence: Synthetic oligonucleotide
uccuugccugucaucuucc

SEQ ID NO: 3093530 - RNA, 19 nt, Artificial Sequence
  Description of Artificial Sequence: Synthetic oligonucleotide
gcugaggucuuccacgaag

SEQ ID NO: 3093531 - RNA, 19 nt, Artificial Sequence
  Description of Artificial Sequence: Synthetic oligonucleotide
uggaaccuggccuccucag

SEQ ID NO: 3093532 - RNA, 19 nt, Artificial Sequence
  Description of Artificial Sequence: Synthetic oligonucleotide
gggaaggucaguccaacac

SEQ ID NO: 3093533 - RNA, 19 nt, Artificial Sequence
  Description of Artificial Sequence: Synthetic oligonucleotide
cuccauccacuccugacac

SEQ ID NO: 3093534 - RNA, 19 nt, Artificial Sequence
  Description of Artificial Sequence: Synthetic oligonucleotide
guacucauagcuggcccgg

SEQ ID NO: 3093535 - RNA, 19 nt, Artificial Sequence
  Description of Artificial Sequence: Synthetic oligonucleotide
cgcauguacucauagcugg

SEQ ID NO: 3093536 - RNA, 19 nt, Artificial Sequence
  Description of Artificial Sequence: Synthetic oligonucleotide
acuccugacacugcucuug

SEQ ID NO: 3093537 - RNA, 19 nt, Artificial Sequence
  Description of Artificial Sequence: Synthetic oligonucleotide
guacaagucugcucgucuc

SEQ ID NO: 3093538 - RNA, 19 nt, Artificial Sequence
  Description of Artificial Sequence: Synthetic oligonucleotide
gccaaacugcuccaagggg

SEQ ID NO: 3093539 - RNA, 19 nt, Artificial Sequence
  Description of Artificial Sequence: Synthetic oligonucleotide
cuccugacacugcucuugg

SEQ ID NO: 3093540 - RNA, 19 nt, Artificial Sequence
  Description of Artificial Sequence: Synthetic oligonucleotide
ccugaucucauuccuguag

SEQ ID NO: 3093541 - RNA, 19 nt, Artificial Sequence
  Description of Artificial Sequence: Synthetic oligonucleotide
uccugcugaggucuuccac

SEQ ID NO: 3093542 - RNA, 19 nt, Artificial Sequence
  Description of Artificial Sequence: Synthetic oligonucleotide
cugcucgucucuaggcagg

SEQ ID NO: 3093543 - RNA, 19 nt, Artificial Sequence
  Description of Artificial Sequence: Synthetic oligonucleotide
cugaucucauuccuguaga

SEQ ID NO: 3093544 - RNA, 19 nt, Artificial Sequence
  Description of Artificial Sequence: Synthetic oligonucleotide
ugcucuuggcuacaacauu

SEQ ID NO: 3093545 - RNA, 19 nt, Artificial Sequence
  Description of Artificial Sequence: Synthetic oligonucleotide
uuugucgcauguacucaua

SEQ ID NO: 3093546 - RNA, 19 nt, Artificial Sequence
  Description of Artificial Sequence: Synthetic oligonucleotide
gugguauuuccugcugagg

SEQ ID NO: 3093547 - RNA, 19 nt, Artificial Sequence
  Description of Artificial Sequence: Synthetic oligonucleotide
gacagccaggggcccaagg

SEQ ID NO: 3093548 - RNA, 19 nt, Artificial Sequence
  Description of Artificial Sequence: Synthetic oligonucleotide
caagucugcucgucucuag

SEQ ID NO: 3093549 - RNA, 19 nt, Artificial Sequence
  Description of Artificial Sequence: Synthetic oligonucleotide
auccacuccugacacugcu

SEQ ID NO: 3093550 - RNA, 19 nt, Artificial Sequence
  Description of Artificial Sequence: Synthetic oligonucleotide
ucauagcuggcccggcgaa

SEQ ID NO: 3093551 - RNA, 19 nt, Artificial Sequence
  Description of Artificial Sequence: Synthetic oligonucleotide
ggaaggucaguccaacaca

SEQ ID NO: 3093552 - RNA, 19 nt, Artificial Sequence
  Description of Artificial Sequence: Synthetic oligonucleotide
aagggguccuugccuguca

SEQ ID NO: 3093553 - RNA, 19 nt, Artificial Sequence
  Description of Artificial Sequence: Synthetic oligonucleotide
ucaucuuccugaucucauu

SEQ ID NO: 3093554 - RNA, 19 nt, Artificial Sequence
  Description of Artificial Sequence: Synthetic oligonucleotide
acaccuagcugggagccag

SEQ ID NO: 3093555 - RNA, 19 nt, Artificial Sequence
  Description of Artificial Sequence: Synthetic oligonucleotide
ucaguccaacacaccuagc

SEQ ID NO: 3093556 - RNA, 19 nt, Artificial Sequence
  Description of Artificial Sequence: Synthetic oligonucleotide
cucauuccuguagaagaug

SEQ ID NO: 3093557 - RNA, 19 nt, Artificial Sequence
  Description of Artificial Sequence: Synthetic oligonucleotide
ggcuuugucgcauguacuc

SEQ ID NO: 3093558 - RNA, 19 nt, Artificial Sequence
  Description of Artificial Sequence: Synthetic oligonucleotide
gguauuuccugcugagguc

SEQ ID NO: 3093559 - RNA, 19 nt, Artificial Sequence
  Description of Artificial Sequence: Synthetic oligonucleotide
aacugcuccaagggguccu

SEQ ID NO: 3093560 - RNA, 19 nt, Artificial Sequence
  Description of Artificial Sequence: Synthetic oligonucleotide
cccaagacagccaggggcc

SEQ ID NO: 3093561 - RNA, 19 nt, Artificial Sequence
  Description of Artificial Sequence: Synthetic oligonucleotide
caccucccaagacagccag

SEQ ID NO: 3093562 - RNA, 19 nt, Artificial Sequence
  Description of Artificial Sequence: Synthetic oligonucleotide
gaagagccuccauccacuc

SEQ ID NO: 3093563 - RNA, 19 nt, Artificial Sequence
  Description of Artificial Sequence: Synthetic oligonucleotide
ucgucucuaggcaggcuau

SEQ ID NO: 3093564 - RNA, 19 nt, Artificial Sequence
  Description of Artificial Sequence: Synthetic oligonucleotide
uggcuacaacauucaaagu

SEQ ID NO: 3093565 - RNA, 19 nt, Artificial Sequence
  Description of Artificial Sequence: Synthetic oligonucleotide
gagaugccaaacugcucca

SEQ ID NO: 3093566 - RNA, 19 nt, Artificial Sequence
  Description of Artificial Sequence: Synthetic oligonucleotide
gucugcucgucucuaggca

SEQ ID NO: 3093567 - RNA, 19 nt, Artificial Sequence
  Description of Artificial Sequence: Synthetic oligonucleotide
guauuuccugcugaggucu

SEQ ID NO: 3093568 - RNA, 19 nt, Artificial Sequence
  Description of Artificial Sequence: Synthetic oligonucleotide
caaagugguauuuccugcu

SEQ ID NO: 3093569 - RNA, 19 nt, Artificial Sequence
  Description of Artificial Sequence: Synthetic oligonucleotide
augaggcuuugucgcaugu

SEQ ID NO: 3093570 - RNA, 19 nt, Artificial Sequence
  Description of Artificial Sequence: Synthetic oligonucleotide
agcuggcccggcgaagagc

SEQ ID NO: 3093571 - RNA, 19 nt, Artificial Sequence
  Description of Artificial Sequence: Synthetic oligonucleotide
agggaaggucaguccaaca

SEQ ID NO: 3093572 - RNA, 19 nt, Artificial Sequence
  Description of Artificial Sequence: Synthetic oligonucleotide
caguccaacacaccuagcu

SEQ ID NO: 3093573 - RNA, 19 nt, Artificial Sequence
  Description of Artificial Sequence: Synthetic oligonucleotide
cagagaugccaaacugcuc

SEQ ID NO: 3093574 - RNA, 19 nt, Artificial Sequence
  Description of Artificial Sequence: Synthetic oligonucleotide
accuggccuccucagagau

SEQ ID NO: 3093575 - RNA, 19 nt, Artificial Sequence
  Description of Artificial Sequence: Synthetic oligonucleotide
cauccacuccugacacugc

SEQ ID NO: 3093576 - RNA, 19 nt, Artificial Sequence
  Description of Artificial Sequence: Synthetic oligonucleotide
cuccucagagaugccaaac

SEQ ID NO: 3093577 - RNA, 19 nt, Artificial Sequence
  Description of Artificial Sequence: Synthetic oligonucleotide
cucccaagacagccagggg

SEQ ID NO: 3093578 - RNA, 19 nt, Artificial Sequence
  Description of Artificial Sequence: Synthetic oligonucleotide
uccugacacugcucuuggc

SEQ ID NO: 3093579 - RNA, 19 nt, Artificial Sequence
  Description of Artificial Sequence: Synthetic oligonucleotide
uagcuggcccggcgaagag

SEQ ID NO: 3093580 - RNA, 19 nt, Artificial Sequence
  Description of Artificial Sequence: Synthetic oligonucleotide
uuccugcugaggucuucca

SEQ ID NO: 3093581 - RNA, 19 nt, Artificial Sequence
  Description of Artificial Sequence: Synthetic oligonucleotide
cugacacugcucuuggcua

SEQ ID NO: 3093582 - RNA, 19 nt, Artificial Sequence
  Description of Artificial Sequence: Synthetic oligonucleotide
ggagccaguacaagucugc

SEQ ID NO: 3093583 - RNA, 19 nt, Artificial Sequence
  Description of Artificial Sequence: Synthetic oligonucleotide
cucauagcuggcccggcga

SEQ ID NO: 3093584 - RNA, 19 nt, Artificial Sequence
  Description of Artificial Sequence: Synthetic oligonucleotide
cugcugaggucuuccacga

SEQ ID NO: 3093585 - RNA, 19 nt, Artificial Sequence
  Description of Artificial Sequence: Synthetic oligonucleotide
uccugaucucauuccugua

SEQ ID NO: 3093586 - RNA, 19 nt, Artificial Sequence
  Description of Artificial Sequence: Synthetic oligonucleotide
uccauccacuccugacacu

SEQ ID NO: 3093587 - RNA, 19 nt, Artificial Sequence
  Description of Artificial Sequence: Synthetic oligonucleotide
cucgucucuaggcaggcua

SEQ ID NO: 3093588 - RNA, 19 nt, Artificial Sequence
  Description of Artificial Sequence: Synthetic oligonucleotide
cuacaacauucaaaguggu

SEQ ID NO: 3093589 - RNA, 19 nt, Artificial Sequence
  Description of Artificial Sequence: Synthetic oligonucleotide
ugcucgucucuaggcaggc

SEQ ID NO: 3093590 - RNA, 19 nt, Artificial Sequence
  Description of Artificial Sequence: Synthetic oligonucleotide
guuggaaccuggccuccuc

SEQ ID NO: 3093591 - RNA, 19 nt, Artificial Sequence
  Description of Artificial Sequence: Synthetic oligonucleotide
agaugaggcuuugucgcau

SEQ ID NO: 3093592 - RNA, 19 nt, Artificial Sequence
  Description of Artificial Sequence: Synthetic oligonucleotide
aagacagccaggggcccaa

SEQ ID NO: 3093593 - RNA, 19 nt, Artificial Sequence
  Description of Artificial Sequence: Synthetic oligonucleotide
ccauccacuccugacacug

SEQ ID NO: 3093594 - RNA, 19 nt, Artificial Sequence
  Description of Artificial Sequence: Synthetic oligonucleotide
uacucauagcuggcccggc

SEQ ID NO: 3093595 - RNA, 19 nt, Artificial Sequence
  Description of Artificial Sequence: Synthetic oligonucleotide
gucucuaggcaggcuauuc

SEQ ID NO: 3093596 - RNA, 19 nt, Artificial Sequence
  Description of Artificial Sequence: Synthetic oligonucleotide
gcgaagagccuccauccac

SEQ ID NO: 3093597 - RNA, 19 nt, Artificial Sequence
  Description of Artificial Sequence: Synthetic oligonucleotide
caagggaaggucaguccaa

SEQ ID NO: 3093598 - RNA, 19 nt, Artificial Sequence
  Description of Artificial Sequence: Synthetic oligonucleotide
cuaggcaggcuauucaguu

SEQ ID NO: 3093599 - RNA, 19 nt, Artificial Sequence
  Description of Artificial Sequence: Synthetic oligonucleotide
ugaggcuuugucgcaugua

SEQ ID NO: 3093600 - RNA, 19 nt, Artificial Sequence
  Description of Artificial Sequence: Synthetic oligonucleotide
gcuccaagggguccuugcc

SEQ ID NO: 3093601 - RNA, 19 nt, Artificial Sequence
  Description of Artificial Sequence: Synthetic oligonucleotide
aggggcccaagggaagguc

SEQ ID NO: 3093602 - RNA, 19 nt, Artificial Sequence
  Description of Artificial Sequence: Synthetic oligonucleotide
agcugggagccaguacaag

SEQ ID NO: 3093603 - RNA, 19 nt, Artificial Sequence
  Description of Artificial Sequence: Synthetic oligonucleotide
gcuggcccggcgaagagcc

SEQ ID NO: 3093604 - RNA, 19 nt, Artificial Sequence
  Description of Artificial Sequence: Synthetic oligonucleotide
cuuugucgcauguacucau

SEQ ID NO: 3093605 - RNA, 19 nt, Artificial Sequence
  Description of Artificial Sequence: Synthetic oligonucleotide
ugcugaggucuuccacgaa

SEQ ID NO: 3093606 - RNA, 19 nt, Artificial Sequence
  Description of Artificial Sequence: Synthetic oligonucleotide
caguacaagucugcucguc

SEQ ID NO: 3093607 - RNA, 19 nt, Artificial Sequence
  Description of Artificial Sequence: Synthetic oligonucleotide
caacauucaaagugguauu

SEQ ID NO: 3093608 - RNA, 19 nt, Artificial Sequence
  Description of Artificial Sequence: Synthetic oligonucleotide
cacugcucuuggcuacaac

SEQ ID NO: 3093609 - RNA, 19 nt, Artificial Sequence
  Description of Artificial Sequence: Synthetic oligonucleotide
acaagucugcucgucucua

SEQ ID NO: 3093610 - RNA, 19 nt, Artificial Sequence
  Description of Artificial Sequence: Synthetic oligonucleotide
ccaaacugcuccaaggggu

SEQ ID NO: 3093611 - RNA, 19 nt, Artificial Sequence
  Description of Artificial Sequence: Synthetic oligonucleotide
gacacugcucuuggcuaca

SEQ ID NO: 3093612 - RNA, 19 nt, Artificial Sequence
  Description of Artificial Sequence: Synthetic oligonucleotide
cggcgaagagccuccaucc

SEQ ID NO: 3093613 - RNA, 19 nt, Artificial Sequence
  Description of Artificial Sequence: Synthetic oligonucleotide
gcauguacucauagcuggc

SEQ ID NO: 3093614 - RNA, 19 nt, Artificial Sequence
  Description of Artificial Sequence: Synthetic oligonucleotide
cagccaggggcccaaggga

SEQ ID NO: 3093615 - RNA, 19 nt, Artificial Sequence
  Description of Artificial Sequence: Synthetic oligonucleotide
caguuggaaccuggccucc

SEQ ID NO: 3093616 - RNA, 19 nt, Artificial Sequence
  Description of Artificial Sequence: Synthetic oligonucleotide
aguuggaaccuggccuccu

SEQ ID NO: 3093617 - RNA, 19 nt, Artificial Sequence
  Description of Artificial Sequence: Synthetic oligonucleotide
cuguagaagaugaggcuuu

SEQ ID NO: 3093618 - RNA, 19 nt, Artificial Sequence
  Description of Artificial Sequence: Synthetic oligonucleotide
gcuauucaguuggaaccug

SEQ ID NO: 3093619 - RNA, 19 nt, Artificial Sequence
  Description of Artificial Sequence: Synthetic oligonucleotide
cugcucuuggcuacaacau

SEQ ID NO: 3093620 - RNA, 19 nt, Artificial Sequence
  Description of Artificial Sequence: Synthetic oligonucleotide
agggguccuugccugucau

SEQ ID NO: 3093621 - RNA, 19 nt, Artificial Sequence
  Description of Artificial Sequence: Synthetic oligonucleotide
gccuccauccacuccugac

SEQ ID NO: 3093622 - RNA, 19 nt, Artificial Sequence
  Description of Artificial Sequence: Synthetic oligonucleotide
acaccucccaagacagcca

SEQ ID NO: 3093623 - RNA, 19 nt, Artificial Sequence
  Description of Artificial Sequence: Synthetic oligonucleotide
ccuccauccacuccugaca

SEQ ID NO: 3093624 - RNA, 19 nt, Artificial Sequence
  Description of Artificial Sequence: Synthetic oligonucleotide
uggcccggcgaagagccuc

SEQ ID NO: 3093625 - RNA, 19 nt, Artificial Sequence
  Description of Artificial Sequence: Synthetic oligonucleotide
gcuuugucgcauguacuca

SEQ ID NO: 3093626 - RNA, 19 nt, Artificial Sequence
  Description of Artificial Sequence: Synthetic oligonucleotide
gggagccaguacaagucug

SEQ ID NO: 3093627 - RNA, 19 nt, Artificial Sequence
  Description of Artificial Sequence: Synthetic oligonucleotide
ggaaccuggccuccucaga

SEQ ID NO: 3093628 - RNA, 19 nt, Artificial Sequence
  Description of Artificial Sequence: Synthetic oligonucleotide
agccuccauccacuccuga

SEQ ID NO: 3093629 - RNA, 19 nt, Artificial Sequence
  Description of Artificial Sequence: Synthetic oligonucleotide
ccggcgaagagccuccauc

SEQ ID NO: 3093630 - RNA, 19 nt, Artificial Sequence
  Description of Artificial Sequence: Synthetic oligonucleotide
caagggguccuugccuguc

SEQ ID NO: 3093631 - RNA, 19 nt, Artificial Sequence
  Description of Artificial Sequence: Synthetic oligonucleotide
agccaggggcccaagggaa

SEQ ID NO: 3093632 - RNA, 19 nt, Artificial Sequence
  Description of Artificial Sequence: Synthetic oligonucleotide
gucuuccacgaagcugaug

SEQ ID NO: 3093633 - RNA, 19 nt, Artificial Sequence
  Description of Artificial Sequence: Synthetic oligonucleotide
ccuagcugggagccaguac

SEQ ID NO: 3093634 - RNA, 19 nt, Artificial Sequence
  Description of Artificial Sequence: Synthetic oligonucleotide
gagccaguacaagucugcu

SEQ ID NO: 3093635 - RNA, 19 nt, Artificial Sequence
  Description of Artificial Sequence: Synthetic oligonucleotide
ggcuauucaguuggaaccu

SEQ ID NO: 3093636 - RNA, 19 nt, Artificial Sequence
  Description of Artificial Sequence: Synthetic oligonucleotide
ggguccuugccugucaucu

SEQ ID NO: 3093637 - RNA, 19 nt, Artificial Sequence
  Description of Artificial Sequence: Synthetic oligonucleotide
ggcgaagagccuccaucca

SEQ ID NO: 3093638 - RNA, 19 nt, Artificial Sequence
  Description of Artificial Sequence: Synthetic oligonucleotide
cuccaagggguccuugccu

SEQ ID NO: 3093639 - RNA, 19 nt, Artificial Sequence
  Description of Artificial Sequence: Synthetic oligonucleotide
guagaagaugaggcuuugu

SEQ ID NO: 3093640 - RNA, 19 nt, Artificial Sequence
  Description of Artificial Sequence: Synthetic oligonucleotide
gggcccaagggaaggucag

SEQ ID NO: 3093641 - RNA, 19 nt, Artificial Sequence
  Description of Artificial Sequence: Synthetic oligonucleotide
gcccaagggaaggucaguc

SEQ ID NO: 3093642 - RNA, 19 nt, Artificial Sequence
  Description of Artificial Sequence: Synthetic oligonucleotide
caagacagccaggggccca

SEQ ID NO: 3093643 - RNA, 19 nt, Artificial Sequence
  Description of Artificial Sequence: Synthetic oligonucleotide
accuagcugggagccagua

SEQ ID NO: 3093644 - RNA, 19 nt, Artificial Sequence
  Description of Artificial Sequence: Synthetic oligonucleotide
ggucaguccaacacaccua

SEQ ID NO: 3093645 - RNA, 19 nt, Artificial Sequence
  Description of Artificial Sequence: Synthetic oligonucleotide
ggccuccucagagaugcca

SEQ ID NO: 3093646 - RNA, 19 nt, Artificial Sequence
  Description of Artificial Sequence: Synthetic oligonucleotide
acacugcucuuggcuacaa

SEQ ID NO: 3093647 - RNA, 19 nt, Artificial Sequence
  Description of Artificial Sequence: Synthetic oligonucleotide
ggggcccaagggaagguca

SEQ ID NO: 3093648 - RNA, 19 nt, Artificial Sequence
  Description of Artificial Sequence: Synthetic oligonucleotide
agacagccaggggcccaag

SEQ ID NO: 3093649 - RNA, 19 nt, Artificial Sequence
  Description of Artificial Sequence: Synthetic oligonucleotide
ccaagacagccaggggccc

SEQ ID NO: 3093650 - RNA, 19 nt, Artificial Sequence
  Description of Artificial Sequence: Synthetic oligonucleotide
ccuggccuccucagagaug

SEQ ID NO: 3093651 - RNA, 19 nt, Artificial Sequence
  Description of Artificial Sequence: Synthetic oligonucleotide
ccuguagaagaugaggcuu

SEQ ID NO: 3093652 - RNA, 19 nt, Artificial Sequence
  Description of Artificial Sequence: Synthetic oligonucleotide
cacaccuagcugggagcca

SEQ ID NO: 3093653 - RNA, 19 nt, Artificial Sequence
  Description of Artificial Sequence: Synthetic oligonucleotide
gccuccucagagaugccaa

SEQ ID NO: 3093654 - RNA, 19 nt, Artificial Sequence
  Description of Artificial Sequence: Synthetic oligonucleotide
gggguccuugccugucauc

SEQ ID NO: 3093655 - RNA, 19 nt, Artificial Sequence
  Description of Artificial Sequence: Synthetic oligonucleotide
cgaagagccuccauccacu

SEQ ID NO: 3093656 - RNA, 19 nt, Artificial Sequence
  Description of Artificial Sequence: Synthetic oligonucleotide
gccugucaucuuccugauc

SEQ ID NO: 3093657 - RNA, 19 nt, Artificial Sequence
  Description of Artificial Sequence: Synthetic oligonucleotide
ccuccucagagaugccaaa

SEQ ID NO: 3093658 - RNA, 19 nt, Artificial Sequence
  Description of Artificial Sequence: Synthetic oligonucleotide
ggcaggcuauucaguugga

SEQ ID NO: 3093659 - RNA, 19 nt, Artificial Sequence
  Description of Artificial Sequence: Synthetic oligonucleotide
ccaacacaccuagcuggga

SEQ ID NO: 3093660 - RNA, 19 nt, Artificial Sequence
  Description of Artificial Sequence: Synthetic oligonucleotide
ccaguacaagucugcucgu

SEQ ID NO: 3093661 - RNA, 19 nt, Artificial Sequence
  Description of Artificial Sequence: Synthetic oligonucleotide
caccuagcugggagccagu

SEQ ID NO: 3093662 - RNA, 19 nt, Artificial Sequence
  Description of Artificial Sequence: Synthetic oligonucleotide
ccuugccugucaucuuccu

SEQ ID NO: 3093663 - RNA, 19 nt, Artificial Sequence
  Description of Artificial Sequence: Synthetic oligonucleotide
caggggcccaagggaaggu

SEQ ID NO: 3093664 - RNA, 19 nt, Artificial Sequence
  Description of Artificial Sequence: Synthetic oligonucleotide
ccaagggguccuugccugu

SEQ ID NO: 3093665 - RNA, 19 nt, Artificial Sequence
  Description of Artificial Sequence: Synthetic oligonucleotide
ggcccaagggaaggucagu

SEQ ID NO: 3093666 - RNA, 19 nt, Artificial Sequence
  Description of Artificial Sequence: Synthetic oligonucleotide
cuggcccggcgaagagccu

SEQ ID NO: 3093667 - RNA, 19 nt, Artificial Sequence
  Description of Artificial Sequence: Synthetic oligonucleotide
gcucgucucuaggcaggcu

SEQ ID NO: 3093668 - RNA, 19 nt, Artificial Sequence
  Description of Artificial Sequence: Synthetic oligonucleotide
ggucuuccacgaagcugau

SEQ ID NO: 3093669 - RNA, 19 nt, Artificial Sequence
  Description of Artificial Sequence: Synthetic oligonucleotide
gcccggcgaagagccucca

SEQ ID NO: 3093670 - RNA, 19 nt, Artificial Sequence
  Description of Artificial Sequence: Synthetic oligonucleotide
cccggcgaagagccuccau

SEQ ID NO: 3093671 - RNA, 19 nt, Artificial Sequence
  Description of Artificial Sequence: Synthetic oligonucleotide
cgucucuaggcaggcuauu

SEQ ID NO: 3093672 - RNA, 19 nt, Artificial Sequence
  Description of Artificial Sequence: Synthetic oligonucleotide
aguucugacacuuagagac

SEQ ID NO: 3093673 - RNA, 19 nt, Artificial Sequence
  Description of Artificial Sequence: Synthetic oligonucleotide
uaaauuauaguucugacac

SEQ ID NO: 3093674 - RNA, 19 nt, Artificial Sequence
  Description of Artificial Sequence: Synthetic oligonucleotide
aauaaauuauaguucugac

SEQ ID NO: 3093675 - RNA, 19 nt, Artificial Sequence
  Description of Artificial Sequence: Synthetic oligonucleotide
aaugaauaaauuauaguuc

SEQ ID NO: 3093676 - RNA, 19 nt, Artificial Sequence
  Description of Artificial Sequence: Synthetic oligonucleotide
aaugaaggguauaaaagcc

SEQ ID NO: 3093677 - RNA, 19 nt, Artificial Sequence
  Description of Artificial Sequence: Synthetic oligonucleotide
auaaaagcccucaagagcc

SEQ ID NO: 3093678 - RNA, 19 nt, Artificial Sequence
  Description of Artificial Sequence: Synthetic oligonucleotide
aauguguucccacaagcac

SEQ ID NO: 3093679 - RNA, 19 nt, Artificial Sequence
  Description of Artificial Sequence: Synthetic oligonucleotide
uauaaaagcccucaagagc

SEQ ID NO: 3093680 - RNA, 19 nt, Artificial Sequence
  Description of Artificial Sequence: Synthetic oligonucleotide
aaugcauacaaaauccaac

SEQ ID NO: 3093681 - RNA, 19 nt, Artificial Sequence
  Description of Artificial Sequence: Synthetic oligonucleotide
augaauaaauuauaguucu

SEQ ID NO: 3093682 - RNA, 19 nt, Artificial Sequence
  Description of Artificial Sequence: Synthetic oligonucleotide
augcauacaaaauccaacg

SEQ ID NO: 3093683 - RNA, 19 nt, Artificial Sequence
  Description of Artificial Sequence: Synthetic oligonucleotide
acaauguguucccacaagc

SEQ ID NO: 3093684 - RNA, 19 nt, Artificial Sequence
  Description of Artificial Sequence: Synthetic oligonucleotide
uuauaguucugacacuuag

SEQ ID NO: 3093685 - RNA, 19 nt, Artificial Sequence
  Description of Artificial Sequence: Synthetic oligonucleotide
uguuucuuggcacacacac

SEQ ID NO: 3093686 - RNA, 19 nt, Artificial Sequence
  Description of Artificial Sequence: Synthetic oligonucleotide
uuucuuggcacacacacac

SEQ ID NO: 3093687 - RNA, 19 nt, Artificial Sequence
  Description of Artificial Sequence: Synthetic oligonucleotide
auaaauuauaguucugaca

SEQ ID NO: 3093688 - RNA, 19 nt, Artificial Sequence
  Description of Artificial Sequence: Synthetic oligonucleotide
ucagauggaguucagcgcc

SEQ ID NO: 3093689 - RNA, 19 nt, Artificial Sequence
  Description of Artificial Sequence: Synthetic oligonucleotide
agaaaugaauaaauuauag

SEQ ID NO: 3093690 - RNA, 19 nt, Artificial Sequence
  Description of Artificial Sequence: Synthetic oligonucleotide
guauaaaagcccucaagag

SEQ ID NO: 3093691 - RNA, 19 nt, Artificial Sequence
  Description of Artificial Sequence: Synthetic oligonucleotide
aacgucagcuaaugaaggg

SEQ ID NO: 3093692 - RNA, 19 nt, Artificial Sequence
  Description of Artificial Sequence: Synthetic oligonucleotide
auugguaccugucagcuca

SEQ ID NO: 3093693 - RNA, 19 nt, Artificial Sequence
  Description of Artificial Sequence: Synthetic oligonucleotide
gaguucagcgcccacaaag

SEQ ID NO: 3093694 - RNA, 19 nt, Artificial Sequence
  Description of Artificial Sequence: Synthetic oligonucleotide
acaaaauccaacgucagcu

SEQ ID NO: 3093695 - RNA, 19 nt, Artificial Sequence
  Description of Artificial Sequence: Synthetic oligonucleotide
cauacaaaauccaacguca

SEQ ID NO: 3093696 - RNA, 19 nt, Artificial Sequence
  Description of Artificial Sequence: Synthetic oligonucleotide
aagcacacaggcuggcagc

SEQ ID NO: 3093697 - RNA, 19 nt, Artificial Sequence
  Description of Artificial Sequence: Synthetic oligonucleotide
uguucccacaagcacacag

SEQ ID NO: 3093698 - RNA, 19 nt, Artificial Sequence
  Description of Artificial Sequence: Synthetic oligonucleotide
uuuauugguaccugucagc

SEQ ID NO: 3093699 - RNA, 19 nt, Artificial Sequence
  Description of Artificial Sequence: Synthetic oligonucleotide
gaauaaauuauaguucuga

SEQ ID NO: 3093700 - RNA, 19 nt, Artificial Sequence
  Description of Artificial Sequence: Synthetic oligonucleotide
aauuauaguucugacacuu

SEQ ID NO: 3093701 - RNA, 19 nt, Artificial Sequence
  Description of Artificial Sequence: Synthetic oligonucleotide
ugaaggguauaaaagcccu

SEQ ID NO: 3093702 - RNA, 19 nt, Artificial Sequence
  Description of Artificial Sequence: Synthetic oligonucleotide
ugagacagugaucuggggu

SEQ ID NO: 3093703 - RNA, 19 nt, Artificial Sequence
  Description of Artificial Sequence: Synthetic oligonucleotide
acuuagagacaauauaaaa

SEQ ID NO: 3093704 - RNA, 19 nt, Artificial Sequence
  Description of Artificial Sequence: Synthetic oligonucleotide
augaaggguauaaaagccc

SEQ ID NO: 3093705 - RNA, 19 nt, Artificial Sequence
  Description of Artificial Sequence: Synthetic oligonucleotide
cacacacacacacacaaag

SEQ ID NO: 3093706 - RNA, 19 nt, Artificial Sequence
  Description of Artificial Sequence: Synthetic oligonucleotide
aaauuauaguucugacacu

SEQ ID NO: 3093707 - RNA, 19 nt, Artificial Sequence
  Description of Artificial Sequence: Synthetic oligonucleotide
cuuuauugguaccugucag

SEQ ID NO: 3093708 - RNA, 19 nt, Artificial Sequence
  Description of Artificial Sequence: Synthetic oligonucleotide
uuggcacacacacacacac

SEQ ID NO: 3093709 - RNA, 19 nt, Artificial Sequence
  Description of Artificial Sequence: Synthetic oligonucleotide
aaagcccugagacagugau

SEQ ID NO: 3093710 - RNA, 19 nt, Artificial Sequence
  Description of Artificial Sequence: Synthetic oligonucleotide
ucuuggcacacacacacac

SEQ ID NO: 3093711 - RNA, 19 nt, Artificial Sequence
  Description of Artificial Sequence: Synthetic oligonucleotide
uccaacgucagcuaaugaa

SEQ ID NO: 3093712 - RNA, 19 nt, Artificial Sequence
  Description of Artificial Sequence: Synthetic oligonucleotide
gguauaaaagcccucaaga

SEQ ID NO: 3093713 - RNA, 19 nt, Artificial Sequence
  Description of Artificial Sequence: Synthetic oligonucleotide
ucaagagccaccccuugcc

SEQ ID NO: 3093714 - RNA, 19 nt, Artificial Sequence
  Description of Artificial Sequence: Synthetic oligonucleotide
ugucagcucagguacaaug

SEQ ID NO: 3093715 - RNA, 19 nt, Artificial Sequence
  Description of Artificial Sequence: Synthetic oligonucleotide
gaaaugaauaaauuauagu

SEQ ID NO: 3093716 - RNA, 19 nt, Artificial Sequence
  Description of Artificial Sequence: Synthetic oligonucleotide
aaaauccaacgucagcuaa

SEQ ID NO: 3093717 - RNA, 19 nt, Artificial Sequence
  Description of Artificial Sequence: Synthetic oligonucleotide
uacaauguguucccacaag

SEQ ID NO: 3093718 - RNA, 19 nt, Artificial Sequence
  Description of Artificial Sequence: Synthetic oligonucleotide
agagccuguuucuuggcac

SEQ ID NO: 3093719 - RNA, 19 nt, Artificial Sequence
  Description of Artificial Sequence: Synthetic oligonucleotide
uaccugucagcucagguac

SEQ ID NO: 3093720 - RNA, 19 nt, Artificial Sequence
  Description of Artificial Sequence: Synthetic oligonucleotide
uugccaacuggccuagggg

SEQ ID NO: 3093721 - RNA, 19 nt, Artificial Sequence
  Description of Artificial Sequence: Synthetic oligonucleotide
ucagguacaauguguuccc

SEQ ID NO: 3093722 - RNA, 19 nt, Artificial Sequence
  Description of Artificial Sequence: Synthetic oligonucleotide
cucagguacaauguguucc

SEQ ID NO: 3093723 - RNA, 19 nt, Artificial Sequence
  Description of Artificial Sequence: Synthetic oligonucleotide
ugcauacaaaauccaacgu

SEQ ID NO: 3093724 - RNA, 19 nt, Artificial Sequence
  Description of Artificial Sequence: Synthetic oligonucleotide
aagaaaugaauaaauuaua

SEQ ID NO: 3093725 - RNA, 19 nt, Artificial Sequence
  Description of Artificial Sequence: Synthetic oligonucleotide
aaggguauaaaagcccuca

SEQ ID NO: 3093726 - RNA, 19 nt, Artificial Sequence
  Description of Artificial Sequence: Synthetic oligonucleotide
uuauugguaccugucagcu

SEQ ID NO: 3093727 - RNA, 19 nt, Artificial Sequence
  Description of Artificial Sequence: Synthetic oligonucleotide
cacacacacacacacacac

SEQ ID NO: 3093728 - RNA, 19 nt, Artificial Sequence
  Description of Artificial Sequence: Synthetic oligonucleotide
aagcccucaagagccaccc

SEQ ID NO: 3093729 - RNA, 19 nt, Artificial Sequence
  Description of Artificial Sequence: Synthetic oligonucleotide
uguguucccacaagcacac

SEQ ID NO: 3093730 - RNA, 19 nt, Artificial Sequence
  Description of Artificial Sequence: Synthetic oligonucleotide
gcucagauggaguucagcg

SEQ ID NO: 3093731 - RNA, 19 nt, Artificial Sequence
  Description of Artificial Sequence: Synthetic oligonucleotide
caacgucagcuaaugaagg

SEQ ID NO: 3093732 - RNA, 19 nt, Artificial Sequence
  Description of Artificial Sequence: Synthetic oligonucleotide
aauccaacgucagcuaaug

SEQ ID NO: 3093733 - RNA, 19 nt, Artificial Sequence
  Description of Artificial Sequence: Synthetic oligonucleotide
agguacaauguguucccac

SEQ ID NO: 3093734 - RNA, 19 nt, Artificial Sequence
  Description of Artificial Sequence: Synthetic oligonucleotide
ucagcucagguacaaugug

SEQ ID NO: 3093735 - RNA, 19 nt, Artificial Sequence
  Description of Artificial Sequence: Synthetic oligonucleotide
uucagcgcccacaaagccc

SEQ ID NO: 3093736 - RNA, 19 nt, Artificial Sequence
  Description of Artificial Sequence: Synthetic oligonucleotide
gacacuuagagacaauaua

SEQ ID NO: 3093737 - RNA, 19 nt, Artificial Sequence
  Description of Artificial Sequence: Synthetic oligonucleotide
ugccaacuggccuaggggc

SEQ ID NO: 3093738 - RNA, 19 nt, Artificial Sequence
  Description of Artificial Sequence: Synthetic oligonucleotide
ucagcgcccacaaagcccu

SEQ ID NO: 3093739 - RNA, 19 nt, Artificial Sequence
  Description of Artificial Sequence: Synthetic oligonucleotide
cucagauggaguucagcgc

SEQ ID NO: 3093740 - RNA, 19 nt, Artificial Sequence
  Description of Artificial Sequence: Synthetic oligonucleotide
acacuuagagacaauauaa

SEQ ID NO: 3093741 - RNA, 19 nt, Artificial Sequence
  Description of Artificial Sequence: Synthetic oligonucleotide
aguucagcgcccacaaagc

SEQ ID NO: 3093742 - RNA, 19 nt, Artificial Sequence
  Description of Artificial Sequence: Synthetic oligonucleotide
aaaagcccucaagagccac

SEQ ID NO: 3093743 - RNA, 19 nt, Artificial Sequence
  Description of Artificial Sequence: Synthetic oligonucleotide
ugacacuuagagacaauau

SEQ ID NO: 3093744 - RNA, 19 nt, Artificial Sequence
  Description of Artificial Sequence: Synthetic oligonucleotide
aaagcccucaagagccacc

SEQ ID NO: 3093745 - RNA, 19 nt, Artificial Sequence
  Description of Artificial Sequence: Synthetic oligonucleotide
cuugccaacuggccuaggg

SEQ ID NO: 3093746 - RNA, 19 nt, Artificial Sequence
  Description of Artificial Sequence: Synthetic oligonucleotide
agagccaccccuugccaac

SEQ ID NO: 3093747 - RNA, 19 nt, Artificial Sequence
  Description of Artificial Sequence: Synthetic oligonucleotide
cuggccuaggggcacacgg

SEQ ID NO: 3093748 - RNA, 19 nt, Artificial Sequence
  Description of Artificial Sequence: Synthetic oligonucleotide
  modified_base (14)..(14): a, c, u, g, unknown or other
acaggcuggcagcnccggc

SEQ ID NO: 3093749 - RNA, 19 nt, Artificial Sequence
  Description of Artificial Sequence: Synthetic oligonucleotide
uaguucugacacuuagaga

SEQ ID NO: 3093750 - RNA, 19 nt, Artificial Sequence
  Description of Artificial Sequence: Synthetic oligonucleotide
acaaagaaaugaauaaauu

SEQ ID NO: 3093751 - RNA, 19 nt, Artificial Sequence
  Description of Artificial Sequence: Synthetic oligonucleotide
ccaacgucagcuaaugaag

SEQ ID NO: 3093752 - RNA, 19 nt, Artificial Sequence
  Description of Artificial Sequence: Synthetic oligonucleotide
gcauacaaaauccaacguc

SEQ ID NO: 3093753 - RNA, 19 nt, Artificial Sequence
  Description of Artificial Sequence: Synthetic oligonucleotide
gcuaaugaaggguauaaaa

SEQ ID NO: 3093754 - RNA, 19 nt, Artificial Sequence
  Description of Artificial Sequence: Synthetic oligonucleotide
caagcacacaggcuggcag

SEQ ID NO: 3093755 - RNA, 19 nt, Artificial Sequence
  Description of Artificial Sequence: Synthetic oligonucleotide
ggguauaaaagcccucaag

SEQ ID NO: 3093756 - RNA, 19 nt, Artificial Sequence
  Description of Artificial Sequence: Synthetic oligonucleotide
uggaguucagcgcccacaa

SEQ ID NO: 3093757 - RNA, 19 nt, Artificial Sequence
  Description of Artificial Sequence: Synthetic oligonucleotide
cacacacacacacaaagaa

SEQ ID NO: 3093758 - RNA, 19 nt, Artificial Sequence
  Description of Artificial Sequence: Synthetic oligonucleotide
ggcacacacacacacacac

SEQ ID NO: 3093759 - RNA, 19 nt, Artificial Sequence
  Description of Artificial Sequence: Synthetic oligonucleotide
  modified_base (4)..(4): a, c, u, g, unknown or other
agcnccggcagaggcaggc

SEQ ID NO: 3093760 - RNA, 19 nt, Artificial Sequence
  Description of Artificial Sequence: Synthetic oligonucleotide
agacagugaucuggggugc

SEQ ID NO: 3093761 - RNA, 19 nt, Artificial Sequence
  Description of Artificial Sequence: Synthetic oligonucleotide
uaaaagcccucaagagcca

SEQ ID NO: 3093762 - RNA, 19 nt, Artificial Sequence
  Description of Artificial Sequence: Synthetic oligonucleotide
caauguguucccacaagca

SEQ ID NO: 3093763 - RNA, 19 nt, Artificial Sequence
  Description of Artificial Sequence: Synthetic oligonucleotide
  modified_base (17)..(17): a, c, u, g, unknown or other
cacacaggcuggcagcncc

SEQ ID NO: 3093764 - RNA, 19 nt, Artificial Sequence
  Description of Artificial Sequence: Synthetic oligonucleotide
cacacacacacaaagaaau

SEQ ID NO: 3093765 - RNA, 19 nt, Artificial Sequence
  Description of Artificial Sequence: Synthetic oligonucleotide
cacacacacacacacacaa

SEQ ID NO: 3093766 - RNA, 19 nt, Artificial Sequence
  Description of Artificial Sequence: Synthetic oligonucleotide
guucagcgcccacaaagcc

SEQ ID NO: 3093767 - RNA, 19 nt, Artificial Sequence
  Description of Artificial Sequence: Synthetic oligonucleotide
aaauccaacgucagcuaau

SEQ ID NO: 3093768 - RNA, 19 nt, Artificial Sequence
  Description of Artificial Sequence: Synthetic oligonucleotide
aagagccaccccuugccaa

SEQ ID NO: 3093769 - RNA, 19 nt, Artificial Sequence
  Description of Artificial Sequence: Synthetic oligonucleotide
uucugacacuuagagacaa

SEQ ID NO: 3093770 - RNA, 19 nt, Artificial Sequence
  Description of Artificial Sequence: Synthetic oligonucleotide
cacuuagagacaauauaaa

SEQ ID NO: 3093771 - RNA, 19 nt, Artificial Sequence
  Description of Artificial Sequence: Synthetic oligonucleotide
ugggcucagauggaguuca

SEQ ID NO: 3093772 - RNA, 19 nt, Artificial Sequence
  Description of Artificial Sequence: Synthetic oligonucleotide
cucaagagccaccccuugc

SEQ ID NO: 3093773 - RNA, 19 nt, Artificial Sequence
  Description of Artificial Sequence: Synthetic oligonucleotide
auguguucccacaagcaca

SEQ ID NO: 3093774 - RNA, 19 nt, Artificial Sequence
  Description of Artificial Sequence: Synthetic oligonucleotide
ccugagacagugaucuggg

SEQ ID NO: 3093775 - RNA, 19 nt, Artificial Sequence
  Description of Artificial Sequence: Synthetic oligonucleotide
  modified_base (8)..(8): a, c, u, g, unknown or other
uggcagcnccggcagaggc

SEQ ID NO: 3093776 - RNA, 19 nt, Artificial Sequence
  Description of Artificial Sequence: Synthetic oligonucleotide
acagugaucuggggugcgc

SEQ ID NO: 3093777 - RNA, 19 nt, Artificial Sequence
  Description of Artificial Sequence: Synthetic oligonucleotide
acgucagcuaaugaagggu

SEQ ID NO: 3093778 - RNA, 19 nt, Artificial Sequence
  Description of Artificial Sequence: Synthetic oligonucleotide
gcccacaaagcccugagac

SEQ ID NO: 3093779 - RNA, 19 nt, Artificial Sequence
  Description of Artificial Sequence: Synthetic oligonucleotide
uucuuggcacacacacaca

SEQ ID NO: 3093780 - RNA, 19 nt, Artificial Sequence
  Description of Artificial Sequence: Synthetic oligonucleotide
ucccacaagcacacaggcu

SEQ ID NO: 3093781 - RNA, 19 nt, Artificial Sequence
  Description of Artificial Sequence: Synthetic oligonucleotide
cugagacagugaucugggg

SEQ ID NO: 3093782 - RNA, 19 nt, Artificial Sequence
  Description of Artificial Sequence: Synthetic oligonucleotide
ucagcuaaugaaggguaua

SEQ ID NO: 3093783 - RNA, 19 nt, Artificial Sequence
  Description of Artificial Sequence: Synthetic oligonucleotide
uauugguaccugucagcuc

SEQ ID NO: 3093784 - RNA, 19 nt, Artificial Sequence
  Description of Artificial Sequence: Synthetic oligonucleotide
guaccugucagcucaggua

SEQ ID NO: 3093785 - RNA, 19 nt, Artificial Sequence
  Description of Artificial Sequence: Synthetic oligonucleotide
accccuugccaacuggccu

SEQ ID NO: 3093786 - RNA, 19 nt, Artificial Sequence
  Description of Artificial Sequence: Synthetic oligonucleotide
cagauggaguucagcgccc

SEQ ID NO: 3093787 - RNA, 19 nt, Artificial Sequence
  Description of Artificial Sequence: Synthetic oligonucleotide
uggcacacacacacacaca

SEQ ID NO: 3093788 - RNA, 19 nt, Artificial Sequence
  Description of Artificial Sequence: Synthetic oligonucleotide
uugguaccugucagcucag

SEQ ID NO: 3093789 - RNA, 19 nt, Artificial Sequence
  Description of Artificial Sequence: Synthetic oligonucleotide
gagccuguuucuuggcaca

SEQ ID NO: 3093790 - RNA, 19 nt, Artificial Sequence
  Description of Artificial Sequence: Synthetic oligonucleotide
aggguauaaaagcccucaa

SEQ ID NO: 3093791 - RNA, 19 nt, Artificial Sequence
  Description of Artificial Sequence: Synthetic oligonucleotide
ucugacacuuagagacaau

SEQ ID NO: 3093792 - RNA, 19 nt, Artificial Sequence
  Description of Artificial Sequence: Synthetic oligonucleotide
acacacacacacaaagaaa

SEQ ID NO: 3093793 - RNA, 19 nt, Artificial Sequence
  Description of Artificial Sequence: Synthetic oligonucleotide
acacacacacacacaaaga

SEQ ID NO: 3093794 - RNA, 19 nt, Artificial Sequence
  Description of Artificial Sequence: Synthetic oligonucleotide
gacagugaucuggggugcg

SEQ ID NO: 3093795 - RNA, 19 nt, Artificial Sequence
  Description of Artificial Sequence: Synthetic oligonucleotide
  modified_base (12)..(12): a, c, u, g, unknown or other
aggcuggcagcnccggcag

SEQ ID NO: 3093796 - RNA, 19 nt, Artificial Sequence
  Description of Artificial Sequence: Synthetic oligonucleotide
aacuggccuaggggcacac

SEQ ID NO: 3093797 - RNA, 19 nt, Artificial Sequence
  Description of Artificial Sequence: Synthetic oligonucleotide
gaaggguauaaaagcccuc

SEQ ID NO: 3093798 - RNA, 19 nt, Artificial Sequence
  Description of Artificial Sequence: Synthetic oligonucleotide
  modified_base (16)..(16): a, c, u, g, unknown or other
acacaggcuggcagcnccg

SEQ ID NO: 3093799 - RNA, 19 nt, Artificial Sequence
  Description of Artificial Sequence: Synthetic oligonucleotide
caccccuugccaacuggcc

SEQ ID NO: 3093800 - RNA, 19 nt, Artificial Sequence
  Description of Artificial Sequence: Synthetic oligonucleotide
cccagagccuguuucuugg

SEQ ID NO: 3093801 - RNA, 19 nt, Artificial Sequence
  Description of Artificial Sequence: Synthetic oligonucleotide
ccuguuucuuggcacacac

SEQ ID NO: 3093802 - RNA, 19 nt, Artificial Sequence
  Description of Artificial Sequence: Synthetic oligonucleotide
cuuggcacacacacacaca

SEQ ID NO: 3093803 - RNA, 19 nt, Artificial Sequence
  Description of Artificial Sequence: Synthetic oligonucleotide
uggccuaggggcacacggu

SEQ ID NO: 3093804 - RNA, 19 nt, Artificial Sequence
  Description of Artificial Sequence: Synthetic oligonucleotide
agcccucaagagccacccc

SEQ ID NO: 3093805 - RNA, 19 nt, Artificial Sequence
  Description of Artificial Sequence: Synthetic oligonucleotide
agccuguuucuuggcacac

SEQ ID NO: 3093806 - RNA, 19 nt, Artificial Sequence
  Description of Artificial Sequence: Synthetic oligonucleotide
aggggcacacggugggcuc

SEQ ID NO: 3093807 - RNA, 19 nt, Artificial Sequence
  Description of Artificial Sequence: Synthetic oligonucleotide
caggcccagagccuguuuc

SEQ ID NO: 3093808 - RNA, 19 nt, Artificial Sequence
  Description of Artificial Sequence: Synthetic oligonucleotide
agcuaaugaaggguauaaa

SEQ ID NO: 3093809 - RNA, 19 nt, Artificial Sequence
  Description of Artificial Sequence: Synthetic oligonucleotide
auccaacgucagcuaauga

SEQ ID NO: 3093810 - RNA, 19 nt, Artificial Sequence
  Description of Artificial Sequence: Synthetic oligonucleotide
cugacacuuagagacaaua

SEQ ID NO: 3093811 - RNA, 19 nt, Artificial Sequence
  Description of Artificial Sequence: Synthetic oligonucleotide
  modified_base (2)..(2): a, c, u, g, unknown or other
cnccggcagaggcaggccc

SEQ ID NO: 3093812 - RNA, 19 nt, Artificial Sequence
  Description of Artificial Sequence: Synthetic oligonucleotide
cccugagacagugaucugg

SEQ ID NO: 3093813 - RNA, 19 nt, Artificial Sequence
  Description of Artificial Sequence: Synthetic oligonucleotide
gauggaguucagcgcccac

SEQ ID NO: 3093814 - RNA, 19 nt, Artificial Sequence
  Description of Artificial Sequence: Synthetic oligonucleotide
  modified_base (10)..(10): a, c, u, g, unknown or other
gcuggcagcnccggcagag

SEQ ID NO: 3093815 - RNA, 19 nt, Artificial Sequence
  Description of Artificial Sequence: Synthetic oligonucleotide
agcucagguacaauguguu

SEQ ID NO: 3093816 - RNA, 19 nt, Artificial Sequence
  Description of Artificial Sequence: Synthetic oligonucleotide
cacacacaaagaaaugaau

SEQ ID NO: 3093817 - RNA, 19 nt, Artificial Sequence
  Description of Artificial Sequence: Synthetic oligonucleotide
  modified_base (19)..(19): a, c, u, g, unknown or other
agcacacaggcuggcagcn

SEQ ID NO: 3093818 - RNA, 19 nt, Artificial Sequence
  Description of Artificial Sequence: Synthetic oligonucleotide
ccuaggggcacacgguggg

SEQ ID NO: 3093819 - RNA, 19 nt, Artificial Sequence
  Description of Artificial Sequence: Synthetic oligonucleotide
guuucuuggcacacacaca

SEQ ID NO: 3093820 - RNA, 19 nt, Artificial Sequence
  Description of Artificial Sequence: Synthetic oligonucleotide
  modified_base (13)..(13): a, c, u, g, unknown or other
caggcuggcagcnccggca

SEQ ID NO: 3093821 - RNA, 19 nt, Artificial Sequence
  Description of Artificial Sequence: Synthetic oligonucleotide
auuauaguucugacacuua

SEQ ID NO: 3093822 - RNA, 19 nt, Artificial Sequence
  Description of Artificial Sequence: Synthetic oligonucleotide
ugguaccugucagcucagg

SEQ ID NO: 3093823 - RNA, 19 nt, Artificial Sequence
  Description of Artificial Sequence: Synthetic oligonucleotide
cagcuaaugaaggguauaa

SEQ ID NO: 3093824 - RNA, 19 nt, Artificial Sequence
  Description of Artificial Sequence: Synthetic oligonucleotide
agugaucuggggugcgcuu

SEQ ID NO: 3093825 - RNA, 19 nt, Artificial Sequence
  Description of Artificial Sequence: Synthetic oligonucleotide
guucugacacuuagagaca

SEQ ID NO: 3093826 - RNA, 19 nt, Artificial Sequence
  Description of Artificial Sequence: Synthetic oligonucleotide
acaagcacacaggcuggca

SEQ ID NO: 3093827 - RNA, 19 nt, Artificial Sequence
  Description of Artificial Sequence: Synthetic oligonucleotide
  modified_base (6)..(6): a, c, u, g, unknown or other
gcagcnccggcagaggcag

SEQ ID NO: 3093828 - RNA, 19 nt, Artificial Sequence
  Description of Artificial Sequence: Synthetic oligonucleotide
gucagcucagguacaaugu

SEQ ID NO: 3093829 - RNA, 19 nt, Artificial Sequence
  Description of Artificial Sequence: Synthetic oligonucleotide
acacacacacacacacaca

SEQ ID NO: 3093830 - RNA, 19 nt, Artificial Sequence
  Description of Artificial Sequence: Synthetic oligonucleotide
ggccuaggggcacacggug

SEQ ID NO: 3093831 - RNA, 19 nt, Artificial Sequence
  Description of Artificial Sequence: Synthetic oligonucleotide
agauggaguucagcgccca

SEQ ID NO: 3093832 - RNA, 19 nt, Artificial Sequence
  Description of Artificial Sequence: Synthetic oligonucleotide
cagagccuguuucuuggca

SEQ ID NO: 3093833 - RNA, 19 nt, Artificial Sequence
  Description of Artificial Sequence: Synthetic oligonucleotide
cuguuucuuggcacacaca

SEQ ID NO: 3093834 - RNA, 19 nt, Artificial Sequence
  Description of Artificial Sequence: Synthetic oligonucleotide
caagagccaccccuugcca

SEQ ID NO: 3093835 - RNA, 19 nt, Artificial Sequence
  Description of Artificial Sequence: Synthetic oligonucleotide
gugaucuggggugcgcuuc

SEQ ID NO: 3093836 - RNA, 19 nt, Artificial Sequence
  Description of Artificial Sequence: Synthetic oligonucleotide
cagcucagguacaaugugu

SEQ ID NO: 3093837 - RNA, 19 nt, Artificial Sequence
  Description of Artificial Sequence: Synthetic oligonucleotide
  modified_base (9)..(9): a, c, u, g, unknown or other
cuggcagcnccggcagagg

SEQ ID NO: 3093838 - RNA, 19 nt, Artificial Sequence
  Description of Artificial Sequence: Synthetic oligonucleotide
  modified_base (15)..(15): a, c, u, g, unknown or other
cacaggcuggcagcnccgg

SEQ ID NO: 3093839 - RNA, 19 nt, Artificial Sequence
  Description of Artificial Sequence: Synthetic oligonucleotide
cuaggggcacacggugggc

SEQ ID NO: 3093840 - RNA, 19 nt, Artificial Sequence
  Description of Artificial Sequence: Synthetic oligonucleotide
gccaccccuugccaacugg

SEQ ID NO: 3093841 - RNA, 19 nt, Artificial Sequence
  Description of Artificial Sequence: Synthetic oligonucleotide
acuggccuaggggcacacg

SEQ ID NO: 3093842 - RNA, 19 nt, Artificial Sequence
  Description of Artificial Sequence: Synthetic oligonucleotide
caaagcccugagacaguga

SEQ ID NO: 3093843 - RNA, 19 nt, Artificial Sequence
  Description of Artificial Sequence: Synthetic oligonucleotide
ccaccccuugccaacuggc

SEQ ID NO: 3093844 - RNA, 19 nt, Artificial Sequence
  Description of Artificial Sequence: Synthetic oligonucleotide
gcucagguacaauguguuc

SEQ ID NO: 3093845 - RNA, 19 nt, Artificial Sequence
  Description of Artificial Sequence: Synthetic oligonucleotide
acacacacacacacacaaa

SEQ ID NO: 3093846 - RNA, 19 nt, Artificial Sequence
  Description of Artificial Sequence: Synthetic oligonucleotide
ggcucagauggaguucagc

SEQ ID NO: 3093847 - RNA, 19 nt, Artificial Sequence
  Description of Artificial Sequence: Synthetic oligonucleotide
gguaccugucagcucaggu

SEQ ID NO: 3093848 - RNA, 19 nt, Artificial Sequence
  Description of Artificial Sequence: Synthetic oligonucleotide
agccaccccuugccaacug

SEQ ID NO: 3093849 - RNA, 19 nt, Artificial Sequence
  Description of Artificial Sequence: Synthetic oligonucleotide
gccuaggggcacacggugg

SEQ ID NO: 3093850 - RNA, 19 nt, Artificial Sequence
  Description of Artificial Sequence: Synthetic oligonucleotide
cccacaaagcccugagaca

SEQ ID NO: 3093851 - RNA, 19 nt, Artificial Sequence
  Description of Artificial Sequence: Synthetic oligonucleotide
ccagagccuguuucuuggc

SEQ ID NO: 3093852 - RNA, 19 nt, Artificial Sequence
  Description of Artificial Sequence: Synthetic oligonucleotide
gugggcucagauggaguuc

SEQ ID NO: 3093853 - RNA, 19 nt, Artificial Sequence
  Description of Artificial Sequence: Synthetic oligonucleotide
gcgcccacaaagcccugag

SEQ ID NO: 3093854 - RNA, 19 nt, Artificial Sequence
  Description of Artificial Sequence: Synthetic oligonucleotide
agcgcccacaaagcccuga

SEQ ID NO: 3093855 - RNA, 19 nt, Artificial Sequence
  Description of Artificial Sequence: Synthetic oligonucleotide
ggugggcucagauggaguu

SEQ ID NO: 3093856 - RNA, 19 nt, Artificial Sequence
  Description of Artificial Sequence: Synthetic oligonucleotide
  modified_base (5)..(5): a, c, u, g, unknown or other
cagcnccggcagaggcagg

SEQ ID NO: 3093857 - RNA, 19 nt, Artificial Sequence
  Description of Artificial Sequence: Synthetic oligonucleotide
  modified_base (7)..(7): a, c, u, g, unknown or other
ggcagcnccggcagaggca

SEQ ID NO: 3093858 - RNA, 19 nt, Artificial Sequence
  Description of Artificial Sequence: Synthetic oligonucleotide
ccucaagagccaccccuug

SEQ ID NO: 3093859 - RNA, 19 nt, Artificial Sequence
  Description of Artificial Sequence: Synthetic oligonucleotide
cacggugggcucagaugga

SEQ ID NO: 3093860 - RNA, 19 nt, Artificial Sequence
  Description of Artificial Sequence: Synthetic oligonucleotide
accugucagcucagguaca

SEQ ID NO: 3093861 - RNA, 19 nt, Artificial Sequence
  Description of Artificial Sequence: Synthetic oligonucleotide
gcccucaagagccaccccu

SEQ ID NO: 3093862 - RNA, 19 nt, Artificial Sequence
  Description of Artificial Sequence: Synthetic oligonucleotide
gucagcuaaugaaggguau

SEQ ID NO: 3093863 - RNA, 19 nt, Artificial Sequence
  Description of Artificial Sequence: Synthetic oligonucleotide
cagguacaauguguuccca

SEQ ID NO: 3093864 - RNA, 19 nt, Artificial Sequence
  Description of Artificial Sequence: Synthetic oligonucleotide
ccaacuggccuaggggcac

SEQ ID NO: 3093865 - RNA, 19 nt, Artificial Sequence
  Description of Artificial Sequence: Synthetic oligonucleotide
cacaaagcccugagacagu

SEQ ID NO: 3093866 - RNA, 19 nt, Artificial Sequence
  Description of Artificial Sequence: Synthetic oligonucleotide
cgucagcuaaugaagggua

SEQ ID NO: 3093867 - RNA, 19 nt, Artificial Sequence
  Description of Artificial Sequence: Synthetic oligonucleotide
gccaacuggccuaggggca

SEQ ID NO: 3093868 - RNA, 19 nt, Artificial Sequence
  Description of Artificial Sequence: Synthetic oligonucleotide
gcacacacacacacacaca

SEQ ID NO: 3093869 - RNA, 19 nt, Artificial Sequence
  Description of Artificial Sequence: Synthetic oligonucleotide
ggaguucagcgcccacaaa

SEQ ID NO: 3093870 - RNA, 19 nt, Artificial Sequence
  Description of Artificial Sequence: Synthetic oligonucleotide
cagugaucuggggugcgcu

SEQ ID NO: 3093871 - RNA, 19 nt, Artificial Sequence
  Description of Artificial Sequence: Synthetic oligonucleotide
gcccugagacagugaucug

SEQ ID NO: 3093872 - RNA, 19 nt, Artificial Sequence
  Description of Artificial Sequence: Synthetic oligonucleotide
caacuggccuaggggcaca

SEQ ID NO: 3093873 - RNA, 19 nt, Artificial Sequence
  Description of Artificial Sequence: Synthetic oligonucleotide
gagccaccccuugccaacu

SEQ ID NO: 3093874 - RNA, 19 nt, Artificial Sequence
  Description of Artificial Sequence: Synthetic oligonucleotide
  modified_base (3)..(3): a, c, u, g, unknown or other
gcnccggcagaggcaggcc

SEQ ID NO: 3093875 - RNA, 19 nt, Artificial Sequence
  Description of Artificial Sequence: Synthetic oligonucleotide
gccuguuucuuggcacaca

SEQ ID NO: 3093876 - RNA, 19 nt, Artificial Sequence
  Description of Artificial Sequence: Synthetic oligonucleotide
cccuugccaacuggccuag

SEQ ID NO: 3093877 - RNA, 19 nt, Artificial Sequence
  Description of Artificial Sequence: Synthetic oligonucleotide
gggcacacggugggcucag

SEQ ID NO: 3093878 - RNA, 19 nt, Artificial Sequence
  Description of Artificial Sequence: Synthetic oligonucleotide
cagcgcccacaaagcccug

SEQ ID NO: 3093879 - RNA, 19 nt, Artificial Sequence
  Description of Artificial Sequence: Synthetic oligonucleotide
ccccuugccaacuggccua

SEQ ID NO: 3093880 - RNA, 19 nt, Artificial Sequence
  Description of Artificial Sequence: Synthetic oligonucleotide
gggcucagauggaguucag

SEQ ID NO: 3093881 - RNA, 19 nt, Artificial Sequence
  Description of Artificial Sequence: Synthetic oligonucleotide
guguucccacaagcacaca

SEQ ID NO: 3093882 - RNA, 19 nt, Artificial Sequence
  Description of Artificial Sequence: Synthetic oligonucleotide
ccugucagcucagguacaa

SEQ ID NO: 3093883 - RNA, 19 nt, Artificial Sequence
  Description of Artificial Sequence: Synthetic oligonucleotide
  modified_base (18)..(18): a, c, u, g, unknown or other
gcacacaggcuggcagcnc

SEQ ID NO: 3093884 - RNA, 19 nt, Artificial Sequence
  Description of Artificial Sequence: Synthetic oligonucleotide
ggggcacacggugggcuca

SEQ ID NO: 3093885 - RNA, 19 nt, Artificial Sequence
  Description of Artificial Sequence: Synthetic oligonucleotide
gcacacggugggcucagau

SEQ ID NO: 3093886 - RNA, 19 nt, Artificial Sequence
  Description of Artificial Sequence: Synthetic oligonucleotide
  modified_base (11)..(11): a, c, u, g, unknown or other
ggcuggcagcnccggcaga

SEQ ID NO: 3093887 - RNA, 19 nt, Artificial Sequence
  Description of Artificial Sequence: Synthetic oligonucleotide
ccggcagaggcaggcccag

SEQ ID NO: 3093888 - RNA, 19 nt, Artificial Sequence
  Description of Artificial Sequence: Synthetic oligonucleotide
ccuugccaacuggccuagg

SEQ ID NO: 3093889 - RNA, 19 nt, Artificial Sequence
  Description of Artificial Sequence: Synthetic oligonucleotide
cugucagcucagguacaau

SEQ ID NO: 3093890 - RNA, 19 nt, Artificial Sequence
  Description of Artificial Sequence: Synthetic oligonucleotide
cccucaagagccaccccuu

SEQ ID NO: 3093891 - RNA, 19 nt, Artificial Sequence
  Description of Artificial Sequence: Synthetic oligonucleotide
cgcccacaaagcccugaga

SEQ ID NO: 3093892 - RNA, 19 nt, Artificial Sequence
  Description of Artificial Sequence: Synthetic oligonucleotide
gcaggcccagagccuguuu

SEQ ID NO: 3093893 - RNA, 19 nt, Artificial Sequence
  Description of Artificial Sequence: Synthetic oligonucleotide
cggugggcucagauggagu

SEQ ID NO: 3093894 - RNA, 19 nt, Artificial Sequence
  Description of Artificial Sequence: Synthetic oligonucleotide
  modified_base (1)..(1): a, c, u, g, unknown or other
nccggcagaggcaggccca

SEQ ID NO: 3093895 - RNA, 19 nt, Artificial Sequence
  Description of Artificial Sequence: Synthetic oligonucleotide
gaggcuugagaacagagcg

SEQ ID NO: 3093896 - RNA, 19 nt, Artificial Sequence
  Description of Artificial Sequence: Synthetic oligonucleotide
uaggauaggucgaagaggc

SEQ ID NO: 3093897 - RNA, 19 nt, Artificial Sequence
  Description of Artificial Sequence: Synthetic oligonucleotide
uguagagcaacuugcaggc

SEQ ID NO: 3093898 - RNA, 19 nt, Artificial Sequence
  Description of Artificial Sequence: Synthetic oligonucleotide
gaagcccucagcuaggcgg

SEQ ID NO: 3093899 - RNA, 19 nt, Artificial Sequence
  Description of Artificial Sequence: Synthetic oligonucleotide
aagcaacugaagcaguuuc

SEQ ID NO: 3093900 - RNA, 19 nt, Artificial Sequence
  Description of Artificial Sequence: Synthetic oligonucleotide
guguagagcaacuugcagg

SEQ ID NO: 3093901 - RNA, 19 nt, Artificial Sequence
  Description of Artificial Sequence: Synthetic oligonucleotide
gaugcaaggacuucuccag

SEQ ID NO: 3093902 - RNA, 19 nt, Artificial Sequence
  Description of Artificial Sequence: Synthetic oligonucleotide
acuaggauaggucgaagag

SEQ ID NO: 3093903 - RNA, 19 nt, Artificial Sequence
  Description of Artificial Sequence: Synthetic oligonucleotide
cuugagaacagagcgaugc

SEQ ID NO: 3093904 - RNA, 19 nt, Artificial Sequence
  Description of Artificial Sequence: Synthetic oligonucleotide
ugaauaggugccaagcaac

SEQ ID NO: 3093905 - RNA, 19 nt, Artificial Sequence
  Description of Artificial Sequence: Synthetic oligonucleotide
acugaagcaguuucuggcg

SEQ ID NO: 3093906 - RNA, 19 nt, Artificial Sequence
  Description of Artificial Sequence: Synthetic oligonucleotide
accaucugcggaaagacgc

SEQ ID NO: 3093907 - RNA, 19 nt, Artificial Sequence
  Description of Artificial Sequence: Synthetic oligonucleotide
aacuaggauaggucgaaga

SEQ ID NO: 3093908 - RNA, 19 nt, Artificial Sequence
  Description of Artificial Sequence: Synthetic oligonucleotide
ugcaggagccacuugaucu

SEQ ID NO: 3093909 - RNA, 19 nt, Artificial Sequence
  Description of Artificial Sequence: Synthetic oligonucleotide
uguguagagcaacuugcag

SEQ ID NO: 3093910 - RNA, 19 nt, Artificial Sequence
  Description of Artificial Sequence: Synthetic oligonucleotide
agaacagagcgaugcaagg

SEQ ID NO: 3093911 - RNA, 19 nt, Artificial Sequence
  Description of Artificial Sequence: Synthetic oligonucleotide
acuugaucugggcaguagg

SEQ ID NO: 3093912 - RNA, 19 nt, Artificial Sequence
  Description of Artificial Sequence: Synthetic oligonucleotide
uucagggcuguguagagca

SEQ ID NO: 3093913 - RNA, 19 nt, Artificial Sequence
  Description of Artificial Sequence: Synthetic oligonucleotide
guaggagaggggcaggugg

SEQ ID NO: 3093914 - RNA, 19 nt, Artificial Sequence
  Description of Artificial Sequence: Synthetic oligonucleotide
aggugaauaggugccaagc

SEQ ID NO: 3093915 - RNA, 19 nt, Artificial Sequence
  Description of Artificial Sequence: Synthetic oligonucleotide
auaggugccaagcaacuga

SEQ ID NO: 3093916 - RNA, 19 nt, Artificial Sequence
  Description of Artificial Sequence: Synthetic oligonucleotide
ucgaagaggcuugagaaca

SEQ ID NO: 3093917 - RNA, 19 nt, Artificial Sequence
  Description of Artificial Sequence: Synthetic oligonucleotide
ucagcuaggcggccaaggg

SEQ ID NO: 3093918 - RNA, 19 nt, Artificial Sequence
  Description of Artificial Sequence: Synthetic oligonucleotide
ugaucugggcaguagguga

SEQ ID NO: 3093919 - RNA, 19 nt, Artificial Sequence
  Description of Artificial Sequence: Synthetic oligonucleotide
caaggacuucuccagaacc

SEQ ID NO: 3093920 - RNA, 19 nt, Artificial Sequence
  Description of Artificial Sequence: Synthetic oligonucleotide
cuaggauaggucgaagagg

SEQ ID NO: 3093921 - RNA, 19 nt, Artificial Sequence
  Description of Artificial Sequence: Synthetic oligonucleotide
uuucuggcgcaccuguucc

SEQ ID NO: 3093922 - RNA, 19 nt, Artificial Sequence
  Description of Artificial Sequence: Synthetic oligonucleotide
aagggaaccaucugcggaa

SEQ ID NO: 3093923 - RNA, 19 nt, Artificial Sequence
  Description of Artificial Sequence: Synthetic oligonucleotide
caguaggugaauaggugcc

SEQ ID NO: 3093924 - RNA, 19 nt, Artificial Sequence
  Description of Artificial Sequence: Synthetic oligonucleotide
agaggcuugagaacagagc

SEQ ID NO: 3093925 - RNA, 19 nt, Artificial Sequence
  Description of Artificial Sequence: Synthetic oligonucleotide
gagaacagagcgaugcaag

SEQ ID NO: 3093926 - RNA, 19 nt, Artificial Sequence
  Description of Artificial Sequence: Synthetic oligonucleotide
ugggcaguaggugaauagg

SEQ ID NO: 3093927 - RNA, 19 nt, Artificial Sequence
  Description of Artificial Sequence: Synthetic oligonucleotide
ugccaagcaacugaagcag

SEQ ID NO: 3093928 - RNA, 19 nt, Artificial Sequence
  Description of Artificial Sequence: Synthetic oligonucleotide
ggugccaagcaacugaagc

SEQ ID NO: 3093929 - RNA, 19 nt, Artificial Sequence
  Description of Artificial Sequence: Synthetic oligonucleotide
aaagacgccgccgcaggcg

SEQ ID NO: 3093930 - RNA, 19 nt, Artificial Sequence
  Description of Artificial Sequence: Synthetic oligonucleotide
agccacuugaucugggcag

SEQ ID NO: 3093931 - RNA, 19 nt, Artificial Sequence
  Description of Artificial Sequence: Synthetic oligonucleotide
caacugaagcaguuucugg

SEQ ID NO: 3093932 - RNA, 19 nt, Artificial Sequence
  Description of Artificial Sequence: Synthetic oligonucleotide
aagacgccgccgcaggcgg

SEQ ID NO: 3093933 - RNA, 19 nt, Artificial Sequence
  Description of Artificial Sequence: Synthetic oligonucleotide
gguggaagcccucagcuag

SEQ ID NO: 3093934 - RNA, 19 nt, Artificial Sequence
  Description of Artificial Sequence: Synthetic oligonucleotide
aagaggcuugagaacagag

SEQ ID NO: 3093935 - RNA, 19 nt, Artificial Sequence
  Description of Artificial Sequence: Synthetic oligonucleotide
aauaggugccaagcaacug

SEQ ID NO: 3093936 - RNA, 19 nt, Artificial Sequence
  Description of Artificial Sequence: Synthetic oligonucleotide
ugcggaaagacgccgccgc

SEQ ID NO: 3093937 - RNA, 19 nt, Artificial Sequence
  Description of Artificial Sequence: Synthetic oligonucleotide
gauaggucgaagaggcuug

SEQ ID NO: 3093938 - RNA, 19 nt, Artificial Sequence
  Description of Artificial Sequence: Synthetic oligonucleotide
acuucuccagaaccaguuc

SEQ ID NO: 3093939 - RNA, 19 nt, Artificial Sequence
  Description of Artificial Sequence: Synthetic oligonucleotide
accuguuccgucuccacug

SEQ ID NO: 3093940 - RNA, 19 nt, Artificial Sequence
  Description of Artificial Sequence: Synthetic oligonucleotide
cuugcaggccugcaggagc

SEQ ID NO: 3093941 - RNA, 19 nt, Artificial Sequence
  Description of Artificial Sequence: Synthetic oligonucleotide
gggcaacuaggauaggucg

SEQ ID NO: 3093942 - RNA, 19 nt, Artificial Sequence
  Description of Artificial Sequence: Synthetic oligonucleotide
uugagaacagagcgaugca

SEQ ID NO: 3093943 - RNA, 19 nt, Artificial Sequence
  Description of Artificial Sequence: Synthetic oligonucleotide
gcaguaggugaauaggugc

SEQ ID NO: 3093944 - RNA, 19 nt, Artificial Sequence
  Description of Artificial Sequence: Synthetic oligonucleotide
uggguccggggccaggugg

SEQ ID NO: 3093945 - RNA, 19 nt, Artificial Sequence
  Description of Artificial Sequence: Synthetic oligonucleotide
gaaccaucugcggaaagac

SEQ ID NO: 3093946 - RNA, 19 nt, Artificial Sequence
  Description of Artificial Sequence: Synthetic oligonucleotide
ucugcggaaagacgccgcc

SEQ ID NO: 3093947 - RNA, 19 nt, Artificial Sequence
  Description of Artificial Sequence: Synthetic oligonucleotide
aagcccucagcuaggcggc

SEQ ID NO: 3093948 - RNA, 19 nt, Artificial Sequence
  Description of Artificial Sequence: Synthetic oligonucleotide
uguuccgucuccacugggu

SEQ ID NO: 3093949 - RNA, 19 nt, Artificial Sequence
  Description of Artificial Sequence: Synthetic oligonucleotide
ugaagcaguuucuggcgca

SEQ ID NO: 3093950 - RNA, 19 nt, Artificial Sequence
  Description of Artificial Sequence: Synthetic oligonucleotide
aaccaucugcggaaagacg

SEQ ID NO: 3093951 - RNA, 19 nt, Artificial Sequence
  Description of Artificial Sequence: Synthetic oligonucleotide
aacuugcaggccugcagga

SEQ ID NO: 3093952 - RNA, 19 nt, Artificial Sequence
  Description of Artificial Sequence: Synthetic oligonucleotide
uccgucuccacuggguagg

SEQ ID NO: 3093953 - RNA, 19 nt, Artificial Sequence
  Description of Artificial Sequence: Synthetic oligonucleotide
uaggugaauaggugccaag

SEQ ID NO: 3093954 - RNA, 19 nt, Artificial Sequence
  Description of Artificial Sequence: Synthetic oligonucleotide
ugcaaggacuucuccagaa

SEQ ID NO: 3093955 - RNA, 19 nt, Artificial Sequence
  Description of Artificial Sequence: Synthetic oligonucleotide
uugaucugggcaguaggug

SEQ ID NO: 3093956 - RNA, 19 nt, Artificial Sequence
  Description of Artificial Sequence: Synthetic oligonucleotide
aggucgaagaggcuugaga

SEQ ID NO: 3093957 - RNA, 19 nt, Artificial Sequence
  Description of Artificial Sequence: Synthetic oligonucleotide
ugagaacagagcgaugcaa

SEQ ID NO: 3093958 - RNA, 19 nt, Artificial Sequence
  Description of Artificial Sequence: Synthetic oligonucleotide
cugaagcaguuucuggcgc

SEQ ID NO: 3093959 - RNA, 19 nt, Artificial Sequence
  Description of Artificial Sequence: Synthetic oligonucleotide
uugcaggccugcaggagcc

SEQ ID NO: 3093960 - RNA, 19 nt, Artificial Sequence
  Description of Artificial Sequence: Synthetic oligonucleotide
cugggcaguaggugaauag

SEQ ID NO: 3093961 - RNA, 19 nt, Artificial Sequence
  Description of Artificial Sequence: Synthetic oligonucleotide
aagcaguuucuggcgcacc

SEQ ID NO: 3093962 - RNA, 19 nt, Artificial Sequence
  Description of Artificial Sequence: Synthetic oligonucleotide
gugaauaggugccaagcaa

SEQ ID NO: 3093963 - RNA, 19 nt, Artificial Sequence
  Description of Artificial Sequence: Synthetic oligonucleotide
gugccaagcaacugaagca

SEQ ID NO: 3093964 - RNA, 19 nt, Artificial Sequence
  Description of Artificial Sequence: Synthetic oligonucleotide
uaggugccaagcaacugaa

SEQ ID NO: 3093965 - RNA, 19 nt, Artificial Sequence
  Description of Artificial Sequence: Synthetic oligonucleotide
uccggggccagguggaagc

SEQ ID NO: 3093966 - RNA, 19 nt, Artificial Sequence
  Description of Artificial Sequence: Synthetic oligonucleotide
gcuguguagagcaacuugc

SEQ ID NO: 3093967 - RNA, 19 nt, Artificial Sequence
  Description of Artificial Sequence: Synthetic oligonucleotide
uuccgucuccacuggguag

SEQ ID NO: 3093968 - RNA, 19 nt, Artificial Sequence
  Description of Artificial Sequence: Synthetic oligonucleotide
agcaguuucuggcgcaccu

SEQ ID NO: 3093969 - RNA, 19 nt, Artificial Sequence
  Description of Artificial Sequence: Synthetic oligonucleotide
ggucgaagaggcuugagaa

SEQ ID NO: 3093970 - RNA, 19 nt, Artificial Sequence
  Description of Artificial Sequence: Synthetic oligonucleotide
gucuccacuggguaggaga

SEQ ID NO: 3093971 - RNA, 19 nt, Artificial Sequence
  Description of Artificial Sequence: Synthetic oligonucleotide
aggacuucuccagaaccag

SEQ ID NO: 3093972 - RNA, 19 nt, Artificial Sequence
  Description of Artificial Sequence: Synthetic oligonucleotide
uucuggcgcaccuguuccg

SEQ ID NO: 3093973 - RNA, 19 nt, Artificial Sequence
  Description of Artificial Sequence: Synthetic oligonucleotide
cacuggguaggagaggggc

SEQ ID NO: 3093974 - RNA, 19 nt, Artificial Sequence
  Description of Artificial Sequence: Synthetic oligonucleotide
gucgaagaggcuugagaac

SEQ ID NO: 3093975 - RNA, 19 nt, Artificial Sequence
  Description of Artificial Sequence: Synthetic oligonucleotide
guuucuggcgcaccuguuc

SEQ ID NO: 3093976 - RNA, 19 nt, Artificial Sequence
  Description of Artificial Sequence: Synthetic oligonucleotide
gaacagagcgaugcaagga

SEQ ID NO: 3093977 - RNA, 19 nt, Artificial Sequence
  Description of Artificial Sequence: Synthetic oligonucleotide
ggaaagacgccgccgcagg

SEQ ID NO: 3093978 - RNA, 19 nt, Artificial Sequence
  Description of Artificial Sequence: Synthetic oligonucleotide
uuucagggcuguguagagc

SEQ ID NO: 3093979 - RNA, 19 nt, Artificial Sequence
  Description of Artificial Sequence: Synthetic oligonucleotide
caagggaaccaucugcgga

SEQ ID NO: 3093980 - RNA, 19 nt, Artificial Sequence
  Description of Artificial Sequence: Synthetic oligonucleotide
gaaagacgccgccgcaggc

SEQ ID NO: 3093981 - RNA, 19 nt, Artificial Sequence
  Description of Artificial Sequence: Synthetic oligonucleotide
ggcaggugggacccgaggg

SEQ ID NO: 3093982 - RNA, 19 nt, Artificial Sequence
  Description of Artificial Sequence: Synthetic oligonucleotide
agagcgaugcaaggacuuc

SEQ ID NO: 3093983 - RNA, 19 nt, Artificial Sequence
  Description of Artificial Sequence: Synthetic oligonucleotide
gagccacuugaucugggca

SEQ ID NO: 3093984 - RNA, 19 nt, Artificial Sequence
  Description of Artificial Sequence: Synthetic oligonucleotide
aggcgggcaacuaggauag

SEQ ID NO: 3093985 - RNA, 19 nt, Artificial Sequence
  Description of Artificial Sequence: Synthetic oligonucleotide
ggcuguguagagcaacuug

SEQ ID NO: 3093986 - RNA, 19 nt, Artificial Sequence
  Description of Artificial Sequence: Synthetic oligonucleotide
ggccaagggaaccaucugc

SEQ ID NO: 3093987 - RNA, 19 nt, Artificial Sequence
  Description of Artificial Sequence: Synthetic oligonucleotide
aucugcggaaagacgccgc

SEQ ID NO: 3093988 - RNA, 19 nt, Artificial Sequence
  Description of Artificial Sequence: Synthetic oligonucleotide
ggugaauaggugccaagca

SEQ ID NO: 3093989 - RNA, 19 nt, Artificial Sequence
  Description of Artificial Sequence: Synthetic oligonucleotide
caucugcggaaagacgccg

SEQ ID NO: 3093990 - RNA, 19 nt, Artificial Sequence
  Description of Artificial Sequence: Synthetic oligonucleotide
cucagcuaggcggccaagg

SEQ ID NO: 3093991 - RNA, 19 nt, Artificial Sequence
  Description of Artificial Sequence: Synthetic oligonucleotide
gguuuucagggcuguguag

SEQ ID NO: 3093992 - RNA, 19 nt, Artificial Sequence
  Description of Artificial Sequence: Synthetic oligonucleotide
gccaagggaaccaucugcg

SEQ ID NO: 3093993 - RNA, 19 nt, Artificial Sequence
  Description of Artificial Sequence: Synthetic oligonucleotide
aguaggugaauaggugcca

SEQ ID NO: 3093994 - RNA, 19 nt, Artificial Sequence
  Description of Artificial Sequence: Synthetic oligonucleotide
gcaacuugcaggccugcag

SEQ ID NO: 3093995 - RNA, 19 nt, Artificial Sequence
  Description of Artificial Sequence: Synthetic oligonucleotide
uccagguccccuggguccg

SEQ ID NO: 3093996 - RNA, 19 nt, Artificial Sequence
  Description of Artificial Sequence: Synthetic oligonucleotide
cuguguagagcaacuugca

SEQ ID NO: 3093997 - RNA, 19 nt, Artificial Sequence
  Description of Artificial Sequence: Synthetic oligonucleotide
agcgaugcaaggacuucuc

SEQ ID NO: 3093998 - RNA, 19 nt, Artificial Sequence
  Description of Artificial Sequence: Synthetic oligonucleotide
agcaacugaagcaguuucu

SEQ ID NO: 3093999 - RNA, 19 nt, Artificial Sequence
  Description of Artificial Sequence: Synthetic oligonucleotide
agggcuccagguccccugg

SEQ ID NO: 3094000 - RNA, 19 nt, Artificial Sequence
  Description of Artificial Sequence: Synthetic oligonucleotide
augcaaggacuucuccaga

SEQ ID NO: 3094001 - RNA, 19 nt, Artificial Sequence
  Description of Artificial Sequence: Synthetic oligonucleotide
gaagcaguuucuggcgcac

SEQ ID NO: 3094002 - RNA, 19 nt, Artificial Sequence
  Description of Artificial Sequence: Synthetic oligonucleotide
gcaacugaagcaguuucug

SEQ ID NO: 3094003 - RNA, 19 nt, Artificial Sequence
  Description of Artificial Sequence: Synthetic oligonucleotide
agcuaggcggccaagggaa

SEQ ID NO: 3094004 - RNA, 19 nt, Artificial Sequence
  Description of Artificial Sequence: Synthetic oligonucleotide
caggcgggcaacuaggaua

SEQ ID NO: 3094005 - RNA, 19 nt, Artificial Sequence
  Description of Artificial Sequence: Synthetic oligonucleotide
gagggcuccagguccccug

SEQ ID NO: 3094006 - RNA, 19 nt, Artificial Sequence
  Description of Artificial Sequence: Synthetic oligonucleotide
agagcaacuugcaggccug

SEQ ID NO: 3094007 - RNA, 19 nt, Artificial Sequence
  Description of Artificial Sequence: Synthetic oligonucleotide
cuugaucugggcaguaggu

SEQ ID NO: 3094008 - RNA, 19 nt, Artificial Sequence
  Description of Artificial Sequence: Synthetic oligonucleotide
gaagaggcuugagaacaga

SEQ ID NO: 3094009 - RNA, 19 nt, Artificial Sequence
  Description of Artificial Sequence: Synthetic oligonucleotide
cuaggcggccaagggaacc

SEQ ID NO: 3094010 - RNA, 19 nt, Artificial Sequence
  Description of Artificial Sequence: Synthetic oligonucleotide
ggcaguaggugaauaggug

SEQ ID NO: 3094011 - RNA, 19 nt, Artificial Sequence
  Description of Artificial Sequence: Synthetic oligonucleotide
gcaggagccacuugaucug

SEQ ID NO: 3094012 - RNA, 19 nt, Artificial Sequence
  Description of Artificial Sequence: Synthetic oligonucleotide
uggcgcaccuguuccgucu

SEQ ID NO: 3094013 - RNA, 19 nt, Artificial Sequence
  Description of Artificial Sequence: Synthetic oligonucleotide
cacuugaucugggcaguag

SEQ ID NO: 3094014 - RNA, 19 nt, Artificial Sequence
  Description of Artificial Sequence: Synthetic oligonucleotide
acagagcgaugcaaggacu

SEQ ID NO: 3094015 - RNA, 19 nt, Artificial Sequence
  Description of Artificial Sequence: Synthetic oligonucleotide
ucuggcgcaccuguuccgu

SEQ ID NO: 3094016 - RNA, 19 nt, Artificial Sequence
  Description of Artificial Sequence: Synthetic oligonucleotide
caacuaggauaggucgaag

SEQ ID NO: 3094017 - RNA, 19 nt, Artificial Sequence
  Description of Artificial Sequence: Synthetic oligonucleotide
guggaagcccucagcuagg

SEQ ID NO: 3094018 - RNA, 19 nt, Artificial Sequence
  Description of Artificial Sequence: Synthetic oligonucleotide
uaggucgaagaggcuugag

SEQ ID NO: 3094019 - RNA, 19 nt, Artificial Sequence
  Description of Artificial Sequence: Synthetic oligonucleotide
ccaagggaaccaucugcgg

SEQ ID NO: 3094020 - RNA, 19 nt, Artificial Sequence
  Description of Artificial Sequence: Synthetic oligonucleotide
gaucugggcaguaggugaa

SEQ ID NO: 3094021 - RNA, 19 nt, Artificial Sequence
  Description of Artificial Sequence: Synthetic oligonucleotide
ggaaccaucugcggaaaga

SEQ ID NO: 3094022 - RNA, 19 nt, Artificial Sequence
  Description of Artificial Sequence: Synthetic oligonucleotide
gacccgagggcuccagguc

SEQ ID NO: 3094023 - RNA, 19 nt, Artificial Sequence
  Description of Artificial Sequence: Synthetic oligonucleotide
cugcggaaagacgccgccg

SEQ ID NO: 3094024 - RNA, 19 nt, Artificial Sequence
  Description of Artificial Sequence: Synthetic oligonucleotide
ucugggcaguaggugaaua

SEQ ID NO: 3094025 - RNA, 19 nt, Artificial Sequence
  Description of Artificial Sequence: Synthetic oligonucleotide
ccaucugcggaaagacgcc

SEQ ID NO: 3094026 - RNA, 19 nt, Artificial Sequence
  Description of Artificial Sequence: Synthetic oligonucleotide
gcaaggacuucuccagaac

SEQ ID NO: 3094027 - RNA, 19 nt, Artificial Sequence
  Description of Artificial Sequence: Synthetic oligonucleotide
cagggcuguguagagcaac

SEQ ID NO: 3094028 - RNA, 19 nt, Artificial Sequence
  Description of Artificial Sequence: Synthetic oligonucleotide
cugcaggagccacuugauc

SEQ ID NO: 3094029 - RNA, 19 nt, Artificial Sequence
  Description of Artificial Sequence: Synthetic oligonucleotide
guuccgucuccacugggua

SEQ ID NO: 3094030 - RNA, 19 nt, Artificial Sequence
  Description of Artificial Sequence: Synthetic oligonucleotide
gcaggugggacccgagggc

SEQ ID NO: 3094031 - RNA, 19 nt, Artificial Sequence
  Description of Artificial Sequence: Synthetic oligonucleotide
aggcuugagaacagagcga

SEQ ID NO: 3094032 - RNA, 19 nt, Artificial Sequence
  Description of Artificial Sequence: Synthetic oligonucleotide
ggaagcccucagcuaggcg

SEQ ID NO: 3094033 - RNA, 19 nt, Artificial Sequence
  Description of Artificial Sequence: Synthetic oligonucleotide
gccugcaggagccacuuga

SEQ ID NO: 3094034 - RNA, 19 nt, Artificial Sequence
  Description of Artificial Sequence: Synthetic oligonucleotide
guagagcaacuugcaggcc

SEQ ID NO: 3094035 - RNA, 19 nt, Artificial Sequence
  Description of Artificial Sequence: Synthetic oligonucleotide
auaggucgaagaggcuuga

SEQ ID NO: 3094036 - RNA, 19 nt, Artificial Sequence
  Description of Artificial Sequence: Synthetic oligonucleotide
cagguggaagcccucagcu

SEQ ID NO: 3094037 - RNA, 19 nt, Artificial Sequence
  Description of Artificial Sequence: Synthetic oligonucleotide
agguggaagcccucagcua

SEQ ID NO: 3094038 - RNA, 19 nt, Artificial Sequence
  Description of Artificial Sequence: Synthetic oligonucleotide
guaggugaauaggugccaa

SEQ ID NO: 3094039 - RNA, 19 nt, Artificial Sequence
  Description of Artificial Sequence: Synthetic oligonucleotide
guccccuggguccggggcc

SEQ ID NO: 3094040 - RNA, 19 nt, Artificial Sequence
  Description of Artificial Sequence: Synthetic oligonucleotide
gacuucuccagaaccaguu

SEQ ID NO: 3094041 - RNA, 19 nt, Artificial Sequence
  Description of Artificial Sequence: Synthetic oligonucleotide
gcgaugcaaggacuucucc

SEQ ID NO: 3094042 - RNA, 19 nt, Artificial Sequence
  Description of Artificial Sequence: Synthetic oligonucleotide
aggagccacuugaucuggg

SEQ ID NO: 3094043 - RNA, 19 nt, Artificial Sequence
  Description of Artificial Sequence: Synthetic oligonucleotide
agcaacuugcaggccugca

SEQ ID NO: 3094044 - RNA, 19 nt, Artificial Sequence
  Description of Artificial Sequence: Synthetic oligonucleotide
ccagguggaagcccucagc

SEQ ID NO: 3094045 - RNA, 19 nt, Artificial Sequence
  Description of Artificial Sequence: Synthetic oligonucleotide
gagcgaugcaaggacuucu

SEQ ID NO: 3094046 - RNA, 19 nt, Artificial Sequence
  Description of Artificial Sequence: Synthetic oligonucleotide
gagcaacuugcaggccugc

SEQ ID NO: 3094047 - RNA, 19 nt, Artificial Sequence
  Description of Artificial Sequence: Synthetic oligonucleotide
ggcaacuaggauaggucga

SEQ ID NO: 3094048 - RNA, 19 nt, Artificial Sequence
  Description of Artificial Sequence: Synthetic oligonucleotide
ccuguuccgucuccacugg

SEQ ID NO: 3094049 - RNA, 19 nt, Artificial Sequence
  Description of Artificial Sequence: Synthetic oligonucleotide
gggcaggugggacccgagg

SEQ ID NO: 3094050 - RNA, 19 nt, Artificial Sequence
  Description of Artificial Sequence: Synthetic oligonucleotide
gccgcaggcgggcaacuag

SEQ ID NO: 3094051 - RNA, 19 nt, Artificial Sequence
  Description of Artificial Sequence: Synthetic oligonucleotide
gggaaccaucugcggaaag

SEQ ID NO: 3094052 - RNA, 19 nt, Artificial Sequence
  Description of Artificial Sequence: Synthetic oligonucleotide
ggguuuucagggcugugua

SEQ ID NO: 3094053 - RNA, 19 nt, Artificial Sequence
  Description of Artificial Sequence: Synthetic oligonucleotide
ccgcaggcgggcaacuagg

SEQ ID NO: 3094054 - RNA, 19 nt, Artificial Sequence
  Description of Artificial Sequence: Synthetic oligonucleotide
aggugccaagcaacugaag

SEQ ID NO: 3094055 - RNA, 19 nt, Artificial Sequence
  Description of Artificial Sequence: Synthetic oligonucleotide
gcaacuaggauaggucgaa

SEQ ID NO: 3094056 - RNA, 19 nt, Artificial Sequence
  Description of Artificial Sequence: Synthetic oligonucleotide
agcccucagcuaggcggcc

SEQ ID NO: 3094057 - RNA, 19 nt, Artificial Sequence
  Description of Artificial Sequence: Synthetic oligonucleotide
gacgccgccgcaggcgggc

SEQ ID NO: 3094058 - RNA, 19 nt, Artificial Sequence
  Description of Artificial Sequence: Synthetic oligonucleotide
cgaugcaaggacuucucca

SEQ ID NO: 3094059 - RNA, 19 nt, Artificial Sequence
  Description of Artificial Sequence: Synthetic oligonucleotide
cgaagaggcuugagaacag

SEQ ID NO: 3094060 - RNA, 19 nt, Artificial Sequence
  Description of Artificial Sequence: Synthetic oligonucleotide
caguuucuggcgcaccugu

SEQ ID NO: 3094061 - RNA, 19 nt, Artificial Sequence
  Description of Artificial Sequence: Synthetic oligonucleotide
cgggcaacuaggauagguc

SEQ ID NO: 3094062 - RNA, 19 nt, Artificial Sequence
  Description of Artificial Sequence: Synthetic oligonucleotide
gccagguggaagcccucag

SEQ ID NO: 3094063 - RNA, 19 nt, Artificial Sequence
  Description of Artificial Sequence: Synthetic oligonucleotide
ggugggacccgagggcucc

SEQ ID NO: 3094064 - RNA, 19 nt, Artificial Sequence
  Description of Artificial Sequence: Synthetic oligonucleotide
aggauaggucgaagaggcu

SEQ ID NO: 3094065 - RNA, 19 nt, Artificial Sequence
  Description of Artificial Sequence: Synthetic oligonucleotide
ggcuugagaacagagcgau

SEQ ID NO: 3094066 - RNA, 19 nt, Artificial Sequence
  Description of Artificial Sequence: Synthetic oligonucleotide
aggugggacccgagggcuc

SEQ ID NO: 3094067 - RNA, 19 nt, Artificial Sequence
  Description of Artificial Sequence: Synthetic oligonucleotide
uccccuggguccggggcca

SEQ ID NO: 3094068 - RNA, 19 nt, Artificial Sequence
  Description of Artificial Sequence: Synthetic oligonucleotide
gcuccagguccccuggguc

SEQ ID NO: 3094069 - RNA, 19 nt, Artificial Sequence
  Description of Artificial Sequence: Synthetic oligonucleotide
agggaaccaucugcggaaa

SEQ ID NO: 3094070 - RNA, 19 nt, Artificial Sequence
  Description of Artificial Sequence: Synthetic oligonucleotide
cuggcgcaccuguuccguc

SEQ ID NO: 3094071 - RNA, 19 nt, Artificial Sequence
  Description of Artificial Sequence: Synthetic oligonucleotide
ugggacccgagggcuccag

SEQ ID NO: 3094072 - RNA, 19 nt, Artificial Sequence
  Description of Artificial Sequence: Synthetic oligonucleotide
gggacccgagggcuccagg

SEQ ID NO: 3094073 - RNA, 19 nt, Artificial Sequence
  Description of Artificial Sequence: Synthetic oligonucleotide
gcaguuucuggcgcaccug

SEQ ID NO: 3094074 - RNA, 19 nt, Artificial Sequence
  Description of Artificial Sequence: Synthetic oligonucleotide
ggagaggggcaggugggac

SEQ ID NO: 3094075 - RNA, 19 nt, Artificial Sequence
  Description of Artificial Sequence: Synthetic oligonucleotide
cagagcgaugcaaggacuu

SEQ ID NO: 3094076 - RNA, 19 nt, Artificial Sequence
  Description of Artificial Sequence: Synthetic oligonucleotide
ccacuggguaggagagggg

SEQ ID NO: 3094077 - RNA, 19 nt, Artificial Sequence
  Description of Artificial Sequence: Synthetic oligonucleotide
aucugggcaguaggugaau

SEQ ID NO: 3094078 - RNA, 19 nt, Artificial Sequence
  Description of Artificial Sequence: Synthetic oligonucleotide
guccggggccagguggaag

SEQ ID NO: 3094079 - RNA, 19 nt, Artificial Sequence
  Description of Artificial Sequence: Synthetic oligonucleotide
aguuucuggcgcaccuguu

SEQ ID NO: 3094080 - RNA, 19 nt, Artificial Sequence
  Description of Artificial Sequence: Synthetic oligonucleotide
cuggguccggggccaggug

SEQ ID NO: 3094081 - RNA, 19 nt, Artificial Sequence
  Description of Artificial Sequence: Synthetic oligonucleotide
gggcaguaggugaauaggu

SEQ ID NO: 3094082 - RNA, 19 nt, Artificial Sequence
  Description of Artificial Sequence: Synthetic oligonucleotide
gcuugagaacagagcgaug

SEQ ID NO: 3094083 - RNA, 19 nt, Artificial Sequence
  Description of Artificial Sequence: Synthetic oligonucleotide
aggggcaggugggacccga

SEQ ID NO: 3094084 - RNA, 19 nt, Artificial Sequence
  Description of Artificial Sequence: Synthetic oligonucleotide
caccuguuccgucuccacu

SEQ ID NO: 3094085 - RNA, 19 nt, Artificial Sequence
  Description of Artificial Sequence: Synthetic oligonucleotide
caagcaacugaagcaguuu

SEQ ID NO: 3094086 - RNA, 19 nt, Artificial Sequence
  Description of Artificial Sequence: Synthetic oligonucleotide
gaggggcaggugggacccg

SEQ ID NO: 3094087 - RNA, 19 nt, Artificial Sequence
  Description of Artificial Sequence: Synthetic oligonucleotide
ggacccgagggcuccaggu

SEQ ID NO: 3094088 - RNA, 19 nt, Artificial Sequence
  Description of Artificial Sequence: Synthetic oligonucleotide
cagguccccuggguccggg

SEQ ID NO: 3094089 - RNA, 19 nt, Artificial Sequence
  Description of Artificial Sequence: Synthetic oligonucleotide
ggcgcaccuguuccgucuc

SEQ ID NO: 3094090 - RNA, 19 nt, Artificial Sequence
  Description of Artificial Sequence: Synthetic oligonucleotide
agacgccgccgcaggcggg

SEQ ID NO: 3094091 - RNA, 19 nt, Artificial Sequence
  Description of Artificial Sequence: Synthetic oligonucleotide
gccuggguuuucagggcug

SEQ ID NO: 3094092 - RNA, 19 nt, Artificial Sequence
  Description of Artificial Sequence: Synthetic oligonucleotide
cggaaagacgccgccgcag

SEQ ID NO: 3094093 - RNA, 19 nt, Artificial Sequence
  Description of Artificial Sequence: Synthetic oligonucleotide
caggugggacccgagggcu

SEQ ID NO: 3094094 - RNA, 19 nt, Artificial Sequence
  Description of Artificial Sequence: Synthetic oligonucleotide
gcggccaagggaaccaucu

SEQ ID NO: 3094095 - RNA, 19 nt, Artificial Sequence
  Description of Artificial Sequence: Synthetic oligonucleotide
gcggaaagacgccgccgca

SEQ ID NO: 3094096 - RNA, 19 nt, Artificial Sequence
  Description of Artificial Sequence: Synthetic oligonucleotide
gcgggcaacuaggauaggu

SEQ ID NO: 3094097 - RNA, 19 nt, Artificial Sequence
  Description of Artificial Sequence: Synthetic oligonucleotide
ccaagcaacugaagcaguu

SEQ ID NO: 3094098 - RNA, 19 nt, Artificial Sequence
  Description of Artificial Sequence: Synthetic oligonucleotide
caggccugcaggagccacu

SEQ ID NO: 3094099 - RNA, 19 nt, Artificial Sequence
  Description of Artificial Sequence: Synthetic oligonucleotide
ggacuucuccagaaccagu

SEQ ID NO: 3094100 - RNA, 19 nt, Artificial Sequence
  Description of Artificial Sequence: Synthetic oligonucleotide
aggcggccaagggaaccau

SEQ ID NO: 3094101 - RNA, 19 nt, Artificial Sequence
  Description of Artificial Sequence: Synthetic oligonucleotide
gcuaggcggccaagggaac

SEQ ID NO: 3094102 - RNA, 19 nt, Artificial Sequence
  Description of Artificial Sequence: Synthetic oligonucleotide
ggccagguggaagcccuca

SEQ ID NO: 3094103 - RNA, 19 nt, Artificial Sequence
  Description of Artificial Sequence: Synthetic oligonucleotide
ggcuccagguccccugggu

SEQ ID NO: 3094104 - RNA, 19 nt, Artificial Sequence
  Description of Artificial Sequence: Synthetic oligonucleotide
ggggcaggugggacccgag

SEQ ID NO: 3094105 - RNA, 19 nt, Artificial Sequence
  Description of Artificial Sequence: Synthetic oligonucleotide
ggguccggggccaggugga

SEQ ID NO: 3094106 - RNA, 19 nt, Artificial Sequence
  Description of Artificial Sequence: Synthetic oligonucleotide
ggcgggcaacuaggauagg

SEQ ID NO: 3094107 - RNA, 19 nt, Artificial Sequence
  Description of Artificial Sequence: Synthetic oligonucleotide
cggccaagggaaccaucug

SEQ ID NO: 3094108 - RNA, 19 nt, Artificial Sequence
  Description of Artificial Sequence: Synthetic oligonucleotide
gccacuugaucugggcagu

SEQ ID NO: 3094109 - RNA, 19 nt, Artificial Sequence
  Description of Artificial Sequence: Synthetic oligonucleotide
gccaagcaacugaagcagu

SEQ ID NO: 3094110 - RNA, 19 nt, Artificial Sequence
  Description of Artificial Sequence: Synthetic oligonucleotide
ggcggccaagggaaccauc

SEQ ID NO: 3094111 - RNA, 19 nt, Artificial Sequence
  Description of Artificial Sequence: Synthetic oligonucleotide
ggguaggagaggggcaggu

SEQ ID NO: 3094112 - RNA, 19 nt, Artificial Sequence
  Description of Artificial Sequence: Synthetic oligonucleotide
ccucagcuaggcggccaag

SEQ ID NO: 3094113 - RNA, 19 nt, Artificial Sequence
  Description of Artificial Sequence: Synthetic oligonucleotide
gcaggcgggcaacuaggau

SEQ ID NO: 3094114 - RNA, 19 nt, Artificial Sequence
  Description of Artificial Sequence: Synthetic oligonucleotide
ccugcaggagccacuugau

SEQ ID NO: 3094115 - RNA, 19 nt, Artificial Sequence
  Description of Artificial Sequence: Synthetic oligonucleotide
ccggggccagguggaagcc

SEQ ID NO: 3094116 - RNA, 19 nt, Artificial Sequence
  Description of Artificial Sequence: Synthetic oligonucleotide
gugggacccgagggcucca

SEQ ID NO: 3094117 - RNA, 19 nt, Artificial Sequence
  Description of Artificial Sequence: Synthetic oligonucleotide
cgcaggcgggcaacuagga

SEQ ID NO: 3094118 - RNA, 19 nt, Artificial Sequence
  Description of Artificial Sequence: Synthetic oligonucleotide
gccgccgcaggcgggcaac

SEQ ID NO: 3094119 - RNA, 19 nt, Artificial Sequence
  Description of Artificial Sequence: Synthetic oligonucleotide
cccucagcuaggcggccaa

SEQ ID NO: 3094120 - RNA, 19 nt, Artificial Sequence
  Description of Artificial Sequence: Synthetic oligonucleotide
gcccucagcuaggcggcca

SEQ ID NO: 3094121 - RNA, 19 nt, Artificial Sequence
  Description of Artificial Sequence: Synthetic oligonucleotide
ccagguccccuggguccgg

SEQ ID NO: 3094122 - RNA, 19 nt, Artificial Sequence
  Description of Artificial Sequence: Synthetic oligonucleotide
cgucuccacuggguaggag

SEQ ID NO: 3094123 - RNA, 19 nt, Artificial Sequence
  Description of Artificial Sequence: Synthetic oligonucleotide
acgccgccgcaggcgggca

SEQ ID NO: 3094124 - RNA, 19 nt, Artificial Sequence
  Description of Artificial Sequence: Synthetic oligonucleotide
gggccagguggaagcccuc

SEQ ID NO: 3094125 - RNA, 19 nt, Artificial Sequence
  Description of Artificial Sequence: Synthetic oligonucleotide
gggcuguguagagcaacuu

SEQ ID NO: 3094126 - RNA, 19 nt, Artificial Sequence
  Description of Artificial Sequence: Synthetic oligonucleotide
cgcaccuguuccgucucca

SEQ ID NO: 3094127 - RNA, 19 nt, Artificial Sequence
  Description of Artificial Sequence: Synthetic oligonucleotide
gguccggggccagguggaa

SEQ ID NO: 3094128 - RNA, 19 nt, Artificial Sequence
  Description of Artificial Sequence: Synthetic oligonucleotide
ccacuugaucugggcagua

SEQ ID NO: 3094129 - RNA, 19 nt, Artificial Sequence
  Description of Artificial Sequence: Synthetic oligonucleotide
ccuggguccggggccaggu

SEQ ID NO: 3094130 - RNA, 19 nt, Artificial Sequence
  Description of Artificial Sequence: Synthetic oligonucleotide
ccgucuccacuggguagga

SEQ ID NO: 3094131 - RNA, 19 nt, Artificial Sequence
  Description of Artificial Sequence: Synthetic oligonucleotide
ccccuggguccggggccag

SEQ ID NO: 3094132 - RNA, 19 nt, Artificial Sequence
  Description of Artificial Sequence: Synthetic oligonucleotide
cgagggcuccagguccccu

SEQ ID NO: 3094133 - RNA, 19 nt, Artificial Sequence
  Description of Artificial Sequence: Synthetic oligonucleotide
cgccgccgcaggcgggcaa

SEQ ID NO: 3094134 - RNA, 19 nt, Artificial Sequence
  Description of Artificial Sequence: Synthetic oligonucleotide
cgccgcaggcgggcaacua

SEQ ID NO: 3094135 - RNA, 19 nt, Artificial Sequence
  Description of Artificial Sequence: Synthetic oligonucleotide
ccgccgcaggcgggcaacu

SEQ ID NO: 3094136 - RNA, 19 nt, Artificial Sequence
  Description of Artificial Sequence: Synthetic oligonucleotide
aaaugaagacugugaaacc

SEQ ID NO: 3094137 - RNA, 19 nt, Artificial Sequence
  Description of Artificial Sequence: Synthetic oligonucleotide
gacaguaauccucaaacgg

SEQ ID NO: 3094138 - RNA, 19 nt, Artificial Sequence
  Description of Artificial Sequence: Synthetic oligonucleotide
gaaaugaagacugugaaac

SEQ ID NO: 3094139 - RNA, 19 nt, Artificial Sequence
  Description of Artificial Sequence: Synthetic oligonucleotide
uccucaaacgguuagaggu

SEQ ID NO: 3094140 - RNA, 19 nt, Artificial Sequence
  Description of Artificial Sequence: Synthetic oligonucleotide
auaaccuuccacuucgcac

SEQ ID NO: 3094141 - RNA, 19 nt, Artificial Sequence
  Description of Artificial Sequence: Synthetic oligonucleotide
ucugucauaaccuuccacu

SEQ ID NO: 3094142 - RNA, 19 nt, Artificial Sequence
  Description of Artificial Sequence: Synthetic oligonucleotide
acugauacaccccuguguc

SEQ ID NO: 3094143 - RNA, 19 nt, Artificial Sequence
  Description of Artificial Sequence: Synthetic oligonucleotide
auuucugucauaaccuucc

SEQ ID NO: 3094144 - RNA, 19 nt, Artificial Sequence
  Description of Artificial Sequence: Synthetic oligonucleotide
ucuauaugcgugcuggagc

SEQ ID NO: 3094145 - RNA, 19 nt, Artificial Sequence
  Description of Artificial Sequence: Synthetic oligonucleotide
uuccacuucgcacugauac

SEQ ID NO: 3094146 - RNA, 19 nt, Artificial Sequence
  Description of Artificial Sequence: Synthetic oligonucleotide
gucauaaccuuccacuucg

SEQ ID NO: 3094147 - RNA, 19 nt, Artificial Sequence
  Description of Artificial Sequence: Synthetic oligonucleotide
uucacucucaguuugcucu

SEQ ID NO: 3094148 - RNA, 19 nt, Artificial Sequence
  Description of Artificial Sequence: Synthetic oligonucleotide
aaugaagacugugaaaccu

SEQ ID NO: 3094149 - RNA, 19 nt, Artificial Sequence
  Description of Artificial Sequence: Synthetic oligonucleotide
agcaucauggauuuggagu

SEQ ID NO: 3094150 - RNA, 19 nt, Artificial Sequence
  Description of Artificial Sequence: Synthetic oligonucleotide
aagacugugaaaccuuugu

SEQ ID NO: 3094151 - RNA, 19 nt, Artificial Sequence
  Description of Artificial Sequence: Synthetic oligonucleotide
auggauuuggaguugugag

SEQ ID NO: 3094152 - RNA, 19 nt, Artificial Sequence
  Description of Artificial Sequence: Synthetic oligonucleotide
gauggcaccacucuauaug

SEQ ID NO: 3094153 - RNA, 19 nt, Artificial Sequence
  Description of Artificial Sequence: Synthetic oligonucleotide
ucucaguuugcucucuggg

SEQ ID NO: 3094154 - RNA, 19 nt, Artificial Sequence
  Description of Artificial Sequence: Synthetic oligonucleotide
aacgguuagagguggcagg

SEQ ID NO: 3094155 - RNA, 19 nt, Artificial Sequence
  Description of Artificial Sequence: Synthetic oligonucleotide
gugacaguaauccucaaac

SEQ ID NO: 3094156 - RNA, 19 nt, Artificial Sequence
  Description of Artificial Sequence: Synthetic oligonucleotide
auggagagcucguuggacc

SEQ ID NO: 3094157 - RNA, 19 nt, Artificial Sequence
  Description of Artificial Sequence: Synthetic oligonucleotide
acuucgcacugauacaccc

SEQ ID NO: 3094158 - RNA, 19 nt, Artificial Sequence
  Description of Artificial Sequence: Synthetic oligonucleotide
ugacaguaauccucaaacg

SEQ ID NO: 3094159 - RNA, 19 nt, Artificial Sequence
  Description of Artificial Sequence: Synthetic oligonucleotide
ugaguucacucucaguuug

SEQ ID NO: 3094160 - RNA, 19 nt, Artificial Sequence
  Description of Artificial Sequence: Synthetic oligonucleotide
ggaccauuuguguagaggg

SEQ ID NO: 3094161 - RNA, 19 nt, Artificial Sequence
  Description of Artificial Sequence: Synthetic oligonucleotide
gggaauuucugucauaacc

SEQ ID NO: 3094162 - RNA, 19 nt, Artificial Sequence
  Description of Artificial Sequence: Synthetic oligonucleotide
aauccucaaacgguuagag

SEQ ID NO: 3094163 - RNA, 19 nt, Artificial Sequence
  Description of Artificial Sequence: Synthetic oligonucleotide
aauuucugucauaaccuuc

SEQ ID NO: 3094164 - RNA, 19 nt, Artificial Sequence
  Description of Artificial Sequence: Synthetic oligonucleotide
uaaccuuccacuucgcacu

SEQ ID NO: 3094165 - RNA, 19 nt, Artificial Sequence
  Description of Artificial Sequence: Synthetic oligonucleotide
ugugaaaccuuugucuucc

SEQ ID NO: 3094166 - RNA, 19 nt, Artificial Sequence
  Description of Artificial Sequence: Synthetic oligonucleotide
uguagagggaauuucuguc

SEQ ID NO: 3094167 - RNA, 19 nt, Artificial Sequence
  Description of Artificial Sequence: Synthetic oligonucleotide
agcucguuggaccugacug

SEQ ID NO: 3094168 - RNA, 19 nt, Artificial Sequence
  Description of Artificial Sequence: Synthetic oligonucleotide
uguguagagggaauuucug

SEQ ID NO: 3094169 - RNA, 19 nt, Artificial Sequence
  Description of Artificial Sequence: Synthetic oligonucleotide
aacugggagaggauguccc

SEQ ID NO: 3094170 - RNA, 19 nt, Artificial Sequence
  Description of Artificial Sequence: Synthetic oligonucleotide
agcagcaucauggauuugg

SEQ ID NO: 3094171 - RNA, 19 nt, Artificial Sequence
  Description of Artificial Sequence: Synthetic oligonucleotide
ucaguuugcucucugggaa

SEQ ID NO: 3094172 - RNA, 19 nt, Artificial Sequence
  Description of Artificial Sequence: Synthetic oligonucleotide
cugauggagagcucguugg

SEQ ID NO: 3094173 - RNA, 19 nt, Artificial Sequence
  Description of Artificial Sequence: Synthetic oligonucleotide
uggauuuggaguugugagc

SEQ ID NO: 3094174 - RNA, 19 nt, Artificial Sequence
  Description of Artificial Sequence: Synthetic oligonucleotide
uuguguagagggaauuucu

SEQ ID NO: 3094175 - RNA, 19 nt, Artificial Sequence
  Description of Artificial Sequence: Synthetic oligonucleotide
agacugugaaaccuuuguc

SEQ ID NO: 3094176 - RNA, 19 nt, Artificial Sequence
  Description of Artificial Sequence: Synthetic oligonucleotide
ggauuuggaguugugagcg

SEQ ID NO: 3094177 - RNA, 19 nt, Artificial Sequence
  Description of Artificial Sequence: Synthetic oligonucleotide
guaauccucaaacgguuag

SEQ ID NO: 3094178 - RNA, 19 nt, Artificial Sequence
  Description of Artificial Sequence: Synthetic oligonucleotide
aaccuuugucuuccugugg

SEQ ID NO: 3094179 - RNA, 19 nt, Artificial Sequence
  Description of Artificial Sequence: Synthetic oligonucleotide
cacucuauaugcgugcugg

SEQ ID NO: 3094180 - RNA, 19 nt, Artificial Sequence
  Description of Artificial Sequence: Synthetic oligonucleotide
agcaguucgggacaagaug

SEQ ID NO: 3094181 - RNA, 19 nt, Artificial Sequence
  Description of Artificial Sequence: Synthetic oligonucleotide
aaacgguuagagguggcag

SEQ ID NO: 3094182 - RNA, 19 nt, Artificial Sequence
  Description of Artificial Sequence: Synthetic oligonucleotide
uugugagcgaaaugaagac

SEQ ID NO: 3094183 - RNA, 19 nt, Artificial Sequence
  Description of Artificial Sequence: Synthetic oligonucleotide
gugagcgaaaugaagacug

SEQ ID NO: 3094184 - RNA, 19 nt, Artificial Sequence
  Description of Artificial Sequence: Synthetic oligonucleotide
uggaccauuuguguagagg

SEQ ID NO: 3094185 - RNA, 19 nt, Artificial Sequence
  Description of Artificial Sequence: Synthetic oligonucleotide
guugugagcgaaaugaaga

SEQ ID NO: 3094186 - RNA, 19 nt, Artificial Sequence
  Description of Artificial Sequence: Synthetic oligonucleotide
uucgggacaagauggcacc

SEQ ID NO: 3094187 - RNA, 19 nt, Artificial Sequence
  Description of Artificial Sequence: Synthetic oligonucleotide
uucgcacugauacaccccu

SEQ ID NO: 3094188 - RNA, 19 nt, Artificial Sequence
  Description of Artificial Sequence: Synthetic oligonucleotide
ugucauaaccuuccacuuc

SEQ ID NO: 3094189 - RNA, 19 nt, Artificial Sequence
  Description of Artificial Sequence: Synthetic oligonucleotide
uccuguggaacugggagag

SEQ ID NO: 3094190 - RNA, 19 nt, Artificial Sequence
  Description of Artificial Sequence: Synthetic oligonucleotide
uggcaggauacccuggcug

SEQ ID NO: 3094191 - RNA, 19 nt, Artificial Sequence
  Description of Artificial Sequence: Synthetic oligonucleotide
gaaaccuuugucuuccugu

SEQ ID NO: 3094192 - RNA, 19 nt, Artificial Sequence
  Description of Artificial Sequence: Synthetic oligonucleotide
uuuguguagagggaauuuc

SEQ ID NO: 3094193 - RNA, 19 nt, Artificial Sequence
  Description of Artificial Sequence: Synthetic oligonucleotide
uggaacugggagaggaugu

SEQ ID NO: 3094194 - RNA, 19 nt, Artificial Sequence
  Description of Artificial Sequence: Synthetic oligonucleotide
aaggugacaguaauccuca

SEQ ID NO: 3094195 - RNA, 19 nt, Artificial Sequence
  Description of Artificial Sequence: Synthetic oligonucleotide
ugaaaccuuugucuuccug

SEQ ID NO: 3094196 - RNA, 19 nt, Artificial Sequence
  Description of Artificial Sequence: Synthetic oligonucleotide
auccucaaacgguuagagg

SEQ ID NO: 3094197 - RNA, 19 nt, Artificial Sequence
  Description of Artificial Sequence: Synthetic oligonucleotide
ugauacaccccuguguccu

SEQ ID NO: 3094198 - RNA, 19 nt, Artificial Sequence
  Description of Artificial Sequence: Synthetic oligonucleotide
accuuugucuuccugugga

SEQ ID NO: 3094199 - RNA, 19 nt, Artificial Sequence
  Description of Artificial Sequence: Synthetic oligonucleotide
gggaaggugacaguaaucc

SEQ ID NO: 3094200 - RNA, 19 nt, Artificial Sequence
  Description of Artificial Sequence: Synthetic oligonucleotide
acaguaauccucaaacggu

SEQ ID NO: 3094201 - RNA, 19 nt, Artificial Sequence
  Description of Artificial Sequence: Synthetic oligonucleotide
ggaguugugagcgaaauga

SEQ ID NO: 3094202 - RNA, 19 nt, Artificial Sequence
  Description of Artificial Sequence: Synthetic oligonucleotide
cucucugggaaggugacag

SEQ ID NO: 3094203 - RNA, 19 nt, Artificial Sequence
  Description of Artificial Sequence: Synthetic oligonucleotide
accccuguguccuccauag

SEQ ID NO: 3094204 - RNA, 19 nt, Artificial Sequence
  Description of Artificial Sequence: Synthetic oligonucleotide
uugcucucugggaagguga

SEQ ID NO: 3094205 - RNA, 19 nt, Artificial Sequence
  Description of Artificial Sequence: Synthetic oligonucleotide
ugcuugaguucacucucag

SEQ ID NO: 3094206 - RNA, 19 nt, Artificial Sequence
  Description of Artificial Sequence: Synthetic oligonucleotide
guagagggaauuucuguca

SEQ ID NO: 3094207 - RNA, 19 nt, Artificial Sequence
  Description of Artificial Sequence: Synthetic oligonucleotide
gcaguucgggacaagaugg

SEQ ID NO: 3094208 - RNA, 19 nt, Artificial Sequence
  Description of Artificial Sequence: Synthetic oligonucleotide
aguugugagcgaaaugaag

SEQ ID NO: 3094209 - RNA, 19 nt, Artificial Sequence
  Description of Artificial Sequence: Synthetic oligonucleotide
uccauagcagcaucaugga

SEQ ID NO: 3094210 - RNA, 19 nt, Artificial Sequence
  Description of Artificial Sequence: Synthetic oligonucleotide
agggaauuucugucauaac

SEQ ID NO: 3094211 - RNA, 19 nt, Artificial Sequence
  Description of Artificial Sequence: Synthetic oligonucleotide
uguguccuccauagcagca

SEQ ID NO: 3094212 - RNA, 19 nt, Artificial Sequence
  Description of Artificial Sequence: Synthetic oligonucleotide
cucaaacgguuagaggugg

SEQ ID NO: 3094213 - RNA, 19 nt, Artificial Sequence
  Description of Artificial Sequence: Synthetic oligonucleotide
ugugagcgaaaugaagacu

SEQ ID NO: 3094214 - RNA, 19 nt, Artificial Sequence
  Description of Artificial Sequence: Synthetic oligonucleotide
uggaguugugagcgaaaug

SEQ ID NO: 3094215 - RNA, 19 nt, Artificial Sequence
  Description of Artificial Sequence: Synthetic oligonucleotide
ugauggagagcucguugga

SEQ ID NO: 3094216 - RNA, 19 nt, Artificial Sequence
  Description of Artificial Sequence: Synthetic oligonucleotide
cuugaguucacucucaguu

SEQ ID NO: 3094217 - RNA, 19 nt, Artificial Sequence
  Description of Artificial Sequence: Synthetic oligonucleotide
cucucaguuugcucucugg

SEQ ID NO: 3094218 - RNA, 19 nt, Artificial Sequence
  Description of Artificial Sequence: Synthetic oligonucleotide
uagagggaauuucugucau

SEQ ID NO: 3094219 - RNA, 19 nt, Artificial Sequence
  Description of Artificial Sequence: Synthetic oligonucleotide
ugagcgaaaugaagacugu

SEQ ID NO: 3094220 - RNA, 19 nt, Artificial Sequence
  Description of Artificial Sequence: Synthetic oligonucleotide
ucugggaaggugacaguaa

SEQ ID NO: 3094221 - RNA, 19 nt, Artificial Sequence
  Description of Artificial Sequence: Synthetic oligonucleotide
gagggaauuucugucauaa

SEQ ID NO: 3094222 - RNA, 19 nt, Artificial Sequence
  Description of Artificial Sequence: Synthetic oligonucleotide
uuccuguggaacugggaga

SEQ ID NO: 3094223 - RNA, 19 nt, Artificial Sequence
  Description of Artificial Sequence: Synthetic oligonucleotide
agcgaaaugaagacuguga

SEQ ID NO: 3094224 - RNA, 19 nt, Artificial Sequence
  Description of Artificial Sequence: Synthetic oligonucleotide
uuucugucauaaccuucca

SEQ ID NO: 3094225 - RNA, 19 nt, Artificial Sequence
  Description of Artificial Sequence: Synthetic oligonucleotide
uggcaccacucuauaugcg

SEQ ID NO: 3094226 - RNA, 19 nt, Artificial Sequence
  Description of Artificial Sequence: Synthetic oligonucleotide
ggagcugauggagagcucg

SEQ ID NO: 3094227 - RNA, 19 nt, Artificial Sequence
  Description of Artificial Sequence: Synthetic oligonucleotide
guuagagguggcaggauac

SEQ ID NO: 3094228 - RNA, 19 nt, Artificial Sequence
  Description of Artificial Sequence: Synthetic oligonucleotide
uuugcucucugggaaggug

SEQ ID NO: 3094229 - RNA, 19 nt, Artificial Sequence
  Description of Artificial Sequence: Synthetic oligonucleotide
ucaaacgguuagagguggc

SEQ ID NO: 3094230 - RNA, 19 nt, Artificial Sequence
  Description of Artificial Sequence: Synthetic oligonucleotide
cuucgcacugauacacccc

SEQ ID NO: 3094231 - RNA, 19 nt, Artificial Sequence
  Description of Artificial Sequence: Synthetic oligonucleotide
uccacuucgcacugauaca

SEQ ID NO: 3094232 - RNA, 19 nt, Artificial Sequence
  Description of Artificial Sequence: Synthetic oligonucleotide
uaauccucaaacgguuaga

SEQ ID NO: 3094233 - RNA, 19 nt, Artificial Sequence
  Description of Artificial Sequence: Synthetic oligonucleotide
uuagagguggcaggauacc

SEQ ID NO: 3094234 - RNA, 19 nt, Artificial Sequence
  Description of Artificial Sequence: Synthetic oligonucleotide
uuuggaguugugagcgaaa

SEQ ID NO: 3094235 - RNA, 19 nt, Artificial Sequence
  Description of Artificial Sequence: Synthetic oligonucleotide
uggagagcucguuggaccu

SEQ ID NO: 3094236 - RNA, 19 nt, Artificial Sequence
  Description of Artificial Sequence: Synthetic oligonucleotide
cucuauaugcgugcuggag

SEQ ID NO: 3094237 - RNA, 19 nt, Artificial Sequence
  Description of Artificial Sequence: Synthetic oligonucleotide
aagauggcaccacucuaua

SEQ ID NO: 3094238 - RNA, 19 nt, Artificial Sequence
  Description of Artificial Sequence: Synthetic oligonucleotide
uugaguucacucucaguuu

SEQ ID NO: 3094239 - RNA, 19 nt, Artificial Sequence
  Description of Artificial Sequence: Synthetic oligonucleotide
ucauaaccuuccacuucgc

SEQ ID NO: 3094240 - RNA, 19 nt, Artificial Sequence
  Description of Artificial Sequence: Synthetic oligonucleotide
uagagguggcaggauaccc

SEQ ID NO: 3094241 - RNA, 19 nt, Artificial Sequence
  Description of Artificial Sequence: Synthetic oligonucleotide
caccacucuauaugcgugc

SEQ ID NO: 3094242 - RNA, 19 nt, Artificial Sequence
  Description of Artificial Sequence: Synthetic oligonucleotide
ucauggauuuggaguugug

SEQ ID NO: 3094243 - RNA, 19 nt, Artificial Sequence
  Description of Artificial Sequence: Synthetic oligonucleotide
cuguguccuccauagcagc

SEQ ID NO: 3094244 - RNA, 19 nt, Artificial Sequence
  Description of Artificial Sequence: Synthetic oligonucleotide
ugucuuccuguggaacugg

SEQ ID NO: 3094245 - RNA, 19 nt, Artificial Sequence
  Description of Artificial Sequence: Synthetic oligonucleotide
gacaagauggcaccacucu

SEQ ID NO: 3094246 - RNA, 19 nt, Artificial Sequence
  Description of Artificial Sequence: Synthetic oligonucleotide
ggcuggaccauuuguguag

SEQ ID NO: 3094247 - RNA, 19 nt, Artificial Sequence
  Description of Artificial Sequence: Synthetic oligonucleotide
uugucuuccuguggaacug

SEQ ID NO: 3094248 - RNA, 19 nt, Artificial Sequence
  Description of Artificial Sequence: Synthetic oligonucleotide
gaagacugugaaaccuuug

SEQ ID NO: 3094249 - RNA, 19 nt, Artificial Sequence
  Description of Artificial Sequence: Synthetic oligonucleotide
cugauacaccccugugucc

SEQ ID NO: 3094250 - RNA, 19 nt, Artificial Sequence
  Description of Artificial Sequence: Synthetic oligonucleotide
accauuuguguagagggaa

SEQ ID NO: 3094251 - RNA, 19 nt, Artificial Sequence
  Description of Artificial Sequence: Synthetic oligonucleotide
ugggaaggugacaguaauc

SEQ ID NO: 3094252 - RNA, 19 nt, Artificial Sequence
  Description of Artificial Sequence: Synthetic oligonucleotide
cauagcagcaucauggauu

SEQ ID NO: 3094253 - RNA, 19 nt, Artificial Sequence
  Description of Artificial Sequence: Synthetic oligonucleotide
gagcgaaaugaagacugug

SEQ ID NO: 3094254 - RNA, 19 nt, Artificial Sequence
  Description of Artificial Sequence: Synthetic oligonucleotide
gauggagagcucguuggac

SEQ ID NO: 3094255 - RNA, 19 nt, Artificial Sequence
  Description of Artificial Sequence: Synthetic oligonucleotide
acaagauggcaccacucua

SEQ ID NO: 3094256 - RNA, 19 nt, Artificial Sequence
  Description of Artificial Sequence: Synthetic oligonucleotide
caguuugcucucugggaag

SEQ ID NO: 3094257 - RNA, 19 nt, Artificial Sequence
  Description of Artificial Sequence: Synthetic oligonucleotide
ugacugcuugaguucacuc

SEQ ID NO: 3094258 - RNA, 19 nt, Artificial Sequence
  Description of Artificial Sequence: Synthetic oligonucleotide
auacaccccuguguccucc

SEQ ID NO: 3094259 - RNA, 19 nt, Artificial Sequence
  Description of Artificial Sequence: Synthetic oligonucleotide
cucaguuugcucucuggga

SEQ ID NO: 3094260 - RNA, 19 nt, Artificial Sequence
  Description of Artificial Sequence: Synthetic oligonucleotide
uuggaccugacugcuugag

SEQ ID NO: 3094261 - RNA, 19 nt, Artificial Sequence
  Description of Artificial Sequence: Synthetic oligonucleotide
uguccuccauagcagcauc

SEQ ID NO: 3094262 - RNA, 19 nt, Artificial Sequence
  Description of Artificial Sequence: Synthetic oligonucleotide
gacugcuugaguucacucu

SEQ ID NO: 3094263 - RNA, 19 nt, Artificial Sequence
  Description of Artificial Sequence: Synthetic oligonucleotide
uuggaguugugagcgaaau

SEQ ID NO: 3094264 - RNA, 19 nt, Artificial Sequence
  Description of Artificial Sequence: Synthetic oligonucleotide
uguggaacugggagaggau

SEQ ID NO: 3094265 - RNA, 19 nt, Artificial Sequence
  Description of Artificial Sequence: Synthetic oligonucleotide
cagcaucauggauuuggag

SEQ ID NO: 3094266 - RNA, 19 nt, Artificial Sequence
  Description of Artificial Sequence: Synthetic oligonucleotide
ugcucucugggaaggugac

SEQ ID NO: 3094267 - RNA, 19 nt, Artificial Sequence
  Description of Artificial Sequence: Synthetic oligonucleotide
uggaccugacugcuugagu

SEQ ID NO: 3094268 - RNA, 19 nt, Artificial Sequence
  Description of Artificial Sequence: Synthetic oligonucleotide
guucgggacaagauggcac

SEQ ID NO: 3094269 - RNA, 19 nt, Artificial Sequence
  Description of Artificial Sequence: Synthetic oligonucleotide
cuauaugcgugcuggagcu

SEQ ID NO: 3094270 - RNA, 19 nt, Artificial Sequence
  Description of Artificial Sequence: Synthetic oligonucleotide
gaccugacugcuugaguuc

SEQ ID NO: 3094271 - RNA, 19 nt, Artificial Sequence
  Description of Artificial Sequence: Synthetic oligonucleotide
guggaacugggagaggaug

SEQ ID NO: 3094272 - RNA, 19 nt, Artificial Sequence
  Description of Artificial Sequence: Synthetic oligonucleotide
auaugcgugcuggagcuga

SEQ ID NO: 3094273 - RNA, 19 nt, Artificial Sequence
  Description of Artificial Sequence: Synthetic oligonucleotide
auuuguguagagggaauuu

SEQ ID NO: 3094274 - RNA, 19 nt, Artificial Sequence
  Description of Artificial Sequence: Synthetic oligonucleotide
cauggauuuggaguuguga

SEQ ID NO: 3094275 - RNA, 19 nt, Artificial Sequence
  Description of Artificial Sequence: Synthetic oligonucleotide
caguucgggacaagauggc

SEQ ID NO: 3094276 - RNA, 19 nt, Artificial Sequence
  Description of Artificial Sequence: Synthetic oligonucleotide
ggaauuucugucauaaccu

SEQ ID NO: 3094277 - RNA, 19 nt, Artificial Sequence
  Description of Artificial Sequence: Synthetic oligonucleotide
auuuggaguugugagcgaa

SEQ ID NO: 3094278 - RNA, 19 nt, Artificial Sequence
  Description of Artificial Sequence: Synthetic oligonucleotide
cacuucgcacugauacacc

SEQ ID NO: 3094279 - RNA, 19 nt, Artificial Sequence
  Description of Artificial Sequence: Synthetic oligonucleotide
aucauggauuuggaguugu

SEQ ID NO: 3094280 - RNA, 19 nt, Artificial Sequence
  Description of Artificial Sequence: Synthetic oligonucleotide
gcugauggagagcucguug

SEQ ID NO: 3094281 - RNA, 19 nt, Artificial Sequence
  Description of Artificial Sequence: Synthetic oligonucleotide
gaauuucugucauaaccuu

SEQ ID NO: 3094282 - RNA, 19 nt, Artificial Sequence
  Description of Artificial Sequence: Synthetic oligonucleotide
ucacucucaguuugcucuc

SEQ ID NO: 3094283 - RNA, 19 nt, Artificial Sequence
  Description of Artificial Sequence: Synthetic oligonucleotide
aguucacucucaguuugcu

SEQ ID NO: 3094284 - RNA, 19 nt, Artificial Sequence
  Description of Artificial Sequence: Synthetic oligonucleotide
gauuuggaguugugagcga

SEQ ID NO: 3094285 - RNA, 19 nt, Artificial Sequence
  Description of Artificial Sequence: Synthetic oligonucleotide
acucuauaugcgugcugga

SEQ ID NO: 3094286 - RNA, 19 nt, Artificial Sequence
  Description of Artificial Sequence: Synthetic oligonucleotide
agauggcaccacucuauau

SEQ ID NO: 3094287 - RNA, 19 nt, Artificial Sequence
  Description of Artificial Sequence: Synthetic oligonucleotide
gaguucacucucaguuugc

SEQ ID NO: 3094288 - RNA, 19 nt, Artificial Sequence
  Description of Artificial Sequence: Synthetic oligonucleotide
guguagagggaauuucugu

SEQ ID NO: 3094289 - RNA, 19 nt, Artificial Sequence
  Description of Artificial Sequence: Synthetic oligonucleotide
gcgaaaugaagacugugaa

SEQ ID NO: 3094290 - RNA, 19 nt, Artificial Sequence
  Description of Artificial Sequence: Synthetic oligonucleotide
aguucgggacaagauggca

SEQ ID NO: 3094291 - RNA, 19 nt, Artificial Sequence
  Description of Artificial Sequence: Synthetic oligonucleotide
ccuguguccuccauagcag

SEQ ID NO: 3094292 - RNA, 19 nt, Artificial Sequence
  Description of Artificial Sequence: Synthetic oligonucleotide
gguggcaggauacccuggc

SEQ ID NO: 3094293 - RNA, 19 nt, Artificial Sequence
  Description of Artificial Sequence: Synthetic oligonucleotide
cauaaccuuccacuucgca

SEQ ID NO: 3094294 - RNA, 19 nt, Artificial Sequence
  Description of Artificial Sequence: Synthetic oligonucleotide
agagguggcaggauacccu

SEQ ID NO: 3094295 - RNA, 19 nt, Artificial Sequence
  Description of Artificial Sequence: Synthetic oligonucleotide
uggcuggaccauuugugua

SEQ ID NO: 3094296 - RNA, 19 nt, Artificial Sequence
  Description of Artificial Sequence: Synthetic oligonucleotide
acgguuagagguggcagga

SEQ ID NO: 3094297 - RNA, 19 nt, Artificial Sequence
  Description of Artificial Sequence: Synthetic oligonucleotide
gaccauuuguguagaggga

SEQ ID NO: 3094298 - RNA, 19 nt, Artificial Sequence
  Description of Artificial Sequence: Synthetic oligonucleotide
accugacugcuugaguuca

SEQ ID NO: 3094299 - RNA, 19 nt, Artificial Sequence
  Description of Artificial Sequence: Synthetic oligonucleotide
gcucguuggaccugacugc

SEQ ID NO: 3094300 - RNA, 19 nt, Artificial Sequence
  Description of Artificial Sequence: Synthetic oligonucleotide
uauaugcgugcuggagcug

SEQ ID NO: 3094301 - RNA, 19 nt, Artificial Sequence
  Description of Artificial Sequence: Synthetic oligonucleotide
ccucaaacgguuagaggug

SEQ ID NO: 3094302 - RNA, 19 nt, Artificial Sequence
  Description of Artificial Sequence: Synthetic oligonucleotide
gaguugugagcgaaaugaa

SEQ ID NO: 3094303 - RNA, 19 nt, Artificial Sequence
  Description of Artificial Sequence: Synthetic oligonucleotide
ucgcacugauacaccccug

SEQ ID NO: 3094304 - RNA, 19 nt, Artificial Sequence
  Description of Artificial Sequence: Synthetic oligonucleotide
caagauggcaccacucuau

SEQ ID NO: 3094305 - RNA, 19 nt, Artificial Sequence
  Description of Artificial Sequence: Synthetic oligonucleotide
gauacaccccuguguccuc

SEQ ID NO: 3094306 - RNA, 19 nt, Artificial Sequence
  Description of Artificial Sequence: Synthetic oligonucleotide
agagggaauuucugucaua

SEQ ID NO: 3094307 - RNA, 19 nt, Artificial Sequence
  Description of Artificial Sequence: Synthetic oligonucleotide
accacucuauaugcgugcu

SEQ ID NO: 3094308 - RNA, 19 nt, Artificial Sequence
  Description of Artificial Sequence: Synthetic oligonucleotide
cuggaccauuuguguagag

SEQ ID NO: 3094309 - RNA, 19 nt, Artificial Sequence
  Description of Artificial Sequence: Synthetic oligonucleotide
aguaauccucaaacgguua

SEQ ID NO: 3094310 - RNA, 19 nt, Artificial Sequence
  Description of Artificial Sequence: Synthetic oligonucleotide
caaacgguuagagguggca

SEQ ID NO: 3094311 - RNA, 19 nt, Artificial Sequence
  Description of Artificial Sequence: Synthetic oligonucleotide
gagagcucguuggaccuga

SEQ ID NO: 3094312 - RNA, 19 nt, Artificial Sequence
  Description of Artificial Sequence: Synthetic oligonucleotide
uaugcgugcuggagcugau

SEQ ID NO: 3094313 - RNA, 19 nt, Artificial Sequence
  Description of Artificial Sequence: Synthetic oligonucleotide
cacugauacaccccugugu

SEQ ID NO: 3094314 - RNA, 19 nt, Artificial Sequence
  Description of Artificial Sequence: Synthetic oligonucleotide
gguuagagguggcaggaua

SEQ ID NO: 3094315 - RNA, 19 nt, Artificial Sequence
  Description of Artificial Sequence: Synthetic oligonucleotide
uacccuggcuggaccauuu

SEQ ID NO: 3094316 - RNA, 19 nt, Artificial Sequence
  Description of Artificial Sequence: Synthetic oligonucleotide
ccacuucgcacugauacac

SEQ ID NO: 3094317 - RNA, 19 nt, Artificial Sequence
  Description of Artificial Sequence: Synthetic oligonucleotide
ucgggacaagauggcacca

SEQ ID NO: 3094318 - RNA, 19 nt, Artificial Sequence
  Description of Artificial Sequence: Synthetic oligonucleotide
guuggaccugacugcuuga

SEQ ID NO: 3094319 - RNA, 19 nt, Artificial Sequence
  Description of Artificial Sequence: Synthetic oligonucleotide
cugcuugaguucacucuca

SEQ ID NO: 3094320 - RNA, 19 nt, Artificial Sequence
  Description of Artificial Sequence: Synthetic oligonucleotide
caguaauccucaaacgguu

SEQ ID NO: 3094321 - RNA, 19 nt, Artificial Sequence
  Description of Artificial Sequence: Synthetic oligonucleotide
cccuguguccuccauagca

SEQ ID NO: 3094322 - RNA, 19 nt, Artificial Sequence
  Description of Artificial Sequence: Synthetic oligonucleotide
cuggagcugauggagagcu

SEQ ID NO: 3094323 - RNA, 19 nt, Artificial Sequence
  Description of Artificial Sequence: Synthetic oligonucleotide
cuggcuggaccauuugugu

SEQ ID NO: 3094324 - RNA, 19 nt, Artificial Sequence
  Description of Artificial Sequence: Synthetic oligonucleotide
ggauacccuggcuggacca

SEQ ID NO: 3094325 - RNA, 19 nt, Artificial Sequence
  Description of Artificial Sequence: Synthetic oligonucleotide
gcacugauacaccccugug

SEQ ID NO: 3094326 - RNA, 19 nt, Artificial Sequence
  Description of Artificial Sequence: Synthetic oligonucleotide
ggaccugacugcuugaguu

SEQ ID NO: 3094327 - RNA, 19 nt, Artificial Sequence
  Description of Artificial Sequence: Synthetic oligonucleotide
cucugggaaggugacagua

SEQ ID NO: 3094328 - RNA, 19 nt, Artificial Sequence
  Description of Artificial Sequence: Synthetic oligonucleotide
cguuggaccugacugcuug

SEQ ID NO: 3094329 - RNA, 19 nt, Artificial Sequence
  Description of Artificial Sequence: Synthetic oligonucleotide
ggcaccacucuauaugcgu

SEQ ID NO: 3094330 - RNA, 19 nt, Artificial Sequence
  Description of Artificial Sequence: Synthetic oligonucleotide
acccuggcuggaccauuug

SEQ ID NO: 3094331 - RNA, 19 nt, Artificial Sequence
  Description of Artificial Sequence: Synthetic oligonucleotide
cugucauaaccuuccacuu

SEQ ID NO: 3094332 - RNA, 19 nt, Artificial Sequence
  Description of Artificial Sequence: Synthetic oligonucleotide
ggacaagauggcaccacuc

SEQ ID NO: 3094333 - RNA, 19 nt, Artificial Sequence
  Description of Artificial Sequence: Synthetic oligonucleotide
ggaaggugacaguaauccu

SEQ ID NO: 3094334 - RNA, 19 nt, Artificial Sequence
  Description of Artificial Sequence: Synthetic oligonucleotide
ucguuggaccugacugcuu

SEQ ID NO: 3094335 - RNA, 19 nt, Artificial Sequence
  Description of Artificial Sequence: Synthetic oligonucleotide
cugggaaggugacaguaau

SEQ ID NO: 3094336 - RNA, 19 nt, Artificial Sequence
  Description of Artificial Sequence: Synthetic oligonucleotide
agagcucguuggaccugac

SEQ ID NO: 3094337 - RNA, 19 nt, Artificial Sequence
  Description of Artificial Sequence: Synthetic oligonucleotide
aggugacaguaauccucaa

SEQ ID NO: 3094338 - RNA, 19 nt, Artificial Sequence
  Description of Artificial Sequence: Synthetic oligonucleotide
guccuccauagcagcauca

SEQ ID NO: 3094339 - RNA, 19 nt, Artificial Sequence
  Description of Artificial Sequence: Synthetic oligonucleotide
cgaaaugaagacugugaaa

SEQ ID NO: 3094340 - RNA, 19 nt, Artificial Sequence
  Description of Artificial Sequence: Synthetic oligonucleotide
augcgugcuggagcugaug

SEQ ID NO: 3094341 - RNA, 19 nt, Artificial Sequence
  Description of Artificial Sequence: Synthetic oligonucleotide
gagcucguuggaccugacu

SEQ ID NO: 3094342 - RNA, 19 nt, Artificial Sequence
  Description of Artificial Sequence: Synthetic oligonucleotide
agcugauggagagcucguu

SEQ ID NO: 3094343 - RNA, 19 nt, Artificial Sequence
  Description of Artificial Sequence: Synthetic oligonucleotide
gggacaagauggcaccacu

SEQ ID NO: 3094344 - RNA, 19 nt, Artificial Sequence
  Description of Artificial Sequence: Synthetic oligonucleotide
cauuuguguagagggaauu

SEQ ID NO: 3094345 - RNA, 19 nt, Artificial Sequence
  Description of Artificial Sequence: Synthetic oligonucleotide
gcagcaucauggauuugga

SEQ ID NO: 3094346 - RNA, 19 nt, Artificial Sequence
  Description of Artificial Sequence: Synthetic oligonucleotide
gcuggagcugauggagagc

SEQ ID NO: 3094347 - RNA, 19 nt, Artificial Sequence
  Description of Artificial Sequence: Synthetic oligonucleotide
cucguuggaccugacugcu

SEQ ID NO: 3094348 - RNA, 19 nt, Artificial Sequence
  Description of Artificial Sequence: Synthetic oligonucleotide
uagcagcaucauggauuug

SEQ ID NO: 3094349 - RNA, 19 nt, Artificial Sequence
  Description of Artificial Sequence: Synthetic oligonucleotide
acaccccuguguccuccau

SEQ ID NO: 3094350 - RNA, 19 nt, Artificial Sequence
  Description of Artificial Sequence: Synthetic oligonucleotide
cagcaguucgggacaagau

SEQ ID NO: 3094351 - RNA, 19 nt, Artificial Sequence
  Description of Artificial Sequence: Synthetic oligonucleotide
ccacucuauaugcgugcug

SEQ ID NO: 3094352 - RNA, 19 nt, Artificial Sequence
  Description of Artificial Sequence: Synthetic oligonucleotide
cuuccacuucgcacugaua

SEQ ID NO: 3094353 - RNA, 19 nt, Artificial Sequence
  Description of Artificial Sequence: Synthetic oligonucleotide
auacccuggcuggaccauu

SEQ ID NO: 3094354 - RNA, 19 nt, Artificial Sequence
  Description of Artificial Sequence: Synthetic oligonucleotide
guggcaggauacccuggcu

SEQ ID NO: 3094355 - RNA, 19 nt, Artificial Sequence
  Description of Artificial Sequence: Synthetic oligonucleotide
gauacccuggcuggaccau

SEQ ID NO: 3094356 - RNA, 19 nt, Artificial Sequence
  Description of Artificial Sequence: Synthetic oligonucleotide
ggagagcucguuggaccug

SEQ ID NO: 3094357 - RNA, 19 nt, Artificial Sequence
  Description of Artificial Sequence: Synthetic oligonucleotide
ccugacugcuugaguucac

SEQ ID NO: 3094358 - RNA, 19 nt, Artificial Sequence
  Description of Artificial Sequence: Synthetic oligonucleotide
gcuggaccauuuguguaga

SEQ ID NO: 3094359 - RNA, 19 nt, Artificial Sequence
  Description of Artificial Sequence: Synthetic oligonucleotide
cugacugcuugaguucacu

SEQ ID NO: 3094360 - RNA, 19 nt, Artificial Sequence
  Description of Artificial Sequence: Synthetic oligonucleotide
ccagcaguucgggacaaga

SEQ ID NO: 3094361 - RNA, 19 nt, Artificial Sequence
  Description of Artificial Sequence: Synthetic oligonucleotide
gcuugaguucacucucagu

SEQ ID NO: 3094362 - RNA, 19 nt, Artificial Sequence
  Description of Artificial Sequence: Synthetic oligonucleotide
gugaaaccuuugucuuccu

SEQ ID NO: 3094363 - RNA, 19 nt, Artificial Sequence
  Description of Artificial Sequence: Synthetic oligonucleotide
gagcugauggagagcucgu

SEQ ID NO: 3094364 - RNA, 19 nt, Artificial Sequence
  Description of Artificial Sequence: Synthetic oligonucleotide
accuuccacuucgcacuga

SEQ ID NO: 3094365 - RNA, 19 nt, Artificial Sequence
  Description of Artificial Sequence: Synthetic oligonucleotide
guguccuccauagcagcau

SEQ ID NO: 3094366 - RNA, 19 nt, Artificial Sequence
  Description of Artificial Sequence: Synthetic oligonucleotide
guuugcucucugggaaggu

SEQ ID NO: 3094367 - RNA, 19 nt, Artificial Sequence
  Description of Artificial Sequence: Synthetic oligonucleotide
ccuuugucuuccuguggaa

SEQ ID NO: 3094368 - RNA, 19 nt, Artificial Sequence
  Description of Artificial Sequence: Synthetic oligonucleotide
ccauuuguguagagggaau

SEQ ID NO: 3094369 - RNA, 19 nt, Artificial Sequence
  Description of Artificial Sequence: Synthetic oligonucleotide
gcucucugggaaggugaca

SEQ ID NO: 3094370 - RNA, 19 nt, Artificial Sequence
  Description of Artificial Sequence: Synthetic oligonucleotide
ccccuguguccuccauagc

SEQ ID NO: 3094371 - RNA, 19 nt, Artificial Sequence
  Description of Artificial Sequence: Synthetic oligonucleotide
cgggacaagauggcaccac

SEQ ID NO: 3094372 - RNA, 19 nt, Artificial Sequence
  Description of Artificial Sequence: Synthetic oligonucleotide
cacucucaguuugcucucu

SEQ ID NO: 3094373 - RNA, 19 nt, Artificial Sequence
  Description of Artificial Sequence: Synthetic oligonucleotide
ccuuccacuucgcacugau

SEQ ID NO: 3094374 - RNA, 19 nt, Artificial Sequence
  Description of Artificial Sequence: Synthetic oligonucleotide
ccauagcagcaucauggau

SEQ ID NO: 3094375 - RNA, 19 nt, Artificial Sequence
  Description of Artificial Sequence: Synthetic oligonucleotide
cgcacugauacaccccugu

SEQ ID NO: 3094376 - RNA, 19 nt, Artificial Sequence
  Description of Artificial Sequence: Synthetic oligonucleotide
cgguuagagguggcaggau

SEQ ID NO: 3094377 - RNA, 19 nt, Artificial Sequence
  Description of Artificial Sequence: Synthetic oligonucleotide
uccuauaagaacuauagag

SEQ ID NO: 3094378 - RNA, 19 nt, Artificial Sequence
  Description of Artificial Sequence: Synthetic oligonucleotide
ugaaaguuggccaaagggg

SEQ ID NO: 3094379 - RNA, 19 nt, Artificial Sequence
  Description of Artificial Sequence: Synthetic oligonucleotide
uugaaaguuggccaaaggg

SEQ ID NO: 3094380 - RNA, 19 nt, Artificial Sequence
  Description of Artificial Sequence: Synthetic oligonucleotide
aacacugucuccaugaugg

SEQ ID NO: 3094381 - RNA, 19 nt, Artificial Sequence
  Description of Artificial Sequence: Synthetic oligonucleotide
aauccuauaagaacuauag

SEQ ID NO: 3094382 - RNA, 19 nt, Artificial Sequence
  Description of Artificial Sequence: Synthetic oligonucleotide
aaguuuaugucucuuccuc

SEQ ID NO: 3094383 - RNA, 19 nt, Artificial Sequence
  Description of Artificial Sequence: Synthetic oligonucleotide
agaggaauccuauaagaac

SEQ ID NO: 3094384 - RNA, 19 nt, Artificial Sequence
  Description of Artificial Sequence: Synthetic oligonucleotide
cuauaagaacuauagagac

SEQ ID NO: 3094385 - RNA, 19 nt, Artificial Sequence
  Description of Artificial Sequence: Synthetic oligonucleotide
acuauagagacuucuuuuc

SEQ ID NO: 3094386 - RNA, 19 nt, Artificial Sequence
  Description of Artificial Sequence: Synthetic oligonucleotide
uuugcuugaaaguuggcca

SEQ ID NO: 3094387 - RNA, 19 nt, Artificial Sequence
  Description of Artificial Sequence: Synthetic oligonucleotide
aaaucugcucaccaacuuc

SEQ ID NO: 3094388 - RNA, 19 nt, Artificial Sequence
  Description of Artificial Sequence: Synthetic oligonucleotide
aaucugcucaccaacuucc

SEQ ID NO: 3094389 - RNA, 19 nt, Artificial Sequence
  Description of Artificial Sequence: Synthetic oligonucleotide
uucuguucuuuccucaugg

SEQ ID NO: 3094390 - RNA, 19 nt, Artificial Sequence
  Description of Artificial Sequence: Synthetic oligonucleotide
uauaagaggggaaggaucu

SEQ ID NO: 3094391 - RNA, 19 nt, Artificial Sequence
  Description of Artificial Sequence: Synthetic oligonucleotide
uucuuugcuugaaaguugg

SEQ ID NO: 3094392 - RNA, 19 nt, Artificial Sequence
  Description of Artificial Sequence: Synthetic oligonucleotide
uguucuuuccucauggaac

SEQ ID NO: 3094393 - RNA, 19 nt, Artificial Sequence
  Description of Artificial Sequence: Synthetic oligonucleotide
uuuuaugccccacucagac

SEQ ID NO: 3094394 - RNA, 19 nt, Artificial Sequence
  Description of Artificial Sequence: Synthetic oligonucleotide
uuaugccccacucagaccu

SEQ ID NO: 3094395 - RNA, 19 nt, Artificial Sequence
  Description of Artificial Sequence: Synthetic oligonucleotide
cuaaguuuaugucucuucc

SEQ ID NO: 3094396 - RNA, 19 nt, Artificial Sequence
  Description of Artificial Sequence: Synthetic oligonucleotide
uauugagggcuauaagagg

SEQ ID NO: 3094397 - RNA, 19 nt, Artificial Sequence
  Description of Artificial Sequence: Synthetic oligonucleotide
guucuuuccucauggaacg

SEQ ID NO: 3094398 - RNA, 19 nt, Artificial Sequence
  Description of Artificial Sequence: Synthetic oligonucleotide
auugagggcuauaagaggg

SEQ ID NO: 3094399 - RNA, 19 nt, Artificial Sequence
  Description of Artificial Sequence: Synthetic oligonucleotide
aacuauagagacuucuuuu

SEQ ID NO: 3094400 - RNA, 19 nt, Artificial Sequence
  Description of Artificial Sequence: Synthetic oligonucleotide
uauaagaacuauagagacu

SEQ ID NO: 3094401 - RNA, 19 nt, Artificial Sequence
  Description of Artificial Sequence: Synthetic oligonucleotide
auaagaacuauagagacuu

SEQ ID NO: 3094402 - RNA, 19 nt, Artificial Sequence
  Description of Artificial Sequence: Synthetic oligonucleotide
uauagagacuucuuuucug

SEQ ID NO: 3094403 - RNA, 19 nt, Artificial Sequence
  Description of Artificial Sequence: Synthetic oligonucleotide
aggaucuaaguuuaugucu

SEQ ID NO: 3094404 - RNA, 19 nt, Artificial Sequence
  Description of Artificial Sequence: Synthetic oligonucleotide
acuuccgguggucagcugc

SEQ ID NO: 3094405 - RNA, 19 nt, Artificial Sequence
  Description of Artificial Sequence: Synthetic oligonucleotide
uugaacacugucuccauga

SEQ ID NO: 3094406 - RNA, 19 nt, Artificial Sequence
  Description of Artificial Sequence: Synthetic oligonucleotide
cucauucuuugcuugaaag

SEQ ID NO: 3094407 - RNA, 19 nt, Artificial Sequence
  Description of Artificial Sequence: Synthetic oligonucleotide
guauugagggcuauaagag

SEQ ID NO: 3094408 - RNA, 19 nt, Artificial Sequence
  Description of Artificial Sequence: Synthetic oligonucleotide
aagaacuauagagacuucu

SEQ ID NO: 3094409 - RNA, 19 nt, Artificial Sequence
  Description of Artificial Sequence: Synthetic oligonucleotide
aguuucuuuuaccucaaga

SEQ ID NO: 3094410 - RNA, 19 nt, Artificial Sequence
  Description of Artificial Sequence: Synthetic oligonucleotide
uagaggaauccuauaagaa

SEQ ID NO: 3094411 - RNA, 19 nt, Artificial Sequence
  Description of Artificial Sequence: Synthetic oligonucleotide
auagagacuucuuuucugu

SEQ ID NO: 3094412 - RNA, 19 nt, Artificial Sequence
  Description of Artificial Sequence: Synthetic oligonucleotide
ucauucuuugcuugaaagu

SEQ ID NO: 3094413 - RNA, 19 nt, Artificial Sequence
  Description of Artificial Sequence: Synthetic oligonucleotide
ucacauucucuucuguucu

SEQ ID NO: 3094414 - RNA, 19 nt, Artificial Sequence
  Description of Artificial Sequence: Synthetic oligonucleotide
cuuugcuugaaaguuggcc

SEQ ID NO: 3094415 - RNA, 19 nt, Artificial Sequence
  Description of Artificial Sequence: Synthetic oligonucleotide
ugguagaggaauccuauaa

SEQ ID NO: 3094416 - RNA, 19 nt, Artificial Sequence
  Description of Artificial Sequence: Synthetic oligonucleotide
cuauaagaggggaaggauc

SEQ ID NO: 3094417 - RNA, 19 nt, Artificial Sequence
  Description of Artificial Sequence: Synthetic oligonucleotide
uuccuaguuucuuuuaccu

SEQ ID NO: 3094418 - RNA, 19 nt, Artificial Sequence
  Description of Artificial Sequence: Synthetic oligonucleotide
cucucaagugcucacauuc

SEQ ID NO: 3094419 - RNA, 19 nt, Artificial Sequence
  Description of Artificial Sequence: Synthetic oligonucleotide
ucuaaguuuaugucucuuc

SEQ ID NO: 3094420 - RNA, 19 nt, Artificial Sequence
  Description of Artificial Sequence: Synthetic oligonucleotide
guagaggaauccuauaaga

SEQ ID NO: 3094421 - RNA, 19 nt, Artificial Sequence
  Description of Artificial Sequence: Synthetic oligonucleotide
ucuuccuaguuucuuuuac

SEQ ID NO: 3094422 - RNA, 19 nt, Artificial Sequence
  Description of Artificial Sequence: Synthetic oligonucleotide
gaaggaucuaaguuuaugu

SEQ ID NO: 3094423 - RNA, 19 nt, Artificial Sequence
  Description of Artificial Sequence: Synthetic oligonucleotide
agugcucacauucucuucu

SEQ ID NO: 3094424 - RNA, 19 nt, Artificial Sequence
  Description of Artificial Sequence: Synthetic oligonucleotide
ucaagugcucacauucucu

SEQ ID NO: 3094425 - RNA, 19 nt, Artificial Sequence
  Description of Artificial Sequence: Synthetic oligonucleotide
ugugguagaggaauccuau

SEQ ID NO: 3094426 - RNA, 19 nt, Artificial Sequence
  Description of Artificial Sequence: Synthetic oligonucleotide
uaaguuuaugucucuuccu

SEQ ID NO: 3094427 - RNA, 19 nt, Artificial Sequence
  Description of Artificial Sequence: Synthetic oligonucleotide
aagugcucacauucucuuc

SEQ ID NO: 3094428 - RNA, 19 nt, Artificial Sequence
  Description of Artificial Sequence: Synthetic oligonucleotide
uugagggcuauaagagggg

SEQ ID NO: 3094429 - RNA, 19 nt, Artificial Sequence
  Description of Artificial Sequence: Synthetic oligonucleotide
aagcacuccagguucugug

SEQ ID NO: 3094430 - RNA, 19 nt, Artificial Sequence
  Description of Artificial Sequence: Synthetic oligonucleotide
cuugaaaguuggccaaagg

SEQ ID NO: 3094431 - RNA, 19 nt, Artificial Sequence
  Description of Artificial Sequence: Synthetic oligonucleotide
ucugcucaccaacuuccgg

SEQ ID NO: 3094432 - RNA, 19 nt, Artificial Sequence
  Description of Artificial Sequence: Synthetic oligonucleotide
agagacuucuuuucuguga

SEQ ID NO: 3094433 - RNA, 19 nt, Artificial Sequence
  Description of Artificial Sequence: Synthetic oligonucleotide
ugguauugagggcuauaag

SEQ ID NO: 3094434 - RNA, 19 nt, Artificial Sequence
  Description of Artificial Sequence: Synthetic oligonucleotide
uggucagcugcucucaagu

SEQ ID NO: 3094435 - RNA, 19 nt, Artificial Sequence
  Description of Artificial Sequence: Synthetic oligonucleotide
cucacauucucuucuguuc

SEQ ID NO: 3094436 - RNA, 19 nt, Artificial Sequence
  Description of Artificial Sequence: Synthetic oligonucleotide
aguuuaugucucuuccuca

SEQ ID NO: 3094437 - RNA, 19 nt, Artificial Sequence
  Description of Artificial Sequence: Synthetic oligonucleotide
cuuuccucauggaacgaag

SEQ ID NO: 3094438 - RNA, 19 nt, Artificial Sequence
  Description of Artificial Sequence: Synthetic oligonucleotide
gguagaggaauccuauaag

SEQ ID NO: 3094439 - RNA, 19 nt, Artificial Sequence
  Description of Artificial Sequence: Synthetic oligonucleotide
aggggaaggaucuaaguuu

SEQ ID NO: 3094440 - RNA, 19 nt, Artificial Sequence
  Description of Artificial Sequence: Synthetic oligonucleotide
uuccucauggaacgaaggu

SEQ ID NO: 3094441 - RNA, 19 nt, Artificial Sequence
  Description of Artificial Sequence: Synthetic oligonucleotide
agggcuauaagaggggaag

SEQ ID NO: 3094442 - RNA, 19 nt, Artificial Sequence
  Description of Artificial Sequence: Synthetic oligonucleotide
gaggaauccuauaagaacu

SEQ ID NO: 3094443 - RNA, 19 nt, Artificial Sequence
  Description of Artificial Sequence: Synthetic oligonucleotide
gucagcugcucucaagugc

SEQ ID NO: 3094444 - RNA, 19 nt, Artificial Sequence
  Description of Artificial Sequence: Synthetic oligonucleotide
ucucaagugcucacauucu

SEQ ID NO: 3094445 - RNA, 19 nt, Artificial Sequence
  Description of Artificial Sequence: Synthetic oligonucleotide
ccuauaagaacuauagaga

SEQ ID NO: 3094446 - RNA, 19 nt, Artificial Sequence
  Description of Artificial Sequence: Synthetic oligonucleotide
uuuaugccccacucagacc

SEQ ID NO: 3094447 - RNA, 19 nt, Artificial Sequence
  Description of Artificial Sequence: Synthetic oligonucleotide
gaacacugucuccaugaug

SEQ ID NO: 3094448 - RNA, 19 nt, Artificial Sequence
  Description of Artificial Sequence: Synthetic oligonucleotide
auccuauaagaacuauaga

SEQ ID NO: 3094449 - RNA, 19 nt, Artificial Sequence
  Description of Artificial Sequence: Synthetic oligonucleotide
uucugugguagaggaaucc

SEQ ID NO: 3094450 - RNA, 19 nt, Artificial Sequence
  Description of Artificial Sequence: Synthetic oligonucleotide
auucuuugcuugaaaguug

SEQ ID NO: 3094451 - RNA, 19 nt, Artificial Sequence
  Description of Artificial Sequence: Synthetic oligonucleotide
agaggggaaggaucuaagu

SEQ ID NO: 3094452 - RNA, 19 nt, Artificial Sequence
  Description of Artificial Sequence: Synthetic oligonucleotide
ucagaccuugaacacuguc

SEQ ID NO: 3094453 - RNA, 19 nt, Artificial Sequence
  Description of Artificial Sequence: Synthetic oligonucleotide
uugcuugaaaguuggccaa

SEQ ID NO: 3094454 - RNA, 19 nt, Artificial Sequence
  Description of Artificial Sequence: Synthetic oligonucleotide
ugucucuuccucauucuuu

SEQ ID NO: 3094455 - RNA, 19 nt, Artificial Sequence
  Description of Artificial Sequence: Synthetic oligonucleotide
ucuuccucauucuuugcuu

SEQ ID NO: 3094456 - RNA, 19 nt, Artificial Sequence
  Description of Artificial Sequence: Synthetic oligonucleotide
ugcucaccaacuuccggug

SEQ ID NO: 3094457 - RNA, 19 nt, Artificial Sequence
  Description of Artificial Sequence: Synthetic oligonucleotide
uccuaguuucuuuuaccuc

SEQ ID NO: 3094458 - RNA, 19 nt, Artificial Sequence
  Description of Artificial Sequence: Synthetic oligonucleotide
acucagaccuugaacacug

SEQ ID NO: 3094459 - RNA, 19 nt, Artificial Sequence
  Description of Artificial Sequence: Synthetic oligonucleotide
acugucuccaugaugguau

SEQ ID NO: 3094460 - RNA, 19 nt, Artificial Sequence
  Description of Artificial Sequence: Synthetic oligonucleotide
ucuuugcuugaaaguuggc

SEQ ID NO: 3094461 - RNA, 19 nt, Artificial Sequence
  Description of Artificial Sequence: Synthetic oligonucleotide
ucuguucuuuccucaugga

SEQ ID NO: 3094462 - RNA, 19 nt, Artificial Sequence
  Description of Artificial Sequence: Synthetic oligonucleotide
uaagaggggaaggaucuaa

SEQ ID NO: 3094463 - RNA, 19 nt, Artificial Sequence
  Description of Artificial Sequence: Synthetic oligonucleotide
accuugaacacugucucca

SEQ ID NO: 3094464 - RNA, 19 nt, Artificial Sequence
  Description of Artificial Sequence: Synthetic oligonucleotide
ucugugguagaggaauccu

SEQ ID NO: 3094465 - RNA, 19 nt, Artificial Sequence
  Description of Artificial Sequence: Synthetic oligonucleotide
uccagguucugugguagag

SEQ ID NO: 3094466 - RNA, 19 nt, Artificial Sequence
  Description of Artificial Sequence: Synthetic oligonucleotide
uaguuucuuuuaccucaag

SEQ ID NO: 3094467 - RNA, 19 nt, Artificial Sequence
  Description of Artificial Sequence: Synthetic oligonucleotide
ugucuuccuaguuucuuuu

SEQ ID NO: 3094468 - RNA, 19 nt, Artificial Sequence
  Description of Artificial Sequence: Synthetic oligonucleotide
gaccuugaacacugucucc

SEQ ID NO: 3094469 - RNA, 19 nt, Artificial Sequence
  Description of Artificial Sequence: Synthetic oligonucleotide
accaacuuccgguggucag

SEQ ID NO: 3094470 - RNA, 19 nt, Artificial Sequence
  Description of Artificial Sequence: Synthetic oligonucleotide
aaaagcacuccagguucug

SEQ ID NO: 3094471 - RNA, 19 nt, Artificial Sequence
  Description of Artificial Sequence: Synthetic oligonucleotide
cucaagugcucacauucuc

SEQ ID NO: 3094472 - RNA, 19 nt, Artificial Sequence
  Description of Artificial Sequence: Synthetic oligonucleotide
uugucuuccuaguuucuuu

SEQ ID NO: 3094473 - RNA, 19 nt, Artificial Sequence
  Description of Artificial Sequence: Synthetic oligonucleotide
cuugaacacugucuccaug

SEQ ID NO: 3094474 - RNA, 19 nt, Artificial Sequence
  Description of Artificial Sequence: Synthetic oligonucleotide
uuuaugucucuuccucauu

SEQ ID NO: 3094475 - RNA, 19 nt, Artificial Sequence
  Description of Artificial Sequence: Synthetic oligonucleotide
ugaacacugucuccaugau

SEQ ID NO: 3094476 - RNA, 19 nt, Artificial Sequence
  Description of Artificial Sequence: Synthetic oligonucleotide
ggaucuaaguuuaugucuc

SEQ ID NO: 3094477 - RNA, 19 nt, Artificial Sequence
  Description of Artificial Sequence: Synthetic oligonucleotide
ugcucucaagugcucacau

SEQ ID NO: 3094478 - RNA, 19 nt, Artificial Sequence
  Description of Artificial Sequence: Synthetic oligonucleotide
uaagaacuauagagacuuc

SEQ ID NO: 3094479 - RNA, 19 nt, Artificial Sequence
  Description of Artificial Sequence: Synthetic oligonucleotide
ugagggcuauaagagggga

SEQ ID NO: 3094480 - RNA, 19 nt, Artificial Sequence
  Description of Artificial Sequence: Synthetic oligonucleotide
augguauugagggcuauaa

SEQ ID NO: 3094481 - RNA, 19 nt, Artificial Sequence
  Description of Artificial Sequence: Synthetic oligonucleotide
cagguucugugguagagga

SEQ ID NO: 3094482 - RNA, 19 nt, Artificial Sequence
  Description of Artificial Sequence: Synthetic oligonucleotide
gaauccuauaagaacuaua

SEQ ID NO: 3094483 - RNA, 19 nt, Artificial Sequence
  Description of Artificial Sequence: Synthetic oligonucleotide
aaagcacuccagguucugu

SEQ ID NO: 3094484 - RNA, 19 nt, Artificial Sequence
  Description of Artificial Sequence: Synthetic oligonucleotide
cauucucuucuguucuuuc

SEQ ID NO: 3094485 - RNA, 19 nt, Artificial Sequence
  Description of Artificial Sequence: Synthetic oligonucleotide
ucuuuccucauggaacgaa

SEQ ID NO: 3094486 - RNA, 19 nt, Artificial Sequence
  Description of Artificial Sequence: Synthetic oligonucleotide
uccucauggaacgaagguu

SEQ ID NO: 3094487 - RNA, 19 nt, Artificial Sequence
  Description of Artificial Sequence: Synthetic oligonucleotide
gaacuauagagacuucuuu

SEQ ID NO: 3094488 - RNA, 19 nt, Artificial Sequence
  Description of Artificial Sequence: Synthetic oligonucleotide
ugcucacauucucuucugu

SEQ ID NO: 3094489 - RNA, 19 nt, Artificial Sequence
  Description of Artificial Sequence: Synthetic oligonucleotide
uuugucuuccuaguuucuu

SEQ ID NO: 3094490 - RNA, 19 nt, Artificial Sequence
  Description of Artificial Sequence: Synthetic oligonucleotide
agaacuauagagacuucuu

SEQ ID NO: 3094491 - RNA, 19 nt, Artificial Sequence
  Description of Artificial Sequence: Synthetic oligonucleotide
ggaaggaucuaaguuuaug

SEQ ID NO: 3094492 - RNA, 19 nt, Artificial Sequence
  Description of Artificial Sequence: Synthetic oligonucleotide
cccacucagaccuugaaca

SEQ ID NO: 3094493 - RNA, 19 nt, Artificial Sequence
  Description of Artificial Sequence: Synthetic oligonucleotide
gaggggaaggaucuaaguu

SEQ ID NO: 3094494 - RNA, 19 nt, Artificial Sequence
  Description of Artificial Sequence: Synthetic oligonucleotide
cuauagagacuucuuuucu

SEQ ID NO: 3094495 - RNA, 19 nt, Artificial Sequence
  Description of Artificial Sequence: Synthetic oligonucleotide
auggaacgaagguuauuuu

SEQ ID NO: 3094496 - RNA, 19 nt, Artificial Sequence
  Description of Artificial Sequence: Synthetic oligonucleotide
guggucagcugcucucaag

SEQ ID NO: 3094497 - RNA, 19 nt, Artificial Sequence
  Description of Artificial Sequence: Synthetic oligonucleotide
guuuaugucucuuccucau

SEQ ID NO: 3094498 - RNA, 19 nt, Artificial Sequence
  Description of Artificial Sequence: Synthetic oligonucleotide
gacuucuuuucugugauuu

SEQ ID NO: 3094499 - RNA, 19 nt, Artificial Sequence
  Description of Artificial Sequence: Synthetic oligonucleotide
ugucuccaugaugguauug

SEQ ID NO: 3094500 - RNA, 19 nt, Artificial Sequence
  Description of Artificial Sequence: Synthetic oligonucleotide
gaucuaaguuuaugucucu

SEQ ID NO: 3094501 - RNA, 19 nt, Artificial Sequence
  Description of Artificial Sequence: Synthetic oligonucleotide
cuaguuucuuuuaccucaa

SEQ ID NO: 3094502 - RNA, 19 nt, Artificial Sequence
  Description of Artificial Sequence: Synthetic oligonucleotide
cauucuuugcuugaaaguu

SEQ ID NO: 3094503 - RNA, 19 nt, Artificial Sequence
  Description of Artificial Sequence: Synthetic oligonucleotide
uccucauucuuugcuugaa

SEQ ID NO: 3094504 - RNA, 19 nt, Artificial Sequence
  Description of Artificial Sequence: Synthetic oligonucleotide
gugcucacauucucuucug

SEQ ID NO: 3094505 - RNA, 19 nt, Artificial Sequence
  Description of Artificial Sequence: Synthetic oligonucleotide
aucugcucaccaacuuccg

SEQ ID NO: 3094506 - RNA, 19 nt, Artificial Sequence
  Description of Artificial Sequence: Synthetic oligonucleotide
cauggaacgaagguuauuu

SEQ ID NO: 3094507 - RNA, 19 nt, Artificial Sequence
  Description of Artificial Sequence: Synthetic oligonucleotide
uucuuuccucauggaacga

SEQ ID NO: 3094508 - RNA, 19 nt, Artificial Sequence
  Description of Artificial Sequence: Synthetic oligonucleotide
aucuaaguuuaugucucuu

SEQ ID NO: 3094509 - RNA, 19 nt, Artificial Sequence
  Description of Artificial Sequence: Synthetic oligonucleotide
aacuuccgguggucagcug

SEQ ID NO: 3094510 - RNA, 19 nt, Artificial Sequence
  Description of Artificial Sequence: Synthetic oligonucleotide
gcuugaaaguuggccaaag

SEQ ID NO: 3094511 - RNA, 19 nt, Artificial Sequence
  Description of Artificial Sequence: Synthetic oligonucleotide
ugcuugaaaguuggccaaa

SEQ ID NO: 3094512 - RNA, 19 nt, Artificial Sequence
  Description of Artificial Sequence: Synthetic oligonucleotide
gggcuauaagaggggaagg

SEQ ID NO: 3094513 - RNA, 19 nt, Artificial Sequence
  Description of Artificial Sequence: Synthetic oligonucleotide
cugcucaccaacuuccggu

SEQ ID NO: 3094514 - RNA, 19 nt, Artificial Sequence
  Description of Artificial Sequence: Synthetic oligonucleotide
ggucagcugcucucaagug

SEQ ID NO: 3094515 - RNA, 19 nt, Artificial Sequence
  Description of Artificial Sequence: Synthetic oligonucleotide
ggcuauaagaggggaagga

SEQ ID NO: 3094516 - RNA, 19 nt, Artificial Sequence
  Description of Artificial Sequence: Synthetic oligonucleotide
ccucauggaacgaagguua

SEQ ID NO: 3094517 - RNA, 19 nt, Artificial Sequence
  Description of Artificial Sequence: Synthetic oligonucleotide
aggaauccuauaagaacua

SEQ ID NO: 3094518 - RNA, 19 nt, Artificial Sequence
  Description of Artificial Sequence: Synthetic oligonucleotide
acacugucuccaugauggu

SEQ ID NO: 3094519 - RNA, 19 nt, Artificial Sequence
  Description of Artificial Sequence: Synthetic oligonucleotide
cugugguagaggaauccua

SEQ ID NO: 3094520 - RNA, 19 nt, Artificial Sequence
  Description of Artificial Sequence: Synthetic oligonucleotide
ccaugaugguauugagggc

SEQ ID NO: 3094521 - RNA, 19 nt, Artificial Sequence
  Description of Artificial Sequence: Synthetic oligonucleotide
ucauggaacgaagguuauu

SEQ ID NO: 3094522 - RNA, 19 nt, Artificial Sequence
  Description of Artificial Sequence: Synthetic oligonucleotide
agcugcucucaagugcuca

SEQ ID NO: 3094523 - RNA, 19 nt, Artificial Sequence
  Description of Artificial Sequence: Synthetic oligonucleotide
gaugguauugagggcuaua

SEQ ID NO: 3094524 - RNA, 19 nt, Artificial Sequence
  Description of Artificial Sequence: Synthetic oligonucleotide
gcucaccaacuuccggugg

SEQ ID NO: 3094525 - RNA, 19 nt, Artificial Sequence
  Description of Artificial Sequence: Synthetic oligonucleotide
gaaaagcacuccagguucu

SEQ ID NO: 3094526 - RNA, 19 nt, Artificial Sequence
  Description of Artificial Sequence: Synthetic oligonucleotide
ugccccacucagaccuuga

SEQ ID NO: 3094527 - RNA, 19 nt, Artificial Sequence
  Description of Artificial Sequence: Synthetic oligonucleotide
ucaccaacuuccggugguc

SEQ ID NO: 3094528 - RNA, 19 nt, Artificial Sequence
  Description of Artificial Sequence: Synthetic oligonucleotide
guucugugguagaggaauc

SEQ ID NO: 3094529 - RNA, 19 nt, Artificial Sequence
  Description of Artificial Sequence: Synthetic oligonucleotide
ccacucagaccuugaacac

SEQ ID NO: 3094530 - RNA, 19 nt, Artificial Sequence
  Description of Artificial Sequence: Synthetic oligonucleotide
ugaugguauugagggcuau

SEQ ID NO: 3094531 - RNA, 19 nt, Artificial Sequence
  Description of Artificial Sequence: Synthetic oligonucleotide
gagggcuauaagaggggaa

SEQ ID NO: 3094532 - RNA, 19 nt, Artificial Sequence
  Description of Artificial Sequence: Synthetic oligonucleotide
gugguagaggaauccuaua

SEQ ID NO: 3094533 - RNA, 19 nt, Artificial Sequence
  Description of Artificial Sequence: Synthetic oligonucleotide
gcugcucucaagugcucac

SEQ ID NO: 3094534 - RNA, 19 nt, Artificial Sequence
  Description of Artificial Sequence: Synthetic oligonucleotide
gucuuccuaguuucuuuua

SEQ ID NO: 3094535 - RNA, 19 nt, Artificial Sequence
  Description of Artificial Sequence: Synthetic oligonucleotide
caagugcucacauucucuu

SEQ ID NO: 3094536 - RNA, 19 nt, Artificial Sequence
  Description of Artificial Sequence: Synthetic oligonucleotide
auaagaggggaaggaucua

SEQ ID NO: 3094537 - RNA, 19 nt, Artificial Sequence
  Description of Artificial Sequence: Synthetic oligonucleotide
ccaacuuccgguggucagc

SEQ ID NO: 3094538 - RNA, 19 nt, Artificial Sequence
  Description of Artificial Sequence: Synthetic oligonucleotide
cucaccaacuuccgguggu

SEQ ID NO: 3094539 - RNA, 19 nt, Artificial Sequence
  Description of Artificial Sequence: Synthetic oligonucleotide
gcuauaagaggggaaggau

SEQ ID NO: 3094540 - RNA, 19 nt, Artificial Sequence
  Description of Artificial Sequence: Synthetic oligonucleotide
cugcucucaagugcucaca

SEQ ID NO: 3094541 - RNA, 19 nt, Artificial Sequence
  Description of Artificial Sequence: Synthetic oligonucleotide
cuuccgguggucagcugcu

SEQ ID NO: 3094542 - RNA, 19 nt, Artificial Sequence
  Description of Artificial Sequence: Synthetic oligonucleotide
cuccagguucugugguaga

SEQ ID NO: 3094543 - RNA, 19 nt, Artificial Sequence
  Description of Artificial Sequence: Synthetic oligonucleotide
cacuccagguucuguggua

SEQ ID NO: 3094544 - RNA, 19 nt, Artificial Sequence
  Description of Artificial Sequence: Synthetic oligonucleotide
cucauggaacgaagguuau

SEQ ID NO: 3094545 - RNA, 19 nt, Artificial Sequence
  Description of Artificial Sequence: Synthetic oligonucleotide
cacugucuccaugauggua

SEQ ID NO: 3094546 - RNA, 19 nt, Artificial Sequence
  Description of Artificial Sequence: Synthetic oligonucleotide
cacucagaccuugaacacu

SEQ ID NO: 3094547 - RNA, 19 nt, Artificial Sequence
  Description of Artificial Sequence: Synthetic oligonucleotide
cagcugcucucaagugcuc

SEQ ID NO: 3094548 - RNA, 19 nt, Artificial Sequence
  Description of Artificial Sequence: Synthetic oligonucleotide
caccaacuuccggugguca

SEQ ID NO: 3094549 - RNA, 19 nt, Artificial Sequence
  Description of Artificial Sequence: Synthetic oligonucleotide
ccgguggucagcugcucuc

SEQ ID NO: 3094550 - RNA, 19 nt, Artificial Sequence
  Description of Artificial Sequence: Synthetic oligonucleotide
caacuuccgguggucagcu

SEQ ID NO: 3094551 - RNA, 19 nt, Artificial Sequence
  Description of Artificial Sequence: Synthetic oligonucleotide
uuccgguggucagcugcuc

SEQ ID NO: 3094552 - RNA, 19 nt, Artificial Sequence
  Description of Artificial Sequence: Synthetic oligonucleotide
ggaauccuauaagaacuau

SEQ ID NO: 3094553 - RNA, 19 nt, Artificial Sequence
  Description of Artificial Sequence: Synthetic oligonucleotide
ccucauucuuugcuugaaa

SEQ ID NO: 3094554 - RNA, 19 nt, Artificial Sequence
  Description of Artificial Sequence: Synthetic oligonucleotide
cacauucucuucuguucuu

SEQ ID NO: 3094555 - RNA, 19 nt, Artificial Sequence
  Description of Artificial Sequence: Synthetic oligonucleotide
gguggucagcugcucucaa

SEQ ID NO: 3094556 - RNA, 19 nt, Artificial Sequence
  Description of Artificial Sequence: Synthetic oligonucleotide
cucagaccuugaacacugu

SEQ ID NO: 3094557 - RNA, 19 nt, Artificial Sequence
  Description of Artificial Sequence: Synthetic oligonucleotide
cugucuccaugaugguauu

SEQ ID NO: 3094558 - RNA, 19 nt, Artificial Sequence
  Description of Artificial Sequence: Synthetic oligonucleotide
gcucucaagugcucacauu

SEQ ID NO: 3094559 - RNA, 19 nt, Artificial Sequence
  Description of Artificial Sequence: Synthetic oligonucleotide
ccuugaacacugucuccau

SEQ ID NO: 3094560 - RNA, 19 nt, Artificial Sequence
  Description of Artificial Sequence: Synthetic oligonucleotide
gggaaggaucuaaguuuau

SEQ ID NO: 3094561 - RNA, 19 nt, Artificial Sequence
  Description of Artificial Sequence: Synthetic oligonucleotide
cgguggucagcugcucuca

SEQ ID NO: 3094562 - RNA, 19 nt, Artificial Sequence
  Description of Artificial Sequence: Synthetic oligonucleotide
aaugauaaacccuuugaug

SEQ ID NO: 3094563 - RNA, 19 nt, Artificial Sequence
  Description of Artificial Sequence: Synthetic oligonucleotide
agauguaggagucagcagc

SEQ ID NO: 3094564 - RNA, 19 nt, Artificial Sequence
  Description of Artificial Sequence: Synthetic oligonucleotide
agacuuuccacugagaacc

SEQ ID NO: 3094565 - RNA, 19 nt, Artificial Sequence
  Description of Artificial Sequence: Synthetic oligonucleotide
cucaucaucaaacacaccc

SEQ ID NO: 3094566 - RNA, 19 nt, Artificial Sequence
  Description of Artificial Sequence: Synthetic oligonucleotide
uugaaggagcacuugaugg

SEQ ID NO: 3094567 - RNA, 19 nt, Artificial Sequence
  Description of Artificial Sequence: Synthetic oligonucleotide
augauaaacccuuugauga

SEQ ID NO: 3094568 - RNA, 19 nt, Artificial Sequence
  Description of Artificial Sequence: Synthetic oligonucleotide
gauucuugaaccuuggaac

SEQ ID NO: 3094569 - RNA, 19 nt, Artificial Sequence
  Description of Artificial Sequence: Synthetic oligonucleotide
uuugaugaccaucucauca

SEQ ID NO: 3094570 - RNA, 19 nt, Artificial Sequence
  Description of Artificial Sequence: Synthetic oligonucleotide
uccacugagaaccugaugu

SEQ ID NO: 3094571 - RNA, 19 nt, Artificial Sequence
  Description of Artificial Sequence: Synthetic oligonucleotide
acuucugcaaugauaaacc

SEQ ID NO: 3094572 - RNA, 19 nt, Artificial Sequence
  Description of Artificial Sequence: Synthetic oligonucleotide
aaccuuggaacaugcacgg

SEQ ID NO: 3094573 - RNA, 19 nt, Artificial Sequence
  Description of Artificial Sequence: Synthetic oligonucleotide
aaacacacccaguuuguag

SEQ ID NO: 3094574 - RNA, 19 nt, Artificial Sequence
  Description of Artificial Sequence: Synthetic oligonucleotide
aucaaacacacccaguuug

SEQ ID NO: 3094575 - RNA, 19 nt, Artificial Sequence
  Description of Artificial Sequence: Synthetic oligonucleotide
aguuuguagauguaggagu

SEQ ID NO: 3094576 - RNA, 19 nt, Artificial Sequence
  Description of Artificial Sequence: Synthetic oligonucleotide
ugaaccuuggaacaugcac

SEQ ID NO: 3094577 - RNA, 19 nt, Artificial Sequence
  Description of Artificial Sequence: Synthetic oligonucleotide
ucugcaaugauaaacccuu

SEQ ID NO: 3094578 - RNA, 19 nt, Artificial Sequence
  Description of Artificial Sequence: Synthetic oligonucleotide
acagggucauaucaguggc

SEQ ID NO: 3094579 - RNA, 19 nt, Artificial Sequence
  Description of Artificial Sequence: Synthetic oligonucleotide
gaaccuuggaacaugcacg

SEQ ID NO: 3094580 - RNA, 19 nt, Artificial Sequence
  Description of Artificial Sequence: Synthetic oligonucleotide
gacagggucauaucagugg

SEQ ID NO: 3094581 - RNA, 19 nt, Artificial Sequence
  Description of Artificial Sequence: Synthetic oligonucleotide
aacacacccaguuuguaga

SEQ ID NO: 3094582 - RNA, 19 nt, Artificial Sequence
  Description of Artificial Sequence: Synthetic oligonucleotide
ugauucuugaaccuuggaa

SEQ ID NO: 3094583 - RNA, 19 nt, Artificial Sequence
  Description of Artificial Sequence: Synthetic oligonucleotide
uaaucuugcaugugucugg

SEQ ID NO: 3094584 - RNA, 19 nt, Artificial Sequence
  Description of Artificial Sequence: Synthetic oligonucleotide
ccugaugucagucaaaggg

SEQ ID NO: 3094585 - RNA, 19 nt, Artificial Sequence
  Description of Artificial Sequence: Synthetic oligonucleotide
cuugucaccaguuuccaug

SEQ ID NO: 3094586 - RNA, 19 nt, Artificial Sequence
  Description of Artificial Sequence: Synthetic oligonucleotide
aaucuugcaugugucuggc

SEQ ID NO: 3094587 - RNA, 19 nt, Artificial Sequence
  Description of Artificial Sequence: Synthetic oligonucleotide
ucagucaaagggaugggca

SEQ ID NO: 3094588 - RNA, 19 nt, Artificial Sequence
  Description of Artificial Sequence: Synthetic oligonucleotide
ucaucaaacacacccaguu

SEQ ID NO: 3094589 - RNA, 19 nt, Artificial Sequence
  Description of Artificial Sequence: Synthetic oligonucleotide
gaaagacagggucauauca

SEQ ID NO: 3094590 - RNA, 19 nt, Artificial Sequence
  Description of Artificial Sequence: Synthetic oligonucleotide
ucugauucuugaaccuugg

SEQ ID NO: 3094591 - RNA, 19 nt, Artificial Sequence
  Description of Artificial Sequence: Synthetic oligonucleotide
agcacuugaugguaagugg

SEQ ID NO: 3094592 - RNA, 19 nt, Artificial Sequence
  Description of Artificial Sequence: Synthetic oligonucleotide
aaagacagggucauaucag

SEQ ID NO: 3094593 - RNA, 19 nt, Artificial Sequence
  Description of Artificial Sequence: Synthetic oligonucleotide
aucucaucaucaaacacac

SEQ ID NO: 3094594 - RNA, 19 nt, Artificial Sequence
  Description of Artificial Sequence: Synthetic oligonucleotide
ucaucaucaaacacaccca

SEQ ID NO: 3094595 - RNA, 19 nt, Artificial Sequence
  Description of Artificial Sequence: Synthetic oligonucleotide
ugcaaugauaaacccuuug

SEQ ID NO: 3094596 - RNA, 19 nt, Artificial Sequence
  Description of Artificial Sequence: Synthetic oligonucleotide
ugagaaccaccucugauuc

SEQ ID NO: 3094597 - RNA, 19 nt, Artificial Sequence
  Description of Artificial Sequence: Synthetic oligonucleotide
aaacccuuugaugaccauc

SEQ ID NO: 3094598 - RNA, 19 nt, Artificial Sequence
  Description of Artificial Sequence: Synthetic oligonucleotide
aaccugaugucagucaaag

SEQ ID NO: 3094599 - RNA, 19 nt, Artificial Sequence
  Description of Artificial Sequence: Synthetic oligonucleotide
aagacagggucauaucagu

SEQ ID NO: 3094600 - RNA, 19 nt, Artificial Sequence
  Description of Artificial Sequence: Synthetic oligonucleotide
auucuugaaccuuggaaca

SEQ ID NO: 3094601 - RNA, 19 nt, Artificial Sequence
  Description of Artificial Sequence: Synthetic oligonucleotide
ggcaucucgacagagaacg

SEQ ID NO: 3094602 - RNA, 19 nt, Artificial Sequence
  Description of Artificial Sequence: Synthetic oligonucleotide
gugucuggcaucucgacag

SEQ ID NO: 3094603 - RNA, 19 nt, Artificial Sequence
  Description of Artificial Sequence: Synthetic oligonucleotide
caucucaucaucaaacaca

SEQ ID NO: 3094604 - RNA, 19 nt, Artificial Sequence
  Description of Artificial Sequence: Synthetic oligonucleotide
uucugcaaugauaaacccu

SEQ ID NO: 3094605 - RNA, 19 nt, Artificial Sequence
  Description of Artificial Sequence: Synthetic oligonucleotide
gacuucugcaaugauaaac

SEQ ID NO: 3094606 - RNA, 19 nt, Artificial Sequence
  Description of Artificial Sequence: Synthetic oligonucleotide
ucuugcaugugucuggcau

SEQ ID NO: 3094607 - RNA, 19 nt, Artificial Sequence
  Description of Artificial Sequence: Synthetic oligonucleotide
gauaaacccuuugaugacc

SEQ ID NO: 3094608 - RNA, 19 nt, Artificial Sequence
  Description of Artificial Sequence: Synthetic oligonucleotide
cuugaaccuuggaacaugc

SEQ ID NO: 3094609 - RNA, 19 nt, Artificial Sequence
  Description of Artificial Sequence: Synthetic oligonucleotide
ugccuugucaccaguuucc

SEQ ID NO: 3094610 - RNA, 19 nt, Artificial Sequence
  Description of Artificial Sequence: Synthetic oligonucleotide
uuguagauguaggagucag

SEQ ID NO: 3094611 - RNA, 19 nt, Artificial Sequence
  Description of Artificial Sequence: Synthetic oligonucleotide
ucaaacacacccaguuugu

SEQ ID NO: 3094612 - RNA, 19 nt, Artificial Sequence
  Description of Artificial Sequence: Synthetic oligonucleotide
augacuucugcaaugauaa

SEQ ID NO: 3094613 - RNA, 19 nt, Artificial Sequence
  Description of Artificial Sequence: Synthetic oligonucleotide
ugauaaacccuuugaugac

SEQ ID NO: 3094614 - RNA, 19 nt, Artificial Sequence
  Description of Artificial Sequence: Synthetic oligonucleotide
caucaucaaacacacccag

SEQ ID NO: 3094615 - RNA, 19 nt, Artificial Sequence
  Description of Artificial Sequence: Synthetic oligonucleotide
cuucugcaaugauaaaccc

SEQ ID NO: 3094616 - RNA, 19 nt, Artificial Sequence
  Description of Artificial Sequence: Synthetic oligonucleotide
caccucugauucuugaacc

SEQ ID NO: 3094617 - RNA, 19 nt, Artificial Sequence
  Description of Artificial Sequence: Synthetic oligonucleotide
cuugaaggagcacuugaug

SEQ ID NO: 3094618 - RNA, 19 nt, Artificial Sequence
  Description of Artificial Sequence: Synthetic oligonucleotide
ucaccaguuuccaugacuu

SEQ ID NO: 3094619 - RNA, 19 nt, Artificial Sequence
  Description of Artificial Sequence: Synthetic oligonucleotide
acacccaguuuguagaugu

SEQ ID NO: 3094620 - RNA, 19 nt, Artificial Sequence
  Description of Artificial Sequence: Synthetic oligonucleotide
gaccaucucaucaucaaac

SEQ ID NO: 3094621 - RNA, 19 nt, Artificial Sequence
  Description of Artificial Sequence: Synthetic oligonucleotide
uugagaaccaccucugauu

SEQ ID NO: 3094622 - RNA, 19 nt, Artificial Sequence
  Description of Artificial Sequence: Synthetic oligonucleotide
guuuccaugacuucugcaa

SEQ ID NO: 3094623 - RNA, 19 nt, Artificial Sequence
  Description of Artificial Sequence: Synthetic oligonucleotide
gagaacgcaggguacagga

SEQ ID NO: 3094624 - RNA, 19 nt, Artificial Sequence
  Description of Artificial Sequence: Synthetic oligonucleotide
cagggugucuugaaggagc

SEQ ID NO: 3094625 - RNA, 19 nt, Artificial Sequence
  Description of Artificial Sequence: Synthetic oligonucleotide
ucucgacagagaacgcagg

SEQ ID NO: 3094626 - RNA, 19 nt, Artificial Sequence
  Description of Artificial Sequence: Synthetic oligonucleotide
aaagggaugggcagggugu

SEQ ID NO: 3094627 - RNA, 19 nt, Artificial Sequence
  Description of Artificial Sequence: Synthetic oligonucleotide
gauguaggagucagcagcc

SEQ ID NO: 3094628 - RNA, 19 nt, Artificial Sequence
  Description of Artificial Sequence: Synthetic oligonucleotide
uugaugaccaucucaucau

SEQ ID NO: 3094629 - RNA, 19 nt, Artificial Sequence
  Description of Artificial Sequence: Synthetic oligonucleotide
ugugucuggcaucucgaca

SEQ ID NO: 3094630 - RNA, 19 nt, Artificial Sequence
  Description of Artificial Sequence: Synthetic oligonucleotide
cuugaugguaaguggccag

SEQ ID NO: 3094631 - RNA, 19 nt, Artificial Sequence
  Description of Artificial Sequence: Synthetic oligonucleotide
uaaguggccagcuaaucuu

SEQ ID NO: 3094632 - RNA, 19 nt, Artificial Sequence
  Description of Artificial Sequence: Synthetic oligonucleotide
guagauguaggagucagca

SEQ ID NO: 3094633 - RNA, 19 nt, Artificial Sequence
  Description of Artificial Sequence: Synthetic oligonucleotide
ggagucagcagccauguug

SEQ ID NO: 3094634 - RNA, 19 nt, Artificial Sequence
  Description of Artificial Sequence: Synthetic oligonucleotide
ucuugaaggagcacuugau

SEQ ID NO: 3094635 - RNA, 19 nt, Artificial Sequence
  Description of Artificial Sequence: Synthetic oligonucleotide
cuaaucuugcaugugucug

SEQ ID NO: 3094636 - RNA, 19 nt, Artificial Sequence
  Description of Artificial Sequence: Synthetic oligonucleotide
cacuugaugguaaguggcc

SEQ ID NO: 3094637 - RNA, 19 nt, Artificial Sequence
  Description of Artificial Sequence: Synthetic oligonucleotide
ucaguggcugccuugucac

SEQ ID NO: 3094638 - RNA, 19 nt, Artificial Sequence
  Description of Artificial Sequence: Synthetic oligonucleotide
cucugauucuugaaccuug

SEQ ID NO: 3094639 - RNA, 19 nt, Artificial Sequence
  Description of Artificial Sequence: Synthetic oligonucleotide
augguaaguggccagcuaa

SEQ ID NO: 3094640 - RNA, 19 nt, Artificial Sequence
  Description of Artificial Sequence: Synthetic oligonucleotide
gagcacuugaugguaagug

SEQ ID NO: 3094641 - RNA, 19 nt, Artificial Sequence
  Description of Artificial Sequence: Synthetic oligonucleotide
uugucaccaguuuccauga

SEQ ID NO: 3094642 - RNA, 19 nt, Artificial Sequence
  Description of Artificial Sequence: Synthetic oligonucleotide
cucgacagagaacgcaggg

SEQ ID NO: 3094643 - RNA, 19 nt, Artificial Sequence
  Description of Artificial Sequence: Synthetic oligonucleotide
agaaccugaugucagucaa

SEQ ID NO: 3094644 - RNA, 19 nt, Artificial Sequence
  Description of Artificial Sequence: Synthetic oligonucleotide
cagucaaagggaugggcag

SEQ ID NO: 3094645 - RNA, 19 nt, Artificial Sequence
  Description of Artificial Sequence: Synthetic oligonucleotide
caguuuguagauguaggag

SEQ ID NO: 3094646 - RNA, 19 nt, Artificial Sequence
  Description of Artificial Sequence: Synthetic oligonucleotide
ucuggcaucucgacagaga

SEQ ID NO: 3094647 - RNA, 19 nt, Artificial Sequence
  Description of Artificial Sequence: Synthetic oligonucleotide
ucuugaaccuuggaacaug

SEQ ID NO: 3094648 - RNA, 19 nt, Artificial Sequence
  Description of Artificial Sequence: Synthetic oligonucleotide
agccauguugagaaccacc

SEQ ID NO: 3094649 - RNA, 19 nt, Artificial Sequence
  Description of Artificial Sequence: Synthetic oligonucleotide
aacgcaggguacaggaaag

SEQ ID NO: 3094650 - RNA, 19 nt, Artificial Sequence
  Description of Artificial Sequence: Synthetic oligonucleotide
augugucuggcaucucgac

SEQ ID NO: 3094651 - RNA, 19 nt, Artificial Sequence
  Description of Artificial Sequence: Synthetic oligonucleotide
uguugagaaccaccucuga

SEQ ID NO: 3094652 - RNA, 19 nt, Artificial Sequence
  Description of Artificial Sequence: Synthetic oligonucleotide
cagacuuuccacugagaac

SEQ ID NO: 3094653 - RNA, 19 nt, Artificial Sequence
  Description of Artificial Sequence: Synthetic oligonucleotide
uguaggagucagcagccau

SEQ ID NO: 3094654 - RNA, 19 nt, Artificial Sequence
  Description of Artificial Sequence: Synthetic oligonucleotide
aucaguggcugccuuguca

SEQ ID NO: 3094655 - RNA, 19 nt, Artificial Sequence
  Description of Artificial Sequence: Synthetic oligonucleotide
ugaccaucucaucaucaaa

SEQ ID NO: 3094656 - RNA, 19 nt, Artificial Sequence
  Description of Artificial Sequence: Synthetic oligonucleotide
acugagaaccugaugucag

SEQ ID NO: 3094657 - RNA, 19 nt, Artificial Sequence
  Description of Artificial Sequence: Synthetic oligonucleotide
guuuguagauguaggaguc

SEQ ID NO: 3094658 - RNA, 19 nt, Artificial Sequence
  Description of Artificial Sequence: Synthetic oligonucleotide
agucaaagggaugggcagg

SEQ ID NO: 3094659 - RNA, 19 nt, Artificial Sequence
  Description of Artificial Sequence: Synthetic oligonucleotide
cauaucaguggcugccuug

SEQ ID NO: 3094660 - RNA, 19 nt, Artificial Sequence
  Description of Artificial Sequence: Synthetic oligonucleotide
cuuuccacugagaaccuga

SEQ ID NO: 3094661 - RNA, 19 nt, Artificial Sequence
  Description of Artificial Sequence: Synthetic oligonucleotide
aggaaagacagggucauau

SEQ ID NO: 3094662 - RNA, 19 nt, Artificial Sequence
  Description of Artificial Sequence: Synthetic oligonucleotide
ugggcagggugucuugaag

SEQ ID NO: 3094663 - RNA, 19 nt, Artificial Sequence
  Description of Artificial Sequence: Synthetic oligonucleotide
gaacgcaggguacaggaaa

SEQ ID NO: 3094664 - RNA, 19 nt, Artificial Sequence
  Description of Artificial Sequence: Synthetic oligonucleotide
agcuaaucuugcauguguc

SEQ ID NO: 3094665 - RNA, 19 nt, Artificial Sequence
  Description of Artificial Sequence: Synthetic oligonucleotide
uuuguagauguaggaguca

SEQ ID NO: 3094666 - RNA, 19 nt, Artificial Sequence
  Description of Artificial Sequence: Synthetic oligonucleotide
cauguugagaaccaccucu

SEQ ID NO: 3094667 - RNA, 19 nt, Artificial Sequence
  Description of Artificial Sequence: Synthetic oligonucleotide
ugaugaccaucucaucauc

SEQ ID NO: 3094668 - RNA, 19 nt, Artificial Sequence
  Description of Artificial Sequence: Synthetic oligonucleotide
gcaaugauaaacccuuuga

SEQ ID NO: 3094669 - RNA, 19 nt, Artificial Sequence
  Description of Artificial Sequence: Synthetic oligonucleotide
aaccaccucugauucuuga

SEQ ID NO: 3094670 - RNA, 19 nt, Artificial Sequence
  Description of Artificial Sequence: Synthetic oligonucleotide
gucaaagggaugggcaggg

SEQ ID NO: 3094671 - RNA, 19 nt, Artificial Sequence
  Description of Artificial Sequence: Synthetic oligonucleotide
aucucgacagagaacgcag

SEQ ID NO: 3094672 - RNA, 19 nt, Artificial Sequence
  Description of Artificial Sequence: Synthetic oligonucleotide
agggucauaucaguggcug

SEQ ID NO: 3094673 - RNA, 19 nt, Artificial Sequence
  Description of Artificial Sequence: Synthetic oligonucleotide
gagaaccugaugucaguca

SEQ ID NO: 3094674 - RNA, 19 nt, Artificial Sequence
  Description of Artificial Sequence: Synthetic oligonucleotide
accugaugucagucaaagg

SEQ ID NO: 3094675 - RNA, 19 nt, Artificial Sequence
  Description of Artificial Sequence: Synthetic oligonucleotide
uugaugguaaguggccagc

SEQ ID NO: 3094676 - RNA, 19 nt, Artificial Sequence
  Description of Artificial Sequence: Synthetic oligonucleotide
aguuuccaugacuucugca

SEQ ID NO: 3094677 - RNA, 19 nt, Artificial Sequence
  Description of Artificial Sequence: Synthetic oligonucleotide
augaccaucucaucaucaa

SEQ ID NO: 3094678 - RNA, 19 nt, Artificial Sequence
  Description of Artificial Sequence: Synthetic oligonucleotide
gcaugugucuggcaucucg

SEQ ID NO: 3094679 - RNA, 19 nt, Artificial Sequence
  Description of Artificial Sequence: Synthetic oligonucleotide
accucugauucuugaaccu

SEQ ID NO: 3094680 - RNA, 19 nt, Artificial Sequence
  Description of Artificial Sequence: Synthetic oligonucleotide
ugucagucaaagggauggg

SEQ ID NO: 3094681 - RNA, 19 nt, Artificial Sequence
  Description of Artificial Sequence: Synthetic oligonucleotide
gaugaccaucucaucauca

SEQ ID NO: 3094682 - RNA, 19 nt, Artificial Sequence
  Description of Artificial Sequence: Synthetic oligonucleotide
caugacuucugcaaugaua

SEQ ID NO: 3094683 - RNA, 19 nt, Artificial Sequence
  Description of Artificial Sequence: Synthetic oligonucleotide
acccaguuuguagauguag

SEQ ID NO: 3094684 - RNA, 19 nt, Artificial Sequence
  Description of Artificial Sequence: Synthetic oligonucleotide
cuugcaugugucuggcauc

SEQ ID NO: 3094685 - RNA, 19 nt, Artificial Sequence
  Description of Artificial Sequence: Synthetic oligonucleotide
gaugucagucaaagggaug

SEQ ID NO: 3094686 - RNA, 19 nt, Artificial Sequence
  Description of Artificial Sequence: Synthetic oligonucleotide
cccaguuuguagauguagg

SEQ ID NO: 3094687 - RNA, 19 nt, Artificial Sequence
  Description of Artificial Sequence: Synthetic oligonucleotide
gucuugaaggagcacuuga

SEQ ID NO: 3094688 - RNA, 19 nt, Artificial Sequence
  Description of Artificial Sequence: Synthetic oligonucleotide
uuuccacugagaaccugau

SEQ ID NO: 3094689 - RNA, 19 nt, Artificial Sequence
  Description of Artificial Sequence: Synthetic oligonucleotide
aagggaugggcaggguguc

SEQ ID NO: 3094690 - RNA, 19 nt, Artificial Sequence
  Description of Artificial Sequence: Synthetic oligonucleotide
uugaaccuuggaacaugca

SEQ ID NO: 3094691 - RNA, 19 nt, Artificial Sequence
  Description of Artificial Sequence: Synthetic oligonucleotide
aaguggccagcuaaucuug

SEQ ID NO: 3094692 - RNA, 19 nt, Artificial Sequence
  Description of Artificial Sequence: Synthetic oligonucleotide
uugcaugugucuggcaucu

SEQ ID NO: 3094693 - RNA, 19 nt, Artificial Sequence
  Description of Artificial Sequence: Synthetic oligonucleotide
auaaacccuuugaugacca

SEQ ID NO: 3094694 - RNA, 19 nt, Artificial Sequence
  Description of Artificial Sequence: Synthetic oligonucleotide
uggccagcuaaucuugcau

SEQ ID NO: 3094695 - RNA, 19 nt, Artificial Sequence
  Description of Artificial Sequence: Synthetic oligonucleotide
gggcagggugucuugaagg

SEQ ID NO: 3094696 - RNA, 19 nt, Artificial Sequence
  Description of Artificial Sequence: Synthetic oligonucleotide
auaucaguggcugccuugu

SEQ ID NO: 3094697 - RNA, 19 nt, Artificial Sequence
  Description of Artificial Sequence: Synthetic oligonucleotide
uaggagucagcagccaugu

SEQ ID NO: 3094698 - RNA, 19 nt, Artificial Sequence
  Description of Artificial Sequence: Synthetic oligonucleotide
ucucaucaucaaacacacc

SEQ ID NO: 3094699 - RNA, 19 nt, Artificial Sequence
  Description of Artificial Sequence: Synthetic oligonucleotide
cuuugaugaccaucucauc

SEQ ID NO: 3094700 - RNA, 19 nt, Artificial Sequence
  Description of Artificial Sequence: Synthetic oligonucleotide
ugguaaguggccagcuaau

SEQ ID NO: 3094701 - RNA, 19 nt, Artificial Sequence
  Description of Artificial Sequence: Synthetic oligonucleotide
ggucauaucaguggcugcc

SEQ ID NO: 3094702 - RNA, 19 nt, Artificial Sequence
  Description of Artificial Sequence: Synthetic oligonucleotide
aguggccagcuaaucuugc

SEQ ID NO: 3094703 - RNA, 19 nt, Artificial Sequence
  Description of Artificial Sequence: Synthetic oligonucleotide
agagaacgcaggguacagg

SEQ ID NO: 3094704 - RNA, 19 nt, Artificial Sequence
  Description of Artificial Sequence: Synthetic oligonucleotide
ucgacagagaacgcagggu

SEQ ID NO: 3094705 - RNA, 19 nt, Artificial Sequence
  Description of Artificial Sequence: Synthetic oligonucleotide
guaaguggccagcuaaucu

SEQ ID NO: 3094706 - RNA, 19 nt, Artificial Sequence
  Description of Artificial Sequence: Synthetic oligonucleotide
gucagucaaagggaugggc

SEQ ID NO: 3094707 - RNA, 19 nt, Artificial Sequence
  Description of Artificial Sequence: Synthetic oligonucleotide
guaggagucagcagccaug

SEQ ID NO: 3094708 - RNA, 19 nt, Artificial Sequence
  Description of Artificial Sequence: Synthetic oligonucleotide
agaaccaccucugauucuu

SEQ ID NO: 3094709 - RNA, 19 nt, Artificial Sequence
  Description of Artificial Sequence: Synthetic oligonucleotide
ugaugguaaguggccagcu

SEQ ID NO: 3094710 - RNA, 19 nt, Artificial Sequence
  Description of Artificial Sequence: Synthetic oligonucleotide
acagagaacgcaggguaca

SEQ ID NO: 3094711 - RNA, 19 nt, Artificial Sequence
  Description of Artificial Sequence: Synthetic oligonucleotide
gacagagaacgcaggguac

SEQ ID NO: 3094712 - RNA, 19 nt, Artificial Sequence
  Description of Artificial Sequence: Synthetic oligonucleotide
acaggaaagacagggucau

SEQ ID NO: 3094713 - RNA, 19 nt, Artificial Sequence
  Description of Artificial Sequence: Synthetic oligonucleotide
auguugagaaccaccucug

SEQ ID NO: 3094714 - RNA, 19 nt, Artificial Sequence
  Description of Artificial Sequence: Synthetic oligonucleotide
caguuuccaugacuucugc

SEQ ID NO: 3094715 - RNA, 19 nt, Artificial Sequence
  Description of Artificial Sequence: Synthetic oligonucleotide
cuggcaucucgacagagaa

SEQ ID NO: 3094716 - RNA, 19 nt, Artificial Sequence
  Description of Artificial Sequence: Synthetic oligonucleotide
cuuggaacaugcacggucu

SEQ ID NO: 3094717 - RNA, 19 nt, Artificial Sequence
  Description of Artificial Sequence: Synthetic oligonucleotide
ucauaucaguggcugccuu

SEQ ID NO: 3094718 - RNA, 19 nt, Artificial Sequence
  Description of Artificial Sequence: Synthetic oligonucleotide
caugugucuggcaucucga

SEQ ID NO: 3094719 - RNA, 19 nt, Artificial Sequence
  Description of Artificial Sequence: Synthetic oligonucleotide
uucuugaaccuuggaacau

SEQ ID NO: 3094720 - RNA, 19 nt, Artificial Sequence
  Description of Artificial Sequence: Synthetic oligonucleotide
caaugauaaacccuuugau

SEQ ID NO: 3094721 - RNA, 19 nt, Artificial Sequence
  Description of Artificial Sequence: Synthetic oligonucleotide
uggcaucucgacagagaac

SEQ ID NO: 3094722 - RNA, 19 nt, Artificial Sequence
  Description of Artificial Sequence: Synthetic oligonucleotide
agacagggucauaucagug

SEQ ID NO: 3094723 - RNA, 19 nt, Artificial Sequence
  Description of Artificial Sequence: Synthetic oligonucleotide
ggccagcuaaucuugcaug

SEQ ID NO: 3094724 - RNA, 19 nt, Artificial Sequence
  Description of Artificial Sequence: Synthetic oligonucleotide
gcacuugaugguaaguggc

SEQ ID NO: 3094725 - RNA, 19 nt, Artificial Sequence
  Description of Artificial Sequence: Synthetic oligonucleotide
ccuuggaacaugcacgguc

SEQ ID NO: 3094726 - RNA, 19 nt, Artificial Sequence
  Description of Artificial Sequence: Synthetic oligonucleotide
accaccucugauucuugaa

SEQ ID NO: 3094727 - RNA, 19 nt, Artificial Sequence
  Description of Artificial Sequence: Synthetic oligonucleotide
acccuuugaugaccaucuc

SEQ ID NO: 3094728 - RNA, 19 nt, Artificial Sequence
  Description of Artificial Sequence: Synthetic oligonucleotide
gaugguaaguggccagcua

SEQ ID NO: 3094729 - RNA, 19 nt, Artificial Sequence
  Description of Artificial Sequence: Synthetic oligonucleotide
aucaucaaacacacccagu

SEQ ID NO: 3094730 - RNA, 19 nt, Artificial Sequence
  Description of Artificial Sequence: Synthetic oligonucleotide
gaaggagcacuugauggua

SEQ ID NO: 3094731 - RNA, 19 nt, Artificial Sequence
  Description of Artificial Sequence: Synthetic oligonucleotide
acacacccaguuuguagau

SEQ ID NO: 3094732 - RNA, 19 nt, Artificial Sequence
  Description of Artificial Sequence: Synthetic oligonucleotide
aaggagcacuugaugguaa

SEQ ID NO: 3094733 - RNA, 19 nt, Artificial Sequence
  Description of Artificial Sequence: Synthetic oligonucleotide
guugagaaccaccucugau

SEQ ID NO: 3094734 - RNA, 19 nt, Artificial Sequence
  Description of Artificial Sequence: Synthetic oligonucleotide
cagagaacgcaggguacag

SEQ ID NO: 3094735 - RNA, 19 nt, Artificial Sequence
  Description of Artificial Sequence: Synthetic oligonucleotide
ugacuucugcaaugauaaa

SEQ ID NO: 3094736 - RNA, 19 nt, Artificial Sequence
  Description of Artificial Sequence: Synthetic oligonucleotide
caucucgacagagaacgca

SEQ ID NO: 3094737 - RNA, 19 nt, Artificial Sequence
  Description of Artificial Sequence: Synthetic oligonucleotide
ccaguuuccaugacuucug

SEQ ID NO: 3094738 - RNA, 19 nt, Artificial Sequence
  Description of Artificial Sequence: Synthetic oligonucleotide
gucaccaguuuccaugacu

SEQ ID NO: 3094739 - RNA, 19 nt, Artificial Sequence
  Description of Artificial Sequence: Synthetic oligonucleotide
cacugagaaccugauguca

SEQ ID NO: 3094740 - RNA, 19 nt, Artificial Sequence
  Description of Artificial Sequence: Synthetic oligonucleotide
uaaacccuuugaugaccau

SEQ ID NO: 3094741 - RNA, 19 nt, Artificial Sequence
  Description of Artificial Sequence: Synthetic oligonucleotide
guggcugccuugucaccag

SEQ ID NO: 3094742 - RNA, 19 nt, Artificial Sequence
  Description of Artificial Sequence: Synthetic oligonucleotide
ccaguuuguagauguagga

SEQ ID NO: 3094743 - RNA, 19 nt, Artificial Sequence
  Description of Artificial Sequence: Synthetic oligonucleotide
uaucaguggcugccuuguc

SEQ ID NO: 3094744 - RNA, 19 nt, Artificial Sequence
  Description of Artificial Sequence: Synthetic oligonucleotide
uuggaacaugcacggucuu

SEQ ID NO: 3094745 - RNA, 19 nt, Artificial Sequence
  Description of Artificial Sequence: Synthetic oligonucleotide
gucuggcaucucgacagag

SEQ ID NO: 3094746 - RNA, 19 nt, Artificial Sequence
  Description of Artificial Sequence: Synthetic oligonucleotide
gucagcagccauguugaga

SEQ ID NO: 3094747 - RNA, 19 nt, Artificial Sequence
  Description of Artificial Sequence: Synthetic oligonucleotide
gagggccagacuuuccacu

SEQ ID NO: 3094748 - RNA, 19 nt, Artificial Sequence
  Description of Artificial Sequence: Synthetic oligonucleotide
ggcagggugucuugaagga

SEQ ID NO: 3094749 - RNA, 19 nt, Artificial Sequence
  Description of Artificial Sequence: Synthetic oligonucleotide
ccagacuuuccacugagaa

SEQ ID NO: 3094750 - RNA, 19 nt, Artificial Sequence
  Description of Artificial Sequence: Synthetic oligonucleotide
cagcuaaucuugcaugugu

SEQ ID NO: 3094751 - RNA, 19 nt, Artificial Sequence
  Description of Artificial Sequence: Synthetic oligonucleotide
ggugucuugaaggagcacu

SEQ ID NO: 3094752 - RNA, 19 nt, Artificial Sequence
  Description of Artificial Sequence: Synthetic oligonucleotide
cugauucuugaaccuugga

SEQ ID NO: 3094753 - RNA, 19 nt, Artificial Sequence
  Description of Artificial Sequence: Synthetic oligonucleotide
gaugggcagggugucuuga

SEQ ID NO: 3094754 - RNA, 19 nt, Artificial Sequence
  Description of Artificial Sequence: Synthetic oligonucleotide
caccaguuuccaugacuuc

SEQ ID NO: 3094755 - RNA, 19 nt, Artificial Sequence
  Description of Artificial Sequence: Synthetic oligonucleotide
gaaccaccucugauucuug

SEQ ID NO: 3094756 - RNA, 19 nt, Artificial Sequence
  Description of Artificial Sequence: Synthetic oligonucleotide
guggccagcuaaucuugca

SEQ ID NO: 3094757 - RNA, 19 nt, Artificial Sequence
  Description of Artificial Sequence: Synthetic oligonucleotide
aucuugcaugugucuggca

SEQ ID NO: 3094758 - RNA, 19 nt, Artificial Sequence
  Description of Artificial Sequence: Synthetic oligonucleotide
agggugucuugaaggagca

SEQ ID NO: 3094759 - RNA, 19 nt, Artificial Sequence
  Description of Artificial Sequence: Synthetic oligonucleotide
ucaaagggaugggcagggu

SEQ ID NO: 3094760 - RNA, 19 nt, Artificial Sequence
  Description of Artificial Sequence: Synthetic oligonucleotide
gggucauaucaguggcugc

SEQ ID NO: 3094761 - RNA, 19 nt, Artificial Sequence
  Description of Artificial Sequence: Synthetic oligonucleotide
aggguacaggaaagacagg

SEQ ID NO: 3094762 - RNA, 19 nt, Artificial Sequence
  Description of Artificial Sequence: Synthetic oligonucleotide
augggcagggugucuugaa

SEQ ID NO: 3094763 - RNA, 19 nt, Artificial Sequence
  Description of Artificial Sequence: Synthetic oligonucleotide
cacacccaguuuguagaug

SEQ ID NO: 3094764 - RNA, 19 nt, Artificial Sequence
  Description of Artificial Sequence: Synthetic oligonucleotide
caguggcugccuugucacc

SEQ ID NO: 3094765 - RNA, 19 nt, Artificial Sequence
  Description of Artificial Sequence: Synthetic oligonucleotide
gguaaguggccagcuaauc

SEQ ID NO: 3094766 - RNA, 19 nt, Artificial Sequence
  Description of Artificial Sequence: Synthetic oligonucleotide
gaaccugaugucagucaaa

SEQ ID NO: 3094767 - RNA, 19 nt, Artificial Sequence
  Description of Artificial Sequence: Synthetic oligonucleotide
ccuuugaugaccaucucau

SEQ ID NO: 3094768 - RNA, 19 nt, Artificial Sequence
  Description of Artificial Sequence: Synthetic oligonucleotide
gcuaaucuugcaugugucu

SEQ ID NO: 3094769 - RNA, 19 nt, Artificial Sequence
  Description of Artificial Sequence: Synthetic oligonucleotide
auguaggagucagcagcca

SEQ ID NO: 3094770 - RNA, 19 nt, Artificial Sequence
  Description of Artificial Sequence: Synthetic oligonucleotide
ccacugagaaccugauguc

SEQ ID NO: 3094771 - RNA, 19 nt, Artificial Sequence
  Description of Artificial Sequence: Synthetic oligonucleotide
cccuuugaugaccaucuca

SEQ ID NO: 3094772 - RNA, 19 nt, Artificial Sequence
  Description of Artificial Sequence: Synthetic oligonucleotide
gcagggugucuugaaggag

SEQ ID NO: 3094773 - RNA, 19 nt, Artificial Sequence
  Description of Artificial Sequence: Synthetic oligonucleotide
agaacgcaggguacaggaa

SEQ ID NO: 3094774 - RNA, 19 nt, Artificial Sequence
  Description of Artificial Sequence: Synthetic oligonucleotide
acgcaggguacaggaaaga

SEQ ID NO: 3094775 - RNA, 19 nt, Artificial Sequence
  Description of Artificial Sequence: Synthetic oligonucleotide
ggaugggcagggugucuug

SEQ ID NO: 3094776 - RNA, 19 nt, Artificial Sequence
  Description of Artificial Sequence: Synthetic oligonucleotide
gccauguugagaaccaccu

SEQ ID NO: 3094777 - RNA, 19 nt, Artificial Sequence
  Description of Artificial Sequence: Synthetic oligonucleotide
cagccauguugagaaccac

SEQ ID NO: 3094778 - RNA, 19 nt, Artificial Sequence
  Description of Artificial Sequence: Synthetic oligonucleotide
caucaaacacacccaguuu

SEQ ID NO: 3094779 - RNA, 19 nt, Artificial Sequence
  Description of Artificial Sequence: Synthetic oligonucleotide
gccagcuaaucuugcaugu

SEQ ID NO: 3094780 - RNA, 19 nt, Artificial Sequence
  Description of Artificial Sequence: Synthetic oligonucleotide
caaacacacccaguuugua

SEQ ID NO: 3094781 - RNA, 19 nt, Artificial Sequence
  Description of Artificial Sequence: Synthetic oligonucleotide
gguacaggaaagacagggu

SEQ ID NO: 3094782 - RNA, 19 nt, Artificial Sequence
  Description of Artificial Sequence: Synthetic oligonucleotide
accuuggaacaugcacggu

SEQ ID NO: 3094783 - RNA, 19 nt, Artificial Sequence
  Description of Artificial Sequence: Synthetic oligonucleotide
ccagcuaaucuugcaugug

SEQ ID NO: 3094784 - RNA, 19 nt, Artificial Sequence
  Description of Artificial Sequence: Synthetic oligonucleotide
agggaugggcagggugucu

SEQ ID NO: 3094785 - RNA, 19 nt, Artificial Sequence
  Description of Artificial Sequence: Synthetic oligonucleotide
gacuuuccacugagaaccu

SEQ ID NO: 3094786 - RNA, 19 nt, Artificial Sequence
  Description of Artificial Sequence: Synthetic oligonucleotide
cagggucauaucaguggcu

SEQ ID NO: 3094787 - RNA, 19 nt, Artificial Sequence
  Description of Artificial Sequence: Synthetic oligonucleotide
ugcaugugucuggcaucuc

SEQ ID NO: 3094788 - RNA, 19 nt, Artificial Sequence
  Description of Artificial Sequence: Synthetic oligonucleotide
cgacagagaacgcagggua

SEQ ID NO: 3094789 - RNA, 19 nt, Artificial Sequence
  Description of Artificial Sequence: Synthetic oligonucleotide
aggagucagcagccauguu

SEQ ID NO: 3094790 - RNA, 19 nt, Artificial Sequence
  Description of Artificial Sequence: Synthetic oligonucleotide
gugucuugaaggagcacuu

SEQ ID NO: 3094791 - RNA, 19 nt, Artificial Sequence
  Description of Artificial Sequence: Synthetic oligonucleotide
gcaucucgacagagaacgc

SEQ ID NO: 3094792 - RNA, 19 nt, Artificial Sequence
  Description of Artificial Sequence: Synthetic oligonucleotide
cgcaggguacaggaaagac

SEQ ID NO: 3094793 - RNA, 19 nt, Artificial Sequence
  Description of Artificial Sequence: Synthetic oligonucleotide
gggccagacuuuccacuga

SEQ ID NO: 3094794 - RNA, 19 nt, Artificial Sequence
  Description of Artificial Sequence: Synthetic oligonucleotide
cacccaguuuguagaugua

SEQ ID NO: 3094795 - RNA, 19 nt, Artificial Sequence
  Description of Artificial Sequence: Synthetic oligonucleotide
ggagcacuugaugguaagu

SEQ ID NO: 3094796 - RNA, 19 nt, Artificial Sequence
  Description of Artificial Sequence: Synthetic oligonucleotide
cugcaaugauaaacccuuu

SEQ ID NO: 3094797 - RNA, 19 nt, Artificial Sequence
  Description of Artificial Sequence: Synthetic oligonucleotide
caggaaagacagggucaua

SEQ ID NO: 3094798 - RNA, 19 nt, Artificial Sequence
  Description of Artificial Sequence: Synthetic oligonucleotide
gggaugggcagggugucuu

SEQ ID NO: 3094799 - RNA, 19 nt, Artificial Sequence
  Description of Artificial Sequence: Synthetic oligonucleotide
ccuugucaccaguuuccau

SEQ ID NO: 3094800 - RNA, 19 nt, Artificial Sequence
  Description of Artificial Sequence: Synthetic oligonucleotide
ccucugauucuugaaccuu

SEQ ID NO: 3094801 - RNA, 19 nt, Artificial Sequence
  Description of Artificial Sequence: Synthetic oligonucleotide
ccaugacuucugcaaugau

SEQ ID NO: 3094802 - RNA, 19 nt, Artificial Sequence
  Description of Artificial Sequence: Synthetic oligonucleotide
ggcugccuugucaccaguu

SEQ ID NO: 3094803 - RNA, 19 nt, Artificial Sequence
  Description of Artificial Sequence: Synthetic oligonucleotide
aagauaaugucccucauag

SEQ ID NO: 3094804 - RNA, 19 nt, Artificial Sequence
  Description of Artificial Sequence: Synthetic oligonucleotide
gauaaugucccucauaggc

SEQ ID NO: 3094805 - RNA, 19 nt, Artificial Sequence
  Description of Artificial Sequence: Synthetic oligonucleotide
gagacagcaaaauaaagug

SEQ ID NO: 3094806 - RNA, 19 nt, Artificial Sequence
  Description of Artificial Sequence: Synthetic oligonucleotide
aauguggucagcaagcagg

SEQ ID NO: 3094807 - RNA, 19 nt, Artificial Sequence
  Description of Artificial Sequence: Synthetic oligonucleotide
agggcauugacaucaaacc

SEQ ID NO: 3094808 - RNA, 19 nt, Artificial Sequence
  Description of Artificial Sequence: Synthetic oligonucleotide
agcaaaauaaagugcaguc

SEQ ID NO: 3094809 - RNA, 19 nt, Artificial Sequence
  Description of Artificial Sequence: Synthetic oligonucleotide
uauuuuguccaucugcugc

SEQ ID NO: 3094810 - RNA, 19 nt, Artificial Sequence
  Description of Artificial Sequence: Synthetic oligonucleotide
aaacccguuaucaaugagc

SEQ ID NO: 3094811 - RNA, 19 nt, Artificial Sequence
  Description of Artificial Sequence: Synthetic oligonucleotide
aaugagcaguuccaggcac

SEQ ID NO: 3094812 - RNA, 19 nt, Artificial Sequence
  Description of Artificial Sequence: Synthetic oligonucleotide
uuucagagcaagauaaugu

SEQ ID NO: 3094813 - RNA, 19 nt, Artificial Sequence
  Description of Artificial Sequence: Synthetic oligonucleotide
ucaaugagcaguuccaggc

SEQ ID NO: 3094814 - RNA, 19 nt, Artificial Sequence
  Description of Artificial Sequence: Synthetic oligonucleotide
auggagauauuucagagca

SEQ ID NO: 3094815 - RNA, 19 nt, Artificial Sequence
  Description of Artificial Sequence: Synthetic oligonucleotide
auaaagugcagucuuucuc

SEQ ID NO: 3094816 - RNA, 19 nt, Artificial Sequence
  Description of Artificial Sequence: Synthetic oligonucleotide
uuggauguuacugggaugg

SEQ ID NO: 3094817 - RNA, 19 nt, Artificial Sequence
  Description of Artificial Sequence: Synthetic oligonucleotide
aaauaaagugcagucuuuc

SEQ ID NO: 3094818 - RNA, 19 nt, Artificial Sequence
  Description of Artificial Sequence: Synthetic oligonucleotide
guuaucaaugagcaguucc

SEQ ID NO: 3094819 - RNA, 19 nt, Artificial Sequence
  Description of Artificial Sequence: Synthetic oligonucleotide
uuaucaaugagcaguucca

SEQ ID NO: 3094820 - RNA, 19 nt, Artificial Sequence
  Description of Artificial Sequence: Synthetic oligonucleotide
cauguuuggauguuacugg

SEQ ID NO: 3094821 - RNA, 19 nt, Artificial Sequence
  Description of Artificial Sequence: Synthetic oligonucleotide
agugaacuggaguuaggcc

SEQ ID NO: 3094822 - RNA, 19 nt, Artificial Sequence
  Description of Artificial Sequence: Synthetic oligonucleotide
uuagagacagcaaaauaaa

SEQ ID NO: 3094823 - RNA, 19 nt, Artificial Sequence
  Description of Artificial Sequence: Synthetic oligonucleotide
aauaaagugcagucuuucu

SEQ ID NO: 3094824 - RNA, 19 nt, Artificial Sequence
  Description of Artificial Sequence: Synthetic oligonucleotide
ugcagucuuucucuggucg

SEQ ID NO: 3094825 - RNA, 19 nt, Artificial Sequence
  Description of Artificial Sequence: Synthetic oligonucleotide
uaaagugcagucuuucucu

SEQ ID NO: 3094826 - RNA, 19 nt, Artificial Sequence
  Description of Artificial Sequence: Synthetic oligonucleotide
cagagcaagauaauguccc

SEQ ID NO: 3094827 - RNA, 19 nt, Artificial Sequence
  Description of Artificial Sequence: Synthetic oligonucleotide
ucagagcaagauaaugucc

SEQ ID NO: 3094828 - RNA, 19 nt, Artificial Sequence
  Description of Artificial Sequence: Synthetic oligonucleotide
ugugcaguggaugucauug

SEQ ID NO: 3094829 - RNA, 19 nt, Artificial Sequence
  Description of Artificial Sequence: Synthetic oligonucleotide
ugaguuauuuuguccaucu

SEQ ID NO: 3094830 - RNA, 19 nt, Artificial Sequence
  Description of Artificial Sequence: Synthetic oligonucleotide
guggaugucauuguuagag

SEQ ID NO: 3094831 - RNA, 19 nt, Artificial Sequence
  Description of Artificial Sequence: Synthetic oligonucleotide
uagagacagcaaaauaaag

SEQ ID NO: 3094832 - RNA, 19 nt, Artificial Sequence
  Description of Artificial Sequence: Synthetic oligonucleotide
gauggagauauuucagagc

SEQ ID NO: 3094833 - RNA, 19 nt, Artificial Sequence
  Description of Artificial Sequence: Synthetic oligonucleotide
agcucgguguauuggaagc

SEQ ID NO: 3094834 - RNA, 19 nt, Artificial Sequence
  Description of Artificial Sequence: Synthetic oligonucleotide
augucauuguuagagacag

SEQ ID NO: 3094835 - RNA, 19 nt, Artificial Sequence
  Description of Artificial Sequence: Synthetic oligonucleotide
gacagcaaaauaaagugca

SEQ ID NO: 3094836 - RNA, 19 nt, Artificial Sequence
  Description of Artificial Sequence: Synthetic oligonucleotide
agacagcaaaauaaagugc

SEQ ID NO: 3094837 - RNA, 19 nt, Artificial Sequence
  Description of Artificial Sequence: Synthetic oligonucleotide
auauuucagagcaagauaa

SEQ ID NO: 3094838 - RNA, 19 nt, Artificial Sequence
  Description of Artificial Sequence: Synthetic oligonucleotide
guuagagacagcaaaauaa

SEQ ID NO: 3094839 - RNA, 19 nt, Artificial Sequence
  Description of Artificial Sequence: Synthetic oligonucleotide
auguuuggauguuacuggg

SEQ ID NO: 3094840 - RNA, 19 nt, Artificial Sequence
  Description of Artificial Sequence: Synthetic oligonucleotide
uucagagcaagauaauguc

SEQ ID NO: 3094841 - RNA, 19 nt, Artificial Sequence
  Description of Artificial Sequence: Synthetic oligonucleotide
uugacaucaaacccguuau

SEQ ID NO: 3094842 - RNA, 19 nt, Artificial Sequence
  Description of Artificial Sequence: Synthetic oligonucleotide
agagacagcaaaauaaagu

SEQ ID NO: 3094843 - RNA, 19 nt, Artificial Sequence
  Description of Artificial Sequence: Synthetic oligonucleotide
ugggauggagauauuucag

SEQ ID NO: 3094844 - RNA, 19 nt, Artificial Sequence
  Description of Artificial Sequence: Synthetic oligonucleotide
uguauuggaagcugcucug

SEQ ID NO: 3094845 - RNA, 19 nt, Artificial Sequence
  Description of Artificial Sequence: Synthetic oligonucleotide
agcaguuccaggcacugag

SEQ ID NO: 3094846 - RNA, 19 nt, Artificial Sequence
  Description of Artificial Sequence: Synthetic oligonucleotide
gugaacuggaguuaggcca

SEQ ID NO: 3094847 - RNA, 19 nt, Artificial Sequence
  Description of Artificial Sequence: Synthetic oligonucleotide
caguggaugucauuguuag

SEQ ID NO: 3094848 - RNA, 19 nt, Artificial Sequence
  Description of Artificial Sequence: Synthetic oligonucleotide
gauauuucagagcaagaua

SEQ ID NO: 3094849 - RNA, 19 nt, Artificial Sequence
  Description of Artificial Sequence: Synthetic oligonucleotide
uguuagagacagcaaaaua

SEQ ID NO: 3094850 - RNA, 19 nt, Artificial Sequence
  Description of Artificial Sequence: Synthetic oligonucleotide
auagcucugggaaaugugg

SEQ ID NO: 3094851 - RNA, 19 nt, Artificial Sequence
  Description of Artificial Sequence: Synthetic oligonucleotide
auuucagagcaagauaaug

SEQ ID NO: 3094852 - RNA, 19 nt, Artificial Sequence
  Description of Artificial Sequence: Synthetic oligonucleotide
aagcagggcauugacauca

SEQ ID NO: 3094853 - RNA, 19 nt, Artificial Sequence
  Description of Artificial Sequence: Synthetic oligonucleotide
aaagugcagucuuucucug

SEQ ID NO: 3094854 - RNA, 19 nt, Artificial Sequence
  Description of Artificial Sequence: Synthetic oligonucleotide
aacccguuaucaaugagca

SEQ ID NO: 3094855 - RNA, 19 nt, Artificial Sequence
  Description of Artificial Sequence: Synthetic oligonucleotide
uucucuggucgucauagcu

SEQ ID NO: 3094856 - RNA, 19 nt, Artificial Sequence
  Description of Artificial Sequence: Synthetic oligonucleotide
cuuucucuggucgucauag

SEQ ID NO: 3094857 - RNA, 19 nt, Artificial Sequence
  Description of Artificial Sequence: Synthetic oligonucleotide
gucauuguuagagacagca

SEQ ID NO: 3094858 - RNA, 19 nt, Artificial Sequence
  Description of Artificial Sequence: Synthetic oligonucleotide
cagggcauugacaucaaac

SEQ ID NO: 3094859 - RNA, 19 nt, Artificial Sequence
  Description of Artificial Sequence: Synthetic oligonucleotide
acuucugugcaguggaugu

SEQ ID NO: 3094860 - RNA, 19 nt, Artificial Sequence
  Description of Artificial Sequence: Synthetic oligonucleotide
agauaaugucccucauagg

SEQ ID NO: 3094861 - RNA, 19 nt, Artificial Sequence
  Description of Artificial Sequence: Synthetic oligonucleotide
agauauuucagagcaagau

SEQ ID NO: 3094862 - RNA, 19 nt, Artificial Sequence
  Description of Artificial Sequence: Synthetic oligonucleotide
ugaacuggaguuaggccac

SEQ ID NO: 3094863 - RNA, 19 nt, Artificial Sequence
  Description of Artificial Sequence: Synthetic oligonucleotide
uuauuuuguccaucugcug

SEQ ID NO: 3094864 - RNA, 19 nt, Artificial Sequence
  Description of Artificial Sequence: Synthetic oligonucleotide
ggcauugacaucaaacccg

SEQ ID NO: 3094865 - RNA, 19 nt, Artificial Sequence
  Description of Artificial Sequence: Synthetic oligonucleotide
gacaucaaacccguuauca

SEQ ID NO: 3094866 - RNA, 19 nt, Artificial Sequence
  Description of Artificial Sequence: Synthetic oligonucleotide
ggauggagauauuucagag

SEQ ID NO: 3094867 - RNA, 19 nt, Artificial Sequence
  Description of Artificial Sequence: Synthetic oligonucleotide
aaggacuucugugcagugg

SEQ ID NO: 3094868 - RNA, 19 nt, Artificial Sequence
  Description of Artificial Sequence: Synthetic oligonucleotide
gauguuacugggauggaga

SEQ ID NO: 3094869 - RNA, 19 nt, Artificial Sequence
  Description of Artificial Sequence: Synthetic oligonucleotide
ggagauauuucagagcaag

SEQ ID NO: 3094870 - RNA, 19 nt, Artificial Sequence
  Description of Artificial Sequence: Synthetic oligonucleotide
uuuggauguuacugggaug

SEQ ID NO: 3094871 - RNA, 19 nt, Artificial Sequence
  Description of Artificial Sequence: Synthetic oligonucleotide
uaucaaugagcaguuccag

SEQ ID NO: 3094872 - RNA, 19 nt, Artificial Sequence
  Description of Artificial Sequence: Synthetic oligonucleotide
cauuguuagagacagcaaa

SEQ ID NO: 3094873 - RNA, 19 nt, Artificial Sequence
  Description of Artificial Sequence: Synthetic oligonucleotide
caggcacugaguuauuuug

SEQ ID NO: 3094874 - RNA, 19 nt, Artificial Sequence
  Description of Artificial Sequence: Synthetic oligonucleotide
ugagugaacuggaguuagg

SEQ ID NO: 3094875 - RNA, 19 nt, Artificial Sequence
  Description of Artificial Sequence: Synthetic oligonucleotide
agugcagucuuucucuggu

SEQ ID NO: 3094876 - RNA, 19 nt, Artificial Sequence
  Description of Artificial Sequence: Synthetic oligonucleotide
ugcugagugaacuggaguu

SEQ ID NO: 3094877 - RNA, 19 nt, Artificial Sequence
  Description of Artificial Sequence: Synthetic oligonucleotide
gagugaacuggaguuaggc

SEQ ID NO: 3094878 - RNA, 19 nt, Artificial Sequence
  Description of Artificial Sequence: Synthetic oligonucleotide
ucaaacccguuaucaauga

SEQ ID NO: 3094879 - RNA, 19 nt, Artificial Sequence
  Description of Artificial Sequence: Synthetic oligonucleotide
uguuuggauguuacuggga

SEQ ID NO: 3094880 - RNA, 19 nt, Artificial Sequence
  Description of Artificial Sequence: Synthetic oligonucleotide
cacugaguuauuuugucca

SEQ ID NO: 3094881 - RNA, 19 nt, Artificial Sequence
  Description of Artificial Sequence: Synthetic oligonucleotide
agcucugggaaaugugguc

SEQ ID NO: 3094882 - RNA, 19 nt, Artificial Sequence
  Description of Artificial Sequence: Synthetic oligonucleotide
aggacuucugugcagugga

SEQ ID NO: 3094883 - RNA, 19 nt, Artificial Sequence
  Description of Artificial Sequence: Synthetic oligonucleotide
uugcauguuuggauguuac

SEQ ID NO: 3094884 - RNA, 19 nt, Artificial Sequence
  Description of Artificial Sequence: Synthetic oligonucleotide
ucucuggucgucauagcuc

SEQ ID NO: 3094885 - RNA, 19 nt, Artificial Sequence
  Description of Artificial Sequence: Synthetic oligonucleotide
ucgguguauuggaagcugc

SEQ ID NO: 3094886 - RNA, 19 nt, Artificial Sequence
  Description of Artificial Sequence: Synthetic oligonucleotide
uauuucagagcaagauaau

SEQ ID NO: 3094887 - RNA, 19 nt, Artificial Sequence
  Description of Artificial Sequence: Synthetic oligonucleotide
gucgucauagcucugggaa

SEQ ID NO: 3094888 - RNA, 19 nt, Artificial Sequence
  Description of Artificial Sequence: Synthetic oligonucleotide
cauagcucugggaaaugug

SEQ ID NO: 3094889 - RNA, 19 nt, Artificial Sequence
  Description of Artificial Sequence: Synthetic oligonucleotide
uuguccaucugcugcugag

SEQ ID NO: 3094890 - RNA, 19 nt, Artificial Sequence
  Description of Artificial Sequence: Synthetic oligonucleotide
agccagaaggacuucugug

SEQ ID NO: 3094891 - RNA, 19 nt, Artificial Sequence
  Description of Artificial Sequence: Synthetic oligonucleotide
ucccucauaggcagcucgg

SEQ ID NO: 3094892 - RNA, 19 nt, Artificial Sequence
  Description of Artificial Sequence: Synthetic oligonucleotide
uggucgucauagcucuggg

SEQ ID NO: 3094893 - RNA, 19 nt, Artificial Sequence
  Description of Artificial Sequence: Synthetic oligonucleotide
gaugucauuguuagagaca

SEQ ID NO: 3094894 - RNA, 19 nt, Artificial Sequence
  Description of Artificial Sequence: Synthetic oligonucleotide
auuguuagagacagcaaaa

SEQ ID NO: 3094895 - RNA, 19 nt, Artificial Sequence
  Description of Artificial Sequence: Synthetic oligonucleotide
guggucagcaagcagggca

SEQ ID NO: 3094896 - RNA, 19 nt, Artificial Sequence
  Description of Artificial Sequence: Synthetic oligonucleotide
ggaugucauuguuagagac

SEQ ID NO: 3094897 - RNA, 19 nt, Artificial Sequence
  Description of Artificial Sequence: Synthetic oligonucleotide
aaugucccucauaggcagc

SEQ ID NO: 3094898 - RNA, 19 nt, Artificial Sequence
  Description of Artificial Sequence: Synthetic oligonucleotide
auaaugucccucauaggca

SEQ ID NO: 3094899 - RNA, 19 nt, Artificial Sequence
  Description of Artificial Sequence: Synthetic oligonucleotide
cugggauggagauauuuca

SEQ ID NO: 3094900 - RNA, 19 nt, Artificial Sequence
  Description of Artificial Sequence: Synthetic oligonucleotide
gucccucauaggcagcucg

SEQ ID NO: 3094901 - RNA, 19 nt, Artificial Sequence
  Description of Artificial Sequence: Synthetic oligonucleotide
uucugugcaguggauguca

SEQ ID NO: 3094902 - RNA, 19 nt, Artificial Sequence
  Description of Artificial Sequence: Synthetic oligonucleotide
uuguuagagacagcaaaau

SEQ ID NO: 3094903 - RNA, 19 nt, Artificial Sequence
  Description of Artificial Sequence: Synthetic oligonucleotide
gaguuauuuuguccaucug

SEQ ID NO: 3094904 - RNA, 19 nt, Artificial Sequence
  Description of Artificial Sequence: Synthetic oligonucleotide
uagcucugggaaauguggu

SEQ ID NO: 3094905 - RNA, 19 nt, Artificial Sequence
  Description of Artificial Sequence: Synthetic oligonucleotide
gcauguuuggauguuacug

SEQ ID NO: 3094906 - RNA, 19 nt, Artificial Sequence
  Description of Artificial Sequence: Synthetic oligonucleotide
guuauuuuguccaucugcu

SEQ ID NO: 3094907 - RNA, 19 nt, Artificial Sequence
  Description of Artificial Sequence: Synthetic oligonucleotide
uuuuccggauugcauguuu

SEQ ID NO: 3094908 - RNA, 19 nt, Artificial Sequence
  Description of Artificial Sequence: Synthetic oligonucleotide
uuuguccaucugcugcuga

SEQ ID NO: 3094909 - RNA, 19 nt, Artificial Sequence
  Description of Artificial Sequence: Synthetic oligonucleotide
agagcaagauaaugucccu

SEQ ID NO: 3094910 - RNA, 19 nt, Artificial Sequence
  Description of Artificial Sequence: Synthetic oligonucleotide
gggcauugacaucaaaccc

SEQ ID NO: 3094911 - RNA, 19 nt, Artificial Sequence
  Description of Artificial Sequence: Synthetic oligonucleotide
cugagugaacuggaguuag

SEQ ID NO: 3094912 - RNA, 19 nt, Artificial Sequence
  Description of Artificial Sequence: Synthetic oligonucleotide
ugcauguuuggauguuacu

SEQ ID NO: 3094913 - RNA, 19 nt, Artificial Sequence
  Description of Artificial Sequence: Synthetic oligonucleotide
ucauagcucugggaaaugu

SEQ ID NO: 3094914 - RNA, 19 nt, Artificial Sequence
  Description of Artificial Sequence: Synthetic oligonucleotide
auguuacugggauggagau

SEQ ID NO: 3094915 - RNA, 19 nt, Artificial Sequence
  Description of Artificial Sequence: Synthetic oligonucleotide
agaaggacuucugugcagu

SEQ ID NO: 3094916 - RNA, 19 nt, Artificial Sequence
  Description of Artificial Sequence: Synthetic oligonucleotide
acagcaaaauaaagugcag

SEQ ID NO: 3094917 - RNA, 19 nt, Artificial Sequence
  Description of Artificial Sequence: Synthetic oligonucleotide
ugcugcugagugaacugga

SEQ ID NO: 3094918 - RNA, 19 nt, Artificial Sequence
  Description of Artificial Sequence: Synthetic oligonucleotide
caaaauaaagugcagucuu

SEQ ID NO: 3094919 - RNA, 19 nt, Artificial Sequence
  Description of Artificial Sequence: Synthetic oligonucleotide
ucauaggcagcucggugua

SEQ ID NO: 3094920 - RNA, 19 nt, Artificial Sequence
  Description of Artificial Sequence: Synthetic oligonucleotide
uggucagcaagcagggcau

SEQ ID NO: 3094921 - RNA, 19 nt, Artificial Sequence
  Description of Artificial Sequence: Synthetic oligonucleotide
ugacaucaaacccguuauc

SEQ ID NO: 3094922 - RNA, 19 nt, Artificial Sequence
  Description of Artificial Sequence: Synthetic oligonucleotide
gacuucugugcaguggaug

SEQ ID NO: 3094923 - RNA, 19 nt, Artificial Sequence
  Description of Artificial Sequence: Synthetic oligonucleotide
gaaauguggucagcaagca

SEQ ID NO: 3094924 - RNA, 19 nt, Artificial Sequence
  Description of Artificial Sequence: Synthetic oligonucleotide
acugaguuauuuuguccau

SEQ ID NO: 3094925 - RNA, 19 nt, Artificial Sequence
  Description of Artificial Sequence: Synthetic oligonucleotide
uauuggaagcugcucuguu

SEQ ID NO: 3094926 - RNA, 19 nt, Artificial Sequence
  Description of Artificial Sequence: Synthetic oligonucleotide
ugucauuguuagagacagc

SEQ ID NO: 3094927 - RNA, 19 nt, Artificial Sequence
  Description of Artificial Sequence: Synthetic oligonucleotide
ugcaguggaugucauuguu

SEQ ID NO: 3094928 - RNA, 19 nt, Artificial Sequence
  Description of Artificial Sequence: Synthetic oligonucleotide
gaaggacuucugugcagug

SEQ ID NO: 3094929 - RNA, 19 nt, Artificial Sequence
  Description of Artificial Sequence: Synthetic oligonucleotide
ugggaaauguggucagcaa

SEQ ID NO: 3094930 - RNA, 19 nt, Artificial Sequence
  Description of Artificial Sequence: Synthetic oligonucleotide
caaacccguuaucaaugag

SEQ ID NO: 3094931 - RNA, 19 nt, Artificial Sequence
  Description of Artificial Sequence: Synthetic oligonucleotide
cuggucgucauagcucugg

SEQ ID NO: 3094932 - RNA, 19 nt, Artificial Sequence
  Description of Artificial Sequence: Synthetic oligonucleotide
guguauuggaagcugcucu

SEQ ID NO: 3094933 - RNA, 19 nt, Artificial Sequence
  Description of Artificial Sequence: Synthetic oligonucleotide
ugagcaguuccaggcacug

SEQ ID NO: 3094934 - RNA, 19 nt, Artificial Sequence
  Description of Artificial Sequence: Synthetic oligonucleotide
uuucucuggucgucauagc

SEQ ID NO: 3094935 - RNA, 19 nt, Artificial Sequence
  Description of Artificial Sequence: Synthetic oligonucleotide
ucgucauagcucugggaaa

SEQ ID NO: 3094936 - RNA, 19 nt, Artificial Sequence
  Description of Artificial Sequence: Synthetic oligonucleotide
uccaucugcugcugaguga

SEQ ID NO: 3094937 - RNA, 19 nt, Artificial Sequence
  Description of Artificial Sequence: Synthetic oligonucleotide
uccggauugcauguuugga

SEQ ID NO: 3094938 - RNA, 19 nt, Artificial Sequence
  Description of Artificial Sequence: Synthetic oligonucleotide
guuuggauguuacugggau

SEQ ID NO: 3094939 - RNA, 19 nt, Artificial Sequence
  Description of Artificial Sequence: Synthetic oligonucleotide
uggagauauuucagagcaa

SEQ ID NO: 3094940 - RNA, 19 nt, Artificial Sequence
  Description of Artificial Sequence: Synthetic oligonucleotide
cagcucgguguauuggaag

SEQ ID NO: 3094941 - RNA, 19 nt, Artificial Sequence
  Description of Artificial Sequence: Synthetic oligonucleotide
gcacugaguuauuuugucc

SEQ ID NO: 3094942 - RNA, 19 nt, Artificial Sequence
  Description of Artificial Sequence: Synthetic oligonucleotide
uaggcagcucgguguauug

SEQ ID NO: 3094943 - RNA, 19 nt, Artificial Sequence
  Description of Artificial Sequence: Synthetic oligonucleotide
aguggaugucauuguuaga

SEQ ID NO: 3094944 - RNA, 19 nt, Artificial Sequence
  Description of Artificial Sequence: Synthetic oligonucleotide
gggauggagauauuucaga

SEQ ID NO: 3094945 - RNA, 19 nt, Artificial Sequence
  Description of Artificial Sequence: Synthetic oligonucleotide
ucugggaaauguggucagc

SEQ ID NO: 3094946 - RNA, 19 nt, Artificial Sequence
  Description of Artificial Sequence: Synthetic oligonucleotide
gagcaagauaaugucccuc

SEQ ID NO: 3094947 - RNA, 19 nt, Artificial Sequence
  Description of Artificial Sequence: Synthetic oligonucleotide
ucuuucucuggucgucaua

SEQ ID NO: 3094948 - RNA, 19 nt, Artificial Sequence
  Description of Artificial Sequence: Synthetic oligonucleotide
cucauaggcagcucggugu

SEQ ID NO: 3094949 - RNA, 19 nt, Artificial Sequence
  Description of Artificial Sequence: Synthetic oligonucleotide
cugaguuauuuuguccauc

SEQ ID NO: 3094950 - RNA, 19 nt, Artificial Sequence
  Description of Artificial Sequence: Synthetic oligonucleotide
caaugagcaguuccaggca

SEQ ID NO: 3094951 - RNA, 19 nt, Artificial Sequence
  Description of Artificial Sequence: Synthetic oligonucleotide
ggcacugaguuauuuuguc

SEQ ID NO: 3094952 - RNA, 19 nt, Artificial Sequence
  Description of Artificial Sequence: Synthetic oligonucleotide
uguccaucugcugcugagu

SEQ ID NO: 3094953 - RNA, 19 nt, Artificial Sequence
  Description of Artificial Sequence: Synthetic oligonucleotide
cucgguguauuggaagcug

SEQ ID NO: 3094954 - RNA, 19 nt, Artificial Sequence
  Description of Artificial Sequence: Synthetic oligonucleotide
ucugugcaguggaugucau

SEQ ID NO: 3094955 - RNA, 19 nt, Artificial Sequence
  Description of Artificial Sequence: Synthetic oligonucleotide
ugcagccagaaggacuucu

SEQ ID NO: 3094956 - RNA, 19 nt, Artificial Sequence
  Description of Artificial Sequence: Synthetic oligonucleotide
acccguuaucaaugagcag

SEQ ID NO: 3094957 - RNA, 19 nt, Artificial Sequence
  Description of Artificial Sequence: Synthetic oligonucleotide
caagauaaugucccucaua

SEQ ID NO: 3094958 - RNA, 19 nt, Artificial Sequence
  Description of Artificial Sequence: Synthetic oligonucleotide
agucuuucucuggucguca

SEQ ID NO: 3094959 - RNA, 19 nt, Artificial Sequence
  Description of Artificial Sequence: Synthetic oligonucleotide
cagcaagcagggcauugac

SEQ ID NO: 3094960 - RNA, 19 nt, Artificial Sequence
  Description of Artificial Sequence: Synthetic oligonucleotide
auugcauguuuggauguua

SEQ ID NO: 3094961 - RNA, 19 nt, Artificial Sequence
  Description of Artificial Sequence: Synthetic oligonucleotide
gcaagcagggcauugacau

SEQ ID NO: 3094962 - RNA, 19 nt, Artificial Sequence
  Description of Artificial Sequence: Synthetic oligonucleotide
cugggaaauguggucagca

SEQ ID NO: 3094963 - RNA, 19 nt, Artificial Sequence
  Description of Artificial Sequence: Synthetic oligonucleotide
aggcagcucgguguauugg

SEQ ID NO: 3094964 - RNA, 19 nt, Artificial Sequence
  Description of Artificial Sequence: Synthetic oligonucleotide
ucuggucgucauagcucug

SEQ ID NO: 3094965 - RNA, 19 nt, Artificial Sequence
  Description of Artificial Sequence: Synthetic oligonucleotide
cucuggucgucauagcucu

SEQ ID NO: 3094966 - RNA, 19 nt, Artificial Sequence
  Description of Artificial Sequence: Synthetic oligonucleotide
uguuacugggauggagaua

SEQ ID NO: 3094967 - RNA, 19 nt, Artificial Sequence
  Description of Artificial Sequence: Synthetic oligonucleotide
guuccaggcacugaguuau

SEQ ID NO: 3094968 - RNA, 19 nt, Artificial Sequence
  Description of Artificial Sequence: Synthetic oligonucleotide
augucccucauaggcagcu

SEQ ID NO: 3094969 - RNA, 19 nt, Artificial Sequence
  Description of Artificial Sequence: Synthetic oligonucleotide
gucagcaagcagggcauug

SEQ ID NO: 3094970 - RNA, 19 nt, Artificial Sequence
  Description of Artificial Sequence: Synthetic oligonucleotide
cggauugcauguuuggaug

SEQ ID NO: 3094971 - RNA, 19 nt, Artificial Sequence
  Description of Artificial Sequence: Synthetic oligonucleotide
aggcacugaguuauuuugu

SEQ ID NO: 3094972 - RNA, 19 nt, Artificial Sequence
  Description of Artificial Sequence: Synthetic oligonucleotide
uguggucagcaagcagggc

SEQ ID NO: 3094973 - RNA, 19 nt, Artificial Sequence
  Description of Artificial Sequence: Synthetic oligonucleotide
accugcagccagaaggacu

SEQ ID NO: 3094974 - RNA, 19 nt, Artificial Sequence
  Description of Artificial Sequence: Synthetic oligonucleotide
agcaagcagggcauugaca

SEQ ID NO: 3094975 - RNA, 19 nt, Artificial Sequence
  Description of Artificial Sequence: Synthetic oligonucleotide
ggcagcucgguguauugga

SEQ ID NO: 3094976 - RNA, 19 nt, Artificial Sequence
  Description of Artificial Sequence: Synthetic oligonucleotide
gguguauuggaagcugcuc

SEQ ID NO: 3094977 - RNA, 19 nt, Artificial Sequence
  Description of Artificial Sequence: Synthetic oligonucleotide
auaggcagcucgguguauu

SEQ ID NO: 3094978 - RNA, 19 nt, Artificial Sequence
  Description of Artificial Sequence: Synthetic oligonucleotide
cagucuuucucuggucguc

SEQ ID NO: 3094979 - RNA, 19 nt, Artificial Sequence
  Description of Artificial Sequence: Synthetic oligonucleotide
augagcaguuccaggcacu

SEQ ID NO: 3094980 - RNA, 19 nt, Artificial Sequence
  Description of Artificial Sequence: Synthetic oligonucleotide
uccaggcacugaguuauuu

SEQ ID NO: 3094981 - RNA, 19 nt, Artificial Sequence
  Description of Artificial Sequence: Synthetic oligonucleotide
gcugcugagugaacuggag

SEQ ID NO: 3094982 - RNA, 19 nt, Artificial Sequence
  Description of Artificial Sequence: Synthetic oligonucleotide
aacuggaguuaggccacuu

SEQ ID NO: 3094983 - RNA, 19 nt, Artificial Sequence
  Description of Artificial Sequence: Synthetic oligonucleotide
cccguuaucaaugagcagu

SEQ ID NO: 3094984 - RNA, 19 nt, Artificial Sequence
  Description of Artificial Sequence: Synthetic oligonucleotide
gaagcugcucuguucuguu

SEQ ID NO: 3094985 - RNA, 19 nt, Artificial Sequence
  Description of Artificial Sequence: Synthetic oligonucleotide
ggauugcauguuuggaugu

SEQ ID NO: 3094986 - RNA, 19 nt, Artificial Sequence
  Description of Artificial Sequence: Synthetic oligonucleotide
ccucauaggcagcucggug

SEQ ID NO: 3094987 - RNA, 19 nt, Artificial Sequence
  Description of Artificial Sequence: Synthetic oligonucleotide
gugcagucuuucucugguc

SEQ ID NO: 3094988 - RNA, 19 nt, Artificial Sequence
  Description of Artificial Sequence: Synthetic oligonucleotide
cuggaguuaggccacuuuu

SEQ ID NO: 3094989 - RNA, 19 nt, Artificial Sequence
  Description of Artificial Sequence: Synthetic oligonucleotide
ggucgucauagcucuggga

SEQ ID NO: 3094990 - RNA, 19 nt, Artificial Sequence
  Description of Artificial Sequence: Synthetic oligonucleotide
guauuggaagcugcucugu

SEQ ID NO: 3094991 - RNA, 19 nt, Artificial Sequence
  Description of Artificial Sequence: Synthetic oligonucleotide
gcagccagaaggacuucug

SEQ ID NO: 3094992 - RNA, 19 nt, Artificial Sequence
  Description of Artificial Sequence: Synthetic oligonucleotide
gauugcauguuuggauguu

SEQ ID NO: 3094993 - RNA, 19 nt, Artificial Sequence
  Description of Artificial Sequence: Synthetic oligonucleotide
ugucccucauaggcagcuc

SEQ ID NO: 3094994 - RNA, 19 nt, Artificial Sequence
  Description of Artificial Sequence: Synthetic oligonucleotide
gugcaguggaugucauugu

SEQ ID NO: 3094995 - RNA, 19 nt, Artificial Sequence
  Description of Artificial Sequence: Synthetic oligonucleotide
gcauugacaucaaacccgu

SEQ ID NO: 3094996 - RNA, 19 nt, Artificial Sequence
  Description of Artificial Sequence: Synthetic oligonucleotide
uuccaggcacugaguuauu

SEQ ID NO: 3094997 - RNA, 19 nt, Artificial Sequence
  Description of Artificial Sequence: Synthetic oligonucleotide
gagcaguuccaggcacuga

SEQ ID NO: 3094998 - RNA, 19 nt, Artificial Sequence
  Description of Artificial Sequence: Synthetic oligonucleotide
ccaucugcugcugagugaa

SEQ ID NO: 3094999 - RNA, 19 nt, Artificial Sequence
  Description of Artificial Sequence: Synthetic oligonucleotide
caguuccaggcacugaguu

SEQ ID NO: 3095000 - RNA, 19 nt, Artificial Sequence
  Description of Artificial Sequence: Synthetic oligonucleotide
cagccagaaggacuucugu

SEQ ID NO: 3095001 - RNA, 19 nt, Artificial Sequence
  Description of Artificial Sequence: Synthetic oligonucleotide
gcaguggaugucauuguua

SEQ ID NO: 3095002 - RNA, 19 nt, Artificial Sequence
  Description of Artificial Sequence: Synthetic oligonucleotide
gcugagugaacuggaguua

SEQ ID NO: 3095003 - RNA, 19 nt, Artificial Sequence
  Description of Artificial Sequence: Synthetic oligonucleotide
gcagucuuucucuggucgu

SEQ ID NO: 3095004 - RNA, 19 nt, Artificial Sequence
  Description of Artificial Sequence: Synthetic oligonucleotide
gucuuucucuggucgucau

SEQ ID NO: 3095005 - RNA, 19 nt, Artificial Sequence
  Description of Artificial Sequence: Synthetic oligonucleotide
ccugcagccagaaggacuu

SEQ ID NO: 3095006 - RNA, 19 nt, Artificial Sequence
  Description of Artificial Sequence: Synthetic oligonucleotide
gcaagauaaugucccucau

SEQ ID NO: 3095007 - RNA, 19 nt, Artificial Sequence
  Description of Artificial Sequence: Synthetic oligonucleotide
ccggauugcauguuuggau

SEQ ID NO: 3095008 - RNA, 19 nt, Artificial Sequence
  Description of Artificial Sequence: Synthetic oligonucleotide
agcagggcauugacaucaa

SEQ ID NO: 3095009 - RNA, 19 nt, Artificial Sequence
  Description of Artificial Sequence: Synthetic oligonucleotide
gaacuggaguuaggccacu

SEQ ID NO: 3095010 - RNA, 19 nt, Artificial Sequence
  Description of Artificial Sequence: Synthetic oligonucleotide
gcagcucgguguauuggaa

SEQ ID NO: 3095011 - RNA, 19 nt, Artificial Sequence
  Description of Artificial Sequence: Synthetic oligonucleotide
cugcagccagaaggacuuc

SEQ ID NO: 3095012 - RNA, 19 nt, Artificial Sequence
  Description of Artificial Sequence: Synthetic oligonucleotide
cguuaucaaugagcaguuc

SEQ ID NO: 3095013 - RNA, 19 nt, Artificial Sequence
  Description of Artificial Sequence: Synthetic oligonucleotide
ccguuaucaaugagcaguu

SEQ ID NO: 3095014 - RNA, 19 nt, Artificial Sequence
  Description of Artificial Sequence: Synthetic oligonucleotide
gcucgguguauuggaagcu

SEQ ID NO: 3095015 - RNA, 19 nt, Artificial Sequence
  Description of Artificial Sequence: Synthetic oligonucleotide
cauugacaucaaacccguu

SEQ ID NO: 3095016 - RNA, 19 nt, Artificial Sequence
  Description of Artificial Sequence: Synthetic oligonucleotide
cugugcaguggaugucauu

SEQ ID NO: 3095017 - RNA, 19 nt, Artificial Sequence
  Description of Artificial Sequence: Synthetic oligonucleotide
ccaggcacugaguuauuuu

SEQ ID NO: 3095018 - RNA, 19 nt, Artificial Sequence
  Description of Artificial Sequence: Synthetic oligonucleotide
gcaguuccaggcacugagu

SEQ ID NO: 3095019 - RNA, 19 nt, Artificial Sequence
  Description of Artificial Sequence: Synthetic oligonucleotide
cauaggcagcucgguguau

SEQ ID NO: 3095020 - RNA, 19 nt, Artificial Sequence
  Description of Artificial Sequence: Synthetic oligonucleotide
cgucauagcucugggaaau

SEQ ID NO: 3095021 - RNA, 19 nt, Artificial Sequence
  Description of Artificial Sequence: Synthetic oligonucleotide
cgguguauuggaagcugcu

SEQ ID NO: 3095022 - RNA, 19 nt, Artificial Sequence
  Description of Artificial Sequence: Synthetic oligonucleotide
ggacuucugugcaguggau

SEQ ID NO: 3095023 - RNA, 19 nt, Artificial Sequence
  Description of Artificial Sequence: Synthetic oligonucleotide
cccucauaggcagcucggu

SEQ ID NO: 3095024 - RNA, 19 nt, Artificial Sequence
  Description of Artificial Sequence: Synthetic oligonucleotide
ggucagcaagcagggcauu

SEQ ID NO: 3095025 - RNA, 19 nt, Artificial Sequence
  Description of Artificial Sequence: Synthetic oligonucleotide
  modified_base (10)..(10): a, c, u, g, unknown or other
aauacauagngguaaaagg

SEQ ID NO: 3095026 - RNA, 19 nt, Artificial Sequence
  Description of Artificial Sequence: Synthetic oligonucleotide
aaggaaaaucgccacaugc

SEQ ID NO: 3095027 - RNA, 19 nt, Artificial Sequence
  Description of Artificial Sequence: Synthetic oligonucleotide
  modified_base (16)..(16): a, c, u, g, unknown or other
uagauaaauacauagnggu

SEQ ID NO: 3095028 - RNA, 19 nt, Artificial Sequence
  Description of Artificial Sequence: Synthetic oligonucleotide
  modified_base (18)..(18): a, c, u, g, unknown or other
cauagauaaauacauagng

SEQ ID NO: 3095029 - RNA, 19 nt, Artificial Sequence
  Description of Artificial Sequence: Synthetic oligonucleotide
uccauagauaaauacauag

SEQ ID NO: 3095030 - RNA, 19 nt, Artificial Sequence
  Description of Artificial Sequence: Synthetic oligonucleotide
uuuguuauagcagugaaga

SEQ ID NO: 3095031 - RNA, 19 nt, Artificial Sequence
  Description of Artificial Sequence: Synthetic oligonucleotide
uuguauuccacaaccaagg

SEQ ID NO: 3095032 - RNA, 19 nt, Artificial Sequence
  Description of Artificial Sequence: Synthetic oligonucleotide
uauuccacaaccaaggggu

SEQ ID NO: 3095033 - RNA, 19 nt, Artificial Sequence
  Description of Artificial Sequence: Synthetic oligonucleotide
  modified_base (3)..(3): a, c, u, g, unknown or other
agngguaaaaggaaaaucg

SEQ ID NO: 3095034 - RNA, 19 nt, Artificial Sequence
  Description of Artificial Sequence: Synthetic oligonucleotide
  modified_base (11)..(11): a, c, u, g, unknown or other
aaauacauagngguaaaag

SEQ ID NO: 3095035 - RNA, 19 nt, Artificial Sequence
  Description of Artificial Sequence: Synthetic oligonucleotide
aacaucccaguccagcugc

SEQ ID NO: 3095036 - RNA, 19 nt, Artificial Sequence
  Description of Artificial Sequence: Synthetic oligonucleotide
uguuuuaagaaccggacuc

SEQ ID NO: 3095037 - RNA, 19 nt, Artificial Sequence
  Description of Artificial Sequence: Synthetic oligonucleotide
ugucuuguauuccacaacc

SEQ ID NO: 3095038 - RNA, 19 nt, Artificial Sequence
  Description of Artificial Sequence: Synthetic oligonucleotide
uguuauagcagugaagacc

SEQ ID NO: 3095039 - RNA, 19 nt, Artificial Sequence
  Description of Artificial Sequence: Synthetic oligonucleotide
  modified_base (14)..(14): a, c, u, g, unknown or other
gauaaauacauagngguaa

SEQ ID NO: 3095040 - RNA, 19 nt, Artificial Sequence
  Description of Artificial Sequence: Synthetic oligonucleotide
aaaaucgccacaugcucuc

SEQ ID NO: 3095041 - RNA, 19 nt, Artificial Sequence
  Description of Artificial Sequence: Synthetic oligonucleotide
cugaaugcuccuaacaucc

SEQ ID NO: 3095042 - RNA, 19 nt, Artificial Sequence
  Description of Artificial Sequence: Synthetic oligonucleotide
agcagugaagaccuuuucc

SEQ ID NO: 3095043 - RNA, 19 nt, Artificial Sequence
  Description of Artificial Sequence: Synthetic oligonucleotide
  modified_base (17)..(17): a, c, u, g, unknown or other
auagauaaauacauagngg

SEQ ID NO: 3095044 - RNA, 19 nt, Artificial Sequence
  Description of Artificial Sequence: Synthetic oligonucleotide
ucuguuuuaagaaccggac

SEQ ID NO: 3095045 - RNA, 19 nt, Artificial Sequence
  Description of Artificial Sequence: Synthetic oligonucleotide
cuuguauuccacaaccaag

SEQ ID NO: 3095046 - RNA, 19 nt, Artificial Sequence
  Description of Artificial Sequence: Synthetic oligonucleotide
uguauuccacaaccaaggg

SEQ ID NO: 3095047 - RNA, 19 nt, Artificial Sequence
  Description of Artificial Sequence: Synthetic oligonucleotide
uuggcugagcaauuugugg

SEQ ID NO: 3095048 - RNA, 19 nt, Artificial Sequence
  Description of Artificial Sequence: Synthetic oligonucleotide
  modified_base (8)..(8): a, c, u, g, unknown or other
uacauagngguaaaaggaa

SEQ ID NO: 3095049 - RNA, 19 nt, Artificial Sequence
  Description of Artificial Sequence: Synthetic oligonucleotide
gaagaccuuuuccagaaug

SEQ ID NO: 3095050 - RNA, 19 nt, Artificial Sequence
  Description of Artificial Sequence: Synthetic oligonucleotide
caauuugugguccacuggc

SEQ ID NO: 3095051 - RNA, 19 nt, Artificial Sequence
  Description of Artificial Sequence: Synthetic oligonucleotide
aauggcguuuggcugagca

SEQ ID NO: 3095052 - RNA, 19 nt, Artificial Sequence
  Description of Artificial Sequence: Synthetic oligonucleotide
uaaaaggaaaaucgccaca

SEQ ID NO: 3095053 - RNA, 19 nt, Artificial Sequence
  Description of Artificial Sequence: Synthetic oligonucleotide
uaagaaccggacuccauag

SEQ ID NO: 3095054 - RNA, 19 nt, Artificial Sequence
  Description of Artificial Sequence: Synthetic oligonucleotide
guauuccacaaccaagggg

SEQ ID NO: 3095055 - RNA, 19 nt, Artificial Sequence
  Description of Artificial Sequence: Synthetic oligonucleotide
  modified_base (9)..(9): a, c, u, g, unknown or other
auacauagngguaaaagga

SEQ ID NO: 3095056 - RNA, 19 nt, Artificial Sequence
  Description of Artificial Sequence: Synthetic oligonucleotide
aaaaggaaaaucgccacau

SEQ ID NO: 3095057 - RNA, 19 nt, Artificial Sequence
  Description of Artificial Sequence: Synthetic oligonucleotide
uuccaaucgcuucucauca

SEQ ID NO: 3095058 - RNA, 19 nt, Artificial Sequence
  Description of Artificial Sequence: Synthetic oligonucleotide
aaccggacuccauagauaa

SEQ ID NO: 3095059 - RNA, 19 nt, Artificial Sequence
  Description of Artificial Sequence: Synthetic oligonucleotide
aagaccuuuuccagaaugg

SEQ ID NO: 3095060 - RNA, 19 nt, Artificial Sequence
  Description of Artificial Sequence: Synthetic oligonucleotide
uggagagcccuuccaaucg

SEQ ID NO: 3095061 - RNA, 19 nt, Artificial Sequence
  Description of Artificial Sequence: Synthetic oligonucleotide
ucuuguauuccacaaccaa

SEQ ID NO: 3095062 - RNA, 19 nt, Artificial Sequence
  Description of Artificial Sequence: Synthetic oligonucleotide
aauuugugguccacuggcc

SEQ ID NO: 3095063 - RNA, 19 nt, Artificial Sequence
  Description of Artificial Sequence: Synthetic oligonucleotide
aaucgccacaugcucucgc

SEQ ID NO: 3095064 - RNA, 19 nt, Artificial Sequence
  Description of Artificial Sequence: Synthetic oligonucleotide
uccagaauggcguuuggcu

SEQ ID NO: 3095065 - RNA, 19 nt, Artificial Sequence
  Description of Artificial Sequence: Synthetic oligonucleotide
guaaaaggaaaaucgccac

SEQ ID NO: 3095066 - RNA, 19 nt, Artificial Sequence
  Description of Artificial Sequence: Synthetic oligonucleotide
uuuggcugagcaauuugug

SEQ ID NO: 3095067 - RNA, 19 nt, Artificial Sequence
  Description of Artificial Sequence: Synthetic oligonucleotide
uauaccagcagugucuugu

SEQ ID NO: 3095068 - RNA, 19 nt, Artificial Sequence
  Description of Artificial Sequence: Synthetic oligonucleotide
cuuuguuauagcagugaag

SEQ ID NO: 3095069 - RNA, 19 nt, Artificial Sequence
  Description of Artificial Sequence: Synthetic oligonucleotide
ucaggaugcuuuguuauag

SEQ ID NO: 3095070 - RNA, 19 nt, Artificial Sequence
  Description of Artificial Sequence: Synthetic oligonucleotide
ucgaaaccagcgcugaaug

SEQ ID NO: 3095071 - RNA, 19 nt, Artificial Sequence
  Description of Artificial Sequence: Synthetic oligonucleotide
ucgcuucucaucaggaugc

SEQ ID NO: 3095072 - RNA, 19 nt, Artificial Sequence
  Description of Artificial Sequence: Synthetic oligonucleotide
  modified_base (2)..(2): a, c, u, g, unknown or other
gngguaaaaggaaaaucgc

SEQ ID NO: 3095073 - RNA, 19 nt, Artificial Sequence
  Description of Artificial Sequence: Synthetic oligonucleotide
uuaagaaccggacuccaua

SEQ ID NO: 3095074 - RNA, 19 nt, Artificial Sequence
  Description of Artificial Sequence: Synthetic oligonucleotide
gaugcuuuguuauagcagu

SEQ ID NO: 3095075 - RNA, 19 nt, Artificial Sequence
  Description of Artificial Sequence: Synthetic oligonucleotide
aaaggaaaaucgccacaug

SEQ ID NO: 3095076 - RNA, 19 nt, Artificial Sequence
  Description of Artificial Sequence: Synthetic oligonucleotide
aucgcuucucaucaggaug

SEQ ID NO: 3095077 - RNA, 19 nt, Artificial Sequence
  Description of Artificial Sequence: Synthetic oligonucleotide
aaugcuccuaacaucccag

SEQ ID NO: 3095078 - RNA, 19 nt, Artificial Sequence
  Description of Artificial Sequence: Synthetic oligonucleotide
aggggucuguuuuaagaac

SEQ ID NO: 3095079 - RNA, 19 nt, Artificial Sequence
  Description of Artificial Sequence: Synthetic oligonucleotide
aguccagcugcuuggagag

SEQ ID NO: 3095080 - RNA, 19 nt, Artificial Sequence
  Description of Artificial Sequence: Synthetic oligonucleotide
agcaauuugugguccacug

SEQ ID NO: 3095081 - RNA, 19 nt, Artificial Sequence
  Description of Artificial Sequence: Synthetic oligonucleotide
gaccuuuuccagaauggcg

SEQ ID NO: 3095082 - RNA, 19 nt, Artificial Sequence
  Description of Artificial Sequence: Synthetic oligonucleotide
ucugucgaaaccagcgcug

SEQ ID NO: 3095083 - RNA, 19 nt, Artificial Sequence
  Description of Artificial Sequence: Synthetic oligonucleotide
  modified_base (4)..(4): a, c, u, g, unknown or other
uagngguaaaaggaaaauc

SEQ ID NO: 3095084 - RNA, 19 nt, Artificial Sequence
  Description of Artificial Sequence: Synthetic oligonucleotide
ucucgcagaaccuggucag

SEQ ID NO: 3095085 - RNA, 19 nt, Artificial Sequence
  Description of Artificial Sequence: Synthetic oligonucleotide
aguuauaccagcagugucu

SEQ ID NO: 3095086 - RNA, 19 nt, Artificial Sequence
  Description of Artificial Sequence: Synthetic oligonucleotide
uggcugagcaauuuguggu

SEQ ID NO: 3095087 - RNA, 19 nt, Artificial Sequence
  Description of Artificial Sequence: Synthetic oligonucleotide
gucucugucgaaaccagcg

SEQ ID NO: 3095088 - RNA, 19 nt, Artificial Sequence
  Description of Artificial Sequence: Synthetic oligonucleotide
  modified_base (17)..(17): a, c, u, g, unknown or other
aaccuggucagggugcngg

SEQ ID NO: 3095089 - RNA, 19 nt, Artificial Sequence
  Description of Artificial Sequence: Synthetic oligonucleotide
gacuccauagauaaauaca

SEQ ID NO: 3095090 - RNA, 19 nt, Artificial Sequence
  Description of Artificial Sequence: Synthetic oligonucleotide
uuuuccagaauggcguuug

SEQ ID NO: 3095091 - RNA, 19 nt, Artificial Sequence
  Description of Artificial Sequence: Synthetic oligonucleotide
cacaugcucucgcagaacc

SEQ ID NO: 3095092 - RNA, 19 nt, Artificial Sequence
  Description of Artificial Sequence: Synthetic oligonucleotide
acuccauagauaaauacau

SEQ ID NO: 3095093 - RNA, 19 nt, Artificial Sequence
  Description of Artificial Sequence: Synthetic oligonucleotide
cuuccaaucgcuucucauc

SEQ ID NO: 3095094 - RNA, 19 nt, Artificial Sequence
  Description of Artificial Sequence: Synthetic oligonucleotide
ucucugucgaaaccagcgc

SEQ ID NO: 3095095 - RNA, 19 nt, Artificial Sequence
  Description of Artificial Sequence: Synthetic oligonucleotide
guuuuaagaaccggacucc

SEQ ID NO: 3095096 - RNA, 19 nt, Artificial Sequence
  Description of Artificial Sequence: Synthetic oligonucleotide
agugucuuguauuccacaa

SEQ ID NO: 3095097 - RNA, 19 nt, Artificial Sequence
  Description of Artificial Sequence: Synthetic oligonucleotide
aggaugcuuuguuauagca

SEQ ID NO: 3095098 - RNA, 19 nt, Artificial Sequence
  Description of Artificial Sequence: Synthetic oligonucleotide
uuugugguccacuggccug

SEQ ID NO: 3095099 - RNA, 19 nt, Artificial Sequence
  Description of Artificial Sequence: Synthetic oligonucleotide
uaacaucccaguccagcug

SEQ ID NO: 3095100 - RNA, 19 nt, Artificial Sequence
  Description of Artificial Sequence: Synthetic oligonucleotide
agcagugucuuguauucca

SEQ ID NO: 3095101 - RNA, 19 nt, Artificial Sequence
  Description of Artificial Sequence: Synthetic oligonucleotide
agaaccggacuccauagau

SEQ ID NO: 3095102 - RNA, 19 nt, Artificial Sequence
  Description of Artificial Sequence: Synthetic oligonucleotide
uuuuaagaaccggacucca

SEQ ID NO: 3095103 - RNA, 19 nt, Artificial Sequence
  Description of Artificial Sequence: Synthetic oligonucleotide
gguaaaaggaaaaucgcca

SEQ ID NO: 3095104 - RNA, 19 nt, Artificial Sequence
  Description of Artificial Sequence: Synthetic oligonucleotide
aaucgcuucucaucaggau

SEQ ID NO: 3095105 - RNA, 19 nt, Artificial Sequence
  Description of Artificial Sequence: Synthetic oligonucleotide
guuauagcagugaagaccu

SEQ ID NO: 3095106 - RNA, 19 nt, Artificial Sequence
  Description of Artificial Sequence: Synthetic oligonucleotide
aaaccagcgcugaaugcuc

SEQ ID NO: 3095107 - RNA, 19 nt, Artificial Sequence
  Description of Artificial Sequence: Synthetic oligonucleotide
  modified_base (6)..(6): a, c, u, g, unknown or other
cauagngguaaaaggaaaa

SEQ ID NO: 3095108 - RNA, 19 nt, Artificial Sequence
  Description of Artificial Sequence: Synthetic oligonucleotide
uucucaucaggaugcuuug

SEQ ID NO: 3095109 - RNA, 19 nt, Artificial Sequence
  Description of Artificial Sequence: Synthetic oligonucleotide
gaguuauaccagcaguguc

SEQ ID NO: 3095110 - RNA, 19 nt, Artificial Sequence
  Description of Artificial Sequence: Synthetic oligonucleotide
cagugaagaccuuuuccag

SEQ ID NO: 3095111 - RNA, 19 nt, Artificial Sequence
  Description of Artificial Sequence: Synthetic oligonucleotide
ucccaguccagcugcuugg

SEQ ID NO: 3095112 - RNA, 19 nt, Artificial Sequence
  Description of Artificial Sequence: Synthetic oligonucleotide
uuguuauagcagugaagac

SEQ ID NO: 3095113 - RNA, 19 nt, Artificial Sequence
  Description of Artificial Sequence: Synthetic oligonucleotide
gaaugcuccuaacauccca

SEQ ID NO: 3095114 - RNA, 19 nt, Artificial Sequence
  Description of Artificial Sequence: Synthetic oligonucleotide
ugaaugcuccuaacauccc

SEQ ID NO: 3095115 - RNA, 19 nt, Artificial Sequence
  Description of Artificial Sequence: Synthetic oligonucleotide
  modified_base (5)..(5): a, c, u, g, unknown or other
auagngguaaaaggaaaau

SEQ ID NO: 3095116 - RNA, 19 nt, Artificial Sequence
  Description of Artificial Sequence: Synthetic oligonucleotide
ugcuuuguuauagcaguga

SEQ ID NO: 3095117 - RNA, 19 nt, Artificial Sequence
  Description of Artificial Sequence: Synthetic oligonucleotide
aagaaccggacuccauaga

SEQ ID NO: 3095118 - RNA, 19 nt, Artificial Sequence
  Description of Artificial Sequence: Synthetic oligonucleotide
caaggggucuguuuuaaga

SEQ ID NO: 3095119 - RNA, 19 nt, Artificial Sequence
  Description of Artificial Sequence: Synthetic oligonucleotide
uuggagagcccuuccaauc

SEQ ID NO: 3095120 - RNA, 19 nt, Artificial Sequence
  Description of Artificial Sequence: Synthetic oligonucleotide
aggggaguuauaccagcag

SEQ ID NO: 3095121 - RNA, 19 nt, Artificial Sequence
  Description of Artificial Sequence: Synthetic oligonucleotide
ugcgucucugucgaaacca

SEQ ID NO: 3095122 - RNA, 19 nt, Artificial Sequence
  Description of Artificial Sequence: Synthetic oligonucleotide
  modified_base (12)..(12): a, c, u, g, unknown or other
uaaauacauagngguaaaa

SEQ ID NO: 3095123 - RNA, 19 nt, Artificial Sequence
  Description of Artificial Sequence: Synthetic oligonucleotide
gcuccuaacaucccagucc

SEQ ID NO: 3095124 - RNA, 19 nt, Artificial Sequence
  Description of Artificial Sequence: Synthetic oligonucleotide
agcgcugaaugcuccuaac

SEQ ID NO: 3095125 - RNA, 19 nt, Artificial Sequence
  Description of Artificial Sequence: Synthetic oligonucleotide
aggaaaaucgccacaugcu

SEQ ID NO: 3095126 - RNA, 19 nt, Artificial Sequence
  Description of Artificial Sequence: Synthetic oligonucleotide
  modified_base (7)..(7): a, c, u, g, unknown or other
acauagngguaaaaggaaa

SEQ ID NO: 3095127 - RNA, 19 nt, Artificial Sequence
  Description of Artificial Sequence: Synthetic oligonucleotide
aaccagcgcugaaugcucc

SEQ ID NO: 3095128 - RNA, 19 nt, Artificial Sequence
  Description of Artificial Sequence: Synthetic oligonucleotide
ggaaaaucgccacaugcuc

SEQ ID NO: 3095129 - RNA, 19 nt, Artificial Sequence
  Description of Artificial Sequence: Synthetic oligonucleotide
uugugguccacuggccugg

SEQ ID NO: 3095130 - RNA, 19 nt, Artificial Sequence
  Description of Artificial Sequence: Synthetic oligonucleotide
  modified_base (13)..(13): a, c, u, g, unknown or other
auaaauacauagngguaaa

SEQ ID NO: 3095131 - RNA, 19 nt, Artificial Sequence
  Description of Artificial Sequence: Synthetic oligonucleotide
gugaagaccuuuuccagaa

SEQ ID NO: 3095132 - RNA, 19 nt, Artificial Sequence
  Description of Artificial Sequence: Synthetic oligonucleotide
gcagugaagaccuuuucca

SEQ ID NO: 3095133 - RNA, 19 nt, Artificial Sequence
  Description of Artificial Sequence: Synthetic oligonucleotide
  modified_base (16)..(16): a, c, u, g, unknown or other
accuggucagggugcnggg

SEQ ID NO: 3095134 - RNA, 19 nt, Artificial Sequence
  Description of Artificial Sequence: Synthetic oligonucleotide
ggacuccauagauaaauac

SEQ ID NO: 3095135 - RNA, 19 nt, Artificial Sequence
  Description of Artificial Sequence: Synthetic oligonucleotide
aaaucgccacaugcucucg

SEQ ID NO: 3095136 - RNA, 19 nt, Artificial Sequence
  Description of Artificial Sequence: Synthetic oligonucleotide
gcaauuugugguccacugg

SEQ ID NO: 3095137 - RNA, 19 nt, Artificial Sequence
  Description of Artificial Sequence: Synthetic oligonucleotide
caggaugcuuuguuauagc

SEQ ID NO: 3095138 - RNA, 19 nt, Artificial Sequence
  Description of Artificial Sequence: Synthetic oligonucleotide
guugcgucucugucgaaac

SEQ ID NO: 3095139 - RNA, 19 nt, Artificial Sequence
  Description of Artificial Sequence: Synthetic oligonucleotide
ugcuuggagagcccuucca

SEQ ID NO: 3095140 - RNA, 19 nt, Artificial Sequence
  Description of Artificial Sequence: Synthetic oligonucleotide
gucuguuuuaagaaccgga

SEQ ID NO: 3095141 - RNA, 19 nt, Artificial Sequence
  Description of Artificial Sequence: Synthetic oligonucleotide
gaaaccagcgcugaaugcu

SEQ ID NO: 3095142 - RNA, 19 nt, Artificial Sequence
  Description of Artificial Sequence: Synthetic oligonucleotide
uugcgucucugucgaaacc

SEQ ID NO: 3095143 - RNA, 19 nt, Artificial Sequence
  Description of Artificial Sequence: Synthetic oligonucleotide
uccaaucgcuucucaucag

SEQ ID NO: 3095144 - RNA, 19 nt, Artificial Sequence
  Description of Artificial Sequence: Synthetic oligonucleotide
cuccuaacaucccagucca

SEQ ID NO: 3095145 - RNA, 19 nt, Artificial Sequence
  Description of Artificial Sequence: Synthetic oligonucleotide
ggaugcuuuguuauagcag

SEQ ID NO: 3095146 - RNA, 19 nt, Artificial Sequence
  Description of Artificial Sequence: Synthetic oligonucleotide
agcccuuccaaucgcuucu

SEQ ID NO: 3095147 - RNA, 19 nt, Artificial Sequence
  Description of Artificial Sequence: Synthetic oligonucleotide
uuccagaauggcguuuggc

SEQ ID NO: 3095148 - RNA, 19 nt, Artificial Sequence
  Description of Artificial Sequence: Synthetic oligonucleotide
acaaccaaggggucuguuu

SEQ ID NO: 3095149 - RNA, 19 nt, Artificial Sequence
  Description of Artificial Sequence: Synthetic oligonucleotide
accagcagugucuuguauu

SEQ ID NO: 3095150 - RNA, 19 nt, Artificial Sequence
  Description of Artificial Sequence: Synthetic oligonucleotide
  modified_base (15)..(15): a, c, u, g, unknown or other
agauaaauacauagnggua

SEQ ID NO: 3095151 - RNA, 19 nt, Artificial Sequence
  Description of Artificial Sequence: Synthetic oligonucleotide
uggcguuuggcugagcaau

SEQ ID NO: 3095152 - RNA, 19 nt, Artificial Sequence
  Description of Artificial Sequence: Synthetic oligonucleotide
caugcucucgcagaaccug

SEQ ID NO: 3095153 - RNA, 19 nt, Artificial Sequence
  Description of Artificial Sequence: Synthetic oligonucleotide
gugucuuguauuccacaac

SEQ ID NO: 3095154 - RNA, 19 nt, Artificial Sequence
  Description of Artificial Sequence: Synthetic oligonucleotide
cagaauggcguuuggcuga

SEQ ID NO: 3095155 - RNA, 19 nt, Artificial Sequence
  Description of Artificial Sequence: Synthetic oligonucleotide
ccugguugcgucucugucg

SEQ ID NO: 3095156 - RNA, 19 nt, Artificial Sequence
  Description of Artificial Sequence: Synthetic oligonucleotide
ucgccacaugcucucgcag

SEQ ID NO: 3095157 - RNA, 19 nt, Artificial Sequence
  Description of Artificial Sequence: Synthetic oligonucleotide
uuuuccugguugcgucucu

SEQ ID NO: 3095158 - RNA, 19 nt, Artificial Sequence
  Description of Artificial Sequence: Synthetic oligonucleotide
ggggucuguuuuaagaacc

SEQ ID NO: 3095159 - RNA, 19 nt, Artificial Sequence
  Description of Artificial Sequence: Synthetic oligonucleotide
gggaguuauaccagcagug

SEQ ID NO: 3095160 - RNA, 19 nt, Artificial Sequence
  Description of Artificial Sequence: Synthetic oligonucleotide
  modified_base (19)..(19): a, c, u, g, unknown or other
ccauagauaaauacauagn

SEQ ID NO: 3095161 - RNA, 19 nt, Artificial Sequence
  Description of Artificial Sequence: Synthetic oligonucleotide
uccugguugcgucucuguc

SEQ ID NO: 3095162 - RNA, 19 nt, Artificial Sequence
  Description of Artificial Sequence: Synthetic oligonucleotide
gaaaaucgccacaugcucu

SEQ ID NO: 3095163 - RNA, 19 nt, Artificial Sequence
  Description of Artificial Sequence: Synthetic oligonucleotide
gcugaaugcuccuaacauc

SEQ ID NO: 3095164 - RNA, 19 nt, Artificial Sequence
  Description of Artificial Sequence: Synthetic oligonucleotide
ugagcaauuugugguccac

SEQ ID NO: 3095165 - RNA, 19 nt, Artificial Sequence
  Description of Artificial Sequence: Synthetic oligonucleotide
caaucgcuucucaucagga

SEQ ID NO: 3095166 - RNA, 19 nt, Artificial Sequence
  Description of Artificial Sequence: Synthetic oligonucleotide
uuauaccagcagugucuug

SEQ ID NO: 3095167 - RNA, 19 nt, Artificial Sequence
  Description of Artificial Sequence: Synthetic oligonucleotide
aaccaaggggucuguuuua

SEQ ID NO: 3095168 - RNA, 19 nt, Artificial Sequence
  Description of Artificial Sequence: Synthetic oligonucleotide
aucaggaugcuuuguuaua

SEQ ID NO: 3095169 - RNA, 19 nt, Artificial Sequence
  Description of Artificial Sequence: Synthetic oligonucleotide
ccaaucgcuucucaucagg

SEQ ID NO: 3095170 - RNA, 19 nt, Artificial Sequence
  Description of Artificial Sequence: Synthetic oligonucleotide
aucgccacaugcucucgca

SEQ ID NO: 3095171 - RNA, 19 nt, Artificial Sequence
  Description of Artificial Sequence: Synthetic oligonucleotide
ccagaauggcguuuggcug

SEQ ID NO: 3095172 - RNA, 19 nt, Artificial Sequence
  Description of Artificial Sequence: Synthetic oligonucleotide
gagcccuuccaaucgcuuc

SEQ ID NO: 3095173 - RNA, 19 nt, Artificial Sequence
  Description of Artificial Sequence: Synthetic oligonucleotide
caguccagcugcuuggaga

SEQ ID NO: 3095174 - RNA, 19 nt, Artificial Sequence
  Description of Artificial Sequence: Synthetic oligonucleotide
ccuaacaucccaguccagc

SEQ ID NO: 3095175 - RNA, 19 nt, Artificial Sequence
  Description of Artificial Sequence: Synthetic oligonucleotide
gcagaaccuggucagggug

SEQ ID NO: 3095176 - RNA, 19 nt, Artificial Sequence
  Description of Artificial Sequence: Synthetic oligonucleotide
cuaacaucccaguccagcu

SEQ ID NO: 3095177 - RNA, 19 nt, Artificial Sequence
  Description of Artificial Sequence: Synthetic oligonucleotide
ugaagaccuuuuccagaau

SEQ ID NO: 3095178 - RNA, 19 nt, Artificial Sequence
  Description of Artificial Sequence: Synthetic oligonucleotide
gggucuguuuuaagaaccg

SEQ ID NO: 3095179 - RNA, 19 nt, Artificial Sequence
  Description of Artificial Sequence: Synthetic oligonucleotide
cugguugcgucucugucga

SEQ ID NO: 3095180 - RNA, 19 nt, Artificial Sequence
  Description of Artificial Sequence: Synthetic oligonucleotide
uccuaacaucccaguccag

SEQ ID NO: 3095181 - RNA, 19 nt, Artificial Sequence
  Description of Artificial Sequence: Synthetic oligonucleotide
ccagcagugucuuguauuc

SEQ ID NO: 3095182 - RNA, 19 nt, Artificial Sequence
  Description of Artificial Sequence: Synthetic oligonucleotide
auagcagugaagaccuuuu

SEQ ID NO: 3095183 - RNA, 19 nt, Artificial Sequence
  Description of Artificial Sequence: Synthetic oligonucleotide
augcucucgcagaaccugg

SEQ ID NO: 3095184 - RNA, 19 nt, Artificial Sequence
  Description of Artificial Sequence: Synthetic oligonucleotide
ugucgaaaccagcgcugaa

SEQ ID NO: 3095185 - RNA, 19 nt, Artificial Sequence
  Description of Artificial Sequence: Synthetic oligonucleotide
auuccacaaccaagggguc

SEQ ID NO: 3095186 - RNA, 19 nt, Artificial Sequence
  Description of Artificial Sequence: Synthetic oligonucleotide
ucucaucaggaugcuuugu

SEQ ID NO: 3095187 - RNA, 19 nt, Artificial Sequence
  Description of Artificial Sequence: Synthetic oligonucleotide
agaauggcguuuggcugag

SEQ ID NO: 3095188 - RNA, 19 nt, Artificial Sequence
  Description of Artificial Sequence: Synthetic oligonucleotide
uuccugguugcgucucugu

SEQ ID NO: 3095189 - RNA, 19 nt, Artificial Sequence
  Description of Artificial Sequence: Synthetic oligonucleotide
gcuuuguuauagcagugaa

SEQ ID NO: 3095190 - RNA, 19 nt, Artificial Sequence
  Description of Artificial Sequence: Synthetic oligonucleotide
cuguuuuaagaaccggacu

SEQ ID NO: 3095191 - RNA, 19 nt, Artificial Sequence
  Description of Artificial Sequence: Synthetic oligonucleotide
uaccagcagugucuuguau

SEQ ID NO: 3095192 - RNA, 19 nt, Artificial Sequence
  Description of Artificial Sequence: Synthetic oligonucleotide
cuccauagauaaauacaua

SEQ ID NO: 3095193 - RNA, 19 nt, Artificial Sequence
  Description of Artificial Sequence: Synthetic oligonucleotide
augcuuuguuauagcagug

SEQ ID NO: 3095194 - RNA, 19 nt, Artificial Sequence
  Description of Artificial Sequence: Synthetic oligonucleotide
auggcguuuggcugagcaa

SEQ ID NO: 3095195 - RNA, 19 nt, Artificial Sequence
  Description of Artificial Sequence: Synthetic oligonucleotide
  modified_base (19)..(19): a, c, u, g, unknown or other
agaaccuggucagggugcn

SEQ ID NO: 3095196 - RNA, 19 nt, Artificial Sequence
  Description of Artificial Sequence: Synthetic oligonucleotide
guuuggcugagcaauuugu

SEQ ID NO: 3095197 - RNA, 19 nt, Artificial Sequence
  Description of Artificial Sequence: Synthetic oligonucleotide
caucaggaugcuuuguuau

SEQ ID NO: 3095198 - RNA, 19 nt, Artificial Sequence
  Description of Artificial Sequence: Synthetic oligonucleotide
gucuuguauuccacaacca

SEQ ID NO: 3095199 - RNA, 19 nt, Artificial Sequence
  Description of Artificial Sequence: Synthetic oligonucleotide
  modified_base (13)..(13): a, c, u, g, unknown or other
uggucagggugcnggguuu

SEQ ID NO: 3095200 - RNA, 19 nt, Artificial Sequence
  Description of Artificial Sequence: Synthetic oligonucleotide
cugcuuggagagcccuucc

SEQ ID NO: 3095201 - RNA, 19 nt, Artificial Sequence
  Description of Artificial Sequence: Synthetic oligonucleotide
auaccagcagugucuugua

SEQ ID NO: 3095202 - RNA, 19 nt, Artificial Sequence
  Description of Artificial Sequence: Synthetic oligonucleotide
gcugagcaauuuguggucc

SEQ ID NO: 3095203 - RNA, 19 nt, Artificial Sequence
  Description of Artificial Sequence: Synthetic oligonucleotide
ggagagcccuuccaaucgc

SEQ ID NO: 3095204 - RNA, 19 nt, Artificial Sequence
  Description of Artificial Sequence: Synthetic oligonucleotide
ggcugagcaauuugugguc

SEQ ID NO: 3095205 - RNA, 19 nt, Artificial Sequence
  Description of Artificial Sequence: Synthetic oligonucleotide
cucgcagaaccuggucagg

SEQ ID NO: 3095206 - RNA, 19 nt, Artificial Sequence
  Description of Artificial Sequence: Synthetic oligonucleotide
cugagcaauuuguggucca

SEQ ID NO: 3095207 - RNA, 19 nt, Artificial Sequence
  Description of Artificial Sequence: Synthetic oligonucleotide
accagcgcugaaugcuccu

SEQ ID NO: 3095208 - RNA, 19 nt, Artificial Sequence
  Description of Artificial Sequence: Synthetic oligonucleotide
cucugucgaaaccagcgcu

SEQ ID NO: 3095209 - RNA, 19 nt, Artificial Sequence
  Description of Artificial Sequence: Synthetic oligonucleotide
uuauagcagugaagaccuu

SEQ ID NO: 3095210 - RNA, 19 nt, Artificial Sequence
  Description of Artificial Sequence: Synthetic oligonucleotide
cagcagugucuuguauucc

SEQ ID NO: 3095211 - RNA, 19 nt, Artificial Sequence
  Description of Artificial Sequence: Synthetic oligonucleotide
gaaccggacuccauagaua

SEQ ID NO: 3095212 - RNA, 19 nt, Artificial Sequence
  Description of Artificial Sequence: Synthetic oligonucleotide
accaaggggucuguuuuaa

SEQ ID NO: 3095213 - RNA, 19 nt, Artificial Sequence
  Description of Artificial Sequence: Synthetic oligonucleotide
ggggaguuauaccagcagu

SEQ ID NO: 3095214 - RNA, 19 nt, Artificial Sequence
  Description of Artificial Sequence: Synthetic oligonucleotide
acaugcucucgcagaaccu

SEQ ID NO: 3095215 - RNA, 19 nt, Artificial Sequence
  Description of Artificial Sequence: Synthetic oligonucleotide
cuuggagagcccuuccaau

SEQ ID NO: 3095216 - RNA, 19 nt, Artificial Sequence
  Description of Artificial Sequence: Synthetic oligonucleotide
  modified_base (18)..(18): a, c, u, g, unknown or other
gaaccuggucagggugcng

SEQ ID NO: 3095217 - RNA, 19 nt, Artificial Sequence
  Description of Artificial Sequence: Synthetic oligonucleotide
cgaaaccagcgcugaaugc

SEQ ID NO: 3095218 - RNA, 19 nt, Artificial Sequence
  Description of Artificial Sequence: Synthetic oligonucleotide
ggaguuauaccagcagugu

SEQ ID NO: 3095219 - RNA, 19 nt, Artificial Sequence
  Description of Artificial Sequence: Synthetic oligonucleotide
cugucgaaaccagcgcuga

SEQ ID NO: 3095220 - RNA, 19 nt, Artificial Sequence
  Description of Artificial Sequence: Synthetic oligonucleotide
guuauaccagcagugucuu

SEQ ID NO: 3095221 - RNA, 19 nt, Artificial Sequence
  Description of Artificial Sequence: Synthetic oligonucleotide
gcgcugaaugcuccuaaca

SEQ ID NO: 3095222 - RNA, 19 nt, Artificial Sequence
  Description of Artificial Sequence: Synthetic oligonucleotide
gucgaaaccagcgcugaau

SEQ ID NO: 3095223 - RNA, 19 nt, Artificial Sequence
  Description of Artificial Sequence: Synthetic oligonucleotide
ccaaggggucuguuuuaag

SEQ ID NO: 3095224 - RNA, 19 nt, Artificial Sequence
  Description of Artificial Sequence: Synthetic oligonucleotide
cguuuggcugagcaauuug

SEQ ID NO: 3095225 - RNA, 19 nt, Artificial Sequence
  Description of Artificial Sequence: Synthetic oligonucleotide
gguugcgucucugucgaaa

SEQ ID NO: 3095226 - RNA, 19 nt, Artificial Sequence
  Description of Artificial Sequence: Synthetic oligonucleotide
gccacaugcucucgcagaa

SEQ ID NO: 3095227 - RNA, 19 nt, Artificial Sequence
  Description of Artificial Sequence: Synthetic oligonucleotide
  modified_base (14)..(14): a, c, u, g, unknown or other
cuggucagggugcnggguu

SEQ ID NO: 3095228 - RNA, 19 nt, Artificial Sequence
  Description of Artificial Sequence: Synthetic oligonucleotide
gcugcuuggagagcccuuc

SEQ ID NO: 3095229 - RNA, 19 nt, Artificial Sequence
  Description of Artificial Sequence: Synthetic oligonucleotide
gcgucucugucgaaaccag

SEQ ID NO: 3095230 - RNA, 19 nt, Artificial Sequence
  Description of Artificial Sequence: Synthetic oligonucleotide
cagcgcugaaugcuccuaa

SEQ ID NO: 3095231 - RNA, 19 nt, Artificial Sequence
  Description of Artificial Sequence: Synthetic oligonucleotide
agagcccuuccaaucgcuu

SEQ ID NO: 3095232 - RNA, 19 nt, Artificial Sequence
  Description of Artificial Sequence: Synthetic oligonucleotide
cgucucugucgaaaccagc

SEQ ID NO: 3095233 - RNA, 19 nt, Artificial Sequence
  Description of Artificial Sequence: Synthetic oligonucleotide
gaauggcguuuggcugagc

SEQ ID NO: 3095234 - RNA, 19 nt, Artificial Sequence
  Description of Artificial Sequence: Synthetic oligonucleotide
gagagcccuuccaaucgcu

SEQ ID NO: 3095235 - RNA, 19 nt, Artificial Sequence
  Description of Artificial Sequence: Synthetic oligonucleotide
acaucccaguccagcugcu

SEQ ID NO: 3095236 - RNA, 19 nt, Artificial Sequence
  Description of Artificial Sequence: Synthetic oligonucleotide
ccaguccagcugcuuggag

SEQ ID NO: 3095237 - RNA, 19 nt, Artificial Sequence
  Description of Artificial Sequence: Synthetic oligonucleotide
ugguugcgucucugucgaa

SEQ ID NO: 3095238 - RNA, 19 nt, Artificial Sequence
  Description of Artificial Sequence: Synthetic oligonucleotide
accggacuccauagauaaa

SEQ ID NO: 3095239 - RNA, 19 nt, Artificial Sequence
  Description of Artificial Sequence: Synthetic oligonucleotide
ccggacuccauagauaaau

SEQ ID NO: 3095240 - RNA, 19 nt, Artificial Sequence
  Description of Artificial Sequence: Synthetic oligonucleotide
cuuuuccagaauggcguuu

SEQ ID NO: 3095241 - RNA, 19 nt, Artificial Sequence
  Description of Artificial Sequence: Synthetic oligonucleotide
agcugcuuggagagcccuu

SEQ ID NO: 3095242 - RNA, 19 nt, Artificial Sequence
  Description of Artificial Sequence: Synthetic oligonucleotide
ccacaugcucucgcagaac

SEQ ID NO: 3095243 - RNA, 19 nt, Artificial Sequence
  Description of Artificial Sequence: Synthetic oligonucleotide
ccuuccaaucgcuucucau

SEQ ID NO: 3095244 - RNA, 19 nt, Artificial Sequence
  Description of Artificial Sequence: Synthetic oligonucleotide
cgcugaaugcuccuaacau

SEQ ID NO: 3095245 - RNA, 19 nt, Artificial Sequence
  Description of Artificial Sequence: Synthetic oligonucleotide
cgccacaugcucucgcaga

SEQ ID NO: 3095246 - RNA, 19 nt, Artificial Sequence
  Description of Artificial Sequence: Synthetic oligonucleotide
cggacuccauagauaaaua

SEQ ID NO: 3095247 - RNA, 19 nt, Artificial Sequence
  Description of Artificial Sequence: Synthetic oligonucleotide
cagcugcuuggagagcccu

SEQ ID NO: 3095248 - RNA, 19 nt, Artificial Sequence
  Description of Artificial Sequence: Synthetic oligonucleotide
cccuuccaaucgcuucuca

SEQ ID NO: 3095249 - RNA, 19 nt, Artificial Sequence
  Description of Artificial Sequence: Synthetic oligonucleotide
ccuuuuccagaauggcguu

SEQ ID NO: 3095250 - RNA, 19 nt, Artificial Sequence
  Description of Artificial Sequence: Synthetic oligonucleotide
cacaaccaaggggucuguu

SEQ ID NO: 3095251 - RNA, 19 nt, Artificial Sequence
  Description of Artificial Sequence: Synthetic oligonucleotide
cccaguccagcugcuugga

SEQ ID NO: 3095252 - RNA, 19 nt, Artificial Sequence
  Description of Artificial Sequence: Synthetic oligonucleotide
ggcguuuggcugagcaauu

SEQ ID NO: 3095253 - RNA, 19 nt, Artificial Sequence
  Description of Artificial Sequence: Synthetic oligonucleotide
gugguccacuggccuggau

SEQ ID NO: 3095254 - RNA, 19 nt, Artificial Sequence
  Description of Artificial Sequence: Synthetic oligonucleotide
gcguuuggcugagcaauuu

SEQ ID NO: 3095255 - RNA, 19 nt, Artificial Sequence
  Description of Artificial Sequence: Synthetic oligonucleotide
caucccaguccagcugcuu

SEQ ID NO: 3095256 - RNA, 19 nt, Artificial Sequence
  Description of Artificial Sequence: Synthetic oligonucleotide
gcuucucaucaggaugcuu

SEQ ID NO: 3095257 - RNA, 19 nt, Artificial Sequence
  Description of Artificial Sequence: Synthetic oligonucleotide
ccagcgcugaaugcuccua

SEQ ID NO: 3095258 - RNA, 19 nt, Artificial Sequence
  Description of Artificial Sequence: Synthetic oligonucleotide
  modified_base (12)..(12): a, c, u, g, unknown or other
ggucagggugcnggguuuu

SEQ ID NO: 3095259 - RNA, 19 nt, Artificial Sequence
  Description of Artificial Sequence: Synthetic oligonucleotide
  modified_base (15)..(15): a, c, u, g, unknown or other
ccuggucagggugcngggu

SEQ ID NO: 3095260 - RNA, 19 nt, Artificial Sequence
  Description of Artificial Sequence: Synthetic oligonucleotide
ccacaaccaaggggucugu

SEQ ID NO: 3095261 - RNA, 19 nt, Artificial Sequence
  Description of Artificial Sequence: Synthetic oligonucleotide
  modified_base (1)..(1): a, c, u, g, unknown or other
ngguaaaaggaaaaucgcc

SEQ ID NO: 3095262 - RNA, 19 nt, Artificial Sequence
  Description of Artificial Sequence: Synthetic oligonucleotide
ucaaauaucaaggguaggg

SEQ ID NO: 3095263 - RNA, 19 nt, Artificial Sequence
  Description of Artificial Sequence: Synthetic oligonucleotide
acucagucccucuuuaugc

SEQ ID NO: 3095264 - RNA, 19 nt, Artificial Sequence
  Description of Artificial Sequence: Synthetic oligonucleotide
aaagccucagcccugaaaa

SEQ ID NO: 3095265 - RNA, 19 nt, Artificial Sequence
  Description of Artificial Sequence: Synthetic oligonucleotide
aaaacuucucuggaaauug

SEQ ID NO: 3095266 - RNA, 19 nt, Artificial Sequence
  Description of Artificial Sequence: Synthetic oligonucleotide
ucuaacucccugucgaggg

SEQ ID NO: 3095267 - RNA, 19 nt, Artificial Sequence
  Description of Artificial Sequence: Synthetic oligonucleotide
aagucuaacucccugucga

SEQ ID NO: 3095268 - RNA, 19 nt, Artificial Sequence
  Description of Artificial Sequence: Synthetic oligonucleotide
uccuguaagucuaacuccc

SEQ ID NO: 3095269 - RNA, 19 nt, Artificial Sequence
  Description of Artificial Sequence: Synthetic oligonucleotide
aacuucucuggaaauugcc

SEQ ID NO: 3095270 - RNA, 19 nt, Artificial Sequence
  Description of Artificial Sequence: Synthetic oligonucleotide
ugagcaagaagcccaccgg

SEQ ID NO: 3095271 - RNA, 19 nt, Artificial Sequence
  Description of Artificial Sequence: Synthetic oligonucleotide
uaagucuaacucccugucg

SEQ ID NO: 3095272 - RNA, 19 nt, Artificial Sequence
  Description of Artificial Sequence: Synthetic oligonucleotide
uucucuggaaauugccucg

SEQ ID NO: 3095273 - RNA, 19 nt, Artificial Sequence
  Description of Artificial Sequence: Synthetic oligonucleotide
aaguuggcguccuaggcug

SEQ ID NO: 3095274 - RNA, 19 nt, Artificial Sequence
  Description of Artificial Sequence: Synthetic oligonucleotide
aacucagucccucuuuaug

SEQ ID NO: 3095275 - RNA, 19 nt, Artificial Sequence
  Description of Artificial Sequence: Synthetic oligonucleotide
aaacuucucuggaaauugc

SEQ ID NO: 3095276 - RNA, 19 nt, Artificial Sequence
  Description of Artificial Sequence: Synthetic oligonucleotide
ucuggaaauugccucgacc

SEQ ID NO: 3095277 - RNA, 19 nt, Artificial Sequence
  Description of Artificial Sequence: Synthetic oligonucleotide
uggggccugagcaagaagc

SEQ ID NO: 3095278 - RNA, 19 nt, Artificial Sequence
  Description of Artificial Sequence: Synthetic oligonucleotide
gacagcaggaacucagucc

SEQ ID NO: 3095279 - RNA, 19 nt, Artificial Sequence
  Description of Artificial Sequence: Synthetic oligonucleotide
caaauaucaaggguagggg

SEQ ID NO: 3095280 - RNA, 19 nt, Artificial Sequence
  Description of Artificial Sequence: Synthetic oligonucleotide
uguaagucuaacucccugu

SEQ ID NO: 3095281 - RNA, 19 nt, Artificial Sequence
  Description of Artificial Sequence: Synthetic oligonucleotide
aaggccuggggccugagca

SEQ ID NO: 3095282 - RNA, 19 nt, Artificial Sequence
  Description of Artificial Sequence: Synthetic oligonucleotide
cucugugagaggauguggg

SEQ ID NO: 3095283 - RNA, 19 nt, Artificial Sequence
  Description of Artificial Sequence: Synthetic oligonucleotide
aagaagcccaccggggugc

SEQ ID NO: 3095284 - RNA, 19 nt, Artificial Sequence
  Description of Artificial Sequence: Synthetic oligonucleotide
aauugccucgaccucugug

SEQ ID NO: 3095285 - RNA, 19 nt, Artificial Sequence
  Description of Artificial Sequence: Synthetic oligonucleotide
ucugugagaggaugugggg

SEQ ID NO: 3095286 - RNA, 19 nt, Artificial Sequence
  Description of Artificial Sequence: Synthetic oligonucleotide
ugggacagcaggaacucag

SEQ ID NO: 3095287 - RNA, 19 nt, Artificial Sequence
  Description of Artificial Sequence: Synthetic oligonucleotide
gaaggaggcaguuggaaga

SEQ ID NO: 3095288 - RNA, 19 nt, Artificial Sequence
  Description of Artificial Sequence: Synthetic oligonucleotide
guucaaauaucaaggguag

SEQ ID NO: 3095289 - RNA, 19 nt, Artificial Sequence
  Description of Artificial Sequence: Synthetic oligonucleotide
gagcaagaagcccaccggg

SEQ ID NO: 3095290 - RNA, 19 nt, Artificial Sequence
  Description of Artificial Sequence: Synthetic oligonucleotide
auugccucgaccucuguga

SEQ ID NO: 3095291 - RNA, 19 nt, Artificial Sequence
  Description of Artificial Sequence: Synthetic oligonucleotide
cugagcaagaagcccaccg

SEQ ID NO: 3095292 - RNA, 19 nt, Artificial Sequence
  Description of Artificial Sequence: Synthetic oligonucleotide
cuccuguaagucuaacucc

SEQ ID NO: 3095293 - RNA, 19 nt, Artificial Sequence
  Description of Artificial Sequence: Synthetic oligonucleotide
ugugagaggauguggggcu

SEQ ID NO: 3095294 - RNA, 19 nt, Artificial Sequence
  Description of Artificial Sequence: Synthetic oligonucleotide
aagccucagcccugaaaac

SEQ ID NO: 3095295 - RNA, 19 nt, Artificial Sequence
  Description of Artificial Sequence: Synthetic oligonucleotide
aaaggccuggggccugagc

SEQ ID NO: 3095296 - RNA, 19 nt, Artificial Sequence
  Description of Artificial Sequence: Synthetic oligonucleotide
ugaaaacuucucuggaaau

SEQ ID NO: 3095297 - RNA, 19 nt, Artificial Sequence
  Description of Artificial Sequence: Synthetic oligonucleotide
uucaaauaucaaggguagg

SEQ ID NO: 3095298 - RNA, 19 nt, Artificial Sequence
  Description of Artificial Sequence: Synthetic oligonucleotide
agcccugaaaacuucucug

SEQ ID NO: 3095299 - RNA, 19 nt, Artificial Sequence
  Description of Artificial Sequence: Synthetic oligonucleotide
caggguggggagaaguugg

SEQ ID NO: 3095300 - RNA, 19 nt, Artificial Sequence
  Description of Artificial Sequence: Synthetic oligonucleotide
uguggggcucccagggugg

SEQ ID NO: 3095301 - RNA, 19 nt, Artificial Sequence
  Description of Artificial Sequence: Synthetic oligonucleotide
gaggauguggggcucccag

SEQ ID NO: 3095302 - RNA, 19 nt, Artificial Sequence
  Description of Artificial Sequence: Synthetic oligonucleotide
cucagucccucuuuaugcc

SEQ ID NO: 3095303 - RNA, 19 nt, Artificial Sequence
  Description of Artificial Sequence: Synthetic oligonucleotide
gggguucaaauaucaaggg

SEQ ID NO: 3095304 - RNA, 19 nt, Artificial Sequence
  Description of Artificial Sequence: Synthetic oligonucleotide
ucuuuaugccaguccaaaa

SEQ ID NO: 3095305 - RNA, 19 nt, Artificial Sequence
  Description of Artificial Sequence: Synthetic oligonucleotide
gaggggaggaaggaggcag

SEQ ID NO: 3095306 - RNA, 19 nt, Artificial Sequence
  Description of Artificial Sequence: Synthetic oligonucleotide
guaagucuaacucccuguc

SEQ ID NO: 3095307 - RNA, 19 nt, Artificial Sequence
  Description of Artificial Sequence: Synthetic oligonucleotide
ucccucuuuaugccagucc

SEQ ID NO: 3095308 - RNA, 19 nt, Artificial Sequence
  Description of Artificial Sequence: Synthetic oligonucleotide
ucgaggggaggaaggaggc

SEQ ID NO: 3095309 - RNA, 19 nt, Artificial Sequence
  Description of Artificial Sequence: Synthetic oligonucleotide
gucgaggggaggaaggagg

SEQ ID NO: 3095310 - RNA, 19 nt, Artificial Sequence
  Description of Artificial Sequence: Synthetic oligonucleotide
agucuaacucccugucgag

SEQ ID NO: 3095311 - RNA, 19 nt, Artificial Sequence
  Description of Artificial Sequence: Synthetic oligonucleotide
gguucaaauaucaagggua

SEQ ID NO: 3095312 - RNA, 19 nt, Artificial Sequence
  Description of Artificial Sequence: Synthetic oligonucleotide
cuggaaauugccucgaccu

SEQ ID NO: 3095313 - RNA, 19 nt, Artificial Sequence
  Description of Artificial Sequence: Synthetic oligonucleotide
  modified_base (18)..(18): a, c, u, g, unknown or other
aaggcgcgaggccuuggng

SEQ ID NO: 3095314 - RNA, 19 nt, Artificial Sequence
  Description of Artificial Sequence: Synthetic oligonucleotide
ggaaggaggcaguuggaag

SEQ ID NO: 3095315 - RNA, 19 nt, Artificial Sequence
  Description of Artificial Sequence: Synthetic oligonucleotide
uccccgucacuccuguaag

SEQ ID NO: 3095316 - RNA, 19 nt, Artificial Sequence
  Description of Artificial Sequence: Synthetic oligonucleotide
cuguaagucuaacucccug

SEQ ID NO: 3095317 - RNA, 19 nt, Artificial Sequence
  Description of Artificial Sequence: Synthetic oligonucleotide
uggaaauugccucgaccuc

SEQ ID NO: 3095318 - RNA, 19 nt, Artificial Sequence
  Description of Artificial Sequence: Synthetic oligonucleotide
ucagucccucuuuaugcca

SEQ ID NO: 3095319 - RNA, 19 nt, Artificial Sequence
  Description of Artificial Sequence: Synthetic oligonucleotide
ggauguggggcucccaggg

SEQ ID NO: 3095320 - RNA, 19 nt, Artificial Sequence
  Description of Artificial Sequence: Synthetic oligonucleotide
cugugagaggauguggggc

SEQ ID NO: 3095321 - RNA, 19 nt, Artificial Sequence
  Description of Artificial Sequence: Synthetic oligonucleotide
uugccucgaccucugugag

SEQ ID NO: 3095322 - RNA, 19 nt, Artificial Sequence
  Description of Artificial Sequence: Synthetic oligonucleotide
cuaggcuggggaaggcgcg

SEQ ID NO: 3095323 - RNA, 19 nt, Artificial Sequence
  Description of Artificial Sequence: Synthetic oligonucleotide
aggauguggggcucccagg

SEQ ID NO: 3095324 - RNA, 19 nt, Artificial Sequence
  Description of Artificial Sequence: Synthetic oligonucleotide
cuaacucccugucgagggg

SEQ ID NO: 3095325 - RNA, 19 nt, Artificial Sequence
  Description of Artificial Sequence: Synthetic oligonucleotide
auguggggcucccagggug

SEQ ID NO: 3095326 - RNA, 19 nt, Artificial Sequence
  Description of Artificial Sequence: Synthetic oligonucleotide
gaaguuggcguccuaggcu

SEQ ID NO: 3095327 - RNA, 19 nt, Artificial Sequence
  Description of Artificial Sequence: Synthetic oligonucleotide
gaaauugccucgaccucug

SEQ ID NO: 3095328 - RNA, 19 nt, Artificial Sequence
  Description of Artificial Sequence: Synthetic oligonucleotide
aagcccaccggggugcauc

SEQ ID NO: 3095329 - RNA, 19 nt, Artificial Sequence
  Description of Artificial Sequence: Synthetic oligonucleotide
agcaagaagcccaccgggg

SEQ ID NO: 3095330 - RNA, 19 nt, Artificial Sequence
  Description of Artificial Sequence: Synthetic oligonucleotide
acuucucuggaaauugccu

SEQ ID NO: 3095331 - RNA, 19 nt, Artificial Sequence
  Description of Artificial Sequence: Synthetic oligonucleotide
ucagcccugaaaacuucuc

SEQ ID NO: 3095332 - RNA, 19 nt, Artificial Sequence
  Description of Artificial Sequence: Synthetic oligonucleotide
gucuaacucccugucgagg

SEQ ID NO: 3095333 - RNA, 19 nt, Artificial Sequence
  Description of Artificial Sequence: Synthetic oligonucleotide
agcaggaacucagucccuc

SEQ ID NO: 3095334 - RNA, 19 nt, Artificial Sequence
  Description of Artificial Sequence: Synthetic oligonucleotide
agcccaccggggugcaucc

SEQ ID NO: 3095335 - RNA, 19 nt, Artificial Sequence
  Description of Artificial Sequence: Synthetic oligonucleotide
auccccgucacuccuguaa

SEQ ID NO: 3095336 - RNA, 19 nt, Artificial Sequence
  Description of Artificial Sequence: Synthetic oligonucleotide
  modified_base (17)..(17): a, c, u, g, unknown or other
aggcgcgaggccuuggnga

SEQ ID NO: 3095337 - RNA, 19 nt, Artificial Sequence
  Description of Artificial Sequence: Synthetic oligonucleotide
aaggaggcaguuggaagaa

SEQ ID NO: 3095338 - RNA, 19 nt, Artificial Sequence
  Description of Artificial Sequence: Synthetic oligonucleotide
ggagaaguuggcguccuag

SEQ ID NO: 3095339 - RNA, 19 nt, Artificial Sequence
  Description of Artificial Sequence: Synthetic oligonucleotide
agccucagcccugaaaacu

SEQ ID NO: 3095340 - RNA, 19 nt, Artificial Sequence
  Description of Artificial Sequence: Synthetic oligonucleotide
aaauugccucgaccucugu

SEQ ID NO: 3095341 - RNA, 19 nt, Artificial Sequence
  Description of Artificial Sequence: Synthetic oligonucleotide
ucucuggaaauugccucga

SEQ ID NO: 3095342 - RNA, 19 nt, Artificial Sequence
  Description of Artificial Sequence: Synthetic oligonucleotide
uggggaaggcgcgaggccu

SEQ ID NO: 3095343 - RNA, 19 nt, Artificial Sequence
  Description of Artificial Sequence: Synthetic oligonucleotide
gccucgaccucugugagag

SEQ ID NO: 3095344 - RNA, 19 nt, Artificial Sequence
  Description of Artificial Sequence: Synthetic oligonucleotide
guggggagaaguuggcguc

SEQ ID NO: 3095345 - RNA, 19 nt, Artificial Sequence
  Description of Artificial Sequence: Synthetic oligonucleotide
ugagaggauguggggcucc

SEQ ID NO: 3095346 - RNA, 19 nt, Artificial Sequence
  Description of Artificial Sequence: Synthetic oligonucleotide
uggcguccuaggcugggga

SEQ ID NO: 3095347 - RNA, 19 nt, Artificial Sequence
  Description of Artificial Sequence: Synthetic oligonucleotide
uggggagaaguuggcgucc

SEQ ID NO: 3095348 - RNA, 19 nt, Artificial Sequence
  Description of Artificial Sequence: Synthetic oligonucleotide
aggaacucagucccucuuu

SEQ ID NO: 3095349 - RNA, 19 nt, Artificial Sequence
  Description of Artificial Sequence: Synthetic oligonucleotide
gaaaacuucucuggaaauu

SEQ ID NO: 3095350 - RNA, 19 nt, Artificial Sequence
  Description of Artificial Sequence: Synthetic oligonucleotide
aggguggggagaaguuggc

SEQ ID NO: 3095351 - RNA, 19 nt, Artificial Sequence
  Description of Artificial Sequence: Synthetic oligonucleotide
accucugugagaggaugug

SEQ ID NO: 3095352 - RNA, 19 nt, Artificial Sequence
  Description of Artificial Sequence: Synthetic oligonucleotide
ccugucgaggggaggaagg

SEQ ID NO: 3095353 - RNA, 19 nt, Artificial Sequence
  Description of Artificial Sequence: Synthetic oligonucleotide
ggugcauccccgucacucc

SEQ ID NO: 3095354 - RNA, 19 nt, Artificial Sequence
  Description of Artificial Sequence: Synthetic oligonucleotide
  modified_base (19)..(19): a, c, u, g, unknown or other
gaaggcgcgaggccuuggn

SEQ ID NO: 3095355 - RNA, 19 nt, Artificial Sequence
  Description of Artificial Sequence: Synthetic oligonucleotide
cucgaccucugugagagga

SEQ ID NO: 3095356 - RNA, 19 nt, Artificial Sequence
  Description of Artificial Sequence: Synthetic oligonucleotide
ccuaggcuggggaaggcgc

SEQ ID NO: 3095357 - RNA, 19 nt, Artificial Sequence
  Description of Artificial Sequence: Synthetic oligonucleotide
aggaaggaggcaguuggaa

SEQ ID NO: 3095358 - RNA, 19 nt, Artificial Sequence
  Description of Artificial Sequence: Synthetic oligonucleotide
uuggcguccuaggcugggg

SEQ ID NO: 3095359 - RNA, 19 nt, Artificial Sequence
  Description of Artificial Sequence: Synthetic oligonucleotide
cucuuuaugccaguccaaa

SEQ ID NO: 3095360 - RNA, 19 nt, Artificial Sequence
  Description of Artificial Sequence: Synthetic oligonucleotide
cuggggaaggcgcgaggcc

SEQ ID NO: 3095361 - RNA, 19 nt, Artificial Sequence
  Description of Artificial Sequence: Synthetic oligonucleotide
accggggugcauccccguc

SEQ ID NO: 3095362 - RNA, 19 nt, Artificial Sequence
  Description of Artificial Sequence: Synthetic oligonucleotide
ucccaggguggggagaagu

SEQ ID NO: 3095363 - RNA, 19 nt, Artificial Sequence
  Description of Artificial Sequence: Synthetic oligonucleotide
ucgaccucugugagaggau

SEQ ID NO: 3095364 - RNA, 19 nt, Artificial Sequence
  Description of Artificial Sequence: Synthetic oligonucleotide
guuggcguccuaggcuggg

SEQ ID NO: 3095365 - RNA, 19 nt, Artificial Sequence
  Description of Artificial Sequence: Synthetic oligonucleotide
aaaaggccuggggccugag

SEQ ID NO: 3095366 - RNA, 19 nt, Artificial Sequence
  Description of Artificial Sequence: Synthetic oligonucleotide
cucuggaaauugccucgac

SEQ ID NO: 3095367 - RNA, 19 nt, Artificial Sequence
  Description of Artificial Sequence: Synthetic oligonucleotide
agucccucuuuaugccagu

SEQ ID NO: 3095368 - RNA, 19 nt, Artificial Sequence
  Description of Artificial Sequence: Synthetic oligonucleotide
caaagccucagcccugaaa

SEQ ID NO: 3095369 - RNA, 19 nt, Artificial Sequence
  Description of Artificial Sequence: Synthetic oligonucleotide
ugccucgaccucugugaga

SEQ ID NO: 3095370 - RNA, 19 nt, Artificial Sequence
  Description of Artificial Sequence: Synthetic oligonucleotide
gagaggauguggggcuccc

SEQ ID NO: 3095371 - RNA, 19 nt, Artificial Sequence
  Description of Artificial Sequence: Synthetic oligonucleotide
ggacagcaggaacucaguc

SEQ ID NO: 3095372 - RNA, 19 nt, Artificial Sequence
  Description of Artificial Sequence: Synthetic oligonucleotide
ggguucaaauaucaagggu

SEQ ID NO: 3095373 - RNA, 19 nt, Artificial Sequence
  Description of Artificial Sequence: Synthetic oligonucleotide
gguggggagaaguuggcgu

SEQ ID NO: 3095374 - RNA, 19 nt, Artificial Sequence
  Description of Artificial Sequence: Synthetic oligonucleotide
cccucuuuaugccagucca

SEQ ID NO: 3095375 - RNA, 19 nt, Artificial Sequence
  Description of Artificial Sequence: Synthetic oligonucleotide
cuggggccugagcaagaag

SEQ ID NO: 3095376 - RNA, 19 nt, Artificial Sequence
  Description of Artificial Sequence: Synthetic oligonucleotide
ggaaauugccucgaccucu

SEQ ID NO: 3095377 - RNA, 19 nt, Artificial Sequence
  Description of Artificial Sequence: Synthetic oligonucleotide
aggaggcaguuggaagaag

SEQ ID NO: 3095378 - RNA, 19 nt, Artificial Sequence
  Description of Artificial Sequence: Synthetic oligonucleotide
aguuggcguccuaggcugg

SEQ ID NO: 3095379 - RNA, 19 nt, Artificial Sequence
  Description of Artificial Sequence: Synthetic oligonucleotide
gaggaaggaggcaguugga

SEQ ID NO: 3095380 - RNA, 19 nt, Artificial Sequence
  Description of Artificial Sequence: Synthetic oligonucleotide
ccucugugagaggaugugg

SEQ ID NO: 3095381 - RNA, 19 nt, Artificial Sequence
  Description of Artificial Sequence: Synthetic oligonucleotide
ggaacucagucccucuuua

SEQ ID NO: 3095382 - RNA, 19 nt, Artificial Sequence
  Description of Artificial Sequence: Synthetic oligonucleotide
gaacucagucccucuuuau

SEQ ID NO: 3095383 - RNA, 19 nt, Artificial Sequence
  Description of Artificial Sequence: Synthetic oligonucleotide
gggugcauccccgucacuc

SEQ ID NO: 3095384 - RNA, 19 nt, Artificial Sequence
  Description of Artificial Sequence: Synthetic oligonucleotide
ggguggggagaaguuggcg

SEQ ID NO: 3095385 - RNA, 19 nt, Artificial Sequence
  Description of Artificial Sequence: Synthetic oligonucleotide
gcuggggaaggcgcgaggc

SEQ ID NO: 3095386 - RNA, 19 nt, Artificial Sequence
  Description of Artificial Sequence: Synthetic oligonucleotide
  modified_base (16)..(16): a, c, u, g, unknown or other
ggcgcgaggccuuggngaa

SEQ ID NO: 3095387 - RNA, 19 nt, Artificial Sequence
  Description of Artificial Sequence: Synthetic oligonucleotide
ggugggacagcaggaacuc

SEQ ID NO: 3095388 - RNA, 19 nt, Artificial Sequence
  Description of Artificial Sequence: Synthetic oligonucleotide
ggggccugagcaagaagcc

SEQ ID NO: 3095389 - RNA, 19 nt, Artificial Sequence
  Description of Artificial Sequence: Synthetic oligonucleotide
cucccugucgaggggagga

SEQ ID NO: 3095390 - RNA, 19 nt, Artificial Sequence
  Description of Artificial Sequence: Synthetic oligonucleotide
cucagcccugaaaacuucu

SEQ ID NO: 3095391 - RNA, 19 nt, Artificial Sequence
  Description of Artificial Sequence: Synthetic oligonucleotide
gauguggggcucccagggu

SEQ ID NO: 3095392 - RNA, 19 nt, Artificial Sequence
  Description of Artificial Sequence: Synthetic oligonucleotide
aggccuggggccugagcaa

SEQ ID NO: 3095393 - RNA, 19 nt, Artificial Sequence
  Description of Artificial Sequence: Synthetic oligonucleotide
agccaaagccucagcccug

SEQ ID NO: 3095394 - RNA, 19 nt, Artificial Sequence
  Description of Artificial Sequence: Synthetic oligonucleotide
gggaggaaggaggcaguug

SEQ ID NO: 3095395 - RNA, 19 nt, Artificial Sequence
  Description of Artificial Sequence: Synthetic oligonucleotide
cugucgaggggaggaagga

SEQ ID NO: 3095396 - RNA, 19 nt, Artificial Sequence
  Description of Artificial Sequence: Synthetic oligonucleotide
gcaagaagcccaccggggu

SEQ ID NO: 3095397 - RNA, 19 nt, Artificial Sequence
  Description of Artificial Sequence: Synthetic oligonucleotide
gaccucugugagaggaugu

SEQ ID NO: 3095398 - RNA, 19 nt, Artificial Sequence
  Description of Artificial Sequence: Synthetic oligonucleotide
aggggaggaaggaggcagu

SEQ ID NO: 3095399 - RNA, 19 nt, Artificial Sequence
  Description of Artificial Sequence: Synthetic oligonucleotide
agaggauguggggcuccca

SEQ ID NO: 3095400 - RNA, 19 nt, Artificial Sequence
  Description of Artificial Sequence: Synthetic oligonucleotide
ccaggguggggagaaguug

SEQ ID NO: 3095401 - RNA, 19 nt, Artificial Sequence
  Description of Artificial Sequence: Synthetic oligonucleotide
gcguccuaggcuggggaag

SEQ ID NO: 3095402 - RNA, 19 nt, Artificial Sequence
  Description of Artificial Sequence: Synthetic oligonucleotide
cccgucacuccuguaaguc

SEQ ID NO: 3095403 - RNA, 19 nt, Artificial Sequence
  Description of Artificial Sequence: Synthetic oligonucleotide
ccaccggggugcauccccg

SEQ ID NO: 3095404 - RNA, 19 nt, Artificial Sequence
  Description of Artificial Sequence: Synthetic oligonucleotide
ucccugucgaggggaggaa

SEQ ID NO: 3095405 - RNA, 19 nt, Artificial Sequence
  Description of Artificial Sequence: Synthetic oligonucleotide
guccuaggcuggggaaggc

SEQ ID NO: 3095406 - RNA, 19 nt, Artificial Sequence
  Description of Artificial Sequence: Synthetic oligonucleotide
ccucagcccugaaaacuuc

SEQ ID NO: 3095407 - RNA, 19 nt, Artificial Sequence
  Description of Artificial Sequence: Synthetic oligonucleotide
gucacuccuguaagucuaa

SEQ ID NO: 3095408 - RNA, 19 nt, Artificial Sequence
  Description of Artificial Sequence: Synthetic oligonucleotide
ggccuggggccugagcaag

SEQ ID NO: 3095409 - RNA, 19 nt, Artificial Sequence
  Description of Artificial Sequence: Synthetic oligonucleotide
gugcauccccgucacuccu

SEQ ID NO: 3095410 - RNA, 19 nt, Artificial Sequence
  Description of Artificial Sequence: Synthetic oligonucleotide
agaagcccaccggggugca

SEQ ID NO: 3095411 - RNA, 19 nt, Artificial Sequence
  Description of Artificial Sequence: Synthetic oligonucleotide
gggugggacagcaggaacu

SEQ ID NO: 3095412 - RNA, 19 nt, Artificial Sequence
  Description of Artificial Sequence: Synthetic oligonucleotide
ggaaggcgcgaggccuugg

SEQ ID NO: 3095413 - RNA, 19 nt, Artificial Sequence
  Description of Artificial Sequence: Synthetic oligonucleotide
ggcguccuaggcuggggaa

SEQ ID NO: 3095414 - RNA, 19 nt, Artificial Sequence
  Description of Artificial Sequence: Synthetic oligonucleotide
ccucuuuaugccaguccaa

SEQ ID NO: 3095415 - RNA, 19 nt, Artificial Sequence
  Description of Artificial Sequence: Synthetic oligonucleotide
cgucacuccuguaagucua

SEQ ID NO: 3095416 - RNA, 19 nt, Artificial Sequence
  Description of Artificial Sequence: Synthetic oligonucleotide
cgaccucugugagaggaug

SEQ ID NO: 3095417 - RNA, 19 nt, Artificial Sequence
  Description of Artificial Sequence: Synthetic oligonucleotide
gccaaagccucagcccuga

SEQ ID NO: 3095418 - RNA, 19 nt, Artificial Sequence
  Description of Artificial Sequence: Synthetic oligonucleotide
cccugucgaggggaggaag

SEQ ID NO: 3095419 - RNA, 19 nt, Artificial Sequence
  Description of Artificial Sequence: Synthetic oligonucleotide
caggaacucagucccucuu

SEQ ID NO: 3095420 - RNA, 19 nt, Artificial Sequence
  Description of Artificial Sequence: Synthetic oligonucleotide
gggcucccaggguggggag

SEQ ID NO: 3095421 - RNA, 19 nt, Artificial Sequence
  Description of Artificial Sequence: Synthetic oligonucleotide
cucccaggguggggagaag

SEQ ID NO: 3095422 - RNA, 19 nt, Artificial Sequence
  Description of Artificial Sequence: Synthetic oligonucleotide
ccucgaccucugugagagg

SEQ ID NO: 3095423 - RNA, 19 nt, Artificial Sequence
  Description of Artificial Sequence: Synthetic oligonucleotide
gggaaggcgcgaggccuug

SEQ ID NO: 3095424 - RNA, 19 nt, Artificial Sequence
  Description of Artificial Sequence: Synthetic oligonucleotide
gcucccaggguggggagaa

SEQ ID NO: 3095425 - RNA, 19 nt, Artificial Sequence
  Description of Artificial Sequence: Synthetic oligonucleotide
ccggggugcauccccguca

SEQ ID NO: 3095426 - RNA, 19 nt, Artificial Sequence
  Description of Artificial Sequence: Synthetic oligonucleotide
gggacagcaggaacucagu

SEQ ID NO: 3095427 - RNA, 19 nt, Artificial Sequence
  Description of Artificial Sequence: Synthetic oligonucleotide
ccgucacuccuguaagucu

SEQ ID NO: 3095428 - RNA, 19 nt, Artificial Sequence
  Description of Artificial Sequence: Synthetic oligonucleotide
cggggugcauccccgucac

SEQ ID NO: 3095429 - RNA, 19 nt, Artificial Sequence
  Description of Artificial Sequence: Synthetic oligonucleotide
gcauccccgucacuccugu

SEQ ID NO: 3095430 - RNA, 19 nt, Artificial Sequence
  Description of Artificial Sequence: Synthetic oligonucleotide
gccucagcccugaaaacuu

SEQ ID NO: 3095431 - RNA, 19 nt, Artificial Sequence
  Description of Artificial Sequence: Synthetic oligonucleotide
  modified_base (14)..(14): a, c, u, g, unknown or other
cgcgaggccuuggngaaaa

SEQ ID NO: 3095432 - RNA, 19 nt, Artificial Sequence
  Description of Artificial Sequence: Synthetic oligonucleotide
gggagaaguuggcguccua

SEQ ID NO: 3095433 - RNA, 19 nt, Artificial Sequence
  Description of Artificial Sequence: Synthetic oligonucleotide
cauccccgucacuccugua

SEQ ID NO: 3095434 - RNA, 19 nt, Artificial Sequence
  Description of Artificial Sequence: Synthetic oligonucleotide
ggggagaaguuggcguccu

SEQ ID NO: 3095435 - RNA, 19 nt, Artificial Sequence
  Description of Artificial Sequence: Synthetic oligonucleotide
ggcucccaggguggggaga

SEQ ID NO: 3095436 - RNA, 19 nt, Artificial Sequence
  Description of Artificial Sequence: Synthetic oligonucleotide
ccuggggccugagcaagaa

SEQ ID NO: 3095437 - RNA, 19 nt, Artificial Sequence
  Description of Artificial Sequence: Synthetic oligonucleotide
caccggggugcauccccgu

SEQ ID NO: 3095438 - RNA, 19 nt, Artificial Sequence
  Description of Artificial Sequence: Synthetic oligonucleotide
gccuggggccugagcaaga

SEQ ID NO: 3095439 - RNA, 19 nt, Artificial Sequence
  Description of Artificial Sequence: Synthetic oligonucleotide
gaagcccaccggggugcau

SEQ ID NO: 3095440 - RNA, 19 nt, Artificial Sequence
  Description of Artificial Sequence: Synthetic oligonucleotide
cccaggguggggagaaguu

SEQ ID NO: 3095441 - RNA, 19 nt, Artificial Sequence
  Description of Artificial Sequence: Synthetic oligonucleotide
ccccgucacuccuguaagu

SEQ ID NO: 3095442 - RNA, 19 nt, Artificial Sequence
  Description of Artificial Sequence: Synthetic oligonucleotide
gcccaccggggugcauccc

SEQ ID NO: 3095443 - RNA, 19 nt, Artificial Sequence
  Description of Artificial Sequence: Synthetic oligonucleotide
ccaaagccucagcccugaa

SEQ ID NO: 3095444 - RNA, 19 nt, Artificial Sequence
  Description of Artificial Sequence: Synthetic oligonucleotide
cgaggggaggaaggaggca

SEQ ID NO: 3095445 - RNA, 19 nt, Artificial Sequence
  Description of Artificial Sequence: Synthetic oligonucleotide
ggggaaggcgcgaggccuu

SEQ ID NO: 3095446 - RNA, 19 nt, Artificial Sequence
  Description of Artificial Sequence: Synthetic oligonucleotide
ggggugcauccccgucacu

SEQ ID NO: 3095447 - RNA, 19 nt, Artificial Sequence
  Description of Artificial Sequence: Synthetic oligonucleotide
  modified_base (15)..(15): a, c, u, g, unknown or other
gcgcgaggccuuggngaaa

SEQ ID NO: 3095448 - RNA, 19 nt, Artificial Sequence
  Description of Artificial Sequence: Synthetic oligonucleotide
aaaacugggaacgcagugc

SEQ ID NO: 3095449 - RNA, 19 nt, Artificial Sequence
  Description of Artificial Sequence: Synthetic oligonucleotide
agugcagcgucccugaccc

SEQ ID NO: 3095450 - RNA, 19 nt, Artificial Sequence
  Description of Artificial Sequence: Synthetic oligonucleotide
uuaagagucggggugaggg

SEQ ID NO: 3095451 - RNA, 19 nt, Artificial Sequence
  Description of Artificial Sequence: Synthetic oligonucleotide
uccuuuaagagucggggug

SEQ ID NO: 3095452 - RNA, 19 nt, Artificial Sequence
  Description of Artificial Sequence: Synthetic oligonucleotide
aggacuggcgaccaagcgc

SEQ ID NO: 3095453 - RNA, 19 nt, Artificial Sequence
  Description of Artificial Sequence: Synthetic oligonucleotide
gauuuccccaugcaaaccc

SEQ ID NO: 3095454 - RNA, 19 nt, Artificial Sequence
  Description of Artificial Sequence: Synthetic oligonucleotide
aaacugggaacgcagugca

SEQ ID NO: 3095455 - RNA, 19 nt, Artificial Sequence
  Description of Artificial Sequence: Synthetic oligonucleotide
aaaccccagaggcagagga

SEQ ID NO: 3095456 - RNA, 19 nt, Artificial Sequence
  Description of Artificial Sequence: Synthetic oligonucleotide
acuccuuuaagagucgggg

SEQ ID NO: 3095457 - RNA, 19 nt, Artificial Sequence
  Description of Artificial Sequence: Synthetic oligonucleotide
cagaggaaaacugggaacg

SEQ ID NO: 3095458 - RNA, 19 nt, Artificial Sequence
  Description of Artificial Sequence: Synthetic oligonucleotide
ugggacacgagacacggga

SEQ ID NO: 3095459 - RNA, 19 nt, Artificial Sequence
  Description of Artificial Sequence: Synthetic oligonucleotide
gaaaacugggaacgcagug

SEQ ID NO: 3095460 - RNA, 19 nt, Artificial Sequence
  Description of Artificial Sequence: Synthetic oligonucleotide
uuuuguugguggcacacuc

SEQ ID NO: 3095461 - RNA, 19 nt, Artificial Sequence
  Description of Artificial Sequence: Synthetic oligonucleotide
uggcacacuccuuuaagag

SEQ ID NO: 3095462 - RNA, 19 nt, Artificial Sequence
  Description of Artificial Sequence: Synthetic oligonucleotide
gacccuugggcacagacac

SEQ ID NO: 3095463 - RNA, 19 nt, Artificial Sequence
  Description of Artificial Sequence: Synthetic oligonucleotide
agcggcauaguugacagag

SEQ ID NO: 3095464 - RNA, 19 nt, Artificial Sequence
  Description of Artificial Sequence: Synthetic oligonucleotide
acagacaccgccauagcac

SEQ ID NO: 3095465 - RNA, 19 nt, Artificial Sequence
  Description of Artificial Sequence: Synthetic oligonucleotide
uuuguugguggcacacucc

SEQ ID NO: 3095466 - RNA, 19 nt, Artificial Sequence
  Description of Artificial Sequence: Synthetic oligonucleotide
aguugacagagggauuucc

SEQ ID NO: 3095467 - RNA, 19 nt, Artificial Sequence
  Description of Artificial Sequence: Synthetic oligonucleotide
ucacccagcggcauaguug

SEQ ID NO: 3095468 - RNA, 19 nt, Artificial Sequence
  Description of Artificial Sequence: Synthetic oligonucleotide
gaggcagaggaaaacuggg

SEQ ID NO: 3095469 - RNA, 19 nt, Artificial Sequence
  Description of Artificial Sequence: Synthetic oligonucleotide
ugacagagggauuucccca

SEQ ID NO: 3095470 - RNA, 19 nt, Artificial Sequence
  Description of Artificial Sequence: Synthetic oligonucleotide
uaagagucggggugagggg

SEQ ID NO: 3095471 - RNA, 19 nt, Artificial Sequence
  Description of Artificial Sequence: Synthetic oligonucleotide
agaggcagaggaaaacugg

SEQ ID NO: 3095472 - RNA, 19 nt, Artificial Sequence
  Description of Artificial Sequence: Synthetic oligonucleotide
agaggaaaacugggaacgc

SEQ ID NO: 3095473 - RNA, 19 nt, Artificial Sequence
  Description of Artificial Sequence: Synthetic oligonucleotide
gacacgagacacgggaggg

SEQ ID NO: 3095474 - RNA, 19 nt, Artificial Sequence
  Description of Artificial Sequence: Synthetic oligonucleotide
ccaugcaaaccccagaggc

SEQ ID NO: 3095475 - RNA, 19 nt, Artificial Sequence
  Description of Artificial Sequence: Synthetic oligonucleotide
augcaaaccccagaggcag

SEQ ID NO: 3095476 - RNA, 19 nt, Artificial Sequence
  Description of Artificial Sequence: Synthetic oligonucleotide
auaguugacagagggauuu

SEQ ID NO: 3095477 - RNA, 19 nt, Artificial Sequence
  Description of Artificial Sequence: Synthetic oligonucleotide
cuggcgaccaagcgcagcg

SEQ ID NO: 3095478 - RNA, 19 nt, Artificial Sequence
  Description of Artificial Sequence: Synthetic oligonucleotide
aggaaaacugggaacgcag

SEQ ID NO: 3095479 - RNA, 19 nt, Artificial Sequence
  Description of Artificial Sequence: Synthetic oligonucleotide
gaggacuggcgaccaagcg

SEQ ID NO: 3095480 - RNA, 19 nt, Artificial Sequence
  Description of Artificial Sequence: Synthetic oligonucleotide
accccgcucaagaugaccc

SEQ ID NO: 3095481 - RNA, 19 nt, Artificial Sequence
  Description of Artificial Sequence: Synthetic oligonucleotide
uguccguccucuccccacg

SEQ ID NO: 3095482 - RNA, 19 nt, Artificial Sequence
  Description of Artificial Sequence: Synthetic oligonucleotide
cuugggcacagacaccgcc

SEQ ID NO: 3095483 - RNA, 19 nt, Artificial Sequence
  Description of Artificial Sequence: Synthetic oligonucleotide
auuuccccaugcaaacccc

SEQ ID NO: 3095484 - RNA, 19 nt, Artificial Sequence
  Description of Artificial Sequence: Synthetic oligonucleotide
ugacccuugggcacagaca

SEQ ID NO: 3095485 - RNA, 19 nt, Artificial Sequence
  Description of Artificial Sequence: Synthetic oligonucleotide
cugggaacgcagugcagcg

SEQ ID NO: 3095486 - RNA, 19 nt, Artificial Sequence
  Description of Artificial Sequence: Synthetic oligonucleotide
cagaggcagaggaaaacug

SEQ ID NO: 3095487 - RNA, 19 nt, Artificial Sequence
  Description of Artificial Sequence: Synthetic oligonucleotide
uugggcacagacaccgcca

SEQ ID NO: 3095488 - RNA, 19 nt, Artificial Sequence
  Description of Artificial Sequence: Synthetic oligonucleotide
uuuccccaugcaaacccca

SEQ ID NO: 3095489 - RNA, 19 nt, Artificial Sequence
  Description of Artificial Sequence: Synthetic oligonucleotide
cacuccuuuaagagucggg

SEQ ID NO: 3095490 - RNA, 19 nt, Artificial Sequence
  Description of Artificial Sequence: Synthetic oligonucleotide
uuuaagagucggggugagg

SEQ ID NO: 3095491 - RNA, 19 nt, Artificial Sequence
  Description of Artificial Sequence: Synthetic oligonucleotide
guugacagagggauuuccc

SEQ ID NO: 3095492 - RNA, 19 nt, Artificial Sequence
  Description of Artificial Sequence: Synthetic oligonucleotide
cacgccacgucacccagcg

SEQ ID NO: 3095493 - RNA, 19 nt, Artificial Sequence
  Description of Artificial Sequence: Synthetic oligonucleotide
gacaccgccauagcacggg

SEQ ID NO: 3095494 - RNA, 19 nt, Artificial Sequence
  Description of Artificial Sequence: Synthetic oligonucleotide
agagggauuuccccaugca

SEQ ID NO: 3095495 - RNA, 19 nt, Artificial Sequence
  Description of Artificial Sequence: Synthetic oligonucleotide
ggacacgagacacgggagg

SEQ ID NO: 3095496 - RNA, 19 nt, Artificial Sequence
  Description of Artificial Sequence: Synthetic oligonucleotide
ggcacagacaccgccauag

SEQ ID NO: 3095497 - RNA, 19 nt, Artificial Sequence
  Description of Artificial Sequence: Synthetic oligonucleotide
cacacuccuuuaagagucg

SEQ ID NO: 3095498 - RNA, 19 nt, Artificial Sequence
  Description of Artificial Sequence: Synthetic oligonucleotide
gagggauuuccccaugcaa

SEQ ID NO: 3095499 - RNA, 19 nt, Artificial Sequence
  Description of Artificial Sequence: Synthetic oligonucleotide
caugcaaaccccagaggca

SEQ ID NO: 3095500 - RNA, 19 nt, Artificial Sequence
  Description of Artificial Sequence: Synthetic oligonucleotide
cagagggauuuccccaugc

SEQ ID NO: 3095501 - RNA, 19 nt, Artificial Sequence
  Description of Artificial Sequence: Synthetic oligonucleotide
agcgcagcggggcagggcu

SEQ ID NO: 3095502 - RNA, 19 nt, Artificial Sequence
  Description of Artificial Sequence: Synthetic oligonucleotide
agggauuuccccaugcaaa

SEQ ID NO: 3095503 - RNA, 19 nt, Artificial Sequence
  Description of Artificial Sequence: Synthetic oligonucleotide
cugacccuugggcacagac

SEQ ID NO: 3095504 - RNA, 19 nt, Artificial Sequence
  Description of Artificial Sequence: Synthetic oligonucleotide
uccccaugcaaaccccaga

SEQ ID NO: 3095505 - RNA, 19 nt, Artificial Sequence
  Description of Artificial Sequence: Synthetic oligonucleotide
cacccagcggcauaguuga

SEQ ID NO: 3095506 - RNA, 19 nt, Artificial Sequence
  Description of Artificial Sequence: Synthetic oligonucleotide
guggcacacuccuuuaaga

SEQ ID NO: 3095507 - RNA, 19 nt, Artificial Sequence
  Description of Artificial Sequence: Synthetic oligonucleotide
gcagaggaaaacugggaac

SEQ ID NO: 3095508 - RNA, 19 nt, Artificial Sequence
  Description of Artificial Sequence: Synthetic oligonucleotide
gggauuuccccaugcaaac

SEQ ID NO: 3095509 - RNA, 19 nt, Artificial Sequence
  Description of Artificial Sequence: Synthetic oligonucleotide
gaggaaaacugggaacgca

SEQ ID NO: 3095510 - RNA, 19 nt, Artificial Sequence
  Description of Artificial Sequence: Synthetic oligonucleotide
acacuccuuuaagagucgg

SEQ ID NO: 3095511 - RNA, 19 nt, Artificial Sequence
  Description of Artificial Sequence: Synthetic oligonucleotide
acuggcgaccaagcgcagc

SEQ ID NO: 3095512 - RNA, 19 nt, Artificial Sequence
  Description of Artificial Sequence: Synthetic oligonucleotide
cuuuaagagucggggugag

SEQ ID NO: 3095513 - RNA, 19 nt, Artificial Sequence
  Description of Artificial Sequence: Synthetic oligonucleotide
aacgcagugcagcgucccu

SEQ ID NO: 3095514 - RNA, 19 nt, Artificial Sequence
  Description of Artificial Sequence: Synthetic oligonucleotide
ccagcggcauaguugacag

SEQ ID NO: 3095515 - RNA, 19 nt, Artificial Sequence
  Description of Artificial Sequence: Synthetic oligonucleotide
cagugcagcgucccugacc

SEQ ID NO: 3095516 - RNA, 19 nt, Artificial Sequence
  Description of Artificial Sequence: Synthetic oligonucleotide
acaccgccauagcacgggg

SEQ ID NO: 3095517 - RNA, 19 nt, Artificial Sequence
  Description of Artificial Sequence: Synthetic oligonucleotide
gcacacuccuuuaagaguc

SEQ ID NO: 3095518 - RNA, 19 nt, Artificial Sequence
  Description of Artificial Sequence: Synthetic oligonucleotide
acagagggauuuccccaug

SEQ ID NO: 3095519 - RNA, 19 nt, Artificial Sequence
  Description of Artificial Sequence: Synthetic oligonucleotide
cacagacaccgccauagca

SEQ ID NO: 3095520 - RNA, 19 nt, Artificial Sequence
  Description of Artificial Sequence: Synthetic oligonucleotide
cggcauaguugacagaggg

SEQ ID NO: 3095521 - RNA, 19 nt, Artificial Sequence
  Description of Artificial Sequence: Synthetic oligonucleotide
ucuccccacgccacgucac

SEQ ID NO: 3095522 - RNA, 19 nt, Artificial Sequence
  Description of Artificial Sequence: Synthetic oligonucleotide
ugcaaaccccagaggcaga

SEQ ID NO: 3095523 - RNA, 19 nt, Artificial Sequence
  Description of Artificial Sequence: Synthetic oligonucleotide
acacgagacacgggagggg

SEQ ID NO: 3095524 - RNA, 19 nt, Artificial Sequence
  Description of Artificial Sequence: Synthetic oligonucleotide
gaacgcagugcagcguccc

SEQ ID NO: 3095525 - RNA, 19 nt, Artificial Sequence
  Description of Artificial Sequence: Synthetic oligonucleotide
ugggcacagacaccgccau

SEQ ID NO: 3095526 - RNA, 19 nt, Artificial Sequence
  Description of Artificial Sequence: Synthetic oligonucleotide
aacugggaacgcagugcag

SEQ ID NO: 3095527 - RNA, 19 nt, Artificial Sequence
  Description of Artificial Sequence: Synthetic oligonucleotide
acgucacccagcggcauag

SEQ ID NO: 3095528 - RNA, 19 nt, Artificial Sequence
  Description of Artificial Sequence: Synthetic oligonucleotide
gucccugacccuugggcac

SEQ ID NO: 3095529 - RNA, 19 nt, Artificial Sequence
  Description of Artificial Sequence: Synthetic oligonucleotide
ggcgaccaagcgcagcggg

SEQ ID NO: 3095530 - RNA, 19 nt, Artificial Sequence
  Description of Artificial Sequence: Synthetic oligonucleotide
ccccaugcaaaccccagag

SEQ ID NO: 3095531 - RNA, 19 nt, Artificial Sequence
  Description of Artificial Sequence: Synthetic oligonucleotide
ggacuggcgaccaagcgca

SEQ ID NO: 3095532 - RNA, 19 nt, Artificial Sequence
  Description of Artificial Sequence: Synthetic oligonucleotide
cuguccguccucuccccac

SEQ ID NO: 3095533 - RNA, 19 nt, Artificial Sequence
  Description of Artificial Sequence: Synthetic oligonucleotide
gacagagggauuuccccau

SEQ ID NO: 3095534 - RNA, 19 nt, Artificial Sequence
  Description of Artificial Sequence: Synthetic oligonucleotide
agcgucccugacccuuggg

SEQ ID NO: 3095535 - RNA, 19 nt, Artificial Sequence
  Description of Artificial Sequence: Synthetic oligonucleotide
gaccccgcucaagaugacc

SEQ ID NO: 3095536 - RNA, 19 nt, Artificial Sequence
  Description of Artificial Sequence: Synthetic oligonucleotide
gggaacgcagugcagcguc

SEQ ID NO: 3095537 - RNA, 19 nt, Artificial Sequence
  Description of Artificial Sequence: Synthetic oligonucleotide
gcauaguugacagagggau

SEQ ID NO: 3095538 - RNA, 19 nt, Artificial Sequence
  Description of Artificial Sequence: Synthetic oligonucleotide
aggcagaggaaaacuggga

SEQ ID NO: 3095539 - RNA, 19 nt, Artificial Sequence
  Description of Artificial Sequence: Synthetic oligonucleotide
ggauuuccccaugcaaacc

SEQ ID NO: 3095540 - RNA, 19 nt, Artificial Sequence
  Description of Artificial Sequence: Synthetic oligonucleotide
caaaccccagaggcagagg

SEQ ID NO: 3095541 - RNA, 19 nt, Artificial Sequence
  Description of Artificial Sequence: Synthetic oligonucleotide
uaguugacagagggauuuc

SEQ ID NO: 3095542 - RNA, 19 nt, Artificial Sequence
  Description of Artificial Sequence: Synthetic oligonucleotide
guccucuccccacgccacg

SEQ ID NO: 3095543 - RNA, 19 nt, Artificial Sequence
  Description of Artificial Sequence: Synthetic oligonucleotide
ugcagcgucccugacccuu

SEQ ID NO: 3095544 - RNA, 19 nt, Artificial Sequence
  Description of Artificial Sequence: Synthetic oligonucleotide
caggggaccccgcucaaga

SEQ ID NO: 3095545 - RNA, 19 nt, Artificial Sequence
  Description of Artificial Sequence: Synthetic oligonucleotide
gcgucccugacccuugggc

SEQ ID NO: 3095546 - RNA, 19 nt, Artificial Sequence
  Description of Artificial Sequence: Synthetic oligonucleotide
ggggaccccgcucaagaug

SEQ ID NO: 3095547 - RNA, 19 nt, Artificial Sequence
  Description of Artificial Sequence: Synthetic oligonucleotide
agacaccgccauagcacgg

SEQ ID NO: 3095548 - RNA, 19 nt, Artificial Sequence
  Description of Artificial Sequence: Synthetic oligonucleotide
cgccacgucacccagcggc

SEQ ID NO: 3095549 - RNA, 19 nt, Artificial Sequence
  Description of Artificial Sequence: Synthetic oligonucleotide
uggcgaccaagcgcagcgg

SEQ ID NO: 3095550 - RNA, 19 nt, Artificial Sequence
  Description of Artificial Sequence: Synthetic oligonucleotide
gcaaaccccagaggcagag

SEQ ID NO: 3095551 - RNA, 19 nt, Artificial Sequence
  Description of Artificial Sequence: Synthetic oligonucleotide
acccuugggcacagacacc

SEQ ID NO: 3095552 - RNA, 19 nt, Artificial Sequence
  Description of Artificial Sequence: Synthetic oligonucleotide
accaagcgcagcggggcag

SEQ ID NO: 3095553 - RNA, 19 nt, Artificial Sequence
  Description of Artificial Sequence: Synthetic oligonucleotide
cgugggacacgagacacgg

SEQ ID NO: 3095554 - RNA, 19 nt, Artificial Sequence
  Description of Artificial Sequence: Synthetic oligonucleotide
uccccacgccacgucaccc

SEQ ID NO: 3095555 - RNA, 19 nt, Artificial Sequence
  Description of Artificial Sequence: Synthetic oligonucleotide
cccaugcaaaccccagagg

SEQ ID NO: 3095556 - RNA, 19 nt, Artificial Sequence
  Description of Artificial Sequence: Synthetic oligonucleotide
cuccccacgccacgucacc

SEQ ID NO: 3095557 - RNA, 19 nt, Artificial Sequence
  Description of Artificial Sequence: Synthetic oligonucleotide
aaccccagaggcagaggaa

SEQ ID NO: 3095558 - RNA, 19 nt, Artificial Sequence
  Description of Artificial Sequence: Synthetic oligonucleotide
acgcagugcagcgucccug

SEQ ID NO: 3095559 - RNA, 19 nt, Artificial Sequence
  Description of Artificial Sequence: Synthetic oligonucleotide
cuccuuuaagagucggggu

SEQ ID NO: 3095560 - RNA, 19 nt, Artificial Sequence
  Description of Artificial Sequence: Synthetic oligonucleotide
ggacaggggaccccgcuca

SEQ ID NO: 3095561 - RNA, 19 nt, Artificial Sequence
  Description of Artificial Sequence: Synthetic oligonucleotide
ugggaacgcagugcagcgu

SEQ ID NO: 3095562 - RNA, 19 nt, Artificial Sequence
  Description of Artificial Sequence: Synthetic oligonucleotide
ucccugacccuugggcaca

SEQ ID NO: 3095563 - RNA, 19 nt, Artificial Sequence
  Description of Artificial Sequence: Synthetic oligonucleotide
ggcacacuccuuuaagagu

SEQ ID NO: 3095564 - RNA, 19 nt, Artificial Sequence
  Description of Artificial Sequence: Synthetic oligonucleotide
gggaccccgcucaagauga

SEQ ID NO: 3095565 - RNA, 19 nt, Artificial Sequence
  Description of Artificial Sequence: Synthetic oligonucleotide
aggggaccccgcucaagau

SEQ ID NO: 3095566 - RNA, 19 nt, Artificial Sequence
  Description of Artificial Sequence: Synthetic oligonucleotide
acaggggaccccgcucaag

SEQ ID NO: 3095567 - RNA, 19 nt, Artificial Sequence
  Description of Artificial Sequence: Synthetic oligonucleotide
uccucuccccacgccacgu

SEQ ID NO: 3095568 - RNA, 19 nt, Artificial Sequence
  Description of Artificial Sequence: Synthetic oligonucleotide
ggcauaguugacagaggga

SEQ ID NO: 3095569 - RNA, 19 nt, Artificial Sequence
  Description of Artificial Sequence: Synthetic oligonucleotide
gggacacgagacacgggag

SEQ ID NO: 3095570 - RNA, 19 nt, Artificial Sequence
  Description of Artificial Sequence: Synthetic oligonucleotide
cucuccccacgccacguca

SEQ ID NO: 3095571 - RNA, 19 nt, Artificial Sequence
  Description of Artificial Sequence: Synthetic oligonucleotide
guccguccucuccccacgc

SEQ ID NO: 3095572 - RNA, 19 nt, Artificial Sequence
  Description of Artificial Sequence: Synthetic oligonucleotide
cagcgucccugacccuugg

SEQ ID NO: 3095573 - RNA, 19 nt, Artificial Sequence
  Description of Artificial Sequence: Synthetic oligonucleotide
cauaguugacagagggauu

SEQ ID NO: 3095574 - RNA, 19 nt, Artificial Sequence
  Description of Artificial Sequence: Synthetic oligonucleotide
ccuuuaagagucgggguga

SEQ ID NO: 3095575 - RNA, 19 nt, Artificial Sequence
  Description of Artificial Sequence: Synthetic oligonucleotide
gcacagacaccgccauagc

SEQ ID NO: 3095576 - RNA, 19 nt, Artificial Sequence
  Description of Artificial Sequence: Synthetic oligonucleotide
cgaggacuggcgaccaagc

SEQ ID NO: 3095577 - RNA, 19 nt, Artificial Sequence
  Description of Artificial Sequence: Synthetic oligonucleotide
gcggcauaguugacagagg

SEQ ID NO: 3095578 - RNA, 19 nt, Artificial Sequence
  Description of Artificial Sequence: Synthetic oligonucleotide
ggccgggaggccccguggg

SEQ ID NO: 3095579 - RNA, 19 nt, Artificial Sequence
  Description of Artificial Sequence: Synthetic oligonucleotide
gcgaccaagcgcagcgggg

SEQ ID NO: 3095580 - RNA, 19 nt, Artificial Sequence
  Description of Artificial Sequence: Synthetic oligonucleotide
ccgugggacacgagacacg

SEQ ID NO: 3095581 - RNA, 19 nt, Artificial Sequence
  Description of Artificial Sequence: Synthetic oligonucleotide
acgccacgucacccagcgg

SEQ ID NO: 3095582 - RNA, 19 nt, Artificial Sequence
  Description of Artificial Sequence: Synthetic oligonucleotide
ggccccgugggacacgaga

SEQ ID NO: 3095583 - RNA, 19 nt, Artificial Sequence
  Description of Artificial Sequence: Synthetic oligonucleotide
caagcgcagcggggcaggg

SEQ ID NO: 3095584 - RNA, 19 nt, Artificial Sequence
  Description of Artificial Sequence: Synthetic oligonucleotide
uccccgcuguccguccucu

SEQ ID NO: 3095585 - RNA, 19 nt, Artificial Sequence
  Description of Artificial Sequence: Synthetic oligonucleotide
ggaacgcagugcagcgucc

SEQ ID NO: 3095586 - RNA, 19 nt, Artificial Sequence
  Description of Artificial Sequence: Synthetic oligonucleotide
cccgugggacacgagacac

SEQ ID NO: 3095587 - RNA, 19 nt, Artificial Sequence
  Description of Artificial Sequence: Synthetic oligonucleotide
ggaaaacugggaacgcagu

SEQ ID NO: 3095588 - RNA, 19 nt, Artificial Sequence
  Description of Artificial Sequence: Synthetic oligonucleotide
ccgaggacuggcgaccaag

SEQ ID NO: 3095589 - RNA, 19 nt, Artificial Sequence
  Description of Artificial Sequence: Synthetic oligonucleotide
gacaggggaccccgcucaa

SEQ ID NO: 3095590 - RNA, 19 nt, Artificial Sequence
  Description of Artificial Sequence: Synthetic oligonucleotide
gacuggcgaccaagcgcag

SEQ ID NO: 3095591 - RNA, 19 nt, Artificial Sequence
  Description of Artificial Sequence: Synthetic oligonucleotide
gaggccccgugggacacga

SEQ ID NO: 3095592 - RNA, 19 nt, Artificial Sequence
  Description of Artificial Sequence: Synthetic oligonucleotide
ccgcuguccguccucuccc

SEQ ID NO: 3095593 - RNA, 19 nt, Artificial Sequence
  Description of Artificial Sequence: Synthetic oligonucleotide
gggacaggggaccccgcuc

SEQ ID NO: 3095594 - RNA, 19 nt, Artificial Sequence
  Description of Artificial Sequence: Synthetic oligonucleotide
ccccgcucaagaugacccc

SEQ ID NO: 3095595 - RNA, 19 nt, Artificial Sequence
  Description of Artificial Sequence: Synthetic oligonucleotide
gggccgggaggccccgugg

SEQ ID NO: 3095596 - RNA, 19 nt, Artificial Sequence
  Description of Artificial Sequence: Synthetic oligonucleotide
ccuugggcacagacaccgc

SEQ ID NO: 3095597 - RNA, 19 nt, Artificial Sequence
  Description of Artificial Sequence: Synthetic oligonucleotide
gucacccagcggcauaguu

SEQ ID NO: 3095598 - RNA, 19 nt, Artificial Sequence
  Description of Artificial Sequence: Synthetic oligonucleotide
gccccgugggacacgagac

SEQ ID NO: 3095599 - RNA, 19 nt, Artificial Sequence
  Description of Artificial Sequence: Synthetic oligonucleotide
ccaagcgcagcggggcagg

SEQ ID NO: 3095600 - RNA, 19 nt, Artificial Sequence
  Description of Artificial Sequence: Synthetic oligonucleotide
cgucccugacccuugggca

SEQ ID NO: 3095601 - RNA, 19 nt, Artificial Sequence
  Description of Artificial Sequence: Synthetic oligonucleotide
acccagcggcauaguugac

SEQ ID NO: 3095602 - RNA, 19 nt, Artificial Sequence
  Description of Artificial Sequence: Synthetic oligonucleotide
cccacgccacgucacccag

SEQ ID NO: 3095603 - RNA, 19 nt, Artificial Sequence
  Description of Artificial Sequence: Synthetic oligonucleotide
cuccccgcuguccguccuc

SEQ ID NO: 3095604 - RNA, 19 nt, Artificial Sequence
  Description of Artificial Sequence: Synthetic oligonucleotide
cagcggcauaguugacaga

SEQ ID NO: 3095605 - RNA, 19 nt, Artificial Sequence
  Description of Artificial Sequence: Synthetic oligonucleotide
cacgucacccagcggcaua

SEQ ID NO: 3095606 - RNA, 19 nt, Artificial Sequence
  Description of Artificial Sequence: Synthetic oligonucleotide
gcagcgucccugacccuug

SEQ ID NO: 3095607 - RNA, 19 nt, Artificial Sequence
  Description of Artificial Sequence: Synthetic oligonucleotide
cguccucuccccacgccac

SEQ ID NO: 3095608 - RNA, 19 nt, Artificial Sequence
  Description of Artificial Sequence: Synthetic oligonucleotide
ggcuccccgcuguccgucc

SEQ ID NO: 3095609 - RNA, 19 nt, Artificial Sequence
  Description of Artificial Sequence: Synthetic oligonucleotide
cccagcggcauaguugaca

SEQ ID NO: 3095610 - RNA, 19 nt, Artificial Sequence
  Description of Artificial Sequence: Synthetic oligonucleotide
gcuguccguccucucccca

SEQ ID NO: 3095611 - RNA, 19 nt, Artificial Sequence
  Description of Artificial Sequence: Synthetic oligonucleotide
ccacgccacgucacccagc

SEQ ID NO: 3095612 - RNA, 19 nt, Artificial Sequence
  Description of Artificial Sequence: Synthetic oligonucleotide
ccguccucuccccacgcca

SEQ ID NO: 3095613 - RNA, 19 nt, Artificial Sequence
  Description of Artificial Sequence: Synthetic oligonucleotide
ggggccgggaggccccgug

SEQ ID NO: 3095614 - RNA, 19 nt, Artificial Sequence
  Description of Artificial Sequence: Synthetic oligonucleotide
gccacgucacccagcggca

SEQ ID NO: 3095615 - RNA, 19 nt, Artificial Sequence
  Description of Artificial Sequence: Synthetic oligonucleotide
ggaggccccgugggacacg

SEQ ID NO: 3095616 - RNA, 19 nt, Artificial Sequence
  Description of Artificial Sequence: Synthetic oligonucleotide
ccgggaggccccgugggac

SEQ ID NO: 3095617 - RNA, 19 nt, Artificial Sequence
  Description of Artificial Sequence: Synthetic oligonucleotide
gggaggccccgugggacac

SEQ ID NO: 3095618 - RNA, 19 nt, Artificial Sequence
  Description of Artificial Sequence: Synthetic oligonucleotide
ggggacaggggaccccgcu

SEQ ID NO: 3095619 - RNA, 19 nt, Artificial Sequence
  Description of Artificial Sequence: Synthetic oligonucleotide
ccccagaggcagaggaaaa

SEQ ID NO: 3095620 - RNA, 19 nt, Artificial Sequence
  Description of Artificial Sequence: Synthetic oligonucleotide
ccccgugggacacgagaca

SEQ ID NO: 3095621 - RNA, 19 nt, Artificial Sequence
  Description of Artificial Sequence: Synthetic oligonucleotide
ccccacgccacgucaccca

SEQ ID NO: 3095622 - RNA, 19 nt, Artificial Sequence
  Description of Artificial Sequence: Synthetic oligonucleotide
gccgggaggccccguggga

SEQ ID NO: 3095623 - RNA, 19 nt, Artificial Sequence
  Description of Artificial Sequence: Synthetic oligonucleotide
ccucuccccacgccacguc

SEQ ID NO: 3095624 - RNA, 19 nt, Artificial Sequence
  Description of Artificial Sequence: Synthetic oligonucleotide
ggaccccgcucaagaugac

SEQ ID NO: 3095625 - RNA, 19 nt, Artificial Sequence
  Description of Artificial Sequence: Synthetic oligonucleotide
aggccccgugggacacgag

SEQ ID NO: 3095626 - RNA, 19 nt, Artificial Sequence
  Description of Artificial Sequence: Synthetic oligonucleotide
gggcuccccgcuguccguc

SEQ ID NO: 3095627 - RNA, 19 nt, Artificial Sequence
  Description of Artificial Sequence: Synthetic oligonucleotide
gcagcggggcagggcugag

SEQ ID NO: 3095628 - RNA, 19 nt, Artificial Sequence
  Description of Artificial Sequence: Synthetic oligonucleotide
cccugacccuugggcacag

SEQ ID NO: 3095629 - RNA, 19 nt, Artificial Sequence
  Description of Artificial Sequence: Synthetic oligonucleotide
gugcagcgucccugacccu

SEQ ID NO: 3095630 - RNA, 19 nt, Artificial Sequence
  Description of Artificial Sequence: Synthetic oligonucleotide
cgggaggccccgugggaca

SEQ ID NO: 3095631 - RNA, 19 nt, Artificial Sequence
  Description of Artificial Sequence: Synthetic oligonucleotide
gcgcagcggggcagggcug

SEQ ID NO: 3095632 - RNA, 19 nt, Artificial Sequence
  Description of Artificial Sequence: Synthetic oligonucleotide
ggggcuccccgcuguccgu

SEQ ID NO: 3095633 - RNA, 19 nt, Artificial Sequence
  Description of Artificial Sequence: Synthetic oligonucleotide
gcuccccgcuguccguccu

SEQ ID NO: 3095634 - RNA, 19 nt, Artificial Sequence
  Description of Artificial Sequence: Synthetic oligonucleotide
ccccgaggacuggcgacca

SEQ ID NO: 3095635 - RNA, 19 nt, Artificial Sequence
  Description of Artificial Sequence: Synthetic oligonucleotide
ccccgcuguccguccucuc

SEQ ID NO: 3095636 - RNA, 19 nt, Artificial Sequence
  Description of Artificial Sequence: Synthetic oligonucleotide
cagcggggcagggcugagu

SEQ ID NO: 3095637 - RNA, 19 nt, Artificial Sequence
  Description of Artificial Sequence: Synthetic oligonucleotide
cgcagcggggcagggcuga

SEQ ID NO: 3095638 - RNA, 19 nt, Artificial Sequence
  Description of Artificial Sequence: Synthetic oligonucleotide
cccgaggacuggcgaccaa

SEQ ID NO: 3095639 - RNA, 19 nt, Artificial Sequence
  Description of Artificial Sequence: Synthetic oligonucleotide
ccugacccuugggcacaga

SEQ ID NO: 3095640 - RNA, 19 nt, Artificial Sequence
  Description of Artificial Sequence: Synthetic oligonucleotide
ccacgucacccagcggcau

SEQ ID NO: 3095641 - RNA, 19 nt, Artificial Sequence
  Description of Artificial Sequence: Synthetic oligonucleotide
cgucacccagcggcauagu

SEQ ID NO: 3095642 - RNA, 19 nt, Artificial Sequence
  Description of Artificial Sequence: Synthetic oligonucleotide
uuguuuuggaaccagaucu

SEQ ID NO: 3095643 - RNA, 19 nt, Artificial Sequence
  Description of Artificial Sequence: Synthetic oligonucleotide
uucuucuuuagcuuccugg

SEQ ID NO: 3095644 - RNA, 19 nt, Artificial Sequence
  Description of Artificial Sequence: Synthetic oligonucleotide
ugauguagcgguuugccug

SEQ ID NO: 3095645 - RNA, 19 nt, Artificial Sequence
  Description of Artificial Sequence: Synthetic oligonucleotide
uggaacuccgccuugaguc

SEQ ID NO: 3095646 - RNA, 19 nt, Artificial Sequence
  Description of Artificial Sequence: Synthetic oligonucleotide
aaugguuguacaguccuug

SEQ ID NO: 3095647 - RNA, 19 nt, Artificial Sequence
  Description of Artificial Sequence: Synthetic oligonucleotide
gauguagcgguuugccugg

SEQ ID NO: 3095648 - RNA, 19 nt, Artificial Sequence
  Description of Artificial Sequence: Synthetic oligonucleotide
aucugggacucguucaggc

SEQ ID NO: 3095649 - RNA, 19 nt, Artificial Sequence
  Description of Artificial Sequence: Synthetic oligonucleotide
ugggccaugaggugcagcg

SEQ ID NO: 3095650 - RNA, 19 nt, Artificial Sequence
  Description of Artificial Sequence: Synthetic oligonucleotide
ucuuuagcuuccuggugcg

SEQ ID NO: 3095651 - RNA, 19 nt, Artificial Sequence
  Description of Artificial Sequence: Synthetic oligonucleotide
uuagcuuccuggugcgugg

SEQ ID NO: 3095652 - RNA, 19 nt, Artificial Sequence
  Description of Artificial Sequence: Synthetic oligonucleotide
guuguacaguccuugggcc

SEQ ID NO: 3095653 - RNA, 19 nt, Artificial Sequence
  Description of Artificial Sequence: Synthetic oligonucleotide
cuugucucccuucucauuc

SEQ ID NO: 3095654 - RNA, 19 nt, Artificial Sequence
  Description of Artificial Sequence: Synthetic oligonucleotide
ugcuccgugauguagcggu

SEQ ID NO: 3095655 - RNA, 19 nt, Artificial Sequence
  Description of Artificial Sequence: Synthetic oligonucleotide
uugaucugggacucguuca

SEQ ID NO: 3095656 - RNA, 19 nt, Artificial Sequence
  Description of Artificial Sequence: Synthetic oligonucleotide
uggucgaaugguuguacag

SEQ ID NO: 3095657 - RNA, 19 nt, Artificial Sequence
  Description of Artificial Sequence: Synthetic oligonucleotide
gguuguacaguccuugggc

SEQ ID NO: 3095658 - RNA, 19 nt, Artificial Sequence
  Description of Artificial Sequence: Synthetic oligonucleotide
cuuguuuuggaaccagauc

SEQ ID NO: 3095659 - RNA, 19 nt, Artificial Sequence
  Description of Artificial Sequence: Synthetic oligonucleotide
cuugagucucugcagcugc

SEQ ID NO: 3095660 - RNA, 19 nt, Artificial Sequence
  Description of Artificial Sequence: Synthetic oligonucleotide
ugcucggccgugaacgccg

SEQ ID NO: 3095661 - RNA, 19 nt, Artificial Sequence
  Description of Artificial Sequence: Synthetic oligonucleotide
gagucucugcagcugcucg

SEQ ID NO: 3095662 - RNA, 19 nt, Artificial Sequence
  Description of Artificial Sequence: Synthetic oligonucleotide
uuuagcuuccuggugcgug

SEQ ID NO: 3095663 - RNA, 19 nt, Artificial Sequence
  Description of Artificial Sequence: Synthetic oligonucleotide
augguuguacaguccuugg

SEQ ID NO: 3095664 - RNA, 19 nt, Artificial Sequence
  Description of Artificial Sequence: Synthetic oligonucleotide
agcugcucggccgugaacg

SEQ ID NO: 3095665 - RNA, 19 nt, Artificial Sequence
  Description of Artificial Sequence: Synthetic oligonucleotide
ucgaaugguuguacagucc

SEQ ID NO: 3095666 - RNA, 19 nt, Artificial Sequence
  Description of Artificial Sequence: Synthetic oligonucleotide
augaggugcagcgccaggc

SEQ ID NO: 3095667 - RNA, 19 nt, Artificial Sequence
  Description of Artificial Sequence: Synthetic oligonucleotide
uugaucuuggcacgcuugu

SEQ ID NO: 3095668 - RNA, 19 nt, Artificial Sequence
  Description of Artificial Sequence: Synthetic oligonucleotide
uccuggaccgugguggucg

SEQ ID NO: 3095669 - RNA, 19 nt, Artificial Sequence
  Description of Artificial Sequence: Synthetic oligonucleotide
gacucguucaggcugagcu

SEQ ID NO: 3095670 - RNA, 19 nt, Artificial Sequence
  Description of Artificial Sequence: Synthetic oligonucleotide
ugaacgccguccucggccg

SEQ ID NO: 3095671 - RNA, 19 nt, Artificial Sequence
  Description of Artificial Sequence: Synthetic oligonucleotide
aguccuugggccaugaggu

SEQ ID NO: 3095672 - RNA, 19 nt, Artificial Sequence
  Description of Artificial Sequence: Synthetic oligonucleotide
cuugaucugggacucguuc

SEQ ID NO: 3095673 - RNA, 19 nt, Artificial Sequence
  Description of Artificial Sequence: Synthetic oligonucleotide
cuuggcacgcuuguuuugg

SEQ ID NO: 3095674 - RNA, 19 nt, Artificial Sequence
  Description of Artificial Sequence: Synthetic oligonucleotide
gucgaaugguuguacaguc

SEQ ID NO: 3095675 - RNA, 19 nt, Artificial Sequence
  Description of Artificial Sequence: Synthetic oligonucleotide
acucguucaggcugagcuc

SEQ ID NO: 3095676 - RNA, 19 nt, Artificial Sequence
  Description of Artificial Sequence: Synthetic oligonucleotide
uuuguccuggaccguggug

SEQ ID NO: 3095677 - RNA, 19 nt, Artificial Sequence
  Description of Artificial Sequence: Synthetic oligonucleotide
uuguacaguccuugggcca

SEQ ID NO: 3095678 - RNA, 19 nt, Artificial Sequence
  Description of Artificial Sequence: Synthetic oligonucleotide
ugaggugcagcgccaggcc

SEQ ID NO: 3095679 - RNA, 19 nt, Artificial Sequence
  Description of Artificial Sequence: Synthetic oligonucleotide
gugaacgccguccucggcc

SEQ ID NO: 3095680 - RNA, 19 nt, Artificial Sequence
  Description of Artificial Sequence: Synthetic oligonucleotide
uagcgguuugccuggaacu

SEQ ID NO: 3095681 - RNA, 19 nt, Artificial Sequence
  Description of Artificial Sequence: Synthetic oligonucleotide
gaccgugguggucgaaugg

SEQ ID NO: 3095682 - RNA, 19 nt, Artificial Sequence
  Description of Artificial Sequence: Synthetic oligonucleotide
cucguucaggcugagcucc

SEQ ID NO: 3095683 - RNA, 19 nt, Artificial Sequence
  Description of Artificial Sequence: Synthetic oligonucleotide
uccgugauguagcgguuug

SEQ ID NO: 3095684 - RNA, 19 nt, Artificial Sequence
  Description of Artificial Sequence: Synthetic oligonucleotide
gaggugcagcgccaggccg

SEQ ID NO: 3095685 - RNA, 19 nt, Artificial Sequence
  Description of Artificial Sequence: Synthetic oligonucleotide
guagcgguuugccuggaac

SEQ ID NO: 3095686 - RNA, 19 nt, Artificial Sequence
  Description of Artificial Sequence: Synthetic oligonucleotide
ucucccuucucauucuuuu

SEQ ID NO: 3095687 - RNA, 19 nt, Artificial Sequence
  Description of Artificial Sequence: Synthetic oligonucleotide
augcccguggcuuucuuga

SEQ ID NO: 3095688 - RNA, 19 nt, Artificial Sequence
  Description of Artificial Sequence: Synthetic oligonucleotide
uccuugggccaugaggugc

SEQ ID NO: 3095689 - RNA, 19 nt, Artificial Sequence
  Description of Artificial Sequence: Synthetic oligonucleotide
guuugccuggaacuccgcc

SEQ ID NO: 3095690 - RNA, 19 nt, Artificial Sequence
  Description of Artificial Sequence: Synthetic oligonucleotide
gaugcccguggcuuucuug

SEQ ID NO: 3095691 - RNA, 19 nt, Artificial Sequence
  Description of Artificial Sequence: Synthetic oligonucleotide
ucuuggcacgcuuguuuug

SEQ ID NO: 3095692 - RNA, 19 nt, Artificial Sequence
  Description of Artificial Sequence: Synthetic oligonucleotide
agcgguuugccuggaacuc

SEQ ID NO: 3095693 - RNA, 19 nt, Artificial Sequence
  Description of Artificial Sequence: Synthetic oligonucleotide
ugggacucguucaggcuga

SEQ ID NO: 3095694 - RNA, 19 nt, Artificial Sequence
  Description of Artificial Sequence: Synthetic oligonucleotide
ugcagcgccaggccguucu

SEQ ID NO: 3095695 - RNA, 19 nt, Artificial Sequence
  Description of Artificial Sequence: Synthetic oligonucleotide
uucuugaugcccguggcuu

SEQ ID NO: 3095696 - RNA, 19 nt, Artificial Sequence
  Description of Artificial Sequence: Synthetic oligonucleotide
uccucggccgcuugucucc

SEQ ID NO: 3095697 - RNA, 19 nt, Artificial Sequence
  Description of Artificial Sequence: Synthetic oligonucleotide
aucuuggcacgcuuguuuu

SEQ ID NO: 3095698 - RNA, 19 nt, Artificial Sequence
  Description of Artificial Sequence: Synthetic oligonucleotide
gcacgcuuguuuuggaacc

SEQ ID NO: 3095699 - RNA, 19 nt, Artificial Sequence
  Description of Artificial Sequence: Synthetic oligonucleotide
uguacaguccuugggccau

SEQ ID NO: 3095700 - RNA, 19 nt, Artificial Sequence
  Description of Artificial Sequence: Synthetic oligonucleotide
ucggccgugaacgccgucc

SEQ ID NO: 3095701 - RNA, 19 nt, Artificial Sequence
  Description of Artificial Sequence: Synthetic oligonucleotide
uugagucucugcagcugcu

SEQ ID NO: 3095702 - RNA, 19 nt, Artificial Sequence
  Description of Artificial Sequence: Synthetic oligonucleotide
ugggccagggucugucgcc

SEQ ID NO: 3095703 - RNA, 19 nt, Artificial Sequence
  Description of Artificial Sequence: Synthetic oligonucleotide
ggcacgcuuguuuuggaac

SEQ ID NO: 3095704 - RNA, 19 nt, Artificial Sequence
  Description of Artificial Sequence: Synthetic oligonucleotide
caugaggugcagcgccagg

SEQ ID NO: 3095705 - RNA, 19 nt, Artificial Sequence
  Description of Artificial Sequence: Synthetic oligonucleotide
gaucuuggcacgcuuguuu

SEQ ID NO: 3095706 - RNA, 19 nt, Artificial Sequence
  Description of Artificial Sequence: Synthetic oligonucleotide
cuuccuggugcguggacca

SEQ ID NO: 3095707 - RNA, 19 nt, Artificial Sequence
  Description of Artificial Sequence: Synthetic oligonucleotide
ggccaugaggugcagcgcc

SEQ ID NO: 3095708 - RNA, 19 nt, Artificial Sequence
  Description of Artificial Sequence: Synthetic oligonucleotide
agcgccaggccguucuuga

SEQ ID NO: 3095709 - RNA, 19 nt, Artificial Sequence
  Description of Artificial Sequence: Synthetic oligonucleotide
aggccguucuugaugcccg

SEQ ID NO: 3095710 - RNA, 19 nt, Artificial Sequence
  Description of Artificial Sequence: Synthetic oligonucleotide
gccaggccguucuugaugc

SEQ ID NO: 3095711 - RNA, 19 nt, Artificial Sequence
  Description of Artificial Sequence: Synthetic oligonucleotide
gcugcuccgugauguagcg

SEQ ID NO: 3095712 - RNA, 19 nt, Artificial Sequence
  Description of Artificial Sequence: Synthetic oligonucleotide
agcuuccuggugcguggac

SEQ ID NO: 3095713 - RNA, 19 nt, Artificial Sequence
  Description of Artificial Sequence: Synthetic oligonucleotide
caggccguucuugaugccc

SEQ ID NO: 3095714 - RNA, 19 nt, Artificial Sequence
  Description of Artificial Sequence: Synthetic oligonucleotide
ucuugaugcccguggcuuu

SEQ ID NO: 3095715 - RNA, 19 nt, Artificial Sequence
  Description of Artificial Sequence: Synthetic oligonucleotide
uucuugaucuuggcacgcu

SEQ ID NO: 3095716 - RNA, 19 nt, Artificial Sequence
  Description of Artificial Sequence: Synthetic oligonucleotide
ucuugaucugggacucguu

SEQ ID NO: 3095717 - RNA, 19 nt, Artificial Sequence
  Description of Artificial Sequence: Synthetic oligonucleotide
uuggcacgcuuguuuugga

SEQ ID NO: 3095718 - RNA, 19 nt, Artificial Sequence
  Description of Artificial Sequence: Synthetic oligonucleotide
guggucgaaugguuguaca

SEQ ID NO: 3095719 - RNA, 19 nt, Artificial Sequence
  Description of Artificial Sequence: Synthetic oligonucleotide
uguccuggaccgugguggu

SEQ ID NO: 3095720 - RNA, 19 nt, Artificial Sequence
  Description of Artificial Sequence: Synthetic oligonucleotide
uggcacgcuuguuuuggaa

SEQ ID NO: 3095721 - RNA, 19 nt, Artificial Sequence
  Description of Artificial Sequence: Synthetic oligonucleotide
accgugguggucgaauggu

SEQ ID NO: 3095722 - RNA, 19 nt, Artificial Sequence
  Description of Artificial Sequence: Synthetic oligonucleotide
cugggccagggucugucgc

SEQ ID NO: 3095723 - RNA, 19 nt, Artificial Sequence
  Description of Artificial Sequence: Synthetic oligonucleotide
gccgugaacgccguccucg

SEQ ID NO: 3095724 - RNA, 19 nt, Artificial Sequence
  Description of Artificial Sequence: Synthetic oligonucleotide
ggucugucgccgcugcucc

SEQ ID NO: 3095725 - RNA, 19 nt, Artificial Sequence
  Description of Artificial Sequence: Synthetic oligonucleotide
uguagcgguuugccuggaa

SEQ ID NO: 3095726 - RNA, 19 nt, Artificial Sequence
  Description of Artificial Sequence: Synthetic oligonucleotide
ggcuuucuugaucuuggca

SEQ ID NO: 3095727 - RNA, 19 nt, Artificial Sequence
  Description of Artificial Sequence: Synthetic oligonucleotide
ugagucucugcagcugcuc

SEQ ID NO: 3095728 - RNA, 19 nt, Artificial Sequence
  Description of Artificial Sequence: Synthetic oligonucleotide
gucucugcagcugcucggc

SEQ ID NO: 3095729 - RNA, 19 nt, Artificial Sequence
  Description of Artificial Sequence: Synthetic oligonucleotide
cugagcuccugggccaggg

SEQ ID NO: 3095730 - RNA, 19 nt, Artificial Sequence
  Description of Artificial Sequence: Synthetic oligonucleotide
ugucucccuucucauucuu

SEQ ID NO: 3095731 - RNA, 19 nt, Artificial Sequence
  Description of Artificial Sequence: Synthetic oligonucleotide
ucugucgccgcugcuccgu

SEQ ID NO: 3095732 - RNA, 19 nt, Artificial Sequence
  Description of Artificial Sequence: Synthetic oligonucleotide
ugagcuccugggccagggu

SEQ ID NO: 3095733 - RNA, 19 nt, Artificial Sequence
  Description of Artificial Sequence: Synthetic oligonucleotide
ccguucuugaugcccgugg

SEQ ID NO: 3095734 - RNA, 19 nt, Artificial Sequence
  Description of Artificial Sequence: Synthetic oligonucleotide
acgcuuguuuuggaaccag

SEQ ID NO: 3095735 - RNA, 19 nt, Artificial Sequence
  Description of Artificial Sequence: Synthetic oligonucleotide
uggaccgugguggucgaau

SEQ ID NO: 3095736 - RNA, 19 nt, Artificial Sequence
  Description of Artificial Sequence: Synthetic oligonucleotide
cuugaugcccguggcuuuc

SEQ ID NO: 3095737 - RNA, 19 nt, Artificial Sequence
  Description of Artificial Sequence: Synthetic oligonucleotide
ugccuggaacuccgccuug

SEQ ID NO: 3095738 - RNA, 19 nt, Artificial Sequence
  Description of Artificial Sequence: Synthetic oligonucleotide
ucguucaggcugagcuccu

SEQ ID NO: 3095739 - RNA, 19 nt, Artificial Sequence
  Description of Artificial Sequence: Synthetic oligonucleotide
guccuugggccaugaggug

SEQ ID NO: 3095740 - RNA, 19 nt, Artificial Sequence
  Description of Artificial Sequence: Synthetic oligonucleotide
uacaguccuugggccauga

SEQ ID NO: 3095741 - RNA, 19 nt, Artificial Sequence
  Description of Artificial Sequence: Synthetic oligonucleotide
gugguggucgaaugguugu

SEQ ID NO: 3095742 - RNA, 19 nt, Artificial Sequence
  Description of Artificial Sequence: Synthetic oligonucleotide
ggaccgugguggucgaaug

SEQ ID NO: 3095743 - RNA, 19 nt, Artificial Sequence
  Description of Artificial Sequence: Synthetic oligonucleotide
gugauguagcgguuugccu

SEQ ID NO: 3095744 - RNA, 19 nt, Artificial Sequence
  Description of Artificial Sequence: Synthetic oligonucleotide
aacuccgccuugagucucu

SEQ ID NO: 3095745 - RNA, 19 nt, Artificial Sequence
  Description of Artificial Sequence: Synthetic oligonucleotide
ugaucuuggcacgcuuguu

SEQ ID NO: 3095746 - RNA, 19 nt, Artificial Sequence
  Description of Artificial Sequence: Synthetic oligonucleotide
gaacuccgccuugagucuc

SEQ ID NO: 3095747 - RNA, 19 nt, Artificial Sequence
  Description of Artificial Sequence: Synthetic oligonucleotide
uugggccaugaggugcagc

SEQ ID NO: 3095748 - RNA, 19 nt, Artificial Sequence
  Description of Artificial Sequence: Synthetic oligonucleotide
aacgccguccucggccgcu

SEQ ID NO: 3095749 - RNA, 19 nt, Artificial Sequence
  Description of Artificial Sequence: Synthetic oligonucleotide
guucuugaugcccguggcu

SEQ ID NO: 3095750 - RNA, 19 nt, Artificial Sequence
  Description of Artificial Sequence: Synthetic oligonucleotide
gucugucgccgcugcuccg

SEQ ID NO: 3095751 - RNA, 19 nt, Artificial Sequence
  Description of Artificial Sequence: Synthetic oligonucleotide
gguggucgaaugguuguac

SEQ ID NO: 3095752 - RNA, 19 nt, Artificial Sequence
  Description of Artificial Sequence: Synthetic oligonucleotide
ugguggucgaaugguugua

SEQ ID NO: 3095753 - RNA, 19 nt, Artificial Sequence
  Description of Artificial Sequence: Synthetic oligonucleotide
cgugguggucgaaugguug

SEQ ID NO: 3095754 - RNA, 19 nt, Artificial Sequence
  Description of Artificial Sequence: Synthetic oligonucleotide
ugucgccgcugcuccguga

SEQ ID NO: 3095755 - RNA, 19 nt, Artificial Sequence
  Description of Artificial Sequence: Synthetic oligonucleotide
uccugggccagggucuguc

SEQ ID NO: 3095756 - RNA, 19 nt, Artificial Sequence
  Description of Artificial Sequence: Synthetic oligonucleotide
cuccgccuugagucucugc

SEQ ID NO: 3095757 - RNA, 19 nt, Artificial Sequence
  Description of Artificial Sequence: Synthetic oligonucleotide
cguucuugaugcccguggc

SEQ ID NO: 3095758 - RNA, 19 nt, Artificial Sequence
  Description of Artificial Sequence: Synthetic oligonucleotide
cugcucggccgugaacgcc

SEQ ID NO: 3095759 - RNA, 19 nt, Artificial Sequence
  Description of Artificial Sequence: Synthetic oligonucleotide
cgguuugccuggaacuccg

SEQ ID NO: 3095760 - RNA, 19 nt, Artificial Sequence
  Description of Artificial Sequence: Synthetic oligonucleotide
uagcuuccuggugcgugga

SEQ ID NO: 3095761 - RNA, 19 nt, Artificial Sequence
  Description of Artificial Sequence: Synthetic oligonucleotide
ucggccgcuugucucccuu

SEQ ID NO: 3095762 - RNA, 19 nt, Artificial Sequence
  Description of Artificial Sequence: Synthetic oligonucleotide
cugcuccgugauguagcgg

SEQ ID NO: 3095763 - RNA, 19 nt, Artificial Sequence
  Description of Artificial Sequence: Synthetic oligonucleotide
cacgcuuguuuuggaacca

SEQ ID NO: 3095764 - RNA, 19 nt, Artificial Sequence
  Description of Artificial Sequence: Synthetic oligonucleotide
ggucgaaugguuguacagu

SEQ ID NO: 3095765 - RNA, 19 nt, Artificial Sequence
  Description of Artificial Sequence: Synthetic oligonucleotide
ugcccguggcuuucuugau

SEQ ID NO: 3095766 - RNA, 19 nt, Artificial Sequence
  Description of Artificial Sequence: Synthetic oligonucleotide
ugaugcccguggcuuucuu

SEQ ID NO: 3095767 - RNA, 19 nt, Artificial Sequence
  Description of Artificial Sequence: Synthetic oligonucleotide
aggugcagcgccaggccgu

SEQ ID NO: 3095768 - RNA, 19 nt, Artificial Sequence
  Description of Artificial Sequence: Synthetic oligonucleotide
ucgccgcugcuccgugaug

SEQ ID NO: 3095769 - RNA, 19 nt, Artificial Sequence
  Description of Artificial Sequence: Synthetic oligonucleotide
gaacgccguccucggccgc

SEQ ID NO: 3095770 - RNA, 19 nt, Artificial Sequence
  Description of Artificial Sequence: Synthetic oligonucleotide
cgcugcuccgugauguagc

SEQ ID NO: 3095771 - RNA, 19 nt, Artificial Sequence
  Description of Artificial Sequence: Synthetic oligonucleotide
cgccuugagucucugcagc

SEQ ID NO: 3095772 - RNA, 19 nt, Artificial Sequence
  Description of Artificial Sequence: Synthetic oligonucleotide
gcgguuugccuggaacucc

SEQ ID NO: 3095773 - RNA, 19 nt, Artificial Sequence
  Description of Artificial Sequence: Synthetic oligonucleotide
gcugcucggccgugaacgc

SEQ ID NO: 3095774 - RNA, 19 nt, Artificial Sequence
  Description of Artificial Sequence: Synthetic oligonucleotide
ccuggaacuccgccuugag

SEQ ID NO: 3095775 - RNA, 19 nt, Artificial Sequence
  Description of Artificial Sequence: Synthetic oligonucleotide
ccgugaacgccguccucgg

SEQ ID NO: 3095776 - RNA, 19 nt, Artificial Sequence
  Description of Artificial Sequence: Synthetic oligonucleotide
ggaacuccgccuugagucu

SEQ ID NO: 3095777 - RNA, 19 nt, Artificial Sequence
  Description of Artificial Sequence: Synthetic oligonucleotide
ccuugagucucugcagcug

SEQ ID NO: 3095778 - RNA, 19 nt, Artificial Sequence
  Description of Artificial Sequence: Synthetic oligonucleotide
cuggaacuccgccuugagu

SEQ ID NO: 3095779 - RNA, 19 nt, Artificial Sequence
  Description of Artificial Sequence: Synthetic oligonucleotide
gcuuguuuuggaaccagau

SEQ ID NO: 3095780 - RNA, 19 nt, Artificial Sequence
  Description of Artificial Sequence: Synthetic oligonucleotide
guacaguccuugggccaug

SEQ ID NO: 3095781 - RNA, 19 nt, Artificial Sequence
  Description of Artificial Sequence: Synthetic oligonucleotide
cguggcuuucuugaucuug

SEQ ID NO: 3095782 - RNA, 19 nt, Artificial Sequence
  Description of Artificial Sequence: Synthetic oligonucleotide
cuugggccaugaggugcag

SEQ ID NO: 3095783 - RNA, 19 nt, Artificial Sequence
  Description of Artificial Sequence: Synthetic oligonucleotide
gaaugguuguacaguccuu

SEQ ID NO: 3095784 - RNA, 19 nt, Artificial Sequence
  Description of Artificial Sequence: Synthetic oligonucleotide
cuuuguccuggaccguggu

SEQ ID NO: 3095785 - RNA, 19 nt, Artificial Sequence
  Description of Artificial Sequence: Synthetic oligonucleotide
cgaaugguuguacaguccu

SEQ ID NO: 3095786 - RNA, 19 nt, Artificial Sequence
  Description of Artificial Sequence: Synthetic oligonucleotide
gggucugucgccgcugcuc

SEQ ID NO: 3095787 - RNA, 19 nt, Artificial Sequence
  Description of Artificial Sequence: Synthetic oligonucleotide
cugucgccgcugcuccgug

SEQ ID NO: 3095788 - RNA, 19 nt, Artificial Sequence
  Description of Artificial Sequence: Synthetic oligonucleotide
cccguggcuuucuugaucu

SEQ ID NO: 3095789 - RNA, 19 nt, Artificial Sequence
  Description of Artificial Sequence: Synthetic oligonucleotide
ccgcuugucucccuucuca

SEQ ID NO: 3095790 - RNA, 19 nt, Artificial Sequence
  Description of Artificial Sequence: Synthetic oligonucleotide
gcccguggcuuucuugauc

SEQ ID NO: 3095791 - RNA, 19 nt, Artificial Sequence
  Description of Artificial Sequence: Synthetic oligonucleotide
acuccgccuugagucucug

SEQ ID NO: 3095792 - RNA, 19 nt, Artificial Sequence
  Description of Artificial Sequence: Synthetic oligonucleotide
gguuugccuggaacuccgc

SEQ ID NO: 3095793 - RNA, 19 nt, Artificial Sequence
  Description of Artificial Sequence: Synthetic oligonucleotide
cagcgccaggccguucuug

SEQ ID NO: 3095794 - RNA, 19 nt, Artificial Sequence
  Description of Artificial Sequence: Synthetic oligonucleotide
ccaugaggugcagcgccag

SEQ ID NO: 3095795 - RNA, 19 nt, Artificial Sequence
  Description of Artificial Sequence: Synthetic oligonucleotide
auguagcgguuugccugga

SEQ ID NO: 3095796 - RNA, 19 nt, Artificial Sequence
  Description of Artificial Sequence: Synthetic oligonucleotide
ccgugauguagcgguuugc

SEQ ID NO: 3095797 - RNA, 19 nt, Artificial Sequence
  Description of Artificial Sequence: Synthetic oligonucleotide
ggcugagcuccugggccag

SEQ ID NO: 3095798 - RNA, 19 nt, Artificial Sequence
  Description of Artificial Sequence: Synthetic oligonucleotide
gggccaugaggugcagcgc

SEQ ID NO: 3095799 - RNA, 19 nt, Artificial Sequence
  Description of Artificial Sequence: Synthetic oligonucleotide
gucgccgcugcuccgugau

SEQ ID NO: 3095800 - RNA, 19 nt, Artificial Sequence
  Description of Artificial Sequence: Synthetic oligonucleotide
ggacucguucaggcugagc

SEQ ID NO: 3095801 - RNA, 19 nt, Artificial Sequence
  Description of Artificial Sequence: Synthetic oligonucleotide
gccguucuugaugcccgug

SEQ ID NO: 3095802 - RNA, 19 nt, Artificial Sequence
  Description of Artificial Sequence: Synthetic oligonucleotide
ccaggccguucuugaugcc

SEQ ID NO: 3095803 - RNA, 19 nt, Artificial Sequence
  Description of Artificial Sequence: Synthetic oligonucleotide
gccgcuugucucccuucuc

SEQ ID NO: 3095804 - RNA, 19 nt, Artificial Sequence
  Description of Artificial Sequence: Synthetic oligonucleotide
ggccagggucugucgccgc

SEQ ID NO: 3095805 - RNA, 19 nt, Artificial Sequence
  Description of Artificial Sequence: Synthetic oligonucleotide
gccaugaggugcagcgcca

SEQ ID NO: 3095806 - RNA, 19 nt, Artificial Sequence
  Description of Artificial Sequence: Synthetic oligonucleotide
cgcuuguuuuggaaccaga

SEQ ID NO: 3095807 - RNA, 19 nt, Artificial Sequence
  Description of Artificial Sequence: Synthetic oligonucleotide
gcugagcuccugggccagg

SEQ ID NO: 3095808 - RNA, 19 nt, Artificial Sequence
  Description of Artificial Sequence: Synthetic oligonucleotide
ccgcugcuccgugauguag

SEQ ID NO: 3095809 - RNA, 19 nt, Artificial Sequence
  Description of Artificial Sequence: Synthetic oligonucleotide
cuuuagcuuccuggugcgu

SEQ ID NO: 3095810 - RNA, 19 nt, Artificial Sequence
  Description of Artificial Sequence: Synthetic oligonucleotide
gccuggaacuccgccuuga

SEQ ID NO: 3095811 - RNA, 19 nt, Artificial Sequence
  Description of Artificial Sequence: Synthetic oligonucleotide
gggacucguucaggcugag

SEQ ID NO: 3095812 - RNA, 19 nt, Artificial Sequence
  Description of Artificial Sequence: Synthetic oligonucleotide
cucggccgugaacgccguc

SEQ ID NO: 3095813 - RNA, 19 nt, Artificial Sequence
  Description of Artificial Sequence: Synthetic oligonucleotide
cgugaacgccguccucggc

SEQ ID NO: 3095814 - RNA, 19 nt, Artificial Sequence
  Description of Artificial Sequence: Synthetic oligonucleotide
ggccgcuugucucccuucu

SEQ ID NO: 3095815 - RNA, 19 nt, Artificial Sequence
  Description of Artificial Sequence: Synthetic oligonucleotide
gcuugucucccuucucauu

SEQ ID NO: 3095816 - RNA, 19 nt, Artificial Sequence
  Description of Artificial Sequence: Synthetic oligonucleotide
gucucccuucucauucuuu

SEQ ID NO: 3095817 - RNA, 19 nt, Artificial Sequence
  Description of Artificial Sequence: Synthetic oligonucleotide
cuccgugauguagcgguuu

SEQ ID NO: 3095818 - RNA, 19 nt, Artificial Sequence
  Description of Artificial Sequence: Synthetic oligonucleotide
ccucggccgcuugucuccc

SEQ ID NO: 3095819 - RNA, 19 nt, Artificial Sequence
  Description of Artificial Sequence: Synthetic oligonucleotide
ccguccucggccgcuuguc

SEQ ID NO: 3095820 - RNA, 19 nt, Artificial Sequence
  Description of Artificial Sequence: Synthetic oligonucleotide
ccuggaccgugguggucga

SEQ ID NO: 3095821 - RNA, 19 nt, Artificial Sequence
  Description of Artificial Sequence: Synthetic oligonucleotide
ggccguucuugaugcccgu

SEQ ID NO: 3095822 - RNA, 19 nt, Artificial Sequence
  Description of Artificial Sequence: Synthetic oligonucleotide
acgccguccucggccgcuu

SEQ ID NO: 3095823 - RNA, 19 nt, Artificial Sequence
  Description of Artificial Sequence: Synthetic oligonucleotide
gccgcugcuccgugaugua

SEQ ID NO: 3095824 - RNA, 19 nt, Artificial Sequence
  Description of Artificial Sequence: Synthetic oligonucleotide
cuggaccgugguggucgaa

SEQ ID NO: 3095825 - RNA, 19 nt, Artificial Sequence
  Description of Artificial Sequence: Synthetic oligonucleotide
gccguccucggccgcuugu

SEQ ID NO: 3095826 - RNA, 19 nt, Artificial Sequence
  Description of Artificial Sequence: Synthetic oligonucleotide
cucggccgcuugucucccu

SEQ ID NO: 3095827 - RNA, 19 nt, Artificial Sequence
  Description of Artificial Sequence: Synthetic oligonucleotide
cggccgcuugucucccuuc

SEQ ID NO: 3095828 - RNA, 19 nt, Artificial Sequence
  Description of Artificial Sequence: Synthetic oligonucleotide
ccgugguggucgaaugguu

SEQ ID NO: 3095829 - RNA, 19 nt, Artificial Sequence
  Description of Artificial Sequence: Synthetic oligonucleotide
cgcuugucucccuucucau

SEQ ID NO: 3095830 - RNA, 19 nt, Artificial Sequence
  Description of Artificial Sequence: Synthetic oligonucleotide
gcgccaggccguucuugau

SEQ ID NO: 3095831 - RNA, 19 nt, Artificial Sequence
  Description of Artificial Sequence: Synthetic oligonucleotide
ggugcagcgccaggccguu

SEQ ID NO: 3095832 - RNA, 19 nt, Artificial Sequence
  Description of Artificial Sequence: Synthetic oligonucleotide
cgccgcugcuccgugaugu

SEQ ID NO: 3095833 - RNA, 19 nt, Artificial Sequence
  Description of Artificial Sequence: Synthetic oligonucleotide
gcuccgugauguagcgguu

SEQ ID NO: 3095834 - RNA, 19 nt, Artificial Sequence
  Description of Artificial Sequence: Synthetic oligonucleotide
cguccucggccgcuugucu

SEQ ID NO: 3095835 - RNA, 19 nt, Artificial Sequence
  Description of Artificial Sequence: Synthetic oligonucleotide
gcagcgccaggccguucuu

SEQ ID NO: 3095836 - RNA, 19 nt, Artificial Sequence
  Description of Artificial Sequence: Synthetic oligonucleotide
cgccguccucggccgcuug

SEQ ID NO: 3095837 - RNA, 19 nt, Artificial Sequence
  Description of Artificial Sequence: Synthetic oligonucleotide
gcucggccgugaacgccgu

SEQ ID NO: 3095838 - RNA, 19 nt, Artificial Sequence
  Description of Artificial Sequence: Synthetic oligonucleotide
ccguggcuuucuugaucuu

SEQ ID NO: 3095839 - RNA, 19 nt, Artificial Sequence
  Description of Artificial Sequence: Synthetic oligonucleotide
aaaauguccuaauagauac

SEQ ID NO: 3095840 - RNA, 19 nt, Artificial Sequence
  Description of Artificial Sequence: Synthetic oligonucleotide
aauagauacagauauuuac

SEQ ID NO: 3095841 - RNA, 19 nt, Artificial Sequence
  Description of Artificial Sequence: Synthetic oligonucleotide
aauagauuuacacaggaag

SEQ ID NO: 3095842 - RNA, 19 nt, Artificial Sequence
  Description of Artificial Sequence: Synthetic oligonucleotide
uauaauucaaacuauauac

SEQ ID NO: 3095843 - RNA, 19 nt, Artificial Sequence
  Description of Artificial Sequence: Synthetic oligonucleotide
caaacuauauacaaaaugg

SEQ ID NO: 3095844 - RNA, 19 nt, Artificial Sequence
  Description of Artificial Sequence: Synthetic oligonucleotide
accuuuaugauuuaauagc

SEQ ID NO: 3095845 - RNA, 19 nt, Artificial Sequence
  Description of Artificial Sequence: Synthetic oligonucleotide
aacaauuggaccuuuauga

SEQ ID NO: 3095846 - RNA, 19 nt, Artificial Sequence
  Description of Artificial Sequence: Synthetic oligonucleotide
auucauauauaauucaaac

SEQ ID NO: 3095847 - RNA, 19 nt, Artificial Sequence
  Description of Artificial Sequence: Synthetic oligonucleotide
ucauauauaauucaaacua

SEQ ID NO: 3095848 - RNA, 19 nt, Artificial Sequence
  Description of Artificial Sequence: Synthetic oligonucleotide
aaucauacaauagauuuac

SEQ ID NO: 3095849 - RNA, 19 nt, Artificial Sequence
  Description of Artificial Sequence: Synthetic oligonucleotide
auacaauagauuuacacag

SEQ ID NO: 3095850 - RNA, 19 nt, Artificial Sequence
  Description of Artificial Sequence: Synthetic oligonucleotide
uauaaaauguccuaauaga

SEQ ID NO: 3095851 - RNA, 19 nt, Artificial Sequence
  Description of Artificial Sequence: Synthetic oligonucleotide
aaugcagcccaucucaaac

SEQ ID NO: 3095852 - RNA, 19 nt, Artificial Sequence
  Description of Artificial Sequence: Synthetic oligonucleotide
aauuauaacugguguaauc

SEQ ID NO: 3095853 - RNA, 19 nt, Artificial Sequence
  Description of Artificial Sequence: Synthetic oligonucleotide
uacacaggaagcaaaaucc

SEQ ID NO: 3095854 - RNA, 19 nt, Artificial Sequence
  Description of Artificial Sequence: Synthetic oligonucleotide
uuaauagcuaaaauuauaa

SEQ ID NO: 3095855 - RNA, 19 nt, Artificial Sequence
  Description of Artificial Sequence: Synthetic oligonucleotide
cuauauacaaaauggaaug

SEQ ID NO: 3095856 - RNA, 19 nt, Artificial Sequence
  Description of Artificial Sequence: Synthetic oligonucleotide
aauuuugcuaaguauacau

SEQ ID NO: 3095857 - RNA, 19 nt, Artificial Sequence
  Description of Artificial Sequence: Synthetic oligonucleotide
uuauauuaccuauuuacug

SEQ ID NO: 3095858 - RNA, 19 nt, Artificial Sequence
  Description of Artificial Sequence: Synthetic oligonucleotide
guauaaaauguccuaauag

SEQ ID NO: 3095859 - RNA, 19 nt, Artificial Sequence
  Description of Artificial Sequence: Synthetic oligonucleotide
uauacaaaauggaaugcag

SEQ ID NO: 3095860 - RNA, 19 nt, Artificial Sequence
  Description of Artificial Sequence: Synthetic oligonucleotide
uccuaauagauacagauau

SEQ ID NO: 3095861 - RNA, 19 nt, Artificial Sequence
  Description of Artificial Sequence: Synthetic oligonucleotide
auagauacagauauuuacc

SEQ ID NO: 3095862 - RNA, 19 nt, Artificial Sequence
  Description of Artificial Sequence: Synthetic oligonucleotide
uuuauauuaccuauuuacu

SEQ ID NO: 3095863 - RNA, 19 nt, Artificial Sequence
  Description of Artificial Sequence: Synthetic oligonucleotide
uauauuaccuauuuacugu

SEQ ID NO: 3095864 - RNA, 19 nt, Artificial Sequence
  Description of Artificial Sequence: Synthetic oligonucleotide
uuuugcuaaguauacaucu

SEQ ID NO: 3095865 - RNA, 19 nt, Artificial Sequence
  Description of Artificial Sequence: Synthetic oligonucleotide
aaauaauuuugcuaaguau

SEQ ID NO: 3095866 - RNA, 19 nt, Artificial Sequence
  Description of Artificial Sequence: Synthetic oligonucleotide
uuuaugauuuaauagcuaa

SEQ ID NO: 3095867 - RNA, 19 nt, Artificial Sequence
  Description of Artificial Sequence: Synthetic oligonucleotide
uacaaaauggaaugcagcc

SEQ ID NO: 3095868 - RNA, 19 nt, Artificial Sequence
  Description of Artificial Sequence: Synthetic oligonucleotide
ugauuuaauagcuaaaauu

SEQ ID NO: 3095869 - RNA, 19 nt, Artificial Sequence
  Description of Artificial Sequence: Synthetic oligonucleotide
uaaguauacaucucaacug

SEQ ID NO: 3095870 - RNA, 19 nt, Artificial Sequence
  Description of Artificial Sequence: Synthetic oligonucleotide
ucauacaauagauuuacac

SEQ ID NO: 3095871 - RNA, 19 nt, Artificial Sequence
  Description of Artificial Sequence: Synthetic oligonucleotide
acuaagacgaggcagaggu

SEQ ID NO: 3095872 - RNA, 19 nt, Artificial Sequence
  Description of Artificial Sequence: Synthetic oligonucleotide
uuugugaaacaauuggacc

SEQ ID NO: 3095873 - RNA, 19 nt, Artificial Sequence
  Description of Artificial Sequence: Synthetic oligonucleotide
auucaaacuauauacaaaa

SEQ ID NO: 3095874 - RNA, 19 nt, Artificial Sequence
  Description of Artificial Sequence: Synthetic oligonucleotide
aaaauaauuuugcuaagua

SEQ ID NO: 3095875 - RNA, 19 nt, Artificial Sequence
  Description of Artificial Sequence: Synthetic oligonucleotide
aaguauacaucucaacuga

SEQ ID NO: 3095876 - RNA, 19 nt, Artificial Sequence
  Description of Artificial Sequence: Synthetic oligonucleotide
uauacaucucaacugaggu

SEQ ID NO: 3095877 - RNA, 19 nt, Artificial Sequence
  Description of Artificial Sequence: Synthetic oligonucleotide
aauaauuuugcuaaguaua

SEQ ID NO: 3095878 - RNA, 19 nt, Artificial Sequence
  Description of Artificial Sequence: Synthetic oligonucleotide
ucuauguauaaaauguccu

SEQ ID NO: 3095879 - RNA, 19 nt, Artificial Sequence
  Description of Artificial Sequence: Synthetic oligonucleotide
auagauuuacacaggaagc

SEQ ID NO: 3095880 - RNA, 19 nt, Artificial Sequence
  Description of Artificial Sequence: Synthetic oligonucleotide
aaacaauuggaccuuuaug

SEQ ID NO: 3095881 - RNA, 19 nt, Artificial Sequence
  Description of Artificial Sequence: Synthetic oligonucleotide
aaaauuauaacugguguaa

SEQ ID NO: 3095882 - RNA, 19 nt, Artificial Sequence
  Description of Artificial Sequence: Synthetic oligonucleotide
aauguccuaauagauacag

SEQ ID NO: 3095883 - RNA, 19 nt, Artificial Sequence
  Description of Artificial Sequence: Synthetic oligonucleotide
gauuuaauagcuaaaauua

SEQ ID NO: 3095884 - RNA, 19 nt, Artificial Sequence
  Description of Artificial Sequence: Synthetic oligonucleotide
uucauauauaauucaaacu

SEQ ID NO: 3095885 - RNA, 19 nt, Artificial Sequence
  Description of Artificial Sequence: Synthetic oligonucleotide
gaccuuuaugauuuaauag

SEQ ID NO: 3095886 - RNA, 19 nt, Artificial Sequence
  Description of Artificial Sequence: Synthetic oligonucleotide
agaagggugauucauauau

SEQ ID NO: 3095887 - RNA, 19 nt, Artificial Sequence
  Description of Artificial Sequence: Synthetic oligonucleotide
uguccuaauagauacagau

SEQ ID NO: 3095888 - RNA, 19 nt, Artificial Sequence
  Description of Artificial Sequence: Synthetic oligonucleotide
uugugaaacaauuggaccu

SEQ ID NO: 3095889 - RNA, 19 nt, Artificial Sequence
  Description of Artificial Sequence: Synthetic oligonucleotide
uuuaauagcuaaaauuaua

SEQ ID NO: 3095890 - RNA, 19 nt, Artificial Sequence
  Description of Artificial Sequence: Synthetic oligonucleotide
gaagcaaaauccaaggggc

SEQ ID NO: 3095891 - RNA, 19 nt, Artificial Sequence
  Description of Artificial Sequence: Synthetic oligonucleotide
uagcuaaaauuauaacugg

SEQ ID NO: 3095892 - RNA, 19 nt, Artificial Sequence
  Description of Artificial Sequence: Synthetic oligonucleotide
uacaauagauuuacacagg

SEQ ID NO: 3095893 - RNA, 19 nt, Artificial Sequence
  Description of Artificial Sequence: Synthetic oligonucleotide
auaauuuugcuaaguauac

SEQ ID NO: 3095894 - RNA, 19 nt, Artificial Sequence
  Description of Artificial Sequence: Synthetic oligonucleotide
cuuugugaaacaauuggac

SEQ ID NO: 3095895 - RNA, 19 nt, Artificial Sequence
  Description of Artificial Sequence: Synthetic oligonucleotide
auaacugguguaaucauac

SEQ ID NO: 3095896 - RNA, 19 nt, Artificial Sequence
  Description of Artificial Sequence: Synthetic oligonucleotide
aauggaaugcagcccaucu

SEQ ID NO: 3095897 - RNA, 19 nt, Artificial Sequence
  Description of Artificial Sequence: Synthetic oligonucleotide
auuauaacugguguaauca

SEQ ID NO: 3095898 - RNA, 19 nt, Artificial Sequence
  Description of Artificial Sequence: Synthetic oligonucleotide
ggaagcaaaauccaagggg

SEQ ID NO: 3095899 - RNA, 19 nt, Artificial Sequence
  Description of Artificial Sequence: Synthetic oligonucleotide
uaagacgaggcagaggugg

SEQ ID NO: 3095900 - RNA, 19 nt, Artificial Sequence
  Description of Artificial Sequence: Synthetic oligonucleotide
cauacaauagauuuacaca

SEQ ID NO: 3095901 - RNA, 19 nt, Artificial Sequence
  Description of Artificial Sequence: Synthetic oligonucleotide
uuacacaggaagcaaaauc

SEQ ID NO: 3095902 - RNA, 19 nt, Artificial Sequence
  Description of Artificial Sequence: Synthetic oligonucleotide
uacaucucaacugaggucu

SEQ ID NO: 3095903 - RNA, 19 nt, Artificial Sequence
  Description of Artificial Sequence: Synthetic oligonucleotide
auacaaaauggaaugcagc

SEQ ID NO: 3095904 - RNA, 19 nt, Artificial Sequence
  Description of Artificial Sequence: Synthetic oligonucleotide
ugauucauauauaauucaa

SEQ ID NO: 3095905 - RNA, 19 nt, Artificial Sequence
  Description of Artificial Sequence: Synthetic oligonucleotide
uaaaauuauaacuggugua

SEQ ID NO: 3095906 - RNA, 19 nt, Artificial Sequence
  Description of Artificial Sequence: Synthetic oligonucleotide
uagauacagauauuuaccu

SEQ ID NO: 3095907 - RNA, 19 nt, Artificial Sequence
  Description of Artificial Sequence: Synthetic oligonucleotide
ucaacugaggucuauguau

SEQ ID NO: 3095908 - RNA, 19 nt, Artificial Sequence
  Description of Artificial Sequence: Synthetic oligonucleotide
uaaaauguccuaauagaua

SEQ ID NO: 3095909 - RNA, 19 nt, Artificial Sequence
  Description of Artificial Sequence: Synthetic oligonucleotide
acaaaauggaaugcagccc

SEQ ID NO: 3095910 - RNA, 19 nt, Artificial Sequence
  Description of Artificial Sequence: Synthetic oligonucleotide
aauacuaagacgaggcaga

SEQ ID NO: 3095911 - RNA, 19 nt, Artificial Sequence
  Description of Artificial Sequence: Synthetic oligonucleotide
aagggugauucauauauaa

SEQ ID NO: 3095912 - RNA, 19 nt, Artificial Sequence
  Description of Artificial Sequence: Synthetic oligonucleotide
auauaauucaaacuauaua

SEQ ID NO: 3095913 - RNA, 19 nt, Artificial Sequence
  Description of Artificial Sequence: Synthetic oligonucleotide
uauauacaaaauggaaugc

SEQ ID NO: 3095914 - RNA, 19 nt, Artificial Sequence
  Description of Artificial Sequence: Synthetic oligonucleotide
gaggucuauguauaaaaug

SEQ ID NO: 3095915 - RNA, 19 nt, Artificial Sequence
  Description of Artificial Sequence: Synthetic oligonucleotide
uggaaugcagcccaucuca

SEQ ID NO: 3095916 - RNA, 19 nt, Artificial Sequence
  Description of Artificial Sequence: Synthetic oligonucleotide
uguauaaaauguccuaaua

SEQ ID NO: 3095917 - RNA, 19 nt, Artificial Sequence
  Description of Artificial Sequence: Synthetic oligonucleotide
aacugguguaaucauacaa

SEQ ID NO: 3095918 - RNA, 19 nt, Artificial Sequence
  Description of Artificial Sequence: Synthetic oligonucleotide
ugguguaaucauacaauag

SEQ ID NO: 3095919 - RNA, 19 nt, Artificial Sequence
  Description of Artificial Sequence: Synthetic oligonucleotide
aaacuauauacaaaaugga

SEQ ID NO: 3095920 - RNA, 19 nt, Artificial Sequence
  Description of Artificial Sequence: Synthetic oligonucleotide
acaauagauuuacacagga

SEQ ID NO: 3095921 - RNA, 19 nt, Artificial Sequence
  Description of Artificial Sequence: Synthetic oligonucleotide
auauuaccuauuuacugug

SEQ ID NO: 3095922 - RNA, 19 nt, Artificial Sequence
  Description of Artificial Sequence: Synthetic oligonucleotide
caggaagcaaaauccaagg

SEQ ID NO: 3095923 - RNA, 19 nt, Artificial Sequence
  Description of Artificial Sequence: Synthetic oligonucleotide
uugcuaaguauacaucuca

SEQ ID NO: 3095924 - RNA, 19 nt, Artificial Sequence
  Description of Artificial Sequence: Synthetic oligonucleotide
aacuauauacaaaauggaa

SEQ ID NO: 3095925 - RNA, 19 nt, Artificial Sequence
  Description of Artificial Sequence: Synthetic oligonucleotide
ucucaaacuggcuuuguga

SEQ ID NO: 3095926 - RNA, 19 nt, Artificial Sequence
  Description of Artificial Sequence: Synthetic oligonucleotide
aauuggaccuuuaugauuu

SEQ ID NO: 3095927 - RNA, 19 nt, Artificial Sequence
  Description of Artificial Sequence: Synthetic oligonucleotide
ggcuuugugaaacaauugg

SEQ ID NO: 3095928 - RNA, 19 nt, Artificial Sequence
  Description of Artificial Sequence: Synthetic oligonucleotide
uauguauaaaauguccuaa

SEQ ID NO: 3095929 - RNA, 19 nt, Artificial Sequence
  Description of Artificial Sequence: Synthetic oligonucleotide
acuauauacaaaauggaau

SEQ ID NO: 3095930 - RNA, 19 nt, Artificial Sequence
  Description of Artificial Sequence: Synthetic oligonucleotide
uagauuuacacaggaagca

SEQ ID NO: 3095931 - RNA, 19 nt, Artificial Sequence
  Description of Artificial Sequence: Synthetic oligonucleotide
uguaaucauacaauagauu

SEQ ID NO: 3095932 - RNA, 19 nt, Artificial Sequence
  Description of Artificial Sequence: Synthetic oligonucleotide
guaaucauacaauagauuu

SEQ ID NO: 3095933 - RNA, 19 nt, Artificial Sequence
  Description of Artificial Sequence: Synthetic oligonucleotide
aggucuauguauaaaaugu

SEQ ID NO: 3095934 - RNA, 19 nt, Artificial Sequence
  Description of Artificial Sequence: Synthetic oligonucleotide
aggaagcaaaauccaaggg

SEQ ID NO: 3095935 - RNA, 19 nt, Artificial Sequence
  Description of Artificial Sequence: Synthetic oligonucleotide
auacaucucaacugagguc

SEQ ID NO: 3095936 - RNA, 19 nt, Artificial Sequence
  Description of Artificial Sequence: Synthetic oligonucleotide
uaaucauacaauagauuua

SEQ ID NO: 3095937 - RNA, 19 nt, Artificial Sequence
  Description of Artificial Sequence: Synthetic oligonucleotide
uacagauauuuaccuuugg

SEQ ID NO: 3095938 - RNA, 19 nt, Artificial Sequence
  Description of Artificial Sequence: Synthetic oligonucleotide
auuaccuauuuacugugcu

SEQ ID NO: 3095939 - RNA, 19 nt, Artificial Sequence
  Description of Artificial Sequence: Synthetic oligonucleotide
aauucaaacuauauacaaa

SEQ ID NO: 3095940 - RNA, 19 nt, Artificial Sequence
  Description of Artificial Sequence: Synthetic oligonucleotide
uaauagauacagauauuua

SEQ ID NO: 3095941 - RNA, 19 nt, Artificial Sequence
  Description of Artificial Sequence: Synthetic oligonucleotide
gucuauguauaaaaugucc

SEQ ID NO: 3095942 - RNA, 19 nt, Artificial Sequence
  Description of Artificial Sequence: Synthetic oligonucleotide
gguguaaucauacaauaga

SEQ ID NO: 3095943 - RNA, 19 nt, Artificial Sequence
  Description of Artificial Sequence: Synthetic oligonucleotide
uuugcuaaguauacaucuc

SEQ ID NO: 3095944 - RNA, 19 nt, Artificial Sequence
  Description of Artificial Sequence: Synthetic oligonucleotide
uauuaccuauuuacugugc

SEQ ID NO: 3095945 - RNA, 19 nt, Artificial Sequence
  Description of Artificial Sequence: Synthetic oligonucleotide
cuauuuacugugcuguuuc

SEQ ID NO: 3095946 - RNA, 19 nt, Artificial Sequence
  Description of Artificial Sequence: Synthetic oligonucleotide
auauacaaaauggaaugca

SEQ ID NO: 3095947 - RNA, 19 nt, Artificial Sequence
  Description of Artificial Sequence: Synthetic oligonucleotide
aggggcguuuuauauuacc

SEQ ID NO: 3095948 - RNA, 19 nt, Artificial Sequence
  Description of Artificial Sequence: Synthetic oligonucleotide
uauaacugguguaaucaua

SEQ ID NO: 3095949 - RNA, 19 nt, Artificial Sequence
  Description of Artificial Sequence: Synthetic oligonucleotide
guauacaucucaacugagg

SEQ ID NO: 3095950 - RNA, 19 nt, Artificial Sequence
  Description of Artificial Sequence: Synthetic oligonucleotide
uuaccuauuuacugugcug

SEQ ID NO: 3095951 - RNA, 19 nt, Artificial Sequence
  Description of Artificial Sequence: Synthetic oligonucleotide
auaaaauguccuaauagau

SEQ ID NO: 3095952 - RNA, 19 nt, Artificial Sequence
  Description of Artificial Sequence: Synthetic oligonucleotide
augauuuaauagcuaaaau

SEQ ID NO: 3095953 - RNA, 19 nt, Artificial Sequence
  Description of Artificial Sequence: Synthetic oligonucleotide
uuuacugugcuguuucaau

SEQ ID NO: 3095954 - RNA, 19 nt, Artificial Sequence
  Description of Artificial Sequence: Synthetic oligonucleotide
caaacuggcuuugugaaac

SEQ ID NO: 3095955 - RNA, 19 nt, Artificial Sequence
  Description of Artificial Sequence: Synthetic oligonucleotide
ugugcuguuucaauuuaaa

SEQ ID NO: 3095956 - RNA, 19 nt, Artificial Sequence
  Description of Artificial Sequence: Synthetic oligonucleotide
caaaauggaaugcagccca

SEQ ID NO: 3095957 - RNA, 19 nt, Artificial Sequence
  Description of Artificial Sequence: Synthetic oligonucleotide
uaccuauuuacugugcugu

SEQ ID NO: 3095958 - RNA, 19 nt, Artificial Sequence
  Description of Artificial Sequence: Synthetic oligonucleotide
ugaggucuauguauaaaau

SEQ ID NO: 3095959 - RNA, 19 nt, Artificial Sequence
  Description of Artificial Sequence: Synthetic oligonucleotide
uucaaacuauauacaaaau

SEQ ID NO: 3095960 - RNA, 19 nt, Artificial Sequence
  Description of Artificial Sequence: Synthetic oligonucleotide
gauacagauauuuaccuuu

SEQ ID NO: 3095961 - RNA, 19 nt, Artificial Sequence
  Description of Artificial Sequence: Synthetic oligonucleotide
cuaaaauuauaacuggugu

SEQ ID NO: 3095962 - RNA, 19 nt, Artificial Sequence
  Description of Artificial Sequence: Synthetic oligonucleotide
auuuugcuaaguauacauc

SEQ ID NO: 3095963 - RNA, 19 nt, Artificial Sequence
  Description of Artificial Sequence: Synthetic oligonucleotide
agagguggccagaagaagg

SEQ ID NO: 3095964 - RNA, 19 nt, Artificial Sequence
  Description of Artificial Sequence: Synthetic oligonucleotide
gugauucauauauaauuca

SEQ ID NO: 3095965 - RNA, 19 nt, Artificial Sequence
  Description of Artificial Sequence: Synthetic oligonucleotide
aagcaaaauccaaggggcg

SEQ ID NO: 3095966 - RNA, 19 nt, Artificial Sequence
  Description of Artificial Sequence: Synthetic oligonucleotide
acaggaagcaaaauccaag

SEQ ID NO: 3095967 - RNA, 19 nt, Artificial Sequence
  Description of Artificial Sequence: Synthetic oligonucleotide
uuauaacugguguaaucau

SEQ ID NO: 3095968 - RNA, 19 nt, Artificial Sequence
  Description of Artificial Sequence: Synthetic oligonucleotide
ucucaacugaggucuaugu

SEQ ID NO: 3095969 - RNA, 19 nt, Artificial Sequence
  Description of Artificial Sequence: Synthetic oligonucleotide
auguauaaaauguccuaau

SEQ ID NO: 3095970 - RNA, 19 nt, Artificial Sequence
  Description of Artificial Sequence: Synthetic oligonucleotide
gauucauauauaauucaaa

SEQ ID NO: 3095971 - RNA, 19 nt, Artificial Sequence
  Description of Artificial Sequence: Synthetic oligonucleotide
aaauggaaugcagcccauc

SEQ ID NO: 3095972 - RNA, 19 nt, Artificial Sequence
  Description of Artificial Sequence: Synthetic oligonucleotide
ugcuaaguauacaucucaa

SEQ ID NO: 3095973 - RNA, 19 nt, Artificial Sequence
  Description of Artificial Sequence: Synthetic oligonucleotide
uaauuuugcuaaguauaca

SEQ ID NO: 3095974 - RNA, 19 nt, Artificial Sequence
  Description of Artificial Sequence: Synthetic oligonucleotide
ugcagcccaucucaaacug

SEQ ID NO: 3095975 - RNA, 19 nt, Artificial Sequence
  Description of Artificial Sequence: Synthetic oligonucleotide
auggaaugcagcccaucuc

SEQ ID NO: 3095976 - RNA, 19 nt, Artificial Sequence
  Description of Artificial Sequence: Synthetic oligonucleotide
aaauuauaacugguguaau

SEQ ID NO: 3095977 - RNA, 19 nt, Artificial Sequence
  Description of Artificial Sequence: Synthetic oligonucleotide
acaauuggaccuuuaugau

SEQ ID NO: 3095978 - RNA, 19 nt, Artificial Sequence
  Description of Artificial Sequence: Synthetic oligonucleotide
gcuaaaauuauaacuggug

SEQ ID NO: 3095979 - RNA, 19 nt, Artificial Sequence
  Description of Artificial Sequence: Synthetic oligonucleotide
uggaccuuuaugauuuaau

SEQ ID NO: 3095980 - RNA, 19 nt, Artificial Sequence
  Description of Artificial Sequence: Synthetic oligonucleotide
auuuaauagcuaaaauuau

SEQ ID NO: 3095981 - RNA, 19 nt, Artificial Sequence
  Description of Artificial Sequence: Synthetic oligonucleotide
ggugauucauauauaauuc

SEQ ID NO: 3095982 - RNA, 19 nt, Artificial Sequence
  Description of Artificial Sequence: Synthetic oligonucleotide
gagguggccagaagaaggg

SEQ ID NO: 3095983 - RNA, 19 nt, Artificial Sequence
  Description of Artificial Sequence: Synthetic oligonucleotide
uccaaggggcguuuuauau

SEQ ID NO: 3095984 - RNA, 19 nt, Artificial Sequence
  Description of Artificial Sequence: Synthetic oligonucleotide
cagcccaucucaaacuggc

SEQ ID NO: 3095985 - RNA, 19 nt, Artificial Sequence
  Description of Artificial Sequence: Synthetic oligonucleotide
uauuuacugugcuguuuca

SEQ ID NO: 3095986 - RNA, 19 nt, Artificial Sequence
  Description of Artificial Sequence: Synthetic oligonucleotide
aagacgaggcagagguggc

SEQ ID NO: 3095987 - RNA, 19 nt, Artificial Sequence
  Description of Artificial Sequence: Synthetic oligonucleotide
auauauaauucaaacuaua

SEQ ID NO: 3095988 - RNA, 19 nt, Artificial Sequence
  Description of Artificial Sequence: Synthetic oligonucleotide
cuauguauaaaauguccua

SEQ ID NO: 3095989 - RNA, 19 nt, Artificial Sequence
  Description of Artificial Sequence: Synthetic oligonucleotide
agauacagauauuuaccuu

SEQ ID NO: 3095990 - RNA, 19 nt, Artificial Sequence
  Description of Artificial Sequence: Synthetic oligonucleotide
aauccaaggggcguuuuau

SEQ ID NO: 3095991 - RNA, 19 nt, Artificial Sequence
  Description of Artificial Sequence: Synthetic oligonucleotide
uuacugugcuguuucaauu

SEQ ID NO: 3095992 - RNA, 19 nt, Artificial Sequence
  Description of Artificial Sequence: Synthetic oligonucleotide
cugaggucuauguauaaaa

SEQ ID NO: 3095993 - RNA, 19 nt, Artificial Sequence
  Description of Artificial Sequence: Synthetic oligonucleotide
aaacuggcuuugugaaaca

SEQ ID NO: 3095994 - RNA, 19 nt, Artificial Sequence
  Description of Artificial Sequence: Synthetic oligonucleotide
acugguguaaucauacaau

SEQ ID NO: 3095995 - RNA, 19 nt, Artificial Sequence
  Description of Artificial Sequence: Synthetic oligonucleotide
agcuaaaauuauaacuggu

SEQ ID NO: 3095996 - RNA, 19 nt, Artificial Sequence
  Description of Artificial Sequence: Synthetic oligonucleotide
uacugugcuguuucaauuu

SEQ ID NO: 3095997 - RNA, 19 nt, Artificial Sequence
  Description of Artificial Sequence: Synthetic oligonucleotide
cucaaacuggcuuugugaa

SEQ ID NO: 3095998 - RNA, 19 nt, Artificial Sequence
  Description of Artificial Sequence: Synthetic oligonucleotide
aacugaggucuauguauaa

SEQ ID NO: 3095999 - RNA, 19 nt, Artificial Sequence
  Description of Artificial Sequence: Synthetic oligonucleotide
gaagaagggugauucauau

SEQ ID NO: 3096000 - RNA, 19 nt, Artificial Sequence
  Description of Artificial Sequence: Synthetic oligonucleotide
cauauauaauucaaacuau

SEQ ID NO: 3096001 - RNA, 19 nt, Artificial Sequence
  Description of Artificial Sequence: Synthetic oligonucleotide
aguauacaucucaacugag

SEQ ID NO: 3096002 - RNA, 19 nt, Artificial Sequence
  Description of Artificial Sequence: Synthetic oligonucleotide
uacuaagacgaggcagagg

SEQ ID NO: 3096003 - RNA, 19 nt, Artificial Sequence
  Description of Artificial Sequence: Synthetic oligonucleotide
uaacugguguaaucauaca

SEQ ID NO: 3096004 - RNA, 19 nt, Artificial Sequence
  Description of Artificial Sequence: Synthetic oligonucleotide
auacagauauuuaccuuug

SEQ ID NO: 3096005 - RNA, 19 nt, Artificial Sequence
  Description of Artificial Sequence: Synthetic oligonucleotide
aaauccaaggggcguuuua

SEQ ID NO: 3096006 - RNA, 19 nt, Artificial Sequence
  Description of Artificial Sequence: Synthetic oligonucleotide
ucaaacuggcuuugugaaa

SEQ ID NO: 3096007 - RNA, 19 nt, Artificial Sequence
  Description of Artificial Sequence: Synthetic oligonucleotide
ugaaacaauuggaccuuua

SEQ ID NO: 3096008 - RNA, 19 nt, Artificial Sequence
  Description of Artificial Sequence: Synthetic oligonucleotide
aaauguccuaauagauaca

SEQ ID NO: 3096009 - RNA, 19 nt, Artificial Sequence
  Description of Artificial Sequence: Synthetic oligonucleotide
uuuacacaggaagcaaaau

SEQ ID NO: 3096010 - RNA, 19 nt, Artificial Sequence
  Description of Artificial Sequence: Synthetic oligonucleotide
ugugaaacaauuggaccuu

SEQ ID NO: 3096011 - RNA, 19 nt, Artificial Sequence
  Description of Artificial Sequence: Synthetic oligonucleotide
cuaauagauacagauauuu

SEQ ID NO: 3096012 - RNA, 19 nt, Artificial Sequence
  Description of Artificial Sequence: Synthetic oligonucleotide
gcuaaguauacaucucaac

SEQ ID NO: 3096013 - RNA, 19 nt, Artificial Sequence
  Description of Artificial Sequence: Synthetic oligonucleotide
aagaagggugauucauaua

SEQ ID NO: 3096014 - RNA, 19 nt, Artificial Sequence
  Description of Artificial Sequence: Synthetic oligonucleotide
agauuuacacaggaagcaa

SEQ ID NO: 3096015 - RNA, 19 nt, Artificial Sequence
  Description of Artificial Sequence: Synthetic oligonucleotide
cuuuaugauuuaauagcua

SEQ ID NO: 3096016 - RNA, 19 nt, Artificial Sequence
  Description of Artificial Sequence: Synthetic oligonucleotide
agcaaaauccaaggggcgu

SEQ ID NO: 3096017 - RNA, 19 nt, Artificial Sequence
  Description of Artificial Sequence: Synthetic oligonucleotide
auacuaagacgaggcagag

SEQ ID NO: 3096018 - RNA, 19 nt, Artificial Sequence
  Description of Artificial Sequence: Synthetic oligonucleotide
caaggggcguuuuauauua

SEQ ID NO: 3096019 - RNA, 19 nt, Artificial Sequence
  Description of Artificial Sequence: Synthetic oligonucleotide
cugguguaaucauacaaua

SEQ ID NO: 3096020 - RNA, 19 nt, Artificial Sequence
  Description of Artificial Sequence: Synthetic oligonucleotide
caauagauuuacacaggaa

SEQ ID NO: 3096021 - RNA, 19 nt, Artificial Sequence
  Description of Artificial Sequence: Synthetic oligonucleotide
agacgaggcagagguggcc

SEQ ID NO: 3096022 - RNA, 19 nt, Artificial Sequence
  Description of Artificial Sequence: Synthetic oligonucleotide
ggaccuuuaugauuuaaua

SEQ ID NO: 3096023 - RNA, 19 nt, Artificial Sequence
  Description of Artificial Sequence: Synthetic oligonucleotide
acugugcuguuucaauuua

SEQ ID NO: 3096024 - RNA, 19 nt, Artificial Sequence
  Description of Artificial Sequence: Synthetic oligonucleotide
aaggggcguuuuauauuac

SEQ ID NO: 3096025 - RNA, 19 nt, Artificial Sequence
  Description of Artificial Sequence: Synthetic oligonucleotide
gggugauucauauauaauu

SEQ ID NO: 3096026 - RNA, 19 nt, Artificial Sequence
  Description of Artificial Sequence: Synthetic oligonucleotide
aucucaacugaggucuaug

SEQ ID NO: 3096027 - RNA, 19 nt, Artificial Sequence
  Description of Artificial Sequence: Synthetic oligonucleotide
acacaggaagcaaaaucca

SEQ ID NO: 3096028 - RNA, 19 nt, Artificial Sequence
  Description of Artificial Sequence: Synthetic oligonucleotide
aacuggcuuugugaaacaa

SEQ ID NO: 3096029 - RNA, 19 nt, Artificial Sequence
  Description of Artificial Sequence: Synthetic oligonucleotide
gugcuguuucaauuuaaaa

SEQ ID NO: 3096030 - RNA, 19 nt, Artificial Sequence
  Description of Artificial Sequence: Synthetic oligonucleotide
cuaagacgaggcagaggug

SEQ ID NO: 3096031 - RNA, 19 nt, Artificial Sequence
  Description of Artificial Sequence: Synthetic oligonucleotide
gccagaagaagggugauuc

SEQ ID NO: 3096032 - RNA, 19 nt, Artificial Sequence
  Description of Artificial Sequence: Synthetic oligonucleotide
cacaggaagcaaaauccaa

SEQ ID NO: 3096033 - RNA, 19 nt, Artificial Sequence
  Description of Artificial Sequence: Synthetic oligonucleotide
guguaaucauacaauagau

SEQ ID NO: 3096034 - RNA, 19 nt, Artificial Sequence
  Description of Artificial Sequence: Synthetic oligonucleotide
acugaggucuauguauaaa

SEQ ID NO: 3096035 - RNA, 19 nt, Artificial Sequence
  Description of Artificial Sequence: Synthetic oligonucleotide
aaaauggaaugcagcccau

SEQ ID NO: 3096036 - RNA, 19 nt, Artificial Sequence
  Description of Artificial Sequence: Synthetic oligonucleotide
gaaugcagcccaucucaaa

SEQ ID NO: 3096037 - RNA, 19 nt, Artificial Sequence
  Description of Artificial Sequence: Synthetic oligonucleotide
ggucuauguauaaaauguc

SEQ ID NO: 3096038 - RNA, 19 nt, Artificial Sequence
  Description of Artificial Sequence: Synthetic oligonucleotide
gcuuugugaaacaauugga

SEQ ID NO: 3096039 - RNA, 19 nt, Artificial Sequence
  Description of Artificial Sequence: Synthetic oligonucleotide
agaagaagggugauucaua

SEQ ID NO: 3096040 - RNA, 19 nt, Artificial Sequence
  Description of Artificial Sequence: Synthetic oligonucleotide
caacugaggucuauguaua

SEQ ID NO: 3096041 - RNA, 19 nt, Artificial Sequence
  Description of Artificial Sequence: Synthetic oligonucleotide
uuggaccuuuaugauuuaa

SEQ ID NO: 3096042 - RNA, 19 nt, Artificial Sequence
  Description of Artificial Sequence: Synthetic oligonucleotide
cagagguggccagaagaag

SEQ ID NO: 3096043 - RNA, 19 nt, Artificial Sequence
  Description of Artificial Sequence: Synthetic oligonucleotide
ccuuuaugauuuaauagcu

SEQ ID NO: 3096044 - RNA, 19 nt, Artificial Sequence
  Description of Artificial Sequence: Synthetic oligonucleotide
aaaauccaaggggcguuuu

SEQ ID NO: 3096045 - RNA, 19 nt, Artificial Sequence
  Description of Artificial Sequence: Synthetic oligonucleotide
acuggcuuugugaaacaau

SEQ ID NO: 3096046 - RNA, 19 nt, Artificial Sequence
  Description of Artificial Sequence: Synthetic oligonucleotide
guggccagaagaaggguga

SEQ ID NO: 3096047 - RNA, 19 nt, Artificial Sequence
  Description of Artificial Sequence: Synthetic oligonucleotide
gguggccagaagaagggug

SEQ ID NO: 3096048 - RNA, 19 nt, Artificial Sequence
  Description of Artificial Sequence: Synthetic oligonucleotide
aucauacaauagauuuaca

SEQ ID NO: 3096049 - RNA, 19 nt, Artificial Sequence
  Description of Artificial Sequence: Synthetic oligonucleotide
ggcguuuuauauuaccuau

SEQ ID NO: 3096050 - RNA, 19 nt, Artificial Sequence
  Description of Artificial Sequence: Synthetic oligonucleotide
accuauuuacugugcuguu

SEQ ID NO: 3096051 - RNA, 19 nt, Artificial Sequence
  Description of Artificial Sequence: Synthetic oligonucleotide
agggugauucauauauaau

SEQ ID NO: 3096052 - RNA, 19 nt, Artificial Sequence
  Description of Artificial Sequence: Synthetic oligonucleotide
acgaggcagagguggccag

SEQ ID NO: 3096053 - RNA, 19 nt, Artificial Sequence
  Description of Artificial Sequence: Synthetic oligonucleotide
cucaacugaggucuaugua

SEQ ID NO: 3096054 - RNA, 19 nt, Artificial Sequence
  Description of Artificial Sequence: Synthetic oligonucleotide
auccaaggggcguuuuaua

SEQ ID NO: 3096055 - RNA, 19 nt, Artificial Sequence
  Description of Artificial Sequence: Synthetic oligonucleotide
guccuaauagauacagaua

SEQ ID NO: 3096056 - RNA, 19 nt, Artificial Sequence
  Description of Artificial Sequence: Synthetic oligonucleotide
gaagggugauucauauaua

SEQ ID NO: 3096057 - RNA, 19 nt, Artificial Sequence
  Description of Artificial Sequence: Synthetic oligonucleotide
auguccuaauagauacaga

SEQ ID NO: 3096058 - RNA, 19 nt, Artificial Sequence
  Description of Artificial Sequence: Synthetic oligonucleotide
cugugcuguuucaauuuaa

SEQ ID NO: 3096059 - RNA, 19 nt, Artificial Sequence
  Description of Artificial Sequence: Synthetic oligonucleotide
caauuggaccuuuaugauu

SEQ ID NO: 3096060 - RNA, 19 nt, Artificial Sequence
  Description of Artificial Sequence: Synthetic oligonucleotide
aggcagagguggccagaag

SEQ ID NO: 3096061 - RNA, 19 nt, Artificial Sequence
  Description of Artificial Sequence: Synthetic oligonucleotide
gggcguuuuauauuaccua

SEQ ID NO: 3096062 - RNA, 19 nt, Artificial Sequence
  Description of Artificial Sequence: Synthetic oligonucleotide
gaggcagagguggccagaa

SEQ ID NO: 3096063 - RNA, 19 nt, Artificial Sequence
  Description of Artificial Sequence: Synthetic oligonucleotide
cagaagaagggugauucau

SEQ ID NO: 3096064 - RNA, 19 nt, Artificial Sequence
  Description of Artificial Sequence: Synthetic oligonucleotide
agguggccagaagaagggu

SEQ ID NO: 3096065 - RNA, 19 nt, Artificial Sequence
  Description of Artificial Sequence: Synthetic oligonucleotide
uggccagaagaagggugau

SEQ ID NO: 3096066 - RNA, 19 nt, Artificial Sequence
  Description of Artificial Sequence: Synthetic oligonucleotide
gcagagguggccagaagaa

SEQ ID NO: 3096067 - RNA, 19 nt, Artificial Sequence
  Description of Artificial Sequence: Synthetic oligonucleotide
ggggcguuuuauauuaccu

SEQ ID NO: 3096068 - RNA, 19 nt, Artificial Sequence
  Description of Artificial Sequence: Synthetic oligonucleotide
ccaucucaaacuggcuuug

SEQ ID NO: 3096069 - RNA, 19 nt, Artificial Sequence
  Description of Artificial Sequence: Synthetic oligonucleotide
agcccaucucaaacuggcu

SEQ ID NO: 3096070 - RNA, 19 nt, Artificial Sequence
  Description of Artificial Sequence: Synthetic oligonucleotide
ccagaagaagggugauuca

SEQ ID NO: 3096071 - RNA, 19 nt, Artificial Sequence
  Description of Artificial Sequence: Synthetic oligonucleotide
cguuuuauauuaccuauuu

SEQ ID NO: 3096072 - RNA, 19 nt, Artificial Sequence
  Description of Artificial Sequence: Synthetic oligonucleotide
ggaaugcagcccaucucaa

SEQ ID NO: 3096073 - RNA, 19 nt, Artificial Sequence
  Description of Artificial Sequence: Synthetic oligonucleotide
gcccaucucaaacuggcuu

SEQ ID NO: 3096074 - RNA, 19 nt, Artificial Sequence
  Description of Artificial Sequence: Synthetic oligonucleotide
acaucucaacugaggucua

SEQ ID NO: 3096075 - RNA, 19 nt, Artificial Sequence
  Description of Artificial Sequence: Synthetic oligonucleotide
ccuaauagauacagauauu

SEQ ID NO: 3096076 - RNA, 19 nt, Artificial Sequence
  Description of Artificial Sequence: Synthetic oligonucleotide
gugaaacaauuggaccuuu

SEQ ID NO: 3096077 - RNA, 19 nt, Artificial Sequence
  Description of Artificial Sequence: Synthetic oligonucleotide
gcaaaauccaaggggcguu

SEQ ID NO: 3096078 - RNA, 19 nt, Artificial Sequence
  Description of Artificial Sequence: Synthetic oligonucleotide
caaaauccaaggggcguuu

SEQ ID NO: 3096079 - RNA, 19 nt, Artificial Sequence
  Description of Artificial Sequence: Synthetic oligonucleotide
caucucaaacuggcuuugu

SEQ ID NO: 3096080 - RNA, 19 nt, Artificial Sequence
  Description of Artificial Sequence: Synthetic oligonucleotide
gcguuuuauauuaccuauu

SEQ ID NO: 3096081 - RNA, 19 nt, Artificial Sequence
  Description of Artificial Sequence: Synthetic oligonucleotide
ccaaggggcguuuuauauu

SEQ ID NO: 3096082 - RNA, 19 nt, Artificial Sequence
  Description of Artificial Sequence: Synthetic oligonucleotide
caucucaacugaggucuau

SEQ ID NO: 3096083 - RNA, 19 nt, Artificial Sequence
  Description of Artificial Sequence: Synthetic oligonucleotide
ccuauuuacugugcuguuu

SEQ ID NO: 3096084 - RNA, 19 nt, Artificial Sequence
  Description of Artificial Sequence: Synthetic oligonucleotide
ggccagaagaagggugauu

SEQ ID NO: 3096085 - RNA, 19 nt, Artificial Sequence
  Description of Artificial Sequence: Synthetic oligonucleotide
auaacaauaggaugaaggc

SEQ ID NO: 3096086 - RNA, 19 nt, Artificial Sequence
  Description of Artificial Sequence: Synthetic oligonucleotide
cauaacaauaggaugaagg

SEQ ID NO: 3096087 - RNA, 19 nt, Artificial Sequence
  Description of Artificial Sequence: Synthetic oligonucleotide
uucaugaucauccacacac

SEQ ID NO: 3096088 - RNA, 19 nt, Artificial Sequence
  Description of Artificial Sequence: Synthetic oligonucleotide
aaggcguucaugaucaucc

SEQ ID NO: 3096089 - RNA, 19 nt, Artificial Sequence
  Description of Artificial Sequence: Synthetic oligonucleotide
aacuccacgaacuggcagc

SEQ ID NO: 3096090 - RNA, 19 nt, Artificial Sequence
  Description of Artificial Sequence: Synthetic oligonucleotide
uauuugacaaacuccacga

SEQ ID NO: 3096091 - RNA, 19 nt, Artificial Sequence
  Description of Artificial Sequence: Synthetic oligonucleotide
ucgcauaacaauaggauga

SEQ ID NO: 3096092 - RNA, 19 nt, Artificial Sequence
  Description of Artificial Sequence: Synthetic oligonucleotide
ugaucauccacacaccggc

SEQ ID NO: 3096093 - RNA, 19 nt, Artificial Sequence
  Description of Artificial Sequence: Synthetic oligonucleotide
guauuugacaaacuccacg

SEQ ID NO: 3096094 - RNA, 19 nt, Artificial Sequence
  Description of Artificial Sequence: Synthetic oligonucleotide
acuguauuugacaaacucc

SEQ ID NO: 3096095 - RNA, 19 nt, Artificial Sequence
  Description of Artificial Sequence: Synthetic oligonucleotide
uugaagaguccagagaugg

SEQ ID NO: 3096096 - RNA, 19 nt, Artificial Sequence
  Description of Artificial Sequence: Synthetic oligonucleotide
aacaauaggaugaaggcgu

SEQ ID NO: 3096097 - RNA, 19 nt, Artificial Sequence
  Description of Artificial Sequence: Synthetic oligonucleotide
uaacaauaggaugaaggcg

SEQ ID NO: 3096098 - RNA, 19 nt, Artificial Sequence
  Description of Artificial Sequence: Synthetic oligonucleotide
auauucagaggguggaugg

SEQ ID NO: 3096099 - RNA, 19 nt, Artificial Sequence
  Description of Artificial Sequence: Synthetic oligonucleotide
uuugacaaacuccacgaac

SEQ ID NO: 3096100 - RNA, 19 nt, Artificial Sequence
  Description of Artificial Sequence: Synthetic oligonucleotide
acaaacuccacgaacuggc

SEQ ID NO: 3096101 - RNA, 19 nt, Artificial Sequence
  Description of Artificial Sequence: Synthetic oligonucleotide
ucagcuacuguauuugaca

SEQ ID NO: 3096102 - RNA, 19 nt, Artificial Sequence
  Description of Artificial Sequence: Synthetic oligonucleotide
uacuguauuugacaaacuc

SEQ ID NO: 3096103 - RNA, 19 nt, Artificial Sequence
  Description of Artificial Sequence: Synthetic oligonucleotide
ugcgauauucagagggugg

SEQ ID NO: 3096104 - RNA, 19 nt, Artificial Sequence
  Description of Artificial Sequence: Synthetic oligonucleotide
gauggugacacaguugaag

SEQ ID NO: 3096105 - RNA, 19 nt, Artificial Sequence
  Description of Artificial Sequence: Synthetic oligonucleotide
gauggcacaggacacggcc

SEQ ID NO: 3096106 - RNA, 19 nt, Artificial Sequence
  Description of Artificial Sequence: Synthetic oligonucleotide
aggaugaaggcguucauga

SEQ ID NO: 3096107 - RNA, 19 nt, Artificial Sequence
  Description of Artificial Sequence: Synthetic oligonucleotide
cuguauuugacaaacucca

SEQ ID NO: 3096108 - RNA, 19 nt, Artificial Sequence
  Description of Artificial Sequence: Synthetic oligonucleotide
caugaucauccacacaccg

SEQ ID NO: 3096109 - RNA, 19 nt, Artificial Sequence
  Description of Artificial Sequence: Synthetic oligonucleotide
aaacuccacgaacuggcag

SEQ ID NO: 3096110 - RNA, 19 nt, Artificial Sequence
  Description of Artificial Sequence: Synthetic oligonucleotide
acaguugaagaguccagag

SEQ ID NO: 3096111 - RNA, 19 nt, Artificial Sequence
  Description of Artificial Sequence: Synthetic oligonucleotide
gaugaaggcguucaugauc

SEQ ID NO: 3096112 - RNA, 19 nt, Artificial Sequence
  Description of Artificial Sequence: Synthetic oligonucleotide
cucgcauaacaauaggaug

SEQ ID NO: 3096113 - RNA, 19 nt, Artificial Sequence
  Description of Artificial Sequence: Synthetic oligonucleotide
ggcugcgauauucagaggg

SEQ ID NO: 3096114 - RNA, 19 nt, Artificial Sequence
  Description of Artificial Sequence: Synthetic oligonucleotide
gauauucagaggguggaug

SEQ ID NO: 3096115 - RNA, 19 nt, Artificial Sequence
  Description of Artificial Sequence: Synthetic oligonucleotide
agaggguggauggugacac

SEQ ID NO: 3096116 - RNA, 19 nt, Artificial Sequence
  Description of Artificial Sequence: Synthetic oligonucleotide
auggugacacaguugaaga

SEQ ID NO: 3096117 - RNA, 19 nt, Artificial Sequence
  Description of Artificial Sequence: Synthetic oligonucleotide
aagaguccagagauggcac

SEQ ID NO: 3096118 - RNA, 19 nt, Artificial Sequence
  Description of Artificial Sequence: Synthetic oligonucleotide
uguauuugacaaacuccac

SEQ ID NO: 3096119 - RNA, 19 nt, Artificial Sequence
  Description of Artificial Sequence: Synthetic oligonucleotide
gacaaacuccacgaacugg

SEQ ID NO: 3096120 - RNA, 19 nt, Artificial Sequence
  Description of Artificial Sequence: Synthetic oligonucleotide
ugacaaacuccacgaacug

SEQ ID NO: 3096121 - RNA, 19 nt, Artificial Sequence
  Description of Artificial Sequence: Synthetic oligonucleotide
ucaugaucauccacacacc

SEQ ID NO: 3096122 - RNA, 19 nt, Artificial Sequence
  Description of Artificial Sequence: Synthetic oligonucleotide
uucucagcuacuguauuug

SEQ ID NO: 3096123 - RNA, 19 nt, Artificial Sequence
  Description of Artificial Sequence: Synthetic oligonucleotide
gaagaguccagagauggca

SEQ ID NO: 3096124 - RNA, 19 nt, Artificial Sequence
  Description of Artificial Sequence: Synthetic oligonucleotide
uccacgaacuggcagcaga

SEQ ID NO: 3096125 - RNA, 19 nt, Artificial Sequence
  Description of Artificial Sequence: Synthetic oligonucleotide
ucauccacacaccggcugc

SEQ ID NO: 3096126 - RNA, 19 nt, Artificial Sequence
  Description of Artificial Sequence: Synthetic oligonucleotide
uucagaggguggaugguga

SEQ ID NO: 3096127 - RNA, 19 nt, Artificial Sequence
  Description of Artificial Sequence: Synthetic oligonucleotide
aagggcgccucgcauaaca

SEQ ID NO: 3096128 - RNA, 19 nt, Artificial Sequence
  Description of Artificial Sequence: Synthetic oligonucleotide
ucugccaggagcguagccc

SEQ ID NO: 3096129 - RNA, 19 nt, Artificial Sequence
  Description of Artificial Sequence: Synthetic oligonucleotide
augaaggcguucaugauca

SEQ ID NO: 3096130 - RNA, 19 nt, Artificial Sequence
  Description of Artificial Sequence: Synthetic oligonucleotide
gagauggcacaggacacgg

SEQ ID NO: 3096131 - RNA, 19 nt, Artificial Sequence
  Description of Artificial Sequence: Synthetic oligonucleotide
ugucaugcccuccuccugu

SEQ ID NO: 3096132 - RNA, 19 nt, Artificial Sequence
  Description of Artificial Sequence: Synthetic oligonucleotide
ugaagaguccagagauggc

SEQ ID NO: 3096133 - RNA, 19 nt, Artificial Sequence
  Description of Artificial Sequence: Synthetic oligonucleotide
gacacaguugaagagucca

SEQ ID NO: 3096134 - RNA, 19 nt, Artificial Sequence
  Description of Artificial Sequence: Synthetic oligonucleotide
accaccaugucaugcccuc

SEQ ID NO: 3096135 - RNA, 19 nt, Artificial Sequence
  Description of Artificial Sequence: Synthetic oligonucleotide
gguaccaccaugucaugcc

SEQ ID NO: 3096136 - RNA, 19 nt, Artificial Sequence
  Description of Artificial Sequence: Synthetic oligonucleotide
agagauggcacaggacacg

SEQ ID NO: 3096137 - RNA, 19 nt, Artificial Sequence
  Description of Artificial Sequence: Synthetic oligonucleotide
aucauccacacaccggcug

SEQ ID NO: 3096138 - RNA, 19 nt, Artificial Sequence
  Description of Artificial Sequence: Synthetic oligonucleotide
cucagcuacuguauuugac

SEQ ID NO: 3096139 - RNA, 19 nt, Artificial Sequence
  Description of Artificial Sequence: Synthetic oligonucleotide
accggcugcgcccaagccg

SEQ ID NO: 3096140 - RNA, 19 nt, Artificial Sequence
  Description of Artificial Sequence: Synthetic oligonucleotide
ugacacaguugaagagucc

SEQ ID NO: 3096141 - RNA, 19 nt, Artificial Sequence
  Description of Artificial Sequence: Synthetic oligonucleotide
augaucauccacacaccgg

SEQ ID NO: 3096142 - RNA, 19 nt, Artificial Sequence
  Description of Artificial Sequence: Synthetic oligonucleotide
cugccaggagcguagcccg

SEQ ID NO: 3096143 - RNA, 19 nt, Artificial Sequence
  Description of Artificial Sequence: Synthetic oligonucleotide
gaacuggcagcagaagggc

SEQ ID NO: 3096144 - RNA, 19 nt, Artificial Sequence
  Description of Artificial Sequence: Synthetic oligonucleotide
cagcacgcccgccagacgg

SEQ ID NO: 3096145 - RNA, 19 nt, Artificial Sequence
  Description of Artificial Sequence: Synthetic oligonucleotide
uggcacaggacacggcccc

SEQ ID NO: 3096146 - RNA, 19 nt, Artificial Sequence
  Description of Artificial Sequence: Synthetic oligonucleotide
cagagauggcacaggacac

SEQ ID NO: 3096147 - RNA, 19 nt, Artificial Sequence
  Description of Artificial Sequence: Synthetic oligonucleotide
ucucagcuacuguauuuga

SEQ ID NO: 3096148 - RNA, 19 nt, Artificial Sequence
  Description of Artificial Sequence: Synthetic oligonucleotide
aacuggcagcagaagggcg

SEQ ID NO: 3096149 - RNA, 19 nt, Artificial Sequence
  Description of Artificial Sequence: Synthetic oligonucleotide
agcgguaccaccaugucau

SEQ ID NO: 3096150 - RNA, 19 nt, Artificial Sequence
  Description of Artificial Sequence: Synthetic oligonucleotide
auuugacaaacuccacgaa

SEQ ID NO: 3096151 - RNA, 19 nt, Artificial Sequence
  Description of Artificial Sequence: Synthetic oligonucleotide
caugcccuccuccugugcc

SEQ ID NO: 3096152 - RNA, 19 nt, Artificial Sequence
  Description of Artificial Sequence: Synthetic oligonucleotide
agggccggcagccccaccg

SEQ ID NO: 3096153 - RNA, 19 nt, Artificial Sequence
  Description of Artificial Sequence: Synthetic oligonucleotide
ccggcugcgauauucagag

SEQ ID NO: 3096154 - RNA, 19 nt, Artificial Sequence
  Description of Artificial Sequence: Synthetic oligonucleotide
auucagaggguggauggug

SEQ ID NO: 3096155 - RNA, 19 nt, Artificial Sequence
  Description of Artificial Sequence: Synthetic oligonucleotide
gaguccagagauggcacag

SEQ ID NO: 3096156 - RNA, 19 nt, Artificial Sequence
  Description of Artificial Sequence: Synthetic oligonucleotide
agccccaccggcugcgccc

SEQ ID NO: 3096157 - RNA, 19 nt, Artificial Sequence
  Description of Artificial Sequence: Synthetic oligonucleotide
aggguggauggugacacag

SEQ ID NO: 3096158 - RNA, 19 nt, Artificial Sequence
  Description of Artificial Sequence: Synthetic oligonucleotide
auggcacaggacacggccc

SEQ ID NO: 3096159 - RNA, 19 nt, Artificial Sequence
  Description of Artificial Sequence: Synthetic oligonucleotide
agaguccagagauggcaca

SEQ ID NO: 3096160 - RNA, 19 nt, Artificial Sequence
  Description of Artificial Sequence: Synthetic oligonucleotide
cgaacuggcagcagaaggg

SEQ ID NO: 3096161 - RNA, 19 nt, Artificial Sequence
  Description of Artificial Sequence: Synthetic oligonucleotide
guugaagaguccagagaug

SEQ ID NO: 3096162 - RNA, 19 nt, Artificial Sequence
  Description of Artificial Sequence: Synthetic oligonucleotide
agacggcacagccagcggu

SEQ ID NO: 3096163 - RNA, 19 nt, Artificial Sequence
  Description of Artificial Sequence: Synthetic oligonucleotide
agaagggcgccucgcauaa

SEQ ID NO: 3096164 - RNA, 19 nt, Artificial Sequence
  Description of Artificial Sequence: Synthetic oligonucleotide
ucagaggguggauggugac

SEQ ID NO: 3096165 - RNA, 19 nt, Artificial Sequence
  Description of Artificial Sequence: Synthetic oligonucleotide
augcccuccuccugugccg

SEQ ID NO: 3096166 - RNA, 19 nt, Artificial Sequence
  Description of Artificial Sequence: Synthetic oligonucleotide
gugacacaguugaagaguc

SEQ ID NO: 3096167 - RNA, 19 nt, Artificial Sequence
  Description of Artificial Sequence: Synthetic oligonucleotide
uauucagaggguggauggu

SEQ ID NO: 3096168 - RNA, 19 nt, Artificial Sequence
  Description of Artificial Sequence: Synthetic oligonucleotide
aggagcguagcccggucca

SEQ ID NO: 3096169 - RNA, 19 nt, Artificial Sequence
  Description of Artificial Sequence: Synthetic oligonucleotide
uucugccaggagcguagcc

SEQ ID NO: 3096170 - RNA, 19 nt, Artificial Sequence
  Description of Artificial Sequence: Synthetic oligonucleotide
caguugaagaguccagaga

SEQ ID NO: 3096171 - RNA, 19 nt, Artificial Sequence
  Description of Artificial Sequence: Synthetic oligonucleotide
gaaggcguucaugaucauc

SEQ ID NO: 3096172 - RNA, 19 nt, Artificial Sequence
  Description of Artificial Sequence: Synthetic oligonucleotide
agcuacuguauuugacaaa

SEQ ID NO: 3096173 - RNA, 19 nt, Artificial Sequence
  Description of Artificial Sequence: Synthetic oligonucleotide
augucaugcccuccuccug

SEQ ID NO: 3096174 - RNA, 19 nt, Artificial Sequence
  Description of Artificial Sequence: Synthetic oligonucleotide
acagccagcgguaccacca

SEQ ID NO: 3096175 - RNA, 19 nt, Artificial Sequence
  Description of Artificial Sequence: Synthetic oligonucleotide
cagcuacuguauuugacaa

SEQ ID NO: 3096176 - RNA, 19 nt, Artificial Sequence
  Description of Artificial Sequence: Synthetic oligonucleotide
acacaguugaagaguccag

SEQ ID NO: 3096177 - RNA, 19 nt, Artificial Sequence
  Description of Artificial Sequence: Synthetic oligonucleotide
cugcgauauucagagggug

SEQ ID NO: 3096178 - RNA, 19 nt, Artificial Sequence
  Description of Artificial Sequence: Synthetic oligonucleotide
cacaccggcugcgauauuc

SEQ ID NO: 3096179 - RNA, 19 nt, Artificial Sequence
  Description of Artificial Sequence: Synthetic oligonucleotide
agauggcacaggacacggc

SEQ ID NO: 3096180 - RNA, 19 nt, Artificial Sequence
  Description of Artificial Sequence: Synthetic oligonucleotide
guucaugaucauccacaca

SEQ ID NO: 3096181 - RNA, 19 nt, Artificial Sequence
  Description of Artificial Sequence: Synthetic oligonucleotide
guggauggugacacaguug

SEQ ID NO: 3096182 - RNA, 19 nt, Artificial Sequence
  Description of Artificial Sequence: Synthetic oligonucleotide
cacaguugaagaguccaga

SEQ ID NO: 3096183 - RNA, 19 nt, Artificial Sequence
  Description of Artificial Sequence: Synthetic oligonucleotide
agcguagcccgguccaccu

SEQ ID NO: 3096184 - RNA, 19 nt, Artificial Sequence
  Description of Artificial Sequence: Synthetic oligonucleotide
ugccaggagcguagcccgg

SEQ ID NO: 3096185 - RNA, 19 nt, Artificial Sequence
  Description of Artificial Sequence: Synthetic oligonucleotide
agcccgguccaccuucuca

SEQ ID NO: 3096186 - RNA, 19 nt, Artificial Sequence
  Description of Artificial Sequence: Synthetic oligonucleotide
caggagcguagcccggucc

SEQ ID NO: 3096187 - RNA, 19 nt, Artificial Sequence
  Description of Artificial Sequence: Synthetic oligonucleotide
uccugugccggcggggcag

SEQ ID NO: 3096188 - RNA, 19 nt, Artificial Sequence
  Description of Artificial Sequence: Synthetic oligonucleotide
cauccacacaccggcugcg

SEQ ID NO: 3096189 - RNA, 19 nt, Artificial Sequence
  Description of Artificial Sequence: Synthetic oligonucleotide
caaacuccacgaacuggca

SEQ ID NO: 3096190 - RNA, 19 nt, Artificial Sequence
  Description of Artificial Sequence: Synthetic oligonucleotide
uccacacaccggcugcgau

SEQ ID NO: 3096191 - RNA, 19 nt, Artificial Sequence
  Description of Artificial Sequence: Synthetic oligonucleotide
cacagccagcgguaccacc

SEQ ID NO: 3096192 - RNA, 19 nt, Artificial Sequence
  Description of Artificial Sequence: Synthetic oligonucleotide
caccuucucagcuacugua

SEQ ID NO: 3096193 - RNA, 19 nt, Artificial Sequence
  Description of Artificial Sequence: Synthetic oligonucleotide
gcguucaugaucauccaca

SEQ ID NO: 3096194 - RNA, 19 nt, Artificial Sequence
  Description of Artificial Sequence: Synthetic oligonucleotide
gguccaccuucucagcuac

SEQ ID NO: 3096195 - RNA, 19 nt, Artificial Sequence
  Description of Artificial Sequence: Synthetic oligonucleotide
aggcguucaugaucaucca

SEQ ID NO: 3096196 - RNA, 19 nt, Artificial Sequence
  Description of Artificial Sequence: Synthetic oligonucleotide
ugcccuccuccugugccgg

SEQ ID NO: 3096197 - RNA, 19 nt, Artificial Sequence
  Description of Artificial Sequence: Synthetic oligonucleotide
acuccacgaacuggcagca

SEQ ID NO: 3096198 - RNA, 19 nt, Artificial Sequence
  Description of Artificial Sequence: Synthetic oligonucleotide
gugccggcggggcagggcc

SEQ ID NO: 3096199 - RNA, 19 nt, Artificial Sequence
  Description of Artificial Sequence: Synthetic oligonucleotide
cuggcagcagaagggcgcc

SEQ ID NO: 3096200 - RNA, 19 nt, Artificial Sequence
  Description of Artificial Sequence: Synthetic oligonucleotide
ccagacggcacagccagcg

SEQ ID NO: 3096201 - RNA, 19 nt, Artificial Sequence
  Description of Artificial Sequence: Synthetic oligonucleotide
cacgaacuggcagcagaag

SEQ ID NO: 3096202 - RNA, 19 nt, Artificial Sequence
  Description of Artificial Sequence: Synthetic oligonucleotide
gcccgguccaccuucucag

SEQ ID NO: 3096203 - RNA, 19 nt, Artificial Sequence
  Description of Artificial Sequence: Synthetic oligonucleotide
caauaggaugaaggcguuc

SEQ ID NO: 3096204 - RNA, 19 nt, Artificial Sequence
  Description of Artificial Sequence: Synthetic oligonucleotide
cagacggcacagccagcgg

SEQ ID NO: 3096205 - RNA, 19 nt, Artificial Sequence
  Description of Artificial Sequence: Synthetic oligonucleotide
ggugacacaguugaagagu

SEQ ID NO: 3096206 - RNA, 19 nt, Artificial Sequence
  Description of Artificial Sequence: Synthetic oligonucleotide
cguucaugaucauccacac

SEQ ID NO: 3096207 - RNA, 19 nt, Artificial Sequence
  Description of Artificial Sequence: Synthetic oligonucleotide
ggcguucaugaucauccac

SEQ ID NO: 3096208 - RNA, 19 nt, Artificial Sequence
  Description of Artificial Sequence: Synthetic oligonucleotide
caccggcugcgauauucag

SEQ ID NO: 3096209 - RNA, 19 nt, Artificial Sequence
  Description of Artificial Sequence: Synthetic oligonucleotide
acggcacagccagcgguac

SEQ ID NO: 3096210 - RNA, 19 nt, Artificial Sequence
  Description of Artificial Sequence: Synthetic oligonucleotide
gucaugcccuccuccugug

SEQ ID NO: 3096211 - RNA, 19 nt, Artificial Sequence
  Description of Artificial Sequence: Synthetic oligonucleotide
accuucucagcuacuguau

SEQ ID NO: 3096212 - RNA, 19 nt, Artificial Sequence
  Description of Artificial Sequence: Synthetic oligonucleotide
gagcguagcccgguccacc

SEQ ID NO: 3096213 - RNA, 19 nt, Artificial Sequence
  Description of Artificial Sequence: Synthetic oligonucleotide
gcauaacaauaggaugaag

SEQ ID NO: 3096214 - RNA, 19 nt, Artificial Sequence
  Description of Artificial Sequence: Synthetic oligonucleotide
ccaugucaugcccuccucc

SEQ ID NO: 3096215 - RNA, 19 nt, Artificial Sequence
  Description of Artificial Sequence: Synthetic oligonucleotide
cagcgguaccaccauguca

SEQ ID NO: 3096216 - RNA, 19 nt, Artificial Sequence
  Description of Artificial Sequence: Synthetic oligonucleotide
gcagcagaagggcgccucg

SEQ ID NO: 3096217 - RNA, 19 nt, Artificial Sequence
  Description of Artificial Sequence: Synthetic oligonucleotide
agcacgcccgccagacggc

SEQ ID NO: 3096218 - RNA, 19 nt, Artificial Sequence
  Description of Artificial Sequence: Synthetic oligonucleotide
ccggcugcgcccaagccgc

SEQ ID NO: 3096219 - RNA, 19 nt, Artificial Sequence
  Description of Artificial Sequence: Synthetic oligonucleotide
accggcugcgauauucaga

SEQ ID NO: 3096220 - RNA, 19 nt, Artificial Sequence
  Description of Artificial Sequence: Synthetic oligonucleotide
gcgcccaagccgcucaugc

SEQ ID NO: 3096221 - RNA, 19 nt, Artificial Sequence
  Description of Artificial Sequence: Synthetic oligonucleotide
gcgauauucagagggugga

SEQ ID NO: 3096222 - RNA, 19 nt, Artificial Sequence
  Description of Artificial Sequence: Synthetic oligonucleotide
agccagcgguaccaccaug

SEQ ID NO: 3096223 - RNA, 19 nt, Artificial Sequence
  Description of Artificial Sequence: Synthetic oligonucleotide
ugccggcggggcagggccg

SEQ ID NO: 3096224 - RNA, 19 nt, Artificial Sequence
  Description of Artificial Sequence: Synthetic oligonucleotide
acaauaggaugaaggcguu

SEQ ID NO: 3096225 - RNA, 19 nt, Artificial Sequence
  Description of Artificial Sequence: Synthetic oligonucleotide
acgcccgccagacggcaca

SEQ ID NO: 3096226 - RNA, 19 nt, Artificial Sequence
  Description of Artificial Sequence: Synthetic oligonucleotide
cuucucagcuacuguauuu

SEQ ID NO: 3096227 - RNA, 19 nt, Artificial Sequence
  Description of Artificial Sequence: Synthetic oligonucleotide
acaccggcugcgauauuca

SEQ ID NO: 3096228 - RNA, 19 nt, Artificial Sequence
  Description of Artificial Sequence: Synthetic oligonucleotide
cuacuguauuugacaaacu

SEQ ID NO: 3096229 - RNA, 19 nt, Artificial Sequence
  Description of Artificial Sequence: Synthetic oligonucleotide
cccgccagacggcacagcc

SEQ ID NO: 3096230 - RNA, 19 nt, Artificial Sequence
  Description of Artificial Sequence: Synthetic oligonucleotide
gccucgcauaacaauagga

SEQ ID NO: 3096231 - RNA, 19 nt, Artificial Sequence
  Description of Artificial Sequence: Synthetic oligonucleotide
ugugccggcggggcagggc

SEQ ID NO: 3096232 - RNA, 19 nt, Artificial Sequence
  Description of Artificial Sequence: Synthetic oligonucleotide
cagaagggcgccucgcaua

SEQ ID NO: 3096233 - RNA, 19 nt, Artificial Sequence
  Description of Artificial Sequence: Synthetic oligonucleotide
cagcagaagggcgccucgc

SEQ ID NO: 3096234 - RNA, 19 nt, Artificial Sequence
  Description of Artificial Sequence: Synthetic oligonucleotide
gaggguggauggugacaca

SEQ ID NO: 3096235 - RNA, 19 nt, Artificial Sequence
  Description of Artificial Sequence: Synthetic oligonucleotide
ugaaggcguucaugaucau

SEQ ID NO: 3096236 - RNA, 19 nt, Artificial Sequence
  Description of Artificial Sequence: Synthetic oligonucleotide
gguggauggugacacaguu

SEQ ID NO: 3096237 - RNA, 19 nt, Artificial Sequence
  Description of Artificial Sequence: Synthetic oligonucleotide
gcgccucgcauaacaauag

SEQ ID NO: 3096238 - RNA, 19 nt, Artificial Sequence
  Description of Artificial Sequence: Synthetic oligonucleotide
cgccagacggcacagccag

SEQ ID NO: 3096239 - RNA, 19 nt, Artificial Sequence
  Description of Artificial Sequence: Synthetic oligonucleotide
caccggcugcgcccaagcc

SEQ ID NO: 3096240 - RNA, 19 nt, Artificial Sequence
  Description of Artificial Sequence: Synthetic oligonucleotide
ccucgcauaacaauaggau

SEQ ID NO: 3096241 - RNA, 19 nt, Artificial Sequence
  Description of Artificial Sequence: Synthetic oligonucleotide
gacggcacagccagcggua

SEQ ID NO: 3096242 - RNA, 19 nt, Artificial Sequence
  Description of Artificial Sequence: Synthetic oligonucleotide
cagaggguggauggugaca

SEQ ID NO: 3096243 - RNA, 19 nt, Artificial Sequence
  Description of Artificial Sequence: Synthetic oligonucleotide
gaucauccacacaccggcu

SEQ ID NO: 3096244 - RNA, 19 nt, Artificial Sequence
  Description of Artificial Sequence: Synthetic oligonucleotide
ggcgccucgcauaacaaua

SEQ ID NO: 3096245 - RNA, 19 nt, Artificial Sequence
  Description of Artificial Sequence: Synthetic oligonucleotide
ugcgcccaagccgcucaug

SEQ ID NO: 3096246 - RNA, 19 nt, Artificial Sequence
  Description of Artificial Sequence: Synthetic oligonucleotide
caccaugucaugcccuccu

SEQ ID NO: 3096247 - RNA, 19 nt, Artificial Sequence
  Description of Artificial Sequence: Synthetic oligonucleotide
cagccccaccggcugcgcc

SEQ ID NO: 3096248 - RNA, 19 nt, Artificial Sequence
  Description of Artificial Sequence: Synthetic oligonucleotide
cuccacgaacuggcagcag

SEQ ID NO: 3096249 - RNA, 19 nt, Artificial Sequence
  Description of Artificial Sequence: Synthetic oligonucleotide
cgccucgcauaacaauagg

SEQ ID NO: 3096250 - RNA, 19 nt, Artificial Sequence
  Description of Artificial Sequence: Synthetic oligonucleotide
cacacaccggcugcgauau

SEQ ID NO: 3096251 - RNA, 19 nt, Artificial Sequence
  Description of Artificial Sequence: Synthetic oligonucleotide
gcugcgcccaagccgcuca

SEQ ID NO: 3096252 - RNA, 19 nt, Artificial Sequence
  Description of Artificial Sequence: Synthetic oligonucleotide
gggccggcagccccaccgg

SEQ ID NO: 3096253 - RNA, 19 nt, Artificial Sequence
  Description of Artificial Sequence: Synthetic oligonucleotide
ggcagccccaccggcugcg

SEQ ID NO: 3096254 - RNA, 19 nt, Artificial Sequence
  Description of Artificial Sequence: Synthetic oligonucleotide
ggaugaaggcguucaugau

SEQ ID NO: 3096255 - RNA, 19 nt, Artificial Sequence
  Description of Artificial Sequence: Synthetic oligonucleotide
gaagggcgccucgcauaac

SEQ ID NO: 3096256 - RNA, 19 nt, Artificial Sequence
  Description of Artificial Sequence: Synthetic oligonucleotide
cacgcccgccagacggcac

SEQ ID NO: 3096257 - RNA, 19 nt, Artificial Sequence
  Description of Artificial Sequence: Synthetic oligonucleotide
ggcggggcagggccggcag

SEQ ID NO: 3096258 - RNA, 19 nt, Artificial Sequence
  Description of Artificial Sequence: Synthetic oligonucleotide
ccacgaacuggcagcagaa

SEQ ID NO: 3096259 - RNA, 19 nt, Artificial Sequence
  Description of Artificial Sequence: Synthetic oligonucleotide
ccuccuccugugccggcgg

SEQ ID NO: 3096260 - RNA, 19 nt, Artificial Sequence
  Description of Artificial Sequence: Synthetic oligonucleotide
cguagcccgguccaccuuc

SEQ ID NO: 3096261 - RNA, 19 nt, Artificial Sequence
  Description of Artificial Sequence: Synthetic oligonucleotide
agggcgccucgcauaacaa

SEQ ID NO: 3096262 - RNA, 19 nt, Artificial Sequence
  Description of Artificial Sequence: Synthetic oligonucleotide
ggcagcagaagggcgccuc

SEQ ID NO: 3096263 - RNA, 19 nt, Artificial Sequence
  Description of Artificial Sequence: Synthetic oligonucleotide
ccagcgguaccaccauguc

SEQ ID NO: 3096264 - RNA, 19 nt, Artificial Sequence
  Description of Artificial Sequence: Synthetic oligonucleotide
cgguaccaccaugucaugc

SEQ ID NO: 3096265 - RNA, 19 nt, Artificial Sequence
  Description of Artificial Sequence: Synthetic oligonucleotide
uggcagcagaagggcgccu

SEQ ID NO: 3096266 - RNA, 19 nt, Artificial Sequence
  Description of Artificial Sequence: Synthetic oligonucleotide
gcugcgauauucagagggu

SEQ ID NO: 3096267 - RNA, 19 nt, Artificial Sequence
  Description of Artificial Sequence: Synthetic oligonucleotide
cccgguccaccuucucagc

SEQ ID NO: 3096268 - RNA, 19 nt, Artificial Sequence
  Description of Artificial Sequence: Synthetic oligonucleotide
gcgguaccaccaugucaug

SEQ ID NO: 3096269 - RNA, 19 nt, Artificial Sequence
  Description of Artificial Sequence: Synthetic oligonucleotide
ccaccaugucaugcccucc

SEQ ID NO: 3096270 - RNA, 19 nt, Artificial Sequence
  Description of Artificial Sequence: Synthetic oligonucleotide
ggagcguagcccgguccac

SEQ ID NO: 3096271 - RNA, 19 nt, Artificial Sequence
  Description of Artificial Sequence: Synthetic oligonucleotide
ccagcacgcccgccagacg

SEQ ID NO: 3096272 - RNA, 19 nt, Artificial Sequence
  Description of Artificial Sequence: Synthetic oligonucleotide
gccagcgguaccaccaugu

SEQ ID NO: 3096273 - RNA, 19 nt, Artificial Sequence
  Description of Artificial Sequence: Synthetic oligonucleotide
ccggcagccccaccggcug

SEQ ID NO: 3096274 - RNA, 19 nt, Artificial Sequence
  Description of Artificial Sequence: Synthetic oligonucleotide
ggccggcagccccaccggc

SEQ ID NO: 3096275 - RNA, 19 nt, Artificial Sequence
  Description of Artificial Sequence: Synthetic oligonucleotide
cuccugugccggcggggca

SEQ ID NO: 3096276 - RNA, 19 nt, Artificial Sequence
  Description of Artificial Sequence: Synthetic oligonucleotide
cugugccggcggggcaggg

SEQ ID NO: 3096277 - RNA, 19 nt, Artificial Sequence
  Description of Artificial Sequence: Synthetic oligonucleotide
gcagaagggcgccucgcau

SEQ ID NO: 3096278 - RNA, 19 nt, Artificial Sequence
  Description of Artificial Sequence: Synthetic oligonucleotide
cgcauaacaauaggaugaa

SEQ ID NO: 3096279 - RNA, 19 nt, Artificial Sequence
  Description of Artificial Sequence: Synthetic oligonucleotide
ccaggagcguagcccgguc

SEQ ID NO: 3096280 - RNA, 19 nt, Artificial Sequence
  Description of Artificial Sequence: Synthetic oligonucleotide
ccacacaccggcugcgaua

SEQ ID NO: 3096281 - RNA, 19 nt, Artificial Sequence
  Description of Artificial Sequence: Synthetic oligonucleotide
guagcccgguccaccuucu

SEQ ID NO: 3096282 - RNA, 19 nt, Artificial Sequence
  Description of Artificial Sequence: Synthetic oligonucleotide
cagggccggcagccccacc

SEQ ID NO: 3096283 - RNA, 19 nt, Artificial Sequence
  Description of Artificial Sequence: Synthetic oligonucleotide
acacaccggcugcgauauu

SEQ ID NO: 3096284 - RNA, 19 nt, Artificial Sequence
  Description of Artificial Sequence: Synthetic oligonucleotide
gggcgccucgcauaacaau

SEQ ID NO: 3096285 - RNA, 19 nt, Artificial Sequence
  Description of Artificial Sequence: Synthetic oligonucleotide
ggguggauggugacacagu

SEQ ID NO: 3096286 - RNA, 19 nt, Artificial Sequence
  Description of Artificial Sequence: Synthetic oligonucleotide
ccgccagacggcacagcca

SEQ ID NO: 3096287 - RNA, 19 nt, Artificial Sequence
  Description of Artificial Sequence: Synthetic oligonucleotide
ccugugccggcggggcagg

SEQ ID NO: 3096288 - RNA, 19 nt, Artificial Sequence
  Description of Artificial Sequence: Synthetic oligonucleotide
gcacagccagcgguaccac

SEQ ID NO: 3096289 - RNA, 19 nt, Artificial Sequence
  Description of Artificial Sequence: Synthetic oligonucleotide
gccggcggggcagggccgg

SEQ ID NO: 3096290 - RNA, 19 nt, Artificial Sequence
  Description of Artificial Sequence: Synthetic oligonucleotide
cggcugcgauauucagagg

SEQ ID NO: 3096291 - RNA, 19 nt, Artificial Sequence
  Description of Artificial Sequence: Synthetic oligonucleotide
gcggggcagggccggcagc

SEQ ID NO: 3096292 - RNA, 19 nt, Artificial Sequence
  Description of Artificial Sequence: Synthetic oligonucleotide
ggggcagggccggcagccc

SEQ ID NO: 3096293 - RNA, 19 nt, Artificial Sequence
  Description of Artificial Sequence: Synthetic oligonucleotide
ccuucucagcuacuguauu

SEQ ID NO: 3096294 - RNA, 19 nt, Artificial Sequence
  Description of Artificial Sequence: Synthetic oligonucleotide
gccagacggcacagccagc

SEQ ID NO: 3096295 - RNA, 19 nt, Artificial Sequence
  Description of Artificial Sequence: Synthetic oligonucleotide
cagccagcgguaccaccau

SEQ ID NO: 3096296 - RNA, 19 nt, Artificial Sequence
  Description of Artificial Sequence: Synthetic oligonucleotide
gcccuccuccugugccggc

SEQ ID NO: 3096297 - RNA, 19 nt, Artificial Sequence
  Description of Artificial Sequence: Synthetic oligonucleotide
ccgguccaccuucucagcu

SEQ ID NO: 3096298 - RNA, 19 nt, Artificial Sequence
  Description of Artificial Sequence: Synthetic oligonucleotide
gcacgcccgccagacggca

SEQ ID NO: 3096299 - RNA, 19 nt, Artificial Sequence
  Description of Artificial Sequence: Synthetic oligonucleotide
ggcugcgcccaagccgcuc

SEQ ID NO: 3096300 - RNA, 19 nt, Artificial Sequence
  Description of Artificial Sequence: Synthetic oligonucleotide
cgguccaccuucucagcua

SEQ ID NO: 3096301 - RNA, 19 nt, Artificial Sequence
  Description of Artificial Sequence: Synthetic oligonucleotide
guccaccuucucagcuacu

SEQ ID NO: 3096302 - RNA, 19 nt, Artificial Sequence
  Description of Artificial Sequence: Synthetic oligonucleotide
gcagccccaccggcugcgc

SEQ ID NO: 3096303 - RNA, 19 nt, Artificial Sequence
  Description of Artificial Sequence: Synthetic oligonucleotide
gccaggagcguagcccggu

SEQ ID NO: 3096304 - RNA, 19 nt, Artificial Sequence
  Description of Artificial Sequence: Synthetic oligonucleotide
gcagggccggcagccccac

SEQ ID NO: 3096305 - RNA, 19 nt, Artificial Sequence
  Description of Artificial Sequence: Synthetic oligonucleotide
gcccgccagacggcacagc

SEQ ID NO: 3096306 - RNA, 19 nt, Artificial Sequence
  Description of Artificial Sequence: Synthetic oligonucleotide
gccccaccggcugcgccca

SEQ ID NO: 3096307 - RNA, 19 nt, Artificial Sequence
  Description of Artificial Sequence: Synthetic oligonucleotide
cggcagccccaccggcugc

SEQ ID NO: 3096308 - RNA, 19 nt, Artificial Sequence
  Description of Artificial Sequence: Synthetic oligonucleotide
cgauauucagaggguggau

SEQ ID NO: 3096309 - RNA, 19 nt, Artificial Sequence
  Description of Artificial Sequence: Synthetic oligonucleotide
cugcgcccaagccgcucau

SEQ ID NO: 3096310 - RNA, 19 nt, Artificial Sequence
  Description of Artificial Sequence: Synthetic oligonucleotide
cgcccgccagacggcacag

SEQ ID NO: 3096311 - RNA, 19 nt, Artificial Sequence
  Description of Artificial Sequence: Synthetic oligonucleotide
ccccagcacgcccgccaga

SEQ ID NO: 3096312 - RNA, 19 nt, Artificial Sequence
  Description of Artificial Sequence: Synthetic oligonucleotide
gcguagcccgguccaccuu

SEQ ID NO: 3096313 - RNA, 19 nt, Artificial Sequence
  Description of Artificial Sequence: Synthetic oligonucleotide
ccggcggggcagggccggc

SEQ ID NO: 3096314 - RNA, 19 nt, Artificial Sequence
  Description of Artificial Sequence: Synthetic oligonucleotide
cggcggggcagggccggca

SEQ ID NO: 3096315 - RNA, 19 nt, Artificial Sequence
  Description of Artificial Sequence: Synthetic oligonucleotide
ccccaccggcugcgcccaa

SEQ ID NO: 3096316 - RNA, 19 nt, Artificial Sequence
  Description of Artificial Sequence: Synthetic oligonucleotide
acugagaugauuuauucac

SEQ ID NO: 3096317 - RNA, 19 nt, Artificial Sequence
  Description of Artificial Sequence: Synthetic oligonucleotide
uuauucacuacccacuugg

SEQ ID NO: 3096318 - RNA, 19 nt, Artificial Sequence
  Description of Artificial Sequence: Synthetic oligonucleotide
agaugauuuauucacuacc

SEQ ID NO: 3096319 - RNA, 19 nt, Artificial Sequence
  Description of Artificial Sequence: Synthetic oligonucleotide
ucugacaaugccaagcugg

SEQ ID NO: 3096320 - RNA, 19 nt, Artificial Sequence
  Description of Artificial Sequence: Synthetic oligonucleotide
aaugacgcagcucuugggc

SEQ ID NO: 3096321 - RNA, 19 nt, Artificial Sequence
  Description of Artificial Sequence: Synthetic oligonucleotide
uguacucucaucaauauuc

SEQ ID NO: 3096322 - RNA, 19 nt, Artificial Sequence
  Description of Artificial Sequence: Synthetic oligonucleotide
ucaucaauauucuccaggg

SEQ ID NO: 3096323 - RNA, 19 nt, Artificial Sequence
  Description of Artificial Sequence: Synthetic oligonucleotide
aucaauauucuccagggag

SEQ ID NO: 3096324 - RNA, 19 nt, Artificial Sequence
  Description of Artificial Sequence: Synthetic oligonucleotide
uucuucauggccuugggag

SEQ ID NO: 3096325 - RNA, 19 nt, Artificial Sequence
  Description of Artificial Sequence: Synthetic oligonucleotide
uagguaaugacgcagcucu

SEQ ID NO: 3096326 - RNA, 19 nt, Artificial Sequence
  Description of Artificial Sequence: Synthetic oligonucleotide
uuugggauccacuugggcc

SEQ ID NO: 3096327 - RNA, 19 nt, Artificial Sequence
  Description of Artificial Sequence: Synthetic oligonucleotide
acucucaucaauauucucc

SEQ ID NO: 3096328 - RNA, 19 nt, Artificial Sequence
  Description of Artificial Sequence: Synthetic oligonucleotide
uggguaaagagccuuuggg

SEQ ID NO: 3096329 - RNA, 19 nt, Artificial Sequence
  Description of Artificial Sequence: Synthetic oligonucleotide
gaugauuuauucacuaccc

SEQ ID NO: 3096330 - RNA, 19 nt, Artificial Sequence
  Description of Artificial Sequence: Synthetic oligonucleotide
ugauuuauucacuacccac

SEQ ID NO: 3096331 - RNA, 19 nt, Artificial Sequence
  Description of Artificial Sequence: Synthetic oligonucleotide
cucaucaauauucuccagg

SEQ ID NO: 3096332 - RNA, 19 nt, Artificial Sequence
  Description of Artificial Sequence: Synthetic oligonucleotide
ucaauauucuccagggagu

SEQ ID NO: 3096333 - RNA, 19 nt, Artificial Sequence
  Description of Artificial Sequence: Synthetic oligonucleotide
uguuucugcuuccacucgg

SEQ ID NO: 3096334 - RNA, 19 nt, Artificial Sequence
  Description of Artificial Sequence: Synthetic oligonucleotide
aacugagaugauuuauuca

SEQ ID NO: 3096335 - RNA, 19 nt, Artificial Sequence
  Description of Artificial Sequence: Synthetic oligonucleotide
aauauucuccagggagucc

SEQ ID NO: 3096336 - RNA, 19 nt, Artificial Sequence
  Description of Artificial Sequence: Synthetic oligonucleotide
acugauagcucugacaaug

SEQ ID NO: 3096337 - RNA, 19 nt, Artificial Sequence
  Description of Artificial Sequence: Synthetic oligonucleotide
gacaaugccaagcugggca

SEQ ID NO: 3096338 - RNA, 19 nt, Artificial Sequence
  Description of Artificial Sequence: Synthetic oligonucleotide
uucacuacccacuugggua

SEQ ID NO: 3096339 - RNA, 19 nt, Artificial Sequence
  Description of Artificial Sequence: Synthetic oligonucleotide
auauucuccagggaguccg

SEQ ID NO: 3096340 - RNA, 19 nt, Artificial Sequence
  Description of Artificial Sequence: Synthetic oligonucleotide
uuggguaaagagccuuugg

SEQ ID NO: 3096341 - RNA, 19 nt, Artificial Sequence
  Description of Artificial Sequence: Synthetic oligonucleotide
agcucugacaaugccaagc

SEQ ID NO: 3096342 - RNA, 19 nt, Artificial Sequence
  Description of Artificial Sequence: Synthetic oligonucleotide
uccacuugggccagguagg

SEQ ID NO: 3096343 - RNA, 19 nt, Artificial Sequence
  Description of Artificial Sequence: Synthetic oligonucleotide
uaaagagccuuugggaucc

SEQ ID NO: 3096344 - RNA, 19 nt, Artificial Sequence
  Description of Artificial Sequence: Synthetic oligonucleotide
guaaugacgcagcucuugg

SEQ ID NO: 3096345 - RNA, 19 nt, Artificial Sequence
  Description of Artificial Sequence: Synthetic oligonucleotide
uauucacuacccacuuggg

SEQ ID NO: 3096346 - RNA, 19 nt, Artificial Sequence
  Description of Artificial Sequence: Synthetic oligonucleotide
augacgcagcucuugggcc

SEQ ID NO: 3096347 - RNA, 19 nt, Artificial Sequence
  Description of Artificial Sequence: Synthetic oligonucleotide
gaacugagaugauuuauuc

SEQ ID NO: 3096348 - RNA, 19 nt, Artificial Sequence
  Description of Artificial Sequence: Synthetic oligonucleotide
cuugaugcaggccuuguac

SEQ ID NO: 3096349 - RNA, 19 nt, Artificial Sequence
  Description of Artificial Sequence: Synthetic oligonucleotide
ugagaugauuuauucacua

SEQ ID NO: 3096350 - RNA, 19 nt, Artificial Sequence
  Description of Artificial Sequence: Synthetic oligonucleotide
uuuauucacuacccacuug

SEQ ID NO: 3096351 - RNA, 19 nt, Artificial Sequence
  Description of Artificial Sequence: Synthetic oligonucleotide
ucugcuuccacucgggaua

SEQ ID NO: 3096352 - RNA, 19 nt, Artificial Sequence
  Description of Artificial Sequence: Synthetic oligonucleotide
ucgggauacuugaugcagg

SEQ ID NO: 3096353 - RNA, 19 nt, Artificial Sequence
  Description of Artificial Sequence: Synthetic oligonucleotide
uugggauccacuugggcca

SEQ ID NO: 3096354 - RNA, 19 nt, Artificial Sequence
  Description of Artificial Sequence: Synthetic oligonucleotide
cacucgggauacuugaugc

SEQ ID NO: 3096355 - RNA, 19 nt, Artificial Sequence
  Description of Artificial Sequence: Synthetic oligonucleotide
ugauagcucugacaaugcc

SEQ ID NO: 3096356 - RNA, 19 nt, Artificial Sequence
  Description of Artificial Sequence: Synthetic oligonucleotide
gagaugauuuauucacuac

SEQ ID NO: 3096357 - RNA, 19 nt, Artificial Sequence
  Description of Artificial Sequence: Synthetic oligonucleotide
ugcacugauagcucugaca

SEQ ID NO: 3096358 - RNA, 19 nt, Artificial Sequence
  Description of Artificial Sequence: Synthetic oligonucleotide
uaaugacgcagcucuuggg

SEQ ID NO: 3096359 - RNA, 19 nt, Artificial Sequence
  Description of Artificial Sequence: Synthetic oligonucleotide
cugacaaugccaagcuggg

SEQ ID NO: 3096360 - RNA, 19 nt, Artificial Sequence
  Description of Artificial Sequence: Synthetic oligonucleotide
augauuuauucacuaccca

SEQ ID NO: 3096361 - RNA, 19 nt, Artificial Sequence
  Description of Artificial Sequence: Synthetic oligonucleotide
acccacuuggguaaagagc

SEQ ID NO: 3096362 - RNA, 19 nt, Artificial Sequence
  Description of Artificial Sequence: Synthetic oligonucleotide
uugaugcaggccuuguaca

SEQ ID NO: 3096363 - RNA, 19 nt, Artificial Sequence
  Description of Artificial Sequence: Synthetic oligonucleotide
acuugggccagguagguaa

SEQ ID NO: 3096364 - RNA, 19 nt, Artificial Sequence
  Description of Artificial Sequence: Synthetic oligonucleotide
gagccaggaacugagauga

SEQ ID NO: 3096365 - RNA, 19 nt, Artificial Sequence
  Description of Artificial Sequence: Synthetic oligonucleotide
uacccacuuggguaaagag

SEQ ID NO: 3096366 - RNA, 19 nt, Artificial Sequence
  Description of Artificial Sequence: Synthetic oligonucleotide
gauagcucugacaaugcca

SEQ ID NO: 3096367 - RNA, 19 nt, Artificial Sequence
  Description of Artificial Sequence: Synthetic oligonucleotide
auuuauucacuacccacuu

SEQ ID NO: 3096368 - RNA, 19 nt, Artificial Sequence
  Description of Artificial Sequence: Synthetic oligonucleotide
uuccacucgggauacuuga

SEQ ID NO: 3096369 - RNA, 19 nt, Artificial Sequence
  Description of Artificial Sequence: Synthetic oligonucleotide
guacaucuucuucauggcc

SEQ ID NO: 3096370 - RNA, 19 nt, Artificial Sequence
  Description of Artificial Sequence: Synthetic oligonucleotide
uguugcacugauagcucug

SEQ ID NO: 3096371 - RNA, 19 nt, Artificial Sequence
  Description of Artificial Sequence: Synthetic oligonucleotide
auucacuacccacuugggu

SEQ ID NO: 3096372 - RNA, 19 nt, Artificial Sequence
  Description of Artificial Sequence: Synthetic oligonucleotide
agguagguaaugacgcagc

SEQ ID NO: 3096373 - RNA, 19 nt, Artificial Sequence
  Description of Artificial Sequence: Synthetic oligonucleotide
agcucuugggcccuguacu

SEQ ID NO: 3096374 - RNA, 19 nt, Artificial Sequence
  Description of Artificial Sequence: Synthetic oligonucleotide
guaaagagccuuugggauc

SEQ ID NO: 3096375 - RNA, 19 nt, Artificial Sequence
  Description of Artificial Sequence: Synthetic oligonucleotide
gauuuauucacuacccacu

SEQ ID NO: 3096376 - RNA, 19 nt, Artificial Sequence
  Description of Artificial Sequence: Synthetic oligonucleotide
cugauagcucugacaaugc

SEQ ID NO: 3096377 - RNA, 19 nt, Artificial Sequence
  Description of Artificial Sequence: Synthetic oligonucleotide
ugccaagcugggcaauggg

SEQ ID NO: 3096378 - RNA, 19 nt, Artificial Sequence
  Description of Artificial Sequence: Synthetic oligonucleotide
uccgggugcagccauggcu

SEQ ID NO: 3096379 - RNA, 19 nt, Artificial Sequence
  Description of Artificial Sequence: Synthetic oligonucleotide
ucacuguacucucaucaau

SEQ ID NO: 3096380 - RNA, 19 nt, Artificial Sequence
  Description of Artificial Sequence: Synthetic oligonucleotide
gccuuugggauccacuugg

SEQ ID NO: 3096381 - RNA, 19 nt, Artificial Sequence
  Description of Artificial Sequence: Synthetic oligonucleotide
aaugccaagcugggcaaug

SEQ ID NO: 3096382 - RNA, 19 nt, Artificial Sequence
  Description of Artificial Sequence: Synthetic oligonucleotide
ucacuacccacuuggguaa

SEQ ID NO: 3096383 - RNA, 19 nt, Artificial Sequence
  Description of Artificial Sequence: Synthetic oligonucleotide
uggcuugaagugcggcugg

SEQ ID NO: 3096384 - RNA, 19 nt, Artificial Sequence
  Description of Artificial Sequence: Synthetic oligonucleotide
auagcucugacaaugccaa

SEQ ID NO: 3096385 - RNA, 19 nt, Artificial Sequence
  Description of Artificial Sequence: Synthetic oligonucleotide
cuuugggauccacuugggc

SEQ ID NO: 3096386 - RNA, 19 nt, Artificial Sequence
  Description of Artificial Sequence: Synthetic oligonucleotide
gcagccauggcuugaagug

SEQ ID NO: 3096387 - RNA, 19 nt, Artificial Sequence
  Description of Artificial Sequence: Synthetic oligonucleotide
ugacgcagcucuugggccc

SEQ ID NO: 3096388 - RNA, 19 nt, Artificial Sequence
  Description of Artificial Sequence: Synthetic oligonucleotide
cucgggauacuugaugcag

SEQ ID NO: 3096389 - RNA, 19 nt, Artificial Sequence
  Description of Artificial Sequence: Synthetic oligonucleotide
ugggcaaugggcucugcuc

SEQ ID NO: 3096390 - RNA, 19 nt, Artificial Sequence
  Description of Artificial Sequence: Synthetic oligonucleotide
ucuugggcccuguacucug

SEQ ID NO: 3096391 - RNA, 19 nt, Artificial Sequence
  Description of Artificial Sequence: Synthetic oligonucleotide
gguguuucugcuuccacuc

SEQ ID NO: 3096392 - RNA, 19 nt, Artificial Sequence
  Description of Artificial Sequence: Synthetic oligonucleotide
ugaugcaggccuuguacau

SEQ ID NO: 3096393 - RNA, 19 nt, Artificial Sequence
  Description of Artificial Sequence: Synthetic oligonucleotide
aaugggcucugcuccgggu

SEQ ID NO: 3096394 - RNA, 19 nt, Artificial Sequence
  Description of Artificial Sequence: Synthetic oligonucleotide
uuucugcuuccacucggga

SEQ ID NO: 3096395 - RNA, 19 nt, Artificial Sequence
  Description of Artificial Sequence: Synthetic oligonucleotide
gcacugauagcucugacaa

SEQ ID NO: 3096396 - RNA, 19 nt, Artificial Sequence
  Description of Artificial Sequence: Synthetic oligonucleotide
guguuucugcuuccacucg

SEQ ID NO: 3096397 - RNA, 19 nt, Artificial Sequence
  Description of Artificial Sequence: Synthetic oligonucleotide
caauauucuccagggaguc

SEQ ID NO: 3096398 - RNA, 19 nt, Artificial Sequence
  Description of Artificial Sequence: Synthetic oligonucleotide
guuucugcuuccacucggg

SEQ ID NO: 3096399 - RNA, 19 nt, Artificial Sequence
  Description of Artificial Sequence: Synthetic oligonucleotide
auggcuugaagugcggcug

SEQ ID NO: 3096400 - RNA, 19 nt, Artificial Sequence
  Description of Artificial Sequence: Synthetic oligonucleotide
ggauacuugaugcaggccu

SEQ ID NO: 3096401 - RNA, 19 nt, Artificial Sequence
  Description of Artificial Sequence: Synthetic oligonucleotide
cuuccacucgggauacuug

SEQ ID NO: 3096402 - RNA, 19 nt, Artificial Sequence
  Description of Artificial Sequence: Synthetic oligonucleotide
ggguaaagagccuuuggga

SEQ ID NO: 3096403 - RNA, 19 nt, Artificial Sequence
  Description of Artificial Sequence: Synthetic oligonucleotide
uauucuccagggaguccgc

SEQ ID NO: 3096404 - RNA, 19 nt, Artificial Sequence
  Description of Artificial Sequence: Synthetic oligonucleotide
acaaugccaagcugggcaa

SEQ ID NO: 3096405 - RNA, 19 nt, Artificial Sequence
  Description of Artificial Sequence: Synthetic oligonucleotide
cuuguacaucuucuucaug

SEQ ID NO: 3096406 - RNA, 19 nt, Artificial Sequence
  Description of Artificial Sequence: Synthetic oligonucleotide
uacucucaucaauauucuc

SEQ ID NO: 3096407 - RNA, 19 nt, Artificial Sequence
  Description of Artificial Sequence: Synthetic oligonucleotide
aagagccuuugggauccac

SEQ ID NO: 3096408 - RNA, 19 nt, Artificial Sequence
  Description of Artificial Sequence: Synthetic oligonucleotide
agccauggcuugaagugcg

SEQ ID NO: 3096409 - RNA, 19 nt, Artificial Sequence
  Description of Artificial Sequence: Synthetic oligonucleotide
ggagccaggaacugagaug

SEQ ID NO: 3096410 - RNA, 19 nt, Artificial Sequence
  Description of Artificial Sequence: Synthetic oligonucleotide
aggaacugagaugauuuau

SEQ ID NO: 3096411 - RNA, 19 nt, Artificial Sequence
  Description of Artificial Sequence: Synthetic oligonucleotide
gaguccgcguguugcacug

SEQ ID NO: 3096412 - RNA, 19 nt, Artificial Sequence
  Description of Artificial Sequence: Synthetic oligonucleotide
cuuggguaaagagccuuug

SEQ ID NO: 3096413 - RNA, 19 nt, Artificial Sequence
  Description of Artificial Sequence: Synthetic oligonucleotide
gccagguagguaaugacgc

SEQ ID NO: 3096414 - RNA, 19 nt, Artificial Sequence
  Description of Artificial Sequence: Synthetic oligonucleotide
augggcucugcuccgggug

SEQ ID NO: 3096415 - RNA, 19 nt, Artificial Sequence
  Description of Artificial Sequence: Synthetic oligonucleotide
ggccagguagguaaugacg

SEQ ID NO: 3096416 - RNA, 19 nt, Artificial Sequence
  Description of Artificial Sequence: Synthetic oligonucleotide
cucugcuccgggugcagcc

SEQ ID NO: 3096417 - RNA, 19 nt, Artificial Sequence
  Description of Artificial Sequence: Synthetic oligonucleotide
agccuuugggauccacuug

SEQ ID NO: 3096418 - RNA, 19 nt, Artificial Sequence
  Description of Artificial Sequence: Synthetic oligonucleotide
acucgggauacuugaugca

SEQ ID NO: 3096419 - RNA, 19 nt, Artificial Sequence
  Description of Artificial Sequence: Synthetic oligonucleotide
ugggccagguagguaauga

SEQ ID NO: 3096420 - RNA, 19 nt, Artificial Sequence
  Description of Artificial Sequence: Synthetic oligonucleotide
uugaagugcggcugguguu

SEQ ID NO: 3096421 - RNA, 19 nt, Artificial Sequence
  Description of Artificial Sequence: Synthetic oligonucleotide
gguaaugacgcagcucuug

SEQ ID NO: 3096422 - RNA, 19 nt, Artificial Sequence
  Description of Artificial Sequence: Synthetic oligonucleotide
gccuuguacaucuucuuca

SEQ ID NO: 3096423 - RNA, 19 nt, Artificial Sequence
  Description of Artificial Sequence: Synthetic oligonucleotide
gguaaagagccuuugggau

SEQ ID NO: 3096424 - RNA, 19 nt, Artificial Sequence
  Description of Artificial Sequence: Synthetic oligonucleotide
uucuccagggaguccgcgu

SEQ ID NO: 3096425 - RNA, 19 nt, Artificial Sequence
  Description of Artificial Sequence: Synthetic oligonucleotide
caagcugggcaaugggcuc

SEQ ID NO: 3096426 - RNA, 19 nt, Artificial Sequence
  Description of Artificial Sequence: Synthetic oligonucleotide
uugcacugauagcucugac

SEQ ID NO: 3096427 - RNA, 19 nt, Artificial Sequence
  Description of Artificial Sequence: Synthetic oligonucleotide
cagggaguccgcguguugc

SEQ ID NO: 3096428 - RNA, 19 nt, Artificial Sequence
  Description of Artificial Sequence: Synthetic oligonucleotide
augccaagcugggcaaugg

SEQ ID NO: 3096429 - RNA, 19 nt, Artificial Sequence
  Description of Artificial Sequence: Synthetic oligonucleotide
ugacaaugccaagcugggc

SEQ ID NO: 3096430 - RNA, 19 nt, Artificial Sequence
  Description of Artificial Sequence: Synthetic oligonucleotide
ccgcguguugcacugauag

SEQ ID NO: 3096431 - RNA, 19 nt, Artificial Sequence
  Description of Artificial Sequence: Synthetic oligonucleotide
aagcugggcaaugggcucu

SEQ ID NO: 3096432 - RNA, 19 nt, Artificial Sequence
  Description of Artificial Sequence: Synthetic oligonucleotide
ugcggcugguguuucugcu

SEQ ID NO: 3096433 - RNA, 19 nt, Artificial Sequence
  Description of Artificial Sequence: Synthetic oligonucleotide
gaugcaggccuuguacauc

SEQ ID NO: 3096434 - RNA, 19 nt, Artificial Sequence
  Description of Artificial Sequence: Synthetic oligonucleotide
cucugacaaugccaagcug

SEQ ID NO: 3096435 - RNA, 19 nt, Artificial Sequence
  Description of Artificial Sequence: Synthetic oligonucleotide
ugaagugcggcugguguuu

SEQ ID NO: 3096436 - RNA, 19 nt, Artificial Sequence
  Description of Artificial Sequence: Synthetic oligonucleotide
gucacuguacucucaucaa

SEQ ID NO: 3096437 - RNA, 19 nt, Artificial Sequence
  Description of Artificial Sequence: Synthetic oligonucleotide
guagguaaugacgcagcuc

SEQ ID NO: 3096438 - RNA, 19 nt, Artificial Sequence
  Description of Artificial Sequence: Synthetic oligonucleotide
cagccauggcuugaagugc

SEQ ID NO: 3096439 - RNA, 19 nt, Artificial Sequence
  Description of Artificial Sequence: Synthetic oligonucleotide
cuugaagugcggcuggugu

SEQ ID NO: 3096440 - RNA, 19 nt, Artificial Sequence
  Description of Artificial Sequence: Synthetic oligonucleotide
auucuccagggaguccgcg

SEQ ID NO: 3096441 - RNA, 19 nt, Artificial Sequence
  Description of Artificial Sequence: Synthetic oligonucleotide
caucaauauucuccaggga

SEQ ID NO: 3096442 - RNA, 19 nt, Artificial Sequence
  Description of Artificial Sequence: Synthetic oligonucleotide
caaugggcucugcuccggg

SEQ ID NO: 3096443 - RNA, 19 nt, Artificial Sequence
  Description of Artificial Sequence: Synthetic oligonucleotide
uccacucgggauacuugau

SEQ ID NO: 3096444 - RNA, 19 nt, Artificial Sequence
  Description of Artificial Sequence: Synthetic oligonucleotide
ggcaaugggcucugcuccg

SEQ ID NO: 3096445 - RNA, 19 nt, Artificial Sequence
  Description of Artificial Sequence: Synthetic oligonucleotide
uagcucugacaaugccaag

SEQ ID NO: 3096446 - RNA, 19 nt, Artificial Sequence
  Description of Artificial Sequence: Synthetic oligonucleotide
auacuugaugcaggccuug

SEQ ID NO: 3096447 - RNA, 19 nt, Artificial Sequence
  Description of Artificial Sequence: Synthetic oligonucleotide
acuugaugcaggccuugua

SEQ ID NO: 3096448 - RNA, 19 nt, Artificial Sequence
  Description of Artificial Sequence: Synthetic oligonucleotide
agagccuuugggauccacu

SEQ ID NO: 3096449 - RNA, 19 nt, Artificial Sequence
  Description of Artificial Sequence: Synthetic oligonucleotide
agugcggcugguguuucug

SEQ ID NO: 3096450 - RNA, 19 nt, Artificial Sequence
  Description of Artificial Sequence: Synthetic oligonucleotide
auggccuugggagccagga

SEQ ID NO: 3096451 - RNA, 19 nt, Artificial Sequence
  Description of Artificial Sequence: Synthetic oligonucleotide
uacuugaugcaggccuugu

SEQ ID NO: 3096452 - RNA, 19 nt, Artificial Sequence
  Description of Artificial Sequence: Synthetic oligonucleotide
aagugcggcugguguuucu

SEQ ID NO: 3096453 - RNA, 19 nt, Artificial Sequence
  Description of Artificial Sequence: Synthetic oligonucleotide
guugcacugauagcucuga

SEQ ID NO: 3096454 - RNA, 19 nt, Artificial Sequence
  Description of Artificial Sequence: Synthetic oligonucleotide
cagcucuugggcccuguac

SEQ ID NO: 3096455 - RNA, 19 nt, Artificial Sequence
  Description of Artificial Sequence: Synthetic oligonucleotide
ugggagccaggaacugaga

SEQ ID NO: 3096456 - RNA, 19 nt, Artificial Sequence
  Description of Artificial Sequence: Synthetic oligonucleotide
cugagaugauuuauucacu

SEQ ID NO: 3096457 - RNA, 19 nt, Artificial Sequence
  Description of Artificial Sequence: Synthetic oligonucleotide
agggaguccgcguguugca

SEQ ID NO: 3096458 - RNA, 19 nt, Artificial Sequence
  Description of Artificial Sequence: Synthetic oligonucleotide
acuacccacuuggguaaag

SEQ ID NO: 3096459 - RNA, 19 nt, Artificial Sequence
  Description of Artificial Sequence: Synthetic oligonucleotide
ucugcuccgggugcagcca

SEQ ID NO: 3096460 - RNA, 19 nt, Artificial Sequence
  Description of Artificial Sequence: Synthetic oligonucleotide
cauggcuugaagugcggcu

SEQ ID NO: 3096461 - RNA, 19 nt, Artificial Sequence
  Description of Artificial Sequence: Synthetic oligonucleotide
cuccucgcggcucucuguc

SEQ ID NO: 3096462 - RNA, 19 nt, Artificial Sequence
  Description of Artificial Sequence: Synthetic oligonucleotide
cauggccuugggagccagg

SEQ ID NO: 3096463 - RNA, 19 nt, Artificial Sequence
  Description of Artificial Sequence: Synthetic oligonucleotide
ucgcggcucucugucacug

SEQ ID NO: 3096464 - RNA, 19 nt, Artificial Sequence
  Description of Artificial Sequence: Synthetic oligonucleotide
ugggauccacuugggccag

SEQ ID NO: 3096465 - RNA, 19 nt, Artificial Sequence
  Description of Artificial Sequence: Synthetic oligonucleotide
gugcggcugguguuucugc

SEQ ID NO: 3096466 - RNA, 19 nt, Artificial Sequence
  Description of Artificial Sequence: Synthetic oligonucleotide
ccuuugggauccacuuggg

SEQ ID NO: 3096467 - RNA, 19 nt, Artificial Sequence
  Description of Artificial Sequence: Synthetic oligonucleotide
caggccuuguacaucuucu

SEQ ID NO: 3096468 - RNA, 19 nt, Artificial Sequence
  Description of Artificial Sequence: Synthetic oligonucleotide
guguugcacugauagcucu

SEQ ID NO: 3096469 - RNA, 19 nt, Artificial Sequence
  Description of Artificial Sequence: Synthetic oligonucleotide
guacucucaucaauauucu

SEQ ID NO: 3096470 - RNA, 19 nt, Artificial Sequence
  Description of Artificial Sequence: Synthetic oligonucleotide
gccaagcugggcaaugggc

SEQ ID NO: 3096471 - RNA, 19 nt, Artificial Sequence
  Description of Artificial Sequence: Synthetic oligonucleotide
cuacccacuuggguaaaga

SEQ ID NO: 3096472 - RNA, 19 nt, Artificial Sequence
  Description of Artificial Sequence: Synthetic oligonucleotide
uucauggccuugggagcca

SEQ ID NO: 3096473 - RNA, 19 nt, Artificial Sequence
  Description of Artificial Sequence: Synthetic oligonucleotide
cgggauacuugaugcaggc

SEQ ID NO: 3096474 - RNA, 19 nt, Artificial Sequence
  Description of Artificial Sequence: Synthetic oligonucleotide
ugcuccgggugcagccaug

SEQ ID NO: 3096475 - RNA, 19 nt, Artificial Sequence
  Description of Artificial Sequence: Synthetic oligonucleotide
gcguguugcacugauagcu

SEQ ID NO: 3096476 - RNA, 19 nt, Artificial Sequence
  Description of Artificial Sequence: Synthetic oligonucleotide
uccucgcggcucucuguca

SEQ ID NO: 3096477 - RNA, 19 nt, Artificial Sequence
  Description of Artificial Sequence: Synthetic oligonucleotide
caggaacugagaugauuua

SEQ ID NO: 3096478 - RNA, 19 nt, Artificial Sequence
  Description of Artificial Sequence: Synthetic oligonucleotide
gauacuugaugcaggccuu

SEQ ID NO: 3096479 - RNA, 19 nt, Artificial Sequence
  Description of Artificial Sequence: Synthetic oligonucleotide
ccacucgggauacuugaug

SEQ ID NO: 3096480 - RNA, 19 nt, Artificial Sequence
  Description of Artificial Sequence: Synthetic oligonucleotide
cugcuuccacucgggauac

SEQ ID NO: 3096481 - RNA, 19 nt, Artificial Sequence
  Description of Artificial Sequence: Synthetic oligonucleotide
cucugucacuguacucuca

SEQ ID NO: 3096482 - RNA, 19 nt, Artificial Sequence
  Description of Artificial Sequence: Synthetic oligonucleotide
gggccagguagguaaugac

SEQ ID NO: 3096483 - RNA, 19 nt, Artificial Sequence
  Description of Artificial Sequence: Synthetic oligonucleotide
uccgcguguugcacugaua

SEQ ID NO: 3096484 - RNA, 19 nt, Artificial Sequence
  Description of Artificial Sequence: Synthetic oligonucleotide
gaagugcggcugguguuuc

SEQ ID NO: 3096485 - RNA, 19 nt, Artificial Sequence
  Description of Artificial Sequence: Synthetic oligonucleotide
gguagguaaugacgcagcu

SEQ ID NO: 3096486 - RNA, 19 nt, Artificial Sequence
  Description of Artificial Sequence: Synthetic oligonucleotide
gcucugacaaugccaagcu

SEQ ID NO: 3096487 - RNA, 19 nt, Artificial Sequence
  Description of Artificial Sequence: Synthetic oligonucleotide
gggauacuugaugcaggcc

SEQ ID NO: 3096488 - RNA, 19 nt, Artificial Sequence
  Description of Artificial Sequence: Synthetic oligonucleotide
gugcagccauggcuugaag

SEQ ID NO: 3096489 - RNA, 19 nt, Artificial Sequence
  Description of Artificial Sequence: Synthetic oligonucleotide
aaagagccuuugggaucca

SEQ ID NO: 3096490 - RNA, 19 nt, Artificial Sequence
  Description of Artificial Sequence: Synthetic oligonucleotide
gcucuugggcccuguacuc

SEQ ID NO: 3096491 - RNA, 19 nt, Artificial Sequence
  Description of Artificial Sequence: Synthetic oligonucleotide
ggaacugagaugauuuauu

SEQ ID NO: 3096492 - RNA, 19 nt, Artificial Sequence
  Description of Artificial Sequence: Synthetic oligonucleotide
gcaaugggcucugcuccgg

SEQ ID NO: 3096493 - RNA, 19 nt, Artificial Sequence
  Description of Artificial Sequence: Synthetic oligonucleotide
ccaggaacugagaugauuu

SEQ ID NO: 3096494 - RNA, 19 nt, Artificial Sequence
  Description of Artificial Sequence: Synthetic oligonucleotide
cguguugcacugauagcuc

SEQ ID NO: 3096495 - RNA, 19 nt, Artificial Sequence
  Description of Artificial Sequence: Synthetic oligonucleotide
gcuccgggugcagccaugg

SEQ ID NO: 3096496 - RNA, 19 nt, Artificial Sequence
  Description of Artificial Sequence: Synthetic oligonucleotide
gauccacuugggccaggua

SEQ ID NO: 3096497 - RNA, 19 nt, Artificial Sequence
  Description of Artificial Sequence: Synthetic oligonucleotide
ccaagcugggcaaugggcu

SEQ ID NO: 3096498 - RNA, 19 nt, Artificial Sequence
  Description of Artificial Sequence: Synthetic oligonucleotide
uccagggaguccgcguguu

SEQ ID NO: 3096499 - RNA, 19 nt, Artificial Sequence
  Description of Artificial Sequence: Synthetic oligonucleotide
cuccgggugcagccauggc

SEQ ID NO: 3096500 - RNA, 19 nt, Artificial Sequence
  Description of Artificial Sequence: Synthetic oligonucleotide
ggcucucugucacuguacu

SEQ ID NO: 3096501 - RNA, 19 nt, Artificial Sequence
  Description of Artificial Sequence: Synthetic oligonucleotide
gcucucugucacuguacuc

SEQ ID NO: 3096502 - RNA, 19 nt, Artificial Sequence
  Description of Artificial Sequence: Synthetic oligonucleotide
gcuugaagugcggcuggug

SEQ ID NO: 3096503 - RNA, 19 nt, Artificial Sequence
  Description of Artificial Sequence: Synthetic oligonucleotide
agcugggcaaugggcucug

SEQ ID NO: 3096504 - RNA, 19 nt, Artificial Sequence
  Description of Artificial Sequence: Synthetic oligonucleotide
ccauggcuugaagugcggc

SEQ ID NO: 3096505 - RNA, 19 nt, Artificial Sequence
  Description of Artificial Sequence: Synthetic oligonucleotide
ccagguagguaaugacgca

SEQ ID NO: 3096506 - RNA, 19 nt, Artificial Sequence
  Description of Artificial Sequence: Synthetic oligonucleotide
gggagccaggaacugagau

SEQ ID NO: 3096507 - RNA, 19 nt, Artificial Sequence
  Description of Artificial Sequence: Synthetic oligonucleotide
ccucgcggcucucugucac

SEQ ID NO: 3096508 - RNA, 19 nt, Artificial Sequence
  Description of Artificial Sequence: Synthetic oligonucleotide
gccauggcuugaagugcgg

SEQ ID NO: 3096509 - RNA, 19 nt, Artificial Sequence
  Description of Artificial Sequence: Synthetic oligonucleotide
cgcguguugcacugauagc

SEQ ID NO: 3096510 - RNA, 19 nt, Artificial Sequence
  Description of Artificial Sequence: Synthetic oligonucleotide
ggugcagccauggcuugaa

SEQ ID NO: 3096511 - RNA, 19 nt, Artificial Sequence
  Description of Artificial Sequence: Synthetic oligonucleotide
agguaaugacgcagcucuu

SEQ ID NO: 3096512 - RNA, 19 nt, Artificial Sequence
  Description of Artificial Sequence: Synthetic oligonucleotide
ccuuguacaucuucuucau

SEQ ID NO: 3096513 - RNA, 19 nt, Artificial Sequence
  Description of Artificial Sequence: Synthetic oligonucleotide
ggaguccgcguguugcacu

SEQ ID NO: 3096514 - RNA, 19 nt, Artificial Sequence
  Description of Artificial Sequence: Synthetic oligonucleotide
cacugauagcucugacaau

SEQ ID NO: 3096515 - RNA, 19 nt, Artificial Sequence
  Description of Artificial Sequence: Synthetic oligonucleotide
aguccgcguguugcacuga

SEQ ID NO: 3096516 - RNA, 19 nt, Artificial Sequence
  Description of Artificial Sequence: Synthetic oligonucleotide
gggaguccgcguguugcac

SEQ ID NO: 3096517 - RNA, 19 nt, Artificial Sequence
  Description of Artificial Sequence: Synthetic oligonucleotide
ugcuuccacucgggauacu

SEQ ID NO: 3096518 - RNA, 19 nt, Artificial Sequence
  Description of Artificial Sequence: Synthetic oligonucleotide
cacuuggguaaagagccuu

SEQ ID NO: 3096519 - RNA, 19 nt, Artificial Sequence
  Description of Artificial Sequence: Synthetic oligonucleotide
cuugggccagguagguaau

SEQ ID NO: 3096520 - RNA, 19 nt, Artificial Sequence
  Description of Artificial Sequence: Synthetic oligonucleotide
ccuugggagccaggaacug

SEQ ID NO: 3096521 - RNA, 19 nt, Artificial Sequence
  Description of Artificial Sequence: Synthetic oligonucleotide
cucuugggcccuguacucu

SEQ ID NO: 3096522 - RNA, 19 nt, Artificial Sequence
  Description of Artificial Sequence: Synthetic oligonucleotide
gacgcagcucuugggcccu

SEQ ID NO: 3096523 - RNA, 19 nt, Artificial Sequence
  Description of Artificial Sequence: Synthetic oligonucleotide
gcggcucucugucacugua

SEQ ID NO: 3096524 - RNA, 19 nt, Artificial Sequence
  Description of Artificial Sequence: Synthetic oligonucleotide
guccgcguguugcacugau

SEQ ID NO: 3096525 - RNA, 19 nt, Artificial Sequence
  Description of Artificial Sequence: Synthetic oligonucleotide
ccagggaguccgcguguug

SEQ ID NO: 3096526 - RNA, 19 nt, Artificial Sequence
  Description of Artificial Sequence: Synthetic oligonucleotide
cggcucucugucacuguac

SEQ ID NO: 3096527 - RNA, 19 nt, Artificial Sequence
  Description of Artificial Sequence: Synthetic oligonucleotide
gcucugcuccgggugcagc

SEQ ID NO: 3096528 - RNA, 19 nt, Artificial Sequence
  Description of Artificial Sequence: Synthetic oligonucleotide
gccuugggagccaggaacu

SEQ ID NO: 3096529 - RNA, 19 nt, Artificial Sequence
  Description of Artificial Sequence: Synthetic oligonucleotide
cuccagggaguccgcgugu

SEQ ID NO: 3096530 - RNA, 19 nt, Artificial Sequence
  Description of Artificial Sequence: Synthetic oligonucleotide
gggauccacuugggccagg

SEQ ID NO: 3096531 - RNA, 19 nt, Artificial Sequence
  Description of Artificial Sequence: Synthetic oligonucleotide
ggauccacuugggccaggu

SEQ ID NO: 3096532 - RNA, 19 nt, Artificial Sequence
  Description of Artificial Sequence: Synthetic oligonucleotide
agccaggaacugagaugau

SEQ ID NO: 3096533 - RNA, 19 nt, Artificial Sequence
  Description of Artificial Sequence: Synthetic oligonucleotide
cucgcggcucucugucacu

SEQ ID NO: 3096534 - RNA, 19 nt, Artificial Sequence
  Description of Artificial Sequence: Synthetic oligonucleotide
gcuuccacucgggauacuu

SEQ ID NO: 3096535 - RNA, 19 nt, Artificial Sequence
  Description of Artificial Sequence: Synthetic oligonucleotide
cacuacccacuuggguaaa

SEQ ID NO: 3096536 - RNA, 19 nt, Artificial Sequence
  Description of Artificial Sequence: Synthetic oligonucleotide
cacuugggccagguaggua

SEQ ID NO: 3096537 - RNA, 19 nt, Artificial Sequence
  Description of Artificial Sequence: Synthetic oligonucleotide
gccaggaacugagaugauu

SEQ ID NO: 3096538 - RNA, 19 nt, Artificial Sequence
  Description of Artificial Sequence: Synthetic oligonucleotide
gggugcagccauggcuuga

SEQ ID NO: 3096539 - RNA, 19 nt, Artificial Sequence
  Description of Artificial Sequence: Synthetic oligonucleotide
ccgggugcagccauggcuu

SEQ ID NO: 3096540 - RNA, 19 nt, Artificial Sequence
  Description of Artificial Sequence: Synthetic oligonucleotide
caaugccaagcugggcaau

SEQ ID NO: 3096541 - RNA, 19 nt, Artificial Sequence
  Description of Artificial Sequence: Synthetic oligonucleotide
gcagcucuugggcccugua

SEQ ID NO: 3096542 - RNA, 19 nt, Artificial Sequence
  Description of Artificial Sequence: Synthetic oligonucleotide
gcugggcaaugggcucugc

SEQ ID NO: 3096543 - RNA, 19 nt, Artificial Sequence
  Description of Artificial Sequence: Synthetic oligonucleotide
cgggugcagccauggcuug

SEQ ID NO: 3096544 - RNA, 19 nt, Artificial Sequence
  Description of Artificial Sequence: Synthetic oligonucleotide
gcggcugguguuucugcuu

SEQ ID NO: 3096545 - RNA, 19 nt, Artificial Sequence
  Description of Artificial Sequence: Synthetic oligonucleotide
cugcuccgggugcagccau

SEQ ID NO: 3096546 - RNA, 19 nt, Artificial Sequence
  Description of Artificial Sequence: Synthetic oligonucleotide
ggcuugaagugcggcuggu

SEQ ID NO: 3096547 - RNA, 19 nt, Artificial Sequence
  Description of Artificial Sequence: Synthetic oligonucleotide
ccacuugggccagguaggu

SEQ ID NO: 3096548 - RNA, 19 nt, Artificial Sequence
  Description of Artificial Sequence: Synthetic oligonucleotide
acuaccacuaaacaguucc

SEQ ID NO: 3096549 - RNA, 19 nt, Artificial Sequence
  Description of Artificial Sequence: Synthetic oligonucleotide
uaaacaguuccauagagcc

SEQ ID NO: 3096550 - RNA, 19 nt, Artificial Sequence
  Description of Artificial Sequence: Synthetic oligonucleotide
auugggaagaggcagcucc

SEQ ID NO: 3096551 - RNA, 19 nt, Artificial Sequence
  Description of Artificial Sequence: Synthetic oligonucleotide
aacaguuccauagagccuc

SEQ ID NO: 3096552 - RNA, 19 nt, Artificial Sequence
  Description of Artificial Sequence: Synthetic oligonucleotide
ugcaaaagccucuagcuug

SEQ ID NO: 3096553 - RNA, 19 nt, Artificial Sequence
  Description of Artificial Sequence: Synthetic oligonucleotide
gaguagagcuccuucacgg

SEQ ID NO: 3096554 - RNA, 19 nt, Artificial Sequence
  Description of Artificial Sequence: Synthetic oligonucleotide
acuaaacaguuccauagag

SEQ ID NO: 3096555 - RNA, 19 nt, Artificial Sequence
  Description of Artificial Sequence: Synthetic oligonucleotide
ucugcaaaagccucuagcu

SEQ ID NO: 3096556 - RNA, 19 nt, Artificial Sequence
  Description of Artificial Sequence: Synthetic oligonucleotide
agagccuucugcaaaagcc

SEQ ID NO: 3096557 - RNA, 19 nt, Artificial Sequence
  Description of Artificial Sequence: Synthetic oligonucleotide
cuuucgaugguccaacugc

SEQ ID NO: 3096558 - RNA, 19 nt, Artificial Sequence
  Description of Artificial Sequence: Synthetic oligonucleotide
aacaacccucagcacaccc

SEQ ID NO: 3096559 - RNA, 19 nt, Artificial Sequence
  Description of Artificial Sequence: Synthetic oligonucleotide
uccauagagccucacagug

SEQ ID NO: 3096560 - RNA, 19 nt, Artificial Sequence
  Description of Artificial Sequence: Synthetic oligonucleotide
uaggccuccuuccauaggg

SEQ ID NO: 3096561 - RNA, 19 nt, Artificial Sequence
  Description of Artificial Sequence: Synthetic oligonucleotide
guuccauagagccucacag

SEQ ID NO: 3096562 - RNA, 19 nt, Artificial Sequence
  Description of Artificial Sequence: Synthetic oligonucleotide
cuaaacaguuccauagagc

SEQ ID NO: 3096563 - RNA, 19 nt, Artificial Sequence
  Description of Artificial Sequence: Synthetic oligonucleotide
acacccugcacuccuagcc

SEQ ID NO: 3096564 - RNA, 19 nt, Artificial Sequence
  Description of Artificial Sequence: Synthetic oligonucleotide
acugcuccaacuucucacc

SEQ ID NO: 3096565 - RNA, 19 nt, Artificial Sequence
  Description of Artificial Sequence: Synthetic oligonucleotide
uucugcaaaagccucuagc

SEQ ID NO: 3096566 - RNA, 19 nt, Artificial Sequence
  Description of Artificial Sequence: Synthetic oligonucleotide
aggacugggcuuucgaugg

SEQ ID NO: 3096567 - RNA, 19 nt, Artificial Sequence
  Description of Artificial Sequence: Synthetic oligonucleotide
aauaccuugccaaggaaca

SEQ ID NO: 3096568 - RNA, 19 nt, Artificial Sequence
  Description of Artificial Sequence: Synthetic oligonucleotide
uagaggagagaauaccuug

SEQ ID NO: 3096569 - RNA, 19 nt, Artificial Sequence
  Description of Artificial Sequence: Synthetic oligonucleotide
acuccuagccgacuaggcc

SEQ ID NO: 3096570 - RNA, 19 nt, Artificial Sequence
  Description of Artificial Sequence: Synthetic oligonucleotide
caaggaacaacccucagca

SEQ ID NO: 3096571 - RNA, 19 nt, Artificial Sequence
  Description of Artificial Sequence: Synthetic oligonucleotide
aggcacauugggaagaggc

SEQ ID NO: 3096572 - RNA, 19 nt, Artificial Sequence
  Description of Artificial Sequence: Synthetic oligonucleotide
cuucucaccaagcugggag

SEQ ID NO: 3096573 - RNA, 19 nt, Artificial Sequence
  Description of Artificial Sequence: Synthetic oligonucleotide
aacuuagaggagagaauac

SEQ ID NO: 3096574 - RNA, 19 nt, Artificial Sequence
  Description of Artificial Sequence: Synthetic oligonucleotide
ugcagcuuggguaggacug

SEQ ID NO: 3096575 - RNA, 19 nt, Artificial Sequence
  Description of Artificial Sequence: Synthetic oligonucleotide
ucgaugguccaacugcucc

SEQ ID NO: 3096576 - RNA, 19 nt, Artificial Sequence
  Description of Artificial Sequence: Synthetic oligonucleotide
aggaacaacccucagcaca

SEQ ID NO: 3096577 - RNA, 19 nt, Artificial Sequence
  Description of Artificial Sequence: Synthetic oligonucleotide
gagagaauaccuugccaag

SEQ ID NO: 3096578 - RNA, 19 nt, Artificial Sequence
  Description of Artificial Sequence: Synthetic oligonucleotide
uccaacuucucaccaagcu

SEQ ID NO: 3096579 - RNA, 19 nt, Artificial Sequence
  Description of Artificial Sequence: Synthetic oligonucleotide
agaggagagaauaccuugc

SEQ ID NO: 3096580 - RNA, 19 nt, Artificial Sequence
  Description of Artificial Sequence: Synthetic oligonucleotide
agcuggagcaggcacauug

SEQ ID NO: 3096581 - RNA, 19 nt, Artificial Sequence
  Description of Artificial Sequence: Synthetic oligonucleotide
aaggaacaacccucagcac

SEQ ID NO: 3096582 - RNA, 19 nt, Artificial Sequence
  Description of Artificial Sequence: Synthetic oligonucleotide
ucacaguggagcuggagca

SEQ ID NO: 3096583 - RNA, 19 nt, Artificial Sequence
  Description of Artificial Sequence: Synthetic oligonucleotide
uuccauaggggcacuacca

SEQ ID NO: 3096584 - RNA, 19 nt, Artificial Sequence
  Description of Artificial Sequence: Synthetic oligonucleotide
agagaauaccuugccaagg

SEQ ID NO: 3096585 - RNA, 19 nt, Artificial Sequence
  Description of Artificial Sequence: Synthetic oligonucleotide
ggaagaggcagcuccaggg

SEQ ID NO: 3096586 - RNA, 19 nt, Artificial Sequence
  Description of Artificial Sequence: Synthetic oligonucleotide
uuucgaugguccaacugcu

SEQ ID NO: 3096587 - RNA, 19 nt, Artificial Sequence
  Description of Artificial Sequence: Synthetic oligonucleotide
uugccaaggaacaacccuc

SEQ ID NO: 3096588 - RNA, 19 nt, Artificial Sequence
  Description of Artificial Sequence: Synthetic oligonucleotide
gaauaccuugccaaggaac

SEQ ID NO: 3096589 - RNA, 19 nt, Artificial Sequence
  Description of Artificial Sequence: Synthetic oligonucleotide
uaggacugggcuuucgaug

SEQ ID NO: 3096590 - RNA, 19 nt, Artificial Sequence
  Description of Artificial Sequence: Synthetic oligonucleotide
gaggagagaauaccuugcc

SEQ ID NO: 3096591 - RNA, 19 nt, Artificial Sequence
  Description of Artificial Sequence: Synthetic oligonucleotide
gagaauaccuugccaagga

SEQ ID NO: 3096592 - RNA, 19 nt, Artificial Sequence
  Description of Artificial Sequence: Synthetic oligonucleotide
accuugccaaggaacaacc

SEQ ID NO: 3096593 - RNA, 19 nt, Artificial Sequence
  Description of Artificial Sequence: Synthetic oligonucleotide
uagagccucacaguggagc

SEQ ID NO: 3096594 - RNA, 19 nt, Artificial Sequence
  Description of Artificial Sequence: Synthetic oligonucleotide
cuuccauaggggcacuacc

SEQ ID NO: 3096595 - RNA, 19 nt, Artificial Sequence
  Description of Artificial Sequence: Synthetic oligonucleotide
ugggaguagagcuccuuca

SEQ ID NO: 3096596 - RNA, 19 nt, Artificial Sequence
  Description of Artificial Sequence: Synthetic oligonucleotide
aggggcacuaccacuaaac

SEQ ID NO: 3096597 - RNA, 19 nt, Artificial Sequence
  Description of Artificial Sequence: Synthetic oligonucleotide
guagagcuccuucacggcc

SEQ ID NO: 3096598 - RNA, 19 nt, Artificial Sequence
  Description of Artificial Sequence: Synthetic oligonucleotide
cacauugggaagaggcagc

SEQ ID NO: 3096599 - RNA, 19 nt, Artificial Sequence
  Description of Artificial Sequence: Synthetic oligonucleotide
uccauaggggcacuaccac

SEQ ID NO: 3096600 - RNA, 19 nt, Artificial Sequence
  Description of Artificial Sequence: Synthetic oligonucleotide
uggagcaggcacauuggga

SEQ ID NO: 3096601 - RNA, 19 nt, Artificial Sequence
  Description of Artificial Sequence: Synthetic oligonucleotide
uuccauagagccucacagu

SEQ ID NO: 3096602 - RNA, 19 nt, Artificial Sequence
  Description of Artificial Sequence: Synthetic oligonucleotide
cauagagccucacagugga

SEQ ID NO: 3096603 - RNA, 19 nt, Artificial Sequence
  Description of Artificial Sequence: Synthetic oligonucleotide
aguuccauagagccucaca

SEQ ID NO: 3096604 - RNA, 19 nt, Artificial Sequence
  Description of Artificial Sequence: Synthetic oligonucleotide
acuaggccuccuuccauag

SEQ ID NO: 3096605 - RNA, 19 nt, Artificial Sequence
  Description of Artificial Sequence: Synthetic oligonucleotide
ugguccaacugcuccaacu

SEQ ID NO: 3096606 - RNA, 19 nt, Artificial Sequence
  Description of Artificial Sequence: Synthetic oligonucleotide
ggagagaauaccuugccaa

SEQ ID NO: 3096607 - RNA, 19 nt, Artificial Sequence
  Description of Artificial Sequence: Synthetic oligonucleotide
aggagagaauaccuugcca

SEQ ID NO: 3096608 - RNA, 19 nt, Artificial Sequence
  Description of Artificial Sequence: Synthetic oligonucleotide
ugccaaggaacaacccuca

SEQ ID NO: 3096609 - RNA, 19 nt, Artificial Sequence
  Description of Artificial Sequence: Synthetic oligonucleotide
uagagcuccuucacggccu

SEQ ID NO: 3096610 - RNA, 19 nt, Artificial Sequence
  Description of Artificial Sequence: Synthetic oligonucleotide
cuuagaggagagaauaccu

SEQ ID NO: 3096611 - RNA, 19 nt, Artificial Sequence
  Description of Artificial Sequence: Synthetic oligonucleotide
ugcacuccuagccgacuag

SEQ ID NO: 3096612 - RNA, 19 nt, Artificial Sequence
  Description of Artificial Sequence: Synthetic oligonucleotide
agagccucacaguggagcu

SEQ ID NO: 3096613 - RNA, 19 nt, Artificial Sequence
  Description of Artificial Sequence: Synthetic oligonucleotide
accaagcugggaguagagc

SEQ ID NO: 3096614 - RNA, 19 nt, Artificial Sequence
  Description of Artificial Sequence: Synthetic oligonucleotide
ggaguagagcuccuucacg

SEQ ID NO: 3096615 - RNA, 19 nt, Artificial Sequence
  Description of Artificial Sequence: Synthetic oligonucleotide
acugggcuuucgauggucc

SEQ ID NO: 3096616 - RNA, 19 nt, Artificial Sequence
  Description of Artificial Sequence: Synthetic oligonucleotide
uggagcuggagcaggcaca

SEQ ID NO: 3096617 - RNA, 19 nt, Artificial Sequence
  Description of Artificial Sequence: Synthetic oligonucleotide
uucucaccaagcugggagu

SEQ ID NO: 3096618 - RNA, 19 nt, Artificial Sequence
  Description of Artificial Sequence: Synthetic oligonucleotide
aaacaguuccauagagccu

SEQ ID NO: 3096619 - RNA, 19 nt, Artificial Sequence
  Description of Artificial Sequence: Synthetic oligonucleotide
agccucacaguggagcugg

SEQ ID NO: 3096620 - RNA, 19 nt, Artificial Sequence
  Description of Artificial Sequence: Synthetic oligonucleotide
gggcacuaccacuaaacag

SEQ ID NO: 3096621 - RNA, 19 nt, Artificial Sequence
  Description of Artificial Sequence: Synthetic oligonucleotide
agcuccuucacggccuccc

SEQ ID NO: 3096622 - RNA, 19 nt, Artificial Sequence
  Description of Artificial Sequence: Synthetic oligonucleotide
cuggagcaggcacauuggg

SEQ ID NO: 3096623 - RNA, 19 nt, Artificial Sequence
  Description of Artificial Sequence: Synthetic oligonucleotide
caagcugggaguagagcuc

SEQ ID NO: 3096624 - RNA, 19 nt, Artificial Sequence
  Description of Artificial Sequence: Synthetic oligonucleotide
agaauaccuugccaaggaa

SEQ ID NO: 3096625 - RNA, 19 nt, Artificial Sequence
  Description of Artificial Sequence: Synthetic oligonucleotide
accacuaaacaguuccaua

SEQ ID NO: 3096626 - RNA, 19 nt, Artificial Sequence
  Description of Artificial Sequence: Synthetic oligonucleotide
uccagagccuucugcaaaa

SEQ ID NO: 3096627 - RNA, 19 nt, Artificial Sequence
  Description of Artificial Sequence: Synthetic oligonucleotide
cucagcacacccugcacuc

SEQ ID NO: 3096628 - RNA, 19 nt, Artificial Sequence
  Description of Artificial Sequence: Synthetic oligonucleotide
ggagcaggcacauugggaa

SEQ ID NO: 3096629 - RNA, 19 nt, Artificial Sequence
  Description of Artificial Sequence: Synthetic oligonucleotide
uaccuugccaaggaacaac

SEQ ID NO: 3096630 - RNA, 19 nt, Artificial Sequence
  Description of Artificial Sequence: Synthetic oligonucleotide
caacccucagcacacccug

SEQ ID NO: 3096631 - RNA, 19 nt, Artificial Sequence
  Description of Artificial Sequence: Synthetic oligonucleotide
acaguggagcuggagcagg

SEQ ID NO: 3096632 - RNA, 19 nt, Artificial Sequence
  Description of Artificial Sequence: Synthetic oligonucleotide
cacuccuagccgacuaggc

SEQ ID NO: 3096633 - RNA, 19 nt, Artificial Sequence
  Description of Artificial Sequence: Synthetic oligonucleotide
uucacggccuccccacucu

SEQ ID NO: 3096634 - RNA, 19 nt, Artificial Sequence
  Description of Artificial Sequence: Synthetic oligonucleotide
agggcuggcgucucugcag

SEQ ID NO: 3096635 - RNA, 19 nt, Artificial Sequence
  Description of Artificial Sequence: Synthetic oligonucleotide
ucaccaagcugggaguaga

SEQ ID NO: 3096636 - RNA, 19 nt, Artificial Sequence
  Description of Artificial Sequence: Synthetic oligonucleotide
cacccugcacuccuagccg

SEQ ID NO: 3096637 - RNA, 19 nt, Artificial Sequence
  Description of Artificial Sequence: Synthetic oligonucleotide
cagagccuucugcaaaagc

SEQ ID NO: 3096638 - RNA, 19 nt, Artificial Sequence
  Description of Artificial Sequence: Synthetic oligonucleotide
uccuucacggccuccccac

SEQ ID NO: 3096639 - RNA, 19 nt, Artificial Sequence
  Description of Artificial Sequence: Synthetic oligonucleotide
gcuccaacuucucaccaag

SEQ ID NO: 3096640 - RNA, 19 nt, Artificial Sequence
  Description of Artificial Sequence: Synthetic oligonucleotide
cauaggggcacuaccacua

SEQ ID NO: 3096641 - RNA, 19 nt, Artificial Sequence
  Description of Artificial Sequence: Synthetic oligonucleotide
cuccaacuucucaccaagc

SEQ ID NO: 3096642 - RNA, 19 nt, Artificial Sequence
  Description of Artificial Sequence: Synthetic oligonucleotide
aacccucagcacacccugc

SEQ ID NO: 3096643 - RNA, 19 nt, Artificial Sequence
  Description of Artificial Sequence: Synthetic oligonucleotide
agccgacuaggccuccuuc

SEQ ID NO: 3096644 - RNA, 19 nt, Artificial Sequence
  Description of Artificial Sequence: Synthetic oligonucleotide
uaccacuaaacaguuccau

SEQ ID NO: 3096645 - RNA, 19 nt, Artificial Sequence
  Description of Artificial Sequence: Synthetic oligonucleotide
ccaaggaacaacccucagc

SEQ ID NO: 3096646 - RNA, 19 nt, Artificial Sequence
  Description of Artificial Sequence: Synthetic oligonucleotide
uucgaugguccaacugcuc

SEQ ID NO: 3096647 - RNA, 19 nt, Artificial Sequence
  Description of Artificial Sequence: Synthetic oligonucleotide
uuggguaggacugggcuuu

SEQ ID NO: 3096648 - RNA, 19 nt, Artificial Sequence
  Description of Artificial Sequence: Synthetic oligonucleotide
gcacauugggaagaggcag

SEQ ID NO: 3096649 - RNA, 19 nt, Artificial Sequence
  Description of Artificial Sequence: Synthetic oligonucleotide
ugcuccaacuucucaccaa

SEQ ID NO: 3096650 - RNA, 19 nt, Artificial Sequence
  Description of Artificial Sequence: Synthetic oligonucleotide
cuugccaaggaacaacccu

SEQ ID NO: 3096651 - RNA, 19 nt, Artificial Sequence
  Description of Artificial Sequence: Synthetic oligonucleotide
gcaaaagccucuagcuugg

SEQ ID NO: 3096652 - RNA, 19 nt, Artificial Sequence
  Description of Artificial Sequence: Synthetic oligonucleotide
agccuucugcaaaagccuc

SEQ ID NO: 3096653 - RNA, 19 nt, Artificial Sequence
  Description of Artificial Sequence: Synthetic oligonucleotide
cugggaguagagcuccuuc

SEQ ID NO: 3096654 - RNA, 19 nt, Artificial Sequence
  Description of Artificial Sequence: Synthetic oligonucleotide
ccaacuucucaccaagcug

SEQ ID NO: 3096655 - RNA, 19 nt, Artificial Sequence
  Description of Artificial Sequence: Synthetic oligonucleotide
ggaacaacccucagcacac

SEQ ID NO: 3096656 - RNA, 19 nt, Artificial Sequence
  Description of Artificial Sequence: Synthetic oligonucleotide
ccauagagccucacagugg

SEQ ID NO: 3096657 - RNA, 19 nt, Artificial Sequence
  Description of Artificial Sequence: Synthetic oligonucleotide
ggcacuaccacuaaacagu

SEQ ID NO: 3096658 - RNA, 19 nt, Artificial Sequence
  Description of Artificial Sequence: Synthetic oligonucleotide
acucuggccugugggcucc

SEQ ID NO: 3096659 - RNA, 19 nt, Artificial Sequence
  Description of Artificial Sequence: Synthetic oligonucleotide
augguccaacugcuccaac

SEQ ID NO: 3096660 - RNA, 19 nt, Artificial Sequence
  Description of Artificial Sequence: Synthetic oligonucleotide
acauugggaagaggcagcu

SEQ ID NO: 3096661 - RNA, 19 nt, Artificial Sequence
  Description of Artificial Sequence: Synthetic oligonucleotide
cuucugcaaaagccucuag

SEQ ID NO: 3096662 - RNA, 19 nt, Artificial Sequence
  Description of Artificial Sequence: Synthetic oligonucleotide
uggcgucucugcagcuugg

SEQ ID NO: 3096663 - RNA, 19 nt, Artificial Sequence
  Description of Artificial Sequence: Synthetic oligonucleotide
cuaggccuccuuccauagg

SEQ ID NO: 3096664 - RNA, 19 nt, Artificial Sequence
  Description of Artificial Sequence: Synthetic oligonucleotide
uccuagccgacuaggccuc

SEQ ID NO: 3096665 - RNA, 19 nt, Artificial Sequence
  Description of Artificial Sequence: Synthetic oligonucleotide
ugggaagaggcagcuccag

SEQ ID NO: 3096666 - RNA, 19 nt, Artificial Sequence
  Description of Artificial Sequence: Synthetic oligonucleotide
cuaccacuaaacaguucca

SEQ ID NO: 3096667 - RNA, 19 nt, Artificial Sequence
  Description of Artificial Sequence: Synthetic oligonucleotide
caccaagcugggaguagag

SEQ ID NO: 3096668 - RNA, 19 nt, Artificial Sequence
  Description of Artificial Sequence: Synthetic oligonucleotide
cuggcgucucugcagcuug

SEQ ID NO: 3096669 - RNA, 19 nt, Artificial Sequence
  Description of Artificial Sequence: Synthetic oligonucleotide
agcaggcacauugggaaga

SEQ ID NO: 3096670 - RNA, 19 nt, Artificial Sequence
  Description of Artificial Sequence: Synthetic oligonucleotide
uccccacucuggccugugg

SEQ ID NO: 3096671 - RNA, 19 nt, Artificial Sequence
  Description of Artificial Sequence: Synthetic oligonucleotide
agcuuggguaggacugggc

SEQ ID NO: 3096672 - RNA, 19 nt, Artificial Sequence
  Description of Artificial Sequence: Synthetic oligonucleotide
gcuuucgaugguccaacug

SEQ ID NO: 3096673 - RNA, 19 nt, Artificial Sequence
  Description of Artificial Sequence: Synthetic oligonucleotide
gacuaggccuccuuccaua

SEQ ID NO: 3096674 - RNA, 19 nt, Artificial Sequence
  Description of Artificial Sequence: Synthetic oligonucleotide
cuccuagccgacuaggccu

SEQ ID NO: 3096675 - RNA, 19 nt, Artificial Sequence
  Description of Artificial Sequence: Synthetic oligonucleotide
gaggcagcuccagggcugg

SEQ ID NO: 3096676 - RNA, 19 nt, Artificial Sequence
  Description of Artificial Sequence: Synthetic oligonucleotide
ucugcagcuuggguaggac

SEQ ID NO: 3096677 - RNA, 19 nt, Artificial Sequence
  Description of Artificial Sequence: Synthetic oligonucleotide
ucagcacacccugcacucc

SEQ ID NO: 3096678 - RNA, 19 nt, Artificial Sequence
  Description of Artificial Sequence: Synthetic oligonucleotide
uaggggcacuaccacuaaa

SEQ ID NO: 3096679 - RNA, 19 nt, Artificial Sequence
  Description of Artificial Sequence: Synthetic oligonucleotide
cacacccugcacuccuagc

SEQ ID NO: 3096680 - RNA, 19 nt, Artificial Sequence
  Description of Artificial Sequence: Synthetic oligonucleotide
gggaguagagcuccuucac

SEQ ID NO: 3096681 - RNA, 19 nt, Artificial Sequence
  Description of Artificial Sequence: Synthetic oligonucleotide
ugggcuuucgaugguccaa

SEQ ID NO: 3096682 - RNA, 19 nt, Artificial Sequence
  Description of Artificial Sequence: Synthetic oligonucleotide
agaggcagcuccagggcug

SEQ ID NO: 3096683 - RNA, 19 nt, Artificial Sequence
  Description of Artificial Sequence: Synthetic oligonucleotide
acccugcacuccuagccga

SEQ ID NO: 3096684 - RNA, 19 nt, Artificial Sequence
  Description of Artificial Sequence: Synthetic oligonucleotide
cacaguggagcuggagcag

SEQ ID NO: 3096685 - RNA, 19 nt, Artificial Sequence
  Description of Artificial Sequence: Synthetic oligonucleotide
auaggggcacuaccacuaa

SEQ ID NO: 3096686 - RNA, 19 nt, Artificial Sequence
  Description of Artificial Sequence: Synthetic oligonucleotide
ucucaccaagcugggagua

SEQ ID NO: 3096687 - RNA, 19 nt, Artificial Sequence
  Description of Artificial Sequence: Synthetic oligonucleotide
gagccuucugcaaaagccu

SEQ ID NO: 3096688 - RNA, 19 nt, Artificial Sequence
  Description of Artificial Sequence: Synthetic oligonucleotide
cuucacggccuccccacuc

SEQ ID NO: 3096689 - RNA, 19 nt, Artificial Sequence
  Description of Artificial Sequence: Synthetic oligonucleotide
ucacggccuccccacucug

SEQ ID NO: 3096690 - RNA, 19 nt, Artificial Sequence
  Description of Artificial Sequence: Synthetic oligonucleotide
cucaccaagcugggaguag

SEQ ID NO: 3096691 - RNA, 19 nt, Artificial Sequence
  Description of Artificial Sequence: Synthetic oligonucleotide
ucucugcagcuuggguagg

SEQ ID NO: 3096692 - RNA, 19 nt, Artificial Sequence
  Description of Artificial Sequence: Synthetic oligonucleotide
cacuaccacuaaacaguuc

SEQ ID NO: 3096693 - RNA, 19 nt, Artificial Sequence
  Description of Artificial Sequence: Synthetic oligonucleotide
gccgacuaggccuccuucc

SEQ ID NO: 3096694 - RNA, 19 nt, Artificial Sequence
  Description of Artificial Sequence: Synthetic oligonucleotide
gaugguccaacugcuccaa

SEQ ID NO: 3096695 - RNA, 19 nt, Artificial Sequence
  Description of Artificial Sequence: Synthetic oligonucleotide
gguaggacugggcuuucga

SEQ ID NO: 3096696 - RNA, 19 nt, Artificial Sequence
  Description of Artificial Sequence: Synthetic oligonucleotide
gcuggagcaggcacauugg

SEQ ID NO: 3096697 - RNA, 19 nt, Artificial Sequence
  Description of Artificial Sequence: Synthetic oligonucleotide
gaacaacccucagcacacc

SEQ ID NO: 3096698 - RNA, 19 nt, Artificial Sequence
  Description of Artificial Sequence: Synthetic oligonucleotide
auaccuugccaaggaacaa

SEQ ID NO: 3096699 - RNA, 19 nt, Artificial Sequence
  Description of Artificial Sequence: Synthetic oligonucleotide
ggggcacuaccacuaaaca

SEQ ID NO: 3096700 - RNA, 19 nt, Artificial Sequence
  Description of Artificial Sequence: Synthetic oligonucleotide
ggccuccuuccauaggggc

SEQ ID NO: 3096701 - RNA, 19 nt, Artificial Sequence
  Description of Artificial Sequence: Synthetic oligonucleotide
ccuugccaaggaacaaccc

SEQ ID NO: 3096702 - RNA, 19 nt, Artificial Sequence
  Description of Artificial Sequence: Synthetic oligonucleotide
aggccuccuuccauagggg

SEQ ID NO: 3096703 - RNA, 19 nt, Artificial Sequence
  Description of Artificial Sequence: Synthetic oligonucleotide
aguggagcuggagcaggca

SEQ ID NO: 3096704 - RNA, 19 nt, Artificial Sequence
  Description of Artificial Sequence: Synthetic oligonucleotide
cuccagagccuucugcaaa

SEQ ID NO: 3096705 - RNA, 19 nt, Artificial Sequence
  Description of Artificial Sequence: Synthetic oligonucleotide
ccaagcugggaguagagcu

SEQ ID NO: 3096706 - RNA, 19 nt, Artificial Sequence
  Description of Artificial Sequence: Synthetic oligonucleotide
gcagcuuggguaggacugg

SEQ ID NO: 3096707 - RNA, 19 nt, Artificial Sequence
  Description of Artificial Sequence: Synthetic oligonucleotide
cacucuggccugugggcuc

SEQ ID NO: 3096708 - RNA, 19 nt, Artificial Sequence
  Description of Artificial Sequence: Synthetic oligonucleotide
gagccucacaguggagcug

SEQ ID NO: 3096709 - RNA, 19 nt, Artificial Sequence
  Description of Artificial Sequence: Synthetic oligonucleotide
caggcacauugggaagagg

SEQ ID NO: 3096710 - RNA, 19 nt, Artificial Sequence
  Description of Artificial Sequence: Synthetic oligonucleotide
guaggacugggcuuucgau

SEQ ID NO: 3096711 - RNA, 19 nt, Artificial Sequence
  Description of Artificial Sequence: Synthetic oligonucleotide
auagagccucacaguggag

SEQ ID NO: 3096712 - RNA, 19 nt, Artificial Sequence
  Description of Artificial Sequence: Synthetic oligonucleotide
gcacuccuagccgacuagg

SEQ ID NO: 3096713 - RNA, 19 nt, Artificial Sequence
  Description of Artificial Sequence: Synthetic oligonucleotide
acuucucaccaagcuggga

SEQ ID NO: 3096714 - RNA, 19 nt, Artificial Sequence
  Description of Artificial Sequence: Synthetic oligonucleotide
ugugggcuccagagccuuc

SEQ ID NO: 3096715 - RNA, 19 nt, Artificial Sequence
  Description of Artificial Sequence: Synthetic oligonucleotide
cccacucuggccugugggc

SEQ ID NO: 3096716 - RNA, 19 nt, Artificial Sequence
  Description of Artificial Sequence: Synthetic oligonucleotide
ggcacauugggaagaggca

SEQ ID NO: 3096717 - RNA, 19 nt, Artificial Sequence
  Description of Artificial Sequence: Synthetic oligonucleotide
cugcuccaacuucucacca

SEQ ID NO: 3096718 - RNA, 19 nt, Artificial Sequence
  Description of Artificial Sequence: Synthetic oligonucleotide
ggcagcuccagggcuggcg

SEQ ID NO: 3096719 - RNA, 19 nt, Artificial Sequence
  Description of Artificial Sequence: Synthetic oligonucleotide
gcuuggguaggacugggcu

SEQ ID NO: 3096720 - RNA, 19 nt, Artificial Sequence
  Description of Artificial Sequence: Synthetic oligonucleotide
uagccgacuaggccuccuu

SEQ ID NO: 3096721 - RNA, 19 nt, Artificial Sequence
  Description of Artificial Sequence: Synthetic oligonucleotide
cugggcuuucgauggucca

SEQ ID NO: 3096722 - RNA, 19 nt, Artificial Sequence
  Description of Artificial Sequence: Synthetic oligonucleotide
gggcuggcgucucugcagc

SEQ ID NO: 3096723 - RNA, 19 nt, Artificial Sequence
  Description of Artificial Sequence: Synthetic oligonucleotide
gccaaggaacaacccucag

SEQ ID NO: 3096724 - RNA, 19 nt, Artificial Sequence
  Description of Artificial Sequence: Synthetic oligonucleotide
ccccacucuggccuguggg

SEQ ID NO: 3096725 - RNA, 19 nt, Artificial Sequence
  Description of Artificial Sequence: Synthetic oligonucleotide
cauugggaagaggcagcuc

SEQ ID NO: 3096726 - RNA, 19 nt, Artificial Sequence
  Description of Artificial Sequence: Synthetic oligonucleotide
gcacacccugcacuccuag

SEQ ID NO: 3096727 - RNA, 19 nt, Artificial Sequence
  Description of Artificial Sequence: Synthetic oligonucleotide
ccaacugcuccaacuucuc

SEQ ID NO: 3096728 - RNA, 19 nt, Artificial Sequence
  Description of Artificial Sequence: Synthetic oligonucleotide
gcaggcacauugggaagag

SEQ ID NO: 3096729 - RNA, 19 nt, Artificial Sequence
  Description of Artificial Sequence: Synthetic oligonucleotide
cuccuucacggccucccca

SEQ ID NO: 3096730 - RNA, 19 nt, Artificial Sequence
  Description of Artificial Sequence: Synthetic oligonucleotide
gggcuuucgaugguccaac

SEQ ID NO: 3096731 - RNA, 19 nt, Artificial Sequence
  Description of Artificial Sequence: Synthetic oligonucleotide
cugcaaaagccucuagcuu

SEQ ID NO: 3096732 - RNA, 19 nt, Artificial Sequence
  Description of Artificial Sequence: Synthetic oligonucleotide
acaguuccauagagccuca

SEQ ID NO: 3096733 - RNA, 19 nt, Artificial Sequence
  Description of Artificial Sequence: Synthetic oligonucleotide
ggcgucucugcagcuuggg

SEQ ID NO: 3096734 - RNA, 19 nt, Artificial Sequence
  Description of Artificial Sequence: Synthetic oligonucleotide
ggccugugggcuccagagc

SEQ ID NO: 3096735 - RNA, 19 nt, Artificial Sequence
  Description of Artificial Sequence: Synthetic oligonucleotide
gguccaacugcuccaacuu

SEQ ID NO: 3096736 - RNA, 19 nt, Artificial Sequence
  Description of Artificial Sequence: Synthetic oligonucleotide
cugcagcuuggguaggacu

SEQ ID NO: 3096737 - RNA, 19 nt, Artificial Sequence
  Description of Artificial Sequence: Synthetic oligonucleotide
ccuuccauaggggcacuac

SEQ ID NO: 3096738 - RNA, 19 nt, Artificial Sequence
  Description of Artificial Sequence: Synthetic oligonucleotide
cagggcuggcgucucugca

SEQ ID NO: 3096739 - RNA, 19 nt, Artificial Sequence
  Description of Artificial Sequence: Synthetic oligonucleotide
cugcacuccuagccgacua

SEQ ID NO: 3096740 - RNA, 19 nt, Artificial Sequence
  Description of Artificial Sequence: Synthetic oligonucleotide
gcuccuucacggccucccc

SEQ ID NO: 3096741 - RNA, 19 nt, Artificial Sequence
  Description of Artificial Sequence: Synthetic oligonucleotide
caguuccauagagccucac

SEQ ID NO: 3096742 - RNA, 19 nt, Artificial Sequence
  Description of Artificial Sequence: Synthetic oligonucleotide
ggguaggacugggcuuucg

SEQ ID NO: 3096743 - RNA, 19 nt, Artificial Sequence
  Description of Artificial Sequence: Synthetic oligonucleotide
uccuuccauaggggcacua

SEQ ID NO: 3096744 - RNA, 19 nt, Artificial Sequence
  Description of Artificial Sequence: Synthetic oligonucleotide
gccuccuuccauaggggca

SEQ ID NO: 3096745 - RNA, 19 nt, Artificial Sequence
  Description of Artificial Sequence: Synthetic oligonucleotide
cgucucugcagcuugggua

SEQ ID NO: 3096746 - RNA, 19 nt, Artificial Sequence
  Description of Artificial Sequence: Synthetic oligonucleotide
gagcuccuucacggccucc

SEQ ID NO: 3096747 - RNA, 19 nt, Artificial Sequence
  Description of Artificial Sequence: Synthetic oligonucleotide
uggguaggacugggcuuuc

SEQ ID NO: 3096748 - RNA, 19 nt, Artificial Sequence
  Description of Artificial Sequence: Synthetic oligonucleotide
cagcacacccugcacuccu

SEQ ID NO: 3096749 - RNA, 19 nt, Artificial Sequence
  Description of Artificial Sequence: Synthetic oligonucleotide
ccagagccuucugcaaaag

SEQ ID NO: 3096750 - RNA, 19 nt, Artificial Sequence
  Description of Artificial Sequence: Synthetic oligonucleotide
cgaugguccaacugcucca

SEQ ID NO: 3096751 - RNA, 19 nt, Artificial Sequence
  Description of Artificial Sequence: Synthetic oligonucleotide
ccucacaguggagcuggag

SEQ ID NO: 3096752 - RNA, 19 nt, Artificial Sequence
  Description of Artificial Sequence: Synthetic oligonucleotide
ccgacuaggccuccuucca

SEQ ID NO: 3096753 - RNA, 19 nt, Artificial Sequence
  Description of Artificial Sequence: Synthetic oligonucleotide
gugggcuccagagccuucu

SEQ ID NO: 3096754 - RNA, 19 nt, Artificial Sequence
  Description of Artificial Sequence: Synthetic oligonucleotide
gcagcuccagggcuggcgu

SEQ ID NO: 3096755 - RNA, 19 nt, Artificial Sequence
  Description of Artificial Sequence: Synthetic oligonucleotide
ccauaggggcacuaccacu

SEQ ID NO: 3096756 - RNA, 19 nt, Artificial Sequence
  Description of Artificial Sequence: Synthetic oligonucleotide
cuccccacucuggccugug

SEQ ID NO: 3096757 - RNA, 19 nt, Artificial Sequence
  Description of Artificial Sequence: Synthetic oligonucleotide
agcacacccugcacuccua

SEQ ID NO: 3096758 - RNA, 19 nt, Artificial Sequence
  Description of Artificial Sequence: Synthetic oligonucleotide
ggcuuucgaugguccaacu

SEQ ID NO: 3096759 - RNA, 19 nt, Artificial Sequence
  Description of Artificial Sequence: Synthetic oligonucleotide
ggagcuggagcaggcacau

SEQ ID NO: 3096760 - RNA, 19 nt, Artificial Sequence
  Description of Artificial Sequence: Synthetic oligonucleotide
gccuucugcaaaagccucu

SEQ ID NO: 3096761 - RNA, 19 nt, Artificial Sequence
  Description of Artificial Sequence: Synthetic oligonucleotide
gcacuaccacuaaacaguu

SEQ ID NO: 3096762 - RNA, 19 nt, Artificial Sequence
  Description of Artificial Sequence: Synthetic oligonucleotide
gcgucucugcagcuugggu

SEQ ID NO: 3096763 - RNA, 19 nt, Artificial Sequence
  Description of Artificial Sequence: Synthetic oligonucleotide
ccuagccgacuaggccucc

SEQ ID NO: 3096764 - RNA, 19 nt, Artificial Sequence
  Description of Artificial Sequence: Synthetic oligonucleotide
cuagccgacuaggccuccu

SEQ ID NO: 3096765 - RNA, 19 nt, Artificial Sequence
  Description of Artificial Sequence: Synthetic oligonucleotide
ggacugggcuuucgauggu

SEQ ID NO: 3096766 - RNA, 19 nt, Artificial Sequence
  Description of Artificial Sequence: Synthetic oligonucleotide
cugugggcuccagagccuu

SEQ ID NO: 3096767 - RNA, 19 nt, Artificial Sequence
  Description of Artificial Sequence: Synthetic oligonucleotide
ccugugggcuccagagccu

SEQ ID NO: 3096768 - RNA, 19 nt, Artificial Sequence
  Description of Artificial Sequence: Synthetic oligonucleotide
ccacucuggccugugggcu

SEQ ID NO: 3096769 - RNA, 19 nt, Artificial Sequence
  Description of Artificial Sequence: Synthetic oligonucleotide
gcuccagggcuggcgucuc

SEQ ID NO: 3096770 - RNA, 19 nt, Artificial Sequence
  Description of Artificial Sequence: Synthetic oligonucleotide
ggcuggcgucucugcagcu

SEQ ID NO: 3096771 - RNA, 19 nt, Artificial Sequence
  Description of Artificial Sequence: Synthetic oligonucleotide
gcugggaguagagcuccuu

SEQ ID NO: 3096772 - RNA, 19 nt, Artificial Sequence
  Description of Artificial Sequence: Synthetic oligonucleotide
cuccuuccauaggggcacu

SEQ ID NO: 3096773 - RNA, 19 nt, Artificial Sequence
  Description of Artificial Sequence: Synthetic oligonucleotide
cucuggccugugggcucca

SEQ ID NO: 3096774 - RNA, 19 nt, Artificial Sequence
  Description of Artificial Sequence: Synthetic oligonucleotide
gcuggcgucucugcagcuu

SEQ ID NO: 3096775 - RNA, 19 nt, Artificial Sequence
  Description of Artificial Sequence: Synthetic oligonucleotide
gagcuggagcaggcacauu

SEQ ID NO: 3096776 - RNA, 19 nt, Artificial Sequence
  Description of Artificial Sequence: Synthetic oligonucleotide
gccucacaguggagcugga

SEQ ID NO: 3096777 - RNA, 19 nt, Artificial Sequence
  Description of Artificial Sequence: Synthetic oligonucleotide
ccuucacggccuccccacu

SEQ ID NO: 3096778 - RNA, 19 nt, Artificial Sequence
  Description of Artificial Sequence: Synthetic oligonucleotide
ccugcacuccuagccgacu

SEQ ID NO: 3096779 - RNA, 19 nt, Artificial Sequence
  Description of Artificial Sequence: Synthetic oligonucleotide
cgacuaggccuccuuccau

SEQ ID NO: 3096780 - RNA, 19 nt, Artificial Sequence
  Description of Artificial Sequence: Synthetic oligonucleotide
aaauuaauacaucauauaa

SEQ ID NO: 3096781 - RNA, 19 nt, Artificial Sequence
  Description of Artificial Sequence: Synthetic oligonucleotide
ucagaauuaccuuugaugc

SEQ ID NO: 3096782 - RNA, 19 nt, Artificial Sequence
  Description of Artificial Sequence: Synthetic oligonucleotide
uguacaaacaguaagcaau

SEQ ID NO: 3096783 - RNA, 19 nt, Artificial Sequence
  Description of Artificial Sequence: Synthetic oligonucleotide
uuaaauuaauacaucauau

SEQ ID NO: 3096784 - RNA, 19 nt, Artificial Sequence
  Description of Artificial Sequence: Synthetic oligonucleotide
caucauauaauucuuaaac

SEQ ID NO: 3096785 - RNA, 19 nt, Artificial Sequence
  Description of Artificial Sequence: Synthetic oligonucleotide
uuuauuuucacaagcauuu

SEQ ID NO: 3096786 - RNA, 19 nt, Artificial Sequence
  Description of Artificial Sequence: Synthetic oligonucleotide
uucagaauuaccuuugaug

SEQ ID NO: 3096787 - RNA, 19 nt, Artificial Sequence
  Description of Artificial Sequence: Synthetic oligonucleotide
auuaauacaucauauaauu

SEQ ID NO: 3096788 - RNA, 19 nt, Artificial Sequence
  Description of Artificial Sequence: Synthetic oligonucleotide
aauucaaaugaaucaggag

SEQ ID NO: 3096789 - RNA, 19 nt, Artificial Sequence
  Description of Artificial Sequence: Synthetic oligonucleotide
aagcauuuguccuggauuc

SEQ ID NO: 3096790 - RNA, 19 nt, Artificial Sequence
  Description of Artificial Sequence: Synthetic oligonucleotide
ucauauaauucuuaaacaa

SEQ ID NO: 3096791 - RNA, 19 nt, Artificial Sequence
  Description of Artificial Sequence: Synthetic oligonucleotide
uaagcaauucaaaugaauc

SEQ ID NO: 3096792 - RNA, 19 nt, Artificial Sequence
  Description of Artificial Sequence: Synthetic oligonucleotide
ucgauguacaaacaguaag

SEQ ID NO: 3096793 - RNA, 19 nt, Artificial Sequence
  Description of Artificial Sequence: Synthetic oligonucleotide
cauauaauucuuaaacaag

SEQ ID NO: 3096794 - RNA, 19 nt, Artificial Sequence
  Description of Artificial Sequence: Synthetic oligonucleotide
aagcaauucaaaugaauca

SEQ ID NO: 3096795 - RNA, 19 nt, Artificial Sequence
  Description of Artificial Sequence: Synthetic oligonucleotide
uucagauuuauuuucacaa

SEQ ID NO: 3096796 - RNA, 19 nt, Artificial Sequence
  Description of Artificial Sequence: Synthetic oligonucleotide
uauaauucuuaaacaagug

SEQ ID NO: 3096797 - RNA, 19 nt, Artificial Sequence
  Description of Artificial Sequence: Synthetic oligonucleotide
uuuugauaacuucagauuu

SEQ ID NO: 3096798 - RNA, 19 nt, Artificial Sequence
  Description of Artificial Sequence: Synthetic oligonucleotide
caaguguugacuucuaacc

SEQ ID NO: 3096799 - RNA, 19 nt, Artificial Sequence
  Description of Artificial Sequence: Synthetic oligonucleotide
aauuaccuuugaugcagcc

SEQ ID NO: 3096800 - RNA, 19 nt, Artificial Sequence
  Description of Artificial Sequence: Synthetic oligonucleotide
uucaaaugaaucaggaggu

SEQ ID NO: 3096801 - RNA, 19 nt, Artificial Sequence
  Description of Artificial Sequence: Synthetic oligonucleotide
aacaguaagcaauucaaau

SEQ ID NO: 3096802 - RNA, 19 nt, Artificial Sequence
  Description of Artificial Sequence: Synthetic oligonucleotide
auaauucuuaaacaagugu

SEQ ID NO: 3096803 - RNA, 19 nt, Artificial Sequence
  Description of Artificial Sequence: Synthetic oligonucleotide
acaaguguugacuucuaac

SEQ ID NO: 3096804 - RNA, 19 nt, Artificial Sequence
  Description of Artificial Sequence: Synthetic oligonucleotide
gagacuacgguggagaccg

SEQ ID NO: 3096805 - RNA, 19 nt, Artificial Sequence
  Description of Artificial Sequence: Synthetic oligonucleotide
acaguaagcaauucaaaug

SEQ ID NO: 3096806 - RNA, 19 nt, Artificial Sequence
  Description of Artificial Sequence: Synthetic oligonucleotide
uuugaugcagccauuacau

SEQ ID NO: 3096807 - RNA, 19 nt, Artificial Sequence
  Description of Artificial Sequence: Synthetic oligonucleotide
aucauauaauucuuaaaca

SEQ ID NO: 3096808 - RNA, 19 nt, Artificial Sequence
  Description of Artificial Sequence: Synthetic oligonucleotide
aauucuuaaacaaguguug

SEQ ID NO: 3096809 - RNA, 19 nt, Artificial Sequence
  Description of Artificial Sequence: Synthetic oligonucleotide
uuuucacaagcauuugucc

SEQ ID NO: 3096810 - RNA, 19 nt, Artificial Sequence
  Description of Artificial Sequence: Synthetic oligonucleotide
ugaugcagccauuacauga

SEQ ID NO: 3096811 - RNA, 19 nt, Artificial Sequence
  Description of Artificial Sequence: Synthetic oligonucleotide
aauuaauacaucauauaau

SEQ ID NO: 3096812 - RNA, 19 nt, Artificial Sequence
  Description of Artificial Sequence: Synthetic oligonucleotide
gauaacuucagauuuauuu

SEQ ID NO: 3096813 - RNA, 19 nt, Artificial Sequence
  Description of Artificial Sequence: Synthetic oligonucleotide
ugaaucaggaggucgcagg

SEQ ID NO: 3096814 - RNA, 19 nt, Artificial Sequence
  Description of Artificial Sequence: Synthetic oligonucleotide
ucuuaaacaaguguugacu

SEQ ID NO: 3096815 - RNA, 19 nt, Artificial Sequence
  Description of Artificial Sequence: Synthetic oligonucleotide
aguguugacuucuaaccuc

SEQ ID NO: 3096816 - RNA, 19 nt, Artificial Sequence
  Description of Artificial Sequence: Synthetic oligonucleotide
uaaauuaauacaucauaua

SEQ ID NO: 3096817 - RNA, 19 nt, Artificial Sequence
  Description of Artificial Sequence: Synthetic oligonucleotide
uuaauacaucauauaauuc

SEQ ID NO: 3096818 - RNA, 19 nt, Artificial Sequence
  Description of Artificial Sequence: Synthetic oligonucleotide
auauaauucuuaaacaagu

SEQ ID NO: 3096819 - RNA, 19 nt, Artificial Sequence
  Description of Artificial Sequence: Synthetic oligonucleotide
agaauuaccuuugaugcag

SEQ ID NO: 3096820 - RNA, 19 nt, Artificial Sequence
  Description of Artificial Sequence: Synthetic oligonucleotide
uugacuucuaaccucugcu

SEQ ID NO: 3096821 - RNA, 19 nt, Artificial Sequence
  Description of Artificial Sequence: Synthetic oligonucleotide
uugaaggugcgccugagga

SEQ ID NO: 3096822 - RNA, 19 nt, Artificial Sequence
  Description of Artificial Sequence: Synthetic oligonucleotide
agcaauucaaaugaaucag

SEQ ID NO: 3096823 - RNA, 19 nt, Artificial Sequence
  Description of Artificial Sequence: Synthetic oligonucleotide
aaguguugacuucuaaccu

SEQ ID NO: 3096824 - RNA, 19 nt, Artificial Sequence
  Description of Artificial Sequence: Synthetic oligonucleotide
auuuucacaagcauuuguc

SEQ ID NO: 3096825 - RNA, 19 nt, Artificial Sequence
  Description of Artificial Sequence: Synthetic oligonucleotide
acaaacaguaagcaauuca

SEQ ID NO: 3096826 - RNA, 19 nt, Artificial Sequence
  Description of Artificial Sequence: Synthetic oligonucleotide
uuucacaagcauuuguccu

SEQ ID NO: 3096827 - RNA, 19 nt, Artificial Sequence
  Description of Artificial Sequence: Synthetic oligonucleotide
ugccaaucgauguacaaac

SEQ ID NO: 3096828 - RNA, 19 nt, Artificial Sequence
  Description of Artificial Sequence: Synthetic oligonucleotide
uacaucauauaauucuuaa

SEQ ID NO: 3096829 - RNA, 19 nt, Artificial Sequence
  Description of Artificial Sequence: Synthetic oligonucleotide
uaaacaaguguugacuucu

SEQ ID NO: 3096830 - RNA, 19 nt, Artificial Sequence
  Description of Artificial Sequence: Synthetic oligonucleotide
acuucagauuuauuuucac

SEQ ID NO: 3096831 - RNA, 19 nt, Artificial Sequence
  Description of Artificial Sequence: Synthetic oligonucleotide
uucacaagcauuuguccug

SEQ ID NO: 3096832 - RNA, 19 nt, Artificial Sequence
  Description of Artificial Sequence: Synthetic oligonucleotide
uaacuucagauuuauuuuc

SEQ ID NO: 3096833 - RNA, 19 nt, Artificial Sequence
  Description of Artificial Sequence: Synthetic oligonucleotide
uuguccuggauucuucugc

SEQ ID NO: 3096834 - RNA, 19 nt, Artificial Sequence
  Description of Artificial Sequence: Synthetic oligonucleotide
caaaugaaucaggaggucg

SEQ ID NO: 3096835 - RNA, 19 nt, Artificial Sequence
  Description of Artificial Sequence: Synthetic oligonucleotide
uucuucugcuugaaggugc

SEQ ID NO: 3096836 - RNA, 19 nt, Artificial Sequence
  Description of Artificial Sequence: Synthetic oligonucleotide
caguaagcaauucaaauga

SEQ ID NO: 3096837 - RNA, 19 nt, Artificial Sequence
  Description of Artificial Sequence: Synthetic oligonucleotide
uuugauaacuucagauuua

SEQ ID NO: 3096838 - RNA, 19 nt, Artificial Sequence
  Description of Artificial Sequence: Synthetic oligonucleotide
aucaggaggucgcaggccg

SEQ ID NO: 3096839 - RNA, 19 nt, Artificial Sequence
  Description of Artificial Sequence: Synthetic oligonucleotide
ggcuucuucugcuugaagg

SEQ ID NO: 3096840 - RNA, 19 nt, Artificial Sequence
  Description of Artificial Sequence: Synthetic oligonucleotide
aauacaucauauaauucuu

SEQ ID NO: 3096841 - RNA, 19 nt, Artificial Sequence
  Description of Artificial Sequence: Synthetic oligonucleotide
caaacaguaagcaauucaa

SEQ ID NO: 3096842 - RNA, 19 nt, Artificial Sequence
  Description of Artificial Sequence: Synthetic oligonucleotide
aaucgauguacaaacagua

SEQ ID NO: 3096843 - RNA, 19 nt, Artificial Sequence
  Description of Artificial Sequence: Synthetic oligonucleotide
aaucaggaggucgcaggcc

SEQ ID NO: 3096844 - RNA, 19 nt, Artificial Sequence
  Description of Artificial Sequence: Synthetic oligonucleotide
ucugcucuucuucagaauu

SEQ ID NO: 3096845 - RNA, 19 nt, Artificial Sequence
  Description of Artificial Sequence: Synthetic oligonucleotide
uuaaacaaguguugacuuc

SEQ ID NO: 3096846 - RNA, 19 nt, Artificial Sequence
  Description of Artificial Sequence: Synthetic oligonucleotide
uucuuaaacaaguguugac

SEQ ID NO: 3096847 - RNA, 19 nt, Artificial Sequence
  Description of Artificial Sequence: Synthetic oligonucleotide
gauguacaaacaguaagca

SEQ ID NO: 3096848 - RNA, 19 nt, Artificial Sequence
  Description of Artificial Sequence: Synthetic oligonucleotide
caauucaaaugaaucagga

SEQ ID NO: 3096849 - RNA, 19 nt, Artificial Sequence
  Description of Artificial Sequence: Synthetic oligonucleotide
gaaggugcgccugaggaag

SEQ ID NO: 3096850 - RNA, 19 nt, Artificial Sequence
  Description of Artificial Sequence: Synthetic oligonucleotide
agauuuauuuucacaagca

SEQ ID NO: 3096851 - RNA, 19 nt, Artificial Sequence
  Description of Artificial Sequence: Synthetic oligonucleotide
gaaucaggaggucgcaggc

SEQ ID NO: 3096852 - RNA, 19 nt, Artificial Sequence
  Description of Artificial Sequence: Synthetic oligonucleotide
uucuucugccaaucgaugu

SEQ ID NO: 3096853 - RNA, 19 nt, Artificial Sequence
  Description of Artificial Sequence: Synthetic oligonucleotide
aacuucagauuuauuuuca

SEQ ID NO: 3096854 - RNA, 19 nt, Artificial Sequence
  Description of Artificial Sequence: Synthetic oligonucleotide
ucacaagcauuuguccugg

SEQ ID NO: 3096855 - RNA, 19 nt, Artificial Sequence
  Description of Artificial Sequence: Synthetic oligonucleotide
uucugcuugaaggugcgcc

SEQ ID NO: 3096856 - RNA, 19 nt, Artificial Sequence
  Description of Artificial Sequence: Synthetic oligonucleotide
acaucauauaauucuuaaa

SEQ ID NO: 3096857 - RNA, 19 nt, Artificial Sequence
  Description of Artificial Sequence: Synthetic oligonucleotide
uguccuggauucuucugcc

SEQ ID NO: 3096858 - RNA, 19 nt, Artificial Sequence
  Description of Artificial Sequence: Synthetic oligonucleotide
cuuugaugcagccauuaca

SEQ ID NO: 3096859 - RNA, 19 nt, Artificial Sequence
  Description of Artificial Sequence: Synthetic oligonucleotide
cuaaccucugcucuucuuc

SEQ ID NO: 3096860 - RNA, 19 nt, Artificial Sequence
  Description of Artificial Sequence: Synthetic oligonucleotide
guugacuucuaaccucugc

SEQ ID NO: 3096861 - RNA, 19 nt, Artificial Sequence
  Description of Artificial Sequence: Synthetic oligonucleotide
uuauuuucacaagcauuug

SEQ ID NO: 3096862 - RNA, 19 nt, Artificial Sequence
  Description of Artificial Sequence: Synthetic oligonucleotide
aacaaguguugacuucuaa

SEQ ID NO: 3096863 - RNA, 19 nt, Artificial Sequence
  Description of Artificial Sequence: Synthetic oligonucleotide
uaaccucugcucuucuuca

SEQ ID NO: 3096864 - RNA, 19 nt, Artificial Sequence
  Description of Artificial Sequence: Synthetic oligonucleotide
uuuguccuggauucuucug

SEQ ID NO: 3096865 - RNA, 19 nt, Artificial Sequence
  Description of Artificial Sequence: Synthetic oligonucleotide
cuucagauuuauuuucaca

SEQ ID NO: 3096866 - RNA, 19 nt, Artificial Sequence
  Description of Artificial Sequence: Synthetic oligonucleotide
uugauaacuucagauuuau

SEQ ID NO: 3096867 - RNA, 19 nt, Artificial Sequence
  Description of Artificial Sequence: Synthetic oligonucleotide
ucuucugccaaucgaugua

SEQ ID NO: 3096868 - RNA, 19 nt, Artificial Sequence
  Description of Artificial Sequence: Synthetic oligonucleotide
gauuuauuuucacaagcau

SEQ ID NO: 3096869 - RNA, 19 nt, Artificial Sequence
  Description of Artificial Sequence: Synthetic oligonucleotide
auuuguccuggauucuucu

SEQ ID NO: 3096870 - RNA, 19 nt, Artificial Sequence
  Description of Artificial Sequence: Synthetic oligonucleotide
aaugaaucaggaggucgca

SEQ ID NO: 3096871 - RNA, 19 nt, Artificial Sequence
  Description of Artificial Sequence: Synthetic oligonucleotide
auguacaaacaguaagcaa

SEQ ID NO: 3096872 - RNA, 19 nt, Artificial Sequence
  Description of Artificial Sequence: Synthetic oligonucleotide
aaacaguaagcaauucaaa

SEQ ID NO: 3096873 - RNA, 19 nt, Artificial Sequence
  Description of Artificial Sequence: Synthetic oligonucleotide
ugacuucuaaccucugcuc

SEQ ID NO: 3096874 - RNA, 19 nt, Artificial Sequence
  Description of Artificial Sequence: Synthetic oligonucleotide
uugcgcuugacgcgccucg

SEQ ID NO: 3096875 - RNA, 19 nt, Artificial Sequence
  Description of Artificial Sequence: Synthetic oligonucleotide
aaccucugcucuucuucag

SEQ ID NO: 3096876 - RNA, 19 nt, Artificial Sequence
  Description of Artificial Sequence: Synthetic oligonucleotide
uccuggauucuucugccaa

SEQ ID NO: 3096877 - RNA, 19 nt, Artificial Sequence
  Description of Artificial Sequence: Synthetic oligonucleotide
cgauguacaaacaguaagc

SEQ ID NO: 3096878 - RNA, 19 nt, Artificial Sequence
  Description of Artificial Sequence: Synthetic oligonucleotide
ucugccaaucgauguacaa

SEQ ID NO: 3096879 - RNA, 19 nt, Artificial Sequence
  Description of Artificial Sequence: Synthetic oligonucleotide
ccaaucgauguacaaacag

SEQ ID NO: 3096880 - RNA, 19 nt, Artificial Sequence
  Description of Artificial Sequence: Synthetic oligonucleotide
ugcgccugaggaaggcgcg

SEQ ID NO: 3096881 - RNA, 19 nt, Artificial Sequence
  Description of Artificial Sequence: Synthetic oligonucleotide
uugaugcagccauuacaug

SEQ ID NO: 3096882 - RNA, 19 nt, Artificial Sequence
  Description of Artificial Sequence: Synthetic oligonucleotide
cuugaaggugcgccugagg

SEQ ID NO: 3096883 - RNA, 19 nt, Artificial Sequence
  Description of Artificial Sequence: Synthetic oligonucleotide
ugcucuucuucagaauuac

SEQ ID NO: 3096884 - RNA, 19 nt, Artificial Sequence
  Description of Artificial Sequence: Synthetic oligonucleotide
cauuuguccuggauucuuc

SEQ ID NO: 3096885 - RNA, 19 nt, Artificial Sequence
  Description of Artificial Sequence: Synthetic oligonucleotide
ggcgccuugcgcuugacgc

SEQ ID NO: 3096886 - RNA, 19 nt, Artificial Sequence
  Description of Artificial Sequence: Synthetic oligonucleotide
acaagcauuuguccuggau

SEQ ID NO: 3096887 - RNA, 19 nt, Artificial Sequence
  Description of Artificial Sequence: Synthetic oligonucleotide
ugaaggugcgccugaggaa

SEQ ID NO: 3096888 - RNA, 19 nt, Artificial Sequence
  Description of Artificial Sequence: Synthetic oligonucleotide
gaauuaccuuugaugcagc

SEQ ID NO: 3096889 - RNA, 19 nt, Artificial Sequence
  Description of Artificial Sequence: Synthetic oligonucleotide
gacuucuaaccucugcucu

SEQ ID NO: 3096890 - RNA, 19 nt, Artificial Sequence
  Description of Artificial Sequence: Synthetic oligonucleotide
cuucugccaaucgauguac

SEQ ID NO: 3096891 - RNA, 19 nt, Artificial Sequence
  Description of Artificial Sequence: Synthetic oligonucleotide
uguugacuucuaaccucug

SEQ ID NO: 3096892 - RNA, 19 nt, Artificial Sequence
  Description of Artificial Sequence: Synthetic oligonucleotide
uucugccaaucgauguaca

SEQ ID NO: 3096893 - RNA, 19 nt, Artificial Sequence
  Description of Artificial Sequence: Synthetic oligonucleotide
augcagccauuacaugauc

SEQ ID NO: 3096894 - RNA, 19 nt, Artificial Sequence
  Description of Artificial Sequence: Synthetic oligonucleotide
ucgcaggccgucuccaggc

SEQ ID NO: 3096895 - RNA, 19 nt, Artificial Sequence
  Description of Artificial Sequence: Synthetic oligonucleotide
caaucgauguacaaacagu

SEQ ID NO: 3096896 - RNA, 19 nt, Artificial Sequence
  Description of Artificial Sequence: Synthetic oligonucleotide
cuuaaacaaguguugacuu

SEQ ID NO: 3096897 - RNA, 19 nt, Artificial Sequence
  Description of Artificial Sequence: Synthetic oligonucleotide
cagaauuaccuuugaugca

SEQ ID NO: 3096898 - RNA, 19 nt, Artificial Sequence
  Description of Artificial Sequence: Synthetic oligonucleotide
acuucuaaccucugcucuu

SEQ ID NO: 3096899 - RNA, 19 nt, Artificial Sequence
  Description of Artificial Sequence: Synthetic oligonucleotide
gauucuucugccaaucgau

SEQ ID NO: 3096900 - RNA, 19 nt, Artificial Sequence
  Description of Artificial Sequence: Synthetic oligonucleotide
cuucuucugcuugaaggug

SEQ ID NO: 3096901 - RNA, 19 nt, Artificial Sequence
  Description of Artificial Sequence: Synthetic oligonucleotide
cugaggaaggcgcgcggcg

SEQ ID NO: 3096902 - RNA, 19 nt, Artificial Sequence
  Description of Artificial Sequence: Synthetic oligonucleotide
ugcuugaaggugcgccuga

SEQ ID NO: 3096903 - RNA, 19 nt, Artificial Sequence
  Description of Artificial Sequence: Synthetic oligonucleotide
uacaaacaguaagcaauuc

SEQ ID NO: 3096904 - RNA, 19 nt, Artificial Sequence
  Description of Artificial Sequence: Synthetic oligonucleotide
auucuucugccaaucgaug

SEQ ID NO: 3096905 - RNA, 19 nt, Artificial Sequence
  Description of Artificial Sequence: Synthetic oligonucleotide
augaaucaggaggucgcag

SEQ ID NO: 3096906 - RNA, 19 nt, Artificial Sequence
  Description of Artificial Sequence: Synthetic oligonucleotide
ucgagacuacgguggagac

SEQ ID NO: 3096907 - RNA, 19 nt, Artificial Sequence
  Description of Artificial Sequence: Synthetic oligonucleotide
ugauaacuucagauuuauu

SEQ ID NO: 3096908 - RNA, 19 nt, Artificial Sequence
  Description of Artificial Sequence: Synthetic oligonucleotide
uucuaaccucugcucuucu

SEQ ID NO: 3096909 - RNA, 19 nt, Artificial Sequence
  Description of Artificial Sequence: Synthetic oligonucleotide
gucgcaggccgucuccagg

SEQ ID NO: 3096910 - RNA, 19 nt, Artificial Sequence
  Description of Artificial Sequence: Synthetic oligonucleotide
ggauucuucugccaaucga

SEQ ID NO: 3096911 - RNA, 19 nt, Artificial Sequence
  Description of Artificial Sequence: Synthetic oligonucleotide
accucugcucuucuucaga

SEQ ID NO: 3096912 - RNA, 19 nt, Artificial Sequence
  Description of Artificial Sequence: Synthetic oligonucleotide
ugaggaaggcgcgcggcgc

SEQ ID NO: 3096913 - RNA, 19 nt, Artificial Sequence
  Description of Artificial Sequence: Synthetic oligonucleotide
aguaagcaauucaaaugaa

SEQ ID NO: 3096914 - RNA, 19 nt, Artificial Sequence
  Description of Artificial Sequence: Synthetic oligonucleotide
cuucuaaccucugcucuuc

SEQ ID NO: 3096915 - RNA, 19 nt, Artificial Sequence
  Description of Artificial Sequence: Synthetic oligonucleotide
gaggaaggcgcgcggcgcc

SEQ ID NO: 3096916 - RNA, 19 nt, Artificial Sequence
  Description of Artificial Sequence: Synthetic oligonucleotide
auacaucauauaauucuua

SEQ ID NO: 3096917 - RNA, 19 nt, Artificial Sequence
  Description of Artificial Sequence: Synthetic oligonucleotide
gacuacgguggagaccgcc

SEQ ID NO: 3096918 - RNA, 19 nt, Artificial Sequence
  Description of Artificial Sequence: Synthetic oligonucleotide
cucgagacuacgguggaga

SEQ ID NO: 3096919 - RNA, 19 nt, Artificial Sequence
  Description of Artificial Sequence: Synthetic oligonucleotide
gaggucgcaggccgucucc

SEQ ID NO: 3096920 - RNA, 19 nt, Artificial Sequence
  Description of Artificial Sequence: Synthetic oligonucleotide
ucuaaccucugcucuucuu

SEQ ID NO: 3096921 - RNA, 19 nt, Artificial Sequence
  Description of Artificial Sequence: Synthetic oligonucleotide
aucgauguacaaacaguaa

SEQ ID NO: 3096922 - RNA, 19 nt, Artificial Sequence
  Description of Artificial Sequence: Synthetic oligonucleotide
aaggugcgccugaggaagg

SEQ ID NO: 3096923 - RNA, 19 nt, Artificial Sequence
  Description of Artificial Sequence: Synthetic oligonucleotide
ggaggugcggcuucuucug

SEQ ID NO: 3096924 - RNA, 19 nt, Artificial Sequence
  Description of Artificial Sequence: Synthetic oligonucleotide
guaagcaauucaaaugaau

SEQ ID NO: 3096925 - RNA, 19 nt, Artificial Sequence
  Description of Artificial Sequence: Synthetic oligonucleotide
gaggugcggcuucuucugc

SEQ ID NO: 3096926 - RNA, 19 nt, Artificial Sequence
  Description of Artificial Sequence: Synthetic oligonucleotide
caagcauuuguccuggauu

SEQ ID NO: 3096927 - RNA, 19 nt, Artificial Sequence
  Description of Artificial Sequence: Synthetic oligonucleotide
agccauuacaugauccuuu

SEQ ID NO: 3096928 - RNA, 19 nt, Artificial Sequence
  Description of Artificial Sequence: Synthetic oligonucleotide
aggugcgccugaggaaggc

SEQ ID NO: 3096929 - RNA, 19 nt, Artificial Sequence
  Description of Artificial Sequence: Synthetic oligonucleotide
gaugcagccauuacaugau

SEQ ID NO: 3096930 - RNA, 19 nt, Artificial Sequence
  Description of Artificial Sequence: Synthetic oligonucleotide
uugacgcgccucgagacua

SEQ ID NO: 3096931 - RNA, 19 nt, Artificial Sequence
  Description of Artificial Sequence: Synthetic oligonucleotide
aaggcgcgcggcgccuugc

SEQ ID NO: 3096932 - RNA, 19 nt, Artificial Sequence
  Description of Artificial Sequence: Synthetic oligonucleotide
aaacaaguguugacuucua

SEQ ID NO: 3096933 - RNA, 19 nt, Artificial Sequence
  Description of Artificial Sequence: Synthetic oligonucleotide
uacgguggagaccgccauc

SEQ ID NO: 3096934 - RNA, 19 nt, Artificial Sequence
  Description of Artificial Sequence: Synthetic oligonucleotide
acuacgguggagaccgcca

SEQ ID NO: 3096935 - RNA, 19 nt, Artificial Sequence
  Description of Artificial Sequence: Synthetic oligonucleotide
gcuugacgcgccucgagac

SEQ ID NO: 3096936 - RNA, 19 nt, Artificial Sequence
  Description of Artificial Sequence: Synthetic oligonucleotide
agcauuuguccuggauucu

SEQ ID NO: 3096937 - RNA, 19 nt, Artificial Sequence
  Description of Artificial Sequence: Synthetic oligonucleotide
accuuugaugcagccauua

SEQ ID NO: 3096938 - RNA, 19 nt, Artificial Sequence
  Description of Artificial Sequence: Synthetic oligonucleotide
cugccaaucgauguacaaa

SEQ ID NO: 3096939 - RNA, 19 nt, Artificial Sequence
  Description of Artificial Sequence: Synthetic oligonucleotide
guguugacuucuaaccucu

SEQ ID NO: 3096940 - RNA, 19 nt, Artificial Sequence
  Description of Artificial Sequence: Synthetic oligonucleotide
gugcgccugaggaaggcgc

SEQ ID NO: 3096941 - RNA, 19 nt, Artificial Sequence
  Description of Artificial Sequence: Synthetic oligonucleotide
cugcucuucuucagaauua

SEQ ID NO: 3096942 - RNA, 19 nt, Artificial Sequence
  Description of Artificial Sequence: Synthetic oligonucleotide
gacgcgccucgagacuacg

SEQ ID NO: 3096943 - RNA, 19 nt, Artificial Sequence
  Description of Artificial Sequence: Synthetic oligonucleotide
gucuccaggcggaggugcg

SEQ ID NO: 3096944 - RNA, 19 nt, Artificial Sequence
  Description of Artificial Sequence: Synthetic oligonucleotide
ugacgcgccucgagacuac

SEQ ID NO: 3096945 - RNA, 19 nt, Artificial Sequence
  Description of Artificial Sequence: Synthetic oligonucleotide
uaccuuugaugcagccauu

SEQ ID NO: 3096946 - RNA, 19 nt, Artificial Sequence
  Description of Artificial Sequence: Synthetic oligonucleotide
cgccucgagacuacggugg

SEQ ID NO: 3096947 - RNA, 19 nt, Artificial Sequence
  Description of Artificial Sequence: Synthetic oligonucleotide
cugcuugaaggugcgccug

SEQ ID NO: 3096948 - RNA, 19 nt, Artificial Sequence
  Description of Artificial Sequence: Synthetic oligonucleotide
ccuuugaugcagccauuac

SEQ ID NO: 3096949 - RNA, 19 nt, Artificial Sequence
  Description of Artificial Sequence: Synthetic oligonucleotide
gcgccuugcgcuugacgcg

SEQ ID NO: 3096950 - RNA, 19 nt, Artificial Sequence
  Description of Artificial Sequence: Synthetic oligonucleotide
cuucagaauuaccuuugau

SEQ ID NO: 3096951 - RNA, 19 nt, Artificial Sequence
  Description of Artificial Sequence: Synthetic oligonucleotide
gaaggcgcgcggcgccuug

SEQ ID NO: 3096952 - RNA, 19 nt, Artificial Sequence
  Description of Artificial Sequence: Synthetic oligonucleotide
cuucugcuugaaggugcgc

SEQ ID NO: 3096953 - RNA, 19 nt, Artificial Sequence
  Description of Artificial Sequence: Synthetic oligonucleotide
guccuggauucuucugcca

SEQ ID NO: 3096954 - RNA, 19 nt, Artificial Sequence
  Description of Artificial Sequence: Synthetic oligonucleotide
gcaggccgucuccaggcgg

SEQ ID NO: 3096955 - RNA, 19 nt, Artificial Sequence
  Description of Artificial Sequence: Synthetic oligonucleotide
ggugcgccugaggaaggcg

SEQ ID NO: 3096956 - RNA, 19 nt, Artificial Sequence
  Description of Artificial Sequence: Synthetic oligonucleotide
uccaggcggaggugcggcu

SEQ ID NO: 3096957 - RNA, 19 nt, Artificial Sequence
  Description of Artificial Sequence: Synthetic oligonucleotide
aggcgcgcggcgccuugcg

SEQ ID NO: 3096958 - RNA, 19 nt, Artificial Sequence
  Description of Artificial Sequence: Synthetic oligonucleotide
ugcgcuugacgcgccucga

SEQ ID NO: 3096959 - RNA, 19 nt, Artificial Sequence
  Description of Artificial Sequence: Synthetic oligonucleotide
caggccgucuccaggcgga

SEQ ID NO: 3096960 - RNA, 19 nt, Artificial Sequence
  Description of Artificial Sequence: Synthetic oligonucleotide
cuugcgcuugacgcgccuc

SEQ ID NO: 3096961 - RNA, 19 nt, Artificial Sequence
  Description of Artificial Sequence: Synthetic oligonucleotide
gcgccucgagacuacggug

SEQ ID NO: 3096962 - RNA, 19 nt, Artificial Sequence
  Description of Artificial Sequence: Synthetic oligonucleotide
acgcgccucgagacuacgg

SEQ ID NO: 3096963 - RNA, 19 nt, Artificial Sequence
  Description of Artificial Sequence: Synthetic oligonucleotide
caggcggaggugcggcuuc

SEQ ID NO: 3096964 - RNA, 19 nt, Artificial Sequence
  Description of Artificial Sequence: Synthetic oligonucleotide
gcuugaaggugcgccugag

SEQ ID NO: 3096965 - RNA, 19 nt, Artificial Sequence
  Description of Artificial Sequence: Synthetic oligonucleotide
gccugaggaaggcgcgcgg

SEQ ID NO: 3096966 - RNA, 19 nt, Artificial Sequence
  Description of Artificial Sequence: Synthetic oligonucleotide
agacuacgguggagaccgc

SEQ ID NO: 3096967 - RNA, 19 nt, Artificial Sequence
  Description of Artificial Sequence: Synthetic oligonucleotide
ggucgcaggccgucuccag

SEQ ID NO: 3096968 - RNA, 19 nt, Artificial Sequence
  Description of Artificial Sequence: Synthetic oligonucleotide
cuugacgcgccucgagacu

SEQ ID NO: 3096969 - RNA, 19 nt, Artificial Sequence
  Description of Artificial Sequence: Synthetic oligonucleotide
aggucgcaggccgucucca

SEQ ID NO: 3096970 - RNA, 19 nt, Artificial Sequence
  Description of Artificial Sequence: Synthetic oligonucleotide
caggaggucgcaggccguc

SEQ ID NO: 3096971 - RNA, 19 nt, Artificial Sequence
  Description of Artificial Sequence: Synthetic oligonucleotide
gccaaucgauguacaaaca

SEQ ID NO: 3096972 - RNA, 19 nt, Artificial Sequence
  Description of Artificial Sequence: Synthetic oligonucleotide
aggaggucgcaggccgucu

SEQ ID NO: 3096973 - RNA, 19 nt, Artificial Sequence
  Description of Artificial Sequence: Synthetic oligonucleotide
ccucugcucuucuucagaa

SEQ ID NO: 3096974 - RNA, 19 nt, Artificial Sequence
  Description of Artificial Sequence: Synthetic oligonucleotide
cacaagcauuuguccugga

SEQ ID NO: 3096975 - RNA, 19 nt, Artificial Sequence
  Description of Artificial Sequence: Synthetic oligonucleotide
ggaggucgcaggccgucuc

SEQ ID NO: 3096976 - RNA, 19 nt, Artificial Sequence
  Description of Artificial Sequence: Synthetic oligonucleotide
gcgcuugacgcgccucgag

SEQ ID NO: 3096977 - RNA, 19 nt, Artificial Sequence
  Description of Artificial Sequence: Synthetic oligonucleotide
cgagacuacgguggagacc

SEQ ID NO: 3096978 - RNA, 19 nt, Artificial Sequence
  Description of Artificial Sequence: Synthetic oligonucleotide
gccauuacaugauccuuuu

SEQ ID NO: 3096979 - RNA, 19 nt, Artificial Sequence
  Description of Artificial Sequence: Synthetic oligonucleotide
aggaaggcgcgcggcgccu

SEQ ID NO: 3096980 - RNA, 19 nt, Artificial Sequence
  Description of Artificial Sequence: Synthetic oligonucleotide
cucugcucuucuucagaau

SEQ ID NO: 3096981 - RNA, 19 nt, Artificial Sequence
  Description of Artificial Sequence: Synthetic oligonucleotide
aggccgucuccaggcggag

SEQ ID NO: 3096982 - RNA, 19 nt, Artificial Sequence
  Description of Artificial Sequence: Synthetic oligonucleotide
gcggaggugcggcuucuuc

SEQ ID NO: 3096983 - RNA, 19 nt, Artificial Sequence
  Description of Artificial Sequence: Synthetic oligonucleotide
gccgucuccaggcggaggu

SEQ ID NO: 3096984 - RNA, 19 nt, Artificial Sequence
  Description of Artificial Sequence: Synthetic oligonucleotide
cuacgguggagaccgccau

SEQ ID NO: 3096985 - RNA, 19 nt, Artificial Sequence
  Description of Artificial Sequence: Synthetic oligonucleotide
gccucgagacuacggugga

SEQ ID NO: 3096986 - RNA, 19 nt, Artificial Sequence
  Description of Artificial Sequence: Synthetic oligonucleotide
cgucuccaggcggaggugc

SEQ ID NO: 3096987 - RNA, 19 nt, Artificial Sequence
  Description of Artificial Sequence: Synthetic oligonucleotide
ggccgucuccaggcggagg

SEQ ID NO: 3096988 - RNA, 19 nt, Artificial Sequence
  Description of Artificial Sequence: Synthetic oligonucleotide
ccucgagacuacgguggag

SEQ ID NO: 3096989 - RNA, 19 nt, Artificial Sequence
  Description of Artificial Sequence: Synthetic oligonucleotide
cagccauuacaugauccuu

SEQ ID NO: 3096990 - RNA, 19 nt, Artificial Sequence
  Description of Artificial Sequence: Synthetic oligonucleotide
aggcggaggugcggcuucu

SEQ ID NO: 3096991 - RNA, 19 nt, Artificial Sequence
  Description of Artificial Sequence: Synthetic oligonucleotide
cgccuugcgcuugacgcgc

SEQ ID NO: 3096992 - RNA, 19 nt, Artificial Sequence
  Description of Artificial Sequence: Synthetic oligonucleotide
ggcgcgcggcgccuugcgc

SEQ ID NO: 3096993 - RNA, 19 nt, Artificial Sequence
  Description of Artificial Sequence: Synthetic oligonucleotide
gcauuuguccuggauucuu

SEQ ID NO: 3096994 - RNA, 19 nt, Artificial Sequence
  Description of Artificial Sequence: Synthetic oligonucleotide
cgccugaggaaggcgcgcg

SEQ ID NO: 3096995 - RNA, 19 nt, Artificial Sequence
  Description of Artificial Sequence: Synthetic oligonucleotide
gcgccugaggaaggcgcgc

SEQ ID NO: 3096996 - RNA, 19 nt, Artificial Sequence
  Description of Artificial Sequence: Synthetic oligonucleotide
cgcaggccgucuccaggcg

SEQ ID NO: 3096997 - RNA, 19 nt, Artificial Sequence
  Description of Artificial Sequence: Synthetic oligonucleotide
cgcuugacgcgccucgaga

SEQ ID NO: 3096998 - RNA, 19 nt, Artificial Sequence
  Description of Artificial Sequence: Synthetic oligonucleotide
cggcuucuucugcuugaag

SEQ ID NO: 3096999 - RNA, 19 nt, Artificial Sequence
  Description of Artificial Sequence: Synthetic oligonucleotide
cggcgccuugcgcuugacg

SEQ ID NO: 3097000 - RNA, 19 nt, Artificial Sequence
  Description of Artificial Sequence: Synthetic oligonucleotide
gcggcuucuucugcuugaa

SEQ ID NO: 3097001 - RNA, 19 nt, Artificial Sequence
  Description of Artificial Sequence: Synthetic oligonucleotide
gcgcgcggcgccuugcgcu

SEQ ID NO: 3097002 - RNA, 19 nt, Artificial Sequence
  Description of Artificial Sequence: Synthetic oligonucleotide
cggaggugcggcuucuucu

SEQ ID NO: 3097003 - RNA, 19 nt, Artificial Sequence
  Description of Artificial Sequence: Synthetic oligonucleotide
ccgucuccaggcggaggug

SEQ ID NO: 3097004 - RNA, 19 nt, Artificial Sequence
  Description of Artificial Sequence: Synthetic oligonucleotide
cgcgccucgagacuacggu

SEQ ID NO: 3097005 - RNA, 19 nt, Artificial Sequence
  Description of Artificial Sequence: Synthetic oligonucleotide
ccuugcgcuugacgcgccu

SEQ ID NO: 3097006 - RNA, 19 nt, Artificial Sequence
  Description of Artificial Sequence: Synthetic oligonucleotide
gcgcggcgccuugcgcuug

SEQ ID NO: 3097007 - RNA, 19 nt, Artificial Sequence
  Description of Artificial Sequence: Synthetic oligonucleotide
gcggcgccuugcgcuugac

SEQ ID NO: 3097008 - RNA, 19 nt, Artificial Sequence
  Description of Artificial Sequence: Synthetic oligonucleotide
ggaaggcgcgcggcgccuu

SEQ ID NO: 3097009 - RNA, 19 nt, Artificial Sequence
  Description of Artificial Sequence: Synthetic oligonucleotide
ccaggcggaggugcggcuu

SEQ ID NO: 3097010 - RNA, 19 nt, Artificial Sequence
  Description of Artificial Sequence: Synthetic oligonucleotide
ggcggaggugcggcuucuu

SEQ ID NO: 3097011 - RNA, 19 nt, Artificial Sequence
  Description of Artificial Sequence: Synthetic oligonucleotide
cgcgcggcgccuugcgcuu

SEQ ID NO: 3097012 - RNA, 19 nt, Artificial Sequence
  Description of Artificial Sequence: Synthetic oligonucleotide
auuuuaaucucguacaucg

SEQ ID NO: 3097013 - RNA, 19 nt, Artificial Sequence
  Description of Artificial Sequence: Synthetic oligonucleotide
aaacuuuucuuugagaacc

SEQ ID NO: 3097014 - RNA, 19 nt, Artificial Sequence
  Description of Artificial Sequence: Synthetic oligonucleotide
ucugauucaauuuuaaucu

SEQ ID NO: 3097015 - RNA, 19 nt, Artificial Sequence
  Description of Artificial Sequence: Synthetic oligonucleotide
uucaauuuuaaucucguac

SEQ ID NO: 3097016 - RNA, 19 nt, Artificial Sequence
  Description of Artificial Sequence: Synthetic oligonucleotide
ucaauuuuaaucucguaca

SEQ ID NO: 3097017 - RNA, 19 nt, Artificial Sequence
  Description of Artificial Sequence: Synthetic oligonucleotide
ugauucaauuuuaaucucg

SEQ ID NO: 3097018 - RNA, 19 nt, Artificial Sequence
  Description of Artificial Sequence: Synthetic oligonucleotide
aaacauccgauguacacag

SEQ ID NO: 3097019 - RNA, 19 nt, Artificial Sequence
  Description of Artificial Sequence: Synthetic oligonucleotide
uucugauucaauuuuaauc

SEQ ID NO: 3097020 - RNA, 19 nt, Artificial Sequence
  Description of Artificial Sequence: Synthetic oligonucleotide
aauucuucugauucaauuu

SEQ ID NO: 3097021 - RNA, 19 nt, Artificial Sequence
  Description of Artificial Sequence: Synthetic oligonucleotide
aauuuuaaucucguacauc

SEQ ID NO: 3097022 - RNA, 19 nt, Artificial Sequence
  Description of Artificial Sequence: Synthetic oligonucleotide
ugauuguaccaucuggugc

SEQ ID NO: 3097023 - RNA, 19 nt, Artificial Sequence
  Description of Artificial Sequence: Synthetic oligonucleotide
aaauucuucugauucaauu

SEQ ID NO: 3097024 - RNA, 19 nt, Artificial Sequence
  Description of Artificial Sequence: Synthetic oligonucleotide
uuaaucucguacaucgccc

SEQ ID NO: 3097025 - RNA, 19 nt, Artificial Sequence
  Description of Artificial Sequence: Synthetic oligonucleotide
uucuuugagaaccuggguc

SEQ ID NO: 3097026 - RNA, 19 nt, Artificial Sequence
  Description of Artificial Sequence: Synthetic oligonucleotide
uacacaguucagcagagga

SEQ ID NO: 3097027 - RNA, 19 nt, Artificial Sequence
  Description of Artificial Sequence: Synthetic oligonucleotide
acuuugauagcuguggcuc

SEQ ID NO: 3097028 - RNA, 19 nt, Artificial Sequence
  Description of Artificial Sequence: Synthetic oligonucleotide
uucagugccugauuguacc

SEQ ID NO: 3097029 - RNA, 19 nt, Artificial Sequence
  Description of Artificial Sequence: Synthetic oligonucleotide
gaaacuuuucuuugagaac

SEQ ID NO: 3097030 - RNA, 19 nt, Artificial Sequence
  Description of Artificial Sequence: Synthetic oligonucleotide
uccucuucucuuuaaauuc

SEQ ID NO: 3097031 - RNA, 19 nt, Artificial Sequence
  Description of Artificial Sequence: Synthetic oligonucleotide
auguacacaguucagcaga

SEQ ID NO: 3097032 - RNA, 19 nt, Artificial Sequence
  Description of Artificial Sequence: Synthetic oligonucleotide
gaggaaacuuuucuuugag

SEQ ID NO: 3097033 - RNA, 19 nt, Artificial Sequence
  Description of Artificial Sequence: Synthetic oligonucleotide
uuuuaaucucguacaucgc

SEQ ID NO: 3097034 - RNA, 19 nt, Artificial Sequence
  Description of Artificial Sequence: Synthetic oligonucleotide
agcagaggaagcccguggc

SEQ ID NO: 3097035 - RNA, 19 nt, Artificial Sequence
  Description of Artificial Sequence: Synthetic oligonucleotide
gugacuuugauagcugugg

SEQ ID NO: 3097036 - RNA, 19 nt, Artificial Sequence
  Description of Artificial Sequence: Synthetic oligonucleotide
ugagaugucugugacuuug

SEQ ID NO: 3097037 - RNA, 19 nt, Artificial Sequence
  Description of Artificial Sequence: Synthetic oligonucleotide
uguacacaguucagcagag

SEQ ID NO: 3097038 - RNA, 19 nt, Artificial Sequence
  Description of Artificial Sequence: Synthetic oligonucleotide
aguucagcagaggaagccc

SEQ ID NO: 3097039 - RNA, 19 nt, Artificial Sequence
  Description of Artificial Sequence: Synthetic oligonucleotide
agaggaagcccguggcucc

SEQ ID NO: 3097040 - RNA, 19 nt, Artificial Sequence
  Description of Artificial Sequence: Synthetic oligonucleotide
uaccaucuggugcugcugg

SEQ ID NO: 3097041 - RNA, 19 nt, Artificial Sequence
  Description of Artificial Sequence: Synthetic oligonucleotide
ucgaggaaacuuuucuuug

SEQ ID NO: 3097042 - RNA, 19 nt, Artificial Sequence
  Description of Artificial Sequence: Synthetic oligonucleotide
gauuguaccaucuggugcu

SEQ ID NO: 3097043 - RNA, 19 nt, Artificial Sequence
  Description of Artificial Sequence: Synthetic oligonucleotide
ggaaacuuuucuuugagaa

SEQ ID NO: 3097044 - RNA, 19 nt, Artificial Sequence
  Description of Artificial Sequence: Synthetic oligonucleotide
ucugugacuuugauagcug

SEQ ID NO: 3097045 - RNA, 19 nt, Artificial Sequence
  Description of Artificial Sequence: Synthetic oligonucleotide
auucuucugauucaauuuu

SEQ ID NO: 3097046 - RNA, 19 nt, Artificial Sequence
  Description of Artificial Sequence: Synthetic oligonucleotide
uaaucucguacaucgcccc

SEQ ID NO: 3097047 - RNA, 19 nt, Artificial Sequence
  Description of Artificial Sequence: Synthetic oligonucleotide
cuuugauagcuguggcucg

SEQ ID NO: 3097048 - RNA, 19 nt, Artificial Sequence
  Description of Artificial Sequence: Synthetic oligonucleotide
cacaguucagcagaggaag

SEQ ID NO: 3097049 - RNA, 19 nt, Artificial Sequence
  Description of Artificial Sequence: Synthetic oligonucleotide
auccgauguacacaguuca

SEQ ID NO: 3097050 - RNA, 19 nt, Artificial Sequence
  Description of Artificial Sequence: Synthetic oligonucleotide
gauagcuguggcucgagga

SEQ ID NO: 3097051 - RNA, 19 nt, Artificial Sequence
  Description of Artificial Sequence: Synthetic oligonucleotide
ucguacaucgccccaccag

SEQ ID NO: 3097052 - RNA, 19 nt, Artificial Sequence
  Description of Artificial Sequence: Synthetic oligonucleotide
aggcaaacauccgauguac

SEQ ID NO: 3097053 - RNA, 19 nt, Artificial Sequence
  Description of Artificial Sequence: Synthetic oligonucleotide
uuucuuugagaaccugggu

SEQ ID NO: 3097054 - RNA, 19 nt, Artificial Sequence
  Description of Artificial Sequence: Synthetic oligonucleotide
gaagccgggccccaugccg

SEQ ID NO: 3097055 - RNA, 19 nt, Artificial Sequence
  Description of Artificial Sequence: Synthetic oligonucleotide
gagaaccugggucacuuug

SEQ ID NO: 3097056 - RNA, 19 nt, Artificial Sequence
  Description of Artificial Sequence: Synthetic oligonucleotide
agugccugauuguaccauc

SEQ ID NO: 3097057 - RNA, 19 nt, Artificial Sequence
  Description of Artificial Sequence: Synthetic oligonucleotide
ucugggaggcaaacauccg

SEQ ID NO: 3097058 - RNA, 19 nt, Artificial Sequence
  Description of Artificial Sequence: Synthetic oligonucleotide
ugauagcuguggcucgagg

SEQ ID NO: 3097059 - RNA, 19 nt, Artificial Sequence
  Description of Artificial Sequence: Synthetic oligonucleotide
ugagcuccccgucagucug

SEQ ID NO: 3097060 - RNA, 19 nt, Artificial Sequence
  Description of Artificial Sequence: Synthetic oligonucleotide
ugcuggacaguccucuucu

SEQ ID NO: 3097061 - RNA, 19 nt, Artificial Sequence
  Description of Artificial Sequence: Synthetic oligonucleotide
cugauuguaccaucuggug

SEQ ID NO: 3097062 - RNA, 19 nt, Artificial Sequence
  Description of Artificial Sequence: Synthetic oligonucleotide
agcagaggcacaguggaag

SEQ ID NO: 3097063 - RNA, 19 nt, Artificial Sequence
  Description of Artificial Sequence: Synthetic oligonucleotide
uuucagugccugauuguac

SEQ ID NO: 3097064 - RNA, 19 nt, Artificial Sequence
  Description of Artificial Sequence: Synthetic oligonucleotide
uccgauguacacaguucag

SEQ ID NO: 3097065 - RNA, 19 nt, Artificial Sequence
  Description of Artificial Sequence: Synthetic oligonucleotide
acuuugagcuccccgucag

SEQ ID NO: 3097066 - RNA, 19 nt, Artificial Sequence
  Description of Artificial Sequence: Synthetic oligonucleotide
gaaccugggucacuuugag

SEQ ID NO: 3097067 - RNA, 19 nt, Artificial Sequence
  Description of Artificial Sequence: Synthetic oligonucleotide
gucugggaggcaaacaucc

SEQ ID NO: 3097068 - RNA, 19 nt, Artificial Sequence
  Description of Artificial Sequence: Synthetic oligonucleotide
agaggcacaguggaagccg

SEQ ID NO: 3097069 - RNA, 19 nt, Artificial Sequence
  Description of Artificial Sequence: Synthetic oligonucleotide
cuccccgucagucugggag

SEQ ID NO: 3097070 - RNA, 19 nt, Artificial Sequence
  Description of Artificial Sequence: Synthetic oligonucleotide
aagcccguggcucccgcgg

SEQ ID NO: 3097071 - RNA, 19 nt, Artificial Sequence
  Description of Artificial Sequence: Synthetic oligonucleotide
uucuucugauucaauuuua

SEQ ID NO: 3097072 - RNA, 19 nt, Artificial Sequence
  Description of Artificial Sequence: Synthetic oligonucleotide
uguggcucgaggaaacuuu

SEQ ID NO: 3097073 - RNA, 19 nt, Artificial Sequence
  Description of Artificial Sequence: Synthetic oligonucleotide
cugauucaauuuuaaucuc

SEQ ID NO: 3097074 - RNA, 19 nt, Artificial Sequence
  Description of Artificial Sequence: Synthetic oligonucleotide
ucuuucagugccugauugu

SEQ ID NO: 3097075 - RNA, 19 nt, Artificial Sequence
  Description of Artificial Sequence: Synthetic oligonucleotide
uaaauucuucugauucaau

SEQ ID NO: 3097076 - RNA, 19 nt, Artificial Sequence
  Description of Artificial Sequence: Synthetic oligonucleotide
ucuucuuucagugccugau

SEQ ID NO: 3097077 - RNA, 19 nt, Artificial Sequence
  Description of Artificial Sequence: Synthetic oligonucleotide
uguaccaucuggugcugcu

SEQ ID NO: 3097078 - RNA, 19 nt, Artificial Sequence
  Description of Artificial Sequence: Synthetic oligonucleotide
acauccgauguacacaguu

SEQ ID NO: 3097079 - RNA, 19 nt, Artificial Sequence
  Description of Artificial Sequence: Synthetic oligonucleotide
auagcuguggcucgaggaa

SEQ ID NO: 3097080 - RNA, 19 nt, Artificial Sequence
  Description of Artificial Sequence: Synthetic oligonucleotide
aaucucguacaucgcccca

SEQ ID NO: 3097081 - RNA, 19 nt, Artificial Sequence
  Description of Artificial Sequence: Synthetic oligonucleotide
ugggaggcaaacauccgau

SEQ ID NO: 3097082 - RNA, 19 nt, Artificial Sequence
  Description of Artificial Sequence: Synthetic oligonucleotide
guucagcagaggaagcccg

SEQ ID NO: 3097083 - RNA, 19 nt, Artificial Sequence
  Description of Artificial Sequence: Synthetic oligonucleotide
uccccgucagucugggagg

SEQ ID NO: 3097084 - RNA, 19 nt, Artificial Sequence
  Description of Artificial Sequence: Synthetic oligonucleotide
aguccucuucucuuuaaau

SEQ ID NO: 3097085 - RNA, 19 nt, Artificial Sequence
  Description of Artificial Sequence: Synthetic oligonucleotide
acaguucagcagaggaagc

SEQ ID NO: 3097086 - RNA, 19 nt, Artificial Sequence
  Description of Artificial Sequence: Synthetic oligonucleotide
gccugauuguaccaucugg

SEQ ID NO: 3097087 - RNA, 19 nt, Artificial Sequence
  Description of Artificial Sequence: Synthetic oligonucleotide
gaugucugugacuuugaua

SEQ ID NO: 3097088 - RNA, 19 nt, Artificial Sequence
  Description of Artificial Sequence: Synthetic oligonucleotide
ucucguacaucgccccacc

SEQ ID NO: 3097089 - RNA, 19 nt, Artificial Sequence
  Description of Artificial Sequence: Synthetic oligonucleotide
cauccgauguacacaguuc

SEQ ID NO: 3097090 - RNA, 19 nt, Artificial Sequence
  Description of Artificial Sequence: Synthetic oligonucleotide
gcaaacauccgauguacac

SEQ ID NO: 3097091 - RNA, 19 nt, Artificial Sequence
  Description of Artificial Sequence: Synthetic oligonucleotide
acaucgccccaccagccuc

SEQ ID NO: 3097092 - RNA, 19 nt, Artificial Sequence
  Description of Artificial Sequence: Synthetic oligonucleotide
gauucaauuuuaaucucgu

SEQ ID NO: 3097093 - RNA, 19 nt, Artificial Sequence
  Description of Artificial Sequence: Synthetic oligonucleotide
uuugauagcuguggcucga

SEQ ID NO: 3097094 - RNA, 19 nt, Artificial Sequence
  Description of Artificial Sequence: Synthetic oligonucleotide
uuugagcuccccgucaguc

SEQ ID NO: 3097095 - RNA, 19 nt, Artificial Sequence
  Description of Artificial Sequence: Synthetic oligonucleotide
uggaagccgggccccaugc

SEQ ID NO: 3097096 - RNA, 19 nt, Artificial Sequence
  Description of Artificial Sequence: Synthetic oligonucleotide
ucagugccugauuguacca

SEQ ID NO: 3097097 - RNA, 19 nt, Artificial Sequence
  Description of Artificial Sequence: Synthetic oligonucleotide
caugccgccaugcccggcg

SEQ ID NO: 3097098 - RNA, 19 nt, Artificial Sequence
  Description of Artificial Sequence: Synthetic oligonucleotide
aucucguacaucgccccac

SEQ ID NO: 3097099 - RNA, 19 nt, Artificial Sequence
  Description of Artificial Sequence: Synthetic oligonucleotide
ugccugauuguaccaucug

SEQ ID NO: 3097100 - RNA, 19 nt, Artificial Sequence
  Description of Artificial Sequence: Synthetic oligonucleotide
auucaauuuuaaucucgua

SEQ ID NO: 3097101 - RNA, 19 nt, Artificial Sequence
  Description of Artificial Sequence: Synthetic oligonucleotide
caaacauccgauguacaca

SEQ ID NO: 3097102 - RNA, 19 nt, Artificial Sequence
  Description of Artificial Sequence: Synthetic oligonucleotide
aagccgggccccaugccgc

SEQ ID NO: 3097103 - RNA, 19 nt, Artificial Sequence
  Description of Artificial Sequence: Synthetic oligonucleotide
caguucagcagaggaagcc

SEQ ID NO: 3097104 - RNA, 19 nt, Artificial Sequence
  Description of Artificial Sequence: Synthetic oligonucleotide
uggacaguccucuucucuu

SEQ ID NO: 3097105 - RNA, 19 nt, Artificial Sequence
  Description of Artificial Sequence: Synthetic oligonucleotide
ugucugugacuuugauagc

SEQ ID NO: 3097106 - RNA, 19 nt, Artificial Sequence
  Description of Artificial Sequence: Synthetic oligonucleotide
ggucacuuugagcuccccg

SEQ ID NO: 3097107 - RNA, 19 nt, Artificial Sequence
  Description of Artificial Sequence: Synthetic oligonucleotide
uucagcagaggaagcccgu

SEQ ID NO: 3097108 - RNA, 19 nt, Artificial Sequence
  Description of Artificial Sequence: Synthetic oligonucleotide
ucucuucuuucagugccug

SEQ ID NO: 3097109 - RNA, 19 nt, Artificial Sequence
  Description of Artificial Sequence: Synthetic oligonucleotide
uacaucgccccaccagccu

SEQ ID NO: 3097110 - RNA, 19 nt, Artificial Sequence
  Description of Artificial Sequence: Synthetic oligonucleotide
uugagcuccccgucagucu

SEQ ID NO: 3097111 - RNA, 19 nt, Artificial Sequence
  Description of Artificial Sequence: Synthetic oligonucleotide
cugggucacuuugagcucc

SEQ ID NO: 3097112 - RNA, 19 nt, Artificial Sequence
  Description of Artificial Sequence: Synthetic oligonucleotide
cuccugagaugucugugac

SEQ ID NO: 3097113 - RNA, 19 nt, Artificial Sequence
  Description of Artificial Sequence: Synthetic oligonucleotide
gaggcaaacauccgaugua

SEQ ID NO: 3097114 - RNA, 19 nt, Artificial Sequence
  Description of Artificial Sequence: Synthetic oligonucleotide
agucugggaggcaaacauc

SEQ ID NO: 3097115 - RNA, 19 nt, Artificial Sequence
  Description of Artificial Sequence: Synthetic oligonucleotide
uugagaaccugggucacuu

SEQ ID NO: 3097116 - RNA, 19 nt, Artificial Sequence
  Description of Artificial Sequence: Synthetic oligonucleotide
uccugagaugucugugacu

SEQ ID NO: 3097117 - RNA, 19 nt, Artificial Sequence
  Description of Artificial Sequence: Synthetic oligonucleotide
gacuuugauagcuguggcu

SEQ ID NO: 3097118 - RNA, 19 nt, Artificial Sequence
  Description of Artificial Sequence: Synthetic oligonucleotide
gucacuuugagcuccccgu

SEQ ID NO: 3097119 - RNA, 19 nt, Artificial Sequence
  Description of Artificial Sequence: Synthetic oligonucleotide
ucagucugggaggcaaaca

SEQ ID NO: 3097120 - RNA, 19 nt, Artificial Sequence
  Description of Artificial Sequence: Synthetic oligonucleotide
gaggcacaguggaagccgg

SEQ ID NO: 3097121 - RNA, 19 nt, Artificial Sequence
  Description of Artificial Sequence: Synthetic oligonucleotide
agaugucugugacuuugau

SEQ ID NO: 3097122 - RNA, 19 nt, Artificial Sequence
  Description of Artificial Sequence: Synthetic oligonucleotide
agcuguggcucgaggaaac

SEQ ID NO: 3097123 - RNA, 19 nt, Artificial Sequence
  Description of Artificial Sequence: Synthetic oligonucleotide
uugauagcuguggcucgag

SEQ ID NO: 3097124 - RNA, 19 nt, Artificial Sequence
  Description of Artificial Sequence: Synthetic oligonucleotide
gaagcccguggcucccgcg

SEQ ID NO: 3097125 - RNA, 19 nt, Artificial Sequence
  Description of Artificial Sequence: Synthetic oligonucleotide
guacacaguucagcagagg

SEQ ID NO: 3097126 - RNA, 19 nt, Artificial Sequence
  Description of Artificial Sequence: Synthetic oligonucleotide
augcccggcgacgcaaccc

SEQ ID NO: 3097127 - RNA, 19 nt, Artificial Sequence
  Description of Artificial Sequence: Synthetic oligonucleotide
agaaccugggucacuuuga

SEQ ID NO: 3097128 - RNA, 19 nt, Artificial Sequence
  Description of Artificial Sequence: Synthetic oligonucleotide
gcucccgcggagcagaggc

SEQ ID NO: 3097129 - RNA, 19 nt, Artificial Sequence
  Description of Artificial Sequence: Synthetic oligonucleotide
ugggucacuuugagcuccc

SEQ ID NO: 3097130 - RNA, 19 nt, Artificial Sequence
  Description of Artificial Sequence: Synthetic oligonucleotide
cagaggaagcccguggcuc

SEQ ID NO: 3097131 - RNA, 19 nt, Artificial Sequence
  Description of Artificial Sequence: Synthetic oligonucleotide
ccccaugccgccaugcccg

SEQ ID NO: 3097132 - RNA, 19 nt, Artificial Sequence
  Description of Artificial Sequence: Synthetic oligonucleotide
cagaggcacaguggaagcc

SEQ ID NO: 3097133 - RNA, 19 nt, Artificial Sequence
  Description of Artificial Sequence: Synthetic oligonucleotide
caauuuuaaucucguacau

SEQ ID NO: 3097134 - RNA, 19 nt, Artificial Sequence
  Description of Artificial Sequence: Synthetic oligonucleotide
gucugugacuuugauagcu

SEQ ID NO: 3097135 - RNA, 19 nt, Artificial Sequence
  Description of Artificial Sequence: Synthetic oligonucleotide
acaguccucuucucuuuaa

SEQ ID NO: 3097136 - RNA, 19 nt, Artificial Sequence
  Description of Artificial Sequence: Synthetic oligonucleotide
cuuucagugccugauugua

SEQ ID NO: 3097137 - RNA, 19 nt, Artificial Sequence
  Description of Artificial Sequence: Synthetic oligonucleotide
guacaucgccccaccagcc

SEQ ID NO: 3097138 - RNA, 19 nt, Artificial Sequence
  Description of Artificial Sequence: Synthetic oligonucleotide
uggcucgaggaaacuuuuc

SEQ ID NO: 3097139 - RNA, 19 nt, Artificial Sequence
  Description of Artificial Sequence: Synthetic oligonucleotide
gcagaggcacaguggaagc

SEQ ID NO: 3097140 - RNA, 19 nt, Artificial Sequence
  Description of Artificial Sequence: Synthetic oligonucleotide
cguacaucgccccaccagc

SEQ ID NO: 3097141 - RNA, 19 nt, Artificial Sequence
  Description of Artificial Sequence: Synthetic oligonucleotide
cucgaggaaacuuuucuuu

SEQ ID NO: 3097142 - RNA, 19 nt, Artificial Sequence
  Description of Artificial Sequence: Synthetic oligonucleotide
ggaggcaaacauccgaugu

SEQ ID NO: 3097143 - RNA, 19 nt, Artificial Sequence
  Description of Artificial Sequence: Synthetic oligonucleotide
guccucuucucuuuaaauu

SEQ ID NO: 3097144 - RNA, 19 nt, Artificial Sequence
  Description of Artificial Sequence: Synthetic oligonucleotide
uuguaccaucuggugcugc

SEQ ID NO: 3097145 - RNA, 19 nt, Artificial Sequence
  Description of Artificial Sequence: Synthetic oligonucleotide
auuguaccaucuggugcug

SEQ ID NO: 3097146 - RNA, 19 nt, Artificial Sequence
  Description of Artificial Sequence: Synthetic oligonucleotide
uagcuguggcucgaggaaa

SEQ ID NO: 3097147 - RNA, 19 nt, Artificial Sequence
  Description of Artificial Sequence: Synthetic oligonucleotide
ccgauguacacaguucagc

SEQ ID NO: 3097148 - RNA, 19 nt, Artificial Sequence
  Description of Artificial Sequence: Synthetic oligonucleotide
gagaugucugugacuuuga

SEQ ID NO: 3097149 - RNA, 19 nt, Artificial Sequence
  Description of Artificial Sequence: Synthetic oligonucleotide
cuucugauucaauuuuaau

SEQ ID NO: 3097150 - RNA, 19 nt, Artificial Sequence
  Description of Artificial Sequence: Synthetic oligonucleotide
cugcuggacaguccucuuc

SEQ ID NO: 3097151 - RNA, 19 nt, Artificial Sequence
  Description of Artificial Sequence: Synthetic oligonucleotide
accaucuggugcugcugga

SEQ ID NO: 3097152 - RNA, 19 nt, Artificial Sequence
  Description of Artificial Sequence: Synthetic oligonucleotide
gacaguccucuucucuuua

SEQ ID NO: 3097153 - RNA, 19 nt, Artificial Sequence
  Description of Artificial Sequence: Synthetic oligonucleotide
aucucuucuuucagugccu

SEQ ID NO: 3097154 - RNA, 19 nt, Artificial Sequence
  Description of Artificial Sequence: Synthetic oligonucleotide
guaccaucuggugcugcug

SEQ ID NO: 3097155 - RNA, 19 nt, Artificial Sequence
  Description of Artificial Sequence: Synthetic oligonucleotide
agccuccugagaugucugu

SEQ ID NO: 3097156 - RNA, 19 nt, Artificial Sequence
  Description of Artificial Sequence: Synthetic oligonucleotide
cacuuugagcuccccguca

SEQ ID NO: 3097157 - RNA, 19 nt, Artificial Sequence
  Description of Artificial Sequence: Synthetic oligonucleotide
gucagucugggaggcaaac

SEQ ID NO: 3097158 - RNA, 19 nt, Artificial Sequence
  Description of Artificial Sequence: Synthetic oligonucleotide
cgauguacacaguucagca

SEQ ID NO: 3097159 - RNA, 19 nt, Artificial Sequence
  Description of Artificial Sequence: Synthetic oligonucleotide
gggaggcaaacauccgaug

SEQ ID NO: 3097160 - RNA, 19 nt, Artificial Sequence
  Description of Artificial Sequence: Synthetic oligonucleotide
ucccgcggagcagaggcac

SEQ ID NO: 3097161 - RNA, 19 nt, Artificial Sequence
  Description of Artificial Sequence: Synthetic oligonucleotide
cagccuccugagaugucug

SEQ ID NO: 3097162 - RNA, 19 nt, Artificial Sequence
  Description of Artificial Sequence: Synthetic oligonucleotide
ggugcugcuggacaguccu

SEQ ID NO: 3097163 - RNA, 19 nt, Artificial Sequence
  Description of Artificial Sequence: Synthetic oligonucleotide
aacauccgauguacacagu

SEQ ID NO: 3097164 - RNA, 19 nt, Artificial Sequence
  Description of Artificial Sequence: Synthetic oligonucleotide
ugagaaccugggucacuuu

SEQ ID NO: 3097165 - RNA, 19 nt, Artificial Sequence
  Description of Artificial Sequence: Synthetic oligonucleotide
ggcucgaggaaacuuuucu

SEQ ID NO: 3097166 - RNA, 19 nt, Artificial Sequence
  Description of Artificial Sequence: Synthetic oligonucleotide
caugcccggcgacgcaacc

SEQ ID NO: 3097167 - RNA, 19 nt, Artificial Sequence
  Description of Artificial Sequence: Synthetic oligonucleotide
cugugacuuugauagcugu

SEQ ID NO: 3097168 - RNA, 19 nt, Artificial Sequence
  Description of Artificial Sequence: Synthetic oligonucleotide
cagucugggaggcaaacau

SEQ ID NO: 3097169 - RNA, 19 nt, Artificial Sequence
  Description of Artificial Sequence: Synthetic oligonucleotide
ggcacaguggaagccgggc

SEQ ID NO: 3097170 - RNA, 19 nt, Artificial Sequence
  Description of Artificial Sequence: Synthetic oligonucleotide
ccugauuguaccaucuggu

SEQ ID NO: 3097171 - RNA, 19 nt, Artificial Sequence
  Description of Artificial Sequence: Synthetic oligonucleotide
gagcuccccgucagucugg

SEQ ID NO: 3097172 - RNA, 19 nt, Artificial Sequence
  Description of Artificial Sequence: Synthetic oligonucleotide
cucuucuuucagugccuga

SEQ ID NO: 3097173 - RNA, 19 nt, Artificial Sequence
  Description of Artificial Sequence: Synthetic oligonucleotide
agcuccccgucagucuggg

SEQ ID NO: 3097174 - RNA, 19 nt, Artificial Sequence
  Description of Artificial Sequence: Synthetic oligonucleotide
caguccucuucucuuuaaa

SEQ ID NO: 3097175 - RNA, 19 nt, Artificial Sequence
  Description of Artificial Sequence: Synthetic oligonucleotide
cuggacaguccucuucucu

SEQ ID NO: 3097176 - RNA, 19 nt, Artificial Sequence
  Description of Artificial Sequence: Synthetic oligonucleotide
aggcacaguggaagccggg

SEQ ID NO: 3097177 - RNA, 19 nt, Artificial Sequence
  Description of Artificial Sequence: Synthetic oligonucleotide
ccuccugagaugucuguga

SEQ ID NO: 3097178 - RNA, 19 nt, Artificial Sequence
  Description of Artificial Sequence: Synthetic oligonucleotide
uggcucccgcggagcagag

SEQ ID NO: 3097179 - RNA, 19 nt, Artificial Sequence
  Description of Artificial Sequence: Synthetic oligonucleotide
aggaagcccguggcucccg

SEQ ID NO: 3097180 - RNA, 19 nt, Artificial Sequence
  Description of Artificial Sequence: Synthetic oligonucleotide
gccccaugccgccaugccc

SEQ ID NO: 3097181 - RNA, 19 nt, Artificial Sequence
  Description of Artificial Sequence: Synthetic oligonucleotide
cgaggaaacuuuucuuuga

SEQ ID NO: 3097182 - RNA, 19 nt, Artificial Sequence
  Description of Artificial Sequence: Synthetic oligonucleotide
cucguacaucgccccacca

SEQ ID NO: 3097183 - RNA, 19 nt, Artificial Sequence
  Description of Artificial Sequence: Synthetic oligonucleotide
ggaagccgggccccaugcc

SEQ ID NO: 3097184 - RNA, 19 nt, Artificial Sequence
  Description of Artificial Sequence: Synthetic oligonucleotide
guggcucccgcggagcaga

SEQ ID NO: 3097185 - RNA, 19 nt, Artificial Sequence
  Description of Artificial Sequence: Synthetic oligonucleotide
agcccguggcucccgcgga

SEQ ID NO: 3097186 - RNA, 19 nt, Artificial Sequence
  Description of Artificial Sequence: Synthetic oligonucleotide
ggcaaacauccgauguaca

SEQ ID NO: 3097187 - RNA, 19 nt, Artificial Sequence
  Description of Artificial Sequence: Synthetic oligonucleotide
gccuccugagaugucugug

SEQ ID NO: 3097188 - RNA, 19 nt, Artificial Sequence
  Description of Artificial Sequence: Synthetic oligonucleotide
ccucuucucuuuaaauucu

SEQ ID NO: 3097189 - RNA, 19 nt, Artificial Sequence
  Description of Artificial Sequence: Synthetic oligonucleotide
gugccugauuguaccaucu

SEQ ID NO: 3097190 - RNA, 19 nt, Artificial Sequence
  Description of Artificial Sequence: Synthetic oligonucleotide
gagcagaggcacaguggaa

SEQ ID NO: 3097191 - RNA, 19 nt, Artificial Sequence
  Description of Artificial Sequence: Synthetic oligonucleotide
ccugggucacuuugagcuc

SEQ ID NO: 3097192 - RNA, 19 nt, Artificial Sequence
  Description of Artificial Sequence: Synthetic oligonucleotide
ccaccagccuccugagaug

SEQ ID NO: 3097193 - RNA, 19 nt, Artificial Sequence
  Description of Artificial Sequence: Synthetic oligonucleotide
ccugagaugucugugacuu

SEQ ID NO: 3097194 - RNA, 19 nt, Artificial Sequence
  Description of Artificial Sequence: Synthetic oligonucleotide
ggccccaugccgccaugcc

SEQ ID NO: 3097195 - RNA, 19 nt, Artificial Sequence
  Description of Artificial Sequence: Synthetic oligonucleotide
accagccuccugagauguc

SEQ ID NO: 3097196 - RNA, 19 nt, Artificial Sequence
  Description of Artificial Sequence: Synthetic oligonucleotide
aguggaagccgggccccau

SEQ ID NO: 3097197 - RNA, 19 nt, Artificial Sequence
  Description of Artificial Sequence: Synthetic oligonucleotide
gcuggacaguccucuucuc

SEQ ID NO: 3097198 - RNA, 19 nt, Artificial Sequence
  Description of Artificial Sequence: Synthetic oligonucleotide
gcucgaggaaacuuuucuu

SEQ ID NO: 3097199 - RNA, 19 nt, Artificial Sequence
  Description of Artificial Sequence: Synthetic oligonucleotide
cuuugagcuccccgucagu

SEQ ID NO: 3097200 - RNA, 19 nt, Artificial Sequence
  Description of Artificial Sequence: Synthetic oligonucleotide
gccccaccagccuccugag

SEQ ID NO: 3097201 - RNA, 19 nt, Artificial Sequence
  Description of Artificial Sequence: Synthetic oligonucleotide
caccagccuccugagaugu

SEQ ID NO: 3097202 - RNA, 19 nt, Artificial Sequence
  Description of Artificial Sequence: Synthetic oligonucleotide
gcagaggaagcccguggcu

SEQ ID NO: 3097203 - RNA, 19 nt, Artificial Sequence
  Description of Artificial Sequence: Synthetic oligonucleotide
ucgccccaccagccuccug

SEQ ID NO: 3097204 - RNA, 19 nt, Artificial Sequence
  Description of Artificial Sequence: Synthetic oligonucleotide
cucccgcggagcagaggca

SEQ ID NO: 3097205 - RNA, 19 nt, Artificial Sequence
  Description of Artificial Sequence: Synthetic oligonucleotide
cccaccagccuccugagau

SEQ ID NO: 3097206 - RNA, 19 nt, Artificial Sequence
  Description of Artificial Sequence: Synthetic oligonucleotide
ggacaguccucuucucuuu

SEQ ID NO: 3097207 - RNA, 19 nt, Artificial Sequence
  Description of Artificial Sequence: Synthetic oligonucleotide
cccaugccgccaugcccgg

SEQ ID NO: 3097208 - RNA, 19 nt, Artificial Sequence
  Description of Artificial Sequence: Synthetic oligonucleotide
ccaugcccggcgacgcaac

SEQ ID NO: 3097209 - RNA, 19 nt, Artificial Sequence
  Description of Artificial Sequence: Synthetic oligonucleotide
ccgcggagcagaggcacag

SEQ ID NO: 3097210 - RNA, 19 nt, Artificial Sequence
  Description of Artificial Sequence: Synthetic oligonucleotide
aucgccccaccagccuccu

SEQ ID NO: 3097211 - RNA, 19 nt, Artificial Sequence
  Description of Artificial Sequence: Synthetic oligonucleotide
gcccguggcucccgcggag

SEQ ID NO: 3097212 - RNA, 19 nt, Artificial Sequence
  Description of Artificial Sequence: Synthetic oligonucleotide
gggucacuuugagcucccc

SEQ ID NO: 3097213 - RNA, 19 nt, Artificial Sequence
  Description of Artificial Sequence: Synthetic oligonucleotide
cagugccugauuguaccau

SEQ ID NO: 3097214 - RNA, 19 nt, Artificial Sequence
  Description of Artificial Sequence: Synthetic oligonucleotide
ccccgucagucugggaggc

SEQ ID NO: 3097215 - RNA, 19 nt, Artificial Sequence
  Description of Artificial Sequence: Synthetic oligonucleotide
cgccccaccagccuccuga

SEQ ID NO: 3097216 - RNA, 19 nt, Artificial Sequence
  Description of Artificial Sequence: Synthetic oligonucleotide
ggcucccgcggagcagagg

SEQ ID NO: 3097217 - RNA, 19 nt, Artificial Sequence
  Description of Artificial Sequence: Synthetic oligonucleotide
cuguggcucgaggaaacuu

SEQ ID NO: 3097218 - RNA, 19 nt, Artificial Sequence
  Description of Artificial Sequence: Synthetic oligonucleotide
cugagaugucugugacuuu

SEQ ID NO: 3097219 - RNA, 19 nt, Artificial Sequence
  Description of Artificial Sequence: Synthetic oligonucleotide
ccgccaugcccggcgacgc

SEQ ID NO: 3097220 - RNA, 19 nt, Artificial Sequence
  Description of Artificial Sequence: Synthetic oligonucleotide
ccagccuccugagaugucu

SEQ ID NO: 3097221 - RNA, 19 nt, Artificial Sequence
  Description of Artificial Sequence: Synthetic oligonucleotide
ccgucagucugggaggcaa

SEQ ID NO: 3097222 - RNA, 19 nt, Artificial Sequence
  Description of Artificial Sequence: Synthetic oligonucleotide
cccguggcucccgcggagc

SEQ ID NO: 3097223 - RNA, 19 nt, Artificial Sequence
  Description of Artificial Sequence: Synthetic oligonucleotide
gccaugcccggcgacgcaa

SEQ ID NO: 3097224 - RNA, 19 nt, Artificial Sequence
  Description of Artificial Sequence: Synthetic oligonucleotide
gcuguggcucgaggaaacu

SEQ ID NO: 3097225 - RNA, 19 nt, Artificial Sequence
  Description of Artificial Sequence: Synthetic oligonucleotide
gcugcuggacaguccucuu

SEQ ID NO: 3097226 - RNA, 19 nt, Artificial Sequence
  Description of Artificial Sequence: Synthetic oligonucleotide
cguggcucccgcggagcag

SEQ ID NO: 3097227 - RNA, 19 nt, Artificial Sequence
  Description of Artificial Sequence: Synthetic oligonucleotide
ccguggcucccgcggagca

SEQ ID NO: 3097228 - RNA, 19 nt, Artificial Sequence
  Description of Artificial Sequence: Synthetic oligonucleotide
cccgcggagcagaggcaca

SEQ ID NO: 3097229 - RNA, 19 nt, Artificial Sequence
  Description of Artificial Sequence: Synthetic oligonucleotide
cgucagucugggaggcaaa

SEQ ID NO: 3097230 - RNA, 19 nt, Artificial Sequence
  Description of Artificial Sequence: Synthetic oligonucleotide
ccaugccgccaugcccggc

SEQ ID NO: 3097231 - RNA, 19 nt, Artificial Sequence
  Description of Artificial Sequence: Synthetic oligonucleotide
gcuccccgucagucuggga

SEQ ID NO: 3097232 - RNA, 19 nt, Artificial Sequence
  Description of Artificial Sequence: Synthetic oligonucleotide
ccccaccagccuccugaga

SEQ ID NO: 3097233 - RNA, 19 nt, Artificial Sequence
  Description of Artificial Sequence: Synthetic oligonucleotide
cccgucagucugggaggca

SEQ ID NO: 3097234 - RNA, 19 nt, Artificial Sequence
  Description of Artificial Sequence: Synthetic oligonucleotide
cgggccccaugccgccaug

SEQ ID NO: 3097235 - RNA, 19 nt, Artificial Sequence
  Description of Artificial Sequence: Synthetic oligonucleotide
cgccaugcccggcgacgca

SEQ ID NO: 3097236 - RNA, 19 nt, Artificial Sequence
  Description of Artificial Sequence: Synthetic oligonucleotide
ccgggccccaugccgccau

SEQ ID NO: 3097237 - RNA, 19 nt, Artificial Sequence
  Description of Artificial Sequence: Synthetic oligonucleotide
cgcggagcagaggcacagu

SEQ ID NO: 3097238 - RNA, 19 nt, Artificial Sequence
  Description of Artificial Sequence: Synthetic oligonucleotide
auuaaauacagcuagacac

SEQ ID NO: 3097239 - RNA, 19 nt, Artificial Sequence
  Description of Artificial Sequence: Synthetic oligonucleotide
ugagguauuaaauacagcu

SEQ ID NO: 3097240 - RNA, 19 nt, Artificial Sequence
  Description of Artificial Sequence: Synthetic oligonucleotide
uuugagguauuaaauacag

SEQ ID NO: 3097241 - RNA, 19 nt, Artificial Sequence
  Description of Artificial Sequence: Synthetic oligonucleotide
aaccuugacugacagagac

SEQ ID NO: 3097242 - RNA, 19 nt, Artificial Sequence
  Description of Artificial Sequence: Synthetic oligonucleotide
ucaaccuugacugacagag

SEQ ID NO: 3097243 - RNA, 19 nt, Artificial Sequence
  Description of Artificial Sequence: Synthetic oligonucleotide
agguauuaaauacagcuag

SEQ ID NO: 3097244 - RNA, 19 nt, Artificial Sequence
  Description of Artificial Sequence: Synthetic oligonucleotide
aucgguguguaucacaggc

SEQ ID NO: 3097245 - RNA, 19 nt, Artificial Sequence
  Description of Artificial Sequence: Synthetic oligonucleotide
aauuuauugccaucggugu

SEQ ID NO: 3097246 - RNA, 19 nt, Artificial Sequence
  Description of Artificial Sequence: Synthetic oligonucleotide
aauacagcuagacacacua

SEQ ID NO: 3097247 - RNA, 19 nt, Artificial Sequence
  Description of Artificial Sequence: Synthetic oligonucleotide
cacacuaguccaaagaggg

SEQ ID NO: 3097248 - RNA, 19 nt, Artificial Sequence
  Description of Artificial Sequence: Synthetic oligonucleotide
aaauuuauugccaucggug

SEQ ID NO: 3097249 - RNA, 19 nt, Artificial Sequence
  Description of Artificial Sequence: Synthetic oligonucleotide
uugugaguacuucaguugg

SEQ ID NO: 3097250 - RNA, 19 nt, Artificial Sequence
  Description of Artificial Sequence: Synthetic oligonucleotide
uuaaauacagcuagacaca

SEQ ID NO: 3097251 - RNA, 19 nt, Artificial Sequence
  Description of Artificial Sequence: Synthetic oligonucleotide
aaaauuuauugccaucggu

SEQ ID NO: 3097252 - RNA, 19 nt, Artificial Sequence
  Description of Artificial Sequence: Synthetic oligonucleotide
uauuaaauacagcuagaca

SEQ ID NO: 3097253 - RNA, 19 nt, Artificial Sequence
  Description of Artificial Sequence: Synthetic oligonucleotide
uaaaaccaaaccuugcuga

SEQ ID NO: 3097254 - RNA, 19 nt, Artificial Sequence
  Description of Artificial Sequence: Synthetic oligonucleotide
aaccaaaccuugcugaaug

SEQ ID NO: 3097255 - RNA, 19 nt, Artificial Sequence
  Description of Artificial Sequence: Synthetic oligonucleotide
gacacacuaguccaaagag

SEQ ID NO: 3097256 - RNA, 19 nt, Artificial Sequence
  Description of Artificial Sequence: Synthetic oligonucleotide
accaucggcauccuaaaac

SEQ ID NO: 3097257 - RNA, 19 nt, Artificial Sequence
  Description of Artificial Sequence: Synthetic oligonucleotide
gauauugugaguacuucag

SEQ ID NO: 3097258 - RNA, 19 nt, Artificial Sequence
  Description of Artificial Sequence: Synthetic oligonucleotide
acaggcagacgacagaggg

SEQ ID NO: 3097259 - RNA, 19 nt, Artificial Sequence
  Description of Artificial Sequence: Synthetic oligonucleotide
auugugaguacuucaguug

SEQ ID NO: 3097260 - RNA, 19 nt, Artificial Sequence
  Description of Artificial Sequence: Synthetic oligonucleotide
uugacugacagagacacga

SEQ ID NO: 3097261 - RNA, 19 nt, Artificial Sequence
  Description of Artificial Sequence: Synthetic oligonucleotide
caaaccuugcugaaugccg

SEQ ID NO: 3097262 - RNA, 19 nt, Artificial Sequence
  Description of Artificial Sequence: Synthetic oligonucleotide
uacagcuagacacacuagu

SEQ ID NO: 3097263 - RNA, 19 nt, Artificial Sequence
  Description of Artificial Sequence: Synthetic oligonucleotide
auugccaucgguguguauc

SEQ ID NO: 3097264 - RNA, 19 nt, Artificial Sequence
  Description of Artificial Sequence: Synthetic oligonucleotide
gacgacagagggaagaugc

SEQ ID NO: 3097265 - RNA, 19 nt, Artificial Sequence
  Description of Artificial Sequence: Synthetic oligonucleotide
ugacuuugagguauuaaau

SEQ ID NO: 3097266 - RNA, 19 nt, Artificial Sequence
  Description of Artificial Sequence: Synthetic oligonucleotide
cuaaaaccaaaccuugcug

SEQ ID NO: 3097267 - RNA, 19 nt, Artificial Sequence
  Description of Artificial Sequence: Synthetic oligonucleotide
uggggugucaaccuugacu

SEQ ID NO: 3097268 - RNA, 19 nt, Artificial Sequence
  Description of Artificial Sequence: Synthetic oligonucleotide
acugacagagacacgaggg

SEQ ID NO: 3097269 - RNA, 19 nt, Artificial Sequence
  Description of Artificial Sequence: Synthetic oligonucleotide
aaugccgugucaacagcgc

SEQ ID NO: 3097270 - RNA, 19 nt, Artificial Sequence
  Description of Artificial Sequence: Synthetic oligonucleotide
aaaaccaaaccuugcugaa

SEQ ID NO: 3097271 - RNA, 19 nt, Artificial Sequence
  Description of Artificial Sequence: Synthetic oligonucleotide
uauugugaguacuucaguu

SEQ ID NO: 3097272 - RNA, 19 nt, Artificial Sequence
  Description of Artificial Sequence: Synthetic oligonucleotide
gacugacagagacacgagg

SEQ ID NO: 3097273 - RNA, 19 nt, Artificial Sequence
  Description of Artificial Sequence: Synthetic oligonucleotide
gacacgaggggauauugug

SEQ ID NO: 3097274 - RNA, 19 nt, Artificial Sequence
  Description of Artificial Sequence: Synthetic oligonucleotide
gaagaugcaggggaugggg

SEQ ID NO: 3097275 - RNA, 19 nt, Artificial Sequence
  Description of Artificial Sequence: Synthetic oligonucleotide
ugucaaccuugacugacag

SEQ ID NO: 3097276 - RNA, 19 nt, Artificial Sequence
  Description of Artificial Sequence: Synthetic oligonucleotide
guauuaaauacagcuagac

SEQ ID NO: 3097277 - RNA, 19 nt, Artificial Sequence
  Description of Artificial Sequence: Synthetic oligonucleotide
uuuauugccaucggugugu

SEQ ID NO: 3097278 - RNA, 19 nt, Artificial Sequence
  Description of Artificial Sequence: Synthetic oligonucleotide
uccuaaaaccaaaccuugc

SEQ ID NO: 3097279 - RNA, 19 nt, Artificial Sequence
  Description of Artificial Sequence: Synthetic oligonucleotide
agcuagacacacuagucca

SEQ ID NO: 3097280 - RNA, 19 nt, Artificial Sequence
  Description of Artificial Sequence: Synthetic oligonucleotide
auuuauugccaucggugug

SEQ ID NO: 3097281 - RNA, 19 nt, Artificial Sequence
  Description of Artificial Sequence: Synthetic oligonucleotide
gaguacuucaguuggcuga

SEQ ID NO: 3097282 - RNA, 19 nt, Artificial Sequence
  Description of Artificial Sequence: Synthetic oligonucleotide
accaaaccuugcugaaugc

SEQ ID NO: 3097283 - RNA, 19 nt, Artificial Sequence
  Description of Artificial Sequence: Synthetic oligonucleotide
agaggguggggugucaacc

SEQ ID NO: 3097284 - RNA, 19 nt, Artificial Sequence
  Description of Artificial Sequence: Synthetic oligonucleotide
cugaaugccgugucaacag

SEQ ID NO: 3097285 - RNA, 19 nt, Artificial Sequence
  Description of Artificial Sequence: Synthetic oligonucleotide
uugagguauuaaauacagc

SEQ ID NO: 3097286 - RNA, 19 nt, Artificial Sequence
  Description of Artificial Sequence: Synthetic oligonucleotide
uguaucacaggcagacgac

SEQ ID NO: 3097287 - RNA, 19 nt, Artificial Sequence
  Description of Artificial Sequence: Synthetic oligonucleotide
agacacacuaguccaaaga

SEQ ID NO: 3097288 - RNA, 19 nt, Artificial Sequence
  Description of Artificial Sequence: Synthetic oligonucleotide
cagcuagacacacuagucc

SEQ ID NO: 3097289 - RNA, 19 nt, Artificial Sequence
  Description of Artificial Sequence: Synthetic oligonucleotide
ggggugucaaccuugacug

SEQ ID NO: 3097290 - RNA, 19 nt, Artificial Sequence
  Description of Artificial Sequence: Synthetic oligonucleotide
uaaauacagcuagacacac

SEQ ID NO: 3097291 - RNA, 19 nt, Artificial Sequence
  Description of Artificial Sequence: Synthetic oligonucleotide
cuuugagguauuaaauaca

SEQ ID NO: 3097292 - RNA, 19 nt, Artificial Sequence
  Description of Artificial Sequence: Synthetic oligonucleotide
cacgaggggauauugugag

SEQ ID NO: 3097293 - RNA, 19 nt, Artificial Sequence
  Description of Artificial Sequence: Synthetic oligonucleotide
gaaugccgugucaacagcg

SEQ ID NO: 3097294 - RNA, 19 nt, Artificial Sequence
  Description of Artificial Sequence: Synthetic oligonucleotide
aagaggguggggugucaac

SEQ ID NO: 3097295 - RNA, 19 nt, Artificial Sequence
  Description of Artificial Sequence: Synthetic oligonucleotide
ugugaguacuucaguuggc

SEQ ID NO: 3097296 - RNA, 19 nt, Artificial Sequence
  Description of Artificial Sequence: Synthetic oligonucleotide
auauugugaguacuucagu

SEQ ID NO: 3097297 - RNA, 19 nt, Artificial Sequence
  Description of Artificial Sequence: Synthetic oligonucleotide
ugaaugccgugucaacagc

SEQ ID NO: 3097298 - RNA, 19 nt, Artificial Sequence
  Description of Artificial Sequence: Synthetic oligonucleotide
cugacuuugagguauuaaa

SEQ ID NO: 3097299 - RNA, 19 nt, Artificial Sequence
  Description of Artificial Sequence: Synthetic oligonucleotide
acagcuagacacacuaguc

SEQ ID NO: 3097300 - RNA, 19 nt, Artificial Sequence
  Description of Artificial Sequence: Synthetic oligonucleotide
cacuaguccaaagagggug

SEQ ID NO: 3097301 - RNA, 19 nt, Artificial Sequence
  Description of Artificial Sequence: Synthetic oligonucleotide
ugaguacuucaguuggcug

SEQ ID NO: 3097302 - RNA, 19 nt, Artificial Sequence
  Description of Artificial Sequence: Synthetic oligonucleotide
uucaguuggcugagggaag

SEQ ID NO: 3097303 - RNA, 19 nt, Artificial Sequence
  Description of Artificial Sequence: Synthetic oligonucleotide
guguaucacaggcagacga

SEQ ID NO: 3097304 - RNA, 19 nt, Artificial Sequence
  Description of Artificial Sequence: Synthetic oligonucleotide
acacacuaguccaaagagg

SEQ ID NO: 3097305 - RNA, 19 nt, Artificial Sequence
  Description of Artificial Sequence: Synthetic oligonucleotide
acuaguccaaagagggugg

SEQ ID NO: 3097306 - RNA, 19 nt, Artificial Sequence
  Description of Artificial Sequence: Synthetic oligonucleotide
ugacugacagagacacgag

SEQ ID NO: 3097307 - RNA, 19 nt, Artificial Sequence
  Description of Artificial Sequence: Synthetic oligonucleotide
uagacacacuaguccaaag

SEQ ID NO: 3097308 - RNA, 19 nt, Artificial Sequence
  Description of Artificial Sequence: Synthetic oligonucleotide
guguguaucacaggcagac

SEQ ID NO: 3097309 - RNA, 19 nt, Artificial Sequence
  Description of Artificial Sequence: Synthetic oligonucleotide
aguacuucaguuggcugag

SEQ ID NO: 3097310 - RNA, 19 nt, Artificial Sequence
  Description of Artificial Sequence: Synthetic oligonucleotide
aaaccuugcugaaugccgu

SEQ ID NO: 3097311 - RNA, 19 nt, Artificial Sequence
  Description of Artificial Sequence: Synthetic oligonucleotide
ugacagagacacgagggga

SEQ ID NO: 3097312 - RNA, 19 nt, Artificial Sequence
  Description of Artificial Sequence: Synthetic oligonucleotide
aguccaaagaggguggggu

SEQ ID NO: 3097313 - RNA, 19 nt, Artificial Sequence
  Description of Artificial Sequence: Synthetic oligonucleotide
uguguaucacaggcagacg

SEQ ID NO: 3097314 - RNA, 19 nt, Artificial Sequence
  Description of Artificial Sequence: Synthetic oligonucleotide
ucggcauccuaaaaccaaa

SEQ ID NO: 3097315 - RNA, 19 nt, Artificial Sequence
  Description of Artificial Sequence: Synthetic oligonucleotide
uugccaucgguguguauca

SEQ ID NO: 3097316 - RNA, 19 nt, Artificial Sequence
  Description of Artificial Sequence: Synthetic oligonucleotide
auccuaaaaccaaaccuug

SEQ ID NO: 3097317 - RNA, 19 nt, Artificial Sequence
  Description of Artificial Sequence: Synthetic oligonucleotide
ccaucggcauccuaaaacc

SEQ ID NO: 3097318 - RNA, 19 nt, Artificial Sequence
  Description of Artificial Sequence: Synthetic oligonucleotide
acuucaguuggcugaggga

SEQ ID NO: 3097319 - RNA, 19 nt, Artificial Sequence
  Description of Artificial Sequence: Synthetic oligonucleotide
ucaguuggcugagggaagc

SEQ ID NO: 3097320 - RNA, 19 nt, Artificial Sequence
  Description of Artificial Sequence: Synthetic oligonucleotide
ucgguguguaucacaggca

SEQ ID NO: 3097321 - RNA, 19 nt, Artificial Sequence
  Description of Artificial Sequence: Synthetic oligonucleotide
ggauauugugaguacuuca

SEQ ID NO: 3097322 - RNA, 19 nt, Artificial Sequence
  Description of Artificial Sequence: Synthetic oligonucleotide
ugccgugucaacagcgcac

SEQ ID NO: 3097323 - RNA, 19 nt, Artificial Sequence
  Description of Artificial Sequence: Synthetic oligonucleotide
ggcauccuaaaaccaaacc

SEQ ID NO: 3097324 - RNA, 19 nt, Artificial Sequence
  Description of Artificial Sequence: Synthetic oligonucleotide
ggccacacugacuuugagg

SEQ ID NO: 3097325 - RNA, 19 nt, Artificial Sequence
  Description of Artificial Sequence: Synthetic oligonucleotide
cuugacugacagagacacg

SEQ ID NO: 3097326 - RNA, 19 nt, Artificial Sequence
  Description of Artificial Sequence: Synthetic oligonucleotide
aaauacagcuagacacacu

SEQ ID NO: 3097327 - RNA, 19 nt, Artificial Sequence
  Description of Artificial Sequence: Synthetic oligonucleotide
gagacacgaggggauauug

SEQ ID NO: 3097328 - RNA, 19 nt, Artificial Sequence
  Description of Artificial Sequence: Synthetic oligonucleotide
aaaccaaaccuugcugaau

SEQ ID NO: 3097329 - RNA, 19 nt, Artificial Sequence
  Description of Artificial Sequence: Synthetic oligonucleotide
gagguauuaaauacagcua

SEQ ID NO: 3097330 - RNA, 19 nt, Artificial Sequence
  Description of Artificial Sequence: Synthetic oligonucleotide
uccaaagaggguggggugu

SEQ ID NO: 3097331 - RNA, 19 nt, Artificial Sequence
  Description of Artificial Sequence: Synthetic oligonucleotide
gaggggauauugugaguac

SEQ ID NO: 3097332 - RNA, 19 nt, Artificial Sequence
  Description of Artificial Sequence: Synthetic oligonucleotide
uaguccaaagagggugggg

SEQ ID NO: 3097333 - RNA, 19 nt, Artificial Sequence
  Description of Artificial Sequence: Synthetic oligonucleotide
cauccuaaaaccaaaccuu

SEQ ID NO: 3097334 - RNA, 19 nt, Artificial Sequence
  Description of Artificial Sequence: Synthetic oligonucleotide
gcauccuaaaaccaaaccu

SEQ ID NO: 3097335 - RNA, 19 nt, Artificial Sequence
  Description of Artificial Sequence: Synthetic oligonucleotide
ugaccaucggcauccuaaa

SEQ ID NO: 3097336 - RNA, 19 nt, Artificial Sequence
  Description of Artificial Sequence: Synthetic oligonucleotide
aucacaggcagacgacaga

SEQ ID NO: 3097337 - RNA, 19 nt, Artificial Sequence
  Description of Artificial Sequence: Synthetic oligonucleotide
aggcagacgacagagggaa

SEQ ID NO: 3097338 - RNA, 19 nt, Artificial Sequence
  Description of Artificial Sequence: Synthetic oligonucleotide
ccuugacugacagagacac

SEQ ID NO: 3097339 - RNA, 19 nt, Artificial Sequence
  Description of Artificial Sequence: Synthetic oligonucleotide
ccaucgguguguaucacag

SEQ ID NO: 3097340 - RNA, 19 nt, Artificial Sequence
  Description of Artificial Sequence: Synthetic oligonucleotide
gggaagaugcaggggaugg

SEQ ID NO: 3097341 - RNA, 19 nt, Artificial Sequence
  Description of Artificial Sequence: Synthetic oligonucleotide
acgcucuugccccaacgug

SEQ ID NO: 3097342 - RNA, 19 nt, Artificial Sequence
  Description of Artificial Sequence: Synthetic oligonucleotide
caucgguguguaucacagg

SEQ ID NO: 3097343 - RNA, 19 nt, Artificial Sequence
  Description of Artificial Sequence: Synthetic oligonucleotide
ugcugaaugccgugucaac

SEQ ID NO: 3097344 - RNA, 19 nt, Artificial Sequence
  Description of Artificial Sequence: Synthetic oligonucleotide
gccacacugacuuugaggu

SEQ ID NO: 3097345 - RNA, 19 nt, Artificial Sequence
  Description of Artificial Sequence: Synthetic oligonucleotide
cuaguccaaagaggguggg

SEQ ID NO: 3097346 - RNA, 19 nt, Artificial Sequence
  Description of Artificial Sequence: Synthetic oligonucleotide
guccaaagaggguggggug

SEQ ID NO: 3097347 - RNA, 19 nt, Artificial Sequence
  Description of Artificial Sequence: Synthetic oligonucleotide
uugcugaaugccgugucaa

SEQ ID NO: 3097348 - RNA, 19 nt, Artificial Sequence
  Description of Artificial Sequence: Synthetic oligonucleotide
gugaccaucggcauccuaa

SEQ ID NO: 3097349 - RNA, 19 nt, Artificial Sequence
  Description of Artificial Sequence: Synthetic oligonucleotide
acugacuuugagguauuaa

SEQ ID NO: 3097350 - RNA, 19 nt, Artificial Sequence
  Description of Artificial Sequence: Synthetic oligonucleotide
aggggauauugugaguacu

SEQ ID NO: 3097351 - RNA, 19 nt, Artificial Sequence
  Description of Artificial Sequence: Synthetic oligonucleotide
aaagaggguggggugucaa

SEQ ID NO: 3097352 - RNA, 19 nt, Artificial Sequence
  Description of Artificial Sequence: Synthetic oligonucleotide
cuugcugaaugccguguca

SEQ ID NO: 3097353 - RNA, 19 nt, Artificial Sequence
  Description of Artificial Sequence: Synthetic oligonucleotide
gguauuaaauacagcuaga

SEQ ID NO: 3097354 - RNA, 19 nt, Artificial Sequence
  Description of Artificial Sequence: Synthetic oligonucleotide
guaucacaggcagacgaca

SEQ ID NO: 3097355 - RNA, 19 nt, Artificial Sequence
  Description of Artificial Sequence: Synthetic oligonucleotide
augccgugucaacagcgca

SEQ ID NO: 3097356 - RNA, 19 nt, Artificial Sequence
  Description of Artificial Sequence: Synthetic oligonucleotide
acacgaggggauauuguga

SEQ ID NO: 3097357 - RNA, 19 nt, Artificial Sequence
  Description of Artificial Sequence: Synthetic oligonucleotide
ggugucaaccuugacugac

SEQ ID NO: 3097358 - RNA, 19 nt, Artificial Sequence
  Description of Artificial Sequence: Synthetic oligonucleotide
caucggcauccuaaaacca

SEQ ID NO: 3097359 - RNA, 19 nt, Artificial Sequence
  Description of Artificial Sequence: Synthetic oligonucleotide
aucggcauccuaaaaccaa

SEQ ID NO: 3097360 - RNA, 19 nt, Artificial Sequence
  Description of Artificial Sequence: Synthetic oligonucleotide
ggggugaccaucggcaucc

SEQ ID NO: 3097361 - RNA, 19 nt, Artificial Sequence
  Description of Artificial Sequence: Synthetic oligonucleotide
agacgacagagggaagaug

SEQ ID NO: 3097362 - RNA, 19 nt, Artificial Sequence
  Description of Artificial Sequence: Synthetic oligonucleotide
agggaagaugcaggggaug

SEQ ID NO: 3097363 - RNA, 19 nt, Artificial Sequence
  Description of Artificial Sequence: Synthetic oligonucleotide
ggaagaugcaggggauggg

SEQ ID NO: 3097364 - RNA, 19 nt, Artificial Sequence
  Description of Artificial Sequence: Synthetic oligonucleotide
cagggccacacugacuuug

SEQ ID NO: 3097365 - RNA, 19 nt, Artificial Sequence
  Description of Artificial Sequence: Synthetic oligonucleotide
ccaaaccuugcugaaugcc

SEQ ID NO: 3097366 - RNA, 19 nt, Artificial Sequence
  Description of Artificial Sequence: Synthetic oligonucleotide
acgaggggauauugugagu

SEQ ID NO: 3097367 - RNA, 19 nt, Artificial Sequence
  Description of Artificial Sequence: Synthetic oligonucleotide
agacacgaggggauauugu

SEQ ID NO: 3097368 - RNA, 19 nt, Artificial Sequence
  Description of Artificial Sequence: Synthetic oligonucleotide
gcugaaugccgugucaaca

SEQ ID NO: 3097369 - RNA, 19 nt, Artificial Sequence
  Description of Artificial Sequence: Synthetic oligonucleotide
cuagacacacuaguccaaa

SEQ ID NO: 3097370 - RNA, 19 nt, Artificial Sequence
  Description of Artificial Sequence: Synthetic oligonucleotide
cgcucuugccccaacgugc

SEQ ID NO: 3097371 - RNA, 19 nt, Artificial Sequence
  Description of Artificial Sequence: Synthetic oligonucleotide
uuauugccaucggugugua

SEQ ID NO: 3097372 - RNA, 19 nt, Artificial Sequence
  Description of Artificial Sequence: Synthetic oligonucleotide
gggauauugugaguacuuc

SEQ ID NO: 3097373 - RNA, 19 nt, Artificial Sequence
  Description of Artificial Sequence: Synthetic oligonucleotide
gucaaccuugacugacaga

SEQ ID NO: 3097374 - RNA, 19 nt, Artificial Sequence
  Description of Artificial Sequence: Synthetic oligonucleotide
cacacugacuuugagguau

SEQ ID NO: 3097375 - RNA, 19 nt, Artificial Sequence
  Description of Artificial Sequence: Synthetic oligonucleotide
accuugcugaaugccgugu

SEQ ID NO: 3097376 - RNA, 19 nt, Artificial Sequence
  Description of Artificial Sequence: Synthetic oligonucleotide
acacuaguccaaagagggu

SEQ ID NO: 3097377 - RNA, 19 nt, Artificial Sequence
  Description of Artificial Sequence: Synthetic oligonucleotide
gugaguacuucaguuggcu

SEQ ID NO: 3097378 - RNA, 19 nt, Artificial Sequence
  Description of Artificial Sequence: Synthetic oligonucleotide
ccuaaaaccaaaccuugcu

SEQ ID NO: 3097379 - RNA, 19 nt, Artificial Sequence
  Description of Artificial Sequence: Synthetic oligonucleotide
accuugacugacagagaca

SEQ ID NO: 3097380 - RNA, 19 nt, Artificial Sequence
  Description of Artificial Sequence: Synthetic oligonucleotide
caggcagacgacagaggga

SEQ ID NO: 3097381 - RNA, 19 nt, Artificial Sequence
  Description of Artificial Sequence: Synthetic oligonucleotide
gaggguggggugucaaccu

SEQ ID NO: 3097382 - RNA, 19 nt, Artificial Sequence
  Description of Artificial Sequence: Synthetic oligonucleotide
guacuucaguuggcugagg

SEQ ID NO: 3097383 - RNA, 19 nt, Artificial Sequence
  Description of Artificial Sequence: Synthetic oligonucleotide
gacagagacacgaggggau

SEQ ID NO: 3097384 - RNA, 19 nt, Artificial Sequence
  Description of Artificial Sequence: Synthetic oligonucleotide
gugucaaccuugacugaca

SEQ ID NO: 3097385 - RNA, 19 nt, Artificial Sequence
  Description of Artificial Sequence: Synthetic oligonucleotide
gaccaucggcauccuaaaa

SEQ ID NO: 3097386 - RNA, 19 nt, Artificial Sequence
  Description of Artificial Sequence: Synthetic oligonucleotide
caaccuugacugacagaga

SEQ ID NO: 3097387 - RNA, 19 nt, Artificial Sequence
  Description of Artificial Sequence: Synthetic oligonucleotide
gcagacgacagagggaaga

SEQ ID NO: 3097388 - RNA, 19 nt, Artificial Sequence
  Description of Artificial Sequence: Synthetic oligonucleotide
caguuggcugagggaagcc

SEQ ID NO: 3097389 - RNA, 19 nt, Artificial Sequence
  Description of Artificial Sequence: Synthetic oligonucleotide
acgacagagggaagaugca

SEQ ID NO: 3097390 - RNA, 19 nt, Artificial Sequence
  Description of Artificial Sequence: Synthetic oligonucleotide
agagacacgaggggauauu

SEQ ID NO: 3097391 - RNA, 19 nt, Artificial Sequence
  Description of Artificial Sequence: Synthetic oligonucleotide
acagagacacgaggggaua

SEQ ID NO: 3097392 - RNA, 19 nt, Artificial Sequence
  Description of Artificial Sequence: Synthetic oligonucleotide
uauugccaucgguguguau

SEQ ID NO: 3097393 - RNA, 19 nt, Artificial Sequence
  Description of Artificial Sequence: Synthetic oligonucleotide
aggguggggugucaaccuu

SEQ ID NO: 3097394 - RNA, 19 nt, Artificial Sequence
  Description of Artificial Sequence: Synthetic oligonucleotide
cucuugccccaacgugccc

SEQ ID NO: 3097395 - RNA, 19 nt, Artificial Sequence
  Description of Artificial Sequence: Synthetic oligonucleotide
gccgugucaacagcgcacc

SEQ ID NO: 3097396 - RNA, 19 nt, Artificial Sequence
  Description of Artificial Sequence: Synthetic oligonucleotide
gcucuugccccaacgugcc

SEQ ID NO: 3097397 - RNA, 19 nt, Artificial Sequence
  Description of Artificial Sequence: Synthetic oligonucleotide
uggcugagggaagccuuaa

SEQ ID NO: 3097398 - RNA, 19 nt, Artificial Sequence
  Description of Artificial Sequence: Synthetic oligonucleotide
ugccaucgguguguaucac

SEQ ID NO: 3097399 - RNA, 19 nt, Artificial Sequence
  Description of Artificial Sequence: Synthetic oligonucleotide
gccaucgguguguaucaca

SEQ ID NO: 3097400 - RNA, 19 nt, Artificial Sequence
  Description of Artificial Sequence: Synthetic oligonucleotide
ccuugcugaaugccguguc

SEQ ID NO: 3097401 - RNA, 19 nt, Artificial Sequence
  Description of Artificial Sequence: Synthetic oligonucleotide
ccacgcucuugccccaacg

SEQ ID NO: 3097402 - RNA, 19 nt, Artificial Sequence
  Description of Artificial Sequence: Synthetic oligonucleotide
cgugucaacagcgcacccc

SEQ ID NO: 3097403 - RNA, 19 nt, Artificial Sequence
  Description of Artificial Sequence: Synthetic oligonucleotide
agggccacacugacuuuga

SEQ ID NO: 3097404 - RNA, 19 nt, Artificial Sequence
  Description of Artificial Sequence: Synthetic oligonucleotide
cgacagagggaagaugcag

SEQ ID NO: 3097405 - RNA, 19 nt, Artificial Sequence
  Description of Artificial Sequence: Synthetic oligonucleotide
ggguggggugucaaccuug

SEQ ID NO: 3097406 - RNA, 19 nt, Artificial Sequence
  Description of Artificial Sequence: Synthetic oligonucleotide
cacgcucuugccccaacgu

SEQ ID NO: 3097407 - RNA, 19 nt, Artificial Sequence
  Description of Artificial Sequence: Synthetic oligonucleotide
gguggggugucaaccuuga

SEQ ID NO: 3097408 - RNA, 19 nt, Artificial Sequence
  Description of Artificial Sequence: Synthetic oligonucleotide
caaagagggugggguguca

SEQ ID NO: 3097409 - RNA, 19 nt, Artificial Sequence
  Description of Artificial Sequence: Synthetic oligonucleotide
cggcauccuaaaaccaaac

SEQ ID NO: 3097410 - RNA, 19 nt, Artificial Sequence
  Description of Artificial Sequence: Synthetic oligonucleotide
gcuagacacacuaguccaa

SEQ ID NO: 3097411 - RNA, 19 nt, Artificial Sequence
  Description of Artificial Sequence: Synthetic oligonucleotide
guuggcugagggaagccuu

SEQ ID NO: 3097412 - RNA, 19 nt, Artificial Sequence
  Description of Artificial Sequence: Synthetic oligonucleotide
gggugucaaccuugacuga

SEQ ID NO: 3097413 - RNA, 19 nt, Artificial Sequence
  Description of Artificial Sequence: Synthetic oligonucleotide
acacugacuuugagguauu

SEQ ID NO: 3097414 - RNA, 19 nt, Artificial Sequence
  Description of Artificial Sequence: Synthetic oligonucleotide
ccaaagagggugggguguc

SEQ ID NO: 3097415 - RNA, 19 nt, Artificial Sequence
  Description of Artificial Sequence: Synthetic oligonucleotide
ggcugagggaagccuuaaa

SEQ ID NO: 3097416 - RNA, 19 nt, Artificial Sequence
  Description of Artificial Sequence: Synthetic oligonucleotide
cgaggggauauugugagua

SEQ ID NO: 3097417 - RNA, 19 nt, Artificial Sequence
  Description of Artificial Sequence: Synthetic oligonucleotide
ggggauauugugaguacuu

SEQ ID NO: 3097418 - RNA, 19 nt, Artificial Sequence
  Description of Artificial Sequence: Synthetic oligonucleotide
ggcagacgacagagggaag

SEQ ID NO: 3097419 - RNA, 19 nt, Artificial Sequence
  Description of Artificial Sequence: Synthetic oligonucleotide
cagacgacagagggaagau

SEQ ID NO: 3097420 - RNA, 19 nt, Artificial Sequence
  Description of Artificial Sequence: Synthetic oligonucleotide
ccgugucaacagcgcaccc

SEQ ID NO: 3097421 - RNA, 19 nt, Artificial Sequence
  Description of Artificial Sequence: Synthetic oligonucleotide
cagagacacgaggggauau

SEQ ID NO: 3097422 - RNA, 19 nt, Artificial Sequence
  Description of Artificial Sequence: Synthetic oligonucleotide
ggugaccaucggcauccua

SEQ ID NO: 3097423 - RNA, 19 nt, Artificial Sequence
  Description of Artificial Sequence: Synthetic oligonucleotide
ccacacugacuuugaggua

SEQ ID NO: 3097424 - RNA, 19 nt, Artificial Sequence
  Description of Artificial Sequence: Synthetic oligonucleotide
cccacgcucuugccccaac

SEQ ID NO: 3097425 - RNA, 19 nt, Artificial Sequence
  Description of Artificial Sequence: Synthetic oligonucleotide
gggugaccaucggcauccu

SEQ ID NO: 3097426 - RNA, 19 nt, Artificial Sequence
  Description of Artificial Sequence: Synthetic oligonucleotide
ccccacgcucuugccccaa

SEQ ID NO: 3097427 - RNA, 19 nt, Artificial Sequence
  Description of Artificial Sequence: Synthetic oligonucleotide
ucugaugucucaaagaucu

SEQ ID NO: 3097428 - RNA, 19 nt, Artificial Sequence
  Description of Artificial Sequence: Synthetic oligonucleotide
ucaaagaucucauaggucu

SEQ ID NO: 3097429 - RNA, 19 nt, Artificial Sequence
  Description of Artificial Sequence: Synthetic oligonucleotide
ugucucaaagaucucauag

SEQ ID NO: 3097430 - RNA, 19 nt, Artificial Sequence
  Description of Artificial Sequence: Synthetic oligonucleotide
uugacuuuggcauaugagc

SEQ ID NO: 3097431 - RNA, 19 nt, Artificial Sequence
  Description of Artificial Sequence: Synthetic oligonucleotide
aaggaauuucuccaggaag

SEQ ID NO: 3097432 - RNA, 19 nt, Artificial Sequence
  Description of Artificial Sequence: Synthetic oligonucleotide
uccaugacaauguagaccu

SEQ ID NO: 3097433 - RNA, 19 nt, Artificial Sequence
  Description of Artificial Sequence: Synthetic oligonucleotide
aauuucuccaggaaguccg

SEQ ID NO: 3097434 - RNA, 19 nt, Artificial Sequence
  Description of Artificial Sequence: Synthetic oligonucleotide
cacguuguaacuuuaggcg

SEQ ID NO: 3097435 - RNA, 19 nt, Artificial Sequence
  Description of Artificial Sequence: Synthetic oligonucleotide
aggucuugacaauagagcg

SEQ ID NO: 3097436 - RNA, 19 nt, Artificial Sequence
  Description of Artificial Sequence: Synthetic oligonucleotide
ugacuuuggcauaugagcc

SEQ ID NO: 3097437 - RNA, 19 nt, Artificial Sequence
  Description of Artificial Sequence: Synthetic oligonucleotide
uuugacuuuggcauaugag

SEQ ID NO: 3097438 - RNA, 19 nt, Artificial Sequence
  Description of Artificial Sequence: Synthetic oligonucleotide
uaacuuuaggcgcucagag

SEQ ID NO: 3097439 - RNA, 19 nt, Artificial Sequence
  Description of Artificial Sequence: Synthetic oligonucleotide
acguuguaacuuuaggcgc

SEQ ID NO: 3097440 - RNA, 19 nt, Artificial Sequence
  Description of Artificial Sequence: Synthetic oligonucleotide
aaguuuacuccccaugaug

SEQ ID NO: 3097441 - RNA, 19 nt, Artificial Sequence
  Description of Artificial Sequence: Synthetic oligonucleotide
uaggucuugacaauagagc

SEQ ID NO: 3097442 - RNA, 19 nt, Artificial Sequence
  Description of Artificial Sequence: Synthetic oligonucleotide
aauagagcggugguuuagc

SEQ ID NO: 3097443 - RNA, 19 nt, Artificial Sequence
  Description of Artificial Sequence: Synthetic oligonucleotide
caugauguagccucgucgc

SEQ ID NO: 3097444 - RNA, 19 nt, Artificial Sequence
  Description of Artificial Sequence: Synthetic oligonucleotide
acaauguagaccuugccau

SEQ ID NO: 3097445 - RNA, 19 nt, Artificial Sequence
  Description of Artificial Sequence: Synthetic oligonucleotide
ucauaggucuugacaauag

SEQ ID NO: 3097446 - RNA, 19 nt, Artificial Sequence
  Description of Artificial Sequence: Synthetic oligonucleotide
aucucauaggucuugacaa

SEQ ID NO: 3097447 - RNA, 19 nt, Artificial Sequence
  Description of Artificial Sequence: Synthetic oligonucleotide
cgaucgaugaucuugaccg

SEQ ID NO: 3097448 - RNA, 19 nt, Artificial Sequence
  Description of Artificial Sequence: Synthetic oligonucleotide
agagcggugguuuagcaug

SEQ ID NO: 3097449 - RNA, 19 nt, Artificial Sequence
  Description of Artificial Sequence: Synthetic oligonucleotide
gacaauguagaccuugcca

SEQ ID NO: 3097450 - RNA, 19 nt, Artificial Sequence
  Description of Artificial Sequence: Synthetic oligonucleotide
aggaucucaaucuccgggg

SEQ ID NO: 3097451 - RNA, 19 nt, Artificial Sequence
  Description of Artificial Sequence: Synthetic oligonucleotide
uggcauaugagcccucucc

SEQ ID NO: 3097452 - RNA, 19 nt, Artificial Sequence
  Description of Artificial Sequence: Synthetic oligonucleotide
aggaggucacccuggaccc

SEQ ID NO: 3097453 - RNA, 19 nt, Artificial Sequence
  Description of Artificial Sequence: Synthetic oligonucleotide
acuuuaggcgcucagagua

SEQ ID NO: 3097454 - RNA, 19 nt, Artificial Sequence
  Description of Artificial Sequence: Synthetic oligonucleotide
uguaacuuuaggcgcucag

SEQ ID NO: 3097455 - RNA, 19 nt, Artificial Sequence
  Description of Artificial Sequence: Synthetic oligonucleotide
cuugacaauagagcggugg

SEQ ID NO: 3097456 - RNA, 19 nt, Artificial Sequence
  Description of Artificial Sequence: Synthetic oligonucleotide
uucuccaggaaguccgugg

SEQ ID NO: 3097457 - RNA, 19 nt, Artificial Sequence
  Description of Artificial Sequence: Synthetic oligonucleotide
gaucucauaggucuugaca

SEQ ID NO: 3097458 - RNA, 19 nt, Artificial Sequence
  Description of Artificial Sequence: Synthetic oligonucleotide
caggaggucacccuggacc

SEQ ID NO: 3097459 - RNA, 19 nt, Artificial Sequence
  Description of Artificial Sequence: Synthetic oligonucleotide
auaggucuugacaauagag

SEQ ID NO: 3097460 - RNA, 19 nt, Artificial Sequence
  Description of Artificial Sequence: Synthetic oligonucleotide
gaugaauuccaggagguca

SEQ ID NO: 3097461 - RNA, 19 nt, Artificial Sequence
  Description of Artificial Sequence: Synthetic oligonucleotide
aauuccaggaggucacccu

SEQ ID NO: 3097462 - RNA, 19 nt, Artificial Sequence
  Description of Artificial Sequence: Synthetic oligonucleotide
aauguagaccuugccaucu

SEQ ID NO: 3097463 - RNA, 19 nt, Artificial Sequence
  Description of Artificial Sequence: Synthetic oligonucleotide
gaucuugaccgccacguug

SEQ ID NO: 3097464 - RNA, 19 nt, Artificial Sequence
  Description of Artificial Sequence: Synthetic oligonucleotide
auggccaggaucucaaucu

SEQ ID NO: 3097465 - RNA, 19 nt, Artificial Sequence
  Description of Artificial Sequence: Synthetic oligonucleotide
ugaugucucaaagaucuca

SEQ ID NO: 3097466 - RNA, 19 nt, Artificial Sequence
  Description of Artificial Sequence: Synthetic oligonucleotide
cuugcgaucgaugaucuug

SEQ ID NO: 3097467 - RNA, 19 nt, Artificial Sequence
  Description of Artificial Sequence: Synthetic oligonucleotide
uugaccgccacguuguaac

SEQ ID NO: 3097468 - RNA, 19 nt, Artificial Sequence
  Description of Artificial Sequence: Synthetic oligonucleotide
aaagaucucauaggucuug

SEQ ID NO: 3097469 - RNA, 19 nt, Artificial Sequence
  Description of Artificial Sequence: Synthetic oligonucleotide
caggaucucaaucuccggg

SEQ ID NO: 3097470 - RNA, 19 nt, Artificial Sequence
  Description of Artificial Sequence: Synthetic oligonucleotide
gacuuuggcauaugagccc

SEQ ID NO: 3097471 - RNA, 19 nt, Artificial Sequence
  Description of Artificial Sequence: Synthetic oligonucleotide
aacuuuaggcgcucagagu

SEQ ID NO: 3097472 - RNA, 19 nt, Artificial Sequence
  Description of Artificial Sequence: Synthetic oligonucleotide
gaugaucuugaccgccacg

SEQ ID NO: 3097473 - RNA, 19 nt, Artificial Sequence
  Description of Artificial Sequence: Synthetic oligonucleotide
augacaauguagaccuugc

SEQ ID NO: 3097474 - RNA, 19 nt, Artificial Sequence
  Description of Artificial Sequence: Synthetic oligonucleotide
aucgaugaucuugaccgcc

SEQ ID NO: 3097475 - RNA, 19 nt, Artificial Sequence
  Description of Artificial Sequence: Synthetic oligonucleotide
uuucuugcgaucgaugauc

SEQ ID NO: 3097476 - RNA, 19 nt, Artificial Sequence
  Description of Artificial Sequence: Synthetic oligonucleotide
auuugacuuuggcauauga

SEQ ID NO: 3097477 - RNA, 19 nt, Artificial Sequence
  Description of Artificial Sequence: Synthetic oligonucleotide
ugacaauguagaccuugcc

SEQ ID NO: 3097478 - RNA, 19 nt, Artificial Sequence
  Description of Artificial Sequence: Synthetic oligonucleotide
aguuuacuccccaugaugu

SEQ ID NO: 3097479 - RNA, 19 nt, Artificial Sequence
  Description of Artificial Sequence: Synthetic oligonucleotide
augaauuccaggaggucac

SEQ ID NO: 3097480 - RNA, 19 nt, Artificial Sequence
  Description of Artificial Sequence: Synthetic oligonucleotide
agaguaggcggauuugacu

SEQ ID NO: 3097481 - RNA, 19 nt, Artificial Sequence
  Description of Artificial Sequence: Synthetic oligonucleotide
gauguagccucgucgcuug

SEQ ID NO: 3097482 - RNA, 19 nt, Artificial Sequence
  Description of Artificial Sequence: Synthetic oligonucleotide
uuuaggcgcucagaguagg

SEQ ID NO: 3097483 - RNA, 19 nt, Artificial Sequence
  Description of Artificial Sequence: Synthetic oligonucleotide
uugcgaucgaugaucuuga

SEQ ID NO: 3097484 - RNA, 19 nt, Artificial Sequence
  Description of Artificial Sequence: Synthetic oligonucleotide
gaauuucuccaggaagucc

SEQ ID NO: 3097485 - RNA, 19 nt, Artificial Sequence
  Description of Artificial Sequence: Synthetic oligonucleotide
agcuccaugacaauguaga

SEQ ID NO: 3097486 - RNA, 19 nt, Artificial Sequence
  Description of Artificial Sequence: Synthetic oligonucleotide
cuccccaugauguagccuc

SEQ ID NO: 3097487 - RNA, 19 nt, Artificial Sequence
  Description of Artificial Sequence: Synthetic oligonucleotide
agaucucauaggucuugac

SEQ ID NO: 3097488 - RNA, 19 nt, Artificial Sequence
  Description of Artificial Sequence: Synthetic oligonucleotide
aggaauuucuccaggaagu

SEQ ID NO: 3097489 - RNA, 19 nt, Artificial Sequence
  Description of Artificial Sequence: Synthetic oligonucleotide
ucacccuggaccccaagcu

SEQ ID NO: 3097490 - RNA, 19 nt, Artificial Sequence
  Description of Artificial Sequence: Synthetic oligonucleotide
uagaccuugccaucugaug

SEQ ID NO: 3097491 - RNA, 19 nt, Artificial Sequence
  Description of Artificial Sequence: Synthetic oligonucleotide
uguagaccuugccaucuga

SEQ ID NO: 3097492 - RNA, 19 nt, Artificial Sequence
  Description of Artificial Sequence: Synthetic oligonucleotide
uucuugcgaucgaugaucu

SEQ ID NO: 3097493 - RNA, 19 nt, Artificial Sequence
  Description of Artificial Sequence: Synthetic oligonucleotide
aggcggauuugacuuuggc

SEQ ID NO: 3097494 - RNA, 19 nt, Artificial Sequence
  Description of Artificial Sequence: Synthetic oligonucleotide
ucucccaaguuuacucccc

SEQ ID NO: 3097495 - RNA, 19 nt, Artificial Sequence
  Description of Artificial Sequence: Synthetic oligonucleotide
cucaaagaucucauagguc

SEQ ID NO: 3097496 - RNA, 19 nt, Artificial Sequence
  Description of Artificial Sequence: Synthetic oligonucleotide
aggcgcucagaguaggcgg

SEQ ID NO: 3097497 - RNA, 19 nt, Artificial Sequence
  Description of Artificial Sequence: Synthetic oligonucleotide
ggugguuuagcauggccag

SEQ ID NO: 3097498 - RNA, 19 nt, Artificial Sequence
  Description of Artificial Sequence: Synthetic oligonucleotide
auuccaggaggucacccug

SEQ ID NO: 3097499 - RNA, 19 nt, Artificial Sequence
  Description of Artificial Sequence: Synthetic oligonucleotide
augaucuugaccgccacgu

SEQ ID NO: 3097500 - RNA, 19 nt, Artificial Sequence
  Description of Artificial Sequence: Synthetic oligonucleotide
guagccucgucgcuugagg

SEQ ID NO: 3097501 - RNA, 19 nt, Artificial Sequence
  Description of Artificial Sequence: Synthetic oligonucleotide
ucagaguaggcggauuuga

SEQ ID NO: 3097502 - RNA, 19 nt, Artificial Sequence
  Description of Artificial Sequence: Synthetic oligonucleotide
ucgaugaucuugaccgcca

SEQ ID NO: 3097503 - RNA, 19 nt, Artificial Sequence
  Description of Artificial Sequence: Synthetic oligonucleotide
ccacguuguaacuuuaggc

SEQ ID NO: 3097504 - RNA, 19 nt, Artificial Sequence
  Description of Artificial Sequence: Synthetic oligonucleotide
ucucaaucuccggggaagg

SEQ ID NO: 3097505 - RNA, 19 nt, Artificial Sequence
  Description of Artificial Sequence: Synthetic oligonucleotide
uggaccccaagcuccauga

SEQ ID NO: 3097506 - RNA, 19 nt, Artificial Sequence
  Description of Artificial Sequence: Synthetic oligonucleotide
ugguuuagcauggccagga

SEQ ID NO: 3097507 - RNA, 19 nt, Artificial Sequence
  Description of Artificial Sequence: Synthetic oligonucleotide
aucucaaucuccggggaag

SEQ ID NO: 3097508 - RNA, 19 nt, Artificial Sequence
  Description of Artificial Sequence: Synthetic oligonucleotide
gaaggaauuucuccaggaa

SEQ ID NO: 3097509 - RNA, 19 nt, Artificial Sequence
  Description of Artificial Sequence: Synthetic oligonucleotide
auaugagcccucucccaag

SEQ ID NO: 3097510 - RNA, 19 nt, Artificial Sequence
  Description of Artificial Sequence: Synthetic oligonucleotide
cucucccaaguuuacuccc

SEQ ID NO: 3097511 - RNA, 19 nt, Artificial Sequence
  Description of Artificial Sequence: Synthetic oligonucleotide
uaugagcccucucccaagu

SEQ ID NO: 3097512 - RNA, 19 nt, Artificial Sequence
  Description of Artificial Sequence: Synthetic oligonucleotide
uaggcgcucagaguaggcg

SEQ ID NO: 3097513 - RNA, 19 nt, Artificial Sequence
  Description of Artificial Sequence: Synthetic oligonucleotide
cuuuaggcgcucagaguag

SEQ ID NO: 3097514 - RNA, 19 nt, Artificial Sequence
  Description of Artificial Sequence: Synthetic oligonucleotide
agccucgucgcuugaggac

SEQ ID NO: 3097515 - RNA, 19 nt, Artificial Sequence
  Description of Artificial Sequence: Synthetic oligonucleotide
gaucgaugaucuugaccgc

SEQ ID NO: 3097516 - RNA, 19 nt, Artificial Sequence
  Description of Artificial Sequence: Synthetic oligonucleotide
acccuggaccccaagcucc

SEQ ID NO: 3097517 - RNA, 19 nt, Artificial Sequence
  Description of Artificial Sequence: Synthetic oligonucleotide
aagaucucauaggucuuga

SEQ ID NO: 3097518 - RNA, 19 nt, Artificial Sequence
  Description of Artificial Sequence: Synthetic oligonucleotide
gaauuccaggaggucaccc

SEQ ID NO: 3097519 - RNA, 19 nt, Artificial Sequence
  Description of Artificial Sequence: Synthetic oligonucleotide
guuuagcauggccaggauc

SEQ ID NO: 3097520 - RNA, 19 nt, Artificial Sequence
  Description of Artificial Sequence: Synthetic oligonucleotide
uuaggcgcucagaguaggc

SEQ ID NO: 3097521 - RNA, 19 nt, Artificial Sequence
  Description of Artificial Sequence: Synthetic oligonucleotide
aucugaugucucaaagauc

SEQ ID NO: 3097522 - RNA, 19 nt, Artificial Sequence
  Description of Artificial Sequence: Synthetic oligonucleotide
aagcuccaugacaauguag

SEQ ID NO: 3097523 - RNA, 19 nt, Artificial Sequence
  Description of Artificial Sequence: Synthetic oligonucleotide
uccccaugauguagccucg

SEQ ID NO: 3097524 - RNA, 19 nt, Artificial Sequence
  Description of Artificial Sequence: Synthetic oligonucleotide
ucucauaggucuugacaau

SEQ ID NO: 3097525 - RNA, 19 nt, Artificial Sequence
  Description of Artificial Sequence: Synthetic oligonucleotide
ccaugauguagccucgucg

SEQ ID NO: 3097526 - RNA, 19 nt, Artificial Sequence
  Description of Artificial Sequence: Synthetic oligonucleotide
auagagcggugguuuagca

SEQ ID NO: 3097527 - RNA, 19 nt, Artificial Sequence
  Description of Artificial Sequence: Synthetic oligonucleotide
ggucuugacaauagagcgg

SEQ ID NO: 3097528 - RNA, 19 nt, Artificial Sequence
  Description of Artificial Sequence: Synthetic oligonucleotide
uuuggcauaugagcccucu

SEQ ID NO: 3097529 - RNA, 19 nt, Artificial Sequence
  Description of Artificial Sequence: Synthetic oligonucleotide
ugagcccucucccaaguuu

SEQ ID NO: 3097530 - RNA, 19 nt, Artificial Sequence
  Description of Artificial Sequence: Synthetic oligonucleotide
acuuuggcauaugagcccu

SEQ ID NO: 3097531 - RNA, 19 nt, Artificial Sequence
  Description of Artificial Sequence: Synthetic oligonucleotide
gggaaggaauuucuccagg

SEQ ID NO: 3097532 - RNA, 19 nt, Artificial Sequence
  Description of Artificial Sequence: Synthetic oligonucleotide
uaggcggauuugacuuugg

SEQ ID NO: 3097533 - RNA, 19 nt, Artificial Sequence
  Description of Artificial Sequence: Synthetic oligonucleotide
ggcauaugagcccucuccc

SEQ ID NO: 3097534 - RNA, 19 nt, Artificial Sequence
  Description of Artificial Sequence: Synthetic oligonucleotide
cauggccaggaucucaauc

SEQ ID NO: 3097535 - RNA, 19 nt, Artificial Sequence
  Description of Artificial Sequence: Synthetic oligonucleotide
gaccccaagcuccaugaca

SEQ ID NO: 3097536 - RNA, 19 nt, Artificial Sequence
  Description of Artificial Sequence: Synthetic oligonucleotide
cagaguaggcggauuugac

SEQ ID NO: 3097537 - RNA, 19 nt, Artificial Sequence
  Description of Artificial Sequence: Synthetic oligonucleotide
cuugccaucugaugucuca

SEQ ID NO: 3097538 - RNA, 19 nt, Artificial Sequence
  Description of Artificial Sequence: Synthetic oligonucleotide
gaguaggcggauuugacuu

SEQ ID NO: 3097539 - RNA, 19 nt, Artificial Sequence
  Description of Artificial Sequence: Synthetic oligonucleotide
gccacguuguaacuuuagg

SEQ ID NO: 3097540 - RNA, 19 nt, Artificial Sequence
  Description of Artificial Sequence: Synthetic oligonucleotide
guaacuuuaggcgcucaga

SEQ ID NO: 3097541 - RNA, 19 nt, Artificial Sequence
  Description of Artificial Sequence: Synthetic oligonucleotide
gccaucugaugucucaaag

SEQ ID NO: 3097542 - RNA, 19 nt, Artificial Sequence
  Description of Artificial Sequence: Synthetic oligonucleotide
gucacccuggaccccaagc

SEQ ID NO: 3097543 - RNA, 19 nt, Artificial Sequence
  Description of Artificial Sequence: Synthetic oligonucleotide
caucugaugucucaaagau

SEQ ID NO: 3097544 - RNA, 19 nt, Artificial Sequence
  Description of Artificial Sequence: Synthetic oligonucleotide
caauagagcggugguuuag

SEQ ID NO: 3097545 - RNA, 19 nt, Artificial Sequence
  Description of Artificial Sequence: Synthetic oligonucleotide
ggaaggaauuucuccagga

SEQ ID NO: 3097546 - RNA, 19 nt, Artificial Sequence
  Description of Artificial Sequence: Synthetic oligonucleotide
aucuugaccgccacguugu

SEQ ID NO: 3097547 - RNA, 19 nt, Artificial Sequence
  Description of Artificial Sequence: Synthetic oligonucleotide
uacuccccaugauguagcc

SEQ ID NO: 3097548 - RNA, 19 nt, Artificial Sequence
  Description of Artificial Sequence: Synthetic oligonucleotide
uagagcggugguuuagcau

SEQ ID NO: 3097549 - RNA, 19 nt, Artificial Sequence
  Description of Artificial Sequence: Synthetic oligonucleotide
uguagccucgucgcuugag

SEQ ID NO: 3097550 - RNA, 19 nt, Artificial Sequence
  Description of Artificial Sequence: Synthetic oligonucleotide
ucuugacaauagagcggug

SEQ ID NO: 3097551 - RNA, 19 nt, Artificial Sequence
  Description of Artificial Sequence: Synthetic oligonucleotide
ggggaaggaauuucuccag

SEQ ID NO: 3097552 - RNA, 19 nt, Artificial Sequence
  Description of Artificial Sequence: Synthetic oligonucleotide
cauaggucuugacaauaga

SEQ ID NO: 3097553 - RNA, 19 nt, Artificial Sequence
  Description of Artificial Sequence: Synthetic oligonucleotide
augauguagccucgucgcu

SEQ ID NO: 3097554 - RNA, 19 nt, Artificial Sequence
  Description of Artificial Sequence: Synthetic oligonucleotide
gagcggugguuuagcaugg

SEQ ID NO: 3097555 - RNA, 19 nt, Artificial Sequence
  Description of Artificial Sequence: Synthetic oligonucleotide
gccaggaucucaaucuccg

SEQ ID NO: 3097556 - RNA, 19 nt, Artificial Sequence
  Description of Artificial Sequence: Synthetic oligonucleotide
uccaggaggucacccugga

SEQ ID NO: 3097557 - RNA, 19 nt, Artificial Sequence
  Description of Artificial Sequence: Synthetic oligonucleotide
auguagaccuugccaucug

SEQ ID NO: 3097558 - RNA, 19 nt, Artificial Sequence
  Description of Artificial Sequence: Synthetic oligonucleotide
uccggggaaggaauuucuc

SEQ ID NO: 3097559 - RNA, 19 nt, Artificial Sequence
  Description of Artificial Sequence: Synthetic oligonucleotide
cauaugagcccucucccaa

SEQ ID NO: 3097560 - RNA, 19 nt, Artificial Sequence
  Description of Artificial Sequence: Synthetic oligonucleotide
ggcggauuugacuuuggca

SEQ ID NO: 3097561 - RNA, 19 nt, Artificial Sequence
  Description of Artificial Sequence: Synthetic oligonucleotide
gucgcuugaggacggcagc

SEQ ID NO: 3097562 - RNA, 19 nt, Artificial Sequence
  Description of Artificial Sequence: Synthetic oligonucleotide
acaauagagcggugguuua

SEQ ID NO: 3097563 - RNA, 19 nt, Artificial Sequence
  Description of Artificial Sequence: Synthetic oligonucleotide
gucuugacaauagagcggu

SEQ ID NO: 3097564 - RNA, 19 nt, Artificial Sequence
  Description of Artificial Sequence: Synthetic oligonucleotide
uggccaggaucucaaucuc

SEQ ID NO: 3097565 - RNA, 19 nt, Artificial Sequence
  Description of Artificial Sequence: Synthetic oligonucleotide
gcggauuugacuuuggcau

SEQ ID NO: 3097566 - RNA, 19 nt, Artificial Sequence
  Description of Artificial Sequence: Synthetic oligonucleotide
gacaauagagcggugguuu

SEQ ID NO: 3097567 - RNA, 19 nt, Artificial Sequence
  Description of Artificial Sequence: Synthetic oligonucleotide
ugauguagccucgucgcuu

SEQ ID NO: 3097568 - RNA, 19 nt, Artificial Sequence
  Description of Artificial Sequence: Synthetic oligonucleotide
gaucucaaucuccggggaa

SEQ ID NO: 3097569 - RNA, 19 nt, Artificial Sequence
  Description of Artificial Sequence: Synthetic oligonucleotide
gauuugacuuuggcauaug

SEQ ID NO: 3097570 - RNA, 19 nt, Artificial Sequence
  Description of Artificial Sequence: Synthetic oligonucleotide
guaggcggauuugacuuug

SEQ ID NO: 3097571 - RNA, 19 nt, Artificial Sequence
  Description of Artificial Sequence: Synthetic oligonucleotide
accccaagcuccaugacaa

SEQ ID NO: 3097572 - RNA, 19 nt, Artificial Sequence
  Description of Artificial Sequence: Synthetic oligonucleotide
gcgaucgaugaucuugacc

SEQ ID NO: 3097573 - RNA, 19 nt, Artificial Sequence
  Description of Artificial Sequence: Synthetic oligonucleotide
uuggcauaugagcccucuc

SEQ ID NO: 3097574 - RNA, 19 nt, Artificial Sequence
  Description of Artificial Sequence: Synthetic oligonucleotide
ugacaauagagcggugguu

SEQ ID NO: 3097575 - RNA, 19 nt, Artificial Sequence
  Description of Artificial Sequence: Synthetic oligonucleotide
ugccaucugaugucucaaa

SEQ ID NO: 3097576 - RNA, 19 nt, Artificial Sequence
  Description of Artificial Sequence: Synthetic oligonucleotide
ccggggaaggaauuucucc

SEQ ID NO: 3097577 - RNA, 19 nt, Artificial Sequence
  Description of Artificial Sequence: Synthetic oligonucleotide
ucuccggggaaggaauuuc

SEQ ID NO: 3097578 - RNA, 19 nt, Artificial Sequence
  Description of Artificial Sequence: Synthetic oligonucleotide
accgccacguuguaacuuu

SEQ ID NO: 3097579 - RNA, 19 nt, Artificial Sequence
  Description of Artificial Sequence: Synthetic oligonucleotide
gaugucucaaagaucucau

SEQ ID NO: 3097580 - RNA, 19 nt, Artificial Sequence
  Description of Artificial Sequence: Synthetic oligonucleotide
augucucaaagaucucaua

SEQ ID NO: 3097581 - RNA, 19 nt, Artificial Sequence
  Description of Artificial Sequence: Synthetic oligonucleotide
gugguuuagcauggccagg

SEQ ID NO: 3097582 - RNA, 19 nt, Artificial Sequence
  Description of Artificial Sequence: Synthetic oligonucleotide
cucagaguaggcggauuug

SEQ ID NO: 3097583 - RNA, 19 nt, Artificial Sequence
  Description of Artificial Sequence: Synthetic oligonucleotide
aguaggcggauuugacuuu

SEQ ID NO: 3097584 - RNA, 19 nt, Artificial Sequence
  Description of Artificial Sequence: Synthetic oligonucleotide
ccaaguuuacuccccauga

SEQ ID NO: 3097585 - RNA, 19 nt, Artificial Sequence
  Description of Artificial Sequence: Synthetic oligonucleotide
ccucucccaaguuuacucc

SEQ ID NO: 3097586 - RNA, 19 nt, Artificial Sequence
  Description of Artificial Sequence: Synthetic oligonucleotide
uagcauggccaggaucuca

SEQ ID NO: 3097587 - RNA, 19 nt, Artificial Sequence
  Description of Artificial Sequence: Synthetic oligonucleotide
uugccaucugaugucucaa

SEQ ID NO: 3097588 - RNA, 19 nt, Artificial Sequence
  Description of Artificial Sequence: Synthetic oligonucleotide
ugaccgccacguuguaacu

SEQ ID NO: 3097589 - RNA, 19 nt, Artificial Sequence
  Description of Artificial Sequence: Synthetic oligonucleotide
gccucgucgcuugaggacg

SEQ ID NO: 3097590 - RNA, 19 nt, Artificial Sequence
  Description of Artificial Sequence: Synthetic oligonucleotide
ugcgaucgaugaucuugac

SEQ ID NO: 3097591 - RNA, 19 nt, Artificial Sequence
  Description of Artificial Sequence: Synthetic oligonucleotide
cugaugucucaaagaucuc

SEQ ID NO: 3097592 - RNA, 19 nt, Artificial Sequence
  Description of Artificial Sequence: Synthetic oligonucleotide
cuggaccccaagcuccaug

SEQ ID NO: 3097593 - RNA, 19 nt, Artificial Sequence
  Description of Artificial Sequence: Synthetic oligonucleotide
agcggugguuuagcauggc

SEQ ID NO: 3097594 - RNA, 19 nt, Artificial Sequence
  Description of Artificial Sequence: Synthetic oligonucleotide
guuuacuccccaugaugua

SEQ ID NO: 3097595 - RNA, 19 nt, Artificial Sequence
  Description of Artificial Sequence: Synthetic oligonucleotide
guuguaacuuuaggcgcuc

SEQ ID NO: 3097596 - RNA, 19 nt, Artificial Sequence
  Description of Artificial Sequence: Synthetic oligonucleotide
ggaauuucuccaggaaguc

SEQ ID NO: 3097597 - RNA, 19 nt, Artificial Sequence
  Description of Artificial Sequence: Synthetic oligonucleotide
cacccuggaccccaagcuc

SEQ ID NO: 3097598 - RNA, 19 nt, Artificial Sequence
  Description of Artificial Sequence: Synthetic oligonucleotide
ccaucugaugucucaaaga

SEQ ID NO: 3097599 - RNA, 19 nt, Artificial Sequence
  Description of Artificial Sequence: Synthetic oligonucleotide
cucauaggucuugacaaua

SEQ ID NO: 3097600 - RNA, 19 nt, Artificial Sequence
  Description of Artificial Sequence: Synthetic oligonucleotide
cccucucccaaguuuacuc

SEQ ID NO: 3097601 - RNA, 19 nt, Artificial Sequence
  Description of Artificial Sequence: Synthetic oligonucleotide
uuagcauggccaggaucuc

SEQ ID NO: 3097602 - RNA, 19 nt, Artificial Sequence
  Description of Artificial Sequence: Synthetic oligonucleotide
aaucuccggggaaggaauu

SEQ ID NO: 3097603 - RNA, 19 nt, Artificial Sequence
  Description of Artificial Sequence: Synthetic oligonucleotide
ggaucucaaucuccgggga

SEQ ID NO: 3097604 - RNA, 19 nt, Artificial Sequence
  Description of Artificial Sequence: Synthetic oligonucleotide
agcauggccaggaucucaa

SEQ ID NO: 3097605 - RNA, 19 nt, Artificial Sequence
  Description of Artificial Sequence: Synthetic oligonucleotide
gaggucacccuggacccca

SEQ ID NO: 3097606 - RNA, 19 nt, Artificial Sequence
  Description of Artificial Sequence: Synthetic oligonucleotide
ucgucgcuugaggacggca

SEQ ID NO: 3097607 - RNA, 19 nt, Artificial Sequence
  Description of Artificial Sequence: Synthetic oligonucleotide
ccaggaucucaaucuccgg

SEQ ID NO: 3097608 - RNA, 19 nt, Artificial Sequence
  Description of Artificial Sequence: Synthetic oligonucleotide
gcauaugagcccucuccca

SEQ ID NO: 3097609 - RNA, 19 nt, Artificial Sequence
  Description of Artificial Sequence: Synthetic oligonucleotide
cuuuggcauaugagcccuc

SEQ ID NO: 3097610 - RNA, 19 nt, Artificial Sequence
  Description of Artificial Sequence: Synthetic oligonucleotide
auuucuccaggaaguccgu

SEQ ID NO: 3097611 - RNA, 19 nt, Artificial Sequence
  Description of Artificial Sequence: Synthetic oligonucleotide
agcccucucccaaguuuac

SEQ ID NO: 3097612 - RNA, 19 nt, Artificial Sequence
  Description of Artificial Sequence: Synthetic oligonucleotide
cucccaaguuuacucccca

SEQ ID NO: 3097613 - RNA, 19 nt, Artificial Sequence
  Description of Artificial Sequence: Synthetic oligonucleotide
gcggugguuuagcauggcc

SEQ ID NO: 3097614 - RNA, 19 nt, Artificial Sequence
  Description of Artificial Sequence: Synthetic oligonucleotide
ucuugaccgccacguugua

SEQ ID NO: 3097615 - RNA, 19 nt, Artificial Sequence
  Description of Artificial Sequence: Synthetic oligonucleotide
gagcccucucccaaguuua

SEQ ID NO: 3097616 - RNA, 19 nt, Artificial Sequence
  Description of Artificial Sequence: Synthetic oligonucleotide
caagcuccaugacaaugua

SEQ ID NO: 3097617 - RNA, 19 nt, Artificial Sequence
  Description of Artificial Sequence: Synthetic oligonucleotide
ucuugcgaucgaugaucuu

SEQ ID NO: 3097618 - RNA, 19 nt, Artificial Sequence
  Description of Artificial Sequence: Synthetic oligonucleotide
acuccccaugauguagccu

SEQ ID NO: 3097619 - RNA, 19 nt, Artificial Sequence
  Description of Artificial Sequence: Synthetic oligonucleotide
cccaagcuccaugacaaug

SEQ ID NO: 3097620 - RNA, 19 nt, Artificial Sequence
  Description of Artificial Sequence: Synthetic oligonucleotide
cuuucuugcgaucgaugau

SEQ ID NO: 3097621 - RNA, 19 nt, Artificial Sequence
  Description of Artificial Sequence: Synthetic oligonucleotide
caaguuuacuccccaugau

SEQ ID NO: 3097622 - RNA, 19 nt, Artificial Sequence
  Description of Artificial Sequence: Synthetic oligonucleotide
ggccaggaucucaaucucc

SEQ ID NO: 3097623 - RNA, 19 nt, Artificial Sequence
  Description of Artificial Sequence: Synthetic oligonucleotide
cgucgcuugaggacggcag

SEQ ID NO: 3097624 - RNA, 19 nt, Artificial Sequence
  Description of Artificial Sequence: Synthetic oligonucleotide
ccaagcuccaugacaaugu

SEQ ID NO: 3097625 - RNA, 19 nt, Artificial Sequence
  Description of Artificial Sequence: Synthetic oligonucleotide
augagcccucucccaaguu

SEQ ID NO: 3097626 - RNA, 19 nt, Artificial Sequence
  Description of Artificial Sequence: Synthetic oligonucleotide
aucuccggggaaggaauuu

SEQ ID NO: 3097627 - RNA, 19 nt, Artificial Sequence
  Description of Artificial Sequence: Synthetic oligonucleotide
cggggaaggaauuucucca

SEQ ID NO: 3097628 - RNA, 19 nt, Artificial Sequence
  Description of Artificial Sequence: Synthetic oligonucleotide
cggugguuuagcauggcca

SEQ ID NO: 3097629 - RNA, 19 nt, Artificial Sequence
  Description of Artificial Sequence: Synthetic oligonucleotide
auguagccucgucgcuuga

SEQ ID NO: 3097630 - RNA, 19 nt, Artificial Sequence
  Description of Artificial Sequence: Synthetic oligonucleotide
cuccggggaaggaauuucu

SEQ ID NO: 3097631 - RNA, 19 nt, Artificial Sequence
  Description of Artificial Sequence: Synthetic oligonucleotide
ccucgucgcuugaggacgg

SEQ ID NO: 3097632 - RNA, 19 nt, Artificial Sequence
  Description of Artificial Sequence: Synthetic oligonucleotide
guagaccuugccaucugau

SEQ ID NO: 3097633 - RNA, 19 nt, Artificial Sequence
  Description of Artificial Sequence: Synthetic oligonucleotide
cuugaccgccacguuguaa

SEQ ID NO: 3097634 - RNA, 19 nt, Artificial Sequence
  Description of Artificial Sequence: Synthetic oligonucleotide
ggauuugacuuuggcauau

SEQ ID NO: 3097635 - RNA, 19 nt, Artificial Sequence
  Description of Artificial Sequence: Synthetic oligonucleotide
ggggcuuucuugcgaucga

SEQ ID NO: 3097636 - RNA, 19 nt, Artificial Sequence
  Description of Artificial Sequence: Synthetic oligonucleotide
cccaugauguagccucguc

SEQ ID NO: 3097637 - RNA, 19 nt, Artificial Sequence
  Description of Artificial Sequence: Synthetic oligonucleotide
ggaccccaagcuccaugac

SEQ ID NO: 3097638 - RNA, 19 nt, Artificial Sequence
  Description of Artificial Sequence: Synthetic oligonucleotide
cucgucgcuugaggacggc

SEQ ID NO: 3097639 - RNA, 19 nt, Artificial Sequence
  Description of Artificial Sequence: Synthetic oligonucleotide
ggucacccuggaccccaag

SEQ ID NO: 3097640 - RNA, 19 nt, Artificial Sequence
  Description of Artificial Sequence: Synthetic oligonucleotide
cgccacguuguaacuuuag

SEQ ID NO: 3097641 - RNA, 19 nt, Artificial Sequence
  Description of Artificial Sequence: Synthetic oligonucleotide
ggcgcucagaguaggcgga

SEQ ID NO: 3097642 - RNA, 19 nt, Artificial Sequence
  Description of Artificial Sequence: Synthetic oligonucleotide
gcucagaguaggcggauuu

SEQ ID NO: 3097643 - RNA, 19 nt, Artificial Sequence
  Description of Artificial Sequence: Synthetic oligonucleotide
cguuguaacuuuaggcgcu

SEQ ID NO: 3097644 - RNA, 19 nt, Artificial Sequence
  Description of Artificial Sequence: Synthetic oligonucleotide
ccuugccaucugaugucuc

SEQ ID NO: 3097645 - RNA, 19 nt, Artificial Sequence
  Description of Artificial Sequence: Synthetic oligonucleotide
ggaggucacccuggacccc

SEQ ID NO: 3097646 - RNA, 19 nt, Artificial Sequence
  Description of Artificial Sequence: Synthetic oligonucleotide
ccaggaggucacccuggac

SEQ ID NO: 3097647 - RNA, 19 nt, Artificial Sequence
  Description of Artificial Sequence: Synthetic oligonucleotide
gguuuagcauggccaggau

SEQ ID NO: 3097648 - RNA, 19 nt, Artificial Sequence
  Description of Artificial Sequence: Synthetic oligonucleotide
gaccgccacguuguaacuu

SEQ ID NO: 3097649 - RNA, 19 nt, Artificial Sequence
  Description of Artificial Sequence: Synthetic oligonucleotide
cggauuugacuuuggcaua

SEQ ID NO: 3097650 - RNA, 19 nt, Artificial Sequence
  Description of Artificial Sequence: Synthetic oligonucleotide
cccuggaccccaagcucca

SEQ ID NO: 3097651 - RNA, 19 nt, Artificial Sequence
  Description of Artificial Sequence: Synthetic oligonucleotide
aggucacccuggaccccaa

SEQ ID NO: 3097652 - RNA, 19 nt, Artificial Sequence
  Description of Artificial Sequence: Synthetic oligonucleotide
gggcuuucuugcgaucgau

SEQ ID NO: 3097653 - RNA, 19 nt, Artificial Sequence
  Description of Artificial Sequence: Synthetic oligonucleotide
gcauggccaggaucucaau

SEQ ID NO: 3097654 - RNA, 19 nt, Artificial Sequence
  Description of Artificial Sequence: Synthetic oligonucleotide
gcccucucccaaguuuacu

SEQ ID NO: 3097655 - RNA, 19 nt, Artificial Sequence
  Description of Artificial Sequence: Synthetic oligonucleotide
ccgccacguuguaacuuua

SEQ ID NO: 3097656 - RNA, 19 nt, Artificial Sequence
  Description of Artificial Sequence: Synthetic oligonucleotide
ccaugacaauguagaccuu

SEQ ID NO: 3097657 - RNA, 19 nt, Artificial Sequence
  Description of Artificial Sequence: Synthetic oligonucleotide
gcgcucagaguaggcggau

SEQ ID NO: 3097658 - RNA, 19 nt, Artificial Sequence
  Description of Artificial Sequence: Synthetic oligonucleotide
ccccaagcuccaugacaau

SEQ ID NO: 3097659 - RNA, 19 nt, Artificial Sequence
  Description of Artificial Sequence: Synthetic oligonucleotide
ccccaugauguagccucgu

SEQ ID NO: 3097660 - RNA, 19 nt, Artificial Sequence
  Description of Artificial Sequence: Synthetic oligonucleotide
ccuggaccccaagcuccau

SEQ ID NO: 3097661 - RNA, 19 nt, Artificial Sequence
  Description of Artificial Sequence: Synthetic oligonucleotide
cgcucagaguaggcggauu

SEQ ID NO: 3097662 - RNA, 19 nt, Artificial Sequence
  Description of Artificial Sequence: Synthetic oligonucleotide
aaaguggugaccauggugg

SEQ ID NO: 3097663 - RNA, 19 nt, Artificial Sequence
  Description of Artificial Sequence: Synthetic oligonucleotide
aguucuuuccuacucaggg

SEQ ID NO: 3097664 - RNA, 19 nt, Artificial Sequence
  Description of Artificial Sequence: Synthetic oligonucleotide
ucucccugaauauuuaugg

SEQ ID NO: 3097665 - RNA, 19 nt, Artificial Sequence
  Description of Artificial Sequence: Synthetic oligonucleotide
ugaauauuuauggaaagug

SEQ ID NO: 3097666 - RNA, 19 nt, Artificial Sequence
  Description of Artificial Sequence: Synthetic oligonucleotide
gaauauuuauggaaagugg

SEQ ID NO: 3097667 - RNA, 19 nt, Artificial Sequence
  Description of Artificial Sequence: Synthetic oligonucleotide
aagucgaucuccuggucgc

SEQ ID NO: 3097668 - RNA, 19 nt, Artificial Sequence
  Description of Artificial Sequence: Synthetic oligonucleotide
auuuauggaaaguggugac

SEQ ID NO: 3097669 - RNA, 19 nt, Artificial Sequence
  Description of Artificial Sequence: Synthetic oligonucleotide
cuugaagucgaucuccugg

SEQ ID NO: 3097670 - RNA, 19 nt, Artificial Sequence
  Description of Artificial Sequence: Synthetic oligonucleotide
uauuuauggaaagugguga

SEQ ID NO: 3097671 - RNA, 19 nt, Artificial Sequence
  Description of Artificial Sequence: Synthetic oligonucleotide
aauucugucgugaucaacu

SEQ ID NO: 3097672 - RNA, 19 nt, Artificial Sequence
  Description of Artificial Sequence: Synthetic oligonucleotide
aucaaguugucaaugcugc

SEQ ID NO: 3097673 - RNA, 19 nt, Artificial Sequence
  Description of Artificial Sequence: Synthetic oligonucleotide
ucugucgugaucaacuccu

SEQ ID NO: 3097674 - RNA, 19 nt, Artificial Sequence
  Description of Artificial Sequence: Synthetic oligonucleotide
acagaguacuccuugaagu

SEQ ID NO: 3097675 - RNA, 19 nt, Artificial Sequence
  Description of Artificial Sequence: Synthetic oligonucleotide
aaguugucaaugcugcucu

SEQ ID NO: 3097676 - RNA, 19 nt, Artificial Sequence
  Description of Artificial Sequence: Synthetic oligonucleotide
aagaggagucuccaucacg

SEQ ID NO: 3097677 - RNA, 19 nt, Artificial Sequence
  Description of Artificial Sequence: Synthetic oligonucleotide
uuguaggccaugcacagug

SEQ ID NO: 3097678 - RNA, 19 nt, Artificial Sequence
  Description of Artificial Sequence: Synthetic oligonucleotide
gaagucgaucuccuggucg

SEQ ID NO: 3097679 - RNA, 19 nt, Artificial Sequence
  Description of Artificial Sequence: Synthetic oligonucleotide
ucauuguaggccaugcaca

SEQ ID NO: 3097680 - RNA, 19 nt, Artificial Sequence
  Description of Artificial Sequence: Synthetic oligonucleotide
aagucauuguaggccaugc

SEQ ID NO: 3097681 - RNA, 19 nt, Artificial Sequence
  Description of Artificial Sequence: Synthetic oligonucleotide
uucaucaaguugucaaugc

SEQ ID NO: 3097682 - RNA, 19 nt, Artificial Sequence
  Description of Artificial Sequence: Synthetic oligonucleotide
gaaaguggugaccauggug

SEQ ID NO: 3097683 - RNA, 19 nt, Artificial Sequence
  Description of Artificial Sequence: Synthetic oligonucleotide
uggucaggaacacagagua

SEQ ID NO: 3097684 - RNA, 19 nt, Artificial Sequence
  Description of Artificial Sequence: Synthetic oligonucleotide
uuauggaaaguggugacca

SEQ ID NO: 3097685 - RNA, 19 nt, Artificial Sequence
  Description of Artificial Sequence: Synthetic oligonucleotide
uucuuuccuacucaggguc

SEQ ID NO: 3097686 - RNA, 19 nt, Artificial Sequence
  Description of Artificial Sequence: Synthetic oligonucleotide
cucagggucagcuugcuac

SEQ ID NO: 3097687 - RNA, 19 nt, Artificial Sequence
  Description of Artificial Sequence: Synthetic oligonucleotide
ucaguucuuuccuacucag

SEQ ID NO: 3097688 - RNA, 19 nt, Artificial Sequence
  Description of Artificial Sequence: Synthetic oligonucleotide
ucuaggaagaagucauugu

SEQ ID NO: 3097689 - RNA, 19 nt, Artificial Sequence
  Description of Artificial Sequence: Synthetic oligonucleotide
aguguggucaggaacacag

SEQ ID NO: 3097690 - RNA, 19 nt, Artificial Sequence
  Description of Artificial Sequence: Synthetic oligonucleotide
uucucugcaagacucaauu

SEQ ID NO: 3097691 - RNA, 19 nt, Artificial Sequence
  Description of Artificial Sequence: Synthetic oligonucleotide
uucaguucuuuccuacuca

SEQ ID NO: 3097692 - RNA, 19 nt, Artificial Sequence
  Description of Artificial Sequence: Synthetic oligonucleotide
ucaucaaguugucaaugcu

SEQ ID NO: 3097693 - RNA, 19 nt, Artificial Sequence
  Description of Artificial Sequence: Synthetic oligonucleotide
uaggccaugcacagugugg

SEQ ID NO: 3097694 - RNA, 19 nt, Artificial Sequence
  Description of Artificial Sequence: Synthetic oligonucleotide
gucauuguaggccaugcac

SEQ ID NO: 3097695 - RNA, 19 nt, Artificial Sequence
  Description of Artificial Sequence: Synthetic oligonucleotide
aggagucuccaucacgacg

SEQ ID NO: 3097696 - RNA, 19 nt, Artificial Sequence
  Description of Artificial Sequence: Synthetic oligonucleotide
uuuauggaaaguggugacc

SEQ ID NO: 3097697 - RNA, 19 nt, Artificial Sequence
  Description of Artificial Sequence: Synthetic oligonucleotide
uuguuguccucuaggaaga

SEQ ID NO: 3097698 - RNA, 19 nt, Artificial Sequence
  Description of Artificial Sequence: Synthetic oligonucleotide
gaacacagaguacuccuug

SEQ ID NO: 3097699 - RNA, 19 nt, Artificial Sequence
  Description of Artificial Sequence: Synthetic oligonucleotide
caucuucucugcaagacuc

SEQ ID NO: 3097700 - RNA, 19 nt, Artificial Sequence
  Description of Artificial Sequence: Synthetic oligonucleotide
auauuuauggaaaguggug

SEQ ID NO: 3097701 - RNA, 19 nt, Artificial Sequence
  Description of Artificial Sequence: Synthetic oligonucleotide
cauuguaggccaugcacag

SEQ ID NO: 3097702 - RNA, 19 nt, Artificial Sequence
  Description of Artificial Sequence: Synthetic oligonucleotide
auucugucgugaucaacuc

SEQ ID NO: 3097703 - RNA, 19 nt, Artificial Sequence
  Description of Artificial Sequence: Synthetic oligonucleotide
ucaucuucucugcaagacu

SEQ ID NO: 3097704 - RNA, 19 nt, Artificial Sequence
  Description of Artificial Sequence: Synthetic oligonucleotide
agaguacuccuugaagucg

SEQ ID NO: 3097705 - RNA, 19 nt, Artificial Sequence
  Description of Artificial Sequence: Synthetic oligonucleotide
aggaacacagaguacuccu

SEQ ID NO: 3097706 - RNA, 19 nt, Artificial Sequence
  Description of Artificial Sequence: Synthetic oligonucleotide
gcaagacucaauucugucg

SEQ ID NO: 3097707 - RNA, 19 nt, Artificial Sequence
  Description of Artificial Sequence: Synthetic oligonucleotide
uugaagucgaucuccuggu

SEQ ID NO: 3097708 - RNA, 19 nt, Artificial Sequence
  Description of Artificial Sequence: Synthetic oligonucleotide
cucaauucugucgugauca

SEQ ID NO: 3097709 - RNA, 19 nt, Artificial Sequence
  Description of Artificial Sequence: Synthetic oligonucleotide
ucacgacgugaacucaagg

SEQ ID NO: 3097710 - RNA, 19 nt, Artificial Sequence
  Description of Artificial Sequence: Synthetic oligonucleotide
acucaauucugucgugauc

SEQ ID NO: 3097711 - RNA, 19 nt, Artificial Sequence
  Description of Artificial Sequence: Synthetic oligonucleotide
uccaucacgacgugaacuc

SEQ ID NO: 3097712 - RNA, 19 nt, Artificial Sequence
  Description of Artificial Sequence: Synthetic oligonucleotide
ugaucaacuccuucaguuc

SEQ ID NO: 3097713 - RNA, 19 nt, Artificial Sequence
  Description of Artificial Sequence: Synthetic oligonucleotide
uucugucgugaucaacucc

SEQ ID NO: 3097714 - RNA, 19 nt, Artificial Sequence
  Description of Artificial Sequence: Synthetic oligonucleotide
ucuucaucaaguugucaau

SEQ ID NO: 3097715 - RNA, 19 nt, Artificial Sequence
  Description of Artificial Sequence: Synthetic oligonucleotide
uugucaaugcugcucuccu

SEQ ID NO: 3097716 - RNA, 19 nt, Artificial Sequence
  Description of Artificial Sequence: Synthetic oligonucleotide
gucaaggccuucucaagag

SEQ ID NO: 3097717 - RNA, 19 nt, Artificial Sequence
  Description of Artificial Sequence: Synthetic oligonucleotide
cuucucaagaggagucucc

SEQ ID NO: 3097718 - RNA, 19 nt, Artificial Sequence
  Description of Artificial Sequence: Synthetic oligonucleotide
acgacgugaacucaaggaa

SEQ ID NO: 3097719 - RNA, 19 nt, Artificial Sequence
  Description of Artificial Sequence: Synthetic oligonucleotide
gaccaugguggucaaggcc

SEQ ID NO: 3097720 - RNA, 19 nt, Artificial Sequence
  Description of Artificial Sequence: Synthetic oligonucleotide
acuccuugaagucgaucuc

SEQ ID NO: 3097721 - RNA, 19 nt, Artificial Sequence
  Description of Artificial Sequence: Synthetic oligonucleotide
cacagaguacuccuugaag

SEQ ID NO: 3097722 - RNA, 19 nt, Artificial Sequence
  Description of Artificial Sequence: Synthetic oligonucleotide
cucaagaggagucuccauc

SEQ ID NO: 3097723 - RNA, 19 nt, Artificial Sequence
  Description of Artificial Sequence: Synthetic oligonucleotide
gucgugaucaacuccuuca

SEQ ID NO: 3097724 - RNA, 19 nt, Artificial Sequence
  Description of Artificial Sequence: Synthetic oligonucleotide
cucuucaucaaguugucaa

SEQ ID NO: 3097725 - RNA, 19 nt, Artificial Sequence
  Description of Artificial Sequence: Synthetic oligonucleotide
aagacucaauucugucgug

SEQ ID NO: 3097726 - RNA, 19 nt, Artificial Sequence
  Description of Artificial Sequence: Synthetic oligonucleotide
ucuuuccuacucaggguca

SEQ ID NO: 3097727 - RNA, 19 nt, Artificial Sequence
  Description of Artificial Sequence: Synthetic oligonucleotide
auuuguuguccucuaggaa

SEQ ID NO: 3097728 - RNA, 19 nt, Artificial Sequence
  Description of Artificial Sequence: Synthetic oligonucleotide
uccaggcucuucaucaagu

SEQ ID NO: 3097729 - RNA, 19 nt, Artificial Sequence
  Description of Artificial Sequence: Synthetic oligonucleotide
ugcaagacucaauucuguc

SEQ ID NO: 3097730 - RNA, 19 nt, Artificial Sequence
  Description of Artificial Sequence: Synthetic oligonucleotide
uccuucaguucuuuccuac

SEQ ID NO: 3097731 - RNA, 19 nt, Artificial Sequence
  Description of Artificial Sequence: Synthetic oligonucleotide
cucucccugaauauuuaug

SEQ ID NO: 3097732 - RNA, 19 nt, Artificial Sequence
  Description of Artificial Sequence: Synthetic oligonucleotide
cagaguacuccuugaaguc

SEQ ID NO: 3097733 - RNA, 19 nt, Artificial Sequence
  Description of Artificial Sequence: Synthetic oligonucleotide
aggcucuucaucaaguugu

SEQ ID NO: 3097734 - RNA, 19 nt, Artificial Sequence
  Description of Artificial Sequence: Synthetic oligonucleotide
cuucaguucuuuccuacuc

SEQ ID NO: 3097735 - RNA, 19 nt, Artificial Sequence
  Description of Artificial Sequence: Synthetic oligonucleotide
cuucaucaaguugucaaug

SEQ ID NO: 3097736 - RNA, 19 nt, Artificial Sequence
  Description of Artificial Sequence: Synthetic oligonucleotide
ucaggaacacagaguacuc

SEQ ID NO: 3097737 - RNA, 19 nt, Artificial Sequence
  Description of Artificial Sequence: Synthetic oligonucleotide
ucagggucagcuugcuacc

SEQ ID NO: 3097738 - RNA, 19 nt, Artificial Sequence
  Description of Artificial Sequence: Synthetic oligonucleotide
agcuugcuacccucucucc

SEQ ID NO: 3097739 - RNA, 19 nt, Artificial Sequence
  Description of Artificial Sequence: Synthetic oligonucleotide
gucaaugcugcucuccuuc

SEQ ID NO: 3097740 - RNA, 19 nt, Artificial Sequence
  Description of Artificial Sequence: Synthetic oligonucleotide
cucuaggaagaagucauug

SEQ ID NO: 3097741 - RNA, 19 nt, Artificial Sequence
  Description of Artificial Sequence: Synthetic oligonucleotide
uacccucucucccugaaua

SEQ ID NO: 3097742 - RNA, 19 nt, Artificial Sequence
  Description of Artificial Sequence: Synthetic oligonucleotide
agaggagucuccaucacga

SEQ ID NO: 3097743 - RNA, 19 nt, Artificial Sequence
  Description of Artificial Sequence: Synthetic oligonucleotide
cacgacgugaacucaagga

SEQ ID NO: 3097744 - RNA, 19 nt, Artificial Sequence
  Description of Artificial Sequence: Synthetic oligonucleotide
cuaggaagaagucauugua

SEQ ID NO: 3097745 - RNA, 19 nt, Artificial Sequence
  Description of Artificial Sequence: Synthetic oligonucleotide
caaguugucaaugcugcuc

SEQ ID NO: 3097746 - RNA, 19 nt, Artificial Sequence
  Description of Artificial Sequence: Synthetic oligonucleotide
cuggucgcuguucuugucc

SEQ ID NO: 3097747 - RNA, 19 nt, Artificial Sequence
  Description of Artificial Sequence: Synthetic oligonucleotide
accaugguggucaaggccu

SEQ ID NO: 3097748 - RNA, 19 nt, Artificial Sequence
  Description of Artificial Sequence: Synthetic oligonucleotide
gaucaacuccuucaguucu

SEQ ID NO: 3097749 - RNA, 19 nt, Artificial Sequence
  Description of Artificial Sequence: Synthetic oligonucleotide
uguccucuaggaagaaguc

SEQ ID NO: 3097750 - RNA, 19 nt, Artificial Sequence
  Description of Artificial Sequence: Synthetic oligonucleotide
uucucaagaggagucucca

SEQ ID NO: 3097751 - RNA, 19 nt, Artificial Sequence
  Description of Artificial Sequence: Synthetic oligonucleotide
ugaccaugguggucaaggc

SEQ ID NO: 3097752 - RNA, 19 nt, Artificial Sequence
  Description of Artificial Sequence: Synthetic oligonucleotide
caguucuuuccuacucagg

SEQ ID NO: 3097753 - RNA, 19 nt, Artificial Sequence
  Description of Artificial Sequence: Synthetic oligonucleotide
cuacucagggucagcuugc

SEQ ID NO: 3097754 - RNA, 19 nt, Artificial Sequence
  Description of Artificial Sequence: Synthetic oligonucleotide
guugucaaugcugcucucc

SEQ ID NO: 3097755 - RNA, 19 nt, Artificial Sequence
  Description of Artificial Sequence: Synthetic oligonucleotide
ucaaguugucaaugcugcu

SEQ ID NO: 3097756 - RNA, 19 nt, Artificial Sequence
  Description of Artificial Sequence: Synthetic oligonucleotide
gacgugaacucaaggaaga

SEQ ID NO: 3097757 - RNA, 19 nt, Artificial Sequence
  Description of Artificial Sequence: Synthetic oligonucleotide
aaggccuucucaagaggag

SEQ ID NO: 3097758 - RNA, 19 nt, Artificial Sequence
  Description of Artificial Sequence: Synthetic oligonucleotide
ucucugcaagacucaauuc

SEQ ID NO: 3097759 - RNA, 19 nt, Artificial Sequence
  Description of Artificial Sequence: Synthetic oligonucleotide
ugucgugaucaacuccuuc

SEQ ID NO: 3097760 - RNA, 19 nt, Artificial Sequence
  Description of Artificial Sequence: Synthetic oligonucleotide
caaggccuucucaagagga

SEQ ID NO: 3097761 - RNA, 19 nt, Artificial Sequence
  Description of Artificial Sequence: Synthetic oligonucleotide
caagacucaauucugucgu

SEQ ID NO: 3097762 - RNA, 19 nt, Artificial Sequence
  Description of Artificial Sequence: Synthetic oligonucleotide
ucgcuguucuuguccaggc

SEQ ID NO: 3097763 - RNA, 19 nt, Artificial Sequence
  Description of Artificial Sequence: Synthetic oligonucleotide
guaggccaugcacagugug

SEQ ID NO: 3097764 - RNA, 19 nt, Artificial Sequence
  Description of Artificial Sequence: Synthetic oligonucleotide
aguugucaaugcugcucuc

SEQ ID NO: 3097765 - RNA, 19 nt, Artificial Sequence
  Description of Artificial Sequence: Synthetic oligonucleotide
uuccuacucagggucagcu

SEQ ID NO: 3097766 - RNA, 19 nt, Artificial Sequence
  Description of Artificial Sequence: Synthetic oligonucleotide
cucugcaagacucaauucu

SEQ ID NO: 3097767 - RNA, 19 nt, Artificial Sequence
  Description of Artificial Sequence: Synthetic oligonucleotide
uggucgcuguucuugucca

SEQ ID NO: 3097768 - RNA, 19 nt, Artificial Sequence
  Description of Artificial Sequence: Synthetic oligonucleotide
caggcucuucaucaaguug

SEQ ID NO: 3097769 - RNA, 19 nt, Artificial Sequence
  Description of Artificial Sequence: Synthetic oligonucleotide
aucuccuggucgcuguucu

SEQ ID NO: 3097770 - RNA, 19 nt, Artificial Sequence
  Description of Artificial Sequence: Synthetic oligonucleotide
caggaacacagaguacucc

SEQ ID NO: 3097771 - RNA, 19 nt, Artificial Sequence
  Description of Artificial Sequence: Synthetic oligonucleotide
guggugaccauggugguca

SEQ ID NO: 3097772 - RNA, 19 nt, Artificial Sequence
  Description of Artificial Sequence: Synthetic oligonucleotide
gucgcuguucuuguccagg

SEQ ID NO: 3097773 - RNA, 19 nt, Artificial Sequence
  Description of Artificial Sequence: Synthetic oligonucleotide
acacagaguacuccuugaa

SEQ ID NO: 3097774 - RNA, 19 nt, Artificial Sequence
  Description of Artificial Sequence: Synthetic oligonucleotide
agacucaauucugucguga

SEQ ID NO: 3097775 - RNA, 19 nt, Artificial Sequence
  Description of Artificial Sequence: Synthetic oligonucleotide
uguaggccaugcacagugu

SEQ ID NO: 3097776 - RNA, 19 nt, Artificial Sequence
  Description of Artificial Sequence: Synthetic oligonucleotide
ucuccaucacgacgugaac

SEQ ID NO: 3097777 - RNA, 19 nt, Artificial Sequence
  Description of Artificial Sequence: Synthetic oligonucleotide
ucaauucugucgugaucaa

SEQ ID NO: 3097778 - RNA, 19 nt, Artificial Sequence
  Description of Artificial Sequence: Synthetic oligonucleotide
gugaucaacuccuucaguu

SEQ ID NO: 3097779 - RNA, 19 nt, Artificial Sequence
  Description of Artificial Sequence: Synthetic oligonucleotide
uauggaaaguggugaccau

SEQ ID NO: 3097780 - RNA, 19 nt, Artificial Sequence
  Description of Artificial Sequence: Synthetic oligonucleotide
ucucucccugaauauuuau

SEQ ID NO: 3097781 - RNA, 19 nt, Artificial Sequence
  Description of Artificial Sequence: Synthetic oligonucleotide
gaguacuccuugaagucga

SEQ ID NO: 3097782 - RNA, 19 nt, Artificial Sequence
  Description of Artificial Sequence: Synthetic oligonucleotide
ccuacucagggucagcuug

SEQ ID NO: 3097783 - RNA, 19 nt, Artificial Sequence
  Description of Artificial Sequence: Synthetic oligonucleotide
ucgaucuccuggucgcugu

SEQ ID NO: 3097784 - RNA, 19 nt, Artificial Sequence
  Description of Artificial Sequence: Synthetic oligonucleotide
aguggugaccauggugguc

SEQ ID NO: 3097785 - RNA, 19 nt, Artificial Sequence
  Description of Artificial Sequence: Synthetic oligonucleotide
ugcacaguguggucaggaa

SEQ ID NO: 3097786 - RNA, 19 nt, Artificial Sequence
  Description of Artificial Sequence: Synthetic oligonucleotide
uugcuacccucucucccug

SEQ ID NO: 3097787 - RNA, 19 nt, Artificial Sequence
  Description of Artificial Sequence: Synthetic oligonucleotide
cuuuccuacucagggucag

SEQ ID NO: 3097788 - RNA, 19 nt, Artificial Sequence
  Description of Artificial Sequence: Synthetic oligonucleotide
caagaggagucuccaucac

SEQ ID NO: 3097789 - RNA, 19 nt, Artificial Sequence
  Description of Artificial Sequence: Synthetic oligonucleotide
cucccugaauauuuaugga

SEQ ID NO: 3097790 - RNA, 19 nt, Artificial Sequence
  Description of Artificial Sequence: Synthetic oligonucleotide
gcuguucuuguccaggcuc

SEQ ID NO: 3097791 - RNA, 19 nt, Artificial Sequence
  Description of Artificial Sequence: Synthetic oligonucleotide
ucucaagaggagucuccau

SEQ ID NO: 3097792 - RNA, 19 nt, Artificial Sequence
  Description of Artificial Sequence: Synthetic oligonucleotide
cagcuugcuacccucucuc

SEQ ID NO: 3097793 - RNA, 19 nt, Artificial Sequence
  Description of Artificial Sequence: Synthetic oligonucleotide
aggccaugcacaguguggu

SEQ ID NO: 3097794 - RNA, 19 nt, Artificial Sequence
  Description of Artificial Sequence: Synthetic oligonucleotide
uccuggucgcuguucuugu

SEQ ID NO: 3097795 - RNA, 19 nt, Artificial Sequence
  Description of Artificial Sequence: Synthetic oligonucleotide
aucacgacgugaacucaag

SEQ ID NO: 3097796 - RNA, 19 nt, Artificial Sequence
  Description of Artificial Sequence: Synthetic oligonucleotide
gaggagucuccaucacgac

SEQ ID NO: 3097797 - RNA, 19 nt, Artificial Sequence
  Description of Artificial Sequence: Synthetic oligonucleotide
uguccaggcucuucaucaa

SEQ ID NO: 3097798 - RNA, 19 nt, Artificial Sequence
  Description of Artificial Sequence: Synthetic oligonucleotide
ggucaaggccuucucaaga

SEQ ID NO: 3097799 - RNA, 19 nt, Artificial Sequence
  Description of Artificial Sequence: Synthetic oligonucleotide
caauucugucgugaucaac

SEQ ID NO: 3097800 - RNA, 19 nt, Artificial Sequence
  Description of Artificial Sequence: Synthetic oligonucleotide
uuuccuacucagggucagc

SEQ ID NO: 3097801 - RNA, 19 nt, Artificial Sequence
  Description of Artificial Sequence: Synthetic oligonucleotide
gcuugcuacccucucuccc

SEQ ID NO: 3097802 - RNA, 19 nt, Artificial Sequence
  Description of Artificial Sequence: Synthetic oligonucleotide
gucuccaucacgacgugaa

SEQ ID NO: 3097803 - RNA, 19 nt, Artificial Sequence
  Description of Artificial Sequence: Synthetic oligonucleotide
cugaauauuuauggaaagu

SEQ ID NO: 3097804 - RNA, 19 nt, Artificial Sequence
  Description of Artificial Sequence: Synthetic oligonucleotide
agggucagcuugcuacccu

SEQ ID NO: 3097805 - RNA, 19 nt, Artificial Sequence
  Description of Artificial Sequence: Synthetic oligonucleotide
ugucaaugcugcucuccuu

SEQ ID NO: 3097806 - RNA, 19 nt, Artificial Sequence
  Description of Artificial Sequence: Synthetic oligonucleotide
aggccuucucaagaggagu

SEQ ID NO: 3097807 - RNA, 19 nt, Artificial Sequence
  Description of Artificial Sequence: Synthetic oligonucleotide
guucuuuccuacucagggu

SEQ ID NO: 3097808 - RNA, 19 nt, Artificial Sequence
  Description of Artificial Sequence: Synthetic oligonucleotide
cgacgugaacucaaggaag

SEQ ID NO: 3097809 - RNA, 19 nt, Artificial Sequence
  Description of Artificial Sequence: Synthetic oligonucleotide
augcacaguguggucagga

SEQ ID NO: 3097810 - RNA, 19 nt, Artificial Sequence
  Description of Artificial Sequence: Synthetic oligonucleotide
caucacgacgugaacucaa

SEQ ID NO: 3097811 - RNA, 19 nt, Artificial Sequence
  Description of Artificial Sequence: Synthetic oligonucleotide
ugguggucaaggccuucuc

SEQ ID NO: 3097812 - RNA, 19 nt, Artificial Sequence
  Description of Artificial Sequence: Synthetic oligonucleotide
cuugcuacccucucucccu

SEQ ID NO: 3097813 - RNA, 19 nt, Artificial Sequence
  Description of Artificial Sequence: Synthetic oligonucleotide
gcugcucuccuucaucuuc

SEQ ID NO: 3097814 - RNA, 19 nt, Artificial Sequence
  Description of Artificial Sequence: Synthetic oligonucleotide
gacucaauucugucgugau

SEQ ID NO: 3097815 - RNA, 19 nt, Artificial Sequence
  Description of Artificial Sequence: Synthetic oligonucleotide
cccugaauauuuauggaaa

SEQ ID NO: 3097816 - RNA, 19 nt, Artificial Sequence
  Description of Artificial Sequence: Synthetic oligonucleotide
augguggucaaggccuucu

SEQ ID NO: 3097817 - RNA, 19 nt, Artificial Sequence
  Description of Artificial Sequence: Synthetic oligonucleotide
auuguaggccaugcacagu

SEQ ID NO: 3097818 - RNA, 19 nt, Artificial Sequence
  Description of Artificial Sequence: Synthetic oligonucleotide
gagucuccaucacgacgug

SEQ ID NO: 3097819 - RNA, 19 nt, Artificial Sequence
  Description of Artificial Sequence: Synthetic oligonucleotide
acccucucucccugaauau

SEQ ID NO: 3097820 - RNA, 19 nt, Artificial Sequence
  Description of Artificial Sequence: Synthetic oligonucleotide
gguggucaaggccuucuca

SEQ ID NO: 3097821 - RNA, 19 nt, Artificial Sequence
  Description of Artificial Sequence: Synthetic oligonucleotide
uccuacucagggucagcuu

SEQ ID NO: 3097822 - RNA, 19 nt, Artificial Sequence
  Description of Artificial Sequence: Synthetic oligonucleotide
ggagucuccaucacgacgu

SEQ ID NO: 3097823 - RNA, 19 nt, Artificial Sequence
  Description of Artificial Sequence: Synthetic oligonucleotide
gucagcuugcuacccucuc

SEQ ID NO: 3097824 - RNA, 19 nt, Artificial Sequence
  Description of Artificial Sequence: Synthetic oligonucleotide
ccaugcacaguguggucag

SEQ ID NO: 3097825 - RNA, 19 nt, Artificial Sequence
  Description of Artificial Sequence: Synthetic oligonucleotide
uguuguccucuaggaagaa

SEQ ID NO: 3097826 - RNA, 19 nt, Artificial Sequence
  Description of Artificial Sequence: Synthetic oligonucleotide
caugcacaguguggucagg

SEQ ID NO: 3097827 - RNA, 19 nt, Artificial Sequence
  Description of Artificial Sequence: Synthetic oligonucleotide
gaucuccuggucgcuguuc

SEQ ID NO: 3097828 - RNA, 19 nt, Artificial Sequence
  Description of Artificial Sequence: Synthetic oligonucleotide
cagggucagcuugcuaccc

SEQ ID NO: 3097829 - RNA, 19 nt, Artificial Sequence
  Description of Artificial Sequence: Synthetic oligonucleotide
uacucagggucagcuugcu

SEQ ID NO: 3097830 - RNA, 19 nt, Artificial Sequence
  Description of Artificial Sequence: Synthetic oligonucleotide
ugcuacccucucucccuga

SEQ ID NO: 3097831 - RNA, 19 nt, Artificial Sequence
  Description of Artificial Sequence: Synthetic oligonucleotide
cugcaagacucaauucugu

SEQ ID NO: 3097832 - RNA, 19 nt, Artificial Sequence
  Description of Artificial Sequence: Synthetic oligonucleotide
gucgaucuccuggucgcug

SEQ ID NO: 3097833 - RNA, 19 nt, Artificial Sequence
  Description of Artificial Sequence: Synthetic oligonucleotide
agucuccaucacgacguga

SEQ ID NO: 3097834 - RNA, 19 nt, Artificial Sequence
  Description of Artificial Sequence: Synthetic oligonucleotide
gccaugcacagugugguca

SEQ ID NO: 3097835 - RNA, 19 nt, Artificial Sequence
  Description of Artificial Sequence: Synthetic oligonucleotide
guacuccuugaagucgauc

SEQ ID NO: 3097836 - RNA, 19 nt, Artificial Sequence
  Description of Artificial Sequence: Synthetic oligonucleotide
cuccaucacgacgugaacu

SEQ ID NO: 3097837 - RNA, 19 nt, Artificial Sequence
  Description of Artificial Sequence: Synthetic oligonucleotide
cucucucccugaauauuua

SEQ ID NO: 3097838 - RNA, 19 nt, Artificial Sequence
  Description of Artificial Sequence: Synthetic oligonucleotide
gggucagcuugcuacccuc

SEQ ID NO: 3097839 - RNA, 19 nt, Artificial Sequence
  Description of Artificial Sequence: Synthetic oligonucleotide
uguucuuguccaggcucuu

SEQ ID NO: 3097840 - RNA, 19 nt, Artificial Sequence
  Description of Artificial Sequence: Synthetic oligonucleotide
aucaacuccuucaguucuu

SEQ ID NO: 3097841 - RNA, 19 nt, Artificial Sequence
  Description of Artificial Sequence: Synthetic oligonucleotide
ggccuucucaagaggaguc

SEQ ID NO: 3097842 - RNA, 19 nt, Artificial Sequence
  Description of Artificial Sequence: Synthetic oligonucleotide
ggucgcuguucuuguccag

SEQ ID NO: 3097843 - RNA, 19 nt, Artificial Sequence
  Description of Artificial Sequence: Synthetic oligonucleotide
acucagggucagcuugcua

SEQ ID NO: 3097844 - RNA, 19 nt, Artificial Sequence
  Description of Artificial Sequence: Synthetic oligonucleotide
agucgaucuccuggucgcu

SEQ ID NO: 3097845 - RNA, 19 nt, Artificial Sequence
  Description of Artificial Sequence: Synthetic oligonucleotide
ucuccuggucgcuguucuu

SEQ ID NO: 3097846 - RNA, 19 nt, Artificial Sequence
  Description of Artificial Sequence: Synthetic oligonucleotide
uggugaccaugguggucaa

SEQ ID NO: 3097847 - RNA, 19 nt, Artificial Sequence
  Description of Artificial Sequence: Synthetic oligonucleotide
ggucaggaacacagaguac

SEQ ID NO: 3097848 - RNA, 19 nt, Artificial Sequence
  Description of Artificial Sequence: Synthetic oligonucleotide
ccuucucaagaggagucuc

SEQ ID NO: 3097849 - RNA, 19 nt, Artificial Sequence
  Description of Artificial Sequence: Synthetic oligonucleotide
guguggucaggaacacaga

SEQ ID NO: 3097850 - RNA, 19 nt, Artificial Sequence
  Description of Artificial Sequence: Synthetic oligonucleotide
aguacuccuugaagucgau

SEQ ID NO: 3097851 - RNA, 19 nt, Artificial Sequence
  Description of Artificial Sequence: Synthetic oligonucleotide
caugguggucaaggccuuc

SEQ ID NO: 3097852 - RNA, 19 nt, Artificial Sequence
  Description of Artificial Sequence: Synthetic oligonucleotide
cuucucugcaagacucaau

SEQ ID NO: 3097853 - RNA, 19 nt, Artificial Sequence
  Description of Artificial Sequence: Synthetic oligonucleotide
ggcucuucaucaaguuguc

SEQ ID NO: 3097854 - RNA, 19 nt, Artificial Sequence
  Description of Artificial Sequence: Synthetic oligonucleotide
caguguggucaggaacaca

SEQ ID NO: 3097855 - RNA, 19 nt, Artificial Sequence
  Description of Artificial Sequence: Synthetic oligonucleotide
gcuacccucucucccugaa

SEQ ID NO: 3097856 - RNA, 19 nt, Artificial Sequence
  Description of Artificial Sequence: Synthetic oligonucleotide
gcucuucaucaaguuguca

SEQ ID NO: 3097857 - RNA, 19 nt, Artificial Sequence
  Description of Artificial Sequence: Synthetic oligonucleotide
ggccaugcacagugugguc

SEQ ID NO: 3097858 - RNA, 19 nt, Artificial Sequence
  Description of Artificial Sequence: Synthetic oligonucleotide
ccuucaguucuuuccuacu

SEQ ID NO: 3097859 - RNA, 19 nt, Artificial Sequence
  Description of Artificial Sequence: Synthetic oligonucleotide
ccucucucccugaauauuu

SEQ ID NO: 3097860 - RNA, 19 nt, Artificial Sequence
  Description of Artificial Sequence: Synthetic oligonucleotide
gcucuccuucaucuucucu

SEQ ID NO: 3097861 - RNA, 19 nt, Artificial Sequence
  Description of Artificial Sequence: Synthetic oligonucleotide
ggaacacagaguacuccuu

SEQ ID NO: 3097862 - RNA, 19 nt, Artificial Sequence
  Description of Artificial Sequence: Synthetic oligonucleotide
cuacccucucucccugaau

SEQ ID NO: 3097863 - RNA, 19 nt, Artificial Sequence
  Description of Artificial Sequence: Synthetic oligonucleotide
ccaucacgacgugaacuca

SEQ ID NO: 3097864 - RNA, 19 nt, Artificial Sequence
  Description of Artificial Sequence: Synthetic oligonucleotide
gccuucucaagaggagucu

SEQ ID NO: 3097865 - RNA, 19 nt, Artificial Sequence
  Description of Artificial Sequence: Synthetic oligonucleotide
cugucgugaucaacuccuu

SEQ ID NO: 3097866 - RNA, 19 nt, Artificial Sequence
  Description of Artificial Sequence: Synthetic oligonucleotide
ggucagcuugcuacccucu

SEQ ID NO: 3097867 - RNA, 19 nt, Artificial Sequence
  Description of Artificial Sequence: Synthetic oligonucleotide
ccaggcucuucaucaaguu

SEQ ID NO: 3097868 - RNA, 19 nt, Artificial Sequence
  Description of Artificial Sequence: Synthetic oligonucleotide
cccucucucccugaauauu

SEQ ID NO: 3097869 - RNA, 19 nt, Artificial Sequence
  Description of Artificial Sequence: Synthetic oligonucleotide
cgaucuccuggucgcuguu

SEQ ID NO: 3097870 - RNA, 19 nt, Artificial Sequence
  Description of Artificial Sequence: Synthetic oligonucleotide
gaagauucucucuagaucc

SEQ ID NO: 3097871 - RNA, 19 nt, Artificial Sequence
  Description of Artificial Sequence: Synthetic oligonucleotide
agcacagaacucuugaagc

SEQ ID NO: 3097872 - RNA, 19 nt, Artificial Sequence
  Description of Artificial Sequence: Synthetic oligonucleotide
aacucuugaagccaggggu

SEQ ID NO: 3097873 - RNA, 19 nt, Artificial Sequence
  Description of Artificial Sequence: Synthetic oligonucleotide
aaacacuuugucugcauag

SEQ ID NO: 3097874 - RNA, 19 nt, Artificial Sequence
  Description of Artificial Sequence: Synthetic oligonucleotide
auauguucccuccaggaag

SEQ ID NO: 3097875 - RNA, 19 nt, Artificial Sequence
  Description of Artificial Sequence: Synthetic oligonucleotide
ucuguagccagaguguugg

SEQ ID NO: 3097876 - RNA, 19 nt, Artificial Sequence
  Description of Artificial Sequence: Synthetic oligonucleotide
cagucaaacacuuugucug

SEQ ID NO: 3097877 - RNA, 19 nt, Artificial Sequence
  Description of Artificial Sequence: Synthetic oligonucleotide
guauacugagugaagaggg

SEQ ID NO: 3097878 - RNA, 19 nt, Artificial Sequence
  Description of Artificial Sequence: Synthetic oligonucleotide
gaauagggcaucuguagcc

SEQ ID NO: 3097879 - RNA, 19 nt, Artificial Sequence
  Description of Artificial Sequence: Synthetic oligonucleotide
ugaauagggcaucuguagc

SEQ ID NO: 3097880 - RNA, 19 nt, Artificial Sequence
  Description of Artificial Sequence: Synthetic oligonucleotide
ucucucuagaucccguggg

SEQ ID NO: 3097881 - RNA, 19 nt, Artificial Sequence
  Description of Artificial Sequence: Synthetic oligonucleotide
uggaauauguucccuccag

SEQ ID NO: 3097882 - RNA, 19 nt, Artificial Sequence
  Description of Artificial Sequence: Synthetic oligonucleotide
acuuugucugcauaguugu

SEQ ID NO: 3097883 - RNA, 19 nt, Artificial Sequence
  Description of Artificial Sequence: Synthetic oligonucleotide
aauauguucccuccaggaa

SEQ ID NO: 3097884 - RNA, 19 nt, Artificial Sequence
  Description of Artificial Sequence: Synthetic oligonucleotide
cugaauagggcaucuguag

SEQ ID NO: 3097885 - RNA, 19 nt, Artificial Sequence
  Description of Artificial Sequence: Synthetic oligonucleotide
uucucucuagaucccgugg

SEQ ID NO: 3097886 - RNA, 19 nt, Artificial Sequence
  Description of Artificial Sequence: Synthetic oligonucleotide
uauguucccuccaggaagc

SEQ ID NO: 3097887 - RNA, 19 nt, Artificial Sequence
  Description of Artificial Sequence: Synthetic oligonucleotide
uguuggggcgacuggacgg

SEQ ID NO: 3097888 - RNA, 19 nt, Artificial Sequence
  Description of Artificial Sequence: Synthetic oligonucleotide
gaauauguucccuccagga

SEQ ID NO: 3097889 - RNA, 19 nt, Artificial Sequence
  Description of Artificial Sequence: Synthetic oligonucleotide
gaacucuugaagccagggg

SEQ ID NO: 3097890 - RNA, 19 nt, Artificial Sequence
  Description of Artificial Sequence: Synthetic oligonucleotide
aagauucucucuagauccc

SEQ ID NO: 3097891 - RNA, 19 nt, Artificial Sequence
  Description of Artificial Sequence: Synthetic oligonucleotide
agaucuugccuccugccag

SEQ ID NO: 3097892 - RNA, 19 nt, Artificial Sequence
  Description of Artificial Sequence: Synthetic oligonucleotide
uauacugagugaagaggga

SEQ ID NO: 3097893 - RNA, 19 nt, Artificial Sequence
  Description of Artificial Sequence: Synthetic oligonucleotide
guagccagaguguuggggc

SEQ ID NO: 3097894 - RNA, 19 nt, Artificial Sequence
  Description of Artificial Sequence: Synthetic oligonucleotide
uguagccagaguguugggg

SEQ ID NO: 3097895 - RNA, 19 nt, Artificial Sequence
  Description of Artificial Sequence: Synthetic oligonucleotide
ucuagaucccguggggugg

SEQ ID NO: 3097896 - RNA, 19 nt, Artificial Sequence
  Description of Artificial Sequence: Synthetic oligonucleotide
uacugagugaagagggaga

SEQ ID NO: 3097897 - RNA, 19 nt, Artificial Sequence
  Description of Artificial Sequence: Synthetic oligonucleotide
cacuuugucugcauaguug

SEQ ID NO: 3097898 - RNA, 19 nt, Artificial Sequence
  Description of Artificial Sequence: Synthetic oligonucleotide
gacuggacgggcaaaguag

SEQ ID NO: 3097899 - RNA, 19 nt, Artificial Sequence
  Description of Artificial Sequence: Synthetic oligonucleotide
gaagccaggggucguaggc

SEQ ID NO: 3097900 - RNA, 19 nt, Artificial Sequence
  Description of Artificial Sequence: Synthetic oligonucleotide
gaugucucuggccagcaca

SEQ ID NO: 3097901 - RNA, 19 nt, Artificial Sequence
  Description of Artificial Sequence: Synthetic oligonucleotide
ggcaucuguagccagagug

SEQ ID NO: 3097902 - RNA, 19 nt, Artificial Sequence
  Description of Artificial Sequence: Synthetic oligonucleotide
aauagggcaucuguagcca

SEQ ID NO: 3097903 - RNA, 19 nt, Artificial Sequence
  Description of Artificial Sequence: Synthetic oligonucleotide
ggcaaaguagagcuggucc

SEQ ID NO: 3097904 - RNA, 19 nt, Artificial Sequence
  Description of Artificial Sequence: Synthetic oligonucleotide
ugguccagggacauggcac

SEQ ID NO: 3097905 - RNA, 19 nt, Artificial Sequence
  Description of Artificial Sequence: Synthetic oligonucleotide
cagcacagaacucuugaag

SEQ ID NO: 3097906 - RNA, 19 nt, Artificial Sequence
  Description of Artificial Sequence: Synthetic oligonucleotide
agcugguccagggacaugg

SEQ ID NO: 3097907 - RNA, 19 nt, Artificial Sequence
  Description of Artificial Sequence: Synthetic oligonucleotide
agaacucuugaagccaggg

SEQ ID NO: 3097908 - RNA, 19 nt, Artificial Sequence
  Description of Artificial Sequence: Synthetic oligonucleotide
auacugagugaagagggag

SEQ ID NO: 3097909 - RNA, 19 nt, Artificial Sequence
  Description of Artificial Sequence: Synthetic oligonucleotide
agguacaggcccugaauag

SEQ ID NO: 3097910 - RNA, 19 nt, Artificial Sequence
  Description of Artificial Sequence: Synthetic oligonucleotide
gaucuugccuccugccagg

SEQ ID NO: 3097911 - RNA, 19 nt, Artificial Sequence
  Description of Artificial Sequence: Synthetic oligonucleotide
ugcagucaaacacuuuguc

SEQ ID NO: 3097912 - RNA, 19 nt, Artificial Sequence
  Description of Artificial Sequence: Synthetic oligonucleotide
aacacuuugucugcauagu

SEQ ID NO: 3097913 - RNA, 19 nt, Artificial Sequence
  Description of Artificial Sequence: Synthetic oligonucleotide
cuugccuccugccagggug

SEQ ID NO: 3097914 - RNA, 19 nt, Artificial Sequence
  Description of Artificial Sequence: Synthetic oligonucleotide
uaggccucgaugcagucaa

SEQ ID NO: 3097915 - RNA, 19 nt, Artificial Sequence
  Description of Artificial Sequence: Synthetic oligonucleotide
guagagcugguccagggac

SEQ ID NO: 3097916 - RNA, 19 nt, Artificial Sequence
  Description of Artificial Sequence: Synthetic oligonucleotide
guagggcguauacugagug

SEQ ID NO: 3097917 - RNA, 19 nt, Artificial Sequence
  Description of Artificial Sequence: Synthetic oligonucleotide
auccccagaucuugccucc

SEQ ID NO: 3097918 - RNA, 19 nt, Artificial Sequence
  Description of Artificial Sequence: Synthetic oligonucleotide
ggaauauguucccuccagg

SEQ ID NO: 3097919 - RNA, 19 nt, Artificial Sequence
  Description of Artificial Sequence: Synthetic oligonucleotide
uuugucugcauaguuguuu

SEQ ID NO: 3097920 - RNA, 19 nt, Artificial Sequence
  Description of Artificial Sequence: Synthetic oligonucleotide
guguagggcguauacugag

SEQ ID NO: 3097921 - RNA, 19 nt, Artificial Sequence
  Description of Artificial Sequence: Synthetic oligonucleotide
guacaggcccugaauaggg

SEQ ID NO: 3097922 - RNA, 19 nt, Artificial Sequence
  Description of Artificial Sequence: Synthetic oligonucleotide
agaguguuggggcgacugg

SEQ ID NO: 3097923 - RNA, 19 nt, Artificial Sequence
  Description of Artificial Sequence: Synthetic oligonucleotide
auucucucuagaucccgug

SEQ ID NO: 3097924 - RNA, 19 nt, Artificial Sequence
  Description of Artificial Sequence: Synthetic oligonucleotide
uguagggcguauacugagu

SEQ ID NO: 3097925 - RNA, 19 nt, Artificial Sequence
  Description of Artificial Sequence: Synthetic oligonucleotide
agauucucucuagaucccg

SEQ ID NO: 3097926 - RNA, 19 nt, Artificial Sequence
  Description of Artificial Sequence: Synthetic oligonucleotide
ggguguagggcguauacug

SEQ ID NO: 3097927 - RNA, 19 nt, Artificial Sequence
  Description of Artificial Sequence: Synthetic oligonucleotide
ucauccccagaucuugccu

SEQ ID NO: 3097928 - RNA, 19 nt, Artificial Sequence
  Description of Artificial Sequence: Synthetic oligonucleotide
aagcccgaagauucucucu

SEQ ID NO: 3097929 - RNA, 19 nt, Artificial Sequence
  Description of Artificial Sequence: Synthetic oligonucleotide
cucucuagaucccgugggg

SEQ ID NO: 3097930 - RNA, 19 nt, Artificial Sequence
  Description of Artificial Sequence: Synthetic oligonucleotide
ugaagccaggggucguagg

SEQ ID NO: 3097931 - RNA, 19 nt, Artificial Sequence
  Description of Artificial Sequence: Synthetic oligonucleotide
uggacgggcaaaguagagc

SEQ ID NO: 3097932 - RNA, 19 nt, Artificial Sequence
  Description of Artificial Sequence: Synthetic oligonucleotide
cucuagaucccguggggug

SEQ ID NO: 3097933 - RNA, 19 nt, Artificial Sequence
  Description of Artificial Sequence: Synthetic oligonucleotide
ugcucauccccagaucuug

SEQ ID NO: 3097934 - RNA, 19 nt, Artificial Sequence
  Description of Artificial Sequence: Synthetic oligonucleotide
acucuugaagccagggguc

SEQ ID NO: 3097935 - RNA, 19 nt, Artificial Sequence
  Description of Artificial Sequence: Synthetic oligonucleotide
ccugccaggguguagggcg

SEQ ID NO: 3097936 - RNA, 19 nt, Artificial Sequence
  Description of Artificial Sequence: Synthetic oligonucleotide
agagguacaggcccugaau

SEQ ID NO: 3097937 - RNA, 19 nt, Artificial Sequence
  Description of Artificial Sequence: Synthetic oligonucleotide
ucaaacacuuugucugcau

SEQ ID NO: 3097938 - RNA, 19 nt, Artificial Sequence
  Description of Artificial Sequence: Synthetic oligonucleotide
caaaguagagcugguccag

SEQ ID NO: 3097939 - RNA, 19 nt, Artificial Sequence
  Description of Artificial Sequence: Synthetic oligonucleotide
acaggcccugaauagggca

SEQ ID NO: 3097940 - RNA, 19 nt, Artificial Sequence
  Description of Artificial Sequence: Synthetic oligonucleotide
acagaacucuugaagccag

SEQ ID NO: 3097941 - RNA, 19 nt, Artificial Sequence
  Description of Artificial Sequence: Synthetic oligonucleotide
gggucguaggccucgaugc

SEQ ID NO: 3097942 - RNA, 19 nt, Artificial Sequence
  Description of Artificial Sequence: Synthetic oligonucleotide
auagggcaucuguagccag

SEQ ID NO: 3097943 - RNA, 19 nt, Artificial Sequence
  Description of Artificial Sequence: Synthetic oligonucleotide
uacaggcccugaauagggc

SEQ ID NO: 3097944 - RNA, 19 nt, Artificial Sequence
  Description of Artificial Sequence: Synthetic oligonucleotide
cucauccccagaucuugcc

SEQ ID NO: 3097945 - RNA, 19 nt, Artificial Sequence
  Description of Artificial Sequence: Synthetic oligonucleotide
ucgaugcagucaaacacuu

SEQ ID NO: 3097946 - RNA, 19 nt, Artificial Sequence
  Description of Artificial Sequence: Synthetic oligonucleotide
guguuggggcgacuggacg

SEQ ID NO: 3097947 - RNA, 19 nt, Artificial Sequence
  Description of Artificial Sequence: Synthetic oligonucleotide
gaucccgugggguggagga

SEQ ID NO: 3097948 - RNA, 19 nt, Artificial Sequence
  Description of Artificial Sequence: Synthetic oligonucleotide
gagguacaggcccugaaua

SEQ ID NO: 3097949 - RNA, 19 nt, Artificial Sequence
  Description of Artificial Sequence: Synthetic oligonucleotide
gguacaggcccugaauagg

SEQ ID NO: 3097950 - RNA, 19 nt, Artificial Sequence
  Description of Artificial Sequence: Synthetic oligonucleotide
ggcaccguggaauauguuc

SEQ ID NO: 3097951 - RNA, 19 nt, Artificial Sequence
  Description of Artificial Sequence: Synthetic oligonucleotide
cucuugaagccaggggucg

SEQ ID NO: 3097952 - RNA, 19 nt, Artificial Sequence
  Description of Artificial Sequence: Synthetic oligonucleotide
gaagcccgaagauucucuc

SEQ ID NO: 3097953 - RNA, 19 nt, Artificial Sequence
  Description of Artificial Sequence: Synthetic oligonucleotide
ccaggaagcccgaagauuc

SEQ ID NO: 3097954 - RNA, 19 nt, Artificial Sequence
  Description of Artificial Sequence: Synthetic oligonucleotide
gcacagaacucuugaagcc

SEQ ID NO: 3097955 - RNA, 19 nt, Artificial Sequence
  Description of Artificial Sequence: Synthetic oligonucleotide
cauccccagaucuugccuc

SEQ ID NO: 3097956 - RNA, 19 nt, Artificial Sequence
  Description of Artificial Sequence: Synthetic oligonucleotide
uagggcaucuguagccaga

SEQ ID NO: 3097957 - RNA, 19 nt, Artificial Sequence
  Description of Artificial Sequence: Synthetic oligonucleotide
ccucgaugcagucaaacac

SEQ ID NO: 3097958 - RNA, 19 nt, Artificial Sequence
  Description of Artificial Sequence: Synthetic oligonucleotide
aguguuggggcgacuggac

SEQ ID NO: 3097959 - RNA, 19 nt, Artificial Sequence
  Description of Artificial Sequence: Synthetic oligonucleotide
ucguaggccucgaugcagu

SEQ ID NO: 3097960 - RNA, 19 nt, Artificial Sequence
  Description of Artificial Sequence: Synthetic oligonucleotide
uagggcguauacugaguga

SEQ ID NO: 3097961 - RNA, 19 nt, Artificial Sequence
  Description of Artificial Sequence: Synthetic oligonucleotide
ucucuagaucccguggggu

SEQ ID NO: 3097962 - RNA, 19 nt, Artificial Sequence
  Description of Artificial Sequence: Synthetic oligonucleotide
gcguauacugagugaagag

SEQ ID NO: 3097963 - RNA, 19 nt, Artificial Sequence
  Description of Artificial Sequence: Synthetic oligonucleotide
cagaacucuugaagccagg

SEQ ID NO: 3097964 - RNA, 19 nt, Artificial Sequence
  Description of Artificial Sequence: Synthetic oligonucleotide
agggcguauacugagugaa

SEQ ID NO: 3097965 - RNA, 19 nt, Artificial Sequence
  Description of Artificial Sequence: Synthetic oligonucleotide
cauggcaccguggaauaug

SEQ ID NO: 3097966 - RNA, 19 nt, Artificial Sequence
  Description of Artificial Sequence: Synthetic oligonucleotide
caccguggaauauguuccc

SEQ ID NO: 3097967 - RNA, 19 nt, Artificial Sequence
  Description of Artificial Sequence: Synthetic oligonucleotide
cguauacugagugaagagg

SEQ ID NO: 3097968 - RNA, 19 nt, Artificial Sequence
  Description of Artificial Sequence: Synthetic oligonucleotide
caggguguagggcguauac

SEQ ID NO: 3097969 - RNA, 19 nt, Artificial Sequence
  Description of Artificial Sequence: Synthetic oligonucleotide
uugaagccaggggucguag

SEQ ID NO: 3097970 - RNA, 19 nt, Artificial Sequence
  Description of Artificial Sequence: Synthetic oligonucleotide
agcccgaagauucucucua

SEQ ID NO: 3097971 - RNA, 19 nt, Artificial Sequence
  Description of Artificial Sequence: Synthetic oligonucleotide
augucucuggccagcacag

SEQ ID NO: 3097972 - RNA, 19 nt, Artificial Sequence
  Description of Artificial Sequence: Synthetic oligonucleotide
uguucccuccaggaagccc

SEQ ID NO: 3097973 - RNA, 19 nt, Artificial Sequence
  Description of Artificial Sequence: Synthetic oligonucleotide
cuggacgggcaaaguagag

SEQ ID NO: 3097974 - RNA, 19 nt, Artificial Sequence
  Description of Artificial Sequence: Synthetic oligonucleotide
gcaccguggaauauguucc

SEQ ID NO: 3097975 - RNA, 19 nt, Artificial Sequence
  Description of Artificial Sequence: Synthetic oligonucleotide
agggcaucuguagccagag

SEQ ID NO: 3097976 - RNA, 19 nt, Artificial Sequence
  Description of Artificial Sequence: Synthetic oligonucleotide
aggaagcccgaagauucuc

SEQ ID NO: 3097977 - RNA, 19 nt, Artificial Sequence
  Description of Artificial Sequence: Synthetic oligonucleotide
gaggaugucucuggccagc

SEQ ID NO: 3097978 - RNA, 19 nt, Artificial Sequence
  Description of Artificial Sequence: Synthetic oligonucleotide
guuggggcgacuggacggg

SEQ ID NO: 3097979 - RNA, 19 nt, Artificial Sequence
  Description of Artificial Sequence: Synthetic oligonucleotide
gguccagggacauggcacc

SEQ ID NO: 3097980 - RNA, 19 nt, Artificial Sequence
  Description of Artificial Sequence: Synthetic oligonucleotide
cucgaugcagucaaacacu

SEQ ID NO: 3097981 - RNA, 19 nt, Artificial Sequence
  Description of Artificial Sequence: Synthetic oligonucleotide
ggguggaggaugucucugg

SEQ ID NO: 3097982 - RNA, 19 nt, Artificial Sequence
  Description of Artificial Sequence: Synthetic oligonucleotide
cagaguguuggggcgacug

SEQ ID NO: 3097983 - RNA, 19 nt, Artificial Sequence
  Description of Artificial Sequence: Synthetic oligonucleotide
guggaauauguucccucca

SEQ ID NO: 3097984 - RNA, 19 nt, Artificial Sequence
  Description of Artificial Sequence: Synthetic oligonucleotide
gacauggcaccguggaaua

SEQ ID NO: 3097985 - RNA, 19 nt, Artificial Sequence
  Description of Artificial Sequence: Synthetic oligonucleotide
cacagaacucuugaagcca

SEQ ID NO: 3097986 - RNA, 19 nt, Artificial Sequence
  Description of Artificial Sequence: Synthetic oligonucleotide
cguggaauauguucccucc

SEQ ID NO: 3097987 - RNA, 19 nt, Artificial Sequence
  Description of Artificial Sequence: Synthetic oligonucleotide
gucguaggccucgaugcag

SEQ ID NO: 3097988 - RNA, 19 nt, Artificial Sequence
  Description of Artificial Sequence: Synthetic oligonucleotide
acuggacgggcaaaguaga

SEQ ID NO: 3097989 - RNA, 19 nt, Artificial Sequence
  Description of Artificial Sequence: Synthetic oligonucleotide
ggacgggcaaaguagagcu

SEQ ID NO: 3097990 - RNA, 19 nt, Artificial Sequence
  Description of Artificial Sequence: Synthetic oligonucleotide
gucucuggccagcacagaa

SEQ ID NO: 3097991 - RNA, 19 nt, Artificial Sequence
  Description of Artificial Sequence: Synthetic oligonucleotide
augcagucaaacacuuugu

SEQ ID NO: 3097992 - RNA, 19 nt, Artificial Sequence
  Description of Artificial Sequence: Synthetic oligonucleotide
cagggacauggcaccgugg

SEQ ID NO: 3097993 - RNA, 19 nt, Artificial Sequence
  Description of Artificial Sequence: Synthetic oligonucleotide
cgaagauucucucuagauc

SEQ ID NO: 3097994 - RNA, 19 nt, Artificial Sequence
  Description of Artificial Sequence: Synthetic oligonucleotide
auguucccuccaggaagcc

SEQ ID NO: 3097995 - RNA, 19 nt, Artificial Sequence
  Description of Artificial Sequence: Synthetic oligonucleotide
ucccgugggguggaggaug

SEQ ID NO: 3097996 - RNA, 19 nt, Artificial Sequence
  Description of Artificial Sequence: Synthetic oligonucleotide
caaacacuuugucugcaua

SEQ ID NO: 3097997 - RNA, 19 nt, Artificial Sequence
  Description of Artificial Sequence: Synthetic oligonucleotide
ggcguauacugagugaaga

SEQ ID NO: 3097998 - RNA, 19 nt, Artificial Sequence
  Description of Artificial Sequence: Synthetic oligonucleotide
cagaucuugccuccugcca

SEQ ID NO: 3097999 - RNA, 19 nt, Artificial Sequence
  Description of Artificial Sequence: Synthetic oligonucleotide
cuguagccagaguguuggg

SEQ ID NO: 3098000 - RNA, 19 nt, Artificial Sequence
  Description of Artificial Sequence: Synthetic oligonucleotide
ucuugaagccaggggucgu

SEQ ID NO: 3098001 - RNA, 19 nt, Artificial Sequence
  Description of Artificial Sequence: Synthetic oligonucleotide
ggggucguaggccucgaug

SEQ ID NO: 3098002 - RNA, 19 nt, Artificial Sequence
  Description of Artificial Sequence: Synthetic oligonucleotide
aucuguagccagaguguug

SEQ ID NO: 3098003 - RNA, 19 nt, Artificial Sequence
  Description of Artificial Sequence: Synthetic oligonucleotide
ccagaucuugccuccugcc

SEQ ID NO: 3098004 - RNA, 19 nt, Artificial Sequence
  Description of Artificial Sequence: Synthetic oligonucleotide
agaucccgugggguggagg

SEQ ID NO: 3098005 - RNA, 19 nt, Artificial Sequence
  Description of Artificial Sequence: Synthetic oligonucleotide
uggggcgacuggacgggca

SEQ ID NO: 3098006 - RNA, 19 nt, Artificial Sequence
  Description of Artificial Sequence: Synthetic oligonucleotide
aggguguagggcguauacu

SEQ ID NO: 3098007 - RNA, 19 nt, Artificial Sequence
  Description of Artificial Sequence: Synthetic oligonucleotide
gucaaacacuuugucugca

SEQ ID NO: 3098008 - RNA, 19 nt, Artificial Sequence
  Description of Artificial Sequence: Synthetic oligonucleotide
gccagcacagaacucuuga

SEQ ID NO: 3098009 - RNA, 19 nt, Artificial Sequence
  Description of Artificial Sequence: Synthetic oligonucleotide
ucuugccuccugccagggu

SEQ ID NO: 3098010 - RNA, 19 nt, Artificial Sequence
  Description of Artificial Sequence: Synthetic oligonucleotide
cuccugccaggguguaggg

SEQ ID NO: 3098011 - RNA, 19 nt, Artificial Sequence
  Description of Artificial Sequence: Synthetic oligonucleotide
aggcccugaauagggcauc

SEQ ID NO: 3098012 - RNA, 19 nt, Artificial Sequence
  Description of Artificial Sequence: Synthetic oligonucleotide
gacgggcaaaguagagcug

SEQ ID NO: 3098013 - RNA, 19 nt, Artificial Sequence
  Description of Artificial Sequence: Synthetic oligonucleotide
uccugccaggguguagggc

SEQ ID NO: 3098014 - RNA, 19 nt, Artificial Sequence
  Description of Artificial Sequence: Synthetic oligonucleotide
agagcugguccagggacau

SEQ ID NO: 3098015 - RNA, 19 nt, Artificial Sequence
  Description of Artificial Sequence: Synthetic oligonucleotide
ccuccugccaggguguagg

SEQ ID NO: 3098016 - RNA, 19 nt, Artificial Sequence
  Description of Artificial Sequence: Synthetic oligonucleotide
gauucucucuagaucccgu

SEQ ID NO: 3098017 - RNA, 19 nt, Artificial Sequence
  Description of Artificial Sequence: Synthetic oligonucleotide
uucccuccaggaagcccga

SEQ ID NO: 3098018 - RNA, 19 nt, Artificial Sequence
  Description of Artificial Sequence: Synthetic oligonucleotide
accguggaauauguucccu

SEQ ID NO: 3098019 - RNA, 19 nt, Artificial Sequence
  Description of Artificial Sequence: Synthetic oligonucleotide
uggccagcacagaacucuu

SEQ ID NO: 3098020 - RNA, 19 nt, Artificial Sequence
  Description of Artificial Sequence: Synthetic oligonucleotide
guccagggacauggcaccg

SEQ ID NO: 3098021 - RNA, 19 nt, Artificial Sequence
  Description of Artificial Sequence: Synthetic oligonucleotide
uccagggacauggcaccgu

SEQ ID NO: 3098022 - RNA, 19 nt, Artificial Sequence
  Description of Artificial Sequence: Synthetic oligonucleotide
gccucgaugcagucaaaca

SEQ ID NO: 3098023 - RNA, 19 nt, Artificial Sequence
  Description of Artificial Sequence: Synthetic oligonucleotide
cugguccagggacauggca

SEQ ID NO: 3098024 - RNA, 19 nt, Artificial Sequence
  Description of Artificial Sequence: Synthetic oligonucleotide
gugggguggaggaugucuc

SEQ ID NO: 3098025 - RNA, 19 nt, Artificial Sequence
  Description of Artificial Sequence: Synthetic oligonucleotide
cccagaucuugccuccugc

SEQ ID NO: 3098026 - RNA, 19 nt, Artificial Sequence
  Description of Artificial Sequence: Synthetic oligonucleotide
aggaugucucuggccagca

SEQ ID NO: 3098027 - RNA, 19 nt, Artificial Sequence
  Description of Artificial Sequence: Synthetic oligonucleotide
gcccgaagauucucucuag

SEQ ID NO: 3098028 - RNA, 19 nt, Artificial Sequence
  Description of Artificial Sequence: Synthetic oligonucleotide
gguguagggcguauacuga

SEQ ID NO: 3098029 - RNA, 19 nt, Artificial Sequence
  Description of Artificial Sequence: Synthetic oligonucleotide
ugucucuggccagcacaga

SEQ ID NO: 3098030 - RNA, 19 nt, Artificial Sequence
  Description of Artificial Sequence: Synthetic oligonucleotide
acagagguacaggcccuga

SEQ ID NO: 3098031 - RNA, 19 nt, Artificial Sequence
  Description of Artificial Sequence: Synthetic oligonucleotide
guaggccucgaugcaguca

SEQ ID NO: 3098032 - RNA, 19 nt, Artificial Sequence
  Description of Artificial Sequence: Synthetic oligonucleotide
cacagagguacaggcccug

SEQ ID NO: 3098033 - RNA, 19 nt, Artificial Sequence
  Description of Artificial Sequence: Synthetic oligonucleotide
ccugaauagggcaucugua

SEQ ID NO: 3098034 - RNA, 19 nt, Artificial Sequence
  Description of Artificial Sequence: Synthetic oligonucleotide
ggcgacuggacgggcaaag

SEQ ID NO: 3098035 - RNA, 19 nt, Artificial Sequence
  Description of Artificial Sequence: Synthetic oligonucleotide
ccguggaauauguucccuc

SEQ ID NO: 3098036 - RNA, 19 nt, Artificial Sequence
  Description of Artificial Sequence: Synthetic oligonucleotide
ccuccaggaagcccgaaga

SEQ ID NO: 3098037 - RNA, 19 nt, Artificial Sequence
  Description of Artificial Sequence: Synthetic oligonucleotide
agccagaguguuggggcga

SEQ ID NO: 3098038 - RNA, 19 nt, Artificial Sequence
  Description of Artificial Sequence: Synthetic oligonucleotide
ggucguaggccucgaugca

SEQ ID NO: 3098039 - RNA, 19 nt, Artificial Sequence
  Description of Artificial Sequence: Synthetic oligonucleotide
cagagguacaggcccugaa

SEQ ID NO: 3098040 - RNA, 19 nt, Artificial Sequence
  Description of Artificial Sequence: Synthetic oligonucleotide
gggcguauacugagugaag

SEQ ID NO: 3098041 - RNA, 19 nt, Artificial Sequence
  Description of Artificial Sequence: Synthetic oligonucleotide
ggccucgaugcagucaaac

SEQ ID NO: 3098042 - RNA, 19 nt, Artificial Sequence
  Description of Artificial Sequence: Synthetic oligonucleotide
ggacauggcaccguggaau

SEQ ID NO: 3098043 - RNA, 19 nt, Artificial Sequence
  Description of Artificial Sequence: Synthetic oligonucleotide
ccugcucauccccagaucu

SEQ ID NO: 3098044 - RNA, 19 nt, Artificial Sequence
  Description of Artificial Sequence: Synthetic oligonucleotide
uuggggcgacuggacgggc

SEQ ID NO: 3098045 - RNA, 19 nt, Artificial Sequence
  Description of Artificial Sequence: Synthetic oligonucleotide
uagaucccgugggguggag

SEQ ID NO: 3098046 - RNA, 19 nt, Artificial Sequence
  Description of Artificial Sequence: Synthetic oligonucleotide
gggguggaggaugucucug

SEQ ID NO: 3098047 - RNA, 19 nt, Artificial Sequence
  Description of Artificial Sequence: Synthetic oligonucleotide
cccuccaggaagcccgaag

SEQ ID NO: 3098048 - RNA, 19 nt, Artificial Sequence
  Description of Artificial Sequence: Synthetic oligonucleotide
uggcaccguggaauauguu

SEQ ID NO: 3098049 - RNA, 19 nt, Artificial Sequence
  Description of Artificial Sequence: Synthetic oligonucleotide
acauggcaccguggaauau

SEQ ID NO: 3098050 - RNA, 19 nt, Artificial Sequence
  Description of Artificial Sequence: Synthetic oligonucleotide
ggaugucucuggccagcac

SEQ ID NO: 3098051 - RNA, 19 nt, Artificial Sequence
  Description of Artificial Sequence: Synthetic oligonucleotide
cuagaucccguggggugga

SEQ ID NO: 3098052 - RNA, 19 nt, Artificial Sequence
  Description of Artificial Sequence: Synthetic oligonucleotide
gcucauccccagaucuugc

SEQ ID NO: 3098053 - RNA, 19 nt, Artificial Sequence
  Description of Artificial Sequence: Synthetic oligonucleotide
gcaucuguagccagagugu

SEQ ID NO: 3098054 - RNA, 19 nt, Artificial Sequence
  Description of Artificial Sequence: Synthetic oligonucleotide
cuugaagccaggggucgua

SEQ ID NO: 3098055 - RNA, 19 nt, Artificial Sequence
  Description of Artificial Sequence: Synthetic oligonucleotide
uccccagaucuugccuccu

SEQ ID NO: 3098056 - RNA, 19 nt, Artificial Sequence
  Description of Artificial Sequence: Synthetic oligonucleotide
ccaggggucguaggccucg

SEQ ID NO: 3098057 - RNA, 19 nt, Artificial Sequence
  Description of Artificial Sequence: Synthetic oligonucleotide
caggaagcccgaagauucu

SEQ ID NO: 3098058 - RNA, 19 nt, Artificial Sequence
  Description of Artificial Sequence: Synthetic oligonucleotide
gagcugguccagggacaug

SEQ ID NO: 3098059 - RNA, 19 nt, Artificial Sequence
  Description of Artificial Sequence: Synthetic oligonucleotide
caggcccugaauagggcau

SEQ ID NO: 3098060 - RNA, 19 nt, Artificial Sequence
  Description of Artificial Sequence: Synthetic oligonucleotide
cuuugucugcauaguuguu

SEQ ID NO: 3098061 - RNA, 19 nt, Artificial Sequence
  Description of Artificial Sequence: Synthetic oligonucleotide
cccgaagauucucucuaga

SEQ ID NO: 3098062 - RNA, 19 nt, Artificial Sequence
  Description of Artificial Sequence: Synthetic oligonucleotide
ccagcacagaacucuugaa

SEQ ID NO: 3098063 - RNA, 19 nt, Artificial Sequence
  Description of Artificial Sequence: Synthetic oligonucleotide
aggggucguaggccucgau

SEQ ID NO: 3098064 - RNA, 19 nt, Artificial Sequence
  Description of Artificial Sequence: Synthetic oligonucleotide
caucuguagccagaguguu

SEQ ID NO: 3098065 - RNA, 19 nt, Artificial Sequence
  Description of Artificial Sequence: Synthetic oligonucleotide
ccgaagauucucucuagau

SEQ ID NO: 3098066 - RNA, 19 nt, Artificial Sequence
  Description of Artificial Sequence: Synthetic oligonucleotide
cccugaauagggcaucugu

SEQ ID NO: 3098067 - RNA, 19 nt, Artificial Sequence
  Description of Artificial Sequence: Synthetic oligonucleotide
cuccaggaagcccgaagau

SEQ ID NO: 3098068 - RNA, 19 nt, Artificial Sequence
  Description of Artificial Sequence: Synthetic oligonucleotide
gggacauggcaccguggaa

SEQ ID NO: 3098069 - RNA, 19 nt, Artificial Sequence
  Description of Artificial Sequence: Synthetic oligonucleotide
ggccagcacagaacucuug

SEQ ID NO: 3098070 - RNA, 19 nt, Artificial Sequence
  Description of Artificial Sequence: Synthetic oligonucleotide
ggggcgacuggacgggcaa

SEQ ID NO: 3098071 - RNA, 19 nt, Artificial Sequence
  Description of Artificial Sequence: Synthetic oligonucleotide
aucccgugggguggaggau

SEQ ID NO: 3098072 - RNA, 19 nt, Artificial Sequence
  Description of Artificial Sequence: Synthetic oligonucleotide
ugccaggguguagggcgua

SEQ ID NO: 3098073 - RNA, 19 nt, Artificial Sequence
  Description of Artificial Sequence: Synthetic oligonucleotide
ccccagaucuugccuccug

SEQ ID NO: 3098074 - RNA, 19 nt, Artificial Sequence
  Description of Artificial Sequence: Synthetic oligonucleotide
gccagaguguuggggcgac

SEQ ID NO: 3098075 - RNA, 19 nt, Artificial Sequence
  Description of Artificial Sequence: Synthetic oligonucleotide
ucccuccaggaagcccgaa

SEQ ID NO: 3098076 - RNA, 19 nt, Artificial Sequence
  Description of Artificial Sequence: Synthetic oligonucleotide
cugccaggguguagggcgu

SEQ ID NO: 3098077 - RNA, 19 nt, Artificial Sequence
  Description of Artificial Sequence: Synthetic oligonucleotide
gcccugaauagggcaucug

SEQ ID NO: 3098078 - RNA, 19 nt, Artificial Sequence
  Description of Artificial Sequence: Synthetic oligonucleotide
cugcucauccccagaucuu

SEQ ID NO: 3098079 - RNA, 19 nt, Artificial Sequence
  Description of Artificial Sequence: Synthetic oligonucleotide
ugccuccugccagggugua

SEQ ID NO: 3098080 - RNA, 19 nt, Artificial Sequence
  Description of Artificial Sequence: Synthetic oligonucleotide
cguaggccucgaugcaguc

SEQ ID NO: 3098081 - RNA, 19 nt, Artificial Sequence
  Description of Artificial Sequence: Synthetic oligonucleotide
cgacuggacgggcaaagua

SEQ ID NO: 3098082 - RNA, 19 nt, Artificial Sequence
  Description of Artificial Sequence: Synthetic oligonucleotide
gccuccugccaggguguag

SEQ ID NO: 3098083 - RNA, 19 nt, Artificial Sequence
  Description of Artificial Sequence: Synthetic oligonucleotide
ccacagagguacaggcccu

SEQ ID NO: 3098084 - RNA, 19 nt, Artificial Sequence
  Description of Artificial Sequence: Synthetic oligonucleotide
ggcccugaauagggcaucu

SEQ ID NO: 3098085 - RNA, 19 nt, Artificial Sequence
  Description of Artificial Sequence: Synthetic oligonucleotide
caggggucguaggccucga

SEQ ID NO: 3098086 - RNA, 19 nt, Artificial Sequence
  Description of Artificial Sequence: Synthetic oligonucleotide
aggccucgaugcagucaaa

SEQ ID NO: 3098087 - RNA, 19 nt, Artificial Sequence
  Description of Artificial Sequence: Synthetic oligonucleotide
gggcaucuguagccagagu

SEQ ID NO: 3098088 - RNA, 19 nt, Artificial Sequence
  Description of Artificial Sequence: Synthetic oligonucleotide
cgugggguggaggaugucu

SEQ ID NO: 3098089 - RNA, 19 nt, Artificial Sequence
  Description of Artificial Sequence: Synthetic oligonucleotide
gcgacuggacgggcaaagu

SEQ ID NO: 3098090 - RNA, 19 nt, Artificial Sequence
  Description of Artificial Sequence: Synthetic oligonucleotide
gccaggggucguaggccuc

SEQ ID NO: 3098091 - RNA, 19 nt, Artificial Sequence
  Description of Artificial Sequence: Synthetic oligonucleotide
cccgugggguggaggaugu

SEQ ID NO: 3098092 - RNA, 19 nt, Artificial Sequence
  Description of Artificial Sequence: Synthetic oligonucleotide
gggcgacuggacgggcaaa

SEQ ID NO: 3098093 - RNA, 19 nt, Artificial Sequence
  Description of Artificial Sequence: Synthetic oligonucleotide
ccaggguguagggcguaua

SEQ ID NO: 3098094 - RNA, 19 nt, Artificial Sequence
  Description of Artificial Sequence: Synthetic oligonucleotide
cgaugcagucaaacacuuu

SEQ ID NO: 3098095 - RNA, 19 nt, Artificial Sequence
  Description of Artificial Sequence: Synthetic oligonucleotide
gccaggguguagggcguau

SEQ ID NO: 3098096 - RNA, 19 nt, Artificial Sequence
  Description of Artificial Sequence: Synthetic oligonucleotide
ccgugggguggaggauguc

SEQ ID NO: 3098097 - RNA, 19 nt, Artificial Sequence
  Description of Artificial Sequence: Synthetic oligonucleotide
ccagaguguuggggcgacu

SEQ ID NO: 3098098 - RNA, 19 nt, Artificial Sequence
  Description of Artificial Sequence: Synthetic oligonucleotide
cuacuacugagccacaccc

SEQ ID NO: 3098099 - RNA, 19 nt, Artificial Sequence
  Description of Artificial Sequence: Synthetic oligonucleotide
ugagccacaccccagcccc

SEQ ID NO: 3098100 - RNA, 19 nt, Artificial Sequence
  Description of Artificial Sequence: Synthetic oligonucleotide
uacugagccacacccagcc

SEQ ID NO: 3098101 - RNA, 19 nt, Artificial Sequence
  Description of Artificial Sequence: Synthetic oligonucleotide
acuacugagccacacccag

SEQ ID NO: 3098102 - RNA, 19 nt, Artificial Sequence
  Description of Artificial Sequence: Synthetic oligonucleotide
ucuacuacugagccacacc

SEQ ID NO: 3098103 - RNA, 19 nt, Artificial Sequence
  Description of Artificial Sequence: Synthetic oligonucleotide
accacugagccaugcacac

SEQ ID NO: 3098104 - RNA, 19 nt, Artificial Sequence
  Description of Artificial Sequence: Synthetic oligonucleotide
ugagccaugcacaccagaa

SEQ ID NO: 3098105 - RNA, 19 nt, Artificial Sequence
  Description of Artificial Sequence: Synthetic oligonucleotide
uaccacugagccaugcaca

SEQ ID NO: 3098106 - RNA, 19 nt, Artificial Sequence
  Description of Artificial Sequence: Synthetic oligonucleotide
cucccacugagccacaccc

SEQ ID NO: 3098107 - RNA, 19 nt, Artificial Sequence
  Description of Artificial Sequence: Synthetic oligonucleotide
cuaccacugagccaugcac

SEQ ID NO: 3098108 - RNA, 19 nt, Artificial Sequence
  Description of Artificial Sequence: Synthetic oligonucleotide
accagaaaagggcaccaga

SEQ ID NO: 3098109 - RNA, 19 nt, Artificial Sequence
  Description of Artificial Sequence: Synthetic oligonucleotide
uucuaggcagggcucuacc

SEQ ID NO: 3098110 - RNA, 19 nt, Artificial Sequence
  Description of Artificial Sequence: Synthetic oligonucleotide
cucccuuggggauucuagg

SEQ ID NO: 3098111 - RNA, 19 nt, Artificial Sequence
  Description of Artificial Sequence: Synthetic oligonucleotide
ggggauuccaggcaggggc

SEQ ID NO: 3098112 - RNA, 19 nt, Artificial Sequence
  Description of Artificial Sequence: Synthetic oligonucleotide
ucuaggcagggcucuacca

SEQ ID NO: 3098113 - RNA, 19 nt, Artificial Sequence
  Description of Artificial Sequence: Synthetic oligonucleotide
acacccagccuuucugggg

SEQ ID NO: 3098114 - RNA, 19 nt, Artificial Sequence
  Description of Artificial Sequence: Synthetic oligonucleotide
cuuggggauucuaggcagg

SEQ ID NO: 3098115 - RNA, 19 nt, Artificial Sequence
  Description of Artificial Sequence: Synthetic oligonucleotide
uacuacugagccacaccca

SEQ ID NO: 3098116 - RNA, 19 nt, Artificial Sequence
  Description of Artificial Sequence: Synthetic oligonucleotide
cuaggcagggcucuaccac

SEQ ID NO: 3098117 - RNA, 19 nt, Artificial Sequence
  Description of Artificial Sequence: Synthetic oligonucleotide
uuggggauucuaggcaggg

SEQ ID NO: 3098118 - RNA, 19 nt, Artificial Sequence
  Description of Artificial Sequence: Synthetic oligonucleotide
cacugagccaugcacacca

SEQ ID NO: 3098119 - RNA, 19 nt, Artificial Sequence
  Description of Artificial Sequence: Synthetic oligonucleotide
uaggcagggcucuaccacu

SEQ ID NO: 3098120 - RNA, 19 nt, Artificial Sequence
  Description of Artificial Sequence: Synthetic oligonucleotide
cacacccagccuuucuggg

SEQ ID NO: 3098121 - RNA, 19 nt, Artificial Sequence
  Description of Artificial Sequence: Synthetic oligonucleotide
cagggcucuaccacugagc

SEQ ID NO: 3098122 - RNA, 19 nt, Artificial Sequence
  Description of Artificial Sequence: Synthetic oligonucleotide
auucuaggcagggcucuac

SEQ ID NO: 3098123 - RNA, 19 nt, Artificial Sequence
  Description of Artificial Sequence: Synthetic oligonucleotide
ucucccacugagccacacc

SEQ ID NO: 3098124 - RNA, 19 nt, Artificial Sequence
  Description of Artificial Sequence: Synthetic oligonucleotide
cuacugagccacacccagc

SEQ ID NO: 3098125 - RNA, 19 nt, Artificial Sequence
  Description of Artificial Sequence: Synthetic oligonucleotide
ccaugcacaccagaaaagg

SEQ ID NO: 3098126 - RNA, 19 nt, Artificial Sequence
  Description of Artificial Sequence: Synthetic oligonucleotide
ugagccacacccagccuuu

SEQ ID NO: 3098127 - RNA, 19 nt, Artificial Sequence
  Description of Artificial Sequence: Synthetic oligonucleotide
ccuuggggauucuaggcag

SEQ ID NO: 3098128 - RNA, 19 nt, Artificial Sequence
  Description of Artificial Sequence: Synthetic oligonucleotide
uccaggcaggggcucuacc

SEQ ID NO: 3098129 - RNA, 19 nt, Artificial Sequence
  Description of Artificial Sequence: Synthetic oligonucleotide
caccccagccccucacugg

SEQ ID NO: 3098130 - RNA, 19 nt, Artificial Sequence
  Description of Artificial Sequence: Synthetic oligonucleotide
cucuacuacugagccacac

SEQ ID NO: 3098131 - RNA, 19 nt, Artificial Sequence
  Description of Artificial Sequence: Synthetic oligonucleotide
uccaggcaggggcucuacu

SEQ ID NO: 3098132 - RNA, 19 nt, Artificial Sequence
  Description of Artificial Sequence: Synthetic oligonucleotide
ccucccuuggggauucuag

SEQ ID NO: 3098133 - RNA, 19 nt, Artificial Sequence
  Description of Artificial Sequence: Synthetic oligonucleotide
ccacacccagccuuucugg

SEQ ID NO: 3098134 - RNA, 19 nt, Artificial Sequence
  Description of Artificial Sequence: Synthetic oligonucleotide
acugagccacacccagccu

SEQ ID NO: 3098135 - RNA, 19 nt, Artificial Sequence
  Description of Artificial Sequence: Synthetic oligonucleotide
gccaugcacaccagaaaag

SEQ ID NO: 3098136 - RNA, 19 nt, Artificial Sequence
  Description of Artificial Sequence: Synthetic oligonucleotide
agccacacccagccuuucu

SEQ ID NO: 3098137 - RNA, 19 nt, Artificial Sequence
  Description of Artificial Sequence: Synthetic oligonucleotide
gccacacccagccuuucug

SEQ ID NO: 3098138 - RNA, 19 nt, Artificial Sequence
  Description of Artificial Sequence: Synthetic oligonucleotide
gcagggcucuaccacugag

SEQ ID NO: 3098139 - RNA, 19 nt, Artificial Sequence
  Description of Artificial Sequence: Synthetic oligonucleotide
cugagccaugcacaccaga

SEQ ID NO: 3098140 - RNA, 19 nt, Artificial Sequence
  Description of Artificial Sequence: Synthetic oligonucleotide
acugagccaugcacaccag

SEQ ID NO: 3098141 - RNA, 19 nt, Artificial Sequence
  Description of Artificial Sequence: Synthetic oligonucleotide
aggcagggcucuaccacug

SEQ ID NO: 3098142 - RNA, 19 nt, Artificial Sequence
  Description of Artificial Sequence: Synthetic oligonucleotide
gauucuaggcagggcucua

SEQ ID NO: 3098143 - RNA, 19 nt, Artificial Sequence
  Description of Artificial Sequence: Synthetic oligonucleotide
ccaggcaggggcucuacca

SEQ ID NO: 3098144 - RNA, 19 nt, Artificial Sequence
  Description of Artificial Sequence: Synthetic oligonucleotide
gggauucuaggcagggcuc

SEQ ID NO: 3098145 - RNA, 19 nt, Artificial Sequence
  Description of Artificial Sequence: Synthetic oligonucleotide
uuccaggcaggggcucuac

SEQ ID NO: 3098146 - RNA, 19 nt, Artificial Sequence
  Description of Artificial Sequence: Synthetic oligonucleotide
gauuccaggcaggggcucu

SEQ ID NO: 3098147 - RNA, 19 nt, Artificial Sequence
  Description of Artificial Sequence: Synthetic oligonucleotide
cccuuggggauucuaggca

SEQ ID NO: 3098148 - RNA, 19 nt, Artificial Sequence
  Description of Artificial Sequence: Synthetic oligonucleotide
uccucccuuggggauucua

SEQ ID NO: 3098149 - RNA, 19 nt, Artificial Sequence
  Description of Artificial Sequence: Synthetic oligonucleotide
ggauucuaggcagggcucu

SEQ ID NO: 3098150 - RNA, 19 nt, Artificial Sequence
  Description of Artificial Sequence: Synthetic oligonucleotide
auuccaggcaggggcucua

SEQ ID NO: 3098151 - RNA, 19 nt, Artificial Sequence
  Description of Artificial Sequence: Synthetic oligonucleotide
ccaggcaggggcucuacua

SEQ ID NO: 3098152 - RNA, 19 nt, Artificial Sequence
  Description of Artificial Sequence: Synthetic oligonucleotide
gagccacacccagccuuuc

SEQ ID NO: 3098153 - RNA, 19 nt, Artificial Sequence
  Description of Artificial Sequence: Synthetic oligonucleotide
ccacugagccaugcacacc

SEQ ID NO: 3098154 - RNA, 19 nt, Artificial Sequence
  Description of Artificial Sequence: Synthetic oligonucleotide
cccaggcuccucccuuggg

SEQ ID NO: 3098155 - RNA, 19 nt, Artificial Sequence
  Description of Artificial Sequence: Synthetic oligonucleotide
ggauuccaggcaggggcuc

SEQ ID NO: 3098156 - RNA, 19 nt, Artificial Sequence
  Description of Artificial Sequence: Synthetic oligonucleotide
ggcagggcucuaccacuga

SEQ ID NO: 3098157 - RNA, 19 nt, Artificial Sequence
  Description of Artificial Sequence: Synthetic oligonucleotide
ccacaccccagccccucac

SEQ ID NO: 3098158 - RNA, 19 nt, Artificial Sequence
  Description of Artificial Sequence: Synthetic oligonucleotide
gggauuccaggcaggggcu

SEQ ID NO: 3098159 - RNA, 19 nt, Artificial Sequence
  Description of Artificial Sequence: Synthetic oligonucleotide
cacaccccagccccucacu

SEQ ID NO: 3098160 - RNA, 19 nt, Artificial Sequence
  Description of Artificial Sequence: Synthetic oligonucleotide
gcucuacuacugagccaca

SEQ ID NO: 3098161 - RNA, 19 nt, Artificial Sequence
  Description of Artificial Sequence: Synthetic oligonucleotide
ucaaauuacuuuauuggcg

SEQ ID NO: 3098162 - RNA, 19 nt, Artificial Sequence
  Description of Artificial Sequence: Synthetic oligonucleotide
aauccuuauagaaaagucc

SEQ ID NO: 3098163 - RNA, 19 nt, Artificial Sequence
  Description of Artificial Sequence: Synthetic oligonucleotide
aaauccagcauuugguuac

SEQ ID NO: 3098164 - RNA, 19 nt, Artificial Sequence
  Description of Artificial Sequence: Synthetic oligonucleotide
guucaaauuacuuuauugg

SEQ ID NO: 3098165 - RNA, 19 nt, Artificial Sequence
  Description of Artificial Sequence: Synthetic oligonucleotide
uugguuacaagucauagcu

SEQ ID NO: 3098166 - RNA, 19 nt, Artificial Sequence
  Description of Artificial Sequence: Synthetic oligonucleotide
acaguuauguugcaugugc

SEQ ID NO: 3098167 - RNA, 19 nt, Artificial Sequence
  Description of Artificial Sequence: Synthetic oligonucleotide
ucuaaaauaccgaacaguc

SEQ ID NO: 3098168 - RNA, 19 nt, Artificial Sequence
  Description of Artificial Sequence: Synthetic oligonucleotide
cagaacauaauccuuauag

SEQ ID NO: 3098169 - RNA, 19 nt, Artificial Sequence
  Description of Artificial Sequence: Synthetic oligonucleotide
acuuuauuggcguugauca

SEQ ID NO: 3098170 - RNA, 19 nt, Artificial Sequence
  Description of Artificial Sequence: Synthetic oligonucleotide
acagucuuggucuuguggc

SEQ ID NO: 3098171 - RNA, 19 nt, Artificial Sequence
  Description of Artificial Sequence: Synthetic oligonucleotide
uucaaauuacuuuauuggc

SEQ ID NO: 3098172 - RNA, 19 nt, Artificial Sequence
  Description of Artificial Sequence: Synthetic oligonucleotide
acuucuaaaauaccgaaca

SEQ ID NO: 3098173 - RNA, 19 nt, Artificial Sequence
  Description of Artificial Sequence: Synthetic oligonucleotide
uaaaauaccgaacagucuu

SEQ ID NO: 3098174 - RNA, 19 nt, Artificial Sequence
  Description of Artificial Sequence: Synthetic oligonucleotide
ugaucaacagaacauaauc

SEQ ID NO: 3098175 - RNA, 19 nt, Artificial Sequence
  Description of Artificial Sequence: Synthetic oligonucleotide
uagaaauaccacuagcugc

SEQ ID NO: 3098176 - RNA, 19 nt, Artificial Sequence
  Description of Artificial Sequence: Synthetic oligonucleotide
uauagaaaaguccccaaac

SEQ ID NO: 3098177 - RNA, 19 nt, Artificial Sequence
  Description of Artificial Sequence: Synthetic oligonucleotide
acuacaaaaucccuacuuc

SEQ ID NO: 3098178 - RNA, 19 nt, Artificial Sequence
  Description of Artificial Sequence: Synthetic oligonucleotide
uccaguguaagcaaggccu

SEQ ID NO: 3098179 - RNA, 19 nt, Artificial Sequence
  Description of Artificial Sequence: Synthetic oligonucleotide
auccuuauagaaaaguccc

SEQ ID NO: 3098180 - RNA, 19 nt, Artificial Sequence
  Description of Artificial Sequence: Synthetic oligonucleotide
acuuacauccaguguaagc

SEQ ID NO: 3098181 - RNA, 19 nt, Artificial Sequence
  Description of Artificial Sequence: Synthetic oligonucleotide
aauaccacuagcugcuuca

SEQ ID NO: 3098182 - RNA, 19 nt, Artificial Sequence
  Description of Artificial Sequence: Synthetic oligonucleotide
uuggcguugaucaacagaa

SEQ ID NO: 3098183 - RNA, 19 nt, Artificial Sequence
  Description of Artificial Sequence: Synthetic oligonucleotide
acauaauccuuauagaaaa

SEQ ID NO: 3098184 - RNA, 19 nt, Artificial Sequence
  Description of Artificial Sequence: Synthetic oligonucleotide
aucaacagaacauaauccu

SEQ ID NO: 3098185 - RNA, 19 nt, Artificial Sequence
  Description of Artificial Sequence: Synthetic oligonucleotide
aauucaggugaggaaacac

SEQ ID NO: 3098186 - RNA, 19 nt, Artificial Sequence
  Description of Artificial Sequence: Synthetic oligonucleotide
uuuucuugguucaaauuac

SEQ ID NO: 3098187 - RNA, 19 nt, Artificial Sequence
  Description of Artificial Sequence: Synthetic oligonucleotide
auaccgaacagucuugguc

SEQ ID NO: 3098188 - RNA, 19 nt, Artificial Sequence
  Description of Artificial Sequence: Synthetic oligonucleotide
ugcuucacuacaaaauccc

SEQ ID NO: 3098189 - RNA, 19 nt, Artificial Sequence
  Description of Artificial Sequence: Synthetic oligonucleotide
uucacuacaaaaucccuac

SEQ ID NO: 3098190 - RNA, 19 nt, Artificial Sequence
  Description of Artificial Sequence: Synthetic oligonucleotide
uaauccuuauagaaaaguc

SEQ ID NO: 3098191 - RNA, 19 nt, Artificial Sequence
  Description of Artificial Sequence: Synthetic oligonucleotide
gaucaacagaacauaaucc

SEQ ID NO: 3098192 - RNA, 19 nt, Artificial Sequence
  Description of Artificial Sequence: Synthetic oligonucleotide
caaacaguuauguugcaug

SEQ ID NO: 3098193 - RNA, 19 nt, Artificial Sequence
  Description of Artificial Sequence: Synthetic oligonucleotide
aaacaguuauguugcaugu

SEQ ID NO: 3098194 - RNA, 19 nt, Artificial Sequence
  Description of Artificial Sequence: Synthetic oligonucleotide
ugaggaaacacaucucagc

SEQ ID NO: 3098195 - RNA, 19 nt, Artificial Sequence
  Description of Artificial Sequence: Synthetic oligonucleotide
auagaaaaguccccaaaca

SEQ ID NO: 3098196 - RNA, 19 nt, Artificial Sequence
  Description of Artificial Sequence: Synthetic oligonucleotide
aauuacuuuauuggcguug

SEQ ID NO: 3098197 - RNA, 19 nt, Artificial Sequence
  Description of Artificial Sequence: Synthetic oligonucleotide
aaaguccccaaacaguuau

SEQ ID NO: 3098198 - RNA, 19 nt, Artificial Sequence
  Description of Artificial Sequence: Synthetic oligonucleotide
uuugguuacaagucauagc

SEQ ID NO: 3098199 - RNA, 19 nt, Artificial Sequence
  Description of Artificial Sequence: Synthetic oligonucleotide
aaucccuacuucuaaaaua

SEQ ID NO: 3098200 - RNA, 19 nt, Artificial Sequence
  Description of Artificial Sequence: Synthetic oligonucleotide
aaaaucccuacuucuaaaa

SEQ ID NO: 3098201 - RNA, 19 nt, Artificial Sequence
  Description of Artificial Sequence: Synthetic oligonucleotide
aucccuacuucuaaaauac

SEQ ID NO: 3098202 - RNA, 19 nt, Artificial Sequence
  Description of Artificial Sequence: Synthetic oligonucleotide
cuagaaauaccacuagcug

SEQ ID NO: 3098203 - RNA, 19 nt, Artificial Sequence
  Description of Artificial Sequence: Synthetic oligonucleotide
gguucaaauuacuuuauug

SEQ ID NO: 3098204 - RNA, 19 nt, Artificial Sequence
  Description of Artificial Sequence: Synthetic oligonucleotide
agaacauaauccuuauaga

SEQ ID NO: 3098205 - RNA, 19 nt, Artificial Sequence
  Description of Artificial Sequence: Synthetic oligonucleotide
aaauaccgaacagucuugg

SEQ ID NO: 3098206 - RNA, 19 nt, Artificial Sequence
  Description of Artificial Sequence: Synthetic oligonucleotide
uuauagaaaaguccccaaa

SEQ ID NO: 3098207 - RNA, 19 nt, Artificial Sequence
  Description of Artificial Sequence: Synthetic oligonucleotide
auagcuuccuagaaauacc

SEQ ID NO: 3098208 - RNA, 19 nt, Artificial Sequence
  Description of Artificial Sequence: Synthetic oligonucleotide
uucuaaaauaccgaacagu

SEQ ID NO: 3098209 - RNA, 19 nt, Artificial Sequence
  Description of Artificial Sequence: Synthetic oligonucleotide
aacauaauccuuauagaaa

SEQ ID NO: 3098210 - RNA, 19 nt, Artificial Sequence
  Description of Artificial Sequence: Synthetic oligonucleotide
auccaguguaagcaaggcc

SEQ ID NO: 3098211 - RNA, 19 nt, Artificial Sequence
  Description of Artificial Sequence: Synthetic oligonucleotide
acaagucauagcuuccuag

SEQ ID NO: 3098212 - RNA, 19 nt, Artificial Sequence
  Description of Artificial Sequence: Synthetic oligonucleotide
uaccgaacagucuuggucu

SEQ ID NO: 3098213 - RNA, 19 nt, Artificial Sequence
  Description of Artificial Sequence: Synthetic oligonucleotide
aaaauccagcauuugguua

SEQ ID NO: 3098214 - RNA, 19 nt, Artificial Sequence
  Description of Artificial Sequence: Synthetic oligonucleotide
auuugguuacaagucauag

SEQ ID NO: 3098215 - RNA, 19 nt, Artificial Sequence
  Description of Artificial Sequence: Synthetic oligonucleotide
gaggaaacacaucucagca

SEQ ID NO: 3098216 - RNA, 19 nt, Artificial Sequence
  Description of Artificial Sequence: Synthetic oligonucleotide
uuauuggcguugaucaaca

SEQ ID NO: 3098217 - RNA, 19 nt, Artificial Sequence
  Description of Artificial Sequence: Synthetic oligonucleotide
uguaagcaaggccuggugu

SEQ ID NO: 3098218 - RNA, 19 nt, Artificial Sequence
  Description of Artificial Sequence: Synthetic oligonucleotide
uuuauuggcguugaucaac

SEQ ID NO: 3098219 - RNA, 19 nt, Artificial Sequence
  Description of Artificial Sequence: Synthetic oligonucleotide
aaaucccuacuucuaaaau

SEQ ID NO: 3098220 - RNA, 19 nt, Artificial Sequence
  Description of Artificial Sequence: Synthetic oligonucleotide
ucuugguucaaauuacuuu

SEQ ID NO: 3098221 - RNA, 19 nt, Artificial Sequence
  Description of Artificial Sequence: Synthetic oligonucleotide
cuuacauccaguguaagca

SEQ ID NO: 3098222 - RNA, 19 nt, Artificial Sequence
  Description of Artificial Sequence: Synthetic oligonucleotide
aaggccuggugucuccagc

SEQ ID NO: 3098223 - RNA, 19 nt, Artificial Sequence
  Description of Artificial Sequence: Synthetic oligonucleotide
cauagcuuccuagaaauac

SEQ ID NO: 3098224 - RNA, 19 nt, Artificial Sequence
  Description of Artificial Sequence: Synthetic oligonucleotide
auggccaggacucccaguc

SEQ ID NO: 3098225 - RNA, 19 nt, Artificial Sequence
  Description of Artificial Sequence: Synthetic oligonucleotide
uacuucuaaaauaccgaac

SEQ ID NO: 3098226 - RNA, 19 nt, Artificial Sequence
  Description of Artificial Sequence: Synthetic oligonucleotide
auaauccuuauagaaaagu

SEQ ID NO: 3098227 - RNA, 19 nt, Artificial Sequence
  Description of Artificial Sequence: Synthetic oligonucleotide
aacagaacauaauccuuau

SEQ ID NO: 3098228 - RNA, 19 nt, Artificial Sequence
  Description of Artificial Sequence: Synthetic oligonucleotide
uacauccaguguaagcaag

SEQ ID NO: 3098229 - RNA, 19 nt, Artificial Sequence
  Description of Artificial Sequence: Synthetic oligonucleotide
uagcuuccuagaaauacca

SEQ ID NO: 3098230 - RNA, 19 nt, Artificial Sequence
  Description of Artificial Sequence: Synthetic oligonucleotide
uccuuauagaaaagucccc

SEQ ID NO: 3098231 - RNA, 19 nt, Artificial Sequence
  Description of Artificial Sequence: Synthetic oligonucleotide
agcauuugguuacaaguca

SEQ ID NO: 3098232 - RNA, 19 nt, Artificial Sequence
  Description of Artificial Sequence: Synthetic oligonucleotide
uuccuagaaauaccacuag

SEQ ID NO: 3098233 - RNA, 19 nt, Artificial Sequence
  Description of Artificial Sequence: Synthetic oligonucleotide
agaaauaccacuagcugcu

SEQ ID NO: 3098234 - RNA, 19 nt, Artificial Sequence
  Description of Artificial Sequence: Synthetic oligonucleotide
ucuccagcaaauucaggug

SEQ ID NO: 3098235 - RNA, 19 nt, Artificial Sequence
  Description of Artificial Sequence: Synthetic oligonucleotide
cuucuaaaauaccgaacag

SEQ ID NO: 3098236 - RNA, 19 nt, Artificial Sequence
  Description of Artificial Sequence: Synthetic oligonucleotide
uuucuugguucaaauuacu

SEQ ID NO: 3098237 - RNA, 19 nt, Artificial Sequence
  Description of Artificial Sequence: Synthetic oligonucleotide
cauaauccuuauagaaaag

SEQ ID NO: 3098238 - RNA, 19 nt, Artificial Sequence
  Description of Artificial Sequence: Synthetic oligonucleotide
uacaaaaucccuacuucua

SEQ ID NO: 3098239 - RNA, 19 nt, Artificial Sequence
  Description of Artificial Sequence: Synthetic oligonucleotide
uugaucaacagaacauaau

SEQ ID NO: 3098240 - RNA, 19 nt, Artificial Sequence
  Description of Artificial Sequence: Synthetic oligonucleotide
ucaacagaacauaauccuu

SEQ ID NO: 3098241 - RNA, 19 nt, Artificial Sequence
  Description of Artificial Sequence: Synthetic oligonucleotide
aagucauagcuuccuagaa

SEQ ID NO: 3098242 - RNA, 19 nt, Artificial Sequence
  Description of Artificial Sequence: Synthetic oligonucleotide
uccagcaaauucaggugag

SEQ ID NO: 3098243 - RNA, 19 nt, Artificial Sequence
  Description of Artificial Sequence: Synthetic oligonucleotide
aaaauaccgaacagucuug

SEQ ID NO: 3098244 - RNA, 19 nt, Artificial Sequence
  Description of Artificial Sequence: Synthetic oligonucleotide
acaaaaucccuacuucuaa

SEQ ID NO: 3098245 - RNA, 19 nt, Artificial Sequence
  Description of Artificial Sequence: Synthetic oligonucleotide
auuggcguugaucaacaga

SEQ ID NO: 3098246 - RNA, 19 nt, Artificial Sequence
  Description of Artificial Sequence: Synthetic oligonucleotide
gguuacaagucauagcuuc

SEQ ID NO: 3098247 - RNA, 19 nt, Artificial Sequence
  Description of Artificial Sequence: Synthetic oligonucleotide
guuauguugcaugugcaug

SEQ ID NO: 3098248 - RNA, 19 nt, Artificial Sequence
  Description of Artificial Sequence: Synthetic oligonucleotide
caaauucaggugaggaaac

SEQ ID NO: 3098249 - RNA, 19 nt, Artificial Sequence
  Description of Artificial Sequence: Synthetic oligonucleotide
aauaccgaacagucuuggu

SEQ ID NO: 3098250 - RNA, 19 nt, Artificial Sequence
  Description of Artificial Sequence: Synthetic oligonucleotide
agaaaaguccccaaacagu

SEQ ID NO: 3098251 - RNA, 19 nt, Artificial Sequence
  Description of Artificial Sequence: Synthetic oligonucleotide
cccuacuucuaaaauaccg

SEQ ID NO: 3098252 - RNA, 19 nt, Artificial Sequence
  Description of Artificial Sequence: Synthetic oligonucleotide
aacacaucucagcauuaaa

SEQ ID NO: 3098253 - RNA, 19 nt, Artificial Sequence
  Description of Artificial Sequence: Synthetic oligonucleotide
uccagcauuugguuacaag

SEQ ID NO: 3098254 - RNA, 19 nt, Artificial Sequence
  Description of Artificial Sequence: Synthetic oligonucleotide
cagcauuugguuacaaguc

SEQ ID NO: 3098255 - RNA, 19 nt, Artificial Sequence
  Description of Artificial Sequence: Synthetic oligonucleotide
augugcauggccaggacuc

SEQ ID NO: 3098256 - RNA, 19 nt, Artificial Sequence
  Description of Artificial Sequence: Synthetic oligonucleotide
uacuuuauuggcguugauc

SEQ ID NO: 3098257 - RNA, 19 nt, Artificial Sequence
  Description of Artificial Sequence: Synthetic oligonucleotide
aacaguuauguugcaugug

SEQ ID NO: 3098258 - RNA, 19 nt, Artificial Sequence
  Description of Artificial Sequence: Synthetic oligonucleotide
caaauuacuuuauuggcgu

SEQ ID NO: 3098259 - RNA, 19 nt, Artificial Sequence
  Description of Artificial Sequence: Synthetic oligonucleotide
aguuauguugcaugugcau

SEQ ID NO: 3098260 - RNA, 19 nt, Artificial Sequence
  Description of Artificial Sequence: Synthetic oligonucleotide
auuacuuuauuggcguuga

SEQ ID NO: 3098261 - RNA, 19 nt, Artificial Sequence
  Description of Artificial Sequence: Synthetic oligonucleotide
agucauagcuuccuagaaa

SEQ ID NO: 3098262 - RNA, 19 nt, Artificial Sequence
  Description of Artificial Sequence: Synthetic oligonucleotide
agcaaauucaggugaggaa

SEQ ID NO: 3098263 - RNA, 19 nt, Artificial Sequence
  Description of Artificial Sequence: Synthetic oligonucleotide
accacuagcugcuucacua

SEQ ID NO: 3098264 - RNA, 19 nt, Artificial Sequence
  Description of Artificial Sequence: Synthetic oligonucleotide
cccaguccuacuuacaucc

SEQ ID NO: 3098265 - RNA, 19 nt, Artificial Sequence
  Description of Artificial Sequence: Synthetic oligonucleotide
uccuacuuacauccagugu

SEQ ID NO: 3098266 - RNA, 19 nt, Artificial Sequence
  Description of Artificial Sequence: Synthetic oligonucleotide
aaauucaggugaggaaaca

SEQ ID NO: 3098267 - RNA, 19 nt, Artificial Sequence
  Description of Artificial Sequence: Synthetic oligonucleotide
uucuugguucaaauuacuu

SEQ ID NO: 3098268 - RNA, 19 nt, Artificial Sequence
  Description of Artificial Sequence: Synthetic oligonucleotide
aaauuacuuuauuggcguu

SEQ ID NO: 3098269 - RNA, 19 nt, Artificial Sequence
  Description of Artificial Sequence: Synthetic oligonucleotide
guaagcaaggccugguguc

SEQ ID NO: 3098270 - RNA, 19 nt, Artificial Sequence
  Description of Artificial Sequence: Synthetic oligonucleotide
uuacaagucauagcuuccu

SEQ ID NO: 3098271 - RNA, 19 nt, Artificial Sequence
  Description of Artificial Sequence: Synthetic oligonucleotide
uuacauccaguguaagcaa

SEQ ID NO: 3098272 - RNA, 19 nt, Artificial Sequence
  Description of Artificial Sequence: Synthetic oligonucleotide
cuuccuagaaauaccacua

SEQ ID NO: 3098273 - RNA, 19 nt, Artificial Sequence
  Description of Artificial Sequence: Synthetic oligonucleotide
ggugaggaaacacaucuca

SEQ ID NO: 3098274 - RNA, 19 nt, Artificial Sequence
  Description of Artificial Sequence: Synthetic oligonucleotide
caagucauagcuuccuaga

SEQ ID NO: 3098275 - RNA, 19 nt, Artificial Sequence
  Description of Artificial Sequence: Synthetic oligonucleotide
uggugucuccagcaaauuc

SEQ ID NO: 3098276 - RNA, 19 nt, Artificial Sequence
  Description of Artificial Sequence: Synthetic oligonucleotide
cuacuucuaaaauaccgaa

SEQ ID NO: 3098277 - RNA, 19 nt, Artificial Sequence
  Description of Artificial Sequence: Synthetic oligonucleotide
guuacaagucauagcuucc

SEQ ID NO: 3098278 - RNA, 19 nt, Artificial Sequence
  Description of Artificial Sequence: Synthetic oligonucleotide
acauccaguguaagcaagg

SEQ ID NO: 3098279 - RNA, 19 nt, Artificial Sequence
  Description of Artificial Sequence: Synthetic oligonucleotide
agcaaggccuggugucucc

SEQ ID NO: 3098280 - RNA, 19 nt, Artificial Sequence
  Description of Artificial Sequence: Synthetic oligonucleotide
ucacuacaaaaucccuacu

SEQ ID NO: 3098281 - RNA, 19 nt, Artificial Sequence
  Description of Artificial Sequence: Synthetic oligonucleotide
caacagaacauaauccuua

SEQ ID NO: 3098282 - RNA, 19 nt, Artificial Sequence
  Description of Artificial Sequence: Synthetic oligonucleotide
acacaucucagcauuaaaa

SEQ ID NO: 3098283 - RNA, 19 nt, Artificial Sequence
  Description of Artificial Sequence: Synthetic oligonucleotide
guccuacuuacauccagug

SEQ ID NO: 3098284 - RNA, 19 nt, Artificial Sequence
  Description of Artificial Sequence: Synthetic oligonucleotide
aaacacaucucagcauuaa

SEQ ID NO: 3098285 - RNA, 19 nt, Artificial Sequence
  Description of Artificial Sequence: Synthetic oligonucleotide
gucauagcuuccuagaaau

SEQ ID NO: 3098286 - RNA, 19 nt, Artificial Sequence
  Description of Artificial Sequence: Synthetic oligonucleotide
ccccaaacaguuauguugc

SEQ ID NO: 3098287 - RNA, 19 nt, Artificial Sequence
  Description of Artificial Sequence: Synthetic oligonucleotide
ucccuacuucuaaaauacc

SEQ ID NO: 3098288 - RNA, 19 nt, Artificial Sequence
  Description of Artificial Sequence: Synthetic oligonucleotide
ucaggugaggaaacacauc

SEQ ID NO: 3098289 - RNA, 19 nt, Artificial Sequence
  Description of Artificial Sequence: Synthetic oligonucleotide
auucaggugaggaaacaca

SEQ ID NO: 3098290 - RNA, 19 nt, Artificial Sequence
  Description of Artificial Sequence: Synthetic oligonucleotide
cuuauagaaaaguccccaa

SEQ ID NO: 3098291 - RNA, 19 nt, Artificial Sequence
  Description of Artificial Sequence: Synthetic oligonucleotide
gcugcuucacuacaaaauc

SEQ ID NO: 3098292 - RNA, 19 nt, Artificial Sequence
  Description of Artificial Sequence: Synthetic oligonucleotide
ugguucaaauuacuuuauu

SEQ ID NO: 3098293 - RNA, 19 nt, Artificial Sequence
  Description of Artificial Sequence: Synthetic oligonucleotide
caguccuacuuacauccag

SEQ ID NO: 3098294 - RNA, 19 nt, Artificial Sequence
  Description of Artificial Sequence: Synthetic oligonucleotide
aggaaacacaucucagcau

SEQ ID NO: 3098295 - RNA, 19 nt, Artificial Sequence
  Description of Artificial Sequence: Synthetic oligonucleotide
cuacaaaaucccuacuucu

SEQ ID NO: 3098296 - RNA, 19 nt, Artificial Sequence
  Description of Artificial Sequence: Synthetic oligonucleotide
uauuggcguugaucaacag

SEQ ID NO: 3098297 - RNA, 19 nt, Artificial Sequence
  Description of Artificial Sequence: Synthetic oligonucleotide
gaaaaguccccaaacaguu

SEQ ID NO: 3098298 - RNA, 19 nt, Artificial Sequence
  Description of Artificial Sequence: Synthetic oligonucleotide
aguccccaaacaguuaugu

SEQ ID NO: 3098299 - RNA, 19 nt, Artificial Sequence
  Description of Artificial Sequence: Synthetic oligonucleotide
caggugaggaaacacaucu

SEQ ID NO: 3098300 - RNA, 19 nt, Artificial Sequence
  Description of Artificial Sequence: Synthetic oligonucleotide
uacaagucauagcuuccua

SEQ ID NO: 3098301 - RNA, 19 nt, Artificial Sequence
  Description of Artificial Sequence: Synthetic oligonucleotide
gacucccaguccuacuuac

SEQ ID NO: 3098302 - RNA, 19 nt, Artificial Sequence
  Description of Artificial Sequence: Synthetic oligonucleotide
cauccaguguaagcaaggc

SEQ ID NO: 3098303 - RNA, 19 nt, Artificial Sequence
  Description of Artificial Sequence: Synthetic oligonucleotide
uaagcaaggccuggugucu

SEQ ID NO: 3098304 - RNA, 19 nt, Artificial Sequence
  Description of Artificial Sequence: Synthetic oligonucleotide
ggcguugaucaacagaaca

SEQ ID NO: 3098305 - RNA, 19 nt, Artificial Sequence
  Description of Artificial Sequence: Synthetic oligonucleotide
cuucacuacaaaaucccua

SEQ ID NO: 3098306 - RNA, 19 nt, Artificial Sequence
  Description of Artificial Sequence: Synthetic oligonucleotide
gucuuggucuuguggcagg

SEQ ID NO: 3098307 - RNA, 19 nt, Artificial Sequence
  Description of Artificial Sequence: Synthetic oligonucleotide
ugcauggccaggacuccca

SEQ ID NO: 3098308 - RNA, 19 nt, Artificial Sequence
  Description of Artificial Sequence: Synthetic oligonucleotide
agucuuggucuuguggcag

SEQ ID NO: 3098309 - RNA, 19 nt, Artificial Sequence
  Description of Artificial Sequence: Synthetic oligonucleotide
agcugcuucacuacaaaau

SEQ ID NO: 3098310 - RNA, 19 nt, Artificial Sequence
  Description of Artificial Sequence: Synthetic oligonucleotide
ugcaugugcauggccagga

SEQ ID NO: 3098311 - RNA, 19 nt, Artificial Sequence
  Description of Artificial Sequence: Synthetic oligonucleotide
guugaucaacagaacauaa

SEQ ID NO: 3098312 - RNA, 19 nt, Artificial Sequence
  Description of Artificial Sequence: Synthetic oligonucleotide
cuccagcaaauucagguga

SEQ ID NO: 3098313 - RNA, 19 nt, Artificial Sequence
  Description of Artificial Sequence: Synthetic oligonucleotide
uacuuacauccaguguaag

SEQ ID NO: 3098314 - RNA, 19 nt, Artificial Sequence
  Description of Artificial Sequence: Synthetic oligonucleotide
ucauagcuuccuagaaaua

SEQ ID NO: 3098315 - RNA, 19 nt, Artificial Sequence
  Description of Artificial Sequence: Synthetic oligonucleotide
cuaaaauaccgaacagucu

SEQ ID NO: 3098316 - RNA, 19 nt, Artificial Sequence
  Description of Artificial Sequence: Synthetic oligonucleotide
uagcugcuucacuacaaaa

SEQ ID NO: 3098317 - RNA, 19 nt, Artificial Sequence
  Description of Artificial Sequence: Synthetic oligonucleotide
aagcaaggccuggugucuc

SEQ ID NO: 3098318 - RNA, 19 nt, Artificial Sequence
  Description of Artificial Sequence: Synthetic oligonucleotide
guguaagcaaggccuggug

SEQ ID NO: 3098319 - RNA, 19 nt, Artificial Sequence
  Description of Artificial Sequence: Synthetic oligonucleotide
agcuuccuagaaauaccac

SEQ ID NO: 3098320 - RNA, 19 nt, Artificial Sequence
  Description of Artificial Sequence: Synthetic oligonucleotide
ccuacuuacauccagugua

SEQ ID NO: 3098321 - RNA, 19 nt, Artificial Sequence
  Description of Artificial Sequence: Synthetic oligonucleotide
auaccacuagcugcuucac

SEQ ID NO: 3098322 - RNA, 19 nt, Artificial Sequence
  Description of Artificial Sequence: Synthetic oligonucleotide
caaaaucccuacuucuaaa

SEQ ID NO: 3098323 - RNA, 19 nt, Artificial Sequence
  Description of Artificial Sequence: Synthetic oligonucleotide
ccuacuucuaaaauaccga

SEQ ID NO: 3098324 - RNA, 19 nt, Artificial Sequence
  Description of Artificial Sequence: Synthetic oligonucleotide
ugguuacaagucauagcuu

SEQ ID NO: 3098325 - RNA, 19 nt, Artificial Sequence
  Description of Artificial Sequence: Synthetic oligonucleotide
gcaaauucaggugaggaaa

SEQ ID NO: 3098326 - RNA, 19 nt, Artificial Sequence
  Description of Artificial Sequence: Synthetic oligonucleotide
cuacuuacauccaguguaa

SEQ ID NO: 3098327 - RNA, 19 nt, Artificial Sequence
  Description of Artificial Sequence: Synthetic oligonucleotide
aguguaagcaaggccuggu

SEQ ID NO: 3098328 - RNA, 19 nt, Artificial Sequence
  Description of Artificial Sequence: Synthetic oligonucleotide
uugcaugugcauggccagg

SEQ ID NO: 3098329 - RNA, 19 nt, Artificial Sequence
  Description of Artificial Sequence: Synthetic oligonucleotide
aggacucccaguccuacuu

SEQ ID NO: 3098330 - RNA, 19 nt, Artificial Sequence
  Description of Artificial Sequence: Synthetic oligonucleotide
aguccuacuuacauccagu

SEQ ID NO: 3098331 - RNA, 19 nt, Artificial Sequence
  Description of Artificial Sequence: Synthetic oligonucleotide
aauccagcauuugguuaca

SEQ ID NO: 3098332 - RNA, 19 nt, Artificial Sequence
  Description of Artificial Sequence: Synthetic oligonucleotide
ucuuggucuuguggcaggc

SEQ ID NO: 3098333 - RNA, 19 nt, Artificial Sequence
  Description of Artificial Sequence: Synthetic oligonucleotide
uaccacuagcugcuucacu

SEQ ID NO: 3098334 - RNA, 19 nt, Artificial Sequence
  Description of Artificial Sequence: Synthetic oligonucleotide
caguuauguugcaugugca

SEQ ID NO: 3098335 - RNA, 19 nt, Artificial Sequence
  Description of Artificial Sequence: Synthetic oligonucleotide
ucccaguccuacuuacauc

SEQ ID NO: 3098336 - RNA, 19 nt, Artificial Sequence
  Description of Artificial Sequence: Synthetic oligonucleotide
acagaacauaauccuuaua

SEQ ID NO: 3098337 - RNA, 19 nt, Artificial Sequence
  Description of Artificial Sequence: Synthetic oligonucleotide
ugugcauggccaggacucc

SEQ ID NO: 3098338 - RNA, 19 nt, Artificial Sequence
  Description of Artificial Sequence: Synthetic oligonucleotide
uggcguugaucaacagaac

SEQ ID NO: 3098339 - RNA, 19 nt, Artificial Sequence
  Description of Artificial Sequence: Synthetic oligonucleotide
aggugaggaaacacaucuc

SEQ ID NO: 3098340 - RNA, 19 nt, Artificial Sequence
  Description of Artificial Sequence: Synthetic oligonucleotide
aaaaguccccaaacaguua

SEQ ID NO: 3098341 - RNA, 19 nt, Artificial Sequence
  Description of Artificial Sequence: Synthetic oligonucleotide
ccuagaaauaccacuagcu

SEQ ID NO: 3098342 - RNA, 19 nt, Artificial Sequence
  Description of Artificial Sequence: Synthetic oligonucleotide
uuacuuuauuggcguugau

SEQ ID NO: 3098343 - RNA, 19 nt, Artificial Sequence
  Description of Artificial Sequence: Synthetic oligonucleotide
cagcaaauucaggugagga

SEQ ID NO: 3098344 - RNA, 19 nt, Artificial Sequence
  Description of Artificial Sequence: Synthetic oligonucleotide
gcuuccuagaaauaccacu

SEQ ID NO: 3098345 - RNA, 19 nt, Artificial Sequence
  Description of Artificial Sequence: Synthetic oligonucleotide
caguguaagcaaggccugg

SEQ ID NO: 3098346 - RNA, 19 nt, Artificial Sequence
  Description of Artificial Sequence: Synthetic oligonucleotide
aaguccccaaacaguuaug

SEQ ID NO: 3098347 - RNA, 19 nt, Artificial Sequence
  Description of Artificial Sequence: Synthetic oligonucleotide
uggccaggacucccagucc

SEQ ID NO: 3098348 - RNA, 19 nt, Artificial Sequence
  Description of Artificial Sequence: Synthetic oligonucleotide
ggaaacacaucucagcauu

SEQ ID NO: 3098349 - RNA, 19 nt, Artificial Sequence
  Description of Artificial Sequence: Synthetic oligonucleotide
cauuugguuacaagucaua

SEQ ID NO: 3098350 - RNA, 19 nt, Artificial Sequence
  Description of Artificial Sequence: Synthetic oligonucleotide
acuagcugcuucacuacaa

SEQ ID NO: 3098351 - RNA, 19 nt, Artificial Sequence
  Description of Artificial Sequence: Synthetic oligonucleotide
ccagcauuugguuacaagu

SEQ ID NO: 3098352 - RNA, 19 nt, Artificial Sequence
  Description of Artificial Sequence: Synthetic oligonucleotide
cuagcugcuucacuacaaa

SEQ ID NO: 3098353 - RNA, 19 nt, Artificial Sequence
  Description of Artificial Sequence: Synthetic oligonucleotide
gaaacacaucucagcauua

SEQ ID NO: 3098354 - RNA, 19 nt, Artificial Sequence
  Description of Artificial Sequence: Synthetic oligonucleotide
ccuuauagaaaagucccca

SEQ ID NO: 3098355 - RNA, 19 nt, Artificial Sequence
  Description of Artificial Sequence: Synthetic oligonucleotide
cagucuuggucuuguggca

SEQ ID NO: 3098356 - RNA, 19 nt, Artificial Sequence
  Description of Artificial Sequence: Synthetic oligonucleotide
cacuacaaaaucccuacuu

SEQ ID NO: 3098357 - RNA, 19 nt, Artificial Sequence
  Description of Artificial Sequence: Synthetic oligonucleotide
caaggccuggugucuccag

SEQ ID NO: 3098358 - RNA, 19 nt, Artificial Sequence
  Description of Artificial Sequence: Synthetic oligonucleotide
cacuagcugcuucacuaca

SEQ ID NO: 3098359 - RNA, 19 nt, Artificial Sequence
  Description of Artificial Sequence: Synthetic oligonucleotide
ccaguguaagcaaggccug

SEQ ID NO: 3098360 - RNA, 19 nt, Artificial Sequence
  Description of Artificial Sequence: Synthetic oligonucleotide
caugugcauggccaggacu

SEQ ID NO: 3098361 - RNA, 19 nt, Artificial Sequence
  Description of Artificial Sequence: Synthetic oligonucleotide
accgaacagucuuggucuu

SEQ ID NO: 3098362 - RNA, 19 nt, Artificial Sequence
  Description of Artificial Sequence: Synthetic oligonucleotide
ccagcaaauucaggugagg

SEQ ID NO: 3098363 - RNA, 19 nt, Artificial Sequence
  Description of Artificial Sequence: Synthetic oligonucleotide
ccacuagcugcuucacuac

SEQ ID NO: 3098364 - RNA, 19 nt, Artificial Sequence
  Description of Artificial Sequence: Synthetic oligonucleotide
acucccaguccuacuuaca

SEQ ID NO: 3098365 - RNA, 19 nt, Artificial Sequence
  Description of Artificial Sequence: Synthetic oligonucleotide
cuuggucuuguggcaggca

SEQ ID NO: 3098366 - RNA, 19 nt, Artificial Sequence
  Description of Artificial Sequence: Synthetic oligonucleotide
gcaugugcauggccaggac

SEQ ID NO: 3098367 - RNA, 19 nt, Artificial Sequence
  Description of Artificial Sequence: Synthetic oligonucleotide
gcguugaucaacagaacau

SEQ ID NO: 3098368 - RNA, 19 nt, Artificial Sequence
  Description of Artificial Sequence: Synthetic oligonucleotide
auccagcauuugguuacaa

SEQ ID NO: 3098369 - RNA, 19 nt, Artificial Sequence
  Description of Artificial Sequence: Synthetic oligonucleotide
gcauuugguuacaagucau

SEQ ID NO: 3098370 - RNA, 19 nt, Artificial Sequence
  Description of Artificial Sequence: Synthetic oligonucleotide
ggccaggacucccaguccu

SEQ ID NO: 3098371 - RNA, 19 nt, Artificial Sequence
  Description of Artificial Sequence: Synthetic oligonucleotide
gaaauaccacuagcugcuu

SEQ ID NO: 3098372 - RNA, 19 nt, Artificial Sequence
  Description of Artificial Sequence: Synthetic oligonucleotide
cguugaucaacagaacaua

SEQ ID NO: 3098373 - RNA, 19 nt, Artificial Sequence
  Description of Artificial Sequence: Synthetic oligonucleotide
ccaggacucccaguccuac

SEQ ID NO: 3098374 - RNA, 19 nt, Artificial Sequence
  Description of Artificial Sequence: Synthetic oligonucleotide
ggacucccaguccuacuua

SEQ ID NO: 3098375 - RNA, 19 nt, Artificial Sequence
  Description of Artificial Sequence: Synthetic oligonucleotide
cauggccaggacucccagu

SEQ ID NO: 3098376 - RNA, 19 nt, Artificial Sequence
  Description of Artificial Sequence: Synthetic oligonucleotide
ccuggugucuccagcaaau

SEQ ID NO: 3098377 - RNA, 19 nt, Artificial Sequence
  Description of Artificial Sequence: Synthetic oligonucleotide
ccaguccuacuuacaucca

SEQ ID NO: 3098378 - RNA, 19 nt, Artificial Sequence
  Description of Artificial Sequence: Synthetic oligonucleotide
ccgaacagucuuggucuug

SEQ ID NO: 3098379 - RNA, 19 nt, Artificial Sequence
  Description of Artificial Sequence: Synthetic oligonucleotide
gcaaggccuggugucucca

SEQ ID NO: 3098380 - RNA, 19 nt, Artificial Sequence
  Description of Artificial Sequence: Synthetic oligonucleotide
ccaaacaguuauguugcau

SEQ ID NO: 3098381 - RNA, 19 nt, Artificial Sequence
  Description of Artificial Sequence: Synthetic oligonucleotide
cuggugucuccagcaaauu

SEQ ID NO: 3098382 - RNA, 19 nt, Artificial Sequence
  Description of Artificial Sequence: Synthetic oligonucleotide
cgaacagucuuggucuugu

SEQ ID NO: 3098383 - RNA, 19 nt, Artificial Sequence
  Description of Artificial Sequence: Synthetic oligonucleotide
gccaggacucccaguccua

SEQ ID NO: 3098384 - RNA, 19 nt, Artificial Sequence
  Description of Artificial Sequence: Synthetic oligonucleotide
aauaaaauaauacauaagc

SEQ ID NO: 3098385 - RNA, 19 nt, Artificial Sequence
  Description of Artificial Sequence: Synthetic oligonucleotide
aaugaaauuauucauaugg

SEQ ID NO: 3098386 - RNA, 19 nt, Artificial Sequence
  Description of Artificial Sequence: Synthetic oligonucleotide
aaauuauucauaugguucc

SEQ ID NO: 3098387 - RNA, 19 nt, Artificial Sequence
  Description of Artificial Sequence: Synthetic oligonucleotide
aaaguuaaaauuaaauacc

SEQ ID NO: 3098388 - RNA, 19 nt, Artificial Sequence
  Description of Artificial Sequence: Synthetic oligonucleotide
aauacaauaaacaguaaac

SEQ ID NO: 3098389 - RNA, 19 nt, Artificial Sequence
  Description of Artificial Sequence: Synthetic oligonucleotide
aacuauuucaaauaaugug

SEQ ID NO: 3098390 - RNA, 19 nt, Artificial Sequence
  Description of Artificial Sequence: Synthetic oligonucleotide
auuuauauuaacuauuuca

SEQ ID NO: 3098391 - RNA, 19 nt, Artificial Sequence
  Description of Artificial Sequence: Synthetic oligonucleotide
aaacaguaaacacaauuac

SEQ ID NO: 3098392 - RNA, 19 nt, Artificial Sequence
  Description of Artificial Sequence: Synthetic oligonucleotide
uaauacauaagcaaaauua

SEQ ID NO: 3098393 - RNA, 19 nt, Artificial Sequence
  Description of Artificial Sequence: Synthetic oligonucleotide
aaguuaaaauuaaauaccc

SEQ ID NO: 3098394 - RNA, 19 nt, Artificial Sequence
  Description of Artificial Sequence: Synthetic oligonucleotide
aaagagucacacuagauca

SEQ ID NO: 3098395 - RNA, 19 nt, Artificial Sequence
  Description of Artificial Sequence: Synthetic oligonucleotide
cuuagaauacaauaaacag

SEQ ID NO: 3098396 - RNA, 19 nt, Artificial Sequence
  Description of Artificial Sequence: Synthetic oligonucleotide
uuucaaaacaccacuaaag

SEQ ID NO: 3098397 - RNA, 19 nt, Artificial Sequence
  Description of Artificial Sequence: Synthetic oligonucleotide
auuuaaaugaaauuauuca

SEQ ID NO: 3098398 - RNA, 19 nt, Artificial Sequence
  Description of Artificial Sequence: Synthetic oligonucleotide
aaaauuaaauacccuuuuc

SEQ ID NO: 3098399 - RNA, 19 nt, Artificial Sequence
  Description of Artificial Sequence: Synthetic oligonucleotide
aacacaauuacauauuuau

SEQ ID NO: 3098400 - RNA, 19 nt, Artificial Sequence
  Description of Artificial Sequence: Synthetic oligonucleotide
uuuauauuaacuauuucaa

SEQ ID NO: 3098401 - RNA, 19 nt, Artificial Sequence
  Description of Artificial Sequence: Synthetic oligonucleotide
ucuguguaaagaaagacca

SEQ ID NO: 3098402 - RNA, 19 nt, Artificial Sequence
  Description of Artificial Sequence: Synthetic oligonucleotide
uagaauacaauaaacagua

SEQ ID NO: 3098403 - RNA, 19 nt, Artificial Sequence
  Description of Artificial Sequence: Synthetic oligonucleotide
uuaacuuagaauacaauaa

SEQ ID NO: 3098404 - RNA, 19 nt, Artificial Sequence
  Description of Artificial Sequence: Synthetic oligonucleotide
uccacauuaacuuagaaua

SEQ ID NO: 3098405 - RNA, 19 nt, Artificial Sequence
  Description of Artificial Sequence: Synthetic oligonucleotide
aagcaaauaaaauaauaca

SEQ ID NO: 3098406 - RNA, 19 nt, Artificial Sequence
  Description of Artificial Sequence: Synthetic oligonucleotide
uauuucuguguaaagaaag

SEQ ID NO: 3098407 - RNA, 19 nt, Artificial Sequence
  Description of Artificial Sequence: Synthetic oligonucleotide
uuagaauacaauaaacagu

SEQ ID NO: 3098408 - RNA, 19 nt, Artificial Sequence
  Description of Artificial Sequence: Synthetic oligonucleotide
uauauuaacuauuucaaau

SEQ ID NO: 3098409 - RNA, 19 nt, Artificial Sequence
  Description of Artificial Sequence: Synthetic oligonucleotide
aaagcaaauuuaugggugg

SEQ ID NO: 3098410 - RNA, 19 nt, Artificial Sequence
  Description of Artificial Sequence: Synthetic oligonucleotide
uuacauauuuauauuaacu

SEQ ID NO: 3098411 - RNA, 19 nt, Artificial Sequence
  Description of Artificial Sequence: Synthetic oligonucleotide
caagcaaauaaaauaauac

SEQ ID NO: 3098412 - RNA, 19 nt, Artificial Sequence
  Description of Artificial Sequence: Synthetic oligonucleotide
auuacauauuuauauuaac

SEQ ID NO: 3098413 - RNA, 19 nt, Artificial Sequence
  Description of Artificial Sequence: Synthetic oligonucleotide
uaagaaaauagaaugcccu

SEQ ID NO: 3098414 - RNA, 19 nt, Artificial Sequence
  Description of Artificial Sequence: Synthetic oligonucleotide
uuuaaaugaaauuauucau

SEQ ID NO: 3098415 - RNA, 19 nt, Artificial Sequence
  Description of Artificial Sequence: Synthetic oligonucleotide
uauggguggauuuaaauga

SEQ ID NO: 3098416 - RNA, 19 nt, Artificial Sequence
  Description of Artificial Sequence: Synthetic oligonucleotide
aagaaaauagaaugcccuc

SEQ ID NO: 3098417 - RNA, 19 nt, Artificial Sequence
  Description of Artificial Sequence: Synthetic oligonucleotide
aauuggauuauuucugugu

SEQ ID NO: 3098418 - RNA, 19 nt, Artificial Sequence
  Description of Artificial Sequence: Synthetic oligonucleotide
aauuaaauacccuuuucaa

SEQ ID NO: 3098419 - RNA, 19 nt, Artificial Sequence
  Description of Artificial Sequence: Synthetic oligonucleotide
aguaaacacaauuacauau

SEQ ID NO: 3098420 - RNA, 19 nt, Artificial Sequence
  Description of Artificial Sequence: Synthetic oligonucleotide
aacaccacuaaagagucac

SEQ ID NO: 3098421 - RNA, 19 nt, Artificial Sequence
  Description of Artificial Sequence: Synthetic oligonucleotide
uucaaaacaccacuaaaga

SEQ ID NO: 3098422 - RNA, 19 nt, Artificial Sequence
  Description of Artificial Sequence: Synthetic oligonucleotide
uguaagaaaauagaaugcc

SEQ ID NO: 3098423 - RNA, 19 nt, Artificial Sequence
  Description of Artificial Sequence: Synthetic oligonucleotide
uucaauuggauuauuucug

SEQ ID NO: 3098424 - RNA, 19 nt, Artificial Sequence
  Description of Artificial Sequence: Synthetic oligonucleotide
uacaauaaacaguaaacac

SEQ ID NO: 3098425 - RNA, 19 nt, Artificial Sequence
  Description of Artificial Sequence: Synthetic oligonucleotide
auuaacuuagaauacaaua

SEQ ID NO: 3098426 - RNA, 19 nt, Artificial Sequence
  Description of Artificial Sequence: Synthetic oligonucleotide
uaaacaguaaacacaauua

SEQ ID NO: 3098427 - RNA, 19 nt, Artificial Sequence
  Description of Artificial Sequence: Synthetic oligonucleotide
aacuuagaauacaauaaac

SEQ ID NO: 3098428 - RNA, 19 nt, Artificial Sequence
  Description of Artificial Sequence: Synthetic oligonucleotide
uuaaaugaaauuauucaua

SEQ ID NO: 3098429 - RNA, 19 nt, Artificial Sequence
  Description of Artificial Sequence: Synthetic oligonucleotide
uacauaagcaaaauuauuu

SEQ ID NO: 3098430 - RNA, 19 nt, Artificial Sequence
  Description of Artificial Sequence: Synthetic oligonucleotide
ucaaaacaccacuaaagag

SEQ ID NO: 3098431 - RNA, 19 nt, Artificial Sequence
  Description of Artificial Sequence: Synthetic oligonucleotide
ucaaauaaugugcaagaac

SEQ ID NO: 3098432 - RNA, 19 nt, Artificial Sequence
  Description of Artificial Sequence: Synthetic oligonucleotide
uucuguguaaagaaagacc

SEQ ID NO: 3098433 - RNA, 19 nt, Artificial Sequence
  Description of Artificial Sequence: Synthetic oligonucleotide
uaaaugaaauuauucauau

SEQ ID NO: 3098434 - RNA, 19 nt, Artificial Sequence
  Description of Artificial Sequence: Synthetic oligonucleotide
aaaacaccacuaaagaguc

SEQ ID NO: 3098435 - RNA, 19 nt, Artificial Sequence
  Description of Artificial Sequence: Synthetic oligonucleotide
uuauggguggauuuaaaug

SEQ ID NO: 3098436 - RNA, 19 nt, Artificial Sequence
  Description of Artificial Sequence: Synthetic oligonucleotide
uacauauuuauauuaacua

SEQ ID NO: 3098437 - RNA, 19 nt, Artificial Sequence
  Description of Artificial Sequence: Synthetic oligonucleotide
uauuaacuauuucaaauaa

SEQ ID NO: 3098438 - RNA, 19 nt, Artificial Sequence
  Description of Artificial Sequence: Synthetic oligonucleotide
aaauagaaugcccuccuca

SEQ ID NO: 3098439 - RNA, 19 nt, Artificial Sequence
  Description of Artificial Sequence: Synthetic oligonucleotide
uaaagagucacacuagauc

SEQ ID NO: 3098440 - RNA, 19 nt, Artificial Sequence
  Description of Artificial Sequence: Synthetic oligonucleotide
uuaaaauuaaauacccuuu

SEQ ID NO: 3098441 - RNA, 19 nt, Artificial Sequence
  Description of Artificial Sequence: Synthetic oligonucleotide
gaaauuauucauaugguuc

SEQ ID NO: 3098442 - RNA, 19 nt, Artificial Sequence
  Description of Artificial Sequence: Synthetic oligonucleotide
agaaaauagaaugcccucc

SEQ ID NO: 3098443 - RNA, 19 nt, Artificial Sequence
  Description of Artificial Sequence: Synthetic oligonucleotide
aauacccuuuucaaaacac

SEQ ID NO: 3098444 - RNA, 19 nt, Artificial Sequence
  Description of Artificial Sequence: Synthetic oligonucleotide
aaaagcaaauuuaugggug

SEQ ID NO: 3098445 - RNA, 19 nt, Artificial Sequence
  Description of Artificial Sequence: Synthetic oligonucleotide
uugcuuagcaacaacaguc

SEQ ID NO: 3098446 - RNA, 19 nt, Artificial Sequence
  Description of Artificial Sequence: Synthetic oligonucleotide
gauuuaaaugaaauuauuc

SEQ ID NO: 3098447 - RNA, 19 nt, Artificial Sequence
  Description of Artificial Sequence: Synthetic oligonucleotide
auaaacaguaaacacaauu

SEQ ID NO: 3098448 - RNA, 19 nt, Artificial Sequence
  Description of Artificial Sequence: Synthetic oligonucleotide
uaugguuccacauuaacuu

SEQ ID NO: 3098449 - RNA, 19 nt, Artificial Sequence
  Description of Artificial Sequence: Synthetic oligonucleotide
uuuucaauuggauuauuuc

SEQ ID NO: 3098450 - RNA, 19 nt, Artificial Sequence
  Description of Artificial Sequence: Synthetic oligonucleotide
uaacuuagaauacaauaaa

SEQ ID NO: 3098451 - RNA, 19 nt, Artificial Sequence
  Description of Artificial Sequence: Synthetic oligonucleotide
aaaugaaauuauucauaug

SEQ ID NO: 3098452 - RNA, 19 nt, Artificial Sequence
  Description of Artificial Sequence: Synthetic oligonucleotide
gaauacaauaaacaguaaa

SEQ ID NO: 3098453 - RNA, 19 nt, Artificial Sequence
  Description of Artificial Sequence: Synthetic oligonucleotide
uagaaugcccuccucaagc

SEQ ID NO: 3098454 - RNA, 19 nt, Artificial Sequence
  Description of Artificial Sequence: Synthetic oligonucleotide
aaaauagaaugcccuccuc

SEQ ID NO: 3098455 - RNA, 19 nt, Artificial Sequence
  Description of Artificial Sequence: Synthetic oligonucleotide
uccucaagcaaauaaaaua

SEQ ID NO: 3098456 - RNA, 19 nt, Artificial Sequence
  Description of Artificial Sequence: Synthetic oligonucleotide
uuuucaaaacaccacuaaa

SEQ ID NO: 3098457 - RNA, 19 nt, Artificial Sequence
  Description of Artificial Sequence: Synthetic oligonucleotide
auaaaauaauacauaagca

SEQ ID NO: 3098458 - RNA, 19 nt, Artificial Sequence
  Description of Artificial Sequence: Synthetic oligonucleotide
uuagcaacaacaguccuug

SEQ ID NO: 3098459 - RNA, 19 nt, Artificial Sequence
  Description of Artificial Sequence: Synthetic oligonucleotide
aauaauacauaagcaaaau

SEQ ID NO: 3098460 - RNA, 19 nt, Artificial Sequence
  Description of Artificial Sequence: Synthetic oligonucleotide
uaaaauuaaauacccuuuu

SEQ ID NO: 3098461 - RNA, 19 nt, Artificial Sequence
  Description of Artificial Sequence: Synthetic oligonucleotide
uguguaaagaaagaccaca

SEQ ID NO: 3098462 - RNA, 19 nt, Artificial Sequence
  Description of Artificial Sequence: Synthetic oligonucleotide
uggauuuaaaugaaauuau

SEQ ID NO: 3098463 - RNA, 19 nt, Artificial Sequence
  Description of Artificial Sequence: Synthetic oligonucleotide
acaauaaacaguaaacaca

SEQ ID NO: 3098464 - RNA, 19 nt, Artificial Sequence
  Description of Artificial Sequence: Synthetic oligonucleotide
auauuaacuauuucaaaua

SEQ ID NO: 3098465 - RNA, 19 nt, Artificial Sequence
  Description of Artificial Sequence: Synthetic oligonucleotide
aaauacccuuuucaaaaca

SEQ ID NO: 3098466 - RNA, 19 nt, Artificial Sequence
  Description of Artificial Sequence: Synthetic oligonucleotide
caaauaaugugcaagaacu

SEQ ID NO: 3098467 - RNA, 19 nt, Artificial Sequence
  Description of Artificial Sequence: Synthetic oligonucleotide
aauagaaugcccuccucaa

SEQ ID NO: 3098468 - RNA, 19 nt, Artificial Sequence
  Description of Artificial Sequence: Synthetic oligonucleotide
agcaaauaaaauaauacau

SEQ ID NO: 3098469 - RNA, 19 nt, Artificial Sequence
  Description of Artificial Sequence: Synthetic oligonucleotide
acuuagaauacaauaaaca

SEQ ID NO: 3098470 - RNA, 19 nt, Artificial Sequence
  Description of Artificial Sequence: Synthetic oligonucleotide
auacaauaaacaguaaaca

SEQ ID NO: 3098471 - RNA, 19 nt, Artificial Sequence
  Description of Artificial Sequence: Synthetic oligonucleotide
ugaaauuauucauaugguu

SEQ ID NO: 3098472 - RNA, 19 nt, Artificial Sequence
  Description of Artificial Sequence: Synthetic oligonucleotide
uuugcuuagcaacaacagu

SEQ ID NO: 3098473 - RNA, 19 nt, Artificial Sequence
  Description of Artificial Sequence: Synthetic oligonucleotide
gauuauuucuguguaaaga

SEQ ID NO: 3098474 - RNA, 19 nt, Artificial Sequence
  Description of Artificial Sequence: Synthetic oligonucleotide
caauaaacaguaaacacaa

SEQ ID NO: 3098475 - RNA, 19 nt, Artificial Sequence
  Description of Artificial Sequence: Synthetic oligonucleotide
uucauaugguuccacauua

SEQ ID NO: 3098476 - RNA, 19 nt, Artificial Sequence
  Description of Artificial Sequence: Synthetic oligonucleotide
uacccuuuucaaaacacca

SEQ ID NO: 3098477 - RNA, 19 nt, Artificial Sequence
  Description of Artificial Sequence: Synthetic oligonucleotide
uccuuguaagaaaauagaa

SEQ ID NO: 3098478 - RNA, 19 nt, Artificial Sequence
  Description of Artificial Sequence: Synthetic oligonucleotide
aacaguaaacacaauuaca

SEQ ID NO: 3098479 - RNA, 19 nt, Artificial Sequence
  Description of Artificial Sequence: Synthetic oligonucleotide
aacaacaguccuuguaaga

SEQ ID NO: 3098480 - RNA, 19 nt, Artificial Sequence
  Description of Artificial Sequence: Synthetic oligonucleotide
ugcuuagcaacaacagucc

SEQ ID NO: 3098481 - RNA, 19 nt, Artificial Sequence
  Description of Artificial Sequence: Synthetic oligonucleotide
uaaacacaauuacauauuu

SEQ ID NO: 3098482 - RNA, 19 nt, Artificial Sequence
  Description of Artificial Sequence: Synthetic oligonucleotide
uuauucauaugguuccaca

SEQ ID NO: 3098483 - RNA, 19 nt, Artificial Sequence
  Description of Artificial Sequence: Synthetic oligonucleotide
aauaaugugcaagaacuua

SEQ ID NO: 3098484 - RNA, 19 nt, Artificial Sequence
  Description of Artificial Sequence: Synthetic oligonucleotide
aaugugcaagaacuuaaaa

SEQ ID NO: 3098485 - RNA, 19 nt, Artificial Sequence
  Description of Artificial Sequence: Synthetic oligonucleotide
uuauuucuguguaaagaaa

SEQ ID NO: 3098486 - RNA, 19 nt, Artificial Sequence
  Description of Artificial Sequence: Synthetic oligonucleotide
acaguaaacacaauuacau

SEQ ID NO: 3098487 - RNA, 19 nt, Artificial Sequence
  Description of Artificial Sequence: Synthetic oligonucleotide
ugguuccacauuaacuuag

SEQ ID NO: 3098488 - RNA, 19 nt, Artificial Sequence
  Description of Artificial Sequence: Synthetic oligonucleotide
ucaauuggauuauuucugu

SEQ ID NO: 3098489 - RNA, 19 nt, Artificial Sequence
  Description of Artificial Sequence: Synthetic oligonucleotide
uguaaagaaagaccacaaa

SEQ ID NO: 3098490 - RNA, 19 nt, Artificial Sequence
  Description of Artificial Sequence: Synthetic oligonucleotide
aguccuuguaagaaaauag

SEQ ID NO: 3098491 - RNA, 19 nt, Artificial Sequence
  Description of Artificial Sequence: Synthetic oligonucleotide
guaagaaaauagaaugccc

SEQ ID NO: 3098492 - RNA, 19 nt, Artificial Sequence
  Description of Artificial Sequence: Synthetic oligonucleotide
uuuauggguggauuuaaau

SEQ ID NO: 3098493 - RNA, 19 nt, Artificial Sequence
  Description of Artificial Sequence: Synthetic oligonucleotide
acaauuacauauuuauauu

SEQ ID NO: 3098494 - RNA, 19 nt, Artificial Sequence
  Description of Artificial Sequence: Synthetic oligonucleotide
acuaaagagucacacuaga

SEQ ID NO: 3098495 - RNA, 19 nt, Artificial Sequence
  Description of Artificial Sequence: Synthetic oligonucleotide
uuccacauuaacuuagaau

SEQ ID NO: 3098496 - RNA, 19 nt, Artificial Sequence
  Description of Artificial Sequence: Synthetic oligonucleotide
auaauacauaagcaaaauu

SEQ ID NO: 3098497 - RNA, 19 nt, Artificial Sequence
  Description of Artificial Sequence: Synthetic oligonucleotide
acauaagcaaaauuauuuu

SEQ ID NO: 3098498 - RNA, 19 nt, Artificial Sequence
  Description of Artificial Sequence: Synthetic oligonucleotide
guuaaaauuaaauacccuu

SEQ ID NO: 3098499 - RNA, 19 nt, Artificial Sequence
  Description of Artificial Sequence: Synthetic oligonucleotide
caaaacaccacuaaagagu

SEQ ID NO: 3098500 - RNA, 19 nt, Artificial Sequence
  Description of Artificial Sequence: Synthetic oligonucleotide
uaaauacccuuuucaaaac

SEQ ID NO: 3098501 - RNA, 19 nt, Artificial Sequence
  Description of Artificial Sequence: Synthetic oligonucleotide
cuauuucaaauaaugugca

SEQ ID NO: 3098502 - RNA, 19 nt, Artificial Sequence
  Description of Artificial Sequence: Synthetic oligonucleotide
auacccuuuucaaaacacc

SEQ ID NO: 3098503 - RNA, 19 nt, Artificial Sequence
  Description of Artificial Sequence: Synthetic oligonucleotide
auuggauuauuucugugua

SEQ ID NO: 3098504 - RNA, 19 nt, Artificial Sequence
  Description of Artificial Sequence: Synthetic oligonucleotide
cacaauuacauauuuauau

SEQ ID NO: 3098505 - RNA, 19 nt, Artificial Sequence
  Description of Artificial Sequence: Synthetic oligonucleotide
auuauucauaugguuccac

SEQ ID NO: 3098506 - RNA, 19 nt, Artificial Sequence
  Description of Artificial Sequence: Synthetic oligonucleotide
auuugcuuagcaacaacag

SEQ ID NO: 3098507 - RNA, 19 nt, Artificial Sequence
  Description of Artificial Sequence: Synthetic oligonucleotide
uaaugugcaagaacuuaaa

SEQ ID NO: 3098508 - RNA, 19 nt, Artificial Sequence
  Description of Artificial Sequence: Synthetic oligonucleotide
uggauuauuucuguguaaa

SEQ ID NO: 3098509 - RNA, 19 nt, Artificial Sequence
  Description of Artificial Sequence: Synthetic oligonucleotide
caauuacauauuuauauua

SEQ ID NO: 3098510 - RNA, 19 nt, Artificial Sequence
  Description of Artificial Sequence: Synthetic oligonucleotide
aauuuauggguggauuuaa

SEQ ID NO: 3098511 - RNA, 19 nt, Artificial Sequence
  Description of Artificial Sequence: Synthetic oligonucleotide
aauuauucauaugguucca

SEQ ID NO: 3098512 - RNA, 19 nt, Artificial Sequence
  Description of Artificial Sequence: Synthetic oligonucleotide
cauaugguuccacauuaac

SEQ ID NO: 3098513 - RNA, 19 nt, Artificial Sequence
  Description of Artificial Sequence: Synthetic oligonucleotide
aaauuuauggguggauuua

SEQ ID NO: 3098514 - RNA, 19 nt, Artificial Sequence
  Description of Artificial Sequence: Synthetic oligonucleotide
cacuaaagagucacacuag

SEQ ID NO: 3098515 - RNA, 19 nt, Artificial Sequence
  Description of Artificial Sequence: Synthetic oligonucleotide
uauuucaaauaaugugcaa

SEQ ID NO: 3098516 - RNA, 19 nt, Artificial Sequence
  Description of Artificial Sequence: Synthetic oligonucleotide
auaugguuccacauuaacu

SEQ ID NO: 3098517 - RNA, 19 nt, Artificial Sequence
  Description of Artificial Sequence: Synthetic oligonucleotide
auagaaugcccuccucaag

SEQ ID NO: 3098518 - RNA, 19 nt, Artificial Sequence
  Description of Artificial Sequence: Synthetic oligonucleotide
augaaauuauucauauggu

SEQ ID NO: 3098519 - RNA, 19 nt, Artificial Sequence
  Description of Artificial Sequence: Synthetic oligonucleotide
auucauaugguuccacauu

SEQ ID NO: 3098520 - RNA, 19 nt, Artificial Sequence
  Description of Artificial Sequence: Synthetic oligonucleotide
aacaguccuuguaagaaaa

SEQ ID NO: 3098521 - RNA, 19 nt, Artificial Sequence
  Description of Artificial Sequence: Synthetic oligonucleotide
aguuaaaauuaaauacccu

SEQ ID NO: 3098522 - RNA, 19 nt, Artificial Sequence
  Description of Artificial Sequence: Synthetic oligonucleotide
gaaaauagaaugcccuccu

SEQ ID NO: 3098523 - RNA, 19 nt, Artificial Sequence
  Description of Artificial Sequence: Synthetic oligonucleotide
caacaacaguccuuguaag

SEQ ID NO: 3098524 - RNA, 19 nt, Artificial Sequence
  Description of Artificial Sequence: Synthetic oligonucleotide
acaacaguccuuguaagaa

SEQ ID NO: 3098525 - RNA, 19 nt, Artificial Sequence
  Description of Artificial Sequence: Synthetic oligonucleotide
auaaugugcaagaacuuaa

SEQ ID NO: 3098526 - RNA, 19 nt, Artificial Sequence
  Description of Artificial Sequence: Synthetic oligonucleotide
accacuaaagagucacacu

SEQ ID NO: 3098527 - RNA, 19 nt, Artificial Sequence
  Description of Artificial Sequence: Synthetic oligonucleotide
caauuggauuauuucugug

SEQ ID NO: 3098528 - RNA, 19 nt, Artificial Sequence
  Description of Artificial Sequence: Synthetic oligonucleotide
aaauaaugugcaagaacuu

SEQ ID NO: 3098529 - RNA, 19 nt, Artificial Sequence
  Description of Artificial Sequence: Synthetic oligonucleotide
auuucuguguaaagaaaga

SEQ ID NO: 3098530 - RNA, 19 nt, Artificial Sequence
  Description of Artificial Sequence: Synthetic oligonucleotide
acccuuuucaaaacaccac

SEQ ID NO: 3098531 - RNA, 19 nt, Artificial Sequence
  Description of Artificial Sequence: Synthetic oligonucleotide
uuggauuauuucuguguaa

SEQ ID NO: 3098532 - RNA, 19 nt, Artificial Sequence
  Description of Artificial Sequence: Synthetic oligonucleotide
cuuuucaaaacaccacuaa

SEQ ID NO: 3098533 - RNA, 19 nt, Artificial Sequence
  Description of Artificial Sequence: Synthetic oligonucleotide
ggauuauuucuguguaaag

SEQ ID NO: 3098534 - RNA, 19 nt, Artificial Sequence
  Description of Artificial Sequence: Synthetic oligonucleotide
ucauaugguuccacauuaa

SEQ ID NO: 3098535 - RNA, 19 nt, Artificial Sequence
  Description of Artificial Sequence: Synthetic oligonucleotide
agaaugcccuccucaagca

SEQ ID NO: 3098536 - RNA, 19 nt, Artificial Sequence
  Description of Artificial Sequence: Synthetic oligonucleotide
cuguguaaagaaagaccac

SEQ ID NO: 3098537 - RNA, 19 nt, Artificial Sequence
  Description of Artificial Sequence: Synthetic oligonucleotide
aaacacaauuacauauuua

SEQ ID NO: 3098538 - RNA, 19 nt, Artificial Sequence
  Description of Artificial Sequence: Synthetic oligonucleotide
agcaacaacaguccuugua

SEQ ID NO: 3098539 - RNA, 19 nt, Artificial Sequence
  Description of Artificial Sequence: Synthetic oligonucleotide
aagcaaauuuaugggugga

SEQ ID NO: 3098540 - RNA, 19 nt, Artificial Sequence
  Description of Artificial Sequence: Synthetic oligonucleotide
aaugcccuccucaagcaaa

SEQ ID NO: 3098541 - RNA, 19 nt, Artificial Sequence
  Description of Artificial Sequence: Synthetic oligonucleotide
ccucaagcaaauaaaauaa

SEQ ID NO: 3098542 - RNA, 19 nt, Artificial Sequence
  Description of Artificial Sequence: Synthetic oligonucleotide
cacauuaacuuagaauaca

SEQ ID NO: 3098543 - RNA, 19 nt, Artificial Sequence
  Description of Artificial Sequence: Synthetic oligonucleotide
caccacuaaagagucacac

SEQ ID NO: 3098544 - RNA, 19 nt, Artificial Sequence
  Description of Artificial Sequence: Synthetic oligonucleotide
guccuuguaagaaaauaga

SEQ ID NO: 3098545 - RNA, 19 nt, Artificial Sequence
  Description of Artificial Sequence: Synthetic oligonucleotide
uggguggauuuaaaugaaa

SEQ ID NO: 3098546 - RNA, 19 nt, Artificial Sequence
  Description of Artificial Sequence: Synthetic oligonucleotide
gcaacaacaguccuuguaa

SEQ ID NO: 3098547 - RNA, 19 nt, Artificial Sequence
  Description of Artificial Sequence: Synthetic oligonucleotide
aauaaacaguaaacacaau

SEQ ID NO: 3098548 - RNA, 19 nt, Artificial Sequence
  Description of Artificial Sequence: Synthetic oligonucleotide
augguuccacauuaacuua

SEQ ID NO: 3098549 - RNA, 19 nt, Artificial Sequence
  Description of Artificial Sequence: Synthetic oligonucleotide
ccacauuaacuuagaauac

SEQ ID NO: 3098550 - RNA, 19 nt, Artificial Sequence
  Description of Artificial Sequence: Synthetic oligonucleotide
guguaaagaaagaccacaa

SEQ ID NO: 3098551 - RNA, 19 nt, Artificial Sequence
  Description of Artificial Sequence: Synthetic oligonucleotide
caguaaacacaauuacaua

SEQ ID NO: 3098552 - RNA, 19 nt, Artificial Sequence
  Description of Artificial Sequence: Synthetic oligonucleotide
acacaauuacauauuuaua

SEQ ID NO: 3098553 - RNA, 19 nt, Artificial Sequence
  Description of Artificial Sequence: Synthetic oligonucleotide
agcaaauuuauggguggau

SEQ ID NO: 3098554 - RNA, 19 nt, Artificial Sequence
  Description of Artificial Sequence: Synthetic oligonucleotide
ccacuaaagagucacacua

SEQ ID NO: 3098555 - RNA, 19 nt, Artificial Sequence
  Description of Artificial Sequence: Synthetic oligonucleotide
guuccacauuaacuuagaa

SEQ ID NO: 3098556 - RNA, 19 nt, Artificial Sequence
  Description of Artificial Sequence: Synthetic oligonucleotide
guaaacacaauuacauauu

SEQ ID NO: 3098557 - RNA, 19 nt, Artificial Sequence
  Description of Artificial Sequence: Synthetic oligonucleotide
caacaguccuuguaagaaa

SEQ ID NO: 3098558 - RNA, 19 nt, Artificial Sequence
  Description of Artificial Sequence: Synthetic oligonucleotide
cuaaagagucacacuagau

SEQ ID NO: 3098559 - RNA, 19 nt, Artificial Sequence
  Description of Artificial Sequence: Synthetic oligonucleotide
aaacaccacuaaagaguca

SEQ ID NO: 3098560 - RNA, 19 nt, Artificial Sequence
  Description of Artificial Sequence: Synthetic oligonucleotide
auuuauggguggauuuaaa

SEQ ID NO: 3098561 - RNA, 19 nt, Artificial Sequence
  Description of Artificial Sequence: Synthetic oligonucleotide
agaauacaauaaacaguaa

SEQ ID NO: 3098562 - RNA, 19 nt, Artificial Sequence
  Description of Artificial Sequence: Synthetic oligonucleotide
cucaagcaaauaaaauaau

SEQ ID NO: 3098563 - RNA, 19 nt, Artificial Sequence
  Description of Artificial Sequence: Synthetic oligonucleotide
gguggauuuaaaugaaauu

SEQ ID NO: 3098564 - RNA, 19 nt, Artificial Sequence
  Description of Artificial Sequence: Synthetic oligonucleotide
cuuagcaacaacaguccuu

SEQ ID NO: 3098565 - RNA, 19 nt, Artificial Sequence
  Description of Artificial Sequence: Synthetic oligonucleotide
auggguggauuuaaaugaa

SEQ ID NO: 3098566 - RNA, 19 nt, Artificial Sequence
  Description of Artificial Sequence: Synthetic oligonucleotide
ccuuguaagaaaauagaau

SEQ ID NO: 3098567 - RNA, 19 nt, Artificial Sequence
  Description of Artificial Sequence: Synthetic oligonucleotide
caguccuuguaagaaaaua

SEQ ID NO: 3098568 - RNA, 19 nt, Artificial Sequence
  Description of Artificial Sequence: Synthetic oligonucleotide
cuccucaagcaaauaaaau

SEQ ID NO: 3098569 - RNA, 19 nt, Artificial Sequence
  Description of Artificial Sequence: Synthetic oligonucleotide
uagcaacaacaguccuugu

SEQ ID NO: 3098570 - RNA, 19 nt, Artificial Sequence
  Description of Artificial Sequence: Synthetic oligonucleotide
ccuccucaagcaaauaaaa

SEQ ID NO: 3098571 - RNA, 19 nt, Artificial Sequence
  Description of Artificial Sequence: Synthetic oligonucleotide
acaguccuuguaagaaaau

SEQ ID NO: 3098572 - RNA, 19 nt, Artificial Sequence
  Description of Artificial Sequence: Synthetic oligonucleotide
ccuuuucaaaacaccacua

SEQ ID NO: 3098573 - RNA, 19 nt, Artificial Sequence
  Description of Artificial Sequence: Synthetic oligonucleotide
acaccacuaaagagucaca

SEQ ID NO: 3098574 - RNA, 19 nt, Artificial Sequence
  Description of Artificial Sequence: Synthetic oligonucleotide
gguuccacauuaacuuaga

SEQ ID NO: 3098575 - RNA, 19 nt, Artificial Sequence
  Description of Artificial Sequence: Synthetic oligonucleotide
gcccuccucaagcaaauaa

SEQ ID NO: 3098576 - RNA, 19 nt, Artificial Sequence
  Description of Artificial Sequence: Synthetic oligonucleotide
ggguggauuuaaaugaaau

SEQ ID NO: 3098577 - RNA, 19 nt, Artificial Sequence
  Description of Artificial Sequence: Synthetic oligonucleotide
cccuuuucaaaacaccacu

SEQ ID NO: 3098578 - RNA, 19 nt, Artificial Sequence
  Description of Artificial Sequence: Synthetic oligonucleotide
cccuccucaagcaaauaaa

SEQ ID NO: 3098579 - RNA, 19 nt, Artificial Sequence
  Description of Artificial Sequence: Synthetic oligonucleotide
augcccuccucaagcaaau

SEQ ID NO: 3098580 - RNA, 19 nt, Artificial Sequence
  Description of Artificial Sequence: Synthetic oligonucleotide
gcaaauuuauggguggauu

SEQ ID NO: 3098581 - RNA, 19 nt, Artificial Sequence
  Description of Artificial Sequence: Synthetic oligonucleotide
gcuuagcaacaacaguccu

SEQ ID NO: 3098582 - RNA, 19 nt, Artificial Sequence
  Description of Artificial Sequence: Synthetic oligonucleotide
ugcccuccucaagcaaaua

SEQ ID NO: 3098583 - RNA, 19 nt, Artificial Sequence
  Description of Artificial Sequence: Synthetic oligonucleotide
augaaagucacuucuuccc

SEQ ID NO: 3098584 - RNA, 19 nt, Artificial Sequence
  Description of Artificial Sequence: Synthetic oligonucleotide
ugcuguuucaucuugguca

SEQ ID NO: 3098585 - RNA, 19 nt, Artificial Sequence
  Description of Artificial Sequence: Synthetic oligonucleotide
ugagaucucauccuccugg

SEQ ID NO: 3098586 - RNA, 19 nt, Artificial Sequence
  Description of Artificial Sequence: Synthetic oligonucleotide
uucuggauauucaagaggu

SEQ ID NO: 3098587 - RNA, 19 nt, Artificial Sequence
  Description of Artificial Sequence: Synthetic oligonucleotide
aaccuuucggcacuucacc

SEQ ID NO: 3098588 - RNA, 19 nt, Artificial Sequence
  Description of Artificial Sequence: Synthetic oligonucleotide
auagaugaaagucacuucu

SEQ ID NO: 3098589 - RNA, 19 nt, Artificial Sequence
  Description of Artificial Sequence: Synthetic oligonucleotide
agugguacgggccuguugg

SEQ ID NO: 3098590 - RNA, 19 nt, Artificial Sequence
  Description of Artificial Sequence: Synthetic oligonucleotide
ugaaagucacuucuucccg

SEQ ID NO: 3098591 - RNA, 19 nt, Artificial Sequence
  Description of Artificial Sequence: Synthetic oligonucleotide
aagagguucucugagaucu

SEQ ID NO: 3098592 - RNA, 19 nt, Artificial Sequence
  Description of Artificial Sequence: Synthetic oligonucleotide
ucugauagaugaaagucac

SEQ ID NO: 3098593 - RNA, 19 nt, Artificial Sequence
  Description of Artificial Sequence: Synthetic oligonucleotide
uggagcuucugauagauga

SEQ ID NO: 3098594 - RNA, 19 nt, Artificial Sequence
  Description of Artificial Sequence: Synthetic oligonucleotide
uucugauagaugaaaguca

SEQ ID NO: 3098595 - RNA, 19 nt, Artificial Sequence
  Description of Artificial Sequence: Synthetic oligonucleotide
gaugaaagucacuucuucc

SEQ ID NO: 3098596 - RNA, 19 nt, Artificial Sequence
  Description of Artificial Sequence: Synthetic oligonucleotide
uguuuucugcaucuucugg

SEQ ID NO: 3098597 - RNA, 19 nt, Artificial Sequence
  Description of Artificial Sequence: Synthetic oligonucleotide
aggaacuucuugcuguccc

SEQ ID NO: 3098598 - RNA, 19 nt, Artificial Sequence
  Description of Artificial Sequence: Synthetic oligonucleotide
agaugaaagucacuucuuc

SEQ ID NO: 3098599 - RNA, 19 nt, Artificial Sequence
  Description of Artificial Sequence: Synthetic oligonucleotide
gaucucauccuccugggcc

SEQ ID NO: 3098600 - RNA, 19 nt, Artificial Sequence
  Description of Artificial Sequence: Synthetic oligonucleotide
uccaguuccucccacagga

SEQ ID NO: 3098601 - RNA, 19 nt, Artificial Sequence
  Description of Artificial Sequence: Synthetic oligonucleotide
ucuucuggauauucaagag

SEQ ID NO: 3098602 - RNA, 19 nt, Artificial Sequence
  Description of Artificial Sequence: Synthetic oligonucleotide
accaacuccaguuccuccc

SEQ ID NO: 3098603 - RNA, 19 nt, Artificial Sequence
  Description of Artificial Sequence: Synthetic oligonucleotide
auauucaagagguucucug

SEQ ID NO: 3098604 - RNA, 19 nt, Artificial Sequence
  Description of Artificial Sequence: Synthetic oligonucleotide
uuggucagaaccuuucggc

SEQ ID NO: 3098605 - RNA, 19 nt, Artificial Sequence
  Description of Artificial Sequence: Synthetic oligonucleotide
uggauauucaagagguucu

SEQ ID NO: 3098606 - RNA, 19 nt, Artificial Sequence
  Description of Artificial Sequence: Synthetic oligonucleotide
cuucuggauauucaagagg

SEQ ID NO: 3098607 - RNA, 19 nt, Artificial Sequence
  Description of Artificial Sequence: Synthetic oligonucleotide
aucuucuggauauucaaga

SEQ ID NO: 3098608 - RNA, 19 nt, Artificial Sequence
  Description of Artificial Sequence: Synthetic oligonucleotide
uauucaagagguucucuga

SEQ ID NO: 3098609 - RNA, 19 nt, Artificial Sequence
  Description of Artificial Sequence: Synthetic oligonucleotide
agucacuucuucccgcacc

SEQ ID NO: 3098610 - RNA, 19 nt, Artificial Sequence
  Description of Artificial Sequence: Synthetic oligonucleotide
ucuuggucagaaccuuucg

SEQ ID NO: 3098611 - RNA, 19 nt, Artificial Sequence
  Description of Artificial Sequence: Synthetic oligonucleotide
ugauagaugaaagucacuu

SEQ ID NO: 3098612 - RNA, 19 nt, Artificial Sequence
  Description of Artificial Sequence: Synthetic oligonucleotide
auucaagagguucucugag

SEQ ID NO: 3098613 - RNA, 19 nt, Artificial Sequence
  Description of Artificial Sequence: Synthetic oligonucleotide
ucaagagguucucugagau

SEQ ID NO: 3098614 - RNA, 19 nt, Artificial Sequence
  Description of Artificial Sequence: Synthetic oligonucleotide
cuucugauagaugaaaguc

SEQ ID NO: 3098615 - RNA, 19 nt, Artificial Sequence
  Description of Artificial Sequence: Synthetic oligonucleotide
aaagucacuucuucccgca

SEQ ID NO: 3098616 - RNA, 19 nt, Artificial Sequence
  Description of Artificial Sequence: Synthetic oligonucleotide
gauagaugaaagucacuuc

SEQ ID NO: 3098617 - RNA, 19 nt, Artificial Sequence
  Description of Artificial Sequence: Synthetic oligonucleotide
cuuggucagaaccuuucgg

SEQ ID NO: 3098618 - RNA, 19 nt, Artificial Sequence
  Description of Artificial Sequence: Synthetic oligonucleotide
ucccacaggaacuucuugc

SEQ ID NO: 3098619 - RNA, 19 nt, Artificial Sequence
  Description of Artificial Sequence: Synthetic oligonucleotide
gaaagucacuucuucccgc

SEQ ID NO: 3098620 - RNA, 19 nt, Artificial Sequence
  Description of Artificial Sequence: Synthetic oligonucleotide
uucugcaucuucuggauau

SEQ ID NO: 3098621 - RNA, 19 nt, Artificial Sequence
  Description of Artificial Sequence: Synthetic oligonucleotide
ugggccaacagcugcaggc

SEQ ID NO: 3098622 - RNA, 19 nt, Artificial Sequence
  Description of Artificial Sequence: Synthetic oligonucleotide
gauuuccugggccaacagc

SEQ ID NO: 3098623 - RNA, 19 nt, Artificial Sequence
  Description of Artificial Sequence: Synthetic oligonucleotide
caucuucuggauauucaag

SEQ ID NO: 3098624 - RNA, 19 nt, Artificial Sequence
  Description of Artificial Sequence: Synthetic oligonucleotide
auuuccugggccaacagcu

SEQ ID NO: 3098625 - RNA, 19 nt, Artificial Sequence
  Description of Artificial Sequence: Synthetic oligonucleotide
uguuucaucuuggucagaa

SEQ ID NO: 3098626 - RNA, 19 nt, Artificial Sequence
  Description of Artificial Sequence: Synthetic oligonucleotide
cuggauauucaagagguuc

SEQ ID NO: 3098627 - RNA, 19 nt, Artificial Sequence
  Description of Artificial Sequence: Synthetic oligonucleotide
uccucacugucccucagug

SEQ ID NO: 3098628 - RNA, 19 nt, Artificial Sequence
  Description of Artificial Sequence: Synthetic oligonucleotide
uucugcaauuccugcaggc

SEQ ID NO: 3098629 - RNA, 19 nt, Artificial Sequence
  Description of Artificial Sequence: Synthetic oligonucleotide
ugucuucugcaauuccugc

SEQ ID NO: 3098630 - RNA, 19 nt, Artificial Sequence
  Description of Artificial Sequence: Synthetic oligonucleotide
uuuucugcaucuucuggau

SEQ ID NO: 3098631 - RNA, 19 nt, Artificial Sequence
  Description of Artificial Sequence: Synthetic oligonucleotide
aagucacuucuucccgcac

SEQ ID NO: 3098632 - RNA, 19 nt, Artificial Sequence
  Description of Artificial Sequence: Synthetic oligonucleotide
uucaagagguucucugaga

SEQ ID NO: 3098633 - RNA, 19 nt, Artificial Sequence
  Description of Artificial Sequence: Synthetic oligonucleotide
auccuccugggccuggagc

SEQ ID NO: 3098634 - RNA, 19 nt, Artificial Sequence
  Description of Artificial Sequence: Synthetic oligonucleotide
uggucagaaccuuucggca

SEQ ID NO: 3098635 - RNA, 19 nt, Artificial Sequence
  Description of Artificial Sequence: Synthetic oligonucleotide
ucugcaauuccugcaggcc

SEQ ID NO: 3098636 - RNA, 19 nt, Artificial Sequence
  Description of Artificial Sequence: Synthetic oligonucleotide
cuugcugucccggauuucc

SEQ ID NO: 3098637 - RNA, 19 nt, Artificial Sequence
  Description of Artificial Sequence: Synthetic oligonucleotide
agaaccuuucggcacuuca

SEQ ID NO: 3098638 - RNA, 19 nt, Artificial Sequence
  Description of Artificial Sequence: Synthetic oligonucleotide
agccccaugcagcuccugc

SEQ ID NO: 3098639 - RNA, 19 nt, Artificial Sequence
  Description of Artificial Sequence: Synthetic oligonucleotide
gaacuucuugcugucccgg

SEQ ID NO: 3098640 - RNA, 19 nt, Artificial Sequence
  Description of Artificial Sequence: Synthetic oligonucleotide
uuccugcaggccuugggcc

SEQ ID NO: 3098641 - RNA, 19 nt, Artificial Sequence
  Description of Artificial Sequence: Synthetic oligonucleotide
accuguguuuucugcaucu

SEQ ID NO: 3098642 - RNA, 19 nt, Artificial Sequence
  Description of Artificial Sequence: Synthetic oligonucleotide
uagaugaaagucacuucuu

SEQ ID NO: 3098643 - RNA, 19 nt, Artificial Sequence
  Description of Artificial Sequence: Synthetic oligonucleotide
uucuucccgcaccaacucc

SEQ ID NO: 3098644 - RNA, 19 nt, Artificial Sequence
  Description of Artificial Sequence: Synthetic oligonucleotide
uccuccugggccuggagcu

SEQ ID NO: 3098645 - RNA, 19 nt, Artificial Sequence
  Description of Artificial Sequence: Synthetic oligonucleotide
aucuuggucagaaccuuuc

SEQ ID NO: 3098646 - RNA, 19 nt, Artificial Sequence
  Description of Artificial Sequence: Synthetic oligonucleotide
agcuucugauagaugaaag

SEQ ID NO: 3098647 - RNA, 19 nt, Artificial Sequence
  Description of Artificial Sequence: Synthetic oligonucleotide
aacuucuugcugucccgga

SEQ ID NO: 3098648 - RNA, 19 nt, Artificial Sequence
  Description of Artificial Sequence: Synthetic oligonucleotide
agugucuucugcaauuccu

SEQ ID NO: 3098649 - RNA, 19 nt, Artificial Sequence
  Description of Artificial Sequence: Synthetic oligonucleotide
cagagccccaugcagcucc

SEQ ID NO: 3098650 - RNA, 19 nt, Artificial Sequence
  Description of Artificial Sequence: Synthetic oligonucleotide
uugcuguuucaucuugguc

SEQ ID NO: 3098651 - RNA, 19 nt, Artificial Sequence
  Description of Artificial Sequence: Synthetic oligonucleotide
gaaccuuucggcacuucac

SEQ ID NO: 3098652 - RNA, 19 nt, Artificial Sequence
  Description of Artificial Sequence: Synthetic oligonucleotide
ggaacuucuugcugucccg

SEQ ID NO: 3098653 - RNA, 19 nt, Artificial Sequence
  Description of Artificial Sequence: Synthetic oligonucleotide
accuuucggcacuucaccu

SEQ ID NO: 3098654 - RNA, 19 nt, Artificial Sequence
  Description of Artificial Sequence: Synthetic oligonucleotide
uucggcacuucaccugugu

SEQ ID NO: 3098655 - RNA, 19 nt, Artificial Sequence
  Description of Artificial Sequence: Synthetic oligonucleotide
ugcaauuccugcaggccuu

SEQ ID NO: 3098656 - RNA, 19 nt, Artificial Sequence
  Description of Artificial Sequence: Synthetic oligonucleotide
ucacugucccucagugucu

SEQ ID NO: 3098657 - RNA, 19 nt, Artificial Sequence
  Description of Artificial Sequence: Synthetic oligonucleotide
acuucuucccgcaccaacu

SEQ ID NO: 3098658 - RNA, 19 nt, Artificial Sequence
  Description of Artificial Sequence: Synthetic oligonucleotide
ucagugucuucugcaauuc

SEQ ID NO: 3098659 - RNA, 19 nt, Artificial Sequence
  Description of Artificial Sequence: Synthetic oligonucleotide
aguuccucccacaggaacu

SEQ ID NO: 3098660 - RNA, 19 nt, Artificial Sequence
  Description of Artificial Sequence: Synthetic oligonucleotide
ucccgcaccaacuccaguu

SEQ ID NO: 3098661 - RNA, 19 nt, Artificial Sequence
  Description of Artificial Sequence: Synthetic oligonucleotide
ugcugucccggauuuccug

SEQ ID NO: 3098662 - RNA, 19 nt, Artificial Sequence
  Description of Artificial Sequence: Synthetic oligonucleotide
caggcagcgagugguacgg

SEQ ID NO: 3098663 - RNA, 19 nt, Artificial Sequence
  Description of Artificial Sequence: Synthetic oligonucleotide
uucuugcugucccggauuu

SEQ ID NO: 3098664 - RNA, 19 nt, Artificial Sequence
  Description of Artificial Sequence: Synthetic oligonucleotide
guuucaucuuggucagaac

SEQ ID NO: 3098665 - RNA, 19 nt, Artificial Sequence
  Description of Artificial Sequence: Synthetic oligonucleotide
caguuccucccacaggaac

SEQ ID NO: 3098666 - RNA, 19 nt, Artificial Sequence
  Description of Artificial Sequence: Synthetic oligonucleotide
ucuggauauucaagagguu

SEQ ID NO: 3098667 - RNA, 19 nt, Artificial Sequence
  Description of Artificial Sequence: Synthetic oligonucleotide
gucacuucuucccgcacca

SEQ ID NO: 3098668 - RNA, 19 nt, Artificial Sequence
  Description of Artificial Sequence: Synthetic oligonucleotide
ugucccucagugucuucug

SEQ ID NO: 3098669 - RNA, 19 nt, Artificial Sequence
  Description of Artificial Sequence: Synthetic oligonucleotide
ugucccggauuuccugggc

SEQ ID NO: 3098670 - RNA, 19 nt, Artificial Sequence
  Description of Artificial Sequence: Synthetic oligonucleotide
gguacgggccuguuggagc

SEQ ID NO: 3098671 - RNA, 19 nt, Artificial Sequence
  Description of Artificial Sequence: Synthetic oligonucleotide
ucccggauuuccugggcca

SEQ ID NO: 3098672 - RNA, 19 nt, Artificial Sequence
  Description of Artificial Sequence: Synthetic oligonucleotide
acuucuugcugucccggau

SEQ ID NO: 3098673 - RNA, 19 nt, Artificial Sequence
  Description of Artificial Sequence: Synthetic oligonucleotide
ggucagaaccuuucggcac

SEQ ID NO: 3098674 - RNA, 19 nt, Artificial Sequence
  Description of Artificial Sequence: Synthetic oligonucleotide
caccaacuccaguuccucc

SEQ ID NO: 3098675 - RNA, 19 nt, Artificial Sequence
  Description of Artificial Sequence: Synthetic oligonucleotide
cagugucuucugcaauucc

SEQ ID NO: 3098676 - RNA, 19 nt, Artificial Sequence
  Description of Artificial Sequence: Synthetic oligonucleotide
cuucuucccgcaccaacuc

SEQ ID NO: 3098677 - RNA, 19 nt, Artificial Sequence
  Description of Artificial Sequence: Synthetic oligonucleotide
gcugucccggauuuccugg

SEQ ID NO: 3098678 - RNA, 19 nt, Artificial Sequence
  Description of Artificial Sequence: Synthetic oligonucleotide
caagagguucucugagauc

SEQ ID NO: 3098679 - RNA, 19 nt, Artificial Sequence
  Description of Artificial Sequence: Synthetic oligonucleotide
cugucccggauuuccuggg

SEQ ID NO: 3098680 - RNA, 19 nt, Artificial Sequence
  Description of Artificial Sequence: Synthetic oligonucleotide
cacaggaacuucuugcugu

SEQ ID NO: 3098681 - RNA, 19 nt, Artificial Sequence
  Description of Artificial Sequence: Synthetic oligonucleotide
cuccaguuccucccacagg

SEQ ID NO: 3098682 - RNA, 19 nt, Artificial Sequence
  Description of Artificial Sequence: Synthetic oligonucleotide
gagugguacgggccuguug

SEQ ID NO: 3098683 - RNA, 19 nt, Artificial Sequence
  Description of Artificial Sequence: Synthetic oligonucleotide
ugguacgggccuguuggag

SEQ ID NO: 3098684 - RNA, 19 nt, Artificial Sequence
  Description of Artificial Sequence: Synthetic oligonucleotide
gauauucaagagguucucu

SEQ ID NO: 3098685 - RNA, 19 nt, Artificial Sequence
  Description of Artificial Sequence: Synthetic oligonucleotide
gucccggauuuccugggcc

SEQ ID NO: 3098686 - RNA, 19 nt, Artificial Sequence
  Description of Artificial Sequence: Synthetic oligonucleotide
gagcuucugauagaugaaa

SEQ ID NO: 3098687 - RNA, 19 nt, Artificial Sequence
  Description of Artificial Sequence: Synthetic oligonucleotide
acgggccuguuggagcucc

SEQ ID NO: 3098688 - RNA, 19 nt, Artificial Sequence
  Description of Artificial Sequence: Synthetic oligonucleotide
gagguucucugagaucuca

SEQ ID NO: 3098689 - RNA, 19 nt, Artificial Sequence
  Description of Artificial Sequence: Synthetic oligonucleotide
uugcugucccggauuuccu

SEQ ID NO: 3098690 - RNA, 19 nt, Artificial Sequence
  Description of Artificial Sequence: Synthetic oligonucleotide
uuucggcacuucaccugug

SEQ ID NO: 3098691 - RNA, 19 nt, Artificial Sequence
  Description of Artificial Sequence: Synthetic oligonucleotide
ccuugcuguuucaucuugg

SEQ ID NO: 3098692 - RNA, 19 nt, Artificial Sequence
  Description of Artificial Sequence: Synthetic oligonucleotide
gguucucugagaucucauc

SEQ ID NO: 3098693 - RNA, 19 nt, Artificial Sequence
  Description of Artificial Sequence: Synthetic oligonucleotide
cugagaucucauccuccug

SEQ ID NO: 3098694 - RNA, 19 nt, Artificial Sequence
  Description of Artificial Sequence: Synthetic oligonucleotide
gcaggcagcgagugguacg

SEQ ID NO: 3098695 - RNA, 19 nt, Artificial Sequence
  Description of Artificial Sequence: Synthetic oligonucleotide
gucccucagugucuucugc

SEQ ID NO: 3098696 - RNA, 19 nt, Artificial Sequence
  Description of Artificial Sequence: Synthetic oligonucleotide
cucccacaggaacuucuug

SEQ ID NO: 3098697 - RNA, 19 nt, Artificial Sequence
  Description of Artificial Sequence: Synthetic oligonucleotide
ucggcacuucaccuguguu

SEQ ID NO: 3098698 - RNA, 19 nt, Artificial Sequence
  Description of Artificial Sequence: Synthetic oligonucleotide
cuggagcuucugauagaug

SEQ ID NO: 3098699 - RNA, 19 nt, Artificial Sequence
  Description of Artificial Sequence: Synthetic oligonucleotide
ggauuuccugggccaacag

SEQ ID NO: 3098700 - RNA, 19 nt, Artificial Sequence
  Description of Artificial Sequence: Synthetic oligonucleotide
cugcaucuucuggauauuc

SEQ ID NO: 3098701 - RNA, 19 nt, Artificial Sequence
  Description of Artificial Sequence: Synthetic oligonucleotide
gucagaaccuuucggcacu

SEQ ID NO: 3098702 - RNA, 19 nt, Artificial Sequence
  Description of Artificial Sequence: Synthetic oligonucleotide
cuugcuguuucaucuuggu

SEQ ID NO: 3098703 - RNA, 19 nt, Artificial Sequence
  Description of Artificial Sequence: Synthetic oligonucleotide
gcuucugauagaugaaagu

SEQ ID NO: 3098704 - RNA, 19 nt, Artificial Sequence
  Description of Artificial Sequence: Synthetic oligonucleotide
ggauauucaagagguucuc

SEQ ID NO: 3098705 - RNA, 19 nt, Artificial Sequence
  Description of Artificial Sequence: Synthetic oligonucleotide
ggcagcgagugguacgggc

SEQ ID NO: 3098706 - RNA, 19 nt, Artificial Sequence
  Description of Artificial Sequence: Synthetic oligonucleotide
agagguucucugagaucuc

SEQ ID NO: 3098707 - RNA, 19 nt, Artificial Sequence
  Description of Artificial Sequence: Synthetic oligonucleotide
caccuguguuuucugcauc

SEQ ID NO: 3098708 - RNA, 19 nt, Artificial Sequence
  Description of Artificial Sequence: Synthetic oligonucleotide
cuuucggcacuucaccugu

SEQ ID NO: 3098709 - RNA, 19 nt, Artificial Sequence
  Description of Artificial Sequence: Synthetic oligonucleotide
ugcaggcagcgagugguac

SEQ ID NO: 3098710 - RNA, 19 nt, Artificial Sequence
  Description of Artificial Sequence: Synthetic oligonucleotide
caggaacuucuugcugucc

SEQ ID NO: 3098711 - RNA, 19 nt, Artificial Sequence
  Description of Artificial Sequence: Synthetic oligonucleotide
ccuuucggcacuucaccug

SEQ ID NO: 3098712 - RNA, 19 nt, Artificial Sequence
  Description of Artificial Sequence: Synthetic oligonucleotide
gggccagagccccaugcag

SEQ ID NO: 3098713 - RNA, 19 nt, Artificial Sequence
  Description of Artificial Sequence: Synthetic oligonucleotide
acagcugcaggcagcgagu

SEQ ID NO: 3098714 - RNA, 19 nt, Artificial Sequence
  Description of Artificial Sequence: Synthetic oligonucleotide
cugcaauuccugcaggccu

SEQ ID NO: 3098715 - RNA, 19 nt, Artificial Sequence
  Description of Artificial Sequence: Synthetic oligonucleotide
uucccgcaccaacuccagu

SEQ ID NO: 3098716 - RNA, 19 nt, Artificial Sequence
  Description of Artificial Sequence: Synthetic oligonucleotide
caacuccaguuccucccac

SEQ ID NO: 3098717 - RNA, 19 nt, Artificial Sequence
  Description of Artificial Sequence: Synthetic oligonucleotide
gccuugcuguuucaucuug

SEQ ID NO: 3098718 - RNA, 19 nt, Artificial Sequence
  Description of Artificial Sequence: Synthetic oligonucleotide
caauuccugcaggccuugg

SEQ ID NO: 3098719 - RNA, 19 nt, Artificial Sequence
  Description of Artificial Sequence: Synthetic oligonucleotide
cucagugucuucugcaauu

SEQ ID NO: 3098720 - RNA, 19 nt, Artificial Sequence
  Description of Artificial Sequence: Synthetic oligonucleotide
gcagcgagugguacgggcc

SEQ ID NO: 3098721 - RNA, 19 nt, Artificial Sequence
  Description of Artificial Sequence: Synthetic oligonucleotide
ggccaacagcugcaggcag

SEQ ID NO: 3098722 - RNA, 19 nt, Artificial Sequence
  Description of Artificial Sequence: Synthetic oligonucleotide
guacgggccuguuggagcu

SEQ ID NO: 3098723 - RNA, 19 nt, Artificial Sequence
  Description of Artificial Sequence: Synthetic oligonucleotide
cugauagaugaaagucacu

SEQ ID NO: 3098724 - RNA, 19 nt, Artificial Sequence
  Description of Artificial Sequence: Synthetic oligonucleotide
gccuguuggagcuccucac

SEQ ID NO: 3098725 - RNA, 19 nt, Artificial Sequence
  Description of Artificial Sequence: Synthetic oligonucleotide
ucauccuccugggccugga

SEQ ID NO: 3098726 - RNA, 19 nt, Artificial Sequence
  Description of Artificial Sequence: Synthetic oligonucleotide
cauccuccugggccuggag

SEQ ID NO: 3098727 - RNA, 19 nt, Artificial Sequence
  Description of Artificial Sequence: Synthetic oligonucleotide
ggccagagccccaugcagc

SEQ ID NO: 3098728 - RNA, 19 nt, Artificial Sequence
  Description of Artificial Sequence: Synthetic oligonucleotide
ccacaggaacuucuugcug

SEQ ID NO: 3098729 - RNA, 19 nt, Artificial Sequence
  Description of Artificial Sequence: Synthetic oligonucleotide
ucagaaccuuucggcacuu

SEQ ID NO: 3098730 - RNA, 19 nt, Artificial Sequence
  Description of Artificial Sequence: Synthetic oligonucleotide
ucuugcugucccggauuuc

SEQ ID NO: 3098731 - RNA, 19 nt, Artificial Sequence
  Description of Artificial Sequence: Synthetic oligonucleotide
ggccuguuggagcuccuca

SEQ ID NO: 3098732 - RNA, 19 nt, Artificial Sequence
  Description of Artificial Sequence: Synthetic oligonucleotide
agguucucugagaucucau

SEQ ID NO: 3098733 - RNA, 19 nt, Artificial Sequence
  Description of Artificial Sequence: Synthetic oligonucleotide
cucauccuccugggccugg

SEQ ID NO: 3098734 - RNA, 19 nt, Artificial Sequence
  Description of Artificial Sequence: Synthetic oligonucleotide
cuugggccagagccccaug

SEQ ID NO: 3098735 - RNA, 19 nt, Artificial Sequence
  Description of Artificial Sequence: Synthetic oligonucleotide
agcgagugguacgggccug

SEQ ID NO: 3098736 - RNA, 19 nt, Artificial Sequence
  Description of Artificial Sequence: Synthetic oligonucleotide
cagcugcaggcagcgagug

SEQ ID NO: 3098737 - RNA, 19 nt, Artificial Sequence
  Description of Artificial Sequence: Synthetic oligonucleotide
gccaacagcugcaggcagc

SEQ ID NO: 3098738 - RNA, 19 nt, Artificial Sequence
  Description of Artificial Sequence: Synthetic oligonucleotide
ucacuucuucccgcaccaa

SEQ ID NO: 3098739 - RNA, 19 nt, Artificial Sequence
  Description of Artificial Sequence: Synthetic oligonucleotide
cacuucaccuguguuuucu

SEQ ID NO: 3098740 - RNA, 19 nt, Artificial Sequence
  Description of Artificial Sequence: Synthetic oligonucleotide
gugguacgggccuguugga

SEQ ID NO: 3098741 - RNA, 19 nt, Artificial Sequence
  Description of Artificial Sequence: Synthetic oligonucleotide
ggccuugggccagagcccc

SEQ ID NO: 3098742 - RNA, 19 nt, Artificial Sequence
  Description of Artificial Sequence: Synthetic oligonucleotide
ccgcaccaacuccaguucc

SEQ ID NO: 3098743 - RNA, 19 nt, Artificial Sequence
  Description of Artificial Sequence: Synthetic oligonucleotide
cugggccuggagcuucuga

SEQ ID NO: 3098744 - RNA, 19 nt, Artificial Sequence
  Description of Artificial Sequence: Synthetic oligonucleotide
aggcagcgagugguacggg

SEQ ID NO: 3098745 - RNA, 19 nt, Artificial Sequence
  Description of Artificial Sequence: Synthetic oligonucleotide
cuccugggccuggagcuuc

SEQ ID NO: 3098746 - RNA, 19 nt, Artificial Sequence
  Description of Artificial Sequence: Synthetic oligonucleotide
cugucccucagugucuucu

SEQ ID NO: 3098747 - RNA, 19 nt, Artificial Sequence
  Description of Artificial Sequence: Synthetic oligonucleotide
gcaauuccugcaggccuug

SEQ ID NO: 3098748 - RNA, 19 nt, Artificial Sequence
  Description of Artificial Sequence: Synthetic oligonucleotide
cccgcaccaacuccaguuc

SEQ ID NO: 3098749 - RNA, 19 nt, Artificial Sequence
  Description of Artificial Sequence: Synthetic oligonucleotide
caucuuggucagaaccuuu

SEQ ID NO: 3098750 - RNA, 19 nt, Artificial Sequence
  Description of Artificial Sequence: Synthetic oligonucleotide
ggcacuucaccuguguuuu

SEQ ID NO: 3098751 - RNA, 19 nt, Artificial Sequence
  Description of Artificial Sequence: Synthetic oligonucleotide
gggccaacagcugcaggca

SEQ ID NO: 3098752 - RNA, 19 nt, Artificial Sequence
  Description of Artificial Sequence: Synthetic oligonucleotide
cagaaccuuucggcacuuc

SEQ ID NO: 3098753 - RNA, 19 nt, Artificial Sequence
  Description of Artificial Sequence: Synthetic oligonucleotide
ccaacuccaguuccuccca

SEQ ID NO: 3098754 - RNA, 19 nt, Artificial Sequence
  Description of Artificial Sequence: Synthetic oligonucleotide
cccacaggaacuucuugcu

SEQ ID NO: 3098755 - RNA, 19 nt, Artificial Sequence
  Description of Artificial Sequence: Synthetic oligonucleotide
gccagagccccaugcagcu

SEQ ID NO: 3098756 - RNA, 19 nt, Artificial Sequence
  Description of Artificial Sequence: Synthetic oligonucleotide
guuccucccacaggaacuu

SEQ ID NO: 3098757 - RNA, 19 nt, Artificial Sequence
  Description of Artificial Sequence: Synthetic oligonucleotide
cagcgagugguacgggccu

SEQ ID NO: 3098758 - RNA, 19 nt, Artificial Sequence
  Description of Artificial Sequence: Synthetic oligonucleotide
cccucagugucuucugcaa

SEQ ID NO: 3098759 - RNA, 19 nt, Artificial Sequence
  Description of Artificial Sequence: Synthetic oligonucleotide
gccuggagcuucugauaga

SEQ ID NO: 3098760 - RNA, 19 nt, Artificial Sequence
  Description of Artificial Sequence: Synthetic oligonucleotide
gggccuggagcuucugaua

SEQ ID NO: 3098761 - RNA, 19 nt, Artificial Sequence
  Description of Artificial Sequence: Synthetic oligonucleotide
agagccccaugcagcuccu

SEQ ID NO: 3098762 - RNA, 19 nt, Artificial Sequence
  Description of Artificial Sequence: Synthetic oligonucleotide
cuccucacugucccucagu

SEQ ID NO: 3098763 - RNA, 19 nt, Artificial Sequence
  Description of Artificial Sequence: Synthetic oligonucleotide
uacgggccuguuggagcuc

SEQ ID NO: 3098764 - RNA, 19 nt, Artificial Sequence
  Description of Artificial Sequence: Synthetic oligonucleotide
gagccccaugcagcuccug

SEQ ID NO: 3098765 - RNA, 19 nt, Artificial Sequence
  Description of Artificial Sequence: Synthetic oligonucleotide
gcacuucaccuguguuuuc

SEQ ID NO: 3098766 - RNA, 19 nt, Artificial Sequence
  Description of Artificial Sequence: Synthetic oligonucleotide
ccuggagcuucugauagau

SEQ ID NO: 3098767 - RNA, 19 nt, Artificial Sequence
  Description of Artificial Sequence: Synthetic oligonucleotide
ccggauuuccugggccaac

SEQ ID NO: 3098768 - RNA, 19 nt, Artificial Sequence
  Description of Artificial Sequence: Synthetic oligonucleotide
caacagcugcaggcagcga

SEQ ID NO: 3098769 - RNA, 19 nt, Artificial Sequence
  Description of Artificial Sequence: Synthetic oligonucleotide
ccaguuccucccacaggaa

SEQ ID NO: 3098770 - RNA, 19 nt, Artificial Sequence
  Description of Artificial Sequence: Synthetic oligonucleotide
gggccuguuggagcuccuc

SEQ ID NO: 3098771 - RNA, 19 nt, Artificial Sequence
  Description of Artificial Sequence: Synthetic oligonucleotide
cggauuuccugggccaaca

SEQ ID NO: 3098772 - RNA, 19 nt, Artificial Sequence
  Description of Artificial Sequence: Synthetic oligonucleotide
ccucacugucccucagugu

SEQ ID NO: 3098773 - RNA, 19 nt, Artificial Sequence
  Description of Artificial Sequence: Synthetic oligonucleotide
ccagagccccaugcagcuc

SEQ ID NO: 3098774 - RNA, 19 nt, Artificial Sequence
  Description of Artificial Sequence: Synthetic oligonucleotide
cgcaccaacuccaguuccu

SEQ ID NO: 3098775 - RNA, 19 nt, Artificial Sequence
  Description of Artificial Sequence: Synthetic oligonucleotide
cggcacuucaccuguguuu

SEQ ID NO: 3098776 - RNA, 19 nt, Artificial Sequence
  Description of Artificial Sequence: Synthetic oligonucleotide
ccucccacaggaacuucuu

SEQ ID NO: 3098777 - RNA, 19 nt, Artificial Sequence
  Description of Artificial Sequence: Synthetic oligonucleotide
cccggauuuccugggccaa

SEQ ID NO: 3098778 - RNA, 19 nt, Artificial Sequence
  Description of Artificial Sequence: Synthetic oligonucleotide
gcgagugguacgggccugu

SEQ ID NO: 3098779 - RNA, 19 nt, Artificial Sequence
  Description of Artificial Sequence: Synthetic oligonucleotide
ccuguguuuucugcaucuu

SEQ ID NO: 3098780 - RNA, 19 nt, Artificial Sequence
  Description of Artificial Sequence: Synthetic oligonucleotide
ccuugggccagagccccau

SEQ ID NO: 3098781 - RNA, 19 nt, Artificial Sequence
  Description of Artificial Sequence: Synthetic oligonucleotide
ccuccugggccuggagcuu

SEQ ID NO: 3098782 - RNA, 19 nt, Artificial Sequence
  Description of Artificial Sequence: Synthetic oligonucleotide
cgggccuguuggagcuccu

SEQ ID NO: 3098783 - RNA, 19 nt, Artificial Sequence
  Description of Artificial Sequence: Synthetic oligonucleotide
cgagugguacgggccuguu

SEQ ID NO: 3098784 - RNA, 19 nt, Artificial Sequence
  Description of Artificial Sequence: Synthetic oligonucleotide
aaucagaugaaucaauugg

SEQ ID NO: 3098785 - RNA, 19 nt, Artificial Sequence
  Description of Artificial Sequence: Synthetic oligonucleotide
uuuaaugcaaaccaaacca

SEQ ID NO: 3098786 - RNA, 19 nt, Artificial Sequence
  Description of Artificial Sequence: Synthetic oligonucleotide
aaaaccaacucuuuagggg

SEQ ID NO: 3098787 - RNA, 19 nt, Artificial Sequence
  Description of Artificial Sequence: Synthetic oligonucleotide
aaaaugaucugguagucuc

SEQ ID NO: 3098788 - RNA, 19 nt, Artificial Sequence
  Description of Artificial Sequence: Synthetic oligonucleotide
aaaagugggcuucugaagg

SEQ ID NO: 3098789 - RNA, 19 nt, Artificial Sequence
  Description of Artificial Sequence: Synthetic oligonucleotide
uugaagacagaaaaguggg

SEQ ID NO: 3098790 - RNA, 19 nt, Artificial Sequence
  Description of Artificial Sequence: Synthetic oligonucleotide
cuugaagacagaaaagugg

SEQ ID NO: 3098791 - RNA, 19 nt, Artificial Sequence
  Description of Artificial Sequence: Synthetic oligonucleotide
aaucaauuggaguuacagg

SEQ ID NO: 3098792 - RNA, 19 nt, Artificial Sequence
  Description of Artificial Sequence: Synthetic oligonucleotide
uuuuaaugcaaaccaaacc

SEQ ID NO: 3098793 - RNA, 19 nt, Artificial Sequence
  Description of Artificial Sequence: Synthetic oligonucleotide
ucuuuaaaccucuugaaga

SEQ ID NO: 3098794 - RNA, 19 nt, Artificial Sequence
  Description of Artificial Sequence: Synthetic oligonucleotide
uuggaaaaugaucugguag

SEQ ID NO: 3098795 - RNA, 19 nt, Artificial Sequence
  Description of Artificial Sequence: Synthetic oligonucleotide
ugcaaaaucagaugaauca

SEQ ID NO: 3098796 - RNA, 19 nt, Artificial Sequence
  Description of Artificial Sequence: Synthetic oligonucleotide
aucaauuggaguuacaggu

SEQ ID NO: 3098797 - RNA, 19 nt, Artificial Sequence
  Description of Artificial Sequence: Synthetic oligonucleotide
uuaaaccucuugaagacag

SEQ ID NO: 3098798 - RNA, 19 nt, Artificial Sequence
  Description of Artificial Sequence: Synthetic oligonucleotide
aacucuuuagggguaaccc

SEQ ID NO: 3098799 - RNA, 19 nt, Artificial Sequence
  Description of Artificial Sequence: Synthetic oligonucleotide
aaaucagaugaaucaauug

SEQ ID NO: 3098800 - RNA, 19 nt, Artificial Sequence
  Description of Artificial Sequence: Synthetic oligonucleotide
ugcaaaccaaaccaaaacc

SEQ ID NO: 3098801 - RNA, 19 nt, Artificial Sequence
  Description of Artificial Sequence: Synthetic oligonucleotide
aaaccaacucuuuaggggu

SEQ ID NO: 3098802 - RNA, 19 nt, Artificial Sequence
  Description of Artificial Sequence: Synthetic oligonucleotide
aaagugggcuucugaaggc

SEQ ID NO: 3098803 - RNA, 19 nt, Artificial Sequence
  Description of Artificial Sequence: Synthetic oligonucleotide
ucagaugaaucaauuggag

SEQ ID NO: 3098804 - RNA, 19 nt, Artificial Sequence
  Description of Artificial Sequence: Synthetic oligonucleotide
augcaaaccaaaccaaaac

SEQ ID NO: 3098805 - RNA, 19 nt, Artificial Sequence
  Description of Artificial Sequence: Synthetic oligonucleotide
ucuugaagacagaaaagug

SEQ ID NO: 3098806 - RNA, 19 nt, Artificial Sequence
  Description of Artificial Sequence: Synthetic oligonucleotide
gaaucaauuggaguuacag

SEQ ID NO: 3098807 - RNA, 19 nt, Artificial Sequence
  Description of Artificial Sequence: Synthetic oligonucleotide
agaugaaucaauuggaguu

SEQ ID NO: 3098808 - RNA, 19 nt, Artificial Sequence
  Description of Artificial Sequence: Synthetic oligonucleotide
ucauuggaaaaugaucugg

SEQ ID NO: 3098809 - RNA, 19 nt, Artificial Sequence
  Description of Artificial Sequence: Synthetic oligonucleotide
auucauuggaaaaugaucu

SEQ ID NO: 3098810 - RNA, 19 nt, Artificial Sequence
  Description of Artificial Sequence: Synthetic oligonucleotide
uggaaaaugaucugguagu

SEQ ID NO: 3098811 - RNA, 19 nt, Artificial Sequence
  Description of Artificial Sequence: Synthetic oligonucleotide
acucuuuagggguaacccc

SEQ ID NO: 3098812 - RNA, 19 nt, Artificial Sequence
  Description of Artificial Sequence: Synthetic oligonucleotide
cugguagucucuuuaaacc

SEQ ID NO: 3098813 - RNA, 19 nt, Artificial Sequence
  Description of Artificial Sequence: Synthetic oligonucleotide
cuuuaaaccucuugaagac

SEQ ID NO: 3098814 - RNA, 19 nt, Artificial Sequence
  Description of Artificial Sequence: Synthetic oligonucleotide
ggaguuacaggucuggugg

SEQ ID NO: 3098815 - RNA, 19 nt, Artificial Sequence
  Description of Artificial Sequence: Synthetic oligonucleotide
cauucauuggaaaaugauc

SEQ ID NO: 3098816 - RNA, 19 nt, Artificial Sequence
  Description of Artificial Sequence: Synthetic oligonucleotide
gaaaagugggcuucugaag

SEQ ID NO: 3098817 - RNA, 19 nt, Artificial Sequence
  Description of Artificial Sequence: Synthetic oligonucleotide
uuuagggguaaccccaggc

SEQ ID NO: 3098818 - RNA, 19 nt, Artificial Sequence
  Description of Artificial Sequence: Synthetic oligonucleotide
ucugguagucucuuuaaac

SEQ ID NO: 3098819 - RNA, 19 nt, Artificial Sequence
  Description of Artificial Sequence: Synthetic oligonucleotide
uuaaugcaaaccaaaccaa

SEQ ID NO: 3098820 - RNA, 19 nt, Artificial Sequence
  Description of Artificial Sequence: Synthetic oligonucleotide
accucuugaagacagaaaa

SEQ ID NO: 3098821 - RNA, 19 nt, Artificial Sequence
  Description of Artificial Sequence: Synthetic oligonucleotide
aauauccagugcaaaauca

SEQ ID NO: 3098822 - RNA, 19 nt, Artificial Sequence
  Description of Artificial Sequence: Synthetic oligonucleotide
gguuccaaggcauucauug

SEQ ID NO: 3098823 - RNA, 19 nt, Artificial Sequence
  Description of Artificial Sequence: Synthetic oligonucleotide
cucuuuaaaccucuugaag

SEQ ID NO: 3098824 - RNA, 19 nt, Artificial Sequence
  Description of Artificial Sequence: Synthetic oligonucleotide
uuccaaggcauucauugga

SEQ ID NO: 3098825 - RNA, 19 nt, Artificial Sequence
  Description of Artificial Sequence: Synthetic oligonucleotide
uuagggguaaccccaggca

SEQ ID NO: 3098826 - RNA, 19 nt, Artificial Sequence
  Description of Artificial Sequence: Synthetic oligonucleotide
agaaaagugggcuucugaa

SEQ ID NO: 3098827 - RNA, 19 nt, Artificial Sequence
  Description of Artificial Sequence: Synthetic oligonucleotide
uucauuggaaaaugaucug

SEQ ID NO: 3098828 - RNA, 19 nt, Artificial Sequence
  Description of Artificial Sequence: Synthetic oligonucleotide
  modified_base (17)..(17): a, c, u, g, unknown or other
agcagcagcagccggcngc

SEQ ID NO: 3098829 - RNA, 19 nt, Artificial Sequence
  Description of Artificial Sequence: Synthetic oligonucleotide
gucucuuuaaaccucuuga

SEQ ID NO: 3098830 - RNA, 19 nt, Artificial Sequence
  Description of Artificial Sequence: Synthetic oligonucleotide
uccagugcaaaaucagaug

SEQ ID NO: 3098831 - RNA, 19 nt, Artificial Sequence
  Description of Artificial Sequence: Synthetic oligonucleotide
ugguagucucuuuaaaccu

SEQ ID NO: 3098832 - RNA, 19 nt, Artificial Sequence
  Description of Artificial Sequence: Synthetic oligonucleotide
aaaaucagaugaaucaauu

SEQ ID NO: 3098833 - RNA, 19 nt, Artificial Sequence
  Description of Artificial Sequence: Synthetic oligonucleotide
ugaagacagaaaagugggc

SEQ ID NO: 3098834 - RNA, 19 nt, Artificial Sequence
  Description of Artificial Sequence: Synthetic oligonucleotide
ucucuuuaaaccucuugaa

SEQ ID NO: 3098835 - RNA, 19 nt, Artificial Sequence
  Description of Artificial Sequence: Synthetic oligonucleotide
caugcgaauauccagugca

SEQ ID NO: 3098836 - RNA, 19 nt, Artificial Sequence
  Description of Artificial Sequence: Synthetic oligonucleotide
aagugggcuucugaaggcc

SEQ ID NO: 3098837 - RNA, 19 nt, Artificial Sequence
  Description of Artificial Sequence: Synthetic oligonucleotide
ucaauuggaguuacagguc

SEQ ID NO: 3098838 - RNA, 19 nt, Artificial Sequence
  Description of Artificial Sequence: Synthetic oligonucleotide
aaggcauucauuggaaaau

SEQ ID NO: 3098839 - RNA, 19 nt, Artificial Sequence
  Description of Artificial Sequence: Synthetic oligonucleotide
aagacagaaaagugggcuu

SEQ ID NO: 3098840 - RNA, 19 nt, Artificial Sequence
  Description of Artificial Sequence: Synthetic oligonucleotide
uggaguuacaggucuggug

SEQ ID NO: 3098841 - RNA, 19 nt, Artificial Sequence
  Description of Artificial Sequence: Synthetic oligonucleotide
agcagcagcagcagcagcc

SEQ ID NO: 3098842 - RNA, 19 nt, Artificial Sequence
  Description of Artificial Sequence: Synthetic oligonucleotide
guuccaaggcauucauugg

SEQ ID NO: 3098843 - RNA, 19 nt, Artificial Sequence
  Description of Artificial Sequence: Synthetic oligonucleotide
augaaucaauuggaguuac

SEQ ID NO: 3098844 - RNA, 19 nt, Artificial Sequence
  Description of Artificial Sequence: Synthetic oligonucleotide
ucuuuagggguaaccccag

SEQ ID NO: 3098845 - RNA, 19 nt, Artificial Sequence
  Description of Artificial Sequence: Synthetic oligonucleotide
uuuaaaccucuugaagaca

SEQ ID NO: 3098846 - RNA, 19 nt, Artificial Sequence
  Description of Artificial Sequence: Synthetic oligonucleotide
agucucuuuaaaccucuug

SEQ ID NO: 3098847 - RNA, 19 nt, Artificial Sequence
  Description of Artificial Sequence: Synthetic oligonucleotide
aggucuggugguuccaagg

SEQ ID NO: 3098848 - RNA, 19 nt, Artificial Sequence
  Description of Artificial Sequence: Synthetic oligonucleotide
auauccagugcaaaaucag

SEQ ID NO: 3098849 - RNA, 19 nt, Artificial Sequence
  Description of Artificial Sequence: Synthetic oligonucleotide
aucagaugaaucaauugga

SEQ ID NO: 3098850 - RNA, 19 nt, Artificial Sequence
  Description of Artificial Sequence: Synthetic oligonucleotide
aaaccucuugaagacagaa

SEQ ID NO: 3098851 - RNA, 19 nt, Artificial Sequence
  Description of Artificial Sequence: Synthetic oligonucleotide
caggcaugcgaauauccag

SEQ ID NO: 3098852 - RNA, 19 nt, Artificial Sequence
  Description of Artificial Sequence: Synthetic oligonucleotide
gcuucugaaggccaggcag

SEQ ID NO: 3098853 - RNA, 19 nt, Artificial Sequence
  Description of Artificial Sequence: Synthetic oligonucleotide
gaagacagaaaagugggcu

SEQ ID NO: 3098854 - RNA, 19 nt, Artificial Sequence
  Description of Artificial Sequence: Synthetic oligonucleotide
ugcagggcgagcagcagca

SEQ ID NO: 3098855 - RNA, 19 nt, Artificial Sequence
  Description of Artificial Sequence: Synthetic oligonucleotide
uccaaggcauucauuggaa

SEQ ID NO: 3098856 - RNA, 19 nt, Artificial Sequence
  Description of Artificial Sequence: Synthetic oligonucleotide
uuacaggucuggugguucc

SEQ ID NO: 3098857 - RNA, 19 nt, Artificial Sequence
  Description of Artificial Sequence: Synthetic oligonucleotide
agugcaaaaucagaugaau

SEQ ID NO: 3098858 - RNA, 19 nt, Artificial Sequence
  Description of Artificial Sequence: Synthetic oligonucleotide
ugaaucaauuggaguuaca

SEQ ID NO: 3098859 - RNA, 19 nt, Artificial Sequence
  Description of Artificial Sequence: Synthetic oligonucleotide
cucuuuagggguaacccca

SEQ ID NO: 3098860 - RNA, 19 nt, Artificial Sequence
  Description of Artificial Sequence: Synthetic oligonucleotide
aaaugaucugguagucucu

SEQ ID NO: 3098861 - RNA, 19 nt, Artificial Sequence
  Description of Artificial Sequence: Synthetic oligonucleotide
uagggguaaccccaggcau

SEQ ID NO: 3098862 - RNA, 19 nt, Artificial Sequence
  Description of Artificial Sequence: Synthetic oligonucleotide
uaaaccucuugaagacaga

SEQ ID NO: 3098863 - RNA, 19 nt, Artificial Sequence
  Description of Artificial Sequence: Synthetic oligonucleotide
aaugaucugguagucucuu

SEQ ID NO: 3098864 - RNA, 19 nt, Artificial Sequence
  Description of Artificial Sequence: Synthetic oligonucleotide
aauuggaguuacaggucug

SEQ ID NO: 3098865 - RNA, 19 nt, Artificial Sequence
  Description of Artificial Sequence: Synthetic oligonucleotide
gaugaaucaauuggaguua

SEQ ID NO: 3098866 - RNA, 19 nt, Artificial Sequence
  Description of Artificial Sequence: Synthetic oligonucleotide
uugcagggcgagcagcagc

SEQ ID NO: 3098867 - RNA, 19 nt, Artificial Sequence
  Description of Artificial Sequence: Synthetic oligonucleotide
gcagcugccuugcagggcg

SEQ ID NO: 3098868 - RNA, 19 nt, Artificial Sequence
  Description of Artificial Sequence: Synthetic oligonucleotide
caaggcauucauuggaaaa

SEQ ID NO: 3098869 - RNA, 19 nt, Artificial Sequence
  Description of Artificial Sequence: Synthetic oligonucleotide
gaucugguagucucuuuaa

SEQ ID NO: 3098870 - RNA, 19 nt, Artificial Sequence
  Description of Artificial Sequence: Synthetic oligonucleotide
gcaaaccaaaccaaaacca

SEQ ID NO: 3098871 - RNA, 19 nt, Artificial Sequence
  Description of Artificial Sequence: Synthetic oligonucleotide
aggcauucauuggaaaaug

SEQ ID NO: 3098872 - RNA, 19 nt, Artificial Sequence
  Description of Artificial Sequence: Synthetic oligonucleotide
caacucuuuagggguaacc

SEQ ID NO: 3098873 - RNA, 19 nt, Artificial Sequence
  Description of Artificial Sequence: Synthetic oligonucleotide
cucuugaagacagaaaagu

SEQ ID NO: 3098874 - RNA, 19 nt, Artificial Sequence
  Description of Artificial Sequence: Synthetic oligonucleotide
gugcaaaaucagaugaauc

SEQ ID NO: 3098875 - RNA, 19 nt, Artificial Sequence
  Description of Artificial Sequence: Synthetic oligonucleotide
auccagugcaaaaucagau

SEQ ID NO: 3098876 - RNA, 19 nt, Artificial Sequence
  Description of Artificial Sequence: Synthetic oligonucleotide
cauuggaaaaugaucuggu

SEQ ID NO: 3098877 - RNA, 19 nt, Artificial Sequence
  Description of Artificial Sequence: Synthetic oligonucleotide
ggucuggugguuccaaggc

SEQ ID NO: 3098878 - RNA, 19 nt, Artificial Sequence
  Description of Artificial Sequence: Synthetic oligonucleotide
aucugguagucucuuuaaa

SEQ ID NO: 3098879 - RNA, 19 nt, Artificial Sequence
  Description of Artificial Sequence: Synthetic oligonucleotide
ccagugcaaaaucagauga

SEQ ID NO: 3098880 - RNA, 19 nt, Artificial Sequence
  Description of Artificial Sequence: Synthetic oligonucleotide
ugcgaauauccagugcaaa

SEQ ID NO: 3098881 - RNA, 19 nt, Artificial Sequence
  Description of Artificial Sequence: Synthetic oligonucleotide
aggcagcugccuugcaggg

SEQ ID NO: 3098882 - RNA, 19 nt, Artificial Sequence
  Description of Artificial Sequence: Synthetic oligonucleotide
ccucuugaagacagaaaag

SEQ ID NO: 3098883 - RNA, 19 nt, Artificial Sequence
  Description of Artificial Sequence: Synthetic oligonucleotide
agcagcagcagcagcagca

SEQ ID NO: 3098884 - RNA, 19 nt, Artificial Sequence
  Description of Artificial Sequence: Synthetic oligonucleotide
gaaaaugaucugguagucu

SEQ ID NO: 3098885 - RNA, 19 nt, Artificial Sequence
  Description of Artificial Sequence: Synthetic oligonucleotide
caauuggaguuacaggucu

SEQ ID NO: 3098886 - RNA, 19 nt, Artificial Sequence
  Description of Artificial Sequence: Synthetic oligonucleotide
caaaaucagaugaaucaau

SEQ ID NO: 3098887 - RNA, 19 nt, Artificial Sequence
  Description of Artificial Sequence: Synthetic oligonucleotide
aggcaugcgaauauccagu

SEQ ID NO: 3098888 - RNA, 19 nt, Artificial Sequence
  Description of Artificial Sequence: Synthetic oligonucleotide
aaccucuugaagacagaaa

SEQ ID NO: 3098889 - RNA, 19 nt, Artificial Sequence
  Description of Artificial Sequence: Synthetic oligonucleotide
aaggccaggcagcugccuu

SEQ ID NO: 3098890 - RNA, 19 nt, Artificial Sequence
  Description of Artificial Sequence: Synthetic oligonucleotide
cagaaaagugggcuucuga

SEQ ID NO: 3098891 - RNA, 19 nt, Artificial Sequence
  Description of Artificial Sequence: Synthetic oligonucleotide
cagaugaaucaauuggagu

SEQ ID NO: 3098892 - RNA, 19 nt, Artificial Sequence
  Description of Artificial Sequence: Synthetic oligonucleotide
ugggcuucugaaggccagg

SEQ ID NO: 3098893 - RNA, 19 nt, Artificial Sequence
  Description of Artificial Sequence: Synthetic oligonucleotide
guuacaggucuggugguuc

SEQ ID NO: 3098894 - RNA, 19 nt, Artificial Sequence
  Description of Artificial Sequence: Synthetic oligonucleotide
ggcaugcgaauauccagug

SEQ ID NO: 3098895 - RNA, 19 nt, Artificial Sequence
  Description of Artificial Sequence: Synthetic oligonucleotide
ugccuugcagggcgagcag

SEQ ID NO: 3098896 - RNA, 19 nt, Artificial Sequence
  Description of Artificial Sequence: Synthetic oligonucleotide
ggaaaaugaucugguaguc

SEQ ID NO: 3098897 - RNA, 19 nt, Artificial Sequence
  Description of Artificial Sequence: Synthetic oligonucleotide
gcaaaaucagaugaaucaa

SEQ ID NO: 3098898 - RNA, 19 nt, Artificial Sequence
  Description of Artificial Sequence: Synthetic oligonucleotide
gucuggugguuccaaggca

SEQ ID NO: 3098899 - RNA, 19 nt, Artificial Sequence
  Description of Artificial Sequence: Synthetic oligonucleotide
gguagucucuuuaaaccuc

SEQ ID NO: 3098900 - RNA, 19 nt, Artificial Sequence
  Description of Artificial Sequence: Synthetic oligonucleotide
acagaaaagugggcuucug

SEQ ID NO: 3098901 - RNA, 19 nt, Artificial Sequence
  Description of Artificial Sequence: Synthetic oligonucleotide
gguaaccccaggcaugcga

SEQ ID NO: 3098902 - RNA, 19 nt, Artificial Sequence
  Description of Artificial Sequence: Synthetic oligonucleotide
cagggcgagcagcagcagc

SEQ ID NO: 3098903 - RNA, 19 nt, Artificial Sequence
  Description of Artificial Sequence: Synthetic oligonucleotide
agggcgagcagcagcagca

SEQ ID NO: 3098904 - RNA, 19 nt, Artificial Sequence
  Description of Artificial Sequence: Synthetic oligonucleotide
caggucuggugguuccaag

SEQ ID NO: 3098905 - RNA, 19 nt, Artificial Sequence
  Description of Artificial Sequence: Synthetic oligonucleotide
aggccaggcagcugccuug

SEQ ID NO: 3098906 - RNA, 19 nt, Artificial Sequence
  Description of Artificial Sequence: Synthetic oligonucleotide
aaccccaggcaugcgaaua

SEQ ID NO: 3098907 - RNA, 19 nt, Artificial Sequence
  Description of Artificial Sequence: Synthetic oligonucleotide
gagcagcagcagcagcagc

SEQ ID NO: 3098908 - RNA, 19 nt, Artificial Sequence
  Description of Artificial Sequence: Synthetic oligonucleotide
  modified_base (16)..(16): a, c, u, g, unknown or other
gcagcagcagccggcngcg

SEQ ID NO: 3098909 - RNA, 19 nt, Artificial Sequence
  Description of Artificial Sequence: Synthetic oligonucleotide
cagugcaaaaucagaugaa

SEQ ID NO: 3098910 - RNA, 19 nt, Artificial Sequence
  Description of Artificial Sequence: Synthetic oligonucleotide
gcgaauauccagugcaaaa

SEQ ID NO: 3098911 - RNA, 19 nt, Artificial Sequence
  Description of Artificial Sequence: Synthetic oligonucleotide
cccaggcaugcgaauaucc

SEQ ID NO: 3098912 - RNA, 19 nt, Artificial Sequence
  Description of Artificial Sequence: Synthetic oligonucleotide
agggguaaccccaggcaug

SEQ ID NO: 3098913 - RNA, 19 nt, Artificial Sequence
  Description of Artificial Sequence: Synthetic oligonucleotide
uggugguuccaaggcauuc

SEQ ID NO: 3098914 - RNA, 19 nt, Artificial Sequence
  Description of Artificial Sequence: Synthetic oligonucleotide
ucugaaggccaggcagcug

SEQ ID NO: 3098915 - RNA, 19 nt, Artificial Sequence
  Description of Artificial Sequence: Synthetic oligonucleotide
accccaggcaugcgaauau

SEQ ID NO: 3098916 - RNA, 19 nt, Artificial Sequence
  Description of Artificial Sequence: Synthetic oligonucleotide
ugguuccaaggcauucauu

SEQ ID NO: 3098917 - RNA, 19 nt, Artificial Sequence
  Description of Artificial Sequence: Synthetic oligonucleotide
guagucucuuuaaaccucu

SEQ ID NO: 3098918 - RNA, 19 nt, Artificial Sequence
  Description of Artificial Sequence: Synthetic oligonucleotide
gcaugcgaauauccagugc

SEQ ID NO: 3098919 - RNA, 19 nt, Artificial Sequence
  Description of Artificial Sequence: Synthetic oligonucleotide
  modified_base (11)..(11): a, c, u, g, unknown or other
agcagccggcngcgggcgc

SEQ ID NO: 3098920 - RNA, 19 nt, Artificial Sequence
  Description of Artificial Sequence: Synthetic oligonucleotide
uacaggucuggugguucca

SEQ ID NO: 3098921 - RNA, 19 nt, Artificial Sequence
  Description of Artificial Sequence: Synthetic oligonucleotide
augaucugguagucucuuu

SEQ ID NO: 3098922 - RNA, 19 nt, Artificial Sequence
  Description of Artificial Sequence: Synthetic oligonucleotide
aaccaacucuuuaggggua

SEQ ID NO: 3098923 - RNA, 19 nt, Artificial Sequence
  Description of Artificial Sequence: Synthetic oligonucleotide
guaaccccaggcaugcgaa

SEQ ID NO: 3098924 - RNA, 19 nt, Artificial Sequence
  Description of Artificial Sequence: Synthetic oligonucleotide
uagucucuuuaaaccucuu

SEQ ID NO: 3098925 - RNA, 19 nt, Artificial Sequence
  Description of Artificial Sequence: Synthetic oligonucleotide
gugggcuucugaaggccag

SEQ ID NO: 3098926 - RNA, 19 nt, Artificial Sequence
  Description of Artificial Sequence: Synthetic oligonucleotide
gggguaaccccaggcaugc

SEQ ID NO: 3098927 - RNA, 19 nt, Artificial Sequence
  Description of Artificial Sequence: Synthetic oligonucleotide
ggcauucauuggaaaauga

SEQ ID NO: 3098928 - RNA, 19 nt, Artificial Sequence
  Description of Artificial Sequence: Synthetic oligonucleotide
uaaccccaggcaugcgaau

SEQ ID NO: 3098929 - RNA, 19 nt, Artificial Sequence
  Description of Artificial Sequence: Synthetic oligonucleotide
gaguuacaggucugguggu

SEQ ID NO: 3098930 - RNA, 19 nt, Artificial Sequence
  Description of Artificial Sequence: Synthetic oligonucleotide
aguuacaggucuggugguu

SEQ ID NO: 3098931 - RNA, 19 nt, Artificial Sequence
  Description of Artificial Sequence: Synthetic oligonucleotide
gcagcagcagcagcagccg

SEQ ID NO: 3098932 - RNA, 19 nt, Artificial Sequence
  Description of Artificial Sequence: Synthetic oligonucleotide
cagcagcagcagcagcagc

SEQ ID NO: 3098933 - RNA, 19 nt, Artificial Sequence
  Description of Artificial Sequence: Synthetic oligonucleotide
accaacucuuuagggguaa

SEQ ID NO: 3098934 - RNA, 19 nt, Artificial Sequence
  Description of Artificial Sequence: Synthetic oligonucleotide
gacagaaaagugggcuucu

SEQ ID NO: 3098935 - RNA, 19 nt, Artificial Sequence
  Description of Artificial Sequence: Synthetic oligonucleotide
ggugguuccaaggcauuca

SEQ ID NO: 3098936 - RNA, 19 nt, Artificial Sequence
  Description of Artificial Sequence: Synthetic oligonucleotide
augcgaauauccagugcaa

SEQ ID NO: 3098937 - RNA, 19 nt, Artificial Sequence
  Description of Artificial Sequence: Synthetic oligonucleotide
cugccuugcagggcgagca

SEQ ID NO: 3098938 - RNA, 19 nt, Artificial Sequence
  Description of Artificial Sequence: Synthetic oligonucleotide
ccaggcagcugccuugcag

SEQ ID NO: 3098939 - RNA, 19 nt, Artificial Sequence
  Description of Artificial Sequence: Synthetic oligonucleotide
ccaggcaugcgaauaucca

SEQ ID NO: 3098940 - RNA, 19 nt, Artificial Sequence
  Description of Artificial Sequence: Synthetic oligonucleotide
acaggucuggugguuccaa

SEQ ID NO: 3098941 - RNA, 19 nt, Artificial Sequence
  Description of Artificial Sequence: Synthetic oligonucleotide
gcagcagcagcagcagcag

SEQ ID NO: 3098942 - RNA, 19 nt, Artificial Sequence
  Description of Artificial Sequence: Synthetic oligonucleotide
  modified_base (10)..(10): a, c, u, g, unknown or other
gcagccggcngcgggcgcg

SEQ ID NO: 3098943 - RNA, 19 nt, Artificial Sequence
  Description of Artificial Sequence: Synthetic oligonucleotide
  modified_base (12)..(12): a, c, u, g, unknown or other
cagcagccggcngcgggcg

SEQ ID NO: 3098944 - RNA, 19 nt, Artificial Sequence
  Description of Artificial Sequence: Synthetic oligonucleotide
gcauucauuggaaaaugau

SEQ ID NO: 3098945 - RNA, 19 nt, Artificial Sequence
  Description of Artificial Sequence: Synthetic oligonucleotide
gugguuccaaggcauucau

SEQ ID NO: 3098946 - RNA, 19 nt, Artificial Sequence
  Description of Artificial Sequence: Synthetic oligonucleotide
gggcuucugaaggccaggc

SEQ ID NO: 3098947 - RNA, 19 nt, Artificial Sequence
  Description of Artificial Sequence: Synthetic oligonucleotide
ggcuucugaaggccaggca

SEQ ID NO: 3098948 - RNA, 19 nt, Artificial Sequence
  Description of Artificial Sequence: Synthetic oligonucleotide
agcugccuugcagggcgag

SEQ ID NO: 3098949 - RNA, 19 nt, Artificial Sequence
  Description of Artificial Sequence: Synthetic oligonucleotide
  modified_base (3)..(3): a, c, u, g, unknown or other
gcngcgggcgcguccggcc

SEQ ID NO: 3098950 - RNA, 19 nt, Artificial Sequence
  Description of Artificial Sequence: Synthetic oligonucleotide
  modified_base (13)..(13): a, c, u, g, unknown or other
gcagcagccggcngcgggc

SEQ ID NO: 3098951 - RNA, 19 nt, Artificial Sequence
  Description of Artificial Sequence: Synthetic oligonucleotide
ccuugcagggcgagcagca

SEQ ID NO: 3098952 - RNA, 19 nt, Artificial Sequence
  Description of Artificial Sequence: Synthetic oligonucleotide
  modified_base (18)..(18): a, c, u, g, unknown or other
cagcagcagcagccggcng

SEQ ID NO: 3098953 - RNA, 19 nt, Artificial Sequence
  Description of Artificial Sequence: Synthetic oligonucleotide
ccaaggcauucauuggaaa

SEQ ID NO: 3098954 - RNA, 19 nt, Artificial Sequence
  Description of Artificial Sequence: Synthetic oligonucleotide
gccuugcagggcgagcagc

SEQ ID NO: 3098955 - RNA, 19 nt, Artificial Sequence
  Description of Artificial Sequence: Synthetic oligonucleotide
ggcagcugccuugcagggc

SEQ ID NO: 3098956 - RNA, 19 nt, Artificial Sequence
  Description of Artificial Sequence: Synthetic oligonucleotide
  modified_base (7)..(7): a, c, u, g, unknown or other
gccggcngcgggcgcgucc

SEQ ID NO: 3098957 - RNA, 19 nt, Artificial Sequence
  Description of Artificial Sequence: Synthetic oligonucleotide
gaaggccaggcagcugccu

SEQ ID NO: 3098958 - RNA, 19 nt, Artificial Sequence
  Description of Artificial Sequence: Synthetic oligonucleotide
gcugccuugcagggcgagc

SEQ ID NO: 3098959 - RNA, 19 nt, Artificial Sequence
  Description of Artificial Sequence: Synthetic oligonucleotide
gggcgagcagcagcagcag

SEQ ID NO: 3098960 - RNA, 19 nt, Artificial Sequence
  Description of Artificial Sequence: Synthetic oligonucleotide
cgagcagcagcagcagcag

SEQ ID NO: 3098961 - RNA, 19 nt, Artificial Sequence
  Description of Artificial Sequence: Synthetic oligonucleotide
  modified_base (6)..(6): a, c, u, g, unknown or other
ccggcngcgggcgcguccg

SEQ ID NO: 3098962 - RNA, 19 nt, Artificial Sequence
  Description of Artificial Sequence: Synthetic oligonucleotide
ccaacucuuuagggguaac

SEQ ID NO: 3098963 - RNA, 19 nt, Artificial Sequence
  Description of Artificial Sequence: Synthetic oligonucleotide
ggguaaccccaggcaugcg

SEQ ID NO: 3098964 - RNA, 19 nt, Artificial Sequence
  Description of Artificial Sequence: Synthetic oligonucleotide
cgaauauccagugcaaaau

SEQ ID NO: 3098965 - RNA, 19 nt, Artificial Sequence
  Description of Artificial Sequence: Synthetic oligonucleotide
  modified_base (4)..(4): a, c, u, g, unknown or other
ggcngcgggcgcguccggc

SEQ ID NO: 3098966 - RNA, 19 nt, Artificial Sequence
  Description of Artificial Sequence: Synthetic oligonucleotide
  modified_base (15)..(15): a, c, u, g, unknown or other
cagcagcagccggcngcgg

SEQ ID NO: 3098967 - RNA, 19 nt, Artificial Sequence
  Description of Artificial Sequence: Synthetic oligonucleotide
  modified_base (2)..(2): a, c, u, g, unknown or other
cngcgggcgcguccggcca

SEQ ID NO: 3098968 - RNA, 19 nt, Artificial Sequence
  Description of Artificial Sequence: Synthetic oligonucleotide
cuggugguuccaaggcauu

SEQ ID NO: 3098969 - RNA, 19 nt, Artificial Sequence
  Description of Artificial Sequence: Synthetic oligonucleotide
cagcugccuugcagggcga

SEQ ID NO: 3098970 - RNA, 19 nt, Artificial Sequence
  Description of Artificial Sequence: Synthetic oligonucleotide
gcagggcgagcagcagcag

SEQ ID NO: 3098971 - RNA, 19 nt, Artificial Sequence
  Description of Artificial Sequence: Synthetic oligonucleotide
  modified_base (8)..(8): a, c, u, g, unknown or other
agccggcngcgggcgcguc

SEQ ID NO: 3098972 - RNA, 19 nt, Artificial Sequence
  Description of Artificial Sequence: Synthetic oligonucleotide
ccccaggcaugcgaauauc

SEQ ID NO: 3098973 - RNA, 19 nt, Artificial Sequence
  Description of Artificial Sequence: Synthetic oligonucleotide
  modified_base (9)..(9): a, c, u, g, unknown or other
cagccggcngcgggcgcgu

SEQ ID NO: 3098974 - RNA, 19 nt, Artificial Sequence
  Description of Artificial Sequence: Synthetic oligonucleotide
  modified_base (5)..(5): a, c, u, g, unknown or other
cggcngcgggcgcguccgg

SEQ ID NO: 3098975 - RNA, 19 nt, Artificial Sequence
  Description of Artificial Sequence: Synthetic oligonucleotide
  modified_base (1)..(1): a, c, u, g, unknown or other
ngcgggcgcguccggccau

SEQ ID NO: 3098976 - RNA, 19 nt, Artificial Sequence
  Description of Artificial Sequence: Synthetic oligonucleotide
ucaaucuucuuccggaucc

SEQ ID NO: 3098977 - RNA, 19 nt, Artificial Sequence
  Description of Artificial Sequence: Synthetic oligonucleotide
uuugaugcacccuucagca

SEQ ID NO: 3098978 - RNA, 19 nt, Artificial Sequence
  Description of Artificial Sequence: Synthetic oligonucleotide
uucaaguccagccagccug

SEQ ID NO: 3098979 - RNA, 19 nt, Artificial Sequence
  Description of Artificial Sequence: Synthetic oligonucleotide
agcagugugagcuucuuag

SEQ ID NO: 3098980 - RNA, 19 nt, Artificial Sequence
  Description of Artificial Sequence: Synthetic oligonucleotide
uuggcuuucaucaccacgu

SEQ ID NO: 3098981 - RNA, 19 nt, Artificial Sequence
  Description of Artificial Sequence: Synthetic oligonucleotide
uguggggucaccuguaaag

SEQ ID NO: 3098982 - RNA, 19 nt, Artificial Sequence
  Description of Artificial Sequence: Synthetic oligonucleotide
accuguaaagucccagugc

SEQ ID NO: 3098983 - RNA, 19 nt, Artificial Sequence
  Description of Artificial Sequence: Synthetic oligonucleotide
aguccagccagccuguggg

SEQ ID NO: 3098984 - RNA, 19 nt, Artificial Sequence
  Description of Artificial Sequence: Synthetic oligonucleotide
cuuugaugcacccuucagc

SEQ ID NO: 3098985 - RNA, 19 nt, Artificial Sequence
  Description of Artificial Sequence: Synthetic oligonucleotide
ucuucuuugaugcacccuu

SEQ ID NO: 3098986 - RNA, 19 nt, Artificial Sequence
  Description of Artificial Sequence: Synthetic oligonucleotide
uuuugcugcugcacgacgc

SEQ ID NO: 3098987 - RNA, 19 nt, Artificial Sequence
  Description of Artificial Sequence: Synthetic oligonucleotide
ugaugcacccuucagcagu

SEQ ID NO: 3098988 - RNA, 19 nt, Artificial Sequence
  Description of Artificial Sequence: Synthetic oligonucleotide
ucuuugaugcacccuucag

SEQ ID NO: 3098989 - RNA, 19 nt, Artificial Sequence
  Description of Artificial Sequence: Synthetic oligonucleotide
guuggcuuucaucaccacg

SEQ ID NO: 3098990 - RNA, 19 nt, Artificial Sequence
  Description of Artificial Sequence: Synthetic oligonucleotide
uuugcugcugcacgacgcg

SEQ ID NO: 3098991 - RNA, 19 nt, Artificial Sequence
  Description of Artificial Sequence: Synthetic oligonucleotide
uuuaggauggugucuugcu

SEQ ID NO: 3098992 - RNA, 19 nt, Artificial Sequence
  Description of Artificial Sequence: Synthetic oligonucleotide
uuaggauggugucuugcug

SEQ ID NO: 3098993 - RNA, 19 nt, Artificial Sequence
  Description of Artificial Sequence: Synthetic oligonucleotide
cuggaguuggcuuucauca

SEQ ID NO: 3098994 - RNA, 19 nt, Artificial Sequence
  Description of Artificial Sequence: Synthetic oligonucleotide
uucuuaggcaggcuggagu

SEQ ID NO: 3098995 - RNA, 19 nt, Artificial Sequence
  Description of Artificial Sequence: Synthetic oligonucleotide
uucaucaccacgucaugcu

SEQ ID NO: 3098996 - RNA, 19 nt, Artificial Sequence
  Description of Artificial Sequence: Synthetic oligonucleotide
agugugagcuucuuaggca

SEQ ID NO: 3098997 - RNA, 19 nt, Artificial Sequence
  Description of Artificial Sequence: Synthetic oligonucleotide
cuucuucagcuuuugcugc

SEQ ID NO: 3098998 - RNA, 19 nt, Artificial Sequence
  Description of Artificial Sequence: Synthetic oligonucleotide
uuucaucaccacgucaugc

SEQ ID NO: 3098999 - RNA, 19 nt, Artificial Sequence
  Description of Artificial Sequence: Synthetic oligonucleotide
gugugagcuucuuaggcag

SEQ ID NO: 3099000 - RNA, 19 nt, Artificial Sequence
  Description of Artificial Sequence: Synthetic oligonucleotide
uucuugggagcgaugacuc

SEQ ID NO: 3099001 - RNA, 19 nt, Artificial Sequence
  Description of Artificial Sequence: Synthetic oligonucleotide
aaguccagccagccugugg

SEQ ID NO: 3099002 - RNA, 19 nt, Artificial Sequence
  Description of Artificial Sequence: Synthetic oligonucleotide
cagugugagcuucuuaggc

SEQ ID NO: 3099003 - RNA, 19 nt, Artificial Sequence
  Description of Artificial Sequence: Synthetic oligonucleotide
uggagcaggguccucuuca

SEQ ID NO: 3099004 - RNA, 19 nt, Artificial Sequence
  Description of Artificial Sequence: Synthetic oligonucleotide
agcaggguccucuucaagu

SEQ ID NO: 3099005 - RNA, 19 nt, Artificial Sequence
  Description of Artificial Sequence: Synthetic oligonucleotide
ugugagcuucuuaggcagg

SEQ ID NO: 3099006 - RNA, 19 nt, Artificial Sequence
  Description of Artificial Sequence: Synthetic oligonucleotide
ugcugcugcacgacgcgcg

SEQ ID NO: 3099007 - RNA, 19 nt, Artificial Sequence
  Description of Artificial Sequence: Synthetic oligonucleotide
ucccagugccuuuaggaug

SEQ ID NO: 3099008 - RNA, 19 nt, Artificial Sequence
  Description of Artificial Sequence: Synthetic oligonucleotide
cacgucaugcucaaucuuc

SEQ ID NO: 3099009 - RNA, 19 nt, Artificial Sequence
  Description of Artificial Sequence: Synthetic oligonucleotide
ccuguaaagucccagugcc

SEQ ID NO: 3099010 - RNA, 19 nt, Artificial Sequence
  Description of Artificial Sequence: Synthetic oligonucleotide
agugccuuuaggauggugu

SEQ ID NO: 3099011 - RNA, 19 nt, Artificial Sequence
  Description of Artificial Sequence: Synthetic oligonucleotide
caugcucaaucuucuuccg

SEQ ID NO: 3099012 - RNA, 19 nt, Artificial Sequence
  Description of Artificial Sequence: Synthetic oligonucleotide
augcucaaucuucuuccgg

SEQ ID NO: 3099013 - RNA, 19 nt, Artificial Sequence
  Description of Artificial Sequence: Synthetic oligonucleotide
ucuucaaguccagccagcc

SEQ ID NO: 3099014 - RNA, 19 nt, Artificial Sequence
  Description of Artificial Sequence: Synthetic oligonucleotide
ucaggacuggagcaggguc

SEQ ID NO: 3099015 - RNA, 19 nt, Artificial Sequence
  Description of Artificial Sequence: Synthetic oligonucleotide
aaagucccagugccuuuag

SEQ ID NO: 3099016 - RNA, 19 nt, Artificial Sequence
  Description of Artificial Sequence: Synthetic oligonucleotide
gagcuucuuaggcaggcug

SEQ ID NO: 3099017 - RNA, 19 nt, Artificial Sequence
  Description of Artificial Sequence: Synthetic oligonucleotide
aggauggugucuugcuggg

SEQ ID NO: 3099018 - RNA, 19 nt, Artificial Sequence
  Description of Artificial Sequence: Synthetic oligonucleotide
caggacuggagcagggucc

SEQ ID NO: 3099019 - RNA, 19 nt, Artificial Sequence
  Description of Artificial Sequence: Synthetic oligonucleotide
cuuuugcugcugcacgacg

SEQ ID NO: 3099020 - RNA, 19 nt, Artificial Sequence
  Description of Artificial Sequence: Synthetic oligonucleotide
ucaccuguaaagucccagu

SEQ ID NO: 3099021 - RNA, 19 nt, Artificial Sequence
  Description of Artificial Sequence: Synthetic oligonucleotide
uguaaagucccagugccuu

SEQ ID NO: 3099022 - RNA, 19 nt, Artificial Sequence
  Description of Artificial Sequence: Synthetic oligonucleotide
ucuuaggcaggcuggaguu

SEQ ID NO: 3099023 - RNA, 19 nt, Artificial Sequence
  Description of Artificial Sequence: Synthetic oligonucleotide
accacgucaugcucaaucu

SEQ ID NO: 3099024 - RNA, 19 nt, Artificial Sequence
  Description of Artificial Sequence: Synthetic oligonucleotide
ucuugggagcgaugacucg

SEQ ID NO: 3099025 - RNA, 19 nt, Artificial Sequence
  Description of Artificial Sequence: Synthetic oligonucleotide
cuuuaggauggugucuugc

SEQ ID NO: 3099026 - RNA, 19 nt, Artificial Sequence
  Description of Artificial Sequence: Synthetic oligonucleotide
cagcuuuugcugcugcacg

SEQ ID NO: 3099027 - RNA, 19 nt, Artificial Sequence
  Description of Artificial Sequence: Synthetic oligonucleotide
ugccaucaggacuggagca

SEQ ID NO: 3099028 - RNA, 19 nt, Artificial Sequence
  Description of Artificial Sequence: Synthetic oligonucleotide
gugccaucaggacuggagc

SEQ ID NO: 3099029 - RNA, 19 nt, Artificial Sequence
  Description of Artificial Sequence: Synthetic oligonucleotide
ccccuuucuucuuugaugc

SEQ ID NO: 3099030 - RNA, 19 nt, Artificial Sequence
  Description of Artificial Sequence: Synthetic oligonucleotide
gggagcgaugacucgaccg

SEQ ID NO: 3099031 - RNA, 19 nt, Artificial Sequence
  Description of Artificial Sequence: Synthetic oligonucleotide
ucaucaccacgucaugcuc

SEQ ID NO: 3099032 - RNA, 19 nt, Artificial Sequence
  Description of Artificial Sequence: Synthetic oligonucleotide
cuuccggauccccacuucc

SEQ ID NO: 3099033 - RNA, 19 nt, Artificial Sequence
  Description of Artificial Sequence: Synthetic oligonucleotide
caccacgucaugcucaauc

SEQ ID NO: 3099034 - RNA, 19 nt, Artificial Sequence
  Description of Artificial Sequence: Synthetic oligonucleotide
ggaguuggcuuucaucacc

SEQ ID NO: 3099035 - RNA, 19 nt, Artificial Sequence
  Description of Artificial Sequence: Synthetic oligonucleotide
ucaaguccagccagccugu

SEQ ID NO: 3099036 - RNA, 19 nt, Artificial Sequence
  Description of Artificial Sequence: Synthetic oligonucleotide
agcuucuuaggcaggcugg

SEQ ID NO: 3099037 - RNA, 19 nt, Artificial Sequence
  Description of Artificial Sequence: Synthetic oligonucleotide
uugaugcacccuucagcag

SEQ ID NO: 3099038 - RNA, 19 nt, Artificial Sequence
  Description of Artificial Sequence: Synthetic oligonucleotide
acgacgcgcgccuucuugg

SEQ ID NO: 3099039 - RNA, 19 nt, Artificial Sequence
  Description of Artificial Sequence: Synthetic oligonucleotide
caccuguaaagucccagug

SEQ ID NO: 3099040 - RNA, 19 nt, Artificial Sequence
  Description of Artificial Sequence: Synthetic oligonucleotide
ugcacccuucagcagugug

SEQ ID NO: 3099041 - RNA, 19 nt, Artificial Sequence
  Description of Artificial Sequence: Synthetic oligonucleotide
agcuuuugcugcugcacga

SEQ ID NO: 3099042 - RNA, 19 nt, Artificial Sequence
  Description of Artificial Sequence: Synthetic oligonucleotide
uucagcuuuugcugcugca

SEQ ID NO: 3099043 - RNA, 19 nt, Artificial Sequence
  Description of Artificial Sequence: Synthetic oligonucleotide
ggagcgaugacucgaccgc

SEQ ID NO: 3099044 - RNA, 19 nt, Artificial Sequence
  Description of Artificial Sequence: Synthetic oligonucleotide
cucuucaaguccagccagc

SEQ ID NO: 3099045 - RNA, 19 nt, Artificial Sequence
  Description of Artificial Sequence: Synthetic oligonucleotide
uuccggauccccacuucca

SEQ ID NO: 3099046 - RNA, 19 nt, Artificial Sequence
  Description of Artificial Sequence: Synthetic oligonucleotide
uugggagcgaugacucgac

SEQ ID NO: 3099047 - RNA, 19 nt, Artificial Sequence
  Description of Artificial Sequence: Synthetic oligonucleotide
uggaguuggcuuucaucac

SEQ ID NO: 3099048 - RNA, 19 nt, Artificial Sequence
  Description of Artificial Sequence: Synthetic oligonucleotide
ugcccauugcugucccagg

SEQ ID NO: 3099049 - RNA, 19 nt, Artificial Sequence
  Description of Artificial Sequence: Synthetic oligonucleotide
gucuugcugggcguggugg

SEQ ID NO: 3099050 - RNA, 19 nt, Artificial Sequence
  Description of Artificial Sequence: Synthetic oligonucleotide
cauugcugucccaggugcc

SEQ ID NO: 3099051 - RNA, 19 nt, Artificial Sequence
  Description of Artificial Sequence: Synthetic oligonucleotide
uggggucaccuguaaaguc

SEQ ID NO: 3099052 - RNA, 19 nt, Artificial Sequence
  Description of Artificial Sequence: Synthetic oligonucleotide
gucaccuguaaagucccag

SEQ ID NO: 3099053 - RNA, 19 nt, Artificial Sequence
  Description of Artificial Sequence: Synthetic oligonucleotide
cuucuuugaugcacccuuc

SEQ ID NO: 3099054 - RNA, 19 nt, Artificial Sequence
  Description of Artificial Sequence: Synthetic oligonucleotide
cucaaucuucuuccggauc

SEQ ID NO: 3099055 - RNA, 19 nt, Artificial Sequence
  Description of Artificial Sequence: Synthetic oligonucleotide
gaugcacccuucagcagug

SEQ ID NO: 3099056 - RNA, 19 nt, Artificial Sequence
  Description of Artificial Sequence: Synthetic oligonucleotide
caucaccugcccauugcug

SEQ ID NO: 3099057 - RNA, 19 nt, Artificial Sequence
  Description of Artificial Sequence: Synthetic oligonucleotide
caggguccucuucaagucc

SEQ ID NO: 3099058 - RNA, 19 nt, Artificial Sequence
  Description of Artificial Sequence: Synthetic oligonucleotide
ggugccaucaggacuggag

SEQ ID NO: 3099059 - RNA, 19 nt, Artificial Sequence
  Description of Artificial Sequence: Synthetic oligonucleotide
acgcgcgccuucuugggag

SEQ ID NO: 3099060 - RNA, 19 nt, Artificial Sequence
  Description of Artificial Sequence: Synthetic oligonucleotide
ugucuugcugggcguggug

SEQ ID NO: 3099061 - RNA, 19 nt, Artificial Sequence
  Description of Artificial Sequence: Synthetic oligonucleotide
ucuucagcuuuugcugcug

SEQ ID NO: 3099062 - RNA, 19 nt, Artificial Sequence
  Description of Artificial Sequence: Synthetic oligonucleotide
ugcugcacgacgcgcgccu

SEQ ID NO: 3099063 - RNA, 19 nt, Artificial Sequence
  Description of Artificial Sequence: Synthetic oligonucleotide
uucuucuuugaugcacccu

SEQ ID NO: 3099064 - RNA, 19 nt, Artificial Sequence
  Description of Artificial Sequence: Synthetic oligonucleotide
uaaagucccagugccuuua

SEQ ID NO: 3099065 - RNA, 19 nt, Artificial Sequence
  Description of Artificial Sequence: Synthetic oligonucleotide
gugccuuuaggaugguguc

SEQ ID NO: 3099066 - RNA, 19 nt, Artificial Sequence
  Description of Artificial Sequence: Synthetic oligonucleotide
ggggucaccuguaaagucc

SEQ ID NO: 3099067 - RNA, 19 nt, Artificial Sequence
  Description of Artificial Sequence: Synthetic oligonucleotide
aucaccacgucaugcucaa

SEQ ID NO: 3099068 - RNA, 19 nt, Artificial Sequence
  Description of Artificial Sequence: Synthetic oligonucleotide
gugagcuucuuaggcaggc

SEQ ID NO: 3099069 - RNA, 19 nt, Artificial Sequence
  Description of Artificial Sequence: Synthetic oligonucleotide
ccauugcugucccaggugc

SEQ ID NO: 3099070 - RNA, 19 nt, Artificial Sequence
  Description of Artificial Sequence: Synthetic oligonucleotide
gagcaggguccucuucaag

SEQ ID NO: 3099071 - RNA, 19 nt, Artificial Sequence
  Description of Artificial Sequence: Synthetic oligonucleotide
agccuguggggucaccugu

SEQ ID NO: 3099072 - RNA, 19 nt, Artificial Sequence
  Description of Artificial Sequence: Synthetic oligonucleotide
ugccuuuaggauggugucu

SEQ ID NO: 3099073 - RNA, 19 nt, Artificial Sequence
  Description of Artificial Sequence: Synthetic oligonucleotide
caaucuucuuccggauccc

SEQ ID NO: 3099074 - RNA, 19 nt, Artificial Sequence
  Description of Artificial Sequence: Synthetic oligonucleotide
gccccuuucuucuuugaug

SEQ ID NO: 3099075 - RNA, 19 nt, Artificial Sequence
  Description of Artificial Sequence: Synthetic oligonucleotide
ugggagcgaugacucgacc

SEQ ID NO: 3099076 - RNA, 19 nt, Artificial Sequence
  Description of Artificial Sequence: Synthetic oligonucleotide
uucuuccggauccccacuu

SEQ ID NO: 3099077 - RNA, 19 nt, Artificial Sequence
  Description of Artificial Sequence: Synthetic oligonucleotide
cugcccauugcugucccag

SEQ ID NO: 3099078 - RNA, 19 nt, Artificial Sequence
  Description of Artificial Sequence: Synthetic oligonucleotide
cuugggagcgaugacucga

SEQ ID NO: 3099079 - RNA, 19 nt, Artificial Sequence
  Description of Artificial Sequence: Synthetic oligonucleotide
auggugucuugcugggcgu

SEQ ID NO: 3099080 - RNA, 19 nt, Artificial Sequence
  Description of Artificial Sequence: Synthetic oligonucleotide
uggcuuucaucaccacguc

SEQ ID NO: 3099081 - RNA, 19 nt, Artificial Sequence
  Description of Artificial Sequence: Synthetic oligonucleotide
ucccaggugccaucaggac

SEQ ID NO: 3099082 - RNA, 19 nt, Artificial Sequence
  Description of Artificial Sequence: Synthetic oligonucleotide
acgucaugcucaaucuucu

SEQ ID NO: 3099083 - RNA, 19 nt, Artificial Sequence
  Description of Artificial Sequence: Synthetic oligonucleotide
ugagcuucuuaggcaggcu

SEQ ID NO: 3099084 - RNA, 19 nt, Artificial Sequence
  Description of Artificial Sequence: Synthetic oligonucleotide
cuucuuaggcaggcuggag

SEQ ID NO: 3099085 - RNA, 19 nt, Artificial Sequence
  Description of Artificial Sequence: Synthetic oligonucleotide
gagcgaugacucgaccgcc

SEQ ID NO: 3099086 - RNA, 19 nt, Artificial Sequence
  Description of Artificial Sequence: Synthetic oligonucleotide
ccucuucaaguccagccag

SEQ ID NO: 3099087 - RNA, 19 nt, Artificial Sequence
  Description of Artificial Sequence: Synthetic oligonucleotide
gcuggaguuggcuuucauc

SEQ ID NO: 3099088 - RNA, 19 nt, Artificial Sequence
  Description of Artificial Sequence: Synthetic oligonucleotide
uaggcaggcuggaguuggc

SEQ ID NO: 3099089 - RNA, 19 nt, Artificial Sequence
  Description of Artificial Sequence: Synthetic oligonucleotide
cacgacgcgcgccuucuug

SEQ ID NO: 3099090 - RNA, 19 nt, Artificial Sequence
  Description of Artificial Sequence: Synthetic oligonucleotide
guccagccagccugugggg

SEQ ID NO: 3099091 - RNA, 19 nt, Artificial Sequence
  Description of Artificial Sequence: Synthetic oligonucleotide
cuuaggcaggcuggaguug

SEQ ID NO: 3099092 - RNA, 19 nt, Artificial Sequence
  Description of Artificial Sequence: Synthetic oligonucleotide
cacuuccagggucuucuuc

SEQ ID NO: 3099093 - RNA, 19 nt, Artificial Sequence
  Description of Artificial Sequence: Synthetic oligonucleotide
aggguccucuucaagucca

SEQ ID NO: 3099094 - RNA, 19 nt, Artificial Sequence
  Description of Artificial Sequence: Synthetic oligonucleotide
ggucuucuucagcuuuugc

SEQ ID NO: 3099095 - RNA, 19 nt, Artificial Sequence
  Description of Artificial Sequence: Synthetic oligonucleotide
uugcugcugcacgacgcgc

SEQ ID NO: 3099096 - RNA, 19 nt, Artificial Sequence
  Description of Artificial Sequence: Synthetic oligonucleotide
aucaggacuggagcagggu

SEQ ID NO: 3099097 - RNA, 19 nt, Artificial Sequence
  Description of Artificial Sequence: Synthetic oligonucleotide
uccagccagccuguggggu

SEQ ID NO: 3099098 - RNA, 19 nt, Artificial Sequence
  Description of Artificial Sequence: Synthetic oligonucleotide
uggugucuugcugggcgug

SEQ ID NO: 3099099 - RNA, 19 nt, Artificial Sequence
  Description of Artificial Sequence: Synthetic oligonucleotide
guggccccuuucuucuuug

SEQ ID NO: 3099100 - RNA, 19 nt, Artificial Sequence
  Description of Artificial Sequence: Synthetic oligonucleotide
cuucuugggagcgaugacu

SEQ ID NO: 3099101 - RNA, 19 nt, Artificial Sequence
  Description of Artificial Sequence: Synthetic oligonucleotide
cggauccccacuuccaggg

SEQ ID NO: 3099102 - RNA, 19 nt, Artificial Sequence
  Description of Artificial Sequence: Synthetic oligonucleotide
gucccaggugccaucagga

SEQ ID NO: 3099103 - RNA, 19 nt, Artificial Sequence
  Description of Artificial Sequence: Synthetic oligonucleotide
ugcacgacgcgcgccuucu

SEQ ID NO: 3099104 - RNA, 19 nt, Artificial Sequence
  Description of Artificial Sequence: Synthetic oligonucleotide
gggucaccuguaaaguccc

SEQ ID NO: 3099105 - RNA, 19 nt, Artificial Sequence
  Description of Artificial Sequence: Synthetic oligonucleotide
ggcuuucaucaccacguca

SEQ ID NO: 3099106 - RNA, 19 nt, Artificial Sequence
  Description of Artificial Sequence: Synthetic oligonucleotide
uggccccuuucuucuuuga

SEQ ID NO: 3099107 - RNA, 19 nt, Artificial Sequence
  Description of Artificial Sequence: Synthetic oligonucleotide
auccccacuuccagggucu

SEQ ID NO: 3099108 - RNA, 19 nt, Artificial Sequence
  Description of Artificial Sequence: Synthetic oligonucleotide
ugcugggcgugguggcccc

SEQ ID NO: 3099109 - RNA, 19 nt, Artificial Sequence
  Description of Artificial Sequence: Synthetic oligonucleotide
ugcugucccaggugccauc

SEQ ID NO: 3099110 - RNA, 19 nt, Artificial Sequence
  Description of Artificial Sequence: Synthetic oligonucleotide
gacgcgcgccuucuuggga

SEQ ID NO: 3099111 - RNA, 19 nt, Artificial Sequence
  Description of Artificial Sequence: Synthetic oligonucleotide
ccaucaggacuggagcagg

SEQ ID NO: 3099112 - RNA, 19 nt, Artificial Sequence
  Description of Artificial Sequence: Synthetic oligonucleotide
gacuggagcaggguccucu

SEQ ID NO: 3099113 - RNA, 19 nt, Artificial Sequence
  Description of Artificial Sequence: Synthetic oligonucleotide
ccggauccccacuuccagg

SEQ ID NO: 3099114 - RNA, 19 nt, Artificial Sequence
  Description of Artificial Sequence: Synthetic oligonucleotide
cuguaaagucccagugccu

SEQ ID NO: 3099115 - RNA, 19 nt, Artificial Sequence
  Description of Artificial Sequence: Synthetic oligonucleotide
cccauugcugucccaggug

SEQ ID NO: 3099116 - RNA, 19 nt, Artificial Sequence
  Description of Artificial Sequence: Synthetic oligonucleotide
aggcaggcuggaguuggcu

SEQ ID NO: 3099117 - RNA, 19 nt, Artificial Sequence
  Description of Artificial Sequence: Synthetic oligonucleotide
guggggucaccuguaaagu

SEQ ID NO: 3099118 - RNA, 19 nt, Artificial Sequence
  Description of Artificial Sequence: Synthetic oligonucleotide
gcugcugcacgacgcgcgc

SEQ ID NO: 3099119 - RNA, 19 nt, Artificial Sequence
  Description of Artificial Sequence: Synthetic oligonucleotide
caggcuggaguuggcuuuc

SEQ ID NO: 3099120 - RNA, 19 nt, Artificial Sequence
  Description of Artificial Sequence: Synthetic oligonucleotide
gcuuuugcugcugcacgac

SEQ ID NO: 3099121 - RNA, 19 nt, Artificial Sequence
  Description of Artificial Sequence: Synthetic oligonucleotide
gcacccuucagcaguguga

SEQ ID NO: 3099122 - RNA, 19 nt, Artificial Sequence
  Description of Artificial Sequence: Synthetic oligonucleotide
guaaagucccagugccuuu

SEQ ID NO: 3099123 - RNA, 19 nt, Artificial Sequence
  Description of Artificial Sequence: Synthetic oligonucleotide
cuucaaguccagccagccu

SEQ ID NO: 3099124 - RNA, 19 nt, Artificial Sequence
  Description of Artificial Sequence: Synthetic oligonucleotide
cgugguggccccuuucuuc

SEQ ID NO: 3099125 - RNA, 19 nt, Artificial Sequence
  Description of Artificial Sequence: Synthetic oligonucleotide
gguccucuucaaguccagc

SEQ ID NO: 3099126 - RNA, 19 nt, Artificial Sequence
  Description of Artificial Sequence: Synthetic oligonucleotide
cagugccuuuaggauggug

SEQ ID NO: 3099127 - RNA, 19 nt, Artificial Sequence
  Description of Artificial Sequence: Synthetic oligonucleotide
ccuuuaggauggugucuug

SEQ ID NO: 3099128 - RNA, 19 nt, Artificial Sequence
  Description of Artificial Sequence: Synthetic oligonucleotide
ccuucuugggagcgaugac

SEQ ID NO: 3099129 - RNA, 19 nt, Artificial Sequence
  Description of Artificial Sequence: Synthetic oligonucleotide
agggucuucuucagcuuuu

SEQ ID NO: 3099130 - RNA, 19 nt, Artificial Sequence
  Description of Artificial Sequence: Synthetic oligonucleotide
gcuucuuaggcaggcugga

SEQ ID NO: 3099131 - RNA, 19 nt, Artificial Sequence
  Description of Artificial Sequence: Synthetic oligonucleotide
ggagcaggguccucuucaa

SEQ ID NO: 3099132 - RNA, 19 nt, Artificial Sequence
  Description of Artificial Sequence: Synthetic oligonucleotide
cugcugcacgacgcgcgcc

SEQ ID NO: 3099133 - RNA, 19 nt, Artificial Sequence
  Description of Artificial Sequence: Synthetic oligonucleotide
caggugccaucaggacugg

SEQ ID NO: 3099134 - RNA, 19 nt, Artificial Sequence
  Description of Artificial Sequence: Synthetic oligonucleotide
cugcacgacgcgcgccuuc

SEQ ID NO: 3099135 - RNA, 19 nt, Artificial Sequence
  Description of Artificial Sequence: Synthetic oligonucleotide
caaguccagccagccugug

SEQ ID NO: 3099136 - RNA, 19 nt, Artificial Sequence
  Description of Artificial Sequence: Synthetic oligonucleotide
ggauggugucuugcugggc

SEQ ID NO: 3099137 - RNA, 19 nt, Artificial Sequence
  Description of Artificial Sequence: Synthetic oligonucleotide
ugggcgugguggccccuuu

SEQ ID NO: 3099138 - RNA, 19 nt, Artificial Sequence
  Description of Artificial Sequence: Synthetic oligonucleotide
gcugucccaggugccauca

SEQ ID NO: 3099139 - RNA, 19 nt, Artificial Sequence
  Description of Artificial Sequence: Synthetic oligonucleotide
ggguccucuucaaguccag

SEQ ID NO: 3099140 - RNA, 19 nt, Artificial Sequence
  Description of Artificial Sequence: Synthetic oligonucleotide
agccagccuguggggucac

SEQ ID NO: 3099141 - RNA, 19 nt, Artificial Sequence
  Description of Artificial Sequence: Synthetic oligonucleotide
ggcgugguggccccuuucu

SEQ ID NO: 3099142 - RNA, 19 nt, Artificial Sequence
  Description of Artificial Sequence: Synthetic oligonucleotide
cagccagccugugggguca

SEQ ID NO: 3099143 - RNA, 19 nt, Artificial Sequence
  Description of Artificial Sequence: Synthetic oligonucleotide
aggcuggaguuggcuuuca

SEQ ID NO: 3099144 - RNA, 19 nt, Artificial Sequence
  Description of Artificial Sequence: Synthetic oligonucleotide
augcacccuucagcagugu

SEQ ID NO: 3099145 - RNA, 19 nt, Artificial Sequence
  Description of Artificial Sequence: Synthetic oligonucleotide
aggugccaucaggacugga

SEQ ID NO: 3099146 - RNA, 19 nt, Artificial Sequence
  Description of Artificial Sequence: Synthetic oligonucleotide
cgacgcgcgccuucuuggg

SEQ ID NO: 3099147 - RNA, 19 nt, Artificial Sequence
  Description of Artificial Sequence: Synthetic oligonucleotide
gccuuuaggauggugucuu

SEQ ID NO: 3099148 - RNA, 19 nt, Artificial Sequence
  Description of Artificial Sequence: Synthetic oligonucleotide
cccaggugccaucaggacu

SEQ ID NO: 3099149 - RNA, 19 nt, Artificial Sequence
  Description of Artificial Sequence: Synthetic oligonucleotide
gcccauugcugucccaggu

SEQ ID NO: 3099150 - RNA, 19 nt, Artificial Sequence
  Description of Artificial Sequence: Synthetic oligonucleotide
gcgcgccuucuugggagcg

SEQ ID NO: 3099151 - RNA, 19 nt, Artificial Sequence
  Description of Artificial Sequence: Synthetic oligonucleotide
ggcaggcuggaguuggcuu

SEQ ID NO: 3099152 - RNA, 19 nt, Artificial Sequence
  Description of Artificial Sequence: Synthetic oligonucleotide
cccuuucuucuuugaugca

SEQ ID NO: 3099153 - RNA, 19 nt, Artificial Sequence
  Description of Artificial Sequence: Synthetic oligonucleotide
cccacuuccagggucuucu

SEQ ID NO: 3099154 - RNA, 19 nt, Artificial Sequence
  Description of Artificial Sequence: Synthetic oligonucleotide
ggucaccuguaaaguccca

SEQ ID NO: 3099155 - RNA, 19 nt, Artificial Sequence
  Description of Artificial Sequence: Synthetic oligonucleotide
uccccacuuccagggucuu

SEQ ID NO: 3099156 - RNA, 19 nt, Artificial Sequence
  Description of Artificial Sequence: Synthetic oligonucleotide
ggccccuuucuucuuugau

SEQ ID NO: 3099157 - RNA, 19 nt, Artificial Sequence
  Description of Artificial Sequence: Synthetic oligonucleotide
gggcgugguggccccuuuc

SEQ ID NO: 3099158 - RNA, 19 nt, Artificial Sequence
  Description of Artificial Sequence: Synthetic oligonucleotide
ggauccccacuuccagggu

SEQ ID NO: 3099159 - RNA, 19 nt, Artificial Sequence
  Description of Artificial Sequence: Synthetic oligonucleotide
gguggccccuuucuucuuu

SEQ ID NO: 3099160 - RNA, 19 nt, Artificial Sequence
  Description of Artificial Sequence: Synthetic oligonucleotide
cgcgcgccuucuugggagc

SEQ ID NO: 3099161 - RNA, 19 nt, Artificial Sequence
  Description of Artificial Sequence: Synthetic oligonucleotide
ggcuggaguuggcuuucau

SEQ ID NO: 3099162 - RNA, 19 nt, Artificial Sequence
  Description of Artificial Sequence: Synthetic oligonucleotide
gccuguggggucaccugua

SEQ ID NO: 3099163 - RNA, 19 nt, Artificial Sequence
  Description of Artificial Sequence: Synthetic oligonucleotide
cgccuucuugggagcgaug

SEQ ID NO: 3099164 - RNA, 19 nt, Artificial Sequence
  Description of Artificial Sequence: Synthetic oligonucleotide
ccagccuguggggucaccu

SEQ ID NO: 3099165 - RNA, 19 nt, Artificial Sequence
  Description of Artificial Sequence: Synthetic oligonucleotide
gccagccuguggggucacc

SEQ ID NO: 3099166 - RNA, 19 nt, Artificial Sequence
  Description of Artificial Sequence: Synthetic oligonucleotide
ccacgucaugcucaaucuu

SEQ ID NO: 3099167 - RNA, 19 nt, Artificial Sequence
  Description of Artificial Sequence: Synthetic oligonucleotide
ccccacuuccagggucuuc

SEQ ID NO: 3099168 - RNA, 19 nt, Artificial Sequence
  Description of Artificial Sequence: Synthetic oligonucleotide
gcgugguggccccuuucuu

SEQ ID NO: 3099169 - RNA, 19 nt, Artificial Sequence
  Description of Artificial Sequence: Synthetic oligonucleotide
gcgccuucuugggagcgau

SEQ ID NO: 3099170 - RNA, 19 nt, Artificial Sequence
  Description of Artificial Sequence: Synthetic oligonucleotide
cgucaugcucaaucuucuu

SEQ ID NO: 3099171 - RNA, 19 nt, Artificial Sequence
  Description of Artificial Sequence: Synthetic oligonucleotide
cugggcgugguggccccuu

SEQ ID NO: 3099172 - RNA, 19 nt, Artificial Sequence
  Description of Artificial Sequence: Synthetic oligonucleotide
ccacuuccagggucuucuu

SEQ ID NO: 3099173 - RNA, 19 nt, Artificial Sequence
  Description of Artificial Sequence: Synthetic oligonucleotide
cgcgccuucuugggagcga

SEQ ID NO: 3099174 - RNA, 19 nt, Artificial Sequence
  Description of Artificial Sequence: Synthetic oligonucleotide
gcacgacgcgcgccuucuu

SEQ ID NO: 3099175 - RNA, 19 nt, Artificial Sequence
  Description of Artificial Sequence: Synthetic oligonucleotide
gcugcacgacgcgcgccuu

SEQ ID NO: 3099176 - RNA, 19 nt, Artificial Sequence
  Description of Artificial Sequence: Synthetic oligonucleotide
gcugggcgugguggccccu

SEQ ID NO: 3099177 - RNA, 19 nt, Artificial Sequence
  Description of Artificial Sequence: Synthetic oligonucleotide
ucaggaaucaccaagagac

SEQ ID NO: 3099178 - RNA, 19 nt, Artificial Sequence
  Description of Artificial Sequence: Synthetic oligonucleotide
aaaggugaaaucuugggag

SEQ ID NO: 3099179 - RNA, 19 nt, Artificial Sequence
  Description of Artificial Sequence: Synthetic oligonucleotide
aaaucuugggagcaagucc

SEQ ID NO: 3099180 - RNA, 19 nt, Artificial Sequence
  Description of Artificial Sequence: Synthetic oligonucleotide
ugcuauugcacuaauaucc

SEQ ID NO: 3099181 - RNA, 19 nt, Artificial Sequence
  Description of Artificial Sequence: Synthetic oligonucleotide
uauugcacuaauauccacg

SEQ ID NO: 3099182 - RNA, 19 nt, Artificial Sequence
  Description of Artificial Sequence: Synthetic oligonucleotide
uuaauugcagaccuuaaga

SEQ ID NO: 3099183 - RNA, 19 nt, Artificial Sequence
  Description of Artificial Sequence: Synthetic oligonucleotide
uaagaguucuaccuguagg

SEQ ID NO: 3099184 - RNA, 19 nt, Artificial Sequence
  Description of Artificial Sequence: Synthetic oligonucleotide
ugcacuaauauccacgggc

SEQ ID NO: 3099185 - RNA, 19 nt, Artificial Sequence
  Description of Artificial Sequence: Synthetic oligonucleotide
guuaagaucucacugauca

SEQ ID NO: 3099186 - RNA, 19 nt, Artificial Sequence
  Description of Artificial Sequence: Synthetic oligonucleotide
aaggugaaaucuugggagc

SEQ ID NO: 3099187 - RNA, 19 nt, Artificial Sequence
  Description of Artificial Sequence: Synthetic oligonucleotide
uuuaauugcagaccuuaag

SEQ ID NO: 3099188 - RNA, 19 nt, Artificial Sequence
  Description of Artificial Sequence: Synthetic oligonucleotide
gaucucacugaucacaucc

SEQ ID NO: 3099189 - RNA, 19 nt, Artificial Sequence
  Description of Artificial Sequence: Synthetic oligonucleotide
uaauugcagaccuuaagag

SEQ ID NO: 3099190 - RNA, 19 nt, Artificial Sequence
  Description of Artificial Sequence: Synthetic oligonucleotide
auugcacuaauauccacgg

SEQ ID NO: 3099191 - RNA, 19 nt, Artificial Sequence
  Description of Artificial Sequence: Synthetic oligonucleotide
uucaguuuggcuacaaaca

SEQ ID NO: 3099192 - RNA, 19 nt, Artificial Sequence
  Description of Artificial Sequence: Synthetic oligonucleotide
uuggcuacaaacauuggac

SEQ ID NO: 3099193 - RNA, 19 nt, Artificial Sequence
  Description of Artificial Sequence: Synthetic oligonucleotide
aauugcagaccuuaagagu

SEQ ID NO: 3099194 - RNA, 19 nt, Artificial Sequence
  Description of Artificial Sequence: Synthetic oligonucleotide
aagaguucuaccuguagga

SEQ ID NO: 3099195 - RNA, 19 nt, Artificial Sequence
  Description of Artificial Sequence: Synthetic oligonucleotide
auauccacgggcaugaugg

SEQ ID NO: 3099196 - RNA, 19 nt, Artificial Sequence
  Description of Artificial Sequence: Synthetic oligonucleotide
caagagacugcauugcugg

SEQ ID NO: 3099197 - RNA, 19 nt, Artificial Sequence
  Description of Artificial Sequence: Synthetic oligonucleotide
uuuggcuacaaacauugga

SEQ ID NO: 3099198 - RNA, 19 nt, Artificial Sequence
  Description of Artificial Sequence: Synthetic oligonucleotide
uguggaguacacaaguagc

SEQ ID NO: 3099199 - RNA, 19 nt, Artificial Sequence
  Description of Artificial Sequence: Synthetic oligonucleotide
uuuucaggaaucaccaaga

SEQ ID NO: 3099200 - RNA, 19 nt, Artificial Sequence
  Description of Artificial Sequence: Synthetic oligonucleotide
ugcauugcuggccaguggg

SEQ ID NO: 3099201 - RNA, 19 nt, Artificial Sequence
  Description of Artificial Sequence: Synthetic oligonucleotide
agaccuuaagaguucuacc

SEQ ID NO: 3099202 - RNA, 19 nt, Artificial Sequence
  Description of Artificial Sequence: Synthetic oligonucleotide
acuguuggagguuaagauc

SEQ ID NO: 3099203 - RNA, 19 nt, Artificial Sequence
  Description of Artificial Sequence: Synthetic oligonucleotide
cuuuucaggaaucaccaag

SEQ ID NO: 3099204 - RNA, 19 nt, Artificial Sequence
  Description of Artificial Sequence: Synthetic oligonucleotide
acaaguagcccuccaggcc

SEQ ID NO: 3099205 - RNA, 19 nt, Artificial Sequence
  Description of Artificial Sequence: Synthetic oligonucleotide
uccuuuucaggaaucacca

SEQ ID NO: 3099206 - RNA, 19 nt, Artificial Sequence
  Description of Artificial Sequence: Synthetic oligonucleotide
caaacauuggaccccaggc

SEQ ID NO: 3099207 - RNA, 19 nt, Artificial Sequence
  Description of Artificial Sequence: Synthetic oligonucleotide
uuuucuucaguuuggcuac

SEQ ID NO: 3099208 - RNA, 19 nt, Artificial Sequence
  Description of Artificial Sequence: Synthetic oligonucleotide
cuucaguuuggcuacaaac

SEQ ID NO: 3099209 - RNA, 19 nt, Artificial Sequence
  Description of Artificial Sequence: Synthetic oligonucleotide
aaacauuggaccccaggcu

SEQ ID NO: 3099210 - RNA, 19 nt, Artificial Sequence
  Description of Artificial Sequence: Synthetic oligonucleotide
ugguuuucagccuuggaga

SEQ ID NO: 3099211 - RNA, 19 nt, Artificial Sequence
  Description of Artificial Sequence: Synthetic oligonucleotide
uuaagaguucuaccuguag

SEQ ID NO: 3099212 - RNA, 19 nt, Artificial Sequence
  Description of Artificial Sequence: Synthetic oligonucleotide
augaugguacuguuggagg

SEQ ID NO: 3099213 - RNA, 19 nt, Artificial Sequence
  Description of Artificial Sequence: Synthetic oligonucleotide
auguggaguacacaaguag

SEQ ID NO: 3099214 - RNA, 19 nt, Artificial Sequence
  Description of Artificial Sequence: Synthetic oligonucleotide
cugguuuucagccuuggag

SEQ ID NO: 3099215 - RNA, 19 nt, Artificial Sequence
  Description of Artificial Sequence: Synthetic oligonucleotide
cauuuuccuguacucaugg

SEQ ID NO: 3099216 - RNA, 19 nt, Artificial Sequence
  Description of Artificial Sequence: Synthetic oligonucleotide
uaagaucucacugaucaca

SEQ ID NO: 3099217 - RNA, 19 nt, Artificial Sequence
  Description of Artificial Sequence: Synthetic oligonucleotide
aauauccacgggcaugaug

SEQ ID NO: 3099218 - RNA, 19 nt, Artificial Sequence
  Description of Artificial Sequence: Synthetic oligonucleotide
aaguccuugcuauugcacu

SEQ ID NO: 3099219 - RNA, 19 nt, Artificial Sequence
  Description of Artificial Sequence: Synthetic oligonucleotide
uuuucagccuuggagagug

SEQ ID NO: 3099220 - RNA, 19 nt, Artificial Sequence
  Description of Artificial Sequence: Synthetic oligonucleotide
aaucuugggagcaaguccu

SEQ ID NO: 3099221 - RNA, 19 nt, Artificial Sequence
  Description of Artificial Sequence: Synthetic oligonucleotide
aguuuggcuacaaacauug

SEQ ID NO: 3099222 - RNA, 19 nt, Artificial Sequence
  Description of Artificial Sequence: Synthetic oligonucleotide
acacaaguagcccuccagg

SEQ ID NO: 3099223 - RNA, 19 nt, Artificial Sequence
  Description of Artificial Sequence: Synthetic oligonucleotide
acaaacauuggaccccagg

SEQ ID NO: 3099224 - RNA, 19 nt, Artificial Sequence
  Description of Artificial Sequence: Synthetic oligonucleotide
uuucaggaaucaccaagag

SEQ ID NO: 3099225 - RNA, 19 nt, Artificial Sequence
  Description of Artificial Sequence: Synthetic oligonucleotide
ggcaugaugguacuguugg

SEQ ID NO: 3099226 - RNA, 19 nt, Artificial Sequence
  Description of Artificial Sequence: Synthetic oligonucleotide
ucaguuuggcuacaaacau

SEQ ID NO: 3099227 - RNA, 19 nt, Artificial Sequence
  Description of Artificial Sequence: Synthetic oligonucleotide
agcaaguccuugcuauugc

SEQ ID NO: 3099228 - RNA, 19 nt, Artificial Sequence
  Description of Artificial Sequence: Synthetic oligonucleotide
caaguagcccuccaggccg

SEQ ID NO: 3099229 - RNA, 19 nt, Artificial Sequence
  Description of Artificial Sequence: Synthetic oligonucleotide
ucaccaagagacugcauug

SEQ ID NO: 3099230 - RNA, 19 nt, Artificial Sequence
  Description of Artificial Sequence: Synthetic oligonucleotide
uacacaaguagcccuccag

SEQ ID NO: 3099231 - RNA, 19 nt, Artificial Sequence
  Description of Artificial Sequence: Synthetic oligonucleotide
aacauuggaccccaggcuu

SEQ ID NO: 3099232 - RNA, 19 nt, Artificial Sequence
  Description of Artificial Sequence: Synthetic oligonucleotide
gagguuaagaucucacuga

SEQ ID NO: 3099233 - RNA, 19 nt, Artificial Sequence
  Description of Artificial Sequence: Synthetic oligonucleotide
auuuuccuguacucauggc

SEQ ID NO: 3099234 - RNA, 19 nt, Artificial Sequence
  Description of Artificial Sequence: Synthetic oligonucleotide
cuuuucuucaguuuggcua

SEQ ID NO: 3099235 - RNA, 19 nt, Artificial Sequence
  Description of Artificial Sequence: Synthetic oligonucleotide
uggcuacaaacauuggacc

SEQ ID NO: 3099236 - RNA, 19 nt, Artificial Sequence
  Description of Artificial Sequence: Synthetic oligonucleotide
cucacugaucacauccugg

SEQ ID NO: 3099237 - RNA, 19 nt, Artificial Sequence
  Description of Artificial Sequence: Synthetic oligonucleotide
uacuguuggagguuaagau

SEQ ID NO: 3099238 - RNA, 19 nt, Artificial Sequence
  Description of Artificial Sequence: Synthetic oligonucleotide
ucacugaucacauccuggu

SEQ ID NO: 3099239 - RNA, 19 nt, Artificial Sequence
  Description of Artificial Sequence: Synthetic oligonucleotide
uggagagugugcaugugga

SEQ ID NO: 3099240 - RNA, 19 nt, Artificial Sequence
  Description of Artificial Sequence: Synthetic oligonucleotide
acugaucacauccugguuu

SEQ ID NO: 3099241 - RNA, 19 nt, Artificial Sequence
  Description of Artificial Sequence: Synthetic oligonucleotide
uuuccuguacucauggcuu

SEQ ID NO: 3099242 - RNA, 19 nt, Artificial Sequence
  Description of Artificial Sequence: Synthetic oligonucleotide
guacucauggcuuuucuuc

SEQ ID NO: 3099243 - RNA, 19 nt, Artificial Sequence
  Description of Artificial Sequence: Synthetic oligonucleotide
ggagguuaagaucucacug

SEQ ID NO: 3099244 - RNA, 19 nt, Artificial Sequence
  Description of Artificial Sequence: Synthetic oligonucleotide
ugcauguggaguacacaag

SEQ ID NO: 3099245 - RNA, 19 nt, Artificial Sequence
  Description of Artificial Sequence: Synthetic oligonucleotide
uccacgggcaugaugguac

SEQ ID NO: 3099246 - RNA, 19 nt, Artificial Sequence
  Description of Artificial Sequence: Synthetic oligonucleotide
caugaugguacuguuggag

SEQ ID NO: 3099247 - RNA, 19 nt, Artificial Sequence
  Description of Artificial Sequence: Synthetic oligonucleotide
aggcuuuaauugcagaccu

SEQ ID NO: 3099248 - RNA, 19 nt, Artificial Sequence
  Description of Artificial Sequence: Synthetic oligonucleotide
caggcuuuguccuuuucag

SEQ ID NO: 3099249 - RNA, 19 nt, Artificial Sequence
  Description of Artificial Sequence: Synthetic oligonucleotide
ugaugguacuguuggaggu

SEQ ID NO: 3099250 - RNA, 19 nt, Artificial Sequence
  Description of Artificial Sequence: Synthetic oligonucleotide
gcaaaggugaaaucuuggg

SEQ ID NO: 3099251 - RNA, 19 nt, Artificial Sequence
  Description of Artificial Sequence: Synthetic oligonucleotide
uacucauggcuuuucuuca

SEQ ID NO: 3099252 - RNA, 19 nt, Artificial Sequence
  Description of Artificial Sequence: Synthetic oligonucleotide
aucacauccugguuuucag

SEQ ID NO: 3099253 - RNA, 19 nt, Artificial Sequence
  Description of Artificial Sequence: Synthetic oligonucleotide
acuaauauccacgggcaug

SEQ ID NO: 3099254 - RNA, 19 nt, Artificial Sequence
  Description of Artificial Sequence: Synthetic oligonucleotide
cacaaguagcccuccaggc

SEQ ID NO: 3099255 - RNA, 19 nt, Artificial Sequence
  Description of Artificial Sequence: Synthetic oligonucleotide
accuuaagaguucuaccug

SEQ ID NO: 3099256 - RNA, 19 nt, Artificial Sequence
  Description of Artificial Sequence: Synthetic oligonucleotide
uuggagguuaagaucucac

SEQ ID NO: 3099257 - RNA, 19 nt, Artificial Sequence
  Description of Artificial Sequence: Synthetic oligonucleotide
ugaaaucuugggagcaagu

SEQ ID NO: 3099258 - RNA, 19 nt, Artificial Sequence
  Description of Artificial Sequence: Synthetic oligonucleotide
cuugggagcaaguccuugc

SEQ ID NO: 3099259 - RNA, 19 nt, Artificial Sequence
  Description of Artificial Sequence: Synthetic oligonucleotide
ucucacugaucacauccug

SEQ ID NO: 3099260 - RNA, 19 nt, Artificial Sequence
  Description of Artificial Sequence: Synthetic oligonucleotide
auugcagaccuuaagaguu

SEQ ID NO: 3099261 - RNA, 19 nt, Artificial Sequence
  Description of Artificial Sequence: Synthetic oligonucleotide
agaguucuaccuguaggac

SEQ ID NO: 3099262 - RNA, 19 nt, Artificial Sequence
  Description of Artificial Sequence: Synthetic oligonucleotide
uugcuauugcacuaauauc

SEQ ID NO: 3099263 - RNA, 19 nt, Artificial Sequence
  Description of Artificial Sequence: Synthetic oligonucleotide
gaccuuaagaguucuaccu

SEQ ID NO: 3099264 - RNA, 19 nt, Artificial Sequence
  Description of Artificial Sequence: Synthetic oligonucleotide
uggagguuaagaucucacu

SEQ ID NO: 3099265 - RNA, 19 nt, Artificial Sequence
  Description of Artificial Sequence: Synthetic oligonucleotide
cuugcuauugcacuaauau

SEQ ID NO: 3099266 - RNA, 19 nt, Artificial Sequence
  Description of Artificial Sequence: Synthetic oligonucleotide
gaaaucuugggagcaaguc

SEQ ID NO: 3099267 - RNA, 19 nt, Artificial Sequence
  Description of Artificial Sequence: Synthetic oligonucleotide
uggaguacacaaguagccc

SEQ ID NO: 3099268 - RNA, 19 nt, Artificial Sequence
  Description of Artificial Sequence: Synthetic oligonucleotide
uugcacuaauauccacggg

SEQ ID NO: 3099269 - RNA, 19 nt, Artificial Sequence
  Description of Artificial Sequence: Synthetic oligonucleotide
aguacacaaguagcccucc

SEQ ID NO: 3099270 - RNA, 19 nt, Artificial Sequence
  Description of Artificial Sequence: Synthetic oligonucleotide
caaaggugaaaucuuggga

SEQ ID NO: 3099271 - RNA, 19 nt, Artificial Sequence
  Description of Artificial Sequence: Synthetic oligonucleotide
caggcuuuaauugcagacc

SEQ ID NO: 3099272 - RNA, 19 nt, Artificial Sequence
  Description of Artificial Sequence: Synthetic oligonucleotide
aggaaucaccaagagacug

SEQ ID NO: 3099273 - RNA, 19 nt, Artificial Sequence
  Description of Artificial Sequence: Synthetic oligonucleotide
uuaagaucucacugaucac

SEQ ID NO: 3099274 - RNA, 19 nt, Artificial Sequence
  Description of Artificial Sequence: Synthetic oligonucleotide
guggaguacacaaguagcc

SEQ ID NO: 3099275 - RNA, 19 nt, Artificial Sequence
  Description of Artificial Sequence: Synthetic oligonucleotide
aggcuuuguccuuuucagg

SEQ ID NO: 3099276 - RNA, 19 nt, Artificial Sequence
  Description of Artificial Sequence: Synthetic oligonucleotide
ggcuacaaacauuggaccc

SEQ ID NO: 3099277 - RNA, 19 nt, Artificial Sequence
  Description of Artificial Sequence: Synthetic oligonucleotide
ucacauccugguuuucagc

SEQ ID NO: 3099278 - RNA, 19 nt, Artificial Sequence
  Description of Artificial Sequence: Synthetic oligonucleotide
cagaccuuaagaguucuac

SEQ ID NO: 3099279 - RNA, 19 nt, Artificial Sequence
  Description of Artificial Sequence: Synthetic oligonucleotide
agguuaagaucucacugau

SEQ ID NO: 3099280 - RNA, 19 nt, Artificial Sequence
  Description of Artificial Sequence: Synthetic oligonucleotide
cuguuggagguuaagaucu

SEQ ID NO: 3099281 - RNA, 19 nt, Artificial Sequence
  Description of Artificial Sequence: Synthetic oligonucleotide
caaguccuugcuauugcac

SEQ ID NO: 3099282 - RNA, 19 nt, Artificial Sequence
  Description of Artificial Sequence: Synthetic oligonucleotide
uggaccccaggcuuugucc

SEQ ID NO: 3099283 - RNA, 19 nt, Artificial Sequence
  Description of Artificial Sequence: Synthetic oligonucleotide
gguuuucagccuuggagag

SEQ ID NO: 3099284 - RNA, 19 nt, Artificial Sequence
  Description of Artificial Sequence: Synthetic oligonucleotide
uugggagcaaguccuugcu

SEQ ID NO: 3099285 - RNA, 19 nt, Artificial Sequence
  Description of Artificial Sequence: Synthetic oligonucleotide
cuauugcacuaauauccac

SEQ ID NO: 3099286 - RNA, 19 nt, Artificial Sequence
  Description of Artificial Sequence: Synthetic oligonucleotide
agagugugcauguggagua

SEQ ID NO: 3099287 - RNA, 19 nt, Artificial Sequence
  Description of Artificial Sequence: Synthetic oligonucleotide
acucauggcuuuucuucag

SEQ ID NO: 3099288 - RNA, 19 nt, Artificial Sequence
  Description of Artificial Sequence: Synthetic oligonucleotide
cuaauauccacgggcauga

SEQ ID NO: 3099289 - RNA, 19 nt, Artificial Sequence
  Description of Artificial Sequence: Synthetic oligonucleotide
ucuucaguuuggcuacaaa

SEQ ID NO: 3099290 - RNA, 19 nt, Artificial Sequence
  Description of Artificial Sequence: Synthetic oligonucleotide
aagaucucacugaucacau

SEQ ID NO: 3099291 - RNA, 19 nt, Artificial Sequence
  Description of Artificial Sequence: Synthetic oligonucleotide
gugcauguggaguacacaa

SEQ ID NO: 3099292 - RNA, 19 nt, Artificial Sequence
  Description of Artificial Sequence: Synthetic oligonucleotide
accaagagacugcauugcu

SEQ ID NO: 3099293 - RNA, 19 nt, Artificial Sequence
  Description of Artificial Sequence: Synthetic oligonucleotide
agaucucacugaucacauc

SEQ ID NO: 3099294 - RNA, 19 nt, Artificial Sequence
  Description of Artificial Sequence: Synthetic oligonucleotide
uagcccuccaggccgcagg

SEQ ID NO: 3099295 - RNA, 19 nt, Artificial Sequence
  Description of Artificial Sequence: Synthetic oligonucleotide
ggcuuuguccuuuucagga

SEQ ID NO: 3099296 - RNA, 19 nt, Artificial Sequence
  Description of Artificial Sequence: Synthetic oligonucleotide
uguacucauggcuuuucuu

SEQ ID NO: 3099297 - RNA, 19 nt, Artificial Sequence
  Description of Artificial Sequence: Synthetic oligonucleotide
aggccgcaggcuuuaauug

SEQ ID NO: 3099298 - RNA, 19 nt, Artificial Sequence
  Description of Artificial Sequence: Synthetic oligonucleotide
gaaucaccaagagacugca

SEQ ID NO: 3099299 - RNA, 19 nt, Artificial Sequence
  Description of Artificial Sequence: Synthetic oligonucleotide
gugaaaucuugggagcaag

SEQ ID NO: 3099300 - RNA, 19 nt, Artificial Sequence
  Description of Artificial Sequence: Synthetic oligonucleotide
gagcaaguccuugcuauug

SEQ ID NO: 3099301 - RNA, 19 nt, Artificial Sequence
  Description of Artificial Sequence: Synthetic oligonucleotide
ugugcauguggaguacaca

SEQ ID NO: 3099302 - RNA, 19 nt, Artificial Sequence
  Description of Artificial Sequence: Synthetic oligonucleotide
gcaggcuuuaauugcagac

SEQ ID NO: 3099303 - RNA, 19 nt, Artificial Sequence
  Description of Artificial Sequence: Synthetic oligonucleotide
gaucacauccugguuuuca

SEQ ID NO: 3099304 - RNA, 19 nt, Artificial Sequence
  Description of Artificial Sequence: Synthetic oligonucleotide
uucagccuuggagagugug

SEQ ID NO: 3099305 - RNA, 19 nt, Artificial Sequence
  Description of Artificial Sequence: Synthetic oligonucleotide
gcuacaaacauuggacccc

SEQ ID NO: 3099306 - RNA, 19 nt, Artificial Sequence
  Description of Artificial Sequence: Synthetic oligonucleotide
acauccugguuuucagccu

SEQ ID NO: 3099307 - RNA, 19 nt, Artificial Sequence
  Description of Artificial Sequence: Synthetic oligonucleotide
uugcagaccuuaagaguuc

SEQ ID NO: 3099308 - RNA, 19 nt, Artificial Sequence
  Description of Artificial Sequence: Synthetic oligonucleotide
cuuuaauugcagaccuuaa

SEQ ID NO: 3099309 - RNA, 19 nt, Artificial Sequence
  Description of Artificial Sequence: Synthetic oligonucleotide
aguccuugcuauugcacua

SEQ ID NO: 3099310 - RNA, 19 nt, Artificial Sequence
  Description of Artificial Sequence: Synthetic oligonucleotide
ggaaucaccaagagacugc

SEQ ID NO: 3099311 - RNA, 19 nt, Artificial Sequence
  Description of Artificial Sequence: Synthetic oligonucleotide
ucuugggagcaaguccuug

SEQ ID NO: 3099312 - RNA, 19 nt, Artificial Sequence
  Description of Artificial Sequence: Synthetic oligonucleotide
acugcauugcuggccagug

SEQ ID NO: 3099313 - RNA, 19 nt, Artificial Sequence
  Description of Artificial Sequence: Synthetic oligonucleotide
uacaaacauuggaccccag

SEQ ID NO: 3099314 - RNA, 19 nt, Artificial Sequence
  Description of Artificial Sequence: Synthetic oligonucleotide
uguuggagguuaagaucuc

SEQ ID NO: 3099315 - RNA, 19 nt, Artificial Sequence
  Description of Artificial Sequence: Synthetic oligonucleotide
caccaagagacugcauugc

SEQ ID NO: 3099316 - RNA, 19 nt, Artificial Sequence
  Description of Artificial Sequence: Synthetic oligonucleotide
guacuguuggagguuaaga

SEQ ID NO: 3099317 - RNA, 19 nt, Artificial Sequence
  Description of Artificial Sequence: Synthetic oligonucleotide
gaguacacaaguagcccuc

SEQ ID NO: 3099318 - RNA, 19 nt, Artificial Sequence
  Description of Artificial Sequence: Synthetic oligonucleotide
uccugguuuucagccuugg

SEQ ID NO: 3099319 - RNA, 19 nt, Artificial Sequence
  Description of Artificial Sequence: Synthetic oligonucleotide
aggugaaaucuugggagca

SEQ ID NO: 3099320 - RNA, 19 nt, Artificial Sequence
  Description of Artificial Sequence: Synthetic oligonucleotide
guuuggcuacaaacauugg

SEQ ID NO: 3099321 - RNA, 19 nt, Artificial Sequence
  Description of Artificial Sequence: Synthetic oligonucleotide
ugcagaccuuaagaguucu

SEQ ID NO: 3099322 - RNA, 19 nt, Artificial Sequence
  Description of Artificial Sequence: Synthetic oligonucleotide
acgggcaugaugguacugu

SEQ ID NO: 3099323 - RNA, 19 nt, Artificial Sequence
  Description of Artificial Sequence: Synthetic oligonucleotide
uuggaccccaggcuuuguc

SEQ ID NO: 3099324 - RNA, 19 nt, Artificial Sequence
  Description of Artificial Sequence: Synthetic oligonucleotide
gagagugugcauguggagu

SEQ ID NO: 3099325 - RNA, 19 nt, Artificial Sequence
  Description of Artificial Sequence: Synthetic oligonucleotide
ggagagugugcauguggag

SEQ ID NO: 3099326 - RNA, 19 nt, Artificial Sequence
  Description of Artificial Sequence: Synthetic oligonucleotide
cuuaagaguucuaccugua

SEQ ID NO: 3099327 - RNA, 19 nt, Artificial Sequence
  Description of Artificial Sequence: Synthetic oligonucleotide
cugcauugcuggccagugg

SEQ ID NO: 3099328 - RNA, 19 nt, Artificial Sequence
  Description of Artificial Sequence: Synthetic oligonucleotide
ccaagagacugcauugcug

SEQ ID NO: 3099329 - RNA, 19 nt, Artificial Sequence
  Description of Artificial Sequence: Synthetic oligonucleotide
ugggagcaaguccuugcua

SEQ ID NO: 3099330 - RNA, 19 nt, Artificial Sequence
  Description of Artificial Sequence: Synthetic oligonucleotide
cuacaaacauuggacccca

SEQ ID NO: 3099331 - RNA, 19 nt, Artificial Sequence
  Description of Artificial Sequence: Synthetic oligonucleotide
uuccuguacucauggcuuu

SEQ ID NO: 3099332 - RNA, 19 nt, Artificial Sequence
  Description of Artificial Sequence: Synthetic oligonucleotide
uccuugcuauugcacuaau

SEQ ID NO: 3099333 - RNA, 19 nt, Artificial Sequence
  Description of Artificial Sequence: Synthetic oligonucleotide
gguacuguuggagguuaag

SEQ ID NO: 3099334 - RNA, 19 nt, Artificial Sequence
  Description of Artificial Sequence: Synthetic oligonucleotide
guuggagguuaagaucuca

SEQ ID NO: 3099335 - RNA, 19 nt, Artificial Sequence
  Description of Artificial Sequence: Synthetic oligonucleotide
uauccacgggcaugauggu

SEQ ID NO: 3099336 - RNA, 19 nt, Artificial Sequence
  Description of Artificial Sequence: Synthetic oligonucleotide
ggccgcaggcuuuaauugc

SEQ ID NO: 3099337 - RNA, 19 nt, Artificial Sequence
  Description of Artificial Sequence: Synthetic oligonucleotide
ggaguacacaaguagcccu

SEQ ID NO: 3099338 - RNA, 19 nt, Artificial Sequence
  Description of Artificial Sequence: Synthetic oligonucleotide
agugugcauguggaguaca

SEQ ID NO: 3099339 - RNA, 19 nt, Artificial Sequence
  Description of Artificial Sequence: Synthetic oligonucleotide
gcuuuaauugcagaccuua

SEQ ID NO: 3099340 - RNA, 19 nt, Artificial Sequence
  Description of Artificial Sequence: Synthetic oligonucleotide
gcuauugcacuaauaucca

SEQ ID NO: 3099341 - RNA, 19 nt, Artificial Sequence
  Description of Artificial Sequence: Synthetic oligonucleotide
uucuucaguuuggcuacaa

SEQ ID NO: 3099342 - RNA, 19 nt, Artificial Sequence
  Description of Artificial Sequence: Synthetic oligonucleotide
ccauuuuccuguacucaug

SEQ ID NO: 3099343 - RNA, 19 nt, Artificial Sequence
  Description of Artificial Sequence: Synthetic oligonucleotide
cuuggagagugugcaugug

SEQ ID NO: 3099344 - RNA, 19 nt, Artificial Sequence
  Description of Artificial Sequence: Synthetic oligonucleotide
gcacuaauauccacgggca

SEQ ID NO: 3099345 - RNA, 19 nt, Artificial Sequence
  Description of Artificial Sequence: Synthetic oligonucleotide
ugguacuguuggagguuaa

SEQ ID NO: 3099346 - RNA, 19 nt, Artificial Sequence
  Description of Artificial Sequence: Synthetic oligonucleotide
gagugugcauguggaguac

SEQ ID NO: 3099347 - RNA, 19 nt, Artificial Sequence
  Description of Artificial Sequence: Synthetic oligonucleotide
agacugcauugcuggccag

SEQ ID NO: 3099348 - RNA, 19 nt, Artificial Sequence
  Description of Artificial Sequence: Synthetic oligonucleotide
gggcaaaggugaaaucuug

SEQ ID NO: 3099349 - RNA, 19 nt, Artificial Sequence
  Description of Artificial Sequence: Synthetic oligonucleotide
cauuggaccccaggcuuug

SEQ ID NO: 3099350 - RNA, 19 nt, Artificial Sequence
  Description of Artificial Sequence: Synthetic oligonucleotide
guacacaaguagcccucca

SEQ ID NO: 3099351 - RNA, 19 nt, Artificial Sequence
  Description of Artificial Sequence: Synthetic oligonucleotide
gugugcauguggaguacac

SEQ ID NO: 3099352 - RNA, 19 nt, Artificial Sequence
  Description of Artificial Sequence: Synthetic oligonucleotide
augguacuguuggagguua

SEQ ID NO: 3099353 - RNA, 19 nt, Artificial Sequence
  Description of Artificial Sequence: Synthetic oligonucleotide
cagccuuggagagugugca

SEQ ID NO: 3099354 - RNA, 19 nt, Artificial Sequence
  Description of Artificial Sequence: Synthetic oligonucleotide
gcaaguccuugcuauugca

SEQ ID NO: 3099355 - RNA, 19 nt, Artificial Sequence
  Description of Artificial Sequence: Synthetic oligonucleotide
gccuuggagagugugcaug

SEQ ID NO: 3099356 - RNA, 19 nt, Artificial Sequence
  Description of Artificial Sequence: Synthetic oligonucleotide
gggagcaaguccuugcuau

SEQ ID NO: 3099357 - RNA, 19 nt, Artificial Sequence
  Description of Artificial Sequence: Synthetic oligonucleotide
gguuaagaucucacugauc

SEQ ID NO: 3099358 - RNA, 19 nt, Artificial Sequence
  Description of Artificial Sequence: Synthetic oligonucleotide
ugaucacauccugguuuuc

SEQ ID NO: 3099359 - RNA, 19 nt, Artificial Sequence
  Description of Artificial Sequence: Synthetic oligonucleotide
cugaucacauccugguuuu

SEQ ID NO: 3099360 - RNA, 19 nt, Artificial Sequence
  Description of Artificial Sequence: Synthetic oligonucleotide
ccuuaagaguucuaccugu

SEQ ID NO: 3099361 - RNA, 19 nt, Artificial Sequence
  Description of Artificial Sequence: Synthetic oligonucleotide
gcauugcuggccagugggg

SEQ ID NO: 3099362 - RNA, 19 nt, Artificial Sequence
  Description of Artificial Sequence: Synthetic oligonucleotide
agccuuggagagugugcau

SEQ ID NO: 3099363 - RNA, 19 nt, Artificial Sequence
  Description of Artificial Sequence: Synthetic oligonucleotide
ccaggcuuuguccuuuuca

SEQ ID NO: 3099364 - RNA, 19 nt, Artificial Sequence
  Description of Artificial Sequence: Synthetic oligonucleotide
gaugguacuguuggagguu

SEQ ID NO: 3099365 - RNA, 19 nt, Artificial Sequence
  Description of Artificial Sequence: Synthetic oligonucleotide
uccuguacucauggcuuuu

SEQ ID NO: 3099366 - RNA, 19 nt, Artificial Sequence
  Description of Artificial Sequence: Synthetic oligonucleotide
cauggcuuuucuucaguuu

SEQ ID NO: 3099367 - RNA, 19 nt, Artificial Sequence
  Description of Artificial Sequence: Synthetic oligonucleotide
uaauauccacgggcaugau

SEQ ID NO: 3099368 - RNA, 19 nt, Artificial Sequence
  Description of Artificial Sequence: Synthetic oligonucleotide
gggcaugaugguacuguug

SEQ ID NO: 3099369 - RNA, 19 nt, Artificial Sequence
  Description of Artificial Sequence: Synthetic oligonucleotide
acauuggaccccaggcuuu

SEQ ID NO: 3099370 - RNA, 19 nt, Artificial Sequence
  Description of Artificial Sequence: Synthetic oligonucleotide
gccauuuuccuguacucau

SEQ ID NO: 3099371 - RNA, 19 nt, Artificial Sequence
  Description of Artificial Sequence: Synthetic oligonucleotide
caggaaucaccaagagacu

SEQ ID NO: 3099372 - RNA, 19 nt, Artificial Sequence
  Description of Artificial Sequence: Synthetic oligonucleotide
guccuugcuauugcacuaa

SEQ ID NO: 3099373 - RNA, 19 nt, Artificial Sequence
  Description of Artificial Sequence: Synthetic oligonucleotide
cucauggcuuuucuucagu

SEQ ID NO: 3099374 - RNA, 19 nt, Artificial Sequence
  Description of Artificial Sequence: Synthetic oligonucleotide
cuguacucauggcuuuucu

SEQ ID NO: 3099375 - RNA, 19 nt, Artificial Sequence
  Description of Artificial Sequence: Synthetic oligonucleotide
gcaugaugguacuguugga

SEQ ID NO: 3099376 - RNA, 19 nt, Artificial Sequence
  Description of Artificial Sequence: Synthetic oligonucleotide
ggugaaaucuugggagcaa

SEQ ID NO: 3099377 - RNA, 19 nt, Artificial Sequence
  Description of Artificial Sequence: Synthetic oligonucleotide
caggccgcaggcuuuaauu

SEQ ID NO: 3099378 - RNA, 19 nt, Artificial Sequence
  Description of Artificial Sequence: Synthetic oligonucleotide
caguuuggcuacaaacauu

SEQ ID NO: 3099379 - RNA, 19 nt, Artificial Sequence
  Description of Artificial Sequence: Synthetic oligonucleotide
auccacgggcaugauggua

SEQ ID NO: 3099380 - RNA, 19 nt, Artificial Sequence
  Description of Artificial Sequence: Synthetic oligonucleotide
gcuuuucuucaguuuggcu

SEQ ID NO: 3099381 - RNA, 19 nt, Artificial Sequence
  Description of Artificial Sequence: Synthetic oligonucleotide
auuggaccccaggcuuugu

SEQ ID NO: 3099382 - RNA, 19 nt, Artificial Sequence
  Description of Artificial Sequence: Synthetic oligonucleotide
guuuucagccuuggagagu

SEQ ID NO: 3099383 - RNA, 19 nt, Artificial Sequence
  Description of Artificial Sequence: Synthetic oligonucleotide
cauccugguuuucagccuu

SEQ ID NO: 3099384 - RNA, 19 nt, Artificial Sequence
  Description of Artificial Sequence: Synthetic oligonucleotide
guagcccuccaggccgcag

SEQ ID NO: 3099385 - RNA, 19 nt, Artificial Sequence
  Description of Artificial Sequence: Synthetic oligonucleotide
ccgcaggcuuuaauugcag

SEQ ID NO: 3099386 - RNA, 19 nt, Artificial Sequence
  Description of Artificial Sequence: Synthetic oligonucleotide
cacgggcaugaugguacug

SEQ ID NO: 3099387 - RNA, 19 nt, Artificial Sequence
  Description of Artificial Sequence: Synthetic oligonucleotide
gccgcaggcuuuaauugca

SEQ ID NO: 3099388 - RNA, 19 nt, Artificial Sequence
  Description of Artificial Sequence: Synthetic oligonucleotide
cacuaauauccacgggcau

SEQ ID NO: 3099389 - RNA, 19 nt, Artificial Sequence
  Description of Artificial Sequence: Synthetic oligonucleotide
ggaccccaggcuuuguccu

SEQ ID NO: 3099390 - RNA, 19 nt, Artificial Sequence
  Description of Artificial Sequence: Synthetic oligonucleotide
ccuguacucauggcuuuuc

SEQ ID NO: 3099391 - RNA, 19 nt, Artificial Sequence
  Description of Artificial Sequence: Synthetic oligonucleotide
accccaggcuuuguccuuu

SEQ ID NO: 3099392 - RNA, 19 nt, Artificial Sequence
  Description of Artificial Sequence: Synthetic oligonucleotide
aucuugggagcaaguccuu

SEQ ID NO: 3099393 - RNA, 19 nt, Artificial Sequence
  Description of Artificial Sequence: Synthetic oligonucleotide
ccuugcuauugcacuaaua

SEQ ID NO: 3099394 - RNA, 19 nt, Artificial Sequence
  Description of Artificial Sequence: Synthetic oligonucleotide
ccuuuucaggaaucaccaa

SEQ ID NO: 3099395 - RNA, 19 nt, Artificial Sequence
  Description of Artificial Sequence: Synthetic oligonucleotide
ccuuggagagugugcaugu

SEQ ID NO: 3099396 - RNA, 19 nt, Artificial Sequence
  Description of Artificial Sequence: Synthetic oligonucleotide
aguagcccuccaggccgca

SEQ ID NO: 3099397 - RNA, 19 nt, Artificial Sequence
  Description of Artificial Sequence: Synthetic oligonucleotide
ccugguuuucagccuugga

SEQ ID NO: 3099398 - RNA, 19 nt, Artificial Sequence
  Description of Artificial Sequence: Synthetic oligonucleotide
cacugaucacauccugguu

SEQ ID NO: 3099399 - RNA, 19 nt, Artificial Sequence
  Description of Artificial Sequence: Synthetic oligonucleotide
ggagcaaguccuugcuauu

SEQ ID NO: 3099400 - RNA, 19 nt, Artificial Sequence
  Description of Artificial Sequence: Synthetic oligonucleotide
uccaggccgcaggcuuuaa

SEQ ID NO: 3099401 - RNA, 19 nt, Artificial Sequence
  Description of Artificial Sequence: Synthetic oligonucleotide
gaccccaggcuuuguccuu

SEQ ID NO: 3099402 - RNA, 19 nt, Artificial Sequence
  Description of Artificial Sequence: Synthetic oligonucleotide
cgcaggcuuuaauugcaga

SEQ ID NO: 3099403 - RNA, 19 nt, Artificial Sequence
  Description of Artificial Sequence: Synthetic oligonucleotide
cccaggcuuuguccuuuuc

SEQ ID NO: 3099404 - RNA, 19 nt, Artificial Sequence
  Description of Artificial Sequence: Synthetic oligonucleotide
cuccaggccgcaggcuuua

SEQ ID NO: 3099405 - RNA, 19 nt, Artificial Sequence
  Description of Artificial Sequence: Synthetic oligonucleotide
gcagaccuuaagaguucua

SEQ ID NO: 3099406 - RNA, 19 nt, Artificial Sequence
  Description of Artificial Sequence: Synthetic oligonucleotide
ggcuuuaauugcagaccuu

SEQ ID NO: 3099407 - RNA, 19 nt, Artificial Sequence
  Description of Artificial Sequence: Synthetic oligonucleotide
ccacgggcaugaugguacu

SEQ ID NO: 3099408 - RNA, 19 nt, Artificial Sequence
  Description of Artificial Sequence: Synthetic oligonucleotide
cccuccaggccgcaggcuu

SEQ ID NO: 3099409 - RNA, 19 nt, Artificial Sequence
  Description of Artificial Sequence: Synthetic oligonucleotide
ccaggccgcaggcuuuaau

SEQ ID NO: 3099410 - RNA, 19 nt, Artificial Sequence
  Description of Artificial Sequence: Synthetic oligonucleotide
cgggcaugaugguacuguu

SEQ ID NO: 3099411 - RNA, 19 nt, Artificial Sequence
  Description of Artificial Sequence: Synthetic oligonucleotide
gcccuccaggccgcaggcu

SEQ ID NO: 3099412 - RNA, 19 nt, Artificial Sequence
  Description of Artificial Sequence: Synthetic oligonucleotide
ccccaggcuuuguccuuuu

SEQ ID NO: 3099413 - RNA, 19 nt, Artificial Sequence
  Description of Artificial Sequence: Synthetic oligonucleotide
agagagguggcccagauug

SEQ ID NO: 3099414 - RNA, 19 nt, Artificial Sequence
  Description of Artificial Sequence: Synthetic oligonucleotide
gaaguugccacccacguac

SEQ ID NO: 3099415 - RNA, 19 nt, Artificial Sequence
  Description of Artificial Sequence: Synthetic oligonucleotide
guugccagggauuugcgcg

SEQ ID NO: 3099416 - RNA, 19 nt, Artificial Sequence
  Description of Artificial Sequence: Synthetic oligonucleotide
agaugggugagagaggugg

SEQ ID NO: 3099417 - RNA, 19 nt, Artificial Sequence
  Description of Artificial Sequence: Synthetic oligonucleotide
uugaagaccggccccgacg

SEQ ID NO: 3099418 - RNA, 19 nt, Artificial Sequence
  Description of Artificial Sequence: Synthetic oligonucleotide
uggcccagauugaagaccg

SEQ ID NO: 3099419 - RNA, 19 nt, Artificial Sequence
  Description of Artificial Sequence: Synthetic oligonucleotide
uugccacccacguacaccg

SEQ ID NO: 3099420 - RNA, 19 nt, Artificial Sequence
  Description of Artificial Sequence: Synthetic oligonucleotide
cuguaguccacgcuggccg

SEQ ID NO: 3099421 - RNA, 19 nt, Artificial Sequence
  Description of Artificial Sequence: Synthetic oligonucleotide
ugaagaccggccccgacgc

SEQ ID NO: 3099422 - RNA, 19 nt, Artificial Sequence
  Description of Artificial Sequence: Synthetic oligonucleotide
gagucgacgaaguugccac

SEQ ID NO: 3099423 - RNA, 19 nt, Artificial Sequence
  Description of Artificial Sequence: Synthetic oligonucleotide
aacucaggcgccgcguagc

SEQ ID NO: 3099424 - RNA, 19 nt, Artificial Sequence
  Description of Artificial Sequence: Synthetic oligonucleotide
uggggcucgaacucaggcg

SEQ ID NO: 3099425 - RNA, 19 nt, Artificial Sequence
  Description of Artificial Sequence: Synthetic oligonucleotide
ugcagguuggcgcuggcga

SEQ ID NO: 3099426 - RNA, 19 nt, Artificial Sequence
  Description of Artificial Sequence: Synthetic oligonucleotide
cauggagucgacgaaguug

SEQ ID NO: 3099427 - RNA, 19 nt, Artificial Sequence
  Description of Artificial Sequence: Synthetic oligonucleotide
auuugcgcggcgcagcugu

SEQ ID NO: 3099428 - RNA, 19 nt, Artificial Sequence
  Description of Artificial Sequence: Synthetic oligonucleotide
agauugaagaccggccccg

SEQ ID NO: 3099429 - RNA, 19 nt, Artificial Sequence
  Description of Artificial Sequence: Synthetic oligonucleotide
uugccagggauuugcgcgg

SEQ ID NO: 3099430 - RNA, 19 nt, Artificial Sequence
  Description of Artificial Sequence: Synthetic oligonucleotide
gacgaaguugccacccacg

SEQ ID NO: 3099431 - RNA, 19 nt, Artificial Sequence
  Description of Artificial Sequence: Synthetic oligonucleotide
agcggcgccguguaggcgg

SEQ ID NO: 3099432 - RNA, 19 nt, Artificial Sequence
  Description of Artificial Sequence: Synthetic oligonucleotide
agucgacgaaguugccacc

SEQ ID NO: 3099433 - RNA, 19 nt, Artificial Sequence
  Description of Artificial Sequence: Synthetic oligonucleotide
auugaagaccggccccgac

SEQ ID NO: 3099434 - RNA, 19 nt, Artificial Sequence
  Description of Artificial Sequence: Synthetic oligonucleotide
agguggcccagauugaaga

SEQ ID NO: 3099435 - RNA, 19 nt, Artificial Sequence
  Description of Artificial Sequence: Synthetic oligonucleotide
cagauugaagaccggcccc

SEQ ID NO: 3099436 - RNA, 19 nt, Artificial Sequence
  Description of Artificial Sequence: Synthetic oligonucleotide
aagaccggccccgacgcgg

SEQ ID NO: 3099437 - RNA, 19 nt, Artificial Sequence
  Description of Artificial Sequence: Synthetic oligonucleotide
  modified_base (4)..(4): a, c, u, g, unknown or other
uucngcugcggcaggcagc

SEQ ID NO: 3099438 - RNA, 19 nt, Artificial Sequence
  Description of Artificial Sequence: Synthetic oligonucleotide
ucaggcgccgcguagcgcu

SEQ ID NO: 3099439 - RNA, 19 nt, Artificial Sequence
  Description of Artificial Sequence: Synthetic oligonucleotide
aggccguacauguugggcu

SEQ ID NO: 3099440 - RNA, 19 nt, Artificial Sequence
  Description of Artificial Sequence: Synthetic oligonucleotide
ccgaagaugggugagagag

SEQ ID NO: 3099441 - RNA, 19 nt, Artificial Sequence
  Description of Artificial Sequence: Synthetic oligonucleotide
augggugagagagguggcc

SEQ ID NO: 3099442 - RNA, 19 nt, Artificial Sequence
  Description of Artificial Sequence: Synthetic oligonucleotide
uuggcgcuggcgaagccgc

SEQ ID NO: 3099443 - RNA, 19 nt, Artificial Sequence
  Description of Artificial Sequence: Synthetic oligonucleotide
acgaaguugccacccacgu

SEQ ID NO: 3099444 - RNA, 19 nt, Artificial Sequence
  Description of Artificial Sequence: Synthetic oligonucleotide
aagccgccgccguugcucg

SEQ ID NO: 3099445 - RNA, 19 nt, Artificial Sequence
  Description of Artificial Sequence: Synthetic oligonucleotide
aguugccacccacguacac

SEQ ID NO: 3099446 - RNA, 19 nt, Artificial Sequence
  Description of Artificial Sequence: Synthetic oligonucleotide
gaagaugggugagagaggu

SEQ ID NO: 3099447 - RNA, 19 nt, Artificial Sequence
  Description of Artificial Sequence: Synthetic oligonucleotide
  modified_base (10)..(10): a, c, u, g, unknown or other
uagcgcuucngcugcggca

SEQ ID NO: 3099448 - RNA, 19 nt, Artificial Sequence
  Description of Artificial Sequence: Synthetic oligonucleotide
ugguugccagggauuugcg

SEQ ID NO: 3099449 - RNA, 19 nt, Artificial Sequence
  Description of Artificial Sequence: Synthetic oligonucleotide
augggguggggcucgaacu

SEQ ID NO: 3099450 - RNA, 19 nt, Artificial Sequence
  Description of Artificial Sequence: Synthetic oligonucleotide
  modified_base (9)..(9): a, c, u, g, unknown or other
agcgcuucngcugcggcag

SEQ ID NO: 3099451 - RNA, 19 nt, Artificial Sequence
  Description of Artificial Sequence: Synthetic oligonucleotide
gugguugccagggauuugc

SEQ ID NO: 3099452 - RNA, 19 nt, Artificial Sequence
  Description of Artificial Sequence: Synthetic oligonucleotide
  modified_base (3)..(3): a, c, u, g, unknown or other
ucngcugcggcaggcagcu

SEQ ID NO: 3099453 - RNA, 19 nt, Artificial Sequence
  Description of Artificial Sequence: Synthetic oligonucleotide
ccagauugaagaccggccc

SEQ ID NO: 3099454 - RNA, 19 nt, Artificial Sequence
  Description of Artificial Sequence: Synthetic oligonucleotide
ugggugagagagguggccc

SEQ ID NO: 3099455 - RNA, 19 nt, Artificial Sequence
  Description of Artificial Sequence: Synthetic oligonucleotide
cagcuguaguccacgcugg

SEQ ID NO: 3099456 - RNA, 19 nt, Artificial Sequence
  Description of Artificial Sequence: Synthetic oligonucleotide
gugguggugguugccaggg

SEQ ID NO: 3099457 - RNA, 19 nt, Artificial Sequence
  Description of Artificial Sequence: Synthetic oligonucleotide
guuggcgcuggcgaagccg

SEQ ID NO: 3099458 - RNA, 19 nt, Artificial Sequence
  Description of Artificial Sequence: Synthetic oligonucleotide
ugagagagguggcccagau

SEQ ID NO: 3099459 - RNA, 19 nt, Artificial Sequence
  Description of Artificial Sequence: Synthetic oligonucleotide
acguacaccgggcugcccu

SEQ ID NO: 3099460 - RNA, 19 nt, Artificial Sequence
  Description of Artificial Sequence: Synthetic oligonucleotide
guugccacccacguacacc

SEQ ID NO: 3099461 - RNA, 19 nt, Artificial Sequence
  Description of Artificial Sequence: Synthetic oligonucleotide
guggggcucgaacucaggc

SEQ ID NO: 3099462 - RNA, 19 nt, Artificial Sequence
  Description of Artificial Sequence: Synthetic oligonucleotide
gaacucaggcgccgcguag

SEQ ID NO: 3099463 - RNA, 19 nt, Artificial Sequence
  Description of Artificial Sequence: Synthetic oligonucleotide
acucaggcgccgcguagcg

SEQ ID NO: 3099464 - RNA, 19 nt, Artificial Sequence
  Description of Artificial Sequence: Synthetic oligonucleotide
ugagcggcgccguguaggc

SEQ ID NO: 3099465 - RNA, 19 nt, Artificial Sequence
  Description of Artificial Sequence: Synthetic oligonucleotide
  modified_base (5)..(5): a, c, u, g, unknown or other
cuucngcugcggcaggcag

SEQ ID NO: 3099466 - RNA, 19 nt, Artificial Sequence
  Description of Artificial Sequence: Synthetic oligonucleotide
uguaguccacgcuggccga

SEQ ID NO: 3099467 - RNA, 19 nt, Artificial Sequence
  Description of Artificial Sequence: Synthetic oligonucleotide
uccacgcuggccgaagaug

SEQ ID NO: 3099468 - RNA, 19 nt, Artificial Sequence
  Description of Artificial Sequence: Synthetic oligonucleotide
ugcggcaggcagcugcuga

SEQ ID NO: 3099469 - RNA, 19 nt, Artificial Sequence
  Description of Artificial Sequence: Synthetic oligonucleotide
ggggcucgaacucaggcgc

SEQ ID NO: 3099470 - RNA, 19 nt, Artificial Sequence
  Description of Artificial Sequence: Synthetic oligonucleotide
ucgacgaaguugccaccca

SEQ ID NO: 3099471 - RNA, 19 nt, Artificial Sequence
  Description of Artificial Sequence: Synthetic oligonucleotide
cugagcggcgccguguagg

SEQ ID NO: 3099472 - RNA, 19 nt, Artificial Sequence
  Description of Artificial Sequence: Synthetic oligonucleotide
gaugggugagagagguggc

SEQ ID NO: 3099473 - RNA, 19 nt, Artificial Sequence
  Description of Artificial Sequence: Synthetic oligonucleotide
gucgacgaaguugccaccc

SEQ ID NO: 3099474 - RNA, 19 nt, Artificial Sequence
  Description of Artificial Sequence: Synthetic oligonucleotide
ugggguggggcucgaacuc

SEQ ID NO: 3099475 - RNA, 19 nt, Artificial Sequence
  Description of Artificial Sequence: Synthetic oligonucleotide
agguuggcgcuggcgaagc

SEQ ID NO: 3099476 - RNA, 19 nt, Artificial Sequence
  Description of Artificial Sequence: Synthetic oligonucleotide
cccagauugaagaccggcc

SEQ ID NO: 3099477 - RNA, 19 nt, Artificial Sequence
  Description of Artificial Sequence: Synthetic oligonucleotide
cucgaacucaggcgccgcg

SEQ ID NO: 3099478 - RNA, 19 nt, Artificial Sequence
  Description of Artificial Sequence: Synthetic oligonucleotide
  modified_base (11)..(11): a, c, u, g, unknown or other
guagcgcuucngcugcggc

SEQ ID NO: 3099479 - RNA, 19 nt, Artificial Sequence
  Description of Artificial Sequence: Synthetic oligonucleotide
gagguggcccagauugaag

SEQ ID NO: 3099480 - RNA, 19 nt, Artificial Sequence
  Description of Artificial Sequence: Synthetic oligonucleotide
guugcucgccauggggugg

SEQ ID NO: 3099481 - RNA, 19 nt, Artificial Sequence
  Description of Artificial Sequence: Synthetic oligonucleotide
uugcucgccaugggguggg

SEQ ID NO: 3099482 - RNA, 19 nt, Artificial Sequence
  Description of Artificial Sequence: Synthetic oligonucleotide
gaagaccggccccgacgcg

SEQ ID NO: 3099483 - RNA, 19 nt, Artificial Sequence
  Description of Artificial Sequence: Synthetic oligonucleotide
caggccguacauguugggc

SEQ ID NO: 3099484 - RNA, 19 nt, Artificial Sequence
  Description of Artificial Sequence: Synthetic oligonucleotide
ggcaggcagcugcugagcg

SEQ ID NO: 3099485 - RNA, 19 nt, Artificial Sequence
  Description of Artificial Sequence: Synthetic oligonucleotide
acgcgggcgccauggaguc

SEQ ID NO: 3099486 - RNA, 19 nt, Artificial Sequence
  Description of Artificial Sequence: Synthetic oligonucleotide
cguguaggcggccaggccg

SEQ ID NO: 3099487 - RNA, 19 nt, Artificial Sequence
  Description of Artificial Sequence: Synthetic oligonucleotide
ggcgccauggagucgacga

SEQ ID NO: 3099488 - RNA, 19 nt, Artificial Sequence
  Description of Artificial Sequence: Synthetic oligonucleotide
uccgugguggugguugcca

SEQ ID NO: 3099489 - RNA, 19 nt, Artificial Sequence
  Description of Artificial Sequence: Synthetic oligonucleotide
ugcgcggcgcagcuguagu

SEQ ID NO: 3099490 - RNA, 19 nt, Artificial Sequence
  Description of Artificial Sequence: Synthetic oligonucleotide
gccguugcucgccaugggg

SEQ ID NO: 3099491 - RNA, 19 nt, Artificial Sequence
  Description of Artificial Sequence: Synthetic oligonucleotide
cacgcuggccgaagauggg

SEQ ID NO: 3099492 - RNA, 19 nt, Artificial Sequence
  Description of Artificial Sequence: Synthetic oligonucleotide
aagaugggugagagaggug

SEQ ID NO: 3099493 - RNA, 19 nt, Artificial Sequence
  Description of Artificial Sequence: Synthetic oligonucleotide
gguugccagggauuugcgc

SEQ ID NO: 3099494 - RNA, 19 nt, Artificial Sequence
  Description of Artificial Sequence: Synthetic oligonucleotide
uggagucgacgaaguugcc

SEQ ID NO: 3099495 - RNA, 19 nt, Artificial Sequence
  Description of Artificial Sequence: Synthetic oligonucleotide
ggccaggccguacauguug

SEQ ID NO: 3099496 - RNA, 19 nt, Artificial Sequence
  Description of Artificial Sequence: Synthetic oligonucleotide
acccacguacaccgggcug

SEQ ID NO: 3099497 - RNA, 19 nt, Artificial Sequence
  Description of Artificial Sequence: Synthetic oligonucleotide
agggauuugcgcggcgcag

SEQ ID NO: 3099498 - RNA, 19 nt, Artificial Sequence
  Description of Artificial Sequence: Synthetic oligonucleotide
ucgaacucaggcgccgcgu

SEQ ID NO: 3099499 - RNA, 19 nt, Artificial Sequence
  Description of Artificial Sequence: Synthetic oligonucleotide
agagguggcccagauugaa

SEQ ID NO: 3099500 - RNA, 19 nt, Artificial Sequence
  Description of Artificial Sequence: Synthetic oligonucleotide
uggugguugccagggauuu

SEQ ID NO: 3099501 - RNA, 19 nt, Artificial Sequence
  Description of Artificial Sequence: Synthetic oligonucleotide
uaguccacgcuggccgaag

SEQ ID NO: 3099502 - RNA, 19 nt, Artificial Sequence
  Description of Artificial Sequence: Synthetic oligonucleotide
ggccguacauguugggcug

SEQ ID NO: 3099503 - RNA, 19 nt, Artificial Sequence
  Description of Artificial Sequence: Synthetic oligonucleotide
aaguugccacccacguaca

SEQ ID NO: 3099504 - RNA, 19 nt, Artificial Sequence
  Description of Artificial Sequence: Synthetic oligonucleotide
ugcugagcggcgccgugua

SEQ ID NO: 3099505 - RNA, 19 nt, Artificial Sequence
  Description of Artificial Sequence: Synthetic oligonucleotide
aguccacgcuggccgaaga

SEQ ID NO: 3099506 - RNA, 19 nt, Artificial Sequence
  Description of Artificial Sequence: Synthetic oligonucleotide
gguggcccagauugaagac

SEQ ID NO: 3099507 - RNA, 19 nt, Artificial Sequence
  Description of Artificial Sequence: Synthetic oligonucleotide
cuggccgaagaugggugag

SEQ ID NO: 3099508 - RNA, 19 nt, Artificial Sequence
  Description of Artificial Sequence: Synthetic oligonucleotide
gcaggcagcugcugagcgg

SEQ ID NO: 3099509 - RNA, 19 nt, Artificial Sequence
  Description of Artificial Sequence: Synthetic oligonucleotide
ggccgaagaugggugagag

SEQ ID NO: 3099510 - RNA, 19 nt, Artificial Sequence
  Description of Artificial Sequence: Synthetic oligonucleotide
uggccgaagaugggugaga

SEQ ID NO: 3099511 - RNA, 19 nt, Artificial Sequence
  Description of Artificial Sequence: Synthetic oligonucleotide
cugcagguuggcgcuggcg

SEQ ID NO: 3099512 - RNA, 19 nt, Artificial Sequence
  Description of Artificial Sequence: Synthetic oligonucleotide
gauugaagaccggccccga

SEQ ID NO: 3099513 - RNA, 19 nt, Artificial Sequence
  Description of Artificial Sequence: Synthetic oligonucleotide
acaccgggcugcccugcag

SEQ ID NO: 3099514 - RNA, 19 nt, Artificial Sequence
  Description of Artificial Sequence: Synthetic oligonucleotide
cagguuggcgcuggcgaag

SEQ ID NO: 3099515 - RNA, 19 nt, Artificial Sequence
  Description of Artificial Sequence: Synthetic oligonucleotide
  modified_base (14)..(14): a, c, u, g, unknown or other
cgcguagcgcuucngcugc

SEQ ID NO: 3099516 - RNA, 19 nt, Artificial Sequence
  Description of Artificial Sequence: Synthetic oligonucleotide
gcacgguccgugguggugg

SEQ ID NO: 3099517 - RNA, 19 nt, Artificial Sequence
  Description of Artificial Sequence: Synthetic oligonucleotide
gauuugcgcggcgcagcug

SEQ ID NO: 3099518 - RNA, 19 nt, Artificial Sequence
  Description of Artificial Sequence: Synthetic oligonucleotide
ggcgcagcuguaguccacg

SEQ ID NO: 3099519 - RNA, 19 nt, Artificial Sequence
  Description of Artificial Sequence: Synthetic oligonucleotide
uugcgcggcgcagcuguag

SEQ ID NO: 3099520 - RNA, 19 nt, Artificial Sequence
  Description of Artificial Sequence: Synthetic oligonucleotide
cgaagaugggugagagagg

SEQ ID NO: 3099521 - RNA, 19 nt, Artificial Sequence
  Description of Artificial Sequence: Synthetic oligonucleotide
gcuguaguccacgcuggcc

SEQ ID NO: 3099522 - RNA, 19 nt, Artificial Sequence
  Description of Artificial Sequence: Synthetic oligonucleotide
gcccagauugaagaccggc

SEQ ID NO: 3099523 - RNA, 19 nt, Artificial Sequence
  Description of Artificial Sequence: Synthetic oligonucleotide
ggagucgacgaaguugcca

SEQ ID NO: 3099524 - RNA, 19 nt, Artificial Sequence
  Description of Artificial Sequence: Synthetic oligonucleotide
acgcuggccgaagaugggu

SEQ ID NO: 3099525 - RNA, 19 nt, Artificial Sequence
  Description of Artificial Sequence: Synthetic oligonucleotide
ggugagagagguggcccag

SEQ ID NO: 3099526 - RNA, 19 nt, Artificial Sequence
  Description of Artificial Sequence: Synthetic oligonucleotide
ugccagggauuugcgcggc

SEQ ID NO: 3099527 - RNA, 19 nt, Artificial Sequence
  Description of Artificial Sequence: Synthetic oligonucleotide
gacgcgggcgccauggagu

SEQ ID NO: 3099528 - RNA, 19 nt, Artificial Sequence
  Description of Artificial Sequence: Synthetic oligonucleotide
gccaggccguacauguugg

SEQ ID NO: 3099529 - RNA, 19 nt, Artificial Sequence
  Description of Artificial Sequence: Synthetic oligonucleotide
cccacguacaccgggcugc

SEQ ID NO: 3099530 - RNA, 19 nt, Artificial Sequence
  Description of Artificial Sequence: Synthetic oligonucleotide
gagagguggcccagauuga

SEQ ID NO: 3099531 - RNA, 19 nt, Artificial Sequence
  Description of Artificial Sequence: Synthetic oligonucleotide
cagggauuugcgcggcgca

SEQ ID NO: 3099532 - RNA, 19 nt, Artificial Sequence
  Description of Artificial Sequence: Synthetic oligonucleotide
gggauuugcgcggcgcagc

SEQ ID NO: 3099533 - RNA, 19 nt, Artificial Sequence
  Description of Artificial Sequence: Synthetic oligonucleotide
ggcucgaacucaggcgccg

SEQ ID NO: 3099534 - RNA, 19 nt, Artificial Sequence
  Description of Artificial Sequence: Synthetic oligonucleotide
gcagcugcugagcggcgcc

SEQ ID NO: 3099535 - RNA, 19 nt, Artificial Sequence
  Description of Artificial Sequence: Synthetic oligonucleotide
gcggcaggcagcugcugag

SEQ ID NO: 3099536 - RNA, 19 nt, Artificial Sequence
  Description of Artificial Sequence: Synthetic oligonucleotide
agaccggccccgacgcggg

SEQ ID NO: 3099537 - RNA, 19 nt, Artificial Sequence
  Description of Artificial Sequence: Synthetic oligonucleotide
ccacccacguacaccgggc

SEQ ID NO: 3099538 - RNA, 19 nt, Artificial Sequence
  Description of Artificial Sequence: Synthetic oligonucleotide
cucgccaugggguggggcu

SEQ ID NO: 3099539 - RNA, 19 nt, Artificial Sequence
  Description of Artificial Sequence: Synthetic oligonucleotide
gguccgugguggugguugc

SEQ ID NO: 3099540 - RNA, 19 nt, Artificial Sequence
  Description of Artificial Sequence: Synthetic oligonucleotide
  modified_base (15)..(15): a, c, u, g, unknown or other
ccgcguagcgcuucngcug

SEQ ID NO: 3099541 - RNA, 19 nt, Artificial Sequence
  Description of Artificial Sequence: Synthetic oligonucleotide
gggugagagagguggccca

SEQ ID NO: 3099542 - RNA, 19 nt, Artificial Sequence
  Description of Artificial Sequence: Synthetic oligonucleotide
gcuggcgaagccgccgccg

SEQ ID NO: 3099543 - RNA, 19 nt, Artificial Sequence
  Description of Artificial Sequence: Synthetic oligonucleotide
uggcgcuggcgaagccgcc

SEQ ID NO: 3099544 - RNA, 19 nt, Artificial Sequence
  Description of Artificial Sequence: Synthetic oligonucleotide
gagcggcgccguguaggcg

SEQ ID NO: 3099545 - RNA, 19 nt, Artificial Sequence
  Description of Artificial Sequence: Synthetic oligonucleotide
uuugcgcggcgcagcugua

SEQ ID NO: 3099546 - RNA, 19 nt, Artificial Sequence
  Description of Artificial Sequence: Synthetic oligonucleotide
cagcugcugagcggcgccg

SEQ ID NO: 3099547 - RNA, 19 nt, Artificial Sequence
  Description of Artificial Sequence: Synthetic oligonucleotide
ggcgcuggcgaagccgccg

SEQ ID NO: 3099548 - RNA, 19 nt, Artificial Sequence
  Description of Artificial Sequence: Synthetic oligonucleotide
ggcgaagccgccgccguug

SEQ ID NO: 3099549 - RNA, 19 nt, Artificial Sequence
  Description of Artificial Sequence: Synthetic oligonucleotide
gcuggccgaagauggguga

SEQ ID NO: 3099550 - RNA, 19 nt, Artificial Sequence
  Description of Artificial Sequence: Synthetic oligonucleotide
ucgccaugggguggggcuc

SEQ ID NO: 3099551 - RNA, 19 nt, Artificial Sequence
  Description of Artificial Sequence: Synthetic oligonucleotide
gguggugguugccagggau

SEQ ID NO: 3099552 - RNA, 19 nt, Artificial Sequence
  Description of Artificial Sequence: Synthetic oligonucleotide
ccaggccguacauguuggg

SEQ ID NO: 3099553 - RNA, 19 nt, Artificial Sequence
  Description of Artificial Sequence: Synthetic oligonucleotide
cucaggcgccgcguagcgc

SEQ ID NO: 3099554 - RNA, 19 nt, Artificial Sequence
  Description of Artificial Sequence: Synthetic oligonucleotide
gcugcccugcagguuggcg

SEQ ID NO: 3099555 - RNA, 19 nt, Artificial Sequence
  Description of Artificial Sequence: Synthetic oligonucleotide
ccagggauuugcgcggcgc

SEQ ID NO: 3099556 - RNA, 19 nt, Artificial Sequence
  Description of Artificial Sequence: Synthetic oligonucleotide
guacaccgggcugcccugc

SEQ ID NO: 3099557 - RNA, 19 nt, Artificial Sequence
  Description of Artificial Sequence: Synthetic oligonucleotide
  modified_base (16)..(16): a, c, u, g, unknown or other
gccgcguagcgcuucngcu

SEQ ID NO: 3099558 - RNA, 19 nt, Artificial Sequence
  Description of Artificial Sequence: Synthetic oligonucleotide
gguggggcucgaacucagg

SEQ ID NO: 3099559 - RNA, 19 nt, Artificial Sequence
  Description of Artificial Sequence: Synthetic oligonucleotide
gcggccaggccguacaugu

SEQ ID NO: 3099560 - RNA, 19 nt, Artificial Sequence
  Description of Artificial Sequence: Synthetic oligonucleotide
cguugcucgccauggggug

SEQ ID NO: 3099561 - RNA, 19 nt, Artificial Sequence
  Description of Artificial Sequence: Synthetic oligonucleotide
ugcucgccauggggugggg

SEQ ID NO: 3099562 - RNA, 19 nt, Artificial Sequence
  Description of Artificial Sequence: Synthetic oligonucleotide
gugagagagguggcccaga

SEQ ID NO: 3099563 - RNA, 19 nt, Artificial Sequence
  Description of Artificial Sequence: Synthetic oligonucleotide
ggugguugccagggauuug

SEQ ID NO: 3099564 - RNA, 19 nt, Artificial Sequence
  Description of Artificial Sequence: Synthetic oligonucleotide
gccagggauuugcgcggcg

SEQ ID NO: 3099565 - RNA, 19 nt, Artificial Sequence
  Description of Artificial Sequence: Synthetic oligonucleotide
cgggcugcccugcagguug

SEQ ID NO: 3099566 - RNA, 19 nt, Artificial Sequence
  Description of Artificial Sequence: Synthetic oligonucleotide
agcugcugagcggcgccgu

SEQ ID NO: 3099567 - RNA, 19 nt, Artificial Sequence
  Description of Artificial Sequence: Synthetic oligonucleotide
gagagagguggcccagauu

SEQ ID NO: 3099568 - RNA, 19 nt, Artificial Sequence
  Description of Artificial Sequence: Synthetic oligonucleotide
ccgugguggugguugccag

SEQ ID NO: 3099569 - RNA, 19 nt, Artificial Sequence
  Description of Artificial Sequence: Synthetic oligonucleotide
gguuggcgcuggcgaagcc

SEQ ID NO: 3099570 - RNA, 19 nt, Artificial Sequence
  Description of Artificial Sequence: Synthetic oligonucleotide
uggcgaagccgccgccguu

SEQ ID NO: 3099571 - RNA, 19 nt, Artificial Sequence
  Description of Artificial Sequence: Synthetic oligonucleotide
gccguguaggcggccaggc

SEQ ID NO: 3099572 - RNA, 19 nt, Artificial Sequence
  Description of Artificial Sequence: Synthetic oligonucleotide
guccgugguggugguugcc

SEQ ID NO: 3099573 - RNA, 19 nt, Artificial Sequence
  Description of Artificial Sequence: Synthetic oligonucleotide
ggguggggcucgaacucag

SEQ ID NO: 3099574 - RNA, 19 nt, Artificial Sequence
  Description of Artificial Sequence: Synthetic oligonucleotide
ggauuugcgcggcgcagcu

SEQ ID NO: 3099575 - RNA, 19 nt, Artificial Sequence
  Description of Artificial Sequence: Synthetic oligonucleotide
ccgccguugcucgccaugg

SEQ ID NO: 3099576 - RNA, 19 nt, Artificial Sequence
  Description of Artificial Sequence: Synthetic oligonucleotide
cacguacaccgggcugccc

SEQ ID NO: 3099577 - RNA, 19 nt, Artificial Sequence
  Description of Artificial Sequence: Synthetic oligonucleotide
ccguacauguugggcugcg

SEQ ID NO: 3099578 - RNA, 19 nt, Artificial Sequence
  Description of Artificial Sequence: Synthetic oligonucleotide
gcagguuggcgcuggcgaa

SEQ ID NO: 3099579 - RNA, 19 nt, Artificial Sequence
  Description of Artificial Sequence: Synthetic oligonucleotide
guaggcggccaggccguac

SEQ ID NO: 3099580 - RNA, 19 nt, Artificial Sequence
  Description of Artificial Sequence: Synthetic oligonucleotide
cgacgaaguugccacccac

SEQ ID NO: 3099581 - RNA, 19 nt, Artificial Sequence
  Description of Artificial Sequence: Synthetic oligonucleotide
gccgccguugcucgccaug

SEQ ID NO: 3099582 - RNA, 19 nt, Artificial Sequence
  Description of Artificial Sequence: Synthetic oligonucleotide
gcugagcggcgccguguag

SEQ ID NO: 3099583 - RNA, 19 nt, Artificial Sequence
  Description of Artificial Sequence: Synthetic oligonucleotide
gccgaagaugggugagaga

SEQ ID NO: 3099584 - RNA, 19 nt, Artificial Sequence
  Description of Artificial Sequence: Synthetic oligonucleotide
gcugcugagcggcgccgug

SEQ ID NO: 3099585 - RNA, 19 nt, Artificial Sequence
  Description of Artificial Sequence: Synthetic oligonucleotide
cgccauggagucgacgaag

SEQ ID NO: 3099586 - RNA, 19 nt, Artificial Sequence
  Description of Artificial Sequence: Synthetic oligonucleotide
aggcggccaggccguacau

SEQ ID NO: 3099587 - RNA, 19 nt, Artificial Sequence
  Description of Artificial Sequence: Synthetic oligonucleotide
aggcgccgcguagcgcuuc

SEQ ID NO: 3099588 - RNA, 19 nt, Artificial Sequence
  Description of Artificial Sequence: Synthetic oligonucleotide
cgcuggccgaagaugggug

SEQ ID NO: 3099589 - RNA, 19 nt, Artificial Sequence
  Description of Artificial Sequence: Synthetic oligonucleotide
ggcccagauugaagaccgg

SEQ ID NO: 3099590 - RNA, 19 nt, Artificial Sequence
  Description of Artificial Sequence: Synthetic oligonucleotide
ccguguaggcggccaggcc

SEQ ID NO: 3099591 - RNA, 19 nt, Artificial Sequence
  Description of Artificial Sequence: Synthetic oligonucleotide
gccguacauguugggcugc

SEQ ID NO: 3099592 - RNA, 19 nt, Artificial Sequence
  Description of Artificial Sequence: Synthetic oligonucleotide
guaguccacgcuggccgaa

SEQ ID NO: 3099593 - RNA, 19 nt, Artificial Sequence
  Description of Artificial Sequence: Synthetic oligonucleotide
cgcggcgcagcuguagucc

SEQ ID NO: 3099594 - RNA, 19 nt, Artificial Sequence
  Description of Artificial Sequence: Synthetic oligonucleotide
  modified_base (6)..(6): a, c, u, g, unknown or other
gcuucngcugcggcaggca

SEQ ID NO: 3099595 - RNA, 19 nt, Artificial Sequence
  Description of Artificial Sequence: Synthetic oligonucleotide
gaccggccccgacgcgggc

SEQ ID NO: 3099596 - RNA, 19 nt, Artificial Sequence
  Description of Artificial Sequence: Synthetic oligonucleotide
gcucgaacucaggcgccgc

SEQ ID NO: 3099597 - RNA, 19 nt, Artificial Sequence
  Description of Artificial Sequence: Synthetic oligonucleotide
guguaggcggccaggccgu

SEQ ID NO: 3099598 - RNA, 19 nt, Artificial Sequence
  Description of Artificial Sequence: Synthetic oligonucleotide
  modified_base (12)..(12): a, c, u, g, unknown or other
cguagcgcuucngcugcgg

SEQ ID NO: 3099599 - RNA, 19 nt, Artificial Sequence
  Description of Artificial Sequence: Synthetic oligonucleotide
gggcucgaacucaggcgcc

SEQ ID NO: 3099600 - RNA, 19 nt, Artificial Sequence
  Description of Artificial Sequence: Synthetic oligonucleotide
  modified_base (8)..(8): a, c, u, g, unknown or other
gcgcuucngcugcggcagg

SEQ ID NO: 3099601 - RNA, 19 nt, Artificial Sequence
  Description of Artificial Sequence: Synthetic oligonucleotide
gcgggcgccauggagucga

SEQ ID NO: 3099602 - RNA, 19 nt, Artificial Sequence
  Description of Artificial Sequence: Synthetic oligonucleotide
guccacgcuggccgaagau

SEQ ID NO: 3099603 - RNA, 19 nt, Artificial Sequence
  Description of Artificial Sequence: Synthetic oligonucleotide
gggguggggcucgaacuca

SEQ ID NO: 3099604 - RNA, 19 nt, Artificial Sequence
  Description of Artificial Sequence: Synthetic oligonucleotide
cguacaccgggcugcccug

SEQ ID NO: 3099605 - RNA, 19 nt, Artificial Sequence
  Description of Artificial Sequence: Synthetic oligonucleotide
gcggcgcagcuguagucca

SEQ ID NO: 3099606 - RNA, 19 nt, Artificial Sequence
  Description of Artificial Sequence: Synthetic oligonucleotide
cgguccgugguggugguug

SEQ ID NO: 3099607 - RNA, 19 nt, Artificial Sequence
  Description of Artificial Sequence: Synthetic oligonucleotide
uguaggcggccaggccgua

SEQ ID NO: 3099608 - RNA, 19 nt, Artificial Sequence
  Description of Artificial Sequence: Synthetic oligonucleotide
guggugguugccagggauu

SEQ ID NO: 3099609 - RNA, 19 nt, Artificial Sequence
  Description of Artificial Sequence: Synthetic oligonucleotide
gggcgccauggagucgacg

SEQ ID NO: 3099610 - RNA, 19 nt, Artificial Sequence
  Description of Artificial Sequence: Synthetic oligonucleotide
cacccacguacaccgggcu

SEQ ID NO: 3099611 - RNA, 19 nt, Artificial Sequence
  Description of Artificial Sequence: Synthetic oligonucleotide
  modified_base (17)..(17): a, c, u, g, unknown or other
cgccgcguagcgcuucngc

SEQ ID NO: 3099612 - RNA, 19 nt, Artificial Sequence
  Description of Artificial Sequence: Synthetic oligonucleotide
gccauggagucgacgaagu

SEQ ID NO: 3099613 - RNA, 19 nt, Artificial Sequence
  Description of Artificial Sequence: Synthetic oligonucleotide
ggcggccaggccguacaug

SEQ ID NO: 3099614 - RNA, 19 nt, Artificial Sequence
  Description of Artificial Sequence: Synthetic oligonucleotide
ccacguacaccgggcugcc

SEQ ID NO: 3099615 - RNA, 19 nt, Artificial Sequence
  Description of Artificial Sequence: Synthetic oligonucleotide
cuggcgaagccgccgccgu

SEQ ID NO: 3099616 - RNA, 19 nt, Artificial Sequence
  Description of Artificial Sequence: Synthetic oligonucleotide
gggcugcccugcagguugg

SEQ ID NO: 3099617 - RNA, 19 nt, Artificial Sequence
  Description of Artificial Sequence: Synthetic oligonucleotide
gcgccguguaggcggccag

SEQ ID NO: 3099618 - RNA, 19 nt, Artificial Sequence
  Description of Artificial Sequence: Synthetic oligonucleotide
  modified_base (7)..(7): a, c, u, g, unknown or other
cgcuucngcugcggcaggc

SEQ ID NO: 3099619 - RNA, 19 nt, Artificial Sequence
  Description of Artificial Sequence: Synthetic oligonucleotide
  modified_base (13)..(13): a, c, u, g, unknown or other
gcguagcgcuucngcugcg

SEQ ID NO: 3099620 - RNA, 19 nt, Artificial Sequence
  Description of Artificial Sequence: Synthetic oligonucleotide
ccguugcucgccauggggu

SEQ ID NO: 3099621 - RNA, 19 nt, Artificial Sequence
  Description of Artificial Sequence: Synthetic oligonucleotide
ccugcagguuggcgcuggc

SEQ ID NO: 3099622 - RNA, 19 nt, Artificial Sequence
  Description of Artificial Sequence: Synthetic oligonucleotide
cgacgcgggcgccauggag

SEQ ID NO: 3099623 - RNA, 19 nt, Artificial Sequence
  Description of Artificial Sequence: Synthetic oligonucleotide
cugcggcaggcagcugcug

SEQ ID NO: 3099624 - RNA, 19 nt, Artificial Sequence
  Description of Artificial Sequence: Synthetic oligonucleotide
gcgccauggagucgacgaa

SEQ ID NO: 3099625 - RNA, 19 nt, Artificial Sequence
  Description of Artificial Sequence: Synthetic oligonucleotide
gcucgccaugggguggggc

SEQ ID NO: 3099626 - RNA, 19 nt, Artificial Sequence
  Description of Artificial Sequence: Synthetic oligonucleotide
  modified_base (19)..(19): a, c, u, g, unknown or other
ggcgccgcguagcgcuucn

SEQ ID NO: 3099627 - RNA, 19 nt, Artificial Sequence
  Description of Artificial Sequence: Synthetic oligonucleotide
gcgcggcgcagcuguaguc

SEQ ID NO: 3099628 - RNA, 19 nt, Artificial Sequence
  Description of Artificial Sequence: Synthetic oligonucleotide
ggcgccguguaggcggcca

SEQ ID NO: 3099629 - RNA, 19 nt, Artificial Sequence
  Description of Artificial Sequence: Synthetic oligonucleotide
cugcugagcggcgccgugu

SEQ ID NO: 3099630 - RNA, 19 nt, Artificial Sequence
  Description of Artificial Sequence: Synthetic oligonucleotide
cgccguugcucgccauggg

SEQ ID NO: 3099631 - RNA, 19 nt, Artificial Sequence
  Description of Artificial Sequence: Synthetic oligonucleotide
cacgguccguggugguggu

SEQ ID NO: 3099632 - RNA, 19 nt, Artificial Sequence
  Description of Artificial Sequence: Synthetic oligonucleotide
cgccaugggguggggcucg

SEQ ID NO: 3099633 - RNA, 19 nt, Artificial Sequence
  Description of Artificial Sequence: Synthetic oligonucleotide
cgaaguugccacccacgua

SEQ ID NO: 3099634 - RNA, 19 nt, Artificial Sequence
  Description of Artificial Sequence: Synthetic oligonucleotide
cgccguguaggcggccagg

SEQ ID NO: 3099635 - RNA, 19 nt, Artificial Sequence
  Description of Artificial Sequence: Synthetic oligonucleotide
gcugcggcaggcagcugcu

SEQ ID NO: 3099636 - RNA, 19 nt, Artificial Sequence
  Description of Artificial Sequence: Synthetic oligonucleotide
cgaacucaggcgccgcgua

SEQ ID NO: 3099637 - RNA, 19 nt, Artificial Sequence
  Description of Artificial Sequence: Synthetic oligonucleotide
acgguccgugguggugguu

SEQ ID NO: 3099638 - RNA, 19 nt, Artificial Sequence
  Description of Artificial Sequence: Synthetic oligonucleotide
gcggcgccguguaggcggc

SEQ ID NO: 3099639 - RNA, 19 nt, Artificial Sequence
  Description of Artificial Sequence: Synthetic oligonucleotide
  modified_base (2)..(2): a, c, u, g, unknown or other
cngcugcggcaggcagcug

SEQ ID NO: 3099640 - RNA, 19 nt, Artificial Sequence
  Description of Artificial Sequence: Synthetic oligonucleotide
cggcgcagcuguaguccac

SEQ ID NO: 3099641 - RNA, 19 nt, Artificial Sequence
  Description of Artificial Sequence: Synthetic oligonucleotide
cgcuggcgaagccgccgcc

SEQ ID NO: 3099642 - RNA, 19 nt, Artificial Sequence
  Description of Artificial Sequence: Synthetic oligonucleotide
cguacauguugggcugcga

SEQ ID NO: 3099643 - RNA, 19 nt, Artificial Sequence
  Description of Artificial Sequence: Synthetic oligonucleotide
  modified_base (18)..(18): a, c, u, g, unknown or other
gcgccgcguagcgcuucng

SEQ ID NO: 3099644 - RNA, 19 nt, Artificial Sequence
  Description of Artificial Sequence: Synthetic oligonucleotide
ccauggagucgacgaaguu

SEQ ID NO: 3099645 - RNA, 19 nt, Artificial Sequence
  Description of Artificial Sequence: Synthetic oligonucleotide
cgcagcuguaguccacgcu

SEQ ID NO: 3099646 - RNA, 19 nt, Artificial Sequence
  Description of Artificial Sequence: Synthetic oligonucleotide
ggccccgacgcgggcgcca

SEQ ID NO: 3099647 - RNA, 19 nt, Artificial Sequence
  Description of Artificial Sequence: Synthetic oligonucleotide
cgcgggcgccauggagucg

SEQ ID NO: 3099648 - RNA, 19 nt, Artificial Sequence
  Description of Artificial Sequence: Synthetic oligonucleotide
gccaugggguggggcucga

SEQ ID NO: 3099649 - RNA, 19 nt, Artificial Sequence
  Description of Artificial Sequence: Synthetic oligonucleotide
caggcgccgcguagcgcuu

SEQ ID NO: 3099650 - RNA, 19 nt, Artificial Sequence
  Description of Artificial Sequence: Synthetic oligonucleotide
ccgacgcgggcgccaugga

SEQ ID NO: 3099651 - RNA, 19 nt, Artificial Sequence
  Description of Artificial Sequence: Synthetic oligonucleotide
cgggcgccauggagucgac

SEQ ID NO: 3099652 - RNA, 19 nt, Artificial Sequence
  Description of Artificial Sequence: Synthetic oligonucleotide
ccgccgccguugcucgcca

SEQ ID NO: 3099653 - RNA, 19 nt, Artificial Sequence
  Description of Artificial Sequence: Synthetic oligonucleotide
ccaugggguggggcucgaa

SEQ ID NO: 3099654 - RNA, 19 nt, Artificial Sequence
  Description of Artificial Sequence: Synthetic oligonucleotide
cggcgccguguaggcggcc

SEQ ID NO: 3099655 - RNA, 19 nt, Artificial Sequence
  Description of Artificial Sequence: Synthetic oligonucleotide
cgaagccgccgccguugcu

SEQ ID NO: 3099656 - RNA, 19 nt, Artificial Sequence
  Description of Artificial Sequence: Synthetic oligonucleotide
gccccgacgcgggcgccau

SEQ ID NO: 3099657 - RNA, 19 nt, Artificial Sequence
  Description of Artificial Sequence: Synthetic oligonucleotide
cggccccgacgcgggcgcc

SEQ ID NO: 3099658 - RNA, 19 nt, Artificial Sequence
  Description of Artificial Sequence: Synthetic oligonucleotide
cggccaggccguacauguu

SEQ ID NO: 3099659 - RNA, 19 nt, Artificial Sequence
  Description of Artificial Sequence: Synthetic oligonucleotide
ccgggcugcccugcagguu

SEQ ID NO: 3099660 - RNA, 19 nt, Artificial Sequence
  Description of Artificial Sequence: Synthetic oligonucleotide
cgccgccguugcucgccau

SEQ ID NO: 3099661 - RNA, 19 nt, Artificial Sequence
  Description of Artificial Sequence: Synthetic oligonucleotide
  modified_base (1)..(1): a, c, u, g, unknown or other
ngcugcggcaggcagcugc

SEQ ID NO: 3099662 - RNA, 19 nt, Artificial Sequence
  Description of Artificial Sequence: Synthetic oligonucleotide
ucauugauuaaaaugugcc

SEQ ID NO: 3099663 - RNA, 19 nt, Artificial Sequence
  Description of Artificial Sequence: Synthetic oligonucleotide
uaaagauacucucugagga

SEQ ID NO: 3099664 - RNA, 19 nt, Artificial Sequence
  Description of Artificial Sequence: Synthetic oligonucleotide
aacauaaagauacucucug

SEQ ID NO: 3099665 - RNA, 19 nt, Artificial Sequence
  Description of Artificial Sequence: Synthetic oligonucleotide
ucugucauggccaagaaaa

SEQ ID NO: 3099666 - RNA, 19 nt, Artificial Sequence
  Description of Artificial Sequence: Synthetic oligonucleotide
guugauaugauccucugcc

SEQ ID NO: 3099667 - RNA, 19 nt, Artificial Sequence
  Description of Artificial Sequence: Synthetic oligonucleotide
uucuuauaaacauaaagau

SEQ ID NO: 3099668 - RNA, 19 nt, Artificial Sequence
  Description of Artificial Sequence: Synthetic oligonucleotide
auaaagauacucucugagg

SEQ ID NO: 3099669 - RNA, 19 nt, Artificial Sequence
  Description of Artificial Sequence: Synthetic oligonucleotide
uaaaaugugccugaaagca

SEQ ID NO: 3099670 - RNA, 19 nt, Artificial Sequence
  Description of Artificial Sequence: Synthetic oligonucleotide
acuguuaauguauguaagg

SEQ ID NO: 3099671 - RNA, 19 nt, Artificial Sequence
  Description of Artificial Sequence: Synthetic oligonucleotide
uaaacauaaagauacucuc

SEQ ID NO: 3099672 - RNA, 19 nt, Artificial Sequence
  Description of Artificial Sequence: Synthetic oligonucleotide
aauggugaaguugauauga

SEQ ID NO: 3099673 - RNA, 19 nt, Artificial Sequence
  Description of Artificial Sequence: Synthetic oligonucleotide
uucauugauuaaaaugugc

SEQ ID NO: 3099674 - RNA, 19 nt, Artificial Sequence
  Description of Artificial Sequence: Synthetic oligonucleotide
uuaaaaugugccugaaagc

SEQ ID NO: 3099675 - RNA, 19 nt, Artificial Sequence
  Description of Artificial Sequence: Synthetic oligonucleotide
caagaaaacccguaguugc

SEQ ID NO: 3099676 - RNA, 19 nt, Artificial Sequence
  Description of Artificial Sequence: Synthetic oligonucleotide
ucuuauaaacauaaagaua

SEQ ID NO: 3099677 - RNA, 19 nt, Artificial Sequence
  Description of Artificial Sequence: Synthetic oligonucleotide
agaguauaggacuggcgcc

SEQ ID NO: 3099678 - RNA, 19 nt, Artificial Sequence
  Description of Artificial Sequence: Synthetic oligonucleotide
ugugccugaaagcagacac

SEQ ID NO: 3099679 - RNA, 19 nt, Artificial Sequence
  Description of Artificial Sequence: Synthetic oligonucleotide
cauaaagauacucucugag

SEQ ID NO: 3099680 - RNA, 19 nt, Artificial Sequence
  Description of Artificial Sequence: Synthetic oligonucleotide
auugauuaaaaugugccug

SEQ ID NO: 3099681 - RNA, 19 nt, Artificial Sequence
  Description of Artificial Sequence: Synthetic oligonucleotide
uguuaauguauguaaggga

SEQ ID NO: 3099682 - RNA, 19 nt, Artificial Sequence
  Description of Artificial Sequence: Synthetic oligonucleotide
uuaauguauguaagggaag

SEQ ID NO: 3099683 - RNA, 19 nt, Artificial Sequence
  Description of Artificial Sequence: Synthetic oligonucleotide
uguauguaagggaagcugu

SEQ ID NO: 3099684 - RNA, 19 nt, Artificial Sequence
  Description of Artificial Sequence: Synthetic oligonucleotide
uuugcuuucauugauuaaa

SEQ ID NO: 3099685 - RNA, 19 nt, Artificial Sequence
  Description of Artificial Sequence: Synthetic oligonucleotide
ugauaugauccucugccag

SEQ ID NO: 3099686 - RNA, 19 nt, Artificial Sequence
  Description of Artificial Sequence: Synthetic oligonucleotide
uuucauugauuaaaaugug

SEQ ID NO: 3099687 - RNA, 19 nt, Artificial Sequence
  Description of Artificial Sequence: Synthetic oligonucleotide
uaaagggccgaucugguga

SEQ ID NO: 3099688 - RNA, 19 nt, Artificial Sequence
  Description of Artificial Sequence: Synthetic oligonucleotide
agacuguuugcuuucauug

SEQ ID NO: 3099689 - RNA, 19 nt, Artificial Sequence
  Description of Artificial Sequence: Synthetic oligonucleotide
ugugguaaagggccgaucu

SEQ ID NO: 3099690 - RNA, 19 nt, Artificial Sequence
  Description of Artificial Sequence: Synthetic oligonucleotide
aguugauaugauccucugc

SEQ ID NO: 3099691 - RNA, 19 nt, Artificial Sequence
  Description of Artificial Sequence: Synthetic oligonucleotide
auaaacauaaagauacucu

SEQ ID NO: 3099692 - RNA, 19 nt, Artificial Sequence
  Description of Artificial Sequence: Synthetic oligonucleotide
cagaguauaggacuggcgc

SEQ ID NO: 3099693 - RNA, 19 nt, Artificial Sequence
  Description of Artificial Sequence: Synthetic oligonucleotide
uaauguauguaagggaagc

SEQ ID NO: 3099694 - RNA, 19 nt, Artificial Sequence
  Description of Artificial Sequence: Synthetic oligonucleotide
cuguuaauguauguaaggg

SEQ ID NO: 3099695 - RNA, 19 nt, Artificial Sequence
  Description of Artificial Sequence: Synthetic oligonucleotide
uacucucugaggaaggccc

SEQ ID NO: 3099696 - RNA, 19 nt, Artificial Sequence
  Description of Artificial Sequence: Synthetic oligonucleotide
aagauacucucugaggaag

SEQ ID NO: 3099697 - RNA, 19 nt, Artificial Sequence
  Description of Artificial Sequence: Synthetic oligonucleotide
uugauuaaaaugugccuga

SEQ ID NO: 3099698 - RNA, 19 nt, Artificial Sequence
  Description of Artificial Sequence: Synthetic oligonucleotide
gcuuucauugauuaaaaug

SEQ ID NO: 3099699 - RNA, 19 nt, Artificial Sequence
  Description of Artificial Sequence: Synthetic oligonucleotide
ggugaaguugauaugaucc

SEQ ID NO: 3099700 - RNA, 19 nt, Artificial Sequence
  Description of Artificial Sequence: Synthetic oligonucleotide
ucagaguauaggacuggcg

SEQ ID NO: 3099701 - RNA, 19 nt, Artificial Sequence
  Description of Artificial Sequence: Synthetic oligonucleotide
ugauuuacauucuuauaaa

SEQ ID NO: 3099702 - RNA, 19 nt, Artificial Sequence
  Description of Artificial Sequence: Synthetic oligonucleotide
uucccuacucugcuggucg

SEQ ID NO: 3099703 - RNA, 19 nt, Artificial Sequence
  Description of Artificial Sequence: Synthetic oligonucleotide
aaagggccgaucuggugac

SEQ ID NO: 3099704 - RNA, 19 nt, Artificial Sequence
  Description of Artificial Sequence: Synthetic oligonucleotide
auuuacauucuuauaaaca

SEQ ID NO: 3099705 - RNA, 19 nt, Artificial Sequence
  Description of Artificial Sequence: Synthetic oligonucleotide
aacuguuaauguauguaag

SEQ ID NO: 3099706 - RNA, 19 nt, Artificial Sequence
  Description of Artificial Sequence: Synthetic oligonucleotide
ucauggccaagaaaacccg

SEQ ID NO: 3099707 - RNA, 19 nt, Artificial Sequence
  Description of Artificial Sequence: Synthetic oligonucleotide
uauguaagggaagcugugg

SEQ ID NO: 3099708 - RNA, 19 nt, Artificial Sequence
  Description of Artificial Sequence: Synthetic oligonucleotide
aaacauaaagauacucucu

SEQ ID NO: 3099709 - RNA, 19 nt, Artificial Sequence
  Description of Artificial Sequence: Synthetic oligonucleotide
gaacuguuaauguauguaa

SEQ ID NO: 3099710 - RNA, 19 nt, Artificial Sequence
  Description of Artificial Sequence: Synthetic oligonucleotide
ugguaaagggccgaucugg

SEQ ID NO: 3099711 - RNA, 19 nt, Artificial Sequence
  Description of Artificial Sequence: Synthetic oligonucleotide
aaagauacucucugaggaa

SEQ ID NO: 3099712 - RNA, 19 nt, Artificial Sequence
  Description of Artificial Sequence: Synthetic oligonucleotide
ugccugaaagcagacacgg

SEQ ID NO: 3099713 - RNA, 19 nt, Artificial Sequence
  Description of Artificial Sequence: Synthetic oligonucleotide
ugcugaacuguuaauguau

SEQ ID NO: 3099714 - RNA, 19 nt, Artificial Sequence
  Description of Artificial Sequence: Synthetic oligonucleotide
aaaaugugccugaaagcag

SEQ ID NO: 3099715 - RNA, 19 nt, Artificial Sequence
  Description of Artificial Sequence: Synthetic oligonucleotide
guuaauguauguaagggaa

SEQ ID NO: 3099716 - RNA, 19 nt, Artificial Sequence
  Description of Artificial Sequence: Synthetic oligonucleotide
aaguugauaugauccucug

SEQ ID NO: 3099717 - RNA, 19 nt, Artificial Sequence
  Description of Artificial Sequence: Synthetic oligonucleotide
aguugcugaacuguuaaug

SEQ ID NO: 3099718 - RNA, 19 nt, Artificial Sequence
  Description of Artificial Sequence: Synthetic oligonucleotide
uuacauucuuauaaacaua

SEQ ID NO: 3099719 - RNA, 19 nt, Artificial Sequence
  Description of Artificial Sequence: Synthetic oligonucleotide
uguuugcuuucauugauua

SEQ ID NO: 3099720 - RNA, 19 nt, Artificial Sequence
  Description of Artificial Sequence: Synthetic oligonucleotide
aaaugugccugaaagcaga

SEQ ID NO: 3099721 - RNA, 19 nt, Artificial Sequence
  Description of Artificial Sequence: Synthetic oligonucleotide
gucauggccaagaaaaccc

SEQ ID NO: 3099722 - RNA, 19 nt, Artificial Sequence
  Description of Artificial Sequence: Synthetic oligonucleotide
aauguauguaagggaagcu

SEQ ID NO: 3099723 - RNA, 19 nt, Artificial Sequence
  Description of Artificial Sequence: Synthetic oligonucleotide
ugucauggccaagaaaacc

SEQ ID NO: 3099724 - RNA, 19 nt, Artificial Sequence
  Description of Artificial Sequence: Synthetic oligonucleotide
aagcagacacggcauuguc

SEQ ID NO: 3099725 - RNA, 19 nt, Artificial Sequence
  Description of Artificial Sequence: Synthetic oligonucleotide
aacccguaguugcugaacu

SEQ ID NO: 3099726 - RNA, 19 nt, Artificial Sequence
  Description of Artificial Sequence: Synthetic oligonucleotide
ugaacuguuaauguaugua

SEQ ID NO: 3099727 - RNA, 19 nt, Artificial Sequence
  Description of Artificial Sequence: Synthetic oligonucleotide
ugaggaaggccccuugcug

SEQ ID NO: 3099728 - RNA, 19 nt, Artificial Sequence
  Description of Artificial Sequence: Synthetic oligonucleotide
uggccaagaaaacccguag

SEQ ID NO: 3099729 - RNA, 19 nt, Artificial Sequence
  Description of Artificial Sequence: Synthetic oligonucleotide
aaacccguaguugcugaac

SEQ ID NO: 3099730 - RNA, 19 nt, Artificial Sequence
  Description of Artificial Sequence: Synthetic oligonucleotide
ugccucagaguauaggacu

SEQ ID NO: 3099731 - RNA, 19 nt, Artificial Sequence
  Description of Artificial Sequence: Synthetic oligonucleotide
uaggacuggcgcccaaugg

SEQ ID NO: 3099732 - RNA, 19 nt, Artificial Sequence
  Description of Artificial Sequence: Synthetic oligonucleotide
acauaaagauacucucuga

SEQ ID NO: 3099733 - RNA, 19 nt, Artificial Sequence
  Description of Artificial Sequence: Synthetic oligonucleotide
gauaugauccucugccaga

SEQ ID NO: 3099734 - RNA, 19 nt, Artificial Sequence
  Description of Artificial Sequence: Synthetic oligonucleotide
ugcuggucgucugucaugg

SEQ ID NO: 3099735 - RNA, 19 nt, Artificial Sequence
  Description of Artificial Sequence: Synthetic oligonucleotide
uugauaugauccucugcca

SEQ ID NO: 3099736 - RNA, 19 nt, Artificial Sequence
  Description of Artificial Sequence: Synthetic oligonucleotide
auguauguaagggaagcug

SEQ ID NO: 3099737 - RNA, 19 nt, Artificial Sequence
  Description of Artificial Sequence: Synthetic oligonucleotide
uugcuuucauugauuaaaa

SEQ ID NO: 3099738 - RNA, 19 nt, Artificial Sequence
  Description of Artificial Sequence: Synthetic oligonucleotide
ugagcagcagacuguuugc

SEQ ID NO: 3099739 - RNA, 19 nt, Artificial Sequence
  Description of Artificial Sequence: Synthetic oligonucleotide
auacucucugaggaaggcc

SEQ ID NO: 3099740 - RNA, 19 nt, Artificial Sequence
  Description of Artificial Sequence: Synthetic oligonucleotide
uggucgucugucauggcca

SEQ ID NO: 3099741 - RNA, 19 nt, Artificial Sequence
  Description of Artificial Sequence: Synthetic oligonucleotide
aaugugccugaaagcagac

SEQ ID NO: 3099742 - RNA, 19 nt, Artificial Sequence
  Description of Artificial Sequence: Synthetic oligonucleotide
auguaagggaagcuguggu

SEQ ID NO: 3099743 - RNA, 19 nt, Artificial Sequence
  Description of Artificial Sequence: Synthetic oligonucleotide
agacacggcauuguccagc

SEQ ID NO: 3099744 - RNA, 19 nt, Artificial Sequence
  Description of Artificial Sequence: Synthetic oligonucleotide
auaugauccucugccagag

SEQ ID NO: 3099745 - RNA, 19 nt, Artificial Sequence
  Description of Artificial Sequence: Synthetic oligonucleotide
ugauccucugccagagacc

SEQ ID NO: 3099746 - RNA, 19 nt, Artificial Sequence
  Description of Artificial Sequence: Synthetic oligonucleotide
gaguauaggacuggcgccc

SEQ ID NO: 3099747 - RNA, 19 nt, Artificial Sequence
  Description of Artificial Sequence: Synthetic oligonucleotide
agcagacacggcauugucc

SEQ ID NO: 3099748 - RNA, 19 nt, Artificial Sequence
  Description of Artificial Sequence: Synthetic oligonucleotide
aaagcagacacggcauugu

SEQ ID NO: 3099749 - RNA, 19 nt, Artificial Sequence
  Description of Artificial Sequence: Synthetic oligonucleotide
cuggucgucugucauggcc

SEQ ID NO: 3099750 - RNA, 19 nt, Artificial Sequence
  Description of Artificial Sequence: Synthetic oligonucleotide
ugaaguugauaugauccuc

SEQ ID NO: 3099751 - RNA, 19 nt, Artificial Sequence
  Description of Artificial Sequence: Synthetic oligonucleotide
gauuaaaaugugccugaaa

SEQ ID NO: 3099752 - RNA, 19 nt, Artificial Sequence
  Description of Artificial Sequence: Synthetic oligonucleotide
gauacucucugaggaaggc

SEQ ID NO: 3099753 - RNA, 19 nt, Artificial Sequence
  Description of Artificial Sequence: Synthetic oligonucleotide
gaaagcagacacggcauug

SEQ ID NO: 3099754 - RNA, 19 nt, Artificial Sequence
  Description of Artificial Sequence: Synthetic oligonucleotide
gacuguuugcuuucauuga

SEQ ID NO: 3099755 - RNA, 19 nt, Artificial Sequence
  Description of Artificial Sequence: Synthetic oligonucleotide
uguaagggaagcuguggua

SEQ ID NO: 3099756 - RNA, 19 nt, Artificial Sequence
  Description of Artificial Sequence: Synthetic oligonucleotide
aagaaaacccguaguugcu

SEQ ID NO: 3099757 - RNA, 19 nt, Artificial Sequence
  Description of Artificial Sequence: Synthetic oligonucleotide
aggacuggcgcccaauggu

SEQ ID NO: 3099758 - RNA, 19 nt, Artificial Sequence
  Description of Artificial Sequence: Synthetic oligonucleotide
ucuggugacagcugauuua

SEQ ID NO: 3099759 - RNA, 19 nt, Artificial Sequence
  Description of Artificial Sequence: Synthetic oligonucleotide
uccucugccagagaccagc

SEQ ID NO: 3099760 - RNA, 19 nt, Artificial Sequence
  Description of Artificial Sequence: Synthetic oligonucleotide
gaaaacccguaguugcuga

SEQ ID NO: 3099761 - RNA, 19 nt, Artificial Sequence
  Description of Artificial Sequence: Synthetic oligonucleotide
guaguugcugaacuguuaa

SEQ ID NO: 3099762 - RNA, 19 nt, Artificial Sequence
  Description of Artificial Sequence: Synthetic oligonucleotide
gaggaaggccccuugcuga

SEQ ID NO: 3099763 - RNA, 19 nt, Artificial Sequence
  Description of Artificial Sequence: Synthetic oligonucleotide
uggugaaguugauaugauc

SEQ ID NO: 3099764 - RNA, 19 nt, Artificial Sequence
  Description of Artificial Sequence: Synthetic oligonucleotide
cuggugacagcugauuuac

SEQ ID NO: 3099765 - RNA, 19 nt, Artificial Sequence
  Description of Artificial Sequence: Synthetic oligonucleotide
agggaagcugugguaaagg

SEQ ID NO: 3099766 - RNA, 19 nt, Artificial Sequence
  Description of Artificial Sequence: Synthetic oligonucleotide
guugcugaacuguuaaugu

SEQ ID NO: 3099767 - RNA, 19 nt, Artificial Sequence
  Description of Artificial Sequence: Synthetic oligonucleotide
agauacucucugaggaagg

SEQ ID NO: 3099768 - RNA, 19 nt, Artificial Sequence
  Description of Artificial Sequence: Synthetic oligonucleotide
caauggugaaguugauaug

SEQ ID NO: 3099769 - RNA, 19 nt, Artificial Sequence
  Description of Artificial Sequence: Synthetic oligonucleotide
auaggacuggcgcccaaug

SEQ ID NO: 3099770 - RNA, 19 nt, Artificial Sequence
  Description of Artificial Sequence: Synthetic oligonucleotide
gggaagcugugguaaaggg

SEQ ID NO: 3099771 - RNA, 19 nt, Artificial Sequence
  Description of Artificial Sequence: Synthetic oligonucleotide
ucgucugucauggccaaga

SEQ ID NO: 3099772 - RNA, 19 nt, Artificial Sequence
  Description of Artificial Sequence: Synthetic oligonucleotide
uugcugaacuguuaaugua

SEQ ID NO: 3099773 - RNA, 19 nt, Artificial Sequence
  Description of Artificial Sequence: Synthetic oligonucleotide
aaaacccguaguugcugaa

SEQ ID NO: 3099774 - RNA, 19 nt, Artificial Sequence
  Description of Artificial Sequence: Synthetic oligonucleotide
agaaaacccguaguugcug

SEQ ID NO: 3099775 - RNA, 19 nt, Artificial Sequence
  Description of Artificial Sequence: Synthetic oligonucleotide
cugccucagaguauaggac

SEQ ID NO: 3099776 - RNA, 19 nt, Artificial Sequence
  Description of Artificial Sequence: Synthetic oligonucleotide
cauugauuaaaaugugccu

SEQ ID NO: 3099777 - RNA, 19 nt, Artificial Sequence
  Description of Artificial Sequence: Synthetic oligonucleotide
ugaaagcagacacggcauu

SEQ ID NO: 3099778 - RNA, 19 nt, Artificial Sequence
  Description of Artificial Sequence: Synthetic oligonucleotide
cucagaguauaggacuggc

SEQ ID NO: 3099779 - RNA, 19 nt, Artificial Sequence
  Description of Artificial Sequence: Synthetic oligonucleotide
gaaguugauaugauccucu

SEQ ID NO: 3099780 - RNA, 19 nt, Artificial Sequence
  Description of Artificial Sequence: Synthetic oligonucleotide
guauguaagggaagcugug

SEQ ID NO: 3099781 - RNA, 19 nt, Artificial Sequence
  Description of Artificial Sequence: Synthetic oligonucleotide
ugauuaaaaugugccugaa

SEQ ID NO: 3099782 - RNA, 19 nt, Artificial Sequence
  Description of Artificial Sequence: Synthetic oligonucleotide
guaagggaagcugugguaa

SEQ ID NO: 3099783 - RNA, 19 nt, Artificial Sequence
  Description of Artificial Sequence: Synthetic oligonucleotide
guaaagggccgaucuggug

SEQ ID NO: 3099784 - RNA, 19 nt, Artificial Sequence
  Description of Artificial Sequence: Synthetic oligonucleotide
gcagacacggcauugucca

SEQ ID NO: 3099785 - RNA, 19 nt, Artificial Sequence
  Description of Artificial Sequence: Synthetic oligonucleotide
acagcugauuuacauucuu

SEQ ID NO: 3099786 - RNA, 19 nt, Artificial Sequence
  Description of Artificial Sequence: Synthetic oligonucleotide
uacucugcuggucgucugu

SEQ ID NO: 3099787 - RNA, 19 nt, Artificial Sequence
  Description of Artificial Sequence: Synthetic oligonucleotide
gaaggccccuugcugagca

SEQ ID NO: 3099788 - RNA, 19 nt, Artificial Sequence
  Description of Artificial Sequence: Synthetic oligonucleotide
aagcugugguaaagggccg

SEQ ID NO: 3099789 - RNA, 19 nt, Artificial Sequence
  Description of Artificial Sequence: Synthetic oligonucleotide
gcugccucagaguauagga

SEQ ID NO: 3099790 - RNA, 19 nt, Artificial Sequence
  Description of Artificial Sequence: Synthetic oligonucleotide
aucuggugacagcugauuu

SEQ ID NO: 3099791 - RNA, 19 nt, Artificial Sequence
  Description of Artificial Sequence: Synthetic oligonucleotide
aggaaggccccuugcugag

SEQ ID NO: 3099792 - RNA, 19 nt, Artificial Sequence
  Description of Artificial Sequence: Synthetic oligonucleotide
acucucugaggaaggcccc

SEQ ID NO: 3099793 - RNA, 19 nt, Artificial Sequence
  Description of Artificial Sequence: Synthetic oligonucleotide
uaugauccucugccagaga

SEQ ID NO: 3099794 - RNA, 19 nt, Artificial Sequence
  Description of Artificial Sequence: Synthetic oligonucleotide
gugguaaagggccgaucug

SEQ ID NO: 3099795 - RNA, 19 nt, Artificial Sequence
  Description of Artificial Sequence: Synthetic oligonucleotide
uuuucccuacucugcuggu

SEQ ID NO: 3099796 - RNA, 19 nt, Artificial Sequence
  Description of Artificial Sequence: Synthetic oligonucleotide
gugaaguugauaugauccu

SEQ ID NO: 3099797 - RNA, 19 nt, Artificial Sequence
  Description of Artificial Sequence: Synthetic oligonucleotide
aggccccuugcugagcagc

SEQ ID NO: 3099798 - RNA, 19 nt, Artificial Sequence
  Description of Artificial Sequence: Synthetic oligonucleotide
gugccugaaagcagacacg

SEQ ID NO: 3099799 - RNA, 19 nt, Artificial Sequence
  Description of Artificial Sequence: Synthetic oligonucleotide
acccguaguugcugaacug

SEQ ID NO: 3099800 - RNA, 19 nt, Artificial Sequence
  Description of Artificial Sequence: Synthetic oligonucleotide
uaguugcugaacuguuaau

SEQ ID NO: 3099801 - RNA, 19 nt, Artificial Sequence
  Description of Artificial Sequence: Synthetic oligonucleotide
ccaagaaaacccguaguug

SEQ ID NO: 3099802 - RNA, 19 nt, Artificial Sequence
  Description of Artificial Sequence: Synthetic oligonucleotide
ccaauggugaaguugauau

SEQ ID NO: 3099803 - RNA, 19 nt, Artificial Sequence
  Description of Artificial Sequence: Synthetic oligonucleotide
uggugacagcugauuuaca

SEQ ID NO: 3099804 - RNA, 19 nt, Artificial Sequence
  Description of Artificial Sequence: Synthetic oligonucleotide
uauaggacuggcgcccaau

SEQ ID NO: 3099805 - RNA, 19 nt, Artificial Sequence
  Description of Artificial Sequence: Synthetic oligonucleotide
agcagcagacuguuugcuu

SEQ ID NO: 3099806 - RNA, 19 nt, Artificial Sequence
  Description of Artificial Sequence: Synthetic oligonucleotide
gcugaacuguuaauguaug

SEQ ID NO: 3099807 - RNA, 19 nt, Artificial Sequence
  Description of Artificial Sequence: Synthetic oligonucleotide
uuucccuacucugcugguc

SEQ ID NO: 3099808 - RNA, 19 nt, Artificial Sequence
  Description of Artificial Sequence: Synthetic oligonucleotide
uccagcugccucagaguau

SEQ ID NO: 3099809 - RNA, 19 nt, Artificial Sequence
  Description of Artificial Sequence: Synthetic oligonucleotide
cagcagacuguuugcuuuc

SEQ ID NO: 3099810 - RNA, 19 nt, Artificial Sequence
  Description of Artificial Sequence: Synthetic oligonucleotide
agggccgaucuggugacag

SEQ ID NO: 3099811 - RNA, 19 nt, Artificial Sequence
  Description of Artificial Sequence: Synthetic oligonucleotide
ggcauuguccagcugccuc

SEQ ID NO: 3099812 - RNA, 19 nt, Artificial Sequence
  Description of Artificial Sequence: Synthetic oligonucleotide
cuacucugcuggucgucug

SEQ ID NO: 3099813 - RNA, 19 nt, Artificial Sequence
  Description of Artificial Sequence: Synthetic oligonucleotide
guccagcugccucagagua

SEQ ID NO: 3099814 - RNA, 19 nt, Artificial Sequence
  Description of Artificial Sequence: Synthetic oligonucleotide
cauuguccagcugccucag

SEQ ID NO: 3099815 - RNA, 19 nt, Artificial Sequence
  Description of Artificial Sequence: Synthetic oligonucleotide
aguauaggacuggcgccca

SEQ ID NO: 3099816 - RNA, 19 nt, Artificial Sequence
  Description of Artificial Sequence: Synthetic oligonucleotide
gacacggcauuguccagcu

SEQ ID NO: 3099817 - RNA, 19 nt, Artificial Sequence
  Description of Artificial Sequence: Synthetic oligonucleotide
gcugauuuacauucuuaua

SEQ ID NO: 3099818 - RNA, 19 nt, Artificial Sequence
  Description of Artificial Sequence: Synthetic oligonucleotide
acuggcgcccaauggugaa

SEQ ID NO: 3099819 - RNA, 19 nt, Artificial Sequence
  Description of Artificial Sequence: Synthetic oligonucleotide
gcauuguccagcugccuca

SEQ ID NO: 3099820 - RNA, 19 nt, Artificial Sequence
  Description of Artificial Sequence: Synthetic oligonucleotide
uggcgcccaauggugaagu

SEQ ID NO: 3099821 - RNA, 19 nt, Artificial Sequence
  Description of Artificial Sequence: Synthetic oligonucleotide
cugaacuguuaauguaugu

SEQ ID NO: 3099822 - RNA, 19 nt, Artificial Sequence
  Description of Artificial Sequence: Synthetic oligonucleotide
gucugucauggccaagaaa

SEQ ID NO: 3099823 - RNA, 19 nt, Artificial Sequence
  Description of Artificial Sequence: Synthetic oligonucleotide
cagcugauuuacauucuua

SEQ ID NO: 3099824 - RNA, 19 nt, Artificial Sequence
  Description of Artificial Sequence: Synthetic oligonucleotide
auggugaaguugauaugau

SEQ ID NO: 3099825 - RNA, 19 nt, Artificial Sequence
  Description of Artificial Sequence: Synthetic oligonucleotide
ucccuacucugcuggucgu

SEQ ID NO: 3099826 - RNA, 19 nt, Artificial Sequence
  Description of Artificial Sequence: Synthetic oligonucleotide
cagacacggcauuguccag

SEQ ID NO: 3099827 - RNA, 19 nt, Artificial Sequence
  Description of Artificial Sequence: Synthetic oligonucleotide
auggccaagaaaacccgua

SEQ ID NO: 3099828 - RNA, 19 nt, Artificial Sequence
  Description of Artificial Sequence: Synthetic oligonucleotide
gccucagaguauaggacug

SEQ ID NO: 3099829 - RNA, 19 nt, Artificial Sequence
  Description of Artificial Sequence: Synthetic oligonucleotide
agcugugguaaagggccga

SEQ ID NO: 3099830 - RNA, 19 nt, Artificial Sequence
  Description of Artificial Sequence: Synthetic oligonucleotide
auuguccagcugccucaga

SEQ ID NO: 3099831 - RNA, 19 nt, Artificial Sequence
  Description of Artificial Sequence: Synthetic oligonucleotide
gacuggcgcccaaugguga

SEQ ID NO: 3099832 - RNA, 19 nt, Artificial Sequence
  Description of Artificial Sequence: Synthetic oligonucleotide
ggacuggcgcccaauggug

SEQ ID NO: 3099833 - RNA, 19 nt, Artificial Sequence
  Description of Artificial Sequence: Synthetic oligonucleotide
gccaagaaaacccguaguu

SEQ ID NO: 3099834 - RNA, 19 nt, Artificial Sequence
  Description of Artificial Sequence: Synthetic oligonucleotide
ccucagaguauaggacugg

SEQ ID NO: 3099835 - RNA, 19 nt, Artificial Sequence
  Description of Artificial Sequence: Synthetic oligonucleotide
cauggccaagaaaacccgu

SEQ ID NO: 3099836 - RNA, 19 nt, Artificial Sequence
  Description of Artificial Sequence: Synthetic oligonucleotide
cugugguaaagggccgauc

SEQ ID NO: 3099837 - RNA, 19 nt, Artificial Sequence
  Description of Artificial Sequence: Synthetic oligonucleotide
cuggcgcccaauggugaag

SEQ ID NO: 3099838 - RNA, 19 nt, Artificial Sequence
  Description of Artificial Sequence: Synthetic oligonucleotide
cccuugcugagcagcagac

SEQ ID NO: 3099839 - RNA, 19 nt, Artificial Sequence
  Description of Artificial Sequence: Synthetic oligonucleotide
cagacuguuugcuuucauu

SEQ ID NO: 3099840 - RNA, 19 nt, Artificial Sequence
  Description of Artificial Sequence: Synthetic oligonucleotide
ucucugaggaaggccccuu

SEQ ID NO: 3099841 - RNA, 19 nt, Artificial Sequence
  Description of Artificial Sequence: Synthetic oligonucleotide
cugaggaaggccccuugcu

SEQ ID NO: 3099842 - RNA, 19 nt, Artificial Sequence
  Description of Artificial Sequence: Synthetic oligonucleotide
gaucuggugacagcugauu

SEQ ID NO: 3099843 - RNA, 19 nt, Artificial Sequence
  Description of Artificial Sequence: Synthetic oligonucleotide
gcgcccaauggugaaguug

SEQ ID NO: 3099844 - RNA, 19 nt, Artificial Sequence
  Description of Artificial Sequence: Synthetic oligonucleotide
cagcugccucagaguauag

SEQ ID NO: 3099845 - RNA, 19 nt, Artificial Sequence
  Description of Artificial Sequence: Synthetic oligonucleotide
cuguuugcuuucauugauu

SEQ ID NO: 3099846 - RNA, 19 nt, Artificial Sequence
  Description of Artificial Sequence: Synthetic oligonucleotide
acacggcauuguccagcug

SEQ ID NO: 3099847 - RNA, 19 nt, Artificial Sequence
  Description of Artificial Sequence: Synthetic oligonucleotide
ggccaagaaaacccguagu

SEQ ID NO: 3099848 - RNA, 19 nt, Artificial Sequence
  Description of Artificial Sequence: Synthetic oligonucleotide
gagcagcagacuguuugcu

SEQ ID NO: 3099849 - RNA, 19 nt, Artificial Sequence
  Description of Artificial Sequence: Synthetic oligonucleotide
gcagcagacuguuugcuuu

SEQ ID NO: 3099850 - RNA, 19 nt, Artificial Sequence
  Description of Artificial Sequence: Synthetic oligonucleotide
aagggccgaucuggugaca

SEQ ID NO: 3099851 - RNA, 19 nt, Artificial Sequence
  Description of Artificial Sequence: Synthetic oligonucleotide
ccgaucuggugacagcuga

SEQ ID NO: 3099852 - RNA, 19 nt, Artificial Sequence
  Description of Artificial Sequence: Synthetic oligonucleotide
gucgucugucauggccaag

SEQ ID NO: 3099853 - RNA, 19 nt, Artificial Sequence
  Description of Artificial Sequence: Synthetic oligonucleotide
guauaggacuggcgcccaa

SEQ ID NO: 3099854 - RNA, 19 nt, Artificial Sequence
  Description of Artificial Sequence: Synthetic oligonucleotide
gggccgaucuggugacagc

SEQ ID NO: 3099855 - RNA, 19 nt, Artificial Sequence
  Description of Artificial Sequence: Synthetic oligonucleotide
gguaaagggccgaucuggu

SEQ ID NO: 3099856 - RNA, 19 nt, Artificial Sequence
  Description of Artificial Sequence: Synthetic oligonucleotide
gccugaaagcagacacggc

SEQ ID NO: 3099857 - RNA, 19 nt, Artificial Sequence
  Description of Artificial Sequence: Synthetic oligonucleotide
ggucgucugucauggccaa

SEQ ID NO: 3099858 - RNA, 19 nt, Artificial Sequence
  Description of Artificial Sequence: Synthetic oligonucleotide
auccucugccagagaccag

SEQ ID NO: 3099859 - RNA, 19 nt, Artificial Sequence
  Description of Artificial Sequence: Synthetic oligonucleotide
ggaaggccccuugcugagc

SEQ ID NO: 3099860 - RNA, 19 nt, Artificial Sequence
  Description of Artificial Sequence: Synthetic oligonucleotide
ggccgaucuggugacagcu

SEQ ID NO: 3099861 - RNA, 19 nt, Artificial Sequence
  Description of Artificial Sequence: Synthetic oligonucleotide
gccgaucuggugacagcug

SEQ ID NO: 3099862 - RNA, 19 nt, Artificial Sequence
  Description of Artificial Sequence: Synthetic oligonucleotide
gcuggucgucugucauggc

SEQ ID NO: 3099863 - RNA, 19 nt, Artificial Sequence
  Description of Artificial Sequence: Synthetic oligonucleotide
ccagcugccucagaguaua

SEQ ID NO: 3099864 - RNA, 19 nt, Artificial Sequence
  Description of Artificial Sequence: Synthetic oligonucleotide
cguaguugcugaacuguua

SEQ ID NO: 3099865 - RNA, 19 nt, Artificial Sequence
  Description of Artificial Sequence: Synthetic oligonucleotide
ccccuugcugagcagcaga

SEQ ID NO: 3099866 - RNA, 19 nt, Artificial Sequence
  Description of Artificial Sequence: Synthetic oligonucleotide
cucucugaggaaggccccu

SEQ ID NO: 3099867 - RNA, 19 nt, Artificial Sequence
  Description of Artificial Sequence: Synthetic oligonucleotide
cccguaguugcugaacugu

SEQ ID NO: 3099868 - RNA, 19 nt, Artificial Sequence
  Description of Artificial Sequence: Synthetic oligonucleotide
cccaauggugaaguugaua

SEQ ID NO: 3099869 - RNA, 19 nt, Artificial Sequence
  Description of Artificial Sequence: Synthetic oligonucleotide
gcagacuguuugcuuucau

SEQ ID NO: 3099870 - RNA, 19 nt, Artificial Sequence
  Description of Artificial Sequence: Synthetic oligonucleotide
cccuacucugcuggucguc

SEQ ID NO: 3099871 - RNA, 19 nt, Artificial Sequence
  Description of Artificial Sequence: Synthetic oligonucleotide
ccuacucugcuggucgucu

SEQ ID NO: 3099872 - RNA, 19 nt, Artificial Sequence
  Description of Artificial Sequence: Synthetic oligonucleotide
ccguaguugcugaacuguu

SEQ ID NO: 3099873 - RNA, 19 nt, Artificial Sequence
  Description of Artificial Sequence: Synthetic oligonucleotide
gcugugguaaagggccgau

SEQ ID NO: 3099874 - RNA, 19 nt, Artificial Sequence
  Description of Artificial Sequence: Synthetic oligonucleotide
cgucugucauggccaagaa

SEQ ID NO: 3099875 - RNA, 19 nt, Artificial Sequence
  Description of Artificial Sequence: Synthetic oligonucleotide
ccuugcugagcagcagacu

SEQ ID NO: 3099876 - RNA, 19 nt, Artificial Sequence
  Description of Artificial Sequence: Synthetic oligonucleotide
ggcgcccaauggugaaguu

SEQ ID NO: 3099877 - RNA, 19 nt, Artificial Sequence
  Description of Artificial Sequence: Synthetic oligonucleotide
gcccaauggugaaguugau

SEQ ID NO: 3099878 - RNA, 19 nt, Artificial Sequence
  Description of Artificial Sequence: Synthetic oligonucleotide
cggcauuguccagcugccu

SEQ ID NO: 3099879 - RNA, 19 nt, Artificial Sequence
  Description of Artificial Sequence: Synthetic oligonucleotide
aaaacagcaacagggaggc

SEQ ID NO: 3099880 - RNA, 19 nt, Artificial Sequence
  Description of Artificial Sequence: Synthetic oligonucleotide
uuccagagugcuuagcagg

SEQ ID NO: 3099881 - RNA, 19 nt, Artificial Sequence
  Description of Artificial Sequence: Synthetic oligonucleotide
cuuuccaggcuguugaggc

SEQ ID NO: 3099882 - RNA, 19 nt, Artificial Sequence
  Description of Artificial Sequence: Synthetic oligonucleotide
aagcuuuccaggcuguuga

SEQ ID NO: 3099883 - RNA, 19 nt, Artificial Sequence
  Description of Artificial Sequence: Synthetic oligonucleotide
cagagucugacgaagcucc

SEQ ID NO: 3099884 - RNA, 19 nt, Artificial Sequence
  Description of Artificial Sequence: Synthetic oligonucleotide
aagaugcugagugacagca

SEQ ID NO: 3099885 - RNA, 19 nt, Artificial Sequence
  Description of Artificial Sequence: Synthetic oligonucleotide
aacagcaacagggaggccu

SEQ ID NO: 3099886 - RNA, 19 nt, Artificial Sequence
  Description of Artificial Sequence: Synthetic oligonucleotide
aacagggaggccuucugug

SEQ ID NO: 3099887 - RNA, 19 nt, Artificial Sequence
  Description of Artificial Sequence: Synthetic oligonucleotide
agcaggagcauguucuggg

SEQ ID NO: 3099888 - RNA, 19 nt, Artificial Sequence
  Description of Artificial Sequence: Synthetic oligonucleotide
ucuagccgcuggaagaugc

SEQ ID NO: 3099889 - RNA, 19 nt, Artificial Sequence
  Description of Artificial Sequence: Synthetic oligonucleotide
agugacagcagagucugac

SEQ ID NO: 3099890 - RNA, 19 nt, Artificial Sequence
  Description of Artificial Sequence: Synthetic oligonucleotide
ugagugacagcagagucug

SEQ ID NO: 3099891 - RNA, 19 nt, Artificial Sequence
  Description of Artificial Sequence: Synthetic oligonucleotide
agucugacgaagcucccgg

SEQ ID NO: 3099892 - RNA, 19 nt, Artificial Sequence
  Description of Artificial Sequence: Synthetic oligonucleotide
ugcaggagacacagcaggg

SEQ ID NO: 3099893 - RNA, 19 nt, Artificial Sequence
  Description of Artificial Sequence: Synthetic oligonucleotide
agcagggccccaucuagcc

SEQ ID NO: 3099894 - RNA, 19 nt, Artificial Sequence
  Description of Artificial Sequence: Synthetic oligonucleotide
ucuggacuucauuacaaaa

SEQ ID NO: 3099895 - RNA, 19 nt, Artificial Sequence
  Description of Artificial Sequence: Synthetic oligonucleotide
uggacuggacucuugggca

SEQ ID NO: 3099896 - RNA, 19 nt, Artificial Sequence
  Description of Artificial Sequence: Synthetic oligonucleotide
cugcaggagacacagcagg

SEQ ID NO: 3099897 - RNA, 19 nt, Artificial Sequence
  Description of Artificial Sequence: Synthetic oligonucleotide
gaugcugagugacagcaga

SEQ ID NO: 3099898 - RNA, 19 nt, Artificial Sequence
  Description of Artificial Sequence: Synthetic oligonucleotide
uggggagagucccaggccc

SEQ ID NO: 3099899 - RNA, 19 nt, Artificial Sequence
  Description of Artificial Sequence: Synthetic oligonucleotide
uguggacuggacucuuggg

SEQ ID NO: 3099900 - RNA, 19 nt, Artificial Sequence
  Description of Artificial Sequence: Synthetic oligonucleotide
aguggucuggacuucauua

SEQ ID NO: 3099901 - RNA, 19 nt, Artificial Sequence
  Description of Artificial Sequence: Synthetic oligonucleotide
aguucaguggucuggacuu

SEQ ID NO: 3099902 - RNA, 19 nt, Artificial Sequence
  Description of Artificial Sequence: Synthetic oligonucleotide
uggacucuugggcaggggc

SEQ ID NO: 3099903 - RNA, 19 nt, Artificial Sequence
  Description of Artificial Sequence: Synthetic oligonucleotide
uccagagugcuuagcagga

SEQ ID NO: 3099904 - RNA, 19 nt, Artificial Sequence
  Description of Artificial Sequence: Synthetic oligonucleotide
acagggaggccuucugugg

SEQ ID NO: 3099905 - RNA, 19 nt, Artificial Sequence
  Description of Artificial Sequence: Synthetic oligonucleotide
guggacuggacucuugggc

SEQ ID NO: 3099906 - RNA, 19 nt, Artificial Sequence
  Description of Artificial Sequence: Synthetic oligonucleotide
ucugacgaagcucccggga

SEQ ID NO: 3099907 - RNA, 19 nt, Artificial Sequence
  Description of Artificial Sequence: Synthetic oligonucleotide
cuuccagagugcuuagcag

SEQ ID NO: 3099908 - RNA, 19 nt, Artificial Sequence
  Description of Artificial Sequence: Synthetic oligonucleotide
acagcagggccccaucuag

SEQ ID NO: 3099909 - RNA, 19 nt, Artificial Sequence
  Description of Artificial Sequence: Synthetic oligonucleotide
cuuagcaggagcauguucu

SEQ ID NO: 3099910 - RNA, 19 nt, Artificial Sequence
  Description of Artificial Sequence: Synthetic oligonucleotide
uggucuggacuucauuaca

SEQ ID NO: 3099911 - RNA, 19 nt, Artificial Sequence
  Description of Artificial Sequence: Synthetic oligonucleotide
cauguucugggcuggggag

SEQ ID NO: 3099912 - RNA, 19 nt, Artificial Sequence
  Description of Artificial Sequence: Synthetic oligonucleotide
gugacagcagagucugacg

SEQ ID NO: 3099913 - RNA, 19 nt, Artificial Sequence
  Description of Artificial Sequence: Synthetic oligonucleotide
uuagcaggagcauguucug

SEQ ID NO: 3099914 - RNA, 19 nt, Artificial Sequence
  Description of Artificial Sequence: Synthetic oligonucleotide
gaagaugcugagugacagc

SEQ ID NO: 3099915 - RNA, 19 nt, Artificial Sequence
  Description of Artificial Sequence: Synthetic oligonucleotide
uggugggcaguucaguggu

SEQ ID NO: 3099916 - RNA, 19 nt, Artificial Sequence
  Description of Artificial Sequence: Synthetic oligonucleotide
uggaagaugcugagugaca

SEQ ID NO: 3099917 - RNA, 19 nt, Artificial Sequence
  Description of Artificial Sequence: Synthetic oligonucleotide
acagcagagucugacgaag

SEQ ID NO: 3099918 - RNA, 19 nt, Artificial Sequence
  Description of Artificial Sequence: Synthetic oligonucleotide
cagagugcuuagcaggagc

SEQ ID NO: 3099919 - RNA, 19 nt, Artificial Sequence
  Description of Artificial Sequence: Synthetic oligonucleotide
cuguggacuggacucuugg

SEQ ID NO: 3099920 - RNA, 19 nt, Artificial Sequence
  Description of Artificial Sequence: Synthetic oligonucleotide
ugacgaagcucccgggaca

SEQ ID NO: 3099921 - RNA, 19 nt, Artificial Sequence
  Description of Artificial Sequence: Synthetic oligonucleotide
agugcuuagcaggagcaug

SEQ ID NO: 3099922 - RNA, 19 nt, Artificial Sequence
  Description of Artificial Sequence: Synthetic oligonucleotide
ggaagaugcugagugacag

SEQ ID NO: 3099923 - RNA, 19 nt, Artificial Sequence
  Description of Artificial Sequence: Synthetic oligonucleotide
agccaagcuuuccaggcug

SEQ ID NO: 3099924 - RNA, 19 nt, Artificial Sequence
  Description of Artificial Sequence: Synthetic oligonucleotide
cuggaagaugcugagugac

SEQ ID NO: 3099925 - RNA, 19 nt, Artificial Sequence
  Description of Artificial Sequence: Synthetic oligonucleotide
agcagagucugacgaagcu

SEQ ID NO: 3099926 - RNA, 19 nt, Artificial Sequence
  Description of Artificial Sequence: Synthetic oligonucleotide
ggagccaagcuuuccaggc

SEQ ID NO: 3099927 - RNA, 19 nt, Artificial Sequence
  Description of Artificial Sequence: Synthetic oligonucleotide
uucguccuccuccuuccag

SEQ ID NO: 3099928 - RNA, 19 nt, Artificial Sequence
  Description of Artificial Sequence: Synthetic oligonucleotide
aggagacacagcagggccc

SEQ ID NO: 3099929 - RNA, 19 nt, Artificial Sequence
  Description of Artificial Sequence: Synthetic oligonucleotide
guggucuggacuucauuac

SEQ ID NO: 3099930 - RNA, 19 nt, Artificial Sequence
  Description of Artificial Sequence: Synthetic oligonucleotide
uguucugggcuggggagag

SEQ ID NO: 3099931 - RNA, 19 nt, Artificial Sequence
  Description of Artificial Sequence: Synthetic oligonucleotide
gagucugacgaagcucccg

SEQ ID NO: 3099932 - RNA, 19 nt, Artificial Sequence
  Description of Artificial Sequence: Synthetic oligonucleotide
gagucccaggcccggagag

SEQ ID NO: 3099933 - RNA, 19 nt, Artificial Sequence
  Description of Artificial Sequence: Synthetic oligonucleotide
ucguccuccuccuuccaga

SEQ ID NO: 3099934 - RNA, 19 nt, Artificial Sequence
  Description of Artificial Sequence: Synthetic oligonucleotide
uagcaggagcauguucugg

SEQ ID NO: 3099935 - RNA, 19 nt, Artificial Sequence
  Description of Artificial Sequence: Synthetic oligonucleotide
ucuguggacuggacucuug

SEQ ID NO: 3099936 - RNA, 19 nt, Artificial Sequence
  Description of Artificial Sequence: Synthetic oligonucleotide
agggaggccuucuguggac

SEQ ID NO: 3099937 - RNA, 19 nt, Artificial Sequence
  Description of Artificial Sequence: Synthetic oligonucleotide
cugacgaagcucccgggac

SEQ ID NO: 3099938 - RNA, 19 nt, Artificial Sequence
  Description of Artificial Sequence: Synthetic oligonucleotide
ccuucuguggacuggacuc

SEQ ID NO: 3099939 - RNA, 19 nt, Artificial Sequence
  Description of Artificial Sequence: Synthetic oligonucleotide
uuuccaggcuguugaggcu

SEQ ID NO: 3099940 - RNA, 19 nt, Artificial Sequence
  Description of Artificial Sequence: Synthetic oligonucleotide
gacgaagcucccgggacag

SEQ ID NO: 3099941 - RNA, 19 nt, Artificial Sequence
  Description of Artificial Sequence: Synthetic oligonucleotide
aggggagccaagcuuucca

SEQ ID NO: 3099942 - RNA, 19 nt, Artificial Sequence
  Description of Artificial Sequence: Synthetic oligonucleotide
gcugcugcaggagacacag

SEQ ID NO: 3099943 - RNA, 19 nt, Artificial Sequence
  Description of Artificial Sequence: Synthetic oligonucleotide
agagugcuuagcaggagca

SEQ ID NO: 3099944 - RNA, 19 nt, Artificial Sequence
  Description of Artificial Sequence: Synthetic oligonucleotide
ugcugagugacagcagagu

SEQ ID NO: 3099945 - RNA, 19 nt, Artificial Sequence
  Description of Artificial Sequence: Synthetic oligonucleotide
gagagucccaggcccggag

SEQ ID NO: 3099946 - RNA, 19 nt, Artificial Sequence
  Description of Artificial Sequence: Synthetic oligonucleotide
aaacagcaacagggaggcc

SEQ ID NO: 3099947 - RNA, 19 nt, Artificial Sequence
  Description of Artificial Sequence: Synthetic oligonucleotide
cagcagagucugacgaagc

SEQ ID NO: 3099948 - RNA, 19 nt, Artificial Sequence
  Description of Artificial Sequence: Synthetic oligonucleotide
gucugacgaagcucccggg

SEQ ID NO: 3099949 - RNA, 19 nt, Artificial Sequence
  Description of Artificial Sequence: Synthetic oligonucleotide
agcuuuccaggcuguugag

SEQ ID NO: 3099950 - RNA, 19 nt, Artificial Sequence
  Description of Artificial Sequence: Synthetic oligonucleotide
gcugagugacagcagaguc

SEQ ID NO: 3099951 - RNA, 19 nt, Artificial Sequence
  Description of Artificial Sequence: Synthetic oligonucleotide
caagcuuuccaggcuguug

SEQ ID NO: 3099952 - RNA, 19 nt, Artificial Sequence
  Description of Artificial Sequence: Synthetic oligonucleotide
agagucugacgaagcuccc

SEQ ID NO: 3099953 - RNA, 19 nt, Artificial Sequence
  Description of Artificial Sequence: Synthetic oligonucleotide
cuggggagagucccaggcc

SEQ ID NO: 3099954 - RNA, 19 nt, Artificial Sequence
  Description of Artificial Sequence: Synthetic oligonucleotide
gggagccaagcuuuccagg

SEQ ID NO: 3099955 - RNA, 19 nt, Artificial Sequence
  Description of Artificial Sequence: Synthetic oligonucleotide
gcuggggagagucccaggc

SEQ ID NO: 3099956 - RNA, 19 nt, Artificial Sequence
  Description of Artificial Sequence: Synthetic oligonucleotide
agcauguucugggcugggg

SEQ ID NO: 3099957 - RNA, 19 nt, Artificial Sequence
  Description of Artificial Sequence: Synthetic oligonucleotide
gacagcagagucugacgaa

SEQ ID NO: 3099958 - RNA, 19 nt, Artificial Sequence
  Description of Artificial Sequence: Synthetic oligonucleotide
ugggcaguucaguggucug

SEQ ID NO: 3099959 - RNA, 19 nt, Artificial Sequence
  Description of Artificial Sequence: Synthetic oligonucleotide
acacagcagggccccaucu

SEQ ID NO: 3099960 - RNA, 19 nt, Artificial Sequence
  Description of Artificial Sequence: Synthetic oligonucleotide
ggacaggccccacugcucc

SEQ ID NO: 3099961 - RNA, 19 nt, Artificial Sequence
  Description of Artificial Sequence: Synthetic oligonucleotide
gcuggugggcaguucagug

SEQ ID NO: 3099962 - RNA, 19 nt, Artificial Sequence
  Description of Artificial Sequence: Synthetic oligonucleotide
cugggcuggggagaguccc

SEQ ID NO: 3099963 - RNA, 19 nt, Artificial Sequence
  Description of Artificial Sequence: Synthetic oligonucleotide
acuggacucuugggcaggg

SEQ ID NO: 3099964 - RNA, 19 nt, Artificial Sequence
  Description of Artificial Sequence: Synthetic oligonucleotide
augcugagugacagcagag

SEQ ID NO: 3099965 - RNA, 19 nt, Artificial Sequence
  Description of Artificial Sequence: Synthetic oligonucleotide
aggggcugcugcaggagac

SEQ ID NO: 3099966 - RNA, 19 nt, Artificial Sequence
  Description of Artificial Sequence: Synthetic oligonucleotide
ucaguggucuggacuucau

SEQ ID NO: 3099967 - RNA, 19 nt, Artificial Sequence
  Description of Artificial Sequence: Synthetic oligonucleotide
agagucccaggcccggaga

SEQ ID NO: 3099968 - RNA, 19 nt, Artificial Sequence
  Description of Artificial Sequence: Synthetic oligonucleotide
gaagcucccgggacaggcc

SEQ ID NO: 3099969 - RNA, 19 nt, Artificial Sequence
  Description of Artificial Sequence: Synthetic oligonucleotide
cugagugacagcagagucu

SEQ ID NO: 3099970 - RNA, 19 nt, Artificial Sequence
  Description of Artificial Sequence: Synthetic oligonucleotide
gucuggacuucauuacaaa

SEQ ID NO: 3099971 - RNA, 19 nt, Artificial Sequence
  Description of Artificial Sequence: Synthetic oligonucleotide
cgcuggaagaugcugagug

SEQ ID NO: 3099972 - RNA, 19 nt, Artificial Sequence
  Description of Artificial Sequence: Synthetic oligonucleotide
uugaggcugcuggugggca

SEQ ID NO: 3099973 - RNA, 19 nt, Artificial Sequence
  Description of Artificial Sequence: Synthetic oligonucleotide
ggggagccaagcuuuccag

SEQ ID NO: 3099974 - RNA, 19 nt, Artificial Sequence
  Description of Artificial Sequence: Synthetic oligonucleotide
uagccgcuggaagaugcug

SEQ ID NO: 3099975 - RNA, 19 nt, Artificial Sequence
  Description of Artificial Sequence: Synthetic oligonucleotide
agaugcugagugacagcag

SEQ ID NO: 3099976 - RNA, 19 nt, Artificial Sequence
  Description of Artificial Sequence: Synthetic oligonucleotide
gacacagcagggccccauc

SEQ ID NO: 3099977 - RNA, 19 nt, Artificial Sequence
  Description of Artificial Sequence: Synthetic oligonucleotide
ggagcauguucugggcugg

SEQ ID NO: 3099978 - RNA, 19 nt, Artificial Sequence
  Description of Artificial Sequence: Synthetic oligonucleotide
gcuuuccaggcuguugagg

SEQ ID NO: 3099979 - RNA, 19 nt, Artificial Sequence
  Description of Artificial Sequence: Synthetic oligonucleotide
cugcuggugggcaguucag

SEQ ID NO: 3099980 - RNA, 19 nt, Artificial Sequence
  Description of Artificial Sequence: Synthetic oligonucleotide
aggcccggagaggggagcc

SEQ ID NO: 3099981 - RNA, 19 nt, Artificial Sequence
  Description of Artificial Sequence: Synthetic oligonucleotide
ggagacacagcagggcccc

SEQ ID NO: 3099982 - RNA, 19 nt, Artificial Sequence
  Description of Artificial Sequence: Synthetic oligonucleotide
ugggcuggggagaguccca

SEQ ID NO: 3099983 - RNA, 19 nt, Artificial Sequence
  Description of Artificial Sequence: Synthetic oligonucleotide
uccuuccagagugcuuagc

SEQ ID NO: 3099984 - RNA, 19 nt, Artificial Sequence
  Description of Artificial Sequence: Synthetic oligonucleotide
ggccccaucuagccgcugg

SEQ ID NO: 3099985 - RNA, 19 nt, Artificial Sequence
  Description of Artificial Sequence: Synthetic oligonucleotide
gaggggagccaagcuuucc

SEQ ID NO: 3099986 - RNA, 19 nt, Artificial Sequence
  Description of Artificial Sequence: Synthetic oligonucleotide
gcaggagcauguucugggc

SEQ ID NO: 3099987 - RNA, 19 nt, Artificial Sequence
  Description of Artificial Sequence: Synthetic oligonucleotide
agaggggagccaagcuuuc

SEQ ID NO: 3099988 - RNA, 19 nt, Artificial Sequence
  Description of Artificial Sequence: Synthetic oligonucleotide
ucccaggcccggagagggg

SEQ ID NO: 3099989 - RNA, 19 nt, Artificial Sequence
  Description of Artificial Sequence: Synthetic oligonucleotide
gcugcuggugggcaguuca

SEQ ID NO: 3099990 - RNA, 19 nt, Artificial Sequence
  Description of Artificial Sequence: Synthetic oligonucleotide
auguucugggcuggggaga

SEQ ID NO: 3099991 - RNA, 19 nt, Artificial Sequence
  Description of Artificial Sequence: Synthetic oligonucleotide
agcaacagggaggccuucu

SEQ ID NO: 3099992 - RNA, 19 nt, Artificial Sequence
  Description of Artificial Sequence: Synthetic oligonucleotide
ccuuccagagugcuuagca

SEQ ID NO: 3099993 - RNA, 19 nt, Artificial Sequence
  Description of Artificial Sequence: Synthetic oligonucleotide
gggcaguucaguggucugg

SEQ ID NO: 3099994 - RNA, 19 nt, Artificial Sequence
  Description of Artificial Sequence: Synthetic oligonucleotide
gagcauguucugggcuggg

SEQ ID NO: 3099995 - RNA, 19 nt, Artificial Sequence
  Description of Artificial Sequence: Synthetic oligonucleotide
cccaucuagccgcuggaag

SEQ ID NO: 3099996 - RNA, 19 nt, Artificial Sequence
  Description of Artificial Sequence: Synthetic oligonucleotide
agccgcuggaagaugcuga

SEQ ID NO: 3099997 - RNA, 19 nt, Artificial Sequence
  Description of Artificial Sequence: Synthetic oligonucleotide
caguucaguggucuggacu

SEQ ID NO: 3099998 - RNA, 19 nt, Artificial Sequence
  Description of Artificial Sequence: Synthetic oligonucleotide
gcuuagcaggagcauguuc

SEQ ID NO: 3099999 - RNA, 19 nt, Artificial Sequence
  Description of Artificial Sequence: Synthetic oligonucleotide
gccgcuggaagaugcugag

SEQ ID NO: 3100000 - RNA, 19 nt, Artificial Sequence
  Description of Artificial Sequence: Synthetic oligonucleotide
gcaacagggaggccuucug

SEQ ID NO: 3100001 - RNA, 19 nt, Artificial Sequence
  Description of Artificial Sequence: Synthetic oligonucleotide
ucuugggcaggggcugcug

SEQ ID NO: 3100002 - RNA, 19 nt, Artificial Sequence
  Description of Artificial Sequence: Synthetic oligonucleotide
gcuguugaggcugcuggug

SEQ ID NO: 3100003 - RNA, 19 nt, Artificial Sequence
  Description of Artificial Sequence: Synthetic oligonucleotide
uccuccuuccagagugcuu

SEQ ID NO: 3100004 - RNA, 19 nt, Artificial Sequence
  Description of Artificial Sequence: Synthetic oligonucleotide
cagggaggccuucugugga

SEQ ID NO: 3100005 - RNA, 19 nt, Artificial Sequence
  Description of Artificial Sequence: Synthetic oligonucleotide
gagaggggagccaagcuuu

SEQ ID NO: 3100006 - RNA, 19 nt, Artificial Sequence
  Description of Artificial Sequence: Synthetic oligonucleotide
gagccaagcuuuccaggcu

SEQ ID NO: 3100007 - RNA, 19 nt, Artificial Sequence
  Description of Artificial Sequence: Synthetic oligonucleotide
aggccuucuguggacugga

SEQ ID NO: 3100008 - RNA, 19 nt, Artificial Sequence
  Description of Artificial Sequence: Synthetic oligonucleotide
agcucccgggacaggcccc

SEQ ID NO: 3100009 - RNA, 19 nt, Artificial Sequence
  Description of Artificial Sequence: Synthetic oligonucleotide
aucuagccgcuggaagaug

SEQ ID NO: 3100010 - RNA, 19 nt, Artificial Sequence
  Description of Artificial Sequence: Synthetic oligonucleotide
ggucuggacuucauuacaa

SEQ ID NO: 3100011 - RNA, 19 nt, Artificial Sequence
  Description of Artificial Sequence: Synthetic oligonucleotide
gugcuuagcaggagcaugu

SEQ ID NO: 3100012 - RNA, 19 nt, Artificial Sequence
  Description of Artificial Sequence: Synthetic oligonucleotide
ucccgggacaggccccacu

SEQ ID NO: 3100013 - RNA, 19 nt, Artificial Sequence
  Description of Artificial Sequence: Synthetic oligonucleotide
acagcaacagggaggccuu

SEQ ID NO: 3100014 - RNA, 19 nt, Artificial Sequence
  Description of Artificial Sequence: Synthetic oligonucleotide
uucuguggacuggacucuu

SEQ ID NO: 3100015 - RNA, 19 nt, Artificial Sequence
  Description of Artificial Sequence: Synthetic oligonucleotide
ggaggccuucuguggacug

SEQ ID NO: 3100016 - RNA, 19 nt, Artificial Sequence
  Description of Artificial Sequence: Synthetic oligonucleotide
caggcuguugaggcugcug

SEQ ID NO: 3100017 - RNA, 19 nt, Artificial Sequence
  Description of Artificial Sequence: Synthetic oligonucleotide
acaggccccacugcuccug

SEQ ID NO: 3100018 - RNA, 19 nt, Artificial Sequence
  Description of Artificial Sequence: Synthetic oligonucleotide
cuggacucuugggcagggg

SEQ ID NO: 3100019 - RNA, 19 nt, Artificial Sequence
  Description of Artificial Sequence: Synthetic oligonucleotide
gccccacugcuccuguucc

SEQ ID NO: 3100020 - RNA, 19 nt, Artificial Sequence
  Description of Artificial Sequence: Synthetic oligonucleotide
ugcuuagcaggagcauguu

SEQ ID NO: 3100021 - RNA, 19 nt, Artificial Sequence
  Description of Artificial Sequence: Synthetic oligonucleotide
ggggagagucccaggcccg

SEQ ID NO: 3100022 - RNA, 19 nt, Artificial Sequence
  Description of Artificial Sequence: Synthetic oligonucleotide
cugcugcaggagacacagc

SEQ ID NO: 3100023 - RNA, 19 nt, Artificial Sequence
  Description of Artificial Sequence: Synthetic oligonucleotide
ggcaguucaguggucugga

SEQ ID NO: 3100024 - RNA, 19 nt, Artificial Sequence
  Description of Artificial Sequence: Synthetic oligonucleotide
agacacagcagggccccau

SEQ ID NO: 3100025 - RNA, 19 nt, Artificial Sequence
  Description of Artificial Sequence: Synthetic oligonucleotide
ggcuggggagagucccagg

SEQ ID NO: 3100026 - RNA, 19 nt, Artificial Sequence
  Description of Artificial Sequence: Synthetic oligonucleotide
caacagggaggccuucugu

SEQ ID NO: 3100027 - RNA, 19 nt, Artificial Sequence
  Description of Artificial Sequence: Synthetic oligonucleotide
cgaagcucccgggacaggc

SEQ ID NO: 3100028 - RNA, 19 nt, Artificial Sequence
  Description of Artificial Sequence: Synthetic oligonucleotide
caggagcauguucugggcu

SEQ ID NO: 3100029 - RNA, 19 nt, Artificial Sequence
  Description of Artificial Sequence: Synthetic oligonucleotide
gggagagucccaggcccgg

SEQ ID NO: 3100030 - RNA, 19 nt, Artificial Sequence
  Description of Artificial Sequence: Synthetic oligonucleotide
gugggcaguucaguggucu

SEQ ID NO: 3100031 - RNA, 19 nt, Artificial Sequence
  Description of Artificial Sequence: Synthetic oligonucleotide
ggagaggggagccaagcuu

SEQ ID NO: 3100032 - RNA, 19 nt, Artificial Sequence
  Description of Artificial Sequence: Synthetic oligonucleotide
caggggcugcugcaggaga

SEQ ID NO: 3100033 - RNA, 19 nt, Artificial Sequence
  Description of Artificial Sequence: Synthetic oligonucleotide
gcaguucaguggucuggac

SEQ ID NO: 3100034 - RNA, 19 nt, Artificial Sequence
  Description of Artificial Sequence: Synthetic oligonucleotide
cacagcagggccccaucua

SEQ ID NO: 3100035 - RNA, 19 nt, Artificial Sequence
  Description of Artificial Sequence: Synthetic oligonucleotide
cccgggacaggccccacug

SEQ ID NO: 3100036 - RNA, 19 nt, Artificial Sequence
  Description of Artificial Sequence: Synthetic oligonucleotide
caggcccggagaggggagc

SEQ ID NO: 3100037 - RNA, 19 nt, Artificial Sequence
  Description of Artificial Sequence: Synthetic oligonucleotide
cccacugcuccuguuccag

SEQ ID NO: 3100038 - RNA, 19 nt, Artificial Sequence
  Description of Artificial Sequence: Synthetic oligonucleotide
cuucuguggacuggacucu

SEQ ID NO: 3100039 - RNA, 19 nt, Artificial Sequence
  Description of Artificial Sequence: Synthetic oligonucleotide
ccuccuccuuccagagugc

SEQ ID NO: 3100040 - RNA, 19 nt, Artificial Sequence
  Description of Artificial Sequence: Synthetic oligonucleotide
cguccuccuccuuccagag

SEQ ID NO: 3100041 - RNA, 19 nt, Artificial Sequence
  Description of Artificial Sequence: Synthetic oligonucleotide
cuagccgcuggaagaugcu

SEQ ID NO: 3100042 - RNA, 19 nt, Artificial Sequence
  Description of Artificial Sequence: Synthetic oligonucleotide
ccggagaggggagccaagc

SEQ ID NO: 3100043 - RNA, 19 nt, Artificial Sequence
  Description of Artificial Sequence: Synthetic oligonucleotide
caucuagccgcuggaagau

SEQ ID NO: 3100044 - RNA, 19 nt, Artificial Sequence
  Description of Artificial Sequence: Synthetic oligonucleotide
gagugcuuagcaggagcau

SEQ ID NO: 3100045 - RNA, 19 nt, Artificial Sequence
  Description of Artificial Sequence: Synthetic oligonucleotide
ccagagugcuuagcaggag

SEQ ID NO: 3100046 - RNA, 19 nt, Artificial Sequence
  Description of Artificial Sequence: Synthetic oligonucleotide
gcaggggcugcugcaggag

SEQ ID NO: 3100047 - RNA, 19 nt, Artificial Sequence
  Description of Artificial Sequence: Synthetic oligonucleotide
gggcuggggagagucccag

SEQ ID NO: 3100048 - RNA, 19 nt, Artificial Sequence
  Description of Artificial Sequence: Synthetic oligonucleotide
gagugacagcagagucuga

SEQ ID NO: 3100049 - RNA, 19 nt, Artificial Sequence
  Description of Artificial Sequence: Synthetic oligonucleotide
gggcugcugcaggagacac

SEQ ID NO: 3100050 - RNA, 19 nt, Artificial Sequence
  Description of Artificial Sequence: Synthetic oligonucleotide
ggacucuugggcaggggcu

SEQ ID NO: 3100051 - RNA, 19 nt, Artificial Sequence
  Description of Artificial Sequence: Synthetic oligonucleotide
gacaggccccacugcuccu

SEQ ID NO: 3100052 - RNA, 19 nt, Artificial Sequence
  Description of Artificial Sequence: Synthetic oligonucleotide
cccuuccuguucguccucc

SEQ ID NO: 3100053 - RNA, 19 nt, Artificial Sequence
  Description of Artificial Sequence: Synthetic oligonucleotide
gggacaggccccacugcuc

SEQ ID NO: 3100054 - RNA, 19 nt, Artificial Sequence
  Description of Artificial Sequence: Synthetic oligonucleotide
gagacacagcagggcccca

SEQ ID NO: 3100055 - RNA, 19 nt, Artificial Sequence
  Description of Artificial Sequence: Synthetic oligonucleotide
ggcuguugaggcugcuggu

SEQ ID NO: 3100056 - RNA, 19 nt, Artificial Sequence
  Description of Artificial Sequence: Synthetic oligonucleotide
gccccaucuagccgcugga

SEQ ID NO: 3100057 - RNA, 19 nt, Artificial Sequence
  Description of Artificial Sequence: Synthetic oligonucleotide
ccgggacaggccccacugc

SEQ ID NO: 3100058 - RNA, 19 nt, Artificial Sequence
  Description of Artificial Sequence: Synthetic oligonucleotide
cagcaacagggaggccuuc

SEQ ID NO: 3100059 - RNA, 19 nt, Artificial Sequence
  Description of Artificial Sequence: Synthetic oligonucleotide
cccggagaggggagccaag

SEQ ID NO: 3100060 - RNA, 19 nt, Artificial Sequence
  Description of Artificial Sequence: Synthetic oligonucleotide
guccuccuccuuccagagu

SEQ ID NO: 3100061 - RNA, 19 nt, Artificial Sequence
  Description of Artificial Sequence: Synthetic oligonucleotide
ggggcugcugcaggagaca

SEQ ID NO: 3100062 - RNA, 19 nt, Artificial Sequence
  Description of Artificial Sequence: Synthetic oligonucleotide
caguggucuggacuucauu

SEQ ID NO: 3100063 - RNA, 19 nt, Artificial Sequence
  Description of Artificial Sequence: Synthetic oligonucleotide
aggccccacugcuccuguu

SEQ ID NO: 3100064 - RNA, 19 nt, Artificial Sequence
  Description of Artificial Sequence: Synthetic oligonucleotide
cuccuccuuccagagugcu

SEQ ID NO: 3100065 - RNA, 19 nt, Artificial Sequence
  Description of Artificial Sequence: Synthetic oligonucleotide
ggcugcugcaggagacaca

SEQ ID NO: 3100066 - RNA, 19 nt, Artificial Sequence
  Description of Artificial Sequence: Synthetic oligonucleotide
ggagagucccaggcccgga

SEQ ID NO: 3100067 - RNA, 19 nt, Artificial Sequence
  Description of Artificial Sequence: Synthetic oligonucleotide
ggugggcaguucagugguc

SEQ ID NO: 3100068 - RNA, 19 nt, Artificial Sequence
  Description of Artificial Sequence: Synthetic oligonucleotide
ggccuucuguggacuggac

SEQ ID NO: 3100069 - RNA, 19 nt, Artificial Sequence
  Description of Artificial Sequence: Synthetic oligonucleotide
gggaggccuucuguggacu

SEQ ID NO: 3100070 - RNA, 19 nt, Artificial Sequence
  Description of Artificial Sequence: Synthetic oligonucleotide
cccaggcccggagagggga

SEQ ID NO: 3100071 - RNA, 19 nt, Artificial Sequence
  Description of Artificial Sequence: Synthetic oligonucleotide
cucccgggacaggccccac

SEQ ID NO: 3100072 - RNA, 19 nt, Artificial Sequence
  Description of Artificial Sequence: Synthetic oligonucleotide
gcucccgggacaggcccca

SEQ ID NO: 3100073 - RNA, 19 nt, Artificial Sequence
  Description of Artificial Sequence: Synthetic oligonucleotide
ccccacugcuccuguucca

SEQ ID NO: 3100074 - RNA, 19 nt, Artificial Sequence
  Description of Artificial Sequence: Synthetic oligonucleotide
gccaagcuuuccaggcugu

SEQ ID NO: 3100075 - RNA, 19 nt, Artificial Sequence
  Description of Artificial Sequence: Synthetic oligonucleotide
caggccccacugcuccugu

SEQ ID NO: 3100076 - RNA, 19 nt, Artificial Sequence
  Description of Artificial Sequence: Synthetic oligonucleotide
gcccggagaggggagccaa

SEQ ID NO: 3100077 - RNA, 19 nt, Artificial Sequence
  Description of Artificial Sequence: Synthetic oligonucleotide
ggcugcuggugggcaguuc

SEQ ID NO: 3100078 - RNA, 19 nt, Artificial Sequence
  Description of Artificial Sequence: Synthetic oligonucleotide
ggcccggagaggggagcca

SEQ ID NO: 3100079 - RNA, 19 nt, Artificial Sequence
  Description of Artificial Sequence: Synthetic oligonucleotide
cgggacaggccccacugcu

SEQ ID NO: 3100080 - RNA, 19 nt, Artificial Sequence
  Description of Artificial Sequence: Synthetic oligonucleotide
ccccaucuagccgcuggaa

SEQ ID NO: 3100081 - RNA, 19 nt, Artificial Sequence
  Description of Artificial Sequence: Synthetic oligonucleotide
gggccccaucuagccgcug

SEQ ID NO: 3100082 - RNA, 19 nt, Artificial Sequence
  Description of Artificial Sequence: Synthetic oligonucleotide
ccaagcuuuccaggcuguu

SEQ ID NO: 3100083 - RNA, 19 nt, Artificial Sequence
  Description of Artificial Sequence: Synthetic oligonucleotide
ccgcuggaagaugcugagu

SEQ ID NO: 3100084 - RNA, 19 nt, Artificial Sequence
  Description of Artificial Sequence: Synthetic oligonucleotide
ccaggcuguugaggcugcu

SEQ ID NO: 3100085 - RNA, 19 nt, Artificial Sequence
  Description of Artificial Sequence: Synthetic oligonucleotide
uucauuuacaccuugacug

SEQ ID NO: 3100086 - RNA, 19 nt, Artificial Sequence
  Description of Artificial Sequence: Synthetic oligonucleotide
uugcugacaacacugacag

SEQ ID NO: 3100087 - RNA, 19 nt, Artificial Sequence
  Description of Artificial Sequence: Synthetic oligonucleotide
aaggaagcaggcuuguuug

SEQ ID NO: 3100088 - RNA, 19 nt, Artificial Sequence
  Description of Artificial Sequence: Synthetic oligonucleotide
uuguuugcugacaacacug

SEQ ID NO: 3100089 - RNA, 19 nt, Artificial Sequence
  Description of Artificial Sequence: Synthetic oligonucleotide
aucugcaauggccaggcgc

SEQ ID NO: 3100090 - RNA, 19 nt, Artificial Sequence
  Description of Artificial Sequence: Synthetic oligonucleotide
uuugcugacaacacugaca

SEQ ID NO: 3100091 - RNA, 19 nt, Artificial Sequence
  Description of Artificial Sequence: Synthetic oligonucleotide
ugugguguuguucauuuac

SEQ ID NO: 3100092 - RNA, 19 nt, Artificial Sequence
  Description of Artificial Sequence: Synthetic oligonucleotide
uguucauuuacaccuugac

SEQ ID NO: 3100093 - RNA, 19 nt, Artificial Sequence
  Description of Artificial Sequence: Synthetic oligonucleotide
ucauuuacaccuugacugc

SEQ ID NO: 3100094 - RNA, 19 nt, Artificial Sequence
  Description of Artificial Sequence: Synthetic oligonucleotide
augccggucaaacccaggc

SEQ ID NO: 3100095 - RNA, 19 nt, Artificial Sequence
  Description of Artificial Sequence: Synthetic oligonucleotide
ugcugugagcacaugccgg

SEQ ID NO: 3100096 - RNA, 19 nt, Artificial Sequence
  Description of Artificial Sequence: Synthetic oligonucleotide
ugcucaucugcaauggcca

SEQ ID NO: 3100097 - RNA, 19 nt, Artificial Sequence
  Description of Artificial Sequence: Synthetic oligonucleotide
acugcugugagcacaugcc

SEQ ID NO: 3100098 - RNA, 19 nt, Artificial Sequence
  Description of Artificial Sequence: Synthetic oligonucleotide
agcacaugccggucaaacc

SEQ ID NO: 3100099 - RNA, 19 nt, Artificial Sequence
  Description of Artificial Sequence: Synthetic oligonucleotide
acagacagggcacucuguc

SEQ ID NO: 3100100 - RNA, 19 nt, Artificial Sequence
  Description of Artificial Sequence: Synthetic oligonucleotide
cacuccagcugucagaggc

SEQ ID NO: 3100101 - RNA, 19 nt, Artificial Sequence
  Description of Artificial Sequence: Synthetic oligonucleotide
guguuguucauuuacaccu

SEQ ID NO: 3100102 - RNA, 19 nt, Artificial Sequence
  Description of Artificial Sequence: Synthetic oligonucleotide
gugauugugguguuguuca

SEQ ID NO: 3100103 - RNA, 19 nt, Artificial Sequence
  Description of Artificial Sequence: Synthetic oligonucleotide
gacaacacugacagcagag

SEQ ID NO: 3100104 - RNA, 19 nt, Artificial Sequence
  Description of Artificial Sequence: Synthetic oligonucleotide
uuuacaccuugacugcugu

SEQ ID NO: 3100105 - RNA, 19 nt, Artificial Sequence
  Description of Artificial Sequence: Synthetic oligonucleotide
uaccacuuucuucugcuca

SEQ ID NO: 3100106 - RNA, 19 nt, Artificial Sequence
  Description of Artificial Sequence: Synthetic oligonucleotide
cugcucaucugcaauggcc

SEQ ID NO: 3100107 - RNA, 19 nt, Artificial Sequence
  Description of Artificial Sequence: Synthetic oligonucleotide
ucaaacccaggccagggaa

SEQ ID NO: 3100108 - RNA, 19 nt, Artificial Sequence
  Description of Artificial Sequence: Synthetic oligonucleotide
uguuugcugacaacacuga

SEQ ID NO: 3100109 - RNA, 19 nt, Artificial Sequence
  Description of Artificial Sequence: Synthetic oligonucleotide
ucuucuguccauaccacuu

SEQ ID NO: 3100110 - RNA, 19 nt, Artificial Sequence
  Description of Artificial Sequence: Synthetic oligonucleotide
ucagaggcuaggcugcugu

SEQ ID NO: 3100111 - RNA, 19 nt, Artificial Sequence
  Description of Artificial Sequence: Synthetic oligonucleotide
uacaccuugacugcuguga

SEQ ID NO: 3100112 - RNA, 19 nt, Artificial Sequence
  Description of Artificial Sequence: Synthetic oligonucleotide
gacugcugugagcacaugc

SEQ ID NO: 3100113 - RNA, 19 nt, Artificial Sequence
  Description of Artificial Sequence: Synthetic oligonucleotide
ugcuguacagacagggcac

SEQ ID NO: 3100114 - RNA, 19 nt, Artificial Sequence
  Description of Artificial Sequence: Synthetic oligonucleotide
ugguguuguucauuuacac

SEQ ID NO: 3100115 - RNA, 19 nt, Artificial Sequence
  Description of Artificial Sequence: Synthetic oligonucleotide
uuguucauuuacaccuuga

SEQ ID NO: 3100116 - RNA, 19 nt, Artificial Sequence
  Description of Artificial Sequence: Synthetic oligonucleotide
acaguccccagccaggucu

SEQ ID NO: 3100117 - RNA, 19 nt, Artificial Sequence
  Description of Artificial Sequence: Synthetic oligonucleotide
gaguggaggucacaguccc

SEQ ID NO: 3100118 - RNA, 19 nt, Artificial Sequence
  Description of Artificial Sequence: Synthetic oligonucleotide
uucugcucaucugcaaugg

SEQ ID NO: 3100119 - RNA, 19 nt, Artificial Sequence
  Description of Artificial Sequence: Synthetic oligonucleotide
ugugugauugugguguugu

SEQ ID NO: 3100120 - RNA, 19 nt, Artificial Sequence
  Description of Artificial Sequence: Synthetic oligonucleotide
ucaucugcaauggccaggc

SEQ ID NO: 3100121 - RNA, 19 nt, Artificial Sequence
  Description of Artificial Sequence: Synthetic oligonucleotide
aggaagcaggcuuguuugc

SEQ ID NO: 3100122 - RNA, 19 nt, Artificial Sequence
  Description of Artificial Sequence: Synthetic oligonucleotide
ucuucugcucaucugcaau

SEQ ID NO: 3100123 - RNA, 19 nt, Artificial Sequence
  Description of Artificial Sequence: Synthetic oligonucleotide
agacagggcacucugucca

SEQ ID NO: 3100124 - RNA, 19 nt, Artificial Sequence
  Description of Artificial Sequence: Synthetic oligonucleotide
uguccauaccacuuucuuc

SEQ ID NO: 3100125 - RNA, 19 nt, Artificial Sequence
  Description of Artificial Sequence: Synthetic oligonucleotide
agaguggaggucacagucc

SEQ ID NO: 3100126 - RNA, 19 nt, Artificial Sequence
  Description of Artificial Sequence: Synthetic oligonucleotide
cagcugagcagacuguccg

SEQ ID NO: 3100127 - RNA, 19 nt, Artificial Sequence
  Description of Artificial Sequence: Synthetic oligonucleotide
gguguuguucauuuacacc

SEQ ID NO: 3100128 - RNA, 19 nt, Artificial Sequence
  Description of Artificial Sequence: Synthetic oligonucleotide
agacuguccgggucacucc

SEQ ID NO: 3100129 - RNA, 19 nt, Artificial Sequence
  Description of Artificial Sequence: Synthetic oligonucleotide
gaagcaggcuuguuugcug

SEQ ID NO: 3100130 - RNA, 19 nt, Artificial Sequence
  Description of Artificial Sequence: Synthetic oligonucleotide
aagcaggcuuguuugcuga

SEQ ID NO: 3100131 - RNA, 19 nt, Artificial Sequence
  Description of Artificial Sequence: Synthetic oligonucleotide
cagaguggaggucacaguc

SEQ ID NO: 3100132 - RNA, 19 nt, Artificial Sequence
  Description of Artificial Sequence: Synthetic oligonucleotide
ugugauugugguguuguuc

SEQ ID NO: 3100133 - RNA, 19 nt, Artificial Sequence
  Description of Artificial Sequence: Synthetic oligonucleotide
guccauaccacuuucuucu

SEQ ID NO: 3100134 - RNA, 19 nt, Artificial Sequence
  Description of Artificial Sequence: Synthetic oligonucleotide
gcugacaacacugacagca

SEQ ID NO: 3100135 - RNA, 19 nt, Artificial Sequence
  Description of Artificial Sequence: Synthetic oligonucleotide
cuucugcucaucugcaaug

SEQ ID NO: 3100136 - RNA, 19 nt, Artificial Sequence
  Description of Artificial Sequence: Synthetic oligonucleotide
guuguucauuuacaccuug

SEQ ID NO: 3100137 - RNA, 19 nt, Artificial Sequence
  Description of Artificial Sequence: Synthetic oligonucleotide
ucucuucuguccauaccac

SEQ ID NO: 3100138 - RNA, 19 nt, Artificial Sequence
  Description of Artificial Sequence: Synthetic oligonucleotide
gcacaugccggucaaaccc

SEQ ID NO: 3100139 - RNA, 19 nt, Artificial Sequence
  Description of Artificial Sequence: Synthetic oligonucleotide
ucuguccauaccacuuucu

SEQ ID NO: 3100140 - RNA, 19 nt, Artificial Sequence
  Description of Artificial Sequence: Synthetic oligonucleotide
gucacuccagcugucagag

SEQ ID NO: 3100141 - RNA, 19 nt, Artificial Sequence
  Description of Artificial Sequence: Synthetic oligonucleotide
acaccuugacugcugugag

SEQ ID NO: 3100142 - RNA, 19 nt, Artificial Sequence
  Description of Artificial Sequence: Synthetic oligonucleotide
cacgcagcugagcagacug

SEQ ID NO: 3100143 - RNA, 19 nt, Artificial Sequence
  Description of Artificial Sequence: Synthetic oligonucleotide
ucugcucaucugcaauggc

SEQ ID NO: 3100144 - RNA, 19 nt, Artificial Sequence
  Description of Artificial Sequence: Synthetic oligonucleotide
cugcugugagcacaugccg

SEQ ID NO: 3100145 - RNA, 19 nt, Artificial Sequence
  Description of Artificial Sequence: Synthetic oligonucleotide
auaccacuuucuucugcuc

SEQ ID NO: 3100146 - RNA, 19 nt, Artificial Sequence
  Description of Artificial Sequence: Synthetic oligonucleotide
uccgggucacuccagcugu

SEQ ID NO: 3100147 - RNA, 19 nt, Artificial Sequence
  Description of Artificial Sequence: Synthetic oligonucleotide
agaggcuaggcugcuguac

SEQ ID NO: 3100148 - RNA, 19 nt, Artificial Sequence
  Description of Artificial Sequence: Synthetic oligonucleotide
cugacaacacugacagcag

SEQ ID NO: 3100149 - RNA, 19 nt, Artificial Sequence
  Description of Artificial Sequence: Synthetic oligonucleotide
guacagacagggcacucug

SEQ ID NO: 3100150 - RNA, 19 nt, Artificial Sequence
  Description of Artificial Sequence: Synthetic oligonucleotide
gacagcagaguggagguca

SEQ ID NO: 3100151 - RNA, 19 nt, Artificial Sequence
  Description of Artificial Sequence: Synthetic oligonucleotide
uguacagacagggcacucu

SEQ ID NO: 3100152 - RNA, 19 nt, Artificial Sequence
  Description of Artificial Sequence: Synthetic oligonucleotide
uucuguccauaccacuuuc

SEQ ID NO: 3100153 - RNA, 19 nt, Artificial Sequence
  Description of Artificial Sequence: Synthetic oligonucleotide
uguuguucauuuacaccuu

SEQ ID NO: 3100154 - RNA, 19 nt, Artificial Sequence
  Description of Artificial Sequence: Synthetic oligonucleotide
guucauuuacaccuugacu

SEQ ID NO: 3100155 - RNA, 19 nt, Artificial Sequence
  Description of Artificial Sequence: Synthetic oligonucleotide
agcugagcagacuguccgg

SEQ ID NO: 3100156 - RNA, 19 nt, Artificial Sequence
  Description of Artificial Sequence: Synthetic oligonucleotide
guuugcugacaacacugac

SEQ ID NO: 3100157 - RNA, 19 nt, Artificial Sequence
  Description of Artificial Sequence: Synthetic oligonucleotide
ugccggucaaacccaggcc

SEQ ID NO: 3100158 - RNA, 19 nt, Artificial Sequence
  Description of Artificial Sequence: Synthetic oligonucleotide
uugacugcugugagcacau

SEQ ID NO: 3100159 - RNA, 19 nt, Artificial Sequence
  Description of Artificial Sequence: Synthetic oligonucleotide
cugcuguacagacagggca

SEQ ID NO: 3100160 - RNA, 19 nt, Artificial Sequence
  Description of Artificial Sequence: Synthetic oligonucleotide
gaggcuaggcugcuguaca

SEQ ID NO: 3100161 - RNA, 19 nt, Artificial Sequence
  Description of Artificial Sequence: Synthetic oligonucleotide
agcaggcuuguuugcugac

SEQ ID NO: 3100162 - RNA, 19 nt, Artificial Sequence
  Description of Artificial Sequence: Synthetic oligonucleotide
aggcuuguuugcugacaac

SEQ ID NO: 3100163 - RNA, 19 nt, Artificial Sequence
  Description of Artificial Sequence: Synthetic oligonucleotide
accacuuucuucugcucau

SEQ ID NO: 3100164 - RNA, 19 nt, Artificial Sequence
  Description of Artificial Sequence: Synthetic oligonucleotide
ugcaauggccaggcgcacg

SEQ ID NO: 3100165 - RNA, 19 nt, Artificial Sequence
  Description of Artificial Sequence: Synthetic oligonucleotide
auuuacaccuugacugcug

SEQ ID NO: 3100166 - RNA, 19 nt, Artificial Sequence
  Description of Artificial Sequence: Synthetic oligonucleotide
gagcacaugccggucaaac

SEQ ID NO: 3100167 - RNA, 19 nt, Artificial Sequence
  Description of Artificial Sequence: Synthetic oligonucleotide
ucugggccucagcaggggc

SEQ ID NO: 3100168 - RNA, 19 nt, Artificial Sequence
  Description of Artificial Sequence: Synthetic oligonucleotide
uacagacagggcacucugu

SEQ ID NO: 3100169 - RNA, 19 nt, Artificial Sequence
  Description of Artificial Sequence: Synthetic oligonucleotide
uuacaccuugacugcugug

SEQ ID NO: 3100170 - RNA, 19 nt, Artificial Sequence
  Description of Artificial Sequence: Synthetic oligonucleotide
uccauaccacuuucuucug

SEQ ID NO: 3100171 - RNA, 19 nt, Artificial Sequence
  Description of Artificial Sequence: Synthetic oligonucleotide
gaaggaagcaggcuuguuu

SEQ ID NO: 3100172 - RNA, 19 nt, Artificial Sequence
  Description of Artificial Sequence: Synthetic oligonucleotide
aggcgcacgcagcugagca

SEQ ID NO: 3100173 - RNA, 19 nt, Artificial Sequence
  Description of Artificial Sequence: Synthetic oligonucleotide
uucuucugcucaucugcaa

SEQ ID NO: 3100174 - RNA, 19 nt, Artificial Sequence
  Description of Artificial Sequence: Synthetic oligonucleotide
gucacaguccccagccagg

SEQ ID NO: 3100175 - RNA, 19 nt, Artificial Sequence
  Description of Artificial Sequence: Synthetic oligonucleotide
uccagcugucagaggcuag

SEQ ID NO: 3100176 - RNA, 19 nt, Artificial Sequence
  Description of Artificial Sequence: Synthetic oligonucleotide
gacagggcacucuguccag

SEQ ID NO: 3100177 - RNA, 19 nt, Artificial Sequence
  Description of Artificial Sequence: Synthetic oligonucleotide
gagcagacuguccggguca

SEQ ID NO: 3100178 - RNA, 19 nt, Artificial Sequence
  Description of Artificial Sequence: Synthetic oligonucleotide
cauaccacuuucuucugcu

SEQ ID NO: 3100179 - RNA, 19 nt, Artificial Sequence
  Description of Artificial Sequence: Synthetic oligonucleotide
agcaggggcucucuucugu

SEQ ID NO: 3100180 - RNA, 19 nt, Artificial Sequence
  Description of Artificial Sequence: Synthetic oligonucleotide
gggcacucuguccaguucc

SEQ ID NO: 3100181 - RNA, 19 nt, Artificial Sequence
  Description of Artificial Sequence: Synthetic oligonucleotide
aggcuaggcugcuguacag

SEQ ID NO: 3100182 - RNA, 19 nt, Artificial Sequence
  Description of Artificial Sequence: Synthetic oligonucleotide
gacuguccgggucacucca

SEQ ID NO: 3100183 - RNA, 19 nt, Artificial Sequence
  Description of Artificial Sequence: Synthetic oligonucleotide
caggucugggccucagcag

SEQ ID NO: 3100184 - RNA, 19 nt, Artificial Sequence
  Description of Artificial Sequence: Synthetic oligonucleotide
caccuugacugcugugagc

SEQ ID NO: 3100185 - RNA, 19 nt, Artificial Sequence
  Description of Artificial Sequence: Synthetic oligonucleotide
ggcuuguuugcugacaaca

SEQ ID NO: 3100186 - RNA, 19 nt, Artificial Sequence
  Description of Artificial Sequence: Synthetic oligonucleotide
uguccgggucacuccagcu

SEQ ID NO: 3100187 - RNA, 19 nt, Artificial Sequence
  Description of Artificial Sequence: Synthetic oligonucleotide
auggccaggcgcacgcagc

SEQ ID NO: 3100188 - RNA, 19 nt, Artificial Sequence
  Description of Artificial Sequence: Synthetic oligonucleotide
agggaaggaagcaggcuug

SEQ ID NO: 3100189 - RNA, 19 nt, Artificial Sequence
  Description of Artificial Sequence: Synthetic oligonucleotide
caugccggucaaacccagg

SEQ ID NO: 3100190 - RNA, 19 nt, Artificial Sequence
  Description of Artificial Sequence: Synthetic oligonucleotide
uggaggucacaguccccag

SEQ ID NO: 3100191 - RNA, 19 nt, Artificial Sequence
  Description of Artificial Sequence: Synthetic oligonucleotide
guccgggucacuccagcug

SEQ ID NO: 3100192 - RNA, 19 nt, Artificial Sequence
  Description of Artificial Sequence: Synthetic oligonucleotide
caggggcucucuucugucc

SEQ ID NO: 3100193 - RNA, 19 nt, Artificial Sequence
  Description of Artificial Sequence: Synthetic oligonucleotide
ucacuccagcugucagagg

SEQ ID NO: 3100194 - RNA, 19 nt, Artificial Sequence
  Description of Artificial Sequence: Synthetic oligonucleotide
ugauugugguguuguucau

SEQ ID NO: 3100195 - RNA, 19 nt, Artificial Sequence
  Description of Artificial Sequence: Synthetic oligonucleotide
cagacuguccgggucacuc

SEQ ID NO: 3100196 - RNA, 19 nt, Artificial Sequence
  Description of Artificial Sequence: Synthetic oligonucleotide
ggucaaacccaggccaggg

SEQ ID NO: 3100197 - RNA, 19 nt, Artificial Sequence
  Description of Artificial Sequence: Synthetic oligonucleotide
gcuaggcugcuguacagac

SEQ ID NO: 3100198 - RNA, 19 nt, Artificial Sequence
  Description of Artificial Sequence: Synthetic oligonucleotide
uggccaggcgcacgcagcu

SEQ ID NO: 3100199 - RNA, 19 nt, Artificial Sequence
  Description of Artificial Sequence: Synthetic oligonucleotide
ucacaguccccagccaggu

SEQ ID NO: 3100200 - RNA, 19 nt, Artificial Sequence
  Description of Artificial Sequence: Synthetic oligonucleotide
acagcagaguggaggucac

SEQ ID NO: 3100201 - RNA, 19 nt, Artificial Sequence
  Description of Artificial Sequence: Synthetic oligonucleotide
gugguguuguucauuuaca

SEQ ID NO: 3100202 - RNA, 19 nt, Artificial Sequence
  Description of Artificial Sequence: Synthetic oligonucleotide
guggaggucacagucccca

SEQ ID NO: 3100203 - RNA, 19 nt, Artificial Sequence
  Description of Artificial Sequence: Synthetic oligonucleotide
gcaauggccaggcgcacgc

SEQ ID NO: 3100204 - RNA, 19 nt, Artificial Sequence
  Description of Artificial Sequence: Synthetic oligonucleotide
agcagacuguccgggucac

SEQ ID NO: 3100205 - RNA, 19 nt, Artificial Sequence
  Description of Artificial Sequence: Synthetic oligonucleotide
cacaugccggucaaaccca

SEQ ID NO: 3100206 - RNA, 19 nt, Artificial Sequence
  Description of Artificial Sequence: Synthetic oligonucleotide
ugcugacaacacugacagc

SEQ ID NO: 3100207 - RNA, 19 nt, Artificial Sequence
  Description of Artificial Sequence: Synthetic oligonucleotide
cugacagcagaguggaggu

SEQ ID NO: 3100208 - RNA, 19 nt, Artificial Sequence
  Description of Artificial Sequence: Synthetic oligonucleotide
caggcuuguuugcugacaa

SEQ ID NO: 3100209 - RNA, 19 nt, Artificial Sequence
  Description of Artificial Sequence: Synthetic oligonucleotide
gccggucaaacccaggcca

SEQ ID NO: 3100210 - RNA, 19 nt, Artificial Sequence
  Description of Artificial Sequence: Synthetic oligonucleotide
ggccagggaaggaagcagg

SEQ ID NO: 3100211 - RNA, 19 nt, Artificial Sequence
  Description of Artificial Sequence: Synthetic oligonucleotide
cuaggcugcuguacagaca

SEQ ID NO: 3100212 - RNA, 19 nt, Artificial Sequence
  Description of Artificial Sequence: Synthetic oligonucleotide
ggaggucacaguccccagc

SEQ ID NO: 3100213 - RNA, 19 nt, Artificial Sequence
  Description of Artificial Sequence: Synthetic oligonucleotide
gucaaacccaggccaggga

SEQ ID NO: 3100214 - RNA, 19 nt, Artificial Sequence
  Description of Artificial Sequence: Synthetic oligonucleotide
uugugguguuguucauuua

SEQ ID NO: 3100215 - RNA, 19 nt, Artificial Sequence
  Description of Artificial Sequence: Synthetic oligonucleotide
ccauaccacuuucuucugc

SEQ ID NO: 3100216 - RNA, 19 nt, Artificial Sequence
  Description of Artificial Sequence: Synthetic oligonucleotide
gcucaucugcaauggccag

SEQ ID NO: 3100217 - RNA, 19 nt, Artificial Sequence
  Description of Artificial Sequence: Synthetic oligonucleotide
caucugcaauggccaggcg

SEQ ID NO: 3100218 - RNA, 19 nt, Artificial Sequence
  Description of Artificial Sequence: Synthetic oligonucleotide
gggucacuccagcugucag

SEQ ID NO: 3100219 - RNA, 19 nt, Artificial Sequence
  Description of Artificial Sequence: Synthetic oligonucleotide
acaugccggucaaacccag

SEQ ID NO: 3100220 - RNA, 19 nt, Artificial Sequence
  Description of Artificial Sequence: Synthetic oligonucleotide
ugucagaggcuaggcugcu

SEQ ID NO: 3100221 - RNA, 19 nt, Artificial Sequence
  Description of Artificial Sequence: Synthetic oligonucleotide
gugagcacaugccggucaa

SEQ ID NO: 3100222 - RNA, 19 nt, Artificial Sequence
  Description of Artificial Sequence: Synthetic oligonucleotide
aacccaggccagggaagga

SEQ ID NO: 3100223 - RNA, 19 nt, Artificial Sequence
  Description of Artificial Sequence: Synthetic oligonucleotide
ggcucucuucuguccauac

SEQ ID NO: 3100224 - RNA, 19 nt, Artificial Sequence
  Description of Artificial Sequence: Synthetic oligonucleotide
caguccccagccaggucug

SEQ ID NO: 3100225 - RNA, 19 nt, Artificial Sequence
  Description of Artificial Sequence: Synthetic oligonucleotide
gucugggccucagcagggg

SEQ ID NO: 3100226 - RNA, 19 nt, Artificial Sequence
  Description of Artificial Sequence: Synthetic oligonucleotide
gcugcuguacagacagggc

SEQ ID NO: 3100227 - RNA, 19 nt, Artificial Sequence
  Description of Artificial Sequence: Synthetic oligonucleotide
cagggaaggaagcaggcuu

SEQ ID NO: 3100228 - RNA, 19 nt, Artificial Sequence
  Description of Artificial Sequence: Synthetic oligonucleotide
ugacagcagaguggagguc

SEQ ID NO: 3100229 - RNA, 19 nt, Artificial Sequence
  Description of Artificial Sequence: Synthetic oligonucleotide
cucuucuguccauaccacu

SEQ ID NO: 3100230 - RNA, 19 nt, Artificial Sequence
  Description of Artificial Sequence: Synthetic oligonucleotide
ccaggccagggaaggaagc

SEQ ID NO: 3100231 - RNA, 19 nt, Artificial Sequence
  Description of Artificial Sequence: Synthetic oligonucleotide
ggucugggccucagcaggg

SEQ ID NO: 3100232 - RNA, 19 nt, Artificial Sequence
  Description of Artificial Sequence: Synthetic oligonucleotide
guccccagccaggucuggg

SEQ ID NO: 3100233 - RNA, 19 nt, Artificial Sequence
  Description of Artificial Sequence: Synthetic oligonucleotide
cuguacagacagggcacuc

SEQ ID NO: 3100234 - RNA, 19 nt, Artificial Sequence
  Description of Artificial Sequence: Synthetic oligonucleotide
gauugugguguuguucauu

SEQ ID NO: 3100235 - RNA, 19 nt, Artificial Sequence
  Description of Artificial Sequence: Synthetic oligonucleotide
ccaggucugggccucagca

SEQ ID NO: 3100236 - RNA, 19 nt, Artificial Sequence
  Description of Artificial Sequence: Synthetic oligonucleotide
acccaggccagggaaggaa

SEQ ID NO: 3100237 - RNA, 19 nt, Artificial Sequence
  Description of Artificial Sequence: Synthetic oligonucleotide
cccaggccagggaaggaag

SEQ ID NO: 3100238 - RNA, 19 nt, Artificial Sequence
  Description of Artificial Sequence: Synthetic oligonucleotide
ugagcacaugccggucaaa

SEQ ID NO: 3100239 - RNA, 19 nt, Artificial Sequence
  Description of Artificial Sequence: Synthetic oligonucleotide
ccggucaaacccaggccag

SEQ ID NO: 3100240 - RNA, 19 nt, Artificial Sequence
  Description of Artificial Sequence: Synthetic oligonucleotide
acuguccgggucacuccag

SEQ ID NO: 3100241 - RNA, 19 nt, Artificial Sequence
  Description of Artificial Sequence: Synthetic oligonucleotide
acagggcacucuguccagu

SEQ ID NO: 3100242 - RNA, 19 nt, Artificial Sequence
  Description of Artificial Sequence: Synthetic oligonucleotide
ugacugcugugagcacaug

SEQ ID NO: 3100243 - RNA, 19 nt, Artificial Sequence
  Description of Artificial Sequence: Synthetic oligonucleotide
caggccagggaaggaagca

SEQ ID NO: 3100244 - RNA, 19 nt, Artificial Sequence
  Description of Artificial Sequence: Synthetic oligonucleotide
cauuuacaccuugacugcu

SEQ ID NO: 3100245 - RNA, 19 nt, Artificial Sequence
  Description of Artificial Sequence: Synthetic oligonucleotide
cagcaggggcucucuucug

SEQ ID NO: 3100246 - RNA, 19 nt, Artificial Sequence
  Description of Artificial Sequence: Synthetic oligonucleotide
gucagaggcuaggcugcug

SEQ ID NO: 3100247 - RNA, 19 nt, Artificial Sequence
  Description of Artificial Sequence: Synthetic oligonucleotide
gcugugagcacaugccggu

SEQ ID NO: 3100248 - RNA, 19 nt, Artificial Sequence
  Description of Artificial Sequence: Synthetic oligonucleotide
cuucuguccauaccacuuu

SEQ ID NO: 3100249 - RNA, 19 nt, Artificial Sequence
  Description of Artificial Sequence: Synthetic oligonucleotide
cuguccauaccacuuucuu

SEQ ID NO: 3100250 - RNA, 19 nt, Artificial Sequence
  Description of Artificial Sequence: Synthetic oligonucleotide
gccaggcgcacgcagcuga

SEQ ID NO: 3100251 - RNA, 19 nt, Artificial Sequence
  Description of Artificial Sequence: Synthetic oligonucleotide
cacaguccccagccagguc

SEQ ID NO: 3100252 - RNA, 19 nt, Artificial Sequence
  Description of Artificial Sequence: Synthetic oligonucleotide
caggcgcacgcagcugagc

SEQ ID NO: 3100253 - RNA, 19 nt, Artificial Sequence
  Description of Artificial Sequence: Synthetic oligonucleotide
cugcaauggccaggcgcac

SEQ ID NO: 3100254 - RNA, 19 nt, Artificial Sequence
  Description of Artificial Sequence: Synthetic oligonucleotide
ggaagcaggcuuguuugcu

SEQ ID NO: 3100255 - RNA, 19 nt, Artificial Sequence
  Description of Artificial Sequence: Synthetic oligonucleotide
acgcagcugagcagacugu

SEQ ID NO: 3100256 - RNA, 19 nt, Artificial Sequence
  Description of Artificial Sequence: Synthetic oligonucleotide
ggcuaggcugcuguacaga

SEQ ID NO: 3100257 - RNA, 19 nt, Artificial Sequence
  Description of Artificial Sequence: Synthetic oligonucleotide
agccaggucugggccucag

SEQ ID NO: 3100258 - RNA, 19 nt, Artificial Sequence
  Description of Artificial Sequence: Synthetic oligonucleotide
gcaggcuuguuugcugaca

SEQ ID NO: 3100259 - RNA, 19 nt, Artificial Sequence
  Description of Artificial Sequence: Synthetic oligonucleotide
gcacucuguccaguucccc

SEQ ID NO: 3100260 - RNA, 19 nt, Artificial Sequence
  Description of Artificial Sequence: Synthetic oligonucleotide
cagaggcuaggcugcugua

SEQ ID NO: 3100261 - RNA, 19 nt, Artificial Sequence
  Description of Artificial Sequence: Synthetic oligonucleotide
gugugauugugguguuguu

SEQ ID NO: 3100262 - RNA, 19 nt, Artificial Sequence
  Description of Artificial Sequence: Synthetic oligonucleotide
ccacuuucuucugcucauc

SEQ ID NO: 3100263 - RNA, 19 nt, Artificial Sequence
  Description of Artificial Sequence: Synthetic oligonucleotide
caauggccaggcgcacgca

SEQ ID NO: 3100264 - RNA, 19 nt, Artificial Sequence
  Description of Artificial Sequence: Synthetic oligonucleotide
gcuguacagacagggcacu

SEQ ID NO: 3100265 - RNA, 19 nt, Artificial Sequence
  Description of Artificial Sequence: Synthetic oligonucleotide
cggucaaacccaggccagg

SEQ ID NO: 3100266 - RNA, 19 nt, Artificial Sequence
  Description of Artificial Sequence: Synthetic oligonucleotide
cgcagcugagcagacuguc

SEQ ID NO: 3100267 - RNA, 19 nt, Artificial Sequence
  Description of Artificial Sequence: Synthetic oligonucleotide
cagggcacucuguccaguu

SEQ ID NO: 3100268 - RNA, 19 nt, Artificial Sequence
  Description of Artificial Sequence: Synthetic oligonucleotide
cagcagaguggaggucaca

SEQ ID NO: 3100269 - RNA, 19 nt, Artificial Sequence
  Description of Artificial Sequence: Synthetic oligonucleotide
gggaaggaagcaggcuugu

SEQ ID NO: 3100270 - RNA, 19 nt, Artificial Sequence
  Description of Artificial Sequence: Synthetic oligonucleotide
ggccaggcgcacgcagcug

SEQ ID NO: 3100271 - RNA, 19 nt, Artificial Sequence
  Description of Artificial Sequence: Synthetic oligonucleotide
ccgggucacuccagcuguc

SEQ ID NO: 3100272 - RNA, 19 nt, Artificial Sequence
  Description of Artificial Sequence: Synthetic oligonucleotide
cgcacgcagcugagcagac

SEQ ID NO: 3100273 - RNA, 19 nt, Artificial Sequence
  Description of Artificial Sequence: Synthetic oligonucleotide
ggccucagcaggggcucuc

SEQ ID NO: 3100274 - RNA, 19 nt, Artificial Sequence
  Description of Artificial Sequence: Synthetic oligonucleotide
ggggcucucuucuguccau

SEQ ID NO: 3100275 - RNA, 19 nt, Artificial Sequence
  Description of Artificial Sequence: Synthetic oligonucleotide
gggcucucuucuguccaua

SEQ ID NO: 3100276 - RNA, 19 nt, Artificial Sequence
  Description of Artificial Sequence: Synthetic oligonucleotide
cagccaggucugggccuca

SEQ ID NO: 3100277 - RNA, 19 nt, Artificial Sequence
  Description of Artificial Sequence: Synthetic oligonucleotide
gcacgcagcugagcagacu

SEQ ID NO: 3100278 - RNA, 19 nt, Artificial Sequence
  Description of Artificial Sequence: Synthetic oligonucleotide
cgggucacuccagcuguca

SEQ ID NO: 3100279 - RNA, 19 nt, Artificial Sequence
  Description of Artificial Sequence: Synthetic oligonucleotide
gccucagcaggggcucucu

SEQ ID NO: 3100280 - RNA, 19 nt, Artificial Sequence
  Description of Artificial Sequence: Synthetic oligonucleotide
gcagacuguccgggucacu

SEQ ID NO: 3100281 - RNA, 19 nt, Artificial Sequence
  Description of Artificial Sequence: Synthetic oligonucleotide
gggccucagcaggggcucu

SEQ ID NO: 3100282 - RNA, 19 nt, Artificial Sequence
  Description of Artificial Sequence: Synthetic oligonucleotide
ccucagcaggggcucucuu

SEQ ID NO: 3100283 - RNA, 19 nt, Artificial Sequence
  Description of Artificial Sequence: Synthetic oligonucleotide
auacuaauaaaauaaauac

SEQ ID NO: 3100284 - RNA, 19 nt, Artificial Sequence
  Description of Artificial Sequence: Synthetic oligonucleotide
aagacagaagaguacaggg

SEQ ID NO: 3100285 - RNA, 19 nt, Artificial Sequence
  Description of Artificial Sequence: Synthetic oligonucleotide
aaauuaaauacuaauaaaa

SEQ ID NO: 3100286 - RNA, 19 nt, Artificial Sequence
  Description of Artificial Sequence: Synthetic oligonucleotide
aauacuauggaagacagaa

SEQ ID NO: 3100287 - RNA, 19 nt, Artificial Sequence
  Description of Artificial Sequence: Synthetic oligonucleotide
auugaaacaauacaaauua

SEQ ID NO: 3100288 - RNA, 19 nt, Artificial Sequence
  Description of Artificial Sequence: Synthetic oligonucleotide
acaaauuaaauacuaauaa

SEQ ID NO: 3100289 - RNA, 19 nt, Artificial Sequence
  Description of Artificial Sequence: Synthetic oligonucleotide
aauaaauacuauggaagac

SEQ ID NO: 3100290 - RNA, 19 nt, Artificial Sequence
  Description of Artificial Sequence: Synthetic oligonucleotide
aaacaauacaaauuaaaua

SEQ ID NO: 3100291 - RNA, 19 nt, Artificial Sequence
  Description of Artificial Sequence: Synthetic oligonucleotide
uaaauacuauggaagacag

SEQ ID NO: 3100292 - RNA, 19 nt, Artificial Sequence
  Description of Artificial Sequence: Synthetic oligonucleotide
caaaucaucacagugauac

SEQ ID NO: 3100293 - RNA, 19 nt, Artificial Sequence
  Description of Artificial Sequence: Synthetic oligonucleotide
aaaccauugaaacaauaca

SEQ ID NO: 3100294 - RNA, 19 nt, Artificial Sequence
  Description of Artificial Sequence: Synthetic oligonucleotide
uacuauggaagacagaaga

SEQ ID NO: 3100295 - RNA, 19 nt, Artificial Sequence
  Description of Artificial Sequence: Synthetic oligonucleotide
aauacuaauaaaauaaaua

SEQ ID NO: 3100296 - RNA, 19 nt, Artificial Sequence
  Description of Artificial Sequence: Synthetic oligonucleotide
aguacagggagauagggag

SEQ ID NO: 3100297 - RNA, 19 nt, Artificial Sequence
  Description of Artificial Sequence: Synthetic oligonucleotide
agugauacagacuuagcag

SEQ ID NO: 3100298 - RNA, 19 nt, Artificial Sequence
  Description of Artificial Sequence: Synthetic oligonucleotide
uacuaauaaaauaaauacu

SEQ ID NO: 3100299 - RNA, 19 nt, Artificial Sequence
  Description of Artificial Sequence: Synthetic oligonucleotide
uggucauaagcacagaagc

SEQ ID NO: 3100300 - RNA, 19 nt, Artificial Sequence
  Description of Artificial Sequence: Synthetic oligonucleotide
ugaaacaauacaaauuaaa

SEQ ID NO: 3100301 - RNA, 19 nt, Artificial Sequence
  Description of Artificial Sequence: Synthetic oligonucleotide
uacaaauuaaauacuaaua

SEQ ID NO: 3100302 - RNA, 19 nt, Artificial Sequence
  Description of Artificial Sequence: Synthetic oligonucleotide
ucucaaaucaucacaguga

SEQ ID NO: 3100303 - RNA, 19 nt, Artificial Sequence
  Description of Artificial Sequence: Synthetic oligonucleotide
aaucaucacagugauacag

SEQ ID NO: 3100304 - RNA, 19 nt, Artificial Sequence
  Description of Artificial Sequence: Synthetic oligonucleotide
auacagacuuagcagaaac

SEQ ID NO: 3100305 - RNA, 19 nt, Artificial Sequence
  Description of Artificial Sequence: Synthetic oligonucleotide
gacagaagaguacagggag

SEQ ID NO: 3100306 - RNA, 19 nt, Artificial Sequence
  Description of Artificial Sequence: Synthetic oligonucleotide
uuuggucuuggucauaagc

SEQ ID NO: 3100307 - RNA, 19 nt, Artificial Sequence
  Description of Artificial Sequence: Synthetic oligonucleotide
acuaauaaaauaaauacua

SEQ ID NO: 3100308 - RNA, 19 nt, Artificial Sequence
  Description of Artificial Sequence: Synthetic oligonucleotide
uggaguucaacuuuccacc

SEQ ID NO: 3100309 - RNA, 19 nt, Artificial Sequence
  Description of Artificial Sequence: Synthetic oligonucleotide
aucacagugauacagacuu

SEQ ID NO: 3100310 - RNA, 19 nt, Artificial Sequence
  Description of Artificial Sequence: Synthetic oligonucleotide
uuagcagaaaccauugaaa

SEQ ID NO: 3100311 - RNA, 19 nt, Artificial Sequence
  Description of Artificial Sequence: Synthetic oligonucleotide
acagaagccaguccaaggg

SEQ ID NO: 3100312 - RNA, 19 nt, Artificial Sequence
  Description of Artificial Sequence: Synthetic oligonucleotide
uuggucuuggucauaagca

SEQ ID NO: 3100313 - RNA, 19 nt, Artificial Sequence
  Description of Artificial Sequence: Synthetic oligonucleotide
uuggucauaagcacagaag

SEQ ID NO: 3100314 - RNA, 19 nt, Artificial Sequence
  Description of Artificial Sequence: Synthetic oligonucleotide
ucagaaguggaguucaacu

SEQ ID NO: 3100315 - RNA, 19 nt, Artificial Sequence
  Description of Artificial Sequence: Synthetic oligonucleotide
auaaauacuauggaagaca

SEQ ID NO: 3100316 - RNA, 19 nt, Artificial Sequence
  Description of Artificial Sequence: Synthetic oligonucleotide
ucugucuucagaaguggag

SEQ ID NO: 3100317 - RNA, 19 nt, Artificial Sequence
  Description of Artificial Sequence: Synthetic oligonucleotide
uauggaagacagaagagua

SEQ ID NO: 3100318 - RNA, 19 nt, Artificial Sequence
  Description of Artificial Sequence: Synthetic oligonucleotide
ucauaagcacagaagccag

SEQ ID NO: 3100319 - RNA, 19 nt, Artificial Sequence
  Description of Artificial Sequence: Synthetic oligonucleotide
uucuccuuaggacaggcca

SEQ ID NO: 3100320 - RNA, 19 nt, Artificial Sequence
  Description of Artificial Sequence: Synthetic oligonucleotide
aagcacagaagccagucca

SEQ ID NO: 3100321 - RNA, 19 nt, Artificial Sequence
  Description of Artificial Sequence: Synthetic oligonucleotide
uucucauuucuccuuagga

SEQ ID NO: 3100322 - RNA, 19 nt, Artificial Sequence
  Description of Artificial Sequence: Synthetic oligonucleotide
aaauacuaauaaaauaaau

SEQ ID NO: 3100323 - RNA, 19 nt, Artificial Sequence
  Description of Artificial Sequence: Synthetic oligonucleotide
ucauuucuccuuaggacag

SEQ ID NO: 3100324 - RNA, 19 nt, Artificial Sequence
  Description of Artificial Sequence: Synthetic oligonucleotide
gaaaccauugaaacaauac

SEQ ID NO: 3100325 - RNA, 19 nt, Artificial Sequence
  Description of Artificial Sequence: Synthetic oligonucleotide
ucucauuucuccuuaggac

SEQ ID NO: 3100326 - RNA, 19 nt, Artificial Sequence
  Description of Artificial Sequence: Synthetic oligonucleotide
gaagacagaagaguacagg

SEQ ID NO: 3100327 - RNA, 19 nt, Artificial Sequence
  Description of Artificial Sequence: Synthetic oligonucleotide
aaccauugaaacaauacaa

SEQ ID NO: 3100328 - RNA, 19 nt, Artificial Sequence
  Description of Artificial Sequence: Synthetic oligonucleotide
gucucaaaucaucacagug

SEQ ID NO: 3100329 - RNA, 19 nt, Artificial Sequence
  Description of Artificial Sequence: Synthetic oligonucleotide
uacagacuuagcagaaacc

SEQ ID NO: 3100330 - RNA, 19 nt, Artificial Sequence
  Description of Artificial Sequence: Synthetic oligonucleotide
caaauuaaauacuaauaaa

SEQ ID NO: 3100331 - RNA, 19 nt, Artificial Sequence
  Description of Artificial Sequence: Synthetic oligonucleotide
acagacuuagcagaaacca

SEQ ID NO: 3100332 - RNA, 19 nt, Artificial Sequence
  Description of Artificial Sequence: Synthetic oligonucleotide
uacagggagauagggaggg

SEQ ID NO: 3100333 - RNA, 19 nt, Artificial Sequence
  Description of Artificial Sequence: Synthetic oligonucleotide
uagggaggggcacucagag

SEQ ID NO: 3100334 - RNA, 19 nt, Artificial Sequence
  Description of Artificial Sequence: Synthetic oligonucleotide
uggaagacagaagaguaca

SEQ ID NO: 3100335 - RNA, 19 nt, Artificial Sequence
  Description of Artificial Sequence: Synthetic oligonucleotide
aagccaguccaagggaccc

SEQ ID NO: 3100336 - RNA, 19 nt, Artificial Sequence
  Description of Artificial Sequence: Synthetic oligonucleotide
cucauuucuccuuaggaca

SEQ ID NO: 3100337 - RNA, 19 nt, Artificial Sequence
  Description of Artificial Sequence: Synthetic oligonucleotide
ucaucacagugauacagac

SEQ ID NO: 3100338 - RNA, 19 nt, Artificial Sequence
  Description of Artificial Sequence: Synthetic oligonucleotide
uugaaacaauacaaauuaa

SEQ ID NO: 3100339 - RNA, 19 nt, Artificial Sequence
  Description of Artificial Sequence: Synthetic oligonucleotide
agcagaaaccauugaaaca

SEQ ID NO: 3100340 - RNA, 19 nt, Artificial Sequence
  Description of Artificial Sequence: Synthetic oligonucleotide
gagauuugggcucuucuca

SEQ ID NO: 3100341 - RNA, 19 nt, Artificial Sequence
  Description of Artificial Sequence: Synthetic oligonucleotide
auuucuccuuaggacaggc

SEQ ID NO: 3100342 - RNA, 19 nt, Artificial Sequence
  Description of Artificial Sequence: Synthetic oligonucleotide
ucuucagaaguggaguuca

SEQ ID NO: 3100343 - RNA, 19 nt, Artificial Sequence
  Description of Artificial Sequence: Synthetic oligonucleotide
gugauacagacuuagcaga

SEQ ID NO: 3100344 - RNA, 19 nt, Artificial Sequence
  Description of Artificial Sequence: Synthetic oligonucleotide
guggaguucaacuuuccac

SEQ ID NO: 3100345 - RNA, 19 nt, Artificial Sequence
  Description of Artificial Sequence: Synthetic oligonucleotide
agaguacagggagauaggg

SEQ ID NO: 3100346 - RNA, 19 nt, Artificial Sequence
  Description of Artificial Sequence: Synthetic oligonucleotide
agaccuucugucuucagaa

SEQ ID NO: 3100347 - RNA, 19 nt, Artificial Sequence
  Description of Artificial Sequence: Synthetic oligonucleotide
caauacaaauuaaauacua

SEQ ID NO: 3100348 - RNA, 19 nt, Artificial Sequence
  Description of Artificial Sequence: Synthetic oligonucleotide
ugauacagacuuagcagaa

SEQ ID NO: 3100349 - RNA, 19 nt, Artificial Sequence
  Description of Artificial Sequence: Synthetic oligonucleotide
uaagcacagaagccagucc

SEQ ID NO: 3100350 - RNA, 19 nt, Artificial Sequence
  Description of Artificial Sequence: Synthetic oligonucleotide
gauagggaggggcacucag

SEQ ID NO: 3100351 - RNA, 19 nt, Artificial Sequence
  Description of Artificial Sequence: Synthetic oligonucleotide
aaaucaucacagugauaca

SEQ ID NO: 3100352 - RNA, 19 nt, Artificial Sequence
  Description of Artificial Sequence: Synthetic oligonucleotide
acaauacaaauuaaauacu

SEQ ID NO: 3100353 - RNA, 19 nt, Artificial Sequence
  Description of Artificial Sequence: Synthetic oligonucleotide
guccaagggacccuggugc

SEQ ID NO: 3100354 - RNA, 19 nt, Artificial Sequence
  Description of Artificial Sequence: Synthetic oligonucleotide
aagaguacagggagauagg

SEQ ID NO: 3100355 - RNA, 19 nt, Artificial Sequence
  Description of Artificial Sequence: Synthetic oligonucleotide
cacagugauacagacuuag

SEQ ID NO: 3100356 - RNA, 19 nt, Artificial Sequence
  Description of Artificial Sequence: Synthetic oligonucleotide
cacagaagccaguccaagg

SEQ ID NO: 3100357 - RNA, 19 nt, Artificial Sequence
  Description of Artificial Sequence: Synthetic oligonucleotide
agaaguggaguucaacuuu

SEQ ID NO: 3100358 - RNA, 19 nt, Artificial Sequence
  Description of Artificial Sequence: Synthetic oligonucleotide
uggucuuggucauaagcac

SEQ ID NO: 3100359 - RNA, 19 nt, Artificial Sequence
  Description of Artificial Sequence: Synthetic oligonucleotide
gacuuagcagaaaccauug

SEQ ID NO: 3100360 - RNA, 19 nt, Artificial Sequence
  Description of Artificial Sequence: Synthetic oligonucleotide
gucauaagcacagaagcca

SEQ ID NO: 3100361 - RNA, 19 nt, Artificial Sequence
  Description of Artificial Sequence: Synthetic oligonucleotide
uaggacaggccacagccac

SEQ ID NO: 3100362 - RNA, 19 nt, Artificial Sequence
  Description of Artificial Sequence: Synthetic oligonucleotide
aaguggaguucaacuuucc

SEQ ID NO: 3100363 - RNA, 19 nt, Artificial Sequence
  Description of Artificial Sequence: Synthetic oligonucleotide
cuucucauuucuccuuagg

SEQ ID NO: 3100364 - RNA, 19 nt, Artificial Sequence
  Description of Artificial Sequence: Synthetic oligonucleotide
accuucugucuucagaagu

SEQ ID NO: 3100365 - RNA, 19 nt, Artificial Sequence
  Description of Artificial Sequence: Synthetic oligonucleotide
acuauggaagacagaagag

SEQ ID NO: 3100366 - RNA, 19 nt, Artificial Sequence
  Description of Artificial Sequence: Synthetic oligonucleotide
auggaagacagaagaguac

SEQ ID NO: 3100367 - RNA, 19 nt, Artificial Sequence
  Description of Artificial Sequence: Synthetic oligonucleotide
cagugauacagacuuagca

SEQ ID NO: 3100368 - RNA, 19 nt, Artificial Sequence
  Description of Artificial Sequence: Synthetic oligonucleotide
agaagccaguccaagggac

SEQ ID NO: 3100369 - RNA, 19 nt, Artificial Sequence
  Description of Artificial Sequence: Synthetic oligonucleotide
ucuccuuaggacaggccac

SEQ ID NO: 3100370 - RNA, 19 nt, Artificial Sequence
  Description of Artificial Sequence: Synthetic oligonucleotide
uugggcucuucucauuucu

SEQ ID NO: 3100371 - RNA, 19 nt, Artificial Sequence
  Description of Artificial Sequence: Synthetic oligonucleotide
uucugucuucagaagugga

SEQ ID NO: 3100372 - RNA, 19 nt, Artificial Sequence
  Description of Artificial Sequence: Synthetic oligonucleotide
ucuucucauuucuccuuag

SEQ ID NO: 3100373 - RNA, 19 nt, Artificial Sequence
  Description of Artificial Sequence: Synthetic oligonucleotide
gucuuggucauaagcacag

SEQ ID NO: 3100374 - RNA, 19 nt, Artificial Sequence
  Description of Artificial Sequence: Synthetic oligonucleotide
acagugauacagacuuagc

SEQ ID NO: 3100375 - RNA, 19 nt, Artificial Sequence
  Description of Artificial Sequence: Synthetic oligonucleotide
gaguucaacuuuccacccc

SEQ ID NO: 3100376 - RNA, 19 nt, Artificial Sequence
  Description of Artificial Sequence: Synthetic oligonucleotide
aguggaguucaacuuucca

SEQ ID NO: 3100377 - RNA, 19 nt, Artificial Sequence
  Description of Artificial Sequence: Synthetic oligonucleotide
cacucagagauuugggcuc

SEQ ID NO: 3100378 - RNA, 19 nt, Artificial Sequence
  Description of Artificial Sequence: Synthetic oligonucleotide
uuaggacaggccacagcca

SEQ ID NO: 3100379 - RNA, 19 nt, Artificial Sequence
  Description of Artificial Sequence: Synthetic oligonucleotide
uuucuccuuaggacaggcc

SEQ ID NO: 3100380 - RNA, 19 nt, Artificial Sequence
  Description of Artificial Sequence: Synthetic oligonucleotide
gcagaaaccauugaaacaa

SEQ ID NO: 3100381 - RNA, 19 nt, Artificial Sequence
  Description of Artificial Sequence: Synthetic oligonucleotide
auuugggcucuucucauuu

SEQ ID NO: 3100382 - RNA, 19 nt, Artificial Sequence
  Description of Artificial Sequence: Synthetic oligonucleotide
gaaguggaguucaacuuuc

SEQ ID NO: 3100383 - RNA, 19 nt, Artificial Sequence
  Description of Artificial Sequence: Synthetic oligonucleotide
aguccaagggacccuggug

SEQ ID NO: 3100384 - RNA, 19 nt, Artificial Sequence
  Description of Artificial Sequence: Synthetic oligonucleotide
cauugaaacaauacaaauu

SEQ ID NO: 3100385 - RNA, 19 nt, Artificial Sequence
  Description of Artificial Sequence: Synthetic oligonucleotide
aucuccagaccuucugucu

SEQ ID NO: 3100386 - RNA, 19 nt, Artificial Sequence
  Description of Artificial Sequence: Synthetic oligonucleotide
accauugaaacaauacaaa

SEQ ID NO: 3100387 - RNA, 19 nt, Artificial Sequence
  Description of Artificial Sequence: Synthetic oligonucleotide
acaggccacagccacccag

SEQ ID NO: 3100388 - RNA, 19 nt, Artificial Sequence
  Description of Artificial Sequence: Synthetic oligonucleotide
ccuuccaccaucuccagac

SEQ ID NO: 3100389 - RNA, 19 nt, Artificial Sequence
  Description of Artificial Sequence: Synthetic oligonucleotide
ugucuucagaaguggaguu

SEQ ID NO: 3100390 - RNA, 19 nt, Artificial Sequence
  Description of Artificial Sequence: Synthetic oligonucleotide
gaccuucugucuucagaag

SEQ ID NO: 3100391 - RNA, 19 nt, Artificial Sequence
  Description of Artificial Sequence: Synthetic oligonucleotide
ggcacucagagauuugggc

SEQ ID NO: 3100392 - RNA, 19 nt, Artificial Sequence
  Description of Artificial Sequence: Synthetic oligonucleotide
acuuagcagaaaccauuga

SEQ ID NO: 3100393 - RNA, 19 nt, Artificial Sequence
  Description of Artificial Sequence: Synthetic oligonucleotide
aaauacuauggaagacaga

SEQ ID NO: 3100394 - RNA, 19 nt, Artificial Sequence
  Description of Artificial Sequence: Synthetic oligonucleotide
uucagaaguggaguucaac

SEQ ID NO: 3100395 - RNA, 19 nt, Artificial Sequence
  Description of Artificial Sequence: Synthetic oligonucleotide
agauuugggcucuucucau

SEQ ID NO: 3100396 - RNA, 19 nt, Artificial Sequence
  Description of Artificial Sequence: Synthetic oligonucleotide
ccuggugccaccuuccacc

SEQ ID NO: 3100397 - RNA, 19 nt, Artificial Sequence
  Description of Artificial Sequence: Synthetic oligonucleotide
ucuccagaccuucugucuu

SEQ ID NO: 3100398 - RNA, 19 nt, Artificial Sequence
  Description of Artificial Sequence: Synthetic oligonucleotide
auacuauggaagacagaag

SEQ ID NO: 3100399 - RNA, 19 nt, Artificial Sequence
  Description of Artificial Sequence: Synthetic oligonucleotide
cuuggucauaagcacagaa

SEQ ID NO: 3100400 - RNA, 19 nt, Artificial Sequence
  Description of Artificial Sequence: Synthetic oligonucleotide
uccaagggacccuggugcc

SEQ ID NO: 3100401 - RNA, 19 nt, Artificial Sequence
  Description of Artificial Sequence: Synthetic oligonucleotide
caggccacagccacccagg

SEQ ID NO: 3100402 - RNA, 19 nt, Artificial Sequence
  Description of Artificial Sequence: Synthetic oligonucleotide
gaagccaguccaagggacc

SEQ ID NO: 3100403 - RNA, 19 nt, Artificial Sequence
  Description of Artificial Sequence: Synthetic oligonucleotide
ggucauaagcacagaagcc

SEQ ID NO: 3100404 - RNA, 19 nt, Artificial Sequence
  Description of Artificial Sequence: Synthetic oligonucleotide
agacuuagcagaaaccauu

SEQ ID NO: 3100405 - RNA, 19 nt, Artificial Sequence
  Description of Artificial Sequence: Synthetic oligonucleotide
agacagaagaguacaggga

SEQ ID NO: 3100406 - RNA, 19 nt, Artificial Sequence
  Description of Artificial Sequence: Synthetic oligonucleotide
caucuccagaccuucuguc

SEQ ID NO: 3100407 - RNA, 19 nt, Artificial Sequence
  Description of Artificial Sequence: Synthetic oligonucleotide
guacagggagauagggagg

SEQ ID NO: 3100408 - RNA, 19 nt, Artificial Sequence
  Description of Artificial Sequence: Synthetic oligonucleotide
ggaguucaacuuuccaccc

SEQ ID NO: 3100409 - RNA, 19 nt, Artificial Sequence
  Description of Artificial Sequence: Synthetic oligonucleotide
aucaucacagugauacaga

SEQ ID NO: 3100410 - RNA, 19 nt, Artificial Sequence
  Description of Artificial Sequence: Synthetic oligonucleotide
cagggagauagggaggggc

SEQ ID NO: 3100411 - RNA, 19 nt, Artificial Sequence
  Description of Artificial Sequence: Synthetic oligonucleotide
ucaaaucaucacagugaua

SEQ ID NO: 3100412 - RNA, 19 nt, Artificial Sequence
  Description of Artificial Sequence: Synthetic oligonucleotide
aggccacagccacccaggc

SEQ ID NO: 3100413 - RNA, 19 nt, Artificial Sequence
  Description of Artificial Sequence: Synthetic oligonucleotide
uuugggcucuucucauuuc

SEQ ID NO: 3100414 - RNA, 19 nt, Artificial Sequence
  Description of Artificial Sequence: Synthetic oligonucleotide
ccuucugucuucagaagug

SEQ ID NO: 3100415 - RNA, 19 nt, Artificial Sequence
  Description of Artificial Sequence: Synthetic oligonucleotide
gaguacagggagauaggga

SEQ ID NO: 3100416 - RNA, 19 nt, Artificial Sequence
  Description of Artificial Sequence: Synthetic oligonucleotide
uccaccaucuccagaccuu

SEQ ID NO: 3100417 - RNA, 19 nt, Artificial Sequence
  Description of Artificial Sequence: Synthetic oligonucleotide
cuauggaagacagaagagu

SEQ ID NO: 3100418 - RNA, 19 nt, Artificial Sequence
  Description of Artificial Sequence: Synthetic oligonucleotide
cucaaaucaucacagugau

SEQ ID NO: 3100419 - RNA, 19 nt, Artificial Sequence
  Description of Artificial Sequence: Synthetic oligonucleotide
ccacguuuggucuugguca

SEQ ID NO: 3100420 - RNA, 19 nt, Artificial Sequence
  Description of Artificial Sequence: Synthetic oligonucleotide
ggggcacucagagauuugg

SEQ ID NO: 3100421 - RNA, 19 nt, Artificial Sequence
  Description of Artificial Sequence: Synthetic oligonucleotide
guuuggucuuggucauaag

SEQ ID NO: 3100422 - RNA, 19 nt, Artificial Sequence
  Description of Artificial Sequence: Synthetic oligonucleotide
gauacagacuuagcagaaa

SEQ ID NO: 3100423 - RNA, 19 nt, Artificial Sequence
  Description of Artificial Sequence: Synthetic oligonucleotide
cauuucuccuuaggacagg

SEQ ID NO: 3100424 - RNA, 19 nt, Artificial Sequence
  Description of Artificial Sequence: Synthetic oligonucleotide
acagaagaguacagggaga

SEQ ID NO: 3100425 - RNA, 19 nt, Artificial Sequence
  Description of Artificial Sequence: Synthetic oligonucleotide
ggaagacagaagaguacag

SEQ ID NO: 3100426 - RNA, 19 nt, Artificial Sequence
  Description of Artificial Sequence: Synthetic oligonucleotide
ugggcucuucucauuucuc

SEQ ID NO: 3100427 - RNA, 19 nt, Artificial Sequence
  Description of Artificial Sequence: Synthetic oligonucleotide
cagaccuucugucuucaga

SEQ ID NO: 3100428 - RNA, 19 nt, Artificial Sequence
  Description of Artificial Sequence: Synthetic oligonucleotide
agaaaccauugaaacaaua

SEQ ID NO: 3100429 - RNA, 19 nt, Artificial Sequence
  Description of Artificial Sequence: Synthetic oligonucleotide
aggacaggccacagccacc

SEQ ID NO: 3100430 - RNA, 19 nt, Artificial Sequence
  Description of Artificial Sequence: Synthetic oligonucleotide
ucacagugauacagacuua

SEQ ID NO: 3100431 - RNA, 19 nt, Artificial Sequence
  Description of Artificial Sequence: Synthetic oligonucleotide
uccuuaggacaggccacag

SEQ ID NO: 3100432 - RNA, 19 nt, Artificial Sequence
  Description of Artificial Sequence: Synthetic oligonucleotide
ucuuggucauaagcacaga

SEQ ID NO: 3100433 - RNA, 19 nt, Artificial Sequence
  Description of Artificial Sequence: Synthetic oligonucleotide
gagauagggaggggcacuc

SEQ ID NO: 3100434 - RNA, 19 nt, Artificial Sequence
  Description of Artificial Sequence: Synthetic oligonucleotide
cuccagaccuucugucuuc

SEQ ID NO: 3100435 - RNA, 19 nt, Artificial Sequence
  Description of Artificial Sequence: Synthetic oligonucleotide
uccagaccuucugucuuca

SEQ ID NO: 3100436 - RNA, 19 nt, Artificial Sequence
  Description of Artificial Sequence: Synthetic oligonucleotide
cagaagccaguccaaggga

SEQ ID NO: 3100437 - RNA, 19 nt, Artificial Sequence
  Description of Artificial Sequence: Synthetic oligonucleotide
acucagagauuugggcucu

SEQ ID NO: 3100438 - RNA, 19 nt, Artificial Sequence
  Description of Artificial Sequence: Synthetic oligonucleotide
gucuucagaaguggaguuc

SEQ ID NO: 3100439 - RNA, 19 nt, Artificial Sequence
  Description of Artificial Sequence: Synthetic oligonucleotide
ucagagauuugggcucuuc

SEQ ID NO: 3100440 - RNA, 19 nt, Artificial Sequence
  Description of Artificial Sequence: Synthetic oligonucleotide
agggagauagggaggggca

SEQ ID NO: 3100441 - RNA, 19 nt, Artificial Sequence
  Description of Artificial Sequence: Synthetic oligonucleotide
gggaggggcacucagagau

SEQ ID NO: 3100442 - RNA, 19 nt, Artificial Sequence
  Description of Artificial Sequence: Synthetic oligonucleotide
ccaccuuccaccaucucca

SEQ ID NO: 3100443 - RNA, 19 nt, Artificial Sequence
  Description of Artificial Sequence: Synthetic oligonucleotide
ggacaggccacagccaccc

SEQ ID NO: 3100444 - RNA, 19 nt, Artificial Sequence
  Description of Artificial Sequence: Synthetic oligonucleotide
acagggagauagggagggg

SEQ ID NO: 3100445 - RNA, 19 nt, Artificial Sequence
  Description of Artificial Sequence: Synthetic oligonucleotide
gcacucagagauuugggcu

SEQ ID NO: 3100446 - RNA, 19 nt, Artificial Sequence
  Description of Artificial Sequence: Synthetic oligonucleotide
accuuccaccaucuccaga

SEQ ID NO: 3100447 - RNA, 19 nt, Artificial Sequence
  Description of Artificial Sequence: Synthetic oligonucleotide
cagaaguggaguucaacuu

SEQ ID NO: 3100448 - RNA, 19 nt, Artificial Sequence
  Description of Artificial Sequence: Synthetic oligonucleotide
ggucuuggucauaagcaca

SEQ ID NO: 3100449 - RNA, 19 nt, Artificial Sequence
  Description of Artificial Sequence: Synthetic oligonucleotide
agggaggggcacucagaga

SEQ ID NO: 3100450 - RNA, 19 nt, Artificial Sequence
  Description of Artificial Sequence: Synthetic oligonucleotide
caucacagugauacagacu

SEQ ID NO: 3100451 - RNA, 19 nt, Artificial Sequence
  Description of Artificial Sequence: Synthetic oligonucleotide
ccauugaaacaauacaaau

SEQ ID NO: 3100452 - RNA, 19 nt, Artificial Sequence
  Description of Artificial Sequence: Synthetic oligonucleotide
gggcacucagagauuuggg

SEQ ID NO: 3100453 - RNA, 19 nt, Artificial Sequence
  Description of Artificial Sequence: Synthetic oligonucleotide
cacccaggcccacguuugg

SEQ ID NO: 3100454 - RNA, 19 nt, Artificial Sequence
  Description of Artificial Sequence: Synthetic oligonucleotide
cagagauuugggcucuucu

SEQ ID NO: 3100455 - RNA, 19 nt, Artificial Sequence
  Description of Artificial Sequence: Synthetic oligonucleotide
caccuuccaccaucuccag

SEQ ID NO: 3100456 - RNA, 19 nt, Artificial Sequence
  Description of Artificial Sequence: Synthetic oligonucleotide
cccacguuuggucuugguc

SEQ ID NO: 3100457 - RNA, 19 nt, Artificial Sequence
  Description of Artificial Sequence: Synthetic oligonucleotide
ccuuaggacaggccacagc

SEQ ID NO: 3100458 - RNA, 19 nt, Artificial Sequence
  Description of Artificial Sequence: Synthetic oligonucleotide
cagacuuagcagaaaccau

SEQ ID NO: 3100459 - RNA, 19 nt, Artificial Sequence
  Description of Artificial Sequence: Synthetic oligonucleotide
cauaagcacagaagccagu

SEQ ID NO: 3100460 - RNA, 19 nt, Artificial Sequence
  Description of Artificial Sequence: Synthetic oligonucleotide
gcacagaagccaguccaag

SEQ ID NO: 3100461 - RNA, 19 nt, Artificial Sequence
  Description of Artificial Sequence: Synthetic oligonucleotide
agcacagaagccaguccaa

SEQ ID NO: 3100462 - RNA, 19 nt, Artificial Sequence
  Description of Artificial Sequence: Synthetic oligonucleotide
gauuugggcucuucucauu

SEQ ID NO: 3100463 - RNA, 19 nt, Artificial Sequence
  Description of Artificial Sequence: Synthetic oligonucleotide
agauagggaggggcacuca

SEQ ID NO: 3100464 - RNA, 19 nt, Artificial Sequence
  Description of Artificial Sequence: Synthetic oligonucleotide
agaagaguacagggagaua

SEQ ID NO: 3100465 - RNA, 19 nt, Artificial Sequence
  Description of Artificial Sequence: Synthetic oligonucleotide
cuccuuaggacaggccaca

SEQ ID NO: 3100466 - RNA, 19 nt, Artificial Sequence
  Description of Artificial Sequence: Synthetic oligonucleotide
cuucagaaguggaguucaa

SEQ ID NO: 3100467 - RNA, 19 nt, Artificial Sequence
  Description of Artificial Sequence: Synthetic oligonucleotide
acccuggugccaccuucca

SEQ ID NO: 3100468 - RNA, 19 nt, Artificial Sequence
  Description of Artificial Sequence: Synthetic oligonucleotide
ggcucuucucauuucuccu

SEQ ID NO: 3100469 - RNA, 19 nt, Artificial Sequence
  Description of Artificial Sequence: Synthetic oligonucleotide
ggacccuggugccaccuuc

SEQ ID NO: 3100470 - RNA, 19 nt, Artificial Sequence
  Description of Artificial Sequence: Synthetic oligonucleotide
ccacccaggcccacguuug

SEQ ID NO: 3100471 - RNA, 19 nt, Artificial Sequence
  Description of Artificial Sequence: Synthetic oligonucleotide
gggagauagggaggggcac

SEQ ID NO: 3100472 - RNA, 19 nt, Artificial Sequence
  Description of Artificial Sequence: Synthetic oligonucleotide
aggcccacguuuggucuug

SEQ ID NO: 3100473 - RNA, 19 nt, Artificial Sequence
  Description of Artificial Sequence: Synthetic oligonucleotide
gaggggcacucagagauuu

SEQ ID NO: 3100474 - RNA, 19 nt, Artificial Sequence
  Description of Artificial Sequence: Synthetic oligonucleotide
cagaaaccauugaaacaau

SEQ ID NO: 3100475 - RNA, 19 nt, Artificial Sequence
  Description of Artificial Sequence: Synthetic oligonucleotide
cacguuuggucuuggucau

SEQ ID NO: 3100476 - RNA, 19 nt, Artificial Sequence
  Description of Artificial Sequence: Synthetic oligonucleotide
agccaguccaagggacccu

SEQ ID NO: 3100477 - RNA, 19 nt, Artificial Sequence
  Description of Artificial Sequence: Synthetic oligonucleotide
ccaguccaagggacccugg

SEQ ID NO: 3100478 - RNA, 19 nt, Artificial Sequence
  Description of Artificial Sequence: Synthetic oligonucleotide
uggugccaccuuccaccau

SEQ ID NO: 3100479 - RNA, 19 nt, Artificial Sequence
  Description of Artificial Sequence: Synthetic oligonucleotide
agggacccuggugccaccu

SEQ ID NO: 3100480 - RNA, 19 nt, Artificial Sequence
  Description of Artificial Sequence: Synthetic oligonucleotide
aggggcacucagagauuug

SEQ ID NO: 3100481 - RNA, 19 nt, Artificial Sequence
  Description of Artificial Sequence: Synthetic oligonucleotide
gccaguccaagggacccug

SEQ ID NO: 3100482 - RNA, 19 nt, Artificial Sequence
  Description of Artificial Sequence: Synthetic oligonucleotide
gacaggccacagccaccca

SEQ ID NO: 3100483 - RNA, 19 nt, Artificial Sequence
  Description of Artificial Sequence: Synthetic oligonucleotide
ccaccaucuccagaccuuc

SEQ ID NO: 3100484 - RNA, 19 nt, Artificial Sequence
  Description of Artificial Sequence: Synthetic oligonucleotide
caguccaagggacccuggu

SEQ ID NO: 3100485 - RNA, 19 nt, Artificial Sequence
  Description of Artificial Sequence: Synthetic oligonucleotide
ggagauagggaggggcacu

SEQ ID NO: 3100486 - RNA, 19 nt, Artificial Sequence
  Description of Artificial Sequence: Synthetic oligonucleotide
cccuggugccaccuuccac

SEQ ID NO: 3100487 - RNA, 19 nt, Artificial Sequence
  Description of Artificial Sequence: Synthetic oligonucleotide
cguuuggucuuggucauaa

SEQ ID NO: 3100488 - RNA, 19 nt, Artificial Sequence
  Description of Artificial Sequence: Synthetic oligonucleotide
caccaucuccagaccuucu

SEQ ID NO: 3100489 - RNA, 19 nt, Artificial Sequence
  Description of Artificial Sequence: Synthetic oligonucleotide
ccaucuccagaccuucugu

SEQ ID NO: 3100490 - RNA, 19 nt, Artificial Sequence
  Description of Artificial Sequence: Synthetic oligonucleotide
agccacccaggcccacguu

SEQ ID NO: 3100491 - RNA, 19 nt, Artificial Sequence
  Description of Artificial Sequence: Synthetic oligonucleotide
acguuuggucuuggucaua

SEQ ID NO: 3100492 - RNA, 19 nt, Artificial Sequence
  Description of Artificial Sequence: Synthetic oligonucleotide
gugccaccuuccaccaucu

SEQ ID NO: 3100493 - RNA, 19 nt, Artificial Sequence
  Description of Artificial Sequence: Synthetic oligonucleotide
cacagccacccaggcccac

SEQ ID NO: 3100494 - RNA, 19 nt, Artificial Sequence
  Description of Artificial Sequence: Synthetic oligonucleotide
ggcccacguuuggucuugg

SEQ ID NO: 3100495 - RNA, 19 nt, Artificial Sequence
  Description of Artificial Sequence: Synthetic oligonucleotide
ccaggcccacguuuggucu

SEQ ID NO: 3100496 - RNA, 19 nt, Artificial Sequence
  Description of Artificial Sequence: Synthetic oligonucleotide
cagccacccaggcccacgu

SEQ ID NO: 3100497 - RNA, 19 nt, Artificial Sequence
  Description of Artificial Sequence: Synthetic oligonucleotide
gccacccaggcccacguuu

SEQ ID NO: 3100498 - RNA, 19 nt, Artificial Sequence
  Description of Artificial Sequence: Synthetic oligonucleotide
caggcccacguuuggucuu

SEQ ID NO: 3100499 - RNA, 19 nt, Artificial Sequence
  Description of Artificial Sequence: Synthetic oligonucleotide
ccaagggacccuggugcca

SEQ ID NO: 3100500 - RNA, 19 nt, Artificial Sequence
  Description of Artificial Sequence: Synthetic oligonucleotide
ccacagccacccaggccca

SEQ ID NO: 3100501 - RNA, 19 nt, Artificial Sequence
  Description of Artificial Sequence: Synthetic oligonucleotide
gcccacguuuggucuuggu

SEQ ID NO: 3100502 - RNA, 19 nt, Artificial Sequence
  Description of Artificial Sequence: Synthetic oligonucleotide
ggaggggcacucagagauu

SEQ ID NO: 3100503 - RNA, 19 nt, Artificial Sequence
  Description of Artificial Sequence: Synthetic oligonucleotide
cucagagauuugggcucuu

SEQ ID NO: 3100504 - RNA, 19 nt, Artificial Sequence
  Description of Artificial Sequence: Synthetic oligonucleotide
gggacccuggugccaccuu

SEQ ID NO: 3100505 - RNA, 19 nt, Artificial Sequence
  Description of Artificial Sequence: Synthetic oligonucleotide
auguggaucauauugaugc

SEQ ID NO: 3100506 - RNA, 19 nt, Artificial Sequence
  Description of Artificial Sequence: Synthetic oligonucleotide
aaaucaggcauuuuguugu

SEQ ID NO: 3100507 - RNA, 19 nt, Artificial Sequence
  Description of Artificial Sequence: Synthetic oligonucleotide
auagguaaucagcacagcc

SEQ ID NO: 3100508 - RNA, 19 nt, Artificial Sequence
  Description of Artificial Sequence: Synthetic oligonucleotide
aaaaucaggcauuuuguug

SEQ ID NO: 3100509 - RNA, 19 nt, Artificial Sequence
  Description of Artificial Sequence: Synthetic oligonucleotide
uauucuuuccggaaaauca

SEQ ID NO: 3100510 - RNA, 19 nt, Artificial Sequence
  Description of Artificial Sequence: Synthetic oligonucleotide
ucaaaguccacauugcucu

SEQ ID NO: 3100511 - RNA, 19 nt, Artificial Sequence
  Description of Artificial Sequence: Synthetic oligonucleotide
gagaucuucccauugacug

SEQ ID NO: 3100512 - RNA, 19 nt, Artificial Sequence
  Description of Artificial Sequence: Synthetic oligonucleotide
uuugaagagccccucagug

SEQ ID NO: 3100513 - RNA, 19 nt, Artificial Sequence
  Description of Artificial Sequence: Synthetic oligonucleotide
ucaggcauuuuguuguugg

SEQ ID NO: 3100514 - RNA, 19 nt, Artificial Sequence
  Description of Artificial Sequence: Synthetic oligonucleotide
uguccugcugcuuugaaga

SEQ ID NO: 3100515 - RNA, 19 nt, Artificial Sequence
  Description of Artificial Sequence: Synthetic oligonucleotide
acagccuugguuuuaagca

SEQ ID NO: 3100516 - RNA, 19 nt, Artificial Sequence
  Description of Artificial Sequence: Synthetic oligonucleotide
agaucuucccauugacugc

SEQ ID NO: 3100517 - RNA, 19 nt, Artificial Sequence
  Description of Artificial Sequence: Synthetic oligonucleotide
ccuaguucuucuaagaggg

SEQ ID NO: 3100518 - RNA, 19 nt, Artificial Sequence
  Description of Artificial Sequence: Synthetic oligonucleotide
ucuuuccggaaaaucaggc

SEQ ID NO: 3100519 - RNA, 19 nt, Artificial Sequence
  Description of Artificial Sequence: Synthetic oligonucleotide
uucuuuccggaaaaucagg

SEQ ID NO: 3100520 - RNA, 19 nt, Artificial Sequence
  Description of Artificial Sequence: Synthetic oligonucleotide
uuuccggaaaaucaggcau

SEQ ID NO: 3100521 - RNA, 19 nt, Artificial Sequence
  Description of Artificial Sequence: Synthetic oligonucleotide
gcugauguggaucauauug

SEQ ID NO: 3100522 - RNA, 19 nt, Artificial Sequence
  Description of Artificial Sequence: Synthetic oligonucleotide
uagguaaucagcacagccu

SEQ ID NO: 3100523 - RNA, 19 nt, Artificial Sequence
  Description of Artificial Sequence: Synthetic oligonucleotide
ucccauugacugcaaaggg

SEQ ID NO: 3100524 - RNA, 19 nt, Artificial Sequence
  Description of Artificial Sequence: Synthetic oligonucleotide
uuuuaagcagcuguccugc

SEQ ID NO: 3100525 - RNA, 19 nt, Artificial Sequence
  Description of Artificial Sequence: Synthetic oligonucleotide
aaguccacauugcucuggg

SEQ ID NO: 3100526 - RNA, 19 nt, Artificial Sequence
  Description of Artificial Sequence: Synthetic oligonucleotide
caggucaaaguccacauug

SEQ ID NO: 3100527 - RNA, 19 nt, Artificial Sequence
  Description of Artificial Sequence: Synthetic oligonucleotide
uuuguuguuggcuggcaug

SEQ ID NO: 3100528 - RNA, 19 nt, Artificial Sequence
  Description of Artificial Sequence: Synthetic oligonucleotide
ugagggucaggucaaaguc

SEQ ID NO: 3100529 - RNA, 19 nt, Artificial Sequence
  Description of Artificial Sequence: Synthetic oligonucleotide
uccacauugcucuggggag

SEQ ID NO: 3100530 - RNA, 19 nt, Artificial Sequence
  Description of Artificial Sequence: Synthetic oligonucleotide
agggcugugucacgaaggc

SEQ ID NO: 3100531 - RNA, 19 nt, Artificial Sequence
  Description of Artificial Sequence: Synthetic oligonucleotide
auuggccuggccuaguucu

SEQ ID NO: 3100532 - RNA, 19 nt, Artificial Sequence
  Description of Artificial Sequence: Synthetic oligonucleotide
ucuaagagggcugugucac

SEQ ID NO: 3100533 - RNA, 19 nt, Artificial Sequence
  Description of Artificial Sequence: Synthetic oligonucleotide
cuucccauugacugcaaag

SEQ ID NO: 3100534 - RNA, 19 nt, Artificial Sequence
  Description of Artificial Sequence: Synthetic oligonucleotide
guaaucagcacagccuugg

SEQ ID NO: 3100535 - RNA, 19 nt, Artificial Sequence
  Description of Artificial Sequence: Synthetic oligonucleotide
uccaccauccucuccagga

SEQ ID NO: 3100536 - RNA, 19 nt, Artificial Sequence
  Description of Artificial Sequence: Synthetic oligonucleotide
aucagcacagccuugguuu

SEQ ID NO: 3100537 - RNA, 19 nt, Artificial Sequence
  Description of Artificial Sequence: Synthetic oligonucleotide
guuuuaagcagcuguccug

SEQ ID NO: 3100538 - RNA, 19 nt, Artificial Sequence
  Description of Artificial Sequence: Synthetic oligonucleotide
aaaguccacauugcucugg

SEQ ID NO: 3100539 - RNA, 19 nt, Artificial Sequence
  Description of Artificial Sequence: Synthetic oligonucleotide
uugaagagccccucagugc

SEQ ID NO: 3100540 - RNA, 19 nt, Artificial Sequence
  Description of Artificial Sequence: Synthetic oligonucleotide
uugguuuuaagcagcuguc

SEQ ID NO: 3100541 - RNA, 19 nt, Artificial Sequence
  Description of Artificial Sequence: Synthetic oligonucleotide
aggaccaagccauuggccu

SEQ ID NO: 3100542 - RNA, 19 nt, Artificial Sequence
  Description of Artificial Sequence: Synthetic oligonucleotide
auucuuuccggaaaaucag

SEQ ID NO: 3100543 - RNA, 19 nt, Artificial Sequence
  Description of Artificial Sequence: Synthetic oligonucleotide
ucuggguuccugcaucuga

SEQ ID NO: 3100544 - RNA, 19 nt, Artificial Sequence
  Description of Artificial Sequence: Synthetic oligonucleotide
gacugcaaagggcccauag

SEQ ID NO: 3100545 - RNA, 19 nt, Artificial Sequence
  Description of Artificial Sequence: Synthetic oligonucleotide
cacagccuugguuuuaagc

SEQ ID NO: 3100546 - RNA, 19 nt, Artificial Sequence
  Description of Artificial Sequence: Synthetic oligonucleotide
uucuaagagggcuguguca

SEQ ID NO: 3100547 - RNA, 19 nt, Artificial Sequence
  Description of Artificial Sequence: Synthetic oligonucleotide
uaguucuucuaagagggcu

SEQ ID NO: 3100548 - RNA, 19 nt, Artificial Sequence
  Description of Artificial Sequence: Synthetic oligonucleotide
guuguuggcuggcaugucc

SEQ ID NO: 3100549 - RNA, 19 nt, Artificial Sequence
  Description of Artificial Sequence: Synthetic oligonucleotide
gagagaucuucccauugac

SEQ ID NO: 3100550 - RNA, 19 nt, Artificial Sequence
  Description of Artificial Sequence: Synthetic oligonucleotide
uuggcuggcauguccacca

SEQ ID NO: 3100551 - RNA, 19 nt, Artificial Sequence
  Description of Artificial Sequence: Synthetic oligonucleotide
ccauugacugcaaagggcc

SEQ ID NO: 3100552 - RNA, 19 nt, Artificial Sequence
  Description of Artificial Sequence: Synthetic oligonucleotide
ucuucuaagagggcugugu

SEQ ID NO: 3100553 - RNA, 19 nt, Artificial Sequence
  Description of Artificial Sequence: Synthetic oligonucleotide
aaagggcccauagguaauc

SEQ ID NO: 3100554 - RNA, 19 nt, Artificial Sequence
  Description of Artificial Sequence: Synthetic oligonucleotide
uguggaucauauugaugca

SEQ ID NO: 3100555 - RNA, 19 nt, Artificial Sequence
  Description of Artificial Sequence: Synthetic oligonucleotide
uuguuggcuggcaugucca

SEQ ID NO: 3100556 - RNA, 19 nt, Artificial Sequence
  Description of Artificial Sequence: Synthetic oligonucleotide
ucuggggagagaucuuccc

SEQ ID NO: 3100557 - RNA, 19 nt, Artificial Sequence
  Description of Artificial Sequence: Synthetic oligonucleotide
gccuaguucuucuaagagg

SEQ ID NO: 3100558 - RNA, 19 nt, Artificial Sequence
  Description of Artificial Sequence: Synthetic oligonucleotide
aggucaaaguccacauugc

SEQ ID NO: 3100559 - RNA, 19 nt, Artificial Sequence
  Description of Artificial Sequence: Synthetic oligonucleotide
uuuuguuguuggcuggcau

SEQ ID NO: 3100560 - RNA, 19 nt, Artificial Sequence
  Description of Artificial Sequence: Synthetic oligonucleotide
aaucagcacagccuugguu

SEQ ID NO: 3100561 - RNA, 19 nt, Artificial Sequence
  Description of Artificial Sequence: Synthetic oligonucleotide
ugguuuuaagcagcugucc

SEQ ID NO: 3100562 - RNA, 19 nt, Artificial Sequence
  Description of Artificial Sequence: Synthetic oligonucleotide
cugauguggaucauauuga

SEQ ID NO: 3100563 - RNA, 19 nt, Artificial Sequence
  Description of Artificial Sequence: Synthetic oligonucleotide
agguaaucagcacagccuu

SEQ ID NO: 3100564 - RNA, 19 nt, Artificial Sequence
  Description of Artificial Sequence: Synthetic oligonucleotide
cuugguuuuaagcagcugu

SEQ ID NO: 3100565 - RNA, 19 nt, Artificial Sequence
  Description of Artificial Sequence: Synthetic oligonucleotide
ugcugcuuugaagagcccc

SEQ ID NO: 3100566 - RNA, 19 nt, Artificial Sequence
  Description of Artificial Sequence: Synthetic oligonucleotide
cagccuugguuuuaagcag

SEQ ID NO: 3100567 - RNA, 19 nt, Artificial Sequence
  Description of Artificial Sequence: Synthetic oligonucleotide
agccuugguuuuaagcagc

SEQ ID NO: 3100568 - RNA, 19 nt, Artificial Sequence
  Description of Artificial Sequence: Synthetic oligonucleotide
acgaaggccccacucuggg

SEQ ID NO: 3100569 - RNA, 19 nt, Artificial Sequence
  Description of Artificial Sequence: Synthetic oligonucleotide
uggccuaguucuucuaaga

SEQ ID NO: 3100570 - RNA, 19 nt, Artificial Sequence
  Description of Artificial Sequence: Synthetic oligonucleotide
gagggucaggucaaagucc

SEQ ID NO: 3100571 - RNA, 19 nt, Artificial Sequence
  Description of Artificial Sequence: Synthetic oligonucleotide
guccacauugcucugggga

SEQ ID NO: 3100572 - RNA, 19 nt, Artificial Sequence
  Description of Artificial Sequence: Synthetic oligonucleotide
gagggcugugucacgaagg

SEQ ID NO: 3100573 - RNA, 19 nt, Artificial Sequence
  Description of Artificial Sequence: Synthetic oligonucleotide
uuguuguuggcuggcaugu

SEQ ID NO: 3100574 - RNA, 19 nt, Artificial Sequence
  Description of Artificial Sequence: Synthetic oligonucleotide
ccugcugcuuugaagagcc

SEQ ID NO: 3100575 - RNA, 19 nt, Artificial Sequence
  Description of Artificial Sequence: Synthetic oligonucleotide
cuucuaagagggcuguguc

SEQ ID NO: 3100576 - RNA, 19 nt, Artificial Sequence
  Description of Artificial Sequence: Synthetic oligonucleotide
cuauucuuuccggaaaauc

SEQ ID NO: 3100577 - RNA, 19 nt, Artificial Sequence
  Description of Artificial Sequence: Synthetic oligonucleotide
uaagagggcugugucacga

SEQ ID NO: 3100578 - RNA, 19 nt, Artificial Sequence
  Description of Artificial Sequence: Synthetic oligonucleotide
agagggcugugucacgaag

SEQ ID NO: 3100579 - RNA, 19 nt, Artificial Sequence
  Description of Artificial Sequence: Synthetic oligonucleotide
cuggguuccugcaucugag

SEQ ID NO: 3100580 - RNA, 19 nt, Artificial Sequence
  Description of Artificial Sequence: Synthetic oligonucleotide
ugcaaagggcccauaggua

SEQ ID NO: 3100581 - RNA, 19 nt, Artificial Sequence
  Description of Artificial Sequence: Synthetic oligonucleotide
cuggccuaguucuucuaag

SEQ ID NO: 3100582 - RNA, 19 nt, Artificial Sequence
  Description of Artificial Sequence: Synthetic oligonucleotide
cauugacugcaaagggccc

SEQ ID NO: 3100583 - RNA, 19 nt, Artificial Sequence
  Description of Artificial Sequence: Synthetic oligonucleotide
ggcugugucacgaaggccc

SEQ ID NO: 3100584 - RNA, 19 nt, Artificial Sequence
  Description of Artificial Sequence: Synthetic oligonucleotide
ugcuuugaagagccccuca

SEQ ID NO: 3100585 - RNA, 19 nt, Artificial Sequence
  Description of Artificial Sequence: Synthetic oligonucleotide
uggguuccugcaucugagg

SEQ ID NO: 3100586 - RNA, 19 nt, Artificial Sequence
  Description of Artificial Sequence: Synthetic oligonucleotide
gaucuucccauugacugca

SEQ ID NO: 3100587 - RNA, 19 nt, Artificial Sequence
  Description of Artificial Sequence: Synthetic oligonucleotide
uggggagagaucuucccau

SEQ ID NO: 3100588 - RNA, 19 nt, Artificial Sequence
  Description of Artificial Sequence: Synthetic oligonucleotide
gcaucugagggucagguca

SEQ ID NO: 3100589 - RNA, 19 nt, Artificial Sequence
  Description of Artificial Sequence: Synthetic oligonucleotide
uggcauguccaccauccuc

SEQ ID NO: 3100590 - RNA, 19 nt, Artificial Sequence
  Description of Artificial Sequence: Synthetic oligonucleotide
aagccauuggccuggccua

SEQ ID NO: 3100591 - RNA, 19 nt, Artificial Sequence
  Description of Artificial Sequence: Synthetic oligonucleotide
caggaccaagccauuggcc

SEQ ID NO: 3100592 - RNA, 19 nt, Artificial Sequence
  Description of Artificial Sequence: Synthetic oligonucleotide
ugucacgaaggccccacuc

SEQ ID NO: 3100593 - RNA, 19 nt, Artificial Sequence
  Description of Artificial Sequence: Synthetic oligonucleotide
cauuuuguuguuggcuggc

SEQ ID NO: 3100594 - RNA, 19 nt, Artificial Sequence
  Description of Artificial Sequence: Synthetic oligonucleotide
gaccaagccauuggccugg

SEQ ID NO: 3100595 - RNA, 19 nt, Artificial Sequence
  Description of Artificial Sequence: Synthetic oligonucleotide
ggguuccugcaucugaggg

SEQ ID NO: 3100596 - RNA, 19 nt, Artificial Sequence
  Description of Artificial Sequence: Synthetic oligonucleotide
cuuuccggaaaaucaggca

SEQ ID NO: 3100597 - RNA, 19 nt, Artificial Sequence
  Description of Artificial Sequence: Synthetic oligonucleotide
gucaaaguccacauugcuc

SEQ ID NO: 3100598 - RNA, 19 nt, Artificial Sequence
  Description of Artificial Sequence: Synthetic oligonucleotide
cuaagagggcugugucacg

SEQ ID NO: 3100599 - RNA, 19 nt, Artificial Sequence
  Description of Artificial Sequence: Synthetic oligonucleotide
uuccggaaaaucaggcauu

SEQ ID NO: 3100600 - RNA, 19 nt, Artificial Sequence
  Description of Artificial Sequence: Synthetic oligonucleotide
caggcauuuuguuguuggc

SEQ ID NO: 3100601 - RNA, 19 nt, Artificial Sequence
  Description of Artificial Sequence: Synthetic oligonucleotide
auugacugcaaagggccca

SEQ ID NO: 3100602 - RNA, 19 nt, Artificial Sequence
  Description of Artificial Sequence: Synthetic oligonucleotide
uaaucagcacagccuuggu

SEQ ID NO: 3100603 - RNA, 19 nt, Artificial Sequence
  Description of Artificial Sequence: Synthetic oligonucleotide
ggccuaguucuucuaagag

SEQ ID NO: 3100604 - RNA, 19 nt, Artificial Sequence
  Description of Artificial Sequence: Synthetic oligonucleotide
cggaaaaucaggcauuuug

SEQ ID NO: 3100605 - RNA, 19 nt, Artificial Sequence
  Description of Artificial Sequence: Synthetic oligonucleotide
agccccucagugcaguuca

SEQ ID NO: 3100606 - RNA, 19 nt, Artificial Sequence
  Description of Artificial Sequence: Synthetic oligonucleotide
cucuggggagagaucuucc

SEQ ID NO: 3100607 - RNA, 19 nt, Artificial Sequence
  Description of Artificial Sequence: Synthetic oligonucleotide
guuccugcaucugaggguc

SEQ ID NO: 3100608 - RNA, 19 nt, Artificial Sequence
  Description of Artificial Sequence: Synthetic oligonucleotide
cacgaaggccccacucugg

SEQ ID NO: 3100609 - RNA, 19 nt, Artificial Sequence
  Description of Artificial Sequence: Synthetic oligonucleotide
gcuuugaagagccccucag

SEQ ID NO: 3100610 - RNA, 19 nt, Artificial Sequence
  Description of Artificial Sequence: Synthetic oligonucleotide
aguccacauugcucugggg

SEQ ID NO: 3100611 - RNA, 19 nt, Artificial Sequence
  Description of Artificial Sequence: Synthetic oligonucleotide
uccugcugcuuugaagagc

SEQ ID NO: 3100612 - RNA, 19 nt, Artificial Sequence
  Description of Artificial Sequence: Synthetic oligonucleotide
agagaucuucccauugacu

SEQ ID NO: 3100613 - RNA, 19 nt, Artificial Sequence
  Description of Artificial Sequence: Synthetic oligonucleotide
caccauccucuccaggacc

SEQ ID NO: 3100614 - RNA, 19 nt, Artificial Sequence
  Description of Artificial Sequence: Synthetic oligonucleotide
agggcccauagguaaucag

SEQ ID NO: 3100615 - RNA, 19 nt, Artificial Sequence
  Description of Artificial Sequence: Synthetic oligonucleotide
cauagguaaucagcacagc

SEQ ID NO: 3100616 - RNA, 19 nt, Artificial Sequence
  Description of Artificial Sequence: Synthetic oligonucleotide
ucuucccauugacugcaaa

SEQ ID NO: 3100617 - RNA, 19 nt, Artificial Sequence
  Description of Artificial Sequence: Synthetic oligonucleotide
ucaggucaaaguccacauu

SEQ ID NO: 3100618 - RNA, 19 nt, Artificial Sequence
  Description of Artificial Sequence: Synthetic oligonucleotide
ugugucacgaaggccccac

SEQ ID NO: 3100619 - RNA, 19 nt, Artificial Sequence
  Description of Artificial Sequence: Synthetic oligonucleotide
gcuggcauguccaccaucc

SEQ ID NO: 3100620 - RNA, 19 nt, Artificial Sequence
  Description of Artificial Sequence: Synthetic oligonucleotide
acucuggguuccugcaucu

SEQ ID NO: 3100621 - RNA, 19 nt, Artificial Sequence
  Description of Artificial Sequence: Synthetic oligonucleotide
caaaguccacauugcucug

SEQ ID NO: 3100622 - RNA, 19 nt, Artificial Sequence
  Description of Artificial Sequence: Synthetic oligonucleotide
agggucaggucaaagucca

SEQ ID NO: 3100623 - RNA, 19 nt, Artificial Sequence
  Description of Artificial Sequence: Synthetic oligonucleotide
gcaaagggcccauagguaa

SEQ ID NO: 3100624 - RNA, 19 nt, Artificial Sequence
  Description of Artificial Sequence: Synthetic oligonucleotide
uccugcaucugagggucag

SEQ ID NO: 3100625 - RNA, 19 nt, Artificial Sequence
  Description of Artificial Sequence: Synthetic oligonucleotide
auuuuguuguuggcuggca

SEQ ID NO: 3100626 - RNA, 19 nt, Artificial Sequence
  Description of Artificial Sequence: Synthetic oligonucleotide
cacucuggguuccugcauc

SEQ ID NO: 3100627 - RNA, 19 nt, Artificial Sequence
  Description of Artificial Sequence: Synthetic oligonucleotide
ccucagugcaguucagggg

SEQ ID NO: 3100628 - RNA, 19 nt, Artificial Sequence
  Description of Artificial Sequence: Synthetic oligonucleotide
uguuggcuggcauguccac

SEQ ID NO: 3100629 - RNA, 19 nt, Artificial Sequence
  Description of Artificial Sequence: Synthetic oligonucleotide
aagagggcugugucacgaa

SEQ ID NO: 3100630 - RNA, 19 nt, Artificial Sequence
  Description of Artificial Sequence: Synthetic oligonucleotide
ggagagaucuucccauuga

SEQ ID NO: 3100631 - RNA, 19 nt, Artificial Sequence
  Description of Artificial Sequence: Synthetic oligonucleotide
ugcaucugagggucagguc

SEQ ID NO: 3100632 - RNA, 19 nt, Artificial Sequence
  Description of Artificial Sequence: Synthetic oligonucleotide
cacauugcucuggggagag

SEQ ID NO: 3100633 - RNA, 19 nt, Artificial Sequence
  Description of Artificial Sequence: Synthetic oligonucleotide
aagggcccauagguaauca

SEQ ID NO: 3100634 - RNA, 19 nt, Artificial Sequence
  Description of Artificial Sequence: Synthetic oligonucleotide
gggagagaucuucccauug

SEQ ID NO: 3100635 - RNA, 19 nt, Artificial Sequence
  Description of Artificial Sequence: Synthetic oligonucleotide
aagagccccucagugcagu

SEQ ID NO: 3100636 - RNA, 19 nt, Artificial Sequence
  Description of Artificial Sequence: Synthetic oligonucleotide
aagcagcuguccugcugcu

SEQ ID NO: 3100637 - RNA, 19 nt, Artificial Sequence
  Description of Artificial Sequence: Synthetic oligonucleotide
uccggaaaaucaggcauuu

SEQ ID NO: 3100638 - RNA, 19 nt, Artificial Sequence
  Description of Artificial Sequence: Synthetic oligonucleotide
gguuuuaagcagcuguccu

SEQ ID NO: 3100639 - RNA, 19 nt, Artificial Sequence
  Description of Artificial Sequence: Synthetic oligonucleotide
ucagcacagccuugguuuu

SEQ ID NO: 3100640 - RNA, 19 nt, Artificial Sequence
  Description of Artificial Sequence: Synthetic oligonucleotide
ggaaaaucaggcauuuugu

SEQ ID NO: 3100641 - RNA, 19 nt, Artificial Sequence
  Description of Artificial Sequence: Synthetic oligonucleotide
guuggcuggcauguccacc

SEQ ID NO: 3100642 - RNA, 19 nt, Artificial Sequence
  Description of Artificial Sequence: Synthetic oligonucleotide
gggcccauagguaaucagc

SEQ ID NO: 3100643 - RNA, 19 nt, Artificial Sequence
  Description of Artificial Sequence: Synthetic oligonucleotide
cauuggccuggccuaguuc

SEQ ID NO: 3100644 - RNA, 19 nt, Artificial Sequence
  Description of Artificial Sequence: Synthetic oligonucleotide
cuggggagagaucuuccca

SEQ ID NO: 3100645 - RNA, 19 nt, Artificial Sequence
  Description of Artificial Sequence: Synthetic oligonucleotide
aucaggcauuuuguuguug

SEQ ID NO: 3100646 - RNA, 19 nt, Artificial Sequence
  Description of Artificial Sequence: Synthetic oligonucleotide
ggaccaagccauuggccug

SEQ ID NO: 3100647 - RNA, 19 nt, Artificial Sequence
  Description of Artificial Sequence: Synthetic oligonucleotide
cccauagguaaucagcaca

SEQ ID NO: 3100648 - RNA, 19 nt, Artificial Sequence
  Description of Artificial Sequence: Synthetic oligonucleotide
ccaggaccaagccauuggc

SEQ ID NO: 3100649 - RNA, 19 nt, Artificial Sequence
  Description of Artificial Sequence: Synthetic oligonucleotide
gaaggccccacucuggguu

SEQ ID NO: 3100650 - RNA, 19 nt, Artificial Sequence
  Description of Artificial Sequence: Synthetic oligonucleotide
gaagagccccucagugcag

SEQ ID NO: 3100651 - RNA, 19 nt, Artificial Sequence
  Description of Artificial Sequence: Synthetic oligonucleotide
accauccucuccaggacca

SEQ ID NO: 3100652 - RNA, 19 nt, Artificial Sequence
  Description of Artificial Sequence: Synthetic oligonucleotide
uugacugcaaagggcccau

SEQ ID NO: 3100653 - RNA, 19 nt, Artificial Sequence
  Description of Artificial Sequence: Synthetic oligonucleotide
gucaggucaaaguccacau

SEQ ID NO: 3100654 - RNA, 19 nt, Artificial Sequence
  Description of Artificial Sequence: Synthetic oligonucleotide
gucacgaaggccccacucu

SEQ ID NO: 3100655 - RNA, 19 nt, Artificial Sequence
  Description of Artificial Sequence: Synthetic oligonucleotide
ggcccauagguaaucagca

SEQ ID NO: 3100656 - RNA, 19 nt, Artificial Sequence
  Description of Artificial Sequence: Synthetic oligonucleotide
ggucaggucaaaguccaca

SEQ ID NO: 3100657 - RNA, 19 nt, Artificial Sequence
  Description of Artificial Sequence: Synthetic oligonucleotide
caucugagggucaggucaa

SEQ ID NO: 3100658 - RNA, 19 nt, Artificial Sequence
  Description of Artificial Sequence: Synthetic oligonucleotide
cuuugaagagccccucagu

SEQ ID NO: 3100659 - RNA, 19 nt, Artificial Sequence
  Description of Artificial Sequence: Synthetic oligonucleotide
agcacagccuugguuuuaa

SEQ ID NO: 3100660 - RNA, 19 nt, Artificial Sequence
  Description of Artificial Sequence: Synthetic oligonucleotide
gguaaucagcacagccuug

SEQ ID NO: 3100661 - RNA, 19 nt, Artificial Sequence
  Description of Artificial Sequence: Synthetic oligonucleotide
cuccaggaccaagccauug

SEQ ID NO: 3100662 - RNA, 19 nt, Artificial Sequence
  Description of Artificial Sequence: Synthetic oligonucleotide
uguuguuggcuggcauguc

SEQ ID NO: 3100663 - RNA, 19 nt, Artificial Sequence
  Description of Artificial Sequence: Synthetic oligonucleotide
ggcauguccaccauccucu

SEQ ID NO: 3100664 - RNA, 19 nt, Artificial Sequence
  Description of Artificial Sequence: Synthetic oligonucleotide
ucuccaggaccaagccauu

SEQ ID NO: 3100665 - RNA, 19 nt, Artificial Sequence
  Description of Artificial Sequence: Synthetic oligonucleotide
accaagccauuggccuggc

SEQ ID NO: 3100666 - RNA, 19 nt, Artificial Sequence
  Description of Artificial Sequence: Synthetic oligonucleotide
agccauuggccuggccuag

SEQ ID NO: 3100667 - RNA, 19 nt, Artificial Sequence
  Description of Artificial Sequence: Synthetic oligonucleotide
aggccccacucuggguucc

SEQ ID NO: 3100668 - RNA, 19 nt, Artificial Sequence
  Description of Artificial Sequence: Synthetic oligonucleotide
uuggccuggccuaguucuu

SEQ ID NO: 3100669 - RNA, 19 nt, Artificial Sequence
  Description of Artificial Sequence: Synthetic oligonucleotide
gcccauagguaaucagcac

SEQ ID NO: 3100670 - RNA, 19 nt, Artificial Sequence
  Description of Artificial Sequence: Synthetic oligonucleotide
gguuccugcaucugagggu

SEQ ID NO: 3100671 - RNA, 19 nt, Artificial Sequence
  Description of Artificial Sequence: Synthetic oligonucleotide
cugcuuugaagagccccuc

SEQ ID NO: 3100672 - RNA, 19 nt, Artificial Sequence
  Description of Artificial Sequence: Synthetic oligonucleotide
cugcugcuuugaagagccc

SEQ ID NO: 3100673 - RNA, 19 nt, Artificial Sequence
  Description of Artificial Sequence: Synthetic oligonucleotide
guucuucuaagagggcugu

SEQ ID NO: 3100674 - RNA, 19 nt, Artificial Sequence
  Description of Artificial Sequence: Synthetic oligonucleotide
cauugcucuggggagagau

SEQ ID NO: 3100675 - RNA, 19 nt, Artificial Sequence
  Description of Artificial Sequence: Synthetic oligonucleotide
uggccuggccuaguucuuc

SEQ ID NO: 3100676 - RNA, 19 nt, Artificial Sequence
  Description of Artificial Sequence: Synthetic oligonucleotide
gagccccucagugcaguuc

SEQ ID NO: 3100677 - RNA, 19 nt, Artificial Sequence
  Description of Artificial Sequence: Synthetic oligonucleotide
gcugugucacgaaggcccc

SEQ ID NO: 3100678 - RNA, 19 nt, Artificial Sequence
  Description of Artificial Sequence: Synthetic oligonucleotide
agcuguccugcugcuuuga

SEQ ID NO: 3100679 - RNA, 19 nt, Artificial Sequence
  Description of Artificial Sequence: Synthetic oligonucleotide
caaagggcccauagguaau

SEQ ID NO: 3100680 - RNA, 19 nt, Artificial Sequence
  Description of Artificial Sequence: Synthetic oligonucleotide
gcucuggggagagaucuuc

SEQ ID NO: 3100681 - RNA, 19 nt, Artificial Sequence
  Description of Artificial Sequence: Synthetic oligonucleotide
agagccccucagugcaguu

SEQ ID NO: 3100682 - RNA, 19 nt, Artificial Sequence
  Description of Artificial Sequence: Synthetic oligonucleotide
cugcaucugagggucaggu

SEQ ID NO: 3100683 - RNA, 19 nt, Artificial Sequence
  Description of Artificial Sequence: Synthetic oligonucleotide
gcacagccuugguuuuaag

SEQ ID NO: 3100684 - RNA, 19 nt, Artificial Sequence
  Description of Artificial Sequence: Synthetic oligonucleotide
gggcugugucacgaaggcc

SEQ ID NO: 3100685 - RNA, 19 nt, Artificial Sequence
  Description of Artificial Sequence: Synthetic oligonucleotide
gcugcuuugaagagccccu

SEQ ID NO: 3100686 - RNA, 19 nt, Artificial Sequence
  Description of Artificial Sequence: Synthetic oligonucleotide
ccugcaucugagggucagg

SEQ ID NO: 3100687 - RNA, 19 nt, Artificial Sequence
  Description of Artificial Sequence: Synthetic oligonucleotide
acauugcucuggggagaga

SEQ ID NO: 3100688 - RNA, 19 nt, Artificial Sequence
  Description of Artificial Sequence: Synthetic oligonucleotide
ggcuggcauguccaccauc

SEQ ID NO: 3100689 - RNA, 19 nt, Artificial Sequence
  Description of Artificial Sequence: Synthetic oligonucleotide
ccuugguuuuaagcagcug

SEQ ID NO: 3100690 - RNA, 19 nt, Artificial Sequence
  Description of Artificial Sequence: Synthetic oligonucleotide
gcagcuguccugcugcuuu

SEQ ID NO: 3100691 - RNA, 19 nt, Artificial Sequence
  Description of Artificial Sequence: Synthetic oligonucleotide
ugacugcaaagggcccaua

SEQ ID NO: 3100692 - RNA, 19 nt, Artificial Sequence
  Description of Artificial Sequence: Synthetic oligonucleotide
aucugagggucaggucaaa

SEQ ID NO: 3100693 - RNA, 19 nt, Artificial Sequence
  Description of Artificial Sequence: Synthetic oligonucleotide
ccuggccuaguucuucuaa

SEQ ID NO: 3100694 - RNA, 19 nt, Artificial Sequence
  Description of Artificial Sequence: Synthetic oligonucleotide
gggcugauguggaucauau

SEQ ID NO: 3100695 - RNA, 19 nt, Artificial Sequence
  Description of Artificial Sequence: Synthetic oligonucleotide
gcuguccugcugcuuugaa

SEQ ID NO: 3100696 - RNA, 19 nt, Artificial Sequence
  Description of Artificial Sequence: Synthetic oligonucleotide
aucuucccauugacugcaa

SEQ ID NO: 3100697 - RNA, 19 nt, Artificial Sequence
  Description of Artificial Sequence: Synthetic oligonucleotide
gcuauucuuuccggaaaau

SEQ ID NO: 3100698 - RNA, 19 nt, Artificial Sequence
  Description of Artificial Sequence: Synthetic oligonucleotide
cuggcauguccaccauccu

SEQ ID NO: 3100699 - RNA, 19 nt, Artificial Sequence
  Description of Artificial Sequence: Synthetic oligonucleotide
gugucacgaaggccccacu

SEQ ID NO: 3100700 - RNA, 19 nt, Artificial Sequence
  Description of Artificial Sequence: Synthetic oligonucleotide
cugugucacgaaggcccca

SEQ ID NO: 3100701 - RNA, 19 nt, Artificial Sequence
  Description of Artificial Sequence: Synthetic oligonucleotide
ccaagccauuggccuggcc

SEQ ID NO: 3100702 - RNA, 19 nt, Artificial Sequence
  Description of Artificial Sequence: Synthetic oligonucleotide
ccacauugcucuggggaga

SEQ ID NO: 3100703 - RNA, 19 nt, Artificial Sequence
  Description of Artificial Sequence: Synthetic oligonucleotide
ggggcugauguggaucaua

SEQ ID NO: 3100704 - RNA, 19 nt, Artificial Sequence
  Description of Artificial Sequence: Synthetic oligonucleotide
ggccuggccuaguucuucu

SEQ ID NO: 3100705 - RNA, 19 nt, Artificial Sequence
  Description of Artificial Sequence: Synthetic oligonucleotide
ggggagagaucuucccauu

SEQ ID NO: 3100706 - RNA, 19 nt, Artificial Sequence
  Description of Artificial Sequence: Synthetic oligonucleotide
gggucaggucaaaguccac

SEQ ID NO: 3100707 - RNA, 19 nt, Artificial Sequence
  Description of Artificial Sequence: Synthetic oligonucleotide
gccuugguuuuaagcagcu

SEQ ID NO: 3100708 - RNA, 19 nt, Artificial Sequence
  Description of Artificial Sequence: Synthetic oligonucleotide
cagcacagccuugguuuua

SEQ ID NO: 3100709 - RNA, 19 nt, Artificial Sequence
  Description of Artificial Sequence: Synthetic oligonucleotide
ggcugauguggaucauauu

SEQ ID NO: 3100710 - RNA, 19 nt, Artificial Sequence
  Description of Artificial Sequence: Synthetic oligonucleotide
gccccucagugcaguucag

SEQ ID NO: 3100711 - RNA, 19 nt, Artificial Sequence
  Description of Artificial Sequence: Synthetic oligonucleotide
gccuggccuaguucuucua

SEQ ID NO: 3100712 - RNA, 19 nt, Artificial Sequence
  Description of Artificial Sequence: Synthetic oligonucleotide
gccccacucuggguuccug

SEQ ID NO: 3100713 - RNA, 19 nt, Artificial Sequence
  Description of Artificial Sequence: Synthetic oligonucleotide
ccauuggccuggccuaguu

SEQ ID NO: 3100714 - RNA, 19 nt, Artificial Sequence
  Description of Artificial Sequence: Synthetic oligonucleotide
gccauuggccuggccuagu

SEQ ID NO: 3100715 - RNA, 19 nt, Artificial Sequence
  Description of Artificial Sequence: Synthetic oligonucleotide
cgaaggccccacucugggu

SEQ ID NO: 3100716 - RNA, 19 nt, Artificial Sequence
  Description of Artificial Sequence: Synthetic oligonucleotide
ccggaaaaucaggcauuuu

SEQ ID NO: 3100717 - RNA, 19 nt, Artificial Sequence
  Description of Artificial Sequence: Synthetic oligonucleotide
ggccccacucuggguuccu

SEQ ID NO: 3100718 - RNA, 19 nt, Artificial Sequence
  Description of Artificial Sequence: Synthetic oligonucleotide
aggacaugaaccuugaugg

SEQ ID NO: 3100719 - RNA, 19 nt, Artificial Sequence
  Description of Artificial Sequence: Synthetic oligonucleotide
aaggcucacaccuugaggg

SEQ ID NO: 3100720 - RNA, 19 nt, Artificial Sequence
  Description of Artificial Sequence: Synthetic oligonucleotide
auuuuaguguuccucaugg

SEQ ID NO: 3100721 - RNA, 19 nt, Artificial Sequence
  Description of Artificial Sequence: Synthetic oligonucleotide
guuagaagcagccuguucg

SEQ ID NO: 3100722 - RNA, 19 nt, Artificial Sequence
  Description of Artificial Sequence: Synthetic oligonucleotide
aacaaagugcuaugcgucc

SEQ ID NO: 3100723 - RNA, 19 nt, Artificial Sequence
  Description of Artificial Sequence: Synthetic oligonucleotide
aggaugucaagagaaaugc

SEQ ID NO: 3100724 - RNA, 19 nt, Artificial Sequence
  Description of Artificial Sequence: Synthetic oligonucleotide
ugaauuuuaguguuccuca

SEQ ID NO: 3100725 - RNA, 19 nt, Artificial Sequence
  Description of Artificial Sequence: Synthetic oligonucleotide
uuaguguuccucaugguca

SEQ ID NO: 3100726 - RNA, 19 nt, Artificial Sequence
  Description of Artificial Sequence: Synthetic oligonucleotide
aguugaauuuuaguguucc

SEQ ID NO: 3100727 - RNA, 19 nt, Artificial Sequence
  Description of Artificial Sequence: Synthetic oligonucleotide
aagauuggccuuuagggga

SEQ ID NO: 3100728 - RNA, 19 nt, Artificial Sequence
  Description of Artificial Sequence: Synthetic oligonucleotide
uuaggggaaagagagagag

SEQ ID NO: 3100729 - RNA, 19 nt, Artificial Sequence
  Description of Artificial Sequence: Synthetic oligonucleotide
uuugaggacaugaaccuug

SEQ ID NO: 3100730 - RNA, 19 nt, Artificial Sequence
  Description of Artificial Sequence: Synthetic oligonucleotide
gaugucaagagaaaugccc

SEQ ID NO: 3100731 - RNA, 19 nt, Artificial Sequence
  Description of Artificial Sequence: Synthetic oligonucleotide
guuaguuagaagcagccug

SEQ ID NO: 3100732 - RNA, 19 nt, Artificial Sequence
  Description of Artificial Sequence: Synthetic oligonucleotide
agauggaagcgccaugugc

SEQ ID NO: 3100733 - RNA, 19 nt, Artificial Sequence
  Description of Artificial Sequence: Synthetic oligonucleotide
cuuucugcaaugcagcugc

SEQ ID NO: 3100734 - RNA, 19 nt, Artificial Sequence
  Description of Artificial Sequence: Synthetic oligonucleotide
aaaggcucacaccuugagg

SEQ ID NO: 3100735 - RNA, 19 nt, Artificial Sequence
  Description of Artificial Sequence: Synthetic oligonucleotide
aauuuuaguguuccucaug

SEQ ID NO: 3100736 - RNA, 19 nt, Artificial Sequence
  Description of Artificial Sequence: Synthetic oligonucleotide
ucuggauucagcaugucuc

SEQ ID NO: 3100737 - RNA, 19 nt, Artificial Sequence
  Description of Artificial Sequence: Synthetic oligonucleotide
gaggacaugaaccuugaug

SEQ ID NO: 3100738 - RNA, 19 nt, Artificial Sequence
  Description of Artificial Sequence: Synthetic oligonucleotide
uuuaguguuccucaugguc

SEQ ID NO: 3100739 - RNA, 19 nt, Artificial Sequence
  Description of Artificial Sequence: Synthetic oligonucleotide
uccaguugaauuuuagugu

SEQ ID NO: 3100740 - RNA, 19 nt, Artificial Sequence
  Description of Artificial Sequence: Synthetic oligonucleotide
ugaaccuugaugguggucc

SEQ ID NO: 3100741 - RNA, 19 nt, Artificial Sequence
  Description of Artificial Sequence: Synthetic oligonucleotide
guccaguugaauuuuagug

SEQ ID NO: 3100742 - RNA, 19 nt, Artificial Sequence
  Description of Artificial Sequence: Synthetic oligonucleotide
cuuuaggggaaagagagag

SEQ ID NO: 3100743 - RNA, 19 nt, Artificial Sequence
  Description of Artificial Sequence: Synthetic oligonucleotide
gauucagcaugucuccugg

SEQ ID NO: 3100744 - RNA, 19 nt, Artificial Sequence
  Description of Artificial Sequence: Synthetic oligonucleotide
agagagaggaugucaagag

SEQ ID NO: 3100745 - RNA, 19 nt, Artificial Sequence
  Description of Artificial Sequence: Synthetic oligonucleotide
uuaguuagaagcagccugu

SEQ ID NO: 3100746 - RNA, 19 nt, Artificial Sequence
  Description of Artificial Sequence: Synthetic oligonucleotide
accaagauuggccuuuagg

SEQ ID NO: 3100747 - RNA, 19 nt, Artificial Sequence
  Description of Artificial Sequence: Synthetic oligonucleotide
ugcuuggggaacaaagugc

SEQ ID NO: 3100748 - RNA, 19 nt, Artificial Sequence
  Description of Artificial Sequence: Synthetic oligonucleotide
augucaagagaaaugcccc

SEQ ID NO: 3100749 - RNA, 19 nt, Artificial Sequence
  Description of Artificial Sequence: Synthetic oligonucleotide
ucugcaaugcagcugcaga

SEQ ID NO: 3100750 - RNA, 19 nt, Artificial Sequence
  Description of Artificial Sequence: Synthetic oligonucleotide
uucagcaugucuccuggag

SEQ ID NO: 3100751 - RNA, 19 nt, Artificial Sequence
  Description of Artificial Sequence: Synthetic oligonucleotide
aaagagagagaggauguca

SEQ ID NO: 3100752 - RNA, 19 nt, Artificial Sequence
  Description of Artificial Sequence: Synthetic oligonucleotide
ggggagguuaguuagaagc

SEQ ID NO: 3100753 - RNA, 19 nt, Artificial Sequence
  Description of Artificial Sequence: Synthetic oligonucleotide
aaugcagcugcagaccaag

SEQ ID NO: 3100754 - RNA, 19 nt, Artificial Sequence
  Description of Artificial Sequence: Synthetic oligonucleotide
uauucuggauucagcaugu

SEQ ID NO: 3100755 - RNA, 19 nt, Artificial Sequence
  Description of Artificial Sequence: Synthetic oligonucleotide
agaagcagccuguucgcac

SEQ ID NO: 3100756 - RNA, 19 nt, Artificial Sequence
  Description of Artificial Sequence: Synthetic oligonucleotide
agugcuaugcguccaguug

SEQ ID NO: 3100757 - RNA, 19 nt, Artificial Sequence
  Description of Artificial Sequence: Synthetic oligonucleotide
uugaauuuuaguguuccuc

SEQ ID NO: 3100758 - RNA, 19 nt, Artificial Sequence
  Description of Artificial Sequence: Synthetic oligonucleotide
agguuaguuagaagcagcc

SEQ ID NO: 3100759 - RNA, 19 nt, Artificial Sequence
  Description of Artificial Sequence: Synthetic oligonucleotide
aggggaaagagagagagga

SEQ ID NO: 3100760 - RNA, 19 nt, Artificial Sequence
  Description of Artificial Sequence: Synthetic oligonucleotide
uuagaagcagccuguucgc

SEQ ID NO: 3100761 - RNA, 19 nt, Artificial Sequence
  Description of Artificial Sequence: Synthetic oligonucleotide
uaugcguccaguugaauuu

SEQ ID NO: 3100762 - RNA, 19 nt, Artificial Sequence
  Description of Artificial Sequence: Synthetic oligonucleotide
ugugcuauucuggauucag

SEQ ID NO: 3100763 - RNA, 19 nt, Artificial Sequence
  Description of Artificial Sequence: Synthetic oligonucleotide
gagaaaggcucacaccuug

SEQ ID NO: 3100764 - RNA, 19 nt, Artificial Sequence
  Description of Artificial Sequence: Synthetic oligonucleotide
caccuugagggguaggugg

SEQ ID NO: 3100765 - RNA, 19 nt, Artificial Sequence
  Description of Artificial Sequence: Synthetic oligonucleotide
acugcuuucugcaaugcag

SEQ ID NO: 3100766 - RNA, 19 nt, Artificial Sequence
  Description of Artificial Sequence: Synthetic oligonucleotide
ugcguuugaggacaugaac

SEQ ID NO: 3100767 - RNA, 19 nt, Artificial Sequence
  Description of Artificial Sequence: Synthetic oligonucleotide
gaaaggcucacaccuugag

SEQ ID NO: 3100768 - RNA, 19 nt, Artificial Sequence
  Description of Artificial Sequence: Synthetic oligonucleotide
aguuagaagcagccuguuc

SEQ ID NO: 3100769 - RNA, 19 nt, Artificial Sequence
  Description of Artificial Sequence: Synthetic oligonucleotide
uucuggauucagcaugucu

SEQ ID NO: 3100770 - RNA, 19 nt, Artificial Sequence
  Description of Artificial Sequence: Synthetic oligonucleotide
cugcagaccaagauuggcc

SEQ ID NO: 3100771 - RNA, 19 nt, Artificial Sequence
  Description of Artificial Sequence: Synthetic oligonucleotide
cagcugcagaccaagauug

SEQ ID NO: 3100772 - RNA, 19 nt, Artificial Sequence
  Description of Artificial Sequence: Synthetic oligonucleotide
ugucuccuggagauggaag

SEQ ID NO: 3100773 - RNA, 19 nt, Artificial Sequence
  Description of Artificial Sequence: Synthetic oligonucleotide
cuggauucagcaugucucc

SEQ ID NO: 3100774 - RNA, 19 nt, Artificial Sequence
  Description of Artificial Sequence: Synthetic oligonucleotide
uuuaggggaaagagagaga

SEQ ID NO: 3100775 - RNA, 19 nt, Artificial Sequence
  Description of Artificial Sequence: Synthetic oligonucleotide
uggccuuuaggggaaagag

SEQ ID NO: 3100776 - RNA, 19 nt, Artificial Sequence
  Description of Artificial Sequence: Synthetic oligonucleotide
agguggggagguuaguuag

SEQ ID NO: 3100777 - RNA, 19 nt, Artificial Sequence
  Description of Artificial Sequence: Synthetic oligonucleotide
gaacaaagugcuaugcguc

SEQ ID NO: 3100778 - RNA, 19 nt, Artificial Sequence
  Description of Artificial Sequence: Synthetic oligonucleotide
agcgccaugugcuugggga

SEQ ID NO: 3100779 - RNA, 19 nt, Artificial Sequence
  Description of Artificial Sequence: Synthetic oligonucleotide
agagagagaggaugucaag

SEQ ID NO: 3100780 - RNA, 19 nt, Artificial Sequence
  Description of Artificial Sequence: Synthetic oligonucleotide
gagguuaguuagaagcagc

SEQ ID NO: 3100781 - RNA, 19 nt, Artificial Sequence
  Description of Artificial Sequence: Synthetic oligonucleotide
agagaggaugucaagagaa

SEQ ID NO: 3100782 - RNA, 19 nt, Artificial Sequence
  Description of Artificial Sequence: Synthetic oligonucleotide
gccuuuaggggaaagagag

SEQ ID NO: 3100783 - RNA, 19 nt, Artificial Sequence
  Description of Artificial Sequence: Synthetic oligonucleotide
uccuggagauggaagcgcc

SEQ ID NO: 3100784 - RNA, 19 nt, Artificial Sequence
  Description of Artificial Sequence: Synthetic oligonucleotide
gggaacaaagugcuaugcg

SEQ ID NO: 3100785 - RNA, 19 nt, Artificial Sequence
  Description of Artificial Sequence: Synthetic oligonucleotide
gugcuuggggaacaaagug

SEQ ID NO: 3100786 - RNA, 19 nt, Artificial Sequence
  Description of Artificial Sequence: Synthetic oligonucleotide
ugggagaaaggcucacacc

SEQ ID NO: 3100787 - RNA, 19 nt, Artificial Sequence
  Description of Artificial Sequence: Synthetic oligonucleotide
uuggggaacaaagugcuau

SEQ ID NO: 3100788 - RNA, 19 nt, Artificial Sequence
  Description of Artificial Sequence: Synthetic oligonucleotide
augugcuuggggaacaaag

SEQ ID NO: 3100789 - RNA, 19 nt, Artificial Sequence
  Description of Artificial Sequence: Synthetic oligonucleotide
aagagagagaggaugucaa

SEQ ID NO: 3100790 - RNA, 19 nt, Artificial Sequence
  Description of Artificial Sequence: Synthetic oligonucleotide
uugaggacaugaaccuuga

SEQ ID NO: 3100791 - RNA, 19 nt, Artificial Sequence
  Description of Artificial Sequence: Synthetic oligonucleotide
cugggagaaaggcucacac

SEQ ID NO: 3100792 - RNA, 19 nt, Artificial Sequence
  Description of Artificial Sequence: Synthetic oligonucleotide
agccuguucgcacaaggca

SEQ ID NO: 3100793 - RNA, 19 nt, Artificial Sequence
  Description of Artificial Sequence: Synthetic oligonucleotide
gagagagaggaugucaaga

SEQ ID NO: 3100794 - RNA, 19 nt, Artificial Sequence
  Description of Artificial Sequence: Synthetic oligonucleotide
uuuuaguguuccucauggu

SEQ ID NO: 3100795 - RNA, 19 nt, Artificial Sequence
  Description of Artificial Sequence: Synthetic oligonucleotide
cugcaaugcagcugcagac

SEQ ID NO: 3100796 - RNA, 19 nt, Artificial Sequence
  Description of Artificial Sequence: Synthetic oligonucleotide
uucgcacaaggcaccacug

SEQ ID NO: 3100797 - RNA, 19 nt, Artificial Sequence
  Description of Artificial Sequence: Synthetic oligonucleotide
uggggaacaaagugcuaug

SEQ ID NO: 3100798 - RNA, 19 nt, Artificial Sequence
  Description of Artificial Sequence: Synthetic oligonucleotide
ugcagcugcagaccaagau

SEQ ID NO: 3100799 - RNA, 19 nt, Artificial Sequence
  Description of Artificial Sequence: Synthetic oligonucleotide
accacugcuuucugcaaug

SEQ ID NO: 3100800 - RNA, 19 nt, Artificial Sequence
  Description of Artificial Sequence: Synthetic oligonucleotide
ugagggguagguggggagg

SEQ ID NO: 3100801 - RNA, 19 nt, Artificial Sequence
  Description of Artificial Sequence: Synthetic oligonucleotide
gggaaagagagagaggaug

SEQ ID NO: 3100802 - RNA, 19 nt, Artificial Sequence
  Description of Artificial Sequence: Synthetic oligonucleotide
gagagaggaugucaagaga

SEQ ID NO: 3100803 - RNA, 19 nt, Artificial Sequence
  Description of Artificial Sequence: Synthetic oligonucleotide
gaagcagccuguucgcaca

SEQ ID NO: 3100804 - RNA, 19 nt, Artificial Sequence
  Description of Artificial Sequence: Synthetic oligonucleotide
ucgcacaaggcaccacugc

SEQ ID NO: 3100805 - RNA, 19 nt, Artificial Sequence
  Description of Artificial Sequence: Synthetic oligonucleotide
gauggaagcgccaugugcu

SEQ ID NO: 3100806 - RNA, 19 nt, Artificial Sequence
  Description of Artificial Sequence: Synthetic oligonucleotide
uugagggguagguggggag

SEQ ID NO: 3100807 - RNA, 19 nt, Artificial Sequence
  Description of Artificial Sequence: Synthetic oligonucleotide
gcguuugaggacaugaacc

SEQ ID NO: 3100808 - RNA, 19 nt, Artificial Sequence
  Description of Artificial Sequence: Synthetic oligonucleotide
aggcaccacugcuuucugc

SEQ ID NO: 3100809 - RNA, 19 nt, Artificial Sequence
  Description of Artificial Sequence: Synthetic oligonucleotide
gaaccuugauggugguccc

SEQ ID NO: 3100810 - RNA, 19 nt, Artificial Sequence
  Description of Artificial Sequence: Synthetic oligonucleotide
ugcuuucugcaaugcagcu

SEQ ID NO: 3100811 - RNA, 19 nt, Artificial Sequence
  Description of Artificial Sequence: Synthetic oligonucleotide
agaggaugucaagagaaau

SEQ ID NO: 3100812 - RNA, 19 nt, Artificial Sequence
  Description of Artificial Sequence: Synthetic oligonucleotide
caaagugcuaugcguccag

SEQ ID NO: 3100813 - RNA, 19 nt, Artificial Sequence
  Description of Artificial Sequence: Synthetic oligonucleotide
ucagccugcguuugaggac

SEQ ID NO: 3100814 - RNA, 19 nt, Artificial Sequence
  Description of Artificial Sequence: Synthetic oligonucleotide
aagugcuaugcguccaguu

SEQ ID NO: 3100815 - RNA, 19 nt, Artificial Sequence
  Description of Artificial Sequence: Synthetic oligonucleotide
aggcucacaccuugagggg

SEQ ID NO: 3100816 - RNA, 19 nt, Artificial Sequence
  Description of Artificial Sequence: Synthetic oligonucleotide
gugcuaugcguccaguuga

SEQ ID NO: 3100817 - RNA, 19 nt, Artificial Sequence
  Description of Artificial Sequence: Synthetic oligonucleotide
ggaagcgccaugugcuugg

SEQ ID NO: 3100818 - RNA, 19 nt, Artificial Sequence
  Description of Artificial Sequence: Synthetic oligonucleotide
gcaugucuccuggagaugg

SEQ ID NO: 3100819 - RNA, 19 nt, Artificial Sequence
  Description of Artificial Sequence: Synthetic oligonucleotide
uucugcaaugcagcugcag

SEQ ID NO: 3100820 - RNA, 19 nt, Artificial Sequence
  Description of Artificial Sequence: Synthetic oligonucleotide
aagcgccaugugcuugggg

SEQ ID NO: 3100821 - RNA, 19 nt, Artificial Sequence
  Description of Artificial Sequence: Synthetic oligonucleotide
uggggagguuaguuagaag

SEQ ID NO: 3100822 - RNA, 19 nt, Artificial Sequence
  Description of Artificial Sequence: Synthetic oligonucleotide
ggaacaaagugcuaugcgu

SEQ ID NO: 3100823 - RNA, 19 nt, Artificial Sequence
  Description of Artificial Sequence: Synthetic oligonucleotide
gaaagagagagaggauguc

SEQ ID NO: 3100824 - RNA, 19 nt, Artificial Sequence
  Description of Artificial Sequence: Synthetic oligonucleotide
gggagaaaggcucacaccu

SEQ ID NO: 3100825 - RNA, 19 nt, Artificial Sequence
  Description of Artificial Sequence: Synthetic oligonucleotide
cagccuguucgcacaaggc

SEQ ID NO: 3100826 - RNA, 19 nt, Artificial Sequence
  Description of Artificial Sequence: Synthetic oligonucleotide
ggagguuaguuagaagcag

SEQ ID NO: 3100827 - RNA, 19 nt, Artificial Sequence
  Description of Artificial Sequence: Synthetic oligonucleotide
gagauggaagcgccaugug

SEQ ID NO: 3100828 - RNA, 19 nt, Artificial Sequence
  Description of Artificial Sequence: Synthetic oligonucleotide
gaugguggucccugggaga

SEQ ID NO: 3100829 - RNA, 19 nt, Artificial Sequence
  Description of Artificial Sequence: Synthetic oligonucleotide
aaggcaccacugcuuucug

SEQ ID NO: 3100830 - RNA, 19 nt, Artificial Sequence
  Description of Artificial Sequence: Synthetic oligonucleotide
uagguggggagguuaguua

SEQ ID NO: 3100831 - RNA, 19 nt, Artificial Sequence
  Description of Artificial Sequence: Synthetic oligonucleotide
aaagugcuaugcguccagu

SEQ ID NO: 3100832 - RNA, 19 nt, Artificial Sequence
  Description of Artificial Sequence: Synthetic oligonucleotide
caguugaauuuuaguguuc

SEQ ID NO: 3100833 - RNA, 19 nt, Artificial Sequence
  Description of Artificial Sequence: Synthetic oligonucleotide
ugcuaugcguccaguugaa

SEQ ID NO: 3100834 - RNA, 19 nt, Artificial Sequence
  Description of Artificial Sequence: Synthetic oligonucleotide
aaggucagccugcguuuga

SEQ ID NO: 3100835 - RNA, 19 nt, Artificial Sequence
  Description of Artificial Sequence: Synthetic oligonucleotide
ggauucagcaugucuccug

SEQ ID NO: 3100836 - RNA, 19 nt, Artificial Sequence
  Description of Artificial Sequence: Synthetic oligonucleotide
gaauuuuaguguuccucau

SEQ ID NO: 3100837 - RNA, 19 nt, Artificial Sequence
  Description of Artificial Sequence: Synthetic oligonucleotide
acaaagugcuaugcgucca

SEQ ID NO: 3100838 - RNA, 19 nt, Artificial Sequence
  Description of Artificial Sequence: Synthetic oligonucleotide
accuugagggguagguggg

SEQ ID NO: 3100839 - RNA, 19 nt, Artificial Sequence
  Description of Artificial Sequence: Synthetic oligonucleotide
ggcaccacugcuuucugca

SEQ ID NO: 3100840 - RNA, 19 nt, Artificial Sequence
  Description of Artificial Sequence: Synthetic oligonucleotide
gucccugggagaaaggcuc

SEQ ID NO: 3100841 - RNA, 19 nt, Artificial Sequence
  Description of Artificial Sequence: Synthetic oligonucleotide
cuccuggagauggaagcgc

SEQ ID NO: 3100842 - RNA, 19 nt, Artificial Sequence
  Description of Artificial Sequence: Synthetic oligonucleotide
ucccugggagaaaggcuca

SEQ ID NO: 3100843 - RNA, 19 nt, Artificial Sequence
  Description of Artificial Sequence: Synthetic oligonucleotide
gaccaagauuggccuuuag

SEQ ID NO: 3100844 - RNA, 19 nt, Artificial Sequence
  Description of Artificial Sequence: Synthetic oligonucleotide
augaaccuugauggugguc

SEQ ID NO: 3100845 - RNA, 19 nt, Artificial Sequence
  Description of Artificial Sequence: Synthetic oligonucleotide
uggaagcgccaugugcuug

SEQ ID NO: 3100846 - RNA, 19 nt, Artificial Sequence
  Description of Artificial Sequence: Synthetic oligonucleotide
uagaagcagccuguucgca

SEQ ID NO: 3100847 - RNA, 19 nt, Artificial Sequence
  Description of Artificial Sequence: Synthetic oligonucleotide
uggauucagcaugucuccu

SEQ ID NO: 3100848 - RNA, 19 nt, Artificial Sequence
  Description of Artificial Sequence: Synthetic oligonucleotide
uuucugcaaugcagcugca

SEQ ID NO: 3100849 - RNA, 19 nt, Artificial Sequence
  Description of Artificial Sequence: Synthetic oligonucleotide
ggaugucaagagaaaugcc

SEQ ID NO: 3100850 - RNA, 19 nt, Artificial Sequence
  Description of Artificial Sequence: Synthetic oligonucleotide
auucagcaugucuccugga

SEQ ID NO: 3100851 - RNA, 19 nt, Artificial Sequence
  Description of Artificial Sequence: Synthetic oligonucleotide
auuggccuuuaggggaaag

SEQ ID NO: 3100852 - RNA, 19 nt, Artificial Sequence
  Description of Artificial Sequence: Synthetic oligonucleotide
acaccuugagggguaggug

SEQ ID NO: 3100853 - RNA, 19 nt, Artificial Sequence
  Description of Artificial Sequence: Synthetic oligonucleotide
guucgcacaaggcaccacu

SEQ ID NO: 3100854 - RNA, 19 nt, Artificial Sequence
  Description of Artificial Sequence: Synthetic oligonucleotide
ugaggacaugaaccuugau

SEQ ID NO: 3100855 - RNA, 19 nt, Artificial Sequence
  Description of Artificial Sequence: Synthetic oligonucleotide
gagaggaugucaagagaaa

SEQ ID NO: 3100856 - RNA, 19 nt, Artificial Sequence
  Description of Artificial Sequence: Synthetic oligonucleotide
aggucagccugcguuugag

SEQ ID NO: 3100857 - RNA, 19 nt, Artificial Sequence
  Description of Artificial Sequence: Synthetic oligonucleotide
ggggaacaaagugcuaugc

SEQ ID NO: 3100858 - RNA, 19 nt, Artificial Sequence
  Description of Artificial Sequence: Synthetic oligonucleotide
ccuguucgcacaaggcacc

SEQ ID NO: 3100859 - RNA, 19 nt, Artificial Sequence
  Description of Artificial Sequence: Synthetic oligonucleotide
guugaauuuuaguguuccu

SEQ ID NO: 3100860 - RNA, 19 nt, Artificial Sequence
  Description of Artificial Sequence: Synthetic oligonucleotide
agcugcagaccaagauugg

SEQ ID NO: 3100861 - RNA, 19 nt, Artificial Sequence
  Description of Artificial Sequence: Synthetic oligonucleotide
auucuggauucagcauguc

SEQ ID NO: 3100862 - RNA, 19 nt, Artificial Sequence
  Description of Artificial Sequence: Synthetic oligonucleotide
ggucagccugcguuugagg

SEQ ID NO: 3100863 - RNA, 19 nt, Artificial Sequence
  Description of Artificial Sequence: Synthetic oligonucleotide
aagcagccuguucgcacaa

SEQ ID NO: 3100864 - RNA, 19 nt, Artificial Sequence
  Description of Artificial Sequence: Synthetic oligonucleotide
cuaugcguccaguugaauu

SEQ ID NO: 3100865 - RNA, 19 nt, Artificial Sequence
  Description of Artificial Sequence: Synthetic oligonucleotide
ucacaccuugagggguagg

SEQ ID NO: 3100866 - RNA, 19 nt, Artificial Sequence
  Description of Artificial Sequence: Synthetic oligonucleotide
gcaaugcagcugcagacca

SEQ ID NO: 3100867 - RNA, 19 nt, Artificial Sequence
  Description of Artificial Sequence: Synthetic oligonucleotide
ugcguccaguugaauuuua

SEQ ID NO: 3100868 - RNA, 19 nt, Artificial Sequence
  Description of Artificial Sequence: Synthetic oligonucleotide
agaaaggcucacaccuuga

SEQ ID NO: 3100869 - RNA, 19 nt, Artificial Sequence
  Description of Artificial Sequence: Synthetic oligonucleotide
aaccuugaugguggucccu

SEQ ID NO: 3100870 - RNA, 19 nt, Artificial Sequence
  Description of Artificial Sequence: Synthetic oligonucleotide
gaagcgccaugugcuuggg

SEQ ID NO: 3100871 - RNA, 19 nt, Artificial Sequence
  Description of Artificial Sequence: Synthetic oligonucleotide
gggagguuaguuagaagca

SEQ ID NO: 3100872 - RNA, 19 nt, Artificial Sequence
  Description of Artificial Sequence: Synthetic oligonucleotide
ggaaagagagagaggaugu

SEQ ID NO: 3100873 - RNA, 19 nt, Artificial Sequence
  Description of Artificial Sequence: Synthetic oligonucleotide
ccugugcuauucuggauuc

SEQ ID NO: 3100874 - RNA, 19 nt, Artificial Sequence
  Description of Artificial Sequence: Synthetic oligonucleotide
gcugcagaccaagauuggc

SEQ ID NO: 3100875 - RNA, 19 nt, Artificial Sequence
  Description of Artificial Sequence: Synthetic oligonucleotide
auggaagcgccaugugcuu

SEQ ID NO: 3100876 - RNA, 19 nt, Artificial Sequence
  Description of Artificial Sequence: Synthetic oligonucleotide
agauuggccuuuaggggaa

SEQ ID NO: 3100877 - RNA, 19 nt, Artificial Sequence
  Description of Artificial Sequence: Synthetic oligonucleotide
gccuguucgcacaaggcac

SEQ ID NO: 3100878 - RNA, 19 nt, Artificial Sequence
  Description of Artificial Sequence: Synthetic oligonucleotide
cacugcuuucugcaaugca

SEQ ID NO: 3100879 - RNA, 19 nt, Artificial Sequence
  Description of Artificial Sequence: Synthetic oligonucleotide
uaguuagaagcagccuguu

SEQ ID NO: 3100880 - RNA, 19 nt, Artificial Sequence
  Description of Artificial Sequence: Synthetic oligonucleotide
uguucgcacaaggcaccac

SEQ ID NO: 3100881 - RNA, 19 nt, Artificial Sequence
  Description of Artificial Sequence: Synthetic oligonucleotide
agcaugucuccuggagaug

SEQ ID NO: 3100882 - RNA, 19 nt, Artificial Sequence
  Description of Artificial Sequence: Synthetic oligonucleotide
cugcguuugaggacaugaa

SEQ ID NO: 3100883 - RNA, 19 nt, Artificial Sequence
  Description of Artificial Sequence: Synthetic oligonucleotide
cagccugcguuugaggaca

SEQ ID NO: 3100884 - RNA, 19 nt, Artificial Sequence
  Description of Artificial Sequence: Synthetic oligonucleotide
cuugagggguaggugggga

SEQ ID NO: 3100885 - RNA, 19 nt, Artificial Sequence
  Description of Artificial Sequence: Synthetic oligonucleotide
cucacaccuugagggguag

SEQ ID NO: 3100886 - RNA, 19 nt, Artificial Sequence
  Description of Artificial Sequence: Synthetic oligonucleotide
augucuccuggagauggaa

SEQ ID NO: 3100887 - RNA, 19 nt, Artificial Sequence
  Description of Artificial Sequence: Synthetic oligonucleotide
guggggagguuaguuagaa

SEQ ID NO: 3100888 - RNA, 19 nt, Artificial Sequence
  Description of Artificial Sequence: Synthetic oligonucleotide
caaggcaccacugcuuucu

SEQ ID NO: 3100889 - RNA, 19 nt, Artificial Sequence
  Description of Artificial Sequence: Synthetic oligonucleotide
caugucuccuggagaugga

SEQ ID NO: 3100890 - RNA, 19 nt, Artificial Sequence
  Description of Artificial Sequence: Synthetic oligonucleotide
ggagauggaagcgccaugu

SEQ ID NO: 3100891 - RNA, 19 nt, Artificial Sequence
  Description of Artificial Sequence: Synthetic oligonucleotide
ccugcguuugaggacauga

SEQ ID NO: 3100892 - RNA, 19 nt, Artificial Sequence
  Description of Artificial Sequence: Synthetic oligonucleotide
gcuuggggaacaaagugcu

SEQ ID NO: 3100893 - RNA, 19 nt, Artificial Sequence
  Description of Artificial Sequence: Synthetic oligonucleotide
gcguccaguugaauuuuag

SEQ ID NO: 3100894 - RNA, 19 nt, Artificial Sequence
  Description of Artificial Sequence: Synthetic oligonucleotide
ggccuuuaggggaaagaga

SEQ ID NO: 3100895 - RNA, 19 nt, Artificial Sequence
  Description of Artificial Sequence: Synthetic oligonucleotide
caaugcagcugcagaccaa

SEQ ID NO: 3100896 - RNA, 19 nt, Artificial Sequence
  Description of Artificial Sequence: Synthetic oligonucleotide
augcguccaguugaauuuu

SEQ ID NO: 3100897 - RNA, 19 nt, Artificial Sequence
  Description of Artificial Sequence: Synthetic oligonucleotide
cuuggggaacaaagugcua

SEQ ID NO: 3100898 - RNA, 19 nt, Artificial Sequence
  Description of Artificial Sequence: Synthetic oligonucleotide
ccaguugaauuuuaguguu

SEQ ID NO: 3100899 - RNA, 19 nt, Artificial Sequence
  Description of Artificial Sequence: Synthetic oligonucleotide
gguuaguuagaagcagccu

SEQ ID NO: 3100900 - RNA, 19 nt, Artificial Sequence
  Description of Artificial Sequence: Synthetic oligonucleotide
cacaaggcaccacugcuuu

SEQ ID NO: 3100901 - RNA, 19 nt, Artificial Sequence
  Description of Artificial Sequence: Synthetic oligonucleotide
cacaccuugagggguaggu

SEQ ID NO: 3100902 - RNA, 19 nt, Artificial Sequence
  Description of Artificial Sequence: Synthetic oligonucleotide
ccuuuaggggaaagagaga

SEQ ID NO: 3100903 - RNA, 19 nt, Artificial Sequence
  Description of Artificial Sequence: Synthetic oligonucleotide
guagguggggagguuaguu

SEQ ID NO: 3100904 - RNA, 19 nt, Artificial Sequence
  Description of Artificial Sequence: Synthetic oligonucleotide
cguuugaggacaugaaccu

SEQ ID NO: 3100905 - RNA, 19 nt, Artificial Sequence
  Description of Artificial Sequence: Synthetic oligonucleotide
agaccaagauuggccuuua

SEQ ID NO: 3100906 - RNA, 19 nt, Artificial Sequence
  Description of Artificial Sequence: Synthetic oligonucleotide
guuugaggacaugaaccuu

SEQ ID NO: 3100907 - RNA, 19 nt, Artificial Sequence
  Description of Artificial Sequence: Synthetic oligonucleotide
augcagcugcagaccaaga

SEQ ID NO: 3100908 - RNA, 19 nt, Artificial Sequence
  Description of Artificial Sequence: Synthetic oligonucleotide
gauuggccuuuaggggaaa

SEQ ID NO: 3100909 - RNA, 19 nt, Artificial Sequence
  Description of Artificial Sequence: Synthetic oligonucleotide
caugugcuuggggaacaaa

SEQ ID NO: 3100910 - RNA, 19 nt, Artificial Sequence
  Description of Artificial Sequence: Synthetic oligonucleotide
cugugcuauucuggauuca

SEQ ID NO: 3100911 - RNA, 19 nt, Artificial Sequence
  Description of Artificial Sequence: Synthetic oligonucleotide
gguggggagguuaguuaga

SEQ ID NO: 3100912 - RNA, 19 nt, Artificial Sequence
  Description of Artificial Sequence: Synthetic oligonucleotide
ccacugcuuucugcaaugc

SEQ ID NO: 3100913 - RNA, 19 nt, Artificial Sequence
  Description of Artificial Sequence: Synthetic oligonucleotide
cuggagauggaagcgccau

SEQ ID NO: 3100914 - RNA, 19 nt, Artificial Sequence
  Description of Artificial Sequence: Synthetic oligonucleotide
caccacugcuuucugcaau

SEQ ID NO: 3100915 - RNA, 19 nt, Artificial Sequence
  Description of Artificial Sequence: Synthetic oligonucleotide
cagaccaagauuggccuuu

SEQ ID NO: 3100916 - RNA, 19 nt, Artificial Sequence
  Description of Artificial Sequence: Synthetic oligonucleotide
ccuggagauggaagcgcca

SEQ ID NO: 3100917 - RNA, 19 nt, Artificial Sequence
  Description of Artificial Sequence: Synthetic oligonucleotide
ggucccugggagaaaggcu

SEQ ID NO: 3100918 - RNA, 19 nt, Artificial Sequence
  Description of Artificial Sequence: Synthetic oligonucleotide
gcgccaugugcuuggggaa

SEQ ID NO: 3100919 - RNA, 19 nt, Artificial Sequence
  Description of Artificial Sequence: Synthetic oligonucleotide
gggguagguggggagguua

SEQ ID NO: 3100920 - RNA, 19 nt, Artificial Sequence
  Description of Artificial Sequence: Synthetic oligonucleotide
cguccaguugaauuuuagu

SEQ ID NO: 3100921 - RNA, 19 nt, Artificial Sequence
  Description of Artificial Sequence: Synthetic oligonucleotide
cccugugcuauucuggauu

SEQ ID NO: 3100922 - RNA, 19 nt, Artificial Sequence
  Description of Artificial Sequence: Synthetic oligonucleotide
agggguagguggggagguu

SEQ ID NO: 3100923 - RNA, 19 nt, Artificial Sequence
  Description of Artificial Sequence: Synthetic oligonucleotide
ccugggagaaaggcucaca

SEQ ID NO: 3100924 - RNA, 19 nt, Artificial Sequence
  Description of Artificial Sequence: Synthetic oligonucleotide
gcucacaccuugaggggua

SEQ ID NO: 3100925 - RNA, 19 nt, Artificial Sequence
  Description of Artificial Sequence: Synthetic oligonucleotide
cgcacaaggcaccacugcu

SEQ ID NO: 3100926 - RNA, 19 nt, Artificial Sequence
  Description of Artificial Sequence: Synthetic oligonucleotide
cgccaugugcuuggggaac

SEQ ID NO: 3100927 - RNA, 19 nt, Artificial Sequence
  Description of Artificial Sequence: Synthetic oligonucleotide
cccugggagaaaggcucac

SEQ ID NO: 3100928 - RNA, 19 nt, Artificial Sequence
  Description of Artificial Sequence: Synthetic oligonucleotide
gguagguggggagguuagu

SEQ ID NO: 3100929 - RNA, 19 nt, Artificial Sequence
  Description of Artificial Sequence: Synthetic oligonucleotide
gcacaaggcaccacugcuu

SEQ ID NO: 3100930 - RNA, 19 nt, Artificial Sequence
  Description of Artificial Sequence: Synthetic oligonucleotide
agccugcguuugaggacau

SEQ ID NO: 3100931 - RNA, 19 nt, Artificial Sequence
  Description of Artificial Sequence: Synthetic oligonucleotide
gccugcguuugaggacaug

SEQ ID NO: 3100932 - RNA, 19 nt, Artificial Sequence
  Description of Artificial Sequence: Synthetic oligonucleotide
gcuaugcguccaguugaau

SEQ ID NO: 3100933 - RNA, 19 nt, Artificial Sequence
  Description of Artificial Sequence: Synthetic oligonucleotide
aauggcaccacacagcacg

SEQ ID NO: 3100934 - RNA, 19 nt, Artificial Sequence
  Description of Artificial Sequence: Synthetic oligonucleotide
aaagucagcauuucacggc

SEQ ID NO: 3100935 - RNA, 19 nt, Artificial Sequence
  Description of Artificial Sequence: Synthetic oligonucleotide
aaaagucagcauuucacgg

SEQ ID NO: 3100936 - RNA, 19 nt, Artificial Sequence
  Description of Artificial Sequence: Synthetic oligonucleotide
auuuguuucguacagcauc

SEQ ID NO: 3100937 - RNA, 19 nt, Artificial Sequence
  Description of Artificial Sequence: Synthetic oligonucleotide
uacaccaacagccuugugg

SEQ ID NO: 3100938 - RNA, 19 nt, Artificial Sequence
  Description of Artificial Sequence: Synthetic oligonucleotide
aucuguguuucccacaucc

SEQ ID NO: 3100939 - RNA, 19 nt, Artificial Sequence
  Description of Artificial Sequence: Synthetic oligonucleotide
cagucuuacaccaacagcc

SEQ ID NO: 3100940 - RNA, 19 nt, Artificial Sequence
  Description of Artificial Sequence: Synthetic oligonucleotide
caaaagucagcauuucacg

SEQ ID NO: 3100941 - RNA, 19 nt, Artificial Sequence
  Description of Artificial Sequence: Synthetic oligonucleotide
gaucugagcugacagaugc

SEQ ID NO: 3100942 - RNA, 19 nt, Artificial Sequence
  Description of Artificial Sequence: Synthetic oligonucleotide
uguguuucccacauccagg

SEQ ID NO: 3100943 - RNA, 19 nt, Artificial Sequence
  Description of Artificial Sequence: Synthetic oligonucleotide
uuuguuucguacagcauca

SEQ ID NO: 3100944 - RNA, 19 nt, Artificial Sequence
  Description of Artificial Sequence: Synthetic oligonucleotide
uguaauggcaccacacagc

SEQ ID NO: 3100945 - RNA, 19 nt, Artificial Sequence
  Description of Artificial Sequence: Synthetic oligonucleotide
ucuuacaccaacagccuug

SEQ ID NO: 3100946 - RNA, 19 nt, Artificial Sequence
  Description of Artificial Sequence: Synthetic oligonucleotide
ugucaucacagcuaucugc

SEQ ID NO: 3100947 - RNA, 19 nt, Artificial Sequence
  Description of Artificial Sequence: Synthetic oligonucleotide
ucuuguacuucauaucugu

SEQ ID NO: 3100948 - RNA, 19 nt, Artificial Sequence
  Description of Artificial Sequence: Synthetic oligonucleotide
uuugcagggccaaaaguca

SEQ ID NO: 3100949 - RNA, 19 nt, Artificial Sequence
  Description of Artificial Sequence: Synthetic oligonucleotide
uuucacggcauuuguuucg

SEQ ID NO: 3100950 - RNA, 19 nt, Artificial Sequence
  Description of Artificial Sequence: Synthetic oligonucleotide
ucuuucagguuggagaucc

SEQ ID NO: 3100951 - RNA, 19 nt, Artificial Sequence
  Description of Artificial Sequence: Synthetic oligonucleotide
uguacuucauaucuguguu

SEQ ID NO: 3100952 - RNA, 19 nt, Artificial Sequence
  Description of Artificial Sequence: Synthetic oligonucleotide
uuguacuucauaucugugu

SEQ ID NO: 3100953 - RNA, 19 nt, Artificial Sequence
  Description of Artificial Sequence: Synthetic oligonucleotide
gaugcucgcagucuuacac

SEQ ID NO: 3100954 - RNA, 19 nt, Artificial Sequence
  Description of Artificial Sequence: Synthetic oligonucleotide
aagucagcauuucacggca

SEQ ID NO: 3100955 - RNA, 19 nt, Artificial Sequence
  Description of Artificial Sequence: Synthetic oligonucleotide
auuucacggcauuuguuuc

SEQ ID NO: 3100956 - RNA, 19 nt, Artificial Sequence
  Description of Artificial Sequence: Synthetic oligonucleotide
aagaugcacuccucgaucu

SEQ ID NO: 3100957 - RNA, 19 nt, Artificial Sequence
  Description of Artificial Sequence: Synthetic oligonucleotide
ucugaugucaucacagcua

SEQ ID NO: 3100958 - RNA, 19 nt, Artificial Sequence
  Description of Artificial Sequence: Synthetic oligonucleotide
caucacagcuaucugcugg

SEQ ID NO: 3100959 - RNA, 19 nt, Artificial Sequence
  Description of Artificial Sequence: Synthetic oligonucleotide
acagcuaucugcuggggug

SEQ ID NO: 3100960 - RNA, 19 nt, Artificial Sequence
  Description of Artificial Sequence: Synthetic oligonucleotide
acaccaacagccuuguggu

SEQ ID NO: 3100961 - RNA, 19 nt, Artificial Sequence
  Description of Artificial Sequence: Synthetic oligonucleotide
uucagcucaucacuggcca

SEQ ID NO: 3100962 - RNA, 19 nt, Artificial Sequence
  Description of Artificial Sequence: Synthetic oligonucleotide
agguuggagauccggcucc

SEQ ID NO: 3100963 - RNA, 19 nt, Artificial Sequence
  Description of Artificial Sequence: Synthetic oligonucleotide
agccuuguggucguggucc

SEQ ID NO: 3100964 - RNA, 19 nt, Artificial Sequence
  Description of Artificial Sequence: Synthetic oligonucleotide
acuucauaucuguguuucc

SEQ ID NO: 3100965 - RNA, 19 nt, Artificial Sequence
  Description of Artificial Sequence: Synthetic oligonucleotide
cccacauccaggaagaugc

SEQ ID NO: 3100966 - RNA, 19 nt, Artificial Sequence
  Description of Artificial Sequence: Synthetic oligonucleotide
uucuuggcaucuuucaggu

SEQ ID NO: 3100967 - RNA, 19 nt, Artificial Sequence
  Description of Artificial Sequence: Synthetic oligonucleotide
guguaauggcaccacacag

SEQ ID NO: 3100968 - RNA, 19 nt, Artificial Sequence
  Description of Artificial Sequence: Synthetic oligonucleotide
uucagguuggagauccggc

SEQ ID NO: 3100969 - RNA, 19 nt, Artificial Sequence
  Description of Artificial Sequence: Synthetic oligonucleotide
cuucauaucuguguuuccc

SEQ ID NO: 3100970 - RNA, 19 nt, Artificial Sequence
  Description of Artificial Sequence: Synthetic oligonucleotide
uucauaucuguguuuccca

SEQ ID NO: 3100971 - RNA, 19 nt, Artificial Sequence
  Description of Artificial Sequence: Synthetic oligonucleotide
ucugcugggguguaauggc

SEQ ID NO: 3100972 - RNA, 19 nt, Artificial Sequence
  Description of Artificial Sequence: Synthetic oligonucleotide
augcucgcagucuuacacc

SEQ ID NO: 3100973 - RNA, 19 nt, Artificial Sequence
  Description of Artificial Sequence: Synthetic oligonucleotide
accaacagccuuguggucg

SEQ ID NO: 3100974 - RNA, 19 nt, Artificial Sequence
  Description of Artificial Sequence: Synthetic oligonucleotide
guaauggcaccacacagca

SEQ ID NO: 3100975 - RNA, 19 nt, Artificial Sequence
  Description of Artificial Sequence: Synthetic oligonucleotide
ugagcugacagaugcucgc

SEQ ID NO: 3100976 - RNA, 19 nt, Artificial Sequence
  Description of Artificial Sequence: Synthetic oligonucleotide
uuucagguuggagauccgg

SEQ ID NO: 3100977 - RNA, 19 nt, Artificial Sequence
  Description of Artificial Sequence: Synthetic oligonucleotide
ucgugguccguuugcaggg

SEQ ID NO: 3100978 - RNA, 19 nt, Artificial Sequence
  Description of Artificial Sequence: Synthetic oligonucleotide
auaucuguguuucccacau

SEQ ID NO: 3100979 - RNA, 19 nt, Artificial Sequence
  Description of Artificial Sequence: Synthetic oligonucleotide
uacuucauaucuguguuuc

SEQ ID NO: 3100980 - RNA, 19 nt, Artificial Sequence
  Description of Artificial Sequence: Synthetic oligonucleotide
gucgugguccguuugcagg

SEQ ID NO: 3100981 - RNA, 19 nt, Artificial Sequence
  Description of Artificial Sequence: Synthetic oligonucleotide
ucauaucuguguuucccac

SEQ ID NO: 3100982 - RNA, 19 nt, Artificial Sequence
  Description of Artificial Sequence: Synthetic oligonucleotide
gaagaugcacuccucgauc

SEQ ID NO: 3100983 - RNA, 19 nt, Artificial Sequence
  Description of Artificial Sequence: Synthetic oligonucleotide
ucagguuggagauccggcu

SEQ ID NO: 3100984 - RNA, 19 nt, Artificial Sequence
  Description of Artificial Sequence: Synthetic oligonucleotide
acacagcacguuuucgccg

SEQ ID NO: 3100985 - RNA, 19 nt, Artificial Sequence
  Description of Artificial Sequence: Synthetic oligonucleotide
guuugcagggccaaaaguc

SEQ ID NO: 3100986 - RNA, 19 nt, Artificial Sequence
  Description of Artificial Sequence: Synthetic oligonucleotide
cuguguuucccacauccag

SEQ ID NO: 3100987 - RNA, 19 nt, Artificial Sequence
  Description of Artificial Sequence: Synthetic oligonucleotide
caggaagaugcacuccucg

SEQ ID NO: 3100988 - RNA, 19 nt, Artificial Sequence
  Description of Artificial Sequence: Synthetic oligonucleotide
ccaaaagucagcauuucac

SEQ ID NO: 3100989 - RNA, 19 nt, Artificial Sequence
  Description of Artificial Sequence: Synthetic oligonucleotide
aucugcugggguguaaugg

SEQ ID NO: 3100990 - RNA, 19 nt, Artificial Sequence
  Description of Artificial Sequence: Synthetic oligonucleotide
cacacagcacguuuucgcc

SEQ ID NO: 3100991 - RNA, 19 nt, Artificial Sequence
  Description of Artificial Sequence: Synthetic oligonucleotide
cuucagcucaucacuggcc

SEQ ID NO: 3100992 - RNA, 19 nt, Artificial Sequence
  Description of Artificial Sequence: Synthetic oligonucleotide
cugagcugacagaugcucg

SEQ ID NO: 3100993 - RNA, 19 nt, Artificial Sequence
  Description of Artificial Sequence: Synthetic oligonucleotide
uugcagggccaaaagucag

SEQ ID NO: 3100994 - RNA, 19 nt, Artificial Sequence
  Description of Artificial Sequence: Synthetic oligonucleotide
agggccaaaagucagcauu

SEQ ID NO: 3100995 - RNA, 19 nt, Artificial Sequence
  Description of Artificial Sequence: Synthetic oligonucleotide
gcaucuuucagguuggaga

SEQ ID NO: 3100996 - RNA, 19 nt, Artificial Sequence
  Description of Artificial Sequence: Synthetic oligonucleotide
ucuguguuucccacaucca

SEQ ID NO: 3100997 - RNA, 19 nt, Artificial Sequence
  Description of Artificial Sequence: Synthetic oligonucleotide
ugcucgcagucuuacacca

SEQ ID NO: 3100998 - RNA, 19 nt, Artificial Sequence
  Description of Artificial Sequence: Synthetic oligonucleotide
cuuguacuucauaucugug

SEQ ID NO: 3100999 - RNA, 19 nt, Artificial Sequence
  Description of Artificial Sequence: Synthetic oligonucleotide
cacggcauuuguuucguac

SEQ ID NO: 3101000 - RNA, 19 nt, Artificial Sequence
  Description of Artificial Sequence: Synthetic oligonucleotide
uuggagauccggcuccgca

SEQ ID NO: 3101001 - RNA, 19 nt, Artificial Sequence
  Description of Artificial Sequence: Synthetic oligonucleotide
acggcauuuguuucguaca

SEQ ID NO: 3101002 - RNA, 19 nt, Artificial Sequence
  Description of Artificial Sequence: Synthetic oligonucleotide
ucgaucugagcugacagau

SEQ ID NO: 3101003 - RNA, 19 nt, Artificial Sequence
  Description of Artificial Sequence: Synthetic oligonucleotide
aacagccuuguggucgugg

SEQ ID NO: 3101004 - RNA, 19 nt, Artificial Sequence
  Description of Artificial Sequence: Synthetic oligonucleotide
cacagcacguuuucgccgc

SEQ ID NO: 3101005 - RNA, 19 nt, Artificial Sequence
  Description of Artificial Sequence: Synthetic oligonucleotide
ugcagggccaaaagucagc

SEQ ID NO: 3101006 - RNA, 19 nt, Artificial Sequence
  Description of Artificial Sequence: Synthetic oligonucleotide
ucugagcugacagaugcuc

SEQ ID NO: 3101007 - RNA, 19 nt, Artificial Sequence
  Description of Artificial Sequence: Synthetic oligonucleotide
acguuuucgccgcaggcca

SEQ ID NO: 3101008 - RNA, 19 nt, Artificial Sequence
  Description of Artificial Sequence: Synthetic oligonucleotide
agcacguuuucgccgcagg

SEQ ID NO: 3101009 - RNA, 19 nt, Artificial Sequence
  Description of Artificial Sequence: Synthetic oligonucleotide
aggaagaugcacuccucga

SEQ ID NO: 3101010 - RNA, 19 nt, Artificial Sequence
  Description of Artificial Sequence: Synthetic oligonucleotide
gcauuuguuucguacagca

SEQ ID NO: 3101011 - RNA, 19 nt, Artificial Sequence
  Description of Artificial Sequence: Synthetic oligonucleotide
cucgcagucuuacaccaac

SEQ ID NO: 3101012 - RNA, 19 nt, Artificial Sequence
  Description of Artificial Sequence: Synthetic oligonucleotide
ucacuggccaucuccucug

SEQ ID NO: 3101013 - RNA, 19 nt, Artificial Sequence
  Description of Artificial Sequence: Synthetic oligonucleotide
cauccaggaagaugcacuc

SEQ ID NO: 3101014 - RNA, 19 nt, Artificial Sequence
  Description of Artificial Sequence: Synthetic oligonucleotide
gguucuuggcaucuuucag

SEQ ID NO: 3101015 - RNA, 19 nt, Artificial Sequence
  Description of Artificial Sequence: Synthetic oligonucleotide
cuggccaucuccucugaug

SEQ ID NO: 3101016 - RNA, 19 nt, Artificial Sequence
  Description of Artificial Sequence: Synthetic oligonucleotide
augucaucacagcuaucug

SEQ ID NO: 3101017 - RNA, 19 nt, Artificial Sequence
  Description of Artificial Sequence: Synthetic oligonucleotide
uguggucgugguccguuug

SEQ ID NO: 3101018 - RNA, 19 nt, Artificial Sequence
  Description of Artificial Sequence: Synthetic oligonucleotide
gauccggcuccgcacgcgg

SEQ ID NO: 3101019 - RNA, 19 nt, Artificial Sequence
  Description of Artificial Sequence: Synthetic oligonucleotide
guguuucccacauccagga

SEQ ID NO: 3101020 - RNA, 19 nt, Artificial Sequence
  Description of Artificial Sequence: Synthetic oligonucleotide
agcugacagaugcucgcag

SEQ ID NO: 3101021 - RNA, 19 nt, Artificial Sequence
  Description of Artificial Sequence: Synthetic oligonucleotide
ugcugggguguaauggcac

SEQ ID NO: 3101022 - RNA, 19 nt, Artificial Sequence
  Description of Artificial Sequence: Synthetic oligonucleotide
auccaggaagaugcacucc

SEQ ID NO: 3101023 - RNA, 19 nt, Artificial Sequence
  Description of Artificial Sequence: Synthetic oligonucleotide
uggagauccggcuccgcac

SEQ ID NO: 3101024 - RNA, 19 nt, Artificial Sequence
  Description of Artificial Sequence: Synthetic oligonucleotide
cacguuuucgccgcaggcc

SEQ ID NO: 3101025 - RNA, 19 nt, Artificial Sequence
  Description of Artificial Sequence: Synthetic oligonucleotide
cugacagaugcucgcaguc

SEQ ID NO: 3101026 - RNA, 19 nt, Artificial Sequence
  Description of Artificial Sequence: Synthetic oligonucleotide
ucgcagucuuacaccaaca

SEQ ID NO: 3101027 - RNA, 19 nt, Artificial Sequence
  Description of Artificial Sequence: Synthetic oligonucleotide
ucaucacagcuaucugcug

SEQ ID NO: 3101028 - RNA, 19 nt, Artificial Sequence
  Description of Artificial Sequence: Synthetic oligonucleotide
gguucuuguacuucauauc

SEQ ID NO: 3101029 - RNA, 19 nt, Artificial Sequence
  Description of Artificial Sequence: Synthetic oligonucleotide
gcagucuuacaccaacagc

SEQ ID NO: 3101030 - RNA, 19 nt, Artificial Sequence
  Description of Artificial Sequence: Synthetic oligonucleotide
cacuccucgaucugagcug

SEQ ID NO: 3101031 - RNA, 19 nt, Artificial Sequence
  Description of Artificial Sequence: Synthetic oligonucleotide
gguguaauggcaccacaca

SEQ ID NO: 3101032 - RNA, 19 nt, Artificial Sequence
  Description of Artificial Sequence: Synthetic oligonucleotide
ucccacauccaggaagaug

SEQ ID NO: 3101033 - RNA, 19 nt, Artificial Sequence
  Description of Artificial Sequence: Synthetic oligonucleotide
ugacagaugcucgcagucu

SEQ ID NO: 3101034 - RNA, 19 nt, Artificial Sequence
  Description of Artificial Sequence: Synthetic oligonucleotide
ggagauccggcuccgcacg

SEQ ID NO: 3101035 - RNA, 19 nt, Artificial Sequence
  Description of Artificial Sequence: Synthetic oligonucleotide
cauaucuguguuucccaca

SEQ ID NO: 3101036 - RNA, 19 nt, Artificial Sequence
  Description of Artificial Sequence: Synthetic oligonucleotide
gaugcacuccucgaucuga

SEQ ID NO: 3101037 - RNA, 19 nt, Artificial Sequence
  Description of Artificial Sequence: Synthetic oligonucleotide
acagccuuguggucguggu

SEQ ID NO: 3101038 - RNA, 19 nt, Artificial Sequence
  Description of Artificial Sequence: Synthetic oligonucleotide
accacacagcacguuuucg

SEQ ID NO: 3101039 - RNA, 19 nt, Artificial Sequence
  Description of Artificial Sequence: Synthetic oligonucleotide
agaugcacuccucgaucug

SEQ ID NO: 3101040 - RNA, 19 nt, Artificial Sequence
  Description of Artificial Sequence: Synthetic oligonucleotide
uucacggcauuuguuucgu

SEQ ID NO: 3101041 - RNA, 19 nt, Artificial Sequence
  Description of Artificial Sequence: Synthetic oligonucleotide
agucuuacaccaacagccu

SEQ ID NO: 3101042 - RNA, 19 nt, Artificial Sequence
  Description of Artificial Sequence: Synthetic oligonucleotide
ugguccguuugcagggcca

SEQ ID NO: 3101043 - RNA, 19 nt, Artificial Sequence
  Description of Artificial Sequence: Synthetic oligonucleotide
acgcgguucuuguacuuca

SEQ ID NO: 3101044 - RNA, 19 nt, Artificial Sequence
  Description of Artificial Sequence: Synthetic oligonucleotide
ucagcauuucacggcauuu

SEQ ID NO: 3101045 - RNA, 19 nt, Artificial Sequence
  Description of Artificial Sequence: Synthetic oligonucleotide
cauuucacggcauuuguuu

SEQ ID NO: 3101046 - RNA, 19 nt, Artificial Sequence
  Description of Artificial Sequence: Synthetic oligonucleotide
ccacacagcacguuuucgc

SEQ ID NO: 3101047 - RNA, 19 nt, Artificial Sequence
  Description of Artificial Sequence: Synthetic oligonucleotide
uaauggcaccacacagcac

SEQ ID NO: 3101048 - RNA, 19 nt, Artificial Sequence
  Description of Artificial Sequence: Synthetic oligonucleotide
cagcauuucacggcauuug

SEQ ID NO: 3101049 - RNA, 19 nt, Artificial Sequence
  Description of Artificial Sequence: Synthetic oligonucleotide
uccguuugcagggccaaaa

SEQ ID NO: 3101050 - RNA, 19 nt, Artificial Sequence
  Description of Artificial Sequence: Synthetic oligonucleotide
uuuucgccgcaggccaggg

SEQ ID NO: 3101051 - RNA, 19 nt, Artificial Sequence
  Description of Artificial Sequence: Synthetic oligonucleotide
caucuuucagguuggagau

SEQ ID NO: 3101052 - RNA, 19 nt, Artificial Sequence
  Description of Artificial Sequence: Synthetic oligonucleotide
ugcacuccucgaucugagc

SEQ ID NO: 3101053 - RNA, 19 nt, Artificial Sequence
  Description of Artificial Sequence: Synthetic oligonucleotide
guggucgugguccguuugc

SEQ ID NO: 3101054 - RNA, 19 nt, Artificial Sequence
  Description of Artificial Sequence: Synthetic oligonucleotide
cagguuggagauccggcuc

SEQ ID NO: 3101055 - RNA, 19 nt, Artificial Sequence
  Description of Artificial Sequence: Synthetic oligonucleotide
uguuucccacauccaggaa

SEQ ID NO: 3101056 - RNA, 19 nt, Artificial Sequence
  Description of Artificial Sequence: Synthetic oligonucleotide
aucuuucagguuggagauc

SEQ ID NO: 3101057 - RNA, 19 nt, Artificial Sequence
  Description of Artificial Sequence: Synthetic oligonucleotide
uccucgaucugagcugaca

SEQ ID NO: 3101058 - RNA, 19 nt, Artificial Sequence
  Description of Artificial Sequence: Synthetic oligonucleotide
gucaucacagcuaucugcu

SEQ ID NO: 3101059 - RNA, 19 nt, Artificial Sequence
  Description of Artificial Sequence: Synthetic oligonucleotide
guuuucgccgcaggccagg

SEQ ID NO: 3101060 - RNA, 19 nt, Artificial Sequence
  Description of Artificial Sequence: Synthetic oligonucleotide
ccucgaucugagcugacag

SEQ ID NO: 3101061 - RNA, 19 nt, Artificial Sequence
  Description of Artificial Sequence: Synthetic oligonucleotide
agaugcucgcagucuuaca

SEQ ID NO: 3101062 - RNA, 19 nt, Artificial Sequence
  Description of Artificial Sequence: Synthetic oligonucleotide
uaucuguguuucccacauc

SEQ ID NO: 3101063 - RNA, 19 nt, Artificial Sequence
  Description of Artificial Sequence: Synthetic oligonucleotide
cucgaucugagcugacaga

SEQ ID NO: 3101064 - RNA, 19 nt, Artificial Sequence
  Description of Artificial Sequence: Synthetic oligonucleotide
cagaugcucgcagucuuac

SEQ ID NO: 3101065 - RNA, 19 nt, Artificial Sequence
  Description of Artificial Sequence: Synthetic oligonucleotide
acuccucgaucugagcuga

SEQ ID NO: 3101066 - RNA, 19 nt, Artificial Sequence
  Description of Artificial Sequence: Synthetic oligonucleotide
cacauccaggaagaugcac

SEQ ID NO: 3101067 - RNA, 19 nt, Artificial Sequence
  Description of Artificial Sequence: Synthetic oligonucleotide
uuacaccaacagccuugug

SEQ ID NO: 3101068 - RNA, 19 nt, Artificial Sequence
  Description of Artificial Sequence: Synthetic oligonucleotide
aggccaggguucuuggcau

SEQ ID NO: 3101069 - RNA, 19 nt, Artificial Sequence
  Description of Artificial Sequence: Synthetic oligonucleotide
ugggguguaauggcaccac

SEQ ID NO: 3101070 - RNA, 19 nt, Artificial Sequence
  Description of Artificial Sequence: Synthetic oligonucleotide
gagauccggcuccgcacgc

SEQ ID NO: 3101071 - RNA, 19 nt, Artificial Sequence
  Description of Artificial Sequence: Synthetic oligonucleotide
ugaugucaucacagcuauc

SEQ ID NO: 3101072 - RNA, 19 nt, Artificial Sequence
  Description of Artificial Sequence: Synthetic oligonucleotide
cucugaugucaucacagcu

SEQ ID NO: 3101073 - RNA, 19 nt, Artificial Sequence
  Description of Artificial Sequence: Synthetic oligonucleotide
ccucugaugucaucacagc

SEQ ID NO: 3101074 - RNA, 19 nt, Artificial Sequence
  Description of Artificial Sequence: Synthetic oligonucleotide
gccaaaagucagcauuuca

SEQ ID NO: 3101075 - RNA, 19 nt, Artificial Sequence
  Description of Artificial Sequence: Synthetic oligonucleotide
ucagcucaucacuggccau

SEQ ID NO: 3101076 - RNA, 19 nt, Artificial Sequence
  Description of Artificial Sequence: Synthetic oligonucleotide
caccacacagcacguuuuc

SEQ ID NO: 3101077 - RNA, 19 nt, Artificial Sequence
  Description of Artificial Sequence: Synthetic oligonucleotide
cugaugucaucacagcuau

SEQ ID NO: 3101078 - RNA, 19 nt, Artificial Sequence
  Description of Artificial Sequence: Synthetic oligonucleotide
uggucgugguccguuugca

SEQ ID NO: 3101079 - RNA, 19 nt, Artificial Sequence
  Description of Artificial Sequence: Synthetic oligonucleotide
uuguuucguacagcaucac

SEQ ID NO: 3101080 - RNA, 19 nt, Artificial Sequence
  Description of Artificial Sequence: Synthetic oligonucleotide
augcacuccucgaucugag

SEQ ID NO: 3101081 - RNA, 19 nt, Artificial Sequence
  Description of Artificial Sequence: Synthetic oligonucleotide
ggcauuuguuucguacagc

SEQ ID NO: 3101082 - RNA, 19 nt, Artificial Sequence
  Description of Artificial Sequence: Synthetic oligonucleotide
gcugggguguaauggcacc

SEQ ID NO: 3101083 - RNA, 19 nt, Artificial Sequence
  Description of Artificial Sequence: Synthetic oligonucleotide
ggguguaauggcaccacac

SEQ ID NO: 3101084 - RNA, 19 nt, Artificial Sequence
  Description of Artificial Sequence: Synthetic oligonucleotide
gacagaugcucgcagucuu

SEQ ID NO: 3101085 - RNA, 19 nt, Artificial Sequence
  Description of Artificial Sequence: Synthetic oligonucleotide
ggucgugguccguuugcag

SEQ ID NO: 3101086 - RNA, 19 nt, Artificial Sequence
  Description of Artificial Sequence: Synthetic oligonucleotide
gugguccguuugcagggcc

SEQ ID NO: 3101087 - RNA, 19 nt, Artificial Sequence
  Description of Artificial Sequence: Synthetic oligonucleotide
ggcaucuuucagguuggag

SEQ ID NO: 3101088 - RNA, 19 nt, Artificial Sequence
  Description of Artificial Sequence: Synthetic oligonucleotide
uuucgccgcaggccagggu

SEQ ID NO: 3101089 - RNA, 19 nt, Artificial Sequence
  Description of Artificial Sequence: Synthetic oligonucleotide
gcacguuuucgccgcaggc

SEQ ID NO: 3101090 - RNA, 19 nt, Artificial Sequence
  Description of Artificial Sequence: Synthetic oligonucleotide
cuccucugaugucaucaca

SEQ ID NO: 3101091 - RNA, 19 nt, Artificial Sequence
  Description of Artificial Sequence: Synthetic oligonucleotide
cugcugggguguaauggca

SEQ ID NO: 3101092 - RNA, 19 nt, Artificial Sequence
  Description of Artificial Sequence: Synthetic oligonucleotide
gagcugacagaugcucgca

SEQ ID NO: 3101093 - RNA, 19 nt, Artificial Sequence
  Description of Artificial Sequence: Synthetic oligonucleotide
cgcagucuuacaccaacag

SEQ ID NO: 3101094 - RNA, 19 nt, Artificial Sequence
  Description of Artificial Sequence: Synthetic oligonucleotide
cacgcgguucuuguacuuc

SEQ ID NO: 3101095 - RNA, 19 nt, Artificial Sequence
  Description of Artificial Sequence: Synthetic oligonucleotide
uuguggucgugguccguuu

SEQ ID NO: 3101096 - RNA, 19 nt, Artificial Sequence
  Description of Artificial Sequence: Synthetic oligonucleotide
gguuggagauccggcuccg

SEQ ID NO: 3101097 - RNA, 19 nt, Artificial Sequence
  Description of Artificial Sequence: Synthetic oligonucleotide
aucugagcugacagaugcu

SEQ ID NO: 3101098 - RNA, 19 nt, Artificial Sequence
  Description of Artificial Sequence: Synthetic oligonucleotide
acuggccaucuccucugau

SEQ ID NO: 3101099 - RNA, 19 nt, Artificial Sequence
  Description of Artificial Sequence: Synthetic oligonucleotide
caucuccucugaugucauc

SEQ ID NO: 3101100 - RNA, 19 nt, Artificial Sequence
  Description of Artificial Sequence: Synthetic oligonucleotide
ggaagaugcacuccucgau

SEQ ID NO: 3101101 - RNA, 19 nt, Artificial Sequence
  Description of Artificial Sequence: Synthetic oligonucleotide
ucgccgcaggccaggguuc

SEQ ID NO: 3101102 - RNA, 19 nt, Artificial Sequence
  Description of Artificial Sequence: Synthetic oligonucleotide
uccggcuccgcacgcgguu

SEQ ID NO: 3101103 - RNA, 19 nt, Artificial Sequence
  Description of Artificial Sequence: Synthetic oligonucleotide
ccguuugcagggccaaaag

SEQ ID NO: 3101104 - RNA, 19 nt, Artificial Sequence
  Description of Artificial Sequence: Synthetic oligonucleotide
caccaacagccuugugguc

SEQ ID NO: 3101105 - RNA, 19 nt, Artificial Sequence
  Description of Artificial Sequence: Synthetic oligonucleotide
cauuuguuucguacagcau

SEQ ID NO: 3101106 - RNA, 19 nt, Artificial Sequence
  Description of Artificial Sequence: Synthetic oligonucleotide
cuuacaccaacagccuugu

SEQ ID NO: 3101107 - RNA, 19 nt, Artificial Sequence
  Description of Artificial Sequence: Synthetic oligonucleotide
acagcacguuuucgccgca

SEQ ID NO: 3101108 - RNA, 19 nt, Artificial Sequence
  Description of Artificial Sequence: Synthetic oligonucleotide
gccuuguggucgugguccg

SEQ ID NO: 3101109 - RNA, 19 nt, Artificial Sequence
  Description of Artificial Sequence: Synthetic oligonucleotide
cggcauuuguuucguacag

SEQ ID NO: 3101110 - RNA, 19 nt, Artificial Sequence
  Description of Artificial Sequence: Synthetic oligonucleotide
cugggguguaauggcacca

SEQ ID NO: 3101111 - RNA, 19 nt, Artificial Sequence
  Description of Artificial Sequence: Synthetic oligonucleotide
cagccuuguggucgugguc

SEQ ID NO: 3101112 - RNA, 19 nt, Artificial Sequence
  Description of Artificial Sequence: Synthetic oligonucleotide
uccgcacgcgguucuugua

SEQ ID NO: 3101113 - RNA, 19 nt, Artificial Sequence
  Description of Artificial Sequence: Synthetic oligonucleotide
guuggagauccggcuccgc

SEQ ID NO: 3101114 - RNA, 19 nt, Artificial Sequence
  Description of Artificial Sequence: Synthetic oligonucleotide
auggcaccacacagcacgu

SEQ ID NO: 3101115 - RNA, 19 nt, Artificial Sequence
  Description of Artificial Sequence: Synthetic oligonucleotide
gggguguaauggcaccaca

SEQ ID NO: 3101116 - RNA, 19 nt, Artificial Sequence
  Description of Artificial Sequence: Synthetic oligonucleotide
ucacggcauuuguuucgua

SEQ ID NO: 3101117 - RNA, 19 nt, Artificial Sequence
  Description of Artificial Sequence: Synthetic oligonucleotide
uggcaucuuucagguugga

SEQ ID NO: 3101118 - RNA, 19 nt, Artificial Sequence
  Description of Artificial Sequence: Synthetic oligonucleotide
cacagcuaucugcuggggu

SEQ ID NO: 3101119 - RNA, 19 nt, Artificial Sequence
  Description of Artificial Sequence: Synthetic oligonucleotide
ccaggaagaugcacuccuc

SEQ ID NO: 3101120 - RNA, 19 nt, Artificial Sequence
  Description of Artificial Sequence: Synthetic oligonucleotide
cagcacguuuucgccgcag

SEQ ID NO: 3101121 - RNA, 19 nt, Artificial Sequence
  Description of Artificial Sequence: Synthetic oligonucleotide
acagaugcucgcagucuua

SEQ ID NO: 3101122 - RNA, 19 nt, Artificial Sequence
  Description of Artificial Sequence: Synthetic oligonucleotide
gucuuacaccaacagccuu

SEQ ID NO: 3101123 - RNA, 19 nt, Artificial Sequence
  Description of Artificial Sequence: Synthetic oligonucleotide
gucagcauuucacggcauu

SEQ ID NO: 3101124 - RNA, 19 nt, Artificial Sequence
  Description of Artificial Sequence: Synthetic oligonucleotide
ccgcacgcgguucuuguac

SEQ ID NO: 3101125 - RNA, 19 nt, Artificial Sequence
  Description of Artificial Sequence: Synthetic oligonucleotide
gcugacagaugcucgcagu

SEQ ID NO: 3101126 - RNA, 19 nt, Artificial Sequence
  Description of Artificial Sequence: Synthetic oligonucleotide
gcaggccaggguucuuggc

SEQ ID NO: 3101127 - RNA, 19 nt, Artificial Sequence
  Description of Artificial Sequence: Synthetic oligonucleotide
cuccucgaucugagcugac

SEQ ID NO: 3101128 - RNA, 19 nt, Artificial Sequence
  Description of Artificial Sequence: Synthetic oligonucleotide
uucccacauccaggaagau

SEQ ID NO: 3101129 - RNA, 19 nt, Artificial Sequence
  Description of Artificial Sequence: Synthetic oligonucleotide
ggccaaaagucagcauuuc

SEQ ID NO: 3101130 - RNA, 19 nt, Artificial Sequence
  Description of Artificial Sequence: Synthetic oligonucleotide
agucagcauuucacggcau

SEQ ID NO: 3101131 - RNA, 19 nt, Artificial Sequence
  Description of Artificial Sequence: Synthetic oligonucleotide
cuaucugcugggguguaau

SEQ ID NO: 3101132 - RNA, 19 nt, Artificial Sequence
  Description of Artificial Sequence: Synthetic oligonucleotide
cgaucugagcugacagaug

SEQ ID NO: 3101133 - RNA, 19 nt, Artificial Sequence
  Description of Artificial Sequence: Synthetic oligonucleotide
uggcaccacacagcacguu

SEQ ID NO: 3101134 - RNA, 19 nt, Artificial Sequence
  Description of Artificial Sequence: Synthetic oligonucleotide
cuccgcacgcgguucuugu

SEQ ID NO: 3101135 - RNA, 19 nt, Artificial Sequence
  Description of Artificial Sequence: Synthetic oligonucleotide
cacuggccaucuccucuga

SEQ ID NO: 3101136 - RNA, 19 nt, Artificial Sequence
  Description of Artificial Sequence: Synthetic oligonucleotide
agcuaucugcuggggugua

SEQ ID NO: 3101137 - RNA, 19 nt, Artificial Sequence
  Description of Artificial Sequence: Synthetic oligonucleotide
gcgguucuuguacuucaua

SEQ ID NO: 3101138 - RNA, 19 nt, Artificial Sequence
  Description of Artificial Sequence: Synthetic oligonucleotide
cgguucuuguacuucauau

SEQ ID NO: 3101139 - RNA, 19 nt, Artificial Sequence
  Description of Artificial Sequence: Synthetic oligonucleotide
cguuuucgccgcaggccag

SEQ ID NO: 3101140 - RNA, 19 nt, Artificial Sequence
  Description of Artificial Sequence: Synthetic oligonucleotide
cagcuaucugcuggggugu

SEQ ID NO: 3101141 - RNA, 19 nt, Artificial Sequence
  Description of Artificial Sequence: Synthetic oligonucleotide
cuuguggucgugguccguu

SEQ ID NO: 3101142 - RNA, 19 nt, Artificial Sequence
  Description of Artificial Sequence: Synthetic oligonucleotide
ggccaggguucuuggcauc

SEQ ID NO: 3101143 - RNA, 19 nt, Artificial Sequence
  Description of Artificial Sequence: Synthetic oligonucleotide
gggccaaaagucagcauuu

SEQ ID NO: 3101144 - RNA, 19 nt, Artificial Sequence
  Description of Artificial Sequence: Synthetic oligonucleotide
gguccguuugcagggccaa

SEQ ID NO: 3101145 - RNA, 19 nt, Artificial Sequence
  Description of Artificial Sequence: Synthetic oligonucleotide
caacagccuuguggucgug

SEQ ID NO: 3101146 - RNA, 19 nt, Artificial Sequence
  Description of Artificial Sequence: Synthetic oligonucleotide
auccggcuccgcacgcggu

SEQ ID NO: 3101147 - RNA, 19 nt, Artificial Sequence
  Description of Artificial Sequence: Synthetic oligonucleotide
ccacauccaggaagaugca

SEQ ID NO: 3101148 - RNA, 19 nt, Artificial Sequence
  Description of Artificial Sequence: Synthetic oligonucleotide
gcuccgcacgcgguucuug

SEQ ID NO: 3101149 - RNA, 19 nt, Artificial Sequence
  Description of Artificial Sequence: Synthetic oligonucleotide
cguuugcagggccaaaagu

SEQ ID NO: 3101150 - RNA, 19 nt, Artificial Sequence
  Description of Artificial Sequence: Synthetic oligonucleotide
ccaacagccuuguggucgu

SEQ ID NO: 3101151 - RNA, 19 nt, Artificial Sequence
  Description of Artificial Sequence: Synthetic oligonucleotide
gcauuucacggcauuuguu

SEQ ID NO: 3101152 - RNA, 19 nt, Artificial Sequence
  Description of Artificial Sequence: Synthetic oligonucleotide
cagggccaaaagucagcau

SEQ ID NO: 3101153 - RNA, 19 nt, Artificial Sequence
  Description of Artificial Sequence: Synthetic oligonucleotide
guccguuugcagggccaaa

SEQ ID NO: 3101154 - RNA, 19 nt, Artificial Sequence
  Description of Artificial Sequence: Synthetic oligonucleotide
gcuaucugcugggguguaa

SEQ ID NO: 3101155 - RNA, 19 nt, Artificial Sequence
  Description of Artificial Sequence: Synthetic oligonucleotide
cgugguccguuugcagggc

SEQ ID NO: 3101156 - RNA, 19 nt, Artificial Sequence
  Description of Artificial Sequence: Synthetic oligonucleotide
gccaggguucuuggcaucu

SEQ ID NO: 3101157 - RNA, 19 nt, Artificial Sequence
  Description of Artificial Sequence: Synthetic oligonucleotide
gcucgcagucuuacaccaa

SEQ ID NO: 3101158 - RNA, 19 nt, Artificial Sequence
  Description of Artificial Sequence: Synthetic oligonucleotide
gcaccacacagcacguuuu

SEQ ID NO: 3101159 - RNA, 19 nt, Artificial Sequence
  Description of Artificial Sequence: Synthetic oligonucleotide
ccggcuccgcacgcgguuc

SEQ ID NO: 3101160 - RNA, 19 nt, Artificial Sequence
  Description of Artificial Sequence: Synthetic oligonucleotide
gcacgcgguucuuguacuu

SEQ ID NO: 3101161 - RNA, 19 nt, Artificial Sequence
  Description of Artificial Sequence: Synthetic oligonucleotide
cgcacgcgguucuuguacu

SEQ ID NO: 3101162 - RNA, 19 nt, Artificial Sequence
  Description of Artificial Sequence: Synthetic oligonucleotide
cgcgguucuuguacuucau

SEQ ID NO: 3101163 - RNA, 19 nt, Artificial Sequence
  Description of Artificial Sequence: Synthetic oligonucleotide
ccuuguggucgugguccgu

SEQ ID NO: 3101164 - RNA, 19 nt, Artificial Sequence
  Description of Artificial Sequence: Synthetic oligonucleotide
ccaggguucuuggcaucuu

SEQ ID NO: 3101165 - RNA, 19 nt, Artificial Sequence
  Description of Artificial Sequence: Synthetic oligonucleotide
ggcuccgcacgcgguucuu

SEQ ID NO: 3101166 - RNA, 19 nt, Artificial Sequence
  Description of Artificial Sequence: Synthetic oligonucleotide
cgccgcaggccaggguucu

SEQ ID NO: 3101167 - RNA, 19 nt, Artificial Sequence
  Description of Artificial Sequence: Synthetic oligonucleotide
gccgcaggccaggguucuu

SEQ ID NO: 3101168 - RNA, 19 nt, Artificial Sequence
  Description of Artificial Sequence: Synthetic oligonucleotide
guaguuuaaauuuaaauac

SEQ ID NO: 3101169 - RNA, 19 nt, Artificial Sequence
  Description of Artificial Sequence: Synthetic oligonucleotide
agcauuuucaaguaggcgg

SEQ ID NO: 3101170 - RNA, 19 nt, Artificial Sequence
  Description of Artificial Sequence: Synthetic oligonucleotide
uguauguaaaauaaucuca

SEQ ID NO: 3101171 - RNA, 19 nt, Artificial Sequence
  Description of Artificial Sequence: Synthetic oligonucleotide
aaaauaaucucagcauucc

SEQ ID NO: 3101172 - RNA, 19 nt, Artificial Sequence
  Description of Artificial Sequence: Synthetic oligonucleotide
uauguauguaaaauaaucu

SEQ ID NO: 3101173 - RNA, 19 nt, Artificial Sequence
  Description of Artificial Sequence: Synthetic oligonucleotide
aguaguuuaaauuuaaaua

SEQ ID NO: 3101174 - RNA, 19 nt, Artificial Sequence
  Description of Artificial Sequence: Synthetic oligonucleotide
auguauguaaaauaaucuc

SEQ ID NO: 3101175 - RNA, 19 nt, Artificial Sequence
  Description of Artificial Sequence: Synthetic oligonucleotide
uuaaauuuaaauacauuua

SEQ ID NO: 3101176 - RNA, 19 nt, Artificial Sequence
  Description of Artificial Sequence: Synthetic oligonucleotide
uaagaaguaguuuaaauuu

SEQ ID NO: 3101177 - RNA, 19 nt, Artificial Sequence
  Description of Artificial Sequence: Synthetic oligonucleotide
auaaucucagcauuccugg

SEQ ID NO: 3101178 - RNA, 19 nt, Artificial Sequence
  Description of Artificial Sequence: Synthetic oligonucleotide
aaaagcuccguuguucucc

SEQ ID NO: 3101179 - RNA, 19 nt, Artificial Sequence
  Description of Artificial Sequence: Synthetic oligonucleotide
auauguauguaaaauaauc

SEQ ID NO: 3101180 - RNA, 19 nt, Artificial Sequence
  Description of Artificial Sequence: Synthetic oligonucleotide
uguaaaauaaucucagcau

SEQ ID NO: 3101181 - RNA, 19 nt, Artificial Sequence
  Description of Artificial Sequence: Synthetic oligonucleotide
uuaagaaguaguuuaaauu

SEQ ID NO: 3101182 - RNA, 19 nt, Artificial Sequence
  Description of Artificial Sequence: Synthetic oligonucleotide
ugaaaccugagguuugugg

SEQ ID NO: 3101183 - RNA, 19 nt, Artificial Sequence
  Description of Artificial Sequence: Synthetic oligonucleotide
uaguuuaaauuuaaauaca

SEQ ID NO: 3101184 - RNA, 19 nt, Artificial Sequence
  Description of Artificial Sequence: Synthetic oligonucleotide
uuuaagaaguaguuuaaau

SEQ ID NO: 3101185 - RNA, 19 nt, Artificial Sequence
  Description of Artificial Sequence: Synthetic oligonucleotide
aauaaucucagcauuccug

SEQ ID NO: 3101186 - RNA, 19 nt, Artificial Sequence
  Description of Artificial Sequence: Synthetic oligonucleotide
aauuucagguauugucagg

SEQ ID NO: 3101187 - RNA, 19 nt, Artificial Sequence
  Description of Artificial Sequence: Synthetic oligonucleotide
guauugucaggucaggccg

SEQ ID NO: 3101188 - RNA, 19 nt, Artificial Sequence
  Description of Artificial Sequence: Synthetic oligonucleotide
aucuugaaguuucuacugc

SEQ ID NO: 3101189 - RNA, 19 nt, Artificial Sequence
  Description of Artificial Sequence: Synthetic oligonucleotide
uuucagucccaaaagcucc

SEQ ID NO: 3101190 - RNA, 19 nt, Artificial Sequence
  Description of Artificial Sequence: Synthetic oligonucleotide
uuuucaaguaggcggacca

SEQ ID NO: 3101191 - RNA, 19 nt, Artificial Sequence
  Description of Artificial Sequence: Synthetic oligonucleotide
ucuuucagucccaaaagcu

SEQ ID NO: 3101192 - RNA, 19 nt, Artificial Sequence
  Description of Artificial Sequence: Synthetic oligonucleotide
gaauuucagguauugucag

SEQ ID NO: 3101193 - RNA, 19 nt, Artificial Sequence
  Description of Artificial Sequence: Synthetic oligonucleotide
acugcugugaaaccugagg

SEQ ID NO: 3101194 - RNA, 19 nt, Artificial Sequence
  Description of Artificial Sequence: Synthetic oligonucleotide
ucucuuucagucccaaaag

SEQ ID NO: 3101195 - RNA, 19 nt, Artificial Sequence
  Description of Artificial Sequence: Synthetic oligonucleotide
uucucuuucagucccaaaa

SEQ ID NO: 3101196 - RNA, 19 nt, Artificial Sequence
  Description of Artificial Sequence: Synthetic oligonucleotide
guauguaaaauaaucucag

SEQ ID NO: 3101197 - RNA, 19 nt, Artificial Sequence
  Description of Artificial Sequence: Synthetic oligonucleotide
ucagguauugucaggucag

SEQ ID NO: 3101198 - RNA, 19 nt, Artificial Sequence
  Description of Artificial Sequence: Synthetic oligonucleotide
gagagcauuuucaaguagg

SEQ ID NO: 3101199 - RNA, 19 nt, Artificial Sequence
  Description of Artificial Sequence: Synthetic oligonucleotide
aaauaaucucagcauuccu

SEQ ID NO: 3101200 - RNA, 19 nt, Artificial Sequence
  Description of Artificial Sequence: Synthetic oligonucleotide
ucaaguaggcggaccaggg

SEQ ID NO: 3101201 - RNA, 19 nt, Artificial Sequence
  Description of Artificial Sequence: Synthetic oligonucleotide
aaucucagcauuccuggca

SEQ ID NO: 3101202 - RNA, 19 nt, Artificial Sequence
  Description of Artificial Sequence: Synthetic oligonucleotide
uucagguauugucagguca

SEQ ID NO: 3101203 - RNA, 19 nt, Artificial Sequence
  Description of Artificial Sequence: Synthetic oligonucleotide
guuucuacugcugugaaac

SEQ ID NO: 3101204 - RNA, 19 nt, Artificial Sequence
  Description of Artificial Sequence: Synthetic oligonucleotide
ugugguguuucucuuucag

SEQ ID NO: 3101205 - RNA, 19 nt, Artificial Sequence
  Description of Artificial Sequence: Synthetic oligonucleotide
uguucuccaggcuuugggg

SEQ ID NO: 3101206 - RNA, 19 nt, Artificial Sequence
  Description of Artificial Sequence: Synthetic oligonucleotide
aaguaggcggaccagggca

SEQ ID NO: 3101207 - RNA, 19 nt, Artificial Sequence
  Description of Artificial Sequence: Synthetic oligonucleotide
uuguucuccaggcuuuggg

SEQ ID NO: 3101208 - RNA, 19 nt, Artificial Sequence
  Description of Artificial Sequence: Synthetic oligonucleotide
ucuacugcugugaaaccug

SEQ ID NO: 3101209 - RNA, 19 nt, Artificial Sequence
  Description of Artificial Sequence: Synthetic oligonucleotide
ugguguuucucuuucaguc

SEQ ID NO: 3101210 - RNA, 19 nt, Artificial Sequence
  Description of Artificial Sequence: Synthetic oligonucleotide
aaaccugagguuuguggug

SEQ ID NO: 3101211 - RNA, 19 nt, Artificial Sequence
  Description of Artificial Sequence: Synthetic oligonucleotide
agagcauuuucaaguaggc

SEQ ID NO: 3101212 - RNA, 19 nt, Artificial Sequence
  Description of Artificial Sequence: Synthetic oligonucleotide
ugaaguuucuacugcugug

SEQ ID NO: 3101213 - RNA, 19 nt, Artificial Sequence
  Description of Artificial Sequence: Synthetic oligonucleotide
aguugcaucuugaaguuuc

SEQ ID NO: 3101214 - RNA, 19 nt, Artificial Sequence
  Description of Artificial Sequence: Synthetic oligonucleotide
aauauguauguaaaauaau

SEQ ID NO: 3101215 - RNA, 19 nt, Artificial Sequence
  Description of Artificial Sequence: Synthetic oligonucleotide
ugucaggucaggccgguag

SEQ ID NO: 3101216 - RNA, 19 nt, Artificial Sequence
  Description of Artificial Sequence: Synthetic oligonucleotide
ucuugaaguuucuacugcu

SEQ ID NO: 3101217 - RNA, 19 nt, Artificial Sequence
  Description of Artificial Sequence: Synthetic oligonucleotide
uauugucaggucaggccgg

SEQ ID NO: 3101218 - RNA, 19 nt, Artificial Sequence
  Description of Artificial Sequence: Synthetic oligonucleotide
uuugugguguuucucuuuc

SEQ ID NO: 3101219 - RNA, 19 nt, Artificial Sequence
  Description of Artificial Sequence: Synthetic oligonucleotide
auuuucaaguaggcggacc

SEQ ID NO: 3101220 - RNA, 19 nt, Artificial Sequence
  Description of Artificial Sequence: Synthetic oligonucleotide
caucuugaaguuucuacug

SEQ ID NO: 3101221 - RNA, 19 nt, Artificial Sequence
  Description of Artificial Sequence: Synthetic oligonucleotide
auggccaggaggcuggagg

SEQ ID NO: 3101222 - RNA, 19 nt, Artificial Sequence
  Description of Artificial Sequence: Synthetic oligonucleotide
uucagucccaaaagcuccg

SEQ ID NO: 3101223 - RNA, 19 nt, Artificial Sequence
  Description of Artificial Sequence: Synthetic oligonucleotide
agucccaaaagcuccguug

SEQ ID NO: 3101224 - RNA, 19 nt, Artificial Sequence
  Description of Artificial Sequence: Synthetic oligonucleotide
uucaaguaggcggaccagg

SEQ ID NO: 3101225 - RNA, 19 nt, Artificial Sequence
  Description of Artificial Sequence: Synthetic oligonucleotide
auuucagguauugucaggu

SEQ ID NO: 3101226 - RNA, 19 nt, Artificial Sequence
  Description of Artificial Sequence: Synthetic oligonucleotide
aguuuaaauuuaaauacau

SEQ ID NO: 3101227 - RNA, 19 nt, Artificial Sequence
  Description of Artificial Sequence: Synthetic oligonucleotide
guaccagugcaccaccugg

SEQ ID NO: 3101228 - RNA, 19 nt, Artificial Sequence
  Description of Artificial Sequence: Synthetic oligonucleotide
gaggagagcauuuucaagu

SEQ ID NO: 3101229 - RNA, 19 nt, Artificial Sequence
  Description of Artificial Sequence: Synthetic oligonucleotide
aucucagcauuccuggcag

SEQ ID NO: 3101230 - RNA, 19 nt, Artificial Sequence
  Description of Artificial Sequence: Synthetic oligonucleotide
aggucaggccgguaguacc

SEQ ID NO: 3101231 - RNA, 19 nt, Artificial Sequence
  Description of Artificial Sequence: Synthetic oligonucleotide
gguauugucaggucaggcc

SEQ ID NO: 3101232 - RNA, 19 nt, Artificial Sequence
  Description of Artificial Sequence: Synthetic oligonucleotide
uaccagugcaccaccuggg

SEQ ID NO: 3101233 - RNA, 19 nt, Artificial Sequence
  Description of Artificial Sequence: Synthetic oligonucleotide
cuugaaguuucuacugcug

SEQ ID NO: 3101234 - RNA, 19 nt, Artificial Sequence
  Description of Artificial Sequence: Synthetic oligonucleotide
guguuucucuuucaguccc

SEQ ID NO: 3101235 - RNA, 19 nt, Artificial Sequence
  Description of Artificial Sequence: Synthetic oligonucleotide
gagcauuuucaaguaggcg

SEQ ID NO: 3101236 - RNA, 19 nt, Artificial Sequence
  Description of Artificial Sequence: Synthetic oligonucleotide
gggaauuucagguauuguc

SEQ ID NO: 3101237 - RNA, 19 nt, Artificial Sequence
  Description of Artificial Sequence: Synthetic oligonucleotide
cagaguugcaucuugaagu

SEQ ID NO: 3101238 - RNA, 19 nt, Artificial Sequence
  Description of Artificial Sequence: Synthetic oligonucleotide
agguuugugguguuucucu

SEQ ID NO: 3101239 - RNA, 19 nt, Artificial Sequence
  Description of Artificial Sequence: Synthetic oligonucleotide
cagugcaccaccugggccc

SEQ ID NO: 3101240 - RNA, 19 nt, Artificial Sequence
  Description of Artificial Sequence: Synthetic oligonucleotide
agcuccguuguucuccagg

SEQ ID NO: 3101241 - RNA, 19 nt, Artificial Sequence
  Description of Artificial Sequence: Synthetic oligonucleotide
gaaguuucuacugcuguga

SEQ ID NO: 3101242 - RNA, 19 nt, Artificial Sequence
  Description of Artificial Sequence: Synthetic oligonucleotide
accagugcaccaccugggc

SEQ ID NO: 3101243 - RNA, 19 nt, Artificial Sequence
  Description of Artificial Sequence: Synthetic oligonucleotide
agguauugucaggucaggc

SEQ ID NO: 3101244 - RNA, 19 nt, Artificial Sequence
  Description of Artificial Sequence: Synthetic oligonucleotide
aagaaguaguuuaaauuua

SEQ ID NO: 3101245 - RNA, 19 nt, Artificial Sequence
  Description of Artificial Sequence: Synthetic oligonucleotide
aaagcuccguuguucucca

SEQ ID NO: 3101246 - RNA, 19 nt, Artificial Sequence
  Description of Artificial Sequence: Synthetic oligonucleotide
gaaaccugagguuuguggu

SEQ ID NO: 3101247 - RNA, 19 nt, Artificial Sequence
  Description of Artificial Sequence: Synthetic oligonucleotide
accaccugggccccggcgc

SEQ ID NO: 3101248 - RNA, 19 nt, Artificial Sequence
  Description of Artificial Sequence: Synthetic oligonucleotide
uucuacugcugugaaaccu

SEQ ID NO: 3101249 - RNA, 19 nt, Artificial Sequence
  Description of Artificial Sequence: Synthetic oligonucleotide
ugggccccggcgcacaugg

SEQ ID NO: 3101250 - RNA, 19 nt, Artificial Sequence
  Description of Artificial Sequence: Synthetic oligonucleotide
uuucuacugcugugaaacc

SEQ ID NO: 3101251 - RNA, 19 nt, Artificial Sequence
  Description of Artificial Sequence: Synthetic oligonucleotide
aaguuucuacugcugugaa

SEQ ID NO: 3101252 - RNA, 19 nt, Artificial Sequence
  Description of Artificial Sequence: Synthetic oligonucleotide
uaaucucagcauuccuggc

SEQ ID NO: 3101253 - RNA, 19 nt, Artificial Sequence
  Description of Artificial Sequence: Synthetic oligonucleotide
uggaggagagcauuuucaa

SEQ ID NO: 3101254 - RNA, 19 nt, Artificial Sequence
  Description of Artificial Sequence: Synthetic oligonucleotide
aggccgguaguaccagugc

SEQ ID NO: 3101255 - RNA, 19 nt, Artificial Sequence
  Description of Artificial Sequence: Synthetic oligonucleotide
uccguuguucuccaggcuu

SEQ ID NO: 3101256 - RNA, 19 nt, Artificial Sequence
  Description of Artificial Sequence: Synthetic oligonucleotide
ggaauuucagguauuguca

SEQ ID NO: 3101257 - RNA, 19 nt, Artificial Sequence
  Description of Artificial Sequence: Synthetic oligonucleotide
cacauggccaggaggcugg

SEQ ID NO: 3101258 - RNA, 19 nt, Artificial Sequence
  Description of Artificial Sequence: Synthetic oligonucleotide
agaguugcaucuugaaguu

SEQ ID NO: 3101259 - RNA, 19 nt, Artificial Sequence
  Description of Artificial Sequence: Synthetic oligonucleotide
aaccugagguuuguggugu

SEQ ID NO: 3101260 - RNA, 19 nt, Artificial Sequence
  Description of Artificial Sequence: Synthetic oligonucleotide
agaaguaguuuaaauuuaa

SEQ ID NO: 3101261 - RNA, 19 nt, Artificial Sequence
  Description of Artificial Sequence: Synthetic oligonucleotide
aguaccagugcaccaccug

SEQ ID NO: 3101262 - RNA, 19 nt, Artificial Sequence
  Description of Artificial Sequence: Synthetic oligonucleotide
gguguuucucuuucagucc

SEQ ID NO: 3101263 - RNA, 19 nt, Artificial Sequence
  Description of Artificial Sequence: Synthetic oligonucleotide
uuucaaguaggcggaccag

SEQ ID NO: 3101264 - RNA, 19 nt, Artificial Sequence
  Description of Artificial Sequence: Synthetic oligonucleotide
gcagaguugcaucuugaag

SEQ ID NO: 3101265 - RNA, 19 nt, Artificial Sequence
  Description of Artificial Sequence: Synthetic oligonucleotide
guaguaccagugcaccacc

SEQ ID NO: 3101266 - RNA, 19 nt, Artificial Sequence
  Description of Artificial Sequence: Synthetic oligonucleotide
cuggaggagagcauuuuca

SEQ ID NO: 3101267 - RNA, 19 nt, Artificial Sequence
  Description of Artificial Sequence: Synthetic oligonucleotide
uacugcugugaaaccugag

SEQ ID NO: 3101268 - RNA, 19 nt, Artificial Sequence
  Description of Artificial Sequence: Synthetic oligonucleotide
ugugaaaccugagguuugu

SEQ ID NO: 3101269 - RNA, 19 nt, Artificial Sequence
  Description of Artificial Sequence: Synthetic oligonucleotide
uuucagguauugucagguc

SEQ ID NO: 3101270 - RNA, 19 nt, Artificial Sequence
  Description of Artificial Sequence: Synthetic oligonucleotide
ugcugugaaaccugagguu

SEQ ID NO: 3101271 - RNA, 19 nt, Artificial Sequence
  Description of Artificial Sequence: Synthetic oligonucleotide
cugugaaaccugagguuug

SEQ ID NO: 3101272 - RNA, 19 nt, Artificial Sequence
  Description of Artificial Sequence: Synthetic oligonucleotide
caaguaggcggaccagggc

SEQ ID NO: 3101273 - RNA, 19 nt, Artificial Sequence
  Description of Artificial Sequence: Synthetic oligonucleotide
uggcagaguugcaucuuga

SEQ ID NO: 3101274 - RNA, 19 nt, Artificial Sequence
  Description of Artificial Sequence: Synthetic oligonucleotide
aggagagcauuuucaagua

SEQ ID NO: 3101275 - RNA, 19 nt, Artificial Sequence
  Description of Artificial Sequence: Synthetic oligonucleotide
cucagcauuccuggcagag

SEQ ID NO: 3101276 - RNA, 19 nt, Artificial Sequence
  Description of Artificial Sequence: Synthetic oligonucleotide
aguaggcggaccagggcac

SEQ ID NO: 3101277 - RNA, 19 nt, Artificial Sequence
  Description of Artificial Sequence: Synthetic oligonucleotide
aguuucuacugcugugaaa

SEQ ID NO: 3101278 - RNA, 19 nt, Artificial Sequence
  Description of Artificial Sequence: Synthetic oligonucleotide
uggccaggaggcuggagga

SEQ ID NO: 3101279 - RNA, 19 nt, Artificial Sequence
  Description of Artificial Sequence: Synthetic oligonucleotide
uuccuggcagaguugcauc

SEQ ID NO: 3101280 - RNA, 19 nt, Artificial Sequence
  Description of Artificial Sequence: Synthetic oligonucleotide
caggccgguaguaccagug

SEQ ID NO: 3101281 - RNA, 19 nt, Artificial Sequence
  Description of Artificial Sequence: Synthetic oligonucleotide
gguaguaccagugcaccac

SEQ ID NO: 3101282 - RNA, 19 nt, Artificial Sequence
  Description of Artificial Sequence: Synthetic oligonucleotide
auuccuggcagaguugcau

SEQ ID NO: 3101283 - RNA, 19 nt, Artificial Sequence
  Description of Artificial Sequence: Synthetic oligonucleotide
agugcaccaccugggcccc

SEQ ID NO: 3101284 - RNA, 19 nt, Artificial Sequence
  Description of Artificial Sequence: Synthetic oligonucleotide
ggcgcacauggccaggagg

SEQ ID NO: 3101285 - RNA, 19 nt, Artificial Sequence
  Description of Artificial Sequence: Synthetic oligonucleotide
cugagguuugugguguuuc

SEQ ID NO: 3101286 - RNA, 19 nt, Artificial Sequence
  Description of Artificial Sequence: Synthetic oligonucleotide
guuguucuccaggcuuugg

SEQ ID NO: 3101287 - RNA, 19 nt, Artificial Sequence
  Description of Artificial Sequence: Synthetic oligonucleotide
gcuccguuguucuccaggc

SEQ ID NO: 3101288 - RNA, 19 nt, Artificial Sequence
  Description of Artificial Sequence: Synthetic oligonucleotide
caaaagcuccguuguucuc

SEQ ID NO: 3101289 - RNA, 19 nt, Artificial Sequence
  Description of Artificial Sequence: Synthetic oligonucleotide
ucagcauuccuggcagagu

SEQ ID NO: 3101290 - RNA, 19 nt, Artificial Sequence
  Description of Artificial Sequence: Synthetic oligonucleotide
cagguauugucaggucagg

SEQ ID NO: 3101291 - RNA, 19 nt, Artificial Sequence
  Description of Artificial Sequence: Synthetic oligonucleotide
cugcugugaaaccugaggu

SEQ ID NO: 3101292 - RNA, 19 nt, Artificial Sequence
  Description of Artificial Sequence: Synthetic oligonucleotide
gcaucuugaaguuucuacu

SEQ ID NO: 3101293 - RNA, 19 nt, Artificial Sequence
  Description of Artificial Sequence: Synthetic oligonucleotide
guuuaaauuuaaauacauu

SEQ ID NO: 3101294 - RNA, 19 nt, Artificial Sequence
  Description of Artificial Sequence: Synthetic oligonucleotide
gagguuugugguguuucuc

SEQ ID NO: 3101295 - RNA, 19 nt, Artificial Sequence
  Description of Artificial Sequence: Synthetic oligonucleotide
gcauuuucaaguaggcgga

SEQ ID NO: 3101296 - RNA, 19 nt, Artificial Sequence
  Description of Artificial Sequence: Synthetic oligonucleotide
gcauuccuggcagaguugc

SEQ ID NO: 3101297 - RNA, 19 nt, Artificial Sequence
  Description of Artificial Sequence: Synthetic oligonucleotide
cauuuucaaguaggcggac

SEQ ID NO: 3101298 - RNA, 19 nt, Artificial Sequence
  Description of Artificial Sequence: Synthetic oligonucleotide
cuacugcugugaaaccuga

SEQ ID NO: 3101299 - RNA, 19 nt, Artificial Sequence
  Description of Artificial Sequence: Synthetic oligonucleotide
ucucagcauuccuggcaga

SEQ ID NO: 3101300 - RNA, 19 nt, Artificial Sequence
  Description of Artificial Sequence: Synthetic oligonucleotide
gucccaaaagcuccguugu

SEQ ID NO: 3101301 - RNA, 19 nt, Artificial Sequence
  Description of Artificial Sequence: Synthetic oligonucleotide
ucccaaaagcuccguuguu

SEQ ID NO: 3101302 - RNA, 19 nt, Artificial Sequence
  Description of Artificial Sequence: Synthetic oligonucleotide
aagcuccguuguucuccag

SEQ ID NO: 3101303 - RNA, 19 nt, Artificial Sequence
  Description of Artificial Sequence: Synthetic oligonucleotide
aggcggaccagggcacgcc

SEQ ID NO: 3101304 - RNA, 19 nt, Artificial Sequence
  Description of Artificial Sequence: Synthetic oligonucleotide
ucaggccgguaguaccagu

SEQ ID NO: 3101305 - RNA, 19 nt, Artificial Sequence
  Description of Artificial Sequence: Synthetic oligonucleotide
gcgcacauggccaggaggc

SEQ ID NO: 3101306 - RNA, 19 nt, Artificial Sequence
  Description of Artificial Sequence: Synthetic oligonucleotide
ucagucccaaaagcuccgu

SEQ ID NO: 3101307 - RNA, 19 nt, Artificial Sequence
  Description of Artificial Sequence: Synthetic oligonucleotide
ucaggucaggccgguagua

SEQ ID NO: 3101308 - RNA, 19 nt, Artificial Sequence
  Description of Artificial Sequence: Synthetic oligonucleotide
auugucaggucaggccggu

SEQ ID NO: 3101309 - RNA, 19 nt, Artificial Sequence
  Description of Artificial Sequence: Synthetic oligonucleotide
gcuggaggagagcauuuuc

SEQ ID NO: 3101310 - RNA, 19 nt, Artificial Sequence
  Description of Artificial Sequence: Synthetic oligonucleotide
gugaaaccugagguuugug

SEQ ID NO: 3101311 - RNA, 19 nt, Artificial Sequence
  Description of Artificial Sequence: Synthetic oligonucleotide
gugguguuucucuuucagu

SEQ ID NO: 3101312 - RNA, 19 nt, Artificial Sequence
  Description of Artificial Sequence: Synthetic oligonucleotide
guaggcggaccagggcacg

SEQ ID NO: 3101313 - RNA, 19 nt, Artificial Sequence
  Description of Artificial Sequence: Synthetic oligonucleotide
agcauuccuggcagaguug

SEQ ID NO: 3101314 - RNA, 19 nt, Artificial Sequence
  Description of Artificial Sequence: Synthetic oligonucleotide
caggucaggccgguaguac

SEQ ID NO: 3101315 - RNA, 19 nt, Artificial Sequence
  Description of Artificial Sequence: Synthetic oligonucleotide
cccaaaagcuccguuguuc

SEQ ID NO: 3101316 - RNA, 19 nt, Artificial Sequence
  Description of Artificial Sequence: Synthetic oligonucleotide
guuucucuuucagucccaa

SEQ ID NO: 3101317 - RNA, 19 nt, Artificial Sequence
  Description of Artificial Sequence: Synthetic oligonucleotide
gucaggccgguaguaccag

SEQ ID NO: 3101318 - RNA, 19 nt, Artificial Sequence
  Description of Artificial Sequence: Synthetic oligonucleotide
ccagugcaccaccugggcc

SEQ ID NO: 3101319 - RNA, 19 nt, Artificial Sequence
  Description of Artificial Sequence: Synthetic oligonucleotide
uaggcggaccagggcacgc

SEQ ID NO: 3101320 - RNA, 19 nt, Artificial Sequence
  Description of Artificial Sequence: Synthetic oligonucleotide
ccgguaguaccagugcacc

SEQ ID NO: 3101321 - RNA, 19 nt, Artificial Sequence
  Description of Artificial Sequence: Synthetic oligonucleotide
guuugugguguuucucuuu

SEQ ID NO: 3101322 - RNA, 19 nt, Artificial Sequence
  Description of Artificial Sequence: Synthetic oligonucleotide
ggccccggcgcacauggcc

SEQ ID NO: 3101323 - RNA, 19 nt, Artificial Sequence
  Description of Artificial Sequence: Synthetic oligonucleotide
ggccgguaguaccagugca

SEQ ID NO: 3101324 - RNA, 19 nt, Artificial Sequence
  Description of Artificial Sequence: Synthetic oligonucleotide
cauuccuggcagaguugca

SEQ ID NO: 3101325 - RNA, 19 nt, Artificial Sequence
  Description of Artificial Sequence: Synthetic oligonucleotide
cagcauuccuggcagaguu

SEQ ID NO: 3101326 - RNA, 19 nt, Artificial Sequence
  Description of Artificial Sequence: Synthetic oligonucleotide
gcacauggccaggaggcug

SEQ ID NO: 3101327 - RNA, 19 nt, Artificial Sequence
  Description of Artificial Sequence: Synthetic oligonucleotide
gucaggucaggccgguagu

SEQ ID NO: 3101328 - RNA, 19 nt, Artificial Sequence
  Description of Artificial Sequence: Synthetic oligonucleotide
ccaaaagcuccguuguucu

SEQ ID NO: 3101329 - RNA, 19 nt, Artificial Sequence
  Description of Artificial Sequence: Synthetic oligonucleotide
ggucaggccgguaguacca

SEQ ID NO: 3101330 - RNA, 19 nt, Artificial Sequence
  Description of Artificial Sequence: Synthetic oligonucleotide
gcugugaaaccugagguuu

SEQ ID NO: 3101331 - RNA, 19 nt, Artificial Sequence
  Description of Artificial Sequence: Synthetic oligonucleotide
gccgguaguaccagugcac

SEQ ID NO: 3101332 - RNA, 19 nt, Artificial Sequence
  Description of Artificial Sequence: Synthetic oligonucleotide
cauggccaggaggcuggag

SEQ ID NO: 3101333 - RNA, 19 nt, Artificial Sequence
  Description of Artificial Sequence: Synthetic oligonucleotide
accugagguuugugguguu

SEQ ID NO: 3101334 - RNA, 19 nt, Artificial Sequence
  Description of Artificial Sequence: Synthetic oligonucleotide
gguuugugguguuucucuu

SEQ ID NO: 3101335 - RNA, 19 nt, Artificial Sequence
  Description of Artificial Sequence: Synthetic oligonucleotide
gccaggaggcuggaggaga

SEQ ID NO: 3101336 - RNA, 19 nt, Artificial Sequence
  Description of Artificial Sequence: Synthetic oligonucleotide
uugucaggucaggccggua

SEQ ID NO: 3101337 - RNA, 19 nt, Artificial Sequence
  Description of Artificial Sequence: Synthetic oligonucleotide
ccccaggcauggugcagag

SEQ ID NO: 3101338 - RNA, 19 nt, Artificial Sequence
  Description of Artificial Sequence: Synthetic oligonucleotide
ggggaauuucagguauugu

SEQ ID NO: 3101339 - RNA, 19 nt, Artificial Sequence
  Description of Artificial Sequence: Synthetic oligonucleotide
cuccguuguucuccaggcu

SEQ ID NO: 3101340 - RNA, 19 nt, Artificial Sequence
  Description of Artificial Sequence: Synthetic oligonucleotide
accugggccccggcgcaca

SEQ ID NO: 3101341 - RNA, 19 nt, Artificial Sequence
  Description of Artificial Sequence: Synthetic oligonucleotide
cguuguucuccaggcuuug

SEQ ID NO: 3101342 - RNA, 19 nt, Artificial Sequence
  Description of Artificial Sequence: Synthetic oligonucleotide
cgguaguaccagugcacca

SEQ ID NO: 3101343 - RNA, 19 nt, Artificial Sequence
  Description of Artificial Sequence: Synthetic oligonucleotide
cugggccccggcgcacaug

SEQ ID NO: 3101344 - RNA, 19 nt, Artificial Sequence
  Description of Artificial Sequence: Synthetic oligonucleotide
cagucccaaaagcuccguu

SEQ ID NO: 3101345 - RNA, 19 nt, Artificial Sequence
  Description of Artificial Sequence: Synthetic oligonucleotide
gugcaccaccugggccccg

SEQ ID NO: 3101346 - RNA, 19 nt, Artificial Sequence
  Description of Artificial Sequence: Synthetic oligonucleotide
ccccggcgcacauggccag

SEQ ID NO: 3101347 - RNA, 19 nt, Artificial Sequence
  Description of Artificial Sequence: Synthetic oligonucleotide
gccccggcgcacauggcca

SEQ ID NO: 3101348 - RNA, 19 nt, Artificial Sequence
  Description of Artificial Sequence: Synthetic oligonucleotide
caccugggccccggcgcac

SEQ ID NO: 3101349 - RNA, 19 nt, Artificial Sequence
  Description of Artificial Sequence: Synthetic oligonucleotide
cccaggcauggugcagagc

SEQ ID NO: 3101350 - RNA, 19 nt, Artificial Sequence
  Description of Artificial Sequence: Synthetic oligonucleotide
ccguuguucuccaggcuuu

SEQ ID NO: 3101351 - RNA, 19 nt, Artificial Sequence
  Description of Artificial Sequence: Synthetic oligonucleotide
cccggcgcacauggccagg

SEQ ID NO: 3101352 - RNA, 19 nt, Artificial Sequence
  Description of Artificial Sequence: Synthetic oligonucleotide
ggaggcuggaggagagcau

SEQ ID NO: 3101353 - RNA, 19 nt, Artificial Sequence
  Description of Artificial Sequence: Synthetic oligonucleotide
cggcgcacauggccaggag

SEQ ID NO: 3101354 - RNA, 19 nt, Artificial Sequence
  Description of Artificial Sequence: Synthetic oligonucleotide
ccggcgcacauggccagga

SEQ ID NO: 3101355 - RNA, 19 nt, Artificial Sequence
  Description of Artificial Sequence: Synthetic oligonucleotide
gggccccggcgcacauggc

SEQ ID NO: 3101356 - RNA, 19 nt, Artificial Sequence
  Description of Artificial Sequence: Synthetic oligonucleotide
ccugagguuugugguguuu

SEQ ID NO: 3101357 - RNA, 19 nt, Artificial Sequence
  Description of Artificial Sequence: Synthetic oligonucleotide
cgcacauggccaggaggcu

SEQ ID NO: 3101358 - RNA, 19 nt, Artificial Sequence
  Description of Artificial Sequence: Synthetic oligonucleotide
uuuaaguucaaauucaaag

SEQ ID NO: 3101359 - RNA, 19 nt, Artificial Sequence
  Description of Artificial Sequence: Synthetic oligonucleotide
auagccuuggcuuagaacc

SEQ ID NO: 3101360 - RNA, 19 nt, Artificial Sequence
  Description of Artificial Sequence: Synthetic oligonucleotide
aaauucaaagccaugauac

SEQ ID NO: 3101361 - RNA, 19 nt, Artificial Sequence
  Description of Artificial Sequence: Synthetic oligonucleotide
uaaguucaaauucaaagcc

SEQ ID NO: 3101362 - RNA, 19 nt, Artificial Sequence
  Description of Artificial Sequence: Synthetic oligonucleotide
uucacuaacacuaggauua

SEQ ID NO: 3101363 - RNA, 19 nt, Artificial Sequence
  Description of Artificial Sequence: Synthetic oligonucleotide
ucuuuuaaguucaaauuca

SEQ ID NO: 3101364 - RNA, 19 nt, Artificial Sequence
  Description of Artificial Sequence: Synthetic oligonucleotide
ucggcaacaacucagagaa

SEQ ID NO: 3101365 - RNA, 19 nt, Artificial Sequence
  Description of Artificial Sequence: Synthetic oligonucleotide
aauucaaagccaugauacg

SEQ ID NO: 3101366 - RNA, 19 nt, Artificial Sequence
  Description of Artificial Sequence: Synthetic oligonucleotide
aacaacucagagaaguccc

SEQ ID NO: 3101367 - RNA, 19 nt, Artificial Sequence
  Description of Artificial Sequence: Synthetic oligonucleotide
aaagccaugauacgguuca

SEQ ID NO: 3101368 - RNA, 19 nt, Artificial Sequence
  Description of Artificial Sequence: Synthetic oligonucleotide
cauguuuucaaggaaaagc

SEQ ID NO: 3101369 - RNA, 19 nt, Artificial Sequence
  Description of Artificial Sequence: Synthetic oligonucleotide
uguuuucaaggaaaagcgg

SEQ ID NO: 3101370 - RNA, 19 nt, Artificial Sequence
  Description of Artificial Sequence: Synthetic oligonucleotide
cuugaauucacuaacacua

SEQ ID NO: 3101371 - RNA, 19 nt, Artificial Sequence
  Description of Artificial Sequence: Synthetic oligonucleotide
uaacacuaggauuacaggu

SEQ ID NO: 3101372 - RNA, 19 nt, Artificial Sequence
  Description of Artificial Sequence: Synthetic oligonucleotide
ugaauucacuaacacuagg

SEQ ID NO: 3101373 - RNA, 19 nt, Artificial Sequence
  Description of Artificial Sequence: Synthetic oligonucleotide
uucaaauucaaagccauga

SEQ ID NO: 3101374 - RNA, 19 nt, Artificial Sequence
  Description of Artificial Sequence: Synthetic oligonucleotide
auguuuucaaggaaaagcg

SEQ ID NO: 3101375 - RNA, 19 nt, Artificial Sequence
  Description of Artificial Sequence: Synthetic oligonucleotide
aauucacuaacacuaggau

SEQ ID NO: 3101376 - RNA, 19 nt, Artificial Sequence
  Description of Artificial Sequence: Synthetic oligonucleotide
cucuuuuaaguucaaauuc

SEQ ID NO: 3101377 - RNA, 19 nt, Artificial Sequence
  Description of Artificial Sequence: Synthetic oligonucleotide
uuuucaaggaaaagcggca

SEQ ID NO: 3101378 - RNA, 19 nt, Artificial Sequence
  Description of Artificial Sequence: Synthetic oligonucleotide
uagaaccauguuuucaagg

SEQ ID NO: 3101379 - RNA, 19 nt, Artificial Sequence
  Description of Artificial Sequence: Synthetic oligonucleotide
aaaagcggcaagccucggc

SEQ ID NO: 3101380 - RNA, 19 nt, Artificial Sequence
  Description of Artificial Sequence: Synthetic oligonucleotide
aaaucugguuucuccccgc

SEQ ID NO: 3101381 - RNA, 19 nt, Artificial Sequence
  Description of Artificial Sequence: Synthetic oligonucleotide
uucucuuuuaaguucaaau

SEQ ID NO: 3101382 - RNA, 19 nt, Artificial Sequence
  Description of Artificial Sequence: Synthetic oligonucleotide
auucaaagccaugauacgg

SEQ ID NO: 3101383 - RNA, 19 nt, Artificial Sequence
  Description of Artificial Sequence: Synthetic oligonucleotide
aggugagcccaccauagcc

SEQ ID NO: 3101384 - RNA, 19 nt, Artificial Sequence
  Description of Artificial Sequence: Synthetic oligonucleotide
acucagagaagucccuucc

SEQ ID NO: 3101385 - RNA, 19 nt, Artificial Sequence
  Description of Artificial Sequence: Synthetic oligonucleotide
ucucauuaaguuccccggg

SEQ ID NO: 3101386 - RNA, 19 nt, Artificial Sequence
  Description of Artificial Sequence: Synthetic oligonucleotide
aacucagagaagucccuuc

SEQ ID NO: 3101387 - RNA, 19 nt, Artificial Sequence
  Description of Artificial Sequence: Synthetic oligonucleotide
aaucugguuucuccccgcc

SEQ ID NO: 3101388 - RNA, 19 nt, Artificial Sequence
  Description of Artificial Sequence: Synthetic oligonucleotide
cuaacacuaggauuacagg

SEQ ID NO: 3101389 - RNA, 19 nt, Artificial Sequence
  Description of Artificial Sequence: Synthetic oligonucleotide
acuaacacuaggauuacag

SEQ ID NO: 3101390 - RNA, 19 nt, Artificial Sequence
  Description of Artificial Sequence: Synthetic oligonucleotide
uugaauucacuaacacuag

SEQ ID NO: 3101391 - RNA, 19 nt, Artificial Sequence
  Description of Artificial Sequence: Synthetic oligonucleotide
aaagcggcaagccucggca

SEQ ID NO: 3101392 - RNA, 19 nt, Artificial Sequence
  Description of Artificial Sequence: Synthetic oligonucleotide
ucucuuuuaaguucaaauu

SEQ ID NO: 3101393 - RNA, 19 nt, Artificial Sequence
  Description of Artificial Sequence: Synthetic oligonucleotide
uuggcuuagaaccauguuu

SEQ ID NO: 3101394 - RNA, 19 nt, Artificial Sequence
  Description of Artificial Sequence: Synthetic oligonucleotide
guuuucaaggaaaagcggc

SEQ ID NO: 3101395 - RNA, 19 nt, Artificial Sequence
  Description of Artificial Sequence: Synthetic oligonucleotide
uucaaagccaugauacggu

SEQ ID NO: 3101396 - RNA, 19 nt, Artificial Sequence
  Description of Artificial Sequence: Synthetic oligonucleotide
acuaggauuacaggugagc

SEQ ID NO: 3101397 - RNA, 19 nt, Artificial Sequence
  Description of Artificial Sequence: Synthetic oligonucleotide
gauacgguucaguagucug

SEQ ID NO: 3101398 - RNA, 19 nt, Artificial Sequence
  Description of Artificial Sequence: Synthetic oligonucleotide
uggaaaucugguuucuccc

SEQ ID NO: 3101399 - RNA, 19 nt, Artificial Sequence
  Description of Artificial Sequence: Synthetic oligonucleotide
gucucauuaaguuccccgg

SEQ ID NO: 3101400 - RNA, 19 nt, Artificial Sequence
  Description of Artificial Sequence: Synthetic oligonucleotide
ucauuaaguuccccgggcc

SEQ ID NO: 3101401 - RNA, 19 nt, Artificial Sequence
  Description of Artificial Sequence: Synthetic oligonucleotide
ucagagaagucccuuccug

SEQ ID NO: 3101402 - RNA, 19 nt, Artificial Sequence
  Description of Artificial Sequence: Synthetic oligonucleotide
uucaaggaaaagcggcaag

SEQ ID NO: 3101403 - RNA, 19 nt, Artificial Sequence
  Description of Artificial Sequence: Synthetic oligonucleotide
ucaaauucaaagccaugau

SEQ ID NO: 3101404 - RNA, 19 nt, Artificial Sequence
  Description of Artificial Sequence: Synthetic oligonucleotide
uuagaaccauguuuucaag

SEQ ID NO: 3101405 - RNA, 19 nt, Artificial Sequence
  Description of Artificial Sequence: Synthetic oligonucleotide
ucaaggaaaagcggcaagc

SEQ ID NO: 3101406 - RNA, 19 nt, Artificial Sequence
  Description of Artificial Sequence: Synthetic oligonucleotide
cuaggauuacaggugagcc

SEQ ID NO: 3101407 - RNA, 19 nt, Artificial Sequence
  Description of Artificial Sequence: Synthetic oligonucleotide
aguagucugggaucaacug

SEQ ID NO: 3101408 - RNA, 19 nt, Artificial Sequence
  Description of Artificial Sequence: Synthetic oligonucleotide
uuauuuagagacggggucu

SEQ ID NO: 3101409 - RNA, 19 nt, Artificial Sequence
  Description of Artificial Sequence: Synthetic oligonucleotide
uggcuuagaaccauguuuu

SEQ ID NO: 3101410 - RNA, 19 nt, Artificial Sequence
  Description of Artificial Sequence: Synthetic oligonucleotide
aggaaaagcggcaagccuc

SEQ ID NO: 3101411 - RNA, 19 nt, Artificial Sequence
  Description of Artificial Sequence: Synthetic oligonucleotide
gaauucacuaacacuagga

SEQ ID NO: 3101412 - RNA, 19 nt, Artificial Sequence
  Description of Artificial Sequence: Synthetic oligonucleotide
uuccuguguggaaaucugg

SEQ ID NO: 3101413 - RNA, 19 nt, Artificial Sequence
  Description of Artificial Sequence: Synthetic oligonucleotide
aaguucaaauucaaagcca

SEQ ID NO: 3101414 - RNA, 19 nt, Artificial Sequence
  Description of Artificial Sequence: Synthetic oligonucleotide
guggaaaucugguuucucc

SEQ ID NO: 3101415 - RNA, 19 nt, Artificial Sequence
  Description of Artificial Sequence: Synthetic oligonucleotide
uaggauuacaggugagccc

SEQ ID NO: 3101416 - RNA, 19 nt, Artificial Sequence
  Description of Artificial Sequence: Synthetic oligonucleotide
uggccuugaauucacuaac

SEQ ID NO: 3101417 - RNA, 19 nt, Artificial Sequence
  Description of Artificial Sequence: Synthetic oligonucleotide
uguguggaaaucugguuuc

SEQ ID NO: 3101418 - RNA, 19 nt, Artificial Sequence
  Description of Artificial Sequence: Synthetic oligonucleotide
cuuagaaccauguuuucaa

SEQ ID NO: 3101419 - RNA, 19 nt, Artificial Sequence
  Description of Artificial Sequence: Synthetic oligonucleotide
cucauuaaguuccccgggc

SEQ ID NO: 3101420 - RNA, 19 nt, Artificial Sequence
  Description of Artificial Sequence: Synthetic oligonucleotide
aggauuacaggugagccca

SEQ ID NO: 3101421 - RNA, 19 nt, Artificial Sequence
  Description of Artificial Sequence: Synthetic oligonucleotide
caacaacucagagaagucc

SEQ ID NO: 3101422 - RNA, 19 nt, Artificial Sequence
  Description of Artificial Sequence: Synthetic oligonucleotide
uacgguucaguagucuggg

SEQ ID NO: 3101423 - RNA, 19 nt, Artificial Sequence
  Description of Artificial Sequence: Synthetic oligonucleotide
uccuguguggaaaucuggu

SEQ ID NO: 3101424 - RNA, 19 nt, Artificial Sequence
  Description of Artificial Sequence: Synthetic oligonucleotide
agagaagucccuuccugug

SEQ ID NO: 3101425 - RNA, 19 nt, Artificial Sequence
  Description of Artificial Sequence: Synthetic oligonucleotide
acacuaggauuacagguga

SEQ ID NO: 3101426 - RNA, 19 nt, Artificial Sequence
  Description of Artificial Sequence: Synthetic oligonucleotide
agaagucccuuccugugug

SEQ ID NO: 3101427 - RNA, 19 nt, Artificial Sequence
  Description of Artificial Sequence: Synthetic oligonucleotide
uagucugggaucaacuguu

SEQ ID NO: 3101428 - RNA, 19 nt, Artificial Sequence
  Description of Artificial Sequence: Synthetic oligonucleotide
gagacggggucucauuaag

SEQ ID NO: 3101429 - RNA, 19 nt, Artificial Sequence
  Description of Artificial Sequence: Synthetic oligonucleotide
acggggucucauuaaguuc

SEQ ID NO: 3101430 - RNA, 19 nt, Artificial Sequence
  Description of Artificial Sequence: Synthetic oligonucleotide
ucugguuucuccccgccuc

SEQ ID NO: 3101431 - RNA, 19 nt, Artificial Sequence
  Description of Artificial Sequence: Synthetic oligonucleotide
caugauacgguucaguagu

SEQ ID NO: 3101432 - RNA, 19 nt, Artificial Sequence
  Description of Artificial Sequence: Synthetic oligonucleotide
uuuuaucagggcugacuac

SEQ ID NO: 3101433 - RNA, 19 nt, Artificial Sequence
  Description of Artificial Sequence: Synthetic oligonucleotide
caaggaaaagcggcaagcc

SEQ ID NO: 3101434 - RNA, 19 nt, Artificial Sequence
  Description of Artificial Sequence: Synthetic oligonucleotide
auuacaggugagcccacca

SEQ ID NO: 3101435 - RNA, 19 nt, Artificial Sequence
  Description of Artificial Sequence: Synthetic oligonucleotide
aguucaaauucaaagccau

SEQ ID NO: 3101436 - RNA, 19 nt, Artificial Sequence
  Description of Artificial Sequence: Synthetic oligonucleotide
auacgguucaguagucugg

SEQ ID NO: 3101437 - RNA, 19 nt, Artificial Sequence
  Description of Artificial Sequence: Synthetic oligonucleotide
cuuccuguguggaaaucug

SEQ ID NO: 3101438 - RNA, 19 nt, Artificial Sequence
  Description of Artificial Sequence: Synthetic oligonucleotide
uuaaguuccccgggccugg

SEQ ID NO: 3101439 - RNA, 19 nt, Artificial Sequence
  Description of Artificial Sequence: Synthetic oligonucleotide
aaguuccccgggccuggcc

SEQ ID NO: 3101440 - RNA, 19 nt, Artificial Sequence
  Description of Artificial Sequence: Synthetic oligonucleotide
caagccucggcaacaacuc

SEQ ID NO: 3101441 - RNA, 19 nt, Artificial Sequence
  Description of Artificial Sequence: Synthetic oligonucleotide
gaagucccuuccugugugg

SEQ ID NO: 3101442 - RNA, 19 nt, Artificial Sequence
  Description of Artificial Sequence: Synthetic oligonucleotide
uuucaaggaaaagcggcaa

SEQ ID NO: 3101443 - RNA, 19 nt, Artificial Sequence
  Description of Artificial Sequence: Synthetic oligonucleotide
auuaaguuccccgggccug

SEQ ID NO: 3101444 - RNA, 19 nt, Artificial Sequence
  Description of Artificial Sequence: Synthetic oligonucleotide
caaauucaaagccaugaua

SEQ ID NO: 3101445 - RNA, 19 nt, Artificial Sequence
  Description of Artificial Sequence: Synthetic oligonucleotide
uagagacggggucucauua

SEQ ID NO: 3101446 - RNA, 19 nt, Artificial Sequence
  Description of Artificial Sequence: Synthetic oligonucleotide
uacaggugagcccaccaua

SEQ ID NO: 3101447 - RNA, 19 nt, Artificial Sequence
  Description of Artificial Sequence: Synthetic oligonucleotide
uagccuuggcuuagaacca

SEQ ID NO: 3101448 - RNA, 19 nt, Artificial Sequence
  Description of Artificial Sequence: Synthetic oligonucleotide
uuacaggugagcccaccau

SEQ ID NO: 3101449 - RNA, 19 nt, Artificial Sequence
  Description of Artificial Sequence: Synthetic oligonucleotide
guuucuccccgccucauuc

SEQ ID NO: 3101450 - RNA, 19 nt, Artificial Sequence
  Description of Artificial Sequence: Synthetic oligonucleotide
agcggcaagccucggcaac

SEQ ID NO: 3101451 - RNA, 19 nt, Artificial Sequence
  Description of Artificial Sequence: Synthetic oligonucleotide
acaggugagcccaccauag

SEQ ID NO: 3101452 - RNA, 19 nt, Artificial Sequence
  Description of Artificial Sequence: Synthetic oligonucleotide
ucaaagccaugauacgguu

SEQ ID NO: 3101453 - RNA, 19 nt, Artificial Sequence
  Description of Artificial Sequence: Synthetic oligonucleotide
gccucauucuauugcgucg

SEQ ID NO: 3101454 - RNA, 19 nt, Artificial Sequence
  Description of Artificial Sequence: Synthetic oligonucleotide
ucaguagucugggaucaac

SEQ ID NO: 3101455 - RNA, 19 nt, Artificial Sequence
  Description of Artificial Sequence: Synthetic oligonucleotide
caaagccaugauacgguuc

SEQ ID NO: 3101456 - RNA, 19 nt, Artificial Sequence
  Description of Artificial Sequence: Synthetic oligonucleotide
ggaaaagcggcaagccucg

SEQ ID NO: 3101457 - RNA, 19 nt, Artificial Sequence
  Description of Artificial Sequence: Synthetic oligonucleotide
aagccucggcaacaacuca

SEQ ID NO: 3101458 - RNA, 19 nt, Artificial Sequence
  Description of Artificial Sequence: Synthetic oligonucleotide
gguucaguagucugggauc

SEQ ID NO: 3101459 - RNA, 19 nt, Artificial Sequence
  Description of Artificial Sequence: Synthetic oligonucleotide
cucggcaacaacucagaga

SEQ ID NO: 3101460 - RNA, 19 nt, Artificial Sequence
  Description of Artificial Sequence: Synthetic oligonucleotide
ugauacgguucaguagucu

SEQ ID NO: 3101461 - RNA, 19 nt, Artificial Sequence
  Description of Artificial Sequence: Synthetic oligonucleotide
uuuagagacggggucucau

SEQ ID NO: 3101462 - RNA, 19 nt, Artificial Sequence
  Description of Artificial Sequence: Synthetic oligonucleotide
gauuacaggugagcccacc

SEQ ID NO: 3101463 - RNA, 19 nt, Artificial Sequence
  Description of Artificial Sequence: Synthetic oligonucleotide
uuucucuuuuaaguucaaa

SEQ ID NO: 3101464 - RNA, 19 nt, Artificial Sequence
  Description of Artificial Sequence: Synthetic oligonucleotide
aguuccccgggccuggccu

SEQ ID NO: 3101465 - RNA, 19 nt, Artificial Sequence
  Description of Artificial Sequence: Synthetic oligonucleotide
guucaaauucaaagccaug

SEQ ID NO: 3101466 - RNA, 19 nt, Artificial Sequence
  Description of Artificial Sequence: Synthetic oligonucleotide
uuagagacggggucucauu

SEQ ID NO: 3101467 - RNA, 19 nt, Artificial Sequence
  Description of Artificial Sequence: Synthetic oligonucleotide
guucaguagucugggauca

SEQ ID NO: 3101468 - RNA, 19 nt, Artificial Sequence
  Description of Artificial Sequence: Synthetic oligonucleotide
cggggucucauuaaguucc

SEQ ID NO: 3101469 - RNA, 19 nt, Artificial Sequence
  Description of Artificial Sequence: Synthetic oligonucleotide
uuucuccccgccucauucu

SEQ ID NO: 3101470 - RNA, 19 nt, Artificial Sequence
  Description of Artificial Sequence: Synthetic oligonucleotide
cacuaggauuacaggugag

SEQ ID NO: 3101471 - RNA, 19 nt, Artificial Sequence
  Description of Artificial Sequence: Synthetic oligonucleotide
guagucugggaucaacugu

SEQ ID NO: 3101472 - RNA, 19 nt, Artificial Sequence
  Description of Artificial Sequence: Synthetic oligonucleotide
uaucagggcugacuacaau

SEQ ID NO: 3101473 - RNA, 19 nt, Artificial Sequence
  Description of Artificial Sequence: Synthetic oligonucleotide
agagacggggucucauuaa

SEQ ID NO: 3101474 - RNA, 19 nt, Artificial Sequence
  Description of Artificial Sequence: Synthetic oligonucleotide
uguggaaaucugguuucuc

SEQ ID NO: 3101475 - RNA, 19 nt, Artificial Sequence
  Description of Artificial Sequence: Synthetic oligonucleotide
ucacuaacacuaggauuac

SEQ ID NO: 3101476 - RNA, 19 nt, Artificial Sequence
  Description of Artificial Sequence: Synthetic oligonucleotide
gccuugaauucacuaacac

SEQ ID NO: 3101477 - RNA, 19 nt, Artificial Sequence
  Description of Artificial Sequence: Synthetic oligonucleotide
augauacgguucaguaguc

SEQ ID NO: 3101478 - RNA, 19 nt, Artificial Sequence
  Description of Artificial Sequence: Synthetic oligonucleotide
accauguuuucaaggaaaa

SEQ ID NO: 3101479 - RNA, 19 nt, Artificial Sequence
  Description of Artificial Sequence: Synthetic oligonucleotide
aagucccuuccugugugga

SEQ ID NO: 3101480 - RNA, 19 nt, Artificial Sequence
  Description of Artificial Sequence: Synthetic oligonucleotide
ugagcccaccauagccuug

SEQ ID NO: 3101481 - RNA, 19 nt, Artificial Sequence
  Description of Artificial Sequence: Synthetic oligonucleotide
agccucggcaacaacucag

SEQ ID NO: 3101482 - RNA, 19 nt, Artificial Sequence
  Description of Artificial Sequence: Synthetic oligonucleotide
ucauucuauugcgucguuu

SEQ ID NO: 3101483 - RNA, 19 nt, Artificial Sequence
  Description of Artificial Sequence: Synthetic oligonucleotide
ggaucaacuguuuuguuuu

SEQ ID NO: 3101484 - RNA, 19 nt, Artificial Sequence
  Description of Artificial Sequence: Synthetic oligonucleotide
cauucuauugcgucguuuu

SEQ ID NO: 3101485 - RNA, 19 nt, Artificial Sequence
  Description of Artificial Sequence: Synthetic oligonucleotide
cccgccucauucuauugcg

SEQ ID NO: 3101486 - RNA, 19 nt, Artificial Sequence
  Description of Artificial Sequence: Synthetic oligonucleotide
ggcaacaacucagagaagu

SEQ ID NO: 3101487 - RNA, 19 nt, Artificial Sequence
  Description of Artificial Sequence: Synthetic oligonucleotide
aucugguuucuccccgccu

SEQ ID NO: 3101488 - RNA, 19 nt, Artificial Sequence
  Description of Artificial Sequence: Synthetic oligonucleotide
gacggggucucauuaaguu

SEQ ID NO: 3101489 - RNA, 19 nt, Artificial Sequence
  Description of Artificial Sequence: Synthetic oligonucleotide
gaaaagcggcaagccucgg

SEQ ID NO: 3101490 - RNA, 19 nt, Artificial Sequence
  Description of Artificial Sequence: Synthetic oligonucleotide
acaacucagagaagucccu

SEQ ID NO: 3101491 - RNA, 19 nt, Artificial Sequence
  Description of Artificial Sequence: Synthetic oligonucleotide
gagaagucccuuccugugu

SEQ ID NO: 3101492 - RNA, 19 nt, Artificial Sequence
  Description of Artificial Sequence: Synthetic oligonucleotide
caggugagcccaccauagc

SEQ ID NO: 3101493 - RNA, 19 nt, Artificial Sequence
  Description of Artificial Sequence: Synthetic oligonucleotide
uucuccccgccucauucua

SEQ ID NO: 3101494 - RNA, 19 nt, Artificial Sequence
  Description of Artificial Sequence: Synthetic oligonucleotide
agccaugauacgguucagu

SEQ ID NO: 3101495 - RNA, 19 nt, Artificial Sequence
  Description of Artificial Sequence: Synthetic oligonucleotide
gcuuagaaccauguuuuca

SEQ ID NO: 3101496 - RNA, 19 nt, Artificial Sequence
  Description of Artificial Sequence: Synthetic oligonucleotide
cuguguggaaaucugguuu

SEQ ID NO: 3101497 - RNA, 19 nt, Artificial Sequence
  Description of Artificial Sequence: Synthetic oligonucleotide
uccccgccucauucuauug

SEQ ID NO: 3101498 - RNA, 19 nt, Artificial Sequence
  Description of Artificial Sequence: Synthetic oligonucleotide
agucccuuccuguguggaa

SEQ ID NO: 3101499 - RNA, 19 nt, Artificial Sequence
  Description of Artificial Sequence: Synthetic oligonucleotide
ugggaucaacuguuuuguu

SEQ ID NO: 3101500 - RNA, 19 nt, Artificial Sequence
  Description of Artificial Sequence: Synthetic oligonucleotide
gccaugauacgguucagua

SEQ ID NO: 3101501 - RNA, 19 nt, Artificial Sequence
  Description of Artificial Sequence: Synthetic oligonucleotide
agcccaccauagccuuggc

SEQ ID NO: 3101502 - RNA, 19 nt, Artificial Sequence
  Description of Artificial Sequence: Synthetic oligonucleotide
auuuagagacggggucuca

SEQ ID NO: 3101503 - RNA, 19 nt, Artificial Sequence
  Description of Artificial Sequence: Synthetic oligonucleotide
caccauagccuuggcuuag

SEQ ID NO: 3101504 - RNA, 19 nt, Artificial Sequence
  Description of Artificial Sequence: Synthetic oligonucleotide
ucccuuccuguguggaaau

SEQ ID NO: 3101505 - RNA, 19 nt, Artificial Sequence
  Description of Artificial Sequence: Synthetic oligonucleotide
ucuccccgccucauucuau

SEQ ID NO: 3101506 - RNA, 19 nt, Artificial Sequence
  Description of Artificial Sequence: Synthetic oligonucleotide
cauuaaguuccccgggccu

SEQ ID NO: 3101507 - RNA, 19 nt, Artificial Sequence
  Description of Artificial Sequence: Synthetic oligonucleotide
caguagucugggaucaacu

SEQ ID NO: 3101508 - RNA, 19 nt, Artificial Sequence
  Description of Artificial Sequence: Synthetic oligonucleotide
ccauguuuucaaggaaaag

SEQ ID NO: 3101509 - RNA, 19 nt, Artificial Sequence
  Description of Artificial Sequence: Synthetic oligonucleotide
agacggggucucauuaagu

SEQ ID NO: 3101510 - RNA, 19 nt, Artificial Sequence
  Description of Artificial Sequence: Synthetic oligonucleotide
acgguucaguagucuggga

SEQ ID NO: 3101511 - RNA, 19 nt, Artificial Sequence
  Description of Artificial Sequence: Synthetic oligonucleotide
ccuugaauucacuaacacu

SEQ ID NO: 3101512 - RNA, 19 nt, Artificial Sequence
  Description of Artificial Sequence: Synthetic oligonucleotide
gcaacaacucagagaaguc

SEQ ID NO: 3101513 - RNA, 19 nt, Artificial Sequence
  Description of Artificial Sequence: Synthetic oligonucleotide
gucccuuccuguguggaaa

SEQ ID NO: 3101514 - RNA, 19 nt, Artificial Sequence
  Description of Artificial Sequence: Synthetic oligonucleotide
ggcuuagaaccauguuuuc

SEQ ID NO: 3101515 - RNA, 19 nt, Artificial Sequence
  Description of Artificial Sequence: Synthetic oligonucleotide
uucaguagucugggaucaa

SEQ ID NO: 3101516 - RNA, 19 nt, Artificial Sequence
  Description of Artificial Sequence: Synthetic oligonucleotide
gggaucaacuguuuuguuu

SEQ ID NO: 3101517 - RNA, 19 nt, Artificial Sequence
  Description of Artificial Sequence: Synthetic oligonucleotide
uaaguuccccgggccuggc

SEQ ID NO: 3101518 - RNA, 19 nt, Artificial Sequence
  Description of Artificial Sequence: Synthetic oligonucleotide
ggccuugaauucacuaaca

SEQ ID NO: 3101519 - RNA, 19 nt, Artificial Sequence
  Description of Artificial Sequence: Synthetic oligonucleotide
cucagagaagucccuuccu

SEQ ID NO: 3101520 - RNA, 19 nt, Artificial Sequence
  Description of Artificial Sequence: Synthetic oligonucleotide
ccccgccucauucuauugc

SEQ ID NO: 3101521 - RNA, 19 nt, Artificial Sequence
  Description of Artificial Sequence: Synthetic oligonucleotide
accauagccuuggcuuaga

SEQ ID NO: 3101522 - RNA, 19 nt, Artificial Sequence
  Description of Artificial Sequence: Synthetic oligonucleotide
agccuuggcuuagaaccau

SEQ ID NO: 3101523 - RNA, 19 nt, Artificial Sequence
  Description of Artificial Sequence: Synthetic oligonucleotide
guuucucuuuuaaguucaa

SEQ ID NO: 3101524 - RNA, 19 nt, Artificial Sequence
  Description of Artificial Sequence: Synthetic oligonucleotide
cacuaacacuaggauuaca

SEQ ID NO: 3101525 - RNA, 19 nt, Artificial Sequence
  Description of Artificial Sequence: Synthetic oligonucleotide
gcaagccucggcaacaacu

SEQ ID NO: 3101526 - RNA, 19 nt, Artificial Sequence
  Description of Artificial Sequence: Synthetic oligonucleotide
ccucggcaacaacucagag

SEQ ID NO: 3101527 - RNA, 19 nt, Artificial Sequence
  Description of Artificial Sequence: Synthetic oligonucleotide
cuuggcuuagaaccauguu

SEQ ID NO: 3101528 - RNA, 19 nt, Artificial Sequence
  Description of Artificial Sequence: Synthetic oligonucleotide
ggugagcccaccauagccu

SEQ ID NO: 3101529 - RNA, 19 nt, Artificial Sequence
  Description of Artificial Sequence: Synthetic oligonucleotide
cccaccauagccuuggcuu

SEQ ID NO: 3101530 - RNA, 19 nt, Artificial Sequence
  Description of Artificial Sequence: Synthetic oligonucleotide
cgccucauucuauugcguc

SEQ ID NO: 3101531 - RNA, 19 nt, Artificial Sequence
  Description of Artificial Sequence: Synthetic oligonucleotide
ggggucucauuaaguuccc

SEQ ID NO: 3101532 - RNA, 19 nt, Artificial Sequence
  Description of Artificial Sequence: Synthetic oligonucleotide
gucugggaucaacuguuuu

SEQ ID NO: 3101533 - RNA, 19 nt, Artificial Sequence
  Description of Artificial Sequence: Synthetic oligonucleotide
ccuggccuugaauucacua

SEQ ID NO: 3101534 - RNA, 19 nt, Artificial Sequence
  Description of Artificial Sequence: Synthetic oligonucleotide
guguggaaaucugguuucu

SEQ ID NO: 3101535 - RNA, 19 nt, Artificial Sequence
  Description of Artificial Sequence: Synthetic oligonucleotide
ggcaagccucggcaacaac

SEQ ID NO: 3101536 - RNA, 19 nt, Artificial Sequence
  Description of Artificial Sequence: Synthetic oligonucleotide
gccuuggcuuagaaccaug

SEQ ID NO: 3101537 - RNA, 19 nt, Artificial Sequence
  Description of Artificial Sequence: Synthetic oligonucleotide
ggauuacaggugagcccac

SEQ ID NO: 3101538 - RNA, 19 nt, Artificial Sequence
  Description of Artificial Sequence: Synthetic oligonucleotide
gccucggcaacaacucaga

SEQ ID NO: 3101539 - RNA, 19 nt, Artificial Sequence
  Description of Artificial Sequence: Synthetic oligonucleotide
ggccuggccuugaauucac

SEQ ID NO: 3101540 - RNA, 19 nt, Artificial Sequence
  Description of Artificial Sequence: Synthetic oligonucleotide
ccaccauagccuuggcuua

SEQ ID NO: 3101541 - RNA, 19 nt, Artificial Sequence
  Description of Artificial Sequence: Synthetic oligonucleotide
ccuuccuguguggaaaucu

SEQ ID NO: 3101542 - RNA, 19 nt, Artificial Sequence
  Description of Artificial Sequence: Synthetic oligonucleotide
cgggccuggccuugaauuc

SEQ ID NO: 3101543 - RNA, 19 nt, Artificial Sequence
  Description of Artificial Sequence: Synthetic oligonucleotide
gcggcaagccucggcaaca

SEQ ID NO: 3101544 - RNA, 19 nt, Artificial Sequence
  Description of Artificial Sequence: Synthetic oligonucleotide
caacucagagaagucccuu

SEQ ID NO: 3101545 - RNA, 19 nt, Artificial Sequence
  Description of Artificial Sequence: Synthetic oligonucleotide
ccucauucuauugcgucgu

SEQ ID NO: 3101546 - RNA, 19 nt, Artificial Sequence
  Description of Artificial Sequence: Synthetic oligonucleotide
ccuguguggaaaucugguu

SEQ ID NO: 3101547 - RNA, 19 nt, Artificial Sequence
  Description of Artificial Sequence: Synthetic oligonucleotide
cuccccgccucauucuauu

SEQ ID NO: 3101548 - RNA, 19 nt, Artificial Sequence
  Description of Artificial Sequence: Synthetic oligonucleotide
ccauagccuuggcuuagaa

SEQ ID NO: 3101549 - RNA, 19 nt, Artificial Sequence
  Description of Artificial Sequence: Synthetic oligonucleotide
cucauucuauugcgucguu

SEQ ID NO: 3101550 - RNA, 19 nt, Artificial Sequence
  Description of Artificial Sequence: Synthetic oligonucleotide
gcccaccauagccuuggcu

SEQ ID NO: 3101551 - RNA, 19 nt, Artificial Sequence
  Description of Artificial Sequence: Synthetic oligonucleotide
cgguucaguagucugggau

SEQ ID NO: 3101552 - RNA, 19 nt, Artificial Sequence
  Description of Artificial Sequence: Synthetic oligonucleotide
cggcaacaacucagagaag

SEQ ID NO: 3101553 - RNA, 19 nt, Artificial Sequence
  Description of Artificial Sequence: Synthetic oligonucleotide
ccgggccuggccuugaauu

SEQ ID NO: 3101554 - RNA, 19 nt, Artificial Sequence
  Description of Artificial Sequence: Synthetic oligonucleotide
cccuuccuguguggaaauc

SEQ ID NO: 3101555 - RNA, 19 nt, Artificial Sequence
  Description of Artificial Sequence: Synthetic oligonucleotide
gguuucuccccgccucauu

SEQ ID NO: 3101556 - RNA, 19 nt, Artificial Sequence
  Description of Artificial Sequence: Synthetic oligonucleotide
guuccccgggccuggccuu

SEQ ID NO: 3101557 - RNA, 19 nt, Artificial Sequence
  Description of Artificial Sequence: Synthetic oligonucleotide
ccgccucauucuauugcgu

SEQ ID NO: 3101558 - RNA, 19 nt, Artificial Sequence
  Description of Artificial Sequence: Synthetic oligonucleotide
gccuggccuugaauucacu

SEQ ID NO: 3101559 - RNA, 19 nt, Artificial Sequence
  Description of Artificial Sequence: Synthetic oligonucleotide
cggcaagccucggcaacaa

SEQ ID NO: 3101560 - RNA, 19 nt, Artificial Sequence
  Description of Artificial Sequence: Synthetic oligonucleotide
cccgggccuggccuugaau

SEQ ID NO: 3101561 - RNA, 19 nt, Artificial Sequence
  Description of Artificial Sequence: Synthetic oligonucleotide
ccccgggccuggccuugaa

SEQ ID NO: 3101562 - RNA, 19 nt, Artificial Sequence
  Description of Artificial Sequence: Synthetic oligonucleotide
aauaguaaguuucauaaug

SEQ ID NO: 3101563 - RNA, 19 nt, Artificial Sequence
  Description of Artificial Sequence: Synthetic oligonucleotide
uauuauuugugcaaaauag

SEQ ID NO: 3101564 - RNA, 19 nt, Artificial Sequence
  Description of Artificial Sequence: Synthetic oligonucleotide
uuuuaaauucagcagauug

SEQ ID NO: 3101565 - RNA, 19 nt, Artificial Sequence
  Description of Artificial Sequence: Synthetic oligonucleotide
uuuaguagcagauccaagg

SEQ ID NO: 3101566 - RNA, 19 nt, Artificial Sequence
  Description of Artificial Sequence: Synthetic oligonucleotide
auuaauauauauuauuugu

SEQ ID NO: 3101567 - RNA, 19 nt, Artificial Sequence
  Description of Artificial Sequence: Synthetic oligonucleotide
uaauauauauuauuugugc

SEQ ID NO: 3101568 - RNA, 19 nt, Artificial Sequence
  Description of Artificial Sequence: Synthetic oligonucleotide
aauauauauuauuugugca

SEQ ID NO: 3101569 - RNA, 19 nt, Artificial Sequence
  Description of Artificial Sequence: Synthetic oligonucleotide
auauuuuagacacauauau

SEQ ID NO: 3101570 - RNA, 19 nt, Artificial Sequence
  Description of Artificial Sequence: Synthetic oligonucleotide
auuuuagacacauauauua

SEQ ID NO: 3101571 - RNA, 19 nt, Artificial Sequence
  Description of Artificial Sequence: Synthetic oligonucleotide
cuugacuugguuuaguagc

SEQ ID NO: 3101572 - RNA, 19 nt, Artificial Sequence
  Description of Artificial Sequence: Synthetic oligonucleotide
uauauuaauauauauuauu

SEQ ID NO: 3101573 - RNA, 19 nt, Artificial Sequence
  Description of Artificial Sequence: Synthetic oligonucleotide
uugguuuaguagcagaucc

SEQ ID NO: 3101574 - RNA, 19 nt, Artificial Sequence
  Description of Artificial Sequence: Synthetic oligonucleotide
uuaguagcagauccaaggg

SEQ ID NO: 3101575 - RNA, 19 nt, Artificial Sequence
  Description of Artificial Sequence: Synthetic oligonucleotide
ucagauuccaguucagcgg

SEQ ID NO: 3101576 - RNA, 19 nt, Artificial Sequence
  Description of Artificial Sequence: Synthetic oligonucleotide
aaguuucauaaugacuucc

SEQ ID NO: 3101577 - RNA, 19 nt, Artificial Sequence
  Description of Artificial Sequence: Synthetic oligonucleotide
uuauuugugcaaaauagua

SEQ ID NO: 3101578 - RNA, 19 nt, Artificial Sequence
  Description of Artificial Sequence: Synthetic oligonucleotide
aaaaugucuauauauucuu

SEQ ID NO: 3101579 - RNA, 19 nt, Artificial Sequence
  Description of Artificial Sequence: Synthetic oligonucleotide
cuugcgaugcuucugagag

SEQ ID NO: 3101580 - RNA, 19 nt, Artificial Sequence
  Description of Artificial Sequence: Synthetic oligonucleotide
aaauucagcagauugugua

SEQ ID NO: 3101581 - RNA, 19 nt, Artificial Sequence
  Description of Artificial Sequence: Synthetic oligonucleotide
uuaaauucagcagauugug

SEQ ID NO: 3101582 - RNA, 19 nt, Artificial Sequence
  Description of Artificial Sequence: Synthetic oligonucleotide
ugagaguagaucuugacuu

SEQ ID NO: 3101583 - RNA, 19 nt, Artificial Sequence
  Description of Artificial Sequence: Synthetic oligonucleotide
uuagacacauauauuaaua

SEQ ID NO: 3101584 - RNA, 19 nt, Artificial Sequence
  Description of Artificial Sequence: Synthetic oligonucleotide
cuauauauucuugcgaugc

SEQ ID NO: 3101585 - RNA, 19 nt, Artificial Sequence
  Description of Artificial Sequence: Synthetic oligonucleotide
uauuugugcaaaauaguaa

SEQ ID NO: 3101586 - RNA, 19 nt, Artificial Sequence
  Description of Artificial Sequence: Synthetic oligonucleotide
augucuauauauucuugcg

SEQ ID NO: 3101587 - RNA, 19 nt, Artificial Sequence
  Description of Artificial Sequence: Synthetic oligonucleotide
auauauauuauuugugcaa

SEQ ID NO: 3101588 - RNA, 19 nt, Artificial Sequence
  Description of Artificial Sequence: Synthetic oligonucleotide
cucagauuccaguucagcg

SEQ ID NO: 3101589 - RNA, 19 nt, Artificial Sequence
  Description of Artificial Sequence: Synthetic oligonucleotide
ugcaaaauaguaaguuuca

SEQ ID NO: 3101590 - RNA, 19 nt, Artificial Sequence
  Description of Artificial Sequence: Synthetic oligonucleotide
cucugcagaacucagauuc

SEQ ID NO: 3101591 - RNA, 19 nt, Artificial Sequence
  Description of Artificial Sequence: Synthetic oligonucleotide
ugucuauauauucuugcga

SEQ ID NO: 3101592 - RNA, 19 nt, Artificial Sequence
  Description of Artificial Sequence: Synthetic oligonucleotide
cuguccuugaacuugggag

SEQ ID NO: 3101593 - RNA, 19 nt, Artificial Sequence
  Description of Artificial Sequence: Synthetic oligonucleotide
uauauuuuagacacauaua

SEQ ID NO: 3101594 - RNA, 19 nt, Artificial Sequence
  Description of Artificial Sequence: Synthetic oligonucleotide
uucauaaugacuuccuuuu

SEQ ID NO: 3101595 - RNA, 19 nt, Artificial Sequence
  Description of Artificial Sequence: Synthetic oligonucleotide
uaguagcagauccaagggg

SEQ ID NO: 3101596 - RNA, 19 nt, Artificial Sequence
  Description of Artificial Sequence: Synthetic oligonucleotide
ucugugugagacauguagc

SEQ ID NO: 3101597 - RNA, 19 nt, Artificial Sequence
  Description of Artificial Sequence: Synthetic oligonucleotide
ugaacuugggagaucuacc

SEQ ID NO: 3101598 - RNA, 19 nt, Artificial Sequence
  Description of Artificial Sequence: Synthetic oligonucleotide
aacucugcagaacucagau

SEQ ID NO: 3101599 - RNA, 19 nt, Artificial Sequence
  Description of Artificial Sequence: Synthetic oligonucleotide
uauauauuauuugugcaaa

SEQ ID NO: 3101600 - RNA, 19 nt, Artificial Sequence
  Description of Artificial Sequence: Synthetic oligonucleotide
uuuagacacauauauuaau

SEQ ID NO: 3101601 - RNA, 19 nt, Artificial Sequence
  Description of Artificial Sequence: Synthetic oligonucleotide
agacauguagcccuggcug

SEQ ID NO: 3101602 - RNA, 19 nt, Artificial Sequence
  Description of Artificial Sequence: Synthetic oligonucleotide
uauauucuugcgaugcuuc

SEQ ID NO: 3101603 - RNA, 19 nt, Artificial Sequence
  Description of Artificial Sequence: Synthetic oligonucleotide
ugcuucugagaguagaucu

SEQ ID NO: 3101604 - RNA, 19 nt, Artificial Sequence
  Description of Artificial Sequence: Synthetic oligonucleotide
auauuauuugugcaaaaua

SEQ ID NO: 3101605 - RNA, 19 nt, Artificial Sequence
  Description of Artificial Sequence: Synthetic oligonucleotide
ucuugacuugguuuaguag

SEQ ID NO: 3101606 - RNA, 19 nt, Artificial Sequence
  Description of Artificial Sequence: Synthetic oligonucleotide
auauuaauauauauuauuu

SEQ ID NO: 3101607 - RNA, 19 nt, Artificial Sequence
  Description of Artificial Sequence: Synthetic oligonucleotide
aaauaguaaguuucauaau

SEQ ID NO: 3101608 - RNA, 19 nt, Artificial Sequence
  Description of Artificial Sequence: Synthetic oligonucleotide
aauucagcagauuguguau

SEQ ID NO: 3101609 - RNA, 19 nt, Artificial Sequence
  Description of Artificial Sequence: Synthetic oligonucleotide
uagacacauauauuaauau

SEQ ID NO: 3101610 - RNA, 19 nt, Artificial Sequence
  Description of Artificial Sequence: Synthetic oligonucleotide
uuucauaaugacuuccuuu

SEQ ID NO: 3101611 - RNA, 19 nt, Artificial Sequence
  Description of Artificial Sequence: Synthetic oligonucleotide
ucuauauauucuugcgaug

SEQ ID NO: 3101612 - RNA, 19 nt, Artificial Sequence
  Description of Artificial Sequence: Synthetic oligonucleotide
uuugugcaaaauaguaagu

SEQ ID NO: 3101613 - RNA, 19 nt, Artificial Sequence
  Description of Artificial Sequence: Synthetic oligonucleotide
uguccuugaacuugggaga

SEQ ID NO: 3101614 - RNA, 19 nt, Artificial Sequence
  Description of Artificial Sequence: Synthetic oligonucleotide
cugugugagacauguagcc

SEQ ID NO: 3101615 - RNA, 19 nt, Artificial Sequence
  Description of Artificial Sequence: Synthetic oligonucleotide
uauauuauuugugcaaaau

SEQ ID NO: 3101616 - RNA, 19 nt, Artificial Sequence
  Description of Artificial Sequence: Synthetic oligonucleotide
ucugcuucucaagugcugg

SEQ ID NO: 3101617 - RNA, 19 nt, Artificial Sequence
  Description of Artificial Sequence: Synthetic oligonucleotide
uaguaaguuucauaaugac

SEQ ID NO: 3101618 - RNA, 19 nt, Artificial Sequence
  Description of Artificial Sequence: Synthetic oligonucleotide
uauuuuagacacauauauu

SEQ ID NO: 3101619 - RNA, 19 nt, Artificial Sequence
  Description of Artificial Sequence: Synthetic oligonucleotide
uagaucuugacuugguuua

SEQ ID NO: 3101620 - RNA, 19 nt, Artificial Sequence
  Description of Artificial Sequence: Synthetic oligonucleotide
ugugcaaaauaguaaguuu

SEQ ID NO: 3101621 - RNA, 19 nt, Artificial Sequence
  Description of Artificial Sequence: Synthetic oligonucleotide
uccaaggggagaaacucug

SEQ ID NO: 3101622 - RNA, 19 nt, Artificial Sequence
  Description of Artificial Sequence: Synthetic oligonucleotide
aaaugucuauauauucuug

SEQ ID NO: 3101623 - RNA, 19 nt, Artificial Sequence
  Description of Artificial Sequence: Synthetic oligonucleotide
uauauauucuugcgaugcu

SEQ ID NO: 3101624 - RNA, 19 nt, Artificial Sequence
  Description of Artificial Sequence: Synthetic oligonucleotide
uaaauucagcagauugugu

SEQ ID NO: 3101625 - RNA, 19 nt, Artificial Sequence
  Description of Artificial Sequence: Synthetic oligonucleotide
auaguaaguuucauaauga

SEQ ID NO: 3101626 - RNA, 19 nt, Artificial Sequence
  Description of Artificial Sequence: Synthetic oligonucleotide
auuauuugugcaaaauagu

SEQ ID NO: 3101627 - RNA, 19 nt, Artificial Sequence
  Description of Artificial Sequence: Synthetic oligonucleotide
gaacucagauuccaguuca

SEQ ID NO: 3101628 - RNA, 19 nt, Artificial Sequence
  Description of Artificial Sequence: Synthetic oligonucleotide
guaaguuucauaaugacuu

SEQ ID NO: 3101629 - RNA, 19 nt, Artificial Sequence
  Description of Artificial Sequence: Synthetic oligonucleotide
auucuugcgaugcuucuga

SEQ ID NO: 3101630 - RNA, 19 nt, Artificial Sequence
  Description of Artificial Sequence: Synthetic oligonucleotide
uugaacuugggagaucuac

SEQ ID NO: 3101631 - RNA, 19 nt, Artificial Sequence
  Description of Artificial Sequence: Synthetic oligonucleotide
gagaguagaucuugacuug

SEQ ID NO: 3101632 - RNA, 19 nt, Artificial Sequence
  Description of Artificial Sequence: Synthetic oligonucleotide
agacacauauauuaauaua

SEQ ID NO: 3101633 - RNA, 19 nt, Artificial Sequence
  Description of Artificial Sequence: Synthetic oligonucleotide
cagauuccaguucagcggc

SEQ ID NO: 3101634 - RNA, 19 nt, Artificial Sequence
  Description of Artificial Sequence: Synthetic oligonucleotide
ugcagaacucagauuccag

SEQ ID NO: 3101635 - RNA, 19 nt, Artificial Sequence
  Description of Artificial Sequence: Synthetic oligonucleotide
agaguagaucuugacuugg

SEQ ID NO: 3101636 - RNA, 19 nt, Artificial Sequence
  Description of Artificial Sequence: Synthetic oligonucleotide
ucugcagaacucagauucc

SEQ ID NO: 3101637 - RNA, 19 nt, Artificial Sequence
  Description of Artificial Sequence: Synthetic oligonucleotide
gugcaaaauaguaaguuuc

SEQ ID NO: 3101638 - RNA, 19 nt, Artificial Sequence
  Description of Artificial Sequence: Synthetic oligonucleotide
acucagauuccaguucagc

SEQ ID NO: 3101639 - RNA, 19 nt, Artificial Sequence
  Description of Artificial Sequence: Synthetic oligonucleotide
uaaguuucauaaugacuuc

SEQ ID NO: 3101640 - RNA, 19 nt, Artificial Sequence
  Description of Artificial Sequence: Synthetic oligonucleotide
aguagcagauccaagggga

SEQ ID NO: 3101641 - RNA, 19 nt, Artificial Sequence
  Description of Artificial Sequence: Synthetic oligonucleotide
gaaacucugcagaacucag

SEQ ID NO: 3101642 - RNA, 19 nt, Artificial Sequence
  Description of Artificial Sequence: Synthetic oligonucleotide
auauauuauuugugcaaaa

SEQ ID NO: 3101643 - RNA, 19 nt, Artificial Sequence
  Description of Artificial Sequence: Synthetic oligonucleotide
ugguuuaguagcagaucca

SEQ ID NO: 3101644 - RNA, 19 nt, Artificial Sequence
  Description of Artificial Sequence: Synthetic oligonucleotide
gauccaaggggagaaacuc

SEQ ID NO: 3101645 - RNA, 19 nt, Artificial Sequence
  Description of Artificial Sequence: Synthetic oligonucleotide
ugugugagacauguagccc

SEQ ID NO: 3101646 - RNA, 19 nt, Artificial Sequence
  Description of Artificial Sequence: Synthetic oligonucleotide
uggcuguccuugaacuugg

SEQ ID NO: 3101647 - RNA, 19 nt, Artificial Sequence
  Description of Artificial Sequence: Synthetic oligonucleotide
ugugagacauguagcccug

SEQ ID NO: 3101648 - RNA, 19 nt, Artificial Sequence
  Description of Artificial Sequence: Synthetic oligonucleotide
agaaacucugcagaacuca

SEQ ID NO: 3101649 - RNA, 19 nt, Artificial Sequence
  Description of Artificial Sequence: Synthetic oligonucleotide
auuccaguucagcggcagc

SEQ ID NO: 3101650 - RNA, 19 nt, Artificial Sequence
  Description of Artificial Sequence: Synthetic oligonucleotide
uucugagaguagaucuuga

SEQ ID NO: 3101651 - RNA, 19 nt, Artificial Sequence
  Description of Artificial Sequence: Synthetic oligonucleotide
uauucuugcgaugcuucug

SEQ ID NO: 3101652 - RNA, 19 nt, Artificial Sequence
  Description of Artificial Sequence: Synthetic oligonucleotide
auauucuugcgaugcuucu

SEQ ID NO: 3101653 - RNA, 19 nt, Artificial Sequence
  Description of Artificial Sequence: Synthetic oligonucleotide
ugcgaugcuucugagagua

SEQ ID NO: 3101654 - RNA, 19 nt, Artificial Sequence
  Description of Artificial Sequence: Synthetic oligonucleotide
ucuugcgaugcuucugaga

SEQ ID NO: 3101655 - RNA, 19 nt, Artificial Sequence
  Description of Artificial Sequence: Synthetic oligonucleotide
gucuauauauucuugcgau

SEQ ID NO: 3101656 - RNA, 19 nt, Artificial Sequence
  Description of Artificial Sequence: Synthetic oligonucleotide
aguuucauaaugacuuccu

SEQ ID NO: 3101657 - RNA, 19 nt, Artificial Sequence
  Description of Artificial Sequence: Synthetic oligonucleotide
uucagcggcagcuucuuua

SEQ ID NO: 3101658 - RNA, 19 nt, Artificial Sequence
  Description of Artificial Sequence: Synthetic oligonucleotide
gacuugguuuaguagcaga

SEQ ID NO: 3101659 - RNA, 19 nt, Artificial Sequence
  Description of Artificial Sequence: Synthetic oligonucleotide
cuucugagaguagaucuug

SEQ ID NO: 3101660 - RNA, 19 nt, Artificial Sequence
  Description of Artificial Sequence: Synthetic oligonucleotide
aguagaucuugacuugguu

SEQ ID NO: 3101661 - RNA, 19 nt, Artificial Sequence
  Description of Artificial Sequence: Synthetic oligonucleotide
gaacuugggagaucuaccu

SEQ ID NO: 3101662 - RNA, 19 nt, Artificial Sequence
  Description of Artificial Sequence: Synthetic oligonucleotide
guuuaguagcagauccaag

SEQ ID NO: 3101663 - RNA, 19 nt, Artificial Sequence
  Description of Artificial Sequence: Synthetic oligonucleotide
ucagcggcagcuucuuuaa

SEQ ID NO: 3101664 - RNA, 19 nt, Artificial Sequence
  Description of Artificial Sequence: Synthetic oligonucleotide
augcuucugagaguagauc

SEQ ID NO: 3101665 - RNA, 19 nt, Artificial Sequence
  Description of Artificial Sequence: Synthetic oligonucleotide
aucuugacuugguuuagua

SEQ ID NO: 3101666 - RNA, 19 nt, Artificial Sequence
  Description of Artificial Sequence: Synthetic oligonucleotide
cuugguuuaguagcagauc

SEQ ID NO: 3101667 - RNA, 19 nt, Artificial Sequence
  Description of Artificial Sequence: Synthetic oligonucleotide
aaacucugcagaacucaga

SEQ ID NO: 3101668 - RNA, 19 nt, Artificial Sequence
  Description of Artificial Sequence: Synthetic oligonucleotide
auauauucuugcgaugcuu

SEQ ID NO: 3101669 - RNA, 19 nt, Artificial Sequence
  Description of Artificial Sequence: Synthetic oligonucleotide
uucagcagauuguguauuu

SEQ ID NO: 3101670 - RNA, 19 nt, Artificial Sequence
  Description of Artificial Sequence: Synthetic oligonucleotide
uucuugcgaugcuucugag

SEQ ID NO: 3101671 - RNA, 19 nt, Artificial Sequence
  Description of Artificial Sequence: Synthetic oligonucleotide
acuugguuuaguagcagau

SEQ ID NO: 3101672 - RNA, 19 nt, Artificial Sequence
  Description of Artificial Sequence: Synthetic oligonucleotide
aacucagauuccaguucag

SEQ ID NO: 3101673 - RNA, 19 nt, Artificial Sequence
  Description of Artificial Sequence: Synthetic oligonucleotide
ggagaaacucugcagaacu

SEQ ID NO: 3101674 - RNA, 19 nt, Artificial Sequence
  Description of Artificial Sequence: Synthetic oligonucleotide
agaucuugacuugguuuag

SEQ ID NO: 3101675 - RNA, 19 nt, Artificial Sequence
  Description of Artificial Sequence: Synthetic oligonucleotide
guagaucuugacuugguuu

SEQ ID NO: 3101676 - RNA, 19 nt, Artificial Sequence
  Description of Artificial Sequence: Synthetic oligonucleotide
caaggggagaaacucugca

SEQ ID NO: 3101677 - RNA, 19 nt, Artificial Sequence
  Description of Artificial Sequence: Synthetic oligonucleotide
guagcagauccaaggggag

SEQ ID NO: 3101678 - RNA, 19 nt, Artificial Sequence
  Description of Artificial Sequence: Synthetic oligonucleotide
gugugagacauguagcccu

SEQ ID NO: 3101679 - RNA, 19 nt, Artificial Sequence
  Description of Artificial Sequence: Synthetic oligonucleotide
agcagauccaaggggagaa

SEQ ID NO: 3101680 - RNA, 19 nt, Artificial Sequence
  Description of Artificial Sequence: Synthetic oligonucleotide
agauccaaggggagaaacu

SEQ ID NO: 3101681 - RNA, 19 nt, Artificial Sequence
  Description of Artificial Sequence: Synthetic oligonucleotide
acauguagcccuggcuguc

SEQ ID NO: 3101682 - RNA, 19 nt, Artificial Sequence
  Description of Artificial Sequence: Synthetic oligonucleotide
gagaaacucugcagaacuc

SEQ ID NO: 3101683 - RNA, 19 nt, Artificial Sequence
  Description of Artificial Sequence: Synthetic oligonucleotide
uagcagauccaaggggaga

SEQ ID NO: 3101684 - RNA, 19 nt, Artificial Sequence
  Description of Artificial Sequence: Synthetic oligonucleotide
gagacauguagcccuggcu

SEQ ID NO: 3101685 - RNA, 19 nt, Artificial Sequence
  Description of Artificial Sequence: Synthetic oligonucleotide
gacauguagcccuggcugu

SEQ ID NO: 3101686 - RNA, 19 nt, Artificial Sequence
  Description of Artificial Sequence: Synthetic oligonucleotide
ucagcagauuguguauuuu

SEQ ID NO: 3101687 - RNA, 19 nt, Artificial Sequence
  Description of Artificial Sequence: Synthetic oligonucleotide
uugcgaugcuucugagagu

SEQ ID NO: 3101688 - RNA, 19 nt, Artificial Sequence
  Description of Artificial Sequence: Synthetic oligonucleotide
gguuuaguagcagauccaa

SEQ ID NO: 3101689 - RNA, 19 nt, Artificial Sequence
  Description of Artificial Sequence: Synthetic oligonucleotide
auccaaggggagaaacucu

SEQ ID NO: 3101690 - RNA, 19 nt, Artificial Sequence
  Description of Artificial Sequence: Synthetic oligonucleotide
acucugcagaacucagauu

SEQ ID NO: 3101691 - RNA, 19 nt, Artificial Sequence
  Description of Artificial Sequence: Synthetic oligonucleotide
gaugcuucugagaguagau

SEQ ID NO: 3101692 - RNA, 19 nt, Artificial Sequence
  Description of Artificial Sequence: Synthetic oligonucleotide
guuucauaaugacuuccuu

SEQ ID NO: 3101693 - RNA, 19 nt, Artificial Sequence
  Description of Artificial Sequence: Synthetic oligonucleotide
gugagacauguagcccugg

SEQ ID NO: 3101694 - RNA, 19 nt, Artificial Sequence
  Description of Artificial Sequence: Synthetic oligonucleotide
cagaacucagauuccaguu

SEQ ID NO: 3101695 - RNA, 19 nt, Artificial Sequence
  Description of Artificial Sequence: Synthetic oligonucleotide
ccaaggggagaaacucugc

SEQ ID NO: 3101696 - RNA, 19 nt, Artificial Sequence
  Description of Artificial Sequence: Synthetic oligonucleotide
gcagaacucagauuccagu

SEQ ID NO: 3101697 - RNA, 19 nt, Artificial Sequence
  Description of Artificial Sequence: Synthetic oligonucleotide
ggggagaaacucugcagaa

SEQ ID NO: 3101698 - RNA, 19 nt, Artificial Sequence
  Description of Artificial Sequence: Synthetic oligonucleotide
gggagaaacucugcagaac

SEQ ID NO: 3101699 - RNA, 19 nt, Artificial Sequence
  Description of Artificial Sequence: Synthetic oligonucleotide
gaucuugacuugguuuagu

SEQ ID NO: 3101700 - RNA, 19 nt, Artificial Sequence
  Description of Artificial Sequence: Synthetic oligonucleotide
gaguagaucuugacuuggu

SEQ ID NO: 3101701 - RNA, 19 nt, Artificial Sequence
  Description of Artificial Sequence: Synthetic oligonucleotide
uccuugaacuugggagauc

SEQ ID NO: 3101702 - RNA, 19 nt, Artificial Sequence
  Description of Artificial Sequence: Synthetic oligonucleotide
cuaccugccucugcuucuc

SEQ ID NO: 3101703 - RNA, 19 nt, Artificial Sequence
  Description of Artificial Sequence: Synthetic oligonucleotide
aguucagcggcagcuucuu

SEQ ID NO: 3101704 - RNA, 19 nt, Artificial Sequence
  Description of Artificial Sequence: Synthetic oligonucleotide
cagcggcagcuucuuuaag

SEQ ID NO: 3101705 - RNA, 19 nt, Artificial Sequence
  Description of Artificial Sequence: Synthetic oligonucleotide
cuucucaagugcugguuuu

SEQ ID NO: 3101706 - RNA, 19 nt, Artificial Sequence
  Description of Artificial Sequence: Synthetic oligonucleotide
cuugaacuugggagaucua

SEQ ID NO: 3101707 - RNA, 19 nt, Artificial Sequence
  Description of Artificial Sequence: Synthetic oligonucleotide
ccuugaacuugggagaucu

SEQ ID NO: 3101708 - RNA, 19 nt, Artificial Sequence
  Description of Artificial Sequence: Synthetic oligonucleotide
caguucagcggcagcuucu

SEQ ID NO: 3101709 - RNA, 19 nt, Artificial Sequence
  Description of Artificial Sequence: Synthetic oligonucleotide
gcaaaauaguaaguuucau

SEQ ID NO: 3101710 - RNA, 19 nt, Artificial Sequence
  Description of Artificial Sequence: Synthetic oligonucleotide
guccuugaacuugggagau

SEQ ID NO: 3101711 - RNA, 19 nt, Artificial Sequence
  Description of Artificial Sequence: Synthetic oligonucleotide
cgaugcuucugagaguaga

SEQ ID NO: 3101712 - RNA, 19 nt, Artificial Sequence
  Description of Artificial Sequence: Synthetic oligonucleotide
gcgaugcuucugagaguag

SEQ ID NO: 3101713 - RNA, 19 nt, Artificial Sequence
  Description of Artificial Sequence: Synthetic oligonucleotide
gcuucugagaguagaucuu

SEQ ID NO: 3101714 - RNA, 19 nt, Artificial Sequence
  Description of Artificial Sequence: Synthetic oligonucleotide
acaacaucaucucagauuc

SEQ ID NO: 3101715 - RNA, 19 nt, Artificial Sequence
  Description of Artificial Sequence: Synthetic oligonucleotide
ucuugagucuaaaagcccg

SEQ ID NO: 3101716 - RNA, 19 nt, Artificial Sequence
  Description of Artificial Sequence: Synthetic oligonucleotide
aaagacagucucuuccucg

SEQ ID NO: 3101717 - RNA, 19 nt, Artificial Sequence
  Description of Artificial Sequence: Synthetic oligonucleotide
gaauguugacaccagagcc

SEQ ID NO: 3101718 - RNA, 19 nt, Artificial Sequence
  Description of Artificial Sequence: Synthetic oligonucleotide
aauguugacaccagagccc

SEQ ID NO: 3101719 - RNA, 19 nt, Artificial Sequence
  Description of Artificial Sequence: Synthetic oligonucleotide
uggucagaagcccauaccg

SEQ ID NO: 3101720 - RNA, 19 nt, Artificial Sequence
  Description of Artificial Sequence: Synthetic oligonucleotide
aagacagucucuuccucgc

SEQ ID NO: 3101721 - RNA, 19 nt, Artificial Sequence
  Description of Artificial Sequence: Synthetic oligonucleotide
cuucuugagucuaaaagcc

SEQ ID NO: 3101722 - RNA, 19 nt, Artificial Sequence
  Description of Artificial Sequence: Synthetic oligonucleotide
aaguagagcgagaucaggc

SEQ ID NO: 3101723 - RNA, 19 nt, Artificial Sequence
  Description of Artificial Sequence: Synthetic oligonucleotide
aacacaucucucuuguucu

SEQ ID NO: 3101724 - RNA, 19 nt, Artificial Sequence
  Description of Artificial Sequence: Synthetic oligonucleotide
uuccugguuucaaagacag

SEQ ID NO: 3101725 - RNA, 19 nt, Artificial Sequence
  Description of Artificial Sequence: Synthetic oligonucleotide
cucuguguuggucagaagc

SEQ ID NO: 3101726 - RNA, 19 nt, Artificial Sequence
  Description of Artificial Sequence: Synthetic oligonucleotide
ucuguguuggucagaagcc

SEQ ID NO: 3101727 - RNA, 19 nt, Artificial Sequence
  Description of Artificial Sequence: Synthetic oligonucleotide
gauuacguagaacaggcga

SEQ ID NO: 3101728 - RNA, 19 nt, Artificial Sequence
  Description of Artificial Sequence: Synthetic oligonucleotide
ucuaaaagcccggaugagg

SEQ ID NO: 3101729 - RNA, 19 nt, Artificial Sequence
  Description of Artificial Sequence: Synthetic oligonucleotide
caucaucucagauuccugg

SEQ ID NO: 3101730 - RNA, 19 nt, Artificial Sequence
  Description of Artificial Sequence: Synthetic oligonucleotide
agugauuacguagaacagg

SEQ ID NO: 3101731 - RNA, 19 nt, Artificial Sequence
  Description of Artificial Sequence: Synthetic oligonucleotide
gagucuaaaagcccggaug

SEQ ID NO: 3101732 - RNA, 19 nt, Artificial Sequence
  Description of Artificial Sequence: Synthetic oligonucleotide
gauuccugguuucaaagac

SEQ ID NO: 3101733 - RNA, 19 nt, Artificial Sequence
  Description of Artificial Sequence: Synthetic oligonucleotide
agucuaaaagcccggauga

SEQ ID NO: 3101734 - RNA, 19 nt, Artificial Sequence
  Description of Artificial Sequence: Synthetic oligonucleotide
aggaaguagagcgagauca

SEQ ID NO: 3101735 - RNA, 19 nt, Artificial Sequence
  Description of Artificial Sequence: Synthetic oligonucleotide
aucucucuuguucuugcgc

SEQ ID NO: 3101736 - RNA, 19 nt, Artificial Sequence
  Description of Artificial Sequence: Synthetic oligonucleotide
uuccucgcuguccagagag

SEQ ID NO: 3101737 - RNA, 19 nt, Artificial Sequence
  Description of Artificial Sequence: Synthetic oligonucleotide
acaucucucuuguucuugc

SEQ ID NO: 3101738 - RNA, 19 nt, Artificial Sequence
  Description of Artificial Sequence: Synthetic oligonucleotide
ucucucuuguucuugcgcc

SEQ ID NO: 3101739 - RNA, 19 nt, Artificial Sequence
  Description of Artificial Sequence: Synthetic oligonucleotide
aacaucaucucagauuccu

SEQ ID NO: 3101740 - RNA, 19 nt, Artificial Sequence
  Description of Artificial Sequence: Synthetic oligonucleotide
gaacacaucucucuuguuc

SEQ ID NO: 3101741 - RNA, 19 nt, Artificial Sequence
  Description of Artificial Sequence: Synthetic oligonucleotide
aaaagcccggaugaggaag

SEQ ID NO: 3101742 - RNA, 19 nt, Artificial Sequence
  Description of Artificial Sequence: Synthetic oligonucleotide
gaugaggaaguagagcgag

SEQ ID NO: 3101743 - RNA, 19 nt, Artificial Sequence
  Description of Artificial Sequence: Synthetic oligonucleotide
uucuugagucuaaaagccc

SEQ ID NO: 3101744 - RNA, 19 nt, Artificial Sequence
  Description of Artificial Sequence: Synthetic oligonucleotide
ucaaagacagucucuuccu

SEQ ID NO: 3101745 - RNA, 19 nt, Artificial Sequence
  Description of Artificial Sequence: Synthetic oligonucleotide
gugauuacguagaacaggc

SEQ ID NO: 3101746 - RNA, 19 nt, Artificial Sequence
  Description of Artificial Sequence: Synthetic oligonucleotide
ugauuacguagaacaggcg

SEQ ID NO: 3101747 - RNA, 19 nt, Artificial Sequence
  Description of Artificial Sequence: Synthetic oligonucleotide
uucgcuguggcuucuugag

SEQ ID NO: 3101748 - RNA, 19 nt, Artificial Sequence
  Description of Artificial Sequence: Synthetic oligonucleotide
ggcuucuugagucuaaaag

SEQ ID NO: 3101749 - RNA, 19 nt, Artificial Sequence
  Description of Artificial Sequence: Synthetic oligonucleotide
gaacaggcgaagcagcaug

SEQ ID NO: 3101750 - RNA, 19 nt, Artificial Sequence
  Description of Artificial Sequence: Synthetic oligonucleotide
gagcccagugauuacguag

SEQ ID NO: 3101751 - RNA, 19 nt, Artificial Sequence
  Description of Artificial Sequence: Synthetic oligonucleotide
cuugagucuaaaagcccgg

SEQ ID NO: 3101752 - RNA, 19 nt, Artificial Sequence
  Description of Artificial Sequence: Synthetic oligonucleotide
caccacaacaucaucucag

SEQ ID NO: 3101753 - RNA, 19 nt, Artificial Sequence
  Description of Artificial Sequence: Synthetic oligonucleotide
cagauuccugguuucaaag

SEQ ID NO: 3101754 - RNA, 19 nt, Artificial Sequence
  Description of Artificial Sequence: Synthetic oligonucleotide
cauccgggaauguugacac

SEQ ID NO: 3101755 - RNA, 19 nt, Artificial Sequence
  Description of Artificial Sequence: Synthetic oligonucleotide
cuaaaagcccggaugagga

SEQ ID NO: 3101756 - RNA, 19 nt, Artificial Sequence
  Description of Artificial Sequence: Synthetic oligonucleotide
gucagaagcccauaccgcc

SEQ ID NO: 3101757 - RNA, 19 nt, Artificial Sequence
  Description of Artificial Sequence: Synthetic oligonucleotide
aagcccauaccgccuucgc

SEQ ID NO: 3101758 - RNA, 19 nt, Artificial Sequence
  Description of Artificial Sequence: Synthetic oligonucleotide
aggcgaagcagcauggggc

SEQ ID NO: 3101759 - RNA, 19 nt, Artificial Sequence
  Description of Artificial Sequence: Synthetic oligonucleotide
uguguuggucagaagccca

SEQ ID NO: 3101760 - RNA, 19 nt, Artificial Sequence
  Description of Artificial Sequence: Synthetic oligonucleotide
agagaacacaucucucuug

SEQ ID NO: 3101761 - RNA, 19 nt, Artificial Sequence
  Description of Artificial Sequence: Synthetic oligonucleotide
ugguuucaaagacagucuc

SEQ ID NO: 3101762 - RNA, 19 nt, Artificial Sequence
  Description of Artificial Sequence: Synthetic oligonucleotide
uuggucagaagcccauacc

SEQ ID NO: 3101763 - RNA, 19 nt, Artificial Sequence
  Description of Artificial Sequence: Synthetic oligonucleotide
ggaauguugacaccagagc

SEQ ID NO: 3101764 - RNA, 19 nt, Artificial Sequence
  Description of Artificial Sequence: Synthetic oligonucleotide
uagaacaggcgaagcagca

SEQ ID NO: 3101765 - RNA, 19 nt, Artificial Sequence
  Description of Artificial Sequence: Synthetic oligonucleotide
uuacguagaacaggcgaag

SEQ ID NO: 3101766 - RNA, 19 nt, Artificial Sequence
  Description of Artificial Sequence: Synthetic oligonucleotide
cggaugaggaaguagagcg

SEQ ID NO: 3101767 - RNA, 19 nt, Artificial Sequence
  Description of Artificial Sequence: Synthetic oligonucleotide
ccagugauuacguagaaca

SEQ ID NO: 3101768 - RNA, 19 nt, Artificial Sequence
  Description of Artificial Sequence: Synthetic oligonucleotide
aucucagauuccugguuuc

SEQ ID NO: 3101769 - RNA, 19 nt, Artificial Sequence
  Description of Artificial Sequence: Synthetic oligonucleotide
ucuuccucgcuguccagag

SEQ ID NO: 3101770 - RNA, 19 nt, Artificial Sequence
  Description of Artificial Sequence: Synthetic oligonucleotide
agaucaggccgcugagccc

SEQ ID NO: 3101771 - RNA, 19 nt, Artificial Sequence
  Description of Artificial Sequence: Synthetic oligonucleotide
agauuccugguuucaaaga

SEQ ID NO: 3101772 - RNA, 19 nt, Artificial Sequence
  Description of Artificial Sequence: Synthetic oligonucleotide
ugcuccucuguguugguca

SEQ ID NO: 3101773 - RNA, 19 nt, Artificial Sequence
  Description of Artificial Sequence: Synthetic oligonucleotide
cagugauuacguagaacag

SEQ ID NO: 3101774 - RNA, 19 nt, Artificial Sequence
  Description of Artificial Sequence: Synthetic oligonucleotide
ucagauuccugguuucaaa

SEQ ID NO: 3101775 - RNA, 19 nt, Artificial Sequence
  Description of Artificial Sequence: Synthetic oligonucleotide
uccgggaauguugacacca

SEQ ID NO: 3101776 - RNA, 19 nt, Artificial Sequence
  Description of Artificial Sequence: Synthetic oligonucleotide
ucuugcgccugccaucccc

SEQ ID NO: 3101777 - RNA, 19 nt, Artificial Sequence
  Description of Artificial Sequence: Synthetic oligonucleotide
agaggccaucucuuccugc

SEQ ID NO: 3101778 - RNA, 19 nt, Artificial Sequence
  Description of Artificial Sequence: Synthetic oligonucleotide
agagaggccaucucuuccu

SEQ ID NO: 3101779 - RNA, 19 nt, Artificial Sequence
  Description of Artificial Sequence: Synthetic oligonucleotide
ugaggaaguagagcgagau

SEQ ID NO: 3101780 - RNA, 19 nt, Artificial Sequence
  Description of Artificial Sequence: Synthetic oligonucleotide
ucagaagcccauaccgccu

SEQ ID NO: 3101781 - RNA, 19 nt, Artificial Sequence
  Description of Artificial Sequence: Synthetic oligonucleotide
agcgagaucaggccgcuga

SEQ ID NO: 3101782 - RNA, 19 nt, Artificial Sequence
  Description of Artificial Sequence: Synthetic oligonucleotide
ugccauccccaccacaaca

SEQ ID NO: 3101783 - RNA, 19 nt, Artificial Sequence
  Description of Artificial Sequence: Synthetic oligonucleotide
acguagaacaggcgaagca

SEQ ID NO: 3101784 - RNA, 19 nt, Artificial Sequence
  Description of Artificial Sequence: Synthetic oligonucleotide
ugagucuaaaagcccggau

SEQ ID NO: 3101785 - RNA, 19 nt, Artificial Sequence
  Description of Artificial Sequence: Synthetic oligonucleotide
accacaacaucaucucaga

SEQ ID NO: 3101786 - RNA, 19 nt, Artificial Sequence
  Description of Artificial Sequence: Synthetic oligonucleotide
uuguucuugcgccugccau

SEQ ID NO: 3101787 - RNA, 19 nt, Artificial Sequence
  Description of Artificial Sequence: Synthetic oligonucleotide
uuucaaagacagucucuuc

SEQ ID NO: 3101788 - RNA, 19 nt, Artificial Sequence
  Description of Artificial Sequence: Synthetic oligonucleotide
ucuuccugcuccucugugu

SEQ ID NO: 3101789 - RNA, 19 nt, Artificial Sequence
  Description of Artificial Sequence: Synthetic oligonucleotide
ccugguuucaaagacaguc

SEQ ID NO: 3101790 - RNA, 19 nt, Artificial Sequence
  Description of Artificial Sequence: Synthetic oligonucleotide
gagaacacaucucucuugu

SEQ ID NO: 3101791 - RNA, 19 nt, Artificial Sequence
  Description of Artificial Sequence: Synthetic oligonucleotide
auuacguagaacaggcgaa

SEQ ID NO: 3101792 - RNA, 19 nt, Artificial Sequence
  Description of Artificial Sequence: Synthetic oligonucleotide
uguucuugcgccugccauc

SEQ ID NO: 3101793 - RNA, 19 nt, Artificial Sequence
  Description of Artificial Sequence: Synthetic oligonucleotide
ucaucucagauuccugguu

SEQ ID NO: 3101794 - RNA, 19 nt, Artificial Sequence
  Description of Artificial Sequence: Synthetic oligonucleotide
caggcgaagcagcaugggg

SEQ ID NO: 3101795 - RNA, 19 nt, Artificial Sequence
  Description of Artificial Sequence: Synthetic oligonucleotide
cagagaggccaucucuucc

SEQ ID NO: 3101796 - RNA, 19 nt, Artificial Sequence
  Description of Artificial Sequence: Synthetic oligonucleotide
caucucucuuguucuugcg

SEQ ID NO: 3101797 - RNA, 19 nt, Artificial Sequence
  Description of Artificial Sequence: Synthetic oligonucleotide
gggaauguugacaccagag

SEQ ID NO: 3101798 - RNA, 19 nt, Artificial Sequence
  Description of Artificial Sequence: Synthetic oligonucleotide
acagucucuuccucgcugu

SEQ ID NO: 3101799 - RNA, 19 nt, Artificial Sequence
  Description of Artificial Sequence: Synthetic oligonucleotide
uacguagaacaggcgaagc

SEQ ID NO: 3101800 - RNA, 19 nt, Artificial Sequence
  Description of Artificial Sequence: Synthetic oligonucleotide
auaccgccuucgcuguggc

SEQ ID NO: 3101801 - RNA, 19 nt, Artificial Sequence
  Description of Artificial Sequence: Synthetic oligonucleotide
ucgcuguccagagaggcca

SEQ ID NO: 3101802 - RNA, 19 nt, Artificial Sequence
  Description of Artificial Sequence: Synthetic oligonucleotide
uccagagaggccaucucuu

SEQ ID NO: 3101803 - RNA, 19 nt, Artificial Sequence
  Description of Artificial Sequence: Synthetic oligonucleotide
gaagcccauaccgccuucg

SEQ ID NO: 3101804 - RNA, 19 nt, Artificial Sequence
  Description of Artificial Sequence: Synthetic oligonucleotide
gaucaggccgcugagccca

SEQ ID NO: 3101805 - RNA, 19 nt, Artificial Sequence
  Description of Artificial Sequence: Synthetic oligonucleotide
auguugacaccagagccca

SEQ ID NO: 3101806 - RNA, 19 nt, Artificial Sequence
  Description of Artificial Sequence: Synthetic oligonucleotide
guucuugcgccugccaucc

SEQ ID NO: 3101807 - RNA, 19 nt, Artificial Sequence
  Description of Artificial Sequence: Synthetic oligonucleotide
auccgggaauguugacacc

SEQ ID NO: 3101808 - RNA, 19 nt, Artificial Sequence
  Description of Artificial Sequence: Synthetic oligonucleotide
cuguguuggucagaagccc

SEQ ID NO: 3101809 - RNA, 19 nt, Artificial Sequence
  Description of Artificial Sequence: Synthetic oligonucleotide
uugagucuaaaagcccgga

SEQ ID NO: 3101810 - RNA, 19 nt, Artificial Sequence
  Description of Artificial Sequence: Synthetic oligonucleotide
uaaaagcccggaugaggaa

SEQ ID NO: 3101811 - RNA, 19 nt, Artificial Sequence
  Description of Artificial Sequence: Synthetic oligonucleotide
cauaccgccuucgcugugg

SEQ ID NO: 3101812 - RNA, 19 nt, Artificial Sequence
  Description of Artificial Sequence: Synthetic oligonucleotide
uccucgcuguccagagagg

SEQ ID NO: 3101813 - RNA, 19 nt, Artificial Sequence
  Description of Artificial Sequence: Synthetic oligonucleotide
uccucuguguuggucagaa

SEQ ID NO: 3101814 - RNA, 19 nt, Artificial Sequence
  Description of Artificial Sequence: Synthetic oligonucleotide
ucucagauuccugguuuca

SEQ ID NO: 3101815 - RNA, 19 nt, Artificial Sequence
  Description of Artificial Sequence: Synthetic oligonucleotide
uguggcuucuugagucuaa

SEQ ID NO: 3101816 - RNA, 19 nt, Artificial Sequence
  Description of Artificial Sequence: Synthetic oligonucleotide
ggcugugcaggcuccaucc

SEQ ID NO: 3101817 - RNA, 19 nt, Artificial Sequence
  Description of Artificial Sequence: Synthetic oligonucleotide
ucucuuguucuugcgccug

SEQ ID NO: 3101818 - RNA, 19 nt, Artificial Sequence
  Description of Artificial Sequence: Synthetic oligonucleotide
caaagacagucucuuccuc

SEQ ID NO: 3101819 - RNA, 19 nt, Artificial Sequence
  Description of Artificial Sequence: Synthetic oligonucleotide
auuccugguuucaaagaca

SEQ ID NO: 3101820 - RNA, 19 nt, Artificial Sequence
  Description of Artificial Sequence: Synthetic oligonucleotide
cauccccaccacaacauca

SEQ ID NO: 3101821 - RNA, 19 nt, Artificial Sequence
  Description of Artificial Sequence: Synthetic oligonucleotide
gaggaaguagagcgagauc

SEQ ID NO: 3101822 - RNA, 19 nt, Artificial Sequence
  Description of Artificial Sequence: Synthetic oligonucleotide
uguccagagaggccaucuc

SEQ ID NO: 3101823 - RNA, 19 nt, Artificial Sequence
  Description of Artificial Sequence: Synthetic oligonucleotide
ucuuguucuugcgccugcc

SEQ ID NO: 3101824 - RNA, 19 nt, Artificial Sequence
  Description of Artificial Sequence: Synthetic oligonucleotide
gcccauaccgccuucgcug

SEQ ID NO: 3101825 - RNA, 19 nt, Artificial Sequence
  Description of Artificial Sequence: Synthetic oligonucleotide
agaagcccauaccgccuuc

SEQ ID NO: 3101826 - RNA, 19 nt, Artificial Sequence
  Description of Artificial Sequence: Synthetic oligonucleotide
gagaggccaucucuuccug

SEQ ID NO: 3101827 - RNA, 19 nt, Artificial Sequence
  Description of Artificial Sequence: Synthetic oligonucleotide
ggcgaagcagcauggggcc

SEQ ID NO: 3101828 - RNA, 19 nt, Artificial Sequence
  Description of Artificial Sequence: Synthetic oligonucleotide
gucuaaaagcccggaugag

SEQ ID NO: 3101829 - RNA, 19 nt, Artificial Sequence
  Description of Artificial Sequence: Synthetic oligonucleotide
cacaacaucaucucagauu

SEQ ID NO: 3101830 - RNA, 19 nt, Artificial Sequence
  Description of Artificial Sequence: Synthetic oligonucleotide
uguugacaccagagcccag

SEQ ID NO: 3101831 - RNA, 19 nt, Artificial Sequence
  Description of Artificial Sequence: Synthetic oligonucleotide
agcccagugauuacguaga

SEQ ID NO: 3101832 - RNA, 19 nt, Artificial Sequence
  Description of Artificial Sequence: Synthetic oligonucleotide
ucgcuguggcuucuugagu

SEQ ID NO: 3101833 - RNA, 19 nt, Artificial Sequence
  Description of Artificial Sequence: Synthetic oligonucleotide
gcugagcccagugauuacg

SEQ ID NO: 3101834 - RNA, 19 nt, Artificial Sequence
  Description of Artificial Sequence: Synthetic oligonucleotide
guugacaccagagcccaga

SEQ ID NO: 3101835 - RNA, 19 nt, Artificial Sequence
  Description of Artificial Sequence: Synthetic oligonucleotide
accagagcccagagaacac

SEQ ID NO: 3101836 - RNA, 19 nt, Artificial Sequence
  Description of Artificial Sequence: Synthetic oligonucleotide
acaggcgaagcagcauggg

SEQ ID NO: 3101837 - RNA, 19 nt, Artificial Sequence
  Description of Artificial Sequence: Synthetic oligonucleotide
aggccaucucuuccugcuc

SEQ ID NO: 3101838 - RNA, 19 nt, Artificial Sequence
  Description of Artificial Sequence: Synthetic oligonucleotide
agcccauaccgccuucgcu

SEQ ID NO: 3101839 - RNA, 19 nt, Artificial Sequence
  Description of Artificial Sequence: Synthetic oligonucleotide
agcccagagaacacaucuc

SEQ ID NO: 3101840 - RNA, 19 nt, Artificial Sequence
  Description of Artificial Sequence: Synthetic oligonucleotide
uggcuucuugagucuaaaa

SEQ ID NO: 3101841 - RNA, 19 nt, Artificial Sequence
  Description of Artificial Sequence: Synthetic oligonucleotide
acaucaucucagauuccug

SEQ ID NO: 3101842 - RNA, 19 nt, Artificial Sequence
  Description of Artificial Sequence: Synthetic oligonucleotide
ugcaggcuccauccgggaa

SEQ ID NO: 3101843 - RNA, 19 nt, Artificial Sequence
  Description of Artificial Sequence: Synthetic oligonucleotide
caccagagcccagagaaca

SEQ ID NO: 3101844 - RNA, 19 nt, Artificial Sequence
  Description of Artificial Sequence: Synthetic oligonucleotide
guuucaaagacagucucuu

SEQ ID NO: 3101845 - RNA, 19 nt, Artificial Sequence
  Description of Artificial Sequence: Synthetic oligonucleotide
cugguuucaaagacagucu

SEQ ID NO: 3101846 - RNA, 19 nt, Artificial Sequence
  Description of Artificial Sequence: Synthetic oligonucleotide
ggaaguagagcgagaucag

SEQ ID NO: 3101847 - RNA, 19 nt, Artificial Sequence
  Description of Artificial Sequence: Synthetic oligonucleotide
ugcgccugccauccccacc

SEQ ID NO: 3101848 - RNA, 19 nt, Artificial Sequence
  Description of Artificial Sequence: Synthetic oligonucleotide
cuccauccgggaauguuga

SEQ ID NO: 3101849 - RNA, 19 nt, Artificial Sequence
  Description of Artificial Sequence: Synthetic oligonucleotide
cuucgcuguggcuucuuga

SEQ ID NO: 3101850 - RNA, 19 nt, Artificial Sequence
  Description of Artificial Sequence: Synthetic oligonucleotide
agacagucucuuccucgcu

SEQ ID NO: 3101851 - RNA, 19 nt, Artificial Sequence
  Description of Artificial Sequence: Synthetic oligonucleotide
cguagaacaggcgaagcag

SEQ ID NO: 3101852 - RNA, 19 nt, Artificial Sequence
  Description of Artificial Sequence: Synthetic oligonucleotide
ggucagaagcccauaccgc

SEQ ID NO: 3101853 - RNA, 19 nt, Artificial Sequence
  Description of Artificial Sequence: Synthetic oligonucleotide
ucucuuccucgcuguccag

SEQ ID NO: 3101854 - RNA, 19 nt, Artificial Sequence
  Description of Artificial Sequence: Synthetic oligonucleotide
ugagcccagugauuacgua

SEQ ID NO: 3101855 - RNA, 19 nt, Artificial Sequence
  Description of Artificial Sequence: Synthetic oligonucleotide
accgccuucgcuguggcuu

SEQ ID NO: 3101856 - RNA, 19 nt, Artificial Sequence
  Description of Artificial Sequence: Synthetic oligonucleotide
agaacacaucucucuuguu

SEQ ID NO: 3101857 - RNA, 19 nt, Artificial Sequence
  Description of Artificial Sequence: Synthetic oligonucleotide
agaacaggcgaagcagcau

SEQ ID NO: 3101858 - RNA, 19 nt, Artificial Sequence
  Description of Artificial Sequence: Synthetic oligonucleotide
gcuccauccgggaauguug

SEQ ID NO: 3101859 - RNA, 19 nt, Artificial Sequence
  Description of Artificial Sequence: Synthetic oligonucleotide
cccaccacaacaucaucuc

SEQ ID NO: 3101860 - RNA, 19 nt, Artificial Sequence
  Description of Artificial Sequence: Synthetic oligonucleotide
uccccaccacaacaucauc

SEQ ID NO: 3101861 - RNA, 19 nt, Artificial Sequence
  Description of Artificial Sequence: Synthetic oligonucleotide
cuuguucuugcgccugcca

SEQ ID NO: 3101862 - RNA, 19 nt, Artificial Sequence
  Description of Artificial Sequence: Synthetic oligonucleotide
acacaucucucuuguucuu

SEQ ID NO: 3101863 - RNA, 19 nt, Artificial Sequence
  Description of Artificial Sequence: Synthetic oligonucleotide
agcccggaugaggaaguag

SEQ ID NO: 3101864 - RNA, 19 nt, Artificial Sequence
  Description of Artificial Sequence: Synthetic oligonucleotide
uccauccgggaauguugac

SEQ ID NO: 3101865 - RNA, 19 nt, Artificial Sequence
  Description of Artificial Sequence: Synthetic oligonucleotide
guccagagaggccaucucu

SEQ ID NO: 3101866 - RNA, 19 nt, Artificial Sequence
  Description of Artificial Sequence: Synthetic oligonucleotide
cuugcgccugccaucccca

SEQ ID NO: 3101867 - RNA, 19 nt, Artificial Sequence
  Description of Artificial Sequence: Synthetic oligonucleotide
uguuggucagaagcccaua

SEQ ID NO: 3101868 - RNA, 19 nt, Artificial Sequence
  Description of Artificial Sequence: Synthetic oligonucleotide
gcugugcaggcuccauccg

SEQ ID NO: 3101869 - RNA, 19 nt, Artificial Sequence
  Description of Artificial Sequence: Synthetic oligonucleotide
aggccgcugagcccaguga

SEQ ID NO: 3101870 - RNA, 19 nt, Artificial Sequence
  Description of Artificial Sequence: Synthetic oligonucleotide
cccggaugaggaaguagag

SEQ ID NO: 3101871 - RNA, 19 nt, Artificial Sequence
  Description of Artificial Sequence: Synthetic oligonucleotide
cugccauccccaccacaac

SEQ ID NO: 3101872 - RNA, 19 nt, Artificial Sequence
  Description of Artificial Sequence: Synthetic oligonucleotide
augaggaaguagagcgaga

SEQ ID NO: 3101873 - RNA, 19 nt, Artificial Sequence
  Description of Artificial Sequence: Synthetic oligonucleotide
cgcuguggcuucuugaguc

SEQ ID NO: 3101874 - RNA, 19 nt, Artificial Sequence
  Description of Artificial Sequence: Synthetic oligonucleotide
caggcuccauccgggaaug

SEQ ID NO: 3101875 - RNA, 19 nt, Artificial Sequence
  Description of Artificial Sequence: Synthetic oligonucleotide
ccggaugaggaaguagagc

SEQ ID NO: 3101876 - RNA, 19 nt, Artificial Sequence
  Description of Artificial Sequence: Synthetic oligonucleotide
uucuugcgccugccauccc

SEQ ID NO: 3101877 - RNA, 19 nt, Artificial Sequence
  Description of Artificial Sequence: Synthetic oligonucleotide
caucucagauuccugguuu

SEQ ID NO: 3101878 - RNA, 19 nt, Artificial Sequence
  Description of Artificial Sequence: Synthetic oligonucleotide
caggccgcugagcccagug

SEQ ID NO: 3101879 - RNA, 19 nt, Artificial Sequence
  Description of Artificial Sequence: Synthetic oligonucleotide
ccagagaacacaucucucu

SEQ ID NO: 3101880 - RNA, 19 nt, Artificial Sequence
  Description of Artificial Sequence: Synthetic oligonucleotide
agagcgagaucaggccgcu

SEQ ID NO: 3101881 - RNA, 19 nt, Artificial Sequence
  Description of Artificial Sequence: Synthetic oligonucleotide
gcgagaucaggccgcugag

SEQ ID NO: 3101882 - RNA, 19 nt, Artificial Sequence
  Description of Artificial Sequence: Synthetic oligonucleotide
cucagauuccugguuucaa

SEQ ID NO: 3101883 - RNA, 19 nt, Artificial Sequence
  Description of Artificial Sequence: Synthetic oligonucleotide
gcccagagaacacaucucu

SEQ ID NO: 3101884 - RNA, 19 nt, Artificial Sequence
  Description of Artificial Sequence: Synthetic oligonucleotide
cccagagaacacaucucuc

SEQ ID NO: 3101885 - RNA, 19 nt, Artificial Sequence
  Description of Artificial Sequence: Synthetic oligonucleotide
gcccggaugaggaaguaga

SEQ ID NO: 3101886 - RNA, 19 nt, Artificial Sequence
  Description of Artificial Sequence: Synthetic oligonucleotide
cugagcccagugauuacgu

SEQ ID NO: 3101887 - RNA, 19 nt, Artificial Sequence
  Description of Artificial Sequence: Synthetic oligonucleotide
cucuuccucgcuguccaga

SEQ ID NO: 3101888 - RNA, 19 nt, Artificial Sequence
  Description of Artificial Sequence: Synthetic oligonucleotide
gcgccugccauccccacca

SEQ ID NO: 3101889 - RNA, 19 nt, Artificial Sequence
  Description of Artificial Sequence: Synthetic oligonucleotide
cagagaacacaucucucuu

SEQ ID NO: 3101890 - RNA, 19 nt, Artificial Sequence
  Description of Artificial Sequence: Synthetic oligonucleotide
ccgggaauguugacaccag

SEQ ID NO: 3101891 - RNA, 19 nt, Artificial Sequence
  Description of Artificial Sequence: Synthetic oligonucleotide
cagucucuuccucgcuguc

SEQ ID NO: 3101892 - RNA, 19 nt, Artificial Sequence
  Description of Artificial Sequence: Synthetic oligonucleotide
cucucuuguucuugcgccu

SEQ ID NO: 3101893 - RNA, 19 nt, Artificial Sequence
  Description of Artificial Sequence: Synthetic oligonucleotide
guggcuucuugagucuaaa

SEQ ID NO: 3101894 - RNA, 19 nt, Artificial Sequence
  Description of Artificial Sequence: Synthetic oligonucleotide
uugcgccugccauccccac

SEQ ID NO: 3101895 - RNA, 19 nt, Artificial Sequence
  Description of Artificial Sequence: Synthetic oligonucleotide
cuuccugcuccucuguguu

SEQ ID NO: 3101896 - RNA, 19 nt, Artificial Sequence
  Description of Artificial Sequence: Synthetic oligonucleotide
cccagugauuacguagaac

SEQ ID NO: 3101897 - RNA, 19 nt, Artificial Sequence
  Description of Artificial Sequence: Synthetic oligonucleotide
cagagcccagagaacacau

SEQ ID NO: 3101898 - RNA, 19 nt, Artificial Sequence
  Description of Artificial Sequence: Synthetic oligonucleotide
uaccgccuucgcuguggcu

SEQ ID NO: 3101899 - RNA, 19 nt, Artificial Sequence
  Description of Artificial Sequence: Synthetic oligonucleotide
cuuccucgcuguccagaga

SEQ ID NO: 3101900 - RNA, 19 nt, Artificial Sequence
  Description of Artificial Sequence: Synthetic oligonucleotide
cgaagcagcauggggcccg

SEQ ID NO: 3101901 - RNA, 19 nt, Artificial Sequence
  Description of Artificial Sequence: Synthetic oligonucleotide
cugcuccucuguguugguc

SEQ ID NO: 3101902 - RNA, 19 nt, Artificial Sequence
  Description of Artificial Sequence: Synthetic oligonucleotide
ccauccgggaauguugaca

SEQ ID NO: 3101903 - RNA, 19 nt, Artificial Sequence
  Description of Artificial Sequence: Synthetic oligonucleotide
cuguccagagaggccaucu

SEQ ID NO: 3101904 - RNA, 19 nt, Artificial Sequence
  Description of Artificial Sequence: Synthetic oligonucleotide
ccuucgcuguggcuucuug

SEQ ID NO: 3101905 - RNA, 19 nt, Artificial Sequence
  Description of Artificial Sequence: Synthetic oligonucleotide
ccaccacaacaucaucuca

SEQ ID NO: 3101906 - RNA, 19 nt, Artificial Sequence
  Description of Artificial Sequence: Synthetic oligonucleotide
gggcugugcaggcuccauc

SEQ ID NO: 3101907 - RNA, 19 nt, Artificial Sequence
  Description of Artificial Sequence: Synthetic oligonucleotide
gagcgagaucaggccgcug

SEQ ID NO: 3101908 - RNA, 19 nt, Artificial Sequence
  Description of Artificial Sequence: Synthetic oligonucleotide
ccauccccaccacaacauc

SEQ ID NO: 3101909 - RNA, 19 nt, Artificial Sequence
  Description of Artificial Sequence: Synthetic oligonucleotide
ccucuguguuggucagaag

SEQ ID NO: 3101910 - RNA, 19 nt, Artificial Sequence
  Description of Artificial Sequence: Synthetic oligonucleotide
ccccaccacaacaucaucu

SEQ ID NO: 3101911 - RNA, 19 nt, Artificial Sequence
  Description of Artificial Sequence: Synthetic oligonucleotide
ccagagcccagagaacaca

SEQ ID NO: 3101912 - RNA, 19 nt, Artificial Sequence
  Description of Artificial Sequence: Synthetic oligonucleotide
cagaagcccauaccgccuu

SEQ ID NO: 3101913 - RNA, 19 nt, Artificial Sequence
  Description of Artificial Sequence: Synthetic oligonucleotide
ucaggccgcugagcccagu

SEQ ID NO: 3101914 - RNA, 19 nt, Artificial Sequence
  Description of Artificial Sequence: Synthetic oligonucleotide
aucaggccgcugagcccag

SEQ ID NO: 3101915 - RNA, 19 nt, Artificial Sequence
  Description of Artificial Sequence: Synthetic oligonucleotide
gcccagugauuacguagaa

SEQ ID NO: 3101916 - RNA, 19 nt, Artificial Sequence
  Description of Artificial Sequence: Synthetic oligonucleotide
cuccucuguguuggucaga

SEQ ID NO: 3101917 - RNA, 19 nt, Artificial Sequence
  Description of Artificial Sequence: Synthetic oligonucleotide
ccgccuucgcuguggcuuc

SEQ ID NO: 3101918 - RNA, 19 nt, Artificial Sequence
  Description of Artificial Sequence: Synthetic oligonucleotide
aggcuccauccgggaaugu

SEQ ID NO: 3101919 - RNA, 19 nt, Artificial Sequence
  Description of Artificial Sequence: Synthetic oligonucleotide
gccugccauccccaccaca

SEQ ID NO: 3101920 - RNA, 19 nt, Artificial Sequence
  Description of Artificial Sequence: Synthetic oligonucleotide
cgggaauguugacaccaga

SEQ ID NO: 3101921 - RNA, 19 nt, Artificial Sequence
  Description of Artificial Sequence: Synthetic oligonucleotide
gccauccccaccacaacau

SEQ ID NO: 3101922 - RNA, 19 nt, Artificial Sequence
  Description of Artificial Sequence: Synthetic oligonucleotide
ccauaccgccuucgcugug

SEQ ID NO: 3101923 - RNA, 19 nt, Artificial Sequence
  Description of Artificial Sequence: Synthetic oligonucleotide
ccgcugagcccagugauua

SEQ ID NO: 3101924 - RNA, 19 nt, Artificial Sequence
  Description of Artificial Sequence: Synthetic oligonucleotide
gcuguccagagaggccauc

SEQ ID NO: 3101925 - RNA, 19 nt, Artificial Sequence
  Description of Artificial Sequence: Synthetic oligonucleotide
cgcugagcccagugauuac

SEQ ID NO: 3101926 - RNA, 19 nt, Artificial Sequence
  Description of Artificial Sequence: Synthetic oligonucleotide
ccacaacaucaucucagau

SEQ ID NO: 3101927 - RNA, 19 nt, Artificial Sequence
  Description of Artificial Sequence: Synthetic oligonucleotide
cccauaccgccuucgcugu

SEQ ID NO: 3101928 - RNA, 19 nt, Artificial Sequence
  Description of Artificial Sequence: Synthetic oligonucleotide
ggcuccauccgggaauguu

SEQ ID NO: 3101929 - RNA, 19 nt, Artificial Sequence
  Description of Artificial Sequence: Synthetic oligonucleotide
ccugcuccucuguguuggu

SEQ ID NO: 3101930 - RNA, 19 nt, Artificial Sequence
  Description of Artificial Sequence: Synthetic oligonucleotide
ggggcugugcaggcuccau

SEQ ID NO: 3101931 - RNA, 19 nt, Artificial Sequence
  Description of Artificial Sequence: Synthetic oligonucleotide
cgccugccauccccaccac

SEQ ID NO: 3101932 - RNA, 19 nt, Artificial Sequence
  Description of Artificial Sequence: Synthetic oligonucleotide
gccuucgcuguggcuucuu

SEQ ID NO: 3101933 - RNA, 19 nt, Artificial Sequence
  Description of Artificial Sequence: Synthetic oligonucleotide
agcacauucauccaguugc

SEQ ID NO: 3101934 - RNA, 19 nt, Artificial Sequence
  Description of Artificial Sequence: Synthetic oligonucleotide
uuuauagcagucuugauug

SEQ ID NO: 3101935 - RNA, 19 nt, Artificial Sequence
  Description of Artificial Sequence: Synthetic oligonucleotide
uuguugauuucuaugaugg

SEQ ID NO: 3101936 - RNA, 19 nt, Artificial Sequence
  Description of Artificial Sequence: Synthetic oligonucleotide
aaaguuauuuuauagcagu

SEQ ID NO: 3101937 - RNA, 19 nt, Artificial Sequence
  Description of Artificial Sequence: Synthetic oligonucleotide
uuuaguaauagcagaagca

SEQ ID NO: 3101938 - RNA, 19 nt, Artificial Sequence
  Description of Artificial Sequence: Synthetic oligonucleotide
uuuaccagcuuucucagcc

SEQ ID NO: 3101939 - RNA, 19 nt, Artificial Sequence
  Description of Artificial Sequence: Synthetic oligonucleotide
uucuguuucuuuuaucugg

SEQ ID NO: 3101940 - RNA, 19 nt, Artificial Sequence
  Description of Artificial Sequence: Synthetic oligonucleotide
aucauguaaccguuuaacc

SEQ ID NO: 3101941 - RNA, 19 nt, Artificial Sequence
  Description of Artificial Sequence: Synthetic oligonucleotide
auuucuguuucuuuuaucu

SEQ ID NO: 3101942 - RNA, 19 nt, Artificial Sequence
  Description of Artificial Sequence: Synthetic oligonucleotide
acugacauuuucuucuagc

SEQ ID NO: 3101943 - RNA, 19 nt, Artificial Sequence
  Description of Artificial Sequence: Synthetic oligonucleotide
uuuugaaagucacugacau

SEQ ID NO: 3101944 - RNA, 19 nt, Artificial Sequence
  Description of Artificial Sequence: Synthetic oligonucleotide
uacuuuaccagcuuucuca

SEQ ID NO: 3101945 - RNA, 19 nt, Artificial Sequence
  Description of Artificial Sequence: Synthetic oligonucleotide
uaugaugguaucauguaac

SEQ ID NO: 3101946 - RNA, 19 nt, Artificial Sequence
  Description of Artificial Sequence: Synthetic oligonucleotide
ucagcuucuacuuuaccag

SEQ ID NO: 3101947 - RNA, 19 nt, Artificial Sequence
  Description of Artificial Sequence: Synthetic oligonucleotide
uuuuauagcagucuugauu

SEQ ID NO: 3101948 - RNA, 19 nt, Artificial Sequence
  Description of Artificial Sequence: Synthetic oligonucleotide
cuuuaguaauagcagaagc

SEQ ID NO: 3101949 - RNA, 19 nt, Artificial Sequence
  Description of Artificial Sequence: Synthetic oligonucleotide
uguuucuuuuaucuggagc

SEQ ID NO: 3101950 - RNA, 19 nt, Artificial Sequence
  Description of Artificial Sequence: Synthetic oligonucleotide
aauuucuguuucuuuuauc

SEQ ID NO: 3101951 - RNA, 19 nt, Artificial Sequence
  Description of Artificial Sequence: Synthetic oligonucleotide
ucauguaaccguuuaaccu

SEQ ID NO: 3101952 - RNA, 19 nt, Artificial Sequence
  Description of Artificial Sequence: Synthetic oligonucleotide
augaugguaucauguaacc

SEQ ID NO: 3101953 - RNA, 19 nt, Artificial Sequence
  Description of Artificial Sequence: Synthetic oligonucleotide
uauuuuauagcagucuuga

SEQ ID NO: 3101954 - RNA, 19 nt, Artificial Sequence
  Description of Artificial Sequence: Synthetic oligonucleotide
aaaaguuauuuuauagcag

SEQ ID NO: 3101955 - RNA, 19 nt, Artificial Sequence
  Description of Artificial Sequence: Synthetic oligonucleotide
uucuaugaugguaucaugu

SEQ ID NO: 3101956 - RNA, 19 nt, Artificial Sequence
  Description of Artificial Sequence: Synthetic oligonucleotide
uaaccguuuaaccucagcu

SEQ ID NO: 3101957 - RNA, 19 nt, Artificial Sequence
  Description of Artificial Sequence: Synthetic oligonucleotide
uuauuuuauagcagucuug

SEQ ID NO: 3101958 - RNA, 19 nt, Artificial Sequence
  Description of Artificial Sequence: Synthetic oligonucleotide
uuaguaauagcagaagcac

SEQ ID NO: 3101959 - RNA, 19 nt, Artificial Sequence
  Description of Artificial Sequence: Synthetic oligonucleotide
uugauuucuaugaugguau

SEQ ID NO: 3101960 - RNA, 19 nt, Artificial Sequence
  Description of Artificial Sequence: Synthetic oligonucleotide
uugaaagucacugacauuu

SEQ ID NO: 3101961 - RNA, 19 nt, Artificial Sequence
  Description of Artificial Sequence: Synthetic oligonucleotide
auccaguuuguuuuguugg

SEQ ID NO: 3101962 - RNA, 19 nt, Artificial Sequence
  Description of Artificial Sequence: Synthetic oligonucleotide
ugggcuuuaguaauagcag

SEQ ID NO: 3101963 - RNA, 19 nt, Artificial Sequence
  Description of Artificial Sequence: Synthetic oligonucleotide
guuuaucauauccaguuug

SEQ ID NO: 3101964 - RNA, 19 nt, Artificial Sequence
  Description of Artificial Sequence: Synthetic oligonucleotide
uuuuguugggucuugaguu

SEQ ID NO: 3101965 - RNA, 19 nt, Artificial Sequence
  Description of Artificial Sequence: Synthetic oligonucleotide
uuguuuaucauauccaguu

SEQ ID NO: 3101966 - RNA, 19 nt, Artificial Sequence
  Description of Artificial Sequence: Synthetic oligonucleotide
uuuaucauauccaguuugu

SEQ ID NO: 3101967 - RNA, 19 nt, Artificial Sequence
  Description of Artificial Sequence: Synthetic oligonucleotide
uuuaaccucagcuucuacu

SEQ ID NO: 3101968 - RNA, 19 nt, Artificial Sequence
  Description of Artificial Sequence: Synthetic oligonucleotide
accguuuaaccucagcuuc

SEQ ID NO: 3101969 - RNA, 19 nt, Artificial Sequence
  Description of Artificial Sequence: Synthetic oligonucleotide
ucuugauugcuacuugggc

SEQ ID NO: 3101970 - RNA, 19 nt, Artificial Sequence
  Description of Artificial Sequence: Synthetic oligonucleotide
aucauauccaguuuguuuu

SEQ ID NO: 3101971 - RNA, 19 nt, Artificial Sequence
  Description of Artificial Sequence: Synthetic oligonucleotide
uaauagcagaagcacauuc

SEQ ID NO: 3101972 - RNA, 19 nt, Artificial Sequence
  Description of Artificial Sequence: Synthetic oligonucleotide
cauguaaccguuuaaccuc

SEQ ID NO: 3101973 - RNA, 19 nt, Artificial Sequence
  Description of Artificial Sequence: Synthetic oligonucleotide
ucuucuagcaauuucuguu

SEQ ID NO: 3101974 - RNA, 19 nt, Artificial Sequence
  Description of Artificial Sequence: Synthetic oligonucleotide
agucuugauugcuacuugg

SEQ ID NO: 3101975 - RNA, 19 nt, Artificial Sequence
  Description of Artificial Sequence: Synthetic oligonucleotide
acauucauccaguugcuug

SEQ ID NO: 3101976 - RNA, 19 nt, Artificial Sequence
  Description of Artificial Sequence: Synthetic oligonucleotide
ugcuuguuuaucauaucca

SEQ ID NO: 3101977 - RNA, 19 nt, Artificial Sequence
  Description of Artificial Sequence: Synthetic oligonucleotide
gaugguaucauguaaccgu

SEQ ID NO: 3101978 - RNA, 19 nt, Artificial Sequence
  Description of Artificial Sequence: Synthetic oligonucleotide
ucuguuucuuuuaucugga

SEQ ID NO: 3101979 - RNA, 19 nt, Artificial Sequence
  Description of Artificial Sequence: Synthetic oligonucleotide
uauccaguuuguuuuguug

SEQ ID NO: 3101980 - RNA, 19 nt, Artificial Sequence
  Description of Artificial Sequence: Synthetic oligonucleotide
aaguuauuuuauagcaguc

SEQ ID NO: 3101981 - RNA, 19 nt, Artificial Sequence
  Description of Artificial Sequence: Synthetic oligonucleotide
guuguugauuucuaugaug

SEQ ID NO: 3101982 - RNA, 19 nt, Artificial Sequence
  Description of Artificial Sequence: Synthetic oligonucleotide
uaucauguaaccguuuaac

SEQ ID NO: 3101983 - RNA, 19 nt, Artificial Sequence
  Description of Artificial Sequence: Synthetic oligonucleotide
uaguaauagcagaagcaca

SEQ ID NO: 3101984 - RNA, 19 nt, Artificial Sequence
  Description of Artificial Sequence: Synthetic oligonucleotide
uccaguuuguuuuguuggg

SEQ ID NO: 3101985 - RNA, 19 nt, Artificial Sequence
  Description of Artificial Sequence: Synthetic oligonucleotide
uccaguugcuuguuuauca

SEQ ID NO: 3101986 - RNA, 19 nt, Artificial Sequence
  Description of Artificial Sequence: Synthetic oligonucleotide
uuuaucuggagcuguagua

SEQ ID NO: 3101987 - RNA, 19 nt, Artificial Sequence
  Description of Artificial Sequence: Synthetic oligonucleotide
aaagucacugacauuuucu

SEQ ID NO: 3101988 - RNA, 19 nt, Artificial Sequence
  Description of Artificial Sequence: Synthetic oligonucleotide
aauagcagaagcacauuca

SEQ ID NO: 3101989 - RNA, 19 nt, Artificial Sequence
  Description of Artificial Sequence: Synthetic oligonucleotide
guuucuuuuaucuggagcu

SEQ ID NO: 3101990 - RNA, 19 nt, Artificial Sequence
  Description of Artificial Sequence: Synthetic oligonucleotide
ugaugguaucauguaaccg

SEQ ID NO: 3101991 - RNA, 19 nt, Artificial Sequence
  Description of Artificial Sequence: Synthetic oligonucleotide
uuaaccucagcuucuacuu

SEQ ID NO: 3101992 - RNA, 19 nt, Artificial Sequence
  Description of Artificial Sequence: Synthetic oligonucleotide
ucgguuguugauuucuaug

SEQ ID NO: 3101993 - RNA, 19 nt, Artificial Sequence
  Description of Artificial Sequence: Synthetic oligonucleotide
agucacugacauuuucuuc

SEQ ID NO: 3101994 - RNA, 19 nt, Artificial Sequence
  Description of Artificial Sequence: Synthetic oligonucleotide
aguuauuuuauagcagucu

SEQ ID NO: 3101995 - RNA, 19 nt, Artificial Sequence
  Description of Artificial Sequence: Synthetic oligonucleotide
ugcuacuugggcuuuagua

SEQ ID NO: 3101996 - RNA, 19 nt, Artificial Sequence
  Description of Artificial Sequence: Synthetic oligonucleotide
ugggucuugaguuuucggu

SEQ ID NO: 3101997 - RNA, 19 nt, Artificial Sequence
  Description of Artificial Sequence: Synthetic oligonucleotide
uguuuuguugggucuugag

SEQ ID NO: 3101998 - RNA, 19 nt, Artificial Sequence
  Description of Artificial Sequence: Synthetic oligonucleotide
ucuaugaugguaucaugua

SEQ ID NO: 3101999 - RNA, 19 nt, Artificial Sequence
  Description of Artificial Sequence: Synthetic oligonucleotide
uuuucgguuguugauuucu

SEQ ID NO: 3102000 - RNA, 19 nt, Artificial Sequence
  Description of Artificial Sequence: Synthetic oligonucleotide
aagcacauucauccaguug

SEQ ID NO: 3102001 - RNA, 19 nt, Artificial Sequence
  Description of Artificial Sequence: Synthetic oligonucleotide
aaccguuuaaccucagcuu

SEQ ID NO: 3102002 - RNA, 19 nt, Artificial Sequence
  Description of Artificial Sequence: Synthetic oligonucleotide
uuucuaugaugguaucaug

SEQ ID NO: 3102003 - RNA, 19 nt, Artificial Sequence
  Description of Artificial Sequence: Synthetic oligonucleotide
aagucacugacauuuucuu

SEQ ID NO: 3102004 - RNA, 19 nt, Artificial Sequence
  Description of Artificial Sequence: Synthetic oligonucleotide
aguaauagcagaagcacau

SEQ ID NO: 3102005 - RNA, 19 nt, Artificial Sequence
  Description of Artificial Sequence: Synthetic oligonucleotide
uucuacuuuaccagcuuuc

SEQ ID NO: 3102006 - RNA, 19 nt, Artificial Sequence
  Description of Artificial Sequence: Synthetic oligonucleotide
auuucuaugaugguaucau

SEQ ID NO: 3102007 - RNA, 19 nt, Artificial Sequence
  Description of Artificial Sequence: Synthetic oligonucleotide
gcuuguuuaucauauccag

SEQ ID NO: 3102008 - RNA, 19 nt, Artificial Sequence
  Description of Artificial Sequence: Synthetic oligonucleotide
auagcagaagcacauucau

SEQ ID NO: 3102009 - RNA, 19 nt, Artificial Sequence
  Description of Artificial Sequence: Synthetic oligonucleotide
cucagcuucuacuuuacca

SEQ ID NO: 3102010 - RNA, 19 nt, Artificial Sequence
  Description of Artificial Sequence: Synthetic oligonucleotide
ucauauccaguuuguuuug

SEQ ID NO: 3102011 - RNA, 19 nt, Artificial Sequence
  Description of Artificial Sequence: Synthetic oligonucleotide
uuaucuggagcuguaguaa

SEQ ID NO: 3102012 - RNA, 19 nt, Artificial Sequence
  Description of Artificial Sequence: Synthetic oligonucleotide
ugaguuuucgguuguugau

SEQ ID NO: 3102013 - RNA, 19 nt, Artificial Sequence
  Description of Artificial Sequence: Synthetic oligonucleotide
ucuacuuuaccagcuuucu

SEQ ID NO: 3102014 - RNA, 19 nt, Artificial Sequence
  Description of Artificial Sequence: Synthetic oligonucleotide
uucuucuagcaauuucugu

SEQ ID NO: 3102015 - RNA, 19 nt, Artificial Sequence
  Description of Artificial Sequence: Synthetic oligonucleotide
gaaagucacugacauuuuc

SEQ ID NO: 3102016 - RNA, 19 nt, Artificial Sequence
  Description of Artificial Sequence: Synthetic oligonucleotide
cugacauuuucuucuagca

SEQ ID NO: 3102017 - RNA, 19 nt, Artificial Sequence
  Description of Artificial Sequence: Synthetic oligonucleotide
cagaagcacauucauccag

SEQ ID NO: 3102018 - RNA, 19 nt, Artificial Sequence
  Description of Artificial Sequence: Synthetic oligonucleotide
gucacugacauuuucuucu

SEQ ID NO: 3102019 - RNA, 19 nt, Artificial Sequence
  Description of Artificial Sequence: Synthetic oligonucleotide
uauagcagucuugauugcu

SEQ ID NO: 3102020 - RNA, 19 nt, Artificial Sequence
  Description of Artificial Sequence: Synthetic oligonucleotide
uuucuuuuaucuggagcug

SEQ ID NO: 3102021 - RNA, 19 nt, Artificial Sequence
  Description of Artificial Sequence: Synthetic oligonucleotide
aaccucagcuucuacuuua

SEQ ID NO: 3102022 - RNA, 19 nt, Artificial Sequence
  Description of Artificial Sequence: Synthetic oligonucleotide
aguugcuuguuuaucauau

SEQ ID NO: 3102023 - RNA, 19 nt, Artificial Sequence
  Description of Artificial Sequence: Synthetic oligonucleotide
gauuucuaugaugguauca

SEQ ID NO: 3102024 - RNA, 19 nt, Artificial Sequence
  Description of Artificial Sequence: Synthetic oligonucleotide
ucauccaguugcuuguuua

SEQ ID NO: 3102025 - RNA, 19 nt, Artificial Sequence
  Description of Artificial Sequence: Synthetic oligonucleotide
uuauagcagucuugauugc

SEQ ID NO: 3102026 - RNA, 19 nt, Artificial Sequence
  Description of Artificial Sequence: Synthetic oligonucleotide
gucuugauugcuacuuggg

SEQ ID NO: 3102027 - RNA, 19 nt, Artificial Sequence
  Description of Artificial Sequence: Synthetic oligonucleotide
aguuuucgguuguugauuu

SEQ ID NO: 3102028 - RNA, 19 nt, Artificial Sequence
  Description of Artificial Sequence: Synthetic oligonucleotide
uguugauuucuaugauggu

SEQ ID NO: 3102029 - RNA, 19 nt, Artificial Sequence
  Description of Artificial Sequence: Synthetic oligonucleotide
uucuuuuaucuggagcugu

SEQ ID NO: 3102030 - RNA, 19 nt, Artificial Sequence
  Description of Artificial Sequence: Synthetic oligonucleotide
ucuuuuaucuggagcugua

SEQ ID NO: 3102031 - RNA, 19 nt, Artificial Sequence
  Description of Artificial Sequence: Synthetic oligonucleotide
cuuuuaucuggagcuguag

SEQ ID NO: 3102032 - RNA, 19 nt, Artificial Sequence
  Description of Artificial Sequence: Synthetic oligonucleotide
uuuguugggucuugaguuu

SEQ ID NO: 3102033 - RNA, 19 nt, Artificial Sequence
  Description of Artificial Sequence: Synthetic oligonucleotide
uagcagucuugauugcuac

SEQ ID NO: 3102034 - RNA, 19 nt, Artificial Sequence
  Description of Artificial Sequence: Synthetic oligonucleotide
cagcuucuacuuuaccagc

SEQ ID NO: 3102035 - RNA, 19 nt, Artificial Sequence
  Description of Artificial Sequence: Synthetic oligonucleotide
uagcagaagcacauucauc

SEQ ID NO: 3102036 - RNA, 19 nt, Artificial Sequence
  Description of Artificial Sequence: Synthetic oligonucleotide
ugauuucuaugaugguauc

SEQ ID NO: 3102037 - RNA, 19 nt, Artificial Sequence
  Description of Artificial Sequence: Synthetic oligonucleotide
auuuuauagcagucuugau

SEQ ID NO: 3102038 - RNA, 19 nt, Artificial Sequence
  Description of Artificial Sequence: Synthetic oligonucleotide
cuugaguuuucgguuguug

SEQ ID NO: 3102039 - RNA, 19 nt, Artificial Sequence
  Description of Artificial Sequence: Synthetic oligonucleotide
cuaugaugguaucauguaa

SEQ ID NO: 3102040 - RNA, 19 nt, Artificial Sequence
  Description of Artificial Sequence: Synthetic oligonucleotide
gcuacuugggcuuuaguaa

SEQ ID NO: 3102041 - RNA, 19 nt, Artificial Sequence
  Description of Artificial Sequence: Synthetic oligonucleotide
uuaccagcuuucucagcca

SEQ ID NO: 3102042 - RNA, 19 nt, Artificial Sequence
  Description of Artificial Sequence: Synthetic oligonucleotide
guuuuguugggucuugagu

SEQ ID NO: 3102043 - RNA, 19 nt, Artificial Sequence
  Description of Artificial Sequence: Synthetic oligonucleotide
ggucuugaguuuucgguug

SEQ ID NO: 3102044 - RNA, 19 nt, Artificial Sequence
  Description of Artificial Sequence: Synthetic oligonucleotide
uguaaccguuuaaccucag

SEQ ID NO: 3102045 - RNA, 19 nt, Artificial Sequence
  Description of Artificial Sequence: Synthetic oligonucleotide
uuugaaagucacugacauu

SEQ ID NO: 3102046 - RNA, 19 nt, Artificial Sequence
  Description of Artificial Sequence: Synthetic oligonucleotide
guugggucuugaguuuucg

SEQ ID NO: 3102047 - RNA, 19 nt, Artificial Sequence
  Description of Artificial Sequence: Synthetic oligonucleotide
uaccagcuuucucagccac

SEQ ID NO: 3102048 - RNA, 19 nt, Artificial Sequence
  Description of Artificial Sequence: Synthetic oligonucleotide
agaagcacauucauccagu

SEQ ID NO: 3102049 - RNA, 19 nt, Artificial Sequence
  Description of Artificial Sequence: Synthetic oligonucleotide
cuuuaccagcuuucucagc

SEQ ID NO: 3102050 - RNA, 19 nt, Artificial Sequence
  Description of Artificial Sequence: Synthetic oligonucleotide
uucgguuguugauuucuau

SEQ ID NO: 3102051 - RNA, 19 nt, Artificial Sequence
  Description of Artificial Sequence: Synthetic oligonucleotide
uuucgguuguugauuucua

SEQ ID NO: 3102052 - RNA, 19 nt, Artificial Sequence
  Description of Artificial Sequence: Synthetic oligonucleotide
ucagccacagcaucauauu

SEQ ID NO: 3102053 - RNA, 19 nt, Artificial Sequence
  Description of Artificial Sequence: Synthetic oligonucleotide
ugaaagucacugacauuuu

SEQ ID NO: 3102054 - RNA, 19 nt, Artificial Sequence
  Description of Artificial Sequence: Synthetic oligonucleotide
cuguuucuuuuaucuggag

SEQ ID NO: 3102055 - RNA, 19 nt, Artificial Sequence
  Description of Artificial Sequence: Synthetic oligonucleotide
auccaguugcuuguuuauc

SEQ ID NO: 3102056 - RNA, 19 nt, Artificial Sequence
  Description of Artificial Sequence: Synthetic oligonucleotide
agccacagcaucauauucu

SEQ ID NO: 3102057 - RNA, 19 nt, Artificial Sequence
  Description of Artificial Sequence: Synthetic oligonucleotide
gcuuuaguaauagcagaag

SEQ ID NO: 3102058 - RNA, 19 nt, Artificial Sequence
  Description of Artificial Sequence: Synthetic oligonucleotide
auugcuacuugggcuuuag

SEQ ID NO: 3102059 - RNA, 19 nt, Artificial Sequence
  Description of Artificial Sequence: Synthetic oligonucleotide
cuacuuuaccagcuuucuc

SEQ ID NO: 3102060 - RNA, 19 nt, Artificial Sequence
  Description of Artificial Sequence: Synthetic oligonucleotide
uuaucauauccaguuuguu

SEQ ID NO: 3102061 - RNA, 19 nt, Artificial Sequence
  Description of Artificial Sequence: Synthetic oligonucleotide
auauccaguuuguuuuguu

SEQ ID NO: 3102062 - RNA, 19 nt, Artificial Sequence
  Description of Artificial Sequence: Synthetic oligonucleotide
guaucauguaaccguuuaa

SEQ ID NO: 3102063 - RNA, 19 nt, Artificial Sequence
  Description of Artificial Sequence: Synthetic oligonucleotide
guugcuuguuuaucauauc

SEQ ID NO: 3102064 - RNA, 19 nt, Artificial Sequence
  Description of Artificial Sequence: Synthetic oligonucleotide
cuuguuuaucauauccagu

SEQ ID NO: 3102065 - RNA, 19 nt, Artificial Sequence
  Description of Artificial Sequence: Synthetic oligonucleotide
uacuugggcuuuaguaaua

SEQ ID NO: 3102066 - RNA, 19 nt, Artificial Sequence
  Description of Artificial Sequence: Synthetic oligonucleotide
cagucuugauugcuacuug

SEQ ID NO: 3102067 - RNA, 19 nt, Artificial Sequence
  Description of Artificial Sequence: Synthetic oligonucleotide
uguugggucuugaguuuuc

SEQ ID NO: 3102068 - RNA, 19 nt, Artificial Sequence
  Description of Artificial Sequence: Synthetic oligonucleotide
cacagcaucauauucuuuu

SEQ ID NO: 3102069 - RNA, 19 nt, Artificial Sequence
  Description of Artificial Sequence: Synthetic oligonucleotide
agcagucuugauugcuacu

SEQ ID NO: 3102070 - RNA, 19 nt, Artificial Sequence
  Description of Artificial Sequence: Synthetic oligonucleotide
ucacugacauuuucuucua

SEQ ID NO: 3102071 - RNA, 19 nt, Artificial Sequence
  Description of Artificial Sequence: Synthetic oligonucleotide
uaaccucagcuucuacuuu

SEQ ID NO: 3102072 - RNA, 19 nt, Artificial Sequence
  Description of Artificial Sequence: Synthetic oligonucleotide
cauucauccaguugcuugu

SEQ ID NO: 3102073 - RNA, 19 nt, Artificial Sequence
  Description of Artificial Sequence: Synthetic oligonucleotide
guuuaaccucagcuucuac

SEQ ID NO: 3102074 - RNA, 19 nt, Artificial Sequence
  Description of Artificial Sequence: Synthetic oligonucleotide
gguaucauguaaccguuua

SEQ ID NO: 3102075 - RNA, 19 nt, Artificial Sequence
  Description of Artificial Sequence: Synthetic oligonucleotide
agcuucuacuuuaccagcu

SEQ ID NO: 3102076 - RNA, 19 nt, Artificial Sequence
  Description of Artificial Sequence: Synthetic oligonucleotide
accucagcuucuacuuuac

SEQ ID NO: 3102077 - RNA, 19 nt, Artificial Sequence
  Description of Artificial Sequence: Synthetic oligonucleotide
gggcuuuaguaauagcaga

SEQ ID NO: 3102078 - RNA, 19 nt, Artificial Sequence
  Description of Artificial Sequence: Synthetic oligonucleotide
uuguuuuguugggucuuga

SEQ ID NO: 3102079 - RNA, 19 nt, Artificial Sequence
  Description of Artificial Sequence: Synthetic oligonucleotide
auguaaccguuuaaccuca

SEQ ID NO: 3102080 - RNA, 19 nt, Artificial Sequence
  Description of Artificial Sequence: Synthetic oligonucleotide
uucauccaguugcuuguuu

SEQ ID NO: 3102081 - RNA, 19 nt, Artificial Sequence
  Description of Artificial Sequence: Synthetic oligonucleotide
acauuuucuucuagcaauu

SEQ ID NO: 3102082 - RNA, 19 nt, Artificial Sequence
  Description of Artificial Sequence: Synthetic oligonucleotide
uugcuacuugggcuuuagu

SEQ ID NO: 3102083 - RNA, 19 nt, Artificial Sequence
  Description of Artificial Sequence: Synthetic oligonucleotide
ugguaucauguaaccguuu

SEQ ID NO: 3102084 - RNA, 19 nt, Artificial Sequence
  Description of Artificial Sequence: Synthetic oligonucleotide
auagcagucuugauugcua

SEQ ID NO: 3102085 - RNA, 19 nt, Artificial Sequence
  Description of Artificial Sequence: Synthetic oligonucleotide
augguaucauguaaccguu

SEQ ID NO: 3102086 - RNA, 19 nt, Artificial Sequence
  Description of Artificial Sequence: Synthetic oligonucleotide
guuuucgguuguugauuuc

SEQ ID NO: 3102087 - RNA, 19 nt, Artificial Sequence
  Description of Artificial Sequence: Synthetic oligonucleotide
gcaauuucuguuucuuuua

SEQ ID NO: 3102088 - RNA, 19 nt, Artificial Sequence
  Description of Artificial Sequence: Synthetic oligonucleotide
cuucuagcaauuucuguuu

SEQ ID NO: 3102089 - RNA, 19 nt, Artificial Sequence
  Description of Artificial Sequence: Synthetic oligonucleotide
ggcuuuaguaauagcagaa

SEQ ID NO: 3102090 - RNA, 19 nt, Artificial Sequence
  Description of Artificial Sequence: Synthetic oligonucleotide
cuacuugggcuuuaguaau

SEQ ID NO: 3102091 - RNA, 19 nt, Artificial Sequence
  Description of Artificial Sequence: Synthetic oligonucleotide
uuguugggucuugaguuuu

SEQ ID NO: 3102092 - RNA, 19 nt, Artificial Sequence
  Description of Artificial Sequence: Synthetic oligonucleotide
ccagcuuucucagccacag

SEQ ID NO: 3102093 - RNA, 19 nt, Artificial Sequence
  Description of Artificial Sequence: Synthetic oligonucleotide
cgguuguugauuucuauga

SEQ ID NO: 3102094 - RNA, 19 nt, Artificial Sequence
  Description of Artificial Sequence: Synthetic oligonucleotide
caauuucuguuucuuuuau

SEQ ID NO: 3102095 - RNA, 19 nt, Artificial Sequence
  Description of Artificial Sequence: Synthetic oligonucleotide
gaguuuucgguuguugauu

SEQ ID NO: 3102096 - RNA, 19 nt, Artificial Sequence
  Description of Artificial Sequence: Synthetic oligonucleotide
gaagcacauucauccaguu

SEQ ID NO: 3102097 - RNA, 19 nt, Artificial Sequence
  Description of Artificial Sequence: Synthetic oligonucleotide
caguugcuuguuuaucaua

SEQ ID NO: 3102098 - RNA, 19 nt, Artificial Sequence
  Description of Artificial Sequence: Synthetic oligonucleotide
ugauugcuacuugggcuuu

SEQ ID NO: 3102099 - RNA, 19 nt, Artificial Sequence
  Description of Artificial Sequence: Synthetic oligonucleotide
cuagcaauuucuguuucuu

SEQ ID NO: 3102100 - RNA, 19 nt, Artificial Sequence
  Description of Artificial Sequence: Synthetic oligonucleotide
gguuguugauuucuaugau

SEQ ID NO: 3102101 - RNA, 19 nt, Artificial Sequence
  Description of Artificial Sequence: Synthetic oligonucleotide
gucuugaguuuucgguugu

SEQ ID NO: 3102102 - RNA, 19 nt, Artificial Sequence
  Description of Artificial Sequence: Synthetic oligonucleotide
cuucuacuuuaccagcuuu

SEQ ID NO: 3102103 - RNA, 19 nt, Artificial Sequence
  Description of Artificial Sequence: Synthetic oligonucleotide
cauauccaguuuguuuugu

SEQ ID NO: 3102104 - RNA, 19 nt, Artificial Sequence
  Description of Artificial Sequence: Synthetic oligonucleotide
gggucuugaguuuucgguu

SEQ ID NO: 3102105 - RNA, 19 nt, Artificial Sequence
  Description of Artificial Sequence: Synthetic oligonucleotide
gauugcuacuugggcuuua

SEQ ID NO: 3102106 - RNA, 19 nt, Artificial Sequence
  Description of Artificial Sequence: Synthetic oligonucleotide
guaauagcagaagcacauu

SEQ ID NO: 3102107 - RNA, 19 nt, Artificial Sequence
  Description of Artificial Sequence: Synthetic oligonucleotide
gcuucuacuuuaccagcuu

SEQ ID NO: 3102108 - RNA, 19 nt, Artificial Sequence
  Description of Artificial Sequence: Synthetic oligonucleotide
ccaguugcuuguuuaucau

SEQ ID NO: 3102109 - RNA, 19 nt, Artificial Sequence
  Description of Artificial Sequence: Synthetic oligonucleotide
gcacauucauccaguugcu

SEQ ID NO: 3102110 - RNA, 19 nt, Artificial Sequence
  Description of Artificial Sequence: Synthetic oligonucleotide
ccaguuuguuuuguugggu

SEQ ID NO: 3102111 - RNA, 19 nt, Artificial Sequence
  Description of Artificial Sequence: Synthetic oligonucleotide
cacauucauccaguugcuu

SEQ ID NO: 3102112 - RNA, 19 nt, Artificial Sequence
  Description of Artificial Sequence: Synthetic oligonucleotide
ccacagcaucauauucuuu

SEQ ID NO: 3102113 - RNA, 19 nt, Artificial Sequence
  Description of Artificial Sequence: Synthetic oligonucleotide
uaauauuugcugaagauca

SEQ ID NO: 3102114 - RNA, 19 nt, Artificial Sequence
  Description of Artificial Sequence: Synthetic oligonucleotide
aagaucaguauaugcagcc

SEQ ID NO: 3102115 - RNA, 19 nt, Artificial Sequence
  Description of Artificial Sequence: Synthetic oligonucleotide
uuuucuuugaccaaccgcu

SEQ ID NO: 3102116 - RNA, 19 nt, Artificial Sequence
  Description of Artificial Sequence: Synthetic oligonucleotide
guuuucaccaucuucagcc

SEQ ID NO: 3102117 - RNA, 19 nt, Artificial Sequence
  Description of Artificial Sequence: Synthetic oligonucleotide
ucugggaucaucauccggg

SEQ ID NO: 3102118 - RNA, 19 nt, Artificial Sequence
  Description of Artificial Sequence: Synthetic oligonucleotide
aauggcguaguuuucacca

SEQ ID NO: 3102119 - RNA, 19 nt, Artificial Sequence
  Description of Artificial Sequence: Synthetic oligonucleotide
uucacuuucuaauauuugc

SEQ ID NO: 3102120 - RNA, 19 nt, Artificial Sequence
  Description of Artificial Sequence: Synthetic oligonucleotide
ugaagaucaguauaugcag

SEQ ID NO: 3102121 - RNA, 19 nt, Artificial Sequence
  Description of Artificial Sequence: Synthetic oligonucleotide
aguauaugcagccucuaac

SEQ ID NO: 3102122 - RNA, 19 nt, Artificial Sequence
  Description of Artificial Sequence: Synthetic oligonucleotide
caaucugggaucaucaucc

SEQ ID NO: 3102123 - RNA, 19 nt, Artificial Sequence
  Description of Artificial Sequence: Synthetic oligonucleotide
aucuugaucugccucacgc

SEQ ID NO: 3102124 - RNA, 19 nt, Artificial Sequence
  Description of Artificial Sequence: Synthetic oligonucleotide
ucuuuauuacuccucagcu

SEQ ID NO: 3102125 - RNA, 19 nt, Artificial Sequence
  Description of Artificial Sequence: Synthetic oligonucleotide
uauaugcagccucuaaccg

SEQ ID NO: 3102126 - RNA, 19 nt, Artificial Sequence
  Description of Artificial Sequence: Synthetic oligonucleotide
uuuauuacuccucagcuuu

SEQ ID NO: 3102127 - RNA, 19 nt, Artificial Sequence
  Description of Artificial Sequence: Synthetic oligonucleotide
uucuuuauuacuccucagc

SEQ ID NO: 3102128 - RNA, 19 nt, Artificial Sequence
  Description of Artificial Sequence: Synthetic oligonucleotide
ucagcuuuguuccaagucu

SEQ ID NO: 3102129 - RNA, 19 nt, Artificial Sequence
  Description of Artificial Sequence: Synthetic oligonucleotide
acucuugcaggauuucugc

SEQ ID NO: 3102130 - RNA, 19 nt, Artificial Sequence
  Description of Artificial Sequence: Synthetic oligonucleotide
guauaugcagccucuaacc

SEQ ID NO: 3102131 - RNA, 19 nt, Artificial Sequence
  Description of Artificial Sequence: Synthetic oligonucleotide
uacuccucagcuuuguucc

SEQ ID NO: 3102132 - RNA, 19 nt, Artificial Sequence
  Description of Artificial Sequence: Synthetic oligonucleotide
uucuuaauggcguaguuuu

SEQ ID NO: 3102133 - RNA, 19 nt, Artificial Sequence
  Description of Artificial Sequence: Synthetic oligonucleotide
aguuuucaccaucuucagc

SEQ ID NO: 3102134 - RNA, 19 nt, Artificial Sequence
  Description of Artificial Sequence: Synthetic oligonucleotide
uugaccaaccgcuucacca

SEQ ID NO: 3102135 - RNA, 19 nt, Artificial Sequence
  Description of Artificial Sequence: Synthetic oligonucleotide
ucauccgggacucuugcag

SEQ ID NO: 3102136 - RNA, 19 nt, Artificial Sequence
  Description of Artificial Sequence: Synthetic oligonucleotide
acuuucuaauauuugcuga

SEQ ID NO: 3102137 - RNA, 19 nt, Artificial Sequence
  Description of Artificial Sequence: Synthetic oligonucleotide
ucuuugaccaaccgcuuca

SEQ ID NO: 3102138 - RNA, 19 nt, Artificial Sequence
  Description of Artificial Sequence: Synthetic oligonucleotide
cugaagaucaguauaugca

SEQ ID NO: 3102139 - RNA, 19 nt, Artificial Sequence
  Description of Artificial Sequence: Synthetic oligonucleotide
uugaucuugaucugccuca

SEQ ID NO: 3102140 - RNA, 19 nt, Artificial Sequence
  Description of Artificial Sequence: Synthetic oligonucleotide
ucuugaucugccucacgcg

SEQ ID NO: 3102141 - RNA, 19 nt, Artificial Sequence
  Description of Artificial Sequence: Synthetic oligonucleotide
uauuugcugaagaucagua

SEQ ID NO: 3102142 - RNA, 19 nt, Artificial Sequence
  Description of Artificial Sequence: Synthetic oligonucleotide
uuucucauacaucacuuuu

SEQ ID NO: 3102143 - RNA, 19 nt, Artificial Sequence
  Description of Artificial Sequence: Synthetic oligonucleotide
uuucuaauauuugcugaag

SEQ ID NO: 3102144 - RNA, 19 nt, Artificial Sequence
  Description of Artificial Sequence: Synthetic oligonucleotide
aaucugggaucaucauccg

SEQ ID NO: 3102145 - RNA, 19 nt, Artificial Sequence
  Description of Artificial Sequence: Synthetic oligonucleotide
uaugcagccucuaaccguc

SEQ ID NO: 3102146 - RNA, 19 nt, Artificial Sequence
  Description of Artificial Sequence: Synthetic oligonucleotide
cacuuucuaauauuugcug

SEQ ID NO: 3102147 - RNA, 19 nt, Artificial Sequence
  Description of Artificial Sequence: Synthetic oligonucleotide
ucuuucucauacaucacuu

SEQ ID NO: 3102148 - RNA, 19 nt, Artificial Sequence
  Description of Artificial Sequence: Synthetic oligonucleotide
ucuugcaggauuucugccu

SEQ ID NO: 3102149 - RNA, 19 nt, Artificial Sequence
  Description of Artificial Sequence: Synthetic oligonucleotide
aauauuugcugaagaucag

SEQ ID NO: 3102150 - RNA, 19 nt, Artificial Sequence
  Description of Artificial Sequence: Synthetic oligonucleotide
gaucaguauaugcagccuc

SEQ ID NO: 3102151 - RNA, 19 nt, Artificial Sequence
  Description of Artificial Sequence: Synthetic oligonucleotide
ugaucugccucacgcgagg

SEQ ID NO: 3102152 - RNA, 19 nt, Artificial Sequence
  Description of Artificial Sequence: Synthetic oligonucleotide
gaagaucaguauaugcagc

SEQ ID NO: 3102153 - RNA, 19 nt, Artificial Sequence
  Description of Artificial Sequence: Synthetic oligonucleotide
uggcaaucugggaucauca

SEQ ID NO: 3102154 - RNA, 19 nt, Artificial Sequence
  Description of Artificial Sequence: Synthetic oligonucleotide
cuuugccucuuucucauac

SEQ ID NO: 3102155 - RNA, 19 nt, Artificial Sequence
  Description of Artificial Sequence: Synthetic oligonucleotide
uuaauggcguaguuuucac

SEQ ID NO: 3102156 - RNA, 19 nt, Artificial Sequence
  Description of Artificial Sequence: Synthetic oligonucleotide
auaugcagccucuaaccgu

SEQ ID NO: 3102157 - RNA, 19 nt, Artificial Sequence
  Description of Artificial Sequence: Synthetic oligonucleotide
cuugaucuugaucugccuc

SEQ ID NO: 3102158 - RNA, 19 nt, Artificial Sequence
  Description of Artificial Sequence: Synthetic oligonucleotide
uucugccugcuucuuaaug

SEQ ID NO: 3102159 - RNA, 19 nt, Artificial Sequence
  Description of Artificial Sequence: Synthetic oligonucleotide
uugaucugccucacgcgag

SEQ ID NO: 3102160 - RNA, 19 nt, Artificial Sequence
  Description of Artificial Sequence: Synthetic oligonucleotide
guugcuuugccucuuucuc

SEQ ID NO: 3102161 - RNA, 19 nt, Artificial Sequence
  Description of Artificial Sequence: Synthetic oligonucleotide
uuauuacuccucagcuuug

SEQ ID NO: 3102162 - RNA, 19 nt, Artificial Sequence
  Description of Artificial Sequence: Synthetic oligonucleotide
uaauggcguaguuuucacc

SEQ ID NO: 3102163 - RNA, 19 nt, Artificial Sequence
  Description of Artificial Sequence: Synthetic oligonucleotide
gcugaagaucaguauaugc

SEQ ID NO: 3102164 - RNA, 19 nt, Artificial Sequence
  Description of Artificial Sequence: Synthetic oligonucleotide
ucaucauccgggacucuug

SEQ ID NO: 3102165 - RNA, 19 nt, Artificial Sequence
  Description of Artificial Sequence: Synthetic oligonucleotide
cuuucuaauauuugcugaa

SEQ ID NO: 3102166 - RNA, 19 nt, Artificial Sequence
  Description of Artificial Sequence: Synthetic oligonucleotide
accacgccugucuugaucu

SEQ ID NO: 3102167 - RNA, 19 nt, Artificial Sequence
  Description of Artificial Sequence: Synthetic oligonucleotide
auuugcugaagaucaguau

SEQ ID NO: 3102168 - RNA, 19 nt, Artificial Sequence
  Description of Artificial Sequence: Synthetic oligonucleotide
caggauuucugccugcuuc

SEQ ID NO: 3102169 - RNA, 19 nt, Artificial Sequence
  Description of Artificial Sequence: Synthetic oligonucleotide
uugcuuugccucuuucuca

SEQ ID NO: 3102170 - RNA, 19 nt, Artificial Sequence
  Description of Artificial Sequence: Synthetic oligonucleotide
ugccugcuucuuaauggcg

SEQ ID NO: 3102171 - RNA, 19 nt, Artificial Sequence
  Description of Artificial Sequence: Synthetic oligonucleotide
cuugcaggauuucugccug

SEQ ID NO: 3102172 - RNA, 19 nt, Artificial Sequence
  Description of Artificial Sequence: Synthetic oligonucleotide
ugaccaaccgcuucaccac

SEQ ID NO: 3102173 - RNA, 19 nt, Artificial Sequence
  Description of Artificial Sequence: Synthetic oligonucleotide
aucugggaucaucauccgg

SEQ ID NO: 3102174 - RNA, 19 nt, Artificial Sequence
  Description of Artificial Sequence: Synthetic oligonucleotide
uuugaccaaccgcuucacc

SEQ ID NO: 3102175 - RNA, 19 nt, Artificial Sequence
  Description of Artificial Sequence: Synthetic oligonucleotide
aggauuucugccugcuucu

SEQ ID NO: 3102176 - RNA, 19 nt, Artificial Sequence
  Description of Artificial Sequence: Synthetic oligonucleotide
auauuugcugaagaucagu

SEQ ID NO: 3102177 - RNA, 19 nt, Artificial Sequence
  Description of Artificial Sequence: Synthetic oligonucleotide
uugccucuuucucauacau

SEQ ID NO: 3102178 - RNA, 19 nt, Artificial Sequence
  Description of Artificial Sequence: Synthetic oligonucleotide
gacucuugcaggauuucug

SEQ ID NO: 3102179 - RNA, 19 nt, Artificial Sequence
  Description of Artificial Sequence: Synthetic oligonucleotide
ucuuaauggcguaguuuuc

SEQ ID NO: 3102180 - RNA, 19 nt, Artificial Sequence
  Description of Artificial Sequence: Synthetic oligonucleotide
cauccgggacucuugcagg

SEQ ID NO: 3102181 - RNA, 19 nt, Artificial Sequence
  Description of Artificial Sequence: Synthetic oligonucleotide
uucaccacgccugucuuga

SEQ ID NO: 3102182 - RNA, 19 nt, Artificial Sequence
  Description of Artificial Sequence: Synthetic oligonucleotide
cucagcuuuguuccaaguc

SEQ ID NO: 3102183 - RNA, 19 nt, Artificial Sequence
  Description of Artificial Sequence: Synthetic oligonucleotide
ucucuggcaaucugggauc

SEQ ID NO: 3102184 - RNA, 19 nt, Artificial Sequence
  Description of Artificial Sequence: Synthetic oligonucleotide
cuuaauggcguaguuuuca

SEQ ID NO: 3102185 - RNA, 19 nt, Artificial Sequence
  Description of Artificial Sequence: Synthetic oligonucleotide
gaccaaccgcuucaccacg

SEQ ID NO: 3102186 - RNA, 19 nt, Artificial Sequence
  Description of Artificial Sequence: Synthetic oligonucleotide
aaccgcuucaccacgccug

SEQ ID NO: 3102187 - RNA, 19 nt, Artificial Sequence
  Description of Artificial Sequence: Synthetic oligonucleotide
ucuugaucuugaucugccu

SEQ ID NO: 3102188 - RNA, 19 nt, Artificial Sequence
  Description of Artificial Sequence: Synthetic oligonucleotide
cucuugcaggauuucugcc

SEQ ID NO: 3102189 - RNA, 19 nt, Artificial Sequence
  Description of Artificial Sequence: Synthetic oligonucleotide
ugcuuugccucuuucucau

SEQ ID NO: 3102190 - RNA, 19 nt, Artificial Sequence
  Description of Artificial Sequence: Synthetic oligonucleotide
cugccucacgcgaggaucg

SEQ ID NO: 3102191 - RNA, 19 nt, Artificial Sequence
  Description of Artificial Sequence: Synthetic oligonucleotide
cuugaucugccucacgcga

SEQ ID NO: 3102192 - RNA, 19 nt, Artificial Sequence
  Description of Artificial Sequence: Synthetic oligonucleotide
caucauccgggacucuugc

SEQ ID NO: 3102193 - RNA, 19 nt, Artificial Sequence
  Description of Artificial Sequence: Synthetic oligonucleotide
uccucagcuuuguuccaag

SEQ ID NO: 3102194 - RNA, 19 nt, Artificial Sequence
  Description of Artificial Sequence: Synthetic oligonucleotide
gucuugaucuugaucugcc

SEQ ID NO: 3102195 - RNA, 19 nt, Artificial Sequence
  Description of Artificial Sequence: Synthetic oligonucleotide
aaccgucucuggcaaucug

SEQ ID NO: 3102196 - RNA, 19 nt, Artificial Sequence
  Description of Artificial Sequence: Synthetic oligonucleotide
ugcugaagaucaguauaug

SEQ ID NO: 3102197 - RNA, 19 nt, Artificial Sequence
  Description of Artificial Sequence: Synthetic oligonucleotide
uauuacuccucagcuuugu

SEQ ID NO: 3102198 - RNA, 19 nt, Artificial Sequence
  Description of Artificial Sequence: Synthetic oligonucleotide
accgucucuggcaaucugg

SEQ ID NO: 3102199 - RNA, 19 nt, Artificial Sequence
  Description of Artificial Sequence: Synthetic oligonucleotide
aucaguauaugcagccucu

SEQ ID NO: 3102200 - RNA, 19 nt, Artificial Sequence
  Description of Artificial Sequence: Synthetic oligonucleotide
ucugccucacgcgaggauc

SEQ ID NO: 3102201 - RNA, 19 nt, Artificial Sequence
  Description of Artificial Sequence: Synthetic oligonucleotide
uuucuuugaccaaccgcuu

SEQ ID NO: 3102202 - RNA, 19 nt, Artificial Sequence
  Description of Artificial Sequence: Synthetic oligonucleotide
ugcuucuuaauggcguagu

SEQ ID NO: 3102203 - RNA, 19 nt, Artificial Sequence
  Description of Artificial Sequence: Synthetic oligonucleotide
uggcguaguuuucaccauc

SEQ ID NO: 3102204 - RNA, 19 nt, Artificial Sequence
  Description of Artificial Sequence: Synthetic oligonucleotide
cgaggaucggccauggucc

SEQ ID NO: 3102205 - RNA, 19 nt, Artificial Sequence
  Description of Artificial Sequence: Synthetic oligonucleotide
cuaaccgucucuggcaauc

SEQ ID NO: 3102206 - RNA, 19 nt, Artificial Sequence
  Description of Artificial Sequence: Synthetic oligonucleotide
cugucuugaucuugaucug

SEQ ID NO: 3102207 - RNA, 19 nt, Artificial Sequence
  Description of Artificial Sequence: Synthetic oligonucleotide
agaucaguauaugcagccu

SEQ ID NO: 3102208 - RNA, 19 nt, Artificial Sequence
  Description of Artificial Sequence: Synthetic oligonucleotide
ugccucuuucucauacauc

SEQ ID NO: 3102209 - RNA, 19 nt, Artificial Sequence
  Description of Artificial Sequence: Synthetic oligonucleotide
agccucuaaccgucucugg

SEQ ID NO: 3102210 - RNA, 19 nt, Artificial Sequence
  Description of Artificial Sequence: Synthetic oligonucleotide
gcaaucugggaucaucauc

SEQ ID NO: 3102211 - RNA, 19 nt, Artificial Sequence
  Description of Artificial Sequence: Synthetic oligonucleotide
accaaccgcuucaccacgc

SEQ ID NO: 3102212 - RNA, 19 nt, Artificial Sequence
  Description of Artificial Sequence: Synthetic oligonucleotide
gaggaucggccaugguccc

SEQ ID NO: 3102213 - RNA, 19 nt, Artificial Sequence
  Description of Artificial Sequence: Synthetic oligonucleotide
ugcaggauuucugccugcu

SEQ ID NO: 3102214 - RNA, 19 nt, Artificial Sequence
  Description of Artificial Sequence: Synthetic oligonucleotide
gccucuaaccgucucuggc

SEQ ID NO: 3102215 - RNA, 19 nt, Artificial Sequence
  Description of Artificial Sequence: Synthetic oligonucleotide
uugcaggauuucugccugc

SEQ ID NO: 3102216 - RNA, 19 nt, Artificial Sequence
  Description of Artificial Sequence: Synthetic oligonucleotide
cuucaccacgccugucuug

SEQ ID NO: 3102217 - RNA, 19 nt, Artificial Sequence
  Description of Artificial Sequence: Synthetic oligonucleotide
cuggcaaucugggaucauc

SEQ ID NO: 3102218 - RNA, 19 nt, Artificial Sequence
  Description of Artificial Sequence: Synthetic oligonucleotide
auuacuccucagcuuuguu

SEQ ID NO: 3102219 - RNA, 19 nt, Artificial Sequence
  Description of Artificial Sequence: Synthetic oligonucleotide
auccgggacucuugcagga

SEQ ID NO: 3102220 - RNA, 19 nt, Artificial Sequence
  Description of Artificial Sequence: Synthetic oligonucleotide
cuuugaccaaccgcuucac

SEQ ID NO: 3102221 - RNA, 19 nt, Artificial Sequence
  Description of Artificial Sequence: Synthetic oligonucleotide
gcgaggaucggccaugguc

SEQ ID NO: 3102222 - RNA, 19 nt, Artificial Sequence
  Description of Artificial Sequence: Synthetic oligonucleotide
aucauccgggacucuugca

SEQ ID NO: 3102223 - RNA, 19 nt, Artificial Sequence
  Description of Artificial Sequence: Synthetic oligonucleotide
gggaucaucauccgggacu

SEQ ID NO: 3102224 - RNA, 19 nt, Artificial Sequence
  Description of Artificial Sequence: Synthetic oligonucleotide
cugcuucuuaauggcguag

SEQ ID NO: 3102225 - RNA, 19 nt, Artificial Sequence
  Description of Artificial Sequence: Synthetic oligonucleotide
cuuuauuacuccucagcuu

SEQ ID NO: 3102226 - RNA, 19 nt, Artificial Sequence
  Description of Artificial Sequence: Synthetic oligonucleotide
auggcguaguuuucaccau

SEQ ID NO: 3102227 - RNA, 19 nt, Artificial Sequence
  Description of Artificial Sequence: Synthetic oligonucleotide
uaaccgucucuggcaaucu

SEQ ID NO: 3102228 - RNA, 19 nt, Artificial Sequence
  Description of Artificial Sequence: Synthetic oligonucleotide
aucaucauccgggacucuu

SEQ ID NO: 3102229 - RNA, 19 nt, Artificial Sequence
  Description of Artificial Sequence: Synthetic oligonucleotide
ucuaaccgucucuggcaau

SEQ ID NO: 3102230 - RNA, 19 nt, Artificial Sequence
  Description of Artificial Sequence: Synthetic oligonucleotide
ucacgcgaggaucggccau

SEQ ID NO: 3102231 - RNA, 19 nt, Artificial Sequence
  Description of Artificial Sequence: Synthetic oligonucleotide
ccgucucuggcaaucuggg

SEQ ID NO: 3102232 - RNA, 19 nt, Artificial Sequence
  Description of Artificial Sequence: Synthetic oligonucleotide
ccucacgcgaggaucggcc

SEQ ID NO: 3102233 - RNA, 19 nt, Artificial Sequence
  Description of Artificial Sequence: Synthetic oligonucleotide
cugggaucaucauccggga

SEQ ID NO: 3102234 - RNA, 19 nt, Artificial Sequence
  Description of Artificial Sequence: Synthetic oligonucleotide
caguauaugcagccucuaa

SEQ ID NO: 3102235 - RNA, 19 nt, Artificial Sequence
  Description of Artificial Sequence: Synthetic oligonucleotide
cucuaaccgucucuggcaa

SEQ ID NO: 3102236 - RNA, 19 nt, Artificial Sequence
  Description of Artificial Sequence: Synthetic oligonucleotide
ggaucaucauccgggacuc

SEQ ID NO: 3102237 - RNA, 19 nt, Artificial Sequence
  Description of Artificial Sequence: Synthetic oligonucleotide
caccacgccugucuugauc

SEQ ID NO: 3102238 - RNA, 19 nt, Artificial Sequence
  Description of Artificial Sequence: Synthetic oligonucleotide
cacgccugucuugaucuug

SEQ ID NO: 3102239 - RNA, 19 nt, Artificial Sequence
  Description of Artificial Sequence: Synthetic oligonucleotide
ucuuguugcuuugccucuu

SEQ ID NO: 3102240 - RNA, 19 nt, Artificial Sequence
  Description of Artificial Sequence: Synthetic oligonucleotide
aucugccucacgcgaggau

SEQ ID NO: 3102241 - RNA, 19 nt, Artificial Sequence
  Description of Artificial Sequence: Synthetic oligonucleotide
ugccucacgcgaggaucgg

SEQ ID NO: 3102242 - RNA, 19 nt, Artificial Sequence
  Description of Artificial Sequence: Synthetic oligonucleotide
acgccugucuugaucuuga

SEQ ID NO: 3102243 - RNA, 19 nt, Artificial Sequence
  Description of Artificial Sequence: Synthetic oligonucleotide
ccucuaaccgucucuggca

SEQ ID NO: 3102244 - RNA, 19 nt, Artificial Sequence
  Description of Artificial Sequence: Synthetic oligonucleotide
cuuucucauacaucacuuu

SEQ ID NO: 3102245 - RNA, 19 nt, Artificial Sequence
  Description of Artificial Sequence: Synthetic oligonucleotide
acgcgaggaucggccaugg

SEQ ID NO: 3102246 - RNA, 19 nt, Artificial Sequence
  Description of Artificial Sequence: Synthetic oligonucleotide
cuucuuaauggcguaguuu

SEQ ID NO: 3102247 - RNA, 19 nt, Artificial Sequence
  Description of Artificial Sequence: Synthetic oligonucleotide
cucacgcgaggaucggcca

SEQ ID NO: 3102248 - RNA, 19 nt, Artificial Sequence
  Description of Artificial Sequence: Synthetic oligonucleotide
cacgcgaggaucggccaug

SEQ ID NO: 3102249 - RNA, 19 nt, Artificial Sequence
  Description of Artificial Sequence: Synthetic oligonucleotide
ccucuuucucauacaucac

SEQ ID NO: 3102250 - RNA, 19 nt, Artificial Sequence
  Description of Artificial Sequence: Synthetic oligonucleotide
gaucugccucacgcgagga

SEQ ID NO: 3102251 - RNA, 19 nt, Artificial Sequence
  Description of Artificial Sequence: Synthetic oligonucleotide
gccugucuugaucuugauc

SEQ ID NO: 3102252 - RNA, 19 nt, Artificial Sequence
  Description of Artificial Sequence: Synthetic oligonucleotide
agcuuuguuccaagucuuu

SEQ ID NO: 3102253 - RNA, 19 nt, Artificial Sequence
  Description of Artificial Sequence: Synthetic oligonucleotide
cucuggcaaucugggauca

SEQ ID NO: 3102254 - RNA, 19 nt, Artificial Sequence
  Description of Artificial Sequence: Synthetic oligonucleotide
ccaaccgcuucaccacgcc

SEQ ID NO: 3102255 - RNA, 19 nt, Artificial Sequence
  Description of Artificial Sequence: Synthetic oligonucleotide
uccgggacucuugcaggau

SEQ ID NO: 3102256 - RNA, 19 nt, Artificial Sequence
  Description of Artificial Sequence: Synthetic oligonucleotide
ucuggcaaucugggaucau

SEQ ID NO: 3102257 - RNA, 19 nt, Artificial Sequence
  Description of Artificial Sequence: Synthetic oligonucleotide
cagcuuuguuccaagucuu

SEQ ID NO: 3102258 - RNA, 19 nt, Artificial Sequence
  Description of Artificial Sequence: Synthetic oligonucleotide
ucaccacgccugucuugau

SEQ ID NO: 3102259 - RNA, 19 nt, Artificial Sequence
  Description of Artificial Sequence: Synthetic oligonucleotide
ggcguaguuuucaccaucu

SEQ ID NO: 3102260 - RNA, 19 nt, Artificial Sequence
  Description of Artificial Sequence: Synthetic oligonucleotide
cuccucagcuuuguuccaa

SEQ ID NO: 3102261 - RNA, 19 nt, Artificial Sequence
  Description of Artificial Sequence: Synthetic oligonucleotide
ggcaaucugggaucaucau

SEQ ID NO: 3102262 - RNA, 19 nt, Artificial Sequence
  Description of Artificial Sequence: Synthetic oligonucleotide
caaccgcuucaccacgccu

SEQ ID NO: 3102263 - RNA, 19 nt, Artificial Sequence
  Description of Artificial Sequence: Synthetic oligonucleotide
ggacucuugcaggauuucu

SEQ ID NO: 3102264 - RNA, 19 nt, Artificial Sequence
  Description of Artificial Sequence: Synthetic oligonucleotide
gcuucuuaauggcguaguu

SEQ ID NO: 3102265 - RNA, 19 nt, Artificial Sequence
  Description of Artificial Sequence: Synthetic oligonucleotide
gggacucuugcaggauuuc

SEQ ID NO: 3102266 - RNA, 19 nt, Artificial Sequence
  Description of Artificial Sequence: Synthetic oligonucleotide
cuuguugcuuugccucuuu

SEQ ID NO: 3102267 - RNA, 19 nt, Artificial Sequence
  Description of Artificial Sequence: Synthetic oligonucleotide
gcuuuguuccaagucuuuu

SEQ ID NO: 3102268 - RNA, 19 nt, Artificial Sequence
  Description of Artificial Sequence: Synthetic oligonucleotide
gaucaucauccgggacucu

SEQ ID NO: 3102269 - RNA, 19 nt, Artificial Sequence
  Description of Artificial Sequence: Synthetic oligonucleotide
gccucacgcgaggaucggc

SEQ ID NO: 3102270 - RNA, 19 nt, Artificial Sequence
  Description of Artificial Sequence: Synthetic oligonucleotide
gcuucaccacgccugucuu

SEQ ID NO: 3102271 - RNA, 19 nt, Artificial Sequence
  Description of Artificial Sequence: Synthetic oligonucleotide
gcuuugccucuuucucaua

SEQ ID NO: 3102272 - RNA, 19 nt, Artificial Sequence
  Description of Artificial Sequence: Synthetic oligonucleotide
ccucagcuuuguuccaagu

SEQ ID NO: 3102273 - RNA, 19 nt, Artificial Sequence
  Description of Artificial Sequence: Synthetic oligonucleotide
cgucucuggcaaucuggga

SEQ ID NO: 3102274 - RNA, 19 nt, Artificial Sequence
  Description of Artificial Sequence: Synthetic oligonucleotide
cgcuucaccacgccugucu

SEQ ID NO: 3102275 - RNA, 19 nt, Artificial Sequence
  Description of Artificial Sequence: Synthetic oligonucleotide
gcaggauuucugccugcuu

SEQ ID NO: 3102276 - RNA, 19 nt, Artificial Sequence
  Description of Artificial Sequence: Synthetic oligonucleotide
gcguaguuuucaccaucuu

SEQ ID NO: 3102277 - RNA, 19 nt, Artificial Sequence
  Description of Artificial Sequence: Synthetic oligonucleotide
caccaucuucagccuucau

SEQ ID NO: 3102278 - RNA, 19 nt, Artificial Sequence
  Description of Artificial Sequence: Synthetic oligonucleotide
cgggacucuugcaggauuu

SEQ ID NO: 3102279 - RNA, 19 nt, Artificial Sequence
  Description of Artificial Sequence: Synthetic oligonucleotide
ccgggacucuugcaggauu

SEQ ID NO: 3102280 - RNA, 19 nt, Artificial Sequence
  Description of Artificial Sequence: Synthetic oligonucleotide
ccgcuucaccacgccuguc

SEQ ID NO: 3102281 - RNA, 19 nt, Artificial Sequence
  Description of Artificial Sequence: Synthetic oligonucleotide
ccacgccugucuugaucuu

SEQ ID NO: 3102282 - RNA, 19 nt, Artificial Sequence
  Description of Artificial Sequence: Synthetic oligonucleotide
cgccugucuugaucuugau

SEQ ID NO: 3102283 - RNA, 19 nt, Artificial Sequence
  Description of Artificial Sequence: Synthetic oligonucleotide
cgcgaggaucggccauggu

SEQ ID NO: 3102284 - RNA, 19 nt, Artificial Sequence
  Description of Artificial Sequence: Synthetic oligonucleotide
aauacuaugaaccauguug

SEQ ID NO: 3102285 - RNA, 19 nt, Artificial Sequence
  Description of Artificial Sequence: Synthetic oligonucleotide
ugugccaucaacaaggugc

SEQ ID NO: 3102286 - RNA, 19 nt, Artificial Sequence
  Description of Artificial Sequence: Synthetic oligonucleotide
aaucugaugucucugucgc

SEQ ID NO: 3102287 - RNA, 19 nt, Artificial Sequence
  Description of Artificial Sequence: Synthetic oligonucleotide
uaaaaggugugcaccaccg

SEQ ID NO: 3102288 - RNA, 19 nt, Artificial Sequence
  Description of Artificial Sequence: Synthetic oligonucleotide
aacaaggugcucuguagac

SEQ ID NO: 3102289 - RNA, 19 nt, Artificial Sequence
  Description of Artificial Sequence: Synthetic oligonucleotide
agauuaaaaggugugcacc

SEQ ID NO: 3102290 - RNA, 19 nt, Artificial Sequence
  Description of Artificial Sequence: Synthetic oligonucleotide
aaaggugugcaccaccguc

SEQ ID NO: 3102291 - RNA, 19 nt, Artificial Sequence
  Description of Artificial Sequence: Synthetic oligonucleotide
caaggagaggccaugaagg

SEQ ID NO: 3102292 - RNA, 19 nt, Artificial Sequence
  Description of Artificial Sequence: Synthetic oligonucleotide
gaaucugaugucucugucg

SEQ ID NO: 3102293 - RNA, 19 nt, Artificial Sequence
  Description of Artificial Sequence: Synthetic oligonucleotide
cuaugaaccauguugucug

SEQ ID NO: 3102294 - RNA, 19 nt, Artificial Sequence
  Description of Artificial Sequence: Synthetic oligonucleotide
guggcuuuugaauucagag

SEQ ID NO: 3102295 - RNA, 19 nt, Artificial Sequence
  Description of Artificial Sequence: Synthetic oligonucleotide
cucaauacuaugaaccaug

SEQ ID NO: 3102296 - RNA, 19 nt, Artificial Sequence
  Description of Artificial Sequence: Synthetic oligonucleotide
agcccuggagauuaaaagg

SEQ ID NO: 3102297 - RNA, 19 nt, Artificial Sequence
  Description of Artificial Sequence: Synthetic oligonucleotide
aauccgaggacuucugacu

SEQ ID NO: 3102298 - RNA, 19 nt, Artificial Sequence
  Description of Artificial Sequence: Synthetic oligonucleotide
ugacuccagaaucugaugu

SEQ ID NO: 3102299 - RNA, 19 nt, Artificial Sequence
  Description of Artificial Sequence: Synthetic oligonucleotide
ucaacaaggugcucuguag

SEQ ID NO: 3102300 - RNA, 19 nt, Artificial Sequence
  Description of Artificial Sequence: Synthetic oligonucleotide
agcugugccaucaacaagg

SEQ ID NO: 3102301 - RNA, 19 nt, Artificial Sequence
  Description of Artificial Sequence: Synthetic oligonucleotide
gauuaaaaggugugcacca

SEQ ID NO: 3102302 - RNA, 19 nt, Artificial Sequence
  Description of Artificial Sequence: Synthetic oligonucleotide
gagauuaaaaggugugcac

SEQ ID NO: 3102303 - RNA, 19 nt, Artificial Sequence
  Description of Artificial Sequence: Synthetic oligonucleotide
ccacucaauacuaugaacc

SEQ ID NO: 3102304 - RNA, 19 nt, Artificial Sequence
  Description of Artificial Sequence: Synthetic oligonucleotide
ucaauacuaugaaccaugu

SEQ ID NO: 3102305 - RNA, 19 nt, Artificial Sequence
  Description of Artificial Sequence: Synthetic oligonucleotide
accgucacccacucaauac

SEQ ID NO: 3102306 - RNA, 19 nt, Artificial Sequence
  Description of Artificial Sequence: Synthetic oligonucleotide
agaaucugaugucucuguc

SEQ ID NO: 3102307 - RNA, 19 nt, Artificial Sequence
  Description of Artificial Sequence: Synthetic oligonucleotide
ucugacuccagaaucugau

SEQ ID NO: 3102308 - RNA, 19 nt, Artificial Sequence
  Description of Artificial Sequence: Synthetic oligonucleotide
uggcuuuugaauucagaga

SEQ ID NO: 3102309 - RNA, 19 nt, Artificial Sequence
  Description of Artificial Sequence: Synthetic oligonucleotide
gaccuuucccgucuggucc

SEQ ID NO: 3102310 - RNA, 19 nt, Artificial Sequence
  Description of Artificial Sequence: Synthetic oligonucleotide
uguucuggcugcucgagcu

SEQ ID NO: 3102311 - RNA, 19 nt, Artificial Sequence
  Description of Artificial Sequence: Synthetic oligonucleotide
auacuaugaaccauguugu

SEQ ID NO: 3102312 - RNA, 19 nt, Artificial Sequence
  Description of Artificial Sequence: Synthetic oligonucleotide
cacauguucuggcugcucg

SEQ ID NO: 3102313 - RNA, 19 nt, Artificial Sequence
  Description of Artificial Sequence: Synthetic oligonucleotide
cucgagcugaccuuucccg

SEQ ID NO: 3102314 - RNA, 19 nt, Artificial Sequence
  Description of Artificial Sequence: Synthetic oligonucleotide
acaaggugcucuguagacc

SEQ ID NO: 3102315 - RNA, 19 nt, Artificial Sequence
  Description of Artificial Sequence: Synthetic oligonucleotide
cuggagauuaaaaggugug

SEQ ID NO: 3102316 - RNA, 19 nt, Artificial Sequence
  Description of Artificial Sequence: Synthetic oligonucleotide
uggagauuaaaaggugugc

SEQ ID NO: 3102317 - RNA, 19 nt, Artificial Sequence
  Description of Artificial Sequence: Synthetic oligonucleotide
ucucugucgcacauguucu

SEQ ID NO: 3102318 - RNA, 19 nt, Artificial Sequence
  Description of Artificial Sequence: Synthetic oligonucleotide
auccgaggacuucugacuc

SEQ ID NO: 3102319 - RNA, 19 nt, Artificial Sequence
  Description of Artificial Sequence: Synthetic oligonucleotide
ucugaugucucugucgcac

SEQ ID NO: 3102320 - RNA, 19 nt, Artificial Sequence
  Description of Artificial Sequence: Synthetic oligonucleotide
acuaugaaccauguugucu

SEQ ID NO: 3102321 - RNA, 19 nt, Artificial Sequence
  Description of Artificial Sequence: Synthetic oligonucleotide
gucucugucgcacauguuc

SEQ ID NO: 3102322 - RNA, 19 nt, Artificial Sequence
  Description of Artificial Sequence: Synthetic oligonucleotide
ugcuguucccaauccgagg

SEQ ID NO: 3102323 - RNA, 19 nt, Artificial Sequence
  Description of Artificial Sequence: Synthetic oligonucleotide
ucugucgcacauguucugg

SEQ ID NO: 3102324 - RNA, 19 nt, Artificial Sequence
  Description of Artificial Sequence: Synthetic oligonucleotide
ucacccacucaauacuaug

SEQ ID NO: 3102325 - RNA, 19 nt, Artificial Sequence
  Description of Artificial Sequence: Synthetic oligonucleotide
uccagaaucugaugucucu

SEQ ID NO: 3102326 - RNA, 19 nt, Artificial Sequence
  Description of Artificial Sequence: Synthetic oligonucleotide
accuuucccgucugguccc

SEQ ID NO: 3102327 - RNA, 19 nt, Artificial Sequence
  Description of Artificial Sequence: Synthetic oligonucleotide
auguucuggcugcucgagc

SEQ ID NO: 3102328 - RNA, 19 nt, Artificial Sequence
  Description of Artificial Sequence: Synthetic oligonucleotide
caauccgaggacuucugac

SEQ ID NO: 3102329 - RNA, 19 nt, Artificial Sequence
  Description of Artificial Sequence: Synthetic oligonucleotide
aggacuucugacuccagaa

SEQ ID NO: 3102330 - RNA, 19 nt, Artificial Sequence
  Description of Artificial Sequence: Synthetic oligonucleotide
accaccgucacccacucaa

SEQ ID NO: 3102331 - RNA, 19 nt, Artificial Sequence
  Description of Artificial Sequence: Synthetic oligonucleotide
caaggugcucuguagacca

SEQ ID NO: 3102332 - RNA, 19 nt, Artificial Sequence
  Description of Artificial Sequence: Synthetic oligonucleotide
ucgcacauguucuggcugc

SEQ ID NO: 3102333 - RNA, 19 nt, Artificial Sequence
  Description of Artificial Sequence: Synthetic oligonucleotide
cuaccaguguggcugcccg

SEQ ID NO: 3102334 - RNA, 19 nt, Artificial Sequence
  Description of Artificial Sequence: Synthetic oligonucleotide
uucugacuccagaaucuga

SEQ ID NO: 3102335 - RNA, 19 nt, Artificial Sequence
  Description of Artificial Sequence: Synthetic oligonucleotide
cacucaauacuaugaacca

SEQ ID NO: 3102336 - RNA, 19 nt, Artificial Sequence
  Description of Artificial Sequence: Synthetic oligonucleotide
accaguguggcugcccgcc

SEQ ID NO: 3102337 - RNA, 19 nt, Artificial Sequence
  Description of Artificial Sequence: Synthetic oligonucleotide
accaggguggcuuuugaau

SEQ ID NO: 3102338 - RNA, 19 nt, Artificial Sequence
  Description of Artificial Sequence: Synthetic oligonucleotide
ugcaccaccgucacccacu

SEQ ID NO: 3102339 - RNA, 19 nt, Artificial Sequence
  Description of Artificial Sequence: Synthetic oligonucleotide
uaugaaccauguugucuga

SEQ ID NO: 3102340 - RNA, 19 nt, Artificial Sequence
  Description of Artificial Sequence: Synthetic oligonucleotide
gacuccagaaucugauguc

SEQ ID NO: 3102341 - RNA, 19 nt, Artificial Sequence
  Description of Artificial Sequence: Synthetic oligonucleotide
aaggugugcaccaccguca

SEQ ID NO: 3102342 - RNA, 19 nt, Artificial Sequence
  Description of Artificial Sequence: Synthetic oligonucleotide
aggccaugaaggcagugcu

SEQ ID NO: 3102343 - RNA, 19 nt, Artificial Sequence
  Description of Artificial Sequence: Synthetic oligonucleotide
aucaacaaggugcucugua

SEQ ID NO: 3102344 - RNA, 19 nt, Artificial Sequence
  Description of Artificial Sequence: Synthetic oligonucleotide
acuccagaaucugaugucu

SEQ ID NO: 3102345 - RNA, 19 nt, Artificial Sequence
  Description of Artificial Sequence: Synthetic oligonucleotide
ucucccuagcccuggagau

SEQ ID NO: 3102346 - RNA, 19 nt, Artificial Sequence
  Description of Artificial Sequence: Synthetic oligonucleotide
ugucgcacauguucuggcu

SEQ ID NO: 3102347 - RNA, 19 nt, Artificial Sequence
  Description of Artificial Sequence: Synthetic oligonucleotide
ggagauuaaaaggugugca

SEQ ID NO: 3102348 - RNA, 19 nt, Artificial Sequence
  Description of Artificial Sequence: Synthetic oligonucleotide
uguucccaauccgaggacu

SEQ ID NO: 3102349 - RNA, 19 nt, Artificial Sequence
  Description of Artificial Sequence: Synthetic oligonucleotide
uacuaugaaccauguuguc

SEQ ID NO: 3102350 - RNA, 19 nt, Artificial Sequence
  Description of Artificial Sequence: Synthetic oligonucleotide
agugcuguucccaauccga

SEQ ID NO: 3102351 - RNA, 19 nt, Artificial Sequence
  Description of Artificial Sequence: Synthetic oligonucleotide
ugcucgagcugaccuuucc

SEQ ID NO: 3102352 - RNA, 19 nt, Artificial Sequence
  Description of Artificial Sequence: Synthetic oligonucleotide
ugaugucucugucgcacau

SEQ ID NO: 3102353 - RNA, 19 nt, Artificial Sequence
  Description of Artificial Sequence: Synthetic oligonucleotide
uggcugcucgagcugaccu

SEQ ID NO: 3102354 - RNA, 19 nt, Artificial Sequence
  Description of Artificial Sequence: Synthetic oligonucleotide
gaggacuucugacuccaga

SEQ ID NO: 3102355 - RNA, 19 nt, Artificial Sequence
  Description of Artificial Sequence: Synthetic oligonucleotide
cugucgcacauguucuggc

SEQ ID NO: 3102356 - RNA, 19 nt, Artificial Sequence
  Description of Artificial Sequence: Synthetic oligonucleotide
ugaccuuucccgucugguc

SEQ ID NO: 3102357 - RNA, 19 nt, Artificial Sequence
  Description of Artificial Sequence: Synthetic oligonucleotide
cugacuccagaaucugaug

SEQ ID NO: 3102358 - RNA, 19 nt, Artificial Sequence
  Description of Artificial Sequence: Synthetic oligonucleotide
ugucucccuagcccuggag

SEQ ID NO: 3102359 - RNA, 19 nt, Artificial Sequence
  Description of Artificial Sequence: Synthetic oligonucleotide
gucgcacauguucuggcug

SEQ ID NO: 3102360 - RNA, 19 nt, Artificial Sequence
  Description of Artificial Sequence: Synthetic oligonucleotide
acccacucaauacuaugaa

SEQ ID NO: 3102361 - RNA, 19 nt, Artificial Sequence
  Description of Artificial Sequence: Synthetic oligonucleotide
uccgaggacuucugacucc

SEQ ID NO: 3102362 - RNA, 19 nt, Artificial Sequence
  Description of Artificial Sequence: Synthetic oligonucleotide
cagugcuguucccaauccg

SEQ ID NO: 3102363 - RNA, 19 nt, Artificial Sequence
  Description of Artificial Sequence: Synthetic oligonucleotide
ucgagcugaccuuucccgu

SEQ ID NO: 3102364 - RNA, 19 nt, Artificial Sequence
  Description of Artificial Sequence: Synthetic oligonucleotide
cacccacucaauacuauga

SEQ ID NO: 3102365 - RNA, 19 nt, Artificial Sequence
  Description of Artificial Sequence: Synthetic oligonucleotide
uucccgucuggucccagcu

SEQ ID NO: 3102366 - RNA, 19 nt, Artificial Sequence
  Description of Artificial Sequence: Synthetic oligonucleotide
acauguucuggcugcucga

SEQ ID NO: 3102367 - RNA, 19 nt, Artificial Sequence
  Description of Artificial Sequence: Synthetic oligonucleotide
ccagcuaccaguguggcug

SEQ ID NO: 3102368 - RNA, 19 nt, Artificial Sequence
  Description of Artificial Sequence: Synthetic oligonucleotide
ccaaggagaggccaugaag

SEQ ID NO: 3102369 - RNA, 19 nt, Artificial Sequence
  Description of Artificial Sequence: Synthetic oligonucleotide
uggcugcccgccaagggac

SEQ ID NO: 3102370 - RNA, 19 nt, Artificial Sequence
  Description of Artificial Sequence: Synthetic oligonucleotide
acucaauacuaugaaccau

SEQ ID NO: 3102371 - RNA, 19 nt, Artificial Sequence
  Description of Artificial Sequence: Synthetic oligonucleotide
ggucccagcuaccagugug

SEQ ID NO: 3102372 - RNA, 19 nt, Artificial Sequence
  Description of Artificial Sequence: Synthetic oligonucleotide
caggguggcuuuugaauuc

SEQ ID NO: 3102373 - RNA, 19 nt, Artificial Sequence
  Description of Artificial Sequence: Synthetic oligonucleotide
gcuguucccaauccgagga

SEQ ID NO: 3102374 - RNA, 19 nt, Artificial Sequence
  Description of Artificial Sequence: Synthetic oligonucleotide
caacaaggugcucuguaga

SEQ ID NO: 3102375 - RNA, 19 nt, Artificial Sequence
  Description of Artificial Sequence: Synthetic oligonucleotide
ucccaauccgaggacuucu

SEQ ID NO: 3102376 - RNA, 19 nt, Artificial Sequence
  Description of Artificial Sequence: Synthetic oligonucleotide
uuucccgucuggucccagc

SEQ ID NO: 3102377 - RNA, 19 nt, Artificial Sequence
  Description of Artificial Sequence: Synthetic oligonucleotide
aggugcucuguagaccagg

SEQ ID NO: 3102378 - RNA, 19 nt, Artificial Sequence
  Description of Artificial Sequence: Synthetic oligonucleotide
aguguggcugcccgccaag

SEQ ID NO: 3102379 - RNA, 19 nt, Artificial Sequence
  Description of Artificial Sequence: Synthetic oligonucleotide
gaugucucugucgcacaug

SEQ ID NO: 3102380 - RNA, 19 nt, Artificial Sequence
  Description of Artificial Sequence: Synthetic oligonucleotide
gaaggcagugcuguuccca

SEQ ID NO: 3102381 - RNA, 19 nt, Artificial Sequence
  Description of Artificial Sequence: Synthetic oligonucleotide
cauguucuggcugcucgag

SEQ ID NO: 3102382 - RNA, 19 nt, Artificial Sequence
  Description of Artificial Sequence: Synthetic oligonucleotide
cuagcccuggagauuaaaa

SEQ ID NO: 3102383 - RNA, 19 nt, Artificial Sequence
  Description of Artificial Sequence: Synthetic oligonucleotide
cuccagaaucugaugucuc

SEQ ID NO: 3102384 - RNA, 19 nt, Artificial Sequence
  Description of Artificial Sequence: Synthetic oligonucleotide
cuggucccagcuaccagug

SEQ ID NO: 3102385 - RNA, 19 nt, Artificial Sequence
  Description of Artificial Sequence: Synthetic oligonucleotide
ugaaggcagugcuguuccc

SEQ ID NO: 3102386 - RNA, 19 nt, Artificial Sequence
  Description of Artificial Sequence: Synthetic oligonucleotide
gucucccuagcccuggaga

SEQ ID NO: 3102387 - RNA, 19 nt, Artificial Sequence
  Description of Artificial Sequence: Synthetic oligonucleotide
cagcugugccaucaacaag

SEQ ID NO: 3102388 - RNA, 19 nt, Artificial Sequence
  Description of Artificial Sequence: Synthetic oligonucleotide
ucccuagcccuggagauua

SEQ ID NO: 3102389 - RNA, 19 nt, Artificial Sequence
  Description of Artificial Sequence: Synthetic oligonucleotide
gugcuguucccaauccgag

SEQ ID NO: 3102390 - RNA, 19 nt, Artificial Sequence
  Description of Artificial Sequence: Synthetic oligonucleotide
aagggaccagcugugccau

SEQ ID NO: 3102391 - RNA, 19 nt, Artificial Sequence
  Description of Artificial Sequence: Synthetic oligonucleotide
cucugucgcacauguucug

SEQ ID NO: 3102392 - RNA, 19 nt, Artificial Sequence
  Description of Artificial Sequence: Synthetic oligonucleotide
agaccaggguggcuuuuga

SEQ ID NO: 3102393 - RNA, 19 nt, Artificial Sequence
  Description of Artificial Sequence: Synthetic oligonucleotide
guggcugcccgccaaggga

SEQ ID NO: 3102394 - RNA, 19 nt, Artificial Sequence
  Description of Artificial Sequence: Synthetic oligonucleotide
aucugaugucucugucgca

SEQ ID NO: 3102395 - RNA, 19 nt, Artificial Sequence
  Description of Artificial Sequence: Synthetic oligonucleotide
gucuggucccagcuaccag

SEQ ID NO: 3102396 - RNA, 19 nt, Artificial Sequence
  Description of Artificial Sequence: Synthetic oligonucleotide
cccacucaauacuaugaac

SEQ ID NO: 3102397 - RNA, 19 nt, Artificial Sequence
  Description of Artificial Sequence: Synthetic oligonucleotide
ugugcaccaccgucaccca

SEQ ID NO: 3102398 - RNA, 19 nt, Artificial Sequence
  Description of Artificial Sequence: Synthetic oligonucleotide
ucuggcugcucgagcugac

SEQ ID NO: 3102399 - RNA, 19 nt, Artificial Sequence
  Description of Artificial Sequence: Synthetic oligonucleotide
ccaucaacaaggugcucug

SEQ ID NO: 3102400 - RNA, 19 nt, Artificial Sequence
  Description of Artificial Sequence: Synthetic oligonucleotide
ggcagugcuguucccaauc

SEQ ID NO: 3102401 - RNA, 19 nt, Artificial Sequence
  Description of Artificial Sequence: Synthetic oligonucleotide
cuguucccaauccgaggac

SEQ ID NO: 3102402 - RNA, 19 nt, Artificial Sequence
  Description of Artificial Sequence: Synthetic oligonucleotide
aaggugcucuguagaccag

SEQ ID NO: 3102403 - RNA, 19 nt, Artificial Sequence
  Description of Artificial Sequence: Synthetic oligonucleotide
uaccaguguggcugcccgc

SEQ ID NO: 3102404 - RNA, 19 nt, Artificial Sequence
  Description of Artificial Sequence: Synthetic oligonucleotide
aggguggcuuuugaauuca

SEQ ID NO: 3102405 - RNA, 19 nt, Artificial Sequence
  Description of Artificial Sequence: Synthetic oligonucleotide
cugugccaucaacaaggug

SEQ ID NO: 3102406 - RNA, 19 nt, Artificial Sequence
  Description of Artificial Sequence: Synthetic oligonucleotide
cccuggagauuaaaaggug

SEQ ID NO: 3102407 - RNA, 19 nt, Artificial Sequence
  Description of Artificial Sequence: Synthetic oligonucleotide
cagaaucugaugucucugu

SEQ ID NO: 3102408 - RNA, 19 nt, Artificial Sequence
  Description of Artificial Sequence: Synthetic oligonucleotide
cagcuaccaguguggcugc

SEQ ID NO: 3102409 - RNA, 19 nt, Artificial Sequence
  Description of Artificial Sequence: Synthetic oligonucleotide
uucccaauccgaggacuuc

SEQ ID NO: 3102410 - RNA, 19 nt, Artificial Sequence
  Description of Artificial Sequence: Synthetic oligonucleotide
gcucgagcugaccuuuccc

SEQ ID NO: 3102411 - RNA, 19 nt, Artificial Sequence
  Description of Artificial Sequence: Synthetic oligonucleotide
gaccaggguggcuuuugaa

SEQ ID NO: 3102412 - RNA, 19 nt, Artificial Sequence
  Description of Artificial Sequence: Synthetic oligonucleotide
ccaagggaccagcugugcc

SEQ ID NO: 3102413 - RNA, 19 nt, Artificial Sequence
  Description of Artificial Sequence: Synthetic oligonucleotide
uggucccagcuaccagugu

SEQ ID NO: 3102414 - RNA, 19 nt, Artificial Sequence
  Description of Artificial Sequence: Synthetic oligonucleotide
agcugaccuuucccgucug

SEQ ID NO: 3102415 - RNA, 19 nt, Artificial Sequence
  Description of Artificial Sequence: Synthetic oligonucleotide
agcuaccaguguggcugcc

SEQ ID NO: 3102416 - RNA, 19 nt, Artificial Sequence
  Description of Artificial Sequence: Synthetic oligonucleotide
gagcugaccuuucccgucu

SEQ ID NO: 3102417 - RNA, 19 nt, Artificial Sequence
  Description of Artificial Sequence: Synthetic oligonucleotide
gcugaccuuucccgucugg

SEQ ID NO: 3102418 - RNA, 19 nt, Artificial Sequence
  Description of Artificial Sequence: Synthetic oligonucleotide
guguggcugcccgccaagg

SEQ ID NO: 3102419 - RNA, 19 nt, Artificial Sequence
  Description of Artificial Sequence: Synthetic oligonucleotide
gguggcuuuugaauucaga

SEQ ID NO: 3102420 - RNA, 19 nt, Artificial Sequence
  Description of Artificial Sequence: Synthetic oligonucleotide
ucccgucuggucccagcua

SEQ ID NO: 3102421 - RNA, 19 nt, Artificial Sequence
  Description of Artificial Sequence: Synthetic oligonucleotide
cccgucuggucccagcuac

SEQ ID NO: 3102422 - RNA, 19 nt, Artificial Sequence
  Description of Artificial Sequence: Synthetic oligonucleotide
cuggcugcucgagcugacc

SEQ ID NO: 3102423 - RNA, 19 nt, Artificial Sequence
  Description of Artificial Sequence: Synthetic oligonucleotide
gccaucaacaaggugcucu

SEQ ID NO: 3102424 - RNA, 19 nt, Artificial Sequence
  Description of Artificial Sequence: Synthetic oligonucleotide
ccuggagauuaaaaggugu

SEQ ID NO: 3102425 - RNA, 19 nt, Artificial Sequence
  Description of Artificial Sequence: Synthetic oligonucleotide
agggaccagcugugccauc

SEQ ID NO: 3102426 - RNA, 19 nt, Artificial Sequence
  Description of Artificial Sequence: Synthetic oligonucleotide
ugcccgccaagggaccagc

SEQ ID NO: 3102427 - RNA, 19 nt, Artificial Sequence
  Description of Artificial Sequence: Synthetic oligonucleotide
gugccaucaacaaggugcu

SEQ ID NO: 3102428 - RNA, 19 nt, Artificial Sequence
  Description of Artificial Sequence: Synthetic oligonucleotide
gugcaccaccgucacccac

SEQ ID NO: 3102429 - RNA, 19 nt, Artificial Sequence
  Description of Artificial Sequence: Synthetic oligonucleotide
gggaccagcugugccauca

SEQ ID NO: 3102430 - RNA, 19 nt, Artificial Sequence
  Description of Artificial Sequence: Synthetic oligonucleotide
gcccuggagauuaaaaggu

SEQ ID NO: 3102431 - RNA, 19 nt, Artificial Sequence
  Description of Artificial Sequence: Synthetic oligonucleotide
gcuaccaguguggcugccc

SEQ ID NO: 3102432 - RNA, 19 nt, Artificial Sequence
  Description of Artificial Sequence: Synthetic oligonucleotide
gccaugaaggcagugcugu

SEQ ID NO: 3102433 - RNA, 19 nt, Artificial Sequence
  Description of Artificial Sequence: Synthetic oligonucleotide
cugcucgagcugaccuuuc

SEQ ID NO: 3102434 - RNA, 19 nt, Artificial Sequence
  Description of Artificial Sequence: Synthetic oligonucleotide
cccaauccgaggacuucug

SEQ ID NO: 3102435 - RNA, 19 nt, Artificial Sequence
  Description of Artificial Sequence: Synthetic oligonucleotide
ggccaugaaggcagugcug

SEQ ID NO: 3102436 - RNA, 19 nt, Artificial Sequence
  Description of Artificial Sequence: Synthetic oligonucleotide
ggacuucugacuccagaau

SEQ ID NO: 3102437 - RNA, 19 nt, Artificial Sequence
  Description of Artificial Sequence: Synthetic oligonucleotide
agggccaaggagaggccau

SEQ ID NO: 3102438 - RNA, 19 nt, Artificial Sequence
  Description of Artificial Sequence: Synthetic oligonucleotide
cuuucccgucuggucccag

SEQ ID NO: 3102439 - RNA, 19 nt, Artificial Sequence
  Description of Artificial Sequence: Synthetic oligonucleotide
caccgucacccacucaaua

SEQ ID NO: 3102440 - RNA, 19 nt, Artificial Sequence
  Description of Artificial Sequence: Synthetic oligonucleotide
cugaccuuucccgucuggu

SEQ ID NO: 3102441 - RNA, 19 nt, Artificial Sequence
  Description of Artificial Sequence: Synthetic oligonucleotide
ugccaucaacaaggugcuc

SEQ ID NO: 3102442 - RNA, 19 nt, Artificial Sequence
  Description of Artificial Sequence: Synthetic oligonucleotide
ggguggcuuuugaauucag

SEQ ID NO: 3102443 - RNA, 19 nt, Artificial Sequence
  Description of Artificial Sequence: Synthetic oligonucleotide
cgagcugaccuuucccguc

SEQ ID NO: 3102444 - RNA, 19 nt, Artificial Sequence
  Description of Artificial Sequence: Synthetic oligonucleotide
cugcccgccaagggaccag

SEQ ID NO: 3102445 - RNA, 19 nt, Artificial Sequence
  Description of Artificial Sequence: Synthetic oligonucleotide
cccgccaagggaccagcug

SEQ ID NO: 3102446 - RNA, 19 nt, Artificial Sequence
  Description of Artificial Sequence: Synthetic oligonucleotide
gccaagggaccagcugugc

SEQ ID NO: 3102447 - RNA, 19 nt, Artificial Sequence
  Description of Artificial Sequence: Synthetic oligonucleotide
ccaauccgaggacuucuga

SEQ ID NO: 3102448 - RNA, 19 nt, Artificial Sequence
  Description of Artificial Sequence: Synthetic oligonucleotide
caguguggcugcccgccaa

SEQ ID NO: 3102449 - RNA, 19 nt, Artificial Sequence
  Description of Artificial Sequence: Synthetic oligonucleotide
guucccaauccgaggacuu

SEQ ID NO: 3102450 - RNA, 19 nt, Artificial Sequence
  Description of Artificial Sequence: Synthetic oligonucleotide
gucacccacucaauacuau

SEQ ID NO: 3102451 - RNA, 19 nt, Artificial Sequence
  Description of Artificial Sequence: Synthetic oligonucleotide
ccgucuggucccagcuacc

SEQ ID NO: 3102452 - RNA, 19 nt, Artificial Sequence
  Description of Artificial Sequence: Synthetic oligonucleotide
ccaggguggcuuuugaauu

SEQ ID NO: 3102453 - RNA, 19 nt, Artificial Sequence
  Description of Artificial Sequence: Synthetic oligonucleotide
gcaccaccgucacccacuc

SEQ ID NO: 3102454 - RNA, 19 nt, Artificial Sequence
  Description of Artificial Sequence: Synthetic oligonucleotide
ggccaaggagaggccauga

SEQ ID NO: 3102455 - RNA, 19 nt, Artificial Sequence
  Description of Artificial Sequence: Synthetic oligonucleotide
cugucucccuagcccugga

SEQ ID NO: 3102456 - RNA, 19 nt, Artificial Sequence
  Description of Artificial Sequence: Synthetic oligonucleotide
caucaacaaggugcucugu

SEQ ID NO: 3102457 - RNA, 19 nt, Artificial Sequence
  Description of Artificial Sequence: Synthetic oligonucleotide
ccgaggacuucugacucca

SEQ ID NO: 3102458 - RNA, 19 nt, Artificial Sequence
  Description of Artificial Sequence: Synthetic oligonucleotide
cgccaagggaccagcugug

SEQ ID NO: 3102459 - RNA, 19 nt, Artificial Sequence
  Description of Artificial Sequence: Synthetic oligonucleotide
ccgucacccacucaauacu

SEQ ID NO: 3102460 - RNA, 19 nt, Artificial Sequence
  Description of Artificial Sequence: Synthetic oligonucleotide
ccgccaagggaccagcugu

SEQ ID NO: 3102461 - RNA, 19 nt, Artificial Sequence
  Description of Artificial Sequence: Synthetic oligonucleotide
ggaccagcugugccaucaa

SEQ ID NO: 3102462 - RNA, 19 nt, Artificial Sequence
  Description of Artificial Sequence: Synthetic oligonucleotide
gcacauguucuggcugcuc

SEQ ID NO: 3102463 - RNA, 19 nt, Artificial Sequence
  Description of Artificial Sequence: Synthetic oligonucleotide
cgucacccacucaauacua

SEQ ID NO: 3102464 - RNA, 19 nt, Artificial Sequence
  Description of Artificial Sequence: Synthetic oligonucleotide
ggcugcccgccaagggacc

SEQ ID NO: 3102465 - RNA, 19 nt, Artificial Sequence
  Description of Artificial Sequence: Synthetic oligonucleotide
cgaggacuucugacuccag

SEQ ID NO: 3102466 - RNA, 19 nt, Artificial Sequence
  Description of Artificial Sequence: Synthetic oligonucleotide
gcugugccaucaacaaggu

SEQ ID NO: 3102467 - RNA, 19 nt, Artificial Sequence
  Description of Artificial Sequence: Synthetic oligonucleotide
caccaccgucacccacuca

SEQ ID NO: 3102468 - RNA, 19 nt, Artificial Sequence
  Description of Artificial Sequence: Synthetic oligonucleotide
gcugcccgccaagggacca

SEQ ID NO: 3102469 - RNA, 19 nt, Artificial Sequence
  Description of Artificial Sequence: Synthetic oligonucleotide
gcugcucgagcugaccuuu

SEQ ID NO: 3102470 - RNA, 19 nt, Artificial Sequence
  Description of Artificial Sequence: Synthetic oligonucleotide
ggcugcucgagcugaccuu

SEQ ID NO: 3102471 - RNA, 19 nt, Artificial Sequence
  Description of Artificial Sequence: Synthetic oligonucleotide
ccuagcccuggagauuaaa

SEQ ID NO: 3102472 - RNA, 19 nt, Artificial Sequence
  Description of Artificial Sequence: Synthetic oligonucleotide
cgucuggucccagcuacca

SEQ ID NO: 3102473 - RNA, 19 nt, Artificial Sequence
  Description of Artificial Sequence: Synthetic oligonucleotide
ccaguguggcugcccgcca

SEQ ID NO: 3102474 - RNA, 19 nt, Artificial Sequence
  Description of Artificial Sequence: Synthetic oligonucleotide
cucccuagcccuggagauu

SEQ ID NO: 3102475 - RNA, 19 nt, Artificial Sequence
  Description of Artificial Sequence: Synthetic oligonucleotide
cccagcuaccaguguggcu

SEQ ID NO: 3102476 - RNA, 19 nt, Artificial Sequence
  Description of Artificial Sequence: Synthetic oligonucleotide
ccaugaaggcagugcuguu

SEQ ID NO: 3102477 - RNA, 19 nt, Artificial Sequence
  Description of Artificial Sequence: Synthetic oligonucleotide
ccuuucccgucugguccca

SEQ ID NO: 3102478 - RNA, 19 nt, Artificial Sequence
  Description of Artificial Sequence: Synthetic oligonucleotide
ccaccgucacccacucaau

SEQ ID NO: 3102479 - RNA, 19 nt, Artificial Sequence
  Description of Artificial Sequence: Synthetic oligonucleotide
cccuagcccuggagauuaa

SEQ ID NO: 3102480 - RNA, 19 nt, Artificial Sequence
  Description of Artificial Sequence: Synthetic oligonucleotide
gcccgccaagggaccagcu

SEQ ID NO: 3102481 - RNA, 19 nt, Artificial Sequence
  Description of Artificial Sequence: Synthetic oligonucleotide
cgcacauguucuggcugcu

SEQ ID NO: 3102482 - RNA, 19 nt, Artificial Sequence
  Description of Artificial Sequence: Synthetic oligonucleotide
uuagaacucagccacaggg

SEQ ID NO: 3102483 - RNA, 19 nt, Artificial Sequence
  Description of Artificial Sequence: Synthetic oligonucleotide
aaauauguaguguccugcc

SEQ ID NO: 3102484 - RNA, 19 nt, Artificial Sequence
  Description of Artificial Sequence: Synthetic oligonucleotide
cugacauucaaauauguag

SEQ ID NO: 3102485 - RNA, 19 nt, Artificial Sequence
  Description of Artificial Sequence: Synthetic oligonucleotide
aaaggaggaagucugcggg

SEQ ID NO: 3102486 - RNA, 19 nt, Artificial Sequence
  Description of Artificial Sequence: Synthetic oligonucleotide
aauauguaguguccugccc

SEQ ID NO: 3102487 - RNA, 19 nt, Artificial Sequence
  Description of Artificial Sequence: Synthetic oligonucleotide
uucucuuuagaacucagcc

SEQ ID NO: 3102488 - RNA, 19 nt, Artificial Sequence
  Description of Artificial Sequence: Synthetic oligonucleotide
uuuuaggacacccugcccc

SEQ ID NO: 3102489 - RNA, 19 nt, Artificial Sequence
  Description of Artificial Sequence: Synthetic oligonucleotide
auagagaacgcugacauuc

SEQ ID NO: 3102490 - RNA, 19 nt, Artificial Sequence
  Description of Artificial Sequence: Synthetic oligonucleotide
aagacagcuuuccauagag

SEQ ID NO: 3102491 - RNA, 19 nt, Artificial Sequence
  Description of Artificial Sequence: Synthetic oligonucleotide
cacuuugggaacaagaaag

SEQ ID NO: 3102492 - RNA, 19 nt, Artificial Sequence
  Description of Artificial Sequence: Synthetic oligonucleotide
ugacauucaaauauguagu

SEQ ID NO: 3102493 - RNA, 19 nt, Artificial Sequence
  Description of Artificial Sequence: Synthetic oligonucleotide
uugggaacaagaaaggacu

SEQ ID NO: 3102494 - RNA, 19 nt, Artificial Sequence
  Description of Artificial Sequence: Synthetic oligonucleotide
uuugggaacaagaaaggac

SEQ ID NO: 3102495 - RNA, 19 nt, Artificial Sequence
  Description of Artificial Sequence: Synthetic oligonucleotide
uugaacugcaagaucagug

SEQ ID NO: 3102496 - RNA, 19 nt, Artificial Sequence
  Description of Artificial Sequence: Synthetic oligonucleotide
cauucaaauauguaguguc

SEQ ID NO: 3102497 - RNA, 19 nt, Artificial Sequence
  Description of Artificial Sequence: Synthetic oligonucleotide
ugaacugcaagaucagugc

SEQ ID NO: 3102498 - RNA, 19 nt, Artificial Sequence
  Description of Artificial Sequence: Synthetic oligonucleotide
cucuuuagaacucagccac

SEQ ID NO: 3102499 - RNA, 19 nt, Artificial Sequence
  Description of Artificial Sequence: Synthetic oligonucleotide
ugaccuucucuuuagaacu

SEQ ID NO: 3102500 - RNA, 19 nt, Artificial Sequence
  Description of Artificial Sequence: Synthetic oligonucleotide
gaaaggaggaagucugcgg

SEQ ID NO: 3102501 - RNA, 19 nt, Artificial Sequence
  Description of Artificial Sequence: Synthetic oligonucleotide
ugcagcaugggagagagcc

SEQ ID NO: 3102502 - RNA, 19 nt, Artificial Sequence
  Description of Artificial Sequence: Synthetic oligonucleotide
cagcuuuccauagagaacg

SEQ ID NO: 3102503 - RNA, 19 nt, Artificial Sequence
  Description of Artificial Sequence: Synthetic oligonucleotide
auucaaauauguagugucc

SEQ ID NO: 3102504 - RNA, 19 nt, Artificial Sequence
  Description of Artificial Sequence: Synthetic oligonucleotide
uuuccauagagaacgcuga

SEQ ID NO: 3102505 - RNA, 19 nt, Artificial Sequence
  Description of Artificial Sequence: Synthetic oligonucleotide
acugcaagaucagugcucc

SEQ ID NO: 3102506 - RNA, 19 nt, Artificial Sequence
  Description of Artificial Sequence: Synthetic oligonucleotide
cuuuccauagagaacgcug

SEQ ID NO: 3102507 - RNA, 19 nt, Artificial Sequence
  Description of Artificial Sequence: Synthetic oligonucleotide
gacauucaaauauguagug

SEQ ID NO: 3102508 - RNA, 19 nt, Artificial Sequence
  Description of Artificial Sequence: Synthetic oligonucleotide
aacucagccacagggaaag

SEQ ID NO: 3102509 - RNA, 19 nt, Artificial Sequence
  Description of Artificial Sequence: Synthetic oligonucleotide
uguaguguccugcccacag

SEQ ID NO: 3102510 - RNA, 19 nt, Artificial Sequence
  Description of Artificial Sequence: Synthetic oligonucleotide
ucaaauauguaguguccug

SEQ ID NO: 3102511 - RNA, 19 nt, Artificial Sequence
  Description of Artificial Sequence: Synthetic oligonucleotide
ucucuuuagaacucagcca

SEQ ID NO: 3102512 - RNA, 19 nt, Artificial Sequence
  Description of Artificial Sequence: Synthetic oligonucleotide
uuuagaacucagccacagg

SEQ ID NO: 3102513 - RNA, 19 nt, Artificial Sequence
  Description of Artificial Sequence: Synthetic oligonucleotide
gaucagugcuccuuuuagg

SEQ ID NO: 3102514 - RNA, 19 nt, Artificial Sequence
  Description of Artificial Sequence: Synthetic oligonucleotide
agaacgcugacauucaaau

SEQ ID NO: 3102515 - RNA, 19 nt, Artificial Sequence
  Description of Artificial Sequence: Synthetic oligonucleotide
ugggagagagcccuggacc

SEQ ID NO: 3102516 - RNA, 19 nt, Artificial Sequence
  Description of Artificial Sequence: Synthetic oligonucleotide
agaucagugcuccuuuuag

SEQ ID NO: 3102517 - RNA, 19 nt, Artificial Sequence
  Description of Artificial Sequence: Synthetic oligonucleotide
aagaaaggacucugagcuc

SEQ ID NO: 3102518 - RNA, 19 nt, Artificial Sequence
  Description of Artificial Sequence: Synthetic oligonucleotide
auauguaguguccugccca

SEQ ID NO: 3102519 - RNA, 19 nt, Artificial Sequence
  Description of Artificial Sequence: Synthetic oligonucleotide
acagccacacuuugggaac

SEQ ID NO: 3102520 - RNA, 19 nt, Artificial Sequence
  Description of Artificial Sequence: Synthetic oligonucleotide
gaugcagcaugggagagag

SEQ ID NO: 3102521 - RNA, 19 nt, Artificial Sequence
  Description of Artificial Sequence: Synthetic oligonucleotide
aucagugcuccuuuuagga

SEQ ID NO: 3102522 - RNA, 19 nt, Artificial Sequence
  Description of Artificial Sequence: Synthetic oligonucleotide
acacacaagacagcuuucc

SEQ ID NO: 3102523 - RNA, 19 nt, Artificial Sequence
  Description of Artificial Sequence: Synthetic oligonucleotide
caaauauguaguguccugc

SEQ ID NO: 3102524 - RNA, 19 nt, Artificial Sequence
  Description of Artificial Sequence: Synthetic oligonucleotide
aaacaugaggucucccaga

SEQ ID NO: 3102525 - RNA, 19 nt, Artificial Sequence
  Description of Artificial Sequence: Synthetic oligonucleotide
ucuucccuugaacugcaag

SEQ ID NO: 3102526 - RNA, 19 nt, Artificial Sequence
  Description of Artificial Sequence: Synthetic oligonucleotide
cugaccuucucuuuagaac

SEQ ID NO: 3102527 - RNA, 19 nt, Artificial Sequence
  Description of Artificial Sequence: Synthetic oligonucleotide
uaguguccugcccacagcc

SEQ ID NO: 3102528 - RNA, 19 nt, Artificial Sequence
  Description of Artificial Sequence: Synthetic oligonucleotide
ugagugggaugcagcaugg

SEQ ID NO: 3102529 - RNA, 19 nt, Artificial Sequence
  Description of Artificial Sequence: Synthetic oligonucleotide
aacaugaggucucccagau

SEQ ID NO: 3102530 - RNA, 19 nt, Artificial Sequence
  Description of Artificial Sequence: Synthetic oligonucleotide
uucaaauauguaguguccu

SEQ ID NO: 3102531 - RNA, 19 nt, Artificial Sequence
  Description of Artificial Sequence: Synthetic oligonucleotide
ccagaugucagguaucugg

SEQ ID NO: 3102532 - RNA, 19 nt, Artificial Sequence
  Description of Artificial Sequence: Synthetic oligonucleotide
ucuggucugagugggaugc

SEQ ID NO: 3102533 - RNA, 19 nt, Artificial Sequence
  Description of Artificial Sequence: Synthetic oligonucleotide
uccuuuuaggacacccugc

SEQ ID NO: 3102534 - RNA, 19 nt, Artificial Sequence
  Description of Artificial Sequence: Synthetic oligonucleotide
aagucugcgggauccguug

SEQ ID NO: 3102535 - RNA, 19 nt, Artificial Sequence
  Description of Artificial Sequence: Synthetic oligonucleotide
aacugccaaacaugagguc

SEQ ID NO: 3102536 - RNA, 19 nt, Artificial Sequence
  Description of Artificial Sequence: Synthetic oligonucleotide
acaagacagcuuuccauag

SEQ ID NO: 3102537 - RNA, 19 nt, Artificial Sequence
  Description of Artificial Sequence: Synthetic oligonucleotide
aacugcaagaucagugcuc

SEQ ID NO: 3102538 - RNA, 19 nt, Artificial Sequence
  Description of Artificial Sequence: Synthetic oligonucleotide
cagguaucuggucugagug

SEQ ID NO: 3102539 - RNA, 19 nt, Artificial Sequence
  Description of Artificial Sequence: Synthetic oligonucleotide
aggacucugagcucucuuc

SEQ ID NO: 3102540 - RNA, 19 nt, Artificial Sequence
  Description of Artificial Sequence: Synthetic oligonucleotide
uagaacucagccacaggga

SEQ ID NO: 3102541 - RNA, 19 nt, Artificial Sequence
  Description of Artificial Sequence: Synthetic oligonucleotide
ugucgcaacugccaaacau

SEQ ID NO: 3102542 - RNA, 19 nt, Artificial Sequence
  Description of Artificial Sequence: Synthetic oligonucleotide
ucucccagaugucagguau

SEQ ID NO: 3102543 - RNA, 19 nt, Artificial Sequence
  Description of Artificial Sequence: Synthetic oligonucleotide
ucgcaacugccaaacauga

SEQ ID NO: 3102544 - RNA, 19 nt, Artificial Sequence
  Description of Artificial Sequence: Synthetic oligonucleotide
agcucucuucccuugaacu

SEQ ID NO: 3102545 - RNA, 19 nt, Artificial Sequence
  Description of Artificial Sequence: Synthetic oligonucleotide
cuucucuuuagaacucagc

SEQ ID NO: 3102546 - RNA, 19 nt, Artificial Sequence
  Description of Artificial Sequence: Synthetic oligonucleotide
acugccaaacaugaggucu

SEQ ID NO: 3102547 - RNA, 19 nt, Artificial Sequence
  Description of Artificial Sequence: Synthetic oligonucleotide
acuuugggaacaagaaagg

SEQ ID NO: 3102548 - RNA, 19 nt, Artificial Sequence
  Description of Artificial Sequence: Synthetic oligonucleotide
agguaucuggucugagugg

SEQ ID NO: 3102549 - RNA, 19 nt, Artificial Sequence
  Description of Artificial Sequence: Synthetic oligonucleotide
augggagagagcccuggac

SEQ ID NO: 3102550 - RNA, 19 nt, Artificial Sequence
  Description of Artificial Sequence: Synthetic oligonucleotide
cuuuagaacucagccacag

SEQ ID NO: 3102551 - RNA, 19 nt, Artificial Sequence
  Description of Artificial Sequence: Synthetic oligonucleotide
gaugucagguaucuggucu

SEQ ID NO: 3102552 - RNA, 19 nt, Artificial Sequence
  Description of Artificial Sequence: Synthetic oligonucleotide
agaacucagccacagggaa

SEQ ID NO: 3102553 - RNA, 19 nt, Artificial Sequence
  Description of Artificial Sequence: Synthetic oligonucleotide
agugggaugcagcauggga

SEQ ID NO: 3102554 - RNA, 19 nt, Artificial Sequence
  Description of Artificial Sequence: Synthetic oligonucleotide
cugagugggaugcagcaug

SEQ ID NO: 3102555 - RNA, 19 nt, Artificial Sequence
  Description of Artificial Sequence: Synthetic oligonucleotide
ucagguaucuggucugagu

SEQ ID NO: 3102556 - RNA, 19 nt, Artificial Sequence
  Description of Artificial Sequence: Synthetic oligonucleotide
agaugucagguaucugguc

SEQ ID NO: 3102557 - RNA, 19 nt, Artificial Sequence
  Description of Artificial Sequence: Synthetic oligonucleotide
acacaagacagcuuuccau

SEQ ID NO: 3102558 - RNA, 19 nt, Artificial Sequence
  Description of Artificial Sequence: Synthetic oligonucleotide
uauguaguguccugcccac

SEQ ID NO: 3102559 - RNA, 19 nt, Artificial Sequence
  Description of Artificial Sequence: Synthetic oligonucleotide
uuuaggacacccugccccu

SEQ ID NO: 3102560 - RNA, 19 nt, Artificial Sequence
  Description of Artificial Sequence: Synthetic oligonucleotide
gaggaagucugcgggaucc

SEQ ID NO: 3102561 - RNA, 19 nt, Artificial Sequence
  Description of Artificial Sequence: Synthetic oligonucleotide
acauucaaauauguagugu

SEQ ID NO: 3102562 - RNA, 19 nt, Artificial Sequence
  Description of Artificial Sequence: Synthetic oligonucleotide
ucuuuagaacucagccaca

SEQ ID NO: 3102563 - RNA, 19 nt, Artificial Sequence
  Description of Artificial Sequence: Synthetic oligonucleotide
cuucccuugaacugcaaga

SEQ ID NO: 3102564 - RNA, 19 nt, Artificial Sequence
  Description of Artificial Sequence: Synthetic oligonucleotide
ugggaugcagcaugggaga

SEQ ID NO: 3102565 - RNA, 19 nt, Artificial Sequence
  Description of Artificial Sequence: Synthetic oligonucleotide
gugggaugcagcaugggag

SEQ ID NO: 3102566 - RNA, 19 nt, Artificial Sequence
  Description of Artificial Sequence: Synthetic oligonucleotide
uagagaacgcugacauuca

SEQ ID NO: 3102567 - RNA, 19 nt, Artificial Sequence
  Description of Artificial Sequence: Synthetic oligonucleotide
aaggaggaagucugcggga

SEQ ID NO: 3102568 - RNA, 19 nt, Artificial Sequence
  Description of Artificial Sequence: Synthetic oligonucleotide
caugaggucucccagaugu

SEQ ID NO: 3102569 - RNA, 19 nt, Artificial Sequence
  Description of Artificial Sequence: Synthetic oligonucleotide
aagaucagugcuccuuuua

SEQ ID NO: 3102570 - RNA, 19 nt, Artificial Sequence
  Description of Artificial Sequence: Synthetic oligonucleotide
acacuuugggaacaagaaa

SEQ ID NO: 3102571 - RNA, 19 nt, Artificial Sequence
  Description of Artificial Sequence: Synthetic oligonucleotide
ucagugcuccuuuuaggac

SEQ ID NO: 3102572 - RNA, 19 nt, Artificial Sequence
  Description of Artificial Sequence: Synthetic oligonucleotide
gguaucuggucugaguggg

SEQ ID NO: 3102573 - RNA, 19 nt, Artificial Sequence
  Description of Artificial Sequence: Synthetic oligonucleotide
uccauagagaacgcugaca

SEQ ID NO: 3102574 - RNA, 19 nt, Artificial Sequence
  Description of Artificial Sequence: Synthetic oligonucleotide
ugcuccuuuuaggacaccc

SEQ ID NO: 3102575 - RNA, 19 nt, Artificial Sequence
  Description of Artificial Sequence: Synthetic oligonucleotide
cucucuucccuugaacugc

SEQ ID NO: 3102576 - RNA, 19 nt, Artificial Sequence
  Description of Artificial Sequence: Synthetic oligonucleotide
gaccugaccuucucuuuag

SEQ ID NO: 3102577 - RNA, 19 nt, Artificial Sequence
  Description of Artificial Sequence: Synthetic oligonucleotide
augucagguaucuggucug

SEQ ID NO: 3102578 - RNA, 19 nt, Artificial Sequence
  Description of Artificial Sequence: Synthetic oligonucleotide
ugaggucucccagauguca

SEQ ID NO: 3102579 - RNA, 19 nt, Artificial Sequence
  Description of Artificial Sequence: Synthetic oligonucleotide
ucugagcucucuucccuug

SEQ ID NO: 3102580 - RNA, 19 nt, Artificial Sequence
  Description of Artificial Sequence: Synthetic oligonucleotide
uuccauagagaacgcugac

SEQ ID NO: 3102581 - RNA, 19 nt, Artificial Sequence
  Description of Artificial Sequence: Synthetic oligonucleotide
cacacuuugggaacaagaa

SEQ ID NO: 3102582 - RNA, 19 nt, Artificial Sequence
  Description of Artificial Sequence: Synthetic oligonucleotide
gacucugagcucucuuccc

SEQ ID NO: 3102583 - RNA, 19 nt, Artificial Sequence
  Description of Artificial Sequence: Synthetic oligonucleotide
cuuuuaggacacccugccc

SEQ ID NO: 3102584 - RNA, 19 nt, Artificial Sequence
  Description of Artificial Sequence: Synthetic oligonucleotide
ugcgggauccguugggccc

SEQ ID NO: 3102585 - RNA, 19 nt, Artificial Sequence
  Description of Artificial Sequence: Synthetic oligonucleotide
cagccacagggaaaggagg

SEQ ID NO: 3102586 - RNA, 19 nt, Artificial Sequence
  Description of Artificial Sequence: Synthetic oligonucleotide
ugggaacaagaaaggacuc

SEQ ID NO: 3102587 - RNA, 19 nt, Artificial Sequence
  Description of Artificial Sequence: Synthetic oligonucleotide
gucgcaacugccaaacaug

SEQ ID NO: 3102588 - RNA, 19 nt, Artificial Sequence
  Description of Artificial Sequence: Synthetic oligonucleotide
ggaacaagaaaggacucug

SEQ ID NO: 3102589 - RNA, 19 nt, Artificial Sequence
  Description of Artificial Sequence: Synthetic oligonucleotide
agugcuccuuuuaggacac

SEQ ID NO: 3102590 - RNA, 19 nt, Artificial Sequence
  Description of Artificial Sequence: Synthetic oligonucleotide
acagggaaaggaggaaguc

SEQ ID NO: 3102591 - RNA, 19 nt, Artificial Sequence
  Description of Artificial Sequence: Synthetic oligonucleotide
ucucuucccuugaacugca

SEQ ID NO: 3102592 - RNA, 19 nt, Artificial Sequence
  Description of Artificial Sequence: Synthetic oligonucleotide
gacacccugccccugucgc

SEQ ID NO: 3102593 - RNA, 19 nt, Artificial Sequence
  Description of Artificial Sequence: Synthetic oligonucleotide
acucugagcucucuucccu

SEQ ID NO: 3102594 - RNA, 19 nt, Artificial Sequence
  Description of Artificial Sequence: Synthetic oligonucleotide
aggucucccagaugucagg

SEQ ID NO: 3102595 - RNA, 19 nt, Artificial Sequence
  Description of Artificial Sequence: Synthetic oligonucleotide
ggaaaggaggaagucugcg

SEQ ID NO: 3102596 - RNA, 19 nt, Artificial Sequence
  Description of Artificial Sequence: Synthetic oligonucleotide
uucccuugaacugcaagau

SEQ ID NO: 3102597 - RNA, 19 nt, Artificial Sequence
  Description of Artificial Sequence: Synthetic oligonucleotide
cagugcuccuuuuaggaca

SEQ ID NO: 3102598 - RNA, 19 nt, Artificial Sequence
  Description of Artificial Sequence: Synthetic oligonucleotide
ccuuuuaggacacccugcc

SEQ ID NO: 3102599 - RNA, 19 nt, Artificial Sequence
  Description of Artificial Sequence: Synthetic oligonucleotide
cacaagacagcuuuccaua

SEQ ID NO: 3102600 - RNA, 19 nt, Artificial Sequence
  Description of Artificial Sequence: Synthetic oligonucleotide
agucugcgggauccguugg

SEQ ID NO: 3102601 - RNA, 19 nt, Artificial Sequence
  Description of Artificial Sequence: Synthetic oligonucleotide
gaggucucccagaugucag

SEQ ID NO: 3102602 - RNA, 19 nt, Artificial Sequence
  Description of Artificial Sequence: Synthetic oligonucleotide
cugccaaacaugaggucuc

SEQ ID NO: 3102603 - RNA, 19 nt, Artificial Sequence
  Description of Artificial Sequence: Synthetic oligonucleotide
ugcaagaucagugcuccuu

SEQ ID NO: 3102604 - RNA, 19 nt, Artificial Sequence
  Description of Artificial Sequence: Synthetic oligonucleotide
ucccuugaacugcaagauc

SEQ ID NO: 3102605 - RNA, 19 nt, Artificial Sequence
  Description of Artificial Sequence: Synthetic oligonucleotide
cccacagccacacuuuggg

SEQ ID NO: 3102606 - RNA, 19 nt, Artificial Sequence
  Description of Artificial Sequence: Synthetic oligonucleotide
gaacaagaaaggacucuga

SEQ ID NO: 3102607 - RNA, 19 nt, Artificial Sequence
  Description of Artificial Sequence: Synthetic oligonucleotide
aaggacucugagcucucuu

SEQ ID NO: 3102608 - RNA, 19 nt, Artificial Sequence
  Description of Artificial Sequence: Synthetic oligonucleotide
ucccagaugucagguaucu

SEQ ID NO: 3102609 - RNA, 19 nt, Artificial Sequence
  Description of Artificial Sequence: Synthetic oligonucleotide
cacagccacacuuugggaa

SEQ ID NO: 3102610 - RNA, 19 nt, Artificial Sequence
  Description of Artificial Sequence: Synthetic oligonucleotide
uaucuggucugagugggau

SEQ ID NO: 3102611 - RNA, 19 nt, Artificial Sequence
  Description of Artificial Sequence: Synthetic oligonucleotide
cccuugaacugcaagauca

SEQ ID NO: 3102612 - RNA, 19 nt, Artificial Sequence
  Description of Artificial Sequence: Synthetic oligonucleotide
cuuugggaacaagaaagga

SEQ ID NO: 3102613 - RNA, 19 nt, Artificial Sequence
  Description of Artificial Sequence: Synthetic oligonucleotide
ggacucugagcucucuucc

SEQ ID NO: 3102614 - RNA, 19 nt, Artificial Sequence
  Description of Artificial Sequence: Synthetic oligonucleotide
ucugcgggauccguugggc

SEQ ID NO: 3102615 - RNA, 19 nt, Artificial Sequence
  Description of Artificial Sequence: Synthetic oligonucleotide
ugcccacagccacacuuug

SEQ ID NO: 3102616 - RNA, 19 nt, Artificial Sequence
  Description of Artificial Sequence: Synthetic oligonucleotide
uguccugcccacagccaca

SEQ ID NO: 3102617 - RNA, 19 nt, Artificial Sequence
  Description of Artificial Sequence: Synthetic oligonucleotide
aucuggucugagugggaug

SEQ ID NO: 3102618 - RNA, 19 nt, Artificial Sequence
  Description of Artificial Sequence: Synthetic oligonucleotide
gaacugcaagaucagugcu

SEQ ID NO: 3102619 - RNA, 19 nt, Artificial Sequence
  Description of Artificial Sequence: Synthetic oligonucleotide
gagcucucuucccuugaac

SEQ ID NO: 3102620 - RNA, 19 nt, Artificial Sequence
  Description of Artificial Sequence: Synthetic oligonucleotide
agcuuuccauagagaacgc

SEQ ID NO: 3102621 - RNA, 19 nt, Artificial Sequence
  Description of Artificial Sequence: Synthetic oligonucleotide
caacugccaaacaugaggu

SEQ ID NO: 3102622 - RNA, 19 nt, Artificial Sequence
  Description of Artificial Sequence: Synthetic oligonucleotide
aaaggacucugagcucucu

SEQ ID NO: 3102623 - RNA, 19 nt, Artificial Sequence
  Description of Artificial Sequence: Synthetic oligonucleotide
guaguguccugcccacagc

SEQ ID NO: 3102624 - RNA, 19 nt, Artificial Sequence
  Description of Artificial Sequence: Synthetic oligonucleotide
ugccccugucgcaacugcc

SEQ ID NO: 3102625 - RNA, 19 nt, Artificial Sequence
  Description of Artificial Sequence: Synthetic oligonucleotide
guguccugcccacagccac

SEQ ID NO: 3102626 - RNA, 19 nt, Artificial Sequence
  Description of Artificial Sequence: Synthetic oligonucleotide
gucugcgggauccguuggg

SEQ ID NO: 3102627 - RNA, 19 nt, Artificial Sequence
  Description of Artificial Sequence: Synthetic oligonucleotide
agagaacgcugacauucaa

SEQ ID NO: 3102628 - RNA, 19 nt, Artificial Sequence
  Description of Artificial Sequence: Synthetic oligonucleotide
gcucucuucccuugaacug

SEQ ID NO: 3102629 - RNA, 19 nt, Artificial Sequence
  Description of Artificial Sequence: Synthetic oligonucleotide
ugucagguaucuggucuga

SEQ ID NO: 3102630 - RNA, 19 nt, Artificial Sequence
  Description of Artificial Sequence: Synthetic oligonucleotide
acaugaggucucccagaug

SEQ ID NO: 3102631 - RNA, 19 nt, Artificial Sequence
  Description of Artificial Sequence: Synthetic oligonucleotide
ugccaaacaugaggucucc

SEQ ID NO: 3102632 - RNA, 19 nt, Artificial Sequence
  Description of Artificial Sequence: Synthetic oligonucleotide
agcccuggaccugaccuuc

SEQ ID NO: 3102633 - RNA, 19 nt, Artificial Sequence
  Description of Artificial Sequence: Synthetic oligonucleotide
gagaacgcugacauucaaa

SEQ ID NO: 3102634 - RNA, 19 nt, Artificial Sequence
  Description of Artificial Sequence: Synthetic oligonucleotide
cacacaagacagcuuucca

SEQ ID NO: 3102635 - RNA, 19 nt, Artificial Sequence
  Description of Artificial Sequence: Synthetic oligonucleotide
acgcugacauucaaauaug

SEQ ID NO: 3102636 - RNA, 19 nt, Artificial Sequence
  Description of Artificial Sequence: Synthetic oligonucleotide
cugcgggauccguugggcc

SEQ ID NO: 3102637 - RNA, 19 nt, Artificial Sequence
  Description of Artificial Sequence: Synthetic oligonucleotide
caagacagcuuuccauaga

SEQ ID NO: 3102638 - RNA, 19 nt, Artificial Sequence
  Description of Artificial Sequence: Synthetic oligonucleotide
accuucucuuuagaacuca

SEQ ID NO: 3102639 - RNA, 19 nt, Artificial Sequence
  Description of Artificial Sequence: Synthetic oligonucleotide
ucugagugggaugcagcau

SEQ ID NO: 3102640 - RNA, 19 nt, Artificial Sequence
  Description of Artificial Sequence: Synthetic oligonucleotide
agccacagggaaaggagga

SEQ ID NO: 3102641 - RNA, 19 nt, Artificial Sequence
  Description of Artificial Sequence: Synthetic oligonucleotide
gagugggaugcagcauggg

SEQ ID NO: 3102642 - RNA, 19 nt, Artificial Sequence
  Description of Artificial Sequence: Synthetic oligonucleotide
ccuugaacugcaagaucag

SEQ ID NO: 3102643 - RNA, 19 nt, Artificial Sequence
  Description of Artificial Sequence: Synthetic oligonucleotide
uggaccugaccuucucuuu

SEQ ID NO: 3102644 - RNA, 19 nt, Artificial Sequence
  Description of Artificial Sequence: Synthetic oligonucleotide
aggacacccugccccuguc

SEQ ID NO: 3102645 - RNA, 19 nt, Artificial Sequence
  Description of Artificial Sequence: Synthetic oligonucleotide
gaccuucucuuuagaacuc

SEQ ID NO: 3102646 - RNA, 19 nt, Artificial Sequence
  Description of Artificial Sequence: Synthetic oligonucleotide
aggaagucugcgggauccg

SEQ ID NO: 3102647 - RNA, 19 nt, Artificial Sequence
  Description of Artificial Sequence: Synthetic oligonucleotide
ccuucucuuuagaacucag

SEQ ID NO: 3102648 - RNA, 19 nt, Artificial Sequence
  Description of Artificial Sequence: Synthetic oligonucleotide
cagaugucagguaucuggu

SEQ ID NO: 3102649 - RNA, 19 nt, Artificial Sequence
  Description of Artificial Sequence: Synthetic oligonucleotide
accugaccuucucuuuaga

SEQ ID NO: 3102650 - RNA, 19 nt, Artificial Sequence
  Description of Artificial Sequence: Synthetic oligonucleotide
aggaggaagucugcgggau

SEQ ID NO: 3102651 - RNA, 19 nt, Artificial Sequence
  Description of Artificial Sequence: Synthetic oligonucleotide
ccacacuuugggaacaaga

SEQ ID NO: 3102652 - RNA, 19 nt, Artificial Sequence
  Description of Artificial Sequence: Synthetic oligonucleotide
gaacucagccacagggaaa

SEQ ID NO: 3102653 - RNA, 19 nt, Artificial Sequence
  Description of Artificial Sequence: Synthetic oligonucleotide
uuaggacacccugccccug

SEQ ID NO: 3102654 - RNA, 19 nt, Artificial Sequence
  Description of Artificial Sequence: Synthetic oligonucleotide
augaggucucccagauguc

SEQ ID NO: 3102655 - RNA, 19 nt, Artificial Sequence
  Description of Artificial Sequence: Synthetic oligonucleotide
agacagcuuuccauagaga

SEQ ID NO: 3102656 - RNA, 19 nt, Artificial Sequence
  Description of Artificial Sequence: Synthetic oligonucleotide
gaaaggacucugagcucuc

SEQ ID NO: 3102657 - RNA, 19 nt, Artificial Sequence
  Description of Artificial Sequence: Synthetic oligonucleotide
ccugucgcaacugccaaac

SEQ ID NO: 3102658 - RNA, 19 nt, Artificial Sequence
  Description of Artificial Sequence: Synthetic oligonucleotide
cugccccugucgcaacugc

SEQ ID NO: 3102659 - RNA, 19 nt, Artificial Sequence
  Description of Artificial Sequence: Synthetic oligonucleotide
ggucugagugggaugcagc

SEQ ID NO: 3102660 - RNA, 19 nt, Artificial Sequence
  Description of Artificial Sequence: Synthetic oligonucleotide
ggacacccugccccugucg

SEQ ID NO: 3102661 - RNA, 19 nt, Artificial Sequence
  Description of Artificial Sequence: Synthetic oligonucleotide
ccauagagaacgcugacau

SEQ ID NO: 3102662 - RNA, 19 nt, Artificial Sequence
  Description of Artificial Sequence: Synthetic oligonucleotide
gcaugggagagagcccugg

SEQ ID NO: 3102663 - RNA, 19 nt, Artificial Sequence
  Description of Artificial Sequence: Synthetic oligonucleotide
caugggagagagcccugga

SEQ ID NO: 3102664 - RNA, 19 nt, Artificial Sequence
  Description of Artificial Sequence: Synthetic oligonucleotide
acccugccccugucgcaac

SEQ ID NO: 3102665 - RNA, 19 nt, Artificial Sequence
  Description of Artificial Sequence: Synthetic oligonucleotide
aguguccugcccacagcca

SEQ ID NO: 3102666 - RNA, 19 nt, Artificial Sequence
  Description of Artificial Sequence: Synthetic oligonucleotide
cagggaaaggaggaagucu

SEQ ID NO: 3102667 - RNA, 19 nt, Artificial Sequence
  Description of Artificial Sequence: Synthetic oligonucleotide
agagagcccuggaccugac

SEQ ID NO: 3102668 - RNA, 19 nt, Artificial Sequence
  Description of Artificial Sequence: Synthetic oligonucleotide
ggaccugaccuucucuuua

SEQ ID NO: 3102669 - RNA, 19 nt, Artificial Sequence
  Description of Artificial Sequence: Synthetic oligonucleotide
cuugaacugcaagaucagu

SEQ ID NO: 3102670 - RNA, 19 nt, Artificial Sequence
  Description of Artificial Sequence: Synthetic oligonucleotide
gcugacauucaaauaugua

SEQ ID NO: 3102671 - RNA, 19 nt, Artificial Sequence
  Description of Artificial Sequence: Synthetic oligonucleotide
gggagagagcccuggaccu

SEQ ID NO: 3102672 - RNA, 19 nt, Artificial Sequence
  Description of Artificial Sequence: Synthetic oligonucleotide
gggaugcagcaugggagag

SEQ ID NO: 3102673 - RNA, 19 nt, Artificial Sequence
  Description of Artificial Sequence: Synthetic oligonucleotide
ccugaccuucucuuuagaa

SEQ ID NO: 3102674 - RNA, 19 nt, Artificial Sequence
  Description of Artificial Sequence: Synthetic oligonucleotide
auguaguguccugcccaca

SEQ ID NO: 3102675 - RNA, 19 nt, Artificial Sequence
  Description of Artificial Sequence: Synthetic oligonucleotide
augcagcaugggagagagc

SEQ ID NO: 3102676 - RNA, 19 nt, Artificial Sequence
  Description of Artificial Sequence: Synthetic oligonucleotide
ggaggaagucugcgggauc

SEQ ID NO: 3102677 - RNA, 19 nt, Artificial Sequence
  Description of Artificial Sequence: Synthetic oligonucleotide
cuggaccugaccuucucuu

SEQ ID NO: 3102678 - RNA, 19 nt, Artificial Sequence
  Description of Artificial Sequence: Synthetic oligonucleotide
guaucuggucugaguggga

SEQ ID NO: 3102679 - RNA, 19 nt, Artificial Sequence
  Description of Artificial Sequence: Synthetic oligonucleotide
gcgggauccguugggcccg

SEQ ID NO: 3102680 - RNA, 19 nt, Artificial Sequence
  Description of Artificial Sequence: Synthetic oligonucleotide
cagcaugggagagagcccu

SEQ ID NO: 3102681 - RNA, 19 nt, Artificial Sequence
  Description of Artificial Sequence: Synthetic oligonucleotide
gggaacaagaaaggacucu

SEQ ID NO: 3102682 - RNA, 19 nt, Artificial Sequence
  Description of Artificial Sequence: Synthetic oligonucleotide
gcagcaugggagagagccc

SEQ ID NO: 3102683 - RNA, 19 nt, Artificial Sequence
  Description of Artificial Sequence: Synthetic oligonucleotide
gcccacagccacacuuugg

SEQ ID NO: 3102684 - RNA, 19 nt, Artificial Sequence
  Description of Artificial Sequence: Synthetic oligonucleotide
agcaugggagagagcccug

SEQ ID NO: 3102685 - RNA, 19 nt, Artificial Sequence
  Description of Artificial Sequence: Synthetic oligonucleotide
gucucccagaugucaggua

SEQ ID NO: 3102686 - RNA, 19 nt, Artificial Sequence
  Description of Artificial Sequence: Synthetic oligonucleotide
gaagucugcgggauccguu

SEQ ID NO: 3102687 - RNA, 19 nt, Artificial Sequence
  Description of Artificial Sequence: Synthetic oligonucleotide
cauagagaacgcugacauu

SEQ ID NO: 3102688 - RNA, 19 nt, Artificial Sequence
  Description of Artificial Sequence: Synthetic oligonucleotide
cugucgcaacugccaaaca

SEQ ID NO: 3102689 - RNA, 19 nt, Artificial Sequence
  Description of Artificial Sequence: Synthetic oligonucleotide
ggaugcagcaugggagaga

SEQ ID NO: 3102690 - RNA, 19 nt, Artificial Sequence
  Description of Artificial Sequence: Synthetic oligonucleotide
gccaaacaugaggucuccc

SEQ ID NO: 3102691 - RNA, 19 nt, Artificial Sequence
  Description of Artificial Sequence: Synthetic oligonucleotide
gcaagaucagugcuccuuu

SEQ ID NO: 3102692 - RNA, 19 nt, Artificial Sequence
  Description of Artificial Sequence: Synthetic oligonucleotide
cgcaacugccaaacaugag

SEQ ID NO: 3102693 - RNA, 19 nt, Artificial Sequence
  Description of Artificial Sequence: Synthetic oligonucleotide
gccacacuuugggaacaag

SEQ ID NO: 3102694 - RNA, 19 nt, Artificial Sequence
  Description of Artificial Sequence: Synthetic oligonucleotide
agccacacuuugggaacaa

SEQ ID NO: 3102695 - RNA, 19 nt, Artificial Sequence
  Description of Artificial Sequence: Synthetic oligonucleotide
cagccacacuuugggaaca

SEQ ID NO: 3102696 - RNA, 19 nt, Artificial Sequence
  Description of Artificial Sequence: Synthetic oligonucleotide
caagaucagugcuccuuuu

SEQ ID NO: 3102697 - RNA, 19 nt, Artificial Sequence
  Description of Artificial Sequence: Synthetic oligonucleotide
cacccugccccugucgcaa

SEQ ID NO: 3102698 - RNA, 19 nt, Artificial Sequence
  Description of Artificial Sequence: Synthetic oligonucleotide
gccccugucgcaacugcca

SEQ ID NO: 3102699 - RNA, 19 nt, Artificial Sequence
  Description of Artificial Sequence: Synthetic oligonucleotide
cucugagcucucuucccuu

SEQ ID NO: 3102700 - RNA, 19 nt, Artificial Sequence
  Description of Artificial Sequence: Synthetic oligonucleotide
ggucucccagaugucaggu

SEQ ID NO: 3102701 - RNA, 19 nt, Artificial Sequence
  Description of Artificial Sequence: Synthetic oligonucleotide
cugcccacagccacacuuu

SEQ ID NO: 3102702 - RNA, 19 nt, Artificial Sequence
  Description of Artificial Sequence: Synthetic oligonucleotide
cucuucccuugaacugcaa

SEQ ID NO: 3102703 - RNA, 19 nt, Artificial Sequence
  Description of Artificial Sequence: Synthetic oligonucleotide
gcuuuccauagagaacgcu

SEQ ID NO: 3102704 - RNA, 19 nt, Artificial Sequence
  Description of Artificial Sequence: Synthetic oligonucleotide
ccacagccacacuuuggga

SEQ ID NO: 3102705 - RNA, 19 nt, Artificial Sequence
  Description of Artificial Sequence: Synthetic oligonucleotide
gcuccuuuuaggacacccu

SEQ ID NO: 3102706 - RNA, 19 nt, Artificial Sequence
  Description of Artificial Sequence: Synthetic oligonucleotide
gugcuccuuuuaggacacc

SEQ ID NO: 3102707 - RNA, 19 nt, Artificial Sequence
  Description of Artificial Sequence: Synthetic oligonucleotide
cuggucugagugggaugca

SEQ ID NO: 3102708 - RNA, 19 nt, Artificial Sequence
  Description of Artificial Sequence: Synthetic oligonucleotide
cccagaugucagguaucug

SEQ ID NO: 3102709 - RNA, 19 nt, Artificial Sequence
  Description of Artificial Sequence: Synthetic oligonucleotide
ccugcccacagccacacuu

SEQ ID NO: 3102710 - RNA, 19 nt, Artificial Sequence
  Description of Artificial Sequence: Synthetic oligonucleotide
ggaagucugcgggauccgu

SEQ ID NO: 3102711 - RNA, 19 nt, Artificial Sequence
  Description of Artificial Sequence: Synthetic oligonucleotide
ccugccccugucgcaacug

SEQ ID NO: 3102712 - RNA, 19 nt, Artificial Sequence
  Description of Artificial Sequence: Synthetic oligonucleotide
cccuggaccugaccuucuc

SEQ ID NO: 3102713 - RNA, 19 nt, Artificial Sequence
  Description of Artificial Sequence: Synthetic oligonucleotide
cgcugacauucaaauaugu

SEQ ID NO: 3102714 - RNA, 19 nt, Artificial Sequence
  Description of Artificial Sequence: Synthetic oligonucleotide
cugcaagaucagugcuccu

SEQ ID NO: 3102715 - RNA, 19 nt, Artificial Sequence
  Description of Artificial Sequence: Synthetic oligonucleotide
ccuggaccugaccuucucu

SEQ ID NO: 3102716 - RNA, 19 nt, Artificial Sequence
  Description of Artificial Sequence: Synthetic oligonucleotide
ccccugucgcaacugccaa

SEQ ID NO: 3102717 - RNA, 19 nt, Artificial Sequence
  Description of Artificial Sequence: Synthetic oligonucleotide
cccugucgcaacugccaaa

SEQ ID NO: 3102718 - RNA, 19 nt, Artificial Sequence
  Description of Artificial Sequence: Synthetic oligonucleotide
gggauccguugggcccgac

SEQ ID NO: 3102719 - RNA, 19 nt, Artificial Sequence
  Description of Artificial Sequence: Synthetic oligonucleotide
gcccuggaccugaccuucu

SEQ ID NO: 3102720 - RNA, 19 nt, Artificial Sequence
  Description of Artificial Sequence: Synthetic oligonucleotide
cccugccccugucgcaacu

SEQ ID NO: 3102721 - RNA, 19 nt, Artificial Sequence
  Description of Artificial Sequence: Synthetic oligonucleotide
cgggauccguugggcccga

SEQ ID NO: 3102722 - RNA, 19 nt, Artificial Sequence
  Description of Artificial Sequence: Synthetic oligonucleotide
uauaucuuggccaacaugc

SEQ ID NO: 3102723 - RNA, 19 nt, Artificial Sequence
  Description of Artificial Sequence: Synthetic oligonucleotide
aaaccaauauaucuuggcc

SEQ ID NO: 3102724 - RNA, 19 nt, Artificial Sequence
  Description of Artificial Sequence: Synthetic oligonucleotide
aaaaccaauauaucuuggc

SEQ ID NO: 3102725 - RNA, 19 nt, Artificial Sequence
  Description of Artificial Sequence: Synthetic oligonucleotide
uguaaugauuaccugaagg

SEQ ID NO: 3102726 - RNA, 19 nt, Artificial Sequence
  Description of Artificial Sequence: Synthetic oligonucleotide
aaaacugguauguaucucg

SEQ ID NO: 3102727 - RNA, 19 nt, Artificial Sequence
  Description of Artificial Sequence: Synthetic oligonucleotide
uuuaauguuguaaugauua

SEQ ID NO: 3102728 - RNA, 19 nt, Artificial Sequence
  Description of Artificial Sequence: Synthetic oligonucleotide
guaguuaucauauauggug

SEQ ID NO: 3102729 - RNA, 19 nt, Artificial Sequence
  Description of Artificial Sequence: Synthetic oligonucleotide
uuucaaaccauguugcucc

SEQ ID NO: 3102730 - RNA, 19 nt, Artificial Sequence
  Description of Artificial Sequence: Synthetic oligonucleotide
aaugauuaccugaaggaac

SEQ ID NO: 3102731 - RNA, 19 nt, Artificial Sequence
  Description of Artificial Sequence: Synthetic oligonucleotide
uaagguacauaaaaguuca

SEQ ID NO: 3102732 - RNA, 19 nt, Artificial Sequence
  Description of Artificial Sequence: Synthetic oligonucleotide
uuucauguaagguacauaa

SEQ ID NO: 3102733 - RNA, 19 nt, Artificial Sequence
  Description of Artificial Sequence: Synthetic oligonucleotide
aacuuucaaaccauguugc

SEQ ID NO: 3102734 - RNA, 19 nt, Artificial Sequence
  Description of Artificial Sequence: Synthetic oligonucleotide
uucaccaaaguuaacauaa

SEQ ID NO: 3102735 - RNA, 19 nt, Artificial Sequence
  Description of Artificial Sequence: Synthetic oligonucleotide
aauguuguaaugauuaccu

SEQ ID NO: 3102736 - RNA, 19 nt, Artificial Sequence
  Description of Artificial Sequence: Synthetic oligonucleotide
acugguauguaucucgugg

SEQ ID NO: 3102737 - RNA, 19 nt, Artificial Sequence
  Description of Artificial Sequence: Synthetic oligonucleotide
ucauguaagguacauaaaa

SEQ ID NO: 3102738 - RNA, 19 nt, Artificial Sequence
  Description of Artificial Sequence: Synthetic oligonucleotide
aaccaauauaucuuggcca

SEQ ID NO: 3102739 - RNA, 19 nt, Artificial Sequence
  Description of Artificial Sequence: Synthetic oligonucleotide
uguuguaaugauuaccuga

SEQ ID NO: 3102740 - RNA, 19 nt, Artificial Sequence
  Description of Artificial Sequence: Synthetic oligonucleotide
aaaaccaauuuuccaguag

SEQ ID NO: 3102741 - RNA, 19 nt, Artificial Sequence
  Description of Artificial Sequence: Synthetic oligonucleotide
aaaccaauuuuccaguaga

SEQ ID NO: 3102742 - RNA, 19 nt, Artificial Sequence
  Description of Artificial Sequence: Synthetic oligonucleotide
uucauaggguccuaaaacc

SEQ ID NO: 3102743 - RNA, 19 nt, Artificial Sequence
  Description of Artificial Sequence: Synthetic oligonucleotide
ucauauaugguguuucaug

SEQ ID NO: 3102744 - RNA, 19 nt, Artificial Sequence
  Description of Artificial Sequence: Synthetic oligonucleotide
ggucuuauaagaucuaggg

SEQ ID NO: 3102745 - RNA, 19 nt, Artificial Sequence
  Description of Artificial Sequence: Synthetic oligonucleotide
cauguaagguacauaaaag

SEQ ID NO: 3102746 - RNA, 19 nt, Artificial Sequence
  Description of Artificial Sequence: Synthetic oligonucleotide
uaugguguuucauguaagg

SEQ ID NO: 3102747 - RNA, 19 nt, Artificial Sequence
  Description of Artificial Sequence: Synthetic oligonucleotide
uguaagguacauaaaaguu

SEQ ID NO: 3102748 - RNA, 19 nt, Artificial Sequence
  Description of Artificial Sequence: Synthetic oligonucleotide
uauaugguguuucauguaa

SEQ ID NO: 3102749 - RNA, 19 nt, Artificial Sequence
  Description of Artificial Sequence: Synthetic oligonucleotide
uacauaaaaguucaccaaa

SEQ ID NO: 3102750 - RNA, 19 nt, Artificial Sequence
  Description of Artificial Sequence: Synthetic oligonucleotide
agguacauaaaaguucacc

SEQ ID NO: 3102751 - RNA, 19 nt, Artificial Sequence
  Description of Artificial Sequence: Synthetic oligonucleotide
auuaccugaaggaacauag

SEQ ID NO: 3102752 - RNA, 19 nt, Artificial Sequence
  Description of Artificial Sequence: Synthetic oligonucleotide
auguaagguacauaaaagu

SEQ ID NO: 3102753 - RNA, 19 nt, Artificial Sequence
  Description of Artificial Sequence: Synthetic oligonucleotide
aaggaacauagaaugaauc

SEQ ID NO: 3102754 - RNA, 19 nt, Artificial Sequence
  Description of Artificial Sequence: Synthetic oligonucleotide
uggucuuauaagaucuagg

SEQ ID NO: 3102755 - RNA, 19 nt, Artificial Sequence
  Description of Artificial Sequence: Synthetic oligonucleotide
aaguucaccaaaguuaaca

SEQ ID NO: 3102756 - RNA, 19 nt, Artificial Sequence
  Description of Artificial Sequence: Synthetic oligonucleotide
acuuuccacauucaagagg

SEQ ID NO: 3102757 - RNA, 19 nt, Artificial Sequence
  Description of Artificial Sequence: Synthetic oligonucleotide
guaaugauuaccugaagga

SEQ ID NO: 3102758 - RNA, 19 nt, Artificial Sequence
  Description of Artificial Sequence: Synthetic oligonucleotide
uaguuaucauauauggugu

SEQ ID NO: 3102759 - RNA, 19 nt, Artificial Sequence
  Description of Artificial Sequence: Synthetic oligonucleotide
gaacauagaaugaaucacc

SEQ ID NO: 3102760 - RNA, 19 nt, Artificial Sequence
  Description of Artificial Sequence: Synthetic oligonucleotide
aaaaguucaccaaaguuaa

SEQ ID NO: 3102761 - RNA, 19 nt, Artificial Sequence
  Description of Artificial Sequence: Synthetic oligonucleotide
auaaaaguucaccaaaguu

SEQ ID NO: 3102762 - RNA, 19 nt, Artificial Sequence
  Description of Artificial Sequence: Synthetic oligonucleotide
gucuuauaagaucuagggg

SEQ ID NO: 3102763 - RNA, 19 nt, Artificial Sequence
  Description of Artificial Sequence: Synthetic oligonucleotide
aaaaugcuguauccaaugu

SEQ ID NO: 3102764 - RNA, 19 nt, Artificial Sequence
  Description of Artificial Sequence: Synthetic oligonucleotide
uaauguuguaaugauuacc

SEQ ID NO: 3102765 - RNA, 19 nt, Artificial Sequence
  Description of Artificial Sequence: Synthetic oligonucleotide
cuucauaggguccuaaaac

SEQ ID NO: 3102766 - RNA, 19 nt, Artificial Sequence
  Description of Artificial Sequence: Synthetic oligonucleotide
ucaccaguaguuaucauau

SEQ ID NO: 3102767 - RNA, 19 nt, Artificial Sequence
  Description of Artificial Sequence: Synthetic oligonucleotide
uagaaugaaucaccaguag

SEQ ID NO: 3102768 - RNA, 19 nt, Artificial Sequence
  Description of Artificial Sequence: Synthetic oligonucleotide
ccuaaaaccaauuuuccag

SEQ ID NO: 3102769 - RNA, 19 nt, Artificial Sequence
  Description of Artificial Sequence: Synthetic oligonucleotide
ucauaggguccuaaaacca

SEQ ID NO: 3102770 - RNA, 19 nt, Artificial Sequence
  Description of Artificial Sequence: Synthetic oligonucleotide
aucuuggccaacaugcugc

SEQ ID NO: 3102771 - RNA, 19 nt, Artificial Sequence
  Description of Artificial Sequence: Synthetic oligonucleotide
agaaugaaucaccaguagu

SEQ ID NO: 3102772 - RNA, 19 nt, Artificial Sequence
  Description of Artificial Sequence: Synthetic oligonucleotide
ucguggucuuauaagaucu

SEQ ID NO: 3102773 - RNA, 19 nt, Artificial Sequence
  Description of Artificial Sequence: Synthetic oligonucleotide
uaucucguggucuuauaag

SEQ ID NO: 3102774 - RNA, 19 nt, Artificial Sequence
  Description of Artificial Sequence: Synthetic oligonucleotide
gguacauaaaaguucacca

SEQ ID NO: 3102775 - RNA, 19 nt, Artificial Sequence
  Description of Artificial Sequence: Synthetic oligonucleotide
ccugaaggaacauagaaug

SEQ ID NO: 3102776 - RNA, 19 nt, Artificial Sequence
  Description of Artificial Sequence: Synthetic oligonucleotide
uaccugaaggaacauagaa

SEQ ID NO: 3102777 - RNA, 19 nt, Artificial Sequence
  Description of Artificial Sequence: Synthetic oligonucleotide
aacauagaaugaaucacca

SEQ ID NO: 3102778 - RNA, 19 nt, Artificial Sequence
  Description of Artificial Sequence: Synthetic oligonucleotide
uccuaaaaccaauuuucca

SEQ ID NO: 3102779 - RNA, 19 nt, Artificial Sequence
  Description of Artificial Sequence: Synthetic oligonucleotide
ucuucauaggguccuaaaa

SEQ ID NO: 3102780 - RNA, 19 nt, Artificial Sequence
  Description of Artificial Sequence: Synthetic oligonucleotide
aaugcuguauccaauguuu

SEQ ID NO: 3102781 - RNA, 19 nt, Artificial Sequence
  Description of Artificial Sequence: Synthetic oligonucleotide
uuaauguuguaaugauuac

SEQ ID NO: 3102782 - RNA, 19 nt, Artificial Sequence
  Description of Artificial Sequence: Synthetic oligonucleotide
ugaaucaccaguaguuauc

SEQ ID NO: 3102783 - RNA, 19 nt, Artificial Sequence
  Description of Artificial Sequence: Synthetic oligonucleotide
aauauaucuuggccaacau

SEQ ID NO: 3102784 - RNA, 19 nt, Artificial Sequence
  Description of Artificial Sequence: Synthetic oligonucleotide
caaaccauguugcuccacg

SEQ ID NO: 3102785 - RNA, 19 nt, Artificial Sequence
  Description of Artificial Sequence: Synthetic oligonucleotide
uuuuaauguuguaaugauu

SEQ ID NO: 3102786 - RNA, 19 nt, Artificial Sequence
  Description of Artificial Sequence: Synthetic oligonucleotide
accaguaguuaucauauau

SEQ ID NO: 3102787 - RNA, 19 nt, Artificial Sequence
  Description of Artificial Sequence: Synthetic oligonucleotide
auauaucuuggccaacaug

SEQ ID NO: 3102788 - RNA, 19 nt, Artificial Sequence
  Description of Artificial Sequence: Synthetic oligonucleotide
aaaugcuguauccaauguu

SEQ ID NO: 3102789 - RNA, 19 nt, Artificial Sequence
  Description of Artificial Sequence: Synthetic oligonucleotide
uaucauauaugguguuuca

SEQ ID NO: 3102790 - RNA, 19 nt, Artificial Sequence
  Description of Artificial Sequence: Synthetic oligonucleotide
ugguguuucauguaaggua

SEQ ID NO: 3102791 - RNA, 19 nt, Artificial Sequence
  Description of Artificial Sequence: Synthetic oligonucleotide
uaucuuggccaacaugcug

SEQ ID NO: 3102792 - RNA, 19 nt, Artificial Sequence
  Description of Artificial Sequence: Synthetic oligonucleotide
uuaucauauaugguguuuc

SEQ ID NO: 3102793 - RNA, 19 nt, Artificial Sequence
  Description of Artificial Sequence: Synthetic oligonucleotide
acauaaaaguucaccaaag

SEQ ID NO: 3102794 - RNA, 19 nt, Artificial Sequence
  Description of Artificial Sequence: Synthetic oligonucleotide
aucucguggucuuauaaga

SEQ ID NO: 3102795 - RNA, 19 nt, Artificial Sequence
  Description of Artificial Sequence: Synthetic oligonucleotide
acauagaaugaaucaccag

SEQ ID NO: 3102796 - RNA, 19 nt, Artificial Sequence
  Description of Artificial Sequence: Synthetic oligonucleotide
uaaugauuaccugaaggaa

SEQ ID NO: 3102797 - RNA, 19 nt, Artificial Sequence
  Description of Artificial Sequence: Synthetic oligonucleotide
cauagaaugaaucaccagu

SEQ ID NO: 3102798 - RNA, 19 nt, Artificial Sequence
  Description of Artificial Sequence: Synthetic oligonucleotide
accaauauaucuuggccaa

SEQ ID NO: 3102799 - RNA, 19 nt, Artificial Sequence
  Description of Artificial Sequence: Synthetic oligonucleotide
uuguaaugauuaccugaag

SEQ ID NO: 3102800 - RNA, 19 nt, Artificial Sequence
  Description of Artificial Sequence: Synthetic oligonucleotide
aguucaccaaaguuaacau

SEQ ID NO: 3102801 - RNA, 19 nt, Artificial Sequence
  Description of Artificial Sequence: Synthetic oligonucleotide
cuuuccacauucaagaggu

SEQ ID NO: 3102802 - RNA, 19 nt, Artificial Sequence
  Description of Artificial Sequence: Synthetic oligonucleotide
aaugaaucaccaguaguua

SEQ ID NO: 3102803 - RNA, 19 nt, Artificial Sequence
  Description of Artificial Sequence: Synthetic oligonucleotide
uccacauucaagagguuuu

SEQ ID NO: 3102804 - RNA, 19 nt, Artificial Sequence
  Description of Artificial Sequence: Synthetic oligonucleotide
aucaccaguaguuaucaua

SEQ ID NO: 3102805 - RNA, 19 nt, Artificial Sequence
  Description of Artificial Sequence: Synthetic oligonucleotide
aacugguauguaucucgug

SEQ ID NO: 3102806 - RNA, 19 nt, Artificial Sequence
  Description of Artificial Sequence: Synthetic oligonucleotide
uuaccugaaggaacauaga

SEQ ID NO: 3102807 - RNA, 19 nt, Artificial Sequence
  Description of Artificial Sequence: Synthetic oligonucleotide
augauuaccugaaggaaca

SEQ ID NO: 3102808 - RNA, 19 nt, Artificial Sequence
  Description of Artificial Sequence: Synthetic oligonucleotide
cauauaugguguuucaugu

SEQ ID NO: 3102809 - RNA, 19 nt, Artificial Sequence
  Description of Artificial Sequence: Synthetic oligonucleotide
guacauaaaaguucaccaa

SEQ ID NO: 3102810 - RNA, 19 nt, Artificial Sequence
  Description of Artificial Sequence: Synthetic oligonucleotide
uucauguaagguacauaaa

SEQ ID NO: 3102811 - RNA, 19 nt, Artificial Sequence
  Description of Artificial Sequence: Synthetic oligonucleotide
gguguuucauguaagguac

SEQ ID NO: 3102812 - RNA, 19 nt, Artificial Sequence
  Description of Artificial Sequence: Synthetic oligonucleotide
ggaacauagaaugaaucac

SEQ ID NO: 3102813 - RNA, 19 nt, Artificial Sequence
  Description of Artificial Sequence: Synthetic oligonucleotide
uaaaaccaauuuuccagua

SEQ ID NO: 3102814 - RNA, 19 nt, Artificial Sequence
  Description of Artificial Sequence: Synthetic oligonucleotide
gguccuaaaaccaauuuuc

SEQ ID NO: 3102815 - RNA, 19 nt, Artificial Sequence
  Description of Artificial Sequence: Synthetic oligonucleotide
aaaguucaccaaaguuaac

SEQ ID NO: 3102816 - RNA, 19 nt, Artificial Sequence
  Description of Artificial Sequence: Synthetic oligonucleotide
augaaucaccaguaguuau

SEQ ID NO: 3102817 - RNA, 19 nt, Artificial Sequence
  Description of Artificial Sequence: Synthetic oligonucleotide
guuguaaugauuaccugaa

SEQ ID NO: 3102818 - RNA, 19 nt, Artificial Sequence
  Description of Artificial Sequence: Synthetic oligonucleotide
auguuguaaugauuaccug

SEQ ID NO: 3102819 - RNA, 19 nt, Artificial Sequence
  Description of Artificial Sequence: Synthetic oligonucleotide
gaaucaccaguaguuauca

SEQ ID NO: 3102820 - RNA, 19 nt, Artificial Sequence
  Description of Artificial Sequence: Synthetic oligonucleotide
ucucguggucuuauaagau

SEQ ID NO: 3102821 - RNA, 19 nt, Artificial Sequence
  Description of Artificial Sequence: Synthetic oligonucleotide
auagaaugaaucaccagua

SEQ ID NO: 3102822 - RNA, 19 nt, Artificial Sequence
  Description of Artificial Sequence: Synthetic oligonucleotide
cucguggucuuauaagauc

SEQ ID NO: 3102823 - RNA, 19 nt, Artificial Sequence
  Description of Artificial Sequence: Synthetic oligonucleotide
aguaguuaucauauauggu

SEQ ID NO: 3102824 - RNA, 19 nt, Artificial Sequence
  Description of Artificial Sequence: Synthetic oligonucleotide
aagguacauaaaaguucac

SEQ ID NO: 3102825 - RNA, 19 nt, Artificial Sequence
  Description of Artificial Sequence: Synthetic oligonucleotide
aaccauguugcuccacgaa

SEQ ID NO: 3102826 - RNA, 19 nt, Artificial Sequence
  Description of Artificial Sequence: Synthetic oligonucleotide
guccuaaaaccaauuuucc

SEQ ID NO: 3102827 - RNA, 19 nt, Artificial Sequence
  Description of Artificial Sequence: Synthetic oligonucleotide
ccaauuuuccaguagaaaa

SEQ ID NO: 3102828 - RNA, 19 nt, Artificial Sequence
  Description of Artificial Sequence: Synthetic oligonucleotide
gaaugaaucaccaguaguu

SEQ ID NO: 3102829 - RNA, 19 nt, Artificial Sequence
  Description of Artificial Sequence: Synthetic oligonucleotide
ugguauguaucucgugguc

SEQ ID NO: 3102830 - RNA, 19 nt, Artificial Sequence
  Description of Artificial Sequence: Synthetic oligonucleotide
accauguugcuccacgaaa

SEQ ID NO: 3102831 - RNA, 19 nt, Artificial Sequence
  Description of Artificial Sequence: Synthetic oligonucleotide
aaacugguauguaucucgu

SEQ ID NO: 3102832 - RNA, 19 nt, Artificial Sequence
  Description of Artificial Sequence: Synthetic oligonucleotide
ucaccaaaguuaacauaaa

SEQ ID NO: 3102833 - RNA, 19 nt, Artificial Sequence
  Description of Artificial Sequence: Synthetic oligonucleotide
uguuucauguaagguacau

SEQ ID NO: 3102834 - RNA, 19 nt, Artificial Sequence
  Description of Artificial Sequence: Synthetic oligonucleotide
aguuaucauauaugguguu

SEQ ID NO: 3102835 - RNA, 19 nt, Artificial Sequence
  Description of Artificial Sequence: Synthetic oligonucleotide
guggucuuauaagaucuag

SEQ ID NO: 3102836 - RNA, 19 nt, Artificial Sequence
  Description of Artificial Sequence: Synthetic oligonucleotide
cuaaaaccaauuuuccagu

SEQ ID NO: 3102837 - RNA, 19 nt, Artificial Sequence
  Description of Artificial Sequence: Synthetic oligonucleotide
ccaguaguuaucauauaug

SEQ ID NO: 3102838 - RNA, 19 nt, Artificial Sequence
  Description of Artificial Sequence: Synthetic oligonucleotide
auaugguguuucauguaag

SEQ ID NO: 3102839 - RNA, 19 nt, Artificial Sequence
  Description of Artificial Sequence: Synthetic oligonucleotide
uucuucauaggguccuaaa

SEQ ID NO: 3102840 - RNA, 19 nt, Artificial Sequence
  Description of Artificial Sequence: Synthetic oligonucleotide
auauaugguguuucaugua

SEQ ID NO: 3102841 - RNA, 19 nt, Artificial Sequence
  Description of Artificial Sequence: Synthetic oligonucleotide
caauauaucuuggccaaca

SEQ ID NO: 3102842 - RNA, 19 nt, Artificial Sequence
  Description of Artificial Sequence: Synthetic oligonucleotide
ugcuguauccaauguuuua

SEQ ID NO: 3102843 - RNA, 19 nt, Artificial Sequence
  Description of Artificial Sequence: Synthetic oligonucleotide
aaccaauuuuccaguagaa

SEQ ID NO: 3102844 - RNA, 19 nt, Artificial Sequence
  Description of Artificial Sequence: Synthetic oligonucleotide
uuccacauucaagagguuu

SEQ ID NO: 3102845 - RNA, 19 nt, Artificial Sequence
  Description of Artificial Sequence: Synthetic oligonucleotide
guaucucguggucuuauaa

SEQ ID NO: 3102846 - RNA, 19 nt, Artificial Sequence
  Description of Artificial Sequence: Synthetic oligonucleotide
aaucaccaguaguuaucau

SEQ ID NO: 3102847 - RNA, 19 nt, Artificial Sequence
  Description of Artificial Sequence: Synthetic oligonucleotide
uucaaaccauguugcucca

SEQ ID NO: 3102848 - RNA, 19 nt, Artificial Sequence
  Description of Artificial Sequence: Synthetic oligonucleotide
cauaggguccuaaaaccaa

SEQ ID NO: 3102849 - RNA, 19 nt, Artificial Sequence
  Description of Artificial Sequence: Synthetic oligonucleotide
aacaugcugcuuuccuuuu

SEQ ID NO: 3102850 - RNA, 19 nt, Artificial Sequence
  Description of Artificial Sequence: Synthetic oligonucleotide
cauaaaaguucaccaaagu

SEQ ID NO: 3102851 - RNA, 19 nt, Artificial Sequence
  Description of Artificial Sequence: Synthetic oligonucleotide
accugaaggaacauagaau

SEQ ID NO: 3102852 - RNA, 19 nt, Artificial Sequence
  Description of Artificial Sequence: Synthetic oligonucleotide
aucauauaugguguuucau

SEQ ID NO: 3102853 - RNA, 19 nt, Artificial Sequence
  Description of Artificial Sequence: Synthetic oligonucleotide
ucuuggccaacaugcugcu

SEQ ID NO: 3102854 - RNA, 19 nt, Artificial Sequence
  Description of Artificial Sequence: Synthetic oligonucleotide
uaggguccuaaaaccaauu

SEQ ID NO: 3102855 - RNA, 19 nt, Artificial Sequence
  Description of Artificial Sequence: Synthetic oligonucleotide
aggguccuaaaaccaauuu

SEQ ID NO: 3102856 - RNA, 19 nt, Artificial Sequence
  Description of Artificial Sequence: Synthetic oligonucleotide
caccaaaguuaacauaaaa

SEQ ID NO: 3102857 - RNA, 19 nt, Artificial Sequence
  Description of Artificial Sequence: Synthetic oligonucleotide
uguaucucguggucuuaua

SEQ ID NO: 3102858 - RNA, 19 nt, Artificial Sequence
  Description of Artificial Sequence: Synthetic oligonucleotide
uuucuucauaggguccuaa

SEQ ID NO: 3102859 - RNA, 19 nt, Artificial Sequence
  Description of Artificial Sequence: Synthetic oligonucleotide
gaaggaacauagaaugaau

SEQ ID NO: 3102860 - RNA, 19 nt, Artificial Sequence
  Description of Artificial Sequence: Synthetic oligonucleotide
gauuaccugaaggaacaua

SEQ ID NO: 3102861 - RNA, 19 nt, Artificial Sequence
  Description of Artificial Sequence: Synthetic oligonucleotide
auaucuuggccaacaugcu

SEQ ID NO: 3102862 - RNA, 19 nt, Artificial Sequence
  Description of Artificial Sequence: Synthetic oligonucleotide
auaggguccuaaaaccaau

SEQ ID NO: 3102863 - RNA, 19 nt, Artificial Sequence
  Description of Artificial Sequence: Synthetic oligonucleotide
gcuguauccaauguuuuaa

SEQ ID NO: 3102864 - RNA, 19 nt, Artificial Sequence
  Description of Artificial Sequence: Synthetic oligonucleotide
uggccaacaugcugcuuuc

SEQ ID NO: 3102865 - RNA, 19 nt, Artificial Sequence
  Description of Artificial Sequence: Synthetic oligonucleotide
ucaaaccauguugcuccac

SEQ ID NO: 3102866 - RNA, 19 nt, Artificial Sequence
  Description of Artificial Sequence: Synthetic oligonucleotide
uauguaucucguggucuua

SEQ ID NO: 3102867 - RNA, 19 nt, Artificial Sequence
  Description of Artificial Sequence: Synthetic oligonucleotide
ugauuaccugaaggaacau

SEQ ID NO: 3102868 - RNA, 19 nt, Artificial Sequence
  Description of Artificial Sequence: Synthetic oligonucleotide
uuuucuucauaggguccua

SEQ ID NO: 3102869 - RNA, 19 nt, Artificial Sequence
  Description of Artificial Sequence: Synthetic oligonucleotide
cugguauguaucucguggu

SEQ ID NO: 3102870 - RNA, 19 nt, Artificial Sequence
  Description of Artificial Sequence: Synthetic oligonucleotide
auguaucucguggucuuau

SEQ ID NO: 3102871 - RNA, 19 nt, Artificial Sequence
  Description of Artificial Sequence: Synthetic oligonucleotide
guuucauguaagguacaua

SEQ ID NO: 3102872 - RNA, 19 nt, Artificial Sequence
  Description of Artificial Sequence: Synthetic oligonucleotide
guauguaucucguggucuu

SEQ ID NO: 3102873 - RNA, 19 nt, Artificial Sequence
  Description of Artificial Sequence: Synthetic oligonucleotide
uuuccacauucaagagguu

SEQ ID NO: 3102874 - RNA, 19 nt, Artificial Sequence
  Description of Artificial Sequence: Synthetic oligonucleotide
caacaugcugcuuuccuuu

SEQ ID NO: 3102875 - RNA, 19 nt, Artificial Sequence
  Description of Artificial Sequence: Synthetic oligonucleotide
gguauguaucucguggucu

SEQ ID NO: 3102876 - RNA, 19 nt, Artificial Sequence
  Description of Artificial Sequence: Synthetic oligonucleotide
ccauguugcuccacgaaaa

SEQ ID NO: 3102877 - RNA, 19 nt, Artificial Sequence
  Description of Artificial Sequence: Synthetic oligonucleotide
augcuguauccaauguuuu

SEQ ID NO: 3102878 - RNA, 19 nt, Artificial Sequence
  Description of Artificial Sequence: Synthetic oligonucleotide
guguuucauguaagguaca

SEQ ID NO: 3102879 - RNA, 19 nt, Artificial Sequence
  Description of Artificial Sequence: Synthetic oligonucleotide
gccaacaugcugcuuuccu

SEQ ID NO: 3102880 - RNA, 19 nt, Artificial Sequence
  Description of Artificial Sequence: Synthetic oligonucleotide
ccaauauaucuuggccaac

SEQ ID NO: 3102881 - RNA, 19 nt, Artificial Sequence
  Description of Artificial Sequence: Synthetic oligonucleotide
caccaguaguuaucauaua

SEQ ID NO: 3102882 - RNA, 19 nt, Artificial Sequence
  Description of Artificial Sequence: Synthetic oligonucleotide
ggccaacaugcugcuuucc

SEQ ID NO: 3102883 - RNA, 19 nt, Artificial Sequence
  Description of Artificial Sequence: Synthetic oligonucleotide
cguggucuuauaagaucua

SEQ ID NO: 3102884 - RNA, 19 nt, Artificial Sequence
  Description of Artificial Sequence: Synthetic oligonucleotide
cuuggccaacaugcugcuu

SEQ ID NO: 3102885 - RNA, 19 nt, Artificial Sequence
  Description of Artificial Sequence: Synthetic oligonucleotide
aaauguuguguuuugauac

SEQ ID NO: 3102886 - RNA, 19 nt, Artificial Sequence
  Description of Artificial Sequence: Synthetic oligonucleotide
uuugauacgccacagggcc

SEQ ID NO: 3102887 - RNA, 19 nt, Artificial Sequence
  Description of Artificial Sequence: Synthetic oligonucleotide
gaugagaugauguuuguug

SEQ ID NO: 3102888 - RNA, 19 nt, Artificial Sequence
  Description of Artificial Sequence: Synthetic oligonucleotide
aauguuguguuuugauacg

SEQ ID NO: 3102889 - RNA, 19 nt, Artificial Sequence
  Description of Artificial Sequence: Synthetic oligonucleotide
guuuucugguucuugaucg

SEQ ID NO: 3102890 - RNA, 19 nt, Artificial Sequence
  Description of Artificial Sequence: Synthetic oligonucleotide
aauggguaauccuuuucac

SEQ ID NO: 3102891 - RNA, 19 nt, Artificial Sequence
  Description of Artificial Sequence: Synthetic oligonucleotide
guuuugauacgccacaggg

SEQ ID NO: 3102892 - RNA, 19 nt, Artificial Sequence
  Description of Artificial Sequence: Synthetic oligonucleotide
auguuuguugcuuuacgcc

SEQ ID NO: 3102893 - RNA, 19 nt, Artificial Sequence
  Description of Artificial Sequence: Synthetic oligonucleotide
augagaugauguuuguugc

SEQ ID NO: 3102894 - RNA, 19 nt, Artificial Sequence
  Description of Artificial Sequence: Synthetic oligonucleotide
uucuugaucgaugagauga

SEQ ID NO: 3102895 - RNA, 19 nt, Artificial Sequence
  Description of Artificial Sequence: Synthetic oligonucleotide
ucauauaugcaucccacac

SEQ ID NO: 3102896 - RNA, 19 nt, Artificial Sequence
  Description of Artificial Sequence: Synthetic oligonucleotide
gauguuuguugcuuuacgc

SEQ ID NO: 3102897 - RNA, 19 nt, Artificial Sequence
  Description of Artificial Sequence: Synthetic oligonucleotide
uggguaauccuuuucacug

SEQ ID NO: 3102898 - RNA, 19 nt, Artificial Sequence
  Description of Artificial Sequence: Synthetic oligonucleotide
uaugcaucccacacgaagc

SEQ ID NO: 3102899 - RNA, 19 nt, Artificial Sequence
  Description of Artificial Sequence: Synthetic oligonucleotide
ugauguuuguugcuuuacg

SEQ ID NO: 3102900 - RNA, 19 nt, Artificial Sequence
  Description of Artificial Sequence: Synthetic oligonucleotide
auauaugcaucccacacga

SEQ ID NO: 3102901 - RNA, 19 nt, Artificial Sequence
  Description of Artificial Sequence: Synthetic oligonucleotide
aaaauguuguguuuugaua

SEQ ID NO: 3102902 - RNA, 19 nt, Artificial Sequence
  Description of Artificial Sequence: Synthetic oligonucleotide
auaugcaucccacacgaag

SEQ ID NO: 3102903 - RNA, 19 nt, Artificial Sequence
  Description of Artificial Sequence: Synthetic oligonucleotide
uguuuguugcuuuacgcca

SEQ ID NO: 3102904 - RNA, 19 nt, Artificial Sequence
  Description of Artificial Sequence: Synthetic oligonucleotide
uuuugauacgccacagggc

SEQ ID NO: 3102905 - RNA, 19 nt, Artificial Sequence
  Description of Artificial Sequence: Synthetic oligonucleotide
uaauccuuuucacuggcca

SEQ ID NO: 3102906 - RNA, 19 nt, Artificial Sequence
  Description of Artificial Sequence: Synthetic oligonucleotide
aauccuuuucacuggccag

SEQ ID NO: 3102907 - RNA, 19 nt, Artificial Sequence
  Description of Artificial Sequence: Synthetic oligonucleotide
uugaucgaugagaugaugu

SEQ ID NO: 3102908 - RNA, 19 nt, Artificial Sequence
  Description of Artificial Sequence: Synthetic oligonucleotide
uguuuugauacgccacagg

SEQ ID NO: 3102909 - RNA, 19 nt, Artificial Sequence
  Description of Artificial Sequence: Synthetic oligonucleotide
uguguuuugauacgccaca

SEQ ID NO: 3102910 - RNA, 19 nt, Artificial Sequence
  Description of Artificial Sequence: Synthetic oligonucleotide
ugaggacagucauauaugc

SEQ ID NO: 3102911 - RNA, 19 nt, Artificial Sequence
  Description of Artificial Sequence: Synthetic oligonucleotide
cauauaugcaucccacacg

SEQ ID NO: 3102912 - RNA, 19 nt, Artificial Sequence
  Description of Artificial Sequence: Synthetic oligonucleotide
ugggguaccccuugaaugg

SEQ ID NO: 3102913 - RNA, 19 nt, Artificial Sequence
  Description of Artificial Sequence: Synthetic oligonucleotide
uugaggacagucauauaug

SEQ ID NO: 3102914 - RNA, 19 nt, Artificial Sequence
  Description of Artificial Sequence: Synthetic oligonucleotide
aggacagucauauaugcau

SEQ ID NO: 3102915 - RNA, 19 nt, Artificial Sequence
  Description of Artificial Sequence: Synthetic oligonucleotide
uggcuaggcacccaugggg

SEQ ID NO: 3102916 - RNA, 19 nt, Artificial Sequence
  Description of Artificial Sequence: Synthetic oligonucleotide
gaauggguaauccuuuuca

SEQ ID NO: 3102917 - RNA, 19 nt, Artificial Sequence
  Description of Artificial Sequence: Synthetic oligonucleotide
ucugguucuugaucgauga

SEQ ID NO: 3102918 - RNA, 19 nt, Artificial Sequence
  Description of Artificial Sequence: Synthetic oligonucleotide
uugggguaccccuugaaug

SEQ ID NO: 3102919 - RNA, 19 nt, Artificial Sequence
  Description of Artificial Sequence: Synthetic oligonucleotide
acuguuguugaggacaguc

SEQ ID NO: 3102920 - RNA, 19 nt, Artificial Sequence
  Description of Artificial Sequence: Synthetic oligonucleotide
guugcuuuacgccagucac

SEQ ID NO: 3102921 - RNA, 19 nt, Artificial Sequence
  Description of Artificial Sequence: Synthetic oligonucleotide
agucauauaugcaucccac

SEQ ID NO: 3102922 - RNA, 19 nt, Artificial Sequence
  Description of Artificial Sequence: Synthetic oligonucleotide
ugcacagagacuuccacaa

SEQ ID NO: 3102923 - RNA, 19 nt, Artificial Sequence
  Description of Artificial Sequence: Synthetic oligonucleotide
augcaucccacacgaagcc

SEQ ID NO: 3102924 - RNA, 19 nt, Artificial Sequence
  Description of Artificial Sequence: Synthetic oligonucleotide
uguuguguuuugauacgcc

SEQ ID NO: 3102925 - RNA, 19 nt, Artificial Sequence
  Description of Artificial Sequence: Synthetic oligonucleotide
uguuguugaggacagucau

SEQ ID NO: 3102926 - RNA, 19 nt, Artificial Sequence
  Description of Artificial Sequence: Synthetic oligonucleotide
aauguuguccgcugcugcu

SEQ ID NO: 3102927 - RNA, 19 nt, Artificial Sequence
  Description of Artificial Sequence: Synthetic oligonucleotide
uuccacagcgcucacaguc

SEQ ID NO: 3102928 - RNA, 19 nt, Artificial Sequence
  Description of Artificial Sequence: Synthetic oligonucleotide
agagacuuccacaaaaugu

SEQ ID NO: 3102929 - RNA, 19 nt, Artificial Sequence
  Description of Artificial Sequence: Synthetic oligonucleotide
ugcuuuacgccagucacag

SEQ ID NO: 3102930 - RNA, 19 nt, Artificial Sequence
  Description of Artificial Sequence: Synthetic oligonucleotide
uguugcuuuacgccaguca

SEQ ID NO: 3102931 - RNA, 19 nt, Artificial Sequence
  Description of Artificial Sequence: Synthetic oligonucleotide
cacgaagccaccaucgcag

SEQ ID NO: 3102932 - RNA, 19 nt, Artificial Sequence
  Description of Artificial Sequence: Synthetic oligonucleotide
auguuguguuuugauacgc

SEQ ID NO: 3102933 - RNA, 19 nt, Artificial Sequence
  Description of Artificial Sequence: Synthetic oligonucleotide
cucacaguccagcagcucc

SEQ ID NO: 3102934 - RNA, 19 nt, Artificial Sequence
  Description of Artificial Sequence: Synthetic oligonucleotide
gcugcuauggcccagcagc

SEQ ID NO: 3102935 - RNA, 19 nt, Artificial Sequence
  Description of Artificial Sequence: Synthetic oligonucleotide
uuguguuuugauacgccac

SEQ ID NO: 3102936 - RNA, 19 nt, Artificial Sequence
  Description of Artificial Sequence: Synthetic oligonucleotide
acagucauauaugcauccc

SEQ ID NO: 3102937 - RNA, 19 nt, Artificial Sequence
  Description of Artificial Sequence: Synthetic oligonucleotide
ugguucuugaucgaugaga

SEQ ID NO: 3102938 - RNA, 19 nt, Artificial Sequence
  Description of Artificial Sequence: Synthetic oligonucleotide
uuguugaggacagucauau

SEQ ID NO: 3102939 - RNA, 19 nt, Artificial Sequence
  Description of Artificial Sequence: Synthetic oligonucleotide
aucgaugagaugauguuug

SEQ ID NO: 3102940 - RNA, 19 nt, Artificial Sequence
  Description of Artificial Sequence: Synthetic oligonucleotide
uuggcuaggcacccauggg

SEQ ID NO: 3102941 - RNA, 19 nt, Artificial Sequence
  Description of Artificial Sequence: Synthetic oligonucleotide
uuccacaaaauguuguguu

SEQ ID NO: 3102942 - RNA, 19 nt, Artificial Sequence
  Description of Artificial Sequence: Synthetic oligonucleotide
auggguaauccuuuucacu

SEQ ID NO: 3102943 - RNA, 19 nt, Artificial Sequence
  Description of Artificial Sequence: Synthetic oligonucleotide
uucugguucuugaucgaug

SEQ ID NO: 3102944 - RNA, 19 nt, Artificial Sequence
  Description of Artificial Sequence: Synthetic oligonucleotide
ugagaugauguuuguugcu

SEQ ID NO: 3102945 - RNA, 19 nt, Artificial Sequence
  Description of Artificial Sequence: Synthetic oligonucleotide
ugaauggguaauccuuuuc

SEQ ID NO: 3102946 - RNA, 19 nt, Artificial Sequence
  Description of Artificial Sequence: Synthetic oligonucleotide
cuuuucacuggccaggcca

SEQ ID NO: 3102947 - RNA, 19 nt, Artificial Sequence
  Description of Artificial Sequence: Synthetic oligonucleotide
uuuucacuggccaggccac

SEQ ID NO: 3102948 - RNA, 19 nt, Artificial Sequence
  Description of Artificial Sequence: Synthetic oligonucleotide
cacaaaauguuguguuuug

SEQ ID NO: 3102949 - RNA, 19 nt, Artificial Sequence
  Description of Artificial Sequence: Synthetic oligonucleotide
augauguuuguugcuuuac

SEQ ID NO: 3102950 - RNA, 19 nt, Artificial Sequence
  Description of Artificial Sequence: Synthetic oligonucleotide
uccacagcgcucacagucc

SEQ ID NO: 3102951 - RNA, 19 nt, Artificial Sequence
  Description of Artificial Sequence: Synthetic oligonucleotide
ugaucgaugagaugauguu

SEQ ID NO: 3102952 - RNA, 19 nt, Artificial Sequence
  Description of Artificial Sequence: Synthetic oligonucleotide
auccuuuucacuggccagg

SEQ ID NO: 3102953 - RNA, 19 nt, Artificial Sequence
  Description of Artificial Sequence: Synthetic oligonucleotide
uuguccgcugcugcuaugg

SEQ ID NO: 3102954 - RNA, 19 nt, Artificial Sequence
  Description of Artificial Sequence: Synthetic oligonucleotide
caauguuguccgcugcugc

SEQ ID NO: 3102955 - RNA, 19 nt, Artificial Sequence
  Description of Artificial Sequence: Synthetic oligonucleotide
cuuuacgccagucacaggu

SEQ ID NO: 3102956 - RNA, 19 nt, Artificial Sequence
  Description of Artificial Sequence: Synthetic oligonucleotide
agcaccugcagguuuucug

SEQ ID NO: 3102957 - RNA, 19 nt, Artificial Sequence
  Description of Artificial Sequence: Synthetic oligonucleotide
uuuucugguucuugaucga

SEQ ID NO: 3102958 - RNA, 19 nt, Artificial Sequence
  Description of Artificial Sequence: Synthetic oligonucleotide
uugcuuuacgccagucaca

SEQ ID NO: 3102959 - RNA, 19 nt, Artificial Sequence
  Description of Artificial Sequence: Synthetic oligonucleotide
ucaauguuguccgcugcug

SEQ ID NO: 3102960 - RNA, 19 nt, Artificial Sequence
  Description of Artificial Sequence: Synthetic oligonucleotide
ucuugaucgaugagaugau

SEQ ID NO: 3102961 - RNA, 19 nt, Artificial Sequence
  Description of Artificial Sequence: Synthetic oligonucleotide
acgaagccaccaucgcagc

SEQ ID NO: 3102962 - RNA, 19 nt, Artificial Sequence
  Description of Artificial Sequence: Synthetic oligonucleotide
uccacaaaauguuguguuu

SEQ ID NO: 3102963 - RNA, 19 nt, Artificial Sequence
  Description of Artificial Sequence: Synthetic oligonucleotide
guuuguugcuuuacgccag

SEQ ID NO: 3102964 - RNA, 19 nt, Artificial Sequence
  Description of Artificial Sequence: Synthetic oligonucleotide
caccaucgcagccauuucc

SEQ ID NO: 3102965 - RNA, 19 nt, Artificial Sequence
  Description of Artificial Sequence: Synthetic oligonucleotide
uuuguugcuuuacgccagu

SEQ ID NO: 3102966 - RNA, 19 nt, Artificial Sequence
  Description of Artificial Sequence: Synthetic oligonucleotide
acaguccagcagcuccugc

SEQ ID NO: 3102967 - RNA, 19 nt, Artificial Sequence
  Description of Artificial Sequence: Synthetic oligonucleotide
gguaauccuuuucacuggc

SEQ ID NO: 3102968 - RNA, 19 nt, Artificial Sequence
  Description of Artificial Sequence: Synthetic oligonucleotide
acacgaagccaccaucgca

SEQ ID NO: 3102969 - RNA, 19 nt, Artificial Sequence
  Description of Artificial Sequence: Synthetic oligonucleotide
acaaaauguuguguuuuga

SEQ ID NO: 3102970 - RNA, 19 nt, Artificial Sequence
  Description of Artificial Sequence: Synthetic oligonucleotide
gcaccugcagguuuucugg

SEQ ID NO: 3102971 - RNA, 19 nt, Artificial Sequence
  Description of Artificial Sequence: Synthetic oligonucleotide
ggguaauccuuuucacugg

SEQ ID NO: 3102972 - RNA, 19 nt, Artificial Sequence
  Description of Artificial Sequence: Synthetic oligonucleotide
gucauauaugcaucccaca

SEQ ID NO: 3102973 - RNA, 19 nt, Artificial Sequence
  Description of Artificial Sequence: Synthetic oligonucleotide
agcuccugcacagagacuu

SEQ ID NO: 3102974 - RNA, 19 nt, Artificial Sequence
  Description of Artificial Sequence: Synthetic oligonucleotide
gaagccaccaucgcagcca

SEQ ID NO: 3102975 - RNA, 19 nt, Artificial Sequence
  Description of Artificial Sequence: Synthetic oligonucleotide
agcgcucacaguccagcag

SEQ ID NO: 3102976 - RNA, 19 nt, Artificial Sequence
  Description of Artificial Sequence: Synthetic oligonucleotide
cacagagacuuccacaaaa

SEQ ID NO: 3102977 - RNA, 19 nt, Artificial Sequence
  Description of Artificial Sequence: Synthetic oligonucleotide
agaugauguuuguugcuuu

SEQ ID NO: 3102978 - RNA, 19 nt, Artificial Sequence
  Description of Artificial Sequence: Synthetic oligonucleotide
ucgaugagaugauguuugu

SEQ ID NO: 3102979 - RNA, 19 nt, Artificial Sequence
  Description of Artificial Sequence: Synthetic oligonucleotide
ugcugcuauggcccagcag

SEQ ID NO: 3102980 - RNA, 19 nt, Artificial Sequence
  Description of Artificial Sequence: Synthetic oligonucleotide
gagacuuccacaaaauguu

SEQ ID NO: 3102981 - RNA, 19 nt, Artificial Sequence
  Description of Artificial Sequence: Synthetic oligonucleotide
gguuuucugguucuugauc

SEQ ID NO: 3102982 - RNA, 19 nt, Artificial Sequence
  Description of Artificial Sequence: Synthetic oligonucleotide
guguuuugauacgccacag

SEQ ID NO: 3102983 - RNA, 19 nt, Artificial Sequence
  Description of Artificial Sequence: Synthetic oligonucleotide
ccacacgaagccaccaucg

SEQ ID NO: 3102984 - RNA, 19 nt, Artificial Sequence
  Description of Artificial Sequence: Synthetic oligonucleotide
uccugcacagagacuucca

SEQ ID NO: 3102985 - RNA, 19 nt, Artificial Sequence
  Description of Artificial Sequence: Synthetic oligonucleotide
gcagcuccugcacagagac

SEQ ID NO: 3102986 - RNA, 19 nt, Artificial Sequence
  Description of Artificial Sequence: Synthetic oligonucleotide
cagucauauaugcauccca

SEQ ID NO: 3102987 - RNA, 19 nt, Artificial Sequence
  Description of Artificial Sequence: Synthetic oligonucleotide
cuguuguugaggacaguca

SEQ ID NO: 3102988 - RNA, 19 nt, Artificial Sequence
  Description of Artificial Sequence: Synthetic oligonucleotide
cagguuuucugguucuuga

SEQ ID NO: 3102989 - RNA, 19 nt, Artificial Sequence
  Description of Artificial Sequence: Synthetic oligonucleotide
uccuuuucacuggccaggc

SEQ ID NO: 3102990 - RNA, 19 nt, Artificial Sequence
  Description of Artificial Sequence: Synthetic oligonucleotide
uguuguccgcugcugcuau

SEQ ID NO: 3102991 - RNA, 19 nt, Artificial Sequence
  Description of Artificial Sequence: Synthetic oligonucleotide
uugauacgccacagggccu

SEQ ID NO: 3102992 - RNA, 19 nt, Artificial Sequence
  Description of Artificial Sequence: Synthetic oligonucleotide
cacacgaagccaccaucgc

SEQ ID NO: 3102993 - RNA, 19 nt, Artificial Sequence
  Description of Artificial Sequence: Synthetic oligonucleotide
agacuuccacaaaauguug

SEQ ID NO: 3102994 - RNA, 19 nt, Artificial Sequence
  Description of Artificial Sequence: Synthetic oligonucleotide
cuugaucgaugagaugaug

SEQ ID NO: 3102995 - RNA, 19 nt, Artificial Sequence
  Description of Artificial Sequence: Synthetic oligonucleotide
uauaugcaucccacacgaa

SEQ ID NO: 3102996 - RNA, 19 nt, Artificial Sequence
  Description of Artificial Sequence: Synthetic oligonucleotide
caaaauguuguguuuugau

SEQ ID NO: 3102997 - RNA, 19 nt, Artificial Sequence
  Description of Artificial Sequence: Synthetic oligonucleotide
guucuugaucgaugagaug

SEQ ID NO: 3102998 - RNA, 19 nt, Artificial Sequence
  Description of Artificial Sequence: Synthetic oligonucleotide
agguuuucugguucuugau

SEQ ID NO: 3102999 - RNA, 19 nt, Artificial Sequence
  Description of Artificial Sequence: Synthetic oligonucleotide
uuucugguucuugaucgau

SEQ ID NO: 3103000 - RNA, 19 nt, Artificial Sequence
  Description of Artificial Sequence: Synthetic oligonucleotide
ugauacgccacagggccuc

SEQ ID NO: 3103001 - RNA, 19 nt, Artificial Sequence
  Description of Artificial Sequence: Synthetic oligonucleotide
guaauccuuuucacuggcc

SEQ ID NO: 3103002 - RNA, 19 nt, Artificial Sequence
  Description of Artificial Sequence: Synthetic oligonucleotide
caucccacacgaagccacc

SEQ ID NO: 3103003 - RNA, 19 nt, Artificial Sequence
  Description of Artificial Sequence: Synthetic oligonucleotide
accccuugaauggguaauc

SEQ ID NO: 3103004 - RNA, 19 nt, Artificial Sequence
  Description of Artificial Sequence: Synthetic oligonucleotide
gcuauggcccagcagcacc

SEQ ID NO: 3103005 - RNA, 19 nt, Artificial Sequence
  Description of Artificial Sequence: Synthetic oligonucleotide
gaggacagucauauaugca

SEQ ID NO: 3103006 - RNA, 19 nt, Artificial Sequence
  Description of Artificial Sequence: Synthetic oligonucleotide
acagagacuuccacaaaau

SEQ ID NO: 3103007 - RNA, 19 nt, Artificial Sequence
  Description of Artificial Sequence: Synthetic oligonucleotide
acgccacagggccucaaug

SEQ ID NO: 3103008 - RNA, 19 nt, Artificial Sequence
  Description of Artificial Sequence: Synthetic oligonucleotide
cugcacagagacuuccaca

SEQ ID NO: 3103009 - RNA, 19 nt, Artificial Sequence
  Description of Artificial Sequence: Synthetic oligonucleotide
uguccgcugcugcuauggc

SEQ ID NO: 3103010 - RNA, 19 nt, Artificial Sequence
  Description of Artificial Sequence: Synthetic oligonucleotide
cugguucuugaucgaugag

SEQ ID NO: 3103011 - RNA, 19 nt, Artificial Sequence
  Description of Artificial Sequence: Synthetic oligonucleotide
caucgcagccauuuccaca

SEQ ID NO: 3103012 - RNA, 19 nt, Artificial Sequence
  Description of Artificial Sequence: Synthetic oligonucleotide
accaucgcagccauuucca

SEQ ID NO: 3103013 - RNA, 19 nt, Artificial Sequence
  Description of Artificial Sequence: Synthetic oligonucleotide
cagcagcuccugcacagag

SEQ ID NO: 3103014 - RNA, 19 nt, Artificial Sequence
  Description of Artificial Sequence: Synthetic oligonucleotide
cuccugcacagagacuucc

SEQ ID NO: 3103015 - RNA, 19 nt, Artificial Sequence
  Description of Artificial Sequence: Synthetic oligonucleotide
uaccccuugaauggguaau

SEQ ID NO: 3103016 - RNA, 19 nt, Artificial Sequence
  Description of Artificial Sequence: Synthetic oligonucleotide
gccacuguuguugaggaca

SEQ ID NO: 3103017 - RNA, 19 nt, Artificial Sequence
  Description of Artificial Sequence: Synthetic oligonucleotide
gcgcucacaguccagcagc

SEQ ID NO: 3103018 - RNA, 19 nt, Artificial Sequence
  Description of Artificial Sequence: Synthetic oligonucleotide
cuugaauggguaauccuuu

SEQ ID NO: 3103019 - RNA, 19 nt, Artificial Sequence
  Description of Artificial Sequence: Synthetic oligonucleotide
uacgccacagggccucaau

SEQ ID NO: 3103020 - RNA, 19 nt, Artificial Sequence
  Description of Artificial Sequence: Synthetic oligonucleotide
uguugaggacagucauaua

SEQ ID NO: 3103021 - RNA, 19 nt, Artificial Sequence
  Description of Artificial Sequence: Synthetic oligonucleotide
gaucgaugagaugauguuu

SEQ ID NO: 3103022 - RNA, 19 nt, Artificial Sequence
  Description of Artificial Sequence: Synthetic oligonucleotide
ccacuguuguugaggacag

SEQ ID NO: 3103023 - RNA, 19 nt, Artificial Sequence
  Description of Artificial Sequence: Synthetic oligonucleotide
gccauuuccacagcgcuca

SEQ ID NO: 3103024 - RNA, 19 nt, Artificial Sequence
  Description of Artificial Sequence: Synthetic oligonucleotide
gagaugauguuuguugcuu

SEQ ID NO: 3103025 - RNA, 19 nt, Artificial Sequence
  Description of Artificial Sequence: Synthetic oligonucleotide
ggacagucauauaugcauc

SEQ ID NO: 3103026 - RNA, 19 nt, Artificial Sequence
  Description of Artificial Sequence: Synthetic oligonucleotide
ugcuauggcccagcagcac

SEQ ID NO: 3103027 - RNA, 19 nt, Artificial Sequence
  Description of Artificial Sequence: Synthetic oligonucleotide
ggccaggccacuguuguug

SEQ ID NO: 3103028 - RNA, 19 nt, Artificial Sequence
  Description of Artificial Sequence: Synthetic oligonucleotide
cugcuauggcccagcagca

SEQ ID NO: 3103029 - RNA, 19 nt, Artificial Sequence
  Description of Artificial Sequence: Synthetic oligonucleotide
cacagggccucaauguugu

SEQ ID NO: 3103030 - RNA, 19 nt, Artificial Sequence
  Description of Artificial Sequence: Synthetic oligonucleotide
accugcagguuuucugguu

SEQ ID NO: 3103031 - RNA, 19 nt, Artificial Sequence
  Description of Artificial Sequence: Synthetic oligonucleotide
cacagcgcucacaguccag

SEQ ID NO: 3103032 - RNA, 19 nt, Artificial Sequence
  Description of Artificial Sequence: Synthetic oligonucleotide
cuuccacaaaauguugugu

SEQ ID NO: 3103033 - RNA, 19 nt, Artificial Sequence
  Description of Artificial Sequence: Synthetic oligonucleotide
guaccccuugaauggguaa

SEQ ID NO: 3103034 - RNA, 19 nt, Artificial Sequence
  Description of Artificial Sequence: Synthetic oligonucleotide
uuguugcuuuacgccaguc

SEQ ID NO: 3103035 - RNA, 19 nt, Artificial Sequence
  Description of Artificial Sequence: Synthetic oligonucleotide
gguucuugaucgaugagau

SEQ ID NO: 3103036 - RNA, 19 nt, Artificial Sequence
  Description of Artificial Sequence: Synthetic oligonucleotide
guuguugaggacagucaua

SEQ ID NO: 3103037 - RNA, 19 nt, Artificial Sequence
  Description of Artificial Sequence: Synthetic oligonucleotide
gcagccauuuccacagcgc

SEQ ID NO: 3103038 - RNA, 19 nt, Artificial Sequence
  Description of Artificial Sequence: Synthetic oligonucleotide
ccacagggccucaauguug

SEQ ID NO: 3103039 - RNA, 19 nt, Artificial Sequence
  Description of Artificial Sequence: Synthetic oligonucleotide
cucaauguuguccgcugcu

SEQ ID NO: 3103040 - RNA, 19 nt, Artificial Sequence
  Description of Artificial Sequence: Synthetic oligonucleotide
ccugcacagagacuuccac

SEQ ID NO: 3103041 - RNA, 19 nt, Artificial Sequence
  Description of Artificial Sequence: Synthetic oligonucleotide
ucgcagccauuuccacagc

SEQ ID NO: 3103042 - RNA, 19 nt, Artificial Sequence
  Description of Artificial Sequence: Synthetic oligonucleotide
guuguccgcugcugcuaug

SEQ ID NO: 3103043 - RNA, 19 nt, Artificial Sequence
  Description of Artificial Sequence: Synthetic oligonucleotide
gcagguuuucugguucuug

SEQ ID NO: 3103044 - RNA, 19 nt, Artificial Sequence
  Description of Artificial Sequence: Synthetic oligonucleotide
cagccauuuccacagcgcu

SEQ ID NO: 3103045 - RNA, 19 nt, Artificial Sequence
  Description of Artificial Sequence: Synthetic oligonucleotide
gggguaccccuugaauggg

SEQ ID NO: 3103046 - RNA, 19 nt, Artificial Sequence
  Description of Artificial Sequence: Synthetic oligonucleotide
aucccacacgaagccacca

SEQ ID NO: 3103047 - RNA, 19 nt, Artificial Sequence
  Description of Artificial Sequence: Synthetic oligonucleotide
cuauggcccagcagcaccu

SEQ ID NO: 3103048 - RNA, 19 nt, Artificial Sequence
  Description of Artificial Sequence: Synthetic oligonucleotide
gcuuuacgccagucacagg

SEQ ID NO: 3103049 - RNA, 19 nt, Artificial Sequence
  Description of Artificial Sequence: Synthetic oligonucleotide
gggguugggguaccccuug

SEQ ID NO: 3103050 - RNA, 19 nt, Artificial Sequence
  Description of Artificial Sequence: Synthetic oligonucleotide
auguuguccgcugcugcua

SEQ ID NO: 3103051 - RNA, 19 nt, Artificial Sequence
  Description of Artificial Sequence: Synthetic oligonucleotide
cgcagccauuuccacagcg

SEQ ID NO: 3103052 - RNA, 19 nt, Artificial Sequence
  Description of Artificial Sequence: Synthetic oligonucleotide
cuggccaggccacuguugu

SEQ ID NO: 3103053 - RNA, 19 nt, Artificial Sequence
  Description of Artificial Sequence: Synthetic oligonucleotide
ccccuugaauggguaaucc

SEQ ID NO: 3103054 - RNA, 19 nt, Artificial Sequence
  Description of Artificial Sequence: Synthetic oligonucleotide
ccuugaauggguaauccuu

SEQ ID NO: 3103055 - RNA, 19 nt, Artificial Sequence
  Description of Artificial Sequence: Synthetic oligonucleotide
cccacacgaagccaccauc

SEQ ID NO: 3103056 - RNA, 19 nt, Artificial Sequence
  Description of Artificial Sequence: Synthetic oligonucleotide
cagcgcucacaguccagca

SEQ ID NO: 3103057 - RNA, 19 nt, Artificial Sequence
  Description of Artificial Sequence: Synthetic oligonucleotide
ccuuuucacuggccaggcc

SEQ ID NO: 3103058 - RNA, 19 nt, Artificial Sequence
  Description of Artificial Sequence: Synthetic oligonucleotide
cugcagguuuucugguucu

SEQ ID NO: 3103059 - RNA, 19 nt, Artificial Sequence
  Description of Artificial Sequence: Synthetic oligonucleotide
gauacgccacagggccuca

SEQ ID NO: 3103060 - RNA, 19 nt, Artificial Sequence
  Description of Artificial Sequence: Synthetic oligonucleotide
uggccaggccacuguuguu

SEQ ID NO: 3103061 - RNA, 19 nt, Artificial Sequence
  Description of Artificial Sequence: Synthetic oligonucleotide
cgaagccaccaucgcagcc

SEQ ID NO: 3103062 - RNA, 19 nt, Artificial Sequence
  Description of Artificial Sequence: Synthetic oligonucleotide
ggccacuguuguugaggac

SEQ ID NO: 3103063 - RNA, 19 nt, Artificial Sequence
  Description of Artificial Sequence: Synthetic oligonucleotide
gguaccccuugaaugggua

SEQ ID NO: 3103064 - RNA, 19 nt, Artificial Sequence
  Description of Artificial Sequence: Synthetic oligonucleotide
gggccucaauguuguccgc

SEQ ID NO: 3103065 - RNA, 19 nt, Artificial Sequence
  Description of Artificial Sequence: Synthetic oligonucleotide
cugcugcuauggcccagca

SEQ ID NO: 3103066 - RNA, 19 nt, Artificial Sequence
  Description of Artificial Sequence: Synthetic oligonucleotide
ccaggccacuguuguugag

SEQ ID NO: 3103067 - RNA, 19 nt, Artificial Sequence
  Description of Artificial Sequence: Synthetic oligonucleotide
gccaccaucgcagccauuu

SEQ ID NO: 3103068 - RNA, 19 nt, Artificial Sequence
  Description of Artificial Sequence: Synthetic oligonucleotide
cccuugaauggguaauccu

SEQ ID NO: 3103069 - RNA, 19 nt, Artificial Sequence
  Description of Artificial Sequence: Synthetic oligonucleotide
ggguugggguaccccuuga

SEQ ID NO: 3103070 - RNA, 19 nt, Artificial Sequence
  Description of Artificial Sequence: Synthetic oligonucleotide
auacgccacagggccucaa

SEQ ID NO: 3103071 - RNA, 19 nt, Artificial Sequence
  Description of Artificial Sequence: Synthetic oligonucleotide
ccacaaaauguuguguuuu

SEQ ID NO: 3103072 - RNA, 19 nt, Artificial Sequence
  Description of Artificial Sequence: Synthetic oligonucleotide
ccaccaucgcagccauuuc

SEQ ID NO: 3103073 - RNA, 19 nt, Artificial Sequence
  Description of Artificial Sequence: Synthetic oligonucleotide
ccacagcgcucacagucca

SEQ ID NO: 3103074 - RNA, 19 nt, Artificial Sequence
  Description of Artificial Sequence: Synthetic oligonucleotide
ggccucaauguuguccgcu

SEQ ID NO: 3103075 - RNA, 19 nt, Artificial Sequence
  Description of Artificial Sequence: Synthetic oligonucleotide
ccauuuccacagcgcucac

SEQ ID NO: 3103076 - RNA, 19 nt, Artificial Sequence
  Description of Artificial Sequence: Synthetic oligonucleotide
gcuccugcacagagacuuc

SEQ ID NO: 3103077 - RNA, 19 nt, Artificial Sequence
  Description of Artificial Sequence: Synthetic oligonucleotide
cgccacagggccucaaugu

SEQ ID NO: 3103078 - RNA, 19 nt, Artificial Sequence
  Description of Artificial Sequence: Synthetic oligonucleotide
ggguaccccuugaaugggu

SEQ ID NO: 3103079 - RNA, 19 nt, Artificial Sequence
  Description of Artificial Sequence: Synthetic oligonucleotide
cacuguuguugaggacagu

SEQ ID NO: 3103080 - RNA, 19 nt, Artificial Sequence
  Description of Artificial Sequence: Synthetic oligonucleotide
cgcucacaguccagcagcu

SEQ ID NO: 3103081 - RNA, 19 nt, Artificial Sequence
  Description of Artificial Sequence: Synthetic oligonucleotide
cgaugagaugauguuuguu

SEQ ID NO: 3103082 - RNA, 19 nt, Artificial Sequence
  Description of Artificial Sequence: Synthetic oligonucleotide
ccagcagcaccugcagguu

SEQ ID NO: 3103083 - RNA, 19 nt, Artificial Sequence
  Description of Artificial Sequence: Synthetic oligonucleotide
aauacauauuucuagauac

SEQ ID NO: 3103084 - RNA, 19 nt, Artificial Sequence
  Description of Artificial Sequence: Synthetic oligonucleotide
uuaaaugcaauucugaucu

SEQ ID NO: 3103085 - RNA, 19 nt, Artificial Sequence
  Description of Artificial Sequence: Synthetic oligonucleotide
aauaaugagaauuaaagua

SEQ ID NO: 3103086 - RNA, 19 nt, Artificial Sequence
  Description of Artificial Sequence: Synthetic oligonucleotide
aagaguaucauccugacca

SEQ ID NO: 3103087 - RNA, 19 nt, Artificial Sequence
  Description of Artificial Sequence: Synthetic oligonucleotide
aagccuaugugauaaagcc

SEQ ID NO: 3103088 - RNA, 19 nt, Artificial Sequence
  Description of Artificial Sequence: Synthetic oligonucleotide
uuaaguuaagcucuaagcc

SEQ ID NO: 3103089 - RNA, 19 nt, Artificial Sequence
  Description of Artificial Sequence: Synthetic oligonucleotide
acuuaaugaagucauaaac

SEQ ID NO: 3103090 - RNA, 19 nt, Artificial Sequence
  Description of Artificial Sequence: Synthetic oligonucleotide
aucauuuuaaguuaagcuc

SEQ ID NO: 3103091 - RNA, 19 nt, Artificial Sequence
  Description of Artificial Sequence: Synthetic oligonucleotide
aaaguaacucuucuguuac

SEQ ID NO: 3103092 - RNA, 19 nt, Artificial Sequence
  Description of Artificial Sequence: Synthetic oligonucleotide
agauacauuauuuugagca

SEQ ID NO: 3103093 - RNA, 19 nt, Artificial Sequence
  Description of Artificial Sequence: Synthetic oligonucleotide
aguuucuugacauucuugc

SEQ ID NO: 3103094 - RNA, 19 nt, Artificial Sequence
  Description of Artificial Sequence: Synthetic oligonucleotide
uuuaaguuaagcucuaagc

SEQ ID NO: 3103095 - RNA, 19 nt, Artificial Sequence
  Description of Artificial Sequence: Synthetic oligonucleotide
uuuagauuuguaauuagca

SEQ ID NO: 3103096 - RNA, 19 nt, Artificial Sequence
  Description of Artificial Sequence: Synthetic oligonucleotide
auaauaaugagaauuaaag

SEQ ID NO: 3103097 - RNA, 19 nt, Artificial Sequence
  Description of Artificial Sequence: Synthetic oligonucleotide
uuuguaauuagcaugacuu

SEQ ID NO: 3103098 - RNA, 19 nt, Artificial Sequence
  Description of Artificial Sequence: Synthetic oligonucleotide
ugaucuuacacuaauacau

SEQ ID NO: 3103099 - RNA, 19 nt, Artificial Sequence
  Description of Artificial Sequence: Synthetic oligonucleotide
aaugaagucauaaacauau

SEQ ID NO: 3103100 - RNA, 19 nt, Artificial Sequence
  Description of Artificial Sequence: Synthetic oligonucleotide
auuaaaguaacucuucugu

SEQ ID NO: 3103101 - RNA, 19 nt, Artificial Sequence
  Description of Artificial Sequence: Synthetic oligonucleotide
ucauuuuaaguuaagcucu

SEQ ID NO: 3103102 - RNA, 19 nt, Artificial Sequence
  Description of Artificial Sequence: Synthetic oligonucleotide
aagucauaaacauaucucu

SEQ ID NO: 3103103 - RNA, 19 nt, Artificial Sequence
  Description of Artificial Sequence: Synthetic oligonucleotide
ucuagauacauuauuuuga

SEQ ID NO: 3103104 - RNA, 19 nt, Artificial Sequence
  Description of Artificial Sequence: Synthetic oligonucleotide
uacacuaauacauauuucu

SEQ ID NO: 3103105 - RNA, 19 nt, Artificial Sequence
  Description of Artificial Sequence: Synthetic oligonucleotide
accaucaugguuuuccucc

SEQ ID NO: 3103106 - RNA, 19 nt, Artificial Sequence
  Description of Artificial Sequence: Synthetic oligonucleotide
aacaucuuaaaugcaauuc

SEQ ID NO: 3103107 - RNA, 19 nt, Artificial Sequence
  Description of Artificial Sequence: Synthetic oligonucleotide
uuaauaauaaugagaauua

SEQ ID NO: 3103108 - RNA, 19 nt, Artificial Sequence
  Description of Artificial Sequence: Synthetic oligonucleotide
uaaacauaucucuauguag

SEQ ID NO: 3103109 - RNA, 19 nt, Artificial Sequence
  Description of Artificial Sequence: Synthetic oligonucleotide
ucaccaacaucuuaaaugc

SEQ ID NO: 3103110 - RNA, 19 nt, Artificial Sequence
  Description of Artificial Sequence: Synthetic oligonucleotide
aauuaaaguaacucuucug

SEQ ID NO: 3103111 - RNA, 19 nt, Artificial Sequence
  Description of Artificial Sequence: Synthetic oligonucleotide
uagauuuguaauuagcaug

SEQ ID NO: 3103112 - RNA, 19 nt, Artificial Sequence
  Description of Artificial Sequence: Synthetic oligonucleotide
auuagcaugacuuaaugaa

SEQ ID NO: 3103113 - RNA, 19 nt, Artificial Sequence
  Description of Artificial Sequence: Synthetic oligonucleotide
uuuuaaguuaagcucuaag

SEQ ID NO: 3103114 - RNA, 19 nt, Artificial Sequence
  Description of Artificial Sequence: Synthetic oligonucleotide
ugaagucauaaacauaucu

SEQ ID NO: 3103115 - RNA, 19 nt, Artificial Sequence
  Description of Artificial Sequence: Synthetic oligonucleotide
uuaaugaagucauaaacau

SEQ ID NO: 3103116 - RNA, 19 nt, Artificial Sequence
  Description of Artificial Sequence: Synthetic oligonucleotide
uugcacuuaauaauaauga

SEQ ID NO: 3103117 - RNA, 19 nt, Artificial Sequence
  Description of Artificial Sequence: Synthetic oligonucleotide
uaauaaugagaauuaaagu

SEQ ID NO: 3103118 - RNA, 19 nt, Artificial Sequence
  Description of Artificial Sequence: Synthetic oligonucleotide
auuugcaucauuuuaaguu

SEQ ID NO: 3103119 - RNA, 19 nt, Artificial Sequence
  Description of Artificial Sequence: Synthetic oligonucleotide
uauauguuuagauuuguaa

SEQ ID NO: 3103120 - RNA, 19 nt, Artificial Sequence
  Description of Artificial Sequence: Synthetic oligonucleotide
uucuguuacuucuugaccc

SEQ ID NO: 3103121 - RNA, 19 nt, Artificial Sequence
  Description of Artificial Sequence: Synthetic oligonucleotide
uacuucuugacccucaaga

SEQ ID NO: 3103122 - RNA, 19 nt, Artificial Sequence
  Description of Artificial Sequence: Synthetic oligonucleotide
gucaccaacaucuuaaaug

SEQ ID NO: 3103123 - RNA, 19 nt, Artificial Sequence
  Description of Artificial Sequence: Synthetic oligonucleotide
uucuagauacauuauuuug

SEQ ID NO: 3103124 - RNA, 19 nt, Artificial Sequence
  Description of Artificial Sequence: Synthetic oligonucleotide
uuagcaugacuuaaugaag

SEQ ID NO: 3103125 - RNA, 19 nt, Artificial Sequence
  Description of Artificial Sequence: Synthetic oligonucleotide
aauuagcaugacuuaauga

SEQ ID NO: 3103126 - RNA, 19 nt, Artificial Sequence
  Description of Artificial Sequence: Synthetic oligonucleotide
cuugcacuuaauaauaaug

SEQ ID NO: 3103127 - RNA, 19 nt, Artificial Sequence
  Description of Artificial Sequence: Synthetic oligonucleotide
augagaauuaaaguaacuc

SEQ ID NO: 3103128 - RNA, 19 nt, Artificial Sequence
  Description of Artificial Sequence: Synthetic oligonucleotide
uauuuugagcaguauaugu

SEQ ID NO: 3103129 - RNA, 19 nt, Artificial Sequence
  Description of Artificial Sequence: Synthetic oligonucleotide
uaaguuaagcucuaagccu

SEQ ID NO: 3103130 - RNA, 19 nt, Artificial Sequence
  Description of Artificial Sequence: Synthetic oligonucleotide
cuuaaugaagucauaaaca

SEQ ID NO: 3103131 - RNA, 19 nt, Artificial Sequence
  Description of Artificial Sequence: Synthetic oligonucleotide
gauacauuauuuugagcag

SEQ ID NO: 3103132 - RNA, 19 nt, Artificial Sequence
  Description of Artificial Sequence: Synthetic oligonucleotide
ugcaauucugaucuuacac

SEQ ID NO: 3103133 - RNA, 19 nt, Artificial Sequence
  Description of Artificial Sequence: Synthetic oligonucleotide
acuaauacauauuucuaga

SEQ ID NO: 3103134 - RNA, 19 nt, Artificial Sequence
  Description of Artificial Sequence: Synthetic oligonucleotide
augguuuuccuccuccucc

SEQ ID NO: 3103135 - RNA, 19 nt, Artificial Sequence
  Description of Artificial Sequence: Synthetic oligonucleotide
uuucuugacauucuugcac

SEQ ID NO: 3103136 - RNA, 19 nt, Artificial Sequence
  Description of Artificial Sequence: Synthetic oligonucleotide
aaugcaauucugaucuuac

SEQ ID NO: 3103137 - RNA, 19 nt, Artificial Sequence
  Description of Artificial Sequence: Synthetic oligonucleotide
ucauaaacauaucucuaug

SEQ ID NO: 3103138 - RNA, 19 nt, Artificial Sequence
  Description of Artificial Sequence: Synthetic oligonucleotide
ugcacuuaauaauaaugag

SEQ ID NO: 3103139 - RNA, 19 nt, Artificial Sequence
  Description of Artificial Sequence: Synthetic oligonucleotide
cuagauacauuauuuugag

SEQ ID NO: 3103140 - RNA, 19 nt, Artificial Sequence
  Description of Artificial Sequence: Synthetic oligonucleotide
uaauuagcaugacuuaaug

SEQ ID NO: 3103141 - RNA, 19 nt, Artificial Sequence
  Description of Artificial Sequence: Synthetic oligonucleotide
auauguuuagauuuguaau

SEQ ID NO: 3103142 - RNA, 19 nt, Artificial Sequence
  Description of Artificial Sequence: Synthetic oligonucleotide
cacuuaauaauaaugagaa

SEQ ID NO: 3103143 - RNA, 19 nt, Artificial Sequence
  Description of Artificial Sequence: Synthetic oligonucleotide
cacuaauacauauuucuag

SEQ ID NO: 3103144 - RNA, 19 nt, Artificial Sequence
  Description of Artificial Sequence: Synthetic oligonucleotide
uaagauuugcaucauuuua

SEQ ID NO: 3103145 - RNA, 19 nt, Artificial Sequence
  Description of Artificial Sequence: Synthetic oligonucleotide
aauaauaaugagaauuaaa

SEQ ID NO: 3103146 - RNA, 19 nt, Artificial Sequence
  Description of Artificial Sequence: Synthetic oligonucleotide
uaaugagaauuaaaguaac

SEQ ID NO: 3103147 - RNA, 19 nt, Artificial Sequence
  Description of Artificial Sequence: Synthetic oligonucleotide
acaucuuaaaugcaauucu

SEQ ID NO: 3103148 - RNA, 19 nt, Artificial Sequence
  Description of Artificial Sequence: Synthetic oligonucleotide
uaagccuaugugauaaagc

SEQ ID NO: 3103149 - RNA, 19 nt, Artificial Sequence
  Description of Artificial Sequence: Synthetic oligonucleotide
uauguuuagauuuguaauu

SEQ ID NO: 3103150 - RNA, 19 nt, Artificial Sequence
  Description of Artificial Sequence: Synthetic oligonucleotide
uuagauuuguaauuagcau

SEQ ID NO: 3103151 - RNA, 19 nt, Artificial Sequence
  Description of Artificial Sequence: Synthetic oligonucleotide
cuuaaaugcaauucugauc

SEQ ID NO: 3103152 - RNA, 19 nt, Artificial Sequence
  Description of Artificial Sequence: Synthetic oligonucleotide
ucuauguaguuucuugaca

SEQ ID NO: 3103153 - RNA, 19 nt, Artificial Sequence
  Description of Artificial Sequence: Synthetic oligonucleotide
acccucaagaguaucaucc

SEQ ID NO: 3103154 - RNA, 19 nt, Artificial Sequence
  Description of Artificial Sequence: Synthetic oligonucleotide
aucaugguuuuccuccucc

SEQ ID NO: 3103155 - RNA, 19 nt, Artificial Sequence
  Description of Artificial Sequence: Synthetic oligonucleotide
uaagcucuaagccuaugug

SEQ ID NO: 3103156 - RNA, 19 nt, Artificial Sequence
  Description of Artificial Sequence: Synthetic oligonucleotide
uaauacauauuucuagaua

SEQ ID NO: 3103157 - RNA, 19 nt, Artificial Sequence
  Description of Artificial Sequence: Synthetic oligonucleotide
uuugcaucauuuuaaguua

SEQ ID NO: 3103158 - RNA, 19 nt, Artificial Sequence
  Description of Artificial Sequence: Synthetic oligonucleotide
uaugugauaaagccauugu

SEQ ID NO: 3103159 - RNA, 19 nt, Artificial Sequence
  Description of Artificial Sequence: Synthetic oligonucleotide
uguuuagauuuguaauuag

SEQ ID NO: 3103160 - RNA, 19 nt, Artificial Sequence
  Description of Artificial Sequence: Synthetic oligonucleotide
uucuugacccucaagagua

SEQ ID NO: 3103161 - RNA, 19 nt, Artificial Sequence
  Description of Artificial Sequence: Synthetic oligonucleotide
uuaagcucuaagccuaugu

SEQ ID NO: 3103162 - RNA, 19 nt, Artificial Sequence
  Description of Artificial Sequence: Synthetic oligonucleotide
ucuuaaaugcaauucugau

SEQ ID NO: 3103163 - RNA, 19 nt, Artificial Sequence
  Description of Artificial Sequence: Synthetic oligonucleotide
auuauuuugagcaguauau

SEQ ID NO: 3103164 - RNA, 19 nt, Artificial Sequence
  Description of Artificial Sequence: Synthetic oligonucleotide
agauuugcaucauuuuaag

SEQ ID NO: 3103165 - RNA, 19 nt, Artificial Sequence
  Description of Artificial Sequence: Synthetic oligonucleotide
gaagucauaaacauaucuc

SEQ ID NO: 3103166 - RNA, 19 nt, Artificial Sequence
  Description of Artificial Sequence: Synthetic oligonucleotide
uagcaugacuuaaugaagu

SEQ ID NO: 3103167 - RNA, 19 nt, Artificial Sequence
  Description of Artificial Sequence: Synthetic oligonucleotide
agaauuaaaguaacucuuc

SEQ ID NO: 3103168 - RNA, 19 nt, Artificial Sequence
  Description of Artificial Sequence: Synthetic oligonucleotide
uaaaguaacucuucuguua

SEQ ID NO: 3103169 - RNA, 19 nt, Artificial Sequence
  Description of Artificial Sequence: Synthetic oligonucleotide
auaaacauaucucuaugua

SEQ ID NO: 3103170 - RNA, 19 nt, Artificial Sequence
  Description of Artificial Sequence: Synthetic oligonucleotide
auuuguaauuagcaugacu

SEQ ID NO: 3103171 - RNA, 19 nt, Artificial Sequence
  Description of Artificial Sequence: Synthetic oligonucleotide
acuucuugacccucaagag

SEQ ID NO: 3103172 - RNA, 19 nt, Artificial Sequence
  Description of Artificial Sequence: Synthetic oligonucleotide
aucucuauguaguuucuug

SEQ ID NO: 3103173 - RNA, 19 nt, Artificial Sequence
  Description of Artificial Sequence: Synthetic oligonucleotide
acauucuugcacuuaauaa

SEQ ID NO: 3103174 - RNA, 19 nt, Artificial Sequence
  Description of Artificial Sequence: Synthetic oligonucleotide
ucucuauguaguuucuuga

SEQ ID NO: 3103175 - RNA, 19 nt, Artificial Sequence
  Description of Artificial Sequence: Synthetic oligonucleotide
uaacucuucuguuacuucu

SEQ ID NO: 3103176 - RNA, 19 nt, Artificial Sequence
  Description of Artificial Sequence: Synthetic oligonucleotide
aagauuugcaucauuuuaa

SEQ ID NO: 3103177 - RNA, 19 nt, Artificial Sequence
  Description of Artificial Sequence: Synthetic oligonucleotide
uuuugagcaguauauguuu

SEQ ID NO: 3103178 - RNA, 19 nt, Artificial Sequence
  Description of Artificial Sequence: Synthetic oligonucleotide
uguaauuagcaugacuuaa

SEQ ID NO: 3103179 - RNA, 19 nt, Artificial Sequence
  Description of Artificial Sequence: Synthetic oligonucleotide
agauuuguaauuagcauga

SEQ ID NO: 3103180 - RNA, 19 nt, Artificial Sequence
  Description of Artificial Sequence: Synthetic oligonucleotide
aaagccauugucaccaaca

SEQ ID NO: 3103181 - RNA, 19 nt, Artificial Sequence
  Description of Artificial Sequence: Synthetic oligonucleotide
caucuuaaaugcaauucug

SEQ ID NO: 3103182 - RNA, 19 nt, Artificial Sequence
  Description of Artificial Sequence: Synthetic oligonucleotide
auguaguuucuugacauuc

SEQ ID NO: 3103183 - RNA, 19 nt, Artificial Sequence
  Description of Artificial Sequence: Synthetic oligonucleotide
uguaguuucuugacauucu

SEQ ID NO: 3103184 - RNA, 19 nt, Artificial Sequence
  Description of Artificial Sequence: Synthetic oligonucleotide
uucuugacauucuugcacu

SEQ ID NO: 3103185 - RNA, 19 nt, Artificial Sequence
  Description of Artificial Sequence: Synthetic oligonucleotide
guuuagauuuguaauuagc

SEQ ID NO: 3103186 - RNA, 19 nt, Artificial Sequence
  Description of Artificial Sequence: Synthetic oligonucleotide
gugauaaagccauugucac

SEQ ID NO: 3103187 - RNA, 19 nt, Artificial Sequence
  Description of Artificial Sequence: Synthetic oligonucleotide
cuuaauaauaaugagaauu

SEQ ID NO: 3103188 - RNA, 19 nt, Artificial Sequence
  Description of Artificial Sequence: Synthetic oligonucleotide
uugacauucuugcacuuaa

SEQ ID NO: 3103189 - RNA, 19 nt, Artificial Sequence
  Description of Artificial Sequence: Synthetic oligonucleotide
uuauuuugagcaguauaug

SEQ ID NO: 3103190 - RNA, 19 nt, Artificial Sequence
  Description of Artificial Sequence: Synthetic oligonucleotide
uugagcaguauauguuuag

SEQ ID NO: 3103191 - RNA, 19 nt, Artificial Sequence
  Description of Artificial Sequence: Synthetic oligonucleotide
agcaugacuuaaugaaguc

SEQ ID NO: 3103192 - RNA, 19 nt, Artificial Sequence
  Description of Artificial Sequence: Synthetic oligonucleotide
aaugagaauuaaaguaacu

SEQ ID NO: 3103193 - RNA, 19 nt, Artificial Sequence
  Description of Artificial Sequence: Synthetic oligonucleotide
ugacuuaaugaagucauaa

SEQ ID NO: 3103194 - RNA, 19 nt, Artificial Sequence
  Description of Artificial Sequence: Synthetic oligonucleotide
uuucuagauacauuauuuu

SEQ ID NO: 3103195 - RNA, 19 nt, Artificial Sequence
  Description of Artificial Sequence: Synthetic oligonucleotide
uaguuucuugacauucuug

SEQ ID NO: 3103196 - RNA, 19 nt, Artificial Sequence
  Description of Artificial Sequence: Synthetic oligonucleotide
uuacacuaauacauauuuc

SEQ ID NO: 3103197 - RNA, 19 nt, Artificial Sequence
  Description of Artificial Sequence: Synthetic oligonucleotide
cuucuguuacuucuugacc

SEQ ID NO: 3103198 - RNA, 19 nt, Artificial Sequence
  Description of Artificial Sequence: Synthetic oligonucleotide
cugaccaucaugguuuucc

SEQ ID NO: 3103199 - RNA, 19 nt, Artificial Sequence
  Description of Artificial Sequence: Synthetic oligonucleotide
ugcaucauuuuaaguuaag

SEQ ID NO: 3103200 - RNA, 19 nt, Artificial Sequence
  Description of Artificial Sequence: Synthetic oligonucleotide
uugacccucaagaguauca

SEQ ID NO: 3103201 - RNA, 19 nt, Artificial Sequence
  Description of Artificial Sequence: Synthetic oligonucleotide
uaaugaagucauaaacaua

SEQ ID NO: 3103202 - RNA, 19 nt, Artificial Sequence
  Description of Artificial Sequence: Synthetic oligonucleotide
uagauacauuauuuugagc

SEQ ID NO: 3103203 - RNA, 19 nt, Artificial Sequence
  Description of Artificial Sequence: Synthetic oligonucleotide
agcaguauauguuuagauu

SEQ ID NO: 3103204 - RNA, 19 nt, Artificial Sequence
  Description of Artificial Sequence: Synthetic oligonucleotide
uacauuauuuugagcagua

SEQ ID NO: 3103205 - RNA, 19 nt, Artificial Sequence
  Description of Artificial Sequence: Synthetic oligonucleotide
uaucauccugaccaucaug

SEQ ID NO: 3103206 - RNA, 19 nt, Artificial Sequence
  Description of Artificial Sequence: Synthetic oligonucleotide
ucuuacacuaauacauauu

SEQ ID NO: 3103207 - RNA, 19 nt, Artificial Sequence
  Description of Artificial Sequence: Synthetic oligonucleotide
auuucuagauacauuauuu

SEQ ID NO: 3103208 - RNA, 19 nt, Artificial Sequence
  Description of Artificial Sequence: Synthetic oligonucleotide
cucuauguaguuucuugac

SEQ ID NO: 3103209 - RNA, 19 nt, Artificial Sequence
  Description of Artificial Sequence: Synthetic oligonucleotide
caucauuuuaaguuaagcu

SEQ ID NO: 3103210 - RNA, 19 nt, Artificial Sequence
  Description of Artificial Sequence: Synthetic oligonucleotide
caguauauguuuagauuug

SEQ ID NO: 3103211 - RNA, 19 nt, Artificial Sequence
  Description of Artificial Sequence: Synthetic oligonucleotide
ucaagaguaucauccugac

SEQ ID NO: 3103212 - RNA, 19 nt, Artificial Sequence
  Description of Artificial Sequence: Synthetic oligonucleotide
aucuuacacuaauacauau

SEQ ID NO: 3103213 - RNA, 19 nt, Artificial Sequence
  Description of Artificial Sequence: Synthetic oligonucleotide
gaauuaaaguaacucuucu

SEQ ID NO: 3103214 - RNA, 19 nt, Artificial Sequence
  Description of Artificial Sequence: Synthetic oligonucleotide
auucugaucuuacacuaau

SEQ ID NO: 3103215 - RNA, 19 nt, Artificial Sequence
  Description of Artificial Sequence: Synthetic oligonucleotide
auugucaccaacaucuuaa

SEQ ID NO: 3103216 - RNA, 19 nt, Artificial Sequence
  Description of Artificial Sequence: Synthetic oligonucleotide
uuugagcaguauauguuua

SEQ ID NO: 3103217 - RNA, 19 nt, Artificial Sequence
  Description of Artificial Sequence: Synthetic oligonucleotide
ucuguuacuucuugacccu

SEQ ID NO: 3103218 - RNA, 19 nt, Artificial Sequence
  Description of Artificial Sequence: Synthetic oligonucleotide
cuaugugauaaagccauug

SEQ ID NO: 3103219 - RNA, 19 nt, Artificial Sequence
  Description of Artificial Sequence: Synthetic oligonucleotide
gacuuaaugaagucauaaa

SEQ ID NO: 3103220 - RNA, 19 nt, Artificial Sequence
  Description of Artificial Sequence: Synthetic oligonucleotide
ucuugcacuuaauaauaau

SEQ ID NO: 3103221 - RNA, 19 nt, Artificial Sequence
  Description of Artificial Sequence: Synthetic oligonucleotide
cuaagccuaugugauaaag

SEQ ID NO: 3103222 - RNA, 19 nt, Artificial Sequence
  Description of Artificial Sequence: Synthetic oligonucleotide
uuguaauuagcaugacuua

SEQ ID NO: 3103223 - RNA, 19 nt, Artificial Sequence
  Description of Artificial Sequence: Synthetic oligonucleotide
uucuugcacuuaauaauaa

SEQ ID NO: 3103224 - RNA, 19 nt, Artificial Sequence
  Description of Artificial Sequence: Synthetic oligonucleotide
aaguuaagcucuaagccua

SEQ ID NO: 3103225 - RNA, 19 nt, Artificial Sequence
  Description of Artificial Sequence: Synthetic oligonucleotide
aguaucauccugaccauca

SEQ ID NO: 3103226 - RNA, 19 nt, Artificial Sequence
  Description of Artificial Sequence: Synthetic oligonucleotide
auacauuauuuugagcagu

SEQ ID NO: 3103227 - RNA, 19 nt, Artificial Sequence
  Description of Artificial Sequence: Synthetic oligonucleotide
uuacuucuugacccucaag

SEQ ID NO: 3103228 - RNA, 19 nt, Artificial Sequence
  Description of Artificial Sequence: Synthetic oligonucleotide
aaaugcaauucugaucuua

SEQ ID NO: 3103229 - RNA, 19 nt, Artificial Sequence
  Description of Artificial Sequence: Synthetic oligonucleotide
cugaucuuacacuaauaca

SEQ ID NO: 3103230 - RNA, 19 nt, Artificial Sequence
  Description of Artificial Sequence: Synthetic oligonucleotide
ugagcaguauauguuuaga

SEQ ID NO: 3103231 - RNA, 19 nt, Artificial Sequence
  Description of Artificial Sequence: Synthetic oligonucleotide
uugcaucauuuuaaguuaa

SEQ ID NO: 3103232 - RNA, 19 nt, Artificial Sequence
  Description of Artificial Sequence: Synthetic oligonucleotide
gacauucuugcacuuaaua

SEQ ID NO: 3103233 - RNA, 19 nt, Artificial Sequence
  Description of Artificial Sequence: Synthetic oligonucleotide
cuuacacuaauacauauuu

SEQ ID NO: 3103234 - RNA, 19 nt, Artificial Sequence
  Description of Artificial Sequence: Synthetic oligonucleotide
aguauauguuuagauuugu

SEQ ID NO: 3103235 - RNA, 19 nt, Artificial Sequence
  Description of Artificial Sequence: Synthetic oligonucleotide
acuuaauaauaaugagaau

SEQ ID NO: 3103236 - RNA, 19 nt, Artificial Sequence
  Description of Artificial Sequence: Synthetic oligonucleotide
aucuuaaaugcaauucuga

SEQ ID NO: 3103237 - RNA, 19 nt, Artificial Sequence
  Description of Artificial Sequence: Synthetic oligonucleotide
aaguaacucuucuguuacu

SEQ ID NO: 3103238 - RNA, 19 nt, Artificial Sequence
  Description of Artificial Sequence: Synthetic oligonucleotide
agccauugucaccaacauc

SEQ ID NO: 3103239 - RNA, 19 nt, Artificial Sequence
  Description of Artificial Sequence: Synthetic oligonucleotide
cauucuugcacuuaauaau

SEQ ID NO: 3103240 - RNA, 19 nt, Artificial Sequence
  Description of Artificial Sequence: Synthetic oligonucleotide
uaaagccauugucaccaac

SEQ ID NO: 3103241 - RNA, 19 nt, Artificial Sequence
  Description of Artificial Sequence: Synthetic oligonucleotide
caauucugaucuuacacua

SEQ ID NO: 3103242 - RNA, 19 nt, Artificial Sequence
  Description of Artificial Sequence: Synthetic oligonucleotide
auguuuagauuuguaauua

SEQ ID NO: 3103243 - RNA, 19 nt, Artificial Sequence
  Description of Artificial Sequence: Synthetic oligonucleotide
cauaaacauaucucuaugu

SEQ ID NO: 3103244 - RNA, 19 nt, Artificial Sequence
  Description of Artificial Sequence: Synthetic oligonucleotide
caagaguaucauccugacc

SEQ ID NO: 3103245 - RNA, 19 nt, Artificial Sequence
  Description of Artificial Sequence: Synthetic oligonucleotide
ugucaccaacaucuuaaau

SEQ ID NO: 3103246 - RNA, 19 nt, Artificial Sequence
  Description of Artificial Sequence: Synthetic oligonucleotide
caugacuuaaugaagucau

SEQ ID NO: 3103247 - RNA, 19 nt, Artificial Sequence
  Description of Artificial Sequence: Synthetic oligonucleotide
auuuugagcaguauauguu

SEQ ID NO: 3103248 - RNA, 19 nt, Artificial Sequence
  Description of Artificial Sequence: Synthetic oligonucleotide
auucuugcacuuaauaaua

SEQ ID NO: 3103249 - RNA, 19 nt, Artificial Sequence
  Description of Artificial Sequence: Synthetic oligonucleotide
accaacaucuuaaaugcaa

SEQ ID NO: 3103250 - RNA, 19 nt, Artificial Sequence
  Description of Artificial Sequence: Synthetic oligonucleotide
gagaauuaaaguaacucuu

SEQ ID NO: 3103251 - RNA, 19 nt, Artificial Sequence
  Description of Artificial Sequence: Synthetic oligonucleotide
cuauguaguuucuugacau

SEQ ID NO: 3103252 - RNA, 19 nt, Artificial Sequence
  Description of Artificial Sequence: Synthetic oligonucleotide
aguaacucuucuguuacuu

SEQ ID NO: 3103253 - RNA, 19 nt, Artificial Sequence
  Description of Artificial Sequence: Synthetic oligonucleotide
ugaccaucaugguuuuccu

SEQ ID NO: 3103254 - RNA, 19 nt, Artificial Sequence
  Description of Artificial Sequence: Synthetic oligonucleotide
aauucugaucuuacacuaa

SEQ ID NO: 3103255 - RNA, 19 nt, Artificial Sequence
  Description of Artificial Sequence: Synthetic oligonucleotide
gucauaaacauaucucuau

SEQ ID NO: 3103256 - RNA, 19 nt, Artificial Sequence
  Description of Artificial Sequence: Synthetic oligonucleotide
ucaugguuuuccuccuccu

SEQ ID NO: 3103257 - RNA, 19 nt, Artificial Sequence
  Description of Artificial Sequence: Synthetic oligonucleotide
uauguaguuucuugacauu

SEQ ID NO: 3103258 - RNA, 19 nt, Artificial Sequence
  Description of Artificial Sequence: Synthetic oligonucleotide
gcacuuaauaauaaugaga

SEQ ID NO: 3103259 - RNA, 19 nt, Artificial Sequence
  Description of Artificial Sequence: Synthetic oligonucleotide
guaacucuucuguuacuuc

SEQ ID NO: 3103260 - RNA, 19 nt, Artificial Sequence
  Description of Artificial Sequence: Synthetic oligonucleotide
augcaauucugaucuuaca

SEQ ID NO: 3103261 - RNA, 19 nt, Artificial Sequence
  Description of Artificial Sequence: Synthetic oligonucleotide
gccauugucaccaacaucu

SEQ ID NO: 3103262 - RNA, 19 nt, Artificial Sequence
  Description of Artificial Sequence: Synthetic oligonucleotide
gcaucauuuuaaguuaagc

SEQ ID NO: 3103263 - RNA, 19 nt, Artificial Sequence
  Description of Artificial Sequence: Synthetic oligonucleotide
agcucuaagccuaugugau

SEQ ID NO: 3103264 - RNA, 19 nt, Artificial Sequence
  Description of Artificial Sequence: Synthetic oligonucleotide
auccugaccaucaugguuu

SEQ ID NO: 3103265 - RNA, 19 nt, Artificial Sequence
  Description of Artificial Sequence: Synthetic oligonucleotide
uugucaccaacaucuuaaa

SEQ ID NO: 3103266 - RNA, 19 nt, Artificial Sequence
  Description of Artificial Sequence: Synthetic oligonucleotide
gcaguauauguuuagauuu

SEQ ID NO: 3103267 - RNA, 19 nt, Artificial Sequence
  Description of Artificial Sequence: Synthetic oligonucleotide
cucuaagccuaugugauaa

SEQ ID NO: 3103268 - RNA, 19 nt, Artificial Sequence
  Description of Artificial Sequence: Synthetic oligonucleotide
gauuuguaauuagcaugac

SEQ ID NO: 3103269 - RNA, 19 nt, Artificial Sequence
  Description of Artificial Sequence: Synthetic oligonucleotide
gaucuuacacuaauacaua

SEQ ID NO: 3103270 - RNA, 19 nt, Artificial Sequence
  Description of Artificial Sequence: Synthetic oligonucleotide
cuaauacauauuucuagau

SEQ ID NO: 3103271 - RNA, 19 nt, Artificial Sequence
  Description of Artificial Sequence: Synthetic oligonucleotide
agucauaaacauaucucua

SEQ ID NO: 3103272 - RNA, 19 nt, Artificial Sequence
  Description of Artificial Sequence: Synthetic oligonucleotide
gagcaguauauguuuagau

SEQ ID NO: 3103273 - RNA, 19 nt, Artificial Sequence
  Description of Artificial Sequence: Synthetic oligonucleotide
ucuaagccuaugugauaaa

SEQ ID NO: 3103274 - RNA, 19 nt, Artificial Sequence
  Description of Artificial Sequence: Synthetic oligonucleotide
acacuaauacauauuucua

SEQ ID NO: 3103275 - RNA, 19 nt, Artificial Sequence
  Description of Artificial Sequence: Synthetic oligonucleotide
gaccaucaugguuuuccuc

SEQ ID NO: 3103276 - RNA, 19 nt, Artificial Sequence
  Description of Artificial Sequence: Synthetic oligonucleotide
ucuugacccucaagaguau

SEQ ID NO: 3103277 - RNA, 19 nt, Artificial Sequence
  Description of Artificial Sequence: Synthetic oligonucleotide
gcaauucugaucuuacacu

SEQ ID NO: 3103278 - RNA, 19 nt, Artificial Sequence
  Description of Artificial Sequence: Synthetic oligonucleotide
agccuaugugauaaagcca

SEQ ID NO: 3103279 - RNA, 19 nt, Artificial Sequence
  Description of Artificial Sequence: Synthetic oligonucleotide
cauuuuaaguuaagcucua

SEQ ID NO: 3103280 - RNA, 19 nt, Artificial Sequence
  Description of Artificial Sequence: Synthetic oligonucleotide
auuuuaaguuaagcucuaa

SEQ ID NO: 3103281 - RNA, 19 nt, Artificial Sequence
  Description of Artificial Sequence: Synthetic oligonucleotide
ucuugacauucuugcacuu

SEQ ID NO: 3103282 - RNA, 19 nt, Artificial Sequence
  Description of Artificial Sequence: Synthetic oligonucleotide
auaucucuauguaguuucu

SEQ ID NO: 3103283 - RNA, 19 nt, Artificial Sequence
  Description of Artificial Sequence: Synthetic oligonucleotide
guuacuucuugacccucaa

SEQ ID NO: 3103284 - RNA, 19 nt, Artificial Sequence
  Description of Artificial Sequence: Synthetic oligonucleotide
acauuauuuugagcaguau

SEQ ID NO: 3103285 - RNA, 19 nt, Artificial Sequence
  Description of Artificial Sequence: Synthetic oligonucleotide
cuucuugacccucaagagu

SEQ ID NO: 3103286 - RNA, 19 nt, Artificial Sequence
  Description of Artificial Sequence: Synthetic oligonucleotide
uaucucuauguaguuucuu

SEQ ID NO: 3103287 - RNA, 19 nt, Artificial Sequence
  Description of Artificial Sequence: Synthetic oligonucleotide
uaaaugcaauucugaucuu

SEQ ID NO: 3103288 - RNA, 19 nt, Artificial Sequence
  Description of Artificial Sequence: Synthetic oligonucleotide
guauauguuuagauuugua

SEQ ID NO: 3103289 - RNA, 19 nt, Artificial Sequence
  Description of Artificial Sequence: Synthetic oligonucleotide
guaauuagcaugacuuaau

SEQ ID NO: 3103290 - RNA, 19 nt, Artificial Sequence
  Description of Artificial Sequence: Synthetic oligonucleotide
guuaagcucuaagccuaug

SEQ ID NO: 3103291 - RNA, 19 nt, Artificial Sequence
  Description of Artificial Sequence: Synthetic oligonucleotide
gcaugacuuaaugaaguca

SEQ ID NO: 3103292 - RNA, 19 nt, Artificial Sequence
  Description of Artificial Sequence: Synthetic oligonucleotide
gaguaucauccugaccauc

SEQ ID NO: 3103293 - RNA, 19 nt, Artificial Sequence
  Description of Artificial Sequence: Synthetic oligonucleotide
cuugacccucaagaguauc

SEQ ID NO: 3103294 - RNA, 19 nt, Artificial Sequence
  Description of Artificial Sequence: Synthetic oligonucleotide
ccucaagaguaucauccug

SEQ ID NO: 3103295 - RNA, 19 nt, Artificial Sequence
  Description of Artificial Sequence: Synthetic oligonucleotide
uuuccuccuccuccuccuc

SEQ ID NO: 3103296 - RNA, 19 nt, Artificial Sequence
  Description of Artificial Sequence: Synthetic oligonucleotide
caucaugguuuuccuccuc

SEQ ID NO: 3103297 - RNA, 19 nt, Artificial Sequence
  Description of Artificial Sequence: Synthetic oligonucleotide
cauugucaccaacaucuua

SEQ ID NO: 3103298 - RNA, 19 nt, Artificial Sequence
  Description of Artificial Sequence: Synthetic oligonucleotide
guaguuucuugacauucuu

SEQ ID NO: 3103299 - RNA, 19 nt, Artificial Sequence
  Description of Artificial Sequence: Synthetic oligonucleotide
caccaacaucuuaaaugca

SEQ ID NO: 3103300 - RNA, 19 nt, Artificial Sequence
  Description of Artificial Sequence: Synthetic oligonucleotide
aguuaagcucuaagccuau

SEQ ID NO: 3103301 - RNA, 19 nt, Artificial Sequence
  Description of Artificial Sequence: Synthetic oligonucleotide
uccugaccaucaugguuuu

SEQ ID NO: 3103302 - RNA, 19 nt, Artificial Sequence
  Description of Artificial Sequence: Synthetic oligonucleotide
gccuaugugauaaagccau

SEQ ID NO: 3103303 - RNA, 19 nt, Artificial Sequence
  Description of Artificial Sequence: Synthetic oligonucleotide
cuugacauucuugcacuua

SEQ ID NO: 3103304 - RNA, 19 nt, Artificial Sequence
  Description of Artificial Sequence: Synthetic oligonucleotide
cauccugaccaucaugguu

SEQ ID NO: 3103305 - RNA, 19 nt, Artificial Sequence
  Description of Artificial Sequence: Synthetic oligonucleotide
guaucauccugaccaucau

SEQ ID NO: 3103306 - RNA, 19 nt, Artificial Sequence
  Description of Artificial Sequence: Synthetic oligonucleotide
ccaacaucuuaaaugcaau

SEQ ID NO: 3103307 - RNA, 19 nt, Artificial Sequence
  Description of Artificial Sequence: Synthetic oligonucleotide
gcucuaagccuaugugaua

SEQ ID NO: 3103308 - RNA, 19 nt, Artificial Sequence
  Description of Artificial Sequence: Synthetic oligonucleotide
cccucaagaguaucauccu

SEQ ID NO: 3103309 - RNA, 19 nt, Artificial Sequence
  Description of Artificial Sequence: Synthetic oligonucleotide
ccaucaugguuuuccuccu

SEQ ID NO: 3103310 - RNA, 19 nt, Artificial Sequence
  Description of Artificial Sequence: Synthetic oligonucleotide
ccugaccaucaugguuuuc

SEQ ID NO: 3103311 - RNA, 19 nt, Artificial Sequence
  Description of Artificial Sequence: Synthetic oligonucleotide
ccuaugugauaaagccauu

SEQ ID NO: 3103312 - RNA, 19 nt, Artificial Sequence
  Description of Artificial Sequence: Synthetic oligonucleotide
ccauugucaccaacaucuu

SEQ ID NO: 3103313 - RNA, 19 nt, Artificial Sequence
  Description of Artificial Sequence: Synthetic oligonucleotide
aaucacuccccagauguac

SEQ ID NO: 3103314 - RNA, 19 nt, Artificial Sequence
  Description of Artificial Sequence: Synthetic oligonucleotide
aacuugaugggucuccccu

SEQ ID NO: 3103315 - RNA, 19 nt, Artificial Sequence
  Description of Artificial Sequence: Synthetic oligonucleotide
ucggaaaucacuccccaga

SEQ ID NO: 3103316 - RNA, 19 nt, Artificial Sequence
  Description of Artificial Sequence: Synthetic oligonucleotide
  modified_base (5)..(5): a, c, u, g, unknown or other
aguunaggggucuggagca

SEQ ID NO: 3103317 - RNA, 19 nt, Artificial Sequence
  Description of Artificial Sequence: Synthetic oligonucleotide
acuccccagauguacaggg

SEQ ID NO: 3103318 - RNA, 19 nt, Artificial Sequence
  Description of Artificial Sequence: Synthetic oligonucleotide
  modified_base (6)..(6): a, c, u, g, unknown or other
caguunaggggucuggagc

SEQ ID NO: 3103319 - RNA, 19 nt, Artificial Sequence
  Description of Artificial Sequence: Synthetic oligonucleotide
  modified_base (18)..(18): a, c, u, g, unknown or other
ucccucaaacaccaguuna

SEQ ID NO: 3103320 - RNA, 19 nt, Artificial Sequence
  Description of Artificial Sequence: Synthetic oligonucleotide
  modified_base (2)..(2): a, c, u, g, unknown or other
unaggggucuggagcagca

SEQ ID NO: 3103321 - RNA, 19 nt, Artificial Sequence
  Description of Artificial Sequence: Synthetic oligonucleotide
ucacuccccagauguacag

SEQ ID NO: 3103322 - RNA, 19 nt, Artificial Sequence
  Description of Artificial Sequence: Synthetic oligonucleotide
ugaugggucuccccuuccc

SEQ ID NO: 3103323 - RNA, 19 nt, Artificial Sequence
  Description of Artificial Sequence: Synthetic oligonucleotide
uccccagauguacaggguc

SEQ ID NO: 3103324 - RNA, 19 nt, Artificial Sequence
  Description of Artificial Sequence: Synthetic oligonucleotide
ucaacuugaugggucuccc

SEQ ID NO: 3103325 - RNA, 19 nt, Artificial Sequence
  Description of Artificial Sequence: Synthetic oligonucleotide
augggucuccccuucccuc

SEQ ID NO: 3103326 - RNA, 19 nt, Artificial Sequence
  Description of Artificial Sequence: Synthetic oligonucleotide
accucaacuugaugggucu

SEQ ID NO: 3103327 - RNA, 19 nt, Artificial Sequence
  Description of Artificial Sequence: Synthetic oligonucleotide
  modified_base (13)..(13): a, c, u, g, unknown or other
caaacaccaguunaggggu

SEQ ID NO: 3103328 - RNA, 19 nt, Artificial Sequence
  Description of Artificial Sequence: Synthetic oligonucleotide
  modified_base (3)..(3): a, c, u, g, unknown or other
uunaggggucuggagcagc

SEQ ID NO: 3103329 - RNA, 19 nt, Artificial Sequence
  Description of Artificial Sequence: Synthetic oligonucleotide
  modified_base (12)..(12): a, c, u, g, unknown or other
aaacaccaguunagggguc

SEQ ID NO: 3103330 - RNA, 19 nt, Artificial Sequence
  Description of Artificial Sequence: Synthetic oligonucleotide
uugaugggucuccccuucc

SEQ ID NO: 3103331 - RNA, 19 nt, Artificial Sequence
  Description of Artificial Sequence: Synthetic oligonucleotide
  modified_base (19)..(19): a, c, u, g, unknown or other
uucccucaaacaccaguun

SEQ ID NO: 3103332 - RNA, 19 nt, Artificial Sequence
  Description of Artificial Sequence: Synthetic oligonucleotide
caccucaacuugauggguc

SEQ ID NO: 3103333 - RNA, 19 nt, Artificial Sequence
  Description of Artificial Sequence: Synthetic oligonucleotide
gucggaaaucacuccccag

SEQ ID NO: 3103334 - RNA, 19 nt, Artificial Sequence
  Description of Artificial Sequence: Synthetic oligonucleotide
caacuugaugggucucccc

SEQ ID NO: 3103335 - RNA, 19 nt, Artificial Sequence
  Description of Artificial Sequence: Synthetic oligonucleotide
  modified_base (7)..(7): a, c, u, g, unknown or other
ccaguunaggggucuggag

SEQ ID NO: 3103336 - RNA, 19 nt, Artificial Sequence
  Description of Artificial Sequence: Synthetic oligonucleotide
  modified_base (4)..(4): a, c, u, g, unknown or other
guunaggggucuggagcag

SEQ ID NO: 3103337 - RNA, 19 nt, Artificial Sequence
  Description of Artificial Sequence: Synthetic oligonucleotide
ggaaaucacuccccagaug

SEQ ID NO: 3103338 - RNA, 19 nt, Artificial Sequence
  Description of Artificial Sequence: Synthetic oligonucleotide
  modified_base (8)..(8): a, c, u, g, unknown or other
accaguunaggggucugga

SEQ ID NO: 3103339 - RNA, 19 nt, Artificial Sequence
  Description of Artificial Sequence: Synthetic oligonucleotide
  modified_base (9)..(9): a, c, u, g, unknown or other
caccaguunaggggucugg

SEQ ID NO: 3103340 - RNA, 19 nt, Artificial Sequence
  Description of Artificial Sequence: Synthetic oligonucleotide
aucacuccccagauguaca

SEQ ID NO: 3103341 - RNA, 19 nt, Artificial Sequence
  Description of Artificial Sequence: Synthetic oligonucleotide
aaaucacuccccagaugua

SEQ ID NO: 3103342 - RNA, 19 nt, Artificial Sequence
  Description of Artificial Sequence: Synthetic oligonucleotide
cacuccccagauguacagg

SEQ ID NO: 3103343 - RNA, 19 nt, Artificial Sequence
  Description of Artificial Sequence: Synthetic oligonucleotide
gaugggucuccccuucccu

SEQ ID NO: 3103344 - RNA, 19 nt, Artificial Sequence
  Description of Artificial Sequence: Synthetic oligonucleotide
cuucccucaaacaccaguu

SEQ ID NO: 3103345 - RNA, 19 nt, Artificial Sequence
  Description of Artificial Sequence: Synthetic oligonucleotide
ccccuucccucaaacacca

SEQ ID NO: 3103346 - RNA, 19 nt, Artificial Sequence
  Description of Artificial Sequence: Synthetic oligonucleotide
ccuucccucaaacaccagu

SEQ ID NO: 3103347 - RNA, 19 nt, Artificial Sequence
  Description of Artificial Sequence: Synthetic oligonucleotide
cuccccagauguacagggu

SEQ ID NO: 3103348 - RNA, 19 nt, Artificial Sequence
  Description of Artificial Sequence: Synthetic oligonucleotide
ccucaacuugaugggucuc

SEQ ID NO: 3103349 - RNA, 19 nt, Artificial Sequence
  Description of Artificial Sequence: Synthetic oligonucleotide
cccuucccucaaacaccag

SEQ ID NO: 3103350 - RNA, 19 nt, Artificial Sequence
  Description of Artificial Sequence: Synthetic oligonucleotide
gggucuccccuucccucaa

SEQ ID NO: 3103351 - RNA, 19 nt, Artificial Sequence
  Description of Artificial Sequence: Synthetic oligonucleotide
cggaaaucacuccccagau

SEQ ID NO: 3103352 - RNA, 19 nt, Artificial Sequence
  Description of Artificial Sequence: Synthetic oligonucleotide
aaggucugugucucgacgc

SEQ ID NO: 3103353 - RNA, 19 nt, Artificial Sequence
  Description of Artificial Sequence: Synthetic oligonucleotide
uucuggugucccuagaacg

SEQ ID NO: 3103354 - RNA, 19 nt, Artificial Sequence
  Description of Artificial Sequence: Synthetic oligonucleotide
augcaugcaaggcaagugc

SEQ ID NO: 3103355 - RNA, 19 nt, Artificial Sequence
  Description of Artificial Sequence: Synthetic oligonucleotide
ucuggugucccuagaacgg

SEQ ID NO: 3103356 - RNA, 19 nt, Artificial Sequence
  Description of Artificial Sequence: Synthetic oligonucleotide
agugucuggguuugggugc

SEQ ID NO: 3103357 - RNA, 19 nt, Artificial Sequence
  Description of Artificial Sequence: Synthetic oligonucleotide
gacagagagaugcagugcc

SEQ ID NO: 3103358 - RNA, 19 nt, Artificial Sequence
  Description of Artificial Sequence: Synthetic oligonucleotide
aagugucuggcucggacag

SEQ ID NO: 3103359 - RNA, 19 nt, Artificial Sequence
  Description of Artificial Sequence: Synthetic oligonucleotide
agaagugucuggcucggac

SEQ ID NO: 3103360 - RNA, 19 nt, Artificial Sequence
  Description of Artificial Sequence: Synthetic oligonucleotide
ucaacagcggaaacccagg

SEQ ID NO: 3103361 - RNA, 19 nt, Artificial Sequence
  Description of Artificial Sequence: Synthetic oligonucleotide
caccucguggucaacagcg

SEQ ID NO: 3103362 - RNA, 19 nt, Artificial Sequence
  Description of Artificial Sequence: Synthetic oligonucleotide
agcagaagugucuggcucg

SEQ ID NO: 3103363 - RNA, 19 nt, Artificial Sequence
  Description of Artificial Sequence: Synthetic oligonucleotide
agagagaugcagugccacc

SEQ ID NO: 3103364 - RNA, 19 nt, Artificial Sequence
  Description of Artificial Sequence: Synthetic oligonucleotide
uggucaacagcggaaaccc

SEQ ID NO: 3103365 - RNA, 19 nt, Artificial Sequence
  Description of Artificial Sequence: Synthetic oligonucleotide
uuuucuggugucccuagaa

SEQ ID NO: 3103366 - RNA, 19 nt, Artificial Sequence
  Description of Artificial Sequence: Synthetic oligonucleotide
gagugucuggguuugggug

SEQ ID NO: 3103367 - RNA, 19 nt, Artificial Sequence
  Description of Artificial Sequence: Synthetic oligonucleotide
uuucuggugucccuagaac

SEQ ID NO: 3103368 - RNA, 19 nt, Artificial Sequence
  Description of Artificial Sequence: Synthetic oligonucleotide
uugggugcugcugucaucc

SEQ ID NO: 3103369 - RNA, 19 nt, Artificial Sequence
  Description of Artificial Sequence: Synthetic oligonucleotide
ugugucucgacgccccucc

SEQ ID NO: 3103370 - RNA, 19 nt, Artificial Sequence
  Description of Artificial Sequence: Synthetic oligonucleotide
aacagcggaaacccaggcu

SEQ ID NO: 3103371 - RNA, 19 nt, Artificial Sequence
  Description of Artificial Sequence: Synthetic oligonucleotide
aggucugugucucgacgcc

SEQ ID NO: 3103372 - RNA, 19 nt, Artificial Sequence
  Description of Artificial Sequence: Synthetic oligonucleotide
ucaucuuugcugagugucu

SEQ ID NO: 3103373 - RNA, 19 nt, Artificial Sequence
  Description of Artificial Sequence: Synthetic oligonucleotide
ugcaugcaaggcaagugcu

SEQ ID NO: 3103374 - RNA, 19 nt, Artificial Sequence
  Description of Artificial Sequence: Synthetic oligonucleotide
gucuggcucggacagagag

SEQ ID NO: 3103375 - RNA, 19 nt, Artificial Sequence
  Description of Artificial Sequence: Synthetic oligonucleotide
aauggggagcugugcugcg

SEQ ID NO: 3103376 - RNA, 19 nt, Artificial Sequence
  Description of Artificial Sequence: Synthetic oligonucleotide
ugucauccuuccuagcaga

SEQ ID NO: 3103377 - RNA, 19 nt, Artificial Sequence
  Description of Artificial Sequence: Synthetic oligonucleotide
ucaauggggagcugugcug

SEQ ID NO: 3103378 - RNA, 19 nt, Artificial Sequence
  Description of Artificial Sequence: Synthetic oligonucleotide
gagaugcagugccaccucg

SEQ ID NO: 3103379 - RNA, 19 nt, Artificial Sequence
  Description of Artificial Sequence: Synthetic oligonucleotide
caaggucugugucucgacg

SEQ ID NO: 3103380 - RNA, 19 nt, Artificial Sequence
  Description of Artificial Sequence: Synthetic oligonucleotide
uggggagcugugcugcgcg

SEQ ID NO: 3103381 - RNA, 19 nt, Artificial Sequence
  Description of Artificial Sequence: Synthetic oligonucleotide
ucggacagagagaugcagu

SEQ ID NO: 3103382 - RNA, 19 nt, Artificial Sequence
  Description of Artificial Sequence: Synthetic oligonucleotide
uggguuugggugcugcugu

SEQ ID NO: 3103383 - RNA, 19 nt, Artificial Sequence
  Description of Artificial Sequence: Synthetic oligonucleotide
gucaacagcggaaacccag

SEQ ID NO: 3103384 - RNA, 19 nt, Artificial Sequence
  Description of Artificial Sequence: Synthetic oligonucleotide
agagaugcagugccaccuc

SEQ ID NO: 3103385 - RNA, 19 nt, Artificial Sequence
  Description of Artificial Sequence: Synthetic oligonucleotide
uggugucccuagaacgggg

SEQ ID NO: 3103386 - RNA, 19 nt, Artificial Sequence
  Description of Artificial Sequence: Synthetic oligonucleotide
ugucucgacgccccuccgg

SEQ ID NO: 3103387 - RNA, 19 nt, Artificial Sequence
  Description of Artificial Sequence: Synthetic oligonucleotide
gaagugucuggcucggaca

SEQ ID NO: 3103388 - RNA, 19 nt, Artificial Sequence
  Description of Artificial Sequence: Synthetic oligonucleotide
gaugcagugccaccucgug

SEQ ID NO: 3103389 - RNA, 19 nt, Artificial Sequence
  Description of Artificial Sequence: Synthetic oligonucleotide
ugagugucuggguuugggu

SEQ ID NO: 3103390 - RNA, 19 nt, Artificial Sequence
  Description of Artificial Sequence: Synthetic oligonucleotide
cuucaugcaugcaaggcaa

SEQ ID NO: 3103391 - RNA, 19 nt, Artificial Sequence
  Description of Artificial Sequence: Synthetic oligonucleotide
ucuggcucggacagagaga

SEQ ID NO: 3103392 - RNA, 19 nt, Artificial Sequence
  Description of Artificial Sequence: Synthetic oligonucleotide
ggcucggacagagagaugc

SEQ ID NO: 3103393 - RNA, 19 nt, Artificial Sequence
  Description of Artificial Sequence: Synthetic oligonucleotide
uccuagcagaagugucugg

SEQ ID NO: 3103394 - RNA, 19 nt, Artificial Sequence
  Description of Artificial Sequence: Synthetic oligonucleotide
caugcaugcaaggcaagug

SEQ ID NO: 3103395 - RNA, 19 nt, Artificial Sequence
  Description of Artificial Sequence: Synthetic oligonucleotide
guggucaacagcggaaacc

SEQ ID NO: 3103396 - RNA, 19 nt, Artificial Sequence
  Description of Artificial Sequence: Synthetic oligonucleotide
ucauccuuccuagcagaag

SEQ ID NO: 3103397 - RNA, 19 nt, Artificial Sequence
  Description of Artificial Sequence: Synthetic oligonucleotide
gucucgacgccccuccggg

SEQ ID NO: 3103398 - RNA, 19 nt, Artificial Sequence
  Description of Artificial Sequence: Synthetic oligonucleotide
uuccuagcagaagugucug

SEQ ID NO: 3103399 - RNA, 19 nt, Artificial Sequence
  Description of Artificial Sequence: Synthetic oligonucleotide
cugcugucauccuuccuag

SEQ ID NO: 3103400 - RNA, 19 nt, Artificial Sequence
  Description of Artificial Sequence: Synthetic oligonucleotide
caauggggagcugugcugc

SEQ ID NO: 3103401 - RNA, 19 nt, Artificial Sequence
  Description of Artificial Sequence: Synthetic oligonucleotide
caaggcaagugcucuacca

SEQ ID NO: 3103402 - RNA, 19 nt, Artificial Sequence
  Description of Artificial Sequence: Synthetic oligonucleotide
  modified_base (14)..(14): a, c, u, g, unknown or other
uccgcuugcugccnugguu

SEQ ID NO: 3103403 - RNA, 19 nt, Artificial Sequence
  Description of Artificial Sequence: Synthetic oligonucleotide
agcugugcugcgcgugcgc

SEQ ID NO: 3103404 - RNA, 19 nt, Artificial Sequence
  Description of Artificial Sequence: Synthetic oligonucleotide
cugagugucuggguuuggg

SEQ ID NO: 3103405 - RNA, 19 nt, Artificial Sequence
  Description of Artificial Sequence: Synthetic oligonucleotide
ugcaaggcaagugcucuac

SEQ ID NO: 3103406 - RNA, 19 nt, Artificial Sequence
  Description of Artificial Sequence: Synthetic oligonucleotide
caacagcggaaacccaggc

SEQ ID NO: 3103407 - RNA, 19 nt, Artificial Sequence
  Description of Artificial Sequence: Synthetic oligonucleotide
ugugcugcgcgugcgcaag

SEQ ID NO: 3103408 - RNA, 19 nt, Artificial Sequence
  Description of Artificial Sequence: Synthetic oligonucleotide
gcuucaugcaugcaaggca

SEQ ID NO: 3103409 - RNA, 19 nt, Artificial Sequence
  Description of Artificial Sequence: Synthetic oligonucleotide
  modified_base (16)..(16): a, c, u, g, unknown or other
cuuccgcuugcugccnugg

SEQ ID NO: 3103410 - RNA, 19 nt, Artificial Sequence
  Description of Artificial Sequence: Synthetic oligonucleotide
uccuuccuagcagaagugu

SEQ ID NO: 3103411 - RNA, 19 nt, Artificial Sequence
  Description of Artificial Sequence: Synthetic oligonucleotide
gugucuggcucggacagag

SEQ ID NO: 3103412 - RNA, 19 nt, Artificial Sequence
  Description of Artificial Sequence: Synthetic oligonucleotide
ugcgcgugcgcaaggucug

SEQ ID NO: 3103413 - RNA, 19 nt, Artificial Sequence
  Description of Artificial Sequence: Synthetic oligonucleotide
gggucaucuuugcugagug

SEQ ID NO: 3103414 - RNA, 19 nt, Artificial Sequence
  Description of Artificial Sequence: Synthetic oligonucleotide
cagcggaaacccaggcugg

SEQ ID NO: 3103415 - RNA, 19 nt, Artificial Sequence
  Description of Artificial Sequence: Synthetic oligonucleotide
cauccuuccuagcagaagu

SEQ ID NO: 3103416 - RNA, 19 nt, Artificial Sequence
  Description of Artificial Sequence: Synthetic oligonucleotide
caucuuugcugagugucug

SEQ ID NO: 3103417 - RNA, 19 nt, Artificial Sequence
  Description of Artificial Sequence: Synthetic oligonucleotide
ugcugagugucuggguuug

SEQ ID NO: 3103418 - RNA, 19 nt, Artificial Sequence
  Description of Artificial Sequence: Synthetic oligonucleotide
ugcgcaaggucugugucuc

SEQ ID NO: 3103419 - RNA, 19 nt, Artificial Sequence
  Description of Artificial Sequence: Synthetic oligonucleotide
cuggugucccuagaacggg

SEQ ID NO: 3103420 - RNA, 19 nt, Artificial Sequence
  Description of Artificial Sequence: Synthetic oligonucleotide
cucggacagagagaugcag

SEQ ID NO: 3103421 - RNA, 19 nt, Artificial Sequence
  Description of Artificial Sequence: Synthetic oligonucleotide
cagagagaugcagugccac

SEQ ID NO: 3103422 - RNA, 19 nt, Artificial Sequence
  Description of Artificial Sequence: Synthetic oligonucleotide
cuuccuagcagaagugucu

SEQ ID NO: 3103423 - RNA, 19 nt, Artificial Sequence
  Description of Artificial Sequence: Synthetic oligonucleotide
ucuggguuugggugcugcu

SEQ ID NO: 3103424 - RNA, 19 nt, Artificial Sequence
  Description of Artificial Sequence: Synthetic oligonucleotide
agugccaccucguggucaa

SEQ ID NO: 3103425 - RNA, 19 nt, Artificial Sequence
  Description of Artificial Sequence: Synthetic oligonucleotide
ccuagcagaagugucuggc

SEQ ID NO: 3103426 - RNA, 19 nt, Artificial Sequence
  Description of Artificial Sequence: Synthetic oligonucleotide
ucguggucaacagcggaaa

SEQ ID NO: 3103427 - RNA, 19 nt, Artificial Sequence
  Description of Artificial Sequence: Synthetic oligonucleotide
uuugggugcugcugucauc

SEQ ID NO: 3103428 - RNA, 19 nt, Artificial Sequence
  Description of Artificial Sequence: Synthetic oligonucleotide
uugcugagugucuggguuu

SEQ ID NO: 3103429 - RNA, 19 nt, Artificial Sequence
  Description of Artificial Sequence: Synthetic oligonucleotide
ugcugucauccuuccuagc

SEQ ID NO: 3103430 - RNA, 19 nt, Artificial Sequence
  Description of Artificial Sequence: Synthetic oligonucleotide
gagagaugcagugccaccu

SEQ ID NO: 3103431 - RNA, 19 nt, Artificial Sequence
  Description of Artificial Sequence: Synthetic oligonucleotide
cuccgggcuucaugcaugc

SEQ ID NO: 3103432 - RNA, 19 nt, Artificial Sequence
  Description of Artificial Sequence: Synthetic oligonucleotide
gcugcugucauccuuccua

SEQ ID NO: 3103433 - RNA, 19 nt, Artificial Sequence
  Description of Artificial Sequence: Synthetic oligonucleotide
ucugugucucgacgccccu

SEQ ID NO: 3103434 - RNA, 19 nt, Artificial Sequence
  Description of Artificial Sequence: Synthetic oligonucleotide
agcggaaacccaggcuggg

SEQ ID NO: 3103435 - RNA, 19 nt, Artificial Sequence
  Description of Artificial Sequence: Synthetic oligonucleotide
cuggguuugggugcugcug

SEQ ID NO: 3103436 - RNA, 19 nt, Artificial Sequence
  Description of Artificial Sequence: Synthetic oligonucleotide
gucugugucucgacgcccc

SEQ ID NO: 3103437 - RNA, 19 nt, Artificial Sequence
  Description of Artificial Sequence: Synthetic oligonucleotide
cucguggucaacagcggaa

SEQ ID NO: 3103438 - RNA, 19 nt, Artificial Sequence
  Description of Artificial Sequence: Synthetic oligonucleotide
ugccaccucguggucaaca

SEQ ID NO: 3103439 - RNA, 19 nt, Artificial Sequence
  Description of Artificial Sequence: Synthetic oligonucleotide
gggcuucaugcaugcaagg

SEQ ID NO: 3103440 - RNA, 19 nt, Artificial Sequence
  Description of Artificial Sequence: Synthetic oligonucleotide
auccuuccuagcagaagug

SEQ ID NO: 3103441 - RNA, 19 nt, Artificial Sequence
  Description of Artificial Sequence: Synthetic oligonucleotide
ccuuccuagcagaaguguc

SEQ ID NO: 3103442 - RNA, 19 nt, Artificial Sequence
  Description of Artificial Sequence: Synthetic oligonucleotide
cucaauggggagcugugcu

SEQ ID NO: 3103443 - RNA, 19 nt, Artificial Sequence
  Description of Artificial Sequence: Synthetic oligonucleotide
  modified_base (15)..(15): a, c, u, g, unknown or other
uuccgcuugcugccnuggu

SEQ ID NO: 3103444 - RNA, 19 nt, Artificial Sequence
  Description of Artificial Sequence: Synthetic oligonucleotide
acagagagaugcagugcca

SEQ ID NO: 3103445 - RNA, 19 nt, Artificial Sequence
  Description of Artificial Sequence: Synthetic oligonucleotide
ugucuggcucggacagaga

SEQ ID NO: 3103446 - RNA, 19 nt, Artificial Sequence
  Description of Artificial Sequence: Synthetic oligonucleotide
ggugcugcugucauccuuc

SEQ ID NO: 3103447 - RNA, 19 nt, Artificial Sequence
  Description of Artificial Sequence: Synthetic oligonucleotide
gagcugugcugcgcgugcg

SEQ ID NO: 3103448 - RNA, 19 nt, Artificial Sequence
  Description of Artificial Sequence: Synthetic oligonucleotide
ucucgacgccccuccgggc

SEQ ID NO: 3103449 - RNA, 19 nt, Artificial Sequence
  Description of Artificial Sequence: Synthetic oligonucleotide
caugcaaggcaagugcucu

SEQ ID NO: 3103450 - RNA, 19 nt, Artificial Sequence
  Description of Artificial Sequence: Synthetic oligonucleotide
cuagcagaagugucuggcu

SEQ ID NO: 3103451 - RNA, 19 nt, Artificial Sequence
  Description of Artificial Sequence: Synthetic oligonucleotide
accucguggucaacagcgg

SEQ ID NO: 3103452 - RNA, 19 nt, Artificial Sequence
  Description of Artificial Sequence: Synthetic oligonucleotide
gcagaagugucuggcucgg

SEQ ID NO: 3103453 - RNA, 19 nt, Artificial Sequence
  Description of Artificial Sequence: Synthetic oligonucleotide
gccccuccgggcuucaugc

SEQ ID NO: 3103454 - RNA, 19 nt, Artificial Sequence
  Description of Artificial Sequence: Synthetic oligonucleotide
gccaccucguggucaacag

SEQ ID NO: 3103455 - RNA, 19 nt, Artificial Sequence
  Description of Artificial Sequence: Synthetic oligonucleotide
gucuggguuugggugcugc

SEQ ID NO: 3103456 - RNA, 19 nt, Artificial Sequence
  Description of Artificial Sequence: Synthetic oligonucleotide
agaugcagugccaccucgu

SEQ ID NO: 3103457 - RNA, 19 nt, Artificial Sequence
  Description of Artificial Sequence: Synthetic oligonucleotide
gugucucgacgccccuccg

SEQ ID NO: 3103458 - RNA, 19 nt, Artificial Sequence
  Description of Artificial Sequence: Synthetic oligonucleotide
gcaaggcaagugcucuacc

SEQ ID NO: 3103459 - RNA, 19 nt, Artificial Sequence
  Description of Artificial Sequence: Synthetic oligonucleotide
  modified_base (18)..(18): a, c, u, g, unknown or other
ugcuuccgcuugcugccnu

SEQ ID NO: 3103460 - RNA, 19 nt, Artificial Sequence
  Description of Artificial Sequence: Synthetic oligonucleotide
cgggcuucaugcaugcaag

SEQ ID NO: 3103461 - RNA, 19 nt, Artificial Sequence
  Description of Artificial Sequence: Synthetic oligonucleotide
augcaaggcaagugcucua

SEQ ID NO: 3103462 - RNA, 19 nt, Artificial Sequence
  Description of Artificial Sequence: Synthetic oligonucleotide
ugcugcgcgugcgcaaggu

SEQ ID NO: 3103463 - RNA, 19 nt, Artificial Sequence
  Description of Artificial Sequence: Synthetic oligonucleotide
uggcucggacagagagaug

SEQ ID NO: 3103464 - RNA, 19 nt, Artificial Sequence
  Description of Artificial Sequence: Synthetic oligonucleotide
cuggcucggacagagagau

SEQ ID NO: 3103465 - RNA, 19 nt, Artificial Sequence
  Description of Artificial Sequence: Synthetic oligonucleotide
cugcgcgugcgcaaggucu

SEQ ID NO: 3103466 - RNA, 19 nt, Artificial Sequence
  Description of Artificial Sequence: Synthetic oligonucleotide
gcaaggucugugucucgac

SEQ ID NO: 3103467 - RNA, 19 nt, Artificial Sequence
  Description of Artificial Sequence: Synthetic oligonucleotide
cuuugcugagugucugggu

SEQ ID NO: 3103468 - RNA, 19 nt, Artificial Sequence
  Description of Artificial Sequence: Synthetic oligonucleotide
ggucugugucucgacgccc

SEQ ID NO: 3103469 - RNA, 19 nt, Artificial Sequence
  Description of Artificial Sequence: Synthetic oligonucleotide
gugcugcgcgugcgcaagg

SEQ ID NO: 3103470 - RNA, 19 nt, Artificial Sequence
  Description of Artificial Sequence: Synthetic oligonucleotide
ggcucaauggggagcugug

SEQ ID NO: 3103471 - RNA, 19 nt, Artificial Sequence
  Description of Artificial Sequence: Synthetic oligonucleotide
ugggugcugcugucauccu

SEQ ID NO: 3103472 - RNA, 19 nt, Artificial Sequence
  Description of Artificial Sequence: Synthetic oligonucleotide
gcucaauggggagcugugc

SEQ ID NO: 3103473 - RNA, 19 nt, Artificial Sequence
  Description of Artificial Sequence: Synthetic oligonucleotide
gugcgcaaggucugugucu

SEQ ID NO: 3103474 - RNA, 19 nt, Artificial Sequence
  Description of Artificial Sequence: Synthetic oligonucleotide
agugucuggcucggacaga

SEQ ID NO: 3103475 - RNA, 19 nt, Artificial Sequence
  Description of Artificial Sequence: Synthetic oligonucleotide
gucauccuuccuagcagaa

SEQ ID NO: 3103476 - RNA, 19 nt, Artificial Sequence
  Description of Artificial Sequence: Synthetic oligonucleotide
ccuccgggcuucaugcaug

SEQ ID NO: 3103477 - RNA, 19 nt, Artificial Sequence
  Description of Artificial Sequence: Synthetic oligonucleotide
gcggaaacccaggcugggg

SEQ ID NO: 3103478 - RNA, 19 nt, Artificial Sequence
  Description of Artificial Sequence: Synthetic oligonucleotide
ccaccucguggucaacagc

SEQ ID NO: 3103479 - RNA, 19 nt, Artificial Sequence
  Description of Artificial Sequence: Synthetic oligonucleotide
ucgacgccccuccgggcuu

SEQ ID NO: 3103480 - RNA, 19 nt, Artificial Sequence
  Description of Artificial Sequence: Synthetic oligonucleotide
  modified_base (17)..(17): a, c, u, g, unknown or other
gcuuccgcuugcugccnug

SEQ ID NO: 3103481 - RNA, 19 nt, Artificial Sequence
  Description of Artificial Sequence: Synthetic oligonucleotide
gguuugggugcugcuguca

SEQ ID NO: 3103482 - RNA, 19 nt, Artificial Sequence
  Description of Artificial Sequence: Synthetic oligonucleotide
cugugucucgacgccccuc

SEQ ID NO: 3103483 - RNA, 19 nt, Artificial Sequence
  Description of Artificial Sequence: Synthetic oligonucleotide
ugucuggguuugggugcug

SEQ ID NO: 3103484 - RNA, 19 nt, Artificial Sequence
  Description of Artificial Sequence: Synthetic oligonucleotide
uccgggcuucaugcaugca

SEQ ID NO: 3103485 - RNA, 19 nt, Artificial Sequence
  Description of Artificial Sequence: Synthetic oligonucleotide
gggagcugugcugcgcgug

SEQ ID NO: 3103486 - RNA, 19 nt, Artificial Sequence
  Description of Artificial Sequence: Synthetic oligonucleotide
ccgggcuucaugcaugcaa

SEQ ID NO: 3103487 - RNA, 19 nt, Artificial Sequence
  Description of Artificial Sequence: Synthetic oligonucleotide
gcugagugucuggguuugg

SEQ ID NO: 3103488 - RNA, 19 nt, Artificial Sequence
  Description of Artificial Sequence: Synthetic oligonucleotide
cucgacgccccuccgggcu

SEQ ID NO: 3103489 - RNA, 19 nt, Artificial Sequence
  Description of Artificial Sequence: Synthetic oligonucleotide
gcgcaaggucugugucucg

SEQ ID NO: 3103490 - RNA, 19 nt, Artificial Sequence
  Description of Artificial Sequence: Synthetic oligonucleotide
ggguuugggugcugcuguc

SEQ ID NO: 3103491 - RNA, 19 nt, Artificial Sequence
  Description of Artificial Sequence: Synthetic oligonucleotide
ggucaucuuugcugagugu

SEQ ID NO: 3103492 - RNA, 19 nt, Artificial Sequence
  Description of Artificial Sequence: Synthetic oligonucleotide
cgugcgcaaggucuguguc

SEQ ID NO: 3103493 - RNA, 19 nt, Artificial Sequence
  Description of Artificial Sequence: Synthetic oligonucleotide
cugugcugcgcgugcgcaa

SEQ ID NO: 3103494 - RNA, 19 nt, Artificial Sequence
  Description of Artificial Sequence: Synthetic oligonucleotide
ccucguggucaacagcgga

SEQ ID NO: 3103495 - RNA, 19 nt, Artificial Sequence
  Description of Artificial Sequence: Synthetic oligonucleotide
ggucaacagcggaaaccca

SEQ ID NO: 3103496 - RNA, 19 nt, Artificial Sequence
  Description of Artificial Sequence: Synthetic oligonucleotide
cguggucaacagcggaaac

SEQ ID NO: 3103497 - RNA, 19 nt, Artificial Sequence
  Description of Artificial Sequence: Synthetic oligonucleotide
gcugcgcgugcgcaagguc

SEQ ID NO: 3103498 - RNA, 19 nt, Artificial Sequence
  Description of Artificial Sequence: Synthetic oligonucleotide
gcugugcugcgcgugcgca

SEQ ID NO: 3103499 - RNA, 19 nt, Artificial Sequence
  Description of Artificial Sequence: Synthetic oligonucleotide
ggggucaucuuugcugagu

SEQ ID NO: 3103500 - RNA, 19 nt, Artificial Sequence
  Description of Artificial Sequence: Synthetic oligonucleotide
gcucggacagagagaugca

SEQ ID NO: 3103501 - RNA, 19 nt, Artificial Sequence
  Description of Artificial Sequence: Synthetic oligonucleotide
gcagugccaccucgugguc

SEQ ID NO: 3103502 - RNA, 19 nt, Artificial Sequence
  Description of Artificial Sequence: Synthetic oligonucleotide
cagaagugucuggcucgga

SEQ ID NO: 3103503 - RNA, 19 nt, Artificial Sequence
  Description of Artificial Sequence: Synthetic oligonucleotide
gggcucaauggggagcugu

SEQ ID NO: 3103504 - RNA, 19 nt, Artificial Sequence
  Description of Artificial Sequence: Synthetic oligonucleotide
gcgugcgcaaggucugugu

SEQ ID NO: 3103505 - RNA, 19 nt, Artificial Sequence
  Description of Artificial Sequence: Synthetic oligonucleotide
  modified_base (13)..(13): a, c, u, g, unknown or other
ccgcuugcugccnugguuu

SEQ ID NO: 3103506 - RNA, 19 nt, Artificial Sequence
  Description of Artificial Sequence: Synthetic oligonucleotide
cgcaaggucugugucucga

SEQ ID NO: 3103507 - RNA, 19 nt, Artificial Sequence
  Description of Artificial Sequence: Synthetic oligonucleotide
gacgccccuccgggcuuca

SEQ ID NO: 3103508 - RNA, 19 nt, Artificial Sequence
  Description of Artificial Sequence: Synthetic oligonucleotide
gugccaccucguggucaac

SEQ ID NO: 3103509 - RNA, 19 nt, Artificial Sequence
  Description of Artificial Sequence: Synthetic oligonucleotide
ggggcucaauggggagcug

SEQ ID NO: 3103510 - RNA, 19 nt, Artificial Sequence
  Description of Artificial Sequence: Synthetic oligonucleotide
cgccccuccgggcuucaug

SEQ ID NO: 3103511 - RNA, 19 nt, Artificial Sequence
  Description of Artificial Sequence: Synthetic oligonucleotide
ggggagcugugcugcgcgu

SEQ ID NO: 3103512 - RNA, 19 nt, Artificial Sequence
  Description of Artificial Sequence: Synthetic oligonucleotide
cgcgugcgcaaggucugug

SEQ ID NO: 3103513 - RNA, 19 nt, Artificial Sequence
  Description of Artificial Sequence: Synthetic oligonucleotide
ccccuccgggcuucaugca

SEQ ID NO: 3103514 - RNA, 19 nt, Artificial Sequence
  Description of Artificial Sequence: Synthetic oligonucleotide
cccuccgggcuucaugcau

SEQ ID NO: 3103515 - RNA, 19 nt, Artificial Sequence
  Description of Artificial Sequence: Synthetic oligonucleotide
acgccccuccgggcuucau

SEQ ID NO: 3103516 - RNA, 19 nt, Artificial Sequence
  Description of Artificial Sequence: Synthetic oligonucleotide
  modified_base (12)..(12): a, c, u, g, unknown or other
cgcuugcugccnugguuuu

SEQ ID NO: 3103517 - RNA, 19 nt, Artificial Sequence
  Description of Artificial Sequence: Synthetic oligonucleotide
gcgcgugcgcaaggucugu

SEQ ID NO: 3103518 - RNA, 19 nt, Artificial Sequence
  Description of Artificial Sequence: Synthetic oligonucleotide
cgacgccccuccgggcuuc

SEQ ID NO: 3103519 - RNA, 19 nt, Artificial Sequence
  Description of Artificial Sequence: Synthetic oligonucleotide
aauaauucuacucucacag

SEQ ID NO: 3103520 - RNA, 19 nt, Artificial Sequence
  Description of Artificial Sequence: Synthetic oligonucleotide
aauucuuccucccagcugc

SEQ ID NO: 3103521 - RNA, 19 nt, Artificial Sequence
  Description of Artificial Sequence: Synthetic oligonucleotide
uuuauugcaaaucaaacca

SEQ ID NO: 3103522 - RNA, 19 nt, Artificial Sequence
  Description of Artificial Sequence: Synthetic oligonucleotide
ugcaaaucaaaccauauga

SEQ ID NO: 3103523 - RNA, 19 nt, Artificial Sequence
  Description of Artificial Sequence: Synthetic oligonucleotide
aaaucaaaccauaugaauc

SEQ ID NO: 3103524 - RNA, 19 nt, Artificial Sequence
  Description of Artificial Sequence: Synthetic oligonucleotide
uuugaagauacuuuuacug

SEQ ID NO: 3103525 - RNA, 19 nt, Artificial Sequence
  Description of Artificial Sequence: Synthetic oligonucleotide
aaccauaugaaucacagaa

SEQ ID NO: 3103526 - RNA, 19 nt, Artificial Sequence
  Description of Artificial Sequence: Synthetic oligonucleotide
aaucaaaccauaugaauca

SEQ ID NO: 3103527 - RNA, 19 nt, Artificial Sequence
  Description of Artificial Sequence: Synthetic oligonucleotide
aauagcuccaaauguacug

SEQ ID NO: 3103528 - RNA, 19 nt, Artificial Sequence
  Description of Artificial Sequence: Synthetic oligonucleotide
acagaagucuaguuaaagc

SEQ ID NO: 3103529 - RNA, 19 nt, Artificial Sequence
  Description of Artificial Sequence: Synthetic oligonucleotide
uuuuguagcauagacacca

SEQ ID NO: 3103530 - RNA, 19 nt, Artificial Sequence
  Description of Artificial Sequence: Synthetic oligonucleotide
cagaagucuaguuaaagcc

SEQ ID NO: 3103531 - RNA, 19 nt, Artificial Sequence
  Description of Artificial Sequence: Synthetic oligonucleotide
aaaggcguccaucauuuuc

SEQ ID NO: 3103532 - RNA, 19 nt, Artificial Sequence
  Description of Artificial Sequence: Synthetic oligonucleotide
gauguguucagauagugga

SEQ ID NO: 3103533 - RNA, 19 nt, Artificial Sequence
  Description of Artificial Sequence: Synthetic oligonucleotide
aaacuguugguuuauugca

SEQ ID NO: 3103534 - RNA, 19 nt, Artificial Sequence
  Description of Artificial Sequence: Synthetic oligonucleotide
caaaccauaugaaucacag

SEQ ID NO: 3103535 - RNA, 19 nt, Artificial Sequence
  Description of Artificial Sequence: Synthetic oligonucleotide
uuuacugugaauucuuccu

SEQ ID NO: 3103536 - RNA, 19 nt, Artificial Sequence
  Description of Artificial Sequence: Synthetic oligonucleotide
uuuucuucaacucggcuac

SEQ ID NO: 3103537 - RNA, 19 nt, Artificial Sequence
  Description of Artificial Sequence: Synthetic oligonucleotide
accagauguguucagauag

SEQ ID NO: 3103538 - RNA, 19 nt, Artificial Sequence
  Description of Artificial Sequence: Synthetic oligonucleotide
uaguggagaacccaaacug

SEQ ID NO: 3103539 - RNA, 19 nt, Artificial Sequence
  Description of Artificial Sequence: Synthetic oligonucleotide
auaugaaucacagaagucu

SEQ ID NO: 3103540 - RNA, 19 nt, Artificial Sequence
  Description of Artificial Sequence: Synthetic oligonucleotide
caaacuguugguuuauugc

SEQ ID NO: 3103541 - RNA, 19 nt, Artificial Sequence
  Description of Artificial Sequence: Synthetic oligonucleotide
aauggcaucugucccauca

SEQ ID NO: 3103542 - RNA, 19 nt, Artificial Sequence
  Description of Artificial Sequence: Synthetic oligonucleotide
ugaagauacuuuuacugug

SEQ ID NO: 3103543 - RNA, 19 nt, Artificial Sequence
  Description of Artificial Sequence: Synthetic oligonucleotide
ugugaauucuuccucccag

SEQ ID NO: 3103544 - RNA, 19 nt, Artificial Sequence
  Description of Artificial Sequence: Synthetic oligonucleotide
uucccaggcaucaaaggcg

SEQ ID NO: 3103545 - RNA, 19 nt, Artificial Sequence
  Description of Artificial Sequence: Synthetic oligonucleotide
auguacugaacauuauuuc

SEQ ID NO: 3103546 - RNA, 19 nt, Artificial Sequence
  Description of Artificial Sequence: Synthetic oligonucleotide
acaccaauaauucuacucu

SEQ ID NO: 3103547 - RNA, 19 nt, Artificial Sequence
  Description of Artificial Sequence: Synthetic oligonucleotide
cuuuugaagauacuuuuac

SEQ ID NO: 3103548 - RNA, 19 nt, Artificial Sequence
  Description of Artificial Sequence: Synthetic oligonucleotide
uuuuacugugaauucuucc

SEQ ID NO: 3103549 - RNA, 19 nt, Artificial Sequence
  Description of Artificial Sequence: Synthetic oligonucleotide
auaauucuacucucacagc

SEQ ID NO: 3103550 - RNA, 19 nt, Artificial Sequence
  Description of Artificial Sequence: Synthetic oligonucleotide
caucauuuucuucaacucg

SEQ ID NO: 3103551 - RNA, 19 nt, Artificial Sequence
  Description of Artificial Sequence: Synthetic oligonucleotide
uugaagauacuuuuacugu

SEQ ID NO: 3103552 - RNA, 19 nt, Artificial Sequence
  Description of Artificial Sequence: Synthetic oligonucleotide
uacugaacauuauuucccg

SEQ ID NO: 3103553 - RNA, 19 nt, Artificial Sequence
  Description of Artificial Sequence: Synthetic oligonucleotide
uugucaauggcaucugucc

SEQ ID NO: 3103554 - RNA, 19 nt, Artificial Sequence
  Description of Artificial Sequence: Synthetic oligonucleotide
aaucacagaagucuaguua

SEQ ID NO: 3103555 - RNA, 19 nt, Artificial Sequence
  Description of Artificial Sequence: Synthetic oligonucleotide
uccaucauuuucuucaacu

SEQ ID NO: 3103556 - RNA, 19 nt, Artificial Sequence
  Description of Artificial Sequence: Synthetic oligonucleotide
aaauguacugaacauuauu

SEQ ID NO: 3103557 - RNA, 19 nt, Artificial Sequence
  Description of Artificial Sequence: Synthetic oligonucleotide
gcuuuuguagcauagacac

SEQ ID NO: 3103558 - RNA, 19 nt, Artificial Sequence
  Description of Artificial Sequence: Synthetic oligonucleotide
cugaacauuauuucccgcc

SEQ ID NO: 3103559 - RNA, 19 nt, Artificial Sequence
  Description of Artificial Sequence: Synthetic oligonucleotide
auacuuuuacugugaauuc

SEQ ID NO: 3103560 - RNA, 19 nt, Artificial Sequence
  Description of Artificial Sequence: Synthetic oligonucleotide
aauguacugaacauuauuu

SEQ ID NO: 3103561 - RNA, 19 nt, Artificial Sequence
  Description of Artificial Sequence: Synthetic oligonucleotide
aacauuauuucccgccucu

SEQ ID NO: 3103562 - RNA, 19 nt, Artificial Sequence
  Description of Artificial Sequence: Synthetic oligonucleotide
uguagcauagacaccaaua

SEQ ID NO: 3103563 - RNA, 19 nt, Artificial Sequence
  Description of Artificial Sequence: Synthetic oligonucleotide
gacaccaauaauucuacuc

SEQ ID NO: 3103564 - RNA, 19 nt, Artificial Sequence
  Description of Artificial Sequence: Synthetic oligonucleotide
aucauuuucuucaacucgg

SEQ ID NO: 3103565 - RNA, 19 nt, Artificial Sequence
  Description of Artificial Sequence: Synthetic oligonucleotide
ugguuuauugcaaaucaaa

SEQ ID NO: 3103566 - RNA, 19 nt, Artificial Sequence
  Description of Artificial Sequence: Synthetic oligonucleotide
uugcaaaucaaaccauaug

SEQ ID NO: 3103567 - RNA, 19 nt, Artificial Sequence
  Description of Artificial Sequence: Synthetic oligonucleotide
guucagauaguggagaacc

SEQ ID NO: 3103568 - RNA, 19 nt, Artificial Sequence
  Description of Artificial Sequence: Synthetic oligonucleotide
guugguuuauugcaaauca

SEQ ID NO: 3103569 - RNA, 19 nt, Artificial Sequence
  Description of Artificial Sequence: Synthetic oligonucleotide
aucacagaagucuaguuaa

SEQ ID NO: 3103570 - RNA, 19 nt, Artificial Sequence
  Description of Artificial Sequence: Synthetic oligonucleotide
ugaacauuauuucccgccu

SEQ ID NO: 3103571 - RNA, 19 nt, Artificial Sequence
  Description of Artificial Sequence: Synthetic oligonucleotide
acugaacauuauuucccgc

SEQ ID NO: 3103572 - RNA, 19 nt, Artificial Sequence
  Description of Artificial Sequence: Synthetic oligonucleotide
uacucucacagcuugcacc

SEQ ID NO: 3103573 - RNA, 19 nt, Artificial Sequence
  Description of Artificial Sequence: Synthetic oligonucleotide
gauacuuuuacugugaauu

SEQ ID NO: 3103574 - RNA, 19 nt, Artificial Sequence
  Description of Artificial Sequence: Synthetic oligonucleotide
ugucaauggcaucuguccc

SEQ ID NO: 3103575 - RNA, 19 nt, Artificial Sequence
  Description of Artificial Sequence: Synthetic oligonucleotide
auuuucuucaacucggcua

SEQ ID NO: 3103576 - RNA, 19 nt, Artificial Sequence
  Description of Artificial Sequence: Synthetic oligonucleotide
gauaguggagaacccaaac

SEQ ID NO: 3103577 - RNA, 19 nt, Artificial Sequence
  Description of Artificial Sequence: Synthetic oligonucleotide
uaugaaucacagaagucua

SEQ ID NO: 3103578 - RNA, 19 nt, Artificial Sequence
  Description of Artificial Sequence: Synthetic oligonucleotide
auaguggagaacccaaacu

SEQ ID NO: 3103579 - RNA, 19 nt, Artificial Sequence
  Description of Artificial Sequence: Synthetic oligonucleotide
ucucuuuugaagauacuuu

SEQ ID NO: 3103580 - RNA, 19 nt, Artificial Sequence
  Description of Artificial Sequence: Synthetic oligonucleotide
ucaaaccauaugaaucaca

SEQ ID NO: 3103581 - RNA, 19 nt, Artificial Sequence
  Description of Artificial Sequence: Synthetic oligonucleotide
ucaaaggcguccaucauuu

SEQ ID NO: 3103582 - RNA, 19 nt, Artificial Sequence
  Description of Artificial Sequence: Synthetic oligonucleotide
uagacaccaauaauucuac

SEQ ID NO: 3103583 - RNA, 19 nt, Artificial Sequence
  Description of Artificial Sequence: Synthetic oligonucleotide
ucggcuaccgaguaauagc

SEQ ID NO: 3103584 - RNA, 19 nt, Artificial Sequence
  Description of Artificial Sequence: Synthetic oligonucleotide
cuucccaggcaucaaaggc

SEQ ID NO: 3103585 - RNA, 19 nt, Artificial Sequence
  Description of Artificial Sequence: Synthetic oligonucleotide
uauugcaaaucaaaccaua

SEQ ID NO: 3103586 - RNA, 19 nt, Artificial Sequence
  Description of Artificial Sequence: Synthetic oligonucleotide
auucuacucucacagcuug

SEQ ID NO: 3103587 - RNA, 19 nt, Artificial Sequence
  Description of Artificial Sequence: Synthetic oligonucleotide
uaauagcuccaaauguacu

SEQ ID NO: 3103588 - RNA, 19 nt, Artificial Sequence
  Description of Artificial Sequence: Synthetic oligonucleotide
uuauugcaaaucaaaccau

SEQ ID NO: 3103589 - RNA, 19 nt, Artificial Sequence
  Description of Artificial Sequence: Synthetic oligonucleotide
ugaauucuuccucccagcu

SEQ ID NO: 3103590 - RNA, 19 nt, Artificial Sequence
  Description of Artificial Sequence: Synthetic oligonucleotide
guacugaacauuauuuccc

SEQ ID NO: 3103591 - RNA, 19 nt, Artificial Sequence
  Description of Artificial Sequence: Synthetic oligonucleotide
ggagaacccaaacuguugg

SEQ ID NO: 3103592 - RNA, 19 nt, Artificial Sequence
  Description of Artificial Sequence: Synthetic oligonucleotide
ugucccaucagcuuuugua

SEQ ID NO: 3103593 - RNA, 19 nt, Artificial Sequence
  Description of Artificial Sequence: Synthetic oligonucleotide
aaaccauaugaaucacaga

SEQ ID NO: 3103594 - RNA, 19 nt, Artificial Sequence
  Description of Artificial Sequence: Synthetic oligonucleotide
gucccaucagcuuuuguag

SEQ ID NO: 3103595 - RNA, 19 nt, Artificial Sequence
  Description of Artificial Sequence: Synthetic oligonucleotide
ucauuuucuucaacucggc

SEQ ID NO: 3103596 - RNA, 19 nt, Artificial Sequence
  Description of Artificial Sequence: Synthetic oligonucleotide
uguguucagauaguggaga

SEQ ID NO: 3103597 - RNA, 19 nt, Artificial Sequence
  Description of Artificial Sequence: Synthetic oligonucleotide
uuacugugaauucuuccuc

SEQ ID NO: 3103598 - RNA, 19 nt, Artificial Sequence
  Description of Artificial Sequence: Synthetic oligonucleotide
ucuuuugaagauacuuuua

SEQ ID NO: 3103599 - RNA, 19 nt, Artificial Sequence
  Description of Artificial Sequence: Synthetic oligonucleotide
uucagauaguggagaaccc

SEQ ID NO: 3103600 - RNA, 19 nt, Artificial Sequence
  Description of Artificial Sequence: Synthetic oligonucleotide
guagcauagacaccaauaa

SEQ ID NO: 3103601 - RNA, 19 nt, Artificial Sequence
  Description of Artificial Sequence: Synthetic oligonucleotide
uggagaacccaaacuguug

SEQ ID NO: 3103602 - RNA, 19 nt, Artificial Sequence
  Description of Artificial Sequence: Synthetic oligonucleotide
cauaugaaucacagaaguc

SEQ ID NO: 3103603 - RNA, 19 nt, Artificial Sequence
  Description of Artificial Sequence: Synthetic oligonucleotide
aagauacuuuuacugugaa

SEQ ID NO: 3103604 - RNA, 19 nt, Artificial Sequence
  Description of Artificial Sequence: Synthetic oligonucleotide
agcauagacaccaauaauu

SEQ ID NO: 3103605 - RNA, 19 nt, Artificial Sequence
  Description of Artificial Sequence: Synthetic oligonucleotide
uucaacucggcuaccgagu

SEQ ID NO: 3103606 - RNA, 19 nt, Artificial Sequence
  Description of Artificial Sequence: Synthetic oligonucleotide
aaggcguccaucauuuucu

SEQ ID NO: 3103607 - RNA, 19 nt, Artificial Sequence
  Description of Artificial Sequence: Synthetic oligonucleotide
ugaaucacagaagucuagu

SEQ ID NO: 3103608 - RNA, 19 nt, Artificial Sequence
  Description of Artificial Sequence: Synthetic oligonucleotide
uugguuuauugcaaaucaa

SEQ ID NO: 3103609 - RNA, 19 nt, Artificial Sequence
  Description of Artificial Sequence: Synthetic oligonucleotide
uacuuuuacugugaauucu

SEQ ID NO: 3103610 - RNA, 19 nt, Artificial Sequence
  Description of Artificial Sequence: Synthetic oligonucleotide
ucagauaguggagaaccca

SEQ ID NO: 3103611 - RNA, 19 nt, Artificial Sequence
  Description of Artificial Sequence: Synthetic oligonucleotide
uccuucccaggcaucaaag

SEQ ID NO: 3103612 - RNA, 19 nt, Artificial Sequence
  Description of Artificial Sequence: Synthetic oligonucleotide
auagacaccaauaauucua

SEQ ID NO: 3103613 - RNA, 19 nt, Artificial Sequence
  Description of Artificial Sequence: Synthetic oligonucleotide
guaauagcuccaaauguac

SEQ ID NO: 3103614 - RNA, 19 nt, Artificial Sequence
  Description of Artificial Sequence: Synthetic oligonucleotide
gaauucuuccucccagcug

SEQ ID NO: 3103615 - RNA, 19 nt, Artificial Sequence
  Description of Artificial Sequence: Synthetic oligonucleotide
uguugguuuauugcaaauc

SEQ ID NO: 3103616 - RNA, 19 nt, Artificial Sequence
  Description of Artificial Sequence: Synthetic oligonucleotide
agaagucuaguuaaagccu

SEQ ID NO: 3103617 - RNA, 19 nt, Artificial Sequence
  Description of Artificial Sequence: Synthetic oligonucleotide
uuucccgccucucuuuuga

SEQ ID NO: 3103618 - RNA, 19 nt, Artificial Sequence
  Description of Artificial Sequence: Synthetic oligonucleotide
gaagauacuuuuacuguga

SEQ ID NO: 3103619 - RNA, 19 nt, Artificial Sequence
  Description of Artificial Sequence: Synthetic oligonucleotide
cagcuuuuguagcauagac

SEQ ID NO: 3103620 - RNA, 19 nt, Artificial Sequence
  Description of Artificial Sequence: Synthetic oligonucleotide
agauguguucagauagugg

SEQ ID NO: 3103621 - RNA, 19 nt, Artificial Sequence
  Description of Artificial Sequence: Synthetic oligonucleotide
aucaaaccauaugaaucac

SEQ ID NO: 3103622 - RNA, 19 nt, Artificial Sequence
  Description of Artificial Sequence: Synthetic oligonucleotide
gcuaccgaguaauagcucc

SEQ ID NO: 3103623 - RNA, 19 nt, Artificial Sequence
  Description of Artificial Sequence: Synthetic oligonucleotide
cuuuuguagcauagacacc

SEQ ID NO: 3103624 - RNA, 19 nt, Artificial Sequence
  Description of Artificial Sequence: Synthetic oligonucleotide
aguaauagcuccaaaugua

SEQ ID NO: 3103625 - RNA, 19 nt, Artificial Sequence
  Description of Artificial Sequence: Synthetic oligonucleotide
auuauuucccgccucucuu

SEQ ID NO: 3103626 - RNA, 19 nt, Artificial Sequence
  Description of Artificial Sequence: Synthetic oligonucleotide
ucuacucucacagcuugca

SEQ ID NO: 3103627 - RNA, 19 nt, Artificial Sequence
  Description of Artificial Sequence: Synthetic oligonucleotide
gguuuauugcaaaucaaac

SEQ ID NO: 3103628 - RNA, 19 nt, Artificial Sequence
  Description of Artificial Sequence: Synthetic oligonucleotide
uagcauagacaccaauaau

SEQ ID NO: 3103629 - RNA, 19 nt, Artificial Sequence
  Description of Artificial Sequence: Synthetic oligonucleotide
cuuuuacugugaauucuuc

SEQ ID NO: 3103630 - RNA, 19 nt, Artificial Sequence
  Description of Artificial Sequence: Synthetic oligonucleotide
accauaugaaucacagaag

SEQ ID NO: 3103631 - RNA, 19 nt, Artificial Sequence
  Description of Artificial Sequence: Synthetic oligonucleotide
aacccaaacuguugguuua

SEQ ID NO: 3103632 - RNA, 19 nt, Artificial Sequence
  Description of Artificial Sequence: Synthetic oligonucleotide
caauaauucuacucucaca

SEQ ID NO: 3103633 - RNA, 19 nt, Artificial Sequence
  Description of Artificial Sequence: Synthetic oligonucleotide
aacucggcuaccgaguaau

SEQ ID NO: 3103634 - RNA, 19 nt, Artificial Sequence
  Description of Artificial Sequence: Synthetic oligonucleotide
cacagaagucuaguuaaag

SEQ ID NO: 3103635 - RNA, 19 nt, Artificial Sequence
  Description of Artificial Sequence: Synthetic oligonucleotide
acuguugguuuauugcaaa

SEQ ID NO: 3103636 - RNA, 19 nt, Artificial Sequence
  Description of Artificial Sequence: Synthetic oligonucleotide
gugaauucuuccucccagc

SEQ ID NO: 3103637 - RNA, 19 nt, Artificial Sequence
  Description of Artificial Sequence: Synthetic oligonucleotide
auagcuccaaauguacuga

SEQ ID NO: 3103638 - RNA, 19 nt, Artificial Sequence
  Description of Artificial Sequence: Synthetic oligonucleotide
uccaaauguacugaacauu

SEQ ID NO: 3103639 - RNA, 19 nt, Artificial Sequence
  Description of Artificial Sequence: Synthetic oligonucleotide
ucccaucagcuuuuguagc

SEQ ID NO: 3103640 - RNA, 19 nt, Artificial Sequence
  Description of Artificial Sequence: Synthetic oligonucleotide
uggcaucugucccaucagc

SEQ ID NO: 3103641 - RNA, 19 nt, Artificial Sequence
  Description of Artificial Sequence: Synthetic oligonucleotide
aucaaaggcguccaucauu

SEQ ID NO: 3103642 - RNA, 19 nt, Artificial Sequence
  Description of Artificial Sequence: Synthetic oligonucleotide
ucccaggcaucaaaggcgu

SEQ ID NO: 3103643 - RNA, 19 nt, Artificial Sequence
  Description of Artificial Sequence: Synthetic oligonucleotide
gcuccaaauguacugaaca

SEQ ID NO: 3103644 - RNA, 19 nt, Artificial Sequence
  Description of Artificial Sequence: Synthetic oligonucleotide
caccaauaauucuacucuc

SEQ ID NO: 3103645 - RNA, 19 nt, Artificial Sequence
  Description of Artificial Sequence: Synthetic oligonucleotide
auugcaaaucaaaccauau

SEQ ID NO: 3103646 - RNA, 19 nt, Artificial Sequence
  Description of Artificial Sequence: Synthetic oligonucleotide
uucuacucucacagcuugc

SEQ ID NO: 3103647 - RNA, 19 nt, Artificial Sequence
  Description of Artificial Sequence: Synthetic oligonucleotide
gaacauuauuucccgccuc

SEQ ID NO: 3103648 - RNA, 19 nt, Artificial Sequence
  Description of Artificial Sequence: Synthetic oligonucleotide
aucagcuuuuguagcauag

SEQ ID NO: 3103649 - RNA, 19 nt, Artificial Sequence
  Description of Artificial Sequence: Synthetic oligonucleotide
ucagcuuuuguagcauaga

SEQ ID NO: 3103650 - RNA, 19 nt, Artificial Sequence
  Description of Artificial Sequence: Synthetic oligonucleotide
agcuuuuguagcauagaca

SEQ ID NO: 3103651 - RNA, 19 nt, Artificial Sequence
  Description of Artificial Sequence: Synthetic oligonucleotide
agauacuuuuacugugaau

SEQ ID NO: 3103652 - RNA, 19 nt, Artificial Sequence
  Description of Artificial Sequence: Synthetic oligonucleotide
ucaacucggcuaccgagua

SEQ ID NO: 3103653 - RNA, 19 nt, Artificial Sequence
  Description of Artificial Sequence: Synthetic oligonucleotide
ucacagaagucuaguuaaa

SEQ ID NO: 3103654 - RNA, 19 nt, Artificial Sequence
  Description of Artificial Sequence: Synthetic oligonucleotide
uguucagauaguggagaac

SEQ ID NO: 3103655 - RNA, 19 nt, Artificial Sequence
  Description of Artificial Sequence: Synthetic oligonucleotide
uuuguagcauagacaccaa

SEQ ID NO: 3103656 - RNA, 19 nt, Artificial Sequence
  Description of Artificial Sequence: Synthetic oligonucleotide
aauucuacucucacagcuu

SEQ ID NO: 3103657 - RNA, 19 nt, Artificial Sequence
  Description of Artificial Sequence: Synthetic oligonucleotide
caaaucaaaccauaugaau

SEQ ID NO: 3103658 - RNA, 19 nt, Artificial Sequence
  Description of Artificial Sequence: Synthetic oligonucleotide
aacuguugguuuauugcaa

SEQ ID NO: 3103659 - RNA, 19 nt, Artificial Sequence
  Description of Artificial Sequence: Synthetic oligonucleotide
accaauaauucuacucuca

SEQ ID NO: 3103660 - RNA, 19 nt, Artificial Sequence
  Description of Artificial Sequence: Synthetic oligonucleotide
uuguagcauagacaccaau

SEQ ID NO: 3103661 - RNA, 19 nt, Artificial Sequence
  Description of Artificial Sequence: Synthetic oligonucleotide
augaaucacagaagucuag

SEQ ID NO: 3103662 - RNA, 19 nt, Artificial Sequence
  Description of Artificial Sequence: Synthetic oligonucleotide
aguggagaacccaaacugu

SEQ ID NO: 3103663 - RNA, 19 nt, Artificial Sequence
  Description of Artificial Sequence: Synthetic oligonucleotide
auggcaucugucccaucag

SEQ ID NO: 3103664 - RNA, 19 nt, Artificial Sequence
  Description of Artificial Sequence: Synthetic oligonucleotide
cagauguguucagauagug

SEQ ID NO: 3103665 - RNA, 19 nt, Artificial Sequence
  Description of Artificial Sequence: Synthetic oligonucleotide
uuauuucccgccucucuuu

SEQ ID NO: 3103666 - RNA, 19 nt, Artificial Sequence
  Description of Artificial Sequence: Synthetic oligonucleotide
cacagcuugcaccagaugu

SEQ ID NO: 3103667 - RNA, 19 nt, Artificial Sequence
  Description of Artificial Sequence: Synthetic oligonucleotide
agcuccaaauguacugaac

SEQ ID NO: 3103668 - RNA, 19 nt, Artificial Sequence
  Description of Artificial Sequence: Synthetic oligonucleotide
acauuauuucccgccucuc

SEQ ID NO: 3103669 - RNA, 19 nt, Artificial Sequence
  Description of Artificial Sequence: Synthetic oligonucleotide
ccaauaauucuacucucac

SEQ ID NO: 3103670 - RNA, 19 nt, Artificial Sequence
  Description of Artificial Sequence: Synthetic oligonucleotide
acagcuugcaccagaugug

SEQ ID NO: 3103671 - RNA, 19 nt, Artificial Sequence
  Description of Artificial Sequence: Synthetic oligonucleotide
cucggcuaccgaguaauag

SEQ ID NO: 3103672 - RNA, 19 nt, Artificial Sequence
  Description of Artificial Sequence: Synthetic oligonucleotide
gcauagacaccaauaauuc

SEQ ID NO: 3103673 - RNA, 19 nt, Artificial Sequence
  Description of Artificial Sequence: Synthetic oligonucleotide
ucccgccucucuuuugaag

SEQ ID NO: 3103674 - RNA, 19 nt, Artificial Sequence
  Description of Artificial Sequence: Synthetic oligonucleotide
ucacagcuugcaccagaug

SEQ ID NO: 3103675 - RNA, 19 nt, Artificial Sequence
  Description of Artificial Sequence: Synthetic oligonucleotide
ugcaccagauguguucaga

SEQ ID NO: 3103676 - RNA, 19 nt, Artificial Sequence
  Description of Artificial Sequence: Synthetic oligonucleotide
uauuucccgccucucuuuu

SEQ ID NO: 3103677 - RNA, 19 nt, Artificial Sequence
  Description of Artificial Sequence: Synthetic oligonucleotide
agacaccaauaauucuacu

SEQ ID NO: 3103678 - RNA, 19 nt, Artificial Sequence
  Description of Artificial Sequence: Synthetic oligonucleotide
ccaaacuguugguuuauug

SEQ ID NO: 3103679 - RNA, 19 nt, Artificial Sequence
  Description of Artificial Sequence: Synthetic oligonucleotide
cagauaguggagaacccaa

SEQ ID NO: 3103680 - RNA, 19 nt, Artificial Sequence
  Description of Artificial Sequence: Synthetic oligonucleotide
ccaaauguacugaacauua

SEQ ID NO: 3103681 - RNA, 19 nt, Artificial Sequence
  Description of Artificial Sequence: Synthetic oligonucleotide
uagcuccaaauguacugaa

SEQ ID NO: 3103682 - RNA, 19 nt, Artificial Sequence
  Description of Artificial Sequence: Synthetic oligonucleotide
cuacucucacagcuugcac

SEQ ID NO: 3103683 - RNA, 19 nt, Artificial Sequence
  Description of Artificial Sequence: Synthetic oligonucleotide
agaacccaaacuguugguu

SEQ ID NO: 3103684 - RNA, 19 nt, Artificial Sequence
  Description of Artificial Sequence: Synthetic oligonucleotide
cucuuuugaagauacuuuu

SEQ ID NO: 3103685 - RNA, 19 nt, Artificial Sequence
  Description of Artificial Sequence: Synthetic oligonucleotide
cuugcaccagauguguuca

SEQ ID NO: 3103686 - RNA, 19 nt, Artificial Sequence
  Description of Artificial Sequence: Synthetic oligonucleotide
auuucccgccucucuuuug

SEQ ID NO: 3103687 - RNA, 19 nt, Artificial Sequence
  Description of Artificial Sequence: Synthetic oligonucleotide
gaacccaaacuguugguuu

SEQ ID NO: 3103688 - RNA, 19 nt, Artificial Sequence
  Description of Artificial Sequence: Synthetic oligonucleotide
cuaccgaguaauagcucca

SEQ ID NO: 3103689 - RNA, 19 nt, Artificial Sequence
  Description of Artificial Sequence: Synthetic oligonucleotide
ugcuugucaauggcaucug

SEQ ID NO: 3103690 - RNA, 19 nt, Artificial Sequence
  Description of Artificial Sequence: Synthetic oligonucleotide
gcuugcaccagauguguuc

SEQ ID NO: 3103691 - RNA, 19 nt, Artificial Sequence
  Description of Artificial Sequence: Synthetic oligonucleotide
guguucagauaguggagaa

SEQ ID NO: 3103692 - RNA, 19 nt, Artificial Sequence
  Description of Artificial Sequence: Synthetic oligonucleotide
ccuucccaggcaucaaagg

SEQ ID NO: 3103693 - RNA, 19 nt, Artificial Sequence
  Description of Artificial Sequence: Synthetic oligonucleotide
cuuuuccuucccaggcauc

SEQ ID NO: 3103694 - RNA, 19 nt, Artificial Sequence
  Description of Artificial Sequence: Synthetic oligonucleotide
ucccagcugcuugucaaug

SEQ ID NO: 3103695 - RNA, 19 nt, Artificial Sequence
  Description of Artificial Sequence: Synthetic oligonucleotide
ccauaugaaucacagaagu

SEQ ID NO: 3103696 - RNA, 19 nt, Artificial Sequence
  Description of Artificial Sequence: Synthetic oligonucleotide
uccucccagcugcuuguca

SEQ ID NO: 3103697 - RNA, 19 nt, Artificial Sequence
  Description of Artificial Sequence: Synthetic oligonucleotide
gcaaaucaaaccauaugaa

SEQ ID NO: 3103698 - RNA, 19 nt, Artificial Sequence
  Description of Artificial Sequence: Synthetic oligonucleotide
gaagucuaguuaaagccuu

SEQ ID NO: 3103699 - RNA, 19 nt, Artificial Sequence
  Description of Artificial Sequence: Synthetic oligonucleotide
accgaguaauagcuccaaa

SEQ ID NO: 3103700 - RNA, 19 nt, Artificial Sequence
  Description of Artificial Sequence: Synthetic oligonucleotide
uaccgaguaauagcuccaa

SEQ ID NO: 3103701 - RNA, 19 nt, Artificial Sequence
  Description of Artificial Sequence: Synthetic oligonucleotide
ccagcugcuugucaauggc

SEQ ID NO: 3103702 - RNA, 19 nt, Artificial Sequence
  Description of Artificial Sequence: Synthetic oligonucleotide
ccaggcaucaaaggcgucc

SEQ ID NO: 3103703 - RNA, 19 nt, Artificial Sequence
  Description of Artificial Sequence: Synthetic oligonucleotide
cugugaauucuuccuccca

SEQ ID NO: 3103704 - RNA, 19 nt, Artificial Sequence
  Description of Artificial Sequence: Synthetic oligonucleotide
agauaguggagaacccaaa

SEQ ID NO: 3103705 - RNA, 19 nt, Artificial Sequence
  Description of Artificial Sequence: Synthetic oligonucleotide
cauuauuucccgccucucu

SEQ ID NO: 3103706 - RNA, 19 nt, Artificial Sequence
  Description of Artificial Sequence: Synthetic oligonucleotide
gagaacccaaacuguuggu

SEQ ID NO: 3103707 - RNA, 19 nt, Artificial Sequence
  Description of Artificial Sequence: Synthetic oligonucleotide
gccucucuuuugaagauac

SEQ ID NO: 3103708 - RNA, 19 nt, Artificial Sequence
  Description of Artificial Sequence: Synthetic oligonucleotide
cuccaaauguacugaacau

SEQ ID NO: 3103709 - RNA, 19 nt, Artificial Sequence
  Description of Artificial Sequence: Synthetic oligonucleotide
ucugucccaucagcuuuug

SEQ ID NO: 3103710 - RNA, 19 nt, Artificial Sequence
  Description of Artificial Sequence: Synthetic oligonucleotide
cccagcugcuugucaaugg

SEQ ID NO: 3103711 - RNA, 19 nt, Artificial Sequence
  Description of Artificial Sequence: Synthetic oligonucleotide
cucucuuuugaagauacuu

SEQ ID NO: 3103712 - RNA, 19 nt, Artificial Sequence
  Description of Artificial Sequence: Synthetic oligonucleotide
cauuuucuucaacucggcu

SEQ ID NO: 3103713 - RNA, 19 nt, Artificial Sequence
  Description of Artificial Sequence: Synthetic oligonucleotide
caaauguacugaacauuau

SEQ ID NO: 3103714 - RNA, 19 nt, Artificial Sequence
  Description of Artificial Sequence: Synthetic oligonucleotide
ggcaucaaaggcguccauc

SEQ ID NO: 3103715 - RNA, 19 nt, Artificial Sequence
  Description of Artificial Sequence: Synthetic oligonucleotide
caucagcuuuuguagcaua

SEQ ID NO: 3103716 - RNA, 19 nt, Artificial Sequence
  Description of Artificial Sequence: Synthetic oligonucleotide
caccagauguguucagaua

SEQ ID NO: 3103717 - RNA, 19 nt, Artificial Sequence
  Description of Artificial Sequence: Synthetic oligonucleotide
caggcaucaaaggcgucca

SEQ ID NO: 3103718 - RNA, 19 nt, Artificial Sequence
  Description of Artificial Sequence: Synthetic oligonucleotide
cccaucagcuuuuguagca

SEQ ID NO: 3103719 - RNA, 19 nt, Artificial Sequence
  Description of Artificial Sequence: Synthetic oligonucleotide
cccgccucucuuuugaaga

SEQ ID NO: 3103720 - RNA, 19 nt, Artificial Sequence
  Description of Artificial Sequence: Synthetic oligonucleotide
caucugucccaucagcuuu

SEQ ID NO: 3103721 - RNA, 19 nt, Artificial Sequence
  Description of Artificial Sequence: Synthetic oligonucleotide
gcugcuugucaauggcauc

SEQ ID NO: 3103722 - RNA, 19 nt, Artificial Sequence
  Description of Artificial Sequence: Synthetic oligonucleotide
aggcguccaucauuuucuu

SEQ ID NO: 3103723 - RNA, 19 nt, Artificial Sequence
  Description of Artificial Sequence: Synthetic oligonucleotide
cuguugguuuauugcaaau

SEQ ID NO: 3103724 - RNA, 19 nt, Artificial Sequence
  Description of Artificial Sequence: Synthetic oligonucleotide
cuuccucccagcugcuugu

SEQ ID NO: 3103725 - RNA, 19 nt, Artificial Sequence
  Description of Artificial Sequence: Synthetic oligonucleotide
aucugucccaucagcuuuu

SEQ ID NO: 3103726 - RNA, 19 nt, Artificial Sequence
  Description of Artificial Sequence: Synthetic oligonucleotide
ccgaguaauagcuccaaau

SEQ ID NO: 3103727 - RNA, 19 nt, Artificial Sequence
  Description of Artificial Sequence: Synthetic oligonucleotide
cucucacagcuugcaccag

SEQ ID NO: 3103728 - RNA, 19 nt, Artificial Sequence
  Description of Artificial Sequence: Synthetic oligonucleotide
aggcaucaaaggcguccau

SEQ ID NO: 3103729 - RNA, 19 nt, Artificial Sequence
  Description of Artificial Sequence: Synthetic oligonucleotide
guggagaacccaaacuguu

SEQ ID NO: 3103730 - RNA, 19 nt, Artificial Sequence
  Description of Artificial Sequence: Synthetic oligonucleotide
auucuuccucccagcugcu

SEQ ID NO: 3103731 - RNA, 19 nt, Artificial Sequence
  Description of Artificial Sequence: Synthetic oligonucleotide
ggcguccaucauuuucuuc

SEQ ID NO: 3103732 - RNA, 19 nt, Artificial Sequence
  Description of Artificial Sequence: Synthetic oligonucleotide
ggcaucugucccaucagcu

SEQ ID NO: 3103733 - RNA, 19 nt, Artificial Sequence
  Description of Artificial Sequence: Synthetic oligonucleotide
gcaccagauguguucagau

SEQ ID NO: 3103734 - RNA, 19 nt, Artificial Sequence
  Description of Artificial Sequence: Synthetic oligonucleotide
uucuuccucccagcugcuu

SEQ ID NO: 3103735 - RNA, 19 nt, Artificial Sequence
  Description of Artificial Sequence: Synthetic oligonucleotide
uuccucccagcugcuuguc

SEQ ID NO: 3103736 - RNA, 19 nt, Artificial Sequence
  Description of Artificial Sequence: Synthetic oligonucleotide
caacucggcuaccgaguaa

SEQ ID NO: 3103737 - RNA, 19 nt, Artificial Sequence
  Description of Artificial Sequence: Synthetic oligonucleotide
cagcuugcaccagaugugu

SEQ ID NO: 3103738 - RNA, 19 nt, Artificial Sequence
  Description of Artificial Sequence: Synthetic oligonucleotide
caucaaaggcguccaucau

SEQ ID NO: 3103739 - RNA, 19 nt, Artificial Sequence
  Description of Artificial Sequence: Synthetic oligonucleotide
ccucccagcugcuugucaa

SEQ ID NO: 3103740 - RNA, 19 nt, Artificial Sequence
  Description of Artificial Sequence: Synthetic oligonucleotide
ggcuaccgaguaauagcuc

SEQ ID NO: 3103741 - RNA, 19 nt, Artificial Sequence
  Description of Artificial Sequence: Synthetic oligonucleotide
agcuugcaccagauguguu

SEQ ID NO: 3103742 - RNA, 19 nt, Artificial Sequence
  Description of Artificial Sequence: Synthetic oligonucleotide
gcaucugucccaucagcuu

SEQ ID NO: 3103743 - RNA, 19 nt, Artificial Sequence
  Description of Artificial Sequence: Synthetic oligonucleotide
ccagauguguucagauagu

SEQ ID NO: 3103744 - RNA, 19 nt, Artificial Sequence
  Description of Artificial Sequence: Synthetic oligonucleotide
acucggcuaccgaguaaua

SEQ ID NO: 3103745 - RNA, 19 nt, Artificial Sequence
  Description of Artificial Sequence: Synthetic oligonucleotide
ccuuuuccuucccaggcau

SEQ ID NO: 3103746 - RNA, 19 nt, Artificial Sequence
  Description of Artificial Sequence: Synthetic oligonucleotide
cggcuaccgaguaauagcu

SEQ ID NO: 3103747 - RNA, 19 nt, Artificial Sequence
  Description of Artificial Sequence: Synthetic oligonucleotide
cucccagcugcuugucaau

SEQ ID NO: 3103748 - RNA, 19 nt, Artificial Sequence
  Description of Artificial Sequence: Synthetic oligonucleotide
cguccaucauuuucuucaa

SEQ ID NO: 3103749 - RNA, 19 nt, Artificial Sequence
  Description of Artificial Sequence: Synthetic oligonucleotide
cugucccaucagcuuuugu

SEQ ID NO: 3103750 - RNA, 19 nt, Artificial Sequence
  Description of Artificial Sequence: Synthetic oligonucleotide
caaaggcguccaucauuuu

SEQ ID NO: 3103751 - RNA, 19 nt, Artificial Sequence
  Description of Artificial Sequence: Synthetic oligonucleotide
cccaggcaucaaaggcguc

SEQ ID NO: 3103752 - RNA, 19 nt, Artificial Sequence
  Description of Artificial Sequence: Synthetic oligonucleotide
ccaucagcuuuuguagcau

SEQ ID NO: 3103753 - RNA, 19 nt, Artificial Sequence
  Description of Artificial Sequence: Synthetic oligonucleotide
ccgccucucuuuugaagau

SEQ ID NO: 3103754 - RNA, 19 nt, Artificial Sequence
  Description of Artificial Sequence: Synthetic oligonucleotide
cccaaacuguugguuuauu

SEQ ID NO: 3103755 - RNA, 19 nt, Artificial Sequence
  Description of Artificial Sequence: Synthetic oligonucleotide
uaaauuguccuucugaaca

SEQ ID NO: 3103756 - RNA, 19 nt, Artificial Sequence
  Description of Artificial Sequence: Synthetic oligonucleotide
aaauuggaugagcaguucc

SEQ ID NO: 3103757 - RNA, 19 nt, Artificial Sequence
  Description of Artificial Sequence: Synthetic oligonucleotide
ugacuuauaaaauuggaug

SEQ ID NO: 3103758 - RNA, 19 nt, Artificial Sequence
  Description of Artificial Sequence: Synthetic oligonucleotide
aaauuggugggucuuuugg

SEQ ID NO: 3103759 - RNA, 19 nt, Artificial Sequence
  Description of Artificial Sequence: Synthetic oligonucleotide
uuauaaaauuggaugagca

SEQ ID NO: 3103760 - RNA, 19 nt, Artificial Sequence
  Description of Artificial Sequence: Synthetic oligonucleotide
aaauuguccuucugaacac

SEQ ID NO: 3103761 - RNA, 19 nt, Artificial Sequence
  Description of Artificial Sequence: Synthetic oligonucleotide
cauccgauaaagauaaugc

SEQ ID NO: 3103762 - RNA, 19 nt, Artificial Sequence
  Description of Artificial Sequence: Synthetic oligonucleotide
uauaaaauuggaugagcag

SEQ ID NO: 3103763 - RNA, 19 nt, Artificial Sequence
  Description of Artificial Sequence: Synthetic oligonucleotide
aacaccauccgauaaagau

SEQ ID NO: 3103764 - RNA, 19 nt, Artificial Sequence
  Description of Artificial Sequence: Synthetic oligonucleotide
auaaagauaaugcgaguag

SEQ ID NO: 3103765 - RNA, 19 nt, Artificial Sequence
  Description of Artificial Sequence: Synthetic oligonucleotide
uccgauaaagauaaugcga

SEQ ID NO: 3103766 - RNA, 19 nt, Artificial Sequence
  Description of Artificial Sequence: Synthetic oligonucleotide
aauuggaugagcaguuccc

SEQ ID NO: 3103767 - RNA, 19 nt, Artificial Sequence
  Description of Artificial Sequence: Synthetic oligonucleotide
uuggagguggucuaaauug

SEQ ID NO: 3103768 - RNA, 19 nt, Artificial Sequence
  Description of Artificial Sequence: Synthetic oligonucleotide
uaaagauaaugcgaguagg

SEQ ID NO: 3103769 - RNA, 19 nt, Artificial Sequence
  Description of Artificial Sequence: Synthetic oligonucleotide
cauacuaccuacaacagca

SEQ ID NO: 3103770 - RNA, 19 nt, Artificial Sequence
  Description of Artificial Sequence: Synthetic oligonucleotide
auccgauaaagauaaugcg

SEQ ID NO: 3103771 - RNA, 19 nt, Artificial Sequence
  Description of Artificial Sequence: Synthetic oligonucleotide
augcgaguagguuugaauc

SEQ ID NO: 3103772 - RNA, 19 nt, Artificial Sequence
  Description of Artificial Sequence: Synthetic oligonucleotide
auaaaauuggaugagcagu

SEQ ID NO: 3103773 - RNA, 19 nt, Artificial Sequence
  Description of Artificial Sequence: Synthetic oligonucleotide
ucuaaauuguccuucugaa

SEQ ID NO: 3103774 - RNA, 19 nt, Artificial Sequence
  Description of Artificial Sequence: Synthetic oligonucleotide
cuuacuguggcacaguauc

SEQ ID NO: 3103775 - RNA, 19 nt, Artificial Sequence
  Description of Artificial Sequence: Synthetic oligonucleotide
uugacuuauaaaauuggau

SEQ ID NO: 3103776 - RNA, 19 nt, Artificial Sequence
  Description of Artificial Sequence: Synthetic oligonucleotide
aucggguugacuuauaaaa

SEQ ID NO: 3103777 - RNA, 19 nt, Artificial Sequence
  Description of Artificial Sequence: Synthetic oligonucleotide
ugcgaguagguuugaaucg

SEQ ID NO: 3103778 - RNA, 19 nt, Artificial Sequence
  Description of Artificial Sequence: Synthetic oligonucleotide
gauaaugcgaguagguuug

SEQ ID NO: 3103779 - RNA, 19 nt, Artificial Sequence
  Description of Artificial Sequence: Synthetic oligonucleotide
  modified_base (16)..(16): a, c, u, g, unknown or other
agcaauggagggcuunuuc

SEQ ID NO: 3103780 - RNA, 19 nt, Artificial Sequence
  Description of Artificial Sequence: Synthetic oligonucleotide
guagguuugaaucggguug

SEQ ID NO: 3103781 - RNA, 19 nt, Artificial Sequence
  Description of Artificial Sequence: Synthetic oligonucleotide
gacaucugcgcccaggaag

SEQ ID NO: 3103782 - RNA, 19 nt, Artificial Sequence
  Description of Artificial Sequence: Synthetic oligonucleotide
cacaguaucugcuuggaug

SEQ ID NO: 3103783 - RNA, 19 nt, Artificial Sequence
  Description of Artificial Sequence: Synthetic oligonucleotide
  modified_base (8)..(8): a, c, u, g, unknown or other
agggcuunuucccaucacc

SEQ ID NO: 3103784 - RNA, 19 nt, Artificial Sequence
  Description of Artificial Sequence: Synthetic oligonucleotide
aacagcagcaauggagggc

SEQ ID NO: 3103785 - RNA, 19 nt, Artificial Sequence
  Description of Artificial Sequence: Synthetic oligonucleotide
aauuguccuucugaacacc

SEQ ID NO: 3103786 - RNA, 19 nt, Artificial Sequence
  Description of Artificial Sequence: Synthetic oligonucleotide
  modified_base (14)..(14): a, c, u, g, unknown or other
caauggagggcuunuuccc

SEQ ID NO: 3103787 - RNA, 19 nt, Artificial Sequence
  Description of Artificial Sequence: Synthetic oligonucleotide
cuuauaaaauuggaugagc

SEQ ID NO: 3103788 - RNA, 19 nt, Artificial Sequence
  Description of Artificial Sequence: Synthetic oligonucleotide
aauuggugggucuuuugga

SEQ ID NO: 3103789 - RNA, 19 nt, Artificial Sequence
  Description of Artificial Sequence: Synthetic oligonucleotide
uaaaauuggaugagcaguu

SEQ ID NO: 3103790 - RNA, 19 nt, Artificial Sequence
  Description of Artificial Sequence: Synthetic oligonucleotide
ucugaacucuuacuguggc

SEQ ID NO: 3103791 - RNA, 19 nt, Artificial Sequence
  Description of Artificial Sequence: Synthetic oligonucleotide
aaugcgaguagguuugaau

SEQ ID NO: 3103792 - RNA, 19 nt, Artificial Sequence
  Description of Artificial Sequence: Synthetic oligonucleotide
ucucugaacucuuacugug

SEQ ID NO: 3103793 - RNA, 19 nt, Artificial Sequence
  Description of Artificial Sequence: Synthetic oligonucleotide
acuguggcacaguaucugc

SEQ ID NO: 3103794 - RNA, 19 nt, Artificial Sequence
  Description of Artificial Sequence: Synthetic oligonucleotide
aaaauuggugggucuuuug

SEQ ID NO: 3103795 - RNA, 19 nt, Artificial Sequence
  Description of Artificial Sequence: Synthetic oligonucleotide
  modified_base (2)..(2): a, c, u, g, unknown or other
unuucccaucaccagcagg

SEQ ID NO: 3103796 - RNA, 19 nt, Artificial Sequence
  Description of Artificial Sequence: Synthetic oligonucleotide
auuggugggucuuuuggag

SEQ ID NO: 3103797 - RNA, 19 nt, Artificial Sequence
  Description of Artificial Sequence: Synthetic oligonucleotide
acuuauaaaauuggaugag

SEQ ID NO: 3103798 - RNA, 19 nt, Artificial Sequence
  Description of Artificial Sequence: Synthetic oligonucleotide
aaagauaaugcgaguaggu

SEQ ID NO: 3103799 - RNA, 19 nt, Artificial Sequence
  Description of Artificial Sequence: Synthetic oligonucleotide
ugaacucuuacuguggcac

SEQ ID NO: 3103800 - RNA, 19 nt, Artificial Sequence
  Description of Artificial Sequence: Synthetic oligonucleotide
aaaauuggaugagcaguuc

SEQ ID NO: 3103801 - RNA, 19 nt, Artificial Sequence
  Description of Artificial Sequence: Synthetic oligonucleotide
uccauacuaccuacaacag

SEQ ID NO: 3103802 - RNA, 19 nt, Artificial Sequence
  Description of Artificial Sequence: Synthetic oligonucleotide
ugaacaccauccgauaaag

SEQ ID NO: 3103803 - RNA, 19 nt, Artificial Sequence
  Description of Artificial Sequence: Synthetic oligonucleotide
agauaaugcgaguagguuu

SEQ ID NO: 3103804 - RNA, 19 nt, Artificial Sequence
  Description of Artificial Sequence: Synthetic oligonucleotide
ugggugagugacaucugcg

SEQ ID NO: 3103805 - RNA, 19 nt, Artificial Sequence
  Description of Artificial Sequence: Synthetic oligonucleotide
cuuggaugggcauccauac

SEQ ID NO: 3103806 - RNA, 19 nt, Artificial Sequence
  Description of Artificial Sequence: Synthetic oligonucleotide
gauaaagauaaugcgagua

SEQ ID NO: 3103807 - RNA, 19 nt, Artificial Sequence
  Description of Artificial Sequence: Synthetic oligonucleotide
uggaugggcauccauacua

SEQ ID NO: 3103808 - RNA, 19 nt, Artificial Sequence
  Description of Artificial Sequence: Synthetic oligonucleotide
  modified_base (4)..(4): a, c, u, g, unknown or other
cuunuucccaucaccagca

SEQ ID NO: 3103809 - RNA, 19 nt, Artificial Sequence
  Description of Artificial Sequence: Synthetic oligonucleotide
uccuucugaacaccauccg

SEQ ID NO: 3103810 - RNA, 19 nt, Artificial Sequence
  Description of Artificial Sequence: Synthetic oligonucleotide
cuaaauuguccuucugaac

SEQ ID NO: 3103811 - RNA, 19 nt, Artificial Sequence
  Description of Artificial Sequence: Synthetic oligonucleotide
aguaucugcuuggaugggc

SEQ ID NO: 3103812 - RNA, 19 nt, Artificial Sequence
  Description of Artificial Sequence: Synthetic oligonucleotide
uuggaugagcaguucccgg

SEQ ID NO: 3103813 - RNA, 19 nt, Artificial Sequence
  Description of Artificial Sequence: Synthetic oligonucleotide
augauuuccugccgggguc

SEQ ID NO: 3103814 - RNA, 19 nt, Artificial Sequence
  Description of Artificial Sequence: Synthetic oligonucleotide
ucugaacaccauccgauaa

SEQ ID NO: 3103815 - RNA, 19 nt, Artificial Sequence
  Description of Artificial Sequence: Synthetic oligonucleotide
uacuaccuacaacagcagc

SEQ ID NO: 3103816 - RNA, 19 nt, Artificial Sequence
  Description of Artificial Sequence: Synthetic oligonucleotide
gaccauggaggccaagucc

SEQ ID NO: 3103817 - RNA, 19 nt, Artificial Sequence
  Description of Artificial Sequence: Synthetic oligonucleotide
ccgauaaagauaaugcgag

SEQ ID NO: 3103818 - RNA, 19 nt, Artificial Sequence
  Description of Artificial Sequence: Synthetic oligonucleotide
aaucggguugacuuauaaa

SEQ ID NO: 3103819 - RNA, 19 nt, Artificial Sequence
  Description of Artificial Sequence: Synthetic oligonucleotide
gucuaaauuguccuucuga

SEQ ID NO: 3103820 - RNA, 19 nt, Artificial Sequence
  Description of Artificial Sequence: Synthetic oligonucleotide
aacucuuacuguggcacag

SEQ ID NO: 3103821 - RNA, 19 nt, Artificial Sequence
  Description of Artificial Sequence: Synthetic oligonucleotide
auuggaugagcaguucccg

SEQ ID NO: 3103822 - RNA, 19 nt, Artificial Sequence
  Description of Artificial Sequence: Synthetic oligonucleotide
ucccaucaccagcaggugg

SEQ ID NO: 3103823 - RNA, 19 nt, Artificial Sequence
  Description of Artificial Sequence: Synthetic oligonucleotide
ucugcuuggaugggcaucc

SEQ ID NO: 3103824 - RNA, 19 nt, Artificial Sequence
  Description of Artificial Sequence: Synthetic oligonucleotide
cucugaacucuuacugugg

SEQ ID NO: 3103825 - RNA, 19 nt, Artificial Sequence
  Description of Artificial Sequence: Synthetic oligonucleotide
uguccuucugaacaccauc

SEQ ID NO: 3103826 - RNA, 19 nt, Artificial Sequence
  Description of Artificial Sequence: Synthetic oligonucleotide
gguugacuuauaaaauugg

SEQ ID NO: 3103827 - RNA, 19 nt, Artificial Sequence
  Description of Artificial Sequence: Synthetic oligonucleotide
acuaccuacaacagcagca

SEQ ID NO: 3103828 - RNA, 19 nt, Artificial Sequence
  Description of Artificial Sequence: Synthetic oligonucleotide
uuugaaucggguugacuua

SEQ ID NO: 3103829 - RNA, 19 nt, Artificial Sequence
  Description of Artificial Sequence: Synthetic oligonucleotide
uggagguggucuaaauugu

SEQ ID NO: 3103830 - RNA, 19 nt, Artificial Sequence
  Description of Artificial Sequence: Synthetic oligonucleotide
agguggucuaaauuguccu

SEQ ID NO: 3103831 - RNA, 19 nt, Artificial Sequence
  Description of Artificial Sequence: Synthetic oligonucleotide
ggucucugaacucuuacug

SEQ ID NO: 3103832 - RNA, 19 nt, Artificial Sequence
  Description of Artificial Sequence: Synthetic oligonucleotide
uggcacaguaucugcuugg

SEQ ID NO: 3103833 - RNA, 19 nt, Artificial Sequence
  Description of Artificial Sequence: Synthetic oligonucleotide
gugagugacaucugcgccc

SEQ ID NO: 3103834 - RNA, 19 nt, Artificial Sequence
  Description of Artificial Sequence: Synthetic oligonucleotide
ucggguugacuuauaaaau

SEQ ID NO: 3103835 - RNA, 19 nt, Artificial Sequence
  Description of Artificial Sequence: Synthetic oligonucleotide
gaggccaaguccuggauga

SEQ ID NO: 3103836 - RNA, 19 nt, Artificial Sequence
  Description of Artificial Sequence: Synthetic oligonucleotide
uggaugagcaguucccgga

SEQ ID NO: 3103837 - RNA, 19 nt, Artificial Sequence
  Description of Artificial Sequence: Synthetic oligonucleotide
aagauaaugcgaguagguu

SEQ ID NO: 3103838 - RNA, 19 nt, Artificial Sequence
  Description of Artificial Sequence: Synthetic oligonucleotide
aucaccagcagguggguga

SEQ ID NO: 3103839 - RNA, 19 nt, Artificial Sequence
  Description of Artificial Sequence: Synthetic oligonucleotide
gagguggucuaaauugucc

SEQ ID NO: 3103840 - RNA, 19 nt, Artificial Sequence
  Description of Artificial Sequence: Synthetic oligonucleotide
uuacuguggcacaguaucu

SEQ ID NO: 3103841 - RNA, 19 nt, Artificial Sequence
  Description of Artificial Sequence: Synthetic oligonucleotide
aguagguuugaaucggguu

SEQ ID NO: 3103842 - RNA, 19 nt, Artificial Sequence
  Description of Artificial Sequence: Synthetic oligonucleotide
guugacuuauaaaauugga

SEQ ID NO: 3103843 - RNA, 19 nt, Artificial Sequence
  Description of Artificial Sequence: Synthetic oligonucleotide
aguucccggaccauggagg

SEQ ID NO: 3103844 - RNA, 19 nt, Artificial Sequence
  Description of Artificial Sequence: Synthetic oligonucleotide
guuugaaucggguugacuu

SEQ ID NO: 3103845 - RNA, 19 nt, Artificial Sequence
  Description of Artificial Sequence: Synthetic oligonucleotide
caccauccgauaaagauaa

SEQ ID NO: 3103846 - RNA, 19 nt, Artificial Sequence
  Description of Artificial Sequence: Synthetic oligonucleotide
  modified_base (5)..(5): a, c, u, g, unknown or other
gcuunuucccaucaccagc

SEQ ID NO: 3103847 - RNA, 19 nt, Artificial Sequence
  Description of Artificial Sequence: Synthetic oligonucleotide
acagcagcaauggagggcu

SEQ ID NO: 3103848 - RNA, 19 nt, Artificial Sequence
  Description of Artificial Sequence: Synthetic oligonucleotide
  modified_base (3)..(3): a, c, u, g, unknown or other
uunuucccaucaccagcag

SEQ ID NO: 3103849 - RNA, 19 nt, Artificial Sequence
  Description of Artificial Sequence: Synthetic oligonucleotide
ugggcauccauacuaccua

SEQ ID NO: 3103850 - RNA, 19 nt, Artificial Sequence
  Description of Artificial Sequence: Synthetic oligonucleotide
gaugggcauccauacuacc

SEQ ID NO: 3103851 - RNA, 19 nt, Artificial Sequence
  Description of Artificial Sequence: Synthetic oligonucleotide
uagguuugaaucggguuga

SEQ ID NO: 3103852 - RNA, 19 nt, Artificial Sequence
  Description of Artificial Sequence: Synthetic oligonucleotide
  modified_base (13)..(13): a, c, u, g, unknown or other
aauggagggcuunuuccca

SEQ ID NO: 3103853 - RNA, 19 nt, Artificial Sequence
  Description of Artificial Sequence: Synthetic oligonucleotide
  modified_base (15)..(15): a, c, u, g, unknown or other
gcaauggagggcuunuucc

SEQ ID NO: 3103854 - RNA, 19 nt, Artificial Sequence
  Description of Artificial Sequence: Synthetic oligonucleotide
uacuguggcacaguaucug

SEQ ID NO: 3103855 - RNA, 19 nt, Artificial Sequence
  Description of Artificial Sequence: Synthetic oligonucleotide
uggugggucuuuuggaggu

SEQ ID NO: 3103856 - RNA, 19 nt, Artificial Sequence
  Description of Artificial Sequence: Synthetic oligonucleotide
uggucuaaauuguccuucu

SEQ ID NO: 3103857 - RNA, 19 nt, Artificial Sequence
  Description of Artificial Sequence: Synthetic oligonucleotide
aggaagaucacugguugcu

SEQ ID NO: 3103858 - RNA, 19 nt, Artificial Sequence
  Description of Artificial Sequence: Synthetic oligonucleotide
caacagcagcaauggaggg

SEQ ID NO: 3103859 - RNA, 19 nt, Artificial Sequence
  Description of Artificial Sequence: Synthetic oligonucleotide
ucuuacuguggcacaguau

SEQ ID NO: 3103860 - RNA, 19 nt, Artificial Sequence
  Description of Artificial Sequence: Synthetic oligonucleotide
guccuucugaacaccaucc

SEQ ID NO: 3103861 - RNA, 19 nt, Artificial Sequence
  Description of Artificial Sequence: Synthetic oligonucleotide
augagcaguucccggacca

SEQ ID NO: 3103862 - RNA, 19 nt, Artificial Sequence
  Description of Artificial Sequence: Synthetic oligonucleotide
ggguugacuuauaaaauug

SEQ ID NO: 3103863 - RNA, 19 nt, Artificial Sequence
  Description of Artificial Sequence: Synthetic oligonucleotide
gaaucggguugacuuauaa

SEQ ID NO: 3103864 - RNA, 19 nt, Artificial Sequence
  Description of Artificial Sequence: Synthetic oligonucleotide
caggaagaucacugguugc

SEQ ID NO: 3103865 - RNA, 19 nt, Artificial Sequence
  Description of Artificial Sequence: Synthetic oligonucleotide
gugggugagugacaucugc

SEQ ID NO: 3103866 - RNA, 19 nt, Artificial Sequence
  Description of Artificial Sequence: Synthetic oligonucleotide
ggugagugacaucugcgcc

SEQ ID NO: 3103867 - RNA, 19 nt, Artificial Sequence
  Description of Artificial Sequence: Synthetic oligonucleotide
gaugauuuccugccggggu

SEQ ID NO: 3103868 - RNA, 19 nt, Artificial Sequence
  Description of Artificial Sequence: Synthetic oligonucleotide
ugagugacaucugcgccca

SEQ ID NO: 3103869 - RNA, 19 nt, Artificial Sequence
  Description of Artificial Sequence: Synthetic oligonucleotide
uguggcacaguaucugcuu

SEQ ID NO: 3103870 - RNA, 19 nt, Artificial Sequence
  Description of Artificial Sequence: Synthetic oligonucleotide
uucugaacaccauccgaua

SEQ ID NO: 3103871 - RNA, 19 nt, Artificial Sequence
  Description of Artificial Sequence: Synthetic oligonucleotide
guucccggaccauggaggc

SEQ ID NO: 3103872 - RNA, 19 nt, Artificial Sequence
  Description of Artificial Sequence: Synthetic oligonucleotide
uuggaugggcauccauacu

SEQ ID NO: 3103873 - RNA, 19 nt, Artificial Sequence
  Description of Artificial Sequence: Synthetic oligonucleotide
ucccggaccauggaggcca

SEQ ID NO: 3103874 - RNA, 19 nt, Artificial Sequence
  Description of Artificial Sequence: Synthetic oligonucleotide
uugaaucggguugacuuau

SEQ ID NO: 3103875 - RNA, 19 nt, Artificial Sequence
  Description of Artificial Sequence: Synthetic oligonucleotide
guggcacaguaucugcuug

SEQ ID NO: 3103876 - RNA, 19 nt, Artificial Sequence
  Description of Artificial Sequence: Synthetic oligonucleotide
gaacucuuacuguggcaca

SEQ ID NO: 3103877 - RNA, 19 nt, Artificial Sequence
  Description of Artificial Sequence: Synthetic oligonucleotide
cccaucaccagcagguggg

SEQ ID NO: 3103878 - RNA, 19 nt, Artificial Sequence
  Description of Artificial Sequence: Synthetic oligonucleotide
gggugagugacaucugcgc

SEQ ID NO: 3103879 - RNA, 19 nt, Artificial Sequence
  Description of Artificial Sequence: Synthetic oligonucleotide
guggucuaaauuguccuuc

SEQ ID NO: 3103880 - RNA, 19 nt, Artificial Sequence
  Description of Artificial Sequence: Synthetic oligonucleotide
  modified_base (6)..(6): a, c, u, g, unknown or other
ggcuunuucccaucaccag

SEQ ID NO: 3103881 - RNA, 19 nt, Artificial Sequence
  Description of Artificial Sequence: Synthetic oligonucleotide
augggcauccauacuaccu

SEQ ID NO: 3103882 - RNA, 19 nt, Artificial Sequence
  Description of Artificial Sequence: Synthetic oligonucleotide
acaucugcgcccaggaaga

SEQ ID NO: 3103883 - RNA, 19 nt, Artificial Sequence
  Description of Artificial Sequence: Synthetic oligonucleotide
gugggucuuuuggaggugg

SEQ ID NO: 3103884 - RNA, 19 nt, Artificial Sequence
  Description of Artificial Sequence: Synthetic oligonucleotide
ccaggaagaucacugguug

SEQ ID NO: 3103885 - RNA, 19 nt, Artificial Sequence
  Description of Artificial Sequence: Synthetic oligonucleotide
  modified_base (9)..(9): a, c, u, g, unknown or other
gagggcuunuucccaucac

SEQ ID NO: 3103886 - RNA, 19 nt, Artificial Sequence
  Description of Artificial Sequence: Synthetic oligonucleotide
uuuccugccggggucucug

SEQ ID NO: 3103887 - RNA, 19 nt, Artificial Sequence
  Description of Artificial Sequence: Synthetic oligonucleotide
cuucugaacaccauccgau

SEQ ID NO: 3103888 - RNA, 19 nt, Artificial Sequence
  Description of Artificial Sequence: Synthetic oligonucleotide
caguucccggaccauggag

SEQ ID NO: 3103889 - RNA, 19 nt, Artificial Sequence
  Description of Artificial Sequence: Synthetic oligonucleotide
ccauacuaccuacaacagc

SEQ ID NO: 3103890 - RNA, 19 nt, Artificial Sequence
  Description of Artificial Sequence: Synthetic oligonucleotide
ugauuuccugccggggucu

SEQ ID NO: 3103891 - RNA, 19 nt, Artificial Sequence
  Description of Artificial Sequence: Synthetic oligonucleotide
acaccauccgauaaagaua

SEQ ID NO: 3103892 - RNA, 19 nt, Artificial Sequence
  Description of Artificial Sequence: Synthetic oligonucleotide
auacuaccuacaacagcag

SEQ ID NO: 3103893 - RNA, 19 nt, Artificial Sequence
  Description of Artificial Sequence: Synthetic oligonucleotide
ccauccgauaaagauaaug

SEQ ID NO: 3103894 - RNA, 19 nt, Artificial Sequence
  Description of Artificial Sequence: Synthetic oligonucleotide
guaucugcuuggaugggca

SEQ ID NO: 3103895 - RNA, 19 nt, Artificial Sequence
  Description of Artificial Sequence: Synthetic oligonucleotide
gcgaguagguuugaaucgg

SEQ ID NO: 3103896 - RNA, 19 nt, Artificial Sequence
  Description of Artificial Sequence: Synthetic oligonucleotide
cugaacaccauccgauaaa

SEQ ID NO: 3103897 - RNA, 19 nt, Artificial Sequence
  Description of Artificial Sequence: Synthetic oligonucleotide
ucuuuuggagguggucuaa

SEQ ID NO: 3103898 - RNA, 19 nt, Artificial Sequence
  Description of Artificial Sequence: Synthetic oligonucleotide
ugacaucugcgcccaggaa

SEQ ID NO: 3103899 - RNA, 19 nt, Artificial Sequence
  Description of Artificial Sequence: Synthetic oligonucleotide
cagcaggugggugagugac

SEQ ID NO: 3103900 - RNA, 19 nt, Artificial Sequence
  Description of Artificial Sequence: Synthetic oligonucleotide
  modified_base (12)..(12): a, c, u, g, unknown or other
auggagggcuunuucccau

SEQ ID NO: 3103901 - RNA, 19 nt, Artificial Sequence
  Description of Artificial Sequence: Synthetic oligonucleotide
  modified_base (10)..(10): a, c, u, g, unknown or other
ggagggcuunuucccauca

SEQ ID NO: 3103902 - RNA, 19 nt, Artificial Sequence
  Description of Artificial Sequence: Synthetic oligonucleotide
ugcuuggaugggcauccau

SEQ ID NO: 3103903 - RNA, 19 nt, Artificial Sequence
  Description of Artificial Sequence: Synthetic oligonucleotide
  modified_base (7)..(7): a, c, u, g, unknown or other
gggcuunuucccaucacca

SEQ ID NO: 3103904 - RNA, 19 nt, Artificial Sequence
  Description of Artificial Sequence: Synthetic oligonucleotide
gucucugaacucuuacugu

SEQ ID NO: 3103905 - RNA, 19 nt, Artificial Sequence
  Description of Artificial Sequence: Synthetic oligonucleotide
uaucugcuuggaugggcau

SEQ ID NO: 3103906 - RNA, 19 nt, Artificial Sequence
  Description of Artificial Sequence: Synthetic oligonucleotide
ugaaucggguugacuuaua

SEQ ID NO: 3103907 - RNA, 19 nt, Artificial Sequence
  Description of Artificial Sequence: Synthetic oligonucleotide
cugaacucuuacuguggca

SEQ ID NO: 3103908 - RNA, 19 nt, Artificial Sequence
  Description of Artificial Sequence: Synthetic oligonucleotide
cuaccuacaacagcagcaa

SEQ ID NO: 3103909 - RNA, 19 nt, Artificial Sequence
  Description of Artificial Sequence: Synthetic oligonucleotide
ggucuaaauuguccuucug

SEQ ID NO: 3103910 - RNA, 19 nt, Artificial Sequence
  Description of Artificial Sequence: Synthetic oligonucleotide
ggaggccaaguccuggaug

SEQ ID NO: 3103911 - RNA, 19 nt, Artificial Sequence
  Description of Artificial Sequence: Synthetic oligonucleotide
aucugcgcccaggaagauc

SEQ ID NO: 3103912 - RNA, 19 nt, Artificial Sequence
  Description of Artificial Sequence: Synthetic oligonucleotide
agguuugaaucggguugac

SEQ ID NO: 3103913 - RNA, 19 nt, Artificial Sequence
  Description of Artificial Sequence: Synthetic oligonucleotide
uggaggccaaguccuggau

SEQ ID NO: 3103914 - RNA, 19 nt, Artificial Sequence
  Description of Artificial Sequence: Synthetic oligonucleotide
uaaugcgaguagguuugaa

SEQ ID NO: 3103915 - RNA, 19 nt, Artificial Sequence
  Description of Artificial Sequence: Synthetic oligonucleotide
ggaugagcaguucccggac

SEQ ID NO: 3103916 - RNA, 19 nt, Artificial Sequence
  Description of Artificial Sequence: Synthetic oligonucleotide
uucccaucaccagcaggug

SEQ ID NO: 3103917 - RNA, 19 nt, Artificial Sequence
  Description of Artificial Sequence: Synthetic oligonucleotide
gaacaccauccgauaaaga

SEQ ID NO: 3103918 - RNA, 19 nt, Artificial Sequence
  Description of Artificial Sequence: Synthetic oligonucleotide
gucuuuuggagguggucua

SEQ ID NO: 3103919 - RNA, 19 nt, Artificial Sequence
  Description of Artificial Sequence: Synthetic oligonucleotide
  modified_base (11)..(11): a, c, u, g, unknown or other
uggagggcuunuucccauc

SEQ ID NO: 3103920 - RNA, 19 nt, Artificial Sequence
  Description of Artificial Sequence: Synthetic oligonucleotide
gcauccauacuaccuacaa

SEQ ID NO: 3103921 - RNA, 19 nt, Artificial Sequence
  Description of Artificial Sequence: Synthetic oligonucleotide
caguaucugcuuggauggg

SEQ ID NO: 3103922 - RNA, 19 nt, Artificial Sequence
  Description of Artificial Sequence: Synthetic oligonucleotide
ggaccauggaggccaaguc

SEQ ID NO: 3103923 - RNA, 19 nt, Artificial Sequence
  Description of Artificial Sequence: Synthetic oligonucleotide
acucuuacuguggcacagu

SEQ ID NO: 3103924 - RNA, 19 nt, Artificial Sequence
  Description of Artificial Sequence: Synthetic oligonucleotide
auaaugcgaguagguuuga

SEQ ID NO: 3103925 - RNA, 19 nt, Artificial Sequence
  Description of Artificial Sequence: Synthetic oligonucleotide
gggcauccauacuaccuac

SEQ ID NO: 3103926 - RNA, 19 nt, Artificial Sequence
  Description of Artificial Sequence: Synthetic oligonucleotide
cucuuacuguggcacagua

SEQ ID NO: 3103927 - RNA, 19 nt, Artificial Sequence
  Description of Artificial Sequence: Synthetic oligonucleotide
ggucuuuuggagguggucu

SEQ ID NO: 3103928 - RNA, 19 nt, Artificial Sequence
  Description of Artificial Sequence: Synthetic oligonucleotide
ggaugggcauccauacuac

SEQ ID NO: 3103929 - RNA, 19 nt, Artificial Sequence
  Description of Artificial Sequence: Synthetic oligonucleotide
cgaguagguuugaaucggg

SEQ ID NO: 3103930 - RNA, 19 nt, Artificial Sequence
  Description of Artificial Sequence: Synthetic oligonucleotide
gaguagguuugaaucgggu

SEQ ID NO: 3103931 - RNA, 19 nt, Artificial Sequence
  Description of Artificial Sequence: Synthetic oligonucleotide
uccugccggggucucugaa

SEQ ID NO: 3103932 - RNA, 19 nt, Artificial Sequence
  Description of Artificial Sequence: Synthetic oligonucleotide
ccuucugaacaccauccga

SEQ ID NO: 3103933 - RNA, 19 nt, Artificial Sequence
  Description of Artificial Sequence: Synthetic oligonucleotide
uucccggaccauggaggcc

SEQ ID NO: 3103934 - RNA, 19 nt, Artificial Sequence
  Description of Artificial Sequence: Synthetic oligonucleotide
caucaccagcaggugggug

SEQ ID NO: 3103935 - RNA, 19 nt, Artificial Sequence
  Description of Artificial Sequence: Synthetic oligonucleotide
cuuuuggagguggucuaaa

SEQ ID NO: 3103936 - RNA, 19 nt, Artificial Sequence
  Description of Artificial Sequence: Synthetic oligonucleotide
ggagguggucuaaauuguc

SEQ ID NO: 3103937 - RNA, 19 nt, Artificial Sequence
  Description of Artificial Sequence: Synthetic oligonucleotide
uuccugccggggucucuga

SEQ ID NO: 3103938 - RNA, 19 nt, Artificial Sequence
  Description of Artificial Sequence: Synthetic oligonucleotide
cuguggcacaguaucugcu

SEQ ID NO: 3103939 - RNA, 19 nt, Artificial Sequence
  Description of Artificial Sequence: Synthetic oligonucleotide
gauuuccugccggggucuc

SEQ ID NO: 3103940 - RNA, 19 nt, Artificial Sequence
  Description of Artificial Sequence: Synthetic oligonucleotide
gagugacaucugcgcccag

SEQ ID NO: 3103941 - RNA, 19 nt, Artificial Sequence
  Description of Artificial Sequence: Synthetic oligonucleotide
auuuccugccggggucucu

SEQ ID NO: 3103942 - RNA, 19 nt, Artificial Sequence
  Description of Artificial Sequence: Synthetic oligonucleotide
cugccggggucucugaacu

SEQ ID NO: 3103943 - RNA, 19 nt, Artificial Sequence
  Description of Artificial Sequence: Synthetic oligonucleotide
gcuuggaugggcauccaua

SEQ ID NO: 3103944 - RNA, 19 nt, Artificial Sequence
  Description of Artificial Sequence: Synthetic oligonucleotide
ugccggggucucugaacuc

SEQ ID NO: 3103945 - RNA, 19 nt, Artificial Sequence
  Description of Artificial Sequence: Synthetic oligonucleotide
gggucucugaacucuuacu

SEQ ID NO: 3103946 - RNA, 19 nt, Artificial Sequence
  Description of Artificial Sequence: Synthetic oligonucleotide
ccugccggggucucugaac

SEQ ID NO: 3103947 - RNA, 19 nt, Artificial Sequence
  Description of Artificial Sequence: Synthetic oligonucleotide
agcaggugggugagugaca

SEQ ID NO: 3103948 - RNA, 19 nt, Artificial Sequence
  Description of Artificial Sequence: Synthetic oligonucleotide
ggcacaguaucugcuugga

SEQ ID NO: 3103949 - RNA, 19 nt, Artificial Sequence
  Description of Artificial Sequence: Synthetic oligonucleotide
caggugggugagugacauc

SEQ ID NO: 3103950 - RNA, 19 nt, Artificial Sequence
  Description of Artificial Sequence: Synthetic oligonucleotide
ggugggugagugacaucug

SEQ ID NO: 3103951 - RNA, 19 nt, Artificial Sequence
  Description of Artificial Sequence: Synthetic oligonucleotide
ggcauccauacuaccuaca

SEQ ID NO: 3103952 - RNA, 19 nt, Artificial Sequence
  Description of Artificial Sequence: Synthetic oligonucleotide
ggugggucuuuuggaggug

SEQ ID NO: 3103953 - RNA, 19 nt, Artificial Sequence
  Description of Artificial Sequence: Synthetic oligonucleotide
gggucuuuuggaggugguc

SEQ ID NO: 3103954 - RNA, 19 nt, Artificial Sequence
  Description of Artificial Sequence: Synthetic oligonucleotide
gcaguucccggaccaugga

SEQ ID NO: 3103955 - RNA, 19 nt, Artificial Sequence
  Description of Artificial Sequence: Synthetic oligonucleotide
gguuugaaucggguugacu

SEQ ID NO: 3103956 - RNA, 19 nt, Artificial Sequence
  Description of Artificial Sequence: Synthetic oligonucleotide
gccaaguccuggaugauuu

SEQ ID NO: 3103957 - RNA, 19 nt, Artificial Sequence
  Description of Artificial Sequence: Synthetic oligonucleotide
cgauaaagauaaugcgagu

SEQ ID NO: 3103958 - RNA, 19 nt, Artificial Sequence
  Description of Artificial Sequence: Synthetic oligonucleotide
accauccgauaaagauaau

SEQ ID NO: 3103959 - RNA, 19 nt, Artificial Sequence
  Description of Artificial Sequence: Synthetic oligonucleotide
cggguugacuuauaaaauu

SEQ ID NO: 3103960 - RNA, 19 nt, Artificial Sequence
  Description of Artificial Sequence: Synthetic oligonucleotide
ccagcaggugggugaguga

SEQ ID NO: 3103961 - RNA, 19 nt, Artificial Sequence
  Description of Artificial Sequence: Synthetic oligonucleotide
gccggggucucugaacucu

SEQ ID NO: 3103962 - RNA, 19 nt, Artificial Sequence
  Description of Artificial Sequence: Synthetic oligonucleotide
gcacaguaucugcuuggau

SEQ ID NO: 3103963 - RNA, 19 nt, Artificial Sequence
  Description of Artificial Sequence: Synthetic oligonucleotide
cugcuuggaugggcaucca

SEQ ID NO: 3103964 - RNA, 19 nt, Artificial Sequence
  Description of Artificial Sequence: Synthetic oligonucleotide
ggccaaguccuggaugauu

SEQ ID NO: 3103965 - RNA, 19 nt, Artificial Sequence
  Description of Artificial Sequence: Synthetic oligonucleotide
  modified_base (17)..(17): a, c, u, g, unknown or other
cagcaauggagggcuunuu

SEQ ID NO: 3103966 - RNA, 19 nt, Artificial Sequence
  Description of Artificial Sequence: Synthetic oligonucleotide
cggaccauggaggccaagu

SEQ ID NO: 3103967 - RNA, 19 nt, Artificial Sequence
  Description of Artificial Sequence: Synthetic oligonucleotide
caucugcgcccaggaagau

SEQ ID NO: 3103968 - RNA, 19 nt, Artificial Sequence
  Description of Artificial Sequence: Synthetic oligonucleotide
ccggaccauggaggccaag

SEQ ID NO: 3103969 - RNA, 19 nt, Artificial Sequence
  Description of Artificial Sequence: Synthetic oligonucleotide
cggggucucugaacucuua

SEQ ID NO: 3103970 - RNA, 19 nt, Artificial Sequence
  Description of Artificial Sequence: Synthetic oligonucleotide
ccaucaccagcaggugggu

SEQ ID NO: 3103971 - RNA, 19 nt, Artificial Sequence
  Description of Artificial Sequence: Synthetic oligonucleotide
caccagcaggugggugagu

SEQ ID NO: 3103972 - RNA, 19 nt, Artificial Sequence
  Description of Artificial Sequence: Synthetic oligonucleotide
cccggaccauggaggccaa

SEQ ID NO: 3103973 - RNA, 19 nt, Artificial Sequence
  Description of Artificial Sequence: Synthetic oligonucleotide
ccggggucucugaacucuu

SEQ ID NO: 3103974 - RNA, 19 nt, Artificial Sequence
  Description of Artificial Sequence: Synthetic oligonucleotide
auuuauaagguuucucucc

SEQ ID NO: 3103975 - RNA, 19 nt, Artificial Sequence
  Description of Artificial Sequence: Synthetic oligonucleotide
auuugaaagguuuucucgc

SEQ ID NO: 3103976 - RNA, 19 nt, Artificial Sequence
  Description of Artificial Sequence: Synthetic oligonucleotide
auucauugcauuuguaagg

SEQ ID NO: 3103977 - RNA, 19 nt, Artificial Sequence
  Description of Artificial Sequence: Synthetic oligonucleotide
ucuugaguucgaaaggugg

SEQ ID NO: 3103978 - RNA, 19 nt, Artificial Sequence
  Description of Artificial Sequence: Synthetic oligonucleotide
uaaagcauuugucacauuc

SEQ ID NO: 3103979 - RNA, 19 nt, Artificial Sequence
  Description of Artificial Sequence: Synthetic oligonucleotide
auucagagcauuuguaagg

SEQ ID NO: 3103980 - RNA, 19 nt, Artificial Sequence
  Description of Artificial Sequence: Synthetic oligonucleotide
gaguucuugaguucgaaag

SEQ ID NO: 3103981 - RNA, 19 nt, Artificial Sequence
  Description of Artificial Sequence: Synthetic oligonucleotide
cuaagauuuggcuuucugg

SEQ ID NO: 3103982 - RNA, 19 nt, Artificial Sequence
  Description of Artificial Sequence: Synthetic oligonucleotide
uuacgaauaaagcauuugu

SEQ ID NO: 3103983 - RNA, 19 nt, Artificial Sequence
  Description of Artificial Sequence: Synthetic oligonucleotide
ucuaaggugggcuuuacga

SEQ ID NO: 3103984 - RNA, 19 nt, Artificial Sequence
  Description of Artificial Sequence: Synthetic oligonucleotide
acgaauaaagcauuuguca

SEQ ID NO: 3103985 - RNA, 19 nt, Artificial Sequence
  Description of Artificial Sequence: Synthetic oligonucleotide
cauucauugcauuuguaag

SEQ ID NO: 3103986 - RNA, 19 nt, Artificial Sequence
  Description of Artificial Sequence: Synthetic oligonucleotide
cugaugucgucuaaggugg

SEQ ID NO: 3103987 - RNA, 19 nt, Artificial Sequence
  Description of Artificial Sequence: Synthetic oligonucleotide
gauaaagcauuugucacag

SEQ ID NO: 3103988 - RNA, 19 nt, Artificial Sequence
  Description of Artificial Sequence: Synthetic oligonucleotide
uaaagcauuugucacagua

SEQ ID NO: 3103989 - RNA, 19 nt, Artificial Sequence
  Description of Artificial Sequence: Synthetic oligonucleotide
gcauuugucacauucagag

SEQ ID NO: 3103990 - RNA, 19 nt, Artificial Sequence
  Description of Artificial Sequence: Synthetic oligonucleotide
aguucuugaguucgaaagg

SEQ ID NO: 3103991 - RNA, 19 nt, Artificial Sequence
  Description of Artificial Sequence: Synthetic oligonucleotide
gcauuugucacauucauug

SEQ ID NO: 3103992 - RNA, 19 nt, Artificial Sequence
  Description of Artificial Sequence: Synthetic oligonucleotide
ugggcuuuacgaauaaagc

SEQ ID NO: 3103993 - RNA, 19 nt, Artificial Sequence
  Description of Artificial Sequence: Synthetic oligonucleotide
uucuggauaaagcauuugu

SEQ ID NO: 3103994 - RNA, 19 nt, Artificial Sequence
  Description of Artificial Sequence: Synthetic oligonucleotide
uguguucuaagauuuggcu

SEQ ID NO: 3103995 - RNA, 19 nt, Artificial Sequence
  Description of Artificial Sequence: Synthetic oligonucleotide
aauaaagcauuugucacau

SEQ ID NO: 3103996 - RNA, 19 nt, Artificial Sequence
  Description of Artificial Sequence: Synthetic oligonucleotide
uggauaaagcauuugucac

SEQ ID NO: 3103997 - RNA, 19 nt, Artificial Sequence
  Description of Artificial Sequence: Synthetic oligonucleotide
uguucuaagauuuggcuuu

SEQ ID NO: 3103998 - RNA, 19 nt, Artificial Sequence
  Description of Artificial Sequence: Synthetic oligonucleotide
uuugaaagguuuucucgcc

SEQ ID NO: 3103999 - RNA, 19 nt, Artificial Sequence
  Description of Artificial Sequence: Synthetic oligonucleotide
uggucuuucuggauaaagc

SEQ ID NO: 3104000 - RNA, 19 nt, Artificial Sequence
  Description of Artificial Sequence: Synthetic oligonucleotide
uacgaauaaagcauuuguc

SEQ ID NO: 3104001 - RNA, 19 nt, Artificial Sequence
  Description of Artificial Sequence: Synthetic oligonucleotide
ucuggauaaagcauuuguc

SEQ ID NO: 3104002 - RNA, 19 nt, Artificial Sequence
  Description of Artificial Sequence: Synthetic oligonucleotide
gaauaaagcauuugucaca

SEQ ID NO: 3104003 - RNA, 19 nt, Artificial Sequence
  Description of Artificial Sequence: Synthetic oligonucleotide
ucuaagauuuggcuuucug

SEQ ID NO: 3104004 - RNA, 19 nt, Artificial Sequence
  Description of Artificial Sequence: Synthetic oligonucleotide
cauucagagcauuuguaag

SEQ ID NO: 3104005 - RNA, 19 nt, Artificial Sequence
  Description of Artificial Sequence: Synthetic oligonucleotide
acauucauugcauuuguaa

SEQ ID NO: 3104006 - RNA, 19 nt, Artificial Sequence
  Description of Artificial Sequence: Synthetic oligonucleotide
uuuacgaauaaagcauuug

SEQ ID NO: 3104007 - RNA, 19 nt, Artificial Sequence
  Description of Artificial Sequence: Synthetic oligonucleotide
ucuuucuggauaaagcauu

SEQ ID NO: 3104008 - RNA, 19 nt, Artificial Sequence
  Description of Artificial Sequence: Synthetic oligonucleotide
uggcuuucuggauaaagca

SEQ ID NO: 3104009 - RNA, 19 nt, Artificial Sequence
  Description of Artificial Sequence: Synthetic oligonucleotide
cuggauaaagcauuuguca

SEQ ID NO: 3104010 - RNA, 19 nt, Artificial Sequence
  Description of Artificial Sequence: Synthetic oligonucleotide
caguaauugcauuuauaag

SEQ ID NO: 3104011 - RNA, 19 nt, Artificial Sequence
  Description of Artificial Sequence: Synthetic oligonucleotide
cauuuauaagguuucucuc

SEQ ID NO: 3104012 - RNA, 19 nt, Artificial Sequence
  Description of Artificial Sequence: Synthetic oligonucleotide
uucacugcauuugaaaggu

SEQ ID NO: 3104013 - RNA, 19 nt, Artificial Sequence
  Description of Artificial Sequence: Synthetic oligonucleotide
cauuugucacaguaauugc

SEQ ID NO: 3104014 - RNA, 19 nt, Artificial Sequence
  Description of Artificial Sequence: Synthetic oligonucleotide
acauucagagcauuuguaa

SEQ ID NO: 3104015 - RNA, 19 nt, Artificial Sequence
  Description of Artificial Sequence: Synthetic oligonucleotide
ugaaagguuuucucgccug

SEQ ID NO: 3104016 - RNA, 19 nt, Artificial Sequence
  Description of Artificial Sequence: Synthetic oligonucleotide
aagguuuucucgccugugu

SEQ ID NO: 3104017 - RNA, 19 nt, Artificial Sequence
  Description of Artificial Sequence: Synthetic oligonucleotide
gcauuugucacaguaauug

SEQ ID NO: 3104018 - RNA, 19 nt, Artificial Sequence
  Description of Artificial Sequence: Synthetic oligonucleotide
uucuugaguucgaaaggug

SEQ ID NO: 3104019 - RNA, 19 nt, Artificial Sequence
  Description of Artificial Sequence: Synthetic oligonucleotide
aagauuuggcuuucuggau

SEQ ID NO: 3104020 - RNA, 19 nt, Artificial Sequence
  Description of Artificial Sequence: Synthetic oligonucleotide
uugaaagguuuucucgccu

SEQ ID NO: 3104021 - RNA, 19 nt, Artificial Sequence
  Description of Artificial Sequence: Synthetic oligonucleotide
cauuugucacauucagagc

SEQ ID NO: 3104022 - RNA, 19 nt, Artificial Sequence
  Description of Artificial Sequence: Synthetic oligonucleotide
aagguggucuuucuggaua

SEQ ID NO: 3104023 - RNA, 19 nt, Artificial Sequence
  Description of Artificial Sequence: Synthetic oligonucleotide
aaagcauuugucacaguaa

SEQ ID NO: 3104024 - RNA, 19 nt, Artificial Sequence
  Description of Artificial Sequence: Synthetic oligonucleotide
uucagagcauuuguaaggu

SEQ ID NO: 3104025 - RNA, 19 nt, Artificial Sequence
  Description of Artificial Sequence: Synthetic oligonucleotide
ucgaaagguggucuuucug

SEQ ID NO: 3104026 - RNA, 19 nt, Artificial Sequence
  Description of Artificial Sequence: Synthetic oligonucleotide
agagcauuuguaagguuuc

SEQ ID NO: 3104027 - RNA, 19 nt, Artificial Sequence
  Description of Artificial Sequence: Synthetic oligonucleotide
gaaagguggucuuucugga

SEQ ID NO: 3104028 - RNA, 19 nt, Artificial Sequence
  Description of Artificial Sequence: Synthetic oligonucleotide
gugugaguucuugaguucg

SEQ ID NO: 3104029 - RNA, 19 nt, Artificial Sequence
  Description of Artificial Sequence: Synthetic oligonucleotide
uaaggugggcuuuacgaau

SEQ ID NO: 3104030 - RNA, 19 nt, Artificial Sequence
  Description of Artificial Sequence: Synthetic oligonucleotide
auuugucacaguaauugca

SEQ ID NO: 3104031 - RNA, 19 nt, Artificial Sequence
  Description of Artificial Sequence: Synthetic oligonucleotide
ggucuuucuggauaaagca

SEQ ID NO: 3104032 - RNA, 19 nt, Artificial Sequence
  Description of Artificial Sequence: Synthetic oligonucleotide
gauuuggcuuucuggauaa

SEQ ID NO: 3104033 - RNA, 19 nt, Artificial Sequence
  Description of Artificial Sequence: Synthetic oligonucleotide
agauuuggcuuucuggaua

SEQ ID NO: 3104034 - RNA, 19 nt, Artificial Sequence
  Description of Artificial Sequence: Synthetic oligonucleotide
ugaguucgaaagguggucu

SEQ ID NO: 3104035 - RNA, 19 nt, Artificial Sequence
  Description of Artificial Sequence: Synthetic oligonucleotide
guuuucucgccugugugag

SEQ ID NO: 3104036 - RNA, 19 nt, Artificial Sequence
  Description of Artificial Sequence: Synthetic oligonucleotide
aaagguuuucucgccugug

SEQ ID NO: 3104037 - RNA, 19 nt, Artificial Sequence
  Description of Artificial Sequence: Synthetic oligonucleotide
aaagguggucuuucuggau

SEQ ID NO: 3104038 - RNA, 19 nt, Artificial Sequence
  Description of Artificial Sequence: Synthetic oligonucleotide
ugaguucuugaguucgaaa

SEQ ID NO: 3104039 - RNA, 19 nt, Artificial Sequence
  Description of Artificial Sequence: Synthetic oligonucleotide
guaauugcauuuauaaggu

SEQ ID NO: 3104040 - RNA, 19 nt, Artificial Sequence
  Description of Artificial Sequence: Synthetic oligonucleotide
ucacaguaauugcauuuau

SEQ ID NO: 3104041 - RNA, 19 nt, Artificial Sequence
  Description of Artificial Sequence: Synthetic oligonucleotide
ugcauuuauaagguuucuc

SEQ ID NO: 3104042 - RNA, 19 nt, Artificial Sequence
  Description of Artificial Sequence: Synthetic oligonucleotide
ugugaguucuugaguucga

SEQ ID NO: 3104043 - RNA, 19 nt, Artificial Sequence
  Description of Artificial Sequence: Synthetic oligonucleotide
gggcuuuacgaauaaagca

SEQ ID NO: 3104044 - RNA, 19 nt, Artificial Sequence
  Description of Artificial Sequence: Synthetic oligonucleotide
ugugugaguucuugaguuc

SEQ ID NO: 3104045 - RNA, 19 nt, Artificial Sequence
  Description of Artificial Sequence: Synthetic oligonucleotide
ggauaaagcauuugucaca

SEQ ID NO: 3104046 - RNA, 19 nt, Artificial Sequence
  Description of Artificial Sequence: Synthetic oligonucleotide
ugaugucgucuaagguggg

SEQ ID NO: 3104047 - RNA, 19 nt, Artificial Sequence
  Description of Artificial Sequence: Synthetic oligonucleotide
cgaauaaagcauuugucac

SEQ ID NO: 3104048 - RNA, 19 nt, Artificial Sequence
  Description of Artificial Sequence: Synthetic oligonucleotide
cgaaagguggucuuucugg

SEQ ID NO: 3104049 - RNA, 19 nt, Artificial Sequence
  Description of Artificial Sequence: Synthetic oligonucleotide
gucuaaggugggcuuuacg

SEQ ID NO: 3104050 - RNA, 19 nt, Artificial Sequence
  Description of Artificial Sequence: Synthetic oligonucleotide
gauaaagcauuugucacau

SEQ ID NO: 3104051 - RNA, 19 nt, Artificial Sequence
  Description of Artificial Sequence: Synthetic oligonucleotide
uucgaaagguggucuuucu

SEQ ID NO: 3104052 - RNA, 19 nt, Artificial Sequence
  Description of Artificial Sequence: Synthetic oligonucleotide
uuucuggauaaagcauuug

SEQ ID NO: 3104053 - RNA, 19 nt, Artificial Sequence
  Description of Artificial Sequence: Synthetic oligonucleotide
uugaguucgaaaggugguc

SEQ ID NO: 3104054 - RNA, 19 nt, Artificial Sequence
  Description of Artificial Sequence: Synthetic oligonucleotide
guggucuuucuggauaaag

SEQ ID NO: 3104055 - RNA, 19 nt, Artificial Sequence
  Description of Artificial Sequence: Synthetic oligonucleotide
cuaaggugggcuuuacgaa

SEQ ID NO: 3104056 - RNA, 19 nt, Artificial Sequence
  Description of Artificial Sequence: Synthetic oligonucleotide
gaugucgucuaaggugggc

SEQ ID NO: 3104057 - RNA, 19 nt, Artificial Sequence
  Description of Artificial Sequence: Synthetic oligonucleotide
augucgucuaaggugggcu

SEQ ID NO: 3104058 - RNA, 19 nt, Artificial Sequence
  Description of Artificial Sequence: Synthetic oligonucleotide
uugcauuuauaagguuucu

SEQ ID NO: 3104059 - RNA, 19 nt, Artificial Sequence
  Description of Artificial Sequence: Synthetic oligonucleotide
gccugugugaguucuugag

SEQ ID NO: 3104060 - RNA, 19 nt, Artificial Sequence
  Description of Artificial Sequence: Synthetic oligonucleotide
agguggucuuucuggauaa

SEQ ID NO: 3104061 - RNA, 19 nt, Artificial Sequence
  Description of Artificial Sequence: Synthetic oligonucleotide
cuugaguucgaaagguggu

SEQ ID NO: 3104062 - RNA, 19 nt, Artificial Sequence
  Description of Artificial Sequence: Synthetic oligonucleotide
cacauucagagcauuugua

SEQ ID NO: 3104063 - RNA, 19 nt, Artificial Sequence
  Description of Artificial Sequence: Synthetic oligonucleotide
gaaagguuuucucgccugu

SEQ ID NO: 3104064 - RNA, 19 nt, Artificial Sequence
  Description of Artificial Sequence: Synthetic oligonucleotide
guucuugaguucgaaaggu

SEQ ID NO: 3104065 - RNA, 19 nt, Artificial Sequence
  Description of Artificial Sequence: Synthetic oligonucleotide
aaggugggcuuuacgaaua

SEQ ID NO: 3104066 - RNA, 19 nt, Artificial Sequence
  Description of Artificial Sequence: Synthetic oligonucleotide
gguuuucucgccuguguga

SEQ ID NO: 3104067 - RNA, 19 nt, Artificial Sequence
  Description of Artificial Sequence: Synthetic oligonucleotide
guucgaaagguggucuuuc

SEQ ID NO: 3104068 - RNA, 19 nt, Artificial Sequence
  Description of Artificial Sequence: Synthetic oligonucleotide
ugucgucuaaggugggcuu

SEQ ID NO: 3104069 - RNA, 19 nt, Artificial Sequence
  Description of Artificial Sequence: Synthetic oligonucleotide
uuuucucgccugugugagu

SEQ ID NO: 3104070 - RNA, 19 nt, Artificial Sequence
  Description of Artificial Sequence: Synthetic oligonucleotide
cagagcauuuguaagguuu

SEQ ID NO: 3104071 - RNA, 19 nt, Artificial Sequence
  Description of Artificial Sequence: Synthetic oligonucleotide
ucagagcauuuguaagguu

SEQ ID NO: 3104072 - RNA, 19 nt, Artificial Sequence
  Description of Artificial Sequence: Synthetic oligonucleotide
guguucuaagauuuggcuu

SEQ ID NO: 3104073 - RNA, 19 nt, Artificial Sequence
  Description of Artificial Sequence: Synthetic oligonucleotide
gucacaguaauugcauuua

SEQ ID NO: 3104074 - RNA, 19 nt, Artificial Sequence
  Description of Artificial Sequence: Synthetic oligonucleotide
cugugugaguucuugaguu

SEQ ID NO: 3104075 - RNA, 19 nt, Artificial Sequence
  Description of Artificial Sequence: Synthetic oligonucleotide
ggcuuuacgaauaaagcau

SEQ ID NO: 3104076 - RNA, 19 nt, Artificial Sequence
  Description of Artificial Sequence: Synthetic oligonucleotide
uucuaagauuuggcuuucu

SEQ ID NO: 3104077 - RNA, 19 nt, Artificial Sequence
  Description of Artificial Sequence: Synthetic oligonucleotide
aguucgaaagguggucuuu

SEQ ID NO: 3104078 - RNA, 19 nt, Artificial Sequence
  Description of Artificial Sequence: Synthetic oligonucleotide
cacugcauuugaaagguuu

SEQ ID NO: 3104079 - RNA, 19 nt, Artificial Sequence
  Description of Artificial Sequence: Synthetic oligonucleotide
guucuaagauuuggcuuuc

SEQ ID NO: 3104080 - RNA, 19 nt, Artificial Sequence
  Description of Artificial Sequence: Synthetic oligonucleotide
cuuuacgaauaaagcauuu

SEQ ID NO: 3104081 - RNA, 19 nt, Artificial Sequence
  Description of Artificial Sequence: Synthetic oligonucleotide
ucacugcauuugaaagguu

SEQ ID NO: 3104082 - RNA, 19 nt, Artificial Sequence
  Description of Artificial Sequence: Synthetic oligonucleotide
agcauuugucacauucauu

SEQ ID NO: 3104083 - RNA, 19 nt, Artificial Sequence
  Description of Artificial Sequence: Synthetic oligonucleotide
agcauuugucacaguaauu

SEQ ID NO: 3104084 - RNA, 19 nt, Artificial Sequence
  Description of Artificial Sequence: Synthetic oligonucleotide
auaaagcauuugucacauu

SEQ ID NO: 3104085 - RNA, 19 nt, Artificial Sequence
  Description of Artificial Sequence: Synthetic oligonucleotide
aggugggcuuuacgaauaa

SEQ ID NO: 3104086 - RNA, 19 nt, Artificial Sequence
  Description of Artificial Sequence: Synthetic oligonucleotide
ucgucuaaggugggcuuua

SEQ ID NO: 3104087 - RNA, 19 nt, Artificial Sequence
  Description of Artificial Sequence: Synthetic oligonucleotide
gucuuucuggauaaagcau

SEQ ID NO: 3104088 - RNA, 19 nt, Artificial Sequence
  Description of Artificial Sequence: Synthetic oligonucleotide
cacauucauugcauuugua

SEQ ID NO: 3104089 - RNA, 19 nt, Artificial Sequence
  Description of Artificial Sequence: Synthetic oligonucleotide
gugaguucuugaguucgaa

SEQ ID NO: 3104090 - RNA, 19 nt, Artificial Sequence
  Description of Artificial Sequence: Synthetic oligonucleotide
gagcauuuguaagguuucu

SEQ ID NO: 3104091 - RNA, 19 nt, Artificial Sequence
  Description of Artificial Sequence: Synthetic oligonucleotide
gaguucgaaagguggucuu

SEQ ID NO: 3104092 - RNA, 19 nt, Artificial Sequence
  Description of Artificial Sequence: Synthetic oligonucleotide
ggauucucugaugucgucu

SEQ ID NO: 3104093 - RNA, 19 nt, Artificial Sequence
  Description of Artificial Sequence: Synthetic oligonucleotide
gcuuucuggauaaagcauu

SEQ ID NO: 3104094 - RNA, 19 nt, Artificial Sequence
  Description of Artificial Sequence: Synthetic oligonucleotide
ggcuuucuggauaaagcau

SEQ ID NO: 3104095 - RNA, 19 nt, Artificial Sequence
  Description of Artificial Sequence: Synthetic oligonucleotide
gcuuuacgaauaaagcauu

SEQ ID NO: 3104096 - RNA, 19 nt, Artificial Sequence
  Description of Artificial Sequence: Synthetic oligonucleotide
ccugugugaguucuugagu

SEQ ID NO: 3104097 - RNA, 19 nt, Artificial Sequence
  Description of Artificial Sequence: Synthetic oligonucleotide
ggugggcuuuacgaauaaa

SEQ ID NO: 3104098 - RNA, 19 nt, Artificial Sequence
  Description of Artificial Sequence: Synthetic oligonucleotide
gucgucuaaggugggcuuu

SEQ ID NO: 3104099 - RNA, 19 nt, Artificial Sequence
  Description of Artificial Sequence: Synthetic oligonucleotide
gguggucuuucuggauaaa

SEQ ID NO: 3104100 - RNA, 19 nt, Artificial Sequence
  Description of Artificial Sequence: Synthetic oligonucleotide
cgucuaaggugggcuuuac

SEQ ID NO: 3104101 - RNA, 19 nt, Artificial Sequence
  Description of Artificial Sequence: Synthetic oligonucleotide
aaagaugcagauuugggac

SEQ ID NO: 3104102 - RNA, 19 nt, Artificial Sequence
  Description of Artificial Sequence: Synthetic oligonucleotide
aaaacuacauuucccagac

SEQ ID NO: 3104103 - RNA, 19 nt, Artificial Sequence
  Description of Artificial Sequence: Synthetic oligonucleotide
aaagucuggauucugacuc

SEQ ID NO: 3104104 - RNA, 19 nt, Artificial Sequence
  Description of Artificial Sequence: Synthetic oligonucleotide
aaagucaaggccuugaggu

SEQ ID NO: 3104105 - RNA, 19 nt, Artificial Sequence
  Description of Artificial Sequence: Synthetic oligonucleotide
gaagcuaucugaaagaugc

SEQ ID NO: 3104106 - RNA, 19 nt, Artificial Sequence
  Description of Artificial Sequence: Synthetic oligonucleotide
aaggccuugagguggaucc

SEQ ID NO: 3104107 - RNA, 19 nt, Artificial Sequence
  Description of Artificial Sequence: Synthetic oligonucleotide
ucaaguuuccacaacaaga

SEQ ID NO: 3104108 - RNA, 19 nt, Artificial Sequence
  Description of Artificial Sequence: Synthetic oligonucleotide
acaagaagcuaucugaaag

SEQ ID NO: 3104109 - RNA, 19 nt, Artificial Sequence
  Description of Artificial Sequence: Synthetic oligonucleotide
uguggcaaggaaauugugg

SEQ ID NO: 3104110 - RNA, 19 nt, Artificial Sequence
  Description of Artificial Sequence: Synthetic oligonucleotide
aagaugcagauuugggacc

SEQ ID NO: 3104111 - RNA, 19 nt, Artificial Sequence
  Description of Artificial Sequence: Synthetic oligonucleotide
ugaaagaugcagauuuggg

SEQ ID NO: 3104112 - RNA, 19 nt, Artificial Sequence
  Description of Artificial Sequence: Synthetic oligonucleotide
aaggaaauuguggaugggc

SEQ ID NO: 3104113 - RNA, 19 nt, Artificial Sequence
  Description of Artificial Sequence: Synthetic oligonucleotide
aguuuccacaacaagaagc

SEQ ID NO: 3104114 - RNA, 19 nt, Artificial Sequence
  Description of Artificial Sequence: Synthetic oligonucleotide
aacaggacaucuuuagcag

SEQ ID NO: 3104115 - RNA, 19 nt, Artificial Sequence
  Description of Artificial Sequence: Synthetic oligonucleotide
aacuacauuucccagacuu

SEQ ID NO: 3104116 - RNA, 19 nt, Artificial Sequence
  Description of Artificial Sequence: Synthetic oligonucleotide
auuucccagacuucuuugc

SEQ ID NO: 3104117 - RNA, 19 nt, Artificial Sequence
  Description of Artificial Sequence: Synthetic oligonucleotide
aucugaaagaugcagauuu

SEQ ID NO: 3104118 - RNA, 19 nt, Artificial Sequence
  Description of Artificial Sequence: Synthetic oligonucleotide
agagccauggaacaggaca

SEQ ID NO: 3104119 - RNA, 19 nt, Artificial Sequence
  Description of Artificial Sequence: Synthetic oligonucleotide
aaaagucuggauucugacu

SEQ ID NO: 3104120 - RNA, 19 nt, Artificial Sequence
  Description of Artificial Sequence: Synthetic oligonucleotide
gaacaggacaucuuuagca

SEQ ID NO: 3104121 - RNA, 19 nt, Artificial Sequence
  Description of Artificial Sequence: Synthetic oligonucleotide
gaaagaugcagauuuggga

SEQ ID NO: 3104122 - RNA, 19 nt, Artificial Sequence
  Description of Artificial Sequence: Synthetic oligonucleotide
ucugacucaaguuuccaca

SEQ ID NO: 3104123 - RNA, 19 nt, Artificial Sequence
  Description of Artificial Sequence: Synthetic oligonucleotide
ucuggauucugacucaagu

SEQ ID NO: 3104124 - RNA, 19 nt, Artificial Sequence
  Description of Artificial Sequence: Synthetic oligonucleotide
cuuucuguguggcugaggc

SEQ ID NO: 3104125 - RNA, 19 nt, Artificial Sequence
  Description of Artificial Sequence: Synthetic oligonucleotide
ucuccugaguucuucacag

SEQ ID NO: 3104126 - RNA, 19 nt, Artificial Sequence
  Description of Artificial Sequence: Synthetic oligonucleotide
uuguggaugggccugcucc

SEQ ID NO: 3104127 - RNA, 19 nt, Artificial Sequence
  Description of Artificial Sequence: Synthetic oligonucleotide
ucuuuagcagcucugcuuc

SEQ ID NO: 3104128 - RNA, 19 nt, Artificial Sequence
  Description of Artificial Sequence: Synthetic oligonucleotide
uggaacaggacaucuuuag

SEQ ID NO: 3104129 - RNA, 19 nt, Artificial Sequence
  Description of Artificial Sequence: Synthetic oligonucleotide
caugcuaacuuucugugug

SEQ ID NO: 3104130 - RNA, 19 nt, Artificial Sequence
  Description of Artificial Sequence: Synthetic oligonucleotide
aggaaauuguggaugggcc

SEQ ID NO: 3104131 - RNA, 19 nt, Artificial Sequence
  Description of Artificial Sequence: Synthetic oligonucleotide
auggauuucuccugaguuc

SEQ ID NO: 3104132 - RNA, 19 nt, Artificial Sequence
  Description of Artificial Sequence: Synthetic oligonucleotide
uuccacaacaagaagcuau

SEQ ID NO: 3104133 - RNA, 19 nt, Artificial Sequence
  Description of Artificial Sequence: Synthetic oligonucleotide
acaggacaucuuuagcagc

SEQ ID NO: 3104134 - RNA, 19 nt, Artificial Sequence
  Description of Artificial Sequence: Synthetic oligonucleotide
aaguuuccacaacaagaag

SEQ ID NO: 3104135 - RNA, 19 nt, Artificial Sequence
  Description of Artificial Sequence: Synthetic oligonucleotide
ucaaagucaaggccuugag

SEQ ID NO: 3104136 - RNA, 19 nt, Artificial Sequence
  Description of Artificial Sequence: Synthetic oligonucleotide
acaucuuuagcagcucugc

SEQ ID NO: 3104137 - RNA, 19 nt, Artificial Sequence
  Description of Artificial Sequence: Synthetic oligonucleotide
uggauucugacucaaguuu

SEQ ID NO: 3104138 - RNA, 19 nt, Artificial Sequence
  Description of Artificial Sequence: Synthetic oligonucleotide
uccaugcuaacuuucugug

SEQ ID NO: 3104139 - RNA, 19 nt, Artificial Sequence
  Description of Artificial Sequence: Synthetic oligonucleotide
cugaguucuucacagucgg

SEQ ID NO: 3104140 - RNA, 19 nt, Artificial Sequence
  Description of Artificial Sequence: Synthetic oligonucleotide
cuaacuuucuguguggcug

SEQ ID NO: 3104141 - RNA, 19 nt, Artificial Sequence
  Description of Artificial Sequence: Synthetic oligonucleotide
aaauuguggaugggccugc

SEQ ID NO: 3104142 - RNA, 19 nt, Artificial Sequence
  Description of Artificial Sequence: Synthetic oligonucleotide
uucuguguggcugaggcug

SEQ ID NO: 3104143 - RNA, 19 nt, Artificial Sequence
  Description of Artificial Sequence: Synthetic oligonucleotide
aacaagaagcuaucugaaa

SEQ ID NO: 3104144 - RNA, 19 nt, Artificial Sequence
  Description of Artificial Sequence: Synthetic oligonucleotide
gacucaaguuuccacaaca

SEQ ID NO: 3104145 - RNA, 19 nt, Artificial Sequence
  Description of Artificial Sequence: Synthetic oligonucleotide
uugagguggauccauggau

SEQ ID NO: 3104146 - RNA, 19 nt, Artificial Sequence
  Description of Artificial Sequence: Synthetic oligonucleotide
gauccauggauuucuccug

SEQ ID NO: 3104147 - RNA, 19 nt, Artificial Sequence
  Description of Artificial Sequence: Synthetic oligonucleotide
gacagagccauggaacagg

SEQ ID NO: 3104148 - RNA, 19 nt, Artificial Sequence
  Description of Artificial Sequence: Synthetic oligonucleotide
gaaauuguggaugggccug

SEQ ID NO: 3104149 - RNA, 19 nt, Artificial Sequence
  Description of Artificial Sequence: Synthetic oligonucleotide
ugcuguggcaaggaaauug

SEQ ID NO: 3104150 - RNA, 19 nt, Artificial Sequence
  Description of Artificial Sequence: Synthetic oligonucleotide
caaguuuccacaacaagaa

SEQ ID NO: 3104151 - RNA, 19 nt, Artificial Sequence
  Description of Artificial Sequence: Synthetic oligonucleotide
uccugaguucuucacaguc

SEQ ID NO: 3104152 - RNA, 19 nt, Artificial Sequence
  Description of Artificial Sequence: Synthetic oligonucleotide
cucaaguuuccacaacaag

SEQ ID NO: 3104153 - RNA, 19 nt, Artificial Sequence
  Description of Artificial Sequence: Synthetic oligonucleotide
guggcaaggaaauugugga

SEQ ID NO: 3104154 - RNA, 19 nt, Artificial Sequence
  Description of Artificial Sequence: Synthetic oligonucleotide
aguucuucacagucggaug

SEQ ID NO: 3104155 - RNA, 19 nt, Artificial Sequence
  Description of Artificial Sequence: Synthetic oligonucleotide
agggacagagccauggaac

SEQ ID NO: 3104156 - RNA, 19 nt, Artificial Sequence
  Description of Artificial Sequence: Synthetic oligonucleotide
aagaagcuaucugaaagau

SEQ ID NO: 3104157 - RNA, 19 nt, Artificial Sequence
  Description of Artificial Sequence: Synthetic oligonucleotide
gcaaggaaauuguggaugg

SEQ ID NO: 3104158 - RNA, 19 nt, Artificial Sequence
  Description of Artificial Sequence: Synthetic oligonucleotide
agcuaucugaaagaugcag

SEQ ID NO: 3104159 - RNA, 19 nt, Artificial Sequence
  Description of Artificial Sequence: Synthetic oligonucleotide
uccacaacaagaagcuauc

SEQ ID NO: 3104160 - RNA, 19 nt, Artificial Sequence
  Description of Artificial Sequence: Synthetic oligonucleotide
uuucccagacuucuuugcu

SEQ ID NO: 3104161 - RNA, 19 nt, Artificial Sequence
  Description of Artificial Sequence: Synthetic oligonucleotide
uucuccugaguucuucaca

SEQ ID NO: 3104162 - RNA, 19 nt, Artificial Sequence
  Description of Artificial Sequence: Synthetic oligonucleotide
uguggcugaggcuggaaga

SEQ ID NO: 3104163 - RNA, 19 nt, Artificial Sequence
  Description of Artificial Sequence: Synthetic oligonucleotide
ugcuccaccuccaugcuaa

SEQ ID NO: 3104164 - RNA, 19 nt, Artificial Sequence
  Description of Artificial Sequence: Synthetic oligonucleotide
uccaccuccaugcuaacuu

SEQ ID NO: 3104165 - RNA, 19 nt, Artificial Sequence
  Description of Artificial Sequence: Synthetic oligonucleotide
augcuaacuuucugugugg

SEQ ID NO: 3104166 - RNA, 19 nt, Artificial Sequence
  Description of Artificial Sequence: Synthetic oligonucleotide
uucacagucggaugcugug

SEQ ID NO: 3104167 - RNA, 19 nt, Artificial Sequence
  Description of Artificial Sequence: Synthetic oligonucleotide
caagaagcuaucugaaaga

SEQ ID NO: 3104168 - RNA, 19 nt, Artificial Sequence
  Description of Artificial Sequence: Synthetic oligonucleotide
gauucugacucaaguuucc

SEQ ID NO: 3104169 - RNA, 19 nt, Artificial Sequence
  Description of Artificial Sequence: Synthetic oligonucleotide
uucaaagucaaggccuuga

SEQ ID NO: 3104170 - RNA, 19 nt, Artificial Sequence
  Description of Artificial Sequence: Synthetic oligonucleotide
uagcagcucugcuucaaag

SEQ ID NO: 3104171 - RNA, 19 nt, Artificial Sequence
  Description of Artificial Sequence: Synthetic oligonucleotide
ugcagauuugggaccugag

SEQ ID NO: 3104172 - RNA, 19 nt, Artificial Sequence
  Description of Artificial Sequence: Synthetic oligonucleotide
ucuguguggcugaggcugg

SEQ ID NO: 3104173 - RNA, 19 nt, Artificial Sequence
  Description of Artificial Sequence: Synthetic oligonucleotide
uaacuuucuguguggcuga

SEQ ID NO: 3104174 - RNA, 19 nt, Artificial Sequence
  Description of Artificial Sequence: Synthetic oligonucleotide
uucugacucaaguuuccac

SEQ ID NO: 3104175 - RNA, 19 nt, Artificial Sequence
  Description of Artificial Sequence: Synthetic oligonucleotide
uucccagacuucuuugcug

SEQ ID NO: 3104176 - RNA, 19 nt, Artificial Sequence
  Description of Artificial Sequence: Synthetic oligonucleotide
ugagguggauccauggauu

SEQ ID NO: 3104177 - RNA, 19 nt, Artificial Sequence
  Description of Artificial Sequence: Synthetic oligonucleotide
aagucuggauucugacuca

SEQ ID NO: 3104178 - RNA, 19 nt, Artificial Sequence
  Description of Artificial Sequence: Synthetic oligonucleotide
agcagcucugcuucaaagu

SEQ ID NO: 3104179 - RNA, 19 nt, Artificial Sequence
  Description of Artificial Sequence: Synthetic oligonucleotide
aucuuuagcagcucugcuu

SEQ ID NO: 3104180 - RNA, 19 nt, Artificial Sequence
  Description of Artificial Sequence: Synthetic oligonucleotide
acuacauuucccagacuuc

SEQ ID NO: 3104181 - RNA, 19 nt, Artificial Sequence
  Description of Artificial Sequence: Synthetic oligonucleotide
ucacagucggaugcugugg

SEQ ID NO: 3104182 - RNA, 19 nt, Artificial Sequence
  Description of Artificial Sequence: Synthetic oligonucleotide
uggauccauggauuucucc

SEQ ID NO: 3104183 - RNA, 19 nt, Artificial Sequence
  Description of Artificial Sequence: Synthetic oligonucleotide
uuucuccugaguucuucac

SEQ ID NO: 3104184 - RNA, 19 nt, Artificial Sequence
  Description of Artificial Sequence: Synthetic oligonucleotide
gacaucuuuagcagcucug

SEQ ID NO: 3104185 - RNA, 19 nt, Artificial Sequence
  Description of Artificial Sequence: Synthetic oligonucleotide
ugacucaaguuuccacaac

SEQ ID NO: 3104186 - RNA, 19 nt, Artificial Sequence
  Description of Artificial Sequence: Synthetic oligonucleotide
uguggaugggccugcucca

SEQ ID NO: 3104187 - RNA, 19 nt, Artificial Sequence
  Description of Artificial Sequence: Synthetic oligonucleotide
ugcuaacuuucuguguggc

SEQ ID NO: 3104188 - RNA, 19 nt, Artificial Sequence
  Description of Artificial Sequence: Synthetic oligonucleotide
acauuucccagacuucuuu

SEQ ID NO: 3104189 - RNA, 19 nt, Artificial Sequence
  Description of Artificial Sequence: Synthetic oligonucleotide
aaacuacauuucccagacu

SEQ ID NO: 3104190 - RNA, 19 nt, Artificial Sequence
  Description of Artificial Sequence: Synthetic oligonucleotide
uccauggauuucuccugag

SEQ ID NO: 3104191 - RNA, 19 nt, Artificial Sequence
  Description of Artificial Sequence: Synthetic oligonucleotide
ggcaaggaaauuguggaug

SEQ ID NO: 3104192 - RNA, 19 nt, Artificial Sequence
  Description of Artificial Sequence: Synthetic oligonucleotide
cacagucggaugcuguggc

SEQ ID NO: 3104193 - RNA, 19 nt, Artificial Sequence
  Description of Artificial Sequence: Synthetic oligonucleotide
auuguggaugggccugcuc

SEQ ID NO: 3104194 - RNA, 19 nt, Artificial Sequence
  Description of Artificial Sequence: Synthetic oligonucleotide
ccugaguucuucacagucg

SEQ ID NO: 3104195 - RNA, 19 nt, Artificial Sequence
  Description of Artificial Sequence: Synthetic oligonucleotide
ggaacaggacaucuuuagc

SEQ ID NO: 3104196 - RNA, 19 nt, Artificial Sequence
  Description of Artificial Sequence: Synthetic oligonucleotide
auccauggauuucuccuga

SEQ ID NO: 3104197 - RNA, 19 nt, Artificial Sequence
  Description of Artificial Sequence: Synthetic oligonucleotide
agucggaugcuguggcaag

SEQ ID NO: 3104198 - RNA, 19 nt, Artificial Sequence
  Description of Artificial Sequence: Synthetic oligonucleotide
uuagcagcucugcuucaaa

SEQ ID NO: 3104199 - RNA, 19 nt, Artificial Sequence
  Description of Artificial Sequence: Synthetic oligonucleotide
guuuccacaacaagaagcu

SEQ ID NO: 3104200 - RNA, 19 nt, Artificial Sequence
  Description of Artificial Sequence: Synthetic oligonucleotide
caacaagaagcuaucugaa

SEQ ID NO: 3104201 - RNA, 19 nt, Artificial Sequence
  Description of Artificial Sequence: Synthetic oligonucleotide
gaugcuguggcaaggaaau

SEQ ID NO: 3104202 - RNA, 19 nt, Artificial Sequence
  Description of Artificial Sequence: Synthetic oligonucleotide
gauuucuccugaguucuuc

SEQ ID NO: 3104203 - RNA, 19 nt, Artificial Sequence
  Description of Artificial Sequence: Synthetic oligonucleotide
agaugcagauuugggaccu

SEQ ID NO: 3104204 - RNA, 19 nt, Artificial Sequence
  Description of Artificial Sequence: Synthetic oligonucleotide
uuucuguguggcugaggcu

SEQ ID NO: 3104205 - RNA, 19 nt, Artificial Sequence
  Description of Artificial Sequence: Synthetic oligonucleotide
cuaucugaaagaugcagau

SEQ ID NO: 3104206 - RNA, 19 nt, Artificial Sequence
  Description of Artificial Sequence: Synthetic oligonucleotide
caaggaaauuguggauggg

SEQ ID NO: 3104207 - RNA, 19 nt, Artificial Sequence
  Description of Artificial Sequence: Synthetic oligonucleotide
uggcaaggaaauuguggau

SEQ ID NO: 3104208 - RNA, 19 nt, Artificial Sequence
  Description of Artificial Sequence: Synthetic oligonucleotide
guggcugaggcuggaagag

SEQ ID NO: 3104209 - RNA, 19 nt, Artificial Sequence
  Description of Artificial Sequence: Synthetic oligonucleotide
aacuuucuguguggcugag

SEQ ID NO: 3104210 - RNA, 19 nt, Artificial Sequence
  Description of Artificial Sequence: Synthetic oligonucleotide
uacauuucccagacuucuu

SEQ ID NO: 3104211 - RNA, 19 nt, Artificial Sequence
  Description of Artificial Sequence: Synthetic oligonucleotide
cuugagguggauccaugga

SEQ ID NO: 3104212 - RNA, 19 nt, Artificial Sequence
  Description of Artificial Sequence: Synthetic oligonucleotide
ccuugagguggauccaugg

SEQ ID NO: 3104213 - RNA, 19 nt, Artificial Sequence
  Description of Artificial Sequence: Synthetic oligonucleotide
uaucugaaagaugcagauu

SEQ ID NO: 3104214 - RNA, 19 nt, Artificial Sequence
  Description of Artificial Sequence: Synthetic oligonucleotide
cugacucaaguuuccacaa

SEQ ID NO: 3104215 - RNA, 19 nt, Artificial Sequence
  Description of Artificial Sequence: Synthetic oligonucleotide
ggauccauggauuucuccu

SEQ ID NO: 3104216 - RNA, 19 nt, Artificial Sequence
  Description of Artificial Sequence: Synthetic oligonucleotide
gcagcucugcuucaaaguc

SEQ ID NO: 3104217 - RNA, 19 nt, Artificial Sequence
  Description of Artificial Sequence: Synthetic oligonucleotide
uucuucacagucggaugcu

SEQ ID NO: 3104218 - RNA, 19 nt, Artificial Sequence
  Description of Artificial Sequence: Synthetic oligonucleotide
cuguggcaaggaaauugug

SEQ ID NO: 3104219 - RNA, 19 nt, Artificial Sequence
  Description of Artificial Sequence: Synthetic oligonucleotide
ggcagggacagagccaugg

SEQ ID NO: 3104220 - RNA, 19 nt, Artificial Sequence
  Description of Artificial Sequence: Synthetic oligonucleotide
agguggauccauggauuuc

SEQ ID NO: 3104221 - RNA, 19 nt, Artificial Sequence
  Description of Artificial Sequence: Synthetic oligonucleotide
cagauuugggaccugaguu

SEQ ID NO: 3104222 - RNA, 19 nt, Artificial Sequence
  Description of Artificial Sequence: Synthetic oligonucleotide
cauggauuucuccugaguu

SEQ ID NO: 3104223 - RNA, 19 nt, Artificial Sequence
  Description of Artificial Sequence: Synthetic oligonucleotide
acuuucuguguggcugagg

SEQ ID NO: 3104224 - RNA, 19 nt, Artificial Sequence
  Description of Artificial Sequence: Synthetic oligonucleotide
aagcuaucugaaagaugca

SEQ ID NO: 3104225 - RNA, 19 nt, Artificial Sequence
  Description of Artificial Sequence: Synthetic oligonucleotide
ggauucugacucaaguuuc

SEQ ID NO: 3104226 - RNA, 19 nt, Artificial Sequence
  Description of Artificial Sequence: Synthetic oligonucleotide
gcuaucugaaagaugcaga

SEQ ID NO: 3104227 - RNA, 19 nt, Artificial Sequence
  Description of Artificial Sequence: Synthetic oligonucleotide
acucaaguuuccacaacaa

SEQ ID NO: 3104228 - RNA, 19 nt, Artificial Sequence
  Description of Artificial Sequence: Synthetic oligonucleotide
aauuguggaugggccugcu

SEQ ID NO: 3104229 - RNA, 19 nt, Artificial Sequence
  Description of Artificial Sequence: Synthetic oligonucleotide
cuccaugcuaacuuucugu

SEQ ID NO: 3104230 - RNA, 19 nt, Artificial Sequence
  Description of Artificial Sequence: Synthetic oligonucleotide
gggacagagccauggaaca

SEQ ID NO: 3104231 - RNA, 19 nt, Artificial Sequence
  Description of Artificial Sequence: Synthetic oligonucleotide
ucggaugcuguggcaagga

SEQ ID NO: 3104232 - RNA, 19 nt, Artificial Sequence
  Description of Artificial Sequence: Synthetic oligonucleotide
gaguucuucacagucggau

SEQ ID NO: 3104233 - RNA, 19 nt, Artificial Sequence
  Description of Artificial Sequence: Synthetic oligonucleotide
agccauggaacaggacauc

SEQ ID NO: 3104234 - RNA, 19 nt, Artificial Sequence
  Description of Artificial Sequence: Synthetic oligonucleotide
acagucggaugcuguggca

SEQ ID NO: 3104235 - RNA, 19 nt, Artificial Sequence
  Description of Artificial Sequence: Synthetic oligonucleotide
cuacauuucccagacuucu

SEQ ID NO: 3104236 - RNA, 19 nt, Artificial Sequence
  Description of Artificial Sequence: Synthetic oligonucleotide
agcucugcuucaaagucaa

SEQ ID NO: 3104237 - RNA, 19 nt, Artificial Sequence
  Description of Artificial Sequence: Synthetic oligonucleotide
uuuccacaacaagaagcua

SEQ ID NO: 3104238 - RNA, 19 nt, Artificial Sequence
  Description of Artificial Sequence: Synthetic oligonucleotide
caccuccaugcuaacuuuc

SEQ ID NO: 3104239 - RNA, 19 nt, Artificial Sequence
  Description of Artificial Sequence: Synthetic oligonucleotide
cugaggcuggaagagaaaa

SEQ ID NO: 3104240 - RNA, 19 nt, Artificial Sequence
  Description of Artificial Sequence: Synthetic oligonucleotide
cauggaacaggacaucuuu

SEQ ID NO: 3104241 - RNA, 19 nt, Artificial Sequence
  Description of Artificial Sequence: Synthetic oligonucleotide
acagagccauggaacagga

SEQ ID NO: 3104242 - RNA, 19 nt, Artificial Sequence
  Description of Artificial Sequence: Synthetic oligonucleotide
augcagauuugggaccuga

SEQ ID NO: 3104243 - RNA, 19 nt, Artificial Sequence
  Description of Artificial Sequence: Synthetic oligonucleotide
ggaaauuguggaugggccu

SEQ ID NO: 3104244 - RNA, 19 nt, Artificial Sequence
  Description of Artificial Sequence: Synthetic oligonucleotide
accuccaugcuaacuuucu

SEQ ID NO: 3104245 - RNA, 19 nt, Artificial Sequence
  Description of Artificial Sequence: Synthetic oligonucleotide
cagacuucuuugcugucaa

SEQ ID NO: 3104246 - RNA, 19 nt, Artificial Sequence
  Description of Artificial Sequence: Synthetic oligonucleotide
cuucaaagucaaggccuug

SEQ ID NO: 3104247 - RNA, 19 nt, Artificial Sequence
  Description of Artificial Sequence: Synthetic oligonucleotide
gucuggauucugacucaag

SEQ ID NO: 3104248 - RNA, 19 nt, Artificial Sequence
  Description of Artificial Sequence: Synthetic oligonucleotide
gaugcagauuugggaccug

SEQ ID NO: 3104249 - RNA, 19 nt, Artificial Sequence
  Description of Artificial Sequence: Synthetic oligonucleotide
cuggauucugacucaaguu

SEQ ID NO: 3104250 - RNA, 19 nt, Artificial Sequence
  Description of Artificial Sequence: Synthetic oligonucleotide
cagggacaggcagggacag

SEQ ID NO: 3104251 - RNA, 19 nt, Artificial Sequence
  Description of Artificial Sequence: Synthetic oligonucleotide
agucuggauucugacucaa

SEQ ID NO: 3104252 - RNA, 19 nt, Artificial Sequence
  Description of Artificial Sequence: Synthetic oligonucleotide
cagggacagagccauggaa

SEQ ID NO: 3104253 - RNA, 19 nt, Artificial Sequence
  Description of Artificial Sequence: Synthetic oligonucleotide
uggcugaggcuggaagaga

SEQ ID NO: 3104254 - RNA, 19 nt, Artificial Sequence
  Description of Artificial Sequence: Synthetic oligonucleotide
ggacagagccauggaacag

SEQ ID NO: 3104255 - RNA, 19 nt, Artificial Sequence
  Description of Artificial Sequence: Synthetic oligonucleotide
gagccauggaacaggacau

SEQ ID NO: 3104256 - RNA, 19 nt, Artificial Sequence
  Description of Artificial Sequence: Synthetic oligonucleotide
auggaacaggacaucuuua

SEQ ID NO: 3104257 - RNA, 19 nt, Artificial Sequence
  Description of Artificial Sequence: Synthetic oligonucleotide
agacuucuuugcugucaaa

SEQ ID NO: 3104258 - RNA, 19 nt, Artificial Sequence
  Description of Artificial Sequence: Synthetic oligonucleotide
cagagccauggaacaggac

SEQ ID NO: 3104259 - RNA, 19 nt, Artificial Sequence
  Description of Artificial Sequence: Synthetic oligonucleotide
gguggauccauggauuucu

SEQ ID NO: 3104260 - RNA, 19 nt, Artificial Sequence
  Description of Artificial Sequence: Synthetic oligonucleotide
cuucacagucggaugcugu

SEQ ID NO: 3104261 - RNA, 19 nt, Artificial Sequence
  Description of Artificial Sequence: Synthetic oligonucleotide
gaugggccugcuccaccuc

SEQ ID NO: 3104262 - RNA, 19 nt, Artificial Sequence
  Description of Artificial Sequence: Synthetic oligonucleotide
caaggccuugagguggauc

SEQ ID NO: 3104263 - RNA, 19 nt, Artificial Sequence
  Description of Artificial Sequence: Synthetic oligonucleotide
ggaugcuguggcaaggaaa

SEQ ID NO: 3104264 - RNA, 19 nt, Artificial Sequence
  Description of Artificial Sequence: Synthetic oligonucleotide
uguguggcugaggcuggaa

SEQ ID NO: 3104265 - RNA, 19 nt, Artificial Sequence
  Description of Artificial Sequence: Synthetic oligonucleotide
caucuuuagcagcucugcu

SEQ ID NO: 3104266 - RNA, 19 nt, Artificial Sequence
  Description of Artificial Sequence: Synthetic oligonucleotide
ccuccaugcuaacuuucug

SEQ ID NO: 3104267 - RNA, 19 nt, Artificial Sequence
  Description of Artificial Sequence: Synthetic oligonucleotide
cagucggaugcuguggcaa

SEQ ID NO: 3104268 - RNA, 19 nt, Artificial Sequence
  Description of Artificial Sequence: Synthetic oligonucleotide
guggauccauggauuucuc

SEQ ID NO: 3104269 - RNA, 19 nt, Artificial Sequence
  Description of Artificial Sequence: Synthetic oligonucleotide
gcuguggcaaggaaauugu

SEQ ID NO: 3104270 - RNA, 19 nt, Artificial Sequence
  Description of Artificial Sequence: Synthetic oligonucleotide
aggccuugagguggaucca

SEQ ID NO: 3104271 - RNA, 19 nt, Artificial Sequence
  Description of Artificial Sequence: Synthetic oligonucleotide
ggacaggcagggacagagc

SEQ ID NO: 3104272 - RNA, 19 nt, Artificial Sequence
  Description of Artificial Sequence: Synthetic oligonucleotide
ccagacuucuuugcuguca

SEQ ID NO: 3104273 - RNA, 19 nt, Artificial Sequence
  Description of Artificial Sequence: Synthetic oligonucleotide
ggccugcuccaccuccaug

SEQ ID NO: 3104274 - RNA, 19 nt, Artificial Sequence
  Description of Artificial Sequence: Synthetic oligonucleotide
gccauggaacaggacaucu

SEQ ID NO: 3104275 - RNA, 19 nt, Artificial Sequence
  Description of Artificial Sequence: Synthetic oligonucleotide
gccuugagguggauccaug

SEQ ID NO: 3104276 - RNA, 19 nt, Artificial Sequence
  Description of Artificial Sequence: Synthetic oligonucleotide
cuccugaguucuucacagu

SEQ ID NO: 3104277 - RNA, 19 nt, Artificial Sequence
  Description of Artificial Sequence: Synthetic oligonucleotide
agggacaggcagggacaga

SEQ ID NO: 3104278 - RNA, 19 nt, Artificial Sequence
  Description of Artificial Sequence: Synthetic oligonucleotide
ccaugcuaacuuucugugu

SEQ ID NO: 3104279 - RNA, 19 nt, Artificial Sequence
  Description of Artificial Sequence: Synthetic oligonucleotide
cccagacuucuuugcuguc

SEQ ID NO: 3104280 - RNA, 19 nt, Artificial Sequence
  Description of Artificial Sequence: Synthetic oligonucleotide
ccauggauuucuccugagu

SEQ ID NO: 3104281 - RNA, 19 nt, Artificial Sequence
  Description of Artificial Sequence: Synthetic oligonucleotide
gcuucaaagucaaggccuu

SEQ ID NO: 3104282 - RNA, 19 nt, Artificial Sequence
  Description of Artificial Sequence: Synthetic oligonucleotide
gcucugcuucaaagucaag

SEQ ID NO: 3104283 - RNA, 19 nt, Artificial Sequence
  Description of Artificial Sequence: Synthetic oligonucleotide
gcuccaccuccaugcuaac

SEQ ID NO: 3104284 - RNA, 19 nt, Artificial Sequence
  Description of Artificial Sequence: Synthetic oligonucleotide
gcugaggcuggaagagaaa

SEQ ID NO: 3104285 - RNA, 19 nt, Artificial Sequence
  Description of Artificial Sequence: Synthetic oligonucleotide
cuguguggcugaggcugga

SEQ ID NO: 3104286 - RNA, 19 nt, Artificial Sequence
  Description of Artificial Sequence: Synthetic oligonucleotide
cuccaccuccaugcuaacu

SEQ ID NO: 3104287 - RNA, 19 nt, Artificial Sequence
  Description of Artificial Sequence: Synthetic oligonucleotide
aggcagggacagagccaug

SEQ ID NO: 3104288 - RNA, 19 nt, Artificial Sequence
  Description of Artificial Sequence: Synthetic oligonucleotide
ccauggaacaggacaucuu

SEQ ID NO: 3104289 - RNA, 19 nt, Artificial Sequence
  Description of Artificial Sequence: Synthetic oligonucleotide
ccaccuccaugcuaacuuu

SEQ ID NO: 3104290 - RNA, 19 nt, Artificial Sequence
  Description of Artificial Sequence: Synthetic oligonucleotide
ggauuucuccugaguucuu

SEQ ID NO: 3104291 - RNA, 19 nt, Artificial Sequence
  Description of Artificial Sequence: Synthetic oligonucleotide
aacuuuaauaguuuuacaa

SEQ ID NO: 3104292 - RNA, 19 nt, Artificial Sequence
  Description of Artificial Sequence: Synthetic oligonucleotide
aguuuuacaaguuaacuga

SEQ ID NO: 3104293 - RNA, 19 nt, Artificial Sequence
  Description of Artificial Sequence: Synthetic oligonucleotide
aauaguuuuacaaguuaac

SEQ ID NO: 3104294 - RNA, 19 nt, Artificial Sequence
  Description of Artificial Sequence: Synthetic oligonucleotide
aguuaacugacacaggaag

SEQ ID NO: 3104295 - RNA, 19 nt, Artificial Sequence
  Description of Artificial Sequence: Synthetic oligonucleotide
ugaagaacaggcaugagau

SEQ ID NO: 3104296 - RNA, 19 nt, Artificial Sequence
  Description of Artificial Sequence: Synthetic oligonucleotide
uaguuuuacaaguuaacug

SEQ ID NO: 3104297 - RNA, 19 nt, Artificial Sequence
  Description of Artificial Sequence: Synthetic oligonucleotide
gacugaaucccuaugacag

SEQ ID NO: 3104298 - RNA, 19 nt, Artificial Sequence
  Description of Artificial Sequence: Synthetic oligonucleotide
uaauaguuuuacaaguuaa

SEQ ID NO: 3104299 - RNA, 19 nt, Artificial Sequence
  Description of Artificial Sequence: Synthetic oligonucleotide
aagaacaggcaugagaugu

SEQ ID NO: 3104300 - RNA, 19 nt, Artificial Sequence
  Description of Artificial Sequence: Synthetic oligonucleotide
acaggaaggacugaauccc

SEQ ID NO: 3104301 - RNA, 19 nt, Artificial Sequence
  Description of Artificial Sequence: Synthetic oligonucleotide
uuaauaguuuuacaaguua

SEQ ID NO: 3104302 - RNA, 19 nt, Artificial Sequence
  Description of Artificial Sequence: Synthetic oligonucleotide
uuuaauaguuuuacaaguu

SEQ ID NO: 3104303 - RNA, 19 nt, Artificial Sequence
  Description of Artificial Sequence: Synthetic oligonucleotide
uaugacaggcugcugaaga

SEQ ID NO: 3104304 - RNA, 19 nt, Artificial Sequence
  Description of Artificial Sequence: Synthetic oligonucleotide
aaggacugaaucccuauga

SEQ ID NO: 3104305 - RNA, 19 nt, Artificial Sequence
  Description of Artificial Sequence: Synthetic oligonucleotide
uuaacugacacaggaagga

SEQ ID NO: 3104306 - RNA, 19 nt, Artificial Sequence
  Description of Artificial Sequence: Synthetic oligonucleotide
acacaggaaggacugaauc

SEQ ID NO: 3104307 - RNA, 19 nt, Artificial Sequence
  Description of Artificial Sequence: Synthetic oligonucleotide
ucaagaggccauuuugugc

SEQ ID NO: 3104308 - RNA, 19 nt, Artificial Sequence
  Description of Artificial Sequence: Synthetic oligonucleotide
auaguuuuacaaguuaacu

SEQ ID NO: 3104309 - RNA, 19 nt, Artificial Sequence
  Description of Artificial Sequence: Synthetic oligonucleotide
aggacugaaucccuaugac

SEQ ID NO: 3104310 - RNA, 19 nt, Artificial Sequence
  Description of Artificial Sequence: Synthetic oligonucleotide
cacaggaaggacugaaucc

SEQ ID NO: 3104311 - RNA, 19 nt, Artificial Sequence
  Description of Artificial Sequence: Synthetic oligonucleotide
ugucaagaggccauuuugu

SEQ ID NO: 3104312 - RNA, 19 nt, Artificial Sequence
  Description of Artificial Sequence: Synthetic oligonucleotide
aaucccuaugacaggcugc

SEQ ID NO: 3104313 - RNA, 19 nt, Artificial Sequence
  Description of Artificial Sequence: Synthetic oligonucleotide
guuaacugacacaggaagg

SEQ ID NO: 3104314 - RNA, 19 nt, Artificial Sequence
  Description of Artificial Sequence: Synthetic oligonucleotide
augucaagaggccauuuug

SEQ ID NO: 3104315 - RNA, 19 nt, Artificial Sequence
  Description of Artificial Sequence: Synthetic oligonucleotide
caugagaugucaagaggcc

SEQ ID NO: 3104316 - RNA, 19 nt, Artificial Sequence
  Description of Artificial Sequence: Synthetic oligonucleotide
cuuuaauaguuuuacaagu

SEQ ID NO: 3104317 - RNA, 19 nt, Artificial Sequence
  Description of Artificial Sequence: Synthetic oligonucleotide
acaggcaugagaugucaag

SEQ ID NO: 3104318 - RNA, 19 nt, Artificial Sequence
  Description of Artificial Sequence: Synthetic oligonucleotide
caagaggccauuuugugca

SEQ ID NO: 3104319 - RNA, 19 nt, Artificial Sequence
  Description of Artificial Sequence: Synthetic oligonucleotide
ugagaugucaagaggccau

SEQ ID NO: 3104320 - RNA, 19 nt, Artificial Sequence
  Description of Artificial Sequence: Synthetic oligonucleotide
acugaaucccuaugacagg

SEQ ID NO: 3104321 - RNA, 19 nt, Artificial Sequence
  Description of Artificial Sequence: Synthetic oligonucleotide
aggcaugagaugucaagag

SEQ ID NO: 3104322 - RNA, 19 nt, Artificial Sequence
  Description of Artificial Sequence: Synthetic oligonucleotide
ggaacuuuaauaguuuuac

SEQ ID NO: 3104323 - RNA, 19 nt, Artificial Sequence
  Description of Artificial Sequence: Synthetic oligonucleotide
gaaucccuaugacaggcug

SEQ ID NO: 3104324 - RNA, 19 nt, Artificial Sequence
  Description of Artificial Sequence: Synthetic oligonucleotide
auuuugugcacugccacug

SEQ ID NO: 3104325 - RNA, 19 nt, Artificial Sequence
  Description of Artificial Sequence: Synthetic oligonucleotide
gaacuuuaauaguuuuaca

SEQ ID NO: 3104326 - RNA, 19 nt, Artificial Sequence
  Description of Artificial Sequence: Synthetic oligonucleotide
gaaggacugaaucccuaug

SEQ ID NO: 3104327 - RNA, 19 nt, Artificial Sequence
  Description of Artificial Sequence: Synthetic oligonucleotide
cugaaucccuaugacaggc

SEQ ID NO: 3104328 - RNA, 19 nt, Artificial Sequence
  Description of Artificial Sequence: Synthetic oligonucleotide
gucaagaggccauuuugug

SEQ ID NO: 3104329 - RNA, 19 nt, Artificial Sequence
  Description of Artificial Sequence: Synthetic oligonucleotide
uuugugcacugccacugug

SEQ ID NO: 3104330 - RNA, 19 nt, Artificial Sequence
  Description of Artificial Sequence: Synthetic oligonucleotide
cugaagaacaggcaugaga

SEQ ID NO: 3104331 - RNA, 19 nt, Artificial Sequence
  Description of Artificial Sequence: Synthetic oligonucleotide
ugcugaagaacaggcauga

SEQ ID NO: 3104332 - RNA, 19 nt, Artificial Sequence
  Description of Artificial Sequence: Synthetic oligonucleotide
gaagaacaggcaugagaug

SEQ ID NO: 3104333 - RNA, 19 nt, Artificial Sequence
  Description of Artificial Sequence: Synthetic oligonucleotide
aacugacacaggaaggacu

SEQ ID NO: 3104334 - RNA, 19 nt, Artificial Sequence
  Description of Artificial Sequence: Synthetic oligonucleotide
ggcaugagaugucaagagg

SEQ ID NO: 3104335 - RNA, 19 nt, Artificial Sequence
  Description of Artificial Sequence: Synthetic oligonucleotide
acugacacaggaaggacug

SEQ ID NO: 3104336 - RNA, 19 nt, Artificial Sequence
  Description of Artificial Sequence: Synthetic oligonucleotide
gcaugagaugucaagaggc

SEQ ID NO: 3104337 - RNA, 19 nt, Artificial Sequence
  Description of Artificial Sequence: Synthetic oligonucleotide
guuuuacaaguuaacugac

SEQ ID NO: 3104338 - RNA, 19 nt, Artificial Sequence
  Description of Artificial Sequence: Synthetic oligonucleotide
ugugcacugccacugugau

SEQ ID NO: 3104339 - RNA, 19 nt, Artificial Sequence
  Description of Artificial Sequence: Synthetic oligonucleotide
gaggccauuuugugcacug

SEQ ID NO: 3104340 - RNA, 19 nt, Artificial Sequence
  Description of Artificial Sequence: Synthetic oligonucleotide
ugaaucccuaugacaggcu

SEQ ID NO: 3104341 - RNA, 19 nt, Artificial Sequence
  Description of Artificial Sequence: Synthetic oligonucleotide
agaacaggcaugagauguc

SEQ ID NO: 3104342 - RNA, 19 nt, Artificial Sequence
  Description of Artificial Sequence: Synthetic oligonucleotide
uaacugacacaggaaggac

SEQ ID NO: 3104343 - RNA, 19 nt, Artificial Sequence
  Description of Artificial Sequence: Synthetic oligonucleotide
ugacaggcugcugaagaac

SEQ ID NO: 3104344 - RNA, 19 nt, Artificial Sequence
  Description of Artificial Sequence: Synthetic oligonucleotide
augagaugucaagaggcca

SEQ ID NO: 3104345 - RNA, 19 nt, Artificial Sequence
  Description of Artificial Sequence: Synthetic oligonucleotide
gacaggcugcugaagaaca

SEQ ID NO: 3104346 - RNA, 19 nt, Artificial Sequence
  Description of Artificial Sequence: Synthetic oligonucleotide
augacaggcugcugaagaa

SEQ ID NO: 3104347 - RNA, 19 nt, Artificial Sequence
  Description of Artificial Sequence: Synthetic oligonucleotide
aucccuaugacaggcugcu

SEQ ID NO: 3104348 - RNA, 19 nt, Artificial Sequence
  Description of Artificial Sequence: Synthetic oligonucleotide
gaacaggcaugagauguca

SEQ ID NO: 3104349 - RNA, 19 nt, Artificial Sequence
  Description of Artificial Sequence: Synthetic oligonucleotide
ggacugaaucccuaugaca

SEQ ID NO: 3104350 - RNA, 19 nt, Artificial Sequence
  Description of Artificial Sequence: Synthetic oligonucleotide
aggccauuuugugcacugc

SEQ ID NO: 3104351 - RNA, 19 nt, Artificial Sequence
  Description of Artificial Sequence: Synthetic oligonucleotide
caggcaugagaugucaaga

SEQ ID NO: 3104352 - RNA, 19 nt, Artificial Sequence
  Description of Artificial Sequence: Synthetic oligonucleotide
cuaugacaggcugcugaag

SEQ ID NO: 3104353 - RNA, 19 nt, Artificial Sequence
  Description of Artificial Sequence: Synthetic oligonucleotide
gaugucaagaggccauuuu

SEQ ID NO: 3104354 - RNA, 19 nt, Artificial Sequence
  Description of Artificial Sequence: Synthetic oligonucleotide
aacaggcaugagaugucaa

SEQ ID NO: 3104355 - RNA, 19 nt, Artificial Sequence
  Description of Artificial Sequence: Synthetic oligonucleotide
cauuuugugcacugccacu

SEQ ID NO: 3104356 - RNA, 19 nt, Artificial Sequence
  Description of Artificial Sequence: Synthetic oligonucleotide
gcugcugaagaacaggcau

SEQ ID NO: 3104357 - RNA, 19 nt, Artificial Sequence
  Description of Artificial Sequence: Synthetic oligonucleotide
gugcacugccacugugaug

SEQ ID NO: 3104358 - RNA, 19 nt, Artificial Sequence
  Description of Artificial Sequence: Synthetic oligonucleotide
agaggccauuuugugcacu

SEQ ID NO: 3104359 - RNA, 19 nt, Artificial Sequence
  Description of Artificial Sequence: Synthetic oligonucleotide
agaugucaagaggccauuu

SEQ ID NO: 3104360 - RNA, 19 nt, Artificial Sequence
  Description of Artificial Sequence: Synthetic oligonucleotide
cccuaugacaggcugcuga

SEQ ID NO: 3104361 - RNA, 19 nt, Artificial Sequence
  Description of Artificial Sequence: Synthetic oligonucleotide
aggaaggacugaaucccua

SEQ ID NO: 3104362 - RNA, 19 nt, Artificial Sequence
  Description of Artificial Sequence: Synthetic oligonucleotide
ucccuaugacaggcugcug

SEQ ID NO: 3104363 - RNA, 19 nt, Artificial Sequence
  Description of Artificial Sequence: Synthetic oligonucleotide
ggaaggacugaaucccuau

SEQ ID NO: 3104364 - RNA, 19 nt, Artificial Sequence
  Description of Artificial Sequence: Synthetic oligonucleotide
gcugaagaacaggcaugag

SEQ ID NO: 3104365 - RNA, 19 nt, Artificial Sequence
  Description of Artificial Sequence: Synthetic oligonucleotide
ccuaugacaggcugcugaa

SEQ ID NO: 3104366 - RNA, 19 nt, Artificial Sequence
  Description of Artificial Sequence: Synthetic oligonucleotide
cugacacaggaaggacuga

SEQ ID NO: 3104367 - RNA, 19 nt, Artificial Sequence
  Description of Artificial Sequence: Synthetic oligonucleotide
gagaugucaagaggccauu

SEQ ID NO: 3104368 - RNA, 19 nt, Artificial Sequence
  Description of Artificial Sequence: Synthetic oligonucleotide
uaagguauaggauagaagc

SEQ ID NO: 3104369 - RNA, 19 nt, Artificial Sequence
  Description of Artificial Sequence: Synthetic oligonucleotide
  modified_base (10)..(10): a, c, u, g, unknown or other
aaaagcagcnccuuuucuc

SEQ ID NO: 3104370 - RNA, 19 nt, Artificial Sequence
  Description of Artificial Sequence: Synthetic oligonucleotide
uaaagaaugaccuaguguc

SEQ ID NO: 3104371 - RNA, 19 nt, Artificial Sequence
  Description of Artificial Sequence: Synthetic oligonucleotide
agugaaggagaccaggacc

SEQ ID NO: 3104372 - RNA, 19 nt, Artificial Sequence
  Description of Artificial Sequence: Synthetic oligonucleotide
uaggauagaagcaggagag

SEQ ID NO: 3104373 - RNA, 19 nt, Artificial Sequence
  Description of Artificial Sequence: Synthetic oligonucleotide
auagcaacuagucaucauc

SEQ ID NO: 3104374 - RNA, 19 nt, Artificial Sequence
  Description of Artificial Sequence: Synthetic oligonucleotide
uguauacagaccacagucg

SEQ ID NO: 3104375 - RNA, 19 nt, Artificial Sequence
  Description of Artificial Sequence: Synthetic oligonucleotide
caacuagucaucaucgucg

SEQ ID NO: 3104376 - RNA, 19 nt, Artificial Sequence
  Description of Artificial Sequence: Synthetic oligonucleotide
aagaaugaccuaguguccc

SEQ ID NO: 3104377 - RNA, 19 nt, Artificial Sequence
  Description of Artificial Sequence: Synthetic oligonucleotide
auaguaaagaaugaccuag

SEQ ID NO: 3104378 - RNA, 19 nt, Artificial Sequence
  Description of Artificial Sequence: Synthetic oligonucleotide
uagcaacuagucaucaucg

SEQ ID NO: 3104379 - RNA, 19 nt, Artificial Sequence
  Description of Artificial Sequence: Synthetic oligonucleotide
ucaagcacccuguauacag

SEQ ID NO: 3104380 - RNA, 19 nt, Artificial Sequence
  Description of Artificial Sequence: Synthetic oligonucleotide
gaugaaagaacugggcugg

SEQ ID NO: 3104381 - RNA, 19 nt, Artificial Sequence
  Description of Artificial Sequence: Synthetic oligonucleotide
auacggauaagguauagga

SEQ ID NO: 3104382 - RNA, 19 nt, Artificial Sequence
  Description of Artificial Sequence: Synthetic oligonucleotide
cuagucaucaucgucgucg

SEQ ID NO: 3104383 - RNA, 19 nt, Artificial Sequence
  Description of Artificial Sequence: Synthetic oligonucleotide
aaagaaugaccuagugucc

SEQ ID NO: 3104384 - RNA, 19 nt, Artificial Sequence
  Description of Artificial Sequence: Synthetic oligonucleotide
  modified_base (9)..(9): a, c, u, g, unknown or other
aaagcagcnccuuuucuca

SEQ ID NO: 3104385 - RNA, 19 nt, Artificial Sequence
  Description of Artificial Sequence: Synthetic oligonucleotide
auaggauagaagcaggaga

SEQ ID NO: 3104386 - RNA, 19 nt, Artificial Sequence
  Description of Artificial Sequence: Synthetic oligonucleotide
auacagaccacagucggcc

SEQ ID NO: 3104387 - RNA, 19 nt, Artificial Sequence
  Description of Artificial Sequence: Synthetic oligonucleotide
aaagaacugggcugguauc

SEQ ID NO: 3104388 - RNA, 19 nt, Artificial Sequence
  Description of Artificial Sequence: Synthetic oligonucleotide
  modified_base (17)..(17): a, c, u, g, unknown or other
ucucaggaaaagcagcncc

SEQ ID NO: 3104389 - RNA, 19 nt, Artificial Sequence
  Description of Artificial Sequence: Synthetic oligonucleotide
agaugaaagaacugggcug

SEQ ID NO: 3104390 - RNA, 19 nt, Artificial Sequence
  Description of Artificial Sequence: Synthetic oligonucleotide
guauacagaccacagucgg

SEQ ID NO: 3104391 - RNA, 19 nt, Artificial Sequence
  Description of Artificial Sequence: Synthetic oligonucleotide
acguguaaagagcaagugg

SEQ ID NO: 3104392 - RNA, 19 nt, Artificial Sequence
  Description of Artificial Sequence: Synthetic oligonucleotide
cuguauacagaccacaguc

SEQ ID NO: 3104393 - RNA, 19 nt, Artificial Sequence
  Description of Artificial Sequence: Synthetic oligonucleotide
  modified_base (19)..(19): a, c, u, g, unknown or other
uaucucaggaaaagcagcn

SEQ ID NO: 3104394 - RNA, 19 nt, Artificial Sequence
  Description of Artificial Sequence: Synthetic oligonucleotide
auagaagcaggagagauga

SEQ ID NO: 3104395 - RNA, 19 nt, Artificial Sequence
  Description of Artificial Sequence: Synthetic oligonucleotide
agagaugaaagaacugggc

SEQ ID NO: 3104396 - RNA, 19 nt, Artificial Sequence
  Description of Artificial Sequence: Synthetic oligonucleotide
aguaaagaaugaccuagug

SEQ ID NO: 3104397 - RNA, 19 nt, Artificial Sequence
  Description of Artificial Sequence: Synthetic oligonucleotide
cuuuucucaccagugaagg

SEQ ID NO: 3104398 - RNA, 19 nt, Artificial Sequence
  Description of Artificial Sequence: Synthetic oligonucleotide
gagagaugaaagaacuggg

SEQ ID NO: 3104399 - RNA, 19 nt, Artificial Sequence
  Description of Artificial Sequence: Synthetic oligonucleotide
ucaccagugaaggagacca

SEQ ID NO: 3104400 - RNA, 19 nt, Artificial Sequence
  Description of Artificial Sequence: Synthetic oligonucleotide
ccuauaguaaagaaugacc

SEQ ID NO: 3104401 - RNA, 19 nt, Artificial Sequence
  Description of Artificial Sequence: Synthetic oligonucleotide
ugccauagcaacuagucau

SEQ ID NO: 3104402 - RNA, 19 nt, Artificial Sequence
  Description of Artificial Sequence: Synthetic oligonucleotide
uguaaagagcaaguggggc

SEQ ID NO: 3104403 - RNA, 19 nt, Artificial Sequence
  Description of Artificial Sequence: Synthetic oligonucleotide
aggugguugccauagcaac

SEQ ID NO: 3104404 - RNA, 19 nt, Artificial Sequence
  Description of Artificial Sequence: Synthetic oligonucleotide
uauaggauagaagcaggag

SEQ ID NO: 3104405 - RNA, 19 nt, Artificial Sequence
  Description of Artificial Sequence: Synthetic oligonucleotide
ggagagaugaaagaacugg

SEQ ID NO: 3104406 - RNA, 19 nt, Artificial Sequence
  Description of Artificial Sequence: Synthetic oligonucleotide
  modified_base (7)..(7): a, c, u, g, unknown or other
agcagcnccuuuucucacc

SEQ ID NO: 3104407 - RNA, 19 nt, Artificial Sequence
  Description of Artificial Sequence: Synthetic oligonucleotide
cuauaguaaagaaugaccu

SEQ ID NO: 3104408 - RNA, 19 nt, Artificial Sequence
  Description of Artificial Sequence: Synthetic oligonucleotide
ugaccuagugucccgagga

SEQ ID NO: 3104409 - RNA, 19 nt, Artificial Sequence
  Description of Artificial Sequence: Synthetic oligonucleotide
ugucccgaggagcucaggg

SEQ ID NO: 3104410 - RNA, 19 nt, Artificial Sequence
  Description of Artificial Sequence: Synthetic oligonucleotide
agguauaggauagaagcag

SEQ ID NO: 3104411 - RNA, 19 nt, Artificial Sequence
  Description of Artificial Sequence: Synthetic oligonucleotide
ugcguggaggguaggaagg

SEQ ID NO: 3104412 - RNA, 19 nt, Artificial Sequence
  Description of Artificial Sequence: Synthetic oligonucleotide
gauacggauaagguauagg

SEQ ID NO: 3104413 - RNA, 19 nt, Artificial Sequence
  Description of Artificial Sequence: Synthetic oligonucleotide
acggauaagguauaggaua

SEQ ID NO: 3104414 - RNA, 19 nt, Artificial Sequence
  Description of Artificial Sequence: Synthetic oligonucleotide
accacagucggcccuauag

SEQ ID NO: 3104415 - RNA, 19 nt, Artificial Sequence
  Description of Artificial Sequence: Synthetic oligonucleotide
gagaccaggaccucaagca

SEQ ID NO: 3104416 - RNA, 19 nt, Artificial Sequence
  Description of Artificial Sequence: Synthetic oligonucleotide
cguguaaagagcaaguggg

SEQ ID NO: 3104417 - RNA, 19 nt, Artificial Sequence
  Description of Artificial Sequence: Synthetic oligonucleotide
uauaguaaagaaugaccua

SEQ ID NO: 3104418 - RNA, 19 nt, Artificial Sequence
  Description of Artificial Sequence: Synthetic oligonucleotide
uauacagaccacagucggc

SEQ ID NO: 3104419 - RNA, 19 nt, Artificial Sequence
  Description of Artificial Sequence: Synthetic oligonucleotide
aaugaccuagugucccgag

SEQ ID NO: 3104420 - RNA, 19 nt, Artificial Sequence
  Description of Artificial Sequence: Synthetic oligonucleotide
aacuagucaucaucgucgu

SEQ ID NO: 3104421 - RNA, 19 nt, Artificial Sequence
  Description of Artificial Sequence: Synthetic oligonucleotide
agaccaggaccucaagcac

SEQ ID NO: 3104422 - RNA, 19 nt, Artificial Sequence
  Description of Artificial Sequence: Synthetic oligonucleotide
ucagggaagugcguggagg

SEQ ID NO: 3104423 - RNA, 19 nt, Artificial Sequence
  Description of Artificial Sequence: Synthetic oligonucleotide
gaaggcacguguaaagagc

SEQ ID NO: 3104424 - RNA, 19 nt, Artificial Sequence
  Description of Artificial Sequence: Synthetic oligonucleotide
agaaugaccuagugucccg

SEQ ID NO: 3104425 - RNA, 19 nt, Artificial Sequence
  Description of Artificial Sequence: Synthetic oligonucleotide
gagcaaguggggcugguag

SEQ ID NO: 3104426 - RNA, 19 nt, Artificial Sequence
  Description of Artificial Sequence: Synthetic oligonucleotide
uaaagagcaaguggggcug

SEQ ID NO: 3104427 - RNA, 19 nt, Artificial Sequence
  Description of Artificial Sequence: Synthetic oligonucleotide
aagguauaggauagaagca

SEQ ID NO: 3104428 - RNA, 19 nt, Artificial Sequence
  Description of Artificial Sequence: Synthetic oligonucleotide
uaguaaagaaugaccuagu

SEQ ID NO: 3104429 - RNA, 19 nt, Artificial Sequence
  Description of Artificial Sequence: Synthetic oligonucleotide
uggaggguaggaaggcacg

SEQ ID NO: 3104430 - RNA, 19 nt, Artificial Sequence
  Description of Artificial Sequence: Synthetic oligonucleotide
ggcccuauaguaaagaaug

SEQ ID NO: 3104431 - RNA, 19 nt, Artificial Sequence
  Description of Artificial Sequence: Synthetic oligonucleotide
  modified_base (8)..(8): a, c, u, g, unknown or other
aagcagcnccuuuucucac

SEQ ID NO: 3104432 - RNA, 19 nt, Artificial Sequence
  Description of Artificial Sequence: Synthetic oligonucleotide
auaagguauaggauagaag

SEQ ID NO: 3104433 - RNA, 19 nt, Artificial Sequence
  Description of Artificial Sequence: Synthetic oligonucleotide
uacggauaagguauaggau

SEQ ID NO: 3104434 - RNA, 19 nt, Artificial Sequence
  Description of Artificial Sequence: Synthetic oligonucleotide
gauagaagcaggagagaug

SEQ ID NO: 3104435 - RNA, 19 nt, Artificial Sequence
  Description of Artificial Sequence: Synthetic oligonucleotide
aagaacugggcugguaucu

SEQ ID NO: 3104436 - RNA, 19 nt, Artificial Sequence
  Description of Artificial Sequence: Synthetic oligonucleotide
gagaugaaagaacugggcu

SEQ ID NO: 3104437 - RNA, 19 nt, Artificial Sequence
  Description of Artificial Sequence: Synthetic oligonucleotide
uugccauagcaacuaguca

SEQ ID NO: 3104438 - RNA, 19 nt, Artificial Sequence
  Description of Artificial Sequence: Synthetic oligonucleotide
guaucucaggaaaagcagc

SEQ ID NO: 3104439 - RNA, 19 nt, Artificial Sequence
  Description of Artificial Sequence: Synthetic oligonucleotide
agcaaguggggcugguagg

SEQ ID NO: 3104440 - RNA, 19 nt, Artificial Sequence
  Description of Artificial Sequence: Synthetic oligonucleotide
  modified_base (4)..(4): a, c, u, g, unknown or other
agcnccuuuucucaccagu

SEQ ID NO: 3104441 - RNA, 19 nt, Artificial Sequence
  Description of Artificial Sequence: Synthetic oligonucleotide
guaaagaaugaccuagugu

SEQ ID NO: 3104442 - RNA, 19 nt, Artificial Sequence
  Description of Artificial Sequence: Synthetic oligonucleotide
guugccauagcaacuaguc

SEQ ID NO: 3104443 - RNA, 19 nt, Artificial Sequence
  Description of Artificial Sequence: Synthetic oligonucleotide
ugguaggugguugccauag

SEQ ID NO: 3104444 - RNA, 19 nt, Artificial Sequence
  Description of Artificial Sequence: Synthetic oligonucleotide
accucaagcacccuguaua

SEQ ID NO: 3104445 - RNA, 19 nt, Artificial Sequence
  Description of Artificial Sequence: Synthetic oligonucleotide
cagggaagugcguggaggg

SEQ ID NO: 3104446 - RNA, 19 nt, Artificial Sequence
  Description of Artificial Sequence: Synthetic oligonucleotide
augaccuagugucccgagg

SEQ ID NO: 3104447 - RNA, 19 nt, Artificial Sequence
  Description of Artificial Sequence: Synthetic oligonucleotide
gguaucucaggaaaagcag

SEQ ID NO: 3104448 - RNA, 19 nt, Artificial Sequence
  Description of Artificial Sequence: Synthetic oligonucleotide
uuuucucaccagugaagga

SEQ ID NO: 3104449 - RNA, 19 nt, Artificial Sequence
  Description of Artificial Sequence: Synthetic oligonucleotide
gguauaggauagaagcagg

SEQ ID NO: 3104450 - RNA, 19 nt, Artificial Sequence
  Description of Artificial Sequence: Synthetic oligonucleotide
accuagugucccgaggagc

SEQ ID NO: 3104451 - RNA, 19 nt, Artificial Sequence
  Description of Artificial Sequence: Synthetic oligonucleotide
uaggugguugccauagcaa

SEQ ID NO: 3104452 - RNA, 19 nt, Artificial Sequence
  Description of Artificial Sequence: Synthetic oligonucleotide
guguaaagagcaagugggg

SEQ ID NO: 3104453 - RNA, 19 nt, Artificial Sequence
  Description of Artificial Sequence: Synthetic oligonucleotide
accaggaccucaagcaccc

SEQ ID NO: 3104454 - RNA, 19 nt, Artificial Sequence
  Description of Artificial Sequence: Synthetic oligonucleotide
ggaaggcacguguaaagag

SEQ ID NO: 3104455 - RNA, 19 nt, Artificial Sequence
  Description of Artificial Sequence: Synthetic oligonucleotide
  modified_base (18)..(18): a, c, u, g, unknown or other
aucucaggaaaagcagcnc

SEQ ID NO: 3104456 - RNA, 19 nt, Artificial Sequence
  Description of Artificial Sequence: Synthetic oligonucleotide
gaaagaacugggcugguau

SEQ ID NO: 3104457 - RNA, 19 nt, Artificial Sequence
  Description of Artificial Sequence: Synthetic oligonucleotide
guaggugguugccauagca

SEQ ID NO: 3104458 - RNA, 19 nt, Artificial Sequence
  Description of Artificial Sequence: Synthetic oligonucleotide
aggguaggaaggcacgugu

SEQ ID NO: 3104459 - RNA, 19 nt, Artificial Sequence
  Description of Artificial Sequence: Synthetic oligonucleotide
aaagagcaaguggggcugg

SEQ ID NO: 3104460 - RNA, 19 nt, Artificial Sequence
  Description of Artificial Sequence: Synthetic oligonucleotide
aggagcucagggaagugcg

SEQ ID NO: 3104461 - RNA, 19 nt, Artificial Sequence
  Description of Artificial Sequence: Synthetic oligonucleotide
agcaggagagaugaaagaa

SEQ ID NO: 3104462 - RNA, 19 nt, Artificial Sequence
  Description of Artificial Sequence: Synthetic oligonucleotide
guaaagagcaaguggggcu

SEQ ID NO: 3104463 - RNA, 19 nt, Artificial Sequence
  Description of Artificial Sequence: Synthetic oligonucleotide
ucccgaggagcucagggaa

SEQ ID NO: 3104464 - RNA, 19 nt, Artificial Sequence
  Description of Artificial Sequence: Synthetic oligonucleotide
cugguaucucaggaaaagc

SEQ ID NO: 3104465 - RNA, 19 nt, Artificial Sequence
  Description of Artificial Sequence: Synthetic oligonucleotide
gugcguggaggguaggaag

SEQ ID NO: 3104466 - RNA, 19 nt, Artificial Sequence
  Description of Artificial Sequence: Synthetic oligonucleotide
agcaacuagucaucaucgu

SEQ ID NO: 3104467 - RNA, 19 nt, Artificial Sequence
  Description of Artificial Sequence: Synthetic oligonucleotide
gaggagcucagggaagugc

SEQ ID NO: 3104468 - RNA, 19 nt, Artificial Sequence
  Description of Artificial Sequence: Synthetic oligonucleotide
agauacggauaagguauag

SEQ ID NO: 3104469 - RNA, 19 nt, Artificial Sequence
  Description of Artificial Sequence: Synthetic oligonucleotide
uagucaucaucgucgucgu

SEQ ID NO: 3104470 - RNA, 19 nt, Artificial Sequence
  Description of Artificial Sequence: Synthetic oligonucleotide
aacugggcugguaucucag

SEQ ID NO: 3104471 - RNA, 19 nt, Artificial Sequence
  Description of Artificial Sequence: Synthetic oligonucleotide
gaccuagugucccgaggag

SEQ ID NO: 3104472 - RNA, 19 nt, Artificial Sequence
  Description of Artificial Sequence: Synthetic oligonucleotide
ucucaccagugaaggagac

SEQ ID NO: 3104473 - RNA, 19 nt, Artificial Sequence
  Description of Artificial Sequence: Synthetic oligonucleotide
ucggcccuauaguaaagaa

SEQ ID NO: 3104474 - RNA, 19 nt, Artificial Sequence
  Description of Artificial Sequence: Synthetic oligonucleotide
caggagagaugaaagaacu

SEQ ID NO: 3104475 - RNA, 19 nt, Artificial Sequence
  Description of Artificial Sequence: Synthetic oligonucleotide
cagugaaggagaccaggac

SEQ ID NO: 3104476 - RNA, 19 nt, Artificial Sequence
  Description of Artificial Sequence: Synthetic oligonucleotide
ggagaccaggaccucaagc

SEQ ID NO: 3104477 - RNA, 19 nt, Artificial Sequence
  Description of Artificial Sequence: Synthetic oligonucleotide
guauaggauagaagcagga

SEQ ID NO: 3104478 - RNA, 19 nt, Artificial Sequence
  Description of Artificial Sequence: Synthetic oligonucleotide
cacguguaaagagcaagug

SEQ ID NO: 3104479 - RNA, 19 nt, Artificial Sequence
  Description of Artificial Sequence: Synthetic oligonucleotide
agaacugggcugguaucuc

SEQ ID NO: 3104480 - RNA, 19 nt, Artificial Sequence
  Description of Artificial Sequence: Synthetic oligonucleotide
  modified_base (12)..(12): a, c, u, g, unknown or other
ggaaaagcagcnccuuuuc

SEQ ID NO: 3104481 - RNA, 19 nt, Artificial Sequence
  Description of Artificial Sequence: Synthetic oligonucleotide
uacagaccacagucggccc

SEQ ID NO: 3104482 - RNA, 19 nt, Artificial Sequence
  Description of Artificial Sequence: Synthetic oligonucleotide
agcacccuguauacagacc

SEQ ID NO: 3104483 - RNA, 19 nt, Artificial Sequence
  Description of Artificial Sequence: Synthetic oligonucleotide
gcacccuguauacagacca

SEQ ID NO: 3104484 - RNA, 19 nt, Artificial Sequence
  Description of Artificial Sequence: Synthetic oligonucleotide
  modified_base (16)..(16): a, c, u, g, unknown or other
cucaggaaaagcagcnccu

SEQ ID NO: 3104485 - RNA, 19 nt, Artificial Sequence
  Description of Artificial Sequence: Synthetic oligonucleotide
gcaacuagucaucaucguc

SEQ ID NO: 3104486 - RNA, 19 nt, Artificial Sequence
  Description of Artificial Sequence: Synthetic oligonucleotide
ccuuuucucaccagugaag

SEQ ID NO: 3104487 - RNA, 19 nt, Artificial Sequence
  Description of Artificial Sequence: Synthetic oligonucleotide
  modified_base (11)..(11): a, c, u, g, unknown or other
gaaaagcagcnccuuuucu

SEQ ID NO: 3104488 - RNA, 19 nt, Artificial Sequence
  Description of Artificial Sequence: Synthetic oligonucleotide
aggaaggcacguguaaaga

SEQ ID NO: 3104489 - RNA, 19 nt, Artificial Sequence
  Description of Artificial Sequence: Synthetic oligonucleotide
ggcacguguaaagagcaag

SEQ ID NO: 3104490 - RNA, 19 nt, Artificial Sequence
  Description of Artificial Sequence: Synthetic oligonucleotide
gaacugggcugguaucuca

SEQ ID NO: 3104491 - RNA, 19 nt, Artificial Sequence
  Description of Artificial Sequence: Synthetic oligonucleotide
acagaccacagucggcccu

SEQ ID NO: 3104492 - RNA, 19 nt, Artificial Sequence
  Description of Artificial Sequence: Synthetic oligonucleotide
cggauaagguauaggauag

SEQ ID NO: 3104493 - RNA, 19 nt, Artificial Sequence
  Description of Artificial Sequence: Synthetic oligonucleotide
uagugucccgaggagcuca

SEQ ID NO: 3104494 - RNA, 19 nt, Artificial Sequence
  Description of Artificial Sequence: Synthetic oligonucleotide
gagcucagggaagugcgug

SEQ ID NO: 3104495 - RNA, 19 nt, Artificial Sequence
  Description of Artificial Sequence: Synthetic oligonucleotide
  modified_base (13)..(13): a, c, u, g, unknown or other
aggaaaagcagcnccuuuu

SEQ ID NO: 3104496 - RNA, 19 nt, Artificial Sequence
  Description of Artificial Sequence: Synthetic oligonucleotide
aggagagaugaaagaacug

SEQ ID NO: 3104497 - RNA, 19 nt, Artificial Sequence
  Description of Artificial Sequence: Synthetic oligonucleotide
caggaccucaagcacccug

SEQ ID NO: 3104498 - RNA, 19 nt, Artificial Sequence
  Description of Artificial Sequence: Synthetic oligonucleotide
gaaggagaccaggaccuca

SEQ ID NO: 3104499 - RNA, 19 nt, Artificial Sequence
  Description of Artificial Sequence: Synthetic oligonucleotide
ucgucuucgucaucaucau

SEQ ID NO: 3104500 - RNA, 19 nt, Artificial Sequence
  Description of Artificial Sequence: Synthetic oligonucleotide
aagugcguggaggguagga

SEQ ID NO: 3104501 - RNA, 19 nt, Artificial Sequence
  Description of Artificial Sequence: Synthetic oligonucleotide
aaggagaccaggaccucaa

SEQ ID NO: 3104502 - RNA, 19 nt, Artificial Sequence
  Description of Artificial Sequence: Synthetic oligonucleotide
  modified_base (15)..(15): a, c, u, g, unknown or other
ucaggaaaagcagcnccuu

SEQ ID NO: 3104503 - RNA, 19 nt, Artificial Sequence
  Description of Artificial Sequence: Synthetic oligonucleotide
gaggguaggaaggcacgug

SEQ ID NO: 3104504 - RNA, 19 nt, Artificial Sequence
  Description of Artificial Sequence: Synthetic oligonucleotide
gugaaggagaccaggaccu

SEQ ID NO: 3104505 - RNA, 19 nt, Artificial Sequence
  Description of Artificial Sequence: Synthetic oligonucleotide
ugaaagaacugggcuggua

SEQ ID NO: 3104506 - RNA, 19 nt, Artificial Sequence
  Description of Artificial Sequence: Synthetic oligonucleotide
cccuguauacagaccacag

SEQ ID NO: 3104507 - RNA, 19 nt, Artificial Sequence
  Description of Artificial Sequence: Synthetic oligonucleotide
gaaugaccuagugucccga

SEQ ID NO: 3104508 - RNA, 19 nt, Artificial Sequence
  Description of Artificial Sequence: Synthetic oligonucleotide
gcaggagagaugaaagaac

SEQ ID NO: 3104509 - RNA, 19 nt, Artificial Sequence
  Description of Artificial Sequence: Synthetic oligonucleotide
cucaccagugaaggagacc

SEQ ID NO: 3104510 - RNA, 19 nt, Artificial Sequence
  Description of Artificial Sequence: Synthetic oligonucleotide
acccuguauacagaccaca

SEQ ID NO: 3104511 - RNA, 19 nt, Artificial Sequence
  Description of Artificial Sequence: Synthetic oligonucleotide
cccuauaguaaagaaugac

SEQ ID NO: 3104512 - RNA, 19 nt, Artificial Sequence
  Description of Artificial Sequence: Synthetic oligonucleotide
  modified_base (2)..(2): a, c, u, g, unknown or other
cnccuuuucucaccaguga

SEQ ID NO: 3104513 - RNA, 19 nt, Artificial Sequence
  Description of Artificial Sequence: Synthetic oligonucleotide
aggagaccaggaccucaag

SEQ ID NO: 3104514 - RNA, 19 nt, Artificial Sequence
  Description of Artificial Sequence: Synthetic oligonucleotide
aggauagaagcaggagaga

SEQ ID NO: 3104515 - RNA, 19 nt, Artificial Sequence
  Description of Artificial Sequence: Synthetic oligonucleotide
guaggaaggcacguguaaa

SEQ ID NO: 3104516 - RNA, 19 nt, Artificial Sequence
  Description of Artificial Sequence: Synthetic oligonucleotide
cucagggaagugcguggag

SEQ ID NO: 3104517 - RNA, 19 nt, Artificial Sequence
  Description of Artificial Sequence: Synthetic oligonucleotide
cacccuguauacagaccac

SEQ ID NO: 3104518 - RNA, 19 nt, Artificial Sequence
  Description of Artificial Sequence: Synthetic oligonucleotide
cugggcugguaucucagga

SEQ ID NO: 3104519 - RNA, 19 nt, Artificial Sequence
  Description of Artificial Sequence: Synthetic oligonucleotide
gguaggaaggcacguguaa

SEQ ID NO: 3104520 - RNA, 19 nt, Artificial Sequence
  Description of Artificial Sequence: Synthetic oligonucleotide
cacagucggcccuauagua

SEQ ID NO: 3104521 - RNA, 19 nt, Artificial Sequence
  Description of Artificial Sequence: Synthetic oligonucleotide
ccucaagcacccuguauac

SEQ ID NO: 3104522 - RNA, 19 nt, Artificial Sequence
  Description of Artificial Sequence: Synthetic oligonucleotide
caagcacccuguauacaga

SEQ ID NO: 3104523 - RNA, 19 nt, Artificial Sequence
  Description of Artificial Sequence: Synthetic oligonucleotide
agugcguggaggguaggaa

SEQ ID NO: 3104524 - RNA, 19 nt, Artificial Sequence
  Description of Artificial Sequence: Synthetic oligonucleotide
acagucggcccuauaguaa

SEQ ID NO: 3104525 - RNA, 19 nt, Artificial Sequence
  Description of Artificial Sequence: Synthetic oligonucleotide
cagucggcccuauaguaaa

SEQ ID NO: 3104526 - RNA, 19 nt, Artificial Sequence
  Description of Artificial Sequence: Synthetic oligonucleotide
gucccgaggagcucaggga

SEQ ID NO: 3104527 - RNA, 19 nt, Artificial Sequence
  Description of Artificial Sequence: Synthetic oligonucleotide
gaagugcguggaggguagg

SEQ ID NO: 3104528 - RNA, 19 nt, Artificial Sequence
  Description of Artificial Sequence: Synthetic oligonucleotide
  modified_base (3)..(3): a, c, u, g, unknown or other
gcnccuuuucucaccagug

SEQ ID NO: 3104529 - RNA, 19 nt, Artificial Sequence
  Description of Artificial Sequence: Synthetic oligonucleotide
ggaagugcguggaggguag

SEQ ID NO: 3104530 - RNA, 19 nt, Artificial Sequence
  Description of Artificial Sequence: Synthetic oligonucleotide
aagagcaaguggggcuggu

SEQ ID NO: 3104531 - RNA, 19 nt, Artificial Sequence
  Description of Artificial Sequence: Synthetic oligonucleotide
ucgucgucgucaucaucau

SEQ ID NO: 3104532 - RNA, 19 nt, Artificial Sequence
  Description of Artificial Sequence: Synthetic oligonucleotide
ugaaggagaccaggaccuc

SEQ ID NO: 3104533 - RNA, 19 nt, Artificial Sequence
  Description of Artificial Sequence: Synthetic oligonucleotide
ggggcugguaggugguugc

SEQ ID NO: 3104534 - RNA, 19 nt, Artificial Sequence
  Description of Artificial Sequence: Synthetic oligonucleotide
  modified_base (6)..(6): a, c, u, g, unknown or other
gcagcnccuuuucucacca

SEQ ID NO: 3104535 - RNA, 19 nt, Artificial Sequence
  Description of Artificial Sequence: Synthetic oligonucleotide
agucggcccuauaguaaag

SEQ ID NO: 3104536 - RNA, 19 nt, Artificial Sequence
  Description of Artificial Sequence: Synthetic oligonucleotide
ggauagaagcaggagagau

SEQ ID NO: 3104537 - RNA, 19 nt, Artificial Sequence
  Description of Artificial Sequence: Synthetic oligonucleotide
gucggcccuauaguaaaga

SEQ ID NO: 3104538 - RNA, 19 nt, Artificial Sequence
  Description of Artificial Sequence: Synthetic oligonucleotide
gggcugguaucucaggaaa

SEQ ID NO: 3104539 - RNA, 19 nt, Artificial Sequence
  Description of Artificial Sequence: Synthetic oligonucleotide
gguaggugguugccauagc

SEQ ID NO: 3104540 - RNA, 19 nt, Artificial Sequence
  Description of Artificial Sequence: Synthetic oligonucleotide
  modified_base (5)..(5): a, c, u, g, unknown or other
cagcnccuuuucucaccag

SEQ ID NO: 3104541 - RNA, 19 nt, Artificial Sequence
  Description of Artificial Sequence: Synthetic oligonucleotide
augaaagaacugggcuggu

SEQ ID NO: 3104542 - RNA, 19 nt, Artificial Sequence
  Description of Artificial Sequence: Synthetic oligonucleotide
caaguggggcugguaggug

SEQ ID NO: 3104543 - RNA, 19 nt, Artificial Sequence
  Description of Artificial Sequence: Synthetic oligonucleotide
aguggggcugguagguggu

SEQ ID NO: 3104544 - RNA, 19 nt, Artificial Sequence
  Description of Artificial Sequence: Synthetic oligonucleotide
agggaagugcguggagggu

SEQ ID NO: 3104545 - RNA, 19 nt, Artificial Sequence
  Description of Artificial Sequence: Synthetic oligonucleotide
gccauagcaacuagucauc

SEQ ID NO: 3104546 - RNA, 19 nt, Artificial Sequence
  Description of Artificial Sequence: Synthetic oligonucleotide
cauagcaacuagucaucau

SEQ ID NO: 3104547 - RNA, 19 nt, Artificial Sequence
  Description of Artificial Sequence: Synthetic oligonucleotide
ucgucgucuucgucaucau

SEQ ID NO: 3104548 - RNA, 19 nt, Artificial Sequence
  Description of Artificial Sequence: Synthetic oligonucleotide
agugucccgaggagcucag

SEQ ID NO: 3104549 - RNA, 19 nt, Artificial Sequence
  Description of Artificial Sequence: Synthetic oligonucleotide
cuagugucccgaggagcuc

SEQ ID NO: 3104550 - RNA, 19 nt, Artificial Sequence
  Description of Artificial Sequence: Synthetic oligonucleotide
gaccucaagcacccuguau

SEQ ID NO: 3104551 - RNA, 19 nt, Artificial Sequence
  Description of Artificial Sequence: Synthetic oligonucleotide
agagcaaguggggcuggua

SEQ ID NO: 3104552 - RNA, 19 nt, Artificial Sequence
  Description of Artificial Sequence: Synthetic oligonucleotide
ccuagugucccgaggagcu

SEQ ID NO: 3104553 - RNA, 19 nt, Artificial Sequence
  Description of Artificial Sequence: Synthetic oligonucleotide
cccgaggagcucagggaag

SEQ ID NO: 3104554 - RNA, 19 nt, Artificial Sequence
  Description of Artificial Sequence: Synthetic oligonucleotide
gcccuauaguaaagaauga

SEQ ID NO: 3104555 - RNA, 19 nt, Artificial Sequence
  Description of Artificial Sequence: Synthetic oligonucleotide
gggaagugcguggagggua

SEQ ID NO: 3104556 - RNA, 19 nt, Artificial Sequence
  Description of Artificial Sequence: Synthetic oligonucleotide
gcguggaggguaggaaggc

SEQ ID NO: 3104557 - RNA, 19 nt, Artificial Sequence
  Description of Artificial Sequence: Synthetic oligonucleotide
gcugguaggugguugccau

SEQ ID NO: 3104558 - RNA, 19 nt, Artificial Sequence
  Description of Artificial Sequence: Synthetic oligonucleotide
gugucccgaggagcucagg

SEQ ID NO: 3104559 - RNA, 19 nt, Artificial Sequence
  Description of Artificial Sequence: Synthetic oligonucleotide
ccauagcaacuagucauca

SEQ ID NO: 3104560 - RNA, 19 nt, Artificial Sequence
  Description of Artificial Sequence: Synthetic oligonucleotide
gcacguguaaagagcaagu

SEQ ID NO: 3104561 - RNA, 19 nt, Artificial Sequence
  Description of Artificial Sequence: Synthetic oligonucleotide
cugguaggugguugccaua

SEQ ID NO: 3104562 - RNA, 19 nt, Artificial Sequence
  Description of Artificial Sequence: Synthetic oligonucleotide
ccuguauacagaccacagu

SEQ ID NO: 3104563 - RNA, 19 nt, Artificial Sequence
  Description of Artificial Sequence: Synthetic oligonucleotide
gguugccauagcaacuagu

SEQ ID NO: 3104564 - RNA, 19 nt, Artificial Sequence
  Description of Artificial Sequence: Synthetic oligonucleotide
ggcugguaucucaggaaaa

SEQ ID NO: 3104565 - RNA, 19 nt, Artificial Sequence
  Description of Artificial Sequence: Synthetic oligonucleotide
ggcugguaggugguugcca

SEQ ID NO: 3104566 - RNA, 19 nt, Artificial Sequence
  Description of Artificial Sequence: Synthetic oligonucleotide
gcaaguggggcugguaggu

SEQ ID NO: 3104567 - RNA, 19 nt, Artificial Sequence
  Description of Artificial Sequence: Synthetic oligonucleotide
gggcugguaggugguugcc

SEQ ID NO: 3104568 - RNA, 19 nt, Artificial Sequence
  Description of Artificial Sequence: Synthetic oligonucleotide
gaccacagucggcccuaua

SEQ ID NO: 3104569 - RNA, 19 nt, Artificial Sequence
  Description of Artificial Sequence: Synthetic oligonucleotide
cagaccacagucggcccua

SEQ ID NO: 3104570 - RNA, 19 nt, Artificial Sequence
  Description of Artificial Sequence: Synthetic oligonucleotide
ggaggguaggaaggcacgu

SEQ ID NO: 3104571 - RNA, 19 nt, Artificial Sequence
  Description of Artificial Sequence: Synthetic oligonucleotide
ggguaggaaggcacgugua

SEQ ID NO: 3104572 - RNA, 19 nt, Artificial Sequence
  Description of Artificial Sequence: Synthetic oligonucleotide
ggaccucaagcacccugua

SEQ ID NO: 3104573 - RNA, 19 nt, Artificial Sequence
  Description of Artificial Sequence: Synthetic oligonucleotide
cgucgucuucgucaucauc

SEQ ID NO: 3104574 - RNA, 19 nt, Artificial Sequence
  Description of Artificial Sequence: Synthetic oligonucleotide
agaccacagucggcccuau

SEQ ID NO: 3104575 - RNA, 19 nt, Artificial Sequence
  Description of Artificial Sequence: Synthetic oligonucleotide
cgucuucgucaucaucauc

SEQ ID NO: 3104576 - RNA, 19 nt, Artificial Sequence
  Description of Artificial Sequence: Synthetic oligonucleotide
ccacagucggcccuauagu

SEQ ID NO: 3104577 - RNA, 19 nt, Artificial Sequence
  Description of Artificial Sequence: Synthetic oligonucleotide
ggagcucagggaagugcgu

SEQ ID NO: 3104578 - RNA, 19 nt, Artificial Sequence
  Description of Artificial Sequence: Synthetic oligonucleotide
cggcccuauaguaaagaau

SEQ ID NO: 3104579 - RNA, 19 nt, Artificial Sequence
  Description of Artificial Sequence: Synthetic oligonucleotide
ccgaggagcucagggaagu

SEQ ID NO: 3104580 - RNA, 19 nt, Artificial Sequence
  Description of Artificial Sequence: Synthetic oligonucleotide
ccaggaccucaagcacccu

SEQ ID NO: 3104581 - RNA, 19 nt, Artificial Sequence
  Description of Artificial Sequence: Synthetic oligonucleotide
  modified_base (1)..(1): a, c, u, g, unknown or other
nccuuuucucaccagugaa

SEQ ID NO: 3104582 - RNA, 19 nt, Artificial Sequence
  Description of Artificial Sequence: Synthetic oligonucleotide
uuaaagaucuguccugucg

SEQ ID NO: 3104583 - RNA, 19 nt, Artificial Sequence
  Description of Artificial Sequence: Synthetic oligonucleotide
aauagcugcaggcccacgc

SEQ ID NO: 3104584 - RNA, 19 nt, Artificial Sequence
  Description of Artificial Sequence: Synthetic oligonucleotide
agcagggugaccgagaucc

SEQ ID NO: 3104585 - RNA, 19 nt, Artificial Sequence
  Description of Artificial Sequence: Synthetic oligonucleotide
acugcugagagacuuaaag

SEQ ID NO: 3104586 - RNA, 19 nt, Artificial Sequence
  Description of Artificial Sequence: Synthetic oligonucleotide
gaagguaugacgcugccug

SEQ ID NO: 3104587 - RNA, 19 nt, Artificial Sequence
  Description of Artificial Sequence: Synthetic oligonucleotide
aaagaucuguccugucgcc

SEQ ID NO: 3104588 - RNA, 19 nt, Artificial Sequence
  Description of Artificial Sequence: Synthetic oligonucleotide
uacacaaauagcugcaggc

SEQ ID NO: 3104589 - RNA, 19 nt, Artificial Sequence
  Description of Artificial Sequence: Synthetic oligonucleotide
uaaagaucuguccugucgc

SEQ ID NO: 3104590 - RNA, 19 nt, Artificial Sequence
  Description of Artificial Sequence: Synthetic oligonucleotide
gagacuuaaagaucugucc

SEQ ID NO: 3104591 - RNA, 19 nt, Artificial Sequence
  Description of Artificial Sequence: Synthetic oligonucleotide
cagaccaguacacaaauag

SEQ ID NO: 3104592 - RNA, 19 nt, Artificial Sequence
  Description of Artificial Sequence: Synthetic oligonucleotide
cuucaggaagguaugacgc

SEQ ID NO: 3104593 - RNA, 19 nt, Artificial Sequence
  Description of Artificial Sequence: Synthetic oligonucleotide
uguccugucgcccacaggu

SEQ ID NO: 3104594 - RNA, 19 nt, Artificial Sequence
  Description of Artificial Sequence: Synthetic oligonucleotide
ucagaaaggaaccgguggc

SEQ ID NO: 3104595 - RNA, 19 nt, Artificial Sequence
  Description of Artificial Sequence: Synthetic oligonucleotide
ugcugagagacuuaaagau

SEQ ID NO: 3104596 - RNA, 19 nt, Artificial Sequence
  Description of Artificial Sequence: Synthetic oligonucleotide
agacuuaaagaucuguccu

SEQ ID NO: 3104597 - RNA, 19 nt, Artificial Sequence
  Description of Artificial Sequence: Synthetic oligonucleotide
accgagauccuucaggaag

SEQ ID NO: 3104598 - RNA, 19 nt, Artificial Sequence
  Description of Artificial Sequence: Synthetic oligonucleotide
gucagaaaggaaccggugg

SEQ ID NO: 3104599 - RNA, 19 nt, Artificial Sequence
  Description of Artificial Sequence: Synthetic oligonucleotide
acacaaauagcugcaggcc

SEQ ID NO: 3104600 - RNA, 19 nt, Artificial Sequence
  Description of Artificial Sequence: Synthetic oligonucleotide
acugucuggggccuucucc

SEQ ID NO: 3104601 - RNA, 19 nt, Artificial Sequence
  Description of Artificial Sequence: Synthetic oligonucleotide
aaccuggccugucaucagc

SEQ ID NO: 3104602 - RNA, 19 nt, Artificial Sequence
  Description of Artificial Sequence: Synthetic oligonucleotide
gacuuaaagaucuguccug

SEQ ID NO: 3104603 - RNA, 19 nt, Artificial Sequence
  Description of Artificial Sequence: Synthetic oligonucleotide
uucuccacugcugagagac

SEQ ID NO: 3104604 - RNA, 19 nt, Artificial Sequence
  Description of Artificial Sequence: Synthetic oligonucleotide
aagaucuguccugucgccc

SEQ ID NO: 3104605 - RNA, 19 nt, Artificial Sequence
  Description of Artificial Sequence: Synthetic oligonucleotide
cacaaauagcugcaggccc

SEQ ID NO: 3104606 - RNA, 19 nt, Artificial Sequence
  Description of Artificial Sequence: Synthetic oligonucleotide
agagacuuaaagaucuguc

SEQ ID NO: 3104607 - RNA, 19 nt, Artificial Sequence
  Description of Artificial Sequence: Synthetic oligonucleotide
guacacaaauagcugcagg

SEQ ID NO: 3104608 - RNA, 19 nt, Artificial Sequence
  Description of Artificial Sequence: Synthetic oligonucleotide
uggccugucaucagcaccc

SEQ ID NO: 3104609 - RNA, 19 nt, Artificial Sequence
  Description of Artificial Sequence: Synthetic oligonucleotide
ugaccgagauccuucagga

SEQ ID NO: 3104610 - RNA, 19 nt, Artificial Sequence
  Description of Artificial Sequence: Synthetic oligonucleotide
augucuccaaggcagcagg

SEQ ID NO: 3104611 - RNA, 19 nt, Artificial Sequence
  Description of Artificial Sequence: Synthetic oligonucleotide
agaccaguacacaaauagc

SEQ ID NO: 3104612 - RNA, 19 nt, Artificial Sequence
  Description of Artificial Sequence: Synthetic oligonucleotide
gugaccgagauccuucagg

SEQ ID NO: 3104613 - RNA, 19 nt, Artificial Sequence
  Description of Artificial Sequence: Synthetic oligonucleotide
aagguaugacgcugccugg

SEQ ID NO: 3104614 - RNA, 19 nt, Artificial Sequence
  Description of Artificial Sequence: Synthetic oligonucleotide
uaugacgcugccugggaca

SEQ ID NO: 3104615 - RNA, 19 nt, Artificial Sequence
  Description of Artificial Sequence: Synthetic oligonucleotide
aggaagguaugacgcugcc

SEQ ID NO: 3104616 - RNA, 19 nt, Artificial Sequence
  Description of Artificial Sequence: Synthetic oligonucleotide
ucaggaagguaugacgcug

SEQ ID NO: 3104617 - RNA, 19 nt, Artificial Sequence
  Description of Artificial Sequence: Synthetic oligonucleotide
ccaguacacaaauagcugc

SEQ ID NO: 3104618 - RNA, 19 nt, Artificial Sequence
  Description of Artificial Sequence: Synthetic oligonucleotide
cugagagacuuaaagaucu

SEQ ID NO: 3104619 - RNA, 19 nt, Artificial Sequence
  Description of Artificial Sequence: Synthetic oligonucleotide
acuuaaagaucuguccugu

SEQ ID NO: 3104620 - RNA, 19 nt, Artificial Sequence
  Description of Artificial Sequence: Synthetic oligonucleotide
agaaaggaaccgguggcuc

SEQ ID NO: 3104621 - RNA, 19 nt, Artificial Sequence
  Description of Artificial Sequence: Synthetic oligonucleotide
uucaggaagguaugacgcu

SEQ ID NO: 3104622 - RNA, 19 nt, Artificial Sequence
  Description of Artificial Sequence: Synthetic oligonucleotide
ccuucaggaagguaugacg

SEQ ID NO: 3104623 - RNA, 19 nt, Artificial Sequence
  Description of Artificial Sequence: Synthetic oligonucleotide
gucaucagcacccgcggcc

SEQ ID NO: 3104624 - RNA, 19 nt, Artificial Sequence
  Description of Artificial Sequence: Synthetic oligonucleotide
gacaagggcugcucgcucc

SEQ ID NO: 3104625 - RNA, 19 nt, Artificial Sequence
  Description of Artificial Sequence: Synthetic oligonucleotide
gaccaguacacaaauagcu

SEQ ID NO: 3104626 - RNA, 19 nt, Artificial Sequence
  Description of Artificial Sequence: Synthetic oligonucleotide
aaaggaaccgguggcucug

SEQ ID NO: 3104627 - RNA, 19 nt, Artificial Sequence
  Description of Artificial Sequence: Synthetic oligonucleotide
aguacacaaauagcugcag

SEQ ID NO: 3104628 - RNA, 19 nt, Artificial Sequence
  Description of Artificial Sequence: Synthetic oligonucleotide
agaucuguccugucgccca

SEQ ID NO: 3104629 - RNA, 19 nt, Artificial Sequence
  Description of Artificial Sequence: Synthetic oligonucleotide
gauccuucaggaagguaug

SEQ ID NO: 3104630 - RNA, 19 nt, Artificial Sequence
  Description of Artificial Sequence: Synthetic oligonucleotide
ggggcuaugucuccaaggc

SEQ ID NO: 3104631 - RNA, 19 nt, Artificial Sequence
  Description of Artificial Sequence: Synthetic oligonucleotide
cugucaucagcacccgcgg

SEQ ID NO: 3104632 - RNA, 19 nt, Artificial Sequence
  Description of Artificial Sequence: Synthetic oligonucleotide
accaguacacaaauagcug

SEQ ID NO: 3104633 - RNA, 19 nt, Artificial Sequence
  Description of Artificial Sequence: Synthetic oligonucleotide
ccugucaucagcacccgcg

SEQ ID NO: 3104634 - RNA, 19 nt, Artificial Sequence
  Description of Artificial Sequence: Synthetic oligonucleotide
caggaagguaugacgcugc

SEQ ID NO: 3104635 - RNA, 19 nt, Artificial Sequence
  Description of Artificial Sequence: Synthetic oligonucleotide
caggucagaaaggaaccgg

SEQ ID NO: 3104636 - RNA, 19 nt, Artificial Sequence
  Description of Artificial Sequence: Synthetic oligonucleotide
auagcugcaggcccacgcu

SEQ ID NO: 3104637 - RNA, 19 nt, Artificial Sequence
  Description of Artificial Sequence: Synthetic oligonucleotide
cuuaaagaucuguccuguc

SEQ ID NO: 3104638 - RNA, 19 nt, Artificial Sequence
  Description of Artificial Sequence: Synthetic oligonucleotide
guggcucuguccugggagg

SEQ ID NO: 3104639 - RNA, 19 nt, Artificial Sequence
  Description of Artificial Sequence: Synthetic oligonucleotide
ugucaucagcacccgcggc

SEQ ID NO: 3104640 - RNA, 19 nt, Artificial Sequence
  Description of Artificial Sequence: Synthetic oligonucleotide
cuggccugucaucagcacc

SEQ ID NO: 3104641 - RNA, 19 nt, Artificial Sequence
  Description of Artificial Sequence: Synthetic oligonucleotide
gguggcucuguccugggag

SEQ ID NO: 3104642 - RNA, 19 nt, Artificial Sequence
  Description of Artificial Sequence: Synthetic oligonucleotide
cugccugggacacugucug

SEQ ID NO: 3104643 - RNA, 19 nt, Artificial Sequence
  Description of Artificial Sequence: Synthetic oligonucleotide
caguacacaaauagcugca

SEQ ID NO: 3104644 - RNA, 19 nt, Artificial Sequence
  Description of Artificial Sequence: Synthetic oligonucleotide
agguaugacgcugccuggg

SEQ ID NO: 3104645 - RNA, 19 nt, Artificial Sequence
  Description of Artificial Sequence: Synthetic oligonucleotide
cacacagaccaguacacaa

SEQ ID NO: 3104646 - RNA, 19 nt, Artificial Sequence
  Description of Artificial Sequence: Synthetic oligonucleotide
aaauagcugcaggcccacg

SEQ ID NO: 3104647 - RNA, 19 nt, Artificial Sequence
  Description of Artificial Sequence: Synthetic oligonucleotide
ucaucagcacccgcggccc

SEQ ID NO: 3104648 - RNA, 19 nt, Artificial Sequence
  Description of Artificial Sequence: Synthetic oligonucleotide
augacgcugccugggacac

SEQ ID NO: 3104649 - RNA, 19 nt, Artificial Sequence
  Description of Artificial Sequence: Synthetic oligonucleotide
ugcaggcccacgcugcuuc

SEQ ID NO: 3104650 - RNA, 19 nt, Artificial Sequence
  Description of Artificial Sequence: Synthetic oligonucleotide
uccuucaggaagguaugac

SEQ ID NO: 3104651 - RNA, 19 nt, Artificial Sequence
  Description of Artificial Sequence: Synthetic oligonucleotide
aagggcugcucgcuccugu

SEQ ID NO: 3104652 - RNA, 19 nt, Artificial Sequence
  Description of Artificial Sequence: Synthetic oligonucleotide
gacgcugccugggacacug

SEQ ID NO: 3104653 - RNA, 19 nt, Artificial Sequence
  Description of Artificial Sequence: Synthetic oligonucleotide
cucuguccugggaggaggg

SEQ ID NO: 3104654 - RNA, 19 nt, Artificial Sequence
  Description of Artificial Sequence: Synthetic oligonucleotide
agggugaccgagauccuuc

SEQ ID NO: 3104655 - RNA, 19 nt, Artificial Sequence
  Description of Artificial Sequence: Synthetic oligonucleotide
gaaccgguggcucuguccu

SEQ ID NO: 3104656 - RNA, 19 nt, Artificial Sequence
  Description of Artificial Sequence: Synthetic oligonucleotide
uagcugcaggcccacgcug

SEQ ID NO: 3104657 - RNA, 19 nt, Artificial Sequence
  Description of Artificial Sequence: Synthetic oligonucleotide
gaaccuggccugucaucag

SEQ ID NO: 3104658 - RNA, 19 nt, Artificial Sequence
  Description of Artificial Sequence: Synthetic oligonucleotide
agcugcaggcccacgcugc

SEQ ID NO: 3104659 - RNA, 19 nt, Artificial Sequence
  Description of Artificial Sequence: Synthetic oligonucleotide
cccaggucagaaaggaacc

SEQ ID NO: 3104660 - RNA, 19 nt, Artificial Sequence
  Description of Artificial Sequence: Synthetic oligonucleotide
ccccaggucagaaaggaac

SEQ ID NO: 3104661 - RNA, 19 nt, Artificial Sequence
  Description of Artificial Sequence: Synthetic oligonucleotide
cacgcugcuuccagcgugc

SEQ ID NO: 3104662 - RNA, 19 nt, Artificial Sequence
  Description of Artificial Sequence: Synthetic oligonucleotide
gaaaggaaccgguggcucu

SEQ ID NO: 3104663 - RNA, 19 nt, Artificial Sequence
  Description of Artificial Sequence: Synthetic oligonucleotide
aggucagaaaggaaccggu

SEQ ID NO: 3104664 - RNA, 19 nt, Artificial Sequence
  Description of Artificial Sequence: Synthetic oligonucleotide
ucuguccugggaggagggg

SEQ ID NO: 3104665 - RNA, 19 nt, Artificial Sequence
  Description of Artificial Sequence: Synthetic oligonucleotide
cuuccagcgugcugacaag

SEQ ID NO: 3104666 - RNA, 19 nt, Artificial Sequence
  Description of Artificial Sequence: Synthetic oligonucleotide
cugucuggggccuucucca

SEQ ID NO: 3104667 - RNA, 19 nt, Artificial Sequence
  Description of Artificial Sequence: Synthetic oligonucleotide
ugacaagggcugcucgcuc

SEQ ID NO: 3104668 - RNA, 19 nt, Artificial Sequence
  Description of Artificial Sequence: Synthetic oligonucleotide
cuccaaggcagcaggguga

SEQ ID NO: 3104669 - RNA, 19 nt, Artificial Sequence
  Description of Artificial Sequence: Synthetic oligonucleotide
gagagacuuaaagaucugu

SEQ ID NO: 3104670 - RNA, 19 nt, Artificial Sequence
  Description of Artificial Sequence: Synthetic oligonucleotide
gcugcuuccagcgugcuga

SEQ ID NO: 3104671 - RNA, 19 nt, Artificial Sequence
  Description of Artificial Sequence: Synthetic oligonucleotide
ugccugggacacugucugg

SEQ ID NO: 3104672 - RNA, 19 nt, Artificial Sequence
  Description of Artificial Sequence: Synthetic oligonucleotide
ggaaccgguggcucugucc

SEQ ID NO: 3104673 - RNA, 19 nt, Artificial Sequence
  Description of Artificial Sequence: Synthetic oligonucleotide
acaagggcugcucgcuccu

SEQ ID NO: 3104674 - RNA, 19 nt, Artificial Sequence
  Description of Artificial Sequence: Synthetic oligonucleotide
uccacugcugagagacuua

SEQ ID NO: 3104675 - RNA, 19 nt, Artificial Sequence
  Description of Artificial Sequence: Synthetic oligonucleotide
uccaaggcagcagggugac

SEQ ID NO: 3104676 - RNA, 19 nt, Artificial Sequence
  Description of Artificial Sequence: Synthetic oligonucleotide
gcuuccagcgugcugacaa

SEQ ID NO: 3104677 - RNA, 19 nt, Artificial Sequence
  Description of Artificial Sequence: Synthetic oligonucleotide
gcugacaagggcugcucgc

SEQ ID NO: 3104678 - RNA, 19 nt, Artificial Sequence
  Description of Artificial Sequence: Synthetic oligonucleotide
gaucuguccugucgcccac

SEQ ID NO: 3104679 - RNA, 19 nt, Artificial Sequence
  Description of Artificial Sequence: Synthetic oligonucleotide
ccuucuccacugcugagag

SEQ ID NO: 3104680 - RNA, 19 nt, Artificial Sequence
  Description of Artificial Sequence: Synthetic oligonucleotide
aaccgguggcucuguccug

SEQ ID NO: 3104681 - RNA, 19 nt, Artificial Sequence
  Description of Artificial Sequence: Synthetic oligonucleotide
caaauagcugcaggcccac

SEQ ID NO: 3104682 - RNA, 19 nt, Artificial Sequence
  Description of Artificial Sequence: Synthetic oligonucleotide
uggggccuucuccacugcu

SEQ ID NO: 3104683 - RNA, 19 nt, Artificial Sequence
  Description of Artificial Sequence: Synthetic oligonucleotide
ugucuggggccuucuccac

SEQ ID NO: 3104684 - RNA, 19 nt, Artificial Sequence
  Description of Artificial Sequence: Synthetic oligonucleotide
uccccaggucagaaaggaa

SEQ ID NO: 3104685 - RNA, 19 nt, Artificial Sequence
  Description of Artificial Sequence: Synthetic oligonucleotide
ucuccacugcugagagacu

SEQ ID NO: 3104686 - RNA, 19 nt, Artificial Sequence
  Description of Artificial Sequence: Synthetic oligonucleotide
aggcccacgcugcuuccag

SEQ ID NO: 3104687 - RNA, 19 nt, Artificial Sequence
  Description of Artificial Sequence: Synthetic oligonucleotide
gcccacgcugcuuccagcg

SEQ ID NO: 3104688 - RNA, 19 nt, Artificial Sequence
  Description of Artificial Sequence: Synthetic oligonucleotide
aggaaccgguggcucuguc

SEQ ID NO: 3104689 - RNA, 19 nt, Artificial Sequence
  Description of Artificial Sequence: Synthetic oligonucleotide
ggucagaaaggaaccggug

SEQ ID NO: 3104690 - RNA, 19 nt, Artificial Sequence
  Description of Artificial Sequence: Synthetic oligonucleotide
agcgugcugacaagggcug

SEQ ID NO: 3104691 - RNA, 19 nt, Artificial Sequence
  Description of Artificial Sequence: Synthetic oligonucleotide
cccacacagaccaguacac

SEQ ID NO: 3104692 - RNA, 19 nt, Artificial Sequence
  Description of Artificial Sequence: Synthetic oligonucleotide
acugggaaccuggccuguc

SEQ ID NO: 3104693 - RNA, 19 nt, Artificial Sequence
  Description of Artificial Sequence: Synthetic oligonucleotide
gccugggacacugucuggg

SEQ ID NO: 3104694 - RNA, 19 nt, Artificial Sequence
  Description of Artificial Sequence: Synthetic oligonucleotide
auccuucaggaagguauga

SEQ ID NO: 3104695 - RNA, 19 nt, Artificial Sequence
  Description of Artificial Sequence: Synthetic oligonucleotide
ccagcgugcugacaagggc

SEQ ID NO: 3104696 - RNA, 19 nt, Artificial Sequence
  Description of Artificial Sequence: Synthetic oligonucleotide
ccaggucagaaaggaaccg

SEQ ID NO: 3104697 - RNA, 19 nt, Artificial Sequence
  Description of Artificial Sequence: Synthetic oligonucleotide
gggcgagccacugggaacc

SEQ ID NO: 3104698 - RNA, 19 nt, Artificial Sequence
  Description of Artificial Sequence: Synthetic oligonucleotide
aaggaaccgguggcucugu

SEQ ID NO: 3104699 - RNA, 19 nt, Artificial Sequence
  Description of Artificial Sequence: Synthetic oligonucleotide
gguaugacgcugccuggga

SEQ ID NO: 3104700 - RNA, 19 nt, Artificial Sequence
  Description of Artificial Sequence: Synthetic oligonucleotide
gccacugggaaccuggccu

SEQ ID NO: 3104701 - RNA, 19 nt, Artificial Sequence
  Description of Artificial Sequence: Synthetic oligonucleotide
cagcgugcugacaagggcu

SEQ ID NO: 3104702 - RNA, 19 nt, Artificial Sequence
  Description of Artificial Sequence: Synthetic oligonucleotide
ggugaccgagauccuucag

SEQ ID NO: 3104703 - RNA, 19 nt, Artificial Sequence
  Description of Artificial Sequence: Synthetic oligonucleotide
gaccgagauccuucaggaa

SEQ ID NO: 3104704 - RNA, 19 nt, Artificial Sequence
  Description of Artificial Sequence: Synthetic oligonucleotide
uggcucuguccugggagga

SEQ ID NO: 3104705 - RNA, 19 nt, Artificial Sequence
  Description of Artificial Sequence: Synthetic oligonucleotide
cacagaccaguacacaaau

SEQ ID NO: 3104706 - RNA, 19 nt, Artificial Sequence
  Description of Artificial Sequence: Synthetic oligonucleotide
gacacugucuggggccuuc

SEQ ID NO: 3104707 - RNA, 19 nt, Artificial Sequence
  Description of Artificial Sequence: Synthetic oligonucleotide
gcuaugucuccaaggcagc

SEQ ID NO: 3104708 - RNA, 19 nt, Artificial Sequence
  Description of Artificial Sequence: Synthetic oligonucleotide
accuggccugucaucagca

SEQ ID NO: 3104709 - RNA, 19 nt, Artificial Sequence
  Description of Artificial Sequence: Synthetic oligonucleotide
cugggaaccuggccuguca

SEQ ID NO: 3104710 - RNA, 19 nt, Artificial Sequence
  Description of Artificial Sequence: Synthetic oligonucleotide
gggccuucuccacugcuga

SEQ ID NO: 3104711 - RNA, 19 nt, Artificial Sequence
  Description of Artificial Sequence: Synthetic oligonucleotide
ccccacacagaccaguaca

SEQ ID NO: 3104712 - RNA, 19 nt, Artificial Sequence
  Description of Artificial Sequence: Synthetic oligonucleotide
acagaccaguacacaaaua

SEQ ID NO: 3104713 - RNA, 19 nt, Artificial Sequence
  Description of Artificial Sequence: Synthetic oligonucleotide
gggcuaugucuccaaggca

SEQ ID NO: 3104714 - RNA, 19 nt, Artificial Sequence
  Description of Artificial Sequence: Synthetic oligonucleotide
caucagcacccgcggcccc

SEQ ID NO: 3104715 - RNA, 19 nt, Artificial Sequence
  Description of Artificial Sequence: Synthetic oligonucleotide
cugcuuccagcgugcugac

SEQ ID NO: 3104716 - RNA, 19 nt, Artificial Sequence
  Description of Artificial Sequence: Synthetic oligonucleotide
ggggcgagccacugggaac

SEQ ID NO: 3104717 - RNA, 19 nt, Artificial Sequence
  Description of Artificial Sequence: Synthetic oligonucleotide
guccugucgcccacaggug

SEQ ID NO: 3104718 - RNA, 19 nt, Artificial Sequence
  Description of Artificial Sequence: Synthetic oligonucleotide
ccacgcugcuuccagcgug

SEQ ID NO: 3104719 - RNA, 19 nt, Artificial Sequence
  Description of Artificial Sequence: Synthetic oligonucleotide
cuggggccuucuccacugc

SEQ ID NO: 3104720 - RNA, 19 nt, Artificial Sequence
  Description of Artificial Sequence: Synthetic oligonucleotide
cuucuccacugcugagaga

SEQ ID NO: 3104721 - RNA, 19 nt, Artificial Sequence
  Description of Artificial Sequence: Synthetic oligonucleotide
ggccuucuccacugcugag

SEQ ID NO: 3104722 - RNA, 19 nt, Artificial Sequence
  Description of Artificial Sequence: Synthetic oligonucleotide
cagaaaggaaccgguggcu

SEQ ID NO: 3104723 - RNA, 19 nt, Artificial Sequence
  Description of Artificial Sequence: Synthetic oligonucleotide
ugcuuccagcgugcugaca

SEQ ID NO: 3104724 - RNA, 19 nt, Artificial Sequence
  Description of Artificial Sequence: Synthetic oligonucleotide
ggggccuucuccacugcug

SEQ ID NO: 3104725 - RNA, 19 nt, Artificial Sequence
  Description of Artificial Sequence: Synthetic oligonucleotide
gggugaccgagauccuuca

SEQ ID NO: 3104726 - RNA, 19 nt, Artificial Sequence
  Description of Artificial Sequence: Synthetic oligonucleotide
gggaaccuggccugucauc

SEQ ID NO: 3104727 - RNA, 19 nt, Artificial Sequence
  Description of Artificial Sequence: Synthetic oligonucleotide
cacugucuggggccuucuc

SEQ ID NO: 3104728 - RNA, 19 nt, Artificial Sequence
  Description of Artificial Sequence: Synthetic oligonucleotide
gugcugacaagggcugcuc

SEQ ID NO: 3104729 - RNA, 19 nt, Artificial Sequence
  Description of Artificial Sequence: Synthetic oligonucleotide
cugacaagggcugcucgcu

SEQ ID NO: 3104730 - RNA, 19 nt, Artificial Sequence
  Description of Artificial Sequence: Synthetic oligonucleotide
aucuguccugucgcccaca

SEQ ID NO: 3104731 - RNA, 19 nt, Artificial Sequence
  Description of Artificial Sequence: Synthetic oligonucleotide
cacugcugagagacuuaaa

SEQ ID NO: 3104732 - RNA, 19 nt, Artificial Sequence
  Description of Artificial Sequence: Synthetic oligonucleotide
cagcagggugaccgagauc

SEQ ID NO: 3104733 - RNA, 19 nt, Artificial Sequence
  Description of Artificial Sequence: Synthetic oligonucleotide
ggccugucaucagcacccg

SEQ ID NO: 3104734 - RNA, 19 nt, Artificial Sequence
  Description of Artificial Sequence: Synthetic oligonucleotide
caagggcugcucgcuccug

SEQ ID NO: 3104735 - RNA, 19 nt, Artificial Sequence
  Description of Artificial Sequence: Synthetic oligonucleotide
ggcccacgcugcuuccagc

SEQ ID NO: 3104736 - RNA, 19 nt, Artificial Sequence
  Description of Artificial Sequence: Synthetic oligonucleotide
gccugucaucagcacccgc

SEQ ID NO: 3104737 - RNA, 19 nt, Artificial Sequence
  Description of Artificial Sequence: Synthetic oligonucleotide
ugacgcugccugggacacu

SEQ ID NO: 3104738 - RNA, 19 nt, Artificial Sequence
  Description of Artificial Sequence: Synthetic oligonucleotide
ggaagguaugacgcugccu

SEQ ID NO: 3104739 - RNA, 19 nt, Artificial Sequence
  Description of Artificial Sequence: Synthetic oligonucleotide
ggcagcagggugaccgaga

SEQ ID NO: 3104740 - RNA, 19 nt, Artificial Sequence
  Description of Artificial Sequence: Synthetic oligonucleotide
acgcugcuuccagcgugcu

SEQ ID NO: 3104741 - RNA, 19 nt, Artificial Sequence
  Description of Artificial Sequence: Synthetic oligonucleotide
gcgugcugacaagggcugc

SEQ ID NO: 3104742 - RNA, 19 nt, Artificial Sequence
  Description of Artificial Sequence: Synthetic oligonucleotide
caggcccacgcugcuucca

SEQ ID NO: 3104743 - RNA, 19 nt, Artificial Sequence
  Description of Artificial Sequence: Synthetic oligonucleotide
cgcugccugggacacuguc

SEQ ID NO: 3104744 - RNA, 19 nt, Artificial Sequence
  Description of Artificial Sequence: Synthetic oligonucleotide
gcugcaggcccacgcugcu

SEQ ID NO: 3104745 - RNA, 19 nt, Artificial Sequence
  Description of Artificial Sequence: Synthetic oligonucleotide
cagggugaccgagauccuu

SEQ ID NO: 3104746 - RNA, 19 nt, Artificial Sequence
  Description of Artificial Sequence: Synthetic oligonucleotide
cgcugcuuccagcgugcug

SEQ ID NO: 3104747 - RNA, 19 nt, Artificial Sequence
  Description of Artificial Sequence: Synthetic oligonucleotide
acgcugccugggacacugu

SEQ ID NO: 3104748 - RNA, 19 nt, Artificial Sequence
  Description of Artificial Sequence: Synthetic oligonucleotide
cacugggaaccuggccugu

SEQ ID NO: 3104749 - RNA, 19 nt, Artificial Sequence
  Description of Artificial Sequence: Synthetic oligonucleotide
gggcugcucgcuccuguuu

SEQ ID NO: 3104750 - RNA, 19 nt, Artificial Sequence
  Description of Artificial Sequence: Synthetic oligonucleotide
gcagggugaccgagauccu

SEQ ID NO: 3104751 - RNA, 19 nt, Artificial Sequence
  Description of Artificial Sequence: Synthetic oligonucleotide
cccacgcugcuuccagcgu

SEQ ID NO: 3104752 - RNA, 19 nt, Artificial Sequence
  Description of Artificial Sequence: Synthetic oligonucleotide
ggacacugucuggggccuu

SEQ ID NO: 3104753 - RNA, 19 nt, Artificial Sequence
  Description of Artificial Sequence: Synthetic oligonucleotide
gaugaugaguccuuuaucc

SEQ ID NO: 3104754 - RNA, 19 nt, Artificial Sequence
  Description of Artificial Sequence: Synthetic oligonucleotide
uaaaacugaagguucaggc

SEQ ID NO: 3104755 - RNA, 19 nt, Artificial Sequence
  Description of Artificial Sequence: Synthetic oligonucleotide
agaggaauaaauccccagc

SEQ ID NO: 3104756 - RNA, 19 nt, Artificial Sequence
  Description of Artificial Sequence: Synthetic oligonucleotide
aaauccagaugaugagucc

SEQ ID NO: 3104757 - RNA, 19 nt, Artificial Sequence
  Description of Artificial Sequence: Synthetic oligonucleotide
uucaccauggugacgacgg

SEQ ID NO: 3104758 - RNA, 19 nt, Artificial Sequence
  Description of Artificial Sequence: Synthetic oligonucleotide
gaggaauaaauccccagcg

SEQ ID NO: 3104759 - RNA, 19 nt, Artificial Sequence
  Description of Artificial Sequence: Synthetic oligonucleotide
uccuuuauccccaaagcag

SEQ ID NO: 3104760 - RNA, 19 nt, Artificial Sequence
  Description of Artificial Sequence: Synthetic oligonucleotide
uccaccacgacgacgagcg

SEQ ID NO: 3104761 - RNA, 19 nt, Artificial Sequence
  Description of Artificial Sequence: Synthetic oligonucleotide
uacacuuccauguuggaug

SEQ ID NO: 3104762 - RNA, 19 nt, Artificial Sequence
  Description of Artificial Sequence: Synthetic oligonucleotide
uuccaaauccagaugauga

SEQ ID NO: 3104763 - RNA, 19 nt, Artificial Sequence
  Description of Artificial Sequence: Synthetic oligonucleotide
aguccuuuauccccaaagc

SEQ ID NO: 3104764 - RNA, 19 nt, Artificial Sequence
  Description of Artificial Sequence: Synthetic oligonucleotide
ucacgagaggaauaaaucc

SEQ ID NO: 3104765 - RNA, 19 nt, Artificial Sequence
  Description of Artificial Sequence: Synthetic oligonucleotide
uuggauggcuuccaaaucc

SEQ ID NO: 3104766 - RNA, 19 nt, Artificial Sequence
  Description of Artificial Sequence: Synthetic oligonucleotide
aaacugaagguucaggcau

SEQ ID NO: 3104767 - RNA, 19 nt, Artificial Sequence
  Description of Artificial Sequence: Synthetic oligonucleotide
augaugaguccuuuauccc

SEQ ID NO: 3104768 - RNA, 19 nt, Artificial Sequence
  Description of Artificial Sequence: Synthetic oligonucleotide
guaaaucccagguaaauca

SEQ ID NO: 3104769 - RNA, 19 nt, Artificial Sequence
  Description of Artificial Sequence: Synthetic oligonucleotide
ugaagguucaggcauucca

SEQ ID NO: 3104770 - RNA, 19 nt, Artificial Sequence
  Description of Artificial Sequence: Synthetic oligonucleotide
uuaaaacugaagguucagg

SEQ ID NO: 3104771 - RNA, 19 nt, Artificial Sequence
  Description of Artificial Sequence: Synthetic oligonucleotide
gcaggcuuaaaacugaagg

SEQ ID NO: 3104772 - RNA, 19 nt, Artificial Sequence
  Description of Artificial Sequence: Synthetic oligonucleotide
ugaugaguccuuuaucccc

SEQ ID NO: 3104773 - RNA, 19 nt, Artificial Sequence
  Description of Artificial Sequence: Synthetic oligonucleotide
caaagcaggcuuaaaacug

SEQ ID NO: 3104774 - RNA, 19 nt, Artificial Sequence
  Description of Artificial Sequence: Synthetic oligonucleotide
auaaauccccagcggaucg

SEQ ID NO: 3104775 - RNA, 19 nt, Artificial Sequence
  Description of Artificial Sequence: Synthetic oligonucleotide
cacgagaggaauaaauccc

SEQ ID NO: 3104776 - RNA, 19 nt, Artificial Sequence
  Description of Artificial Sequence: Synthetic oligonucleotide
aggaauaaauccccagcgg

SEQ ID NO: 3104777 - RNA, 19 nt, Artificial Sequence
  Description of Artificial Sequence: Synthetic oligonucleotide
cauuccaggaucugcaccc

SEQ ID NO: 3104778 - RNA, 19 nt, Artificial Sequence
  Description of Artificial Sequence: Synthetic oligonucleotide
acaagucuccaccacgacg

SEQ ID NO: 3104779 - RNA, 19 nt, Artificial Sequence
  Description of Artificial Sequence: Synthetic oligonucleotide
aaggacaagucuccaccac

SEQ ID NO: 3104780 - RNA, 19 nt, Artificial Sequence
  Description of Artificial Sequence: Synthetic oligonucleotide
aaacuggccgcccuugaag

SEQ ID NO: 3104781 - RNA, 19 nt, Artificial Sequence
  Description of Artificial Sequence: Synthetic oligonucleotide
uccaaauccagaugaugag

SEQ ID NO: 3104782 - RNA, 19 nt, Artificial Sequence
  Description of Artificial Sequence: Synthetic oligonucleotide
gaguccuuuauccccaaag

SEQ ID NO: 3104783 - RNA, 19 nt, Artificial Sequence
  Description of Artificial Sequence: Synthetic oligonucleotide
agaugaugaguccuuuauc

SEQ ID NO: 3104784 - RNA, 19 nt, Artificial Sequence
  Description of Artificial Sequence: Synthetic oligonucleotide
caaauccagaugaugaguc

SEQ ID NO: 3104785 - RNA, 19 nt, Artificial Sequence
  Description of Artificial Sequence: Synthetic oligonucleotide
ucccagguaaaucacgaga

SEQ ID NO: 3104786 - RNA, 19 nt, Artificial Sequence
  Description of Artificial Sequence: Synthetic oligonucleotide
uaaaucacgagaggaauaa

SEQ ID NO: 3104787 - RNA, 19 nt, Artificial Sequence
  Description of Artificial Sequence: Synthetic oligonucleotide
aaaucccagguaaaucacg

SEQ ID NO: 3104788 - RNA, 19 nt, Artificial Sequence
  Description of Artificial Sequence: Synthetic oligonucleotide
acgagaggaauaaaucccc

SEQ ID NO: 3104789 - RNA, 19 nt, Artificial Sequence
  Description of Artificial Sequence: Synthetic oligonucleotide
aucacgagaggaauaaauc

SEQ ID NO: 3104790 - RNA, 19 nt, Artificial Sequence
  Description of Artificial Sequence: Synthetic oligonucleotide
gagaggaauaaauccccag

SEQ ID NO: 3104791 - RNA, 19 nt, Artificial Sequence
  Description of Artificial Sequence: Synthetic oligonucleotide
aggacaagucuccaccacg

SEQ ID NO: 3104792 - RNA, 19 nt, Artificial Sequence
  Description of Artificial Sequence: Synthetic oligonucleotide
uaaaucccagguaaaucac

SEQ ID NO: 3104793 - RNA, 19 nt, Artificial Sequence
  Description of Artificial Sequence: Synthetic oligonucleotide
uugaagagcugcugcagcc

SEQ ID NO: 3104794 - RNA, 19 nt, Artificial Sequence
  Description of Artificial Sequence: Synthetic oligonucleotide
aauccagaugaugaguccu

SEQ ID NO: 3104795 - RNA, 19 nt, Artificial Sequence
  Description of Artificial Sequence: Synthetic oligonucleotide
aaucacgagaggaauaaau

SEQ ID NO: 3104796 - RNA, 19 nt, Artificial Sequence
  Description of Artificial Sequence: Synthetic oligonucleotide
uuugcucagcuucaccaug

SEQ ID NO: 3104797 - RNA, 19 nt, Artificial Sequence
  Description of Artificial Sequence: Synthetic oligonucleotide
acacuuccauguuggaugg

SEQ ID NO: 3104798 - RNA, 19 nt, Artificial Sequence
  Description of Artificial Sequence: Synthetic oligonucleotide
gaagguucaggcauuccag

SEQ ID NO: 3104799 - RNA, 19 nt, Artificial Sequence
  Description of Artificial Sequence: Synthetic oligonucleotide
gugacgacgggccagagga

SEQ ID NO: 3104800 - RNA, 19 nt, Artificial Sequence
  Description of Artificial Sequence: Synthetic oligonucleotide
cagaggaaggacaagucuc

SEQ ID NO: 3104801 - RNA, 19 nt, Artificial Sequence
  Description of Artificial Sequence: Synthetic oligonucleotide
aggaaggacaagucuccac

SEQ ID NO: 3104802 - RNA, 19 nt, Artificial Sequence
  Description of Artificial Sequence: Synthetic oligonucleotide
caagucuccaccacgacga

SEQ ID NO: 3104803 - RNA, 19 nt, Artificial Sequence
  Description of Artificial Sequence: Synthetic oligonucleotide
uuggcuucuuugcucagcu

SEQ ID NO: 3104804 - RNA, 19 nt, Artificial Sequence
  Description of Artificial Sequence: Synthetic oligonucleotide
ggaaggacaagucuccacc

SEQ ID NO: 3104805 - RNA, 19 nt, Artificial Sequence
  Description of Artificial Sequence: Synthetic oligonucleotide
aaucccagguaaaucacga

SEQ ID NO: 3104806 - RNA, 19 nt, Artificial Sequence
  Description of Artificial Sequence: Synthetic oligonucleotide
aaagcaggcuuaaaacuga

SEQ ID NO: 3104807 - RNA, 19 nt, Artificial Sequence
  Description of Artificial Sequence: Synthetic oligonucleotide
accauggugacgacgggcc

SEQ ID NO: 3104808 - RNA, 19 nt, Artificial Sequence
  Description of Artificial Sequence: Synthetic oligonucleotide
aacuggccgcccuugaaga

SEQ ID NO: 3104809 - RNA, 19 nt, Artificial Sequence
  Description of Artificial Sequence: Synthetic oligonucleotide
cuugaagagcugcugcagc

SEQ ID NO: 3104810 - RNA, 19 nt, Artificial Sequence
  Description of Artificial Sequence: Synthetic oligonucleotide
cuuuauccccaaagcaggc

SEQ ID NO: 3104811 - RNA, 19 nt, Artificial Sequence
  Description of Artificial Sequence: Synthetic oligonucleotide
ggauacacuuccauguugg

SEQ ID NO: 3104812 - RNA, 19 nt, Artificial Sequence
  Description of Artificial Sequence: Synthetic oligonucleotide
ccuuuauccccaaagcagg

SEQ ID NO: 3104813 - RNA, 19 nt, Artificial Sequence
  Description of Artificial Sequence: Synthetic oligonucleotide
aggauacacuuccauguug

SEQ ID NO: 3104814 - RNA, 19 nt, Artificial Sequence
  Description of Artificial Sequence: Synthetic oligonucleotide
cagcggaucgcaaacuggc

SEQ ID NO: 3104815 - RNA, 19 nt, Artificial Sequence
  Description of Artificial Sequence: Synthetic oligonucleotide
cuuaaaacugaagguucag

SEQ ID NO: 3104816 - RNA, 19 nt, Artificial Sequence
  Description of Artificial Sequence: Synthetic oligonucleotide
ggaauaaauccccagcgga

SEQ ID NO: 3104817 - RNA, 19 nt, Artificial Sequence
  Description of Artificial Sequence: Synthetic oligonucleotide
uggauggcuuccaaaucca

SEQ ID NO: 3104818 - RNA, 19 nt, Artificial Sequence
  Description of Artificial Sequence: Synthetic oligonucleotide
uuauccccaaagcaggcuu

SEQ ID NO: 3104819 - RNA, 19 nt, Artificial Sequence
  Description of Artificial Sequence: Synthetic oligonucleotide
gaaggacaagucuccacca

SEQ ID NO: 3104820 - RNA, 19 nt, Artificial Sequence
  Description of Artificial Sequence: Synthetic oligonucleotide
guccuuuauccccaaagca

SEQ ID NO: 3104821 - RNA, 19 nt, Artificial Sequence
  Description of Artificial Sequence: Synthetic oligonucleotide
aagucuccaccacgacgac

SEQ ID NO: 3104822 - RNA, 19 nt, Artificial Sequence
  Description of Artificial Sequence: Synthetic oligonucleotide
uucaggcauuccaggaucu

SEQ ID NO: 3104823 - RNA, 19 nt, Artificial Sequence
  Description of Artificial Sequence: Synthetic oligonucleotide
cuuccaaauccagaugaug

SEQ ID NO: 3104824 - RNA, 19 nt, Artificial Sequence
  Description of Artificial Sequence: Synthetic oligonucleotide
cccagguaaaucacgagag

SEQ ID NO: 3104825 - RNA, 19 nt, Artificial Sequence
  Description of Artificial Sequence: Synthetic oligonucleotide
gaugaguccuuuaucccca

SEQ ID NO: 3104826 - RNA, 19 nt, Artificial Sequence
  Description of Artificial Sequence: Synthetic oligonucleotide
guucaggcauuccaggauc

SEQ ID NO: 3104827 - RNA, 19 nt, Artificial Sequence
  Description of Artificial Sequence: Synthetic oligonucleotide
aggcuuaaaacugaagguu

SEQ ID NO: 3104828 - RNA, 19 nt, Artificial Sequence
  Description of Artificial Sequence: Synthetic oligonucleotide
uccauguuggauggcuucc

SEQ ID NO: 3104829 - RNA, 19 nt, Artificial Sequence
  Description of Artificial Sequence: Synthetic oligonucleotide
acuuccauguuggauggcu

SEQ ID NO: 3104830 - RNA, 19 nt, Artificial Sequence
  Description of Artificial Sequence: Synthetic oligonucleotide
ggcuuccaaauccagauga

SEQ ID NO: 3104831 - RNA, 19 nt, Artificial Sequence
  Description of Artificial Sequence: Synthetic oligonucleotide
acgacgacgagcgcguccg

SEQ ID NO: 3104832 - RNA, 19 nt, Artificial Sequence
  Description of Artificial Sequence: Synthetic oligonucleotide
uuuauccccaaagcaggcu

SEQ ID NO: 3104833 - RNA, 19 nt, Artificial Sequence
  Description of Artificial Sequence: Synthetic oligonucleotide
uuccauguuggauggcuuc

SEQ ID NO: 3104834 - RNA, 19 nt, Artificial Sequence
  Description of Artificial Sequence: Synthetic oligonucleotide
cugcaccccucguaaaucc

SEQ ID NO: 3104835 - RNA, 19 nt, Artificial Sequence
  Description of Artificial Sequence: Synthetic oligonucleotide
agguucaggcauuccagga

SEQ ID NO: 3104836 - RNA, 19 nt, Artificial Sequence
  Description of Artificial Sequence: Synthetic oligonucleotide
cccaaagcaggcuuaaaac

SEQ ID NO: 3104837 - RNA, 19 nt, Artificial Sequence
  Description of Artificial Sequence: Synthetic oligonucleotide
cagguaaaucacgagagga

SEQ ID NO: 3104838 - RNA, 19 nt, Artificial Sequence
  Description of Artificial Sequence: Synthetic oligonucleotide
acugaagguucaggcauuc

SEQ ID NO: 3104839 - RNA, 19 nt, Artificial Sequence
  Description of Artificial Sequence: Synthetic oligonucleotide
aucccagguaaaucacgag

SEQ ID NO: 3104840 - RNA, 19 nt, Artificial Sequence
  Description of Artificial Sequence: Synthetic oligonucleotide
ucaccauggugacgacggg

SEQ ID NO: 3104841 - RNA, 19 nt, Artificial Sequence
  Description of Artificial Sequence: Synthetic oligonucleotide
ucguaaaucccagguaaau

SEQ ID NO: 3104842 - RNA, 19 nt, Artificial Sequence
  Description of Artificial Sequence: Synthetic oligonucleotide
guuggauggcuuccaaauc

SEQ ID NO: 3104843 - RNA, 19 nt, Artificial Sequence
  Description of Artificial Sequence: Synthetic oligonucleotide
gauggcuuccaaauccaga

SEQ ID NO: 3104844 - RNA, 19 nt, Artificial Sequence
  Description of Artificial Sequence: Synthetic oligonucleotide
gacgacgggccagaggaag

SEQ ID NO: 3104845 - RNA, 19 nt, Artificial Sequence
  Description of Artificial Sequence: Synthetic oligonucleotide
auuccaggaucugcacccc

SEQ ID NO: 3104846 - RNA, 19 nt, Artificial Sequence
  Description of Artificial Sequence: Synthetic oligonucleotide
ugcaccccucguaaauccc

SEQ ID NO: 3104847 - RNA, 19 nt, Artificial Sequence
  Description of Artificial Sequence: Synthetic oligonucleotide
acgacgagcgcguccggag

SEQ ID NO: 3104848 - RNA, 19 nt, Artificial Sequence
  Description of Artificial Sequence: Synthetic oligonucleotide
caccacgacgacgagcgcg

SEQ ID NO: 3104849 - RNA, 19 nt, Artificial Sequence
  Description of Artificial Sequence: Synthetic oligonucleotide
cuucaccauggugacgacg

SEQ ID NO: 3104850 - RNA, 19 nt, Artificial Sequence
  Description of Artificial Sequence: Synthetic oligonucleotide
gucuccaccacgacgacga

SEQ ID NO: 3104851 - RNA, 19 nt, Artificial Sequence
  Description of Artificial Sequence: Synthetic oligonucleotide
aaauccccagcggaucgca

SEQ ID NO: 3104852 - RNA, 19 nt, Artificial Sequence
  Description of Artificial Sequence: Synthetic oligonucleotide
gacgagcgcguccggagcc

SEQ ID NO: 3104853 - RNA, 19 nt, Artificial Sequence
  Description of Artificial Sequence: Synthetic oligonucleotide
ugaagagcugcugcagccu

SEQ ID NO: 3104854 - RNA, 19 nt, Artificial Sequence
  Description of Artificial Sequence: Synthetic oligonucleotide
caggcauuccaggaucugc

SEQ ID NO: 3104855 - RNA, 19 nt, Artificial Sequence
  Description of Artificial Sequence: Synthetic oligonucleotide
agcggaucgcaaacuggcc

SEQ ID NO: 3104856 - RNA, 19 nt, Artificial Sequence
  Description of Artificial Sequence: Synthetic oligonucleotide
uccccagcggaucgcaaac

SEQ ID NO: 3104857 - RNA, 19 nt, Artificial Sequence
  Description of Artificial Sequence: Synthetic oligonucleotide
uccaggaucugcaccccuc

SEQ ID NO: 3104858 - RNA, 19 nt, Artificial Sequence
  Description of Artificial Sequence: Synthetic oligonucleotide
caggcuuaaaacugaaggu

SEQ ID NO: 3104859 - RNA, 19 nt, Artificial Sequence
  Description of Artificial Sequence: Synthetic oligonucleotide
aaaucacgagaggaauaaa

SEQ ID NO: 3104860 - RNA, 19 nt, Artificial Sequence
  Description of Artificial Sequence: Synthetic oligonucleotide
aucugcaccccucguaaau

SEQ ID NO: 3104861 - RNA, 19 nt, Artificial Sequence
  Description of Artificial Sequence: Synthetic oligonucleotide
auacacuuccauguuggau

SEQ ID NO: 3104862 - RNA, 19 nt, Artificial Sequence
  Description of Artificial Sequence: Synthetic oligonucleotide
agguaaaucacgagaggaa

SEQ ID NO: 3104863 - RNA, 19 nt, Artificial Sequence
  Description of Artificial Sequence: Synthetic oligonucleotide
gacaagucuccaccacgac

SEQ ID NO: 3104864 - RNA, 19 nt, Artificial Sequence
  Description of Artificial Sequence: Synthetic oligonucleotide
cuuggcuucuuugcucagc

SEQ ID NO: 3104865 - RNA, 19 nt, Artificial Sequence
  Description of Artificial Sequence: Synthetic oligonucleotide
uauccccaaagcaggcuua

SEQ ID NO: 3104866 - RNA, 19 nt, Artificial Sequence
  Description of Artificial Sequence: Synthetic oligonucleotide
aucgcaaacuggccgcccu

SEQ ID NO: 3104867 - RNA, 19 nt, Artificial Sequence
  Description of Artificial Sequence: Synthetic oligonucleotide
uaaauccccagcggaucgc

SEQ ID NO: 3104868 - RNA, 19 nt, Artificial Sequence
  Description of Artificial Sequence: Synthetic oligonucleotide
ggcuuaaaacugaagguuc

SEQ ID NO: 3104869 - RNA, 19 nt, Artificial Sequence
  Description of Artificial Sequence: Synthetic oligonucleotide
ucugcaccccucguaaauc

SEQ ID NO: 3104870 - RNA, 19 nt, Artificial Sequence
  Description of Artificial Sequence: Synthetic oligonucleotide
uggccgcccuugaagagcu

SEQ ID NO: 3104871 - RNA, 19 nt, Artificial Sequence
  Description of Artificial Sequence: Synthetic oligonucleotide
auguuggauggcuuccaaa

SEQ ID NO: 3104872 - RNA, 19 nt, Artificial Sequence
  Description of Artificial Sequence: Synthetic oligonucleotide
acuggccgcccuugaagag

SEQ ID NO: 3104873 - RNA, 19 nt, Artificial Sequence
  Description of Artificial Sequence: Synthetic oligonucleotide
cauggugacgacgggccag

SEQ ID NO: 3104874 - RNA, 19 nt, Artificial Sequence
  Description of Artificial Sequence: Synthetic oligonucleotide
gaauaaauccccagcggau

SEQ ID NO: 3104875 - RNA, 19 nt, Artificial Sequence
  Description of Artificial Sequence: Synthetic oligonucleotide
agcccgacgggagcggagc

SEQ ID NO: 3104876 - RNA, 19 nt, Artificial Sequence
  Description of Artificial Sequence: Synthetic oligonucleotide
ccagguaaaucacgagagg

SEQ ID NO: 3104877 - RNA, 19 nt, Artificial Sequence
  Description of Artificial Sequence: Synthetic oligonucleotide
accccucguaaaucccagg

SEQ ID NO: 3104878 - RNA, 19 nt, Artificial Sequence
  Description of Artificial Sequence: Synthetic oligonucleotide
guaaaucacgagaggaaua

SEQ ID NO: 3104879 - RNA, 19 nt, Artificial Sequence
  Description of Artificial Sequence: Synthetic oligonucleotide
gcauuccaggaucugcacc

SEQ ID NO: 3104880 - RNA, 19 nt, Artificial Sequence
  Description of Artificial Sequence: Synthetic oligonucleotide
uccggagcccgacgggagc

SEQ ID NO: 3104881 - RNA, 19 nt, Artificial Sequence
  Description of Artificial Sequence: Synthetic oligonucleotide
caccauggugacgacgggc

SEQ ID NO: 3104882 - RNA, 19 nt, Artificial Sequence
  Description of Artificial Sequence: Synthetic oligonucleotide
aggcauuccaggaucugca

SEQ ID NO: 3104883 - RNA, 19 nt, Artificial Sequence
  Description of Artificial Sequence: Synthetic oligonucleotide
caccccucguaaaucccag

SEQ ID NO: 3104884 - RNA, 19 nt, Artificial Sequence
  Description of Artificial Sequence: Synthetic oligonucleotide
ugcagccucugcuuggcuu

SEQ ID NO: 3104885 - RNA, 19 nt, Artificial Sequence
  Description of Artificial Sequence: Synthetic oligonucleotide
agcaggcuuaaaacugaag

SEQ ID NO: 3104886 - RNA, 19 nt, Artificial Sequence
  Description of Artificial Sequence: Synthetic oligonucleotide
ucaggcauuccaggaucug

SEQ ID NO: 3104887 - RNA, 19 nt, Artificial Sequence
  Description of Artificial Sequence: Synthetic oligonucleotide
ggugacgacgggccagagg

SEQ ID NO: 3104888 - RNA, 19 nt, Artificial Sequence
  Description of Artificial Sequence: Synthetic oligonucleotide
ugaguccuuuauccccaaa

SEQ ID NO: 3104889 - RNA, 19 nt, Artificial Sequence
  Description of Artificial Sequence: Synthetic oligonucleotide
cuggccgcccuugaagagc

SEQ ID NO: 3104890 - RNA, 19 nt, Artificial Sequence
  Description of Artificial Sequence: Synthetic oligonucleotide
ccagcggaucgcaaacugg

SEQ ID NO: 3104891 - RNA, 19 nt, Artificial Sequence
  Description of Artificial Sequence: Synthetic oligonucleotide
cucguaaaucccagguaaa

SEQ ID NO: 3104892 - RNA, 19 nt, Artificial Sequence
  Description of Artificial Sequence: Synthetic oligonucleotide
gcuuaaaacugaagguuca

SEQ ID NO: 3104893 - RNA, 19 nt, Artificial Sequence
  Description of Artificial Sequence: Synthetic oligonucleotide
cacgacgacgagcgcgucc

SEQ ID NO: 3104894 - RNA, 19 nt, Artificial Sequence
  Description of Artificial Sequence: Synthetic oligonucleotide
aagcaggcuuaaaacugaa

SEQ ID NO: 3104895 - RNA, 19 nt, Artificial Sequence
  Description of Artificial Sequence: Synthetic oligonucleotide
ggaucugcaccccucguaa

SEQ ID NO: 3104896 - RNA, 19 nt, Artificial Sequence
  Description of Artificial Sequence: Synthetic oligonucleotide
ccucguaaaucccagguaa

SEQ ID NO: 3104897 - RNA, 19 nt, Artificial Sequence
  Description of Artificial Sequence: Synthetic oligonucleotide
ucuccaccacgacgacgag

SEQ ID NO: 3104898 - RNA, 19 nt, Artificial Sequence
  Description of Artificial Sequence: Synthetic oligonucleotide
cagaugaugaguccuuuau

SEQ ID NO: 3104899 - RNA, 19 nt, Artificial Sequence
  Description of Artificial Sequence: Synthetic oligonucleotide
auccccagcggaucgcaaa

SEQ ID NO: 3104900 - RNA, 19 nt, Artificial Sequence
  Description of Artificial Sequence: Synthetic oligonucleotide
acgacgggccagaggaagg

SEQ ID NO: 3104901 - RNA, 19 nt, Artificial Sequence
  Description of Artificial Sequence: Synthetic oligonucleotide
gaucgcaaacuggccgccc

SEQ ID NO: 3104902 - RNA, 19 nt, Artificial Sequence
  Description of Artificial Sequence: Synthetic oligonucleotide
gcccuugaagagcugcugc

SEQ ID NO: 3104903 - RNA, 19 nt, Artificial Sequence
  Description of Artificial Sequence: Synthetic oligonucleotide
cugaagguucaggcauucc

SEQ ID NO: 3104904 - RNA, 19 nt, Artificial Sequence
  Description of Artificial Sequence: Synthetic oligonucleotide
gaggaaggacaagucucca

SEQ ID NO: 3104905 - RNA, 19 nt, Artificial Sequence
  Description of Artificial Sequence: Synthetic oligonucleotide
uccagaugaugaguccuuu

SEQ ID NO: 3104906 - RNA, 19 nt, Artificial Sequence
  Description of Artificial Sequence: Synthetic oligonucleotide
cuccaccacgacgacgagc

SEQ ID NO: 3104907 - RNA, 19 nt, Artificial Sequence
  Description of Artificial Sequence: Synthetic oligonucleotide
ccaggaucugcaccccucg

SEQ ID NO: 3104908 - RNA, 19 nt, Artificial Sequence
  Description of Artificial Sequence: Synthetic oligonucleotide
acgagcgcguccggagccc

SEQ ID NO: 3104909 - RNA, 19 nt, Artificial Sequence
  Description of Artificial Sequence: Synthetic oligonucleotide
ccaaagcaggcuuaaaacu

SEQ ID NO: 3104910 - RNA, 19 nt, Artificial Sequence
  Description of Artificial Sequence: Synthetic oligonucleotide
gaucugcaccccucguaaa

SEQ ID NO: 3104911 - RNA, 19 nt, Artificial Sequence
  Description of Artificial Sequence: Synthetic oligonucleotide
accacgacgacgagcgcgu

SEQ ID NO: 3104912 - RNA, 19 nt, Artificial Sequence
  Description of Artificial Sequence: Synthetic oligonucleotide
gguaaaucacgagaggaau

SEQ ID NO: 3104913 - RNA, 19 nt, Artificial Sequence
  Description of Artificial Sequence: Synthetic oligonucleotide
ggacaagucuccaccacga

SEQ ID NO: 3104914 - RNA, 19 nt, Artificial Sequence
  Description of Artificial Sequence: Synthetic oligonucleotide
gaggauacacuuccauguu

SEQ ID NO: 3104915 - RNA, 19 nt, Artificial Sequence
  Description of Artificial Sequence: Synthetic oligonucleotide
ugacgacgggccagaggaa

SEQ ID NO: 3104916 - RNA, 19 nt, Artificial Sequence
  Description of Artificial Sequence: Synthetic oligonucleotide
agcgcguccggagcccgac

SEQ ID NO: 3104917 - RNA, 19 nt, Artificial Sequence
  Description of Artificial Sequence: Synthetic oligonucleotide
cauguuggauggcuuccaa

SEQ ID NO: 3104918 - RNA, 19 nt, Artificial Sequence
  Description of Artificial Sequence: Synthetic oligonucleotide
acgggccagaggaaggaca

SEQ ID NO: 3104919 - RNA, 19 nt, Artificial Sequence
  Description of Artificial Sequence: Synthetic oligonucleotide
ggauggcuuccaaauccag

SEQ ID NO: 3104920 - RNA, 19 nt, Artificial Sequence
  Description of Artificial Sequence: Synthetic oligonucleotide
augaguccuuuauccccaa

SEQ ID NO: 3104921 - RNA, 19 nt, Artificial Sequence
  Description of Artificial Sequence: Synthetic oligonucleotide
cguaaaucccagguaaauc

SEQ ID NO: 3104922 - RNA, 19 nt, Artificial Sequence
  Description of Artificial Sequence: Synthetic oligonucleotide
auggugacgacgggccaga

SEQ ID NO: 3104923 - RNA, 19 nt, Artificial Sequence
  Description of Artificial Sequence: Synthetic oligonucleotide
gcucagcuucaccauggug

SEQ ID NO: 3104924 - RNA, 19 nt, Artificial Sequence
  Description of Artificial Sequence: Synthetic oligonucleotide
ucgcaaacuggccgcccuu

SEQ ID NO: 3104925 - RNA, 19 nt, Artificial Sequence
  Description of Artificial Sequence: Synthetic oligonucleotide
caaacuggccgcccuugaa

SEQ ID NO: 3104926 - RNA, 19 nt, Artificial Sequence
  Description of Artificial Sequence: Synthetic oligonucleotide
gacgggccagaggaaggac

SEQ ID NO: 3104927 - RNA, 19 nt, Artificial Sequence
  Description of Artificial Sequence: Synthetic oligonucleotide
auccagaugaugaguccuu

SEQ ID NO: 3104928 - RNA, 19 nt, Artificial Sequence
  Description of Artificial Sequence: Synthetic oligonucleotide
gacgacgagcgcguccgga

SEQ ID NO: 3104929 - RNA, 19 nt, Artificial Sequence
  Description of Artificial Sequence: Synthetic oligonucleotide
auccccaaagcaggcuuaa

SEQ ID NO: 3104930 - RNA, 19 nt, Artificial Sequence
  Description of Artificial Sequence: Synthetic oligonucleotide
aauccccagcggaucgcaa

SEQ ID NO: 3104931 - RNA, 19 nt, Artificial Sequence
  Description of Artificial Sequence: Synthetic oligonucleotide
gguucaggcauuccaggau

SEQ ID NO: 3104932 - RNA, 19 nt, Artificial Sequence
  Description of Artificial Sequence: Synthetic oligonucleotide
ccccaaagcaggcuuaaaa

SEQ ID NO: 3104933 - RNA, 19 nt, Artificial Sequence
  Description of Artificial Sequence: Synthetic oligonucleotide
ggaucgcaaacuggccgcc

SEQ ID NO: 3104934 - RNA, 19 nt, Artificial Sequence
  Description of Artificial Sequence: Synthetic oligonucleotide
guccggagcccgacgggag

SEQ ID NO: 3104935 - RNA, 19 nt, Artificial Sequence
  Description of Artificial Sequence: Synthetic oligonucleotide
uggugacgacgggccagag

SEQ ID NO: 3104936 - RNA, 19 nt, Artificial Sequence
  Description of Artificial Sequence: Synthetic oligonucleotide
gccagaggaaggacaaguc

SEQ ID NO: 3104937 - RNA, 19 nt, Artificial Sequence
  Description of Artificial Sequence: Synthetic oligonucleotide
uccccaaagcaggcuuaaa

SEQ ID NO: 3104938 - RNA, 19 nt, Artificial Sequence
  Description of Artificial Sequence: Synthetic oligonucleotide
gagcccgacgggagcggag

SEQ ID NO: 3104939 - RNA, 19 nt, Artificial Sequence
  Description of Artificial Sequence: Synthetic oligonucleotide
cccuugaagagcugcugca

SEQ ID NO: 3104940 - RNA, 19 nt, Artificial Sequence
  Description of Artificial Sequence: Synthetic oligonucleotide
cacuuccauguuggauggc

SEQ ID NO: 3104941 - RNA, 19 nt, Artificial Sequence
  Description of Artificial Sequence: Synthetic oligonucleotide
gcuuggcuucuuugcucag

SEQ ID NO: 3104942 - RNA, 19 nt, Artificial Sequence
  Description of Artificial Sequence: Synthetic oligonucleotide
gcugcagccucugcuuggc

SEQ ID NO: 3104943 - RNA, 19 nt, Artificial Sequence
  Description of Artificial Sequence: Synthetic oligonucleotide
gccgcccuugaagagcugc

SEQ ID NO: 3104944 - RNA, 19 nt, Artificial Sequence
  Description of Artificial Sequence: Synthetic oligonucleotide
ggccagaggaaggacaagu

SEQ ID NO: 3104945 - RNA, 19 nt, Artificial Sequence
  Description of Artificial Sequence: Synthetic oligonucleotide
cuuccauguuggauggcuu

SEQ ID NO: 3104946 - RNA, 19 nt, Artificial Sequence
  Description of Artificial Sequence: Synthetic oligonucleotide
gcaaacuggccgcccuuga

SEQ ID NO: 3104947 - RNA, 19 nt, Artificial Sequence
  Description of Artificial Sequence: Synthetic oligonucleotide
cgagaggaauaaaucccca

SEQ ID NO: 3104948 - RNA, 19 nt, Artificial Sequence
  Description of Artificial Sequence: Synthetic oligonucleotide
gcguccggagcccgacggg

SEQ ID NO: 3104949 - RNA, 19 nt, Artificial Sequence
  Description of Artificial Sequence: Synthetic oligonucleotide
ccaaauccagaugaugagu

SEQ ID NO: 3104950 - RNA, 19 nt, Artificial Sequence
  Description of Artificial Sequence: Synthetic oligonucleotide
gcaccccucguaaauccca

SEQ ID NO: 3104951 - RNA, 19 nt, Artificial Sequence
  Description of Artificial Sequence: Synthetic oligonucleotide
cgcguccggagcccgacgg

SEQ ID NO: 3104952 - RNA, 19 nt, Artificial Sequence
  Description of Artificial Sequence: Synthetic oligonucleotide
ccagaugaugaguccuuua

SEQ ID NO: 3104953 - RNA, 19 nt, Artificial Sequence
  Description of Artificial Sequence: Synthetic oligonucleotide
ccggagcccgacgggagcg

SEQ ID NO: 3104954 - RNA, 19 nt, Artificial Sequence
  Description of Artificial Sequence: Synthetic oligonucleotide
gggccagaggaaggacaag

SEQ ID NO: 3104955 - RNA, 19 nt, Artificial Sequence
  Description of Artificial Sequence: Synthetic oligonucleotide
cgacgagcgcguccggagc

SEQ ID NO: 3104956 - RNA, 19 nt, Artificial Sequence
  Description of Artificial Sequence: Synthetic oligonucleotide
cccucguaaaucccaggua

SEQ ID NO: 3104957 - RNA, 19 nt, Artificial Sequence
  Description of Artificial Sequence: Synthetic oligonucleotide
ccccucguaaaucccaggu

SEQ ID NO: 3104958 - RNA, 19 nt, Artificial Sequence
  Description of Artificial Sequence: Synthetic oligonucleotide
ccauguuggauggcuucca

SEQ ID NO: 3104959 - RNA, 19 nt, Artificial Sequence
  Description of Artificial Sequence: Synthetic oligonucleotide
caggaucugcaccccucgu

SEQ ID NO: 3104960 - RNA, 19 nt, Artificial Sequence
  Description of Artificial Sequence: Synthetic oligonucleotide
gcgcguccggagcccgacg

SEQ ID NO: 3104961 - RNA, 19 nt, Artificial Sequence
  Description of Artificial Sequence: Synthetic oligonucleotide
cgggccagaggaaggacaa

SEQ ID NO: 3104962 - RNA, 19 nt, Artificial Sequence
  Description of Artificial Sequence: Synthetic oligonucleotide
cgcaaacuggccgcccuug

SEQ ID NO: 3104963 - RNA, 19 nt, Artificial Sequence
  Description of Artificial Sequence: Synthetic oligonucleotide
ccauggugacgacgggcca

SEQ ID NO: 3104964 - RNA, 19 nt, Artificial Sequence
  Description of Artificial Sequence: Synthetic oligonucleotide
gagcgcguccggagcccga

SEQ ID NO: 3104965 - RNA, 19 nt, Artificial Sequence
  Description of Artificial Sequence: Synthetic oligonucleotide
cgcccuugaagagcugcug

SEQ ID NO: 3104966 - RNA, 19 nt, Artificial Sequence
  Description of Artificial Sequence: Synthetic oligonucleotide
ggagcccgacgggagcgga

SEQ ID NO: 3104967 - RNA, 19 nt, Artificial Sequence
  Description of Artificial Sequence: Synthetic oligonucleotide
ccaccacgacgacgagcgc

SEQ ID NO: 3104968 - RNA, 19 nt, Artificial Sequence
  Description of Artificial Sequence: Synthetic oligonucleotide
cgagcgcguccggagcccg

SEQ ID NO: 3104969 - RNA, 19 nt, Artificial Sequence
  Description of Artificial Sequence: Synthetic oligonucleotide
cugcagccucugcuuggcu

SEQ ID NO: 3104970 - RNA, 19 nt, Artificial Sequence
  Description of Artificial Sequence: Synthetic oligonucleotide
gccucugcuuggcuucuuu

SEQ ID NO: 3104971 - RNA, 19 nt, Artificial Sequence
  Description of Artificial Sequence: Synthetic oligonucleotide
cgacgggccagaggaagga

SEQ ID NO: 3104972 - RNA, 19 nt, Artificial Sequence
  Description of Artificial Sequence: Synthetic oligonucleotide
cgacgacgagcgcguccgg

SEQ ID NO: 3104973 - RNA, 19 nt, Artificial Sequence
  Description of Artificial Sequence: Synthetic oligonucleotide
ccgcccuugaagagcugcu

SEQ ID NO: 3104974 - RNA, 19 nt, Artificial Sequence
  Description of Artificial Sequence: Synthetic oligonucleotide
cguccggagcccgacggga

SEQ ID NO: 3104975 - RNA, 19 nt, Artificial Sequence
  Description of Artificial Sequence: Synthetic oligonucleotide
cggagcccgacgggagcgg

SEQ ID NO: 3104976 - RNA, 19 nt, Artificial Sequence
  Description of Artificial Sequence: Synthetic oligonucleotide
ggccgcccuugaagagcug

SEQ ID NO: 3104977 - RNA, 19 nt, Artificial Sequence
  Description of Artificial Sequence: Synthetic oligonucleotide
ccacgacgacgagcgcguc

SEQ ID NO: 3104978 - RNA, 19 nt, Artificial Sequence
  Description of Artificial Sequence: Synthetic oligonucleotide
ccccagcggaucgcaaacu

SEQ ID NO: 3104979 - RNA, 19 nt, Artificial Sequence
  Description of Artificial Sequence: Synthetic oligonucleotide
uccuucauaauuuacagga

SEQ ID NO: 3104980 - RNA, 19 nt, Artificial Sequence
  Description of Artificial Sequence: Synthetic oligonucleotide
cuuaaagcgacauuccugg

SEQ ID NO: 3104981 - RNA, 19 nt, Artificial Sequence
  Description of Artificial Sequence: Synthetic oligonucleotide
aaagcgacauuccuggcac

SEQ ID NO: 3104982 - RNA, 19 nt, Artificial Sequence
  Description of Artificial Sequence: Synthetic oligonucleotide
agagagaagcuauuugugc

SEQ ID NO: 3104983 - RNA, 19 nt, Artificial Sequence
  Description of Artificial Sequence: Synthetic oligonucleotide
uuuuccuucauaauuuaca

SEQ ID NO: 3104984 - RNA, 19 nt, Artificial Sequence
  Description of Artificial Sequence: Synthetic oligonucleotide
uugucuaugacacauuuuc

SEQ ID NO: 3104985 - RNA, 19 nt, Artificial Sequence
  Description of Artificial Sequence: Synthetic oligonucleotide
uuuccuucauaauuuacag

SEQ ID NO: 3104986 - RNA, 19 nt, Artificial Sequence
  Description of Artificial Sequence: Synthetic oligonucleotide
auuucugcagcucuucucg

SEQ ID NO: 3104987 - RNA, 19 nt, Artificial Sequence
  Description of Artificial Sequence: Synthetic oligonucleotide
ucauccagcaccaagucug

SEQ ID NO: 3104988 - RNA, 19 nt, Artificial Sequence
  Description of Artificial Sequence: Synthetic oligonucleotide
gagagagugagagagagag

SEQ ID NO: 3104989 - RNA, 19 nt, Artificial Sequence
  Description of Artificial Sequence: Synthetic oligonucleotide
aauugauuucugcagcucu

SEQ ID NO: 3104990 - RNA, 19 nt, Artificial Sequence
  Description of Artificial Sequence: Synthetic oligonucleotide
auaauuuacaggaauaaga

SEQ ID NO: 3104991 - RNA, 19 nt, Artificial Sequence
  Description of Artificial Sequence: Synthetic oligonucleotide
agagaagcuauuugugccc

SEQ ID NO: 3104992 - RNA, 19 nt, Artificial Sequence
  Description of Artificial Sequence: Synthetic oligonucleotide
gagagagagagugagagag

SEQ ID NO: 3104993 - RNA, 19 nt, Artificial Sequence
  Description of Artificial Sequence: Synthetic oligonucleotide
gagagugagagagagagag

SEQ ID NO: 3104994 - RNA, 19 nt, Artificial Sequence
  Description of Artificial Sequence: Synthetic oligonucleotide
ucuuaaagcgacauuccug

SEQ ID NO: 3104995 - RNA, 19 nt, Artificial Sequence
  Description of Artificial Sequence: Synthetic oligonucleotide
agagagagaagcuauuugu

SEQ ID NO: 3104996 - RNA, 19 nt, Artificial Sequence
  Description of Artificial Sequence: Synthetic oligonucleotide
gagagaagcuauuugugcc

SEQ ID NO: 3104997 - RNA, 19 nt, Artificial Sequence
  Description of Artificial Sequence: Synthetic oligonucleotide
uuucuuaaagcgacauucc

SEQ ID NO: 3104998 - RNA, 19 nt, Artificial Sequence
  Description of Artificial Sequence: Synthetic oligonucleotide
uccucuaucagcuuccgcu

SEQ ID NO: 3104999 - RNA, 19 nt, Artificial Sequence
  Description of Artificial Sequence: Synthetic oligonucleotide
uguugccaugccaacauag

SEQ ID NO: 3105000 - RNA, 19 nt, Artificial Sequence
  Description of Artificial Sequence: Synthetic oligonucleotide
gagagagagagagugagag

SEQ ID NO: 3105001 - RNA, 19 nt, Artificial Sequence
  Description of Artificial Sequence: Synthetic oligonucleotide
ucugguuugugcccaauug

SEQ ID NO: 3105002 - RNA, 19 nt, Artificial Sequence
  Description of Artificial Sequence: Synthetic oligonucleotide
uucauaauuuacaggaaua

SEQ ID NO: 3105003 - RNA, 19 nt, Artificial Sequence
  Description of Artificial Sequence: Synthetic oligonucleotide
ucagcuuccgcuuggcuag

SEQ ID NO: 3105004 - RNA, 19 nt, Artificial Sequence
  Description of Artificial Sequence: Synthetic oligonucleotide
agcuauuugugccccauuc

SEQ ID NO: 3105005 - RNA, 19 nt, Artificial Sequence
  Description of Artificial Sequence: Synthetic oligonucleotide
gacacauuuuccuucauaa

SEQ ID NO: 3105006 - RNA, 19 nt, Artificial Sequence
  Description of Artificial Sequence: Synthetic oligonucleotide
uaaagcgacauuccuggca

SEQ ID NO: 3105007 - RNA, 19 nt, Artificial Sequence
  Description of Artificial Sequence: Synthetic oligonucleotide
gugacuuugucuaugacac

SEQ ID NO: 3105008 - RNA, 19 nt, Artificial Sequence
  Description of Artificial Sequence: Synthetic oligonucleotide
agagagaggggagagagag

SEQ ID NO: 3105009 - RNA, 19 nt, Artificial Sequence
  Description of Artificial Sequence: Synthetic oligonucleotide
uuccuucauaauuuacagg

SEQ ID NO: 3105010 - RNA, 19 nt, Artificial Sequence
  Description of Artificial Sequence: Synthetic oligonucleotide
uaugacacauuuuccuuca

SEQ ID NO: 3105011 - RNA, 19 nt, Artificial Sequence
  Description of Artificial Sequence: Synthetic oligonucleotide
ugccaugccaacauagaug

SEQ ID NO: 3105012 - RNA, 19 nt, Artificial Sequence
  Description of Artificial Sequence: Synthetic oligonucleotide
ucugcagcucuucucgccg

SEQ ID NO: 3105013 - RNA, 19 nt, Artificial Sequence
  Description of Artificial Sequence: Synthetic oligonucleotide
ugucuaugacacauuuucc

SEQ ID NO: 3105014 - RNA, 19 nt, Artificial Sequence
  Description of Artificial Sequence: Synthetic oligonucleotide
aacauagaugcauuucuua

SEQ ID NO: 3105015 - RNA, 19 nt, Artificial Sequence
  Description of Artificial Sequence: Synthetic oligonucleotide
ucauaauuuacaggaauaa

SEQ ID NO: 3105016 - RNA, 19 nt, Artificial Sequence
  Description of Artificial Sequence: Synthetic oligonucleotide
gugagagagagagagaagc

SEQ ID NO: 3105017 - RNA, 19 nt, Artificial Sequence
  Description of Artificial Sequence: Synthetic oligonucleotide
agagaggggagagagagag

SEQ ID NO: 3105018 - RNA, 19 nt, Artificial Sequence
  Description of Artificial Sequence: Synthetic oligonucleotide
uucuuaaagcgacauuccu

SEQ ID NO: 3105019 - RNA, 19 nt, Artificial Sequence
  Description of Artificial Sequence: Synthetic oligonucleotide
augcauuucuuaaagcgac

SEQ ID NO: 3105020 - RNA, 19 nt, Artificial Sequence
  Description of Artificial Sequence: Synthetic oligonucleotide
cauaauuuacaggaauaag

SEQ ID NO: 3105021 - RNA, 19 nt, Artificial Sequence
  Description of Artificial Sequence: Synthetic oligonucleotide
agaggggagagagagagag

SEQ ID NO: 3105022 - RNA, 19 nt, Artificial Sequence
  Description of Artificial Sequence: Synthetic oligonucleotide
gagagagagugagagagag

SEQ ID NO: 3105023 - RNA, 19 nt, Artificial Sequence
  Description of Artificial Sequence: Synthetic oligonucleotide
acauagaugcauuucuuaa

SEQ ID NO: 3105024 - RNA, 19 nt, Artificial Sequence
  Description of Artificial Sequence: Synthetic oligonucleotide
agagagagaggggagagag

SEQ ID NO: 3105025 - RNA, 19 nt, Artificial Sequence
  Description of Artificial Sequence: Synthetic oligonucleotide
acgguucuccucuaucagc

SEQ ID NO: 3105026 - RNA, 19 nt, Artificial Sequence
  Description of Artificial Sequence: Synthetic oligonucleotide
uuggcuagccucuugcugu

SEQ ID NO: 3105027 - RNA, 19 nt, Artificial Sequence
  Description of Artificial Sequence: Synthetic oligonucleotide
uguggguucugguuugugc

SEQ ID NO: 3105028 - RNA, 19 nt, Artificial Sequence
  Description of Artificial Sequence: Synthetic oligonucleotide
ugcccaauugauuucugca

SEQ ID NO: 3105029 - RNA, 19 nt, Artificial Sequence
  Description of Artificial Sequence: Synthetic oligonucleotide
auuugugccccauuccuca

SEQ ID NO: 3105030 - RNA, 19 nt, Artificial Sequence
  Description of Artificial Sequence: Synthetic oligonucleotide
accaagucuguugccaugc

SEQ ID NO: 3105031 - RNA, 19 nt, Artificial Sequence
  Description of Artificial Sequence: Synthetic oligonucleotide
ugagagagagagagaagcu

SEQ ID NO: 3105032 - RNA, 19 nt, Artificial Sequence
  Description of Artificial Sequence: Synthetic oligonucleotide
uagaugcauuucuuaaagc

SEQ ID NO: 3105033 - RNA, 19 nt, Artificial Sequence
  Description of Artificial Sequence: Synthetic oligonucleotide
cuaugacacauuuuccuuc

SEQ ID NO: 3105034 - RNA, 19 nt, Artificial Sequence
  Description of Artificial Sequence: Synthetic oligonucleotide
uccagcaccaagucuguug

SEQ ID NO: 3105035 - RNA, 19 nt, Artificial Sequence
  Description of Artificial Sequence: Synthetic oligonucleotide
ucacgguucuccucuauca

SEQ ID NO: 3105036 - RNA, 19 nt, Artificial Sequence
  Description of Artificial Sequence: Synthetic oligonucleotide
gccaugccaacauagaugc

SEQ ID NO: 3105037 - RNA, 19 nt, Artificial Sequence
  Description of Artificial Sequence: Synthetic oligonucleotide
ucuaugacacauuuuccuu

SEQ ID NO: 3105038 - RNA, 19 nt, Artificial Sequence
  Description of Artificial Sequence: Synthetic oligonucleotide
uucuccucuaucagcuucc

SEQ ID NO: 3105039 - RNA, 19 nt, Artificial Sequence
  Description of Artificial Sequence: Synthetic oligonucleotide
auuuuccuucauaauuuac

SEQ ID NO: 3105040 - RNA, 19 nt, Artificial Sequence
  Description of Artificial Sequence: Synthetic oligonucleotide
uugcgagugacuuugucua

SEQ ID NO: 3105041 - RNA, 19 nt, Artificial Sequence
  Description of Artificial Sequence: Synthetic oligonucleotide
guggguucugguuugugcc

SEQ ID NO: 3105042 - RNA, 19 nt, Artificial Sequence
  Description of Artificial Sequence: Synthetic oligonucleotide
gagagagaagcuauuugug

SEQ ID NO: 3105043 - RNA, 19 nt, Artificial Sequence
  Description of Artificial Sequence: Synthetic oligonucleotide
aggggagagagagagagug

SEQ ID NO: 3105044 - RNA, 19 nt, Artificial Sequence
  Description of Artificial Sequence: Synthetic oligonucleotide
ugguuugugcccaauugau

SEQ ID NO: 3105045 - RNA, 19 nt, Artificial Sequence
  Description of Artificial Sequence: Synthetic oligonucleotide
ugugccccauuccucaucu

SEQ ID NO: 3105046 - RNA, 19 nt, Artificial Sequence
  Description of Artificial Sequence: Synthetic oligonucleotide
uauuugugccccauuccuc

SEQ ID NO: 3105047 - RNA, 19 nt, Artificial Sequence
  Description of Artificial Sequence: Synthetic oligonucleotide
ugcauuucuuaaagcgaca

SEQ ID NO: 3105048 - RNA, 19 nt, Artificial Sequence
  Description of Artificial Sequence: Synthetic oligonucleotide
gagugagagagagagagaa

SEQ ID NO: 3105049 - RNA, 19 nt, Artificial Sequence
  Description of Artificial Sequence: Synthetic oligonucleotide
uugccaugccaacauagau

SEQ ID NO: 3105050 - RNA, 19 nt, Artificial Sequence
  Description of Artificial Sequence: Synthetic oligonucleotide
aagucuguugccaugccaa

SEQ ID NO: 3105051 - RNA, 19 nt, Artificial Sequence
  Description of Artificial Sequence: Synthetic oligonucleotide
agucuguugccaugccaac

SEQ ID NO: 3105052 - RNA, 19 nt, Artificial Sequence
  Description of Artificial Sequence: Synthetic oligonucleotide
acauuuuccuucauaauuu

SEQ ID NO: 3105053 - RNA, 19 nt, Artificial Sequence
  Description of Artificial Sequence: Synthetic oligonucleotide
uuugucuaugacacauuuu

SEQ ID NO: 3105054 - RNA, 19 nt, Artificial Sequence
  Description of Artificial Sequence: Synthetic oligonucleotide
uagccucuugcugucaucc

SEQ ID NO: 3105055 - RNA, 19 nt, Artificial Sequence
  Description of Artificial Sequence: Synthetic oligonucleotide
ucaucuguggguucugguu

SEQ ID NO: 3105056 - RNA, 19 nt, Artificial Sequence
  Description of Artificial Sequence: Synthetic oligonucleotide
uuugugcccaauugauuuc

SEQ ID NO: 3105057 - RNA, 19 nt, Artificial Sequence
  Description of Artificial Sequence: Synthetic oligonucleotide
uuaaagcgacauuccuggc

SEQ ID NO: 3105058 - RNA, 19 nt, Artificial Sequence
  Description of Artificial Sequence: Synthetic oligonucleotide
ugucauccagcaccaaguc

SEQ ID NO: 3105059 - RNA, 19 nt, Artificial Sequence
  Description of Artificial Sequence: Synthetic oligonucleotide
cauagaugcauuucuuaaa

SEQ ID NO: 3105060 - RNA, 19 nt, Artificial Sequence
  Description of Artificial Sequence: Synthetic oligonucleotide
cauuccuggcacugguugc

SEQ ID NO: 3105061 - RNA, 19 nt, Artificial Sequence
  Description of Artificial Sequence: Synthetic oligonucleotide
gucuaugacacauuuuccu

SEQ ID NO: 3105062 - RNA, 19 nt, Artificial Sequence
  Description of Artificial Sequence: Synthetic oligonucleotide
uucugcagcucuucucgcc

SEQ ID NO: 3105063 - RNA, 19 nt, Artificial Sequence
  Description of Artificial Sequence: Synthetic oligonucleotide
cuuggcuagccucuugcug

SEQ ID NO: 3105064 - RNA, 19 nt, Artificial Sequence
  Description of Artificial Sequence: Synthetic oligonucleotide
cugguugcgagugacuuug

SEQ ID NO: 3105065 - RNA, 19 nt, Artificial Sequence
  Description of Artificial Sequence: Synthetic oligonucleotide
auuccuggcacugguugcg

SEQ ID NO: 3105066 - RNA, 19 nt, Artificial Sequence
  Description of Artificial Sequence: Synthetic oligonucleotide
aucagcuuccgcuuggcua

SEQ ID NO: 3105067 - RNA, 19 nt, Artificial Sequence
  Description of Artificial Sequence: Synthetic oligonucleotide
gagaagcuauuugugcccc

SEQ ID NO: 3105068 - RNA, 19 nt, Artificial Sequence
  Description of Artificial Sequence: Synthetic oligonucleotide
agagagagagagaagcuau

SEQ ID NO: 3105069 - RNA, 19 nt, Artificial Sequence
  Description of Artificial Sequence: Synthetic oligonucleotide
guuugugcccaauugauuu

SEQ ID NO: 3105070 - RNA, 19 nt, Artificial Sequence
  Description of Artificial Sequence: Synthetic oligonucleotide
uugcugucauccagcacca

SEQ ID NO: 3105071 - RNA, 19 nt, Artificial Sequence
  Description of Artificial Sequence: Synthetic oligonucleotide
agagagagagagugagaga

SEQ ID NO: 3105072 - RNA, 19 nt, Artificial Sequence
  Description of Artificial Sequence: Synthetic oligonucleotide
acacauuuuccuucauaau

SEQ ID NO: 3105073 - RNA, 19 nt, Artificial Sequence
  Description of Artificial Sequence: Synthetic oligonucleotide
uuucugcagcucuucucgc

SEQ ID NO: 3105074 - RNA, 19 nt, Artificial Sequence
  Description of Artificial Sequence: Synthetic oligonucleotide
aucuguggguucugguuug

SEQ ID NO: 3105075 - RNA, 19 nt, Artificial Sequence
  Description of Artificial Sequence: Synthetic oligonucleotide
ucuucucgccgccucuucu

SEQ ID NO: 3105076 - RNA, 19 nt, Artificial Sequence
  Description of Artificial Sequence: Synthetic oligonucleotide
gcccaauugauuucugcag

SEQ ID NO: 3105077 - RNA, 19 nt, Artificial Sequence
  Description of Artificial Sequence: Synthetic oligonucleotide
guugcgagugacuuugucu

SEQ ID NO: 3105078 - RNA, 19 nt, Artificial Sequence
  Description of Artificial Sequence: Synthetic oligonucleotide
ugugcccaauugauuucug

SEQ ID NO: 3105079 - RNA, 19 nt, Artificial Sequence
  Description of Artificial Sequence: Synthetic oligonucleotide
gcuauuugugccccauucc

SEQ ID NO: 3105080 - RNA, 19 nt, Artificial Sequence
  Description of Artificial Sequence: Synthetic oligonucleotide
gggagagagagagagugag

SEQ ID NO: 3105081 - RNA, 19 nt, Artificial Sequence
  Description of Artificial Sequence: Synthetic oligonucleotide
uugugcccaauugauuucu

SEQ ID NO: 3105082 - RNA, 19 nt, Artificial Sequence
  Description of Artificial Sequence: Synthetic oligonucleotide
cacauuuuccuucauaauu

SEQ ID NO: 3105083 - RNA, 19 nt, Artificial Sequence
  Description of Artificial Sequence: Synthetic oligonucleotide
agcaccaagucuguugcca

SEQ ID NO: 3105084 - RNA, 19 nt, Artificial Sequence
  Description of Artificial Sequence: Synthetic oligonucleotide
gugcccaauugauuucugc

SEQ ID NO: 3105085 - RNA, 19 nt, Artificial Sequence
  Description of Artificial Sequence: Synthetic oligonucleotide
uuccgcuuggcuagccucu

SEQ ID NO: 3105086 - RNA, 19 nt, Artificial Sequence
  Description of Artificial Sequence: Synthetic oligonucleotide
cuucauaauuuacaggaau

SEQ ID NO: 3105087 - RNA, 19 nt, Artificial Sequence
  Description of Artificial Sequence: Synthetic oligonucleotide
cugguuugugcccaauuga

SEQ ID NO: 3105088 - RNA, 19 nt, Artificial Sequence
  Description of Artificial Sequence: Synthetic oligonucleotide
cccaauugauuucugcagc

SEQ ID NO: 3105089 - RNA, 19 nt, Artificial Sequence
  Description of Artificial Sequence: Synthetic oligonucleotide
uugauuucugcagcucuuc

SEQ ID NO: 3105090 - RNA, 19 nt, Artificial Sequence
  Description of Artificial Sequence: Synthetic oligonucleotide
gacuuugucuaugacacau

SEQ ID NO: 3105091 - RNA, 19 nt, Artificial Sequence
  Description of Artificial Sequence: Synthetic oligonucleotide
uaucagcuuccgcuuggcu

SEQ ID NO: 3105092 - RNA, 19 nt, Artificial Sequence
  Description of Artificial Sequence: Synthetic oligonucleotide
ugacuuugucuaugacaca

SEQ ID NO: 3105093 - RNA, 19 nt, Artificial Sequence
  Description of Artificial Sequence: Synthetic oligonucleotide
cuuccgcuuggcuagccuc

SEQ ID NO: 3105094 - RNA, 19 nt, Artificial Sequence
  Description of Artificial Sequence: Synthetic oligonucleotide
ucuccucuaucagcuuccg

SEQ ID NO: 3105095 - RNA, 19 nt, Artificial Sequence
  Description of Artificial Sequence: Synthetic oligonucleotide
agugagagagagagagaag

SEQ ID NO: 3105096 - RNA, 19 nt, Artificial Sequence
  Description of Artificial Sequence: Synthetic oligonucleotide
cuauuugugccccauuccu

SEQ ID NO: 3105097 - RNA, 19 nt, Artificial Sequence
  Description of Artificial Sequence: Synthetic oligonucleotide
cucgccgccucuucucacg

SEQ ID NO: 3105098 - RNA, 19 nt, Artificial Sequence
  Description of Artificial Sequence: Synthetic oligonucleotide
uucugguuugugcccaauu

SEQ ID NO: 3105099 - RNA, 19 nt, Artificial Sequence
  Description of Artificial Sequence: Synthetic oligonucleotide
ucgccgccucuucucacgg

SEQ ID NO: 3105100 - RNA, 19 nt, Artificial Sequence
  Description of Artificial Sequence: Synthetic oligonucleotide
gagagagagagagaagcua

SEQ ID NO: 3105101 - RNA, 19 nt, Artificial Sequence
  Description of Artificial Sequence: Synthetic oligonucleotide
ccagcaccaagucuguugc

SEQ ID NO: 3105102 - RNA, 19 nt, Artificial Sequence
  Description of Artificial Sequence: Synthetic oligonucleotide
ugcagcucuucucgccgcc

SEQ ID NO: 3105103 - RNA, 19 nt, Artificial Sequence
  Description of Artificial Sequence: Synthetic oligonucleotide
gagugacuuugucuaugac

SEQ ID NO: 3105104 - RNA, 19 nt, Artificial Sequence
  Description of Artificial Sequence: Synthetic oligonucleotide
caauugauuucugcagcuc

SEQ ID NO: 3105105 - RNA, 19 nt, Artificial Sequence
  Description of Artificial Sequence: Synthetic oligonucleotide
agcgacauuccuggcacug

SEQ ID NO: 3105106 - RNA, 19 nt, Artificial Sequence
  Description of Artificial Sequence: Synthetic oligonucleotide
cauuuuccuucauaauuua

SEQ ID NO: 3105107 - RNA, 19 nt, Artificial Sequence
  Description of Artificial Sequence: Synthetic oligonucleotide
cucacgguucuccucuauc

SEQ ID NO: 3105108 - RNA, 19 nt, Artificial Sequence
  Description of Artificial Sequence: Synthetic oligonucleotide
cugucauccagcaccaagu

SEQ ID NO: 3105109 - RNA, 19 nt, Artificial Sequence
  Description of Artificial Sequence: Synthetic oligonucleotide
aagcuauuugugccccauu

SEQ ID NO: 3105110 - RNA, 19 nt, Artificial Sequence
  Description of Artificial Sequence: Synthetic oligonucleotide
ggagagagagaggggagag

SEQ ID NO: 3105111 - RNA, 19 nt, Artificial Sequence
  Description of Artificial Sequence: Synthetic oligonucleotide
cuggcacugguugcgagug

SEQ ID NO: 3105112 - RNA, 19 nt, Artificial Sequence
  Description of Artificial Sequence: Synthetic oligonucleotide
agaagcuauuugugcccca

SEQ ID NO: 3105113 - RNA, 19 nt, Artificial Sequence
  Description of Artificial Sequence: Synthetic oligonucleotide
ugccaacauagaugcauuu

SEQ ID NO: 3105114 - RNA, 19 nt, Artificial Sequence
  Description of Artificial Sequence: Synthetic oligonucleotide
caagucuguugccaugcca

SEQ ID NO: 3105115 - RNA, 19 nt, Artificial Sequence
  Description of Artificial Sequence: Synthetic oligonucleotide
guugccaugccaacauaga

SEQ ID NO: 3105116 - RNA, 19 nt, Artificial Sequence
  Description of Artificial Sequence: Synthetic oligonucleotide
cuucucgccgccucuucuc

SEQ ID NO: 3105117 - RNA, 19 nt, Artificial Sequence
  Description of Artificial Sequence: Synthetic oligonucleotide
aagcgacauuccuggcacu

SEQ ID NO: 3105118 - RNA, 19 nt, Artificial Sequence
  Description of Artificial Sequence: Synthetic oligonucleotide
cuaucagcuuccgcuuggc

SEQ ID NO: 3105119 - RNA, 19 nt, Artificial Sequence
  Description of Artificial Sequence: Synthetic oligonucleotide
auugauuucugcagcucuu

SEQ ID NO: 3105120 - RNA, 19 nt, Artificial Sequence
  Description of Artificial Sequence: Synthetic oligonucleotide
caccaagucuguugccaug

SEQ ID NO: 3105121 - RNA, 19 nt, Artificial Sequence
  Description of Artificial Sequence: Synthetic oligonucleotide
gccucuugcugucauccag

SEQ ID NO: 3105122 - RNA, 19 nt, Artificial Sequence
  Description of Artificial Sequence: Synthetic oligonucleotide
cuucucacgguucuccucu

SEQ ID NO: 3105123 - RNA, 19 nt, Artificial Sequence
  Description of Artificial Sequence: Synthetic oligonucleotide
cuuugucuaugacacauuu

SEQ ID NO: 3105124 - RNA, 19 nt, Artificial Sequence
  Description of Artificial Sequence: Synthetic oligonucleotide
uugugccccauuccucauc

SEQ ID NO: 3105125 - RNA, 19 nt, Artificial Sequence
  Description of Artificial Sequence: Synthetic oligonucleotide
ccucuugcugucauccagc

SEQ ID NO: 3105126 - RNA, 19 nt, Artificial Sequence
  Description of Artificial Sequence: Synthetic oligonucleotide
caugccaacauagaugcau

SEQ ID NO: 3105127 - RNA, 19 nt, Artificial Sequence
  Description of Artificial Sequence: Synthetic oligonucleotide
acugguugcgagugacuuu

SEQ ID NO: 3105128 - RNA, 19 nt, Artificial Sequence
  Description of Artificial Sequence: Synthetic oligonucleotide
ugcgagugacuuugucuau

SEQ ID NO: 3105129 - RNA, 19 nt, Artificial Sequence
  Description of Artificial Sequence: Synthetic oligonucleotide
cucuugcugucauccagca

SEQ ID NO: 3105130 - RNA, 19 nt, Artificial Sequence
  Description of Artificial Sequence: Synthetic oligonucleotide
uuugugccccauuccucau

SEQ ID NO: 3105131 - RNA, 19 nt, Artificial Sequence
  Description of Artificial Sequence: Synthetic oligonucleotide
ucucacgguucuccucuau

SEQ ID NO: 3105132 - RNA, 19 nt, Artificial Sequence
  Description of Artificial Sequence: Synthetic oligonucleotide
ccccauuccucaucugugg

SEQ ID NO: 3105133 - RNA, 19 nt, Artificial Sequence
  Description of Artificial Sequence: Synthetic oligonucleotide
cuagccucuugcugucauc

SEQ ID NO: 3105134 - RNA, 19 nt, Artificial Sequence
  Description of Artificial Sequence: Synthetic oligonucleotide
agagagagagugagagaga

SEQ ID NO: 3105135 - RNA, 19 nt, Artificial Sequence
  Description of Artificial Sequence: Synthetic oligonucleotide
cugcagcucuucucgccgc

SEQ ID NO: 3105136 - RNA, 19 nt, Artificial Sequence
  Description of Artificial Sequence: Synthetic oligonucleotide
cuccucuaucagcuuccgc

SEQ ID NO: 3105137 - RNA, 19 nt, Artificial Sequence
  Description of Artificial Sequence: Synthetic oligonucleotide
agagugagagagagagaga

SEQ ID NO: 3105138 - RNA, 19 nt, Artificial Sequence
  Description of Artificial Sequence: Synthetic oligonucleotide
cccauuccucaucuguggg

SEQ ID NO: 3105139 - RNA, 19 nt, Artificial Sequence
  Description of Artificial Sequence: Synthetic oligonucleotide
ccaacauagaugcauuucu

SEQ ID NO: 3105140 - RNA, 19 nt, Artificial Sequence
  Description of Artificial Sequence: Synthetic oligonucleotide
agcuuccgcuuggcuagcc

SEQ ID NO: 3105141 - RNA, 19 nt, Artificial Sequence
  Description of Artificial Sequence: Synthetic oligonucleotide
gucuguugccaugccaaca

SEQ ID NO: 3105142 - RNA, 19 nt, Artificial Sequence
  Description of Artificial Sequence: Synthetic oligonucleotide
gagagagagaggggagaga

SEQ ID NO: 3105143 - RNA, 19 nt, Artificial Sequence
  Description of Artificial Sequence: Synthetic oligonucleotide
agagagagugagagagaga

SEQ ID NO: 3105144 - RNA, 19 nt, Artificial Sequence
  Description of Artificial Sequence: Synthetic oligonucleotide
cagcaccaagucuguugcc

SEQ ID NO: 3105145 - RNA, 19 nt, Artificial Sequence
  Description of Artificial Sequence: Synthetic oligonucleotide
agagagugagagagagaga

SEQ ID NO: 3105146 - RNA, 19 nt, Artificial Sequence
  Description of Artificial Sequence: Synthetic oligonucleotide
uggcuagccucuugcuguc

SEQ ID NO: 3105147 - RNA, 19 nt, Artificial Sequence
  Description of Artificial Sequence: Synthetic oligonucleotide
agccucuugcugucaucca

SEQ ID NO: 3105148 - RNA, 19 nt, Artificial Sequence
  Description of Artificial Sequence: Synthetic oligonucleotide
gccaacauagaugcauuuc

SEQ ID NO: 3105149 - RNA, 19 nt, Artificial Sequence
  Description of Artificial Sequence: Synthetic oligonucleotide
ucuguggguucugguuugu

SEQ ID NO: 3105150 - RNA, 19 nt, Artificial Sequence
  Description of Artificial Sequence: Synthetic oligonucleotide
uggcacugguugcgaguga

SEQ ID NO: 3105151 - RNA, 19 nt, Artificial Sequence
  Description of Artificial Sequence: Synthetic oligonucleotide
gagagagaggggagagaga

SEQ ID NO: 3105152 - RNA, 19 nt, Artificial Sequence
  Description of Artificial Sequence: Synthetic oligonucleotide
augccaacauagaugcauu

SEQ ID NO: 3105153 - RNA, 19 nt, Artificial Sequence
  Description of Artificial Sequence: Synthetic oligonucleotide
ugguugcgagugacuuugu

SEQ ID NO: 3105154 - RNA, 19 nt, Artificial Sequence
  Description of Artificial Sequence: Synthetic oligonucleotide
caacauagaugcauuucuu

SEQ ID NO: 3105155 - RNA, 19 nt, Artificial Sequence
  Description of Artificial Sequence: Synthetic oligonucleotide
uccucaucuguggguucug

SEQ ID NO: 3105156 - RNA, 19 nt, Artificial Sequence
  Description of Artificial Sequence: Synthetic oligonucleotide
gguugcgagugacuuuguc

SEQ ID NO: 3105157 - RNA, 19 nt, Artificial Sequence
  Description of Artificial Sequence: Synthetic oligonucleotide
gaagcuauuugugccccau

SEQ ID NO: 3105158 - RNA, 19 nt, Artificial Sequence
  Description of Artificial Sequence: Synthetic oligonucleotide
acuuugucuaugacacauu

SEQ ID NO: 3105159 - RNA, 19 nt, Artificial Sequence
  Description of Artificial Sequence: Synthetic oligonucleotide
gagagaggggagagagaga

SEQ ID NO: 3105160 - RNA, 19 nt, Artificial Sequence
  Description of Artificial Sequence: Synthetic oligonucleotide
ggcacugguugcgagugac

SEQ ID NO: 3105161 - RNA, 19 nt, Artificial Sequence
  Description of Artificial Sequence: Synthetic oligonucleotide
caucuguggguucugguuu

SEQ ID NO: 3105162 - RNA, 19 nt, Artificial Sequence
  Description of Artificial Sequence: Synthetic oligonucleotide
gcgacauuccuggcacugg

SEQ ID NO: 3105163 - RNA, 19 nt, Artificial Sequence
  Description of Artificial Sequence: Synthetic oligonucleotide
uucucacgguucuccucua

SEQ ID NO: 3105164 - RNA, 19 nt, Artificial Sequence
  Description of Artificial Sequence: Synthetic oligonucleotide
ccuucauaauuuacaggaa

SEQ ID NO: 3105165 - RNA, 19 nt, Artificial Sequence
  Description of Artificial Sequence: Synthetic oligonucleotide
cauuucuuaaagcgacauu

SEQ ID NO: 3105166 - RNA, 19 nt, Artificial Sequence
  Description of Artificial Sequence: Synthetic oligonucleotide
cucaucuguggguucuggu

SEQ ID NO: 3105167 - RNA, 19 nt, Artificial Sequence
  Description of Artificial Sequence: Synthetic oligonucleotide
cuguggguucugguuugug

SEQ ID NO: 3105168 - RNA, 19 nt, Artificial Sequence
  Description of Artificial Sequence: Synthetic oligonucleotide
gccccauuccucaucugug

SEQ ID NO: 3105169 - RNA, 19 nt, Artificial Sequence
  Description of Artificial Sequence: Synthetic oligonucleotide
ccaagucuguugccaugcc

SEQ ID NO: 3105170 - RNA, 19 nt, Artificial Sequence
  Description of Artificial Sequence: Synthetic oligonucleotide
gagaggggagagagagaga

SEQ ID NO: 3105171 - RNA, 19 nt, Artificial Sequence
  Description of Artificial Sequence: Synthetic oligonucleotide
ccaauugauuucugcagcu

SEQ ID NO: 3105172 - RNA, 19 nt, Artificial Sequence
  Description of Artificial Sequence: Synthetic oligonucleotide
cauuccucaucuguggguu

SEQ ID NO: 3105173 - RNA, 19 nt, Artificial Sequence
  Description of Artificial Sequence: Synthetic oligonucleotide
ggagagagagagagugaga

SEQ ID NO: 3105174 - RNA, 19 nt, Artificial Sequence
  Description of Artificial Sequence: Synthetic oligonucleotide
gagagagagagaagcuauu

SEQ ID NO: 3105175 - RNA, 19 nt, Artificial Sequence
  Description of Artificial Sequence: Synthetic oligonucleotide
ccucaucuguggguucugg

SEQ ID NO: 3105176 - RNA, 19 nt, Artificial Sequence
  Description of Artificial Sequence: Synthetic oligonucleotide
gcauuucuuaaagcgacau

SEQ ID NO: 3105177 - RNA, 19 nt, Artificial Sequence
  Description of Artificial Sequence: Synthetic oligonucleotide
gugccccauuccucaucug

SEQ ID NO: 3105178 - RNA, 19 nt, Artificial Sequence
  Description of Artificial Sequence: Synthetic oligonucleotide
uccgcuuggcuagccucuu

SEQ ID NO: 3105179 - RNA, 19 nt, Artificial Sequence
  Description of Artificial Sequence: Synthetic oligonucleotide
ggggagagagagagaguga

SEQ ID NO: 3105180 - RNA, 19 nt, Artificial Sequence
  Description of Artificial Sequence: Synthetic oligonucleotide
cacugguugcgagugacuu

SEQ ID NO: 3105181 - RNA, 19 nt, Artificial Sequence
  Description of Artificial Sequence: Synthetic oligonucleotide
gaggggagagagagagagu

SEQ ID NO: 3105182 - RNA, 19 nt, Artificial Sequence
  Description of Artificial Sequence: Synthetic oligonucleotide
ugcugucauccagcaccaa

SEQ ID NO: 3105183 - RNA, 19 nt, Artificial Sequence
  Description of Artificial Sequence: Synthetic oligonucleotide
gacauuccuggcacugguu

SEQ ID NO: 3105184 - RNA, 19 nt, Artificial Sequence
  Description of Artificial Sequence: Synthetic oligonucleotide
gguucugguuugugcccaa

SEQ ID NO: 3105185 - RNA, 19 nt, Artificial Sequence
  Description of Artificial Sequence: Synthetic oligonucleotide
cagcuuccgcuuggcuagc

SEQ ID NO: 3105186 - RNA, 19 nt, Artificial Sequence
  Description of Artificial Sequence: Synthetic oligonucleotide
gcuuggcuagccucuugcu

SEQ ID NO: 3105187 - RNA, 19 nt, Artificial Sequence
  Description of Artificial Sequence: Synthetic oligonucleotide
gguuugugcccaauugauu

SEQ ID NO: 3105188 - RNA, 19 nt, Artificial Sequence
  Description of Artificial Sequence: Synthetic oligonucleotide
cgguucuccucuaucagcu

SEQ ID NO: 3105189 - RNA, 19 nt, Artificial Sequence
  Description of Artificial Sequence: Synthetic oligonucleotide
auccagcaccaagucuguu

SEQ ID NO: 3105190 - RNA, 19 nt, Artificial Sequence
  Description of Artificial Sequence: Synthetic oligonucleotide
ccauuccucaucugugggu

SEQ ID NO: 3105191 - RNA, 19 nt, Artificial Sequence
  Description of Artificial Sequence: Synthetic oligonucleotide
gcaccaagucuguugccau

SEQ ID NO: 3105192 - RNA, 19 nt, Artificial Sequence
  Description of Artificial Sequence: Synthetic oligonucleotide
ccgccucuucucacgguuc

SEQ ID NO: 3105193 - RNA, 19 nt, Artificial Sequence
  Description of Artificial Sequence: Synthetic oligonucleotide
gcuagccucuugcugucau

SEQ ID NO: 3105194 - RNA, 19 nt, Artificial Sequence
  Description of Artificial Sequence: Synthetic oligonucleotide
gcuuccgcuuggcuagccu

SEQ ID NO: 3105195 - RNA, 19 nt, Artificial Sequence
  Description of Artificial Sequence: Synthetic oligonucleotide
ccucuaucagcuuccgcuu

SEQ ID NO: 3105196 - RNA, 19 nt, Artificial Sequence
  Description of Artificial Sequence: Synthetic oligonucleotide
ccuggcacugguugcgagu

SEQ ID NO: 3105197 - RNA, 19 nt, Artificial Sequence
  Description of Artificial Sequence: Synthetic oligonucleotide
ccaugccaacauagaugca

SEQ ID NO: 3105198 - RNA, 19 nt, Artificial Sequence
  Description of Artificial Sequence: Synthetic oligonucleotide
guucugguuugugcccaau

SEQ ID NO: 3105199 - RNA, 19 nt, Artificial Sequence
  Description of Artificial Sequence: Synthetic oligonucleotide
gguucuccucuaucagcuu

SEQ ID NO: 3105200 - RNA, 19 nt, Artificial Sequence
  Description of Artificial Sequence: Synthetic oligonucleotide
gccgccucuucucacgguu

SEQ ID NO: 3105201 - RNA, 19 nt, Artificial Sequence
  Description of Artificial Sequence: Synthetic oligonucleotide
ccgcuuggcuagccucuug

SEQ ID NO: 3105202 - RNA, 19 nt, Artificial Sequence
  Description of Artificial Sequence: Synthetic oligonucleotide
cgacauuccuggcacuggu

SEQ ID NO: 3105203 - RNA, 19 nt, Artificial Sequence
  Description of Artificial Sequence: Synthetic oligonucleotide
gcacugguugcgagugacu

SEQ ID NO: 3105204 - RNA, 19 nt, Artificial Sequence
  Description of Artificial Sequence: Synthetic oligonucleotide
gcagcucuucucgccgccu

SEQ ID NO: 3105205 - RNA, 19 nt, Artificial Sequence
  Description of Artificial Sequence: Synthetic oligonucleotide
cgccucuucucacgguucu

SEQ ID NO: 3105206 - RNA, 19 nt, Artificial Sequence
  Description of Artificial Sequence: Synthetic oligonucleotide
cgccgccucuucucacggu

SEQ ID NO: 3105207 - RNA, 19 nt, Artificial Sequence
  Description of Artificial Sequence: Synthetic oligonucleotide
gaagaauaaggauaaaggg

SEQ ID NO: 3105208 - RNA, 19 nt, Artificial Sequence
  Description of Artificial Sequence: Synthetic oligonucleotide
aagaauaaggauaaagggc

SEQ ID NO: 3105209 - RNA, 19 nt, Artificial Sequence
  Description of Artificial Sequence: Synthetic oligonucleotide
aaggauaaagggcaguccc

SEQ ID NO: 3105210 - RNA, 19 nt, Artificial Sequence
  Description of Artificial Sequence: Synthetic oligonucleotide
aaaacuacagcuuggccag

SEQ ID NO: 3105211 - RNA, 19 nt, Artificial Sequence
  Description of Artificial Sequence: Synthetic oligonucleotide
ugugcugaaaacuacagcu

SEQ ID NO: 3105212 - RNA, 19 nt, Artificial Sequence
  Description of Artificial Sequence: Synthetic oligonucleotide
agaagaauaaggauaaagg

SEQ ID NO: 3105213 - RNA, 19 nt, Artificial Sequence
  Description of Artificial Sequence: Synthetic oligonucleotide
gaaaacuacagcuuggcca

SEQ ID NO: 3105214 - RNA, 19 nt, Artificial Sequence
  Description of Artificial Sequence: Synthetic oligonucleotide
agaauaaggauaaagggca

SEQ ID NO: 3105215 - RNA, 19 nt, Artificial Sequence
  Description of Artificial Sequence: Synthetic oligonucleotide
uuggccagaagaauaagga

SEQ ID NO: 3105216 - RNA, 19 nt, Artificial Sequence
  Description of Artificial Sequence: Synthetic oligonucleotide
aaagggcagucccuucugc

SEQ ID NO: 3105217 - RNA, 19 nt, Artificial Sequence
  Description of Artificial Sequence: Synthetic oligonucleotide
cuuggccagaagaauaagg

SEQ ID NO: 3105218 - RNA, 19 nt, Artificial Sequence
  Description of Artificial Sequence: Synthetic oligonucleotide
auaaggauaaagggcaguc

SEQ ID NO: 3105219 - RNA, 19 nt, Artificial Sequence
  Description of Artificial Sequence: Synthetic oligonucleotide
aaccccuuccucugagugc

SEQ ID NO: 3105220 - RNA, 19 nt, Artificial Sequence
  Description of Artificial Sequence: Synthetic oligonucleotide
ugaaaacuacagcuuggcc

SEQ ID NO: 3105221 - RNA, 19 nt, Artificial Sequence
  Description of Artificial Sequence: Synthetic oligonucleotide
cagaagaauaaggauaaag

SEQ ID NO: 3105222 - RNA, 19 nt, Artificial Sequence
  Description of Artificial Sequence: Synthetic oligonucleotide
cuugugcugaaaacuacag

SEQ ID NO: 3105223 - RNA, 19 nt, Artificial Sequence
  Description of Artificial Sequence: Synthetic oligonucleotide
uugugcugaaaacuacagc

SEQ ID NO: 3105224 - RNA, 19 nt, Artificial Sequence
  Description of Artificial Sequence: Synthetic oligonucleotide
cagccuucagcucugacag

SEQ ID NO: 3105225 - RNA, 19 nt, Artificial Sequence
  Description of Artificial Sequence: Synthetic oligonucleotide
agcaugguggaaguggugg

SEQ ID NO: 3105226 - RNA, 19 nt, Artificial Sequence
  Description of Artificial Sequence: Synthetic oligonucleotide
aauaaggauaaagggcagu

SEQ ID NO: 3105227 - RNA, 19 nt, Artificial Sequence
  Description of Artificial Sequence: Synthetic oligonucleotide
auaaagggcagucccuucu

SEQ ID NO: 3105228 - RNA, 19 nt, Artificial Sequence
  Description of Artificial Sequence: Synthetic oligonucleotide
ucaucaaccccuuccucug

SEQ ID NO: 3105229 - RNA, 19 nt, Artificial Sequence
  Description of Artificial Sequence: Synthetic oligonucleotide
uaaggauaaagggcagucc

SEQ ID NO: 3105230 - RNA, 19 nt, Artificial Sequence
  Description of Artificial Sequence: Synthetic oligonucleotide
cucugagugcccacggugg

SEQ ID NO: 3105231 - RNA, 19 nt, Artificial Sequence
  Description of Artificial Sequence: Synthetic oligonucleotide
accccuuccucugagugcc

SEQ ID NO: 3105232 - RNA, 19 nt, Artificial Sequence
  Description of Artificial Sequence: Synthetic oligonucleotide
gaauaaggauaaagggcag

SEQ ID NO: 3105233 - RNA, 19 nt, Artificial Sequence
  Description of Artificial Sequence: Synthetic oligonucleotide
ugcucaucaaccccuuccu

SEQ ID NO: 3105234 - RNA, 19 nt, Artificial Sequence
  Description of Artificial Sequence: Synthetic oligonucleotide
guagcugcuuccuucggug

SEQ ID NO: 3105235 - RNA, 19 nt, Artificial Sequence
  Description of Artificial Sequence: Synthetic oligonucleotide
uaaagggcagucccuucug

SEQ ID NO: 3105236 - RNA, 19 nt, Artificial Sequence
  Description of Artificial Sequence: Synthetic oligonucleotide
ucugacagcgcuggugccg

SEQ ID NO: 3105237 - RNA, 19 nt, Artificial Sequence
  Description of Artificial Sequence: Synthetic oligonucleotide
cugcucaucaaccccuucc

SEQ ID NO: 3105238 - RNA, 19 nt, Artificial Sequence
  Description of Artificial Sequence: Synthetic oligonucleotide
gugguagcugcuuccuucg

SEQ ID NO: 3105239 - RNA, 19 nt, Artificial Sequence
  Description of Artificial Sequence: Synthetic oligonucleotide
aagggcagucccuucugca

SEQ ID NO: 3105240 - RNA, 19 nt, Artificial Sequence
  Description of Artificial Sequence: Synthetic oligonucleotide
uuccucugagugcccacgg

SEQ ID NO: 3105241 - RNA, 19 nt, Artificial Sequence
  Description of Artificial Sequence: Synthetic oligonucleotide
cuuccuucggugcuucggc

SEQ ID NO: 3105242 - RNA, 19 nt, Artificial Sequence
  Description of Artificial Sequence: Synthetic oligonucleotide
gaucacagccuucagcucu

SEQ ID NO: 3105243 - RNA, 19 nt, Artificial Sequence
  Description of Artificial Sequence: Synthetic oligonucleotide
acccacgugcugcaggagg

SEQ ID NO: 3105244 - RNA, 19 nt, Artificial Sequence
  Description of Artificial Sequence: Synthetic oligonucleotide
ugagugcccacgguggucc

SEQ ID NO: 3105245 - RNA, 19 nt, Artificial Sequence
  Description of Artificial Sequence: Synthetic oligonucleotide
augguggaagugguggugg

SEQ ID NO: 3105246 - RNA, 19 nt, Artificial Sequence
  Description of Artificial Sequence: Synthetic oligonucleotide
cagaucacagccuucagcu

SEQ ID NO: 3105247 - RNA, 19 nt, Artificial Sequence
  Description of Artificial Sequence: Synthetic oligonucleotide
uggccagaagaauaaggau

SEQ ID NO: 3105248 - RNA, 19 nt, Artificial Sequence
  Description of Artificial Sequence: Synthetic oligonucleotide
ugguggugggacugggcgg

SEQ ID NO: 3105249 - RNA, 19 nt, Artificial Sequence
  Description of Artificial Sequence: Synthetic oligonucleotide
agggcagucccuucugcag

SEQ ID NO: 3105250 - RNA, 19 nt, Artificial Sequence
  Description of Artificial Sequence: Synthetic oligonucleotide
gauaaagggcagucccuuc

SEQ ID NO: 3105251 - RNA, 19 nt, Artificial Sequence
  Description of Artificial Sequence: Synthetic oligonucleotide
agcuugugcugaaaacuac

SEQ ID NO: 3105252 - RNA, 19 nt, Artificial Sequence
  Description of Artificial Sequence: Synthetic oligonucleotide
aucaaccccuuccucugag

SEQ ID NO: 3105253 - RNA, 19 nt, Artificial Sequence
  Description of Artificial Sequence: Synthetic oligonucleotide
uggcugcucaucaaccccu

SEQ ID NO: 3105254 - RNA, 19 nt, Artificial Sequence
  Description of Artificial Sequence: Synthetic oligonucleotide
ggcagcaugguggaagugg

SEQ ID NO: 3105255 - RNA, 19 nt, Artificial Sequence
  Description of Artificial Sequence: Synthetic oligonucleotide
cuacagcuuggccagaaga

SEQ ID NO: 3105256 - RNA, 19 nt, Artificial Sequence
  Description of Artificial Sequence: Synthetic oligonucleotide
acuacagcuuggccagaag

SEQ ID NO: 3105257 - RNA, 19 nt, Artificial Sequence
  Description of Artificial Sequence: Synthetic oligonucleotide
caaccccuuccucugagug

SEQ ID NO: 3105258 - RNA, 19 nt, Artificial Sequence
  Description of Artificial Sequence: Synthetic oligonucleotide
ucugagugcccacgguggu

SEQ ID NO: 3105259 - RNA, 19 nt, Artificial Sequence
  Description of Artificial Sequence: Synthetic oligonucleotide
agucccuggcugcucauca

SEQ ID NO: 3105260 - RNA, 19 nt, Artificial Sequence
  Description of Artificial Sequence: Synthetic oligonucleotide
gaagugguggugggacugg

SEQ ID NO: 3105261 - RNA, 19 nt, Artificial Sequence
  Description of Artificial Sequence: Synthetic oligonucleotide
ugguagcugcuuccuucgg

SEQ ID NO: 3105262 - RNA, 19 nt, Artificial Sequence
  Description of Artificial Sequence: Synthetic oligonucleotide
uccuucggugcuucggcca

SEQ ID NO: 3105263 - RNA, 19 nt, Artificial Sequence
  Description of Artificial Sequence: Synthetic oligonucleotide
ugcugcaggagggacgccc

SEQ ID NO: 3105264 - RNA, 19 nt, Artificial Sequence
  Description of Artificial Sequence: Synthetic oligonucleotide
gugggcagcaugguggaag

SEQ ID NO: 3105265 - RNA, 19 nt, Artificial Sequence
  Description of Artificial Sequence: Synthetic oligonucleotide
gcucugacagcgcuggugc

SEQ ID NO: 3105266 - RNA, 19 nt, Artificial Sequence
  Description of Artificial Sequence: Synthetic oligonucleotide
ucccuggcugcucaucaac

SEQ ID NO: 3105267 - RNA, 19 nt, Artificial Sequence
  Description of Artificial Sequence: Synthetic oligonucleotide
cuuccucugagugcccacg

SEQ ID NO: 3105268 - RNA, 19 nt, Artificial Sequence
  Description of Artificial Sequence: Synthetic oligonucleotide
gcagaucacagccuucagc

SEQ ID NO: 3105269 - RNA, 19 nt, Artificial Sequence
  Description of Artificial Sequence: Synthetic oligonucleotide
uuccuucggugcuucggcc

SEQ ID NO: 3105270 - RNA, 19 nt, Artificial Sequence
  Description of Artificial Sequence: Synthetic oligonucleotide
uucggugcuucggccaccg

SEQ ID NO: 3105271 - RNA, 19 nt, Artificial Sequence
  Description of Artificial Sequence: Synthetic oligonucleotide
gacugggcgguggugguag

SEQ ID NO: 3105272 - RNA, 19 nt, Artificial Sequence
  Description of Artificial Sequence: Synthetic oligonucleotide
agcagaucacagccuucag

SEQ ID NO: 3105273 - RNA, 19 nt, Artificial Sequence
  Description of Artificial Sequence: Synthetic oligonucleotide
ggugguagcugcuuccuuc

SEQ ID NO: 3105274 - RNA, 19 nt, Artificial Sequence
  Description of Artificial Sequence: Synthetic oligonucleotide
uagcugcuuccuucggugc

SEQ ID NO: 3105275 - RNA, 19 nt, Artificial Sequence
  Description of Artificial Sequence: Synthetic oligonucleotide
aucccugguggcuggcauc

SEQ ID NO: 3105276 - RNA, 19 nt, Artificial Sequence
  Description of Artificial Sequence: Synthetic oligonucleotide
guggaagugguggugggac

SEQ ID NO: 3105277 - RNA, 19 nt, Artificial Sequence
  Description of Artificial Sequence: Synthetic oligonucleotide
agucccuucugcagccagc

SEQ ID NO: 3105278 - RNA, 19 nt, Artificial Sequence
  Description of Artificial Sequence: Synthetic oligonucleotide
agccuucagcucugacagc

SEQ ID NO: 3105279 - RNA, 19 nt, Artificial Sequence
  Description of Artificial Sequence: Synthetic oligonucleotide
aacuacagcuuggccagaa

SEQ ID NO: 3105280 - RNA, 19 nt, Artificial Sequence
  Description of Artificial Sequence: Synthetic oligonucleotide
agcgcuggugccggagucc

SEQ ID NO: 3105281 - RNA, 19 nt, Artificial Sequence
  Description of Artificial Sequence: Synthetic oligonucleotide
uggaagugguggugggacu

SEQ ID NO: 3105282 - RNA, 19 nt, Artificial Sequence
  Description of Artificial Sequence: Synthetic oligonucleotide
agcucugacagcgcuggug

SEQ ID NO: 3105283 - RNA, 19 nt, Artificial Sequence
  Description of Artificial Sequence: Synthetic oligonucleotide
cugacagcgcuggugccgg

SEQ ID NO: 3105284 - RNA, 19 nt, Artificial Sequence
  Description of Artificial Sequence: Synthetic oligonucleotide
ucaaccccuuccucugagu

SEQ ID NO: 3105285 - RNA, 19 nt, Artificial Sequence
  Description of Artificial Sequence: Synthetic oligonucleotide
uccucugagugcccacggu

SEQ ID NO: 3105286 - RNA, 19 nt, Artificial Sequence
  Description of Artificial Sequence: Synthetic oligonucleotide
aggauaaagggcagucccu

SEQ ID NO: 3105287 - RNA, 19 nt, Artificial Sequence
  Description of Artificial Sequence: Synthetic oligonucleotide
gccagaagaauaaggauaa

SEQ ID NO: 3105288 - RNA, 19 nt, Artificial Sequence
  Description of Artificial Sequence: Synthetic oligonucleotide
ggugcuucggccaccggcc

SEQ ID NO: 3105289 - RNA, 19 nt, Artificial Sequence
  Description of Artificial Sequence: Synthetic oligonucleotide
ggccagaagaauaaggaua

SEQ ID NO: 3105290 - RNA, 19 nt, Artificial Sequence
  Description of Artificial Sequence: Synthetic oligonucleotide
accggccucaucccuggug

SEQ ID NO: 3105291 - RNA, 19 nt, Artificial Sequence
  Description of Artificial Sequence: Synthetic oligonucleotide
acugggcgguggugguagc

SEQ ID NO: 3105292 - RNA, 19 nt, Artificial Sequence
  Description of Artificial Sequence: Synthetic oligonucleotide
ugcuuccuucggugcuucg

SEQ ID NO: 3105293 - RNA, 19 nt, Artificial Sequence
  Description of Artificial Sequence: Synthetic oligonucleotide
agcuuggccagaagaauaa

SEQ ID NO: 3105294 - RNA, 19 nt, Artificial Sequence
  Description of Artificial Sequence: Synthetic oligonucleotide
gugccggagucccuggcug

SEQ ID NO: 3105295 - RNA, 19 nt, Artificial Sequence
  Description of Artificial Sequence: Synthetic oligonucleotide
cucugacagcgcuggugcc

SEQ ID NO: 3105296 - RNA, 19 nt, Artificial Sequence
  Description of Artificial Sequence: Synthetic oligonucleotide
ggaagugguggugggacug

SEQ ID NO: 3105297 - RNA, 19 nt, Artificial Sequence
  Description of Artificial Sequence: Synthetic oligonucleotide
acgugcugcaggagggacg

SEQ ID NO: 3105298 - RNA, 19 nt, Artificial Sequence
  Description of Artificial Sequence: Synthetic oligonucleotide
ccuggcugcucaucaaccc

SEQ ID NO: 3105299 - RNA, 19 nt, Artificial Sequence
  Description of Artificial Sequence: Synthetic oligonucleotide
ugccggagucccuggcugc

SEQ ID NO: 3105300 - RNA, 19 nt, Artificial Sequence
  Description of Artificial Sequence: Synthetic oligonucleotide
agugcccacgguggucccc

SEQ ID NO: 3105301 - RNA, 19 nt, Artificial Sequence
  Description of Artificial Sequence: Synthetic oligonucleotide
ccggccucaucccuggugg

SEQ ID NO: 3105302 - RNA, 19 nt, Artificial Sequence
  Description of Artificial Sequence: Synthetic oligonucleotide
acagcgcuggugccggagu

SEQ ID NO: 3105303 - RNA, 19 nt, Artificial Sequence
  Description of Artificial Sequence: Synthetic oligonucleotide
cccacgugcugcaggaggg

SEQ ID NO: 3105304 - RNA, 19 nt, Artificial Sequence
  Description of Artificial Sequence: Synthetic oligonucleotide
cagcuuggccagaagaaua

SEQ ID NO: 3105305 - RNA, 19 nt, Artificial Sequence
  Description of Artificial Sequence: Synthetic oligonucleotide
ugguggcuggcaucgggau

SEQ ID NO: 3105306 - RNA, 19 nt, Artificial Sequence
  Description of Artificial Sequence: Synthetic oligonucleotide
uggugggacugggcggugg

SEQ ID NO: 3105307 - RNA, 19 nt, Artificial Sequence
  Description of Artificial Sequence: Synthetic oligonucleotide
ggcagucccuucugcagcc

SEQ ID NO: 3105308 - RNA, 19 nt, Artificial Sequence
  Description of Artificial Sequence: Synthetic oligonucleotide
gacagcgcuggugccggag

SEQ ID NO: 3105309 - RNA, 19 nt, Artificial Sequence
  Description of Artificial Sequence: Synthetic oligonucleotide
gcuuccuucggugcuucgg

SEQ ID NO: 3105310 - RNA, 19 nt, Artificial Sequence
  Description of Artificial Sequence: Synthetic oligonucleotide
cacggugguccccacccac

SEQ ID NO: 3105311 - RNA, 19 nt, Artificial Sequence
  Description of Artificial Sequence: Synthetic oligonucleotide
cagucccuucugcagccag

SEQ ID NO: 3105312 - RNA, 19 nt, Artificial Sequence
  Description of Artificial Sequence: Synthetic oligonucleotide
aucacagccuucagcucug

SEQ ID NO: 3105313 - RNA, 19 nt, Artificial Sequence
  Description of Artificial Sequence: Synthetic oligonucleotide
uggugccggagucccuggc

SEQ ID NO: 3105314 - RNA, 19 nt, Artificial Sequence
  Description of Artificial Sequence: Synthetic oligonucleotide
cccugggugggcagcaugg

SEQ ID NO: 3105315 - RNA, 19 nt, Artificial Sequence
  Description of Artificial Sequence: Synthetic oligonucleotide
gcuugugcugaaaacuaca

SEQ ID NO: 3105316 - RNA, 19 nt, Artificial Sequence
  Description of Artificial Sequence: Synthetic oligonucleotide
cugguggcuggcaucggga

SEQ ID NO: 3105317 - RNA, 19 nt, Artificial Sequence
  Description of Artificial Sequence: Synthetic oligonucleotide
cagcaugguggaaguggug

SEQ ID NO: 3105318 - RNA, 19 nt, Artificial Sequence
  Description of Artificial Sequence: Synthetic oligonucleotide
aaacuacagcuuggccaga

SEQ ID NO: 3105319 - RNA, 19 nt, Artificial Sequence
  Description of Artificial Sequence: Synthetic oligonucleotide
acggugguccccacccacg

SEQ ID NO: 3105320 - RNA, 19 nt, Artificial Sequence
  Description of Artificial Sequence: Synthetic oligonucleotide
cccacggugguccccaccc

SEQ ID NO: 3105321 - RNA, 19 nt, Artificial Sequence
  Description of Artificial Sequence: Synthetic oligonucleotide
ccucugagugcccacggug

SEQ ID NO: 3105322 - RNA, 19 nt, Artificial Sequence
  Description of Artificial Sequence: Synthetic oligonucleotide
ucaucccugguggcuggca

SEQ ID NO: 3105323 - RNA, 19 nt, Artificial Sequence
  Description of Artificial Sequence: Synthetic oligonucleotide
uccccacccacgugcugca

SEQ ID NO: 3105324 - RNA, 19 nt, Artificial Sequence
  Description of Artificial Sequence: Synthetic oligonucleotide
gguggcuggcaucgggaug

SEQ ID NO: 3105325 - RNA, 19 nt, Artificial Sequence
  Description of Artificial Sequence: Synthetic oligonucleotide
uggugguagcugcuuccuu

SEQ ID NO: 3105326 - RNA, 19 nt, Artificial Sequence
  Description of Artificial Sequence: Synthetic oligonucleotide
cccuggcugcucaucaacc

SEQ ID NO: 3105327 - RNA, 19 nt, Artificial Sequence
  Description of Artificial Sequence: Synthetic oligonucleotide
ugcuucggccaccggccuc

SEQ ID NO: 3105328 - RNA, 19 nt, Artificial Sequence
  Description of Artificial Sequence: Synthetic oligonucleotide
ucggugcuucggccaccgg

SEQ ID NO: 3105329 - RNA, 19 nt, Artificial Sequence
  Description of Artificial Sequence: Synthetic oligonucleotide
cacgugcugcaggagggac

SEQ ID NO: 3105330 - RNA, 19 nt, Artificial Sequence
  Description of Artificial Sequence: Synthetic oligonucleotide
cuucagcucugacagcgcu

SEQ ID NO: 3105331 - RNA, 19 nt, Artificial Sequence
  Description of Artificial Sequence: Synthetic oligonucleotide
gcuuggccagaagaauaag

SEQ ID NO: 3105332 - RNA, 19 nt, Artificial Sequence
  Description of Artificial Sequence: Synthetic oligonucleotide
cccuucugcagccagcaga

SEQ ID NO: 3105333 - RNA, 19 nt, Artificial Sequence
  Description of Artificial Sequence: Synthetic oligonucleotide
caucaaccccuuccucuga

SEQ ID NO: 3105334 - RNA, 19 nt, Artificial Sequence
  Description of Artificial Sequence: Synthetic oligonucleotide
cugagugcccacggugguc

SEQ ID NO: 3105335 - RNA, 19 nt, Artificial Sequence
  Description of Artificial Sequence: Synthetic oligonucleotide
ccuucagcucugacagcgc

SEQ ID NO: 3105336 - RNA, 19 nt, Artificial Sequence
  Description of Artificial Sequence: Synthetic oligonucleotide
cuucggugcuucggccacc

SEQ ID NO: 3105337 - RNA, 19 nt, Artificial Sequence
  Description of Artificial Sequence: Synthetic oligonucleotide
gguagcugcuuccuucggu

SEQ ID NO: 3105338 - RNA, 19 nt, Artificial Sequence
  Description of Artificial Sequence: Synthetic oligonucleotide
cccacccacgugcugcagg

SEQ ID NO: 3105339 - RNA, 19 nt, Artificial Sequence
  Description of Artificial Sequence: Synthetic oligonucleotide
gcuggugccggagucccug

SEQ ID NO: 3105340 - RNA, 19 nt, Artificial Sequence
  Description of Artificial Sequence: Synthetic oligonucleotide
cagcgcuggugccggaguc

SEQ ID NO: 3105341 - RNA, 19 nt, Artificial Sequence
  Description of Artificial Sequence: Synthetic oligonucleotide
agccagcagaucacagccu

SEQ ID NO: 3105342 - RNA, 19 nt, Artificial Sequence
  Description of Artificial Sequence: Synthetic oligonucleotide
ccucaucccugguggcugg

SEQ ID NO: 3105343 - RNA, 19 nt, Artificial Sequence
  Description of Artificial Sequence: Synthetic oligonucleotide
ccaccggccucaucccugg

SEQ ID NO: 3105344 - RNA, 19 nt, Artificial Sequence
  Description of Artificial Sequence: Synthetic oligonucleotide
gagucccuggcugcucauc

SEQ ID NO: 3105345 - RNA, 19 nt, Artificial Sequence
  Description of Artificial Sequence: Synthetic oligonucleotide
ccuucggugcuucggccac

SEQ ID NO: 3105346 - RNA, 19 nt, Artificial Sequence
  Description of Artificial Sequence: Synthetic oligonucleotide
cggugcuucggccaccggc

SEQ ID NO: 3105347 - RNA, 19 nt, Artificial Sequence
  Description of Artificial Sequence: Synthetic oligonucleotide
ggugguccccacccacgug

SEQ ID NO: 3105348 - RNA, 19 nt, Artificial Sequence
  Description of Artificial Sequence: Synthetic oligonucleotide
ugacagcgcuggugccgga

SEQ ID NO: 3105349 - RNA, 19 nt, Artificial Sequence
  Description of Artificial Sequence: Synthetic oligonucleotide
gugggacugggcgguggug

SEQ ID NO: 3105350 - RNA, 19 nt, Artificial Sequence
  Description of Artificial Sequence: Synthetic oligonucleotide
gucccuggcugcucaucaa

SEQ ID NO: 3105351 - RNA, 19 nt, Artificial Sequence
  Description of Artificial Sequence: Synthetic oligonucleotide
ccuuccucugagugcccac

SEQ ID NO: 3105352 - RNA, 19 nt, Artificial Sequence
  Description of Artificial Sequence: Synthetic oligonucleotide
cugcagccagcagaucaca

SEQ ID NO: 3105353 - RNA, 19 nt, Artificial Sequence
  Description of Artificial Sequence: Synthetic oligonucleotide
ggauaaagggcagucccuu

SEQ ID NO: 3105354 - RNA, 19 nt, Artificial Sequence
  Description of Artificial Sequence: Synthetic oligonucleotide
uucggccaccggccucauc

SEQ ID NO: 3105355 - RNA, 19 nt, Artificial Sequence
  Description of Artificial Sequence: Synthetic oligonucleotide
guggugguagcugcuuccu

SEQ ID NO: 3105356 - RNA, 19 nt, Artificial Sequence
  Description of Artificial Sequence: Synthetic oligonucleotide
ccacccacgugcugcagga

SEQ ID NO: 3105357 - RNA, 19 nt, Artificial Sequence
  Description of Artificial Sequence: Synthetic oligonucleotide
ccuucugcagccagcagau

SEQ ID NO: 3105358 - RNA, 19 nt, Artificial Sequence
  Description of Artificial Sequence: Synthetic oligonucleotide
cacccacgugcugcaggag

SEQ ID NO: 3105359 - RNA, 19 nt, Artificial Sequence
  Description of Artificial Sequence: Synthetic oligonucleotide
gcagcaugguggaaguggu

SEQ ID NO: 3105360 - RNA, 19 nt, Artificial Sequence
  Description of Artificial Sequence: Synthetic oligonucleotide
gccaccggccucaucccug

SEQ ID NO: 3105361 - RNA, 19 nt, Artificial Sequence
  Description of Artificial Sequence: Synthetic oligonucleotide
gguggugggacugggcggu

SEQ ID NO: 3105362 - RNA, 19 nt, Artificial Sequence
  Description of Artificial Sequence: Synthetic oligonucleotide
gccagcagaucacagccuu

SEQ ID NO: 3105363 - RNA, 19 nt, Artificial Sequence
  Description of Artificial Sequence: Synthetic oligonucleotide
gcgcuggugccggaguccc

SEQ ID NO: 3105364 - RNA, 19 nt, Artificial Sequence
  Description of Artificial Sequence: Synthetic oligonucleotide
ggugccggagucccuggcu

SEQ ID NO: 3105365 - RNA, 19 nt, Artificial Sequence
  Description of Artificial Sequence: Synthetic oligonucleotide
caucccugguggcuggcau

SEQ ID NO: 3105366 - RNA, 19 nt, Artificial Sequence
  Description of Artificial Sequence: Synthetic oligonucleotide
ggugggacugggcgguggu

SEQ ID NO: 3105367 - RNA, 19 nt, Artificial Sequence
  Description of Artificial Sequence: Synthetic oligonucleotide
guggugggacugggcggug

SEQ ID NO: 3105368 - RNA, 19 nt, Artificial Sequence
  Description of Artificial Sequence: Synthetic oligonucleotide
gcccacggugguccccacc

SEQ ID NO: 3105369 - RNA, 19 nt, Artificial Sequence
  Description of Artificial Sequence: Synthetic oligonucleotide
gggcagcaugguggaagug

SEQ ID NO: 3105370 - RNA, 19 nt, Artificial Sequence
  Description of Artificial Sequence: Synthetic oligonucleotide
gugcuucggccaccggccu

SEQ ID NO: 3105371 - RNA, 19 nt, Artificial Sequence
  Description of Artificial Sequence: Synthetic oligonucleotide
gggacugggcggugguggu

SEQ ID NO: 3105372 - RNA, 19 nt, Artificial Sequence
  Description of Artificial Sequence: Synthetic oligonucleotide
ccagaagaauaaggauaaa

SEQ ID NO: 3105373 - RNA, 19 nt, Artificial Sequence
  Description of Artificial Sequence: Synthetic oligonucleotide
ggccucaucccugguggcu

SEQ ID NO: 3105374 - RNA, 19 nt, Artificial Sequence
  Description of Artificial Sequence: Synthetic oligonucleotide
cugggcgguggugguagcu

SEQ ID NO: 3105375 - RNA, 19 nt, Artificial Sequence
  Description of Artificial Sequence: Synthetic oligonucleotide
ccccuuccucugagugccc

SEQ ID NO: 3105376 - RNA, 19 nt, Artificial Sequence
  Description of Artificial Sequence: Synthetic oligonucleotide
cggccaccggccucauccc

SEQ ID NO: 3105377 - RNA, 19 nt, Artificial Sequence
  Description of Artificial Sequence: Synthetic oligonucleotide
cggccucaucccugguggc

SEQ ID NO: 3105378 - RNA, 19 nt, Artificial Sequence
  Description of Artificial Sequence: Synthetic oligonucleotide
gcagucccuucugcagcca

SEQ ID NO: 3105379 - RNA, 19 nt, Artificial Sequence
  Description of Artificial Sequence: Synthetic oligonucleotide
cggagucccuggcugcuca

SEQ ID NO: 3105380 - RNA, 19 nt, Artificial Sequence
  Description of Artificial Sequence: Synthetic oligonucleotide
cccuuccucugagugccca

SEQ ID NO: 3105381 - RNA, 19 nt, Artificial Sequence
  Description of Artificial Sequence: Synthetic oligonucleotide
ggccaccggccucaucccu

SEQ ID NO: 3105382 - RNA, 19 nt, Artificial Sequence
  Description of Artificial Sequence: Synthetic oligonucleotide
gcugcuuccuucggugcuu

SEQ ID NO: 3105383 - RNA, 19 nt, Artificial Sequence
  Description of Artificial Sequence: Synthetic oligonucleotide
ggugggcagcaugguggaa

SEQ ID NO: 3105384 - RNA, 19 nt, Artificial Sequence
  Description of Artificial Sequence: Synthetic oligonucleotide
ccacgugcugcaggaggga

SEQ ID NO: 3105385 - RNA, 19 nt, Artificial Sequence
  Description of Artificial Sequence: Synthetic oligonucleotide
ggagucccuggcugcucau

SEQ ID NO: 3105386 - RNA, 19 nt, Artificial Sequence
  Description of Artificial Sequence: Synthetic oligonucleotide
ggacugggcggugguggua

SEQ ID NO: 3105387 - RNA, 19 nt, Artificial Sequence
  Description of Artificial Sequence: Synthetic oligonucleotide
ccacggugguccccaccca

SEQ ID NO: 3105388 - RNA, 19 nt, Artificial Sequence
  Description of Artificial Sequence: Synthetic oligonucleotide
cagcucugacagcgcuggu

SEQ ID NO: 3105389 - RNA, 19 nt, Artificial Sequence
  Description of Artificial Sequence: Synthetic oligonucleotide
ccggagucccuggcugcuc

SEQ ID NO: 3105390 - RNA, 19 nt, Artificial Sequence
  Description of Artificial Sequence: Synthetic oligonucleotide
gccggagucccuggcugcu

SEQ ID NO: 3105391 - RNA, 19 nt, Artificial Sequence
  Description of Artificial Sequence: Synthetic oligonucleotide
ccccacccacgugcugcag

SEQ ID NO: 3105392 - RNA, 19 nt, Artificial Sequence
  Description of Artificial Sequence: Synthetic oligonucleotide
gcgguggugguagcugcuu

SEQ ID NO: 3105393 - RNA, 19 nt, Artificial Sequence
  Description of Artificial Sequence: Synthetic oligonucleotide
caccggccucaucccuggu

SEQ ID NO: 3105394 - RNA, 19 nt, Artificial Sequence
  Description of Artificial Sequence: Synthetic oligonucleotide
cggugguccccacccacgu

SEQ ID NO: 3105395 - RNA, 19 nt, Artificial Sequence
  Description of Artificial Sequence: Synthetic oligonucleotide
cgcuggugccggagucccu

SEQ ID NO: 3105396 - RNA, 19 nt, Artificial Sequence
  Description of Artificial Sequence: Synthetic oligonucleotide
aaaaguacacuccucauac

SEQ ID NO: 3105397 - RNA, 19 nt, Artificial Sequence
  Description of Artificial Sequence: Synthetic oligonucleotide
aauaaauuaauauacuuaa

SEQ ID NO: 3105398 - RNA, 19 nt, Artificial Sequence
  Description of Artificial Sequence: Synthetic oligonucleotide
auuuguuuggcauuuacgc

SEQ ID NO: 3105399 - RNA, 19 nt, Artificial Sequence
  Description of Artificial Sequence: Synthetic oligonucleotide
aauaucugaacucaaauaa

SEQ ID NO: 3105400 - RNA, 19 nt, Artificial Sequence
  Description of Artificial Sequence: Synthetic oligonucleotide
uuuguuucaaaguacaagc

SEQ ID NO: 3105401 - RNA, 19 nt, Artificial Sequence
  Description of Artificial Sequence: Synthetic oligonucleotide
cucaaauaaauuaauauac

SEQ ID NO: 3105402 - RNA, 19 nt, Artificial Sequence
  Description of Artificial Sequence: Synthetic oligonucleotide
uaaauuaauauacuuaaaa

SEQ ID NO: 3105403 - RNA, 19 nt, Artificial Sequence
  Description of Artificial Sequence: Synthetic oligonucleotide
aaacuuuuguguauaaugc

SEQ ID NO: 3105404 - RNA, 19 nt, Artificial Sequence
  Description of Artificial Sequence: Synthetic oligonucleotide
aacuuuuguguauaaugcc

SEQ ID NO: 3105405 - RNA, 19 nt, Artificial Sequence
  Description of Artificial Sequence: Synthetic oligonucleotide
uaaacuuuuguguauaaug

SEQ ID NO: 3105406 - RNA, 19 nt, Artificial Sequence
  Description of Artificial Sequence: Synthetic oligonucleotide
agaauuauagcuuuuaaaa

SEQ ID NO: 3105407 - RNA, 19 nt, Artificial Sequence
  Description of Artificial Sequence: Synthetic oligonucleotide
aacucaaauaaauuaauau

SEQ ID NO: 3105408 - RNA, 19 nt, Artificial Sequence
  Description of Artificial Sequence: Synthetic oligonucleotide
uuuaauaugcacaaucaaa

SEQ ID NO: 3105409 - RNA, 19 nt, Artificial Sequence
  Description of Artificial Sequence: Synthetic oligonucleotide
uuaauaugcacaaucaaau

SEQ ID NO: 3105410 - RNA, 19 nt, Artificial Sequence
  Description of Artificial Sequence: Synthetic oligonucleotide
ucugguuccaguaagccag

SEQ ID NO: 3105411 - RNA, 19 nt, Artificial Sequence
  Description of Artificial Sequence: Synthetic oligonucleotide
aauaugcacaaucaaauuu

SEQ ID NO: 3105412 - RNA, 19 nt, Artificial Sequence
  Description of Artificial Sequence: Synthetic oligonucleotide
aaaauaucugaacucaaau

SEQ ID NO: 3105413 - RNA, 19 nt, Artificial Sequence
  Description of Artificial Sequence: Synthetic oligonucleotide
uauuuguuuggcauuuacg

SEQ ID NO: 3105414 - RNA, 19 nt, Artificial Sequence
  Description of Artificial Sequence: Synthetic oligonucleotide
ucaaauaaauuaauauacu

SEQ ID NO: 3105415 - RNA, 19 nt, Artificial Sequence
  Description of Artificial Sequence: Synthetic oligonucleotide
uuguguauaaugccugugg

SEQ ID NO: 3105416 - RNA, 19 nt, Artificial Sequence
  Description of Artificial Sequence: Synthetic oligonucleotide
uguguauaaugccuguggg

SEQ ID NO: 3105417 - RNA, 19 nt, Artificial Sequence
  Description of Artificial Sequence: Synthetic oligonucleotide
ucugaacucaaauaaauua

SEQ ID NO: 3105418 - RNA, 19 nt, Artificial Sequence
  Description of Artificial Sequence: Synthetic oligonucleotide
aagaauuauagcuuuuaaa

SEQ ID NO: 3105419 - RNA, 19 nt, Artificial Sequence
  Description of Artificial Sequence: Synthetic oligonucleotide
aaaguacaagccaaggcac

SEQ ID NO: 3105420 - RNA, 19 nt, Artificial Sequence
  Description of Artificial Sequence: Synthetic oligonucleotide
ucaaaguacaagccaaggc

SEQ ID NO: 3105421 - RNA, 19 nt, Artificial Sequence
  Description of Artificial Sequence: Synthetic oligonucleotide
aagcuggcuaauuuguuuc

SEQ ID NO: 3105422 - RNA, 19 nt, Artificial Sequence
  Description of Artificial Sequence: Synthetic oligonucleotide
aaauaucugaacucaaaua

SEQ ID NO: 3105423 - RNA, 19 nt, Artificial Sequence
  Description of Artificial Sequence: Synthetic oligonucleotide
auugcaaaccauuggugac

SEQ ID NO: 3105424 - RNA, 19 nt, Artificial Sequence
  Description of Artificial Sequence: Synthetic oligonucleotide
ucuacaagaauuauagcuu

SEQ ID NO: 3105425 - RNA, 19 nt, Artificial Sequence
  Description of Artificial Sequence: Synthetic oligonucleotide
caguaagccagaaagcugg

SEQ ID NO: 3105426 - RNA, 19 nt, Artificial Sequence
  Description of Artificial Sequence: Synthetic oligonucleotide
augucuacaagaauuauag

SEQ ID NO: 3105427 - RNA, 19 nt, Artificial Sequence
  Description of Artificial Sequence: Synthetic oligonucleotide
uuguuuggcauuuacgcug

SEQ ID NO: 3105428 - RNA, 19 nt, Artificial Sequence
  Description of Artificial Sequence: Synthetic oligonucleotide
uuuuaauaugcacaaucaa

SEQ ID NO: 3105429 - RNA, 19 nt, Artificial Sequence
  Description of Artificial Sequence: Synthetic oligonucleotide
uguauaaugccugugggac

SEQ ID NO: 3105430 - RNA, 19 nt, Artificial Sequence
  Description of Artificial Sequence: Synthetic oligonucleotide
cuaauuuguuucaaaguac

SEQ ID NO: 3105431 - RNA, 19 nt, Artificial Sequence
  Description of Artificial Sequence: Synthetic oligonucleotide
uaucugaacucaaauaaau

SEQ ID NO: 3105432 - RNA, 19 nt, Artificial Sequence
  Description of Artificial Sequence: Synthetic oligonucleotide
auuuguuucaaaguacaag

SEQ ID NO: 3105433 - RNA, 19 nt, Artificial Sequence
  Description of Artificial Sequence: Synthetic oligonucleotide
uggcuaauuuguuucaaag

SEQ ID NO: 3105434 - RNA, 19 nt, Artificial Sequence
  Description of Artificial Sequence: Synthetic oligonucleotide
aucagcagugcucugguuc

SEQ ID NO: 3105435 - RNA, 19 nt, Artificial Sequence
  Description of Artificial Sequence: Synthetic oligonucleotide
ugaacucaaauaaauuaau

SEQ ID NO: 3105436 - RNA, 19 nt, Artificial Sequence
  Description of Artificial Sequence: Synthetic oligonucleotide
uguuuggcauuuacgcugg

SEQ ID NO: 3105437 - RNA, 19 nt, Artificial Sequence
  Description of Artificial Sequence: Synthetic oligonucleotide
uccucauacuauuuguuug

SEQ ID NO: 3105438 - RNA, 19 nt, Artificial Sequence
  Description of Artificial Sequence: Synthetic oligonucleotide
caaaguacaagccaaggca

SEQ ID NO: 3105439 - RNA, 19 nt, Artificial Sequence
  Description of Artificial Sequence: Synthetic oligonucleotide
uucaaaguacaagccaagg

SEQ ID NO: 3105440 - RNA, 19 nt, Artificial Sequence
  Description of Artificial Sequence: Synthetic oligonucleotide
gucuacaagaauuauagcu

SEQ ID NO: 3105441 - RNA, 19 nt, Artificial Sequence
  Description of Artificial Sequence: Synthetic oligonucleotide
uuuguuuggcauuuacgcu

SEQ ID NO: 3105442 - RNA, 19 nt, Artificial Sequence
  Description of Artificial Sequence: Synthetic oligonucleotide
cuuuuguguauaaugccug

SEQ ID NO: 3105443 - RNA, 19 nt, Artificial Sequence
  Description of Artificial Sequence: Synthetic oligonucleotide
aaguacacuccucauacua

SEQ ID NO: 3105444 - RNA, 19 nt, Artificial Sequence
  Description of Artificial Sequence: Synthetic oligonucleotide
gacacggucacaucagcag

SEQ ID NO: 3105445 - RNA, 19 nt, Artificial Sequence
  Description of Artificial Sequence: Synthetic oligonucleotide
uuggcauuuacgcugguua

SEQ ID NO: 3105446 - RNA, 19 nt, Artificial Sequence
  Description of Artificial Sequence: Synthetic oligonucleotide
aaagcuggcuaauuuguuu

SEQ ID NO: 3105447 - RNA, 19 nt, Artificial Sequence
  Description of Artificial Sequence: Synthetic oligonucleotide
uccaguaagccagaaagcu

SEQ ID NO: 3105448 - RNA, 19 nt, Artificial Sequence
  Description of Artificial Sequence: Synthetic oligonucleotide
auuuacgcugguuaaacuu

SEQ ID NO: 3105449 - RNA, 19 nt, Artificial Sequence
  Description of Artificial Sequence: Synthetic oligonucleotide
uuuacccacagaaugucua

SEQ ID NO: 3105450 - RNA, 19 nt, Artificial Sequence
  Description of Artificial Sequence: Synthetic oligonucleotide
uuuacgcugguuaaacuuu

SEQ ID NO: 3105451 - RNA, 19 nt, Artificial Sequence
  Description of Artificial Sequence: Synthetic oligonucleotide
uauaaugccugugggacac

SEQ ID NO: 3105452 - RNA, 19 nt, Artificial Sequence
  Description of Artificial Sequence: Synthetic oligonucleotide
uuccaguaagccagaaagc

SEQ ID NO: 3105453 - RNA, 19 nt, Artificial Sequence
  Description of Artificial Sequence: Synthetic oligonucleotide
cugaacucaaauaaauuaa

SEQ ID NO: 3105454 - RNA, 19 nt, Artificial Sequence
  Description of Artificial Sequence: Synthetic oligonucleotide
ucagcagugcucugguucc

SEQ ID NO: 3105455 - RNA, 19 nt, Artificial Sequence
  Description of Artificial Sequence: Synthetic oligonucleotide
cagaaagcuggcuaauuug

SEQ ID NO: 3105456 - RNA, 19 nt, Artificial Sequence
  Description of Artificial Sequence: Synthetic oligonucleotide
ucauacuauuuguuuggca

SEQ ID NO: 3105457 - RNA, 19 nt, Artificial Sequence
  Description of Artificial Sequence: Synthetic oligonucleotide
aaugucuacaagaauuaua

SEQ ID NO: 3105458 - RNA, 19 nt, Artificial Sequence
  Description of Artificial Sequence: Synthetic oligonucleotide
augccugugggacacgguc

SEQ ID NO: 3105459 - RNA, 19 nt, Artificial Sequence
  Description of Artificial Sequence: Synthetic oligonucleotide
uaauaugcacaaucaaauu

SEQ ID NO: 3105460 - RNA, 19 nt, Artificial Sequence
  Description of Artificial Sequence: Synthetic oligonucleotide
acuuuuguguauaaugccu

SEQ ID NO: 3105461 - RNA, 19 nt, Artificial Sequence
  Description of Artificial Sequence: Synthetic oligonucleotide
uuuuacccacagaaugucu

SEQ ID NO: 3105462 - RNA, 19 nt, Artificial Sequence
  Description of Artificial Sequence: Synthetic oligonucleotide
ugucuacaagaauuauagc

SEQ ID NO: 3105463 - RNA, 19 nt, Artificial Sequence
  Description of Artificial Sequence: Synthetic oligonucleotide
cuauuuguuuggcauuuac

SEQ ID NO: 3105464 - RNA, 19 nt, Artificial Sequence
  Description of Artificial Sequence: Synthetic oligonucleotide
aaaguacacuccucauacu

SEQ ID NO: 3105465 - RNA, 19 nt, Artificial Sequence
  Description of Artificial Sequence: Synthetic oligonucleotide
gcuaauuuguuucaaagua

SEQ ID NO: 3105466 - RNA, 19 nt, Artificial Sequence
  Description of Artificial Sequence: Synthetic oligonucleotide
uuuguguauaaugccugug

SEQ ID NO: 3105467 - RNA, 19 nt, Artificial Sequence
  Description of Artificial Sequence: Synthetic oligonucleotide
auaugcacaaucaaauuuu

SEQ ID NO: 3105468 - RNA, 19 nt, Artificial Sequence
  Description of Artificial Sequence: Synthetic oligonucleotide
aagccagaaagcuggcuaa

SEQ ID NO: 3105469 - RNA, 19 nt, Artificial Sequence
  Description of Artificial Sequence: Synthetic oligonucleotide
cauacuauuuguuuggcau

SEQ ID NO: 3105470 - RNA, 19 nt, Artificial Sequence
  Description of Artificial Sequence: Synthetic oligonucleotide
ugggacacggucacaucag

SEQ ID NO: 3105471 - RNA, 19 nt, Artificial Sequence
  Description of Artificial Sequence: Synthetic oligonucleotide
uuaaacuuuuguguauaau

SEQ ID NO: 3105472 - RNA, 19 nt, Artificial Sequence
  Description of Artificial Sequence: Synthetic oligonucleotide
caaauaaauuaauauacuu

SEQ ID NO: 3105473 - RNA, 19 nt, Artificial Sequence
  Description of Artificial Sequence: Synthetic oligonucleotide
uuacccacagaaugucuac

SEQ ID NO: 3105474 - RNA, 19 nt, Artificial Sequence
  Description of Artificial Sequence: Synthetic oligonucleotide
ccucauacuauuuguuugg

SEQ ID NO: 3105475 - RNA, 19 nt, Artificial Sequence
  Description of Artificial Sequence: Synthetic oligonucleotide
aauuuguuucaaaguacaa

SEQ ID NO: 3105476 - RNA, 19 nt, Artificial Sequence
  Description of Artificial Sequence: Synthetic oligonucleotide
uaaugccugugggacacgg

SEQ ID NO: 3105477 - RNA, 19 nt, Artificial Sequence
  Description of Artificial Sequence: Synthetic oligonucleotide
ugguuaaacuuuuguguau

SEQ ID NO: 3105478 - RNA, 19 nt, Artificial Sequence
  Description of Artificial Sequence: Synthetic oligonucleotide
cacagaaugucuacaagaa

SEQ ID NO: 3105479 - RNA, 19 nt, Artificial Sequence
  Description of Artificial Sequence: Synthetic oligonucleotide
ugcucugguuccaguaagc

SEQ ID NO: 3105480 - RNA, 19 nt, Artificial Sequence
  Description of Artificial Sequence: Synthetic oligonucleotide
acagaaugucuacaagaau

SEQ ID NO: 3105481 - RNA, 19 nt, Artificial Sequence
  Description of Artificial Sequence: Synthetic oligonucleotide
auaaauuaauauacuuaaa

SEQ ID NO: 3105482 - RNA, 19 nt, Artificial Sequence
  Description of Artificial Sequence: Synthetic oligonucleotide
cagaaugucuacaagaauu

SEQ ID NO: 3105483 - RNA, 19 nt, Artificial Sequence
  Description of Artificial Sequence: Synthetic oligonucleotide
cacaucagcagugcucugg

SEQ ID NO: 3105484 - RNA, 19 nt, Artificial Sequence
  Description of Artificial Sequence: Synthetic oligonucleotide
auacuauuuguuuggcauu

SEQ ID NO: 3105485 - RNA, 19 nt, Artificial Sequence
  Description of Artificial Sequence: Synthetic oligonucleotide
gaacucaaauaaauuaaua

SEQ ID NO: 3105486 - RNA, 19 nt, Artificial Sequence
  Description of Artificial Sequence: Synthetic oligonucleotide
uugcaaaccauuggugacu

SEQ ID NO: 3105487 - RNA, 19 nt, Artificial Sequence
  Description of Artificial Sequence: Synthetic oligonucleotide
guguauaaugccuguggga

SEQ ID NO: 3105488 - RNA, 19 nt, Artificial Sequence
  Description of Artificial Sequence: Synthetic oligonucleotide
cugguuaaacuuuugugua

SEQ ID NO: 3105489 - RNA, 19 nt, Artificial Sequence
  Description of Artificial Sequence: Synthetic oligonucleotide
uacaagaauuauagcuuuu

SEQ ID NO: 3105490 - RNA, 19 nt, Artificial Sequence
  Description of Artificial Sequence: Synthetic oligonucleotide
acaagaauuauagcuuuua

SEQ ID NO: 3105491 - RNA, 19 nt, Artificial Sequence
  Description of Artificial Sequence: Synthetic oligonucleotide
uacuauuuguuuggcauuu

SEQ ID NO: 3105492 - RNA, 19 nt, Artificial Sequence
  Description of Artificial Sequence: Synthetic oligonucleotide
agaaugucuacaagaauua

SEQ ID NO: 3105493 - RNA, 19 nt, Artificial Sequence
  Description of Artificial Sequence: Synthetic oligonucleotide
acaucagcagugcucuggu

SEQ ID NO: 3105494 - RNA, 19 nt, Artificial Sequence
  Description of Artificial Sequence: Synthetic oligonucleotide
auaucugaacucaaauaaa

SEQ ID NO: 3105495 - RNA, 19 nt, Artificial Sequence
  Description of Artificial Sequence: Synthetic oligonucleotide
acacggucacaucagcagu

SEQ ID NO: 3105496 - RNA, 19 nt, Artificial Sequence
  Description of Artificial Sequence: Synthetic oligonucleotide
aguaagccagaaagcuggc

SEQ ID NO: 3105497 - RNA, 19 nt, Artificial Sequence
  Description of Artificial Sequence: Synthetic oligonucleotide
gcugguuaaacuuuugugu

SEQ ID NO: 3105498 - RNA, 19 nt, Artificial Sequence
  Description of Artificial Sequence: Synthetic oligonucleotide
cucauacuauuuguuuggc

SEQ ID NO: 3105499 - RNA, 19 nt, Artificial Sequence
  Description of Artificial Sequence: Synthetic oligonucleotide
uacgcugguuaaacuuuug

SEQ ID NO: 3105500 - RNA, 19 nt, Artificial Sequence
  Description of Artificial Sequence: Synthetic oligonucleotide
aaguacaagccaaggcacu

SEQ ID NO: 3105501 - RNA, 19 nt, Artificial Sequence
  Description of Artificial Sequence: Synthetic oligonucleotide
acgcugguuaaacuuuugu

SEQ ID NO: 3105502 - RNA, 19 nt, Artificial Sequence
  Description of Artificial Sequence: Synthetic oligonucleotide
uggcauuuacgcugguuaa

SEQ ID NO: 3105503 - RNA, 19 nt, Artificial Sequence
  Description of Artificial Sequence: Synthetic oligonucleotide
caagaauuauagcuuuuaa

SEQ ID NO: 3105504 - RNA, 19 nt, Artificial Sequence
  Description of Artificial Sequence: Synthetic oligonucleotide
acggucacaucagcagugc

SEQ ID NO: 3105505 - RNA, 19 nt, Artificial Sequence
  Description of Artificial Sequence: Synthetic oligonucleotide
cacggucacaucagcagug

SEQ ID NO: 3105506 - RNA, 19 nt, Artificial Sequence
  Description of Artificial Sequence: Synthetic oligonucleotide
guuaaacuuuuguguauaa

SEQ ID NO: 3105507 - RNA, 19 nt, Artificial Sequence
  Description of Artificial Sequence: Synthetic oligonucleotide
agugcucugguuccaguaa

SEQ ID NO: 3105508 - RNA, 19 nt, Artificial Sequence
  Description of Artificial Sequence: Synthetic oligonucleotide
ugccugugggacacgguca

SEQ ID NO: 3105509 - RNA, 19 nt, Artificial Sequence
  Description of Artificial Sequence: Synthetic oligonucleotide
uuacgcugguuaaacuuuu

SEQ ID NO: 3105510 - RNA, 19 nt, Artificial Sequence
  Description of Artificial Sequence: Synthetic oligonucleotide
uacacuccucauacuauuu

SEQ ID NO: 3105511 - RNA, 19 nt, Artificial Sequence
  Description of Artificial Sequence: Synthetic oligonucleotide
gugggacacggucacauca

SEQ ID NO: 3105512 - RNA, 19 nt, Artificial Sequence
  Description of Artificial Sequence: Synthetic oligonucleotide
gugcucugguuccaguaag

SEQ ID NO: 3105513 - RNA, 19 nt, Artificial Sequence
  Description of Artificial Sequence: Synthetic oligonucleotide
guauaaugccugugggaca

SEQ ID NO: 3105514 - RNA, 19 nt, Artificial Sequence
  Description of Artificial Sequence: Synthetic oligonucleotide
aucugaacucaaauaaauu

SEQ ID NO: 3105515 - RNA, 19 nt, Artificial Sequence
  Description of Artificial Sequence: Synthetic oligonucleotide
aguacacuccucauacuau

SEQ ID NO: 3105516 - RNA, 19 nt, Artificial Sequence
  Description of Artificial Sequence: Synthetic oligonucleotide
uacccacagaaugucuaca

SEQ ID NO: 3105517 - RNA, 19 nt, Artificial Sequence
  Description of Artificial Sequence: Synthetic oligonucleotide
ccacagaaugucuacaaga

SEQ ID NO: 3105518 - RNA, 19 nt, Artificial Sequence
  Description of Artificial Sequence: Synthetic oligonucleotide
gcauuuacgcugguuaaac

SEQ ID NO: 3105519 - RNA, 19 nt, Artificial Sequence
  Description of Artificial Sequence: Synthetic oligonucleotide
cuacaagaauuauagcuuu

SEQ ID NO: 3105520 - RNA, 19 nt, Artificial Sequence
  Description of Artificial Sequence: Synthetic oligonucleotide
ccaguaagccagaaagcug

SEQ ID NO: 3105521 - RNA, 19 nt, Artificial Sequence
  Description of Artificial Sequence: Synthetic oligonucleotide
ggcuaauuuguuucaaagu

SEQ ID NO: 3105522 - RNA, 19 nt, Artificial Sequence
  Description of Artificial Sequence: Synthetic oligonucleotide
gucacaucagcagugcucu

SEQ ID NO: 3105523 - RNA, 19 nt, Artificial Sequence
  Description of Artificial Sequence: Synthetic oligonucleotide
ugcaaaccauuggugacuu

SEQ ID NO: 3105524 - RNA, 19 nt, Artificial Sequence
  Description of Artificial Sequence: Synthetic oligonucleotide
cuggcuaauuuguuucaaa

SEQ ID NO: 3105525 - RNA, 19 nt, Artificial Sequence
  Description of Artificial Sequence: Synthetic oligonucleotide
ugugggacacggucacauc

SEQ ID NO: 3105526 - RNA, 19 nt, Artificial Sequence
  Description of Artificial Sequence: Synthetic oligonucleotide
aaugccugugggacacggu

SEQ ID NO: 3105527 - RNA, 19 nt, Artificial Sequence
  Description of Artificial Sequence: Synthetic oligonucleotide
cgcugguuaaacuuuugug

SEQ ID NO: 3105528 - RNA, 19 nt, Artificial Sequence
  Description of Artificial Sequence: Synthetic oligonucleotide
gguuaaacuuuuguguaua

SEQ ID NO: 3105529 - RNA, 19 nt, Artificial Sequence
  Description of Artificial Sequence: Synthetic oligonucleotide
ggucacaucagcagugcuc

SEQ ID NO: 3105530 - RNA, 19 nt, Artificial Sequence
  Description of Artificial Sequence: Synthetic oligonucleotide
ucacaucagcagugcucug

SEQ ID NO: 3105531 - RNA, 19 nt, Artificial Sequence
  Description of Artificial Sequence: Synthetic oligonucleotide
auaaugccugugggacacg

SEQ ID NO: 3105532 - RNA, 19 nt, Artificial Sequence
  Description of Artificial Sequence: Synthetic oligonucleotide
acuccucauacuauuuguu

SEQ ID NO: 3105533 - RNA, 19 nt, Artificial Sequence
  Description of Artificial Sequence: Synthetic oligonucleotide
gaaugucuacaagaauuau

SEQ ID NO: 3105534 - RNA, 19 nt, Artificial Sequence
  Description of Artificial Sequence: Synthetic oligonucleotide
cccacagaaugucuacaag

SEQ ID NO: 3105535 - RNA, 19 nt, Artificial Sequence
  Description of Artificial Sequence: Synthetic oligonucleotide
agcagugcucugguuccag

SEQ ID NO: 3105536 - RNA, 19 nt, Artificial Sequence
  Description of Artificial Sequence: Synthetic oligonucleotide
cauuuacgcugguuaaacu

SEQ ID NO: 3105537 - RNA, 19 nt, Artificial Sequence
  Description of Artificial Sequence: Synthetic oligonucleotide
caaaccauuggugacuuuu

SEQ ID NO: 3105538 - RNA, 19 nt, Artificial Sequence
  Description of Artificial Sequence: Synthetic oligonucleotide
guacacuccucauacuauu

SEQ ID NO: 3105539 - RNA, 19 nt, Artificial Sequence
  Description of Artificial Sequence: Synthetic oligonucleotide
acuauuuguuuggcauuua

SEQ ID NO: 3105540 - RNA, 19 nt, Artificial Sequence
  Description of Artificial Sequence: Synthetic oligonucleotide
gguuccaguaagccagaaa

SEQ ID NO: 3105541 - RNA, 19 nt, Artificial Sequence
  Description of Artificial Sequence: Synthetic oligonucleotide
cagugcucugguuccagua

SEQ ID NO: 3105542 - RNA, 19 nt, Artificial Sequence
  Description of Artificial Sequence: Synthetic oligonucleotide
gaaagcuggcuaauuuguu

SEQ ID NO: 3105543 - RNA, 19 nt, Artificial Sequence
  Description of Artificial Sequence: Synthetic oligonucleotide
agccagaaagcuggcuaau

SEQ ID NO: 3105544 - RNA, 19 nt, Artificial Sequence
  Description of Artificial Sequence: Synthetic oligonucleotide
ggcauuuacgcugguuaaa

SEQ ID NO: 3105545 - RNA, 19 nt, Artificial Sequence
  Description of Artificial Sequence: Synthetic oligonucleotide
guaagccagaaagcuggcu

SEQ ID NO: 3105546 - RNA, 19 nt, Artificial Sequence
  Description of Artificial Sequence: Synthetic oligonucleotide
cugugggacacggucacau

SEQ ID NO: 3105547 - RNA, 19 nt, Artificial Sequence
  Description of Artificial Sequence: Synthetic oligonucleotide
gcuggcuaauuuguuucaa

SEQ ID NO: 3105548 - RNA, 19 nt, Artificial Sequence
  Description of Artificial Sequence: Synthetic oligonucleotide
ccagaaagcuggcuaauuu

SEQ ID NO: 3105549 - RNA, 19 nt, Artificial Sequence
  Description of Artificial Sequence: Synthetic oligonucleotide
guuuggcauuuacgcuggu

SEQ ID NO: 3105550 - RNA, 19 nt, Artificial Sequence
  Description of Artificial Sequence: Synthetic oligonucleotide
cagcagugcucugguucca

SEQ ID NO: 3105551 - RNA, 19 nt, Artificial Sequence
  Description of Artificial Sequence: Synthetic oligonucleotide
gcagugcucugguuccagu

SEQ ID NO: 3105552 - RNA, 19 nt, Artificial Sequence
  Description of Artificial Sequence: Synthetic oligonucleotide
caucagcagugcucugguu

SEQ ID NO: 3105553 - RNA, 19 nt, Artificial Sequence
  Description of Artificial Sequence: Synthetic oligonucleotide
gccagaaagcuggcuaauu

SEQ ID NO: 3105554 - RNA, 19 nt, Artificial Sequence
  Description of Artificial Sequence: Synthetic oligonucleotide
ccugugggacacggucaca

SEQ ID NO: 3105555 - RNA, 19 nt, Artificial Sequence
  Description of Artificial Sequence: Synthetic oligonucleotide
cggucacaucagcagugcu

SEQ ID NO: 3105556 - RNA, 19 nt, Artificial Sequence
  Description of Artificial Sequence: Synthetic oligonucleotide
aaaaggggagacaagaugg

SEQ ID NO: 3105557 - RNA, 19 nt, Artificial Sequence
  Description of Artificial Sequence: Synthetic oligonucleotide
gaaacuuccucacggaugg

SEQ ID NO: 3105558 - RNA, 19 nt, Artificial Sequence
  Description of Artificial Sequence: Synthetic oligonucleotide
aagauggugaaacuuccuc

SEQ ID NO: 3105559 - RNA, 19 nt, Artificial Sequence
  Description of Artificial Sequence: Synthetic oligonucleotide
ugagcauugggcagcaagg

SEQ ID NO: 3105560 - RNA, 19 nt, Artificial Sequence
  Description of Artificial Sequence: Synthetic oligonucleotide
uggugaaacuuccucacgg

SEQ ID NO: 3105561 - RNA, 19 nt, Artificial Sequence
  Description of Artificial Sequence: Synthetic oligonucleotide
ugcagaaguuuccugagca

SEQ ID NO: 3105562 - RNA, 19 nt, Artificial Sequence
  Description of Artificial Sequence: Synthetic oligonucleotide
ugaaacuuccucacggaug

SEQ ID NO: 3105563 - RNA, 19 nt, Artificial Sequence
  Description of Artificial Sequence: Synthetic oligonucleotide
ucacggauggcccuucugg

SEQ ID NO: 3105564 - RNA, 19 nt, Artificial Sequence
  Description of Artificial Sequence: Synthetic oligonucleotide
agccauagagacuggaagg

SEQ ID NO: 3105565 - RNA, 19 nt, Artificial Sequence
  Description of Artificial Sequence: Synthetic oligonucleotide
aacuuccucacggauggcc

SEQ ID NO: 3105566 - RNA, 19 nt, Artificial Sequence
  Description of Artificial Sequence: Synthetic oligonucleotide
uccuuguacaggcuguggg

SEQ ID NO: 3105567 - RNA, 19 nt, Artificial Sequence
  Description of Artificial Sequence: Synthetic oligonucleotide
ucaggaucaaaccgaagga

SEQ ID NO: 3105568 - RNA, 19 nt, Artificial Sequence
  Description of Artificial Sequence: Synthetic oligonucleotide
cauagcuucuuacugcugc

SEQ ID NO: 3105569 - RNA, 19 nt, Artificial Sequence
  Description of Artificial Sequence: Synthetic oligonucleotide
ucugcuguacuccuuguac

SEQ ID NO: 3105570 - RNA, 19 nt, Artificial Sequence
  Description of Artificial Sequence: Synthetic oligonucleotide
auagcuucuuacugcugcc

SEQ ID NO: 3105571 - RNA, 19 nt, Artificial Sequence
  Description of Artificial Sequence: Synthetic oligonucleotide
uucuggcccacaaaagggg

SEQ ID NO: 3105572 - RNA, 19 nt, Artificial Sequence
  Description of Artificial Sequence: Synthetic oligonucleotide
gagccauagagacuggaag

SEQ ID NO: 3105573 - RNA, 19 nt, Artificial Sequence
  Description of Artificial Sequence: Synthetic oligonucleotide
cuugacuaccuucuggccc

SEQ ID NO: 3105574 - RNA, 19 nt, Artificial Sequence
  Description of Artificial Sequence: Synthetic oligonucleotide
cuucuggcccacaaaaggg

SEQ ID NO: 3105575 - RNA, 19 nt, Artificial Sequence
  Description of Artificial Sequence: Synthetic oligonucleotide
aaggagucggggcauagcu

SEQ ID NO: 3105576 - RNA, 19 nt, Artificial Sequence
  Description of Artificial Sequence: Synthetic oligonucleotide
agucuugacuaccuucugg

SEQ ID NO: 3105577 - RNA, 19 nt, Artificial Sequence
  Description of Artificial Sequence: Synthetic oligonucleotide
gauggugaaacuuccucac

SEQ ID NO: 3105578 - RNA, 19 nt, Artificial Sequence
  Description of Artificial Sequence: Synthetic oligonucleotide
agcauugggcagcaaggcc

SEQ ID NO: 3105579 - RNA, 19 nt, Artificial Sequence
  Description of Artificial Sequence: Synthetic oligonucleotide
aaguuuccugagcauuggg

SEQ ID NO: 3105580 - RNA, 19 nt, Artificial Sequence
  Description of Artificial Sequence: Synthetic oligonucleotide
agcuucuuacugcugcccc

SEQ ID NO: 3105581 - RNA, 19 nt, Artificial Sequence
  Description of Artificial Sequence: Synthetic oligonucleotide
auccauggccucuuucugc

SEQ ID NO: 3105582 - RNA, 19 nt, Artificial Sequence
  Description of Artificial Sequence: Synthetic oligonucleotide
aguuuccugagcauugggc

SEQ ID NO: 3105583 - RNA, 19 nt, Artificial Sequence
  Description of Artificial Sequence: Synthetic oligonucleotide
agauggugaaacuuccuca

SEQ ID NO: 3105584 - RNA, 19 nt, Artificial Sequence
  Description of Artificial Sequence: Synthetic oligonucleotide
caaaaggggagacaagaug

SEQ ID NO: 3105585 - RNA, 19 nt, Artificial Sequence
  Description of Artificial Sequence: Synthetic oligonucleotide
cuguacuccuuguacaggc

SEQ ID NO: 3105586 - RNA, 19 nt, Artificial Sequence
  Description of Artificial Sequence: Synthetic oligonucleotide
gucuugacuaccuucuggc

SEQ ID NO: 3105587 - RNA, 19 nt, Artificial Sequence
  Description of Artificial Sequence: Synthetic oligonucleotide
ugcuguacuccuuguacag

SEQ ID NO: 3105588 - RNA, 19 nt, Artificial Sequence
  Description of Artificial Sequence: Synthetic oligonucleotide
uugacuaccuucuggccca

SEQ ID NO: 3105589 - RNA, 19 nt, Artificial Sequence
  Description of Artificial Sequence: Synthetic oligonucleotide
auagagacuggaaggaguc

SEQ ID NO: 3105590 - RNA, 19 nt, Artificial Sequence
  Description of Artificial Sequence: Synthetic oligonucleotide
agagacuggaaggagucgg

SEQ ID NO: 3105591 - RNA, 19 nt, Artificial Sequence
  Description of Artificial Sequence: Synthetic oligonucleotide
  modified_base (15)..(15): a, c, u, g, unknown or other
ucaaaccgaaggaanaauu

SEQ ID NO: 3105592 - RNA, 19 nt, Artificial Sequence
  Description of Artificial Sequence: Synthetic oligonucleotide
gacaagauggugaaacuuc

SEQ ID NO: 3105593 - RNA, 19 nt, Artificial Sequence
  Description of Artificial Sequence: Synthetic oligonucleotide
guuuccugagcauugggca

SEQ ID NO: 3105594 - RNA, 19 nt, Artificial Sequence
  Description of Artificial Sequence: Synthetic oligonucleotide
uaccuucuggcccacaaaa

SEQ ID NO: 3105595 - RNA, 19 nt, Artificial Sequence
  Description of Artificial Sequence: Synthetic oligonucleotide
acuggaaggagucggggca

SEQ ID NO: 3105596 - RNA, 19 nt, Artificial Sequence
  Description of Artificial Sequence: Synthetic oligonucleotide
uuuccaugcaccugggcau

SEQ ID NO: 3105597 - RNA, 19 nt, Artificial Sequence
  Description of Artificial Sequence: Synthetic oligonucleotide
cugagcauugggcagcaag

SEQ ID NO: 3105598 - RNA, 19 nt, Artificial Sequence
  Description of Artificial Sequence: Synthetic oligonucleotide
cuuucugcuguacuccuug

SEQ ID NO: 3105599 - RNA, 19 nt, Artificial Sequence
  Description of Artificial Sequence: Synthetic oligonucleotide
gaaguuuccugagcauugg

SEQ ID NO: 3105600 - RNA, 19 nt, Artificial Sequence
  Description of Artificial Sequence: Synthetic oligonucleotide
gcauccuggagccauagag

SEQ ID NO: 3105601 - RNA, 19 nt, Artificial Sequence
  Description of Artificial Sequence: Synthetic oligonucleotide
auggugaaacuuccucacg

SEQ ID NO: 3105602 - RNA, 19 nt, Artificial Sequence
  Description of Artificial Sequence: Synthetic oligonucleotide
  modified_base (13)..(13): a, c, u, g, unknown or other
aaaccgaaggaanaauuuu

SEQ ID NO: 3105603 - RNA, 19 nt, Artificial Sequence
  Description of Artificial Sequence: Synthetic oligonucleotide
ucuugacuaccuucuggcc

SEQ ID NO: 3105604 - RNA, 19 nt, Artificial Sequence
  Description of Artificial Sequence: Synthetic oligonucleotide
acuuccucacggauggccc

SEQ ID NO: 3105605 - RNA, 19 nt, Artificial Sequence
  Description of Artificial Sequence: Synthetic oligonucleotide
ggagacaagauggugaaac

SEQ ID NO: 3105606 - RNA, 19 nt, Artificial Sequence
  Description of Artificial Sequence: Synthetic oligonucleotide
gacuggaaggagucggggc

SEQ ID NO: 3105607 - RNA, 19 nt, Artificial Sequence
  Description of Artificial Sequence: Synthetic oligonucleotide
gauccauggccucuuucug

SEQ ID NO: 3105608 - RNA, 19 nt, Artificial Sequence
  Description of Artificial Sequence: Synthetic oligonucleotide
ucuggcccacaaaagggga

SEQ ID NO: 3105609 - RNA, 19 nt, Artificial Sequence
  Description of Artificial Sequence: Synthetic oligonucleotide
uacuccuuguacaggcugu

SEQ ID NO: 3105610 - RNA, 19 nt, Artificial Sequence
  Description of Artificial Sequence: Synthetic oligonucleotide
uccauggccucuuucugcu

SEQ ID NO: 3105611 - RNA, 19 nt, Artificial Sequence
  Description of Artificial Sequence: Synthetic oligonucleotide
gcugcugccgaguagcucc

SEQ ID NO: 3105612 - RNA, 19 nt, Artificial Sequence
  Description of Artificial Sequence: Synthetic oligonucleotide
  modified_base (16)..(16): a, c, u, g, unknown or other
aucaaaccgaaggaanaau

SEQ ID NO: 3105613 - RNA, 19 nt, Artificial Sequence
  Description of Artificial Sequence: Synthetic oligonucleotide
cacaaaaggggagacaaga

SEQ ID NO: 3105614 - RNA, 19 nt, Artificial Sequence
  Description of Artificial Sequence: Synthetic oligonucleotide
aaggggagacaagauggug

SEQ ID NO: 3105615 - RNA, 19 nt, Artificial Sequence
  Description of Artificial Sequence: Synthetic oligonucleotide
ccucaucaggaucaaaccg

SEQ ID NO: 3105616 - RNA, 19 nt, Artificial Sequence
  Description of Artificial Sequence: Synthetic oligonucleotide
ccuucuggcccacaaaagg

SEQ ID NO: 3105617 - RNA, 19 nt, Artificial Sequence
  Description of Artificial Sequence: Synthetic oligonucleotide
guacuccuuguacaggcug

SEQ ID NO: 3105618 - RNA, 19 nt, Artificial Sequence
  Description of Artificial Sequence: Synthetic oligonucleotide
caaggccagcucuggaucc

SEQ ID NO: 3105619 - RNA, 19 nt, Artificial Sequence
  Description of Artificial Sequence: Synthetic oligonucleotide
  modified_base (17)..(17): a, c, u, g, unknown or other
gaucaaaccgaaggaanaa

SEQ ID NO: 3105620 - RNA, 19 nt, Artificial Sequence
  Description of Artificial Sequence: Synthetic oligonucleotide
ugggcugcugccgaguagc

SEQ ID NO: 3105621 - RNA, 19 nt, Artificial Sequence
  Description of Artificial Sequence: Synthetic oligonucleotide
aaaggggagacaagauggu

SEQ ID NO: 3105622 - RNA, 19 nt, Artificial Sequence
  Description of Artificial Sequence: Synthetic oligonucleotide
gagacuggaaggagucggg

SEQ ID NO: 3105623 - RNA, 19 nt, Artificial Sequence
  Description of Artificial Sequence: Synthetic oligonucleotide
caccugggcauccuggagc

SEQ ID NO: 3105624 - RNA, 19 nt, Artificial Sequence
  Description of Artificial Sequence: Synthetic oligonucleotide
cauugggcagcaaggccag

SEQ ID NO: 3105625 - RNA, 19 nt, Artificial Sequence
  Description of Artificial Sequence: Synthetic oligonucleotide
uguacaggcugugggcugc

SEQ ID NO: 3105626 - RNA, 19 nt, Artificial Sequence
  Description of Artificial Sequence: Synthetic oligonucleotide
  modified_base (14)..(14): a, c, u, g, unknown or other
caaaccgaaggaanaauuu

SEQ ID NO: 3105627 - RNA, 19 nt, Artificial Sequence
  Description of Artificial Sequence: Synthetic oligonucleotide
uuguacaggcugugggcug

SEQ ID NO: 3105628 - RNA, 19 nt, Artificial Sequence
  Description of Artificial Sequence: Synthetic oligonucleotide
aaacuuccucacggauggc

SEQ ID NO: 3105629 - RNA, 19 nt, Artificial Sequence
  Description of Artificial Sequence: Synthetic oligonucleotide
gagcauugggcagcaaggc

SEQ ID NO: 3105630 - RNA, 19 nt, Artificial Sequence
  Description of Artificial Sequence: Synthetic oligonucleotide
cacggauggcccuucuggc

SEQ ID NO: 3105631 - RNA, 19 nt, Artificial Sequence
  Description of Artificial Sequence: Synthetic oligonucleotide
  modified_base (19)..(19): a, c, u, g, unknown or other
aggaucaaaccgaaggaan

SEQ ID NO: 3105632 - RNA, 19 nt, Artificial Sequence
  Description of Artificial Sequence: Synthetic oligonucleotide
agacuggaaggagucgggg

SEQ ID NO: 3105633 - RNA, 19 nt, Artificial Sequence
  Description of Artificial Sequence: Synthetic oligonucleotide
cauccuggagccauagaga

SEQ ID NO: 3105634 - RNA, 19 nt, Artificial Sequence
  Description of Artificial Sequence: Synthetic oligonucleotide
gggcauagcuucuuacugc

SEQ ID NO: 3105635 - RNA, 19 nt, Artificial Sequence
  Description of Artificial Sequence: Synthetic oligonucleotide
cuggcccacaaaaggggag

SEQ ID NO: 3105636 - RNA, 19 nt, Artificial Sequence
  Description of Artificial Sequence: Synthetic oligonucleotide
uggcccuucuggcaucucu

SEQ ID NO: 3105637 - RNA, 19 nt, Artificial Sequence
  Description of Artificial Sequence: Synthetic oligonucleotide
cauagagacuggaaggagu

SEQ ID NO: 3105638 - RNA, 19 nt, Artificial Sequence
  Description of Artificial Sequence: Synthetic oligonucleotide
ggagucggggcauagcuuc

SEQ ID NO: 3105639 - RNA, 19 nt, Artificial Sequence
  Description of Artificial Sequence: Synthetic oligonucleotide
uuucugcuguacuccuugu

SEQ ID NO: 3105640 - RNA, 19 nt, Artificial Sequence
  Description of Artificial Sequence: Synthetic oligonucleotide
uagcuucuuacugcugccc

SEQ ID NO: 3105641 - RNA, 19 nt, Artificial Sequence
  Description of Artificial Sequence: Synthetic oligonucleotide
uucugcuguacuccuugua

SEQ ID NO: 3105642 - RNA, 19 nt, Artificial Sequence
  Description of Artificial Sequence: Synthetic oligonucleotide
uugggcagcaaggccagcu

SEQ ID NO: 3105643 - RNA, 19 nt, Artificial Sequence
  Description of Artificial Sequence: Synthetic oligonucleotide
ccuuguacaggcugugggc

SEQ ID NO: 3105644 - RNA, 19 nt, Artificial Sequence
  Description of Artificial Sequence: Synthetic oligonucleotide
gagacaagauggugaaacu

SEQ ID NO: 3105645 - RNA, 19 nt, Artificial Sequence
  Description of Artificial Sequence: Synthetic oligonucleotide
ucggggcauagcuucuuac

SEQ ID NO: 3105646 - RNA, 19 nt, Artificial Sequence
  Description of Artificial Sequence: Synthetic oligonucleotide
uccuggagccauagagacu

SEQ ID NO: 3105647 - RNA, 19 nt, Artificial Sequence
  Description of Artificial Sequence: Synthetic oligonucleotide
cugcuguacuccuuguaca

SEQ ID NO: 3105648 - RNA, 19 nt, Artificial Sequence
  Description of Artificial Sequence: Synthetic oligonucleotide
acaaaaggggagacaagau

SEQ ID NO: 3105649 - RNA, 19 nt, Artificial Sequence
  Description of Artificial Sequence: Synthetic oligonucleotide
acggauggcccuucuggca

SEQ ID NO: 3105650 - RNA, 19 nt, Artificial Sequence
  Description of Artificial Sequence: Synthetic oligonucleotide
uggauccauggccucuuuc

SEQ ID NO: 3105651 - RNA, 19 nt, Artificial Sequence
  Description of Artificial Sequence: Synthetic oligonucleotide
gaaggagucggggcauagc

SEQ ID NO: 3105652 - RNA, 19 nt, Artificial Sequence
  Description of Artificial Sequence: Synthetic oligonucleotide
uggcccacaaaaggggaga

SEQ ID NO: 3105653 - RNA, 19 nt, Artificial Sequence
  Description of Artificial Sequence: Synthetic oligonucleotide
ucuuucugcuguacuccuu

SEQ ID NO: 3105654 - RNA, 19 nt, Artificial Sequence
  Description of Artificial Sequence: Synthetic oligonucleotide
ugccgaguagcuccaucuc

SEQ ID NO: 3105655 - RNA, 19 nt, Artificial Sequence
  Description of Artificial Sequence: Synthetic oligonucleotide
ggugaaacuuccucacgga

SEQ ID NO: 3105656 - RNA, 19 nt, Artificial Sequence
  Description of Artificial Sequence: Synthetic oligonucleotide
ugggcagcaaggccagcuc

SEQ ID NO: 3105657 - RNA, 19 nt, Artificial Sequence
  Description of Artificial Sequence: Synthetic oligonucleotide
augcaccugggcauccugg

SEQ ID NO: 3105658 - RNA, 19 nt, Artificial Sequence
  Description of Artificial Sequence: Synthetic oligonucleotide
accuucuggcccacaaaag

SEQ ID NO: 3105659 - RNA, 19 nt, Artificial Sequence
  Description of Artificial Sequence: Synthetic oligonucleotide
gccgaguagcuccaucucc

SEQ ID NO: 3105660 - RNA, 19 nt, Artificial Sequence
  Description of Artificial Sequence: Synthetic oligonucleotide
ugugggcugcugccgagua

SEQ ID NO: 3105661 - RNA, 19 nt, Artificial Sequence
  Description of Artificial Sequence: Synthetic oligonucleotide
  modified_base (18)..(18): a, c, u, g, unknown or other
ggaucaaaccgaaggaana

SEQ ID NO: 3105662 - RNA, 19 nt, Artificial Sequence
  Description of Artificial Sequence: Synthetic oligonucleotide
cuccuuguacaggcugugg

SEQ ID NO: 3105663 - RNA, 19 nt, Artificial Sequence
  Description of Artificial Sequence: Synthetic oligonucleotide
caugcaccugggcauccug

SEQ ID NO: 3105664 - RNA, 19 nt, Artificial Sequence
  Description of Artificial Sequence: Synthetic oligonucleotide
gcauugggcagcaaggcca

SEQ ID NO: 3105665 - RNA, 19 nt, Artificial Sequence
  Description of Artificial Sequence: Synthetic oligonucleotide
aaggccagcucuggaucca

SEQ ID NO: 3105666 - RNA, 19 nt, Artificial Sequence
  Description of Artificial Sequence: Synthetic oligonucleotide
cagucuugacuaccuucug

SEQ ID NO: 3105667 - RNA, 19 nt, Artificial Sequence
  Description of Artificial Sequence: Synthetic oligonucleotide
caggaucaaaccgaaggaa

SEQ ID NO: 3105668 - RNA, 19 nt, Artificial Sequence
  Description of Artificial Sequence: Synthetic oligonucleotide
gcuguacuccuuguacagg

SEQ ID NO: 3105669 - RNA, 19 nt, Artificial Sequence
  Description of Artificial Sequence: Synthetic oligonucleotide
cucacggauggcccuucug

SEQ ID NO: 3105670 - RNA, 19 nt, Artificial Sequence
  Description of Artificial Sequence: Synthetic oligonucleotide
ucuggauccauggccucuu

SEQ ID NO: 3105671 - RNA, 19 nt, Artificial Sequence
  Description of Artificial Sequence: Synthetic oligonucleotide
cccagucuugacuaccuuc

SEQ ID NO: 3105672 - RNA, 19 nt, Artificial Sequence
  Description of Artificial Sequence: Synthetic oligonucleotide
auugggcagcaaggccagc

SEQ ID NO: 3105673 - RNA, 19 nt, Artificial Sequence
  Description of Artificial Sequence: Synthetic oligonucleotide
gugaaacuuccucacggau

SEQ ID NO: 3105674 - RNA, 19 nt, Artificial Sequence
  Description of Artificial Sequence: Synthetic oligonucleotide
gccauagagacuggaagga

SEQ ID NO: 3105675 - RNA, 19 nt, Artificial Sequence
  Description of Artificial Sequence: Synthetic oligonucleotide
uccugagcauugggcagca

SEQ ID NO: 3105676 - RNA, 19 nt, Artificial Sequence
  Description of Artificial Sequence: Synthetic oligonucleotide
uccaugcaccugggcaucc

SEQ ID NO: 3105677 - RNA, 19 nt, Artificial Sequence
  Description of Artificial Sequence: Synthetic oligonucleotide
ggcauagcuucuuacugcu

SEQ ID NO: 3105678 - RNA, 19 nt, Artificial Sequence
  Description of Artificial Sequence: Synthetic oligonucleotide
cuuguacaggcugugggcu

SEQ ID NO: 3105679 - RNA, 19 nt, Artificial Sequence
  Description of Artificial Sequence: Synthetic oligonucleotide
uuccaugcaccugggcauc

SEQ ID NO: 3105680 - RNA, 19 nt, Artificial Sequence
  Description of Artificial Sequence: Synthetic oligonucleotide
gugggcugcugccgaguag

SEQ ID NO: 3105681 - RNA, 19 nt, Artificial Sequence
  Description of Artificial Sequence: Synthetic oligonucleotide
cugccgaguagcuccaucu

SEQ ID NO: 3105682 - RNA, 19 nt, Artificial Sequence
  Description of Artificial Sequence: Synthetic oligonucleotide
ccacaaaaggggagacaag

SEQ ID NO: 3105683 - RNA, 19 nt, Artificial Sequence
  Description of Artificial Sequence: Synthetic oligonucleotide
gcagcaaggccagcucugg

SEQ ID NO: 3105684 - RNA, 19 nt, Artificial Sequence
  Description of Artificial Sequence: Synthetic oligonucleotide
ccauagagacuggaaggag

SEQ ID NO: 3105685 - RNA, 19 nt, Artificial Sequence
  Description of Artificial Sequence: Synthetic oligonucleotide
ccaucuccucaucaggauc

SEQ ID NO: 3105686 - RNA, 19 nt, Artificial Sequence
  Description of Artificial Sequence: Synthetic oligonucleotide
cccacaaaaggggagacaa

SEQ ID NO: 3105687 - RNA, 19 nt, Artificial Sequence
  Description of Artificial Sequence: Synthetic oligonucleotide
cauggccucuuucugcugu

SEQ ID NO: 3105688 - RNA, 19 nt, Artificial Sequence
  Description of Artificial Sequence: Synthetic oligonucleotide
ucuccucaucaggaucaaa

SEQ ID NO: 3105689 - RNA, 19 nt, Artificial Sequence
  Description of Artificial Sequence: Synthetic oligonucleotide
ggaaggagucggggcauag

SEQ ID NO: 3105690 - RNA, 19 nt, Artificial Sequence
  Description of Artificial Sequence: Synthetic oligonucleotide
cuaccuucuggcccacaaa

SEQ ID NO: 3105691 - RNA, 19 nt, Artificial Sequence
  Description of Artificial Sequence: Synthetic oligonucleotide
uggccucuuucugcuguac

SEQ ID NO: 3105692 - RNA, 19 nt, Artificial Sequence
  Description of Artificial Sequence: Synthetic oligonucleotide
ugggcauccuggagccaua

SEQ ID NO: 3105693 - RNA, 19 nt, Artificial Sequence
  Description of Artificial Sequence: Synthetic oligonucleotide
ccagucuugacuaccuucu

SEQ ID NO: 3105694 - RNA, 19 nt, Artificial Sequence
  Description of Artificial Sequence: Synthetic oligonucleotide
auggccucuuucugcugua

SEQ ID NO: 3105695 - RNA, 19 nt, Artificial Sequence
  Description of Artificial Sequence: Synthetic oligonucleotide
ggcagcaaggccagcucug

SEQ ID NO: 3105696 - RNA, 19 nt, Artificial Sequence
  Description of Artificial Sequence: Synthetic oligonucleotide
gcaccugggcauccuggag

SEQ ID NO: 3105697 - RNA, 19 nt, Artificial Sequence
  Description of Artificial Sequence: Synthetic oligonucleotide
ggagccauagagacuggaa

SEQ ID NO: 3105698 - RNA, 19 nt, Artificial Sequence
  Description of Artificial Sequence: Synthetic oligonucleotide
uacaggcugugggcugcug

SEQ ID NO: 3105699 - RNA, 19 nt, Artificial Sequence
  Description of Artificial Sequence: Synthetic oligonucleotide
cagaaguuuccugagcauu

SEQ ID NO: 3105700 - RNA, 19 nt, Artificial Sequence
  Description of Artificial Sequence: Synthetic oligonucleotide
uggaaggagucggggcaua

SEQ ID NO: 3105701 - RNA, 19 nt, Artificial Sequence
  Description of Artificial Sequence: Synthetic oligonucleotide
uuccucacggauggcccuu

SEQ ID NO: 3105702 - RNA, 19 nt, Artificial Sequence
  Description of Artificial Sequence: Synthetic oligonucleotide
gcugugggcugcugccgag

SEQ ID NO: 3105703 - RNA, 19 nt, Artificial Sequence
  Description of Artificial Sequence: Synthetic oligonucleotide
cuuccucacggauggcccu

SEQ ID NO: 3105704 - RNA, 19 nt, Artificial Sequence
  Description of Artificial Sequence: Synthetic oligonucleotide
aucuccucaucaggaucaa

SEQ ID NO: 3105705 - RNA, 19 nt, Artificial Sequence
  Description of Artificial Sequence: Synthetic oligonucleotide
aggagucggggcauagcuu

SEQ ID NO: 3105706 - RNA, 19 nt, Artificial Sequence
  Description of Artificial Sequence: Synthetic oligonucleotide
gucggggcauagcuucuua

SEQ ID NO: 3105707 - RNA, 19 nt, Artificial Sequence
  Description of Artificial Sequence: Synthetic oligonucleotide
gcauagcuucuuacugcug

SEQ ID NO: 3105708 - RNA, 19 nt, Artificial Sequence
  Description of Artificial Sequence: Synthetic oligonucleotide
gcugccgaguagcuccauc

SEQ ID NO: 3105709 - RNA, 19 nt, Artificial Sequence
  Description of Artificial Sequence: Synthetic oligonucleotide
gauggcccuucuggcaucu

SEQ ID NO: 3105710 - RNA, 19 nt, Artificial Sequence
  Description of Artificial Sequence: Synthetic oligonucleotide
gggcauccuggagccauag

SEQ ID NO: 3105711 - RNA, 19 nt, Artificial Sequence
  Description of Artificial Sequence: Synthetic oligonucleotide
ggcccacaaaaggggagac

SEQ ID NO: 3105712 - RNA, 19 nt, Artificial Sequence
  Description of Artificial Sequence: Synthetic oligonucleotide
agucggggcauagcuucuu

SEQ ID NO: 3105713 - RNA, 19 nt, Artificial Sequence
  Description of Artificial Sequence: Synthetic oligonucleotide
ggcugugggcugcugccga

SEQ ID NO: 3105714 - RNA, 19 nt, Artificial Sequence
  Description of Artificial Sequence: Synthetic oligonucleotide
cugcugccgaguagcucca

SEQ ID NO: 3105715 - RNA, 19 nt, Artificial Sequence
  Description of Artificial Sequence: Synthetic oligonucleotide
ggauggcccuucuggcauc

SEQ ID NO: 3105716 - RNA, 19 nt, Artificial Sequence
  Description of Artificial Sequence: Synthetic oligonucleotide
ccgaguagcuccaucuccu

SEQ ID NO: 3105717 - RNA, 19 nt, Artificial Sequence
  Description of Artificial Sequence: Synthetic oligonucleotide
gcucuggauccauggccuc

SEQ ID NO: 3105718 - RNA, 19 nt, Artificial Sequence
  Description of Artificial Sequence: Synthetic oligonucleotide
ggcauccuggagccauaga

SEQ ID NO: 3105719 - RNA, 19 nt, Artificial Sequence
  Description of Artificial Sequence: Synthetic oligonucleotide
gacuaccuucuggcccaca

SEQ ID NO: 3105720 - RNA, 19 nt, Artificial Sequence
  Description of Artificial Sequence: Synthetic oligonucleotide
cugggcauccuggagccau

SEQ ID NO: 3105721 - RNA, 19 nt, Artificial Sequence
  Description of Artificial Sequence: Synthetic oligonucleotide
gggcagcaaggccagcucu

SEQ ID NO: 3105722 - RNA, 19 nt, Artificial Sequence
  Description of Artificial Sequence: Synthetic oligonucleotide
ggccucuuucugcuguacu

SEQ ID NO: 3105723 - RNA, 19 nt, Artificial Sequence
  Description of Artificial Sequence: Synthetic oligonucleotide
gagucggggcauagcuucu

SEQ ID NO: 3105724 - RNA, 19 nt, Artificial Sequence
  Description of Artificial Sequence: Synthetic oligonucleotide
cgaguagcuccaucuccuc

SEQ ID NO: 3105725 - RNA, 19 nt, Artificial Sequence
  Description of Artificial Sequence: Synthetic oligonucleotide
ccauggccucuuucugcug

SEQ ID NO: 3105726 - RNA, 19 nt, Artificial Sequence
  Description of Artificial Sequence: Synthetic oligonucleotide
gcccacaaaaggggagaca

SEQ ID NO: 3105727 - RNA, 19 nt, Artificial Sequence
  Description of Artificial Sequence: Synthetic oligonucleotide
ugcugccgaguagcuccau

SEQ ID NO: 3105728 - RNA, 19 nt, Artificial Sequence
  Description of Artificial Sequence: Synthetic oligonucleotide
cuggaaggagucggggcau

SEQ ID NO: 3105729 - RNA, 19 nt, Artificial Sequence
  Description of Artificial Sequence: Synthetic oligonucleotide
cggggcauagcuucuuacu

SEQ ID NO: 3105730 - RNA, 19 nt, Artificial Sequence
  Description of Artificial Sequence: Synthetic oligonucleotide
guacaggcugugggcugcu

SEQ ID NO: 3105731 - RNA, 19 nt, Artificial Sequence
  Description of Artificial Sequence: Synthetic oligonucleotide
cggauggcccuucuggcau

SEQ ID NO: 3105732 - RNA, 19 nt, Artificial Sequence
  Description of Artificial Sequence: Synthetic oligonucleotide
gggcugcugccgaguagcu

SEQ ID NO: 3105733 - RNA, 19 nt, Artificial Sequence
  Description of Artificial Sequence: Synthetic oligonucleotide
ccugggcauccuggagcca

SEQ ID NO: 3105734 - RNA, 19 nt, Artificial Sequence
  Description of Artificial Sequence: Synthetic oligonucleotide
ccucacggauggcccuucu

SEQ ID NO: 3105735 - RNA, 19 nt, Artificial Sequence
  Description of Artificial Sequence: Synthetic oligonucleotide
ccccagucuugacuaccuu

SEQ ID NO: 3105736 - RNA, 19 nt, Artificial Sequence
  Description of Artificial Sequence: Synthetic oligonucleotide
ccugagcauugggcagcaa

SEQ ID NO: 3105737 - RNA, 19 nt, Artificial Sequence
  Description of Artificial Sequence: Synthetic oligonucleotide
uauuuaaggauuaagauag

SEQ ID NO: 3105738 - RNA, 19 nt, Artificial Sequence
  Description of Artificial Sequence: Synthetic oligonucleotide
aauuuagcaaaacucugcc

SEQ ID NO: 3105739 - RNA, 19 nt, Artificial Sequence
  Description of Artificial Sequence: Synthetic oligonucleotide
uuuuauuuaaggauuaaga

SEQ ID NO: 3105740 - RNA, 19 nt, Artificial Sequence
  Description of Artificial Sequence: Synthetic oligonucleotide
uguaauuuagcaaaacucu

SEQ ID NO: 3105741 - RNA, 19 nt, Artificial Sequence
  Description of Artificial Sequence: Synthetic oligonucleotide
uaaggauuaagauaguagc

SEQ ID NO: 3105742 - RNA, 19 nt, Artificial Sequence
  Description of Artificial Sequence: Synthetic oligonucleotide
uuaaggauuaagauaguag

SEQ ID NO: 3105743 - RNA, 19 nt, Artificial Sequence
  Description of Artificial Sequence: Synthetic oligonucleotide
aauguaauuuagcaaaacu

SEQ ID NO: 3105744 - RNA, 19 nt, Artificial Sequence
  Description of Artificial Sequence: Synthetic oligonucleotide
uaagauaguagcuucaagu

SEQ ID NO: 3105745 - RNA, 19 nt, Artificial Sequence
  Description of Artificial Sequence: Synthetic oligonucleotide
uuuauuuaaggauuaagau

SEQ ID NO: 3105746 - RNA, 19 nt, Artificial Sequence
  Description of Artificial Sequence: Synthetic oligonucleotide
aacagaaggccaguaaucc

SEQ ID NO: 3105747 - RNA, 19 nt, Artificial Sequence
  Description of Artificial Sequence: Synthetic oligonucleotide
aacauuuuaaaagggcugg

SEQ ID NO: 3105748 - RNA, 19 nt, Artificial Sequence
  Description of Artificial Sequence: Synthetic oligonucleotide
uuuagcaaaacucugccuc

SEQ ID NO: 3105749 - RNA, 19 nt, Artificial Sequence
  Description of Artificial Sequence: Synthetic oligonucleotide
uaauuuagcaaaacucugc

SEQ ID NO: 3105750 - RNA, 19 nt, Artificial Sequence
  Description of Artificial Sequence: Synthetic oligonucleotide
uuauuuaaggauuaagaua

SEQ ID NO: 3105751 - RNA, 19 nt, Artificial Sequence
  Description of Artificial Sequence: Synthetic oligonucleotide
aaaacauuuuaaaagggcu

SEQ ID NO: 3105752 - RNA, 19 nt, Artificial Sequence
  Description of Artificial Sequence: Synthetic oligonucleotide
auuuuaaaagggcugggag

SEQ ID NO: 3105753 - RNA, 19 nt, Artificial Sequence
  Description of Artificial Sequence: Synthetic oligonucleotide
auguaauuuagcaaaacuc

SEQ ID NO: 3105754 - RNA, 19 nt, Artificial Sequence
  Description of Artificial Sequence: Synthetic oligonucleotide
uuuacuucagauuaucuuu

SEQ ID NO: 3105755 - RNA, 19 nt, Artificial Sequence
  Description of Artificial Sequence: Synthetic oligonucleotide
aaaacucugccucauaaua

SEQ ID NO: 3105756 - RNA, 19 nt, Artificial Sequence
  Description of Artificial Sequence: Synthetic oligonucleotide
uugccuagcaagcacaagc

SEQ ID NO: 3105757 - RNA, 19 nt, Artificial Sequence
  Description of Artificial Sequence: Synthetic oligonucleotide
uuuuaaaagggcugggagu

SEQ ID NO: 3105758 - RNA, 19 nt, Artificial Sequence
  Description of Artificial Sequence: Synthetic oligonucleotide
uuaagauaguagcuucaag

SEQ ID NO: 3105759 - RNA, 19 nt, Artificial Sequence
  Description of Artificial Sequence: Synthetic oligonucleotide
aguagcuucaagucagguc

SEQ ID NO: 3105760 - RNA, 19 nt, Artificial Sequence
  Description of Artificial Sequence: Synthetic oligonucleotide
aaacauuuuaaaagggcug

SEQ ID NO: 3105761 - RNA, 19 nt, Artificial Sequence
  Description of Artificial Sequence: Synthetic oligonucleotide
uuuuacuucagauuaucuu

SEQ ID NO: 3105762 - RNA, 19 nt, Artificial Sequence
  Description of Artificial Sequence: Synthetic oligonucleotide
cagaauguaauuuagcaaa

SEQ ID NO: 3105763 - RNA, 19 nt, Artificial Sequence
  Description of Artificial Sequence: Synthetic oligonucleotide
ugggaguuuagcucagugg

SEQ ID NO: 3105764 - RNA, 19 nt, Artificial Sequence
  Description of Artificial Sequence: Synthetic oligonucleotide
acagaaggccaguaauccc

SEQ ID NO: 3105765 - RNA, 19 nt, Artificial Sequence
  Description of Artificial Sequence: Synthetic oligonucleotide
ucuggcaacagaaggccag

SEQ ID NO: 3105766 - RNA, 19 nt, Artificial Sequence
  Description of Artificial Sequence: Synthetic oligonucleotide
aaggccaguaaucccagcu

SEQ ID NO: 3105767 - RNA, 19 nt, Artificial Sequence
  Description of Artificial Sequence: Synthetic oligonucleotide
uucaagucaggucuggcaa

SEQ ID NO: 3105768 - RNA, 19 nt, Artificial Sequence
  Description of Artificial Sequence: Synthetic oligonucleotide
agauaguagcuucaaguca

SEQ ID NO: 3105769 - RNA, 19 nt, Artificial Sequence
  Description of Artificial Sequence: Synthetic oligonucleotide
aggagacugaggcagaaug

SEQ ID NO: 3105770 - RNA, 19 nt, Artificial Sequence
  Description of Artificial Sequence: Synthetic oligonucleotide
aaggauuaagauaguagcu

SEQ ID NO: 3105771 - RNA, 19 nt, Artificial Sequence
  Description of Artificial Sequence: Synthetic oligonucleotide
guagcuucaagucaggucu

SEQ ID NO: 3105772 - RNA, 19 nt, Artificial Sequence
  Description of Artificial Sequence: Synthetic oligonucleotide
gaguuuagcucagugguag

SEQ ID NO: 3105773 - RNA, 19 nt, Artificial Sequence
  Description of Artificial Sequence: Synthetic oligonucleotide
uuuaaaagggcugggaguu

SEQ ID NO: 3105774 - RNA, 19 nt, Artificial Sequence
  Description of Artificial Sequence: Synthetic oligonucleotide
aacucugccucauaauaaa

SEQ ID NO: 3105775 - RNA, 19 nt, Artificial Sequence
  Description of Artificial Sequence: Synthetic oligonucleotide
uuagcaaaacucugccuca

SEQ ID NO: 3105776 - RNA, 19 nt, Artificial Sequence
  Description of Artificial Sequence: Synthetic oligonucleotide
guaauuuagcaaaacucug

SEQ ID NO: 3105777 - RNA, 19 nt, Artificial Sequence
  Description of Artificial Sequence: Synthetic oligonucleotide
ugccuagcaagcacaagcc

SEQ ID NO: 3105778 - RNA, 19 nt, Artificial Sequence
  Description of Artificial Sequence: Synthetic oligonucleotide
aaucccagcugcucaggag

SEQ ID NO: 3105779 - RNA, 19 nt, Artificial Sequence
  Description of Artificial Sequence: Synthetic oligonucleotide
aagggcugggaguuuagcu

SEQ ID NO: 3105780 - RNA, 19 nt, Artificial Sequence
  Description of Artificial Sequence: Synthetic oligonucleotide
aguaaucccagcugcucag

SEQ ID NO: 3105781 - RNA, 19 nt, Artificial Sequence
  Description of Artificial Sequence: Synthetic oligonucleotide
aaagggcugggaguuuagc

SEQ ID NO: 3105782 - RNA, 19 nt, Artificial Sequence
  Description of Artificial Sequence: Synthetic oligonucleotide
uuuaaggauuaagauagua

SEQ ID NO: 3105783 - RNA, 19 nt, Artificial Sequence
  Description of Artificial Sequence: Synthetic oligonucleotide
ugaggcagaauguaauuua

SEQ ID NO: 3105784 - RNA, 19 nt, Artificial Sequence
  Description of Artificial Sequence: Synthetic oligonucleotide
uuacuucagauuaucuuuu

SEQ ID NO: 3105785 - RNA, 19 nt, Artificial Sequence
  Description of Artificial Sequence: Synthetic oligonucleotide
ucaggucuggcaacagaag

SEQ ID NO: 3105786 - RNA, 19 nt, Artificial Sequence
  Description of Artificial Sequence: Synthetic oligonucleotide
ggcagaauguaauuuagca

SEQ ID NO: 3105787 - RNA, 19 nt, Artificial Sequence
  Description of Artificial Sequence: Synthetic oligonucleotide
gaggcagaauguaauuuag

SEQ ID NO: 3105788 - RNA, 19 nt, Artificial Sequence
  Description of Artificial Sequence: Synthetic oligonucleotide
gaauguaauuuagcaaaac

SEQ ID NO: 3105789 - RNA, 19 nt, Artificial Sequence
  Description of Artificial Sequence: Synthetic oligonucleotide
acauuuuaaaagggcuggg

SEQ ID NO: 3105790 - RNA, 19 nt, Artificial Sequence
  Description of Artificial Sequence: Synthetic oligonucleotide
gauuaagauaguagcuuca

SEQ ID NO: 3105791 - RNA, 19 nt, Artificial Sequence
  Description of Artificial Sequence: Synthetic oligonucleotide
caacagaaggccaguaauc

SEQ ID NO: 3105792 - RNA, 19 nt, Artificial Sequence
  Description of Artificial Sequence: Synthetic oligonucleotide
aaacucugccucauaauaa

SEQ ID NO: 3105793 - RNA, 19 nt, Artificial Sequence
  Description of Artificial Sequence: Synthetic oligonucleotide
aggcagaauguaauuuagc

SEQ ID NO: 3105794 - RNA, 19 nt, Artificial Sequence
  Description of Artificial Sequence: Synthetic oligonucleotide
ggauuaagauaguagcuuc

SEQ ID NO: 3105795 - RNA, 19 nt, Artificial Sequence
  Description of Artificial Sequence: Synthetic oligonucleotide
uuuagcucagugguagagu

SEQ ID NO: 3105796 - RNA, 19 nt, Artificial Sequence
  Description of Artificial Sequence: Synthetic oligonucleotide
guuuagcucagugguagag

SEQ ID NO: 3105797 - RNA, 19 nt, Artificial Sequence
  Description of Artificial Sequence: Synthetic oligonucleotide
aggauuaagauaguagcuu

SEQ ID NO: 3105798 - RNA, 19 nt, Artificial Sequence
  Description of Artificial Sequence: Synthetic oligonucleotide
auuaagauaguagcuucaa

SEQ ID NO: 3105799 - RNA, 19 nt, Artificial Sequence
  Description of Artificial Sequence: Synthetic oligonucleotide
cagaaggccaguaauccca

SEQ ID NO: 3105800 - RNA, 19 nt, Artificial Sequence
  Description of Artificial Sequence: Synthetic oligonucleotide
ucaagucaggucuggcaac

SEQ ID NO: 3105801 - RNA, 19 nt, Artificial Sequence
  Description of Artificial Sequence: Synthetic oligonucleotide
uaaucccagcugcucagga

SEQ ID NO: 3105802 - RNA, 19 nt, Artificial Sequence
  Description of Artificial Sequence: Synthetic oligonucleotide
cuucaagucaggucuggca

SEQ ID NO: 3105803 - RNA, 19 nt, Artificial Sequence
  Description of Artificial Sequence: Synthetic oligonucleotide
acugaggcagaauguaauu

SEQ ID NO: 3105804 - RNA, 19 nt, Artificial Sequence
  Description of Artificial Sequence: Synthetic oligonucleotide
cugggaguuuagcucagug

SEQ ID NO: 3105805 - RNA, 19 nt, Artificial Sequence
  Description of Artificial Sequence: Synthetic oligonucleotide
aaaagggcugggaguuuag

SEQ ID NO: 3105806 - RNA, 19 nt, Artificial Sequence
  Description of Artificial Sequence: Synthetic oligonucleotide
agaauguaauuuagcaaaa

SEQ ID NO: 3105807 - RNA, 19 nt, Artificial Sequence
  Description of Artificial Sequence: Synthetic oligonucleotide
cauuuuaaaagggcuggga

SEQ ID NO: 3105808 - RNA, 19 nt, Artificial Sequence
  Description of Artificial Sequence: Synthetic oligonucleotide
uaaaagggcugggaguuua

SEQ ID NO: 3105809 - RNA, 19 nt, Artificial Sequence
  Description of Artificial Sequence: Synthetic oligonucleotide
agucaggucuggcaacaga

SEQ ID NO: 3105810 - RNA, 19 nt, Artificial Sequence
  Description of Artificial Sequence: Synthetic oligonucleotide
uagcuucaagucaggucug

SEQ ID NO: 3105811 - RNA, 19 nt, Artificial Sequence
  Description of Artificial Sequence: Synthetic oligonucleotide
gcagaauguaauuuagcaa

SEQ ID NO: 3105812 - RNA, 19 nt, Artificial Sequence
  Description of Artificial Sequence: Synthetic oligonucleotide
auaguagcuucaagucagg

SEQ ID NO: 3105813 - RNA, 19 nt, Artificial Sequence
  Description of Artificial Sequence: Synthetic oligonucleotide
aguuuagcucagugguaga

SEQ ID NO: 3105814 - RNA, 19 nt, Artificial Sequence
  Description of Artificial Sequence: Synthetic oligonucleotide
gggaguuuagcucaguggu

SEQ ID NO: 3105815 - RNA, 19 nt, Artificial Sequence
  Description of Artificial Sequence: Synthetic oligonucleotide
agcuucaagucaggucugg

SEQ ID NO: 3105816 - RNA, 19 nt, Artificial Sequence
  Description of Artificial Sequence: Synthetic oligonucleotide
guaaucccagcugcucagg

SEQ ID NO: 3105817 - RNA, 19 nt, Artificial Sequence
  Description of Artificial Sequence: Synthetic oligonucleotide
aagucaggucuggcaacag

SEQ ID NO: 3105818 - RNA, 19 nt, Artificial Sequence
  Description of Artificial Sequence: Synthetic oligonucleotide
gagacugaggcagaaugua

SEQ ID NO: 3105819 - RNA, 19 nt, Artificial Sequence
  Description of Artificial Sequence: Synthetic oligonucleotide
gcaaaacucugccucauaa

SEQ ID NO: 3105820 - RNA, 19 nt, Artificial Sequence
  Description of Artificial Sequence: Synthetic oligonucleotide
caguaaucccagcugcuca

SEQ ID NO: 3105821 - RNA, 19 nt, Artificial Sequence
  Description of Artificial Sequence: Synthetic oligonucleotide
uaguagcuucaagucaggu

SEQ ID NO: 3105822 - RNA, 19 nt, Artificial Sequence
  Description of Artificial Sequence: Synthetic oligonucleotide
agcugcucaggagacugag

SEQ ID NO: 3105823 - RNA, 19 nt, Artificial Sequence
  Description of Artificial Sequence: Synthetic oligonucleotide
gucaggucuggcaacagaa

SEQ ID NO: 3105824 - RNA, 19 nt, Artificial Sequence
  Description of Artificial Sequence: Synthetic oligonucleotide
agaaggccaguaaucccag

SEQ ID NO: 3105825 - RNA, 19 nt, Artificial Sequence
  Description of Artificial Sequence: Synthetic oligonucleotide
ucccagcugcucaggagac

SEQ ID NO: 3105826 - RNA, 19 nt, Artificial Sequence
  Description of Artificial Sequence: Synthetic oligonucleotide
auuuaaggauuaagauagu

SEQ ID NO: 3105827 - RNA, 19 nt, Artificial Sequence
  Description of Artificial Sequence: Synthetic oligonucleotide
gugcuugccuagcaagcac

SEQ ID NO: 3105828 - RNA, 19 nt, Artificial Sequence
  Description of Artificial Sequence: Synthetic oligonucleotide
ucaggagacugaggcagaa

SEQ ID NO: 3105829 - RNA, 19 nt, Artificial Sequence
  Description of Artificial Sequence: Synthetic oligonucleotide
agcaaaacucugccucaua

SEQ ID NO: 3105830 - RNA, 19 nt, Artificial Sequence
  Description of Artificial Sequence: Synthetic oligonucleotide
uagcaaaacucugccucau

SEQ ID NO: 3105831 - RNA, 19 nt, Artificial Sequence
  Description of Artificial Sequence: Synthetic oligonucleotide
agacugaggcagaauguaa

SEQ ID NO: 3105832 - RNA, 19 nt, Artificial Sequence
  Description of Artificial Sequence: Synthetic oligonucleotide
gacugaggcagaauguaau

SEQ ID NO: 3105833 - RNA, 19 nt, Artificial Sequence
  Description of Artificial Sequence: Synthetic oligonucleotide
uuaaaagggcugggaguuu

SEQ ID NO: 3105834 - RNA, 19 nt, Artificial Sequence
  Description of Artificial Sequence: Synthetic oligonucleotide
caagucaggucuggcaaca

SEQ ID NO: 3105835 - RNA, 19 nt, Artificial Sequence
  Description of Artificial Sequence: Synthetic oligonucleotide
gccuagcaagcacaagccc

SEQ ID NO: 3105836 - RNA, 19 nt, Artificial Sequence
  Description of Artificial Sequence: Synthetic oligonucleotide
caaaacucugccucauaau

SEQ ID NO: 3105837 - RNA, 19 nt, Artificial Sequence
  Description of Artificial Sequence: Synthetic oligonucleotide
acucugccucauaauaaaa

SEQ ID NO: 3105838 - RNA, 19 nt, Artificial Sequence
  Description of Artificial Sequence: Synthetic oligonucleotide
ggcaacagaaggccaguaa

SEQ ID NO: 3105839 - RNA, 19 nt, Artificial Sequence
  Description of Artificial Sequence: Synthetic oligonucleotide
cucaggagacugaggcaga

SEQ ID NO: 3105840 - RNA, 19 nt, Artificial Sequence
  Description of Artificial Sequence: Synthetic oligonucleotide
gcugcucaggagacugagg

SEQ ID NO: 3105841 - RNA, 19 nt, Artificial Sequence
  Description of Artificial Sequence: Synthetic oligonucleotide
gcuucaagucaggucuggc

SEQ ID NO: 3105842 - RNA, 19 nt, Artificial Sequence
  Description of Artificial Sequence: Synthetic oligonucleotide
uggcaacagaaggccagua

SEQ ID NO: 3105843 - RNA, 19 nt, Artificial Sequence
  Description of Artificial Sequence: Synthetic oligonucleotide
gucuggcaacagaaggcca

SEQ ID NO: 3105844 - RNA, 19 nt, Artificial Sequence
  Description of Artificial Sequence: Synthetic oligonucleotide
ccaguaaucccagcugcuc

SEQ ID NO: 3105845 - RNA, 19 nt, Artificial Sequence
  Description of Artificial Sequence: Synthetic oligonucleotide
cugaggcagaauguaauuu

SEQ ID NO: 3105846 - RNA, 19 nt, Artificial Sequence
  Description of Artificial Sequence: Synthetic oligonucleotide
ggagacugaggcagaaugu

SEQ ID NO: 3105847 - RNA, 19 nt, Artificial Sequence
  Description of Artificial Sequence: Synthetic oligonucleotide
ggaguuuagcucaguggua

SEQ ID NO: 3105848 - RNA, 19 nt, Artificial Sequence
  Description of Artificial Sequence: Synthetic oligonucleotide
cagcugcucaggagacuga

SEQ ID NO: 3105849 - RNA, 19 nt, Artificial Sequence
  Description of Artificial Sequence: Synthetic oligonucleotide
cuggcaacagaaggccagu

SEQ ID NO: 3105850 - RNA, 19 nt, Artificial Sequence
  Description of Artificial Sequence: Synthetic oligonucleotide
caggagacugaggcagaau

SEQ ID NO: 3105851 - RNA, 19 nt, Artificial Sequence
  Description of Artificial Sequence: Synthetic oligonucleotide
gcugggaguuuagcucagu

SEQ ID NO: 3105852 - RNA, 19 nt, Artificial Sequence
  Description of Artificial Sequence: Synthetic oligonucleotide
gauaaaacaacuccaauca

SEQ ID NO: 3105853 - RNA, 19 nt, Artificial Sequence
  Description of Artificial Sequence: Synthetic oligonucleotide
uuauuuauuuauuauuccc

SEQ ID NO: 3105854 - RNA, 19 nt, Artificial Sequence
  Description of Artificial Sequence: Synthetic oligonucleotide
aaucauugacucaaguugc

SEQ ID NO: 3105855 - RNA, 19 nt, Artificial Sequence
  Description of Artificial Sequence: Synthetic oligonucleotide
ucagggauaaaacaacucc

SEQ ID NO: 3105856 - RNA, 19 nt, Artificial Sequence
  Description of Artificial Sequence: Synthetic oligonucleotide
ccuguuauagguaagaucc

SEQ ID NO: 3105857 - RNA, 19 nt, Artificial Sequence
  Description of Artificial Sequence: Synthetic oligonucleotide
aaaacaacuccaaucauug

SEQ ID NO: 3105858 - RNA, 19 nt, Artificial Sequence
  Description of Artificial Sequence: Synthetic oligonucleotide
caaucauugacucaaguug

SEQ ID NO: 3105859 - RNA, 19 nt, Artificial Sequence
  Description of Artificial Sequence: Synthetic oligonucleotide
ucuggaacaucuuaucucc

SEQ ID NO: 3105860 - RNA, 19 nt, Artificial Sequence
  Description of Artificial Sequence: Synthetic oligonucleotide
agaaugaagagccacccag

SEQ ID NO: 3105861 - RNA, 19 nt, Artificial Sequence
  Description of Artificial Sequence: Synthetic oligonucleotide
cuuaucuccaguuucugag

SEQ ID NO: 3105862 - RNA, 19 nt, Artificial Sequence
  Description of Artificial Sequence: Synthetic oligonucleotide
uauagguaagaucccauga

SEQ ID NO: 3105863 - RNA, 19 nt, Artificial Sequence
  Description of Artificial Sequence: Synthetic oligonucleotide
guugcuauaguuucuggag

SEQ ID NO: 3105864 - RNA, 19 nt, Artificial Sequence
  Description of Artificial Sequence: Synthetic oligonucleotide
acaucuuaucuccaguuuc

SEQ ID NO: 3105865 - RNA, 19 nt, Artificial Sequence
  Description of Artificial Sequence: Synthetic oligonucleotide
cauucucucuggaagaucc

SEQ ID NO: 3105866 - RNA, 19 nt, Artificial Sequence
  Description of Artificial Sequence: Synthetic oligonucleotide
ugaagagccacccagcuua

SEQ ID NO: 3105867 - RNA, 19 nt, Artificial Sequence
  Description of Artificial Sequence: Synthetic oligonucleotide
cacacacacacacacaucc

SEQ ID NO: 3105868 - RNA, 19 nt, Artificial Sequence
  Description of Artificial Sequence: Synthetic oligonucleotide
auuucuggaacaucuuauc

SEQ ID NO: 3105869 - RNA, 19 nt, Artificial Sequence
  Description of Artificial Sequence: Synthetic oligonucleotide
ugaagaccuucccagaaug

SEQ ID NO: 3105870 - RNA, 19 nt, Artificial Sequence
  Description of Artificial Sequence: Synthetic oligonucleotide
aaugaagagccacccagcu

SEQ ID NO: 3105871 - RNA, 19 nt, Artificial Sequence
  Description of Artificial Sequence: Synthetic oligonucleotide
ugcagguaagugaagaccu

SEQ ID NO: 3105872 - RNA, 19 nt, Artificial Sequence
  Description of Artificial Sequence: Synthetic oligonucleotide
uaaaacaacuccaaucauu

SEQ ID NO: 3105873 - RNA, 19 nt, Artificial Sequence
  Description of Artificial Sequence: Synthetic oligonucleotide
uuucuggaacaucuuaucu

SEQ ID NO: 3105874 - RNA, 19 nt, Artificial Sequence
  Description of Artificial Sequence: Synthetic oligonucleotide
uuauagguaagaucccaug

SEQ ID NO: 3105875 - RNA, 19 nt, Artificial Sequence
  Description of Artificial Sequence: Synthetic oligonucleotide
ucuccaguuucugagauca

SEQ ID NO: 3105876 - RNA, 19 nt, Artificial Sequence
  Description of Artificial Sequence: Synthetic oligonucleotide
auaguuucuggagaacuac

SEQ ID NO: 3105877 - RNA, 19 nt, Artificial Sequence
  Description of Artificial Sequence: Synthetic oligonucleotide
aagauccuguuauagguaa

SEQ ID NO: 3105878 - RNA, 19 nt, Artificial Sequence
  Description of Artificial Sequence: Synthetic oligonucleotide
cucaaguugcuauaguuuc

SEQ ID NO: 3105879 - RNA, 19 nt, Artificial Sequence
  Description of Artificial Sequence: Synthetic oligonucleotide
uacaucucagggauaaaac

SEQ ID NO: 3105880 - RNA, 19 nt, Artificial Sequence
  Description of Artificial Sequence: Synthetic oligonucleotide
aagaucccaugauuucugg

SEQ ID NO: 3105881 - RNA, 19 nt, Artificial Sequence
  Description of Artificial Sequence: Synthetic oligonucleotide
uaagaucccaugauuucug

SEQ ID NO: 3105882 - RNA, 19 nt, Artificial Sequence
  Description of Artificial Sequence: Synthetic oligonucleotide
cauccauucucucuggaag

SEQ ID NO: 3105883 - RNA, 19 nt, Artificial Sequence
  Description of Artificial Sequence: Synthetic oligonucleotide
acaucucagggauaaaaca

SEQ ID NO: 3105884 - RNA, 19 nt, Artificial Sequence
  Description of Artificial Sequence: Synthetic oligonucleotide
aaguugcuauaguuucugg

SEQ ID NO: 3105885 - RNA, 19 nt, Artificial Sequence
  Description of Artificial Sequence: Synthetic oligonucleotide
ggauaaaacaacuccaauc

SEQ ID NO: 3105886 - RNA, 19 nt, Artificial Sequence
  Description of Artificial Sequence: Synthetic oligonucleotide
aucccaugauuucuggaac

SEQ ID NO: 3105887 - RNA, 19 nt, Artificial Sequence
  Description of Artificial Sequence: Synthetic oligonucleotide
uucuggaacaucuuaucuc

SEQ ID NO: 3105888 - RNA, 19 nt, Artificial Sequence
  Description of Artificial Sequence: Synthetic oligonucleotide
ucucagggauaaaacaacu

SEQ ID NO: 3105889 - RNA, 19 nt, Artificial Sequence
  Description of Artificial Sequence: Synthetic oligonucleotide
uugcuauaguuucuggaga

SEQ ID NO: 3105890 - RNA, 19 nt, Artificial Sequence
  Description of Artificial Sequence: Synthetic oligonucleotide
uggaacaucuuaucuccag

SEQ ID NO: 3105891 - RNA, 19 nt, Artificial Sequence
  Description of Artificial Sequence: Synthetic oligonucleotide
cacacacacacacacacac

SEQ ID NO: 3105892 - RNA, 19 nt, Artificial Sequence
  Description of Artificial Sequence: Synthetic oligonucleotide
aguugcuauaguuucugga

SEQ ID NO: 3105893 - RNA, 19 nt, Artificial Sequence
  Description of Artificial Sequence: Synthetic oligonucleotide
uguuauagguaagauccca

SEQ ID NO: 3105894 - RNA, 19 nt, Artificial Sequence
  Description of Artificial Sequence: Synthetic oligonucleotide
aggagaugcagguaaguga

SEQ ID NO: 3105895 - RNA, 19 nt, Artificial Sequence
  Description of Artificial Sequence: Synthetic oligonucleotide
uauaguuucuggagaacua

SEQ ID NO: 3105896 - RNA, 19 nt, Artificial Sequence
  Description of Artificial Sequence: Synthetic oligonucleotide
cacacauccauucucucug

SEQ ID NO: 3105897 - RNA, 19 nt, Artificial Sequence
  Description of Artificial Sequence: Synthetic oligonucleotide
auagguaagaucccaugau

SEQ ID NO: 3105898 - RNA, 19 nt, Artificial Sequence
  Description of Artificial Sequence: Synthetic oligonucleotide
aucucagggauaaaacaac

SEQ ID NO: 3105899 - RNA, 19 nt, Artificial Sequence
  Description of Artificial Sequence: Synthetic oligonucleotide
gaugcagguaagugaagac

SEQ ID NO: 3105900 - RNA, 19 nt, Artificial Sequence
  Description of Artificial Sequence: Synthetic oligonucleotide
ucaaguugcuauaguuucu

SEQ ID NO: 3105901 - RNA, 19 nt, Artificial Sequence
  Description of Artificial Sequence: Synthetic oligonucleotide
gaucccaugauuucuggaa

SEQ ID NO: 3105902 - RNA, 19 nt, Artificial Sequence
  Description of Artificial Sequence: Synthetic oligonucleotide
ucuuaucuccaguuucuga

SEQ ID NO: 3105903 - RNA, 19 nt, Artificial Sequence
  Description of Artificial Sequence: Synthetic oligonucleotide
ugcuauaguuucuggagaa

SEQ ID NO: 3105904 - RNA, 19 nt, Artificial Sequence
  Description of Artificial Sequence: Synthetic oligonucleotide
uuacaucucagggauaaaa

SEQ ID NO: 3105905 - RNA, 19 nt, Artificial Sequence
  Description of Artificial Sequence: Synthetic oligonucleotide
agguaagugaagaccuucc

SEQ ID NO: 3105906 - RNA, 19 nt, Artificial Sequence
  Description of Artificial Sequence: Synthetic oligonucleotide
uccuguuauagguaagauc

SEQ ID NO: 3105907 - RNA, 19 nt, Artificial Sequence
  Description of Artificial Sequence: Synthetic oligonucleotide
uugacucaaguugcuauag

SEQ ID NO: 3105908 - RNA, 19 nt, Artificial Sequence
  Description of Artificial Sequence: Synthetic oligonucleotide
ucaugccaggagaugcagg

SEQ ID NO: 3105909 - RNA, 19 nt, Artificial Sequence
  Description of Artificial Sequence: Synthetic oligonucleotide
aaacaacuccaaucauuga

SEQ ID NO: 3105910 - RNA, 19 nt, Artificial Sequence
  Description of Artificial Sequence: Synthetic oligonucleotide
uuaucuccaguuucugaga

SEQ ID NO: 3105911 - RNA, 19 nt, Artificial Sequence
  Description of Artificial Sequence: Synthetic oligonucleotide
aacuccaaucauugacuca

SEQ ID NO: 3105912 - RNA, 19 nt, Artificial Sequence
  Description of Artificial Sequence: Synthetic oligonucleotide
uccaaucauugacucaagu

SEQ ID NO: 3105913 - RNA, 19 nt, Artificial Sequence
  Description of Artificial Sequence: Synthetic oligonucleotide
ugagaucaugccaggagau

SEQ ID NO: 3105914 - RNA, 19 nt, Artificial Sequence
  Description of Artificial Sequence: Synthetic oligonucleotide
guaagugaagaccuuccca

SEQ ID NO: 3105915 - RNA, 19 nt, Artificial Sequence
  Description of Artificial Sequence: Synthetic oligonucleotide
cacacacacacauccauuc

SEQ ID NO: 3105916 - RNA, 19 nt, Artificial Sequence
  Description of Artificial Sequence: Synthetic oligonucleotide
aguuucuggagaacuacag

SEQ ID NO: 3105917 - RNA, 19 nt, Artificial Sequence
  Description of Artificial Sequence: Synthetic oligonucleotide
uagguaagaucccaugauu

SEQ ID NO: 3105918 - RNA, 19 nt, Artificial Sequence
  Description of Artificial Sequence: Synthetic oligonucleotide
aagugaagaccuucccaga

SEQ ID NO: 3105919 - RNA, 19 nt, Artificial Sequence
  Description of Artificial Sequence: Synthetic oligonucleotide
ugccaggagaugcagguaa

SEQ ID NO: 3105920 - RNA, 19 nt, Artificial Sequence
  Description of Artificial Sequence: Synthetic oligonucleotide
auaaaacaacuccaaucau

SEQ ID NO: 3105921 - RNA, 19 nt, Artificial Sequence
  Description of Artificial Sequence: Synthetic oligonucleotide
uccaguuucugagaucaug

SEQ ID NO: 3105922 - RNA, 19 nt, Artificial Sequence
  Description of Artificial Sequence: Synthetic oligonucleotide
uaucuccaguuucugagau

SEQ ID NO: 3105923 - RNA, 19 nt, Artificial Sequence
  Description of Artificial Sequence: Synthetic oligonucleotide
caucucagggauaaaacaa

SEQ ID NO: 3105924 - RNA, 19 nt, Artificial Sequence
  Description of Artificial Sequence: Synthetic oligonucleotide
acacacauccauucucucu

SEQ ID NO: 3105925 - RNA, 19 nt, Artificial Sequence
  Description of Artificial Sequence: Synthetic oligonucleotide
cagggauaaaacaacucca

SEQ ID NO: 3105926 - RNA, 19 nt, Artificial Sequence
  Description of Artificial Sequence: Synthetic oligonucleotide
gaaugaagagccacccagc

SEQ ID NO: 3105927 - RNA, 19 nt, Artificial Sequence
  Description of Artificial Sequence: Synthetic oligonucleotide
ucccaugauuucuggaaca

SEQ ID NO: 3105928 - RNA, 19 nt, Artificial Sequence
  Description of Artificial Sequence: Synthetic oligonucleotide
cuggaagauccuguuauag

SEQ ID NO: 3105929 - RNA, 19 nt, Artificial Sequence
  Description of Artificial Sequence: Synthetic oligonucleotide
ccaguuucugagaucaugc

SEQ ID NO: 3105930 - RNA, 19 nt, Artificial Sequence
  Description of Artificial Sequence: Synthetic oligonucleotide
agugaagaccuucccagaa

SEQ ID NO: 3105931 - RNA, 19 nt, Artificial Sequence
  Description of Artificial Sequence: Synthetic oligonucleotide
cuguuauagguaagauccc

SEQ ID NO: 3105932 - RNA, 19 nt, Artificial Sequence
  Description of Artificial Sequence: Synthetic oligonucleotide
cucagggauaaaacaacuc

SEQ ID NO: 3105933 - RNA, 19 nt, Artificial Sequence
  Description of Artificial Sequence: Synthetic oligonucleotide
caguuucugagaucaugcc

SEQ ID NO: 3105934 - RNA, 19 nt, Artificial Sequence
  Description of Artificial Sequence: Synthetic oligonucleotide
agccacccagcuuacaucu

SEQ ID NO: 3105935 - RNA, 19 nt, Artificial Sequence
  Description of Artificial Sequence: Synthetic oligonucleotide
auccauucucucuggaaga

SEQ ID NO: 3105936 - RNA, 19 nt, Artificial Sequence
  Description of Artificial Sequence: Synthetic oligonucleotide
agaugcagguaagugaaga

SEQ ID NO: 3105937 - RNA, 19 nt, Artificial Sequence
  Description of Artificial Sequence: Synthetic oligonucleotide
aagaccuucccagaaugaa

SEQ ID NO: 3105938 - RNA, 19 nt, Artificial Sequence
  Description of Artificial Sequence: Synthetic oligonucleotide
auugacucaaguugcuaua

SEQ ID NO: 3105939 - RNA, 19 nt, Artificial Sequence
  Description of Artificial Sequence: Synthetic oligonucleotide
gauccuguuauagguaaga

SEQ ID NO: 3105940 - RNA, 19 nt, Artificial Sequence
  Description of Artificial Sequence: Synthetic oligonucleotide
caaguugcuauaguuucug

SEQ ID NO: 3105941 - RNA, 19 nt, Artificial Sequence
  Description of Artificial Sequence: Synthetic oligonucleotide
ugacucaaguugcuauagu

SEQ ID NO: 3105942 - RNA, 19 nt, Artificial Sequence
  Description of Artificial Sequence: Synthetic oligonucleotide
caacuccaaucauugacuc

SEQ ID NO: 3105943 - RNA, 19 nt, Artificial Sequence
  Description of Artificial Sequence: Synthetic oligonucleotide
cacacacacauccauucuc

SEQ ID NO: 3105944 - RNA, 19 nt, Artificial Sequence
  Description of Artificial Sequence: Synthetic oligonucleotide
agagccacccagcuuacau

SEQ ID NO: 3105945 - RNA, 19 nt, Artificial Sequence
  Description of Artificial Sequence: Synthetic oligonucleotide
gguaagugaagaccuuccc

SEQ ID NO: 3105946 - RNA, 19 nt, Artificial Sequence
  Description of Artificial Sequence: Synthetic oligonucleotide
uucucucuggaagauccug

SEQ ID NO: 3105947 - RNA, 19 nt, Artificial Sequence
  Description of Artificial Sequence: Synthetic oligonucleotide
aucuccaguuucugagauc

SEQ ID NO: 3105948 - RNA, 19 nt, Artificial Sequence
  Description of Artificial Sequence: Synthetic oligonucleotide
gguaagaucccaugauuuc

SEQ ID NO: 3105949 - RNA, 19 nt, Artificial Sequence
  Description of Artificial Sequence: Synthetic oligonucleotide
acauccauucucucuggaa

SEQ ID NO: 3105950 - RNA, 19 nt, Artificial Sequence
  Description of Artificial Sequence: Synthetic oligonucleotide
agaccuucccagaaugaag

SEQ ID NO: 3105951 - RNA, 19 nt, Artificial Sequence
  Description of Artificial Sequence: Synthetic oligonucleotide
cccagcuuacaucucaggg

SEQ ID NO: 3105952 - RNA, 19 nt, Artificial Sequence
  Description of Artificial Sequence: Synthetic oligonucleotide
agaucccaugauuucugga

SEQ ID NO: 3105953 - RNA, 19 nt, Artificial Sequence
  Description of Artificial Sequence: Synthetic oligonucleotide
ucccagaaugaagagccac

SEQ ID NO: 3105954 - RNA, 19 nt, Artificial Sequence
  Description of Artificial Sequence: Synthetic oligonucleotide
ucucuggaagauccuguua

SEQ ID NO: 3105955 - RNA, 19 nt, Artificial Sequence
  Description of Artificial Sequence: Synthetic oligonucleotide
gacucaaguugcuauaguu

SEQ ID NO: 3105956 - RNA, 19 nt, Artificial Sequence
  Description of Artificial Sequence: Synthetic oligonucleotide
caggagaugcagguaagug

SEQ ID NO: 3105957 - RNA, 19 nt, Artificial Sequence
  Description of Artificial Sequence: Synthetic oligonucleotide
acccagcuuacaucucagg

SEQ ID NO: 3105958 - RNA, 19 nt, Artificial Sequence
  Description of Artificial Sequence: Synthetic oligonucleotide
ucuggaagauccuguuaua

SEQ ID NO: 3105959 - RNA, 19 nt, Artificial Sequence
  Description of Artificial Sequence: Synthetic oligonucleotide
gagaucaugccaggagaug

SEQ ID NO: 3105960 - RNA, 19 nt, Artificial Sequence
  Description of Artificial Sequence: Synthetic oligonucleotide
acacacacauccauucucu

SEQ ID NO: 3105961 - RNA, 19 nt, Artificial Sequence
  Description of Artificial Sequence: Synthetic oligonucleotide
agggauaaaacaacuccaa

SEQ ID NO: 3105962 - RNA, 19 nt, Artificial Sequence
  Description of Artificial Sequence: Synthetic oligonucleotide
agguaagaucccaugauuu

SEQ ID NO: 3105963 - RNA, 19 nt, Artificial Sequence
  Description of Artificial Sequence: Synthetic oligonucleotide
acucaaguugcuauaguuu

SEQ ID NO: 3105964 - RNA, 19 nt, Artificial Sequence
  Description of Artificial Sequence: Synthetic oligonucleotide
gaacaucuuaucuccaguu

SEQ ID NO: 3105965 - RNA, 19 nt, Artificial Sequence
  Description of Artificial Sequence: Synthetic oligonucleotide
cccacacacacacacacac

SEQ ID NO: 3105966 - RNA, 19 nt, Artificial Sequence
  Description of Artificial Sequence: Synthetic oligonucleotide
uucccagaaugaagagcca

SEQ ID NO: 3105967 - RNA, 19 nt, Artificial Sequence
  Description of Artificial Sequence: Synthetic oligonucleotide
aucuuaucuccaguuucug

SEQ ID NO: 3105968 - RNA, 19 nt, Artificial Sequence
  Description of Artificial Sequence: Synthetic oligonucleotide
guaagaucccaugauuucu

SEQ ID NO: 3105969 - RNA, 19 nt, Artificial Sequence
  Description of Artificial Sequence: Synthetic oligonucleotide
cagguaagugaagaccuuc

SEQ ID NO: 3105970 - RNA, 19 nt, Artificial Sequence
  Description of Artificial Sequence: Synthetic oligonucleotide
ucauugacucaaguugcua

SEQ ID NO: 3105971 - RNA, 19 nt, Artificial Sequence
  Description of Artificial Sequence: Synthetic oligonucleotide
gaagauccuguuauaggua

SEQ ID NO: 3105972 - RNA, 19 nt, Artificial Sequence
  Description of Artificial Sequence: Synthetic oligonucleotide
ggagaugcagguaagugaa

SEQ ID NO: 3105973 - RNA, 19 nt, Artificial Sequence
  Description of Artificial Sequence: Synthetic oligonucleotide
cuauaguuucuggagaacu

SEQ ID NO: 3105974 - RNA, 19 nt, Artificial Sequence
  Description of Artificial Sequence: Synthetic oligonucleotide
cccagaaugaagagccacc

SEQ ID NO: 3105975 - RNA, 19 nt, Artificial Sequence
  Description of Artificial Sequence: Synthetic oligonucleotide
gagccacccagcuuacauc

SEQ ID NO: 3105976 - RNA, 19 nt, Artificial Sequence
  Description of Artificial Sequence: Synthetic oligonucleotide
caucuuaucuccaguuucu

SEQ ID NO: 3105977 - RNA, 19 nt, Artificial Sequence
  Description of Artificial Sequence: Synthetic oligonucleotide
cauugacucaaguugcuau

SEQ ID NO: 3105978 - RNA, 19 nt, Artificial Sequence
  Description of Artificial Sequence: Synthetic oligonucleotide
acacacacacacacacauc

SEQ ID NO: 3105979 - RNA, 19 nt, Artificial Sequence
  Description of Artificial Sequence: Synthetic oligonucleotide
cacccagcuuacaucucag

SEQ ID NO: 3105980 - RNA, 19 nt, Artificial Sequence
  Description of Artificial Sequence: Synthetic oligonucleotide
uccauucucucuggaagau

SEQ ID NO: 3105981 - RNA, 19 nt, Artificial Sequence
  Description of Artificial Sequence: Synthetic oligonucleotide
aucauugacucaaguugcu

SEQ ID NO: 3105982 - RNA, 19 nt, Artificial Sequence
  Description of Artificial Sequence: Synthetic oligonucleotide
caugccaggagaugcaggu

SEQ ID NO: 3105983 - RNA, 19 nt, Artificial Sequence
  Description of Artificial Sequence: Synthetic oligonucleotide
agauccuguuauagguaag

SEQ ID NO: 3105984 - RNA, 19 nt, Artificial Sequence
  Description of Artificial Sequence: Synthetic oligonucleotide
ccagaaugaagagccaccc

SEQ ID NO: 3105985 - RNA, 19 nt, Artificial Sequence
  Description of Artificial Sequence: Synthetic oligonucleotide
gagaugcagguaagugaag

SEQ ID NO: 3105986 - RNA, 19 nt, Artificial Sequence
  Description of Artificial Sequence: Synthetic oligonucleotide
cucuggaagauccuguuau

SEQ ID NO: 3105987 - RNA, 19 nt, Artificial Sequence
  Description of Artificial Sequence: Synthetic oligonucleotide
cacacacacacacacacau

SEQ ID NO: 3105988 - RNA, 19 nt, Artificial Sequence
  Description of Artificial Sequence: Synthetic oligonucleotide
cacacacauccauucucuc

SEQ ID NO: 3105989 - RNA, 19 nt, Artificial Sequence
  Description of Artificial Sequence: Synthetic oligonucleotide
augaagagccacccagcuu

SEQ ID NO: 3105990 - RNA, 19 nt, Artificial Sequence
  Description of Artificial Sequence: Synthetic oligonucleotide
auccuguuauagguaagau

SEQ ID NO: 3105991 - RNA, 19 nt, Artificial Sequence
  Description of Artificial Sequence: Synthetic oligonucleotide
ccagcuuacaucucaggga

SEQ ID NO: 3105992 - RNA, 19 nt, Artificial Sequence
  Description of Artificial Sequence: Synthetic oligonucleotide
gcuuacaucucagggauaa

SEQ ID NO: 3105993 - RNA, 19 nt, Artificial Sequence
  Description of Artificial Sequence: Synthetic oligonucleotide
cagcuuacaucucagggau

SEQ ID NO: 3105994 - RNA, 19 nt, Artificial Sequence
  Description of Artificial Sequence: Synthetic oligonucleotide
cagaaugaagagccaccca

SEQ ID NO: 3105995 - RNA, 19 nt, Artificial Sequence
  Description of Artificial Sequence: Synthetic oligonucleotide
ccuucccagaaugaagagc

SEQ ID NO: 3105996 - RNA, 19 nt, Artificial Sequence
  Description of Artificial Sequence: Synthetic oligonucleotide
cuggaacaucuuaucucca

SEQ ID NO: 3105997 - RNA, 19 nt, Artificial Sequence
  Description of Artificial Sequence: Synthetic oligonucleotide
guuauagguaagaucccau

SEQ ID NO: 3105998 - RNA, 19 nt, Artificial Sequence
  Description of Artificial Sequence: Synthetic oligonucleotide
acacacacacacacacaca

SEQ ID NO: 3105999 - RNA, 19 nt, Artificial Sequence
  Description of Artificial Sequence: Synthetic oligonucleotide
acacacacacacacaucca

SEQ ID NO: 3106000 - RNA, 19 nt, Artificial Sequence
  Description of Artificial Sequence: Synthetic oligonucleotide
ggaacaucuuaucuccagu

SEQ ID NO: 3106001 - RNA, 19 nt, Artificial Sequence
  Description of Artificial Sequence: Synthetic oligonucleotide
gaagagccacccagcuuac

SEQ ID NO: 3106002 - RNA, 19 nt, Artificial Sequence
  Description of Artificial Sequence: Synthetic oligonucleotide
augauuucuggaacaucuu

SEQ ID NO: 3106003 - RNA, 19 nt, Artificial Sequence
  Description of Artificial Sequence: Synthetic oligonucleotide
acacacacacacauccauu

SEQ ID NO: 3106004 - RNA, 19 nt, Artificial Sequence
  Description of Artificial Sequence: Synthetic oligonucleotide
gcuauaguuucuggagaac

SEQ ID NO: 3106005 - RNA, 19 nt, Artificial Sequence
  Description of Artificial Sequence: Synthetic oligonucleotide
auucucucuggaagauccu

SEQ ID NO: 3106006 - RNA, 19 nt, Artificial Sequence
  Description of Artificial Sequence: Synthetic oligonucleotide
cacacacacacacauccau

SEQ ID NO: 3106007 - RNA, 19 nt, Artificial Sequence
  Description of Artificial Sequence: Synthetic oligonucleotide
aagagccacccagcuuaca

SEQ ID NO: 3106008 - RNA, 19 nt, Artificial Sequence
  Description of Artificial Sequence: Synthetic oligonucleotide
gugaagaccuucccagaau

SEQ ID NO: 3106009 - RNA, 19 nt, Artificial Sequence
  Description of Artificial Sequence: Synthetic oligonucleotide
ccaaucauugacucaaguu

SEQ ID NO: 3106010 - RNA, 19 nt, Artificial Sequence
  Description of Artificial Sequence: Synthetic oligonucleotide
gccaggagaugcagguaag

SEQ ID NO: 3106011 - RNA, 19 nt, Artificial Sequence
  Description of Artificial Sequence: Synthetic oligonucleotide
ccacccagcuuacaucuca

SEQ ID NO: 3106012 - RNA, 19 nt, Artificial Sequence
  Description of Artificial Sequence: Synthetic oligonucleotide
ccaugauuucuggaacauc

SEQ ID NO: 3106013 - RNA, 19 nt, Artificial Sequence
  Description of Artificial Sequence: Synthetic oligonucleotide
cucucuggaagauccuguu

SEQ ID NO: 3106014 - RNA, 19 nt, Artificial Sequence
  Description of Artificial Sequence: Synthetic oligonucleotide
ccacacacacacacacaca

SEQ ID NO: 3106015 - RNA, 19 nt, Artificial Sequence
  Description of Artificial Sequence: Synthetic oligonucleotide
ccauucucucuggaagauc

SEQ ID NO: 3106016 - RNA, 19 nt, Artificial Sequence
  Description of Artificial Sequence: Synthetic oligonucleotide
agcuuacaucucagggaua

SEQ ID NO: 3106017 - RNA, 19 nt, Artificial Sequence
  Description of Artificial Sequence: Synthetic oligonucleotide
ccccacacacacacacaca

SEQ ID NO: 3106018 - RNA, 19 nt, Artificial Sequence
  Description of Artificial Sequence: Synthetic oligonucleotide
cuccaguuucugagaucau

SEQ ID NO: 3106019 - RNA, 19 nt, Artificial Sequence
  Description of Artificial Sequence: Synthetic oligonucleotide
gccacccagcuuacaucuc

SEQ ID NO: 3106020 - RNA, 19 nt, Artificial Sequence
  Description of Artificial Sequence: Synthetic oligonucleotide
gcagguaagugaagaccuu

SEQ ID NO: 3106021 - RNA, 19 nt, Artificial Sequence
  Description of Artificial Sequence: Synthetic oligonucleotide
aaaaugcagaaucacuucg

SEQ ID NO: 3106022 - RNA, 19 nt, Artificial Sequence
  Description of Artificial Sequence: Synthetic oligonucleotide
uaagaaguuauaaacacga

SEQ ID NO: 3106023 - RNA, 19 nt, Artificial Sequence
  Description of Artificial Sequence: Synthetic oligonucleotide
aaucacuucguuugugucc

SEQ ID NO: 3106024 - RNA, 19 nt, Artificial Sequence
  Description of Artificial Sequence: Synthetic oligonucleotide
uuuguuacagacaacaguc

SEQ ID NO: 3106025 - RNA, 19 nt, Artificial Sequence
  Description of Artificial Sequence: Synthetic oligonucleotide
aauauagagcaaucuugcc

SEQ ID NO: 3106026 - RNA, 19 nt, Artificial Sequence
  Description of Artificial Sequence: Synthetic oligonucleotide
uguccagugaucaaguagg

SEQ ID NO: 3106027 - RNA, 19 nt, Artificial Sequence
  Description of Artificial Sequence: Synthetic oligonucleotide
uuuaauauucuagucaacc

SEQ ID NO: 3106028 - RNA, 19 nt, Artificial Sequence
  Description of Artificial Sequence: Synthetic oligonucleotide
uaauauagagcaaucuugc

SEQ ID NO: 3106029 - RNA, 19 nt, Artificial Sequence
  Description of Artificial Sequence: Synthetic oligonucleotide
ugguccaaagauaauauag

SEQ ID NO: 3106030 - RNA, 19 nt, Artificial Sequence
  Description of Artificial Sequence: Synthetic oligonucleotide
cacauaagaaguuauaaac

SEQ ID NO: 3106031 - RNA, 19 nt, Artificial Sequence
  Description of Artificial Sequence: Synthetic oligonucleotide
aaguuauaaacacgauggc

SEQ ID NO: 3106032 - RNA, 19 nt, Artificial Sequence
  Description of Artificial Sequence: Synthetic oligonucleotide
cuuaacucuaguuuucugg

SEQ ID NO: 3106033 - RNA, 19 nt, Artificial Sequence
  Description of Artificial Sequence: Synthetic oligonucleotide
aacucuaguuuucuggcac

SEQ ID NO: 3106034 - RNA, 19 nt, Artificial Sequence
  Description of Artificial Sequence: Synthetic oligonucleotide
aacagucuaauccuuaacu

SEQ ID NO: 3106035 - RNA, 19 nt, Artificial Sequence
  Description of Artificial Sequence: Synthetic oligonucleotide
cauaagaaguuauaaacac

SEQ ID NO: 3106036 - RNA, 19 nt, Artificial Sequence
  Description of Artificial Sequence: Synthetic oligonucleotide
uauagagcaaucuugccug

SEQ ID NO: 3106037 - RNA, 19 nt, Artificial Sequence
  Description of Artificial Sequence: Synthetic oligonucleotide
cuacagaacagucuaaucc

SEQ ID NO: 3106038 - RNA, 19 nt, Artificial Sequence
  Description of Artificial Sequence: Synthetic oligonucleotide
ugcagaaucacuucguuug

SEQ ID NO: 3106039 - RNA, 19 nt, Artificial Sequence
  Description of Artificial Sequence: Synthetic oligonucleotide
aacagucugcaucuuacgg

SEQ ID NO: 3106040 - RNA, 19 nt, Artificial Sequence
  Description of Artificial Sequence: Synthetic oligonucleotide
caugguuuuaauauucuag

SEQ ID NO: 3106041 - RNA, 19 nt, Artificial Sequence
  Description of Artificial Sequence: Synthetic oligonucleotide
acagacaacagucugcauc

SEQ ID NO: 3106042 - RNA, 19 nt, Artificial Sequence
  Description of Artificial Sequence: Synthetic oligonucleotide
agaaguuauaaacacgaug

SEQ ID NO: 3106043 - RNA, 19 nt, Artificial Sequence
  Description of Artificial Sequence: Synthetic oligonucleotide
uccaaagauaauauagagc

SEQ ID NO: 3106044 - RNA, 19 nt, Artificial Sequence
  Description of Artificial Sequence: Synthetic oligonucleotide
ucaaguaggacauuccuac

SEQ ID NO: 3106045 - RNA, 19 nt, Artificial Sequence
  Description of Artificial Sequence: Synthetic oligonucleotide
aacacgauggcauucgagu

SEQ ID NO: 3106046 - RNA, 19 nt, Artificial Sequence
  Description of Artificial Sequence: Synthetic oligonucleotide
aaguaggacauuccuacag

SEQ ID NO: 3106047 - RNA, 19 nt, Artificial Sequence
  Description of Artificial Sequence: Synthetic oligonucleotide
uuagucagcucacauaaga

SEQ ID NO: 3106048 - RNA, 19 nt, Artificial Sequence
  Description of Artificial Sequence: Synthetic oligonucleotide
uuaauauucuagucaacca

SEQ ID NO: 3106049 - RNA, 19 nt, Artificial Sequence
  Description of Artificial Sequence: Synthetic oligonucleotide
uuaacucuaguuuucuggc

SEQ ID NO: 3106050 - RNA, 19 nt, Artificial Sequence
  Description of Artificial Sequence: Synthetic oligonucleotide
cuugaggagauguuggucc

SEQ ID NO: 3106051 - RNA, 19 nt, Artificial Sequence
  Description of Artificial Sequence: Synthetic oligonucleotide
uaauauucuagucaaccaa

SEQ ID NO: 3106052 - RNA, 19 nt, Artificial Sequence
  Description of Artificial Sequence: Synthetic oligonucleotide
aaucuugccugauuuacca

SEQ ID NO: 3106053 - RNA, 19 nt, Artificial Sequence
  Description of Artificial Sequence: Synthetic oligonucleotide
acagucuaauccuuaacuc

SEQ ID NO: 3106054 - RNA, 19 nt, Artificial Sequence
  Description of Artificial Sequence: Synthetic oligonucleotide
auaauauagagcaaucuug

SEQ ID NO: 3106055 - RNA, 19 nt, Artificial Sequence
  Description of Artificial Sequence: Synthetic oligonucleotide
aggacauuccuacagaaca

SEQ ID NO: 3106056 - RNA, 19 nt, Artificial Sequence
  Description of Artificial Sequence: Synthetic oligonucleotide
uaauccuuaacucuaguuu

SEQ ID NO: 3106057 - RNA, 19 nt, Artificial Sequence
  Description of Artificial Sequence: Synthetic oligonucleotide
aauccuuaacucuaguuuu

SEQ ID NO: 3106058 - RNA, 19 nt, Artificial Sequence
  Description of Artificial Sequence: Synthetic oligonucleotide
gauuagucagcucacauaa

SEQ ID NO: 3106059 - RNA, 19 nt, Artificial Sequence
  Description of Artificial Sequence: Synthetic oligonucleotide
ccaaagauaauauagagca

SEQ ID NO: 3106060 - RNA, 19 nt, Artificial Sequence
  Description of Artificial Sequence: Synthetic oligonucleotide
uguuacagacaacagucug

SEQ ID NO: 3106061 - RNA, 19 nt, Artificial Sequence
  Description of Artificial Sequence: Synthetic oligonucleotide
augguuuuaauauucuagu

SEQ ID NO: 3106062 - RNA, 19 nt, Artificial Sequence
  Description of Artificial Sequence: Synthetic oligonucleotide
uacagaacagucuaauccu

SEQ ID NO: 3106063 - RNA, 19 nt, Artificial Sequence
  Description of Artificial Sequence: Synthetic oligonucleotide
uuggccaugguuuuaauau

SEQ ID NO: 3106064 - RNA, 19 nt, Artificial Sequence
  Description of Artificial Sequence: Synthetic oligonucleotide
acagucugcaucuuacggg

SEQ ID NO: 3106065 - RNA, 19 nt, Artificial Sequence
  Description of Artificial Sequence: Synthetic oligonucleotide
aagauaauauagagcaauc

SEQ ID NO: 3106066 - RNA, 19 nt, Artificial Sequence
  Description of Artificial Sequence: Synthetic oligonucleotide
guuuuaauauucuagucaa

SEQ ID NO: 3106067 - RNA, 19 nt, Artificial Sequence
  Description of Artificial Sequence: Synthetic oligonucleotide
guccaaagauaauauagag

SEQ ID NO: 3106068 - RNA, 19 nt, Artificial Sequence
  Description of Artificial Sequence: Synthetic oligonucleotide
uacgggagagauuagucag

SEQ ID NO: 3106069 - RNA, 19 nt, Artificial Sequence
  Description of Artificial Sequence: Synthetic oligonucleotide
uuuguguccagugaucaag

SEQ ID NO: 3106070 - RNA, 19 nt, Artificial Sequence
  Description of Artificial Sequence: Synthetic oligonucleotide
auaagaaguuauaaacacg

SEQ ID NO: 3106071 - RNA, 19 nt, Artificial Sequence
  Description of Artificial Sequence: Synthetic oligonucleotide
ugguuuguuacagacaaca

SEQ ID NO: 3106072 - RNA, 19 nt, Artificial Sequence
  Description of Artificial Sequence: Synthetic oligonucleotide
agucagcucacauaagaag

SEQ ID NO: 3106073 - RNA, 19 nt, Artificial Sequence
  Description of Artificial Sequence: Synthetic oligonucleotide
ucacauaagaaguuauaaa

SEQ ID NO: 3106074 - RNA, 19 nt, Artificial Sequence
  Description of Artificial Sequence: Synthetic oligonucleotide
caucuugaggagauguugg

SEQ ID NO: 3106075 - RNA, 19 nt, Artificial Sequence
  Description of Artificial Sequence: Synthetic oligonucleotide
cuaguuuucuggcacuucc

SEQ ID NO: 3106076 - RNA, 19 nt, Artificial Sequence
  Description of Artificial Sequence: Synthetic oligonucleotide
auaaacacgauggcauucg

SEQ ID NO: 3106077 - RNA, 19 nt, Artificial Sequence
  Description of Artificial Sequence: Synthetic oligonucleotide
gguuuuaauauucuaguca

SEQ ID NO: 3106078 - RNA, 19 nt, Artificial Sequence
  Description of Artificial Sequence: Synthetic oligonucleotide
ugaucaaguaggacauucc

SEQ ID NO: 3106079 - RNA, 19 nt, Artificial Sequence
  Description of Artificial Sequence: Synthetic oligonucleotide
aauauucuagucaaccaaa

SEQ ID NO: 3106080 - RNA, 19 nt, Artificial Sequence
  Description of Artificial Sequence: Synthetic oligonucleotide
uuuucuggcacuuccuggu

SEQ ID NO: 3106081 - RNA, 19 nt, Artificial Sequence
  Description of Artificial Sequence: Synthetic oligonucleotide
uuacgggagagauuaguca

SEQ ID NO: 3106082 - RNA, 19 nt, Artificial Sequence
  Description of Artificial Sequence: Synthetic oligonucleotide
acauaagaaguuauaaaca

SEQ ID NO: 3106083 - RNA, 19 nt, Artificial Sequence
  Description of Artificial Sequence: Synthetic oligonucleotide
uuuuaauauucuagucaac

SEQ ID NO: 3106084 - RNA, 19 nt, Artificial Sequence
  Description of Artificial Sequence: Synthetic oligonucleotide
guuuucuggcacuuccugg

SEQ ID NO: 3106085 - RNA, 19 nt, Artificial Sequence
  Description of Artificial Sequence: Synthetic oligonucleotide
acaacagucugcaucuuac

SEQ ID NO: 3106086 - RNA, 19 nt, Artificial Sequence
  Description of Artificial Sequence: Synthetic oligonucleotide
ggagagauuagucagcuca

SEQ ID NO: 3106087 - RNA, 19 nt, Artificial Sequence
  Description of Artificial Sequence: Synthetic oligonucleotide
auuccuacagaacagucua

SEQ ID NO: 3106088 - RNA, 19 nt, Artificial Sequence
  Description of Artificial Sequence: Synthetic oligonucleotide
agaaucacuucguuugugu

SEQ ID NO: 3106089 - RNA, 19 nt, Artificial Sequence
  Description of Artificial Sequence: Synthetic oligonucleotide
uuacagacaacagucugca

SEQ ID NO: 3106090 - RNA, 19 nt, Artificial Sequence
  Description of Artificial Sequence: Synthetic oligonucleotide
gauaauauagagcaaucuu

SEQ ID NO: 3106091 - RNA, 19 nt, Artificial Sequence
  Description of Artificial Sequence: Synthetic oligonucleotide
uuuccugccaaaucaccug

SEQ ID NO: 3106092 - RNA, 19 nt, Artificial Sequence
  Description of Artificial Sequence: Synthetic oligonucleotide
agauaauauagagcaaucu

SEQ ID NO: 3106093 - RNA, 19 nt, Artificial Sequence
  Description of Artificial Sequence: Synthetic oligonucleotide
gauguugguccaaagauaa

SEQ ID NO: 3106094 - RNA, 19 nt, Artificial Sequence
  Description of Artificial Sequence: Synthetic oligonucleotide
uucguuuguguccagugau

SEQ ID NO: 3106095 - RNA, 19 nt, Artificial Sequence
  Description of Artificial Sequence: Synthetic oligonucleotide
ugauuuaccauuggccaug

SEQ ID NO: 3106096 - RNA, 19 nt, Artificial Sequence
  Description of Artificial Sequence: Synthetic oligonucleotide
aaugcagaaucacuucguu

SEQ ID NO: 3106097 - RNA, 19 nt, Artificial Sequence
  Description of Artificial Sequence: Synthetic oligonucleotide
cuuacgggagagauuaguc

SEQ ID NO: 3106098 - RNA, 19 nt, Artificial Sequence
  Description of Artificial Sequence: Synthetic oligonucleotide
aguuuucuggcacuuccug

SEQ ID NO: 3106099 - RNA, 19 nt, Artificial Sequence
  Description of Artificial Sequence: Synthetic oligonucleotide
guguccagugaucaaguag

SEQ ID NO: 3106100 - RNA, 19 nt, Artificial Sequence
  Description of Artificial Sequence: Synthetic oligonucleotide
guuacagacaacagucugc

SEQ ID NO: 3106101 - RNA, 19 nt, Artificial Sequence
  Description of Artificial Sequence: Synthetic oligonucleotide
uuccugguuuguuacagac

SEQ ID NO: 3106102 - RNA, 19 nt, Artificial Sequence
  Description of Artificial Sequence: Synthetic oligonucleotide
ugccugauuuaccauuggc

SEQ ID NO: 3106103 - RNA, 19 nt, Artificial Sequence
  Description of Artificial Sequence: Synthetic oligonucleotide
aguaggacauuccuacaga

SEQ ID NO: 3106104 - RNA, 19 nt, Artificial Sequence
  Description of Artificial Sequence: Synthetic oligonucleotide
acuucguuuguguccagug

SEQ ID NO: 3106105 - RNA, 19 nt, Artificial Sequence
  Description of Artificial Sequence: Synthetic oligonucleotide
cuugccugauuuaccauug

SEQ ID NO: 3106106 - RNA, 19 nt, Artificial Sequence
  Description of Artificial Sequence: Synthetic oligonucleotide
uuguuacagacaacagucu

SEQ ID NO: 3106107 - RNA, 19 nt, Artificial Sequence
  Description of Artificial Sequence: Synthetic oligonucleotide
caaucuugccugauuuacc

SEQ ID NO: 3106108 - RNA, 19 nt, Artificial Sequence
  Description of Artificial Sequence: Synthetic oligonucleotide
ucuaauccuuaacucuagu

SEQ ID NO: 3106109 - RNA, 19 nt, Artificial Sequence
  Description of Artificial Sequence: Synthetic oligonucleotide
uuccugccaaaucaccugc

SEQ ID NO: 3106110 - RNA, 19 nt, Artificial Sequence
  Description of Artificial Sequence: Synthetic oligonucleotide
ucugcaucuuacgggagag

SEQ ID NO: 3106111 - RNA, 19 nt, Artificial Sequence
  Description of Artificial Sequence: Synthetic oligonucleotide
uagucagcucacauaagaa

SEQ ID NO: 3106112 - RNA, 19 nt, Artificial Sequence
  Description of Artificial Sequence: Synthetic oligonucleotide
aaaugcagaaucacuucgu

SEQ ID NO: 3106113 - RNA, 19 nt, Artificial Sequence
  Description of Artificial Sequence: Synthetic oligonucleotide
uaggacauuccuacagaac

SEQ ID NO: 3106114 - RNA, 19 nt, Artificial Sequence
  Description of Artificial Sequence: Synthetic oligonucleotide
gagauguugguccaaagau

SEQ ID NO: 3106115 - RNA, 19 nt, Artificial Sequence
  Description of Artificial Sequence: Synthetic oligonucleotide
uauaaacacgauggcauuc

SEQ ID NO: 3106116 - RNA, 19 nt, Artificial Sequence
  Description of Artificial Sequence: Synthetic oligonucleotide
uuauaaacacgauggcauu

SEQ ID NO: 3106117 - RNA, 19 nt, Artificial Sequence
  Description of Artificial Sequence: Synthetic oligonucleotide
gaaucacuucguuuguguc

SEQ ID NO: 3106118 - RNA, 19 nt, Artificial Sequence
  Description of Artificial Sequence: Synthetic oligonucleotide
guuauaaacacgauggcau

SEQ ID NO: 3106119 - RNA, 19 nt, Artificial Sequence
  Description of Artificial Sequence: Synthetic oligonucleotide
ucuggcacuuccugguuug

SEQ ID NO: 3106120 - RNA, 19 nt, Artificial Sequence
  Description of Artificial Sequence: Synthetic oligonucleotide
agaacagucuaauccuuaa

SEQ ID NO: 3106121 - RNA, 19 nt, Artificial Sequence
  Description of Artificial Sequence: Synthetic oligonucleotide
aaacacgauggcauucgag

SEQ ID NO: 3106122 - RNA, 19 nt, Artificial Sequence
  Description of Artificial Sequence: Synthetic oligonucleotide
uaacucuaguuuucuggca

SEQ ID NO: 3106123 - RNA, 19 nt, Artificial Sequence
  Description of Artificial Sequence: Synthetic oligonucleotide
gaacagucuaauccuuaac

SEQ ID NO: 3106124 - RNA, 19 nt, Artificial Sequence
  Description of Artificial Sequence: Synthetic oligonucleotide
guuuguuacagacaacagu

SEQ ID NO: 3106125 - RNA, 19 nt, Artificial Sequence
  Description of Artificial Sequence: Synthetic oligonucleotide
uuguguccagugaucaagu

SEQ ID NO: 3106126 - RNA, 19 nt, Artificial Sequence
  Description of Artificial Sequence: Synthetic oligonucleotide
agauuagucagcucacaua

SEQ ID NO: 3106127 - RNA, 19 nt, Artificial Sequence
  Description of Artificial Sequence: Synthetic oligonucleotide
ucagcucacauaagaaguu

SEQ ID NO: 3106128 - RNA, 19 nt, Artificial Sequence
  Description of Artificial Sequence: Synthetic oligonucleotide
ucuugccugauuuaccauu

SEQ ID NO: 3106129 - RNA, 19 nt, Artificial Sequence
  Description of Artificial Sequence: Synthetic oligonucleotide
acuuccugguuuguuacag

SEQ ID NO: 3106130 - RNA, 19 nt, Artificial Sequence
  Description of Artificial Sequence: Synthetic oligonucleotide
caacagucugcaucuuacg

SEQ ID NO: 3106131 - RNA, 19 nt, Artificial Sequence
  Description of Artificial Sequence: Synthetic oligonucleotide
uugccugauuuaccauugg

SEQ ID NO: 3106132 - RNA, 19 nt, Artificial Sequence
  Description of Artificial Sequence: Synthetic oligonucleotide
gauuuaccauuggccaugg

SEQ ID NO: 3106133 - RNA, 19 nt, Artificial Sequence
  Description of Artificial Sequence: Synthetic oligonucleotide
ucuuacgggagagauuagu

SEQ ID NO: 3106134 - RNA, 19 nt, Artificial Sequence
  Description of Artificial Sequence: Synthetic oligonucleotide
ugcaucuuacgggagagau

SEQ ID NO: 3106135 - RNA, 19 nt, Artificial Sequence
  Description of Artificial Sequence: Synthetic oligonucleotide
gaucaaguaggacauuccu

SEQ ID NO: 3106136 - RNA, 19 nt, Artificial Sequence
  Description of Artificial Sequence: Synthetic oligonucleotide
uccugguuuguuacagaca

SEQ ID NO: 3106137 - RNA, 19 nt, Artificial Sequence
  Description of Artificial Sequence: Synthetic oligonucleotide
uaaacacgauggcauucga

SEQ ID NO: 3106138 - RNA, 19 nt, Artificial Sequence
  Description of Artificial Sequence: Synthetic oligonucleotide
ugccaaaucaccugcccau

SEQ ID NO: 3106139 - RNA, 19 nt, Artificial Sequence
  Description of Artificial Sequence: Synthetic oligonucleotide
aucacuucguuugugucca

SEQ ID NO: 3106140 - RNA, 19 nt, Artificial Sequence
  Description of Artificial Sequence: Synthetic oligonucleotide
uugaggagauguuggucca

SEQ ID NO: 3106141 - RNA, 19 nt, Artificial Sequence
  Description of Artificial Sequence: Synthetic oligonucleotide
ccagugaucaaguaggaca

SEQ ID NO: 3106142 - RNA, 19 nt, Artificial Sequence
  Description of Artificial Sequence: Synthetic oligonucleotide
caucuuacgggagagauua

SEQ ID NO: 3106143 - RNA, 19 nt, Artificial Sequence
  Description of Artificial Sequence: Synthetic oligonucleotide
cucacauaagaaguuauaa

SEQ ID NO: 3106144 - RNA, 19 nt, Artificial Sequence
  Description of Artificial Sequence: Synthetic oligonucleotide
gugaucaaguaggacauuc

SEQ ID NO: 3106145 - RNA, 19 nt, Artificial Sequence
  Description of Artificial Sequence: Synthetic oligonucleotide
uugguccaaagauaauaua

SEQ ID NO: 3106146 - RNA, 19 nt, Artificial Sequence
  Description of Artificial Sequence: Synthetic oligonucleotide
aggagauguugguccaaag

SEQ ID NO: 3106147 - RNA, 19 nt, Artificial Sequence
  Description of Artificial Sequence: Synthetic oligonucleotide
auccuuaacucuaguuuuc

SEQ ID NO: 3106148 - RNA, 19 nt, Artificial Sequence
  Description of Artificial Sequence: Synthetic oligonucleotide
auuggccaugguuuuaaua

SEQ ID NO: 3106149 - RNA, 19 nt, Artificial Sequence
  Description of Artificial Sequence: Synthetic oligonucleotide
aagaaguuauaaacacgau

SEQ ID NO: 3106150 - RNA, 19 nt, Artificial Sequence
  Description of Artificial Sequence: Synthetic oligonucleotide
uccuuaacucuaguuuucu

SEQ ID NO: 3106151 - RNA, 19 nt, Artificial Sequence
  Description of Artificial Sequence: Synthetic oligonucleotide
ucuugaggagauguugguc

SEQ ID NO: 3106152 - RNA, 19 nt, Artificial Sequence
  Description of Artificial Sequence: Synthetic oligonucleotide
acucuaguuuucuggcacu

SEQ ID NO: 3106153 - RNA, 19 nt, Artificial Sequence
  Description of Artificial Sequence: Synthetic oligonucleotide
uccuacagaacagucuaau

SEQ ID NO: 3106154 - RNA, 19 nt, Artificial Sequence
  Description of Artificial Sequence: Synthetic oligonucleotide
acgggagagauuagucagc

SEQ ID NO: 3106155 - RNA, 19 nt, Artificial Sequence
  Description of Artificial Sequence: Synthetic oligonucleotide
ucguuuguguccagugauc

SEQ ID NO: 3106156 - RNA, 19 nt, Artificial Sequence
  Description of Artificial Sequence: Synthetic oligonucleotide
cagucugcaucuuacggga

SEQ ID NO: 3106157 - RNA, 19 nt, Artificial Sequence
  Description of Artificial Sequence: Synthetic oligonucleotide
guaggacauuccuacagaa

SEQ ID NO: 3106158 - RNA, 19 nt, Artificial Sequence
  Description of Artificial Sequence: Synthetic oligonucleotide
aaucaccugcccaucuuga

SEQ ID NO: 3106159 - RNA, 19 nt, Artificial Sequence
  Description of Artificial Sequence: Synthetic oligonucleotide
agucuaauccuuaacucua

SEQ ID NO: 3106160 - RNA, 19 nt, Artificial Sequence
  Description of Artificial Sequence: Synthetic oligonucleotide
cacgauggcauucgaguuc

SEQ ID NO: 3106161 - RNA, 19 nt, Artificial Sequence
  Description of Artificial Sequence: Synthetic oligonucleotide
gucuaauccuuaacucuag

SEQ ID NO: 3106162 - RNA, 19 nt, Artificial Sequence
  Description of Artificial Sequence: Synthetic oligonucleotide
uccugccaaaucaccugcc

SEQ ID NO: 3106163 - RNA, 19 nt, Artificial Sequence
  Description of Artificial Sequence: Synthetic oligonucleotide
cagacaacagucugcaucu

SEQ ID NO: 3106164 - RNA, 19 nt, Artificial Sequence
  Description of Artificial Sequence: Synthetic oligonucleotide
gccugauuuaccauuggcc

SEQ ID NO: 3106165 - RNA, 19 nt, Artificial Sequence
  Description of Artificial Sequence: Synthetic oligonucleotide
agagcaaucuugccugauu

SEQ ID NO: 3106166 - RNA, 19 nt, Artificial Sequence
  Description of Artificial Sequence: Synthetic oligonucleotide
auauucuagucaaccaaaa

SEQ ID NO: 3106167 - RNA, 19 nt, Artificial Sequence
  Description of Artificial Sequence: Synthetic oligonucleotide
gguccaaagauaauauaga

SEQ ID NO: 3106168 - RNA, 19 nt, Artificial Sequence
  Description of Artificial Sequence: Synthetic oligonucleotide
cagucuaauccuuaacucu

SEQ ID NO: 3106169 - RNA, 19 nt, Artificial Sequence
  Description of Artificial Sequence: Synthetic oligonucleotide
acgauggcauucgaguuca

SEQ ID NO: 3106170 - RNA, 19 nt, Artificial Sequence
  Description of Artificial Sequence: Synthetic oligonucleotide
augcagaaucacuucguuu

SEQ ID NO: 3106171 - RNA, 19 nt, Artificial Sequence
  Description of Artificial Sequence: Synthetic oligonucleotide
acacgauggcauucgaguu

SEQ ID NO: 3106172 - RNA, 19 nt, Artificial Sequence
  Description of Artificial Sequence: Synthetic oligonucleotide
gucagcucacauaagaagu

SEQ ID NO: 3106173 - RNA, 19 nt, Artificial Sequence
  Description of Artificial Sequence: Synthetic oligonucleotide
uccagugaucaaguaggac

SEQ ID NO: 3106174 - RNA, 19 nt, Artificial Sequence
  Description of Artificial Sequence: Synthetic oligonucleotide
gguuuguuacagacaacag

SEQ ID NO: 3106175 - RNA, 19 nt, Artificial Sequence
  Description of Artificial Sequence: Synthetic oligonucleotide
uuccuacagaacagucuaa

SEQ ID NO: 3106176 - RNA, 19 nt, Artificial Sequence
  Description of Artificial Sequence: Synthetic oligonucleotide
agagauuagucagcucaca

SEQ ID NO: 3106177 - RNA, 19 nt, Artificial Sequence
  Description of Artificial Sequence: Synthetic oligonucleotide
gagauuagucagcucacau

SEQ ID NO: 3106178 - RNA, 19 nt, Artificial Sequence
  Description of Artificial Sequence: Synthetic oligonucleotide
auuagucagcucacauaag

SEQ ID NO: 3106179 - RNA, 19 nt, Artificial Sequence
  Description of Artificial Sequence: Synthetic oligonucleotide
gcaaucuugccugauuuac

SEQ ID NO: 3106180 - RNA, 19 nt, Artificial Sequence
  Description of Artificial Sequence: Synthetic oligonucleotide
cuucguuuguguccaguga

SEQ ID NO: 3106181 - RNA, 19 nt, Artificial Sequence
  Description of Artificial Sequence: Synthetic oligonucleotide
ggacauuccuacagaacag

SEQ ID NO: 3106182 - RNA, 19 nt, Artificial Sequence
  Description of Artificial Sequence: Synthetic oligonucleotide
gacaacagucugcaucuua

SEQ ID NO: 3106183 - RNA, 19 nt, Artificial Sequence
  Description of Artificial Sequence: Synthetic oligonucleotide
ucuaguuuucuggcacuuc

SEQ ID NO: 3106184 - RNA, 19 nt, Artificial Sequence
  Description of Artificial Sequence: Synthetic oligonucleotide
agauguugguccaaagaua

SEQ ID NO: 3106185 - RNA, 19 nt, Artificial Sequence
  Description of Artificial Sequence: Synthetic oligonucleotide
agcaaucuugccugauuua

SEQ ID NO: 3106186 - RNA, 19 nt, Artificial Sequence
  Description of Artificial Sequence: Synthetic oligonucleotide
uucuggcacuuccugguuu

SEQ ID NO: 3106187 - RNA, 19 nt, Artificial Sequence
  Description of Artificial Sequence: Synthetic oligonucleotide
uguguccagugaucaagua

SEQ ID NO: 3106188 - RNA, 19 nt, Artificial Sequence
  Description of Artificial Sequence: Synthetic oligonucleotide
gucugcaucuuacgggaga

SEQ ID NO: 3106189 - RNA, 19 nt, Artificial Sequence
  Description of Artificial Sequence: Synthetic oligonucleotide
gagcaaucuugccugauuu

SEQ ID NO: 3106190 - RNA, 19 nt, Artificial Sequence
  Description of Artificial Sequence: Synthetic oligonucleotide
uaccauuggccaugguuuu

SEQ ID NO: 3106191 - RNA, 19 nt, Artificial Sequence
  Description of Artificial Sequence: Synthetic oligonucleotide
cugguuuguuacagacaac

SEQ ID NO: 3106192 - RNA, 19 nt, Artificial Sequence
  Description of Artificial Sequence: Synthetic oligonucleotide
caaguaggacauuccuaca

SEQ ID NO: 3106193 - RNA, 19 nt, Artificial Sequence
  Description of Artificial Sequence: Synthetic oligonucleotide
uuucuggcacuuccugguu

SEQ ID NO: 3106194 - RNA, 19 nt, Artificial Sequence
  Description of Artificial Sequence: Synthetic oligonucleotide
agcucacauaagaaguuau

SEQ ID NO: 3106195 - RNA, 19 nt, Artificial Sequence
  Description of Artificial Sequence: Synthetic oligonucleotide
cagaaucacuucguuugug

SEQ ID NO: 3106196 - RNA, 19 nt, Artificial Sequence
  Description of Artificial Sequence: Synthetic oligonucleotide
cuaauccuuaacucuaguu

SEQ ID NO: 3106197 - RNA, 19 nt, Artificial Sequence
  Description of Artificial Sequence: Synthetic oligonucleotide
guugguccaaagauaauau

SEQ ID NO: 3106198 - RNA, 19 nt, Artificial Sequence
  Description of Artificial Sequence: Synthetic oligonucleotide
aucuugccugauuuaccau

SEQ ID NO: 3106199 - RNA, 19 nt, Artificial Sequence
  Description of Artificial Sequence: Synthetic oligonucleotide
gacauuccuacagaacagu

SEQ ID NO: 3106200 - RNA, 19 nt, Artificial Sequence
  Description of Artificial Sequence: Synthetic oligonucleotide
cagugaucaaguaggacau

SEQ ID NO: 3106201 - RNA, 19 nt, Artificial Sequence
  Description of Artificial Sequence: Synthetic oligonucleotide
cugccaaaucaccugccca

SEQ ID NO: 3106202 - RNA, 19 nt, Artificial Sequence
  Description of Artificial Sequence: Synthetic oligonucleotide
ccuacagaacagucuaauc

SEQ ID NO: 3106203 - RNA, 19 nt, Artificial Sequence
  Description of Artificial Sequence: Synthetic oligonucleotide
ccaucuugaggagauguug

SEQ ID NO: 3106204 - RNA, 19 nt, Artificial Sequence
  Description of Artificial Sequence: Synthetic oligonucleotide
gcacuuccugguuuguuac

SEQ ID NO: 3106205 - RNA, 19 nt, Artificial Sequence
  Description of Artificial Sequence: Synthetic oligonucleotide
guuuguguccagugaucaa

SEQ ID NO: 3106206 - RNA, 19 nt, Artificial Sequence
  Description of Artificial Sequence: Synthetic oligonucleotide
ggccaugguuuuaauauuc

SEQ ID NO: 3106207 - RNA, 19 nt, Artificial Sequence
  Description of Artificial Sequence: Synthetic oligonucleotide
cagaacagucuaauccuua

SEQ ID NO: 3106208 - RNA, 19 nt, Artificial Sequence
  Description of Artificial Sequence: Synthetic oligonucleotide
cuuccugguuuguuacaga

SEQ ID NO: 3106209 - RNA, 19 nt, Artificial Sequence
  Description of Artificial Sequence: Synthetic oligonucleotide
ccuuaacucuaguuuucug

SEQ ID NO: 3106210 - RNA, 19 nt, Artificial Sequence
  Description of Artificial Sequence: Synthetic oligonucleotide
ccugccaaaucaccugccc

SEQ ID NO: 3106211 - RNA, 19 nt, Artificial Sequence
  Description of Artificial Sequence: Synthetic oligonucleotide
acagaacagucuaauccuu

SEQ ID NO: 3106212 - RNA, 19 nt, Artificial Sequence
  Description of Artificial Sequence: Synthetic oligonucleotide
uacagacaacagucugcau

SEQ ID NO: 3106213 - RNA, 19 nt, Artificial Sequence
  Description of Artificial Sequence: Synthetic oligonucleotide
gaggagauguugguccaaa

SEQ ID NO: 3106214 - RNA, 19 nt, Artificial Sequence
  Description of Artificial Sequence: Synthetic oligonucleotide
accugcccaucuugaggag

SEQ ID NO: 3106215 - RNA, 19 nt, Artificial Sequence
  Description of Artificial Sequence: Synthetic oligonucleotide
ugaggagauguugguccaa

SEQ ID NO: 3106216 - RNA, 19 nt, Artificial Sequence
  Description of Artificial Sequence: Synthetic oligonucleotide
auuuaccauuggccauggu

SEQ ID NO: 3106217 - RNA, 19 nt, Artificial Sequence
  Description of Artificial Sequence: Synthetic oligonucleotide
ucacuucguuuguguccag

SEQ ID NO: 3106218 - RNA, 19 nt, Artificial Sequence
  Description of Artificial Sequence: Synthetic oligonucleotide
cugauuuaccauuggccau

SEQ ID NO: 3106219 - RNA, 19 nt, Artificial Sequence
  Description of Artificial Sequence: Synthetic oligonucleotide
uagagcaaucuugccugau

SEQ ID NO: 3106220 - RNA, 19 nt, Artificial Sequence
  Description of Artificial Sequence: Synthetic oligonucleotide
ggcacuuccugguuuguua

SEQ ID NO: 3106221 - RNA, 19 nt, Artificial Sequence
  Description of Artificial Sequence: Synthetic oligonucleotide
agucugcaucuuacgggag

SEQ ID NO: 3106222 - RNA, 19 nt, Artificial Sequence
  Description of Artificial Sequence: Synthetic oligonucleotide
cacuuccugguuuguuaca

SEQ ID NO: 3106223 - RNA, 19 nt, Artificial Sequence
  Description of Artificial Sequence: Synthetic oligonucleotide
aucuuacgggagagauuag

SEQ ID NO: 3106224 - RNA, 19 nt, Artificial Sequence
  Description of Artificial Sequence: Synthetic oligonucleotide
guccagugaucaaguagga

SEQ ID NO: 3106225 - RNA, 19 nt, Artificial Sequence
  Description of Artificial Sequence: Synthetic oligonucleotide
agugaucaaguaggacauu

SEQ ID NO: 3106226 - RNA, 19 nt, Artificial Sequence
  Description of Artificial Sequence: Synthetic oligonucleotide
ugcccaucuugaggagaug

SEQ ID NO: 3106227 - RNA, 19 nt, Artificial Sequence
  Description of Artificial Sequence: Synthetic oligonucleotide
cagcucacauaagaaguua

SEQ ID NO: 3106228 - RNA, 19 nt, Artificial Sequence
  Description of Artificial Sequence: Synthetic oligonucleotide
auguugguccaaagauaau

SEQ ID NO: 3106229 - RNA, 19 nt, Artificial Sequence
  Description of Artificial Sequence: Synthetic oligonucleotide
uggcacuuccugguuuguu

SEQ ID NO: 3106230 - RNA, 19 nt, Artificial Sequence
  Description of Artificial Sequence: Synthetic oligonucleotide
ccaugguuuuaauauucua

SEQ ID NO: 3106231 - RNA, 19 nt, Artificial Sequence
  Description of Artificial Sequence: Synthetic oligonucleotide
cugcccaucuugaggagau

SEQ ID NO: 3106232 - RNA, 19 nt, Artificial Sequence
  Description of Artificial Sequence: Synthetic oligonucleotide
gcucacauaagaaguuaua

SEQ ID NO: 3106233 - RNA, 19 nt, Artificial Sequence
  Description of Artificial Sequence: Synthetic oligonucleotide
accauuggccaugguuuua

SEQ ID NO: 3106234 - RNA, 19 nt, Artificial Sequence
  Description of Artificial Sequence: Synthetic oligonucleotide
gggagagauuagucagcuc

SEQ ID NO: 3106235 - RNA, 19 nt, Artificial Sequence
  Description of Artificial Sequence: Synthetic oligonucleotide
cguuuguguccagugauca

SEQ ID NO: 3106236 - RNA, 19 nt, Artificial Sequence
  Description of Artificial Sequence: Synthetic oligonucleotide
gccaaaucaccugcccauc

SEQ ID NO: 3106237 - RNA, 19 nt, Artificial Sequence
  Description of Artificial Sequence: Synthetic oligonucleotide
agacaacagucugcaucuu

SEQ ID NO: 3106238 - RNA, 19 nt, Artificial Sequence
  Description of Artificial Sequence: Synthetic oligonucleotide
cugcaucuuacgggagaga

SEQ ID NO: 3106239 - RNA, 19 nt, Artificial Sequence
  Description of Artificial Sequence: Synthetic oligonucleotide
gccaugguuuuaauauucu

SEQ ID NO: 3106240 - RNA, 19 nt, Artificial Sequence
  Description of Artificial Sequence: Synthetic oligonucleotide
gcccaucuugaggagaugu

SEQ ID NO: 3106241 - RNA, 19 nt, Artificial Sequence
  Description of Artificial Sequence: Synthetic oligonucleotide
ccauuggccaugguuuuaa

SEQ ID NO: 3106242 - RNA, 19 nt, Artificial Sequence
  Description of Artificial Sequence: Synthetic oligonucleotide
cucuaguuuucuggcacuu

SEQ ID NO: 3106243 - RNA, 19 nt, Artificial Sequence
  Description of Artificial Sequence: Synthetic oligonucleotide
cacuucguuuguguccagu

SEQ ID NO: 3106244 - RNA, 19 nt, Artificial Sequence
  Description of Artificial Sequence: Synthetic oligonucleotide
cauuggccaugguuuuaau

SEQ ID NO: 3106245 - RNA, 19 nt, Artificial Sequence
  Description of Artificial Sequence: Synthetic oligonucleotide
ccugcccaucuugaggaga

SEQ ID NO: 3106246 - RNA, 19 nt, Artificial Sequence
  Description of Artificial Sequence: Synthetic oligonucleotide
gcaucuuacgggagagauu

SEQ ID NO: 3106247 - RNA, 19 nt, Artificial Sequence
  Description of Artificial Sequence: Synthetic oligonucleotide
cccaucuugaggagauguu

SEQ ID NO: 3106248 - RNA, 19 nt, Artificial Sequence
  Description of Artificial Sequence: Synthetic oligonucleotide
cuggcacuuccugguuugu

SEQ ID NO: 3106249 - RNA, 19 nt, Artificial Sequence
  Description of Artificial Sequence: Synthetic oligonucleotide
cgggagagauuagucagcu

SEQ ID NO: 3106250 - RNA, 19 nt, Artificial Sequence
  Description of Artificial Sequence: Synthetic oligonucleotide
cgauggcauucgaguucau

SEQ ID NO: 3106251 - RNA, 19 nt, Artificial Sequence
  Description of Artificial Sequence: Synthetic oligonucleotide
acucagaaaacuugguucc

SEQ ID NO: 3106252 - RNA, 19 nt, Artificial Sequence
  Description of Artificial Sequence: Synthetic oligonucleotide
uguggccaaaacaugaggg

SEQ ID NO: 3106253 - RNA, 19 nt, Artificial Sequence
  Description of Artificial Sequence: Synthetic oligonucleotide
uguguggagacaaugagga

SEQ ID NO: 3106254 - RNA, 19 nt, Artificial Sequence
  Description of Artificial Sequence: Synthetic oligonucleotide
auuucuauauuccacucag

SEQ ID NO: 3106255 - RNA, 19 nt, Artificial Sequence
  Description of Artificial Sequence: Synthetic oligonucleotide
aaacaugaggguuccaguc

SEQ ID NO: 3106256 - RNA, 19 nt, Artificial Sequence
  Description of Artificial Sequence: Synthetic oligonucleotide
uguggagacaaugaggagg

SEQ ID NO: 3106257 - RNA, 19 nt, Artificial Sequence
  Description of Artificial Sequence: Synthetic oligonucleotide
ucagagauuucuauauucc

SEQ ID NO: 3106258 - RNA, 19 nt, Artificial Sequence
  Description of Artificial Sequence: Synthetic oligonucleotide
cuauauuccacucagaaaa

SEQ ID NO: 3106259 - RNA, 19 nt, Artificial Sequence
  Description of Artificial Sequence: Synthetic oligonucleotide
agauacagaguucucagag

SEQ ID NO: 3106260 - RNA, 19 nt, Artificial Sequence
  Description of Artificial Sequence: Synthetic oligonucleotide
ucuucuguggccaaaacau

SEQ ID NO: 3106261 - RNA, 19 nt, Artificial Sequence
  Description of Artificial Sequence: Synthetic oligonucleotide
auuugucugguagacaugc

SEQ ID NO: 3106262 - RNA, 19 nt, Artificial Sequence
  Description of Artificial Sequence: Synthetic oligonucleotide
aaaacuugguuccaucagu

SEQ ID NO: 3106263 - RNA, 19 nt, Artificial Sequence
  Description of Artificial Sequence: Synthetic oligonucleotide
uuauuugucugguagacau

SEQ ID NO: 3106264 - RNA, 19 nt, Artificial Sequence
  Description of Artificial Sequence: Synthetic oligonucleotide
uucuauauuccacucagaa

SEQ ID NO: 3106265 - RNA, 19 nt, Artificial Sequence
  Description of Artificial Sequence: Synthetic oligonucleotide
ugugauguucuucuguggc

SEQ ID NO: 3106266 - RNA, 19 nt, Artificial Sequence
  Description of Artificial Sequence: Synthetic oligonucleotide
ucuucccugacacacaaca

SEQ ID NO: 3106267 - RNA, 19 nt, Artificial Sequence
  Description of Artificial Sequence: Synthetic oligonucleotide
uuccacucagaaaacuugg

SEQ ID NO: 3106268 - RNA, 19 nt, Artificial Sequence
  Description of Artificial Sequence: Synthetic oligonucleotide
cacacaacagucaucagug

SEQ ID NO: 3106269 - RNA, 19 nt, Artificial Sequence
  Description of Artificial Sequence: Synthetic oligonucleotide
acaacagucaucagugugc

SEQ ID NO: 3106270 - RNA, 19 nt, Artificial Sequence
  Description of Artificial Sequence: Synthetic oligonucleotide
cuagauacagaguucucag

SEQ ID NO: 3106271 - RNA, 19 nt, Artificial Sequence
  Description of Artificial Sequence: Synthetic oligonucleotide
aaaacaugaggguuccagu

SEQ ID NO: 3106272 - RNA, 19 nt, Artificial Sequence
  Description of Artificial Sequence: Synthetic oligonucleotide
ugacacacaacagucauca

SEQ ID NO: 3106273 - RNA, 19 nt, Artificial Sequence
  Description of Artificial Sequence: Synthetic oligonucleotide
agaguucucagaguaacac

SEQ ID NO: 3106274 - RNA, 19 nt, Artificial Sequence
  Description of Artificial Sequence: Synthetic oligonucleotide
ucaucagugugcaauggca

SEQ ID NO: 3106275 - RNA, 19 nt, Artificial Sequence
  Description of Artificial Sequence: Synthetic oligonucleotide
ucugugauguucuucugug

SEQ ID NO: 3106276 - RNA, 19 nt, Artificial Sequence
  Description of Artificial Sequence: Synthetic oligonucleotide
agagauuucuauauuccac

SEQ ID NO: 3106277 - RNA, 19 nt, Artificial Sequence
  Description of Artificial Sequence: Synthetic oligonucleotide
aaguguaugcucucuagau

SEQ ID NO: 3106278 - RNA, 19 nt, Artificial Sequence
  Description of Artificial Sequence: Synthetic oligonucleotide
agauuucuauauuccacuc

SEQ ID NO: 3106279 - RNA, 19 nt, Artificial Sequence
  Description of Artificial Sequence: Synthetic oligonucleotide
augcucucuagauacagag

SEQ ID NO: 3106280 - RNA, 19 nt, Artificial Sequence
  Description of Artificial Sequence: Synthetic oligonucleotide
ucugucuuuagcucagcag

SEQ ID NO: 3106281 - RNA, 19 nt, Artificial Sequence
  Description of Artificial Sequence: Synthetic oligonucleotide
uucuguggccaaaacauga

SEQ ID NO: 3106282 - RNA, 19 nt, Artificial Sequence
  Description of Artificial Sequence: Synthetic oligonucleotide
uccaguuucugcuuauuug

SEQ ID NO: 3106283 - RNA, 19 nt, Artificial Sequence
  Description of Artificial Sequence: Synthetic oligonucleotide
ucuagauacagaguucuca

SEQ ID NO: 3106284 - RNA, 19 nt, Artificial Sequence
  Description of Artificial Sequence: Synthetic oligonucleotide
guguaugcucucuagauac

SEQ ID NO: 3106285 - RNA, 19 nt, Artificial Sequence
  Description of Artificial Sequence: Synthetic oligonucleotide
cacucagaaaacuugguuc

SEQ ID NO: 3106286 - RNA, 19 nt, Artificial Sequence
  Description of Artificial Sequence: Synthetic oligonucleotide
aguaacacuguucugugau

SEQ ID NO: 3106287 - RNA, 19 nt, Artificial Sequence
  Description of Artificial Sequence: Synthetic oligonucleotide
aacaugaggguuccagucu

SEQ ID NO: 3106288 - RNA, 19 nt, Artificial Sequence
  Description of Artificial Sequence: Synthetic oligonucleotide
uucuucuguggccaaaaca

SEQ ID NO: 3106289 - RNA, 19 nt, Artificial Sequence
  Description of Artificial Sequence: Synthetic oligonucleotide
uguuccuucagagauuucu

SEQ ID NO: 3106290 - RNA, 19 nt, Artificial Sequence
  Description of Artificial Sequence: Synthetic oligonucleotide
gagacugucccauuaccgc

SEQ ID NO: 3106291 - RNA, 19 nt, Artificial Sequence
  Description of Artificial Sequence: Synthetic oligonucleotide
uuuagcucagcaguucucc

SEQ ID NO: 3106292 - RNA, 19 nt, Artificial Sequence
  Description of Artificial Sequence: Synthetic oligonucleotide
acacacaacagucaucagu

SEQ ID NO: 3106293 - RNA, 19 nt, Artificial Sequence
  Description of Artificial Sequence: Synthetic oligonucleotide
ucuauauuccacucagaaa

SEQ ID NO: 3106294 - RNA, 19 nt, Artificial Sequence
  Description of Artificial Sequence: Synthetic oligonucleotide
ugugcaauggcaagccugu

SEQ ID NO: 3106295 - RNA, 19 nt, Artificial Sequence
  Description of Artificial Sequence: Synthetic oligonucleotide
ucuguggccaaaacaugag

SEQ ID NO: 3106296 - RNA, 19 nt, Artificial Sequence
  Description of Artificial Sequence: Synthetic oligonucleotide
cugcuuauuugucugguag

SEQ ID NO: 3106297 - RNA, 19 nt, Artificial Sequence
  Description of Artificial Sequence: Synthetic oligonucleotide
guuucugcuuauuugucug

SEQ ID NO: 3106298 - RNA, 19 nt, Artificial Sequence
  Description of Artificial Sequence: Synthetic oligonucleotide
cuguguggagacaaugagg

SEQ ID NO: 3106299 - RNA, 19 nt, Artificial Sequence
  Description of Artificial Sequence: Synthetic oligonucleotide
aguucucagaguaacacug

SEQ ID NO: 3106300 - RNA, 19 nt, Artificial Sequence
  Description of Artificial Sequence: Synthetic oligonucleotide
ucucuagauacagaguucu

SEQ ID NO: 3106301 - RNA, 19 nt, Artificial Sequence
  Description of Artificial Sequence: Synthetic oligonucleotide
uucccugacacacaacagu

SEQ ID NO: 3106302 - RNA, 19 nt, Artificial Sequence
  Description of Artificial Sequence: Synthetic oligonucleotide
ucuuuagcucagcaguucu

SEQ ID NO: 3106303 - RNA, 19 nt, Artificial Sequence
  Description of Artificial Sequence: Synthetic oligonucleotide
caaaacaugaggguuccag

SEQ ID NO: 3106304 - RNA, 19 nt, Artificial Sequence
  Description of Artificial Sequence: Synthetic oligonucleotide
aguucuccuguguggagac

SEQ ID NO: 3106305 - RNA, 19 nt, Artificial Sequence
  Description of Artificial Sequence: Synthetic oligonucleotide
gauuucuauauuccacuca

SEQ ID NO: 3106306 - RNA, 19 nt, Artificial Sequence
  Description of Artificial Sequence: Synthetic oligonucleotide
auacagaguucucagagua

SEQ ID NO: 3106307 - RNA, 19 nt, Artificial Sequence
  Description of Artificial Sequence: Synthetic oligonucleotide
aguuucugcuuauuugucu

SEQ ID NO: 3106308 - RNA, 19 nt, Artificial Sequence
  Description of Artificial Sequence: Synthetic oligonucleotide
agaguaacacuguucugug

SEQ ID NO: 3106309 - RNA, 19 nt, Artificial Sequence
  Description of Artificial Sequence: Synthetic oligonucleotide
uauuccacucagaaaacuu

SEQ ID NO: 3106310 - RNA, 19 nt, Artificial Sequence
  Description of Artificial Sequence: Synthetic oligonucleotide
acaugaggguuccagucuc

SEQ ID NO: 3106311 - RNA, 19 nt, Artificial Sequence
  Description of Artificial Sequence: Synthetic oligonucleotide
caagccuguuccuucagag

SEQ ID NO: 3106312 - RNA, 19 nt, Artificial Sequence
  Description of Artificial Sequence: Synthetic oligonucleotide
guggagacaaugaggaggg

SEQ ID NO: 3106313 - RNA, 19 nt, Artificial Sequence
  Description of Artificial Sequence: Synthetic oligonucleotide
auuaccgcuggcucucuuc

SEQ ID NO: 3106314 - RNA, 19 nt, Artificial Sequence
  Description of Artificial Sequence: Synthetic oligonucleotide
uccuguguggagacaauga

SEQ ID NO: 3106315 - RNA, 19 nt, Artificial Sequence
  Description of Artificial Sequence: Synthetic oligonucleotide
aucagugugcaauggcaag

SEQ ID NO: 3106316 - RNA, 19 nt, Artificial Sequence
  Description of Artificial Sequence: Synthetic oligonucleotide
uuaccgcuggcucucuucc

SEQ ID NO: 3106317 - RNA, 19 nt, Artificial Sequence
  Description of Artificial Sequence: Synthetic oligonucleotide
ucucagaguaacacuguuc

SEQ ID NO: 3106318 - RNA, 19 nt, Artificial Sequence
  Description of Artificial Sequence: Synthetic oligonucleotide
ugcuuauuugucugguaga

SEQ ID NO: 3106319 - RNA, 19 nt, Artificial Sequence
  Description of Artificial Sequence: Synthetic oligonucleotide
gagauuucuauauuccacu

SEQ ID NO: 3106320 - RNA, 19 nt, Artificial Sequence
  Description of Artificial Sequence: Synthetic oligonucleotide
uaacacuguucugugaugu

SEQ ID NO: 3106321 - RNA, 19 nt, Artificial Sequence
  Description of Artificial Sequence: Synthetic oligonucleotide
acuugguuccaucaguuuu

SEQ ID NO: 3106322 - RNA, 19 nt, Artificial Sequence
  Description of Artificial Sequence: Synthetic oligonucleotide
uauuugucugguagacaug

SEQ ID NO: 3106323 - RNA, 19 nt, Artificial Sequence
  Description of Artificial Sequence: Synthetic oligonucleotide
ucccugacacacaacaguc

SEQ ID NO: 3106324 - RNA, 19 nt, Artificial Sequence
  Description of Artificial Sequence: Synthetic oligonucleotide
auggcaagccuguuccuuc

SEQ ID NO: 3106325 - RNA, 19 nt, Artificial Sequence
  Description of Artificial Sequence: Synthetic oligonucleotide
cacaacagucaucagugug

SEQ ID NO: 3106326 - RNA, 19 nt, Artificial Sequence
  Description of Artificial Sequence: Synthetic oligonucleotide
uuucuauauuccacucaga

SEQ ID NO: 3106327 - RNA, 19 nt, Artificial Sequence
  Description of Artificial Sequence: Synthetic oligonucleotide
gaaguguaugcucucuaga

SEQ ID NO: 3106328 - RNA, 19 nt, Artificial Sequence
  Description of Artificial Sequence: Synthetic oligonucleotide
ucagugugcaauggcaagc

SEQ ID NO: 3106329 - RNA, 19 nt, Artificial Sequence
  Description of Artificial Sequence: Synthetic oligonucleotide
acagucaucagugugcaau

SEQ ID NO: 3106330 - RNA, 19 nt, Artificial Sequence
  Description of Artificial Sequence: Synthetic oligonucleotide
gcaauggcaagccuguucc

SEQ ID NO: 3106331 - RNA, 19 nt, Artificial Sequence
  Description of Artificial Sequence: Synthetic oligonucleotide
agccuguuccuucagagau

SEQ ID NO: 3106332 - RNA, 19 nt, Artificial Sequence
  Description of Artificial Sequence: Synthetic oligonucleotide
uccagucucugucuuuagc

SEQ ID NO: 3106333 - RNA, 19 nt, Artificial Sequence
  Description of Artificial Sequence: Synthetic oligonucleotide
acacuguucugugauguuc

SEQ ID NO: 3106334 - RNA, 19 nt, Artificial Sequence
  Description of Artificial Sequence: Synthetic oligonucleotide
gaggguuccagucucuguc

SEQ ID NO: 3106335 - RNA, 19 nt, Artificial Sequence
  Description of Artificial Sequence: Synthetic oligonucleotide
ugcaauggcaagccuguuc

SEQ ID NO: 3106336 - RNA, 19 nt, Artificial Sequence
  Description of Artificial Sequence: Synthetic oligonucleotide
uagauacagaguucucaga

SEQ ID NO: 3106337 - RNA, 19 nt, Artificial Sequence
  Description of Artificial Sequence: Synthetic oligonucleotide
auuccacucagaaaacuug

SEQ ID NO: 3106338 - RNA, 19 nt, Artificial Sequence
  Description of Artificial Sequence: Synthetic oligonucleotide
uguaugcucucuagauaca

SEQ ID NO: 3106339 - RNA, 19 nt, Artificial Sequence
  Description of Artificial Sequence: Synthetic oligonucleotide
cuguggccaaaacaugagg

SEQ ID NO: 3106340 - RNA, 19 nt, Artificial Sequence
  Description of Artificial Sequence: Synthetic oligonucleotide
cugugauguucuucugugg

SEQ ID NO: 3106341 - RNA, 19 nt, Artificial Sequence
  Description of Artificial Sequence: Synthetic oligonucleotide
aagccuguuccuucagaga

SEQ ID NO: 3106342 - RNA, 19 nt, Artificial Sequence
  Description of Artificial Sequence: Synthetic oligonucleotide
uggcucucuucccugacac

SEQ ID NO: 3106343 - RNA, 19 nt, Artificial Sequence
  Description of Artificial Sequence: Synthetic oligonucleotide
gucaucagugugcaauggc

SEQ ID NO: 3106344 - RNA, 19 nt, Artificial Sequence
  Description of Artificial Sequence: Synthetic oligonucleotide
guaugcucucuagauacag

SEQ ID NO: 3106345 - RNA, 19 nt, Artificial Sequence
  Description of Artificial Sequence: Synthetic oligonucleotide
uccacucagaaaacuuggu

SEQ ID NO: 3106346 - RNA, 19 nt, Artificial Sequence
  Description of Artificial Sequence: Synthetic oligonucleotide
ucagaguaacacuguucug

SEQ ID NO: 3106347 - RNA, 19 nt, Artificial Sequence
  Description of Artificial Sequence: Synthetic oligonucleotide
agacugucccauuaccgcu

SEQ ID NO: 3106348 - RNA, 19 nt, Artificial Sequence
  Description of Artificial Sequence: Synthetic oligonucleotide
cucagaguaacacuguucu

SEQ ID NO: 3106349 - RNA, 19 nt, Artificial Sequence
  Description of Artificial Sequence: Synthetic oligonucleotide
aguguaugcucucuagaua

SEQ ID NO: 3106350 - RNA, 19 nt, Artificial Sequence
  Description of Artificial Sequence: Synthetic oligonucleotide
uccuucagagauuucuaua

SEQ ID NO: 3106351 - RNA, 19 nt, Artificial Sequence
  Description of Artificial Sequence: Synthetic oligonucleotide
agcucagcaguucuccugu

SEQ ID NO: 3106352 - RNA, 19 nt, Artificial Sequence
  Description of Artificial Sequence: Synthetic oligonucleotide
ugcucucuagauacagagu

SEQ ID NO: 3106353 - RNA, 19 nt, Artificial Sequence
  Description of Artificial Sequence: Synthetic oligonucleotide
ugucuuuagcucagcaguu

SEQ ID NO: 3106354 - RNA, 19 nt, Artificial Sequence
  Description of Artificial Sequence: Synthetic oligonucleotide
cagagauuucuauauucca

SEQ ID NO: 3106355 - RNA, 19 nt, Artificial Sequence
  Description of Artificial Sequence: Synthetic oligonucleotide
auauuccacucagaaaacu

SEQ ID NO: 3106356 - RNA, 19 nt, Artificial Sequence
  Description of Artificial Sequence: Synthetic oligonucleotide
guaacacuguucugugaug

SEQ ID NO: 3106357 - RNA, 19 nt, Artificial Sequence
  Description of Artificial Sequence: Synthetic oligonucleotide
uagcucagcaguucuccug

SEQ ID NO: 3106358 - RNA, 19 nt, Artificial Sequence
  Description of Artificial Sequence: Synthetic oligonucleotide
cuucuguggccaaaacaug

SEQ ID NO: 3106359 - RNA, 19 nt, Artificial Sequence
  Description of Artificial Sequence: Synthetic oligonucleotide
uuccuucagagauuucuau

SEQ ID NO: 3106360 - RNA, 19 nt, Artificial Sequence
  Description of Artificial Sequence: Synthetic oligonucleotide
uucucagaguaacacuguu

SEQ ID NO: 3106361 - RNA, 19 nt, Artificial Sequence
  Description of Artificial Sequence: Synthetic oligonucleotide
cagcaguucuccugugugg

SEQ ID NO: 3106362 - RNA, 19 nt, Artificial Sequence
  Description of Artificial Sequence: Synthetic oligonucleotide
aaacuugguuccaucaguu

SEQ ID NO: 3106363 - RNA, 19 nt, Artificial Sequence
  Description of Artificial Sequence: Synthetic oligonucleotide
agucaucagugugcaaugg

SEQ ID NO: 3106364 - RNA, 19 nt, Artificial Sequence
  Description of Artificial Sequence: Synthetic oligonucleotide
ggagacugucccauuaccg

SEQ ID NO: 3106365 - RNA, 19 nt, Artificial Sequence
  Description of Artificial Sequence: Synthetic oligonucleotide
cagaaaacuugguuccauc

SEQ ID NO: 3106366 - RNA, 19 nt, Artificial Sequence
  Description of Artificial Sequence: Synthetic oligonucleotide
aacuugguuccaucaguuu

SEQ ID NO: 3106367 - RNA, 19 nt, Artificial Sequence
  Description of Artificial Sequence: Synthetic oligonucleotide
cucucuagauacagaguuc

SEQ ID NO: 3106368 - RNA, 19 nt, Artificial Sequence
  Description of Artificial Sequence: Synthetic oligonucleotide
acugucccauuaccgcugg

SEQ ID NO: 3106369 - RNA, 19 nt, Artificial Sequence
  Description of Artificial Sequence: Synthetic oligonucleotide
uuagcucagcaguucuccu

SEQ ID NO: 3106370 - RNA, 19 nt, Artificial Sequence
  Description of Artificial Sequence: Synthetic oligonucleotide
cagucaucagugugcaaug

SEQ ID NO: 3106371 - RNA, 19 nt, Artificial Sequence
  Description of Artificial Sequence: Synthetic oligonucleotide
uuugucugguagacaugcu

SEQ ID NO: 3106372 - RNA, 19 nt, Artificial Sequence
  Description of Artificial Sequence: Synthetic oligonucleotide
gauacagaguucucagagu

SEQ ID NO: 3106373 - RNA, 19 nt, Artificial Sequence
  Description of Artificial Sequence: Synthetic oligonucleotide
cugucuuuagcucagcagu

SEQ ID NO: 3106374 - RNA, 19 nt, Artificial Sequence
  Description of Artificial Sequence: Synthetic oligonucleotide
uuuuccaguuucugcuuau

SEQ ID NO: 3106375 - RNA, 19 nt, Artificial Sequence
  Description of Artificial Sequence: Synthetic oligonucleotide
aauggcaagccuguuccuu

SEQ ID NO: 3106376 - RNA, 19 nt, Artificial Sequence
  Description of Artificial Sequence: Synthetic oligonucleotide
cuuuagcucagcaguucuc

SEQ ID NO: 3106377 - RNA, 19 nt, Artificial Sequence
  Description of Artificial Sequence: Synthetic oligonucleotide
ucagaaaacuugguuccau

SEQ ID NO: 3106378 - RNA, 19 nt, Artificial Sequence
  Description of Artificial Sequence: Synthetic oligonucleotide
gugugcaauggcaagccug

SEQ ID NO: 3106379 - RNA, 19 nt, Artificial Sequence
  Description of Artificial Sequence: Synthetic oligonucleotide
uucugcuuauuugucuggu

SEQ ID NO: 3106380 - RNA, 19 nt, Artificial Sequence
  Description of Artificial Sequence: Synthetic oligonucleotide
ucccauuaccgcuggcucu

SEQ ID NO: 3106381 - RNA, 19 nt, Artificial Sequence
  Description of Artificial Sequence: Synthetic oligonucleotide
aacacuguucugugauguu

SEQ ID NO: 3106382 - RNA, 19 nt, Artificial Sequence
  Description of Artificial Sequence: Synthetic oligonucleotide
cagucucugucuuuagcuc

SEQ ID NO: 3106383 - RNA, 19 nt, Artificial Sequence
  Description of Artificial Sequence: Synthetic oligonucleotide
cagugugcaauggcaagcc

SEQ ID NO: 3106384 - RNA, 19 nt, Artificial Sequence
  Description of Artificial Sequence: Synthetic oligonucleotide
ucugcuuauuugucuggua

SEQ ID NO: 3106385 - RNA, 19 nt, Artificial Sequence
  Description of Artificial Sequence: Synthetic oligonucleotide
ugaggguuccagucucugu

SEQ ID NO: 3106386 - RNA, 19 nt, Artificial Sequence
  Description of Artificial Sequence: Synthetic oligonucleotide
gacacacaacagucaucag

SEQ ID NO: 3106387 - RNA, 19 nt, Artificial Sequence
  Description of Artificial Sequence: Synthetic oligonucleotide
agcaguucuccugugugga

SEQ ID NO: 3106388 - RNA, 19 nt, Artificial Sequence
  Description of Artificial Sequence: Synthetic oligonucleotide
uggccaaaacaugaggguu

SEQ ID NO: 3106389 - RNA, 19 nt, Artificial Sequence
  Description of Artificial Sequence: Synthetic oligonucleotide
gaguaacacuguucuguga

SEQ ID NO: 3106390 - RNA, 19 nt, Artificial Sequence
  Description of Artificial Sequence: Synthetic oligonucleotide
aggguuccagucucugucu

SEQ ID NO: 3106391 - RNA, 19 nt, Artificial Sequence
  Description of Artificial Sequence: Synthetic oligonucleotide
gaguucucagaguaacacu

SEQ ID NO: 3106392 - RNA, 19 nt, Artificial Sequence
  Description of Artificial Sequence: Synthetic oligonucleotide
cugacacacaacagucauc

SEQ ID NO: 3106393 - RNA, 19 nt, Artificial Sequence
  Description of Artificial Sequence: Synthetic oligonucleotide
ccuguguggagacaaugag

SEQ ID NO: 3106394 - RNA, 19 nt, Artificial Sequence
  Description of Artificial Sequence: Synthetic oligonucleotide
uuccagucucugucuuuag

SEQ ID NO: 3106395 - RNA, 19 nt, Artificial Sequence
  Description of Artificial Sequence: Synthetic oligonucleotide
gacugucccauuaccgcug

SEQ ID NO: 3106396 - RNA, 19 nt, Artificial Sequence
  Description of Artificial Sequence: Synthetic oligonucleotide
gcuuauuugucugguagac

SEQ ID NO: 3106397 - RNA, 19 nt, Artificial Sequence
  Description of Artificial Sequence: Synthetic oligonucleotide
caucagugugcaauggcaa

SEQ ID NO: 3106398 - RNA, 19 nt, Artificial Sequence
  Description of Artificial Sequence: Synthetic oligonucleotide
cagaguaacacuguucugu

SEQ ID NO: 3106399 - RNA, 19 nt, Artificial Sequence
  Description of Artificial Sequence: Synthetic oligonucleotide
agugugcaauggcaagccu

SEQ ID NO: 3106400 - RNA, 19 nt, Artificial Sequence
  Description of Artificial Sequence: Synthetic oligonucleotide
uggcaagccuguuccuuca

SEQ ID NO: 3106401 - RNA, 19 nt, Artificial Sequence
  Description of Artificial Sequence: Synthetic oligonucleotide
guguggagacaaugaggag

SEQ ID NO: 3106402 - RNA, 19 nt, Artificial Sequence
  Description of Artificial Sequence: Synthetic oligonucleotide
guucugugauguucuucug

SEQ ID NO: 3106403 - RNA, 19 nt, Artificial Sequence
  Description of Artificial Sequence: Synthetic oligonucleotide
cucuagauacagaguucuc

SEQ ID NO: 3106404 - RNA, 19 nt, Artificial Sequence
  Description of Artificial Sequence: Synthetic oligonucleotide
accgcuggcucucuucccu

SEQ ID NO: 3106405 - RNA, 19 nt, Artificial Sequence
  Description of Artificial Sequence: Synthetic oligonucleotide
gucucugucuuuagcucag

SEQ ID NO: 3106406 - RNA, 19 nt, Artificial Sequence
  Description of Artificial Sequence: Synthetic oligonucleotide
gucccauuaccgcuggcuc

SEQ ID NO: 3106407 - RNA, 19 nt, Artificial Sequence
  Description of Artificial Sequence: Synthetic oligonucleotide
guucuucuguggccaaaac

SEQ ID NO: 3106408 - RNA, 19 nt, Artificial Sequence
  Description of Artificial Sequence: Synthetic oligonucleotide
gggagacugucccauuacc

SEQ ID NO: 3106409 - RNA, 19 nt, Artificial Sequence
  Description of Artificial Sequence: Synthetic oligonucleotide
aacagucaucagugugcaa

SEQ ID NO: 3106410 - RNA, 19 nt, Artificial Sequence
  Description of Artificial Sequence: Synthetic oligonucleotide
cuccuguguggagacaaug

SEQ ID NO: 3106411 - RNA, 19 nt, Artificial Sequence
  Description of Artificial Sequence: Synthetic oligonucleotide
gcucucuucccugacacac

SEQ ID NO: 3106412 - RNA, 19 nt, Artificial Sequence
  Description of Artificial Sequence: Synthetic oligonucleotide
gcucucuagauacagaguu

SEQ ID NO: 3106413 - RNA, 19 nt, Artificial Sequence
  Description of Artificial Sequence: Synthetic oligonucleotide
ucuccuguguggagacaau

SEQ ID NO: 3106414 - RNA, 19 nt, Artificial Sequence
  Description of Artificial Sequence: Synthetic oligonucleotide
gucuuuagcucagcaguuc

SEQ ID NO: 3106415 - RNA, 19 nt, Artificial Sequence
  Description of Artificial Sequence: Synthetic oligonucleotide
augaggguuccagucucug

SEQ ID NO: 3106416 - RNA, 19 nt, Artificial Sequence
  Description of Artificial Sequence: Synthetic oligonucleotide
uggagacaaugaggagggg

SEQ ID NO: 3106417 - RNA, 19 nt, Artificial Sequence
  Description of Artificial Sequence: Synthetic oligonucleotide
caacagucaucagugugca

SEQ ID NO: 3106418 - RNA, 19 nt, Artificial Sequence
  Description of Artificial Sequence: Synthetic oligonucleotide
ucucugucuuuagcucagc

SEQ ID NO: 3106419 - RNA, 19 nt, Artificial Sequence
  Description of Artificial Sequence: Synthetic oligonucleotide
uaccgcuggcucucuuccc

SEQ ID NO: 3106420 - RNA, 19 nt, Artificial Sequence
  Description of Artificial Sequence: Synthetic oligonucleotide
ggccaaaacaugaggguuc

SEQ ID NO: 3106421 - RNA, 19 nt, Artificial Sequence
  Description of Artificial Sequence: Synthetic oligonucleotide
guuccagucucugucuuua

SEQ ID NO: 3106422 - RNA, 19 nt, Artificial Sequence
  Description of Artificial Sequence: Synthetic oligonucleotide
guuccuucagagauuucua

SEQ ID NO: 3106423 - RNA, 19 nt, Artificial Sequence
  Description of Artificial Sequence: Synthetic oligonucleotide
ccaguuucugcuuauuugu

SEQ ID NO: 3106424 - RNA, 19 nt, Artificial Sequence
  Description of Artificial Sequence: Synthetic oligonucleotide
cucucuucccugacacaca

SEQ ID NO: 3106425 - RNA, 19 nt, Artificial Sequence
  Description of Artificial Sequence: Synthetic oligonucleotide
cucagaaaacuugguucca

SEQ ID NO: 3106426 - RNA, 19 nt, Artificial Sequence
  Description of Artificial Sequence: Synthetic oligonucleotide
caguucuccuguguggaga

SEQ ID NO: 3106427 - RNA, 19 nt, Artificial Sequence
  Description of Artificial Sequence: Synthetic oligonucleotide
ccuucagagauuucuauau

SEQ ID NO: 3106428 - RNA, 19 nt, Artificial Sequence
  Description of Artificial Sequence: Synthetic oligonucleotide
ggggagacugucccauuac

SEQ ID NO: 3106429 - RNA, 19 nt, Artificial Sequence
  Description of Artificial Sequence: Synthetic oligonucleotide
gcaguucuccuguguggag

SEQ ID NO: 3106430 - RNA, 19 nt, Artificial Sequence
  Description of Artificial Sequence: Synthetic oligonucleotide
ccagucucugucuuuagcu

SEQ ID NO: 3106431 - RNA, 19 nt, Artificial Sequence
  Description of Artificial Sequence: Synthetic oligonucleotide
cuggcucucuucccugaca

SEQ ID NO: 3106432 - RNA, 19 nt, Artificial Sequence
  Description of Artificial Sequence: Synthetic oligonucleotide
ggcaagccuguuccuucag

SEQ ID NO: 3106433 - RNA, 19 nt, Artificial Sequence
  Description of Artificial Sequence: Synthetic oligonucleotide
guucucagaguaacacugu

SEQ ID NO: 3106434 - RNA, 19 nt, Artificial Sequence
  Description of Artificial Sequence: Synthetic oligonucleotide
gcaagccuguuccuucaga

SEQ ID NO: 3106435 - RNA, 19 nt, Artificial Sequence
  Description of Artificial Sequence: Synthetic oligonucleotide
cuguuccuucagagauuuc

SEQ ID NO: 3106436 - RNA, 19 nt, Artificial Sequence
  Description of Artificial Sequence: Synthetic oligonucleotide
caugaggguuccagucucu

SEQ ID NO: 3106437 - RNA, 19 nt, Artificial Sequence
  Description of Artificial Sequence: Synthetic oligonucleotide
cccauuaccgcuggcucuc

SEQ ID NO: 3106438 - RNA, 19 nt, Artificial Sequence
  Description of Artificial Sequence: Synthetic oligonucleotide
cccugacacacaacaguca

SEQ ID NO: 3106439 - RNA, 19 nt, Artificial Sequence
  Description of Artificial Sequence: Synthetic oligonucleotide
gcuggcucucuucccugac

SEQ ID NO: 3106440 - RNA, 19 nt, Artificial Sequence
  Description of Artificial Sequence: Synthetic oligonucleotide
gcucagcaguucuccugug

SEQ ID NO: 3106441 - RNA, 19 nt, Artificial Sequence
  Description of Artificial Sequence: Synthetic oligonucleotide
ggcucucuucccugacaca

SEQ ID NO: 3106442 - RNA, 19 nt, Artificial Sequence
  Description of Artificial Sequence: Synthetic oligonucleotide
ccacucagaaaacuugguu

SEQ ID NO: 3106443 - RNA, 19 nt, Artificial Sequence
  Description of Artificial Sequence: Synthetic oligonucleotide
gguuccagucucugucuuu

SEQ ID NO: 3106444 - RNA, 19 nt, Artificial Sequence
  Description of Artificial Sequence: Synthetic oligonucleotide
ccgcuggcucucuucccug

SEQ ID NO: 3106445 - RNA, 19 nt, Artificial Sequence
  Description of Artificial Sequence: Synthetic oligonucleotide
ggguuccagucucugucuu

SEQ ID NO: 3106446 - RNA, 19 nt, Artificial Sequence
  Description of Artificial Sequence: Synthetic oligonucleotide
cauuaccgcuggcucucuu

SEQ ID NO: 3106447 - RNA, 19 nt, Artificial Sequence
  Description of Artificial Sequence: Synthetic oligonucleotide
gugcaauggcaagccuguu

SEQ ID NO: 3106448 - RNA, 19 nt, Artificial Sequence
  Description of Artificial Sequence: Synthetic oligonucleotide
cgcuggcucucuucccuga

SEQ ID NO: 3106449 - RNA, 19 nt, Artificial Sequence
  Description of Artificial Sequence: Synthetic oligonucleotide
gccuguuccuucagagauu

SEQ ID NO: 3106450 - RNA, 19 nt, Artificial Sequence
  Description of Artificial Sequence: Synthetic oligonucleotide
ccauuaccgcuggcucucu

SEQ ID NO: 3106451 - RNA, 19 nt, Artificial Sequence
  Description of Artificial Sequence: Synthetic oligonucleotide
uggaaaacagcaaucaggg

SEQ ID NO: 3106452 - RNA, 19 nt, Artificial Sequence
  Description of Artificial Sequence: Synthetic oligonucleotide
uaagccaccaauaagguug

SEQ ID NO: 3106453 - RNA, 19 nt, Artificial Sequence
  Description of Artificial Sequence: Synthetic oligonucleotide
accaauaagguugagaaac

SEQ ID NO: 3106454 - RNA, 19 nt, Artificial Sequence
  Description of Artificial Sequence: Synthetic oligonucleotide
uguacuuuuggaaaacagc

SEQ ID NO: 3106455 - RNA, 19 nt, Artificial Sequence
  Description of Artificial Sequence: Synthetic oligonucleotide
acucauggcaagcuaaagc

SEQ ID NO: 3106456 - RNA, 19 nt, Artificial Sequence
  Description of Artificial Sequence: Synthetic oligonucleotide
aaaucuagcugcccaucgc

SEQ ID NO: 3106457 - RNA, 19 nt, Artificial Sequence
  Description of Artificial Sequence: Synthetic oligonucleotide
caagcuaaagcuaagccac

SEQ ID NO: 3106458 - RNA, 19 nt, Artificial Sequence
  Description of Artificial Sequence: Synthetic oligonucleotide
aacucuuggaaaucuagcu

SEQ ID NO: 3106459 - RNA, 19 nt, Artificial Sequence
  Description of Artificial Sequence: Synthetic oligonucleotide
aaacucuuggaaaucuagc

SEQ ID NO: 3106460 - RNA, 19 nt, Artificial Sequence
  Description of Artificial Sequence: Synthetic oligonucleotide
aaagcuaagccaccaauaa

SEQ ID NO: 3106461 - RNA, 19 nt, Artificial Sequence
  Description of Artificial Sequence: Synthetic oligonucleotide
uuuggaaaacagcaaucag

SEQ ID NO: 3106462 - RNA, 19 nt, Artificial Sequence
  Description of Artificial Sequence: Synthetic oligonucleotide
cucuuggaaaucuagcugc

SEQ ID NO: 3106463 - RNA, 19 nt, Artificial Sequence
  Description of Artificial Sequence: Synthetic oligonucleotide
agcuaagccaccaauaagg

SEQ ID NO: 3106464 - RNA, 19 nt, Artificial Sequence
  Description of Artificial Sequence: Synthetic oligonucleotide
ugugaaggcggccagcucc

SEQ ID NO: 3106465 - RNA, 19 nt, Artificial Sequence
  Description of Artificial Sequence: Synthetic oligonucleotide
ugguucuuugugaaggcgg

SEQ ID NO: 3106466 - RNA, 19 nt, Artificial Sequence
  Description of Artificial Sequence: Synthetic oligonucleotide
uucugguucuuugugaagg

SEQ ID NO: 3106467 - RNA, 19 nt, Artificial Sequence
  Description of Artificial Sequence: Synthetic oligonucleotide
gaaaucuagcugcccaucg

SEQ ID NO: 3106468 - RNA, 19 nt, Artificial Sequence
  Description of Artificial Sequence: Synthetic oligonucleotide
uccguguucaugaaaguga

SEQ ID NO: 3106469 - RNA, 19 nt, Artificial Sequence
  Description of Artificial Sequence: Synthetic oligonucleotide
uucaugaaagugaggaacu

SEQ ID NO: 3106470 - RNA, 19 nt, Artificial Sequence
  Description of Artificial Sequence: Synthetic oligonucleotide
uuagacacgcuucugggaa

SEQ ID NO: 3106471 - RNA, 19 nt, Artificial Sequence
  Description of Artificial Sequence: Synthetic oligonucleotide
aagugaggaacucaguuuu

SEQ ID NO: 3106472 - RNA, 19 nt, Artificial Sequence
  Description of Artificial Sequence: Synthetic oligonucleotide
aaaacagcaaucagggacu

SEQ ID NO: 3106473 - RNA, 19 nt, Artificial Sequence
  Description of Artificial Sequence: Synthetic oligonucleotide
uuggaaaucuagcugccca

SEQ ID NO: 3106474 - RNA, 19 nt, Artificial Sequence
  Description of Artificial Sequence: Synthetic oligonucleotide
aaagugaggaacucaguuu

SEQ ID NO: 3106475 - RNA, 19 nt, Artificial Sequence
  Description of Artificial Sequence: Synthetic oligonucleotide
cuucaggaaggacucaugg

SEQ ID NO: 3106476 - RNA, 19 nt, Artificial Sequence
  Description of Artificial Sequence: Synthetic oligonucleotide
aagcuaagccaccaauaag

SEQ ID NO: 3106477 - RNA, 19 nt, Artificial Sequence
  Description of Artificial Sequence: Synthetic oligonucleotide
aaucuagcugcccaucgcu

SEQ ID NO: 3106478 - RNA, 19 nt, Artificial Sequence
  Description of Artificial Sequence: Synthetic oligonucleotide
acuuuuggaaaacagcaau

SEQ ID NO: 3106479 - RNA, 19 nt, Artificial Sequence
  Description of Artificial Sequence: Synthetic oligonucleotide
gaaacucuuggaaaucuag

SEQ ID NO: 3106480 - RNA, 19 nt, Artificial Sequence
  Description of Artificial Sequence: Synthetic oligonucleotide
uugagaaacucuuggaaau

SEQ ID NO: 3106481 - RNA, 19 nt, Artificial Sequence
  Description of Artificial Sequence: Synthetic oligonucleotide
agagcuggcagcuguuccc

SEQ ID NO: 3106482 - RNA, 19 nt, Artificial Sequence
  Description of Artificial Sequence: Synthetic oligonucleotide
aguuuuggagagcuggcag

SEQ ID NO: 3106483 - RNA, 19 nt, Artificial Sequence
  Description of Artificial Sequence: Synthetic oligonucleotide
aggaacucaguuuuggaga

SEQ ID NO: 3106484 - RNA, 19 nt, Artificial Sequence
  Description of Artificial Sequence: Synthetic oligonucleotide
cucaguuuuggagagcugg

SEQ ID NO: 3106485 - RNA, 19 nt, Artificial Sequence
  Description of Artificial Sequence: Synthetic oligonucleotide
guacuuuuggaaaacagca

SEQ ID NO: 3106486 - RNA, 19 nt, Artificial Sequence
  Description of Artificial Sequence: Synthetic oligonucleotide
uaaagcuaagccaccaaua

SEQ ID NO: 3106487 - RNA, 19 nt, Artificial Sequence
  Description of Artificial Sequence: Synthetic oligonucleotide
acucuuggaaaucuagcug

SEQ ID NO: 3106488 - RNA, 19 nt, Artificial Sequence
  Description of Artificial Sequence: Synthetic oligonucleotide
uaagguugagaaacucuug

SEQ ID NO: 3106489 - RNA, 19 nt, Artificial Sequence
  Description of Artificial Sequence: Synthetic oligonucleotide
uucuucaucaugcggucca

SEQ ID NO: 3106490 - RNA, 19 nt, Artificial Sequence
  Description of Artificial Sequence: Synthetic oligonucleotide
aacucaguuuuggagagcu

SEQ ID NO: 3106491 - RNA, 19 nt, Artificial Sequence
  Description of Artificial Sequence: Synthetic oligonucleotide
guucaugaaagugaggaac

SEQ ID NO: 3106492 - RNA, 19 nt, Artificial Sequence
  Description of Artificial Sequence: Synthetic oligonucleotide
accaggguccuucugguuc

SEQ ID NO: 3106493 - RNA, 19 nt, Artificial Sequence
  Description of Artificial Sequence: Synthetic oligonucleotide
augaaagugaggaacucag

SEQ ID NO: 3106494 - RNA, 19 nt, Artificial Sequence
  Description of Artificial Sequence: Synthetic oligonucleotide
cuucccacuguacuuuugg

SEQ ID NO: 3106495 - RNA, 19 nt, Artificial Sequence
  Description of Artificial Sequence: Synthetic oligonucleotide
uucaggaaggacucauggc

SEQ ID NO: 3106496 - RNA, 19 nt, Artificial Sequence
  Description of Artificial Sequence: Synthetic oligonucleotide
uucaucaugcgguccagga

SEQ ID NO: 3106497 - RNA, 19 nt, Artificial Sequence
  Description of Artificial Sequence: Synthetic oligonucleotide
uacuuuuggaaaacagcaa

SEQ ID NO: 3106498 - RNA, 19 nt, Artificial Sequence
  Description of Artificial Sequence: Synthetic oligonucleotide
ucagggacucgaugcaccg

SEQ ID NO: 3106499 - RNA, 19 nt, Artificial Sequence
  Description of Artificial Sequence: Synthetic oligonucleotide
guuuuggagagcuggcagc

SEQ ID NO: 3106500 - RNA, 19 nt, Artificial Sequence
  Description of Artificial Sequence: Synthetic oligonucleotide
ucuuugugaaggcggccag

SEQ ID NO: 3106501 - RNA, 19 nt, Artificial Sequence
  Description of Artificial Sequence: Synthetic oligonucleotide
ucugguucuuugugaaggc

SEQ ID NO: 3106502 - RNA, 19 nt, Artificial Sequence
  Description of Artificial Sequence: Synthetic oligonucleotide
aagcuaaagcuaagccacc

SEQ ID NO: 3106503 - RNA, 19 nt, Artificial Sequence
  Description of Artificial Sequence: Synthetic oligonucleotide
ugaaagugaggaacucagu

SEQ ID NO: 3106504 - RNA, 19 nt, Artificial Sequence
  Description of Artificial Sequence: Synthetic oligonucleotide
uguucaugaaagugaggaa

SEQ ID NO: 3106505 - RNA, 19 nt, Artificial Sequence
  Description of Artificial Sequence: Synthetic oligonucleotide
uuggagagcuggcagcugu

SEQ ID NO: 3106506 - RNA, 19 nt, Artificial Sequence
  Description of Artificial Sequence: Synthetic oligonucleotide
ucgcuguugagauccagcu

SEQ ID NO: 3106507 - RNA, 19 nt, Artificial Sequence
  Description of Artificial Sequence: Synthetic oligonucleotide
gcuguugagauccagcuuc

SEQ ID NO: 3106508 - RNA, 19 nt, Artificial Sequence
  Description of Artificial Sequence: Synthetic oligonucleotide
acagcaaucagggacucga

SEQ ID NO: 3106509 - RNA, 19 nt, Artificial Sequence
  Description of Artificial Sequence: Synthetic oligonucleotide
uucuuugugaaggcggcca

SEQ ID NO: 3106510 - RNA, 19 nt, Artificial Sequence
  Description of Artificial Sequence: Synthetic oligonucleotide
agcuccguguucaugaaag

SEQ ID NO: 3106511 - RNA, 19 nt, Artificial Sequence
  Description of Artificial Sequence: Synthetic oligonucleotide
aaggcggccagcuccgugu

SEQ ID NO: 3106512 - RNA, 19 nt, Artificial Sequence
  Description of Artificial Sequence: Synthetic oligonucleotide
ucaucaugcgguccaggac

SEQ ID NO: 3106513 - RNA, 19 nt, Artificial Sequence
  Description of Artificial Sequence: Synthetic oligonucleotide
aucgcuguugagauccagc

SEQ ID NO: 3106514 - RNA, 19 nt, Artificial Sequence
  Description of Artificial Sequence: Synthetic oligonucleotide
ggaacucaguuuuggagag

SEQ ID NO: 3106515 - RNA, 19 nt, Artificial Sequence
  Description of Artificial Sequence: Synthetic oligonucleotide
guucccauccuucccacug

SEQ ID NO: 3106516 - RNA, 19 nt, Artificial Sequence
  Description of Artificial Sequence: Synthetic oligonucleotide
uuugugaaggcggccagcu

SEQ ID NO: 3106517 - RNA, 19 nt, Artificial Sequence
  Description of Artificial Sequence: Synthetic oligonucleotide
guugagauccagcuucuuc

SEQ ID NO: 3106518 - RNA, 19 nt, Artificial Sequence
  Description of Artificial Sequence: Synthetic oligonucleotide
cucauggcaagcuaaagcu

SEQ ID NO: 3106519 - RNA, 19 nt, Artificial Sequence
  Description of Artificial Sequence: Synthetic oligonucleotide
uccuucugguucuuuguga

SEQ ID NO: 3106520 - RNA, 19 nt, Artificial Sequence
  Description of Artificial Sequence: Synthetic oligonucleotide
caucaugcgguccaggaca

SEQ ID NO: 3106521 - RNA, 19 nt, Artificial Sequence
  Description of Artificial Sequence: Synthetic oligonucleotide
ugcgguccaggacaccagg

SEQ ID NO: 3106522 - RNA, 19 nt, Artificial Sequence
  Description of Artificial Sequence: Synthetic oligonucleotide
gaagccuucaggaaggacu

SEQ ID NO: 3106523 - RNA, 19 nt, Artificial Sequence
  Description of Artificial Sequence: Synthetic oligonucleotide
gugaggaacucaguuuugg

SEQ ID NO: 3106524 - RNA, 19 nt, Artificial Sequence
  Description of Artificial Sequence: Synthetic oligonucleotide
aucagggacucgaugcacc

SEQ ID NO: 3106525 - RNA, 19 nt, Artificial Sequence
  Description of Artificial Sequence: Synthetic oligonucleotide
agcaaucagggacucgaug

SEQ ID NO: 3106526 - RNA, 19 nt, Artificial Sequence
  Description of Artificial Sequence: Synthetic oligonucleotide
gaaagugaggaacucaguu

SEQ ID NO: 3106527 - RNA, 19 nt, Artificial Sequence
  Description of Artificial Sequence: Synthetic oligonucleotide
ggcaagcuaaagcuaagcc

SEQ ID NO: 3106528 - RNA, 19 nt, Artificial Sequence
  Description of Artificial Sequence: Synthetic oligonucleotide
auaagguugagaaacucuu

SEQ ID NO: 3106529 - RNA, 19 nt, Artificial Sequence
  Description of Artificial Sequence: Synthetic oligonucleotide
cucgaugcaccguucaguc

SEQ ID NO: 3106530 - RNA, 19 nt, Artificial Sequence
  Description of Artificial Sequence: Synthetic oligonucleotide
ucuagcugcccaucgcugu

SEQ ID NO: 3106531 - RNA, 19 nt, Artificial Sequence
  Description of Artificial Sequence: Synthetic oligonucleotide
gcaagcuaaagcuaagcca

SEQ ID NO: 3106532 - RNA, 19 nt, Artificial Sequence
  Description of Artificial Sequence: Synthetic oligonucleotide
cuggcagcuguucccaucc

SEQ ID NO: 3106533 - RNA, 19 nt, Artificial Sequence
  Description of Artificial Sequence: Synthetic oligonucleotide
ucccacuguacuuuuggaa

SEQ ID NO: 3106534 - RNA, 19 nt, Artificial Sequence
  Description of Artificial Sequence: Synthetic oligonucleotide
aggaaggacucauggcaag

SEQ ID NO: 3106535 - RNA, 19 nt, Artificial Sequence
  Description of Artificial Sequence: Synthetic oligonucleotide
agacacgcuucugggaagc

SEQ ID NO: 3106536 - RNA, 19 nt, Artificial Sequence
  Description of Artificial Sequence: Synthetic oligonucleotide
cauggcaagcuaaagcuaa

SEQ ID NO: 3106537 - RNA, 19 nt, Artificial Sequence
  Description of Artificial Sequence: Synthetic oligonucleotide
ucauggcaagcuaaagcua

SEQ ID NO: 3106538 - RNA, 19 nt, Artificial Sequence
  Description of Artificial Sequence: Synthetic oligonucleotide
ugagaaacucuuggaaauc

SEQ ID NO: 3106539 - RNA, 19 nt, Artificial Sequence
  Description of Artificial Sequence: Synthetic oligonucleotide
gacucgaugcaccguucag

SEQ ID NO: 3106540 - RNA, 19 nt, Artificial Sequence
  Description of Artificial Sequence: Synthetic oligonucleotide
aacagcaaucagggacucg

SEQ ID NO: 3106541 - RNA, 19 nt, Artificial Sequence
  Description of Artificial Sequence: Synthetic oligonucleotide
uagacacgcuucugggaag

SEQ ID NO: 3106542 - RNA, 19 nt, Artificial Sequence
  Description of Artificial Sequence: Synthetic oligonucleotide
uggaaaucuagcugcccau

SEQ ID NO: 3106543 - RNA, 19 nt, Artificial Sequence
  Description of Artificial Sequence: Synthetic oligonucleotide
aaggacucauggcaagcua

SEQ ID NO: 3106544 - RNA, 19 nt, Artificial Sequence
  Description of Artificial Sequence: Synthetic oligonucleotide
uggcaagcuaaagcuaagc

SEQ ID NO: 3106545 - RNA, 19 nt, Artificial Sequence
  Description of Artificial Sequence: Synthetic oligonucleotide
gguugagaaacucuuggaa

SEQ ID NO: 3106546 - RNA, 19 nt, Artificial Sequence
  Description of Artificial Sequence: Synthetic oligonucleotide
gacucauggcaagcuaaag

SEQ ID NO: 3106547 - RNA, 19 nt, Artificial Sequence
  Description of Artificial Sequence: Synthetic oligonucleotide
cuucugguucuuugugaag

SEQ ID NO: 3106548 - RNA, 19 nt, Artificial Sequence
  Description of Artificial Sequence: Synthetic oligonucleotide
cagcuucuucaucaugcgg

SEQ ID NO: 3106549 - RNA, 19 nt, Artificial Sequence
  Description of Artificial Sequence: Synthetic oligonucleotide
cugguucuuugugaaggcg

SEQ ID NO: 3106550 - RNA, 19 nt, Artificial Sequence
  Description of Artificial Sequence: Synthetic oligonucleotide
ugagauccagcuucuucau

SEQ ID NO: 3106551 - RNA, 19 nt, Artificial Sequence
  Description of Artificial Sequence: Synthetic oligonucleotide
uucccacuguacuuuugga

SEQ ID NO: 3106552 - RNA, 19 nt, Artificial Sequence
  Description of Artificial Sequence: Synthetic oligonucleotide
cuuggaaaucuagcugccc

SEQ ID NO: 3106553 - RNA, 19 nt, Artificial Sequence
  Description of Artificial Sequence: Synthetic oligonucleotide
ucaugaaagugaggaacuc

SEQ ID NO: 3106554 - RNA, 19 nt, Artificial Sequence
  Description of Artificial Sequence: Synthetic oligonucleotide
acuguacuuuuggaaaaca

SEQ ID NO: 3106555 - RNA, 19 nt, Artificial Sequence
  Description of Artificial Sequence: Synthetic oligonucleotide
cuccguguucaugaaagug

SEQ ID NO: 3106556 - RNA, 19 nt, Artificial Sequence
  Description of Artificial Sequence: Synthetic oligonucleotide
ucuucaucaugcgguccag

SEQ ID NO: 3106557 - RNA, 19 nt, Artificial Sequence
  Description of Artificial Sequence: Synthetic oligonucleotide
uucccauccuucccacugu

SEQ ID NO: 3106558 - RNA, 19 nt, Artificial Sequence
  Description of Artificial Sequence: Synthetic oligonucleotide
cccaucgcuguugagaucc

SEQ ID NO: 3106559 - RNA, 19 nt, Artificial Sequence
  Description of Artificial Sequence: Synthetic oligonucleotide
agcuaaagcuaagccacca

SEQ ID NO: 3106560 - RNA, 19 nt, Artificial Sequence
  Description of Artificial Sequence: Synthetic oligonucleotide
gagaaacucuuggaaaucu

SEQ ID NO: 3106561 - RNA, 19 nt, Artificial Sequence
  Description of Artificial Sequence: Synthetic oligonucleotide
acaccaggguccuucuggu

SEQ ID NO: 3106562 - RNA, 19 nt, Artificial Sequence
  Description of Artificial Sequence: Synthetic oligonucleotide
acucgaugcaccguucagu

SEQ ID NO: 3106563 - RNA, 19 nt, Artificial Sequence
  Description of Artificial Sequence: Synthetic oligonucleotide
aucaugcgguccaggacac

SEQ ID NO: 3106564 - RNA, 19 nt, Artificial Sequence
  Description of Artificial Sequence: Synthetic oligonucleotide
agggacucgaugcaccguu

SEQ ID NO: 3106565 - RNA, 19 nt, Artificial Sequence
  Description of Artificial Sequence: Synthetic oligonucleotide
ccguguucaugaaagugag

SEQ ID NO: 3106566 - RNA, 19 nt, Artificial Sequence
  Description of Artificial Sequence: Synthetic oligonucleotide
cuucuucaucaugcggucc

SEQ ID NO: 3106567 - RNA, 19 nt, Artificial Sequence
  Description of Artificial Sequence: Synthetic oligonucleotide
gguucuuugugaaggcggc

SEQ ID NO: 3106568 - RNA, 19 nt, Artificial Sequence
  Description of Artificial Sequence: Synthetic oligonucleotide
aagccaccaauaagguuga

SEQ ID NO: 3106569 - RNA, 19 nt, Artificial Sequence
  Description of Artificial Sequence: Synthetic oligonucleotide
cuuugugaaggcggccagc

SEQ ID NO: 3106570 - RNA, 19 nt, Artificial Sequence
  Description of Artificial Sequence: Synthetic oligonucleotide
cuucaucaugcgguccagg

SEQ ID NO: 3106571 - RNA, 19 nt, Artificial Sequence
  Description of Artificial Sequence: Synthetic oligonucleotide
gagauccagcuucuucauc

SEQ ID NO: 3106572 - RNA, 19 nt, Artificial Sequence
  Description of Artificial Sequence: Synthetic oligonucleotide
ccagcuucuucaucaugcg

SEQ ID NO: 3106573 - RNA, 19 nt, Artificial Sequence
  Description of Artificial Sequence: Synthetic oligonucleotide
gugaaggcggccagcuccg

SEQ ID NO: 3106574 - RNA, 19 nt, Artificial Sequence
  Description of Artificial Sequence: Synthetic oligonucleotide
ucgaugcaccguucagucu

SEQ ID NO: 3106575 - RNA, 19 nt, Artificial Sequence
  Description of Artificial Sequence: Synthetic oligonucleotide
cuaaagcuaagccaccaau

SEQ ID NO: 3106576 - RNA, 19 nt, Artificial Sequence
  Description of Artificial Sequence: Synthetic oligonucleotide
ugcaccguucagucucugu

SEQ ID NO: 3106577 - RNA, 19 nt, Artificial Sequence
  Description of Artificial Sequence: Synthetic oligonucleotide
gaacucaguuuuggagagc

SEQ ID NO: 3106578 - RNA, 19 nt, Artificial Sequence
  Description of Artificial Sequence: Synthetic oligonucleotide
uuuggagagcuggcagcug

SEQ ID NO: 3106579 - RNA, 19 nt, Artificial Sequence
  Description of Artificial Sequence: Synthetic oligonucleotide
gaaggcggccagcuccgug

SEQ ID NO: 3106580 - RNA, 19 nt, Artificial Sequence
  Description of Artificial Sequence: Synthetic oligonucleotide
aggacucauggcaagcuaa

SEQ ID NO: 3106581 - RNA, 19 nt, Artificial Sequence
  Description of Artificial Sequence: Synthetic oligonucleotide
agugaggaacucaguuuug

SEQ ID NO: 3106582 - RNA, 19 nt, Artificial Sequence
  Description of Artificial Sequence: Synthetic oligonucleotide
guucuuugugaaggcggcc

SEQ ID NO: 3106583 - RNA, 19 nt, Artificial Sequence
  Description of Artificial Sequence: Synthetic oligonucleotide
auggcaagcuaaagcuaag

SEQ ID NO: 3106584 - RNA, 19 nt, Artificial Sequence
  Description of Artificial Sequence: Synthetic oligonucleotide
caugcgguccaggacacca

SEQ ID NO: 3106585 - RNA, 19 nt, Artificial Sequence
  Description of Artificial Sequence: Synthetic oligonucleotide
caggacaccaggguccuuc

SEQ ID NO: 3106586 - RNA, 19 nt, Artificial Sequence
  Description of Artificial Sequence: Synthetic oligonucleotide
uguucccauccuucccacu

SEQ ID NO: 3106587 - RNA, 19 nt, Artificial Sequence
  Description of Artificial Sequence: Synthetic oligonucleotide
caggaaggacucauggcaa

SEQ ID NO: 3106588 - RNA, 19 nt, Artificial Sequence
  Description of Artificial Sequence: Synthetic oligonucleotide
gccagcuccguguucauga

SEQ ID NO: 3106589 - RNA, 19 nt, Artificial Sequence
  Description of Artificial Sequence: Synthetic oligonucleotide
cuguucccauccuucccac

SEQ ID NO: 3106590 - RNA, 19 nt, Artificial Sequence
  Description of Artificial Sequence: Synthetic oligonucleotide
ggguccuucugguucuuug

SEQ ID NO: 3106591 - RNA, 19 nt, Artificial Sequence
  Description of Artificial Sequence: Synthetic oligonucleotide
gcuguucccauccuuccca

SEQ ID NO: 3106592 - RNA, 19 nt, Artificial Sequence
  Description of Artificial Sequence: Synthetic oligonucleotide
uugugaaggcggccagcuc

SEQ ID NO: 3106593 - RNA, 19 nt, Artificial Sequence
  Description of Artificial Sequence: Synthetic oligonucleotide
aucuagcugcccaucgcug

SEQ ID NO: 3106594 - RNA, 19 nt, Artificial Sequence
  Description of Artificial Sequence: Synthetic oligonucleotide
agaaacucuuggaaaucua

SEQ ID NO: 3106595 - RNA, 19 nt, Artificial Sequence
  Description of Artificial Sequence: Synthetic oligonucleotide
aggacaccaggguccuucu

SEQ ID NO: 3106596 - RNA, 19 nt, Artificial Sequence
  Description of Artificial Sequence: Synthetic oligonucleotide
cccacuguacuuuuggaaa

SEQ ID NO: 3106597 - RNA, 19 nt, Artificial Sequence
  Description of Artificial Sequence: Synthetic oligonucleotide
ggaaaacagcaaucaggga

SEQ ID NO: 3106598 - RNA, 19 nt, Artificial Sequence
  Description of Artificial Sequence: Synthetic oligonucleotide
ucccauccuucccacugua

SEQ ID NO: 3106599 - RNA, 19 nt, Artificial Sequence
  Description of Artificial Sequence: Synthetic oligonucleotide
cgaugcaccguucagucuc

SEQ ID NO: 3106600 - RNA, 19 nt, Artificial Sequence
  Description of Artificial Sequence: Synthetic oligonucleotide
acacgcuucugggaagccu

SEQ ID NO: 3106601 - RNA, 19 nt, Artificial Sequence
  Description of Artificial Sequence: Synthetic oligonucleotide
agcugcccaucgcuguuga

SEQ ID NO: 3106602 - RNA, 19 nt, Artificial Sequence
  Description of Artificial Sequence: Synthetic oligonucleotide
caucgcuguugagauccag

SEQ ID NO: 3106603 - RNA, 19 nt, Artificial Sequence
  Description of Artificial Sequence: Synthetic oligonucleotide
uagcugcccaucgcuguug

SEQ ID NO: 3106604 - RNA, 19 nt, Artificial Sequence
  Description of Artificial Sequence: Synthetic oligonucleotide
gacacgcuucugggaagcc

SEQ ID NO: 3106605 - RNA, 19 nt, Artificial Sequence
  Description of Artificial Sequence: Synthetic oligonucleotide
ggaaaucuagcugcccauc

SEQ ID NO: 3106606 - RNA, 19 nt, Artificial Sequence
  Description of Artificial Sequence: Synthetic oligonucleotide
gagcuggcagcuguuccca

SEQ ID NO: 3106607 - RNA, 19 nt, Artificial Sequence
  Description of Artificial Sequence: Synthetic oligonucleotide
gcuaaagcuaagccaccaa

SEQ ID NO: 3106608 - RNA, 19 nt, Artificial Sequence
  Description of Artificial Sequence: Synthetic oligonucleotide
gcagcuguucccauccuuc

SEQ ID NO: 3106609 - RNA, 19 nt, Artificial Sequence
  Description of Artificial Sequence: Synthetic oligonucleotide
uggcagcuguucccauccu

SEQ ID NO: 3106610 - RNA, 19 nt, Artificial Sequence
  Description of Artificial Sequence: Synthetic oligonucleotide
ccuucugguucuuugugaa

SEQ ID NO: 3106611 - RNA, 19 nt, Artificial Sequence
  Description of Artificial Sequence: Synthetic oligonucleotide
cguguucaugaaagugagg

SEQ ID NO: 3106612 - RNA, 19 nt, Artificial Sequence
  Description of Artificial Sequence: Synthetic oligonucleotide
ggacucgaugcaccguuca

SEQ ID NO: 3106613 - RNA, 19 nt, Artificial Sequence
  Description of Artificial Sequence: Synthetic oligonucleotide
gccaccaauaagguugaga

SEQ ID NO: 3106614 - RNA, 19 nt, Artificial Sequence
  Description of Artificial Sequence: Synthetic oligonucleotide
uguugagauccagcuucuu

SEQ ID NO: 3106615 - RNA, 19 nt, Artificial Sequence
  Description of Artificial Sequence: Synthetic oligonucleotide
cuaagccaccaauaagguu

SEQ ID NO: 3106616 - RNA, 19 nt, Artificial Sequence
  Description of Artificial Sequence: Synthetic oligonucleotide
ucaugcgguccaggacacc

SEQ ID NO: 3106617 - RNA, 19 nt, Artificial Sequence
  Description of Artificial Sequence: Synthetic oligonucleotide
acgcuucugggaagccuuc

SEQ ID NO: 3106618 - RNA, 19 nt, Artificial Sequence
  Description of Artificial Sequence: Synthetic oligonucleotide
augcgguccaggacaccag

SEQ ID NO: 3106619 - RNA, 19 nt, Artificial Sequence
  Description of Artificial Sequence: Synthetic oligonucleotide
gguccuucugguucuuugu

SEQ ID NO: 3106620 - RNA, 19 nt, Artificial Sequence
  Description of Artificial Sequence: Synthetic oligonucleotide
cuguugagauccagcuucu

SEQ ID NO: 3106621 - RNA, 19 nt, Artificial Sequence
  Description of Artificial Sequence: Synthetic oligonucleotide
ccacuguacuuuuggaaaa

SEQ ID NO: 3106622 - RNA, 19 nt, Artificial Sequence
  Description of Artificial Sequence: Synthetic oligonucleotide
ccaauaagguugagaaacu

SEQ ID NO: 3106623 - RNA, 19 nt, Artificial Sequence
  Description of Artificial Sequence: Synthetic oligonucleotide
cacgcuucugggaagccuu

SEQ ID NO: 3106624 - RNA, 19 nt, Artificial Sequence
  Description of Artificial Sequence: Synthetic oligonucleotide
gcgguccaggacaccaggg

SEQ ID NO: 3106625 - RNA, 19 nt, Artificial Sequence
  Description of Artificial Sequence: Synthetic oligonucleotide
gaugcaccguucagucucu

SEQ ID NO: 3106626 - RNA, 19 nt, Artificial Sequence
  Description of Artificial Sequence: Synthetic oligonucleotide
gcuaagccaccaauaaggu

SEQ ID NO: 3106627 - RNA, 19 nt, Artificial Sequence
  Description of Artificial Sequence: Synthetic oligonucleotide
ggaagccuucaggaaggac

SEQ ID NO: 3106628 - RNA, 19 nt, Artificial Sequence
  Description of Artificial Sequence: Synthetic oligonucleotide
ggacucauggcaagcuaaa

SEQ ID NO: 3106629 - RNA, 19 nt, Artificial Sequence
  Description of Artificial Sequence: Synthetic oligonucleotide
agcuggcagcuguucccau

SEQ ID NO: 3106630 - RNA, 19 nt, Artificial Sequence
  Description of Artificial Sequence: Synthetic oligonucleotide
ggagagcuggcagcuguuc

SEQ ID NO: 3106631 - RNA, 19 nt, Artificial Sequence
  Description of Artificial Sequence: Synthetic oligonucleotide
ugaaggcggccagcuccgu

SEQ ID NO: 3106632 - RNA, 19 nt, Artificial Sequence
  Description of Artificial Sequence: Synthetic oligonucleotide
gcggccagcuccguguuca

SEQ ID NO: 3106633 - RNA, 19 nt, Artificial Sequence
  Description of Artificial Sequence: Synthetic oligonucleotide
agccaccaauaagguugag

SEQ ID NO: 3106634 - RNA, 19 nt, Artificial Sequence
  Description of Artificial Sequence: Synthetic oligonucleotide
augcaccguucagucucug

SEQ ID NO: 3106635 - RNA, 19 nt, Artificial Sequence
  Description of Artificial Sequence: Synthetic oligonucleotide
cagcuccguguucaugaaa

SEQ ID NO: 3106636 - RNA, 19 nt, Artificial Sequence
  Description of Artificial Sequence: Synthetic oligonucleotide
gcugcccaucgcuguugag

SEQ ID NO: 3106637 - RNA, 19 nt, Artificial Sequence
  Description of Artificial Sequence: Synthetic oligonucleotide
cuagcugcccaucgcuguu

SEQ ID NO: 3106638 - RNA, 19 nt, Artificial Sequence
  Description of Artificial Sequence: Synthetic oligonucleotide
gcuccguguucaugaaagu

SEQ ID NO: 3106639 - RNA, 19 nt, Artificial Sequence
  Description of Artificial Sequence: Synthetic oligonucleotide
gggacucgaugcaccguuc

SEQ ID NO: 3106640 - RNA, 19 nt, Artificial Sequence
  Description of Artificial Sequence: Synthetic oligonucleotide
cagcaaucagggacucgau

SEQ ID NO: 3106641 - RNA, 19 nt, Artificial Sequence
  Description of Artificial Sequence: Synthetic oligonucleotide
ggccagcuccguguucaug

SEQ ID NO: 3106642 - RNA, 19 nt, Artificial Sequence
  Description of Artificial Sequence: Synthetic oligonucleotide
aggguccuucugguucuuu

SEQ ID NO: 3106643 - RNA, 19 nt, Artificial Sequence
  Description of Artificial Sequence: Synthetic oligonucleotide
ccaggguccuucugguucu

SEQ ID NO: 3106644 - RNA, 19 nt, Artificial Sequence
  Description of Artificial Sequence: Synthetic oligonucleotide
ggcagcuguucccauccuu

SEQ ID NO: 3106645 - RNA, 19 nt, Artificial Sequence
  Description of Artificial Sequence: Synthetic oligonucleotide
gccuucaggaaggacucau

SEQ ID NO: 3106646 - RNA, 19 nt, Artificial Sequence
  Description of Artificial Sequence: Synthetic oligonucleotide
gcccaucgcuguugagauc

SEQ ID NO: 3106647 - RNA, 19 nt, Artificial Sequence
  Description of Artificial Sequence: Synthetic oligonucleotide
ccagcuccguguucaugaa

SEQ ID NO: 3106648 - RNA, 19 nt, Artificial Sequence
  Description of Artificial Sequence: Synthetic oligonucleotide
ggcggccagcuccguguuc

SEQ ID NO: 3106649 - RNA, 19 nt, Artificial Sequence
  Description of Artificial Sequence: Synthetic oligonucleotide
ccaucgcuguugagaucca

SEQ ID NO: 3106650 - RNA, 19 nt, Artificial Sequence
  Description of Artificial Sequence: Synthetic oligonucleotide
cagggacucgaugcaccgu

SEQ ID NO: 3106651 - RNA, 19 nt, Artificial Sequence
  Description of Artificial Sequence: Synthetic oligonucleotide
caccaggguccuucugguu

SEQ ID NO: 3106652 - RNA, 19 nt, Artificial Sequence
  Description of Artificial Sequence: Synthetic oligonucleotide
cgcuucugggaagccuuca

SEQ ID NO: 3106653 - RNA, 19 nt, Artificial Sequence
  Description of Artificial Sequence: Synthetic oligonucleotide
cgcuguugagauccagcuu

SEQ ID NO: 3106654 - RNA, 19 nt, Artificial Sequence
  Description of Artificial Sequence: Synthetic oligonucleotide
caggguccuucugguucuu

SEQ ID NO: 3106655 - RNA, 19 nt, Artificial Sequence
  Description of Artificial Sequence: Synthetic oligonucleotide
cggccagcuccguguucau

SEQ ID NO: 3106656 - RNA, 19 nt, Artificial Sequence
  Description of Artificial Sequence: Synthetic oligonucleotide
ccaggacaccaggguccuu

SEQ ID NO: 3106657 - RNA, 19 nt, Artificial Sequence
  Description of Artificial Sequence: Synthetic oligonucleotide
aggaugacagcauugaggc

SEQ ID NO: 3106658 - RNA, 19 nt, Artificial Sequence
  Description of Artificial Sequence: Synthetic oligonucleotide
gauagcaggaagcaaagag

SEQ ID NO: 3106659 - RNA, 19 nt, Artificial Sequence
  Description of Artificial Sequence: Synthetic oligonucleotide
gaagcaaagaggaugacag

SEQ ID NO: 3106660 - RNA, 19 nt, Artificial Sequence
  Description of Artificial Sequence: Synthetic oligonucleotide
augacauagguguaguugg

SEQ ID NO: 3106661 - RNA, 19 nt, Artificial Sequence
  Description of Artificial Sequence: Synthetic oligonucleotide
uguaguuggguaaugcugc

SEQ ID NO: 3106662 - RNA, 19 nt, Artificial Sequence
  Description of Artificial Sequence: Synthetic oligonucleotide
acagcacucucuuauaggg

SEQ ID NO: 3106663 - RNA, 19 nt, Artificial Sequence
  Description of Artificial Sequence: Synthetic oligonucleotide
uuauagggcucgauggugg

SEQ ID NO: 3106664 - RNA, 19 nt, Artificial Sequence
  Description of Artificial Sequence: Synthetic oligonucleotide
cucuuauagggcucgaugg

SEQ ID NO: 3106665 - RNA, 19 nt, Artificial Sequence
  Description of Artificial Sequence: Synthetic oligonucleotide
augguaaccuccaugagac

SEQ ID NO: 3106666 - RNA, 19 nt, Artificial Sequence
  Description of Artificial Sequence: Synthetic oligonucleotide
aguuggguaaugcugcuuc

SEQ ID NO: 3106667 - RNA, 19 nt, Artificial Sequence
  Description of Artificial Sequence: Synthetic oligonucleotide
aagcaaagaggaugacagc

SEQ ID NO: 3106668 - RNA, 19 nt, Artificial Sequence
  Description of Artificial Sequence: Synthetic oligonucleotide
uucggaacacucuccagcg

SEQ ID NO: 3106669 - RNA, 19 nt, Artificial Sequence
  Description of Artificial Sequence: Synthetic oligonucleotide
uagcaggaagcaaagagga

SEQ ID NO: 3106670 - RNA, 19 nt, Artificial Sequence
  Description of Artificial Sequence: Synthetic oligonucleotide
augaccguccucuccagcc

SEQ ID NO: 3106671 - RNA, 19 nt, Artificial Sequence
  Description of Artificial Sequence: Synthetic oligonucleotide
gaggaugacagcauugagg

SEQ ID NO: 3106672 - RNA, 19 nt, Artificial Sequence
  Description of Artificial Sequence: Synthetic oligonucleotide
ucucuuauagggcucgaug

SEQ ID NO: 3106673 - RNA, 19 nt, Artificial Sequence
  Description of Artificial Sequence: Synthetic oligonucleotide
acaucccacacacaacccc

SEQ ID NO: 3106674 - RNA, 19 nt, Artificial Sequence
  Description of Artificial Sequence: Synthetic oligonucleotide
gaugacagcauugaggcca

SEQ ID NO: 3106675 - RNA, 19 nt, Artificial Sequence
  Description of Artificial Sequence: Synthetic oligonucleotide
auugaggccaucaccaugg

SEQ ID NO: 3106676 - RNA, 19 nt, Artificial Sequence
  Description of Artificial Sequence: Synthetic oligonucleotide
auagcaggaagcaaagagg

SEQ ID NO: 3106677 - RNA, 19 nt, Artificial Sequence
  Description of Artificial Sequence: Synthetic oligonucleotide
aaaucaucuucccauucaa

SEQ ID NO: 3106678 - RNA, 19 nt, Artificial Sequence
  Description of Artificial Sequence: Synthetic oligonucleotide
accaugguaaccuccauga

SEQ ID NO: 3106679 - RNA, 19 nt, Artificial Sequence
  Description of Artificial Sequence: Synthetic oligonucleotide
gacagcacucucuuauagg

SEQ ID NO: 3106680 - RNA, 19 nt, Artificial Sequence
  Description of Artificial Sequence: Synthetic oligonucleotide
accuccaugagacagcacu

SEQ ID NO: 3106681 - RNA, 19 nt, Artificial Sequence
  Description of Artificial Sequence: Synthetic oligonucleotide
uggguaaugcugcuucggg

SEQ ID NO: 3106682 - RNA, 19 nt, Artificial Sequence
  Description of Artificial Sequence: Synthetic oligonucleotide
gcugcuucgggguagauag

SEQ ID NO: 3106683 - RNA, 19 nt, Artificial Sequence
  Description of Artificial Sequence: Synthetic oligonucleotide
ucgaugguggucaugucca

SEQ ID NO: 3106684 - RNA, 19 nt, Artificial Sequence
  Description of Artificial Sequence: Synthetic oligonucleotide
acaaccccggcccagccgc

SEQ ID NO: 3106685 - RNA, 19 nt, Artificial Sequence
  Description of Artificial Sequence: Synthetic oligonucleotide
guccucuccagccacaucc

SEQ ID NO: 3106686 - RNA, 19 nt, Artificial Sequence
  Description of Artificial Sequence: Synthetic oligonucleotide
ugacauagguguaguuggg

SEQ ID NO: 3106687 - RNA, 19 nt, Artificial Sequence
  Description of Artificial Sequence: Synthetic oligonucleotide
augguggucauguccacuc

SEQ ID NO: 3106688 - RNA, 19 nt, Artificial Sequence
  Description of Artificial Sequence: Synthetic oligonucleotide
ucuuauagggcucgauggu

SEQ ID NO: 3106689 - RNA, 19 nt, Artificial Sequence
  Description of Artificial Sequence: Synthetic oligonucleotide
agcacucucuuauagggcu

SEQ ID NO: 3106690 - RNA, 19 nt, Artificial Sequence
  Description of Artificial Sequence: Synthetic oligonucleotide
caugacauagguguaguug

SEQ ID NO: 3106691 - RNA, 19 nt, Artificial Sequence
  Description of Artificial Sequence: Synthetic oligonucleotide
guucggaacacucuccagc

SEQ ID NO: 3106692 - RNA, 19 nt, Artificial Sequence
  Description of Artificial Sequence: Synthetic oligonucleotide
cuucgggguagauagcagg

SEQ ID NO: 3106693 - RNA, 19 nt, Artificial Sequence
  Description of Artificial Sequence: Synthetic oligonucleotide
cacucuccagcgaugaccg

SEQ ID NO: 3106694 - RNA, 19 nt, Artificial Sequence
  Description of Artificial Sequence: Synthetic oligonucleotide
agcaaagaggaugacagca

SEQ ID NO: 3106695 - RNA, 19 nt, Artificial Sequence
  Description of Artificial Sequence: Synthetic oligonucleotide
aaagaggaugacagcauug

SEQ ID NO: 3106696 - RNA, 19 nt, Artificial Sequence
  Description of Artificial Sequence: Synthetic oligonucleotide
aagaggaugacagcauuga

SEQ ID NO: 3106697 - RNA, 19 nt, Artificial Sequence
  Description of Artificial Sequence: Synthetic oligonucleotide
caucccacacacaaccccg

SEQ ID NO: 3106698 - RNA, 19 nt, Artificial Sequence
  Description of Artificial Sequence: Synthetic oligonucleotide
cucacuggcucccaggccc

SEQ ID NO: 3106699 - RNA, 19 nt, Artificial Sequence
  Description of Artificial Sequence: Synthetic oligonucleotide
aggcaaaucaucuucccau

SEQ ID NO: 3106700 - RNA, 19 nt, Artificial Sequence
  Description of Artificial Sequence: Synthetic oligonucleotide
gaggccaucaccaugguaa

SEQ ID NO: 3106701 - RNA, 19 nt, Artificial Sequence
  Description of Artificial Sequence: Synthetic oligonucleotide
agacagcacucucuuauag

SEQ ID NO: 3106702 - RNA, 19 nt, Artificial Sequence
  Description of Artificial Sequence: Synthetic oligonucleotide
cucgaugguggucaugucc

SEQ ID NO: 3106703 - RNA, 19 nt, Artificial Sequence
  Description of Artificial Sequence: Synthetic oligonucleotide
agcgaugaccguccucucc

SEQ ID NO: 3106704 - RNA, 19 nt, Artificial Sequence
  Description of Artificial Sequence: Synthetic oligonucleotide
aacacucuccagcgaugac

SEQ ID NO: 3106705 - RNA, 19 nt, Artificial Sequence
  Description of Artificial Sequence: Synthetic oligonucleotide
ucuccagcgaugaccgucc

SEQ ID NO: 3106706 - RNA, 19 nt, Artificial Sequence
  Description of Artificial Sequence: Synthetic oligonucleotide
uucgggguagauagcagga

SEQ ID NO: 3106707 - RNA, 19 nt, Artificial Sequence
  Description of Artificial Sequence: Synthetic oligonucleotide
agguguaguuggguaaugc

SEQ ID NO: 3106708 - RNA, 19 nt, Artificial Sequence
  Description of Artificial Sequence: Synthetic oligonucleotide
agcauugaggccaucacca

SEQ ID NO: 3106709 - RNA, 19 nt, Artificial Sequence
  Description of Artificial Sequence: Synthetic oligonucleotide
guagauagcaggaagcaaa

SEQ ID NO: 3106710 - RNA, 19 nt, Artificial Sequence
  Description of Artificial Sequence: Synthetic oligonucleotide
agaggaugacagcauugag

SEQ ID NO: 3106711 - RNA, 19 nt, Artificial Sequence
  Description of Artificial Sequence: Synthetic oligonucleotide
caugguaaccuccaugaga

SEQ ID NO: 3106712 - RNA, 19 nt, Artificial Sequence
  Description of Artificial Sequence: Synthetic oligonucleotide
uuggguaaugcugcuucgg

SEQ ID NO: 3106713 - RNA, 19 nt, Artificial Sequence
  Description of Artificial Sequence: Synthetic oligonucleotide
guuggguaaugcugcuucg

SEQ ID NO: 3106714 - RNA, 19 nt, Artificial Sequence
  Description of Artificial Sequence: Synthetic oligonucleotide
gguaaccuccaugagacag

SEQ ID NO: 3106715 - RNA, 19 nt, Artificial Sequence
  Description of Artificial Sequence: Synthetic oligonucleotide
agccacaucccacacacaa

SEQ ID NO: 3106716 - RNA, 19 nt, Artificial Sequence
  Description of Artificial Sequence: Synthetic oligonucleotide
uuccaugacauagguguag

SEQ ID NO: 3106717 - RNA, 19 nt, Artificial Sequence
  Description of Artificial Sequence: Synthetic oligonucleotide
ugcccgaggcaaaucaucu

SEQ ID NO: 3106718 - RNA, 19 nt, Artificial Sequence
  Description of Artificial Sequence: Synthetic oligonucleotide
guguaguuggguaaugcug

SEQ ID NO: 3106719 - RNA, 19 nt, Artificial Sequence
  Description of Artificial Sequence: Synthetic oligonucleotide
caucaccaugguaaccucc

SEQ ID NO: 3106720 - RNA, 19 nt, Artificial Sequence
  Description of Artificial Sequence: Synthetic oligonucleotide
cuuauagggcucgauggug

SEQ ID NO: 3106721 - RNA, 19 nt, Artificial Sequence
  Description of Artificial Sequence: Synthetic oligonucleotide
caaaucaucuucccauuca

SEQ ID NO: 3106722 - RNA, 19 nt, Artificial Sequence
  Description of Artificial Sequence: Synthetic oligonucleotide
cagcauugaggccaucacc

SEQ ID NO: 3106723 - RNA, 19 nt, Artificial Sequence
  Description of Artificial Sequence: Synthetic oligonucleotide
acauagguguaguugggua

SEQ ID NO: 3106724 - RNA, 19 nt, Artificial Sequence
  Description of Artificial Sequence: Synthetic oligonucleotide
gaggcaaaucaucuuccca

SEQ ID NO: 3106725 - RNA, 19 nt, Artificial Sequence
  Description of Artificial Sequence: Synthetic oligonucleotide
ugcuucgggguagauagca

SEQ ID NO: 3106726 - RNA, 19 nt, Artificial Sequence
  Description of Artificial Sequence: Synthetic oligonucleotide
aguucggaacacucuccag

SEQ ID NO: 3106727 - RNA, 19 nt, Artificial Sequence
  Description of Artificial Sequence: Synthetic oligonucleotide
uagggcucgauggugguca

SEQ ID NO: 3106728 - RNA, 19 nt, Artificial Sequence
  Description of Artificial Sequence: Synthetic oligonucleotide
uggucauguccacucgcug

SEQ ID NO: 3106729 - RNA, 19 nt, Artificial Sequence
  Description of Artificial Sequence: Synthetic oligonucleotide
cauugaggccaucaccaug

SEQ ID NO: 3106730 - RNA, 19 nt, Artificial Sequence
  Description of Artificial Sequence: Synthetic oligonucleotide
uaaccuccaugagacagca

SEQ ID NO: 3106731 - RNA, 19 nt, Artificial Sequence
  Description of Artificial Sequence: Synthetic oligonucleotide
ccacaucccacacacaacc

SEQ ID NO: 3106732 - RNA, 19 nt, Artificial Sequence
  Description of Artificial Sequence: Synthetic oligonucleotide
ggguaaugcugcuucgggg

SEQ ID NO: 3106733 - RNA, 19 nt, Artificial Sequence
  Description of Artificial Sequence: Synthetic oligonucleotide
ggucauguccacucgcugc

SEQ ID NO: 3106734 - RNA, 19 nt, Artificial Sequence
  Description of Artificial Sequence: Synthetic oligonucleotide
uaaugcugcuucgggguag

SEQ ID NO: 3106735 - RNA, 19 nt, Artificial Sequence
  Description of Artificial Sequence: Synthetic oligonucleotide
uccaugagacagcacucuc

SEQ ID NO: 3106736 - RNA, 19 nt, Artificial Sequence
  Description of Artificial Sequence: Synthetic oligonucleotide
uguccacucgcugcucucg

SEQ ID NO: 3106737 - RNA, 19 nt, Artificial Sequence
  Description of Artificial Sequence: Synthetic oligonucleotide
cauagguguaguuggguaa

SEQ ID NO: 3106738 - RNA, 19 nt, Artificial Sequence
  Description of Artificial Sequence: Synthetic oligonucleotide
gcucucgcugcccaguucg

SEQ ID NO: 3106739 - RNA, 19 nt, Artificial Sequence
  Description of Artificial Sequence: Synthetic oligonucleotide
cagcacucucuuauagggc

SEQ ID NO: 3106740 - RNA, 19 nt, Artificial Sequence
  Description of Artificial Sequence: Synthetic oligonucleotide
guaaccuccaugagacagc

SEQ ID NO: 3106741 - RNA, 19 nt, Artificial Sequence
  Description of Artificial Sequence: Synthetic oligonucleotide
acucgcugcucucgcugcc

SEQ ID NO: 3106742 - RNA, 19 nt, Artificial Sequence
  Description of Artificial Sequence: Synthetic oligonucleotide
gacagcauugaggccauca

SEQ ID NO: 3106743 - RNA, 19 nt, Artificial Sequence
  Description of Artificial Sequence: Synthetic oligonucleotide
uauagggcucgaugguggu

SEQ ID NO: 3106744 - RNA, 19 nt, Artificial Sequence
  Description of Artificial Sequence: Synthetic oligonucleotide
cacaucccacacacaaccc

SEQ ID NO: 3106745 - RNA, 19 nt, Artificial Sequence
  Description of Artificial Sequence: Synthetic oligonucleotide
ugcccaguucggaacacuc

SEQ ID NO: 3106746 - RNA, 19 nt, Artificial Sequence
  Description of Artificial Sequence: Synthetic oligonucleotide
cacucucuuauagggcucg

SEQ ID NO: 3106747 - RNA, 19 nt, Artificial Sequence
  Description of Artificial Sequence: Synthetic oligonucleotide
uccucuccagccacauccc

SEQ ID NO: 3106748 - RNA, 19 nt, Artificial Sequence
  Description of Artificial Sequence: Synthetic oligonucleotide
ugaccguccucuccagcca

SEQ ID NO: 3106749 - RNA, 19 nt, Artificial Sequence
  Description of Artificial Sequence: Synthetic oligonucleotide
gaugaccguccucuccagc

SEQ ID NO: 3106750 - RNA, 19 nt, Artificial Sequence
  Description of Artificial Sequence: Synthetic oligonucleotide
cucccaggcccucugcccg

SEQ ID NO: 3106751 - RNA, 19 nt, Artificial Sequence
  Description of Artificial Sequence: Synthetic oligonucleotide
ccagccacaucccacacac

SEQ ID NO: 3106752 - RNA, 19 nt, Artificial Sequence
  Description of Artificial Sequence: Synthetic oligonucleotide
auagguguaguuggguaau

SEQ ID NO: 3106753 - RNA, 19 nt, Artificial Sequence
  Description of Artificial Sequence: Synthetic oligonucleotide
auguccacucgcugcucuc

SEQ ID NO: 3106754 - RNA, 19 nt, Artificial Sequence
  Description of Artificial Sequence: Synthetic oligonucleotide
aaugcugcuucgggguaga

SEQ ID NO: 3106755 - RNA, 19 nt, Artificial Sequence
  Description of Artificial Sequence: Synthetic oligonucleotide
ucugcccgaggcaaaucau

SEQ ID NO: 3106756 - RNA, 19 nt, Artificial Sequence
  Description of Artificial Sequence: Synthetic oligonucleotide
ccacacacaaccccggccc

SEQ ID NO: 3106757 - RNA, 19 nt, Artificial Sequence
  Description of Artificial Sequence: Synthetic oligonucleotide
ucccacacacaaccccggc

SEQ ID NO: 3106758 - RNA, 19 nt, Artificial Sequence
  Description of Artificial Sequence: Synthetic oligonucleotide
gguaaugcugcuucggggu

SEQ ID NO: 3106759 - RNA, 19 nt, Artificial Sequence
  Description of Artificial Sequence: Synthetic oligonucleotide
ucggaacacucuccagcga

SEQ ID NO: 3106760 - RNA, 19 nt, Artificial Sequence
  Description of Artificial Sequence: Synthetic oligonucleotide
aggaagcaaagaggaugac

SEQ ID NO: 3106761 - RNA, 19 nt, Artificial Sequence
  Description of Artificial Sequence: Synthetic oligonucleotide
agcugccucacuggcuccc

SEQ ID NO: 3106762 - RNA, 19 nt, Artificial Sequence
  Description of Artificial Sequence: Synthetic oligonucleotide
cugcccgaggcaaaucauc

SEQ ID NO: 3106763 - RNA, 19 nt, Artificial Sequence
  Description of Artificial Sequence: Synthetic oligonucleotide
gguggucauguccacucgc

SEQ ID NO: 3106764 - RNA, 19 nt, Artificial Sequence
  Description of Artificial Sequence: Synthetic oligonucleotide
ggaagcaaagaggaugaca

SEQ ID NO: 3106765 - RNA, 19 nt, Artificial Sequence
  Description of Artificial Sequence: Synthetic oligonucleotide
cucuccagcgaugaccguc

SEQ ID NO: 3106766 - RNA, 19 nt, Artificial Sequence
  Description of Artificial Sequence: Synthetic oligonucleotide
cacucgcugcucucgcugc

SEQ ID NO: 3106767 - RNA, 19 nt, Artificial Sequence
  Description of Artificial Sequence: Synthetic oligonucleotide
cucugcccgaggcaaauca

SEQ ID NO: 3106768 - RNA, 19 nt, Artificial Sequence
  Description of Artificial Sequence: Synthetic oligonucleotide
uagguguaguuggguaaug

SEQ ID NO: 3106769 - RNA, 19 nt, Artificial Sequence
  Description of Artificial Sequence: Synthetic oligonucleotide
ugaggccaucaccauggua

SEQ ID NO: 3106770 - RNA, 19 nt, Artificial Sequence
  Description of Artificial Sequence: Synthetic oligonucleotide
agauagcaggaagcaaaga

SEQ ID NO: 3106771 - RNA, 19 nt, Artificial Sequence
  Description of Artificial Sequence: Synthetic oligonucleotide
auagggcucgauggugguc

SEQ ID NO: 3106772 - RNA, 19 nt, Artificial Sequence
  Description of Artificial Sequence: Synthetic oligonucleotide
ucgcugcccaguucggaac

SEQ ID NO: 3106773 - RNA, 19 nt, Artificial Sequence
  Description of Artificial Sequence: Synthetic oligonucleotide
cacaaccccggcccagccg

SEQ ID NO: 3106774 - RNA, 19 nt, Artificial Sequence
  Description of Artificial Sequence: Synthetic oligonucleotide
caguucggaacacucucca

SEQ ID NO: 3106775 - RNA, 19 nt, Artificial Sequence
  Description of Artificial Sequence: Synthetic oligonucleotide
caggcccucugcccgaggc

SEQ ID NO: 3106776 - RNA, 19 nt, Artificial Sequence
  Description of Artificial Sequence: Synthetic oligonucleotide
gcaaaucaucuucccauuc

SEQ ID NO: 3106777 - RNA, 19 nt, Artificial Sequence
  Description of Artificial Sequence: Synthetic oligonucleotide
ccgaggcaaaucaucuucc

SEQ ID NO: 3106778 - RNA, 19 nt, Artificial Sequence
  Description of Artificial Sequence: Synthetic oligonucleotide
ucaccaugguaaccuccau

SEQ ID NO: 3106779 - RNA, 19 nt, Artificial Sequence
  Description of Artificial Sequence: Synthetic oligonucleotide
ugguaaccuccaugagaca

SEQ ID NO: 3106780 - RNA, 19 nt, Artificial Sequence
  Description of Artificial Sequence: Synthetic oligonucleotide
gagacagcacucucuuaua

SEQ ID NO: 3106781 - RNA, 19 nt, Artificial Sequence
  Description of Artificial Sequence: Synthetic oligonucleotide
ccaguucggaacacucucc

SEQ ID NO: 3106782 - RNA, 19 nt, Artificial Sequence
  Description of Artificial Sequence: Synthetic oligonucleotide
aucccacacacaaccccgg

SEQ ID NO: 3106783 - RNA, 19 nt, Artificial Sequence
  Description of Artificial Sequence: Synthetic oligonucleotide
gaccguccucuccagccac

SEQ ID NO: 3106784 - RNA, 19 nt, Artificial Sequence
  Description of Artificial Sequence: Synthetic oligonucleotide
gguguaguuggguaaugcu

SEQ ID NO: 3106785 - RNA, 19 nt, Artificial Sequence
  Description of Artificial Sequence: Synthetic oligonucleotide
gucauguccacucgcugcu

SEQ ID NO: 3106786 - RNA, 19 nt, Artificial Sequence
  Description of Artificial Sequence: Synthetic oligonucleotide
cccgaggcaaaucaucuuc

SEQ ID NO: 3106787 - RNA, 19 nt, Artificial Sequence
  Description of Artificial Sequence: Synthetic oligonucleotide
uugaggccaucaccauggu

SEQ ID NO: 3106788 - RNA, 19 nt, Artificial Sequence
  Description of Artificial Sequence: Synthetic oligonucleotide
cucucgcugcccaguucgg

SEQ ID NO: 3106789 - RNA, 19 nt, Artificial Sequence
  Description of Artificial Sequence: Synthetic oligonucleotide
aaccuccaugagacagcac

SEQ ID NO: 3106790 - RNA, 19 nt, Artificial Sequence
  Description of Artificial Sequence: Synthetic oligonucleotide
ucgcugcucucgcugccca

SEQ ID NO: 3106791 - RNA, 19 nt, Artificial Sequence
  Description of Artificial Sequence: Synthetic oligonucleotide
uccacucgcugcucucgcu

SEQ ID NO: 3106792 - RNA, 19 nt, Artificial Sequence
  Description of Artificial Sequence: Synthetic oligonucleotide
ucgggguagauagcaggaa

SEQ ID NO: 3106793 - RNA, 19 nt, Artificial Sequence
  Description of Artificial Sequence: Synthetic oligonucleotide
uccagcgaugaccguccuc

SEQ ID NO: 3106794 - RNA, 19 nt, Artificial Sequence
  Description of Artificial Sequence: Synthetic oligonucleotide
gacauagguguaguugggu

SEQ ID NO: 3106795 - RNA, 19 nt, Artificial Sequence
  Description of Artificial Sequence: Synthetic oligonucleotide
cacacaaccccggcccagc

SEQ ID NO: 3106796 - RNA, 19 nt, Artificial Sequence
  Description of Artificial Sequence: Synthetic oligonucleotide
ucucgcugcccaguucgga

SEQ ID NO: 3106797 - RNA, 19 nt, Artificial Sequence
  Description of Artificial Sequence: Synthetic oligonucleotide
gcgaugaccguccucucca

SEQ ID NO: 3106798 - RNA, 19 nt, Artificial Sequence
  Description of Artificial Sequence: Synthetic oligonucleotide
cccaguucggaacacucuc

SEQ ID NO: 3106799 - RNA, 19 nt, Artificial Sequence
  Description of Artificial Sequence: Synthetic oligonucleotide
guccacucgcugcucucgc

SEQ ID NO: 3106800 - RNA, 19 nt, Artificial Sequence
  Description of Artificial Sequence: Synthetic oligonucleotide
guaaugcugcuucggggua

SEQ ID NO: 3106801 - RNA, 19 nt, Artificial Sequence
  Description of Artificial Sequence: Synthetic oligonucleotide
acacacaaccccggcccag

SEQ ID NO: 3106802 - RNA, 19 nt, Artificial Sequence
  Description of Artificial Sequence: Synthetic oligonucleotide
ugcugcuucgggguagaua

SEQ ID NO: 3106803 - RNA, 19 nt, Artificial Sequence
  Description of Artificial Sequence: Synthetic oligonucleotide
caugagacagcacucucuu

SEQ ID NO: 3106804 - RNA, 19 nt, Artificial Sequence
  Description of Artificial Sequence: Synthetic oligonucleotide
cugcuucgggguagauagc

SEQ ID NO: 3106805 - RNA, 19 nt, Artificial Sequence
  Description of Artificial Sequence: Synthetic oligonucleotide
cucgcugcccaguucggaa

SEQ ID NO: 3106806 - RNA, 19 nt, Artificial Sequence
  Description of Artificial Sequence: Synthetic oligonucleotide
agccgcucagcugccucac

SEQ ID NO: 3106807 - RNA, 19 nt, Artificial Sequence
  Description of Artificial Sequence: Synthetic oligonucleotide
ggaacacucuccagcgaug

SEQ ID NO: 3106808 - RNA, 19 nt, Artificial Sequence
  Description of Artificial Sequence: Synthetic oligonucleotide
guaguuggguaaugcugcu

SEQ ID NO: 3106809 - RNA, 19 nt, Artificial Sequence
  Description of Artificial Sequence: Synthetic oligonucleotide
gguagauagcaggaagcaa

SEQ ID NO: 3106810 - RNA, 19 nt, Artificial Sequence
  Description of Artificial Sequence: Synthetic oligonucleotide
cgaggcaaaucaucuuccc

SEQ ID NO: 3106811 - RNA, 19 nt, Artificial Sequence
  Description of Artificial Sequence: Synthetic oligonucleotide
ccuccaugagacagcacuc

SEQ ID NO: 3106812 - RNA, 19 nt, Artificial Sequence
  Description of Artificial Sequence: Synthetic oligonucleotide
caaagaggaugacagcauu

SEQ ID NO: 3106813 - RNA, 19 nt, Artificial Sequence
  Description of Artificial Sequence: Synthetic oligonucleotide
uaguuggguaaugcugcuu

SEQ ID NO: 3106814 - RNA, 19 nt, Artificial Sequence
  Description of Artificial Sequence: Synthetic oligonucleotide
cucgcugcucucgcugccc

SEQ ID NO: 3106815 - RNA, 19 nt, Artificial Sequence
  Description of Artificial Sequence: Synthetic oligonucleotide
cccacacacaaccccggcc

SEQ ID NO: 3106816 - RNA, 19 nt, Artificial Sequence
  Description of Artificial Sequence: Synthetic oligonucleotide
aaccccggcccagccgcuc

SEQ ID NO: 3106817 - RNA, 19 nt, Artificial Sequence
  Description of Artificial Sequence: Synthetic oligonucleotide
gaugguggucauguccacu

SEQ ID NO: 3106818 - RNA, 19 nt, Artificial Sequence
  Description of Artificial Sequence: Synthetic oligonucleotide
cgggguagauagcaggaag

SEQ ID NO: 3106819 - RNA, 19 nt, Artificial Sequence
  Description of Artificial Sequence: Synthetic oligonucleotide
agcaggaagcaaagaggau

SEQ ID NO: 3106820 - RNA, 19 nt, Artificial Sequence
  Description of Artificial Sequence: Synthetic oligonucleotide
ccaugguaaccuccaugag

SEQ ID NO: 3106821 - RNA, 19 nt, Artificial Sequence
  Description of Artificial Sequence: Synthetic oligonucleotide
aggcccucugcccgaggca

SEQ ID NO: 3106822 - RNA, 19 nt, Artificial Sequence
  Description of Artificial Sequence: Synthetic oligonucleotide
ucauguccacucgcugcuc

SEQ ID NO: 3106823 - RNA, 19 nt, Artificial Sequence
  Description of Artificial Sequence: Synthetic oligonucleotide
ucccaggcccucugcccga

SEQ ID NO: 3106824 - RNA, 19 nt, Artificial Sequence
  Description of Artificial Sequence: Synthetic oligonucleotide
augacagcauugaggccau

SEQ ID NO: 3106825 - RNA, 19 nt, Artificial Sequence
  Description of Artificial Sequence: Synthetic oligonucleotide
gcuucgggguagauagcag

SEQ ID NO: 3106826 - RNA, 19 nt, Artificial Sequence
  Description of Artificial Sequence: Synthetic oligonucleotide
guuccaugacauaggugua

SEQ ID NO: 3106827 - RNA, 19 nt, Artificial Sequence
  Description of Artificial Sequence: Synthetic oligonucleotide
acucucuuauagggcucga

SEQ ID NO: 3106828 - RNA, 19 nt, Artificial Sequence
  Description of Artificial Sequence: Synthetic oligonucleotide
cauguccacucgcugcucu

SEQ ID NO: 3106829 - RNA, 19 nt, Artificial Sequence
  Description of Artificial Sequence: Synthetic oligonucleotide
guggucauguccacucgcu

SEQ ID NO: 3106830 - RNA, 19 nt, Artificial Sequence
  Description of Artificial Sequence: Synthetic oligonucleotide
acucuccagcgaugaccgu

SEQ ID NO: 3106831 - RNA, 19 nt, Artificial Sequence
  Description of Artificial Sequence: Synthetic oligonucleotide
ccacucgcugcucucgcug

SEQ ID NO: 3106832 - RNA, 19 nt, Artificial Sequence
  Description of Artificial Sequence: Synthetic oligonucleotide
acuggcucccaggcccucu

SEQ ID NO: 3106833 - RNA, 19 nt, Artificial Sequence
  Description of Artificial Sequence: Synthetic oligonucleotide
ccgcucagcugccucacug

SEQ ID NO: 3106834 - RNA, 19 nt, Artificial Sequence
  Description of Artificial Sequence: Synthetic oligonucleotide
ccaucaccaugguaaccuc

SEQ ID NO: 3106835 - RNA, 19 nt, Artificial Sequence
  Description of Artificial Sequence: Synthetic oligonucleotide
cagccgcucagcugccuca

SEQ ID NO: 3106836 - RNA, 19 nt, Artificial Sequence
  Description of Artificial Sequence: Synthetic oligonucleotide
cagcgaugaccguccucuc

SEQ ID NO: 3106837 - RNA, 19 nt, Artificial Sequence
  Description of Artificial Sequence: Synthetic oligonucleotide
gccacaucccacacacaac

SEQ ID NO: 3106838 - RNA, 19 nt, Artificial Sequence
  Description of Artificial Sequence: Synthetic oligonucleotide
accccggcccagccgcuca

SEQ ID NO: 3106839 - RNA, 19 nt, Artificial Sequence
  Description of Artificial Sequence: Synthetic oligonucleotide
ggcaaaucaucuucccauu

SEQ ID NO: 3106840 - RNA, 19 nt, Artificial Sequence
  Description of Artificial Sequence: Synthetic oligonucleotide
ccagcgaugaccguccucu

SEQ ID NO: 3106841 - RNA, 19 nt, Artificial Sequence
  Description of Artificial Sequence: Synthetic oligonucleotide
ccaugagacagcacucucu

SEQ ID NO: 3106842 - RNA, 19 nt, Artificial Sequence
  Description of Artificial Sequence: Synthetic oligonucleotide
agggcucgaugguggucau

SEQ ID NO: 3106843 - RNA, 19 nt, Artificial Sequence
  Description of Artificial Sequence: Synthetic oligonucleotide
gcacucucuuauagggcuc

SEQ ID NO: 3106844 - RNA, 19 nt, Artificial Sequence
  Description of Artificial Sequence: Synthetic oligonucleotide
accguccucuccagccaca

SEQ ID NO: 3106845 - RNA, 19 nt, Artificial Sequence
  Description of Artificial Sequence: Synthetic oligonucleotide
cagccacaucccacacaca

SEQ ID NO: 3106846 - RNA, 19 nt, Artificial Sequence
  Description of Artificial Sequence: Synthetic oligonucleotide
cgaugaccguccucuccag

SEQ ID NO: 3106847 - RNA, 19 nt, Artificial Sequence
  Description of Artificial Sequence: Synthetic oligonucleotide
gcucgaugguggucauguc

SEQ ID NO: 3106848 - RNA, 19 nt, Artificial Sequence
  Description of Artificial Sequence: Synthetic oligonucleotide
ugacagcauugaggccauc

SEQ ID NO: 3106849 - RNA, 19 nt, Artificial Sequence
  Description of Artificial Sequence: Synthetic oligonucleotide
cucucuuauagggcucgau

SEQ ID NO: 3106850 - RNA, 19 nt, Artificial Sequence
  Description of Artificial Sequence: Synthetic oligonucleotide
cgaugguggucauguccac

SEQ ID NO: 3106851 - RNA, 19 nt, Artificial Sequence
  Description of Artificial Sequence: Synthetic oligonucleotide
ggcccucugcccgaggcaa

SEQ ID NO: 3106852 - RNA, 19 nt, Artificial Sequence
  Description of Artificial Sequence: Synthetic oligonucleotide
gcugcccaguucggaacac

SEQ ID NO: 3106853 - RNA, 19 nt, Artificial Sequence
  Description of Artificial Sequence: Synthetic oligonucleotide
gcauugaggccaucaccau

SEQ ID NO: 3106854 - RNA, 19 nt, Artificial Sequence
  Description of Artificial Sequence: Synthetic oligonucleotide
augcugcuucgggguagau

SEQ ID NO: 3106855 - RNA, 19 nt, Artificial Sequence
  Description of Artificial Sequence: Synthetic oligonucleotide
cacuggcucccaggcccuc

SEQ ID NO: 3106856 - RNA, 19 nt, Artificial Sequence
  Description of Artificial Sequence: Synthetic oligonucleotide
cugcccaguucggaacacu

SEQ ID NO: 3106857 - RNA, 19 nt, Artificial Sequence
  Description of Artificial Sequence: Synthetic oligonucleotide
cggaacacucuccagcgau

SEQ ID NO: 3106858 - RNA, 19 nt, Artificial Sequence
  Description of Artificial Sequence: Synthetic oligonucleotide
gggcucgaugguggucaug

SEQ ID NO: 3106859 - RNA, 19 nt, Artificial Sequence
  Description of Artificial Sequence: Synthetic oligonucleotide
gcccaguucggaacacucu

SEQ ID NO: 3106860 - RNA, 19 nt, Artificial Sequence
  Description of Artificial Sequence: Synthetic oligonucleotide
gcugcucucgcugcccagu

SEQ ID NO: 3106861 - RNA, 19 nt, Artificial Sequence
  Description of Artificial Sequence: Synthetic oligonucleotide
gcugccucacuggcuccca

SEQ ID NO: 3106862 - RNA, 19 nt, Artificial Sequence
  Description of Artificial Sequence: Synthetic oligonucleotide
cgcugcccaguucggaaca

SEQ ID NO: 3106863 - RNA, 19 nt, Artificial Sequence
  Description of Artificial Sequence: Synthetic oligonucleotide
cugcucucgcugcccaguu

SEQ ID NO: 3106864 - RNA, 19 nt, Artificial Sequence
  Description of Artificial Sequence: Synthetic oligonucleotide
ccucugcccgaggcaaauc

SEQ ID NO: 3106865 - RNA, 19 nt, Artificial Sequence
  Description of Artificial Sequence: Synthetic oligonucleotide
ccaugacauagguguaguu

SEQ ID NO: 3106866 - RNA, 19 nt, Artificial Sequence
  Description of Artificial Sequence: Synthetic oligonucleotide
cgcugcucucgcugcccag

SEQ ID NO: 3106867 - RNA, 19 nt, Artificial Sequence
  Description of Artificial Sequence: Synthetic oligonucleotide
cggcccagccgcucagcug

SEQ ID NO: 3106868 - RNA, 19 nt, Artificial Sequence
  Description of Artificial Sequence: Synthetic oligonucleotide
cuccagcgaugaccguccu

SEQ ID NO: 3106869 - RNA, 19 nt, Artificial Sequence
  Description of Artificial Sequence: Synthetic oligonucleotide
gcccgaggcaaaucaucuu

SEQ ID NO: 3106870 - RNA, 19 nt, Artificial Sequence
  Description of Artificial Sequence: Synthetic oligonucleotide
cguccucuccagccacauc

SEQ ID NO: 3106871 - RNA, 19 nt, Artificial Sequence
  Description of Artificial Sequence: Synthetic oligonucleotide
caaccccggcccagccgcu

SEQ ID NO: 3106872 - RNA, 19 nt, Artificial Sequence
  Description of Artificial Sequence: Synthetic oligonucleotide
cccggcccagccgcucagc

SEQ ID NO: 3106873 - RNA, 19 nt, Artificial Sequence
  Description of Artificial Sequence: Synthetic oligonucleotide
gccgcucagcugccucacu

SEQ ID NO: 3106874 - RNA, 19 nt, Artificial Sequence
  Description of Artificial Sequence: Synthetic oligonucleotide
gcccucugcccgaggcaaa

SEQ ID NO: 3106875 - RNA, 19 nt, Artificial Sequence
  Description of Artificial Sequence: Synthetic oligonucleotide
ccggcccagccgcucagcu

SEQ ID NO: 3106876 - RNA, 19 nt, Artificial Sequence
  Description of Artificial Sequence: Synthetic oligonucleotide
cccucugcccgaggcaaau

SEQ ID NO: 3106877 - RNA, 19 nt, Artificial Sequence
  Description of Artificial Sequence: Synthetic oligonucleotide
uuaguguugaugcagaugg

SEQ ID NO: 3106878 - RNA, 19 nt, Artificial Sequence
  Description of Artificial Sequence: Synthetic oligonucleotide
uuuuguuacauucauuugc

SEQ ID NO: 3106879 - RNA, 19 nt, Artificial Sequence
  Description of Artificial Sequence: Synthetic oligonucleotide
agcuguuuaguguugaugc

SEQ ID NO: 3106880 - RNA, 19 nt, Artificial Sequence
  Description of Artificial Sequence: Synthetic oligonucleotide
ucauucuagauucaucugg

SEQ ID NO: 3106881 - RNA, 19 nt, Artificial Sequence
  Description of Artificial Sequence: Synthetic oligonucleotide
agaguacuggguuaguucc

SEQ ID NO: 3106882 - RNA, 19 nt, Artificial Sequence
  Description of Artificial Sequence: Synthetic oligonucleotide
auucauucuagauucaucu

SEQ ID NO: 3106883 - RNA, 19 nt, Artificial Sequence
  Description of Artificial Sequence: Synthetic oligonucleotide
aagaguacuggguuaguuc

SEQ ID NO: 3106884 - RNA, 19 nt, Artificial Sequence
  Description of Artificial Sequence: Synthetic oligonucleotide
ucuagauucaucuggcuug

SEQ ID NO: 3106885 - RNA, 19 nt, Artificial Sequence
  Description of Artificial Sequence: Synthetic oligonucleotide
uagguuucuggucagaaga

SEQ ID NO: 3106886 - RNA, 19 nt, Artificial Sequence
  Description of Artificial Sequence: Synthetic oligonucleotide
acucaauuuagguuucugg

SEQ ID NO: 3106887 - RNA, 19 nt, Artificial Sequence
  Description of Artificial Sequence: Synthetic oligonucleotide
ucaucuggcuugcaggugg

SEQ ID NO: 3106888 - RNA, 19 nt, Artificial Sequence
  Description of Artificial Sequence: Synthetic oligonucleotide
agaguguucacuugcgagg

SEQ ID NO: 3106889 - RNA, 19 nt, Artificial Sequence
  Description of Artificial Sequence: Synthetic oligonucleotide
aauucauucuagauucauc

SEQ ID NO: 3106890 - RNA, 19 nt, Artificial Sequence
  Description of Artificial Sequence: Synthetic oligonucleotide
agucacucaauuuagguuu

SEQ ID NO: 3106891 - RNA, 19 nt, Artificial Sequence
  Description of Artificial Sequence: Synthetic oligonucleotide
cauucuagauucaucuggc

SEQ ID NO: 3106892 - RNA, 19 nt, Artificial Sequence
  Description of Artificial Sequence: Synthetic oligonucleotide
aauuuagguuucuggucag

SEQ ID NO: 3106893 - RNA, 19 nt, Artificial Sequence
  Description of Artificial Sequence: Synthetic oligonucleotide
gagaguguucacuugcgag

SEQ ID NO: 3106894 - RNA, 19 nt, Artificial Sequence
  Description of Artificial Sequence: Synthetic oligonucleotide
ugcagauggggccaaaaga

SEQ ID NO: 3106895 - RNA, 19 nt, Artificial Sequence
  Description of Artificial Sequence: Synthetic oligonucleotide
uguuuaguguugaugcaga

SEQ ID NO: 3106896 - RNA, 19 nt, Artificial Sequence
  Description of Artificial Sequence: Synthetic oligonucleotide
ucaauuuagguuucugguc

SEQ ID NO: 3106897 - RNA, 19 nt, Artificial Sequence
  Description of Artificial Sequence: Synthetic oligonucleotide
ugagucacucaauuuaggu

SEQ ID NO: 3106898 - RNA, 19 nt, Artificial Sequence
  Description of Artificial Sequence: Synthetic oligonucleotide
uguguuccugcccuacugg

SEQ ID NO: 3106899 - RNA, 19 nt, Artificial Sequence
  Description of Artificial Sequence: Synthetic oligonucleotide
uuucuggucagaagaggag

SEQ ID NO: 3106900 - RNA, 19 nt, Artificial Sequence
  Description of Artificial Sequence: Synthetic oligonucleotide
ugugccuuguugaugggca

SEQ ID NO: 3106901 - RNA, 19 nt, Artificial Sequence
  Description of Artificial Sequence: Synthetic oligonucleotide
uccugagucacucaauuua

SEQ ID NO: 3106902 - RNA, 19 nt, Artificial Sequence
  Description of Artificial Sequence: Synthetic oligonucleotide
aguguugaugcagaugggg

SEQ ID NO: 3106903 - RNA, 19 nt, Artificial Sequence
  Description of Artificial Sequence: Synthetic oligonucleotide
uugcaaagggcaaucuuca

SEQ ID NO: 3106904 - RNA, 19 nt, Artificial Sequence
  Description of Artificial Sequence: Synthetic oligonucleotide
uggguuaguucccugugcc

SEQ ID NO: 3106905 - RNA, 19 nt, Artificial Sequence
  Description of Artificial Sequence: Synthetic oligonucleotide
gaggcagggaguuugcagc

SEQ ID NO: 3106906 - RNA, 19 nt, Artificial Sequence
  Description of Artificial Sequence: Synthetic oligonucleotide
uuugcagcuguuuaguguu

SEQ ID NO: 3106907 - RNA, 19 nt, Artificial Sequence
  Description of Artificial Sequence: Synthetic oligonucleotide
uuagguuucuggucagaag

SEQ ID NO: 3106908 - RNA, 19 nt, Artificial Sequence
  Description of Artificial Sequence: Synthetic oligonucleotide
caaagggcaaucuucagga

SEQ ID NO: 3106909 - RNA, 19 nt, Artificial Sequence
  Description of Artificial Sequence: Synthetic oligonucleotide
uuguugaugggcaggacuc

SEQ ID NO: 3106910 - RNA, 19 nt, Artificial Sequence
  Description of Artificial Sequence: Synthetic oligonucleotide
agauucaucuggcuugcag

SEQ ID NO: 3106911 - RNA, 19 nt, Artificial Sequence
  Description of Artificial Sequence: Synthetic oligonucleotide
caauuuagguuucugguca

SEQ ID NO: 3106912 - RNA, 19 nt, Artificial Sequence
  Description of Artificial Sequence: Synthetic oligonucleotide
uuuaguguugaugcagaug

SEQ ID NO: 3106913 - RNA, 19 nt, Artificial Sequence
  Description of Artificial Sequence: Synthetic oligonucleotide
uucauucuagauucaucug

SEQ ID NO: 3106914 - RNA, 19 nt, Artificial Sequence
  Description of Artificial Sequence: Synthetic oligonucleotide
uucuagauucaucuggcuu

SEQ ID NO: 3106915 - RNA, 19 nt, Artificial Sequence
  Description of Artificial Sequence: Synthetic oligonucleotide
caaaagaguacuggguuag

SEQ ID NO: 3106916 - RNA, 19 nt, Artificial Sequence
  Description of Artificial Sequence: Synthetic oligonucleotide
gaguguucacuugcgaggg

SEQ ID NO: 3106917 - RNA, 19 nt, Artificial Sequence
  Description of Artificial Sequence: Synthetic oligonucleotide
aaauucauucuagauucau

SEQ ID NO: 3106918 - RNA, 19 nt, Artificial Sequence
  Description of Artificial Sequence: Synthetic oligonucleotide
ugcaggugggugcaguugc

SEQ ID NO: 3106919 - RNA, 19 nt, Artificial Sequence
  Description of Artificial Sequence: Synthetic oligonucleotide
aaagggcaaucuucaggag

SEQ ID NO: 3106920 - RNA, 19 nt, Artificial Sequence
  Description of Artificial Sequence: Synthetic oligonucleotide
uguuccucuguguuccugc

SEQ ID NO: 3106921 - RNA, 19 nt, Artificial Sequence
  Description of Artificial Sequence: Synthetic oligonucleotide
auucaucuggcuugcaggu

SEQ ID NO: 3106922 - RNA, 19 nt, Artificial Sequence
  Description of Artificial Sequence: Synthetic oligonucleotide
uucuggucagaagaggagc

SEQ ID NO: 3106923 - RNA, 19 nt, Artificial Sequence
  Description of Artificial Sequence: Synthetic oligonucleotide
agaggcagggaguuugcag

SEQ ID NO: 3106924 - RNA, 19 nt, Artificial Sequence
  Description of Artificial Sequence: Synthetic oligonucleotide
guugcaaagggcaaucuuc

SEQ ID NO: 3106925 - RNA, 19 nt, Artificial Sequence
  Description of Artificial Sequence: Synthetic oligonucleotide
gcaaagggcaaucuucagg

SEQ ID NO: 3106926 - RNA, 19 nt, Artificial Sequence
  Description of Artificial Sequence: Synthetic oligonucleotide
uggucagaagaggagcagg

SEQ ID NO: 3106927 - RNA, 19 nt, Artificial Sequence
  Description of Artificial Sequence: Synthetic oligonucleotide
ugggugcaguugcaaaggg

SEQ ID NO: 3106928 - RNA, 19 nt, Artificial Sequence
  Description of Artificial Sequence: Synthetic oligonucleotide
caggagaguguucacuugc

SEQ ID NO: 3106929 - RNA, 19 nt, Artificial Sequence
  Description of Artificial Sequence: Synthetic oligonucleotide
cugagucacucaauuuagg

SEQ ID NO: 3106930 - RNA, 19 nt, Artificial Sequence
  Description of Artificial Sequence: Synthetic oligonucleotide
uguuccugcccuacuggcc

SEQ ID NO: 3106931 - RNA, 19 nt, Artificial Sequence
  Description of Artificial Sequence: Synthetic oligonucleotide
cuguuuaguguugaugcag

SEQ ID NO: 3106932 - RNA, 19 nt, Artificial Sequence
  Description of Artificial Sequence: Synthetic oligonucleotide
agggcaaucuucaggagag

SEQ ID NO: 3106933 - RNA, 19 nt, Artificial Sequence
  Description of Artificial Sequence: Synthetic oligonucleotide
uucaggagaguguucacuu

SEQ ID NO: 3106934 - RNA, 19 nt, Artificial Sequence
  Description of Artificial Sequence: Synthetic oligonucleotide
uaguguugaugcagauggg

SEQ ID NO: 3106935 - RNA, 19 nt, Artificial Sequence
  Description of Artificial Sequence: Synthetic oligonucleotide
augcagauggggccaaaag

SEQ ID NO: 3106936 - RNA, 19 nt, Artificial Sequence
  Description of Artificial Sequence: Synthetic oligonucleotide
uuuagguuucuggucagaa

SEQ ID NO: 3106937 - RNA, 19 nt, Artificial Sequence
  Description of Artificial Sequence: Synthetic oligonucleotide
cuggcuugcaggugggugc

SEQ ID NO: 3106938 - RNA, 19 nt, Artificial Sequence
  Description of Artificial Sequence: Synthetic oligonucleotide
aucuucaggagaguguuca

SEQ ID NO: 3106939 - RNA, 19 nt, Artificial Sequence
  Description of Artificial Sequence: Synthetic oligonucleotide
ggaguuugcagcuguuuag

SEQ ID NO: 3106940 - RNA, 19 nt, Artificial Sequence
  Description of Artificial Sequence: Synthetic oligonucleotide
cucaauuuagguuucuggu

SEQ ID NO: 3106941 - RNA, 19 nt, Artificial Sequence
  Description of Artificial Sequence: Synthetic oligonucleotide
ucaggagaguguucacuug

SEQ ID NO: 3106942 - RNA, 19 nt, Artificial Sequence
  Description of Artificial Sequence: Synthetic oligonucleotide
aaaauucauucuagauuca

SEQ ID NO: 3106943 - RNA, 19 nt, Artificial Sequence
  Description of Artificial Sequence: Synthetic oligonucleotide
acuggguuaguucccugug

SEQ ID NO: 3106944 - RNA, 19 nt, Artificial Sequence
  Description of Artificial Sequence: Synthetic oligonucleotide
aaagaguacuggguuaguu

SEQ ID NO: 3106945 - RNA, 19 nt, Artificial Sequence
  Description of Artificial Sequence: Synthetic oligonucleotide
ugcaaagggcaaucuucag

SEQ ID NO: 3106946 - RNA, 19 nt, Artificial Sequence
  Description of Artificial Sequence: Synthetic oligonucleotide
cuacuggccuuccugaguc

SEQ ID NO: 3106947 - RNA, 19 nt, Artificial Sequence
  Description of Artificial Sequence: Synthetic oligonucleotide
ugcccuacuggccuuccug

SEQ ID NO: 3106948 - RNA, 19 nt, Artificial Sequence
  Description of Artificial Sequence: Synthetic oligonucleotide
cuagauucaucuggcuugc

SEQ ID NO: 3106949 - RNA, 19 nt, Artificial Sequence
  Description of Artificial Sequence: Synthetic oligonucleotide
auucuagauucaucuggcu

SEQ ID NO: 3106950 - RNA, 19 nt, Artificial Sequence
  Description of Artificial Sequence: Synthetic oligonucleotide
ggugggugcaguugcaaag

SEQ ID NO: 3106951 - RNA, 19 nt, Artificial Sequence
  Description of Artificial Sequence: Synthetic oligonucleotide
guuucuggucagaagagga

SEQ ID NO: 3106952 - RNA, 19 nt, Artificial Sequence
  Description of Artificial Sequence: Synthetic oligonucleotide
guuaguucccugugccuug

SEQ ID NO: 3106953 - RNA, 19 nt, Artificial Sequence
  Description of Artificial Sequence: Synthetic oligonucleotide
aaucuucaggagaguguuc

SEQ ID NO: 3106954 - RNA, 19 nt, Artificial Sequence
  Description of Artificial Sequence: Synthetic oligonucleotide
guguugaugcagauggggc

SEQ ID NO: 3106955 - RNA, 19 nt, Artificial Sequence
  Description of Artificial Sequence: Synthetic oligonucleotide
gauggggccaaaagaguac

SEQ ID NO: 3106956 - RNA, 19 nt, Artificial Sequence
  Description of Artificial Sequence: Synthetic oligonucleotide
ucuggcuugcaggugggug

SEQ ID NO: 3106957 - RNA, 19 nt, Artificial Sequence
  Description of Artificial Sequence: Synthetic oligonucleotide
guucccugugccuuguuga

SEQ ID NO: 3106958 - RNA, 19 nt, Artificial Sequence
  Description of Artificial Sequence: Synthetic oligonucleotide
augggcaggacuccuggcu

SEQ ID NO: 3106959 - RNA, 19 nt, Artificial Sequence
  Description of Artificial Sequence: Synthetic oligonucleotide
aguugcaaagggcaaucuu

SEQ ID NO: 3106960 - RNA, 19 nt, Artificial Sequence
  Description of Artificial Sequence: Synthetic oligonucleotide
gugggugcaguugcaaagg

SEQ ID NO: 3106961 - RNA, 19 nt, Artificial Sequence
  Description of Artificial Sequence: Synthetic oligonucleotide
cuggguuaguucccugugc

SEQ ID NO: 3106962 - RNA, 19 nt, Artificial Sequence
  Description of Artificial Sequence: Synthetic oligonucleotide
cccugugccuuguugaugg

SEQ ID NO: 3106963 - RNA, 19 nt, Artificial Sequence
  Description of Artificial Sequence: Synthetic oligonucleotide
aguguucacuugcgagggg

SEQ ID NO: 3106964 - RNA, 19 nt, Artificial Sequence
  Description of Artificial Sequence: Synthetic oligonucleotide
ugccuuguugaugggcagg

SEQ ID NO: 3106965 - RNA, 19 nt, Artificial Sequence
  Description of Artificial Sequence: Synthetic oligonucleotide
aaaagaguacuggguuagu

SEQ ID NO: 3106966 - RNA, 19 nt, Artificial Sequence
  Description of Artificial Sequence: Synthetic oligonucleotide
ccugagucacucaauuuag

SEQ ID NO: 3106967 - RNA, 19 nt, Artificial Sequence
  Description of Artificial Sequence: Synthetic oligonucleotide
caggacuccuggcuguucc

SEQ ID NO: 3106968 - RNA, 19 nt, Artificial Sequence
  Description of Artificial Sequence: Synthetic oligonucleotide
ggugcaguugcaaagggca

SEQ ID NO: 3106969 - RNA, 19 nt, Artificial Sequence
  Description of Artificial Sequence: Synthetic oligonucleotide
uguugaugggcaggacucc

SEQ ID NO: 3106970 - RNA, 19 nt, Artificial Sequence
  Description of Artificial Sequence: Synthetic oligonucleotide
acuggccuuccugagucac

SEQ ID NO: 3106971 - RNA, 19 nt, Artificial Sequence
  Description of Artificial Sequence: Synthetic oligonucleotide
uuccucuguguuccugccc

SEQ ID NO: 3106972 - RNA, 19 nt, Artificial Sequence
  Description of Artificial Sequence: Synthetic oligonucleotide
gguuucuggucagaagagg

SEQ ID NO: 3106973 - RNA, 19 nt, Artificial Sequence
  Description of Artificial Sequence: Synthetic oligonucleotide
ucuucaggagaguguucac

SEQ ID NO: 3106974 - RNA, 19 nt, Artificial Sequence
  Description of Artificial Sequence: Synthetic oligonucleotide
guuugcagcuguuuagugu

SEQ ID NO: 3106975 - RNA, 19 nt, Artificial Sequence
  Description of Artificial Sequence: Synthetic oligonucleotide
aguacuggguuaguucccu

SEQ ID NO: 3106976 - RNA, 19 nt, Artificial Sequence
  Description of Artificial Sequence: Synthetic oligonucleotide
guguuccugcccuacuggc

SEQ ID NO: 3106977 - RNA, 19 nt, Artificial Sequence
  Description of Artificial Sequence: Synthetic oligonucleotide
agguuucuggucagaagag

SEQ ID NO: 3106978 - RNA, 19 nt, Artificial Sequence
  Description of Artificial Sequence: Synthetic oligonucleotide
guugaugcagauggggcca

SEQ ID NO: 3106979 - RNA, 19 nt, Artificial Sequence
  Description of Artificial Sequence: Synthetic oligonucleotide
ugcagcuguuuaguguuga

SEQ ID NO: 3106980 - RNA, 19 nt, Artificial Sequence
  Description of Artificial Sequence: Synthetic oligonucleotide
guuccucuguguuccugcc

SEQ ID NO: 3106981 - RNA, 19 nt, Artificial Sequence
  Description of Artificial Sequence: Synthetic oligonucleotide
gagucacucaauuuagguu

SEQ ID NO: 3106982 - RNA, 19 nt, Artificial Sequence
  Description of Artificial Sequence: Synthetic oligonucleotide
uugcagcuguuuaguguug

SEQ ID NO: 3106983 - RNA, 19 nt, Artificial Sequence
  Description of Artificial Sequence: Synthetic oligonucleotide
ugcaguugcaaagggcaau

SEQ ID NO: 3106984 - RNA, 19 nt, Artificial Sequence
  Description of Artificial Sequence: Synthetic oligonucleotide
cagcuguuuaguguugaug

SEQ ID NO: 3106985 - RNA, 19 nt, Artificial Sequence
  Description of Artificial Sequence: Synthetic oligonucleotide
caucuggcuugcagguggg

SEQ ID NO: 3106986 - RNA, 19 nt, Artificial Sequence
  Description of Artificial Sequence: Synthetic oligonucleotide
cuuguugaugggcaggacu

SEQ ID NO: 3106987 - RNA, 19 nt, Artificial Sequence
  Description of Artificial Sequence: Synthetic oligonucleotide
gaguacuggguuaguuccc

SEQ ID NO: 3106988 - RNA, 19 nt, Artificial Sequence
  Description of Artificial Sequence: Synthetic oligonucleotide
uuccugagucacucaauuu

SEQ ID NO: 3106989 - RNA, 19 nt, Artificial Sequence
  Description of Artificial Sequence: Synthetic oligonucleotide
uucaucuggcuugcaggug

SEQ ID NO: 3106990 - RNA, 19 nt, Artificial Sequence
  Description of Artificial Sequence: Synthetic oligonucleotide
agauggggccaaaagagua

SEQ ID NO: 3106991 - RNA, 19 nt, Artificial Sequence
  Description of Artificial Sequence: Synthetic oligonucleotide
ggcaaucuucaggagagug

SEQ ID NO: 3106992 - RNA, 19 nt, Artificial Sequence
  Description of Artificial Sequence: Synthetic oligonucleotide
ggcuguuccucuguguucc

SEQ ID NO: 3106993 - RNA, 19 nt, Artificial Sequence
  Description of Artificial Sequence: Synthetic oligonucleotide
cacucaauuuagguuucug

SEQ ID NO: 3106994 - RNA, 19 nt, Artificial Sequence
  Description of Artificial Sequence: Synthetic oligonucleotide
aggcagggaguuugcagcu

SEQ ID NO: 3106995 - RNA, 19 nt, Artificial Sequence
  Description of Artificial Sequence: Synthetic oligonucleotide
uugcaggugggugcaguug

SEQ ID NO: 3106996 - RNA, 19 nt, Artificial Sequence
  Description of Artificial Sequence: Synthetic oligonucleotide
auggggccaaaagaguacu

SEQ ID NO: 3106997 - RNA, 19 nt, Artificial Sequence
  Description of Artificial Sequence: Synthetic oligonucleotide
uucccugugccuuguugau

SEQ ID NO: 3106998 - RNA, 19 nt, Artificial Sequence
  Description of Artificial Sequence: Synthetic oligonucleotide
cugugccuuguugaugggc

SEQ ID NO: 3106999 - RNA, 19 nt, Artificial Sequence
  Description of Artificial Sequence: Synthetic oligonucleotide
auuuagguuucuggucaga

SEQ ID NO: 3107000 - RNA, 19 nt, Artificial Sequence
  Description of Artificial Sequence: Synthetic oligonucleotide
gugccuuguugaugggcag

SEQ ID NO: 3107001 - RNA, 19 nt, Artificial Sequence
  Description of Artificial Sequence: Synthetic oligonucleotide
uggcuguuccucuguguuc

SEQ ID NO: 3107002 - RNA, 19 nt, Artificial Sequence
  Description of Artificial Sequence: Synthetic oligonucleotide
uuaguucccugugccuugu

SEQ ID NO: 3107003 - RNA, 19 nt, Artificial Sequence
  Description of Artificial Sequence: Synthetic oligonucleotide
aggugggugcaguugcaaa

SEQ ID NO: 3107004 - RNA, 19 nt, Artificial Sequence
  Description of Artificial Sequence: Synthetic oligonucleotide
ucacucaauuuagguuucu

SEQ ID NO: 3107005 - RNA, 19 nt, Artificial Sequence
  Description of Artificial Sequence: Synthetic oligonucleotide
guuccugcccuacuggccu

SEQ ID NO: 3107006 - RNA, 19 nt, Artificial Sequence
  Description of Artificial Sequence: Synthetic oligonucleotide
gggagaggcagggaguuug

SEQ ID NO: 3107007 - RNA, 19 nt, Artificial Sequence
  Description of Artificial Sequence: Synthetic oligonucleotide
gaguuugcagcuguuuagu

SEQ ID NO: 3107008 - RNA, 19 nt, Artificial Sequence
  Description of Artificial Sequence: Synthetic oligonucleotide
ucccugugccuuguugaug

SEQ ID NO: 3107009 - RNA, 19 nt, Artificial Sequence
  Description of Artificial Sequence: Synthetic oligonucleotide
guacuggguuaguucccug

SEQ ID NO: 3107010 - RNA, 19 nt, Artificial Sequence
  Description of Artificial Sequence: Synthetic oligonucleotide
gaugcagauggggccaaaa

SEQ ID NO: 3107011 - RNA, 19 nt, Artificial Sequence
  Description of Artificial Sequence: Synthetic oligonucleotide
gucacucaauuuagguuuc

SEQ ID NO: 3107012 - RNA, 19 nt, Artificial Sequence
  Description of Artificial Sequence: Synthetic oligonucleotide
gcuguuuaguguugaugca

SEQ ID NO: 3107013 - RNA, 19 nt, Artificial Sequence
  Description of Artificial Sequence: Synthetic oligonucleotide
aggacuccuggcuguuccu

SEQ ID NO: 3107014 - RNA, 19 nt, Artificial Sequence
  Description of Artificial Sequence: Synthetic oligonucleotide
uacuggccuuccugaguca

SEQ ID NO: 3107015 - RNA, 19 nt, Artificial Sequence
  Description of Artificial Sequence: Synthetic oligonucleotide
uggcuugcaggugggugca

SEQ ID NO: 3107016 - RNA, 19 nt, Artificial Sequence
  Description of Artificial Sequence: Synthetic oligonucleotide
ggagaguguucacuugcga

SEQ ID NO: 3107017 - RNA, 19 nt, Artificial Sequence
  Description of Artificial Sequence: Synthetic oligonucleotide
gggaguuugcagcuguuua

SEQ ID NO: 3107018 - RNA, 19 nt, Artificial Sequence
  Description of Artificial Sequence: Synthetic oligonucleotide
cucuguguuccugcccuac

SEQ ID NO: 3107019 - RNA, 19 nt, Artificial Sequence
  Description of Artificial Sequence: Synthetic oligonucleotide
cuuccugagucacucaauu

SEQ ID NO: 3107020 - RNA, 19 nt, Artificial Sequence
  Description of Artificial Sequence: Synthetic oligonucleotide
guuuaguguugaugcagau

SEQ ID NO: 3107021 - RNA, 19 nt, Artificial Sequence
  Description of Artificial Sequence: Synthetic oligonucleotide
gccaaaagaguacuggguu

SEQ ID NO: 3107022 - RNA, 19 nt, Artificial Sequence
  Description of Artificial Sequence: Synthetic oligonucleotide
gggugcaguugcaaagggc

SEQ ID NO: 3107023 - RNA, 19 nt, Artificial Sequence
  Description of Artificial Sequence: Synthetic oligonucleotide
uagauucaucuggcuugca

SEQ ID NO: 3107024 - RNA, 19 nt, Artificial Sequence
  Description of Artificial Sequence: Synthetic oligonucleotide
cagauggggccaaaagagu

SEQ ID NO: 3107025 - RNA, 19 nt, Artificial Sequence
  Description of Artificial Sequence: Synthetic oligonucleotide
cuucaggagaguguucacu

SEQ ID NO: 3107026 - RNA, 19 nt, Artificial Sequence
  Description of Artificial Sequence: Synthetic oligonucleotide
gcaguugcaaagggcaauc

SEQ ID NO: 3107027 - RNA, 19 nt, Artificial Sequence
  Description of Artificial Sequence: Synthetic oligonucleotide
agggaguuugcagcuguuu

SEQ ID NO: 3107028 - RNA, 19 nt, Artificial Sequence
  Description of Artificial Sequence: Synthetic oligonucleotide
ccaaaagaguacuggguua

SEQ ID NO: 3107029 - RNA, 19 nt, Artificial Sequence
  Description of Artificial Sequence: Synthetic oligonucleotide
cuguuccucuguguuccug

SEQ ID NO: 3107030 - RNA, 19 nt, Artificial Sequence
  Description of Artificial Sequence: Synthetic oligonucleotide
gucagaagaggagcaggcu

SEQ ID NO: 3107031 - RNA, 19 nt, Artificial Sequence
  Description of Artificial Sequence: Synthetic oligonucleotide
cuggcuguuccucuguguu

SEQ ID NO: 3107032 - RNA, 19 nt, Artificial Sequence
  Description of Artificial Sequence: Synthetic oligonucleotide
gcaaucuucaggagagugu

SEQ ID NO: 3107033 - RNA, 19 nt, Artificial Sequence
  Description of Artificial Sequence: Synthetic oligonucleotide
ugaugcagauggggccaaa

SEQ ID NO: 3107034 - RNA, 19 nt, Artificial Sequence
  Description of Artificial Sequence: Synthetic oligonucleotide
gcccuacuggccuuccuga

SEQ ID NO: 3107035 - RNA, 19 nt, Artificial Sequence
  Description of Artificial Sequence: Synthetic oligonucleotide
ggccaaaagaguacugggu

SEQ ID NO: 3107036 - RNA, 19 nt, Artificial Sequence
  Description of Artificial Sequence: Synthetic oligonucleotide
cccuacuggccuuccugag

SEQ ID NO: 3107037 - RNA, 19 nt, Artificial Sequence
  Description of Artificial Sequence: Synthetic oligonucleotide
uaguucccugugccuuguu

SEQ ID NO: 3107038 - RNA, 19 nt, Artificial Sequence
  Description of Artificial Sequence: Synthetic oligonucleotide
gguuaguucccugugccuu

SEQ ID NO: 3107039 - RNA, 19 nt, Artificial Sequence
  Description of Artificial Sequence: Synthetic oligonucleotide
uuccugcccuacuggccuu

SEQ ID NO: 3107040 - RNA, 19 nt, Artificial Sequence
  Description of Artificial Sequence: Synthetic oligonucleotide
ccugugccuuguugauggg

SEQ ID NO: 3107041 - RNA, 19 nt, Artificial Sequence
  Description of Artificial Sequence: Synthetic oligonucleotide
aucuggcuugcaggugggu

SEQ ID NO: 3107042 - RNA, 19 nt, Artificial Sequence
  Description of Artificial Sequence: Synthetic oligonucleotide
uccugcccuacuggccuuc

SEQ ID NO: 3107043 - RNA, 19 nt, Artificial Sequence
  Description of Artificial Sequence: Synthetic oligonucleotide
cuugcaggugggugcaguu

SEQ ID NO: 3107044 - RNA, 19 nt, Artificial Sequence
  Description of Artificial Sequence: Synthetic oligonucleotide
ggcagggaguuugcagcug

SEQ ID NO: 3107045 - RNA, 19 nt, Artificial Sequence
  Description of Artificial Sequence: Synthetic oligonucleotide
ggguuaguucccugugccu

SEQ ID NO: 3107046 - RNA, 19 nt, Artificial Sequence
  Description of Artificial Sequence: Synthetic oligonucleotide
caggugggugcaguugcaa

SEQ ID NO: 3107047 - RNA, 19 nt, Artificial Sequence
  Description of Artificial Sequence: Synthetic oligonucleotide
caguugcaaagggcaaucu

SEQ ID NO: 3107048 - RNA, 19 nt, Artificial Sequence
  Description of Artificial Sequence: Synthetic oligonucleotide
cuggccuuccugagucacu

SEQ ID NO: 3107049 - RNA, 19 nt, Artificial Sequence
  Description of Artificial Sequence: Synthetic oligonucleotide
ccuuguugaugggcaggac

SEQ ID NO: 3107050 - RNA, 19 nt, Artificial Sequence
  Description of Artificial Sequence: Synthetic oligonucleotide
ggccuuccugagucacuca

SEQ ID NO: 3107051 - RNA, 19 nt, Artificial Sequence
  Description of Artificial Sequence: Synthetic oligonucleotide
ccuacuggccuuccugagu

SEQ ID NO: 3107052 - RNA, 19 nt, Artificial Sequence
  Description of Artificial Sequence: Synthetic oligonucleotide
gcagcuguuuaguguugau

SEQ ID NO: 3107053 - RNA, 19 nt, Artificial Sequence
  Description of Artificial Sequence: Synthetic oligonucleotide
gggcaggacuccuggcugu

SEQ ID NO: 3107054 - RNA, 19 nt, Artificial Sequence
  Description of Artificial Sequence: Synthetic oligonucleotide
gcaggugggugcaguugca

SEQ ID NO: 3107055 - RNA, 19 nt, Artificial Sequence
  Description of Artificial Sequence: Synthetic oligonucleotide
ccugcccuacuggccuucc

SEQ ID NO: 3107056 - RNA, 19 nt, Artificial Sequence
  Description of Artificial Sequence: Synthetic oligonucleotide
ggcuugcaggugggugcag

SEQ ID NO: 3107057 - RNA, 19 nt, Artificial Sequence
  Description of Artificial Sequence: Synthetic oligonucleotide
gcuugcaggugggugcagu

SEQ ID NO: 3107058 - RNA, 19 nt, Artificial Sequence
  Description of Artificial Sequence: Synthetic oligonucleotide
gcaggacuccuggcuguuc

SEQ ID NO: 3107059 - RNA, 19 nt, Artificial Sequence
  Description of Artificial Sequence: Synthetic oligonucleotide
cagggaguuugcagcuguu

SEQ ID NO: 3107060 - RNA, 19 nt, Artificial Sequence
  Description of Artificial Sequence: Synthetic oligonucleotide
ccuuccugagucacucaau

SEQ ID NO: 3107061 - RNA, 19 nt, Artificial Sequence
  Description of Artificial Sequence: Synthetic oligonucleotide
cugcccuacuggccuuccu

SEQ ID NO: 3107062 - RNA, 19 nt, Artificial Sequence
  Description of Artificial Sequence: Synthetic oligonucleotide
gcuguuccucuguguuccu

SEQ ID NO: 3107063 - RNA, 19 nt, Artificial Sequence
  Description of Artificial Sequence: Synthetic oligonucleotide
gggcaaucuucaggagagu

SEQ ID NO: 3107064 - RNA, 19 nt, Artificial Sequence
  Description of Artificial Sequence: Synthetic oligonucleotide
ccucuguguuccugcccua

SEQ ID NO: 3107065 - RNA, 19 nt, Artificial Sequence
  Description of Artificial Sequence: Synthetic oligonucleotide
ggcaggacuccuggcuguu

SEQ ID NO: 3107066 - RNA, 19 nt, Artificial Sequence
  Description of Artificial Sequence: Synthetic oligonucleotide
ggggagaggcagggaguuu

SEQ ID NO: 3107067 - RNA, 19 nt, Artificial Sequence
  Description of Artificial Sequence: Synthetic oligonucleotide
uccaguaugauuuugucuc

SEQ ID NO: 3107068 - RNA, 19 nt, Artificial Sequence
  Description of Artificial Sequence: Synthetic oligonucleotide
uaugauuuugucucaagac

SEQ ID NO: 3107069 - RNA, 19 nt, Artificial Sequence
  Description of Artificial Sequence: Synthetic oligonucleotide
ugucucaagacuucgaaga

SEQ ID NO: 3107070 - RNA, 19 nt, Artificial Sequence
  Description of Artificial Sequence: Synthetic oligonucleotide
ugauuuugucucaagacuu

SEQ ID NO: 3107071 - RNA, 19 nt, Artificial Sequence
  Description of Artificial Sequence: Synthetic oligonucleotide
uuugucucaagacuucgaa

SEQ ID NO: 3107072 - RNA, 19 nt, Artificial Sequence
  Description of Artificial Sequence: Synthetic oligonucleotide
aagacuucgaagacuacug

SEQ ID NO: 3107073 - RNA, 19 nt, Artificial Sequence
  Description of Artificial Sequence: Synthetic oligonucleotide
uugucucaagacuucgaag

SEQ ID NO: 3107074 - RNA, 19 nt, Artificial Sequence
  Description of Artificial Sequence: Synthetic oligonucleotide
uuucuccccaguauguugu

SEQ ID NO: 3107075 - RNA, 19 nt, Artificial Sequence
  Description of Artificial Sequence: Synthetic oligonucleotide
aguaugauuuugucucaag

SEQ ID NO: 3107076 - RNA, 19 nt, Artificial Sequence
  Description of Artificial Sequence: Synthetic oligonucleotide
auuuugucucaagacuucg

SEQ ID NO: 3107077 - RNA, 19 nt, Artificial Sequence
  Description of Artificial Sequence: Synthetic oligonucleotide
uuuugucucaagacuucga

SEQ ID NO: 3107078 - RNA, 19 nt, Artificial Sequence
  Description of Artificial Sequence: Synthetic oligonucleotide
ucuccaguaugauuuuguc

SEQ ID NO: 3107079 - RNA, 19 nt, Artificial Sequence
  Description of Artificial Sequence: Synthetic oligonucleotide
ucucaagacuucgaagacu

SEQ ID NO: 3107080 - RNA, 19 nt, Artificial Sequence
  Description of Artificial Sequence: Synthetic oligonucleotide
cucaagacuucgaagacua

SEQ ID NO: 3107081 - RNA, 19 nt, Artificial Sequence
  Description of Artificial Sequence: Synthetic oligonucleotide
gauuuugucucaagacuuc

SEQ ID NO: 3107082 - RNA, 19 nt, Artificial Sequence
  Description of Artificial Sequence: Synthetic oligonucleotide
agacuucgaagacuacugu

SEQ ID NO: 3107083 - RNA, 19 nt, Artificial Sequence
  Description of Artificial Sequence: Synthetic oligonucleotide
gucucaagacuucgaagac

SEQ ID NO: 3107084 - RNA, 19 nt, Artificial Sequence
  Description of Artificial Sequence: Synthetic oligonucleotide
acuucgaagacuacuguua

SEQ ID NO: 3107085 - RNA, 19 nt, Artificial Sequence
  Description of Artificial Sequence: Synthetic oligonucleotide
ucaagacuucgaagacuac

SEQ ID NO: 3107086 - RNA, 19 nt, Artificial Sequence
  Description of Artificial Sequence: Synthetic oligonucleotide
gacuucgaagacuacuguu

SEQ ID NO: 3107087 - RNA, 19 nt, Artificial Sequence
  Description of Artificial Sequence: Synthetic oligonucleotide
cuccaguaugauuuugucu

SEQ ID NO: 3107088 - RNA, 19 nt, Artificial Sequence
  Description of Artificial Sequence: Synthetic oligonucleotide
caagacuucgaagacuacu

SEQ ID NO: 3107089 - RNA, 19 nt, Artificial Sequence
  Description of Artificial Sequence: Synthetic oligonucleotide
cucuccaguaugauuuugu

SEQ ID NO: 3107090 - RNA, 19 nt, Artificial Sequence
  Description of Artificial Sequence: Synthetic oligonucleotide
uucuccccaguauguuguu

SEQ ID NO: 3107091 - RNA, 19 nt, Artificial Sequence
  Description of Artificial Sequence: Synthetic oligonucleotide
caguaugauuuugucucaa

SEQ ID NO: 3107092 - RNA, 19 nt, Artificial Sequence
  Description of Artificial Sequence: Synthetic oligonucleotide
ccaguaugauuuugucuca

SEQ ID NO: 3107093 - RNA, 19 nt, Artificial Sequence
  Description of Artificial Sequence: Synthetic oligonucleotide
auguagaugagauaaagcc

SEQ ID NO: 3107094 - RNA, 19 nt, Artificial Sequence
  Description of Artificial Sequence: Synthetic oligonucleotide
aauugaguuguucuucacc

SEQ ID NO: 3107095 - RNA, 19 nt, Artificial Sequence
  Description of Artificial Sequence: Synthetic oligonucleotide
agagaugggacuucgaccc

SEQ ID NO: 3107096 - RNA, 19 nt, Artificial Sequence
  Description of Artificial Sequence: Synthetic oligonucleotide
uuguucuucaccuccaugg

SEQ ID NO: 3107097 - RNA, 19 nt, Artificial Sequence
  Description of Artificial Sequence: Synthetic oligonucleotide
aauagucucccauucucac

SEQ ID NO: 3107098 - RNA, 19 nt, Artificial Sequence
  Description of Artificial Sequence: Synthetic oligonucleotide
uguagaugagauaaagccc

SEQ ID NO: 3107099 - RNA, 19 nt, Artificial Sequence
  Description of Artificial Sequence: Synthetic oligonucleotide
ugagauaaagcccaucaca

SEQ ID NO: 3107100 - RNA, 19 nt, Artificial Sequence
  Description of Artificial Sequence: Synthetic oligonucleotide
accauagugaaguccaccc

SEQ ID NO: 3107101 - RNA, 19 nt, Artificial Sequence
  Description of Artificial Sequence: Synthetic oligonucleotide
aaaggagcccuucauguag

SEQ ID NO: 3107102 - RNA, 19 nt, Artificial Sequence
  Description of Artificial Sequence: Synthetic oligonucleotide
augaagguugaucuugacc

SEQ ID NO: 3107103 - RNA, 19 nt, Artificial Sequence
  Description of Artificial Sequence: Synthetic oligonucleotide
uugaccauuguucagcaug

SEQ ID NO: 3107104 - RNA, 19 nt, Artificial Sequence
  Description of Artificial Sequence: Synthetic oligonucleotide
auagagaugggacuucgac

SEQ ID NO: 3107105 - RNA, 19 nt, Artificial Sequence
  Description of Artificial Sequence: Synthetic oligonucleotide
caugguuugauacucauuc

SEQ ID NO: 3107106 - RNA, 19 nt, Artificial Sequence
  Description of Artificial Sequence: Synthetic oligonucleotide
agaauagucucccauucuc

SEQ ID NO: 3107107 - RNA, 19 nt, Artificial Sequence
  Description of Artificial Sequence: Synthetic oligonucleotide
uuugauacucauuccuggg

SEQ ID NO: 3107108 - RNA, 19 nt, Artificial Sequence
  Description of Artificial Sequence: Synthetic oligonucleotide
gaugcuucaccggagaagg

SEQ ID NO: 3107109 - RNA, 19 nt, Artificial Sequence
  Description of Artificial Sequence: Synthetic oligonucleotide
gaugagauaaagcccauca

SEQ ID NO: 3107110 - RNA, 19 nt, Artificial Sequence
  Description of Artificial Sequence: Synthetic oligonucleotide
auugaguuguucuucaccu

SEQ ID NO: 3107111 - RNA, 19 nt, Artificial Sequence
  Description of Artificial Sequence: Synthetic oligonucleotide
ugaccauuguucagcaugg

SEQ ID NO: 3107112 - RNA, 19 nt, Artificial Sequence
  Description of Artificial Sequence: Synthetic oligonucleotide
ugaguuguucuucaccucc

SEQ ID NO: 3107113 - RNA, 19 nt, Artificial Sequence
  Description of Artificial Sequence: Synthetic oligonucleotide
auuggaggaugcuucaccg

SEQ ID NO: 3107114 - RNA, 19 nt, Artificial Sequence
  Description of Artificial Sequence: Synthetic oligonucleotide
guuugauacucauuccugg

SEQ ID NO: 3107115 - RNA, 19 nt, Artificial Sequence
  Description of Artificial Sequence: Synthetic oligonucleotide
ucagcaugggcauagagau

SEQ ID NO: 3107116 - RNA, 19 nt, Artificial Sequence
  Description of Artificial Sequence: Synthetic oligonucleotide
gagauaaagcccaucacag

SEQ ID NO: 3107117 - RNA, 19 nt, Artificial Sequence
  Description of Artificial Sequence: Synthetic oligonucleotide
gaaaugaagguugaucuug

SEQ ID NO: 3107118 - RNA, 19 nt, Artificial Sequence
  Description of Artificial Sequence: Synthetic oligonucleotide
gagacuuuggauuggagga

SEQ ID NO: 3107119 - RNA, 19 nt, Artificial Sequence
  Description of Artificial Sequence: Synthetic oligonucleotide
aagguugaucuugaccucc

SEQ ID NO: 3107120 - RNA, 19 nt, Artificial Sequence
  Description of Artificial Sequence: Synthetic oligonucleotide
gagcccuucauguagauga

SEQ ID NO: 3107121 - RNA, 19 nt, Artificial Sequence
  Description of Artificial Sequence: Synthetic oligonucleotide
uucagcaugggcauagaga

SEQ ID NO: 3107122 - RNA, 19 nt, Artificial Sequence
  Description of Artificial Sequence: Synthetic oligonucleotide
cauguagaugagauaaagc

SEQ ID NO: 3107123 - RNA, 19 nt, Artificial Sequence
  Description of Artificial Sequence: Synthetic oligonucleotide
augguuugauacucauucc

SEQ ID NO: 3107124 - RNA, 19 nt, Artificial Sequence
  Description of Artificial Sequence: Synthetic oligonucleotide
ugguuugauacucauuccu

SEQ ID NO: 3107125 - RNA, 19 nt, Artificial Sequence
  Description of Artificial Sequence: Synthetic oligonucleotide
augagauaaagcccaucac

SEQ ID NO: 3107126 - RNA, 19 nt, Artificial Sequence
  Description of Artificial Sequence: Synthetic oligonucleotide
acaucugguaacuugugcu

SEQ ID NO: 3107127 - RNA, 19 nt, Artificial Sequence
  Description of Artificial Sequence: Synthetic oligonucleotide
gaagaauagucucccauuc

SEQ ID NO: 3107128 - RNA, 19 nt, Artificial Sequence
  Description of Artificial Sequence: Synthetic oligonucleotide
auggcaauugaguuguucu

SEQ ID NO: 3107129 - RNA, 19 nt, Artificial Sequence
  Description of Artificial Sequence: Synthetic oligonucleotide
agauaaagcccaucacagg

SEQ ID NO: 3107130 - RNA, 19 nt, Artificial Sequence
  Description of Artificial Sequence: Synthetic oligonucleotide
uagagaugggacuucgacc

SEQ ID NO: 3107131 - RNA, 19 nt, Artificial Sequence
  Description of Artificial Sequence: Synthetic oligonucleotide
cuuccggaaaugaagguug

SEQ ID NO: 3107132 - RNA, 19 nt, Artificial Sequence
  Description of Artificial Sequence: Synthetic oligonucleotide
gauacucauuccuggguag

SEQ ID NO: 3107133 - RNA, 19 nt, Artificial Sequence
  Description of Artificial Sequence: Synthetic oligonucleotide
ucucacaucugguaacuug

SEQ ID NO: 3107134 - RNA, 19 nt, Artificial Sequence
  Description of Artificial Sequence: Synthetic oligonucleotide
gauuggaggaugcuucacc

SEQ ID NO: 3107135 - RNA, 19 nt, Artificial Sequence
  Description of Artificial Sequence: Synthetic oligonucleotide
gauaaagcccaucacaggu

SEQ ID NO: 3107136 - RNA, 19 nt, Artificial Sequence
  Description of Artificial Sequence: Synthetic oligonucleotide
ggagacuuuggauuggagg

SEQ ID NO: 3107137 - RNA, 19 nt, Artificial Sequence
  Description of Artificial Sequence: Synthetic oligonucleotide
uaaagcccaucacagguga

SEQ ID NO: 3107138 - RNA, 19 nt, Artificial Sequence
  Description of Artificial Sequence: Synthetic oligonucleotide
aagaauagucucccauucu

SEQ ID NO: 3107139 - RNA, 19 nt, Artificial Sequence
  Description of Artificial Sequence: Synthetic oligonucleotide
uuggauuggaggaugcuuc

SEQ ID NO: 3107140 - RNA, 19 nt, Artificial Sequence
  Description of Artificial Sequence: Synthetic oligonucleotide
guaacuugugcucggagac

SEQ ID NO: 3107141 - RNA, 19 nt, Artificial Sequence
  Description of Artificial Sequence: Synthetic oligonucleotide
guagaugagauaaagccca

SEQ ID NO: 3107142 - RNA, 19 nt, Artificial Sequence
  Description of Artificial Sequence: Synthetic oligonucleotide
agaaggauggaggugcagg

SEQ ID NO: 3107143 - RNA, 19 nt, Artificial Sequence
  Description of Artificial Sequence: Synthetic oligonucleotide
uaggcugaagaauagucuc

SEQ ID NO: 3107144 - RNA, 19 nt, Artificial Sequence
  Description of Artificial Sequence: Synthetic oligonucleotide
gaaggauggaggugcaggc

SEQ ID NO: 3107145 - RNA, 19 nt, Artificial Sequence
  Description of Artificial Sequence: Synthetic oligonucleotide
cacccuuugaccauuguuc

SEQ ID NO: 3107146 - RNA, 19 nt, Artificial Sequence
  Description of Artificial Sequence: Synthetic oligonucleotide
ugaaguccacccuuugacc

SEQ ID NO: 3107147 - RNA, 19 nt, Artificial Sequence
  Description of Artificial Sequence: Synthetic oligonucleotide
cuucauguagaugagauaa

SEQ ID NO: 3107148 - RNA, 19 nt, Artificial Sequence
  Description of Artificial Sequence: Synthetic oligonucleotide
uugauacucauuccugggu

SEQ ID NO: 3107149 - RNA, 19 nt, Artificial Sequence
  Description of Artificial Sequence: Synthetic oligonucleotide
ucugguaacuugugcucgg

SEQ ID NO: 3107150 - RNA, 19 nt, Artificial Sequence
  Description of Artificial Sequence: Synthetic oligonucleotide
uucuucaccuccaugguuu

SEQ ID NO: 3107151 - RNA, 19 nt, Artificial Sequence
  Description of Artificial Sequence: Synthetic oligonucleotide
uggaggaugcuucaccgga

SEQ ID NO: 3107152 - RNA, 19 nt, Artificial Sequence
  Description of Artificial Sequence: Synthetic oligonucleotide
gaaguccacccuuugacca

SEQ ID NO: 3107153 - RNA, 19 nt, Artificial Sequence
  Description of Artificial Sequence: Synthetic oligonucleotide
ugggacuucgacccuuccg

SEQ ID NO: 3107154 - RNA, 19 nt, Artificial Sequence
  Description of Artificial Sequence: Synthetic oligonucleotide
ugauacucauuccugggua

SEQ ID NO: 3107155 - RNA, 19 nt, Artificial Sequence
  Description of Artificial Sequence: Synthetic oligonucleotide
cucccauucucacaucugg

SEQ ID NO: 3107156 - RNA, 19 nt, Artificial Sequence
  Description of Artificial Sequence: Synthetic oligonucleotide
uagucucccauucucacau

SEQ ID NO: 3107157 - RNA, 19 nt, Artificial Sequence
  Description of Artificial Sequence: Synthetic oligonucleotide
ugaagaauagucucccauu

SEQ ID NO: 3107158 - RNA, 19 nt, Artificial Sequence
  Description of Artificial Sequence: Synthetic oligonucleotide
augggcauagagaugggac

SEQ ID NO: 3107159 - RNA, 19 nt, Artificial Sequence
  Description of Artificial Sequence: Synthetic oligonucleotide
cuucaccggagaaggaugg

SEQ ID NO: 3107160 - RNA, 19 nt, Artificial Sequence
  Description of Artificial Sequence: Synthetic oligonucleotide
gugaaguccacccuuugac

SEQ ID NO: 3107161 - RNA, 19 nt, Artificial Sequence
  Description of Artificial Sequence: Synthetic oligonucleotide
gggacuucgacccuuccgg

SEQ ID NO: 3107162 - RNA, 19 nt, Artificial Sequence
  Description of Artificial Sequence: Synthetic oligonucleotide
cauucucacaucugguaac

SEQ ID NO: 3107163 - RNA, 19 nt, Artificial Sequence
  Description of Artificial Sequence: Synthetic oligonucleotide
uguucuucaccuccauggu

SEQ ID NO: 3107164 - RNA, 19 nt, Artificial Sequence
  Description of Artificial Sequence: Synthetic oligonucleotide
ugggcauagagaugggacu

SEQ ID NO: 3107165 - RNA, 19 nt, Artificial Sequence
  Description of Artificial Sequence: Synthetic oligonucleotide
aaaaggagcccuucaugua

SEQ ID NO: 3107166 - RNA, 19 nt, Artificial Sequence
  Description of Artificial Sequence: Synthetic oligonucleotide
aaaugaagguugaucuuga

SEQ ID NO: 3107167 - RNA, 19 nt, Artificial Sequence
  Description of Artificial Sequence: Synthetic oligonucleotide
ugugcucggagacuuugga

SEQ ID NO: 3107168 - RNA, 19 nt, Artificial Sequence
  Description of Artificial Sequence: Synthetic oligonucleotide
gacccuuccggaaaugaag

SEQ ID NO: 3107169 - RNA, 19 nt, Artificial Sequence
  Description of Artificial Sequence: Synthetic oligonucleotide
ugcucggagacuuuggauu

SEQ ID NO: 3107170 - RNA, 19 nt, Artificial Sequence
  Description of Artificial Sequence: Synthetic oligonucleotide
uuguucagcaugggcauag

SEQ ID NO: 3107171 - RNA, 19 nt, Artificial Sequence
  Description of Artificial Sequence: Synthetic oligonucleotide
uuccuggguaggcugaaga

SEQ ID NO: 3107172 - RNA, 19 nt, Artificial Sequence
  Description of Artificial Sequence: Synthetic oligonucleotide
caccggagaaggauggagg

SEQ ID NO: 3107173 - RNA, 19 nt, Artificial Sequence
  Description of Artificial Sequence: Synthetic oligonucleotide
aucugguaacuugugcucg

SEQ ID NO: 3107174 - RNA, 19 nt, Artificial Sequence
  Description of Artificial Sequence: Synthetic oligonucleotide
uggguaggcugaagaauag

SEQ ID NO: 3107175 - RNA, 19 nt, Artificial Sequence
  Description of Artificial Sequence: Synthetic oligonucleotide
aucuugaccuccuggaaaa

SEQ ID NO: 3107176 - RNA, 19 nt, Artificial Sequence
  Description of Artificial Sequence: Synthetic oligonucleotide
uugugcucggagacuuugg

SEQ ID NO: 3107177 - RNA, 19 nt, Artificial Sequence
  Description of Artificial Sequence: Synthetic oligonucleotide
cacaucugguaacuugugc

SEQ ID NO: 3107178 - RNA, 19 nt, Artificial Sequence
  Description of Artificial Sequence: Synthetic oligonucleotide
aggcugaagaauagucucc

SEQ ID NO: 3107179 - RNA, 19 nt, Artificial Sequence
  Description of Artificial Sequence: Synthetic oligonucleotide
acuuuggauuggaggaugc

SEQ ID NO: 3107180 - RNA, 19 nt, Artificial Sequence
  Description of Artificial Sequence: Synthetic oligonucleotide
ugguaacuugugcucggag

SEQ ID NO: 3107181 - RNA, 19 nt, Artificial Sequence
  Description of Artificial Sequence: Synthetic oligonucleotide
ucacaggugauggcaauug

SEQ ID NO: 3107182 - RNA, 19 nt, Artificial Sequence
  Description of Artificial Sequence: Synthetic oligonucleotide
gaucuugaccuccuggaaa

SEQ ID NO: 3107183 - RNA, 19 nt, Artificial Sequence
  Description of Artificial Sequence: Synthetic oligonucleotide
ucacaucugguaacuugug

SEQ ID NO: 3107184 - RNA, 19 nt, Artificial Sequence
  Description of Artificial Sequence: Synthetic oligonucleotide
ugaucuugaccuccuggaa

SEQ ID NO: 3107185 - RNA, 19 nt, Artificial Sequence
  Description of Artificial Sequence: Synthetic oligonucleotide
acccuuugaccauuguuca

SEQ ID NO: 3107186 - RNA, 19 nt, Artificial Sequence
  Description of Artificial Sequence: Synthetic oligonucleotide
caucugguaacuugugcuc

SEQ ID NO: 3107187 - RNA, 19 nt, Artificial Sequence
  Description of Artificial Sequence: Synthetic oligonucleotide
aagcccaucacaggugaug

SEQ ID NO: 3107188 - RNA, 19 nt, Artificial Sequence
  Description of Artificial Sequence: Synthetic oligonucleotide
cucauuccuggguaggcug

SEQ ID NO: 3107189 - RNA, 19 nt, Artificial Sequence
  Description of Artificial Sequence: Synthetic oligonucleotide
agcccaucacaggugaugg

SEQ ID NO: 3107190 - RNA, 19 nt, Artificial Sequence
  Description of Artificial Sequence: Synthetic oligonucleotide
ucauuccuggguaggcuga

SEQ ID NO: 3107191 - RNA, 19 nt, Artificial Sequence
  Description of Artificial Sequence: Synthetic oligonucleotide
ucaccggagaaggauggag

SEQ ID NO: 3107192 - RNA, 19 nt, Artificial Sequence
  Description of Artificial Sequence: Synthetic oligonucleotide
uuuggauuggaggaugcuu

SEQ ID NO: 3107193 - RNA, 19 nt, Artificial Sequence
  Description of Artificial Sequence: Synthetic oligonucleotide
auagucucccauucucaca

SEQ ID NO: 3107194 - RNA, 19 nt, Artificial Sequence
  Description of Artificial Sequence: Synthetic oligonucleotide
acaggugauggcaauugag

SEQ ID NO: 3107195 - RNA, 19 nt, Artificial Sequence
  Description of Artificial Sequence: Synthetic oligonucleotide
uggauuggaggaugcuuca

SEQ ID NO: 3107196 - RNA, 19 nt, Artificial Sequence
  Description of Artificial Sequence: Synthetic oligonucleotide
aggugauggcaauugaguu

SEQ ID NO: 3107197 - RNA, 19 nt, Artificial Sequence
  Description of Artificial Sequence: Synthetic oligonucleotide
acccuuccggaaaugaagg

SEQ ID NO: 3107198 - RNA, 19 nt, Artificial Sequence
  Description of Artificial Sequence: Synthetic oligonucleotide
gaauagucucccauucuca

SEQ ID NO: 3107199 - RNA, 19 nt, Artificial Sequence
  Description of Artificial Sequence: Synthetic oligonucleotide
guucagcaugggcauagag

SEQ ID NO: 3107200 - RNA, 19 nt, Artificial Sequence
  Description of Artificial Sequence: Synthetic oligonucleotide
gacuuuggauuggaggaug

SEQ ID NO: 3107201 - RNA, 19 nt, Artificial Sequence
  Description of Artificial Sequence: Synthetic oligonucleotide
accuccaugguuugauacu

SEQ ID NO: 3107202 - RNA, 19 nt, Artificial Sequence
  Description of Artificial Sequence: Synthetic oligonucleotide
accggagaaggauggaggu

SEQ ID NO: 3107203 - RNA, 19 nt, Artificial Sequence
  Description of Artificial Sequence: Synthetic oligonucleotide
caccuccaugguuugauac

SEQ ID NO: 3107204 - RNA, 19 nt, Artificial Sequence
  Description of Artificial Sequence: Synthetic oligonucleotide
uccaugguuugauacucau

SEQ ID NO: 3107205 - RNA, 19 nt, Artificial Sequence
  Description of Artificial Sequence: Synthetic oligonucleotide
uagugaaguccacccuuug

SEQ ID NO: 3107206 - RNA, 19 nt, Artificial Sequence
  Description of Artificial Sequence: Synthetic oligonucleotide
aacuugugcucggagacuu

SEQ ID NO: 3107207 - RNA, 19 nt, Artificial Sequence
  Description of Artificial Sequence: Synthetic oligonucleotide
gaagguugaucuugaccuc

SEQ ID NO: 3107208 - RNA, 19 nt, Artificial Sequence
  Description of Artificial Sequence: Synthetic oligonucleotide
uuccggaaaugaagguuga

SEQ ID NO: 3107209 - RNA, 19 nt, Artificial Sequence
  Description of Artificial Sequence: Synthetic oligonucleotide
auaaagcccaucacaggug

SEQ ID NO: 3107210 - RNA, 19 nt, Artificial Sequence
  Description of Artificial Sequence: Synthetic oligonucleotide
acuucgacccuuccggaaa

SEQ ID NO: 3107211 - RNA, 19 nt, Artificial Sequence
  Description of Artificial Sequence: Synthetic oligonucleotide
ucuucaccuccaugguuug

SEQ ID NO: 3107212 - RNA, 19 nt, Artificial Sequence
  Description of Artificial Sequence: Synthetic oligonucleotide
gguaacuugugcucggaga

SEQ ID NO: 3107213 - RNA, 19 nt, Artificial Sequence
  Description of Artificial Sequence: Synthetic oligonucleotide
gauggcaauugaguuguuc

SEQ ID NO: 3107214 - RNA, 19 nt, Artificial Sequence
  Description of Artificial Sequence: Synthetic oligonucleotide
aaguccacccuuugaccau

SEQ ID NO: 3107215 - RNA, 19 nt, Artificial Sequence
  Description of Artificial Sequence: Synthetic oligonucleotide
auucucacaucugguaacu

SEQ ID NO: 3107216 - RNA, 19 nt, Artificial Sequence
  Description of Artificial Sequence: Synthetic oligonucleotide
gguuugauacucauuccug

SEQ ID NO: 3107217 - RNA, 19 nt, Artificial Sequence
  Description of Artificial Sequence: Synthetic oligonucleotide
cuuugaccauuguucagca

SEQ ID NO: 3107218 - RNA, 19 nt, Artificial Sequence
  Description of Artificial Sequence: Synthetic oligonucleotide
uugaguuguucuucaccuc

SEQ ID NO: 3107219 - RNA, 19 nt, Artificial Sequence
  Description of Artificial Sequence: Synthetic oligonucleotide
augggacuucgacccuucc

SEQ ID NO: 3107220 - RNA, 19 nt, Artificial Sequence
  Description of Artificial Sequence: Synthetic oligonucleotide
uccuggguaggcugaagaa

SEQ ID NO: 3107221 - RNA, 19 nt, Artificial Sequence
  Description of Artificial Sequence: Synthetic oligonucleotide
uucaccuccaugguuugau

SEQ ID NO: 3107222 - RNA, 19 nt, Artificial Sequence
  Description of Artificial Sequence: Synthetic oligonucleotide
uggcaauugaguuguucuu

SEQ ID NO: 3107223 - RNA, 19 nt, Artificial Sequence
  Description of Artificial Sequence: Synthetic oligonucleotide
gguaggcugaagaauaguc

SEQ ID NO: 3107224 - RNA, 19 nt, Artificial Sequence
  Description of Artificial Sequence: Synthetic oligonucleotide
ugcuucaccggagaaggau

SEQ ID NO: 3107225 - RNA, 19 nt, Artificial Sequence
  Description of Artificial Sequence: Synthetic oligonucleotide
ccuuugaccauuguucagc

SEQ ID NO: 3107226 - RNA, 19 nt, Artificial Sequence
  Description of Artificial Sequence: Synthetic oligonucleotide
cuugugcucggagacuuug

SEQ ID NO: 3107227 - RNA, 19 nt, Artificial Sequence
  Description of Artificial Sequence: Synthetic oligonucleotide
gaggaugcuucaccggaga

SEQ ID NO: 3107228 - RNA, 19 nt, Artificial Sequence
  Description of Artificial Sequence: Synthetic oligonucleotide
cucacaucugguaacuugu

SEQ ID NO: 3107229 - RNA, 19 nt, Artificial Sequence
  Description of Artificial Sequence: Synthetic oligonucleotide
uagaugagauaaagcccau

SEQ ID NO: 3107230 - RNA, 19 nt, Artificial Sequence
  Description of Artificial Sequence: Synthetic oligonucleotide
gcaauugaguuguucuuca

SEQ ID NO: 3107231 - RNA, 19 nt, Artificial Sequence
  Description of Artificial Sequence: Synthetic oligonucleotide
ucgacccuuccggaaauga

SEQ ID NO: 3107232 - RNA, 19 nt, Artificial Sequence
  Description of Artificial Sequence: Synthetic oligonucleotide
aaggagcccuucauguaga

SEQ ID NO: 3107233 - RNA, 19 nt, Artificial Sequence
  Description of Artificial Sequence: Synthetic oligonucleotide
uaacuugugcucggagacu

SEQ ID NO: 3107234 - RNA, 19 nt, Artificial Sequence
  Description of Artificial Sequence: Synthetic oligonucleotide
ggcugaagaauagucuccc

SEQ ID NO: 3107235 - RNA, 19 nt, Artificial Sequence
  Description of Artificial Sequence: Synthetic oligonucleotide
gaccauuguucagcauggg

SEQ ID NO: 3107236 - RNA, 19 nt, Artificial Sequence
  Description of Artificial Sequence: Synthetic oligonucleotide
uuugaccauuguucagcau

SEQ ID NO: 3107237 - RNA, 19 nt, Artificial Sequence
  Description of Artificial Sequence: Synthetic oligonucleotide
agucucccauucucacauc

SEQ ID NO: 3107238 - RNA, 19 nt, Artificial Sequence
  Description of Artificial Sequence: Synthetic oligonucleotide
caggugauggcaauugagu

SEQ ID NO: 3107239 - RNA, 19 nt, Artificial Sequence
  Description of Artificial Sequence: Synthetic oligonucleotide
ggaugcuucaccggagaag

SEQ ID NO: 3107240 - RNA, 19 nt, Artificial Sequence
  Description of Artificial Sequence: Synthetic oligonucleotide
gcauagagaugggacuucg

SEQ ID NO: 3107241 - RNA, 19 nt, Artificial Sequence
  Description of Artificial Sequence: Synthetic oligonucleotide
ucggagacuuuggauugga

SEQ ID NO: 3107242 - RNA, 19 nt, Artificial Sequence
  Description of Artificial Sequence: Synthetic oligonucleotide
guaggcugaagaauagucu

SEQ ID NO: 3107243 - RNA, 19 nt, Artificial Sequence
  Description of Artificial Sequence: Synthetic oligonucleotide
acucauuccuggguaggcu

SEQ ID NO: 3107244 - RNA, 19 nt, Artificial Sequence
  Description of Artificial Sequence: Synthetic oligonucleotide
gagaaggauggaggugcag

SEQ ID NO: 3107245 - RNA, 19 nt, Artificial Sequence
  Description of Artificial Sequence: Synthetic oligonucleotide
ggcaauugaguuguucuuc

SEQ ID NO: 3107246 - RNA, 19 nt, Artificial Sequence
  Description of Artificial Sequence: Synthetic oligonucleotide
agacuuuggauuggaggau

SEQ ID NO: 3107247 - RNA, 19 nt, Artificial Sequence
  Description of Artificial Sequence: Synthetic oligonucleotide
aggaugcuucaccggagaa

SEQ ID NO: 3107248 - RNA, 19 nt, Artificial Sequence
  Description of Artificial Sequence: Synthetic oligonucleotide
cucggagacuuuggauugg

SEQ ID NO: 3107249 - RNA, 19 nt, Artificial Sequence
  Description of Artificial Sequence: Synthetic oligonucleotide
cugaagaauagucucccau

SEQ ID NO: 3107250 - RNA, 19 nt, Artificial Sequence
  Description of Artificial Sequence: Synthetic oligonucleotide
gaguuguucuucaccucca

SEQ ID NO: 3107251 - RNA, 19 nt, Artificial Sequence
  Description of Artificial Sequence: Synthetic oligonucleotide
gacuucgacccuuccggaa

SEQ ID NO: 3107252 - RNA, 19 nt, Artificial Sequence
  Description of Artificial Sequence: Synthetic oligonucleotide
cauagagaugggacuucga

SEQ ID NO: 3107253 - RNA, 19 nt, Artificial Sequence
  Description of Artificial Sequence: Synthetic oligonucleotide
cauuguucagcaugggcau

SEQ ID NO: 3107254 - RNA, 19 nt, Artificial Sequence
  Description of Artificial Sequence: Synthetic oligonucleotide
auagugaaguccacccuuu

SEQ ID NO: 3107255 - RNA, 19 nt, Artificial Sequence
  Description of Artificial Sequence: Synthetic oligonucleotide
uccacccuuugaccauugu

SEQ ID NO: 3107256 - RNA, 19 nt, Artificial Sequence
  Description of Artificial Sequence: Synthetic oligonucleotide
cauagugaaguccacccuu

SEQ ID NO: 3107257 - RNA, 19 nt, Artificial Sequence
  Description of Artificial Sequence: Synthetic oligonucleotide
cggagaaggauggaggugc

SEQ ID NO: 3107258 - RNA, 19 nt, Artificial Sequence
  Description of Artificial Sequence: Synthetic oligonucleotide
ucaccuccaugguuugaua

SEQ ID NO: 3107259 - RNA, 19 nt, Artificial Sequence
  Description of Artificial Sequence: Synthetic oligonucleotide
uguucagcaugggcauaga

SEQ ID NO: 3107260 - RNA, 19 nt, Artificial Sequence
  Description of Artificial Sequence: Synthetic oligonucleotide
gaugggacuucgacccuuc

SEQ ID NO: 3107261 - RNA, 19 nt, Artificial Sequence
  Description of Artificial Sequence: Synthetic oligonucleotide
uucaccggagaaggaugga

SEQ ID NO: 3107262 - RNA, 19 nt, Artificial Sequence
  Description of Artificial Sequence: Synthetic oligonucleotide
cagcaugggcauagagaug

SEQ ID NO: 3107263 - RNA, 19 nt, Artificial Sequence
  Description of Artificial Sequence: Synthetic oligonucleotide
gucucccauucucacaucu

SEQ ID NO: 3107264 - RNA, 19 nt, Artificial Sequence
  Description of Artificial Sequence: Synthetic oligonucleotide
gcuucaccggagaaggaug

SEQ ID NO: 3107265 - RNA, 19 nt, Artificial Sequence
  Description of Artificial Sequence: Synthetic oligonucleotide
ccggaaaugaagguugauc

SEQ ID NO: 3107266 - RNA, 19 nt, Artificial Sequence
  Description of Artificial Sequence: Synthetic oligonucleotide
cacaggugauggcaauuga

SEQ ID NO: 3107267 - RNA, 19 nt, Artificial Sequence
  Description of Artificial Sequence: Synthetic oligonucleotide
cuccaugguuugauacuca

SEQ ID NO: 3107268 - RNA, 19 nt, Artificial Sequence
  Description of Artificial Sequence: Synthetic oligonucleotide
cggaaaugaagguugaucu

SEQ ID NO: 3107269 - RNA, 19 nt, Artificial Sequence
  Description of Artificial Sequence: Synthetic oligonucleotide
uucgacccuuccggaaaug

SEQ ID NO: 3107270 - RNA, 19 nt, Artificial Sequence
  Description of Artificial Sequence: Synthetic oligonucleotide
aucacaggugauggcaauu

SEQ ID NO: 3107271 - RNA, 19 nt, Artificial Sequence
  Description of Artificial Sequence: Synthetic oligonucleotide
gguugaucuugaccuccug

SEQ ID NO: 3107272 - RNA, 19 nt, Artificial Sequence
  Description of Artificial Sequence: Synthetic oligonucleotide
agcccuucauguagaugag

SEQ ID NO: 3107273 - RNA, 19 nt, Artificial Sequence
  Description of Artificial Sequence: Synthetic oligonucleotide
ggaggaugcuucaccggag

SEQ ID NO: 3107274 - RNA, 19 nt, Artificial Sequence
  Description of Artificial Sequence: Synthetic oligonucleotide
uccggaaaugaagguugau

SEQ ID NO: 3107275 - RNA, 19 nt, Artificial Sequence
  Description of Artificial Sequence: Synthetic oligonucleotide
caugggcauagagauggga

SEQ ID NO: 3107276 - RNA, 19 nt, Artificial Sequence
  Description of Artificial Sequence: Synthetic oligonucleotide
agguugaucuugaccuccu

SEQ ID NO: 3107277 - RNA, 19 nt, Artificial Sequence
  Description of Artificial Sequence: Synthetic oligonucleotide
aaagcccaucacaggugau

SEQ ID NO: 3107278 - RNA, 19 nt, Artificial Sequence
  Description of Artificial Sequence: Synthetic oligonucleotide
aggagcccuucauguagau

SEQ ID NO: 3107279 - RNA, 19 nt, Artificial Sequence
  Description of Artificial Sequence: Synthetic oligonucleotide
ccauucucacaucugguaa

SEQ ID NO: 3107280 - RNA, 19 nt, Artificial Sequence
  Description of Artificial Sequence: Synthetic oligonucleotide
agaugggacuucgacccuu

SEQ ID NO: 3107281 - RNA, 19 nt, Artificial Sequence
  Description of Artificial Sequence: Synthetic oligonucleotide
ccuccaugguuugauacuc

SEQ ID NO: 3107282 - RNA, 19 nt, Artificial Sequence
  Description of Artificial Sequence: Synthetic oligonucleotide
uucucacaucugguaacuu

SEQ ID NO: 3107283 - RNA, 19 nt, Artificial Sequence
  Description of Artificial Sequence: Synthetic oligonucleotide
cccuuugaccauuguucag

SEQ ID NO: 3107284 - RNA, 19 nt, Artificial Sequence
  Description of Artificial Sequence: Synthetic oligonucleotide
auuguucagcaugggcaua

SEQ ID NO: 3107285 - RNA, 19 nt, Artificial Sequence
  Description of Artificial Sequence: Synthetic oligonucleotide
ggaaaugaagguugaucuu

SEQ ID NO: 3107286 - RNA, 19 nt, Artificial Sequence
  Description of Artificial Sequence: Synthetic oligonucleotide
guucuucaccuccaugguu

SEQ ID NO: 3107287 - RNA, 19 nt, Artificial Sequence
  Description of Artificial Sequence: Synthetic oligonucleotide
ggauuggaggaugcuucac

SEQ ID NO: 3107288 - RNA, 19 nt, Artificial Sequence
  Description of Artificial Sequence: Synthetic oligonucleotide
ugauggcaauugaguuguu

SEQ ID NO: 3107289 - RNA, 19 nt, Artificial Sequence
  Description of Artificial Sequence: Synthetic oligonucleotide
ggagcccuucauguagaug

SEQ ID NO: 3107290 - RNA, 19 nt, Artificial Sequence
  Description of Artificial Sequence: Synthetic oligonucleotide
aguccacccuuugaccauu

SEQ ID NO: 3107291 - RNA, 19 nt, Artificial Sequence
  Description of Artificial Sequence: Synthetic oligonucleotide
ggacuucgacccuuccgga

SEQ ID NO: 3107292 - RNA, 19 nt, Artificial Sequence
  Description of Artificial Sequence: Synthetic oligonucleotide
cugguaacuugugcucgga

SEQ ID NO: 3107293 - RNA, 19 nt, Artificial Sequence
  Description of Artificial Sequence: Synthetic oligonucleotide
ggcauagagaugggacuuc

SEQ ID NO: 3107294 - RNA, 19 nt, Artificial Sequence
  Description of Artificial Sequence: Synthetic oligonucleotide
gagaugggacuucgacccu

SEQ ID NO: 3107295 - RNA, 19 nt, Artificial Sequence
  Description of Artificial Sequence: Synthetic oligonucleotide
cccuucauguagaugagau

SEQ ID NO: 3107296 - RNA, 19 nt, Artificial Sequence
  Description of Artificial Sequence: Synthetic oligonucleotide
cccauucucacaucuggua

SEQ ID NO: 3107297 - RNA, 19 nt, Artificial Sequence
  Description of Artificial Sequence: Synthetic oligonucleotide
gugcucggagacuuuggau

SEQ ID NO: 3107298 - RNA, 19 nt, Artificial Sequence
  Description of Artificial Sequence: Synthetic oligonucleotide
cuuuggauuggaggaugcu

SEQ ID NO: 3107299 - RNA, 19 nt, Artificial Sequence
  Description of Artificial Sequence: Synthetic oligonucleotide
gcccaucacaggugauggc

SEQ ID NO: 3107300 - RNA, 19 nt, Artificial Sequence
  Description of Artificial Sequence: Synthetic oligonucleotide
caucacaggugauggcaau

SEQ ID NO: 3107301 - RNA, 19 nt, Artificial Sequence
  Description of Artificial Sequence: Synthetic oligonucleotide
guccacccuuugaccauug

SEQ ID NO: 3107302 - RNA, 19 nt, Artificial Sequence
  Description of Artificial Sequence: Synthetic oligonucleotide
ccaucacaggugauggcaa

SEQ ID NO: 3107303 - RNA, 19 nt, Artificial Sequence
  Description of Artificial Sequence: Synthetic oligonucleotide
augcuucaccggagaagga

SEQ ID NO: 3107304 - RNA, 19 nt, Artificial Sequence
  Description of Artificial Sequence: Synthetic oligonucleotide
cuucaccuccaugguuuga

SEQ ID NO: 3107305 - RNA, 19 nt, Artificial Sequence
  Description of Artificial Sequence: Synthetic oligonucleotide
ggagaaggauggaggugca

SEQ ID NO: 3107306 - RNA, 19 nt, Artificial Sequence
  Description of Artificial Sequence: Synthetic oligonucleotide
cggagacuuuggauuggag

SEQ ID NO: 3107307 - RNA, 19 nt, Artificial Sequence
  Description of Artificial Sequence: Synthetic oligonucleotide
cuucgacccuuccggaaau

SEQ ID NO: 3107308 - RNA, 19 nt, Artificial Sequence
  Description of Artificial Sequence: Synthetic oligonucleotide
ccggagaaggauggaggug

SEQ ID NO: 3107309 - RNA, 19 nt, Artificial Sequence
  Description of Artificial Sequence: Synthetic oligonucleotide
acuugugcucggagacuuu

SEQ ID NO: 3107310 - RNA, 19 nt, Artificial Sequence
  Description of Artificial Sequence: Synthetic oligonucleotide
ccauagugaaguccacccu

SEQ ID NO: 3107311 - RNA, 19 nt, Artificial Sequence
  Description of Artificial Sequence: Synthetic oligonucleotide
gcccuucauguagaugaga

SEQ ID NO: 3107312 - RNA, 19 nt, Artificial Sequence
  Description of Artificial Sequence: Synthetic oligonucleotide
gggcauagagaugggacuu

SEQ ID NO: 3107313 - RNA, 19 nt, Artificial Sequence
  Description of Artificial Sequence: Synthetic oligonucleotide
ggguaggcugaagaauagu

SEQ ID NO: 3107314 - RNA, 19 nt, Artificial Sequence
  Description of Artificial Sequence: Synthetic oligonucleotide
cgacccuuccggaaaugaa

SEQ ID NO: 3107315 - RNA, 19 nt, Artificial Sequence
  Description of Artificial Sequence: Synthetic oligonucleotide
ccuggguaggcugaagaau

SEQ ID NO: 3107316 - RNA, 19 nt, Artificial Sequence
  Description of Artificial Sequence: Synthetic oligonucleotide
ccacccuuugaccauuguu

SEQ ID NO: 3107317 - RNA, 19 nt, Artificial Sequence
  Description of Artificial Sequence: Synthetic oligonucleotide
ccaugguuugauacucauu

SEQ ID NO: 3107318 - RNA, 19 nt, Artificial Sequence
  Description of Artificial Sequence: Synthetic oligonucleotide
cccuuccggaaaugaaggu

SEQ ID NO: 3107319 - RNA, 19 nt, Artificial Sequence
  Description of Artificial Sequence: Synthetic oligonucleotide
uuucaauccacuuagaggg

SEQ ID NO: 3107320 - RNA, 19 nt, Artificial Sequence
  Description of Artificial Sequence: Synthetic oligonucleotide
uuuucaauccacuuagagg

SEQ ID NO: 3107321 - RNA, 19 nt, Artificial Sequence
  Description of Artificial Sequence: Synthetic oligonucleotide
ucauucaugagucaaauuc

SEQ ID NO: 3107322 - RNA, 19 nt, Artificial Sequence
  Description of Artificial Sequence: Synthetic oligonucleotide
ucauuuucaauccacuuag

SEQ ID NO: 3107323 - RNA, 19 nt, Artificial Sequence
  Description of Artificial Sequence: Synthetic oligonucleotide
uggaucauaaugcagaaga

SEQ ID NO: 3107324 - RNA, 19 nt, Artificial Sequence
  Description of Artificial Sequence: Synthetic oligonucleotide
uuuucuguuccacaaagag

SEQ ID NO: 3107325 - RNA, 19 nt, Artificial Sequence
  Description of Artificial Sequence: Synthetic oligonucleotide
cacaauuggaucauaaugc

SEQ ID NO: 3107326 - RNA, 19 nt, Artificial Sequence
  Description of Artificial Sequence: Synthetic oligonucleotide
ucacaauuggaucauaaug

SEQ ID NO: 3107327 - RNA, 19 nt, Artificial Sequence
  Description of Artificial Sequence: Synthetic oligonucleotide
ucaaauucauuuucaaucc

SEQ ID NO: 3107328 - RNA, 19 nt, Artificial Sequence
  Description of Artificial Sequence: Synthetic oligonucleotide
uucuguuccacaaagagaa

SEQ ID NO: 3107329 - RNA, 19 nt, Artificial Sequence
  Description of Artificial Sequence: Synthetic oligonucleotide
gucaaauucauuuucaauc

SEQ ID NO: 3107330 - RNA, 19 nt, Artificial Sequence
  Description of Artificial Sequence: Synthetic oligonucleotide
uuuguucacaauuggauca

SEQ ID NO: 3107331 - RNA, 19 nt, Artificial Sequence
  Description of Artificial Sequence: Synthetic oligonucleotide
ugaaggagaaaccuguccc

SEQ ID NO: 3107332 - RNA, 19 nt, Artificial Sequence
  Description of Artificial Sequence: Synthetic oligonucleotide
aaauucauuuucaauccac

SEQ ID NO: 3107333 - RNA, 19 nt, Artificial Sequence
  Description of Artificial Sequence: Synthetic oligonucleotide
agaagagucagcuucucuc

SEQ ID NO: 3107334 - RNA, 19 nt, Artificial Sequence
  Description of Artificial Sequence: Synthetic oligonucleotide
aauuggaucauaaugcaga

SEQ ID NO: 3107335 - RNA, 19 nt, Artificial Sequence
  Description of Artificial Sequence: Synthetic oligonucleotide
aucauaaugcagaagaguc

SEQ ID NO: 3107336 - RNA, 19 nt, Artificial Sequence
  Description of Artificial Sequence: Synthetic oligonucleotide
auuuucaauccacuuagag

SEQ ID NO: 3107337 - RNA, 19 nt, Artificial Sequence
  Description of Artificial Sequence: Synthetic oligonucleotide
ucaugagucaaauucauuu

SEQ ID NO: 3107338 - RNA, 19 nt, Artificial Sequence
  Description of Artificial Sequence: Synthetic oligonucleotide
augagucaaauucauuuuc

SEQ ID NO: 3107339 - RNA, 19 nt, Artificial Sequence
  Description of Artificial Sequence: Synthetic oligonucleotide
gaagagucagcuucucucg

SEQ ID NO: 3107340 - RNA, 19 nt, Artificial Sequence
  Description of Artificial Sequence: Synthetic oligonucleotide
cuucucuugugguugaagg

SEQ ID NO: 3107341 - RNA, 19 nt, Artificial Sequence
  Description of Artificial Sequence: Synthetic oligonucleotide
uucuucagcacacacugca

SEQ ID NO: 3107342 - RNA, 19 nt, Artificial Sequence
  Description of Artificial Sequence: Synthetic oligonucleotide
ugagucaaauucauuuuca

SEQ ID NO: 3107343 - RNA, 19 nt, Artificial Sequence
  Description of Artificial Sequence: Synthetic oligonucleotide
uuuuguucacaauuggauc

SEQ ID NO: 3107344 - RNA, 19 nt, Artificial Sequence
  Description of Artificial Sequence: Synthetic oligonucleotide
uucauuuucaauccacuua

SEQ ID NO: 3107345 - RNA, 19 nt, Artificial Sequence
  Description of Artificial Sequence: Synthetic oligonucleotide
uuucuguuccacaaagaga

SEQ ID NO: 3107346 - RNA, 19 nt, Artificial Sequence
  Description of Artificial Sequence: Synthetic oligonucleotide
uuugacuugcucuuggcaa

SEQ ID NO: 3107347 - RNA, 19 nt, Artificial Sequence
  Description of Artificial Sequence: Synthetic oligonucleotide
uugaaggagaaaccugucc

SEQ ID NO: 3107348 - RNA, 19 nt, Artificial Sequence
  Description of Artificial Sequence: Synthetic oligonucleotide
ucauaaugcagaagaguca

SEQ ID NO: 3107349 - RNA, 19 nt, Artificial Sequence
  Description of Artificial Sequence: Synthetic oligonucleotide
ugugguugaaggagaaacc

SEQ ID NO: 3107350 - RNA, 19 nt, Artificial Sequence
  Description of Artificial Sequence: Synthetic oligonucleotide
cauaaugcagaagagucag

SEQ ID NO: 3107351 - RNA, 19 nt, Artificial Sequence
  Description of Artificial Sequence: Synthetic oligonucleotide
acuagucucaccagaaugg

SEQ ID NO: 3107352 - RNA, 19 nt, Artificial Sequence
  Description of Artificial Sequence: Synthetic oligonucleotide
ugggucuucucauucauga

SEQ ID NO: 3107353 - RNA, 19 nt, Artificial Sequence
  Description of Artificial Sequence: Synthetic oligonucleotide
acaauuggaucauaaugca

SEQ ID NO: 3107354 - RNA, 19 nt, Artificial Sequence
  Description of Artificial Sequence: Synthetic oligonucleotide
ucucuugugguugaaggag

SEQ ID NO: 3107355 - RNA, 19 nt, Artificial Sequence
  Description of Artificial Sequence: Synthetic oligonucleotide
uugugguugaaggagaaac

SEQ ID NO: 3107356 - RNA, 19 nt, Artificial Sequence
  Description of Artificial Sequence: Synthetic oligonucleotide
uaaugcagaagagucagcu

SEQ ID NO: 3107357 - RNA, 19 nt, Artificial Sequence
  Description of Artificial Sequence: Synthetic oligonucleotide
aagagucagcuucucucgg

SEQ ID NO: 3107358 - RNA, 19 nt, Artificial Sequence
  Description of Artificial Sequence: Synthetic oligonucleotide
agaaaccugucccagcuug

SEQ ID NO: 3107359 - RNA, 19 nt, Artificial Sequence
  Description of Artificial Sequence: Synthetic oligonucleotide
agguuucugagccggggcc

SEQ ID NO: 3107360 - RNA, 19 nt, Artificial Sequence
  Description of Artificial Sequence: Synthetic oligonucleotide
aaaccugucccagcuuggc

SEQ ID NO: 3107361 - RNA, 19 nt, Artificial Sequence
  Description of Artificial Sequence: Synthetic oligonucleotide
cacugcagguuucugagcc

SEQ ID NO: 3107362 - RNA, 19 nt, Artificial Sequence
  Description of Artificial Sequence: Synthetic oligonucleotide
caauuggaucauaaugcag

SEQ ID NO: 3107363 - RNA, 19 nt, Artificial Sequence
  Description of Artificial Sequence: Synthetic oligonucleotide
cauucaugagucaaauuca

SEQ ID NO: 3107364 - RNA, 19 nt, Artificial Sequence
  Description of Artificial Sequence: Synthetic oligonucleotide
agucaaauucauuuucaau

SEQ ID NO: 3107365 - RNA, 19 nt, Artificial Sequence
  Description of Artificial Sequence: Synthetic oligonucleotide
ugguugaaggagaaaccug

SEQ ID NO: 3107366 - RNA, 19 nt, Artificial Sequence
  Description of Artificial Sequence: Synthetic oligonucleotide
accugucccagcuuggcuc

SEQ ID NO: 3107367 - RNA, 19 nt, Artificial Sequence
  Description of Artificial Sequence: Synthetic oligonucleotide
aggagaaaccugucccagc

SEQ ID NO: 3107368 - RNA, 19 nt, Artificial Sequence
  Description of Artificial Sequence: Synthetic oligonucleotide
uguuccacaaagagaacuu

SEQ ID NO: 3107369 - RNA, 19 nt, Artificial Sequence
  Description of Artificial Sequence: Synthetic oligonucleotide
cacuagucucaccagaaug

SEQ ID NO: 3107370 - RNA, 19 nt, Artificial Sequence
  Description of Artificial Sequence: Synthetic oligonucleotide
uucacaauuggaucauaau

SEQ ID NO: 3107371 - RNA, 19 nt, Artificial Sequence
  Description of Artificial Sequence: Synthetic oligonucleotide
gagucggcuucucuugugg

SEQ ID NO: 3107372 - RNA, 19 nt, Artificial Sequence
  Description of Artificial Sequence: Synthetic oligonucleotide
uucagcacacacugcaggu

SEQ ID NO: 3107373 - RNA, 19 nt, Artificial Sequence
  Description of Artificial Sequence: Synthetic oligonucleotide
auuggaucauaaugcagaa

SEQ ID NO: 3107374 - RNA, 19 nt, Artificial Sequence
  Description of Artificial Sequence: Synthetic oligonucleotide
auucauuuucaauccacuu

SEQ ID NO: 3107375 - RNA, 19 nt, Artificial Sequence
  Description of Artificial Sequence: Synthetic oligonucleotide
uucucauucaugagucaaa

SEQ ID NO: 3107376 - RNA, 19 nt, Artificial Sequence
  Description of Artificial Sequence: Synthetic oligonucleotide
gaaggagaaaccuguccca

SEQ ID NO: 3107377 - RNA, 19 nt, Artificial Sequence
  Description of Artificial Sequence: Synthetic oligonucleotide
gagucagcuucucucggag

SEQ ID NO: 3107378 - RNA, 19 nt, Artificial Sequence
  Description of Artificial Sequence: Synthetic oligonucleotide
ugcgcuuccucuucuucag

SEQ ID NO: 3107379 - RNA, 19 nt, Artificial Sequence
  Description of Artificial Sequence: Synthetic oligonucleotide
acacugcagguuucugagc

SEQ ID NO: 3107380 - RNA, 19 nt, Artificial Sequence
  Description of Artificial Sequence: Synthetic oligonucleotide
auccugggucuucucauuc

SEQ ID NO: 3107381 - RNA, 19 nt, Artificial Sequence
  Description of Artificial Sequence: Synthetic oligonucleotide
ucucauucaugagucaaau

SEQ ID NO: 3107382 - RNA, 19 nt, Artificial Sequence
  Description of Artificial Sequence: Synthetic oligonucleotide
uucaauccacuuagaggga

SEQ ID NO: 3107383 - RNA, 19 nt, Artificial Sequence
  Description of Artificial Sequence: Synthetic oligonucleotide
gagucaaauucauuuucaa

SEQ ID NO: 3107384 - RNA, 19 nt, Artificial Sequence
  Description of Artificial Sequence: Synthetic oligonucleotide
uccacuuagagggagcgua

SEQ ID NO: 3107385 - RNA, 19 nt, Artificial Sequence
  Description of Artificial Sequence: Synthetic oligonucleotide
auaaugcagaagagucagc

SEQ ID NO: 3107386 - RNA, 19 nt, Artificial Sequence
  Description of Artificial Sequence: Synthetic oligonucleotide
caauccacuuagagggagc

SEQ ID NO: 3107387 - RNA, 19 nt, Artificial Sequence
  Description of Artificial Sequence: Synthetic oligonucleotide
ucggcuucucuugugguug

SEQ ID NO: 3107388 - RNA, 19 nt, Artificial Sequence
  Description of Artificial Sequence: Synthetic oligonucleotide
gaucauaaugcagaagagu

SEQ ID NO: 3107389 - RNA, 19 nt, Artificial Sequence
  Description of Artificial Sequence: Synthetic oligonucleotide
ucggagucggcuucucuug

SEQ ID NO: 3107390 - RNA, 19 nt, Artificial Sequence
  Description of Artificial Sequence: Synthetic oligonucleotide
uuggaucauaaugcagaag

SEQ ID NO: 3107391 - RNA, 19 nt, Artificial Sequence
  Description of Artificial Sequence: Synthetic oligonucleotide
gaaaccugucccagcuugg

SEQ ID NO: 3107392 - RNA, 19 nt, Artificial Sequence
  Description of Artificial Sequence: Synthetic oligonucleotide
ucuucucauucaugaguca

SEQ ID NO: 3107393 - RNA, 19 nt, Artificial Sequence
  Description of Artificial Sequence: Synthetic oligonucleotide
agucucaccagaaugguuu

SEQ ID NO: 3107394 - RNA, 19 nt, Artificial Sequence
  Description of Artificial Sequence: Synthetic oligonucleotide
gucuucucauucaugaguc

SEQ ID NO: 3107395 - RNA, 19 nt, Artificial Sequence
  Description of Artificial Sequence: Synthetic oligonucleotide
uucaugagucaaauucauu

SEQ ID NO: 3107396 - RNA, 19 nt, Artificial Sequence
  Description of Artificial Sequence: Synthetic oligonucleotide
aaccugucccagcuuggcu

SEQ ID NO: 3107397 - RNA, 19 nt, Artificial Sequence
  Description of Artificial Sequence: Synthetic oligonucleotide
caaauucauuuucaaucca

SEQ ID NO: 3107398 - RNA, 19 nt, Artificial Sequence
  Description of Artificial Sequence: Synthetic oligonucleotide
ucacuagucucaccagaau

SEQ ID NO: 3107399 - RNA, 19 nt, Artificial Sequence
  Description of Artificial Sequence: Synthetic oligonucleotide
acuuagagggagcguauuu

SEQ ID NO: 3107400 - RNA, 19 nt, Artificial Sequence
  Description of Artificial Sequence: Synthetic oligonucleotide
ugcagguuucugagccggg

SEQ ID NO: 3107401 - RNA, 19 nt, Artificial Sequence
  Description of Artificial Sequence: Synthetic oligonucleotide
agagucagcuucucucgga

SEQ ID NO: 3107402 - RNA, 19 nt, Artificial Sequence
  Description of Artificial Sequence: Synthetic oligonucleotide
ucuguuccacaaagagaac

SEQ ID NO: 3107403 - RNA, 19 nt, Artificial Sequence
  Description of Artificial Sequence: Synthetic oligonucleotide
auucaugagucaaauucau

SEQ ID NO: 3107404 - RNA, 19 nt, Artificial Sequence
  Description of Artificial Sequence: Synthetic oligonucleotide
ugugcgcuuccucuucuuc

SEQ ID NO: 3107405 - RNA, 19 nt, Artificial Sequence
  Description of Artificial Sequence: Synthetic oligonucleotide
uucucucggagucggcuuc

SEQ ID NO: 3107406 - RNA, 19 nt, Artificial Sequence
  Description of Artificial Sequence: Synthetic oligonucleotide
ggaucauaaugcagaagag

SEQ ID NO: 3107407 - RNA, 19 nt, Artificial Sequence
  Description of Artificial Sequence: Synthetic oligonucleotide
uccugggucuucucauuca

SEQ ID NO: 3107408 - RNA, 19 nt, Artificial Sequence
  Description of Artificial Sequence: Synthetic oligonucleotide
cugagccggggccucaucc

SEQ ID NO: 3107409 - RNA, 19 nt, Artificial Sequence
  Description of Artificial Sequence: Synthetic oligonucleotide
cagguuucugagccggggc

SEQ ID NO: 3107410 - RNA, 19 nt, Artificial Sequence
  Description of Artificial Sequence: Synthetic oligonucleotide
cugcagguuucugagccgg

SEQ ID NO: 3107411 - RNA, 19 nt, Artificial Sequence
  Description of Artificial Sequence: Synthetic oligonucleotide
cucacuagucucaccagaa

SEQ ID NO: 3107412 - RNA, 19 nt, Artificial Sequence
  Description of Artificial Sequence: Synthetic oligonucleotide
uuguucacaauuggaucau

SEQ ID NO: 3107413 - RNA, 19 nt, Artificial Sequence
  Description of Artificial Sequence: Synthetic oligonucleotide
ugagccggggccucauccu

SEQ ID NO: 3107414 - RNA, 19 nt, Artificial Sequence
  Description of Artificial Sequence: Synthetic oligonucleotide
uagucucaccagaaugguu

SEQ ID NO: 3107415 - RNA, 19 nt, Artificial Sequence
  Description of Artificial Sequence: Synthetic oligonucleotide
agucggcuucucuuguggu

SEQ ID NO: 3107416 - RNA, 19 nt, Artificial Sequence
  Description of Artificial Sequence: Synthetic oligonucleotide
cuucucauucaugagucaa

SEQ ID NO: 3107417 - RNA, 19 nt, Artificial Sequence
  Description of Artificial Sequence: Synthetic oligonucleotide
uuggcucacuagucucacc

SEQ ID NO: 3107418 - RNA, 19 nt, Artificial Sequence
  Description of Artificial Sequence: Synthetic oligonucleotide
ucucggagucggcuucucu

SEQ ID NO: 3107419 - RNA, 19 nt, Artificial Sequence
  Description of Artificial Sequence: Synthetic oligonucleotide
agucagcuucucucggagu

SEQ ID NO: 3107420 - RNA, 19 nt, Artificial Sequence
  Description of Artificial Sequence: Synthetic oligonucleotide
caugcugugcgcuuccucu

SEQ ID NO: 3107421 - RNA, 19 nt, Artificial Sequence
  Description of Artificial Sequence: Synthetic oligonucleotide
cucauccugggucuucuca

SEQ ID NO: 3107422 - RNA, 19 nt, Artificial Sequence
  Description of Artificial Sequence: Synthetic oligonucleotide
ugcugugcgcuuccucuuc

SEQ ID NO: 3107423 - RNA, 19 nt, Artificial Sequence
  Description of Artificial Sequence: Synthetic oligonucleotide
ggucuucucauucaugagu

SEQ ID NO: 3107424 - RNA, 19 nt, Artificial Sequence
  Description of Artificial Sequence: Synthetic oligonucleotide
guugaaggagaaaccuguc

SEQ ID NO: 3107425 - RNA, 19 nt, Artificial Sequence
  Description of Artificial Sequence: Synthetic oligonucleotide
cuuggcucacuagucucac

SEQ ID NO: 3107426 - RNA, 19 nt, Artificial Sequence
  Description of Artificial Sequence: Synthetic oligonucleotide
gugguugaaggagaaaccu

SEQ ID NO: 3107427 - RNA, 19 nt, Artificial Sequence
  Description of Artificial Sequence: Synthetic oligonucleotide
ucccagcuuggcucacuag

SEQ ID NO: 3107428 - RNA, 19 nt, Artificial Sequence
  Description of Artificial Sequence: Synthetic oligonucleotide
caugagucaaauucauuuu

SEQ ID NO: 3107429 - RNA, 19 nt, Artificial Sequence
  Description of Artificial Sequence: Synthetic oligonucleotide
gggucuucucauucaugag

SEQ ID NO: 3107430 - RNA, 19 nt, Artificial Sequence
  Description of Artificial Sequence: Synthetic oligonucleotide
cagcuucucucggagucgg

SEQ ID NO: 3107431 - RNA, 19 nt, Artificial Sequence
  Description of Artificial Sequence: Synthetic oligonucleotide
gguugaaggagaaaccugu

SEQ ID NO: 3107432 - RNA, 19 nt, Artificial Sequence
  Description of Artificial Sequence: Synthetic oligonucleotide
agcacacacugcagguuuc

SEQ ID NO: 3107433 - RNA, 19 nt, Artificial Sequence
  Description of Artificial Sequence: Synthetic oligonucleotide
ggagaaaccugucccagcu

SEQ ID NO: 3107434 - RNA, 19 nt, Artificial Sequence
  Description of Artificial Sequence: Synthetic oligonucleotide
cccgaggccaugcugugcg

SEQ ID NO: 3107435 - RNA, 19 nt, Artificial Sequence
  Description of Artificial Sequence: Synthetic oligonucleotide
cuguuccacaaagagaacu

SEQ ID NO: 3107436 - RNA, 19 nt, Artificial Sequence
  Description of Artificial Sequence: Synthetic oligonucleotide
gagccggggccucauccug

SEQ ID NO: 3107437 - RNA, 19 nt, Artificial Sequence
  Description of Artificial Sequence: Synthetic oligonucleotide
uccucuucuucagcacaca

SEQ ID NO: 3107438 - RNA, 19 nt, Artificial Sequence
  Description of Artificial Sequence: Synthetic oligonucleotide
uguucacaauuggaucaua

SEQ ID NO: 3107439 - RNA, 19 nt, Artificial Sequence
  Description of Artificial Sequence: Synthetic oligonucleotide
ggcucacuagucucaccag

SEQ ID NO: 3107440 - RNA, 19 nt, Artificial Sequence
  Description of Artificial Sequence: Synthetic oligonucleotide
gcagguuucugagccgggg

SEQ ID NO: 3107441 - RNA, 19 nt, Artificial Sequence
  Description of Artificial Sequence: Synthetic oligonucleotide
gcucacuagucucaccaga

SEQ ID NO: 3107442 - RNA, 19 nt, Artificial Sequence
  Description of Artificial Sequence: Synthetic oligonucleotide
ccagcuuggcucacuaguc

SEQ ID NO: 3107443 - RNA, 19 nt, Artificial Sequence
  Description of Artificial Sequence: Synthetic oligonucleotide
gcuucucuugugguugaag

SEQ ID NO: 3107444 - RNA, 19 nt, Artificial Sequence
  Description of Artificial Sequence: Synthetic oligonucleotide
ggagucggcuucucuugug

SEQ ID NO: 3107445 - RNA, 19 nt, Artificial Sequence
  Description of Artificial Sequence: Synthetic oligonucleotide
ucucucggagucggcuucu

SEQ ID NO: 3107446 - RNA, 19 nt, Artificial Sequence
  Description of Artificial Sequence: Synthetic oligonucleotide
ccucuucuucagcacacac

SEQ ID NO: 3107447 - RNA, 19 nt, Artificial Sequence
  Description of Artificial Sequence: Synthetic oligonucleotide
uuucugagccggggccuca

SEQ ID NO: 3107448 - RNA, 19 nt, Artificial Sequence
  Description of Artificial Sequence: Synthetic oligonucleotide
agcuucucucggagucggc

SEQ ID NO: 3107449 - RNA, 19 nt, Artificial Sequence
  Description of Artificial Sequence: Synthetic oligonucleotide
cacacacugcagguuucug

SEQ ID NO: 3107450 - RNA, 19 nt, Artificial Sequence
  Description of Artificial Sequence: Synthetic oligonucleotide
ucugagccggggccucauc

SEQ ID NO: 3107451 - RNA, 19 nt, Artificial Sequence
  Description of Artificial Sequence: Synthetic oligonucleotide
augcugugcgcuuccucuu

SEQ ID NO: 3107452 - RNA, 19 nt, Artificial Sequence
  Description of Artificial Sequence: Synthetic oligonucleotide
cuuagagggagcguauuuu

SEQ ID NO: 3107453 - RNA, 19 nt, Artificial Sequence
  Description of Artificial Sequence: Synthetic oligonucleotide
auccacuuagagggagcgu

SEQ ID NO: 3107454 - RNA, 19 nt, Artificial Sequence
  Description of Artificial Sequence: Synthetic oligonucleotide
cuagucucaccagaauggu

SEQ ID NO: 3107455 - RNA, 19 nt, Artificial Sequence
  Description of Artificial Sequence: Synthetic oligonucleotide
agccggggccucauccugg

SEQ ID NO: 3107456 - RNA, 19 nt, Artificial Sequence
  Description of Artificial Sequence: Synthetic oligonucleotide
cuugugguugaaggagaaa

SEQ ID NO: 3107457 - RNA, 19 nt, Artificial Sequence
  Description of Artificial Sequence: Synthetic oligonucleotide
cagaagagucagcuucucu

SEQ ID NO: 3107458 - RNA, 19 nt, Artificial Sequence
  Description of Artificial Sequence: Synthetic oligonucleotide
cucggagucggcuucucuu

SEQ ID NO: 3107459 - RNA, 19 nt, Artificial Sequence
  Description of Artificial Sequence: Synthetic oligonucleotide
cagcuuggcucacuagucu

SEQ ID NO: 3107460 - RNA, 19 nt, Artificial Sequence
  Description of Artificial Sequence: Synthetic oligonucleotide
guuccacaaagagaacuuu

SEQ ID NO: 3107461 - RNA, 19 nt, Artificial Sequence
  Description of Artificial Sequence: Synthetic oligonucleotide
ggccaugcugugcgcuucc

SEQ ID NO: 3107462 - RNA, 19 nt, Artificial Sequence
  Description of Artificial Sequence: Synthetic oligonucleotide
gucccagcuuggcucacua

SEQ ID NO: 3107463 - RNA, 19 nt, Artificial Sequence
  Description of Artificial Sequence: Synthetic oligonucleotide
gccggggccucauccuggg

SEQ ID NO: 3107464 - RNA, 19 nt, Artificial Sequence
  Description of Artificial Sequence: Synthetic oligonucleotide
gagaaaccugucccagcuu

SEQ ID NO: 3107465 - RNA, 19 nt, Artificial Sequence
  Description of Artificial Sequence: Synthetic oligonucleotide
uucugagccggggccucau

SEQ ID NO: 3107466 - RNA, 19 nt, Artificial Sequence
  Description of Artificial Sequence: Synthetic oligonucleotide
cagcacacacugcagguuu

SEQ ID NO: 3107467 - RNA, 19 nt, Artificial Sequence
  Description of Artificial Sequence: Synthetic oligonucleotide
gucggcuucucuugugguu

SEQ ID NO: 3107468 - RNA, 19 nt, Artificial Sequence
  Description of Artificial Sequence: Synthetic oligonucleotide
cuucucucggagucggcuu

SEQ ID NO: 3107469 - RNA, 19 nt, Artificial Sequence
  Description of Artificial Sequence: Synthetic oligonucleotide
gucucaccagaaugguuuu

SEQ ID NO: 3107470 - RNA, 19 nt, Artificial Sequence
  Description of Artificial Sequence: Synthetic oligonucleotide
gaggccaugcugugcgcuu

SEQ ID NO: 3107471 - RNA, 19 nt, Artificial Sequence
  Description of Artificial Sequence: Synthetic oligonucleotide
ccugucccagcuuggcuca

SEQ ID NO: 3107472 - RNA, 19 nt, Artificial Sequence
  Description of Artificial Sequence: Synthetic oligonucleotide
gcagaagagucagcuucuc

SEQ ID NO: 3107473 - RNA, 19 nt, Artificial Sequence
  Description of Artificial Sequence: Synthetic oligonucleotide
ggggccucauccugggucu

SEQ ID NO: 3107474 - RNA, 19 nt, Artificial Sequence
  Description of Artificial Sequence: Synthetic oligonucleotide
gcgcuuccucuucuucagc

SEQ ID NO: 3107475 - RNA, 19 nt, Artificial Sequence
  Description of Artificial Sequence: Synthetic oligonucleotide
cccagcuuggcucacuagu

SEQ ID NO: 3107476 - RNA, 19 nt, Artificial Sequence
  Description of Artificial Sequence: Synthetic oligonucleotide
cggggccucauccuggguc

SEQ ID NO: 3107477 - RNA, 19 nt, Artificial Sequence
  Description of Artificial Sequence: Synthetic oligonucleotide
gcuucucucggagucggcu

SEQ ID NO: 3107478 - RNA, 19 nt, Artificial Sequence
  Description of Artificial Sequence: Synthetic oligonucleotide
cauccugggucuucucauu

SEQ ID NO: 3107479 - RNA, 19 nt, Artificial Sequence
  Description of Artificial Sequence: Synthetic oligonucleotide
cucucggagucggcuucuc

SEQ ID NO: 3107480 - RNA, 19 nt, Artificial Sequence
  Description of Artificial Sequence: Synthetic oligonucleotide
gcugugcgcuuccucuucu

SEQ ID NO: 3107481 - RNA, 19 nt, Artificial Sequence
  Description of Artificial Sequence: Synthetic oligonucleotide
ccucauccugggucuucuc

SEQ ID NO: 3107482 - RNA, 19 nt, Artificial Sequence
  Description of Artificial Sequence: Synthetic oligonucleotide
ccgaggccaugcugugcgc

SEQ ID NO: 3107483 - RNA, 19 nt, Artificial Sequence
  Description of Artificial Sequence: Synthetic oligonucleotide
cacuuagagggagcguauu

SEQ ID NO: 3107484 - RNA, 19 nt, Artificial Sequence
  Description of Artificial Sequence: Synthetic oligonucleotide
ggccucauccugggucuuc

SEQ ID NO: 3107485 - RNA, 19 nt, Artificial Sequence
  Description of Artificial Sequence: Synthetic oligonucleotide
gcacacacugcagguuucu

SEQ ID NO: 3107486 - RNA, 19 nt, Artificial Sequence
  Description of Artificial Sequence: Synthetic oligonucleotide
ccacuuagagggagcguau

SEQ ID NO: 3107487 - RNA, 19 nt, Artificial Sequence
  Description of Artificial Sequence: Synthetic oligonucleotide
ccccgaggccaugcugugc

SEQ ID NO: 3107488 - RNA, 19 nt, Artificial Sequence
  Description of Artificial Sequence: Synthetic oligonucleotide
cugugcgcuuccucuucuu

SEQ ID NO: 3107489 - RNA, 19 nt, Artificial Sequence
  Description of Artificial Sequence: Synthetic oligonucleotide
ggcuucucuugugguugaa

SEQ ID NO: 3107490 - RNA, 19 nt, Artificial Sequence
  Description of Artificial Sequence: Synthetic oligonucleotide
cggcuucucuugugguuga

SEQ ID NO: 3107491 - RNA, 19 nt, Artificial Sequence
  Description of Artificial Sequence: Synthetic oligonucleotide
gggccucauccugggucuu

SEQ ID NO: 3107492 - RNA, 19 nt, Artificial Sequence
  Description of Artificial Sequence: Synthetic oligonucleotide
ccggggccucauccugggu

SEQ ID NO: 3107493 - RNA, 19 nt, Artificial Sequence
  Description of Artificial Sequence: Synthetic oligonucleotide
ucaaugaugccccauuugg

SEQ ID NO: 3107494 - RNA, 19 nt, Artificial Sequence
  Description of Artificial Sequence: Synthetic oligonucleotide
agcaaaagggaucugcucc

SEQ ID NO: 3107495 - RNA, 19 nt, Artificial Sequence
  Description of Artificial Sequence: Synthetic oligonucleotide
uguggauacacaucgaugc

SEQ ID NO: 3107496 - RNA, 19 nt, Artificial Sequence
  Description of Artificial Sequence: Synthetic oligonucleotide
aaugaugccccauuugguc

SEQ ID NO: 3107497 - RNA, 19 nt, Artificial Sequence
  Description of Artificial Sequence: Synthetic oligonucleotide
acuguuaaggagcuggucg

SEQ ID NO: 3107498 - RNA, 19 nt, Artificial Sequence
  Description of Artificial Sequence: Synthetic oligonucleotide
gucguugacauccucaucg

SEQ ID NO: 3107499 - RNA, 19 nt, Artificial Sequence
  Description of Artificial Sequence: Synthetic oligonucleotide
uacacaucgaugcagugag

SEQ ID NO: 3107500 - RNA, 19 nt, Artificial Sequence
  Description of Artificial Sequence: Synthetic oligonucleotide
aauggucaggcugucagcc

SEQ ID NO: 3107501 - RNA, 19 nt, Artificial Sequence
  Description of Artificial Sequence: Synthetic oligonucleotide
acuggcaccacauucacag

SEQ ID NO: 3107502 - RNA, 19 nt, Artificial Sequence
  Description of Artificial Sequence: Synthetic oligonucleotide
ugaguuuucagauuuugcu

SEQ ID NO: 3107503 - RNA, 19 nt, Artificial Sequence
  Description of Artificial Sequence: Synthetic oligonucleotide
cuucuguggauacacaucg

SEQ ID NO: 3107504 - RNA, 19 nt, Artificial Sequence
  Description of Artificial Sequence: Synthetic oligonucleotide
cuuacuguuaaggagcugg

SEQ ID NO: 3107505 - RNA, 19 nt, Artificial Sequence
  Description of Artificial Sequence: Synthetic oligonucleotide
ucaauggucaggcugucag

SEQ ID NO: 3107506 - RNA, 19 nt, Artificial Sequence
  Description of Artificial Sequence: Synthetic oligonucleotide
gaucuuacuguuaaggagc

SEQ ID NO: 3107507 - RNA, 19 nt, Artificial Sequence
  Description of Artificial Sequence: Synthetic oligonucleotide
caucgaaacacuucugugg

SEQ ID NO: 3107508 - RNA, 19 nt, Artificial Sequence
  Description of Artificial Sequence: Synthetic oligonucleotide
uucagauuuugcuggaucc

SEQ ID NO: 3107509 - RNA, 19 nt, Artificial Sequence
  Description of Artificial Sequence: Synthetic oligonucleotide
uggauccugcuucugaagg

SEQ ID NO: 3107510 - RNA, 19 nt, Artificial Sequence
  Description of Artificial Sequence: Synthetic oligonucleotide
gaguuuucagauuuugcug

SEQ ID NO: 3107511 - RNA, 19 nt, Artificial Sequence
  Description of Artificial Sequence: Synthetic oligonucleotide
ucuucaauggucaggcugu

SEQ ID NO: 3107512 - RNA, 19 nt, Artificial Sequence
  Description of Artificial Sequence: Synthetic oligonucleotide
ucucuuucuucaaugguca

SEQ ID NO: 3107513 - RNA, 19 nt, Artificial Sequence
  Description of Artificial Sequence: Synthetic oligonucleotide
gaugcagugaguuuucaga

SEQ ID NO: 3107514 - RNA, 19 nt, Artificial Sequence
  Description of Artificial Sequence: Synthetic oligonucleotide
accacauucacaguccggc

SEQ ID NO: 3107515 - RNA, 19 nt, Artificial Sequence
  Description of Artificial Sequence: Synthetic oligonucleotide
cuuucuucaauggucaggc

SEQ ID NO: 3107516 - RNA, 19 nt, Artificial Sequence
  Description of Artificial Sequence: Synthetic oligonucleotide
uugacauccucaucgaaac

SEQ ID NO: 3107517 - RNA, 19 nt, Artificial Sequence
  Description of Artificial Sequence: Synthetic oligonucleotide
caggcugucagcccgagcg

SEQ ID NO: 3107518 - RNA, 19 nt, Artificial Sequence
  Description of Artificial Sequence: Synthetic oligonucleotide
ucuuucuucaauggucagg

SEQ ID NO: 3107519 - RNA, 19 nt, Artificial Sequence
  Description of Artificial Sequence: Synthetic oligonucleotide
ucaucgaaacacuucugug

SEQ ID NO: 3107520 - RNA, 19 nt, Artificial Sequence
  Description of Artificial Sequence: Synthetic oligonucleotide
uucaaugaugccccauuug

SEQ ID NO: 3107521 - RNA, 19 nt, Artificial Sequence
  Description of Artificial Sequence: Synthetic oligonucleotide
aaaagggaucugcucccgg

SEQ ID NO: 3107522 - RNA, 19 nt, Artificial Sequence
  Description of Artificial Sequence: Synthetic oligonucleotide
aucgaaacacuucugugga

SEQ ID NO: 3107523 - RNA, 19 nt, Artificial Sequence
  Description of Artificial Sequence: Synthetic oligonucleotide
ggaucuuacuguuaaggag

SEQ ID NO: 3107524 - RNA, 19 nt, Artificial Sequence
  Description of Artificial Sequence: Synthetic oligonucleotide
uuucagauuuugcuggauc

SEQ ID NO: 3107525 - RNA, 19 nt, Artificial Sequence
  Description of Artificial Sequence: Synthetic oligonucleotide
uggucaggcugucagcccg

SEQ ID NO: 3107526 - RNA, 19 nt, Artificial Sequence
  Description of Artificial Sequence: Synthetic oligonucleotide
caugcucucggucagcccc

SEQ ID NO: 3107527 - RNA, 19 nt, Artificial Sequence
  Description of Artificial Sequence: Synthetic oligonucleotide
ucuguggauacacaucgau

SEQ ID NO: 3107528 - RNA, 19 nt, Artificial Sequence
  Description of Artificial Sequence: Synthetic oligonucleotide
aaagggaucugcucccgga

SEQ ID NO: 3107529 - RNA, 19 nt, Artificial Sequence
  Description of Artificial Sequence: Synthetic oligonucleotide
gacauccucaucgaaacac

SEQ ID NO: 3107530 - RNA, 19 nt, Artificial Sequence
  Description of Artificial Sequence: Synthetic oligonucleotide
agcccgagcgaucacuggc

SEQ ID NO: 3107531 - RNA, 19 nt, Artificial Sequence
  Description of Artificial Sequence: Synthetic oligonucleotide
gauccugcuucugaaggcg

SEQ ID NO: 3107532 - RNA, 19 nt, Artificial Sequence
  Description of Artificial Sequence: Synthetic oligonucleotide
gaaacacuucuguggauac

SEQ ID NO: 3107533 - RNA, 19 nt, Artificial Sequence
  Description of Artificial Sequence: Synthetic oligonucleotide
gaucacuggcaccacauuc

SEQ ID NO: 3107534 - RNA, 19 nt, Artificial Sequence
  Description of Artificial Sequence: Synthetic oligonucleotide
uggauacacaucgaugcag

SEQ ID NO: 3107535 - RNA, 19 nt, Artificial Sequence
  Description of Artificial Sequence: Synthetic oligonucleotide
gaaggcgucucuuucuuca

SEQ ID NO: 3107536 - RNA, 19 nt, Artificial Sequence
  Description of Artificial Sequence: Synthetic oligonucleotide
gagcuggucguugacaucc

SEQ ID NO: 3107537 - RNA, 19 nt, Artificial Sequence
  Description of Artificial Sequence: Synthetic oligonucleotide
uuaaggagcuggucguuga

SEQ ID NO: 3107538 - RNA, 19 nt, Artificial Sequence
  Description of Artificial Sequence: Synthetic oligonucleotide
auucaccacaugcucucgg

SEQ ID NO: 3107539 - RNA, 19 nt, Artificial Sequence
  Description of Artificial Sequence: Synthetic oligonucleotide
agugaguuuucagauuuug

SEQ ID NO: 3107540 - RNA, 19 nt, Artificial Sequence
  Description of Artificial Sequence: Synthetic oligonucleotide
gauacacaucgaugcagug

SEQ ID NO: 3107541 - RNA, 19 nt, Artificial Sequence
  Description of Artificial Sequence: Synthetic oligonucleotide
cacagcaaaagggaucugc

SEQ ID NO: 3107542 - RNA, 19 nt, Artificial Sequence
  Description of Artificial Sequence: Synthetic oligonucleotide
acuucuguggauacacauc

SEQ ID NO: 3107543 - RNA, 19 nt, Artificial Sequence
  Description of Artificial Sequence: Synthetic oligonucleotide
uuacuguuaaggagcuggu

SEQ ID NO: 3107544 - RNA, 19 nt, Artificial Sequence
  Description of Artificial Sequence: Synthetic oligonucleotide
uuugcuggauccugcuucu

SEQ ID NO: 3107545 - RNA, 19 nt, Artificial Sequence
  Description of Artificial Sequence: Synthetic oligonucleotide
augcagugaguuuucagau

SEQ ID NO: 3107546 - RNA, 19 nt, Artificial Sequence
  Description of Artificial Sequence: Synthetic oligonucleotide
acauucacaguccggcaca

SEQ ID NO: 3107547 - RNA, 19 nt, Artificial Sequence
  Description of Artificial Sequence: Synthetic oligonucleotide
ucccauucaccacaugcuc

SEQ ID NO: 3107548 - RNA, 19 nt, Artificial Sequence
  Description of Artificial Sequence: Synthetic oligonucleotide
ucccggaucuuacuguuaa

SEQ ID NO: 3107549 - RNA, 19 nt, Artificial Sequence
  Description of Artificial Sequence: Synthetic oligonucleotide
gucucuuucuucaaugguc

SEQ ID NO: 3107550 - RNA, 19 nt, Artificial Sequence
  Description of Artificial Sequence: Synthetic oligonucleotide
cacauucacaguccggcac

SEQ ID NO: 3107551 - RNA, 19 nt, Artificial Sequence
  Description of Artificial Sequence: Synthetic oligonucleotide
ucagauuuugcuggauccu

SEQ ID NO: 3107552 - RNA, 19 nt, Artificial Sequence
  Description of Artificial Sequence: Synthetic oligonucleotide
auacacaucgaugcaguga

SEQ ID NO: 3107553 - RNA, 19 nt, Artificial Sequence
  Description of Artificial Sequence: Synthetic oligonucleotide
ucagcccgagcgaucacug

SEQ ID NO: 3107554 - RNA, 19 nt, Artificial Sequence
  Description of Artificial Sequence: Synthetic oligonucleotide
acacaccucccauucacca

SEQ ID NO: 3107555 - RNA, 19 nt, Artificial Sequence
  Description of Artificial Sequence: Synthetic oligonucleotide
cacaguccggcacagccgc

SEQ ID NO: 3107556 - RNA, 19 nt, Artificial Sequence
  Description of Artificial Sequence: Synthetic oligonucleotide
uucaccacaugcucucggu

SEQ ID NO: 3107557 - RNA, 19 nt, Artificial Sequence
  Description of Artificial Sequence: Synthetic oligonucleotide
accacaugcucucggucag

SEQ ID NO: 3107558 - RNA, 19 nt, Artificial Sequence
  Description of Artificial Sequence: Synthetic oligonucleotide
acaugcucucggucagccc

SEQ ID NO: 3107559 - RNA, 19 nt, Artificial Sequence
  Description of Artificial Sequence: Synthetic oligonucleotide
gugaguuuucagauuuugc

SEQ ID NO: 3107560 - RNA, 19 nt, Artificial Sequence
  Description of Artificial Sequence: Synthetic oligonucleotide
aagggaucugcucccggau

SEQ ID NO: 3107561 - RNA, 19 nt, Artificial Sequence
  Description of Artificial Sequence: Synthetic oligonucleotide
uuggucuuccggcccagga

SEQ ID NO: 3107562 - RNA, 19 nt, Artificial Sequence
  Description of Artificial Sequence: Synthetic oligonucleotide
ugacauccucaucgaaaca

SEQ ID NO: 3107563 - RNA, 19 nt, Artificial Sequence
  Description of Artificial Sequence: Synthetic oligonucleotide
agggaucugcucccggauc

SEQ ID NO: 3107564 - RNA, 19 nt, Artificial Sequence
  Description of Artificial Sequence: Synthetic oligonucleotide
cucucggucagccccgacc

SEQ ID NO: 3107565 - RNA, 19 nt, Artificial Sequence
  Description of Artificial Sequence: Synthetic oligonucleotide
ccucccauucaccacaugc

SEQ ID NO: 3107566 - RNA, 19 nt, Artificial Sequence
  Description of Artificial Sequence: Synthetic oligonucleotide
guugacauccucaucgaaa

SEQ ID NO: 3107567 - RNA, 19 nt, Artificial Sequence
  Description of Artificial Sequence: Synthetic oligonucleotide
uggucguugacauccucau

SEQ ID NO: 3107568 - RNA, 19 nt, Artificial Sequence
  Description of Artificial Sequence: Synthetic oligonucleotide
uggucuuccggcccaggac

SEQ ID NO: 3107569 - RNA, 19 nt, Artificial Sequence
  Description of Artificial Sequence: Synthetic oligonucleotide
caauggucaggcugucagc

SEQ ID NO: 3107570 - RNA, 19 nt, Artificial Sequence
  Description of Artificial Sequence: Synthetic oligonucleotide
aucacuggcaccacauuca

SEQ ID NO: 3107571 - RNA, 19 nt, Artificial Sequence
  Description of Artificial Sequence: Synthetic oligonucleotide
ucguugacauccucaucga

SEQ ID NO: 3107572 - RNA, 19 nt, Artificial Sequence
  Description of Artificial Sequence: Synthetic oligonucleotide
uaaggagcuggucguugac

SEQ ID NO: 3107573 - RNA, 19 nt, Artificial Sequence
  Description of Artificial Sequence: Synthetic oligonucleotide
caggacacaccucccauuc

SEQ ID NO: 3107574 - RNA, 19 nt, Artificial Sequence
  Description of Artificial Sequence: Synthetic oligonucleotide
acagcaaaagggaucugcu

SEQ ID NO: 3107575 - RNA, 19 nt, Artificial Sequence
  Description of Artificial Sequence: Synthetic oligonucleotide
cccgaccacagcaaaaggg

SEQ ID NO: 3107576 - RNA, 19 nt, Artificial Sequence
  Description of Artificial Sequence: Synthetic oligonucleotide
aaacacuucuguggauaca

SEQ ID NO: 3107577 - RNA, 19 nt, Artificial Sequence
  Description of Artificial Sequence: Synthetic oligonucleotide
gcaaaagggaucugcuccc

SEQ ID NO: 3107578 - RNA, 19 nt, Artificial Sequence
  Description of Artificial Sequence: Synthetic oligonucleotide
guuaaggagcuggucguug

SEQ ID NO: 3107579 - RNA, 19 nt, Artificial Sequence
  Description of Artificial Sequence: Synthetic oligonucleotide
guuuucagauuuugcugga

SEQ ID NO: 3107580 - RNA, 19 nt, Artificial Sequence
  Description of Artificial Sequence: Synthetic oligonucleotide
cagauuuugcuggauccug

SEQ ID NO: 3107581 - RNA, 19 nt, Artificial Sequence
  Description of Artificial Sequence: Synthetic oligonucleotide
ugcucccggaucuuacugu

SEQ ID NO: 3107582 - RNA, 19 nt, Artificial Sequence
  Description of Artificial Sequence: Synthetic oligonucleotide
ucaccacaugcucucgguc

SEQ ID NO: 3107583 - RNA, 19 nt, Artificial Sequence
  Description of Artificial Sequence: Synthetic oligonucleotide
cucuuucuucaauggucag

SEQ ID NO: 3107584 - RNA, 19 nt, Artificial Sequence
  Description of Artificial Sequence: Synthetic oligonucleotide
ugccccauuuggucuuccg

SEQ ID NO: 3107585 - RNA, 19 nt, Artificial Sequence
  Description of Artificial Sequence: Synthetic oligonucleotide
uccggcccaggacacaccu

SEQ ID NO: 3107586 - RNA, 19 nt, Artificial Sequence
  Description of Artificial Sequence: Synthetic oligonucleotide
gcgucucuuucuucaaugg

SEQ ID NO: 3107587 - RNA, 19 nt, Artificial Sequence
  Description of Artificial Sequence: Synthetic oligonucleotide
caaaagggaucugcucccg

SEQ ID NO: 3107588 - RNA, 19 nt, Artificial Sequence
  Description of Artificial Sequence: Synthetic oligonucleotide
ggcgucucuuucuucaaug

SEQ ID NO: 3107589 - RNA, 19 nt, Artificial Sequence
  Description of Artificial Sequence: Synthetic oligonucleotide
caccacauucacaguccgg

SEQ ID NO: 3107590 - RNA, 19 nt, Artificial Sequence
  Description of Artificial Sequence: Synthetic oligonucleotide
aguccggcacagccgccgc

SEQ ID NO: 3107591 - RNA, 19 nt, Artificial Sequence
  Description of Artificial Sequence: Synthetic oligonucleotide
gucagccccgaccacagca

SEQ ID NO: 3107592 - RNA, 19 nt, Artificial Sequence
  Description of Artificial Sequence: Synthetic oligonucleotide
uuucuucaauggucaggcu

SEQ ID NO: 3107593 - RNA, 19 nt, Artificial Sequence
  Description of Artificial Sequence: Synthetic oligonucleotide
ugcuucugaaggcgucucu

SEQ ID NO: 3107594 - RNA, 19 nt, Artificial Sequence
  Description of Artificial Sequence: Synthetic oligonucleotide
cuggucguugacauccuca

SEQ ID NO: 3107595 - RNA, 19 nt, Artificial Sequence
  Description of Artificial Sequence: Synthetic oligonucleotide
ggauccugcuucugaaggc

SEQ ID NO: 3107596 - RNA, 19 nt, Artificial Sequence
  Description of Artificial Sequence: Synthetic oligonucleotide
caccacaugcucucgguca

SEQ ID NO: 3107597 - RNA, 19 nt, Artificial Sequence
  Description of Artificial Sequence: Synthetic oligonucleotide
aucgaugcagugaguuuuc

SEQ ID NO: 3107598 - RNA, 19 nt, Artificial Sequence
  Description of Artificial Sequence: Synthetic oligonucleotide
gacacaccucccauucacc

SEQ ID NO: 3107599 - RNA, 19 nt, Artificial Sequence
  Description of Artificial Sequence: Synthetic oligonucleotide
aucuuacuguuaaggagcu

SEQ ID NO: 3107600 - RNA, 19 nt, Artificial Sequence
  Description of Artificial Sequence: Synthetic oligonucleotide
guggauacacaucgaugca

SEQ ID NO: 3107601 - RNA, 19 nt, Artificial Sequence
  Description of Artificial Sequence: Synthetic oligonucleotide
cacaugcucucggucagcc

SEQ ID NO: 3107602 - RNA, 19 nt, Artificial Sequence
  Description of Artificial Sequence: Synthetic oligonucleotide
ggacacaccucccauucac

SEQ ID NO: 3107603 - RNA, 19 nt, Artificial Sequence
  Description of Artificial Sequence: Synthetic oligonucleotide
cacaccucccauucaccac

SEQ ID NO: 3107604 - RNA, 19 nt, Artificial Sequence
  Description of Artificial Sequence: Synthetic oligonucleotide
acaucgaugcagugaguuu

SEQ ID NO: 3107605 - RNA, 19 nt, Artificial Sequence
  Description of Artificial Sequence: Synthetic oligonucleotide
cucaucgaaacacuucugu

SEQ ID NO: 3107606 - RNA, 19 nt, Artificial Sequence
  Description of Artificial Sequence: Synthetic oligonucleotide
ccccauuuggucuuccggc

SEQ ID NO: 3107607 - RNA, 19 nt, Artificial Sequence
  Description of Artificial Sequence: Synthetic oligonucleotide
acauccucaucgaaacacu

SEQ ID NO: 3107608 - RNA, 19 nt, Artificial Sequence
  Description of Artificial Sequence: Synthetic oligonucleotide
aucugcucccggaucuuac

SEQ ID NO: 3107609 - RNA, 19 nt, Artificial Sequence
  Description of Artificial Sequence: Synthetic oligonucleotide
uacuguuaaggagcugguc

SEQ ID NO: 3107610 - RNA, 19 nt, Artificial Sequence
  Description of Artificial Sequence: Synthetic oligonucleotide
cauucaccacaugcucucg

SEQ ID NO: 3107611 - RNA, 19 nt, Artificial Sequence
  Description of Artificial Sequence: Synthetic oligonucleotide
uucaauggucaggcuguca

SEQ ID NO: 3107612 - RNA, 19 nt, Artificial Sequence
  Description of Artificial Sequence: Synthetic oligonucleotide
ugaaggcgucucuuucuuc

SEQ ID NO: 3107613 - RNA, 19 nt, Artificial Sequence
  Description of Artificial Sequence: Synthetic oligonucleotide
ugaugccccauuuggucuu

SEQ ID NO: 3107614 - RNA, 19 nt, Artificial Sequence
  Description of Artificial Sequence: Synthetic oligonucleotide
ucuuacuguuaaggagcug

SEQ ID NO: 3107615 - RNA, 19 nt, Artificial Sequence
  Description of Artificial Sequence: Synthetic oligonucleotide
uuuggucuuccggcccagg

SEQ ID NO: 3107616 - RNA, 19 nt, Artificial Sequence
  Description of Artificial Sequence: Synthetic oligonucleotide
gcaccacauucacaguccg

SEQ ID NO: 3107617 - RNA, 19 nt, Artificial Sequence
  Description of Artificial Sequence: Synthetic oligonucleotide
ucggucagccccgaccaca

SEQ ID NO: 3107618 - RNA, 19 nt, Artificial Sequence
  Description of Artificial Sequence: Synthetic oligonucleotide
ucgaaacacuucuguggau

SEQ ID NO: 3107619 - RNA, 19 nt, Artificial Sequence
  Description of Artificial Sequence: Synthetic oligonucleotide
cugcucccggaucuuacug

SEQ ID NO: 3107620 - RNA, 19 nt, Artificial Sequence
  Description of Artificial Sequence: Synthetic oligonucleotide
gccccauuuggucuuccgg

SEQ ID NO: 3107621 - RNA, 19 nt, Artificial Sequence
  Description of Artificial Sequence: Synthetic oligonucleotide
agcgaucacuggcaccaca

SEQ ID NO: 3107622 - RNA, 19 nt, Artificial Sequence
  Description of Artificial Sequence: Synthetic oligonucleotide
ggucuuccggcccaggaca

SEQ ID NO: 3107623 - RNA, 19 nt, Artificial Sequence
  Description of Artificial Sequence: Synthetic oligonucleotide
cauucacaguccggcacag

SEQ ID NO: 3107624 - RNA, 19 nt, Artificial Sequence
  Description of Artificial Sequence: Synthetic oligonucleotide
cccauuuggucuuccggcc

SEQ ID NO: 3107625 - RNA, 19 nt, Artificial Sequence
  Description of Artificial Sequence: Synthetic oligonucleotide
uccggcacagccgccgcag

SEQ ID NO: 3107626 - RNA, 19 nt, Artificial Sequence
  Description of Artificial Sequence: Synthetic oligonucleotide
cauuuggucuuccggccca

SEQ ID NO: 3107627 - RNA, 19 nt, Artificial Sequence
  Description of Artificial Sequence: Synthetic oligonucleotide
ucaggcugucagcccgagc

SEQ ID NO: 3107628 - RNA, 19 nt, Artificial Sequence
  Description of Artificial Sequence: Synthetic oligonucleotide
ggcaccacauucacagucc

SEQ ID NO: 3107629 - RNA, 19 nt, Artificial Sequence
  Description of Artificial Sequence: Synthetic oligonucleotide
cuguuaaggagcuggucgu

SEQ ID NO: 3107630 - RNA, 19 nt, Artificial Sequence
  Description of Artificial Sequence: Synthetic oligonucleotide
aggacacaccucccauuca

SEQ ID NO: 3107631 - RNA, 19 nt, Artificial Sequence
  Description of Artificial Sequence: Synthetic oligonucleotide
cuuccggcccaggacacac

SEQ ID NO: 3107632 - RNA, 19 nt, Artificial Sequence
  Description of Artificial Sequence: Synthetic oligonucleotide
ccauucaccacaugcucuc

SEQ ID NO: 3107633 - RNA, 19 nt, Artificial Sequence
  Description of Artificial Sequence: Synthetic oligonucleotide
uguuaaggagcuggucguu

SEQ ID NO: 3107634 - RNA, 19 nt, Artificial Sequence
  Description of Artificial Sequence: Synthetic oligonucleotide
ucgaugcagugaguuuuca

SEQ ID NO: 3107635 - RNA, 19 nt, Artificial Sequence
  Description of Artificial Sequence: Synthetic oligonucleotide
cucccauucaccacaugcu

SEQ ID NO: 3107636 - RNA, 19 nt, Artificial Sequence
  Description of Artificial Sequence: Synthetic oligonucleotide
ccgaccacagcaaaaggga

SEQ ID NO: 3107637 - RNA, 19 nt, Artificial Sequence
  Description of Artificial Sequence: Synthetic oligonucleotide
caaugaugccccauuuggu

SEQ ID NO: 3107638 - RNA, 19 nt, Artificial Sequence
  Description of Artificial Sequence: Synthetic oligonucleotide
caguccggcacagccgccg

SEQ ID NO: 3107639 - RNA, 19 nt, Artificial Sequence
  Description of Artificial Sequence: Synthetic oligonucleotide
auuuggucuuccggcccag

SEQ ID NO: 3107640 - RNA, 19 nt, Artificial Sequence
  Description of Artificial Sequence: Synthetic oligonucleotide
cagcccgagcgaucacugg

SEQ ID NO: 3107641 - RNA, 19 nt, Artificial Sequence
  Description of Artificial Sequence: Synthetic oligonucleotide
cacuucuguggauacacau

SEQ ID NO: 3107642 - RNA, 19 nt, Artificial Sequence
  Description of Artificial Sequence: Synthetic oligonucleotide
ccauuuggucuuccggccc

SEQ ID NO: 3107643 - RNA, 19 nt, Artificial Sequence
  Description of Artificial Sequence: Synthetic oligonucleotide
uuccggcccaggacacacc

SEQ ID NO: 3107644 - RNA, 19 nt, Artificial Sequence
  Description of Artificial Sequence: Synthetic oligonucleotide
aggcgucucuuucuucaau

SEQ ID NO: 3107645 - RNA, 19 nt, Artificial Sequence
  Description of Artificial Sequence: Synthetic oligonucleotide
augcucucggucagccccg

SEQ ID NO: 3107646 - RNA, 19 nt, Artificial Sequence
  Description of Artificial Sequence: Synthetic oligonucleotide
cugucagcccgagcgauca

SEQ ID NO: 3107647 - RNA, 19 nt, Artificial Sequence
  Description of Artificial Sequence: Synthetic oligonucleotide
aggcugucagcccgagcga

SEQ ID NO: 3107648 - RNA, 19 nt, Artificial Sequence
  Description of Artificial Sequence: Synthetic oligonucleotide
gccccgaccacagcaaaag

SEQ ID NO: 3107649 - RNA, 19 nt, Artificial Sequence
  Description of Artificial Sequence: Synthetic oligonucleotide
augccccauuuggucuucc

SEQ ID NO: 3107650 - RNA, 19 nt, Artificial Sequence
  Description of Artificial Sequence: Synthetic oligonucleotide
ugucagcccgagcgaucac

SEQ ID NO: 3107651 - RNA, 19 nt, Artificial Sequence
  Description of Artificial Sequence: Synthetic oligonucleotide
caucgaugcagugaguuuu

SEQ ID NO: 3107652 - RNA, 19 nt, Artificial Sequence
  Description of Artificial Sequence: Synthetic oligonucleotide
ucuuccggcccaggacaca

SEQ ID NO: 3107653 - RNA, 19 nt, Artificial Sequence
  Description of Artificial Sequence: Synthetic oligonucleotide
ccucaucgaaacacuucug

SEQ ID NO: 3107654 - RNA, 19 nt, Artificial Sequence
  Description of Artificial Sequence: Synthetic oligonucleotide
acaguccggcacagccgcc

SEQ ID NO: 3107655 - RNA, 19 nt, Artificial Sequence
  Description of Artificial Sequence: Synthetic oligonucleotide
cgaugcagugaguuuucag

SEQ ID NO: 3107656 - RNA, 19 nt, Artificial Sequence
  Description of Artificial Sequence: Synthetic oligonucleotide
ggauacacaucgaugcagu

SEQ ID NO: 3107657 - RNA, 19 nt, Artificial Sequence
  Description of Artificial Sequence: Synthetic oligonucleotide
cggaucuuacuguuaagga

SEQ ID NO: 3107658 - RNA, 19 nt, Artificial Sequence
  Description of Artificial Sequence: Synthetic oligonucleotide
uugcuggauccugcuucug

SEQ ID NO: 3107659 - RNA, 19 nt, Artificial Sequence
  Description of Artificial Sequence: Synthetic oligonucleotide
cugcuucugaaggcgucuc

SEQ ID NO: 3107660 - RNA, 19 nt, Artificial Sequence
  Description of Artificial Sequence: Synthetic oligonucleotide
auccugcuucugaaggcgu

SEQ ID NO: 3107661 - RNA, 19 nt, Artificial Sequence
  Description of Artificial Sequence: Synthetic oligonucleotide
cacuggcaccacauucaca

SEQ ID NO: 3107662 - RNA, 19 nt, Artificial Sequence
  Description of Artificial Sequence: Synthetic oligonucleotide
cacaucgaugcagugaguu

SEQ ID NO: 3107663 - RNA, 19 nt, Artificial Sequence
  Description of Artificial Sequence: Synthetic oligonucleotide
gaugccccauuuggucuuc

SEQ ID NO: 3107664 - RNA, 19 nt, Artificial Sequence
  Description of Artificial Sequence: Synthetic oligonucleotide
accucccauucaccacaug

SEQ ID NO: 3107665 - RNA, 19 nt, Artificial Sequence
  Description of Artificial Sequence: Synthetic oligonucleotide
ggucguugacauccucauc

SEQ ID NO: 3107666 - RNA, 19 nt, Artificial Sequence
  Description of Artificial Sequence: Synthetic oligonucleotide
cauccucaucgaaacacuu

SEQ ID NO: 3107667 - RNA, 19 nt, Artificial Sequence
  Description of Artificial Sequence: Synthetic oligonucleotide
gucaggcugucagcccgag

SEQ ID NO: 3107668 - RNA, 19 nt, Artificial Sequence
  Description of Artificial Sequence: Synthetic oligonucleotide
ccccgaccacagcaaaagg

SEQ ID NO: 3107669 - RNA, 19 nt, Artificial Sequence
  Description of Artificial Sequence: Synthetic oligonucleotide
cccggaucuuacuguuaag

SEQ ID NO: 3107670 - RNA, 19 nt, Artificial Sequence
  Description of Artificial Sequence: Synthetic oligonucleotide
ccgagcgaucacuggcacc

SEQ ID NO: 3107671 - RNA, 19 nt, Artificial Sequence
  Description of Artificial Sequence: Synthetic oligonucleotide
acacaucgaugcagugagu

SEQ ID NO: 3107672 - RNA, 19 nt, Artificial Sequence
  Description of Artificial Sequence: Synthetic oligonucleotide
cugaaggcgucucuuucuu

SEQ ID NO: 3107673 - RNA, 19 nt, Artificial Sequence
  Description of Artificial Sequence: Synthetic oligonucleotide
ugcucucggucagccccga

SEQ ID NO: 3107674 - RNA, 19 nt, Artificial Sequence
  Description of Artificial Sequence: Synthetic oligonucleotide
ccacauucacaguccggca

SEQ ID NO: 3107675 - RNA, 19 nt, Artificial Sequence
  Description of Artificial Sequence: Synthetic oligonucleotide
agcuggucguugacauccu

SEQ ID NO: 3107676 - RNA, 19 nt, Artificial Sequence
  Description of Artificial Sequence: Synthetic oligonucleotide
gcuggucguugacauccuc

SEQ ID NO: 3107677 - RNA, 19 nt, Artificial Sequence
  Description of Artificial Sequence: Synthetic oligonucleotide
agccccgaccacagcaaaa

SEQ ID NO: 3107678 - RNA, 19 nt, Artificial Sequence
  Description of Artificial Sequence: Synthetic oligonucleotide
cccauucaccacaugcucu

SEQ ID NO: 3107679 - RNA, 19 nt, Artificial Sequence
  Description of Artificial Sequence: Synthetic oligonucleotide
gcccaggacacaccuccca

SEQ ID NO: 3107680 - RNA, 19 nt, Artificial Sequence
  Description of Artificial Sequence: Synthetic oligonucleotide
cucccggaucuuacuguua

SEQ ID NO: 3107681 - RNA, 19 nt, Artificial Sequence
  Description of Artificial Sequence: Synthetic oligonucleotide
cgaaacacuucuguggaua

SEQ ID NO: 3107682 - RNA, 19 nt, Artificial Sequence
  Description of Artificial Sequence: Synthetic oligonucleotide
cccgagcgaucacuggcac

SEQ ID NO: 3107683 - RNA, 19 nt, Artificial Sequence
  Description of Artificial Sequence: Synthetic oligonucleotide
cggucagccccgaccacag

SEQ ID NO: 3107684 - RNA, 19 nt, Artificial Sequence
  Description of Artificial Sequence: Synthetic oligonucleotide
ggucagccccgaccacagc

SEQ ID NO: 3107685 - RNA, 19 nt, Artificial Sequence
  Description of Artificial Sequence: Synthetic oligonucleotide
cagugaguuuucagauuuu

SEQ ID NO: 3107686 - RNA, 19 nt, Artificial Sequence
  Description of Artificial Sequence: Synthetic oligonucleotide
cuggcaccacauucacagu

SEQ ID NO: 3107687 - RNA, 19 nt, Artificial Sequence
  Description of Artificial Sequence: Synthetic oligonucleotide
guccggcacagccgccgca

SEQ ID NO: 3107688 - RNA, 19 nt, Artificial Sequence
  Description of Artificial Sequence: Synthetic oligonucleotide
gcccgagcgaucacuggca

SEQ ID NO: 3107689 - RNA, 19 nt, Artificial Sequence
  Description of Artificial Sequence: Synthetic oligonucleotide
cagccccgaccacagcaaa

SEQ ID NO: 3107690 - RNA, 19 nt, Artificial Sequence
  Description of Artificial Sequence: Synthetic oligonucleotide
gcugucagcccgagcgauc

SEQ ID NO: 3107691 - RNA, 19 nt, Artificial Sequence
  Description of Artificial Sequence: Synthetic oligonucleotide
ccacaugcucucggucagc

SEQ ID NO: 3107692 - RNA, 19 nt, Artificial Sequence
  Description of Artificial Sequence: Synthetic oligonucleotide
gcgaucacuggcaccacau

SEQ ID NO: 3107693 - RNA, 19 nt, Artificial Sequence
  Description of Artificial Sequence: Synthetic oligonucleotide
ggucaggcugucagcccga

SEQ ID NO: 3107694 - RNA, 19 nt, Artificial Sequence
  Description of Artificial Sequence: Synthetic oligonucleotide
gcucccggaucuuacuguu

SEQ ID NO: 3107695 - RNA, 19 nt, Artificial Sequence
  Description of Artificial Sequence: Synthetic oligonucleotide
ccggcacagccgccgcagg

SEQ ID NO: 3107696 - RNA, 19 nt, Artificial Sequence
  Description of Artificial Sequence: Synthetic oligonucleotide
cgucucuuucuucaauggu

SEQ ID NO: 3107697 - RNA, 19 nt, Artificial Sequence
  Description of Artificial Sequence: Synthetic oligonucleotide
cguugacauccucaucgaa

SEQ ID NO: 3107698 - RNA, 19 nt, Artificial Sequence
  Description of Artificial Sequence: Synthetic oligonucleotide
caccucccauucaccacau

SEQ ID NO: 3107699 - RNA, 19 nt, Artificial Sequence
  Description of Artificial Sequence: Synthetic oligonucleotide
ccacagcaaaagggaucug

SEQ ID NO: 3107700 - RNA, 19 nt, Artificial Sequence
  Description of Artificial Sequence: Synthetic oligonucleotide
gcucucggucagccccgac

SEQ ID NO: 3107701 - RNA, 19 nt, Artificial Sequence
  Description of Artificial Sequence: Synthetic oligonucleotide
ggcugucagcccgagcgau

SEQ ID NO: 3107702 - RNA, 19 nt, Artificial Sequence
  Description of Artificial Sequence: Synthetic oligonucleotide
cccaggacacaccucccau

SEQ ID NO: 3107703 - RNA, 19 nt, Artificial Sequence
  Description of Artificial Sequence: Synthetic oligonucleotide
cgaccacagcaaaagggau

SEQ ID NO: 3107704 - RNA, 19 nt, Artificial Sequence
  Description of Artificial Sequence: Synthetic oligonucleotide
ccaggacacaccucccauu

SEQ ID NO: 3107705 - RNA, 19 nt, Artificial Sequence
  Description of Artificial Sequence: Synthetic oligonucleotide
cgaucacuggcaccacauu

SEQ ID NO: 3107706 - RNA, 19 nt, Artificial Sequence
  Description of Artificial Sequence: Synthetic oligonucleotide
ugaauggugauuaugaugg

SEQ ID NO: 3107707 - RNA, 19 nt, Artificial Sequence
  Description of Artificial Sequence: Synthetic oligonucleotide
uauuagacaagcuauaagu

SEQ ID NO: 3107708 - RNA, 19 nt, Artificial Sequence
  Description of Artificial Sequence: Synthetic oligonucleotide
aagacaaaguauuagacaa

SEQ ID NO: 3107709 - RNA, 19 nt, Artificial Sequence
  Description of Artificial Sequence: Synthetic oligonucleotide
gaagcuguaaaugagagug

SEQ ID NO: 3107710 - RNA, 19 nt, Artificial Sequence
  Description of Artificial Sequence: Synthetic oligonucleotide
gaggauuuaguacucuugg

SEQ ID NO: 3107711 - RNA, 19 nt, Artificial Sequence
  Description of Artificial Sequence: Synthetic oligonucleotide
gaugaucaaacacugcugc

SEQ ID NO: 3107712 - RNA, 19 nt, Artificial Sequence
  Description of Artificial Sequence: Synthetic oligonucleotide
aacaggaagcuguaaauga

SEQ ID NO: 3107713 - RNA, 19 nt, Artificial Sequence
  Description of Artificial Sequence: Synthetic oligonucleotide
gugauuaugaugguggugg

SEQ ID NO: 3107714 - RNA, 19 nt, Artificial Sequence
  Description of Artificial Sequence: Synthetic oligonucleotide
cacaguaccaacaggaagc

SEQ ID NO: 3107715 - RNA, 19 nt, Artificial Sequence
  Description of Artificial Sequence: Synthetic oligonucleotide
ugaagacaaaguauuagac

SEQ ID NO: 3107716 - RNA, 19 nt, Artificial Sequence
  Description of Artificial Sequence: Synthetic oligonucleotide
uggaugaucaaacacugcu

SEQ ID NO: 3107717 - RNA, 19 nt, Artificial Sequence
  Description of Artificial Sequence: Synthetic oligonucleotide
agcuauaagucuugugugc

SEQ ID NO: 3107718 - RNA, 19 nt, Artificial Sequence
  Description of Artificial Sequence: Synthetic oligonucleotide
aaaguauuagacaagcuau

SEQ ID NO: 3107719 - RNA, 19 nt, Artificial Sequence
  Description of Artificial Sequence: Synthetic oligonucleotide
ugugcuaaggugcugcugc

SEQ ID NO: 3107720 - RNA, 19 nt, Artificial Sequence
  Description of Artificial Sequence: Synthetic oligonucleotide
uuagacaagcuauaagucu

SEQ ID NO: 3107721 - RNA, 19 nt, Artificial Sequence
  Description of Artificial Sequence: Synthetic oligonucleotide
aaaugagagugcuugugug

SEQ ID NO: 3107722 - RNA, 19 nt, Artificial Sequence
  Description of Artificial Sequence: Synthetic oligonucleotide
aggaagaggauuuaguacu

SEQ ID NO: 3107723 - RNA, 19 nt, Artificial Sequence
  Description of Artificial Sequence: Synthetic oligonucleotide
aagcuauaagucuugugug

SEQ ID NO: 3107724 - RNA, 19 nt, Artificial Sequence
  Description of Artificial Sequence: Synthetic oligonucleotide
uuuguucacaguaccaaca

SEQ ID NO: 3107725 - RNA, 19 nt, Artificial Sequence
  Description of Artificial Sequence: Synthetic oligonucleotide
gaugaagacaaaguauuag

SEQ ID NO: 3107726 - RNA, 19 nt, Artificial Sequence
  Description of Artificial Sequence: Synthetic oligonucleotide
uuuuggaucacuuggccgu

SEQ ID NO: 3107727 - RNA, 19 nt, Artificial Sequence
  Description of Artificial Sequence: Synthetic oligonucleotide
gaagacaaaguauuagaca

SEQ ID NO: 3107728 - RNA, 19 nt, Artificial Sequence
  Description of Artificial Sequence: Synthetic oligonucleotide
gacaaaguauuagacaagc

SEQ ID NO: 3107729 - RNA, 19 nt, Artificial Sequence
  Description of Artificial Sequence: Synthetic oligonucleotide
ucgaagaugaagacaaagu

SEQ ID NO: 3107730 - RNA, 19 nt, Artificial Sequence
  Description of Artificial Sequence: Synthetic oligonucleotide
uaaaugagagugcuugugu

SEQ ID NO: 3107731 - RNA, 19 nt, Artificial Sequence
  Description of Artificial Sequence: Synthetic oligonucleotide
aaugagagugcuuguguga

SEQ ID NO: 3107732 - RNA, 19 nt, Artificial Sequence
  Description of Artificial Sequence: Synthetic oligonucleotide
ucacaguaccaacaggaag

SEQ ID NO: 3107733 - RNA, 19 nt, Artificial Sequence
  Description of Artificial Sequence: Synthetic oligonucleotide
aggauuuaguacucuuggc

SEQ ID NO: 3107734 - RNA, 19 nt, Artificial Sequence
  Description of Artificial Sequence: Synthetic oligonucleotide
uguuuuggaucacuuggcc

SEQ ID NO: 3107735 - RNA, 19 nt, Artificial Sequence
  Description of Artificial Sequence: Synthetic oligonucleotide
auuagacaagcuauaaguc

SEQ ID NO: 3107736 - RNA, 19 nt, Artificial Sequence
  Description of Artificial Sequence: Synthetic oligonucleotide
uuguucacaguaccaacag

SEQ ID NO: 3107737 - RNA, 19 nt, Artificial Sequence
  Description of Artificial Sequence: Synthetic oligonucleotide
aagaugaagacaaaguauu

SEQ ID NO: 3107738 - RNA, 19 nt, Artificial Sequence
  Description of Artificial Sequence: Synthetic oligonucleotide
uacguguagagcucgaaga

SEQ ID NO: 3107739 - RNA, 19 nt, Artificial Sequence
  Description of Artificial Sequence: Synthetic oligonucleotide
ucaaggaagaggauuuagu

SEQ ID NO: 3107740 - RNA, 19 nt, Artificial Sequence
  Description of Artificial Sequence: Synthetic oligonucleotide
guuuuggaucacuuggccg

SEQ ID NO: 3107741 - RNA, 19 nt, Artificial Sequence
  Description of Artificial Sequence: Synthetic oligonucleotide
augaucaaacacugcugcc

SEQ ID NO: 3107742 - RNA, 19 nt, Artificial Sequence
  Description of Artificial Sequence: Synthetic oligonucleotide
uuacguguagagcucgaag

SEQ ID NO: 3107743 - RNA, 19 nt, Artificial Sequence
  Description of Artificial Sequence: Synthetic oligonucleotide
uguucacaguaccaacagg

SEQ ID NO: 3107744 - RNA, 19 nt, Artificial Sequence
  Description of Artificial Sequence: Synthetic oligonucleotide
aaggggaaauucaaggaag

SEQ ID NO: 3107745 - RNA, 19 nt, Artificial Sequence
  Description of Artificial Sequence: Synthetic oligonucleotide
ugaucaaacacugcugccc

SEQ ID NO: 3107746 - RNA, 19 nt, Artificial Sequence
  Description of Artificial Sequence: Synthetic oligonucleotide
aaauucaaggaagaggauu

SEQ ID NO: 3107747 - RNA, 19 nt, Artificial Sequence
  Description of Artificial Sequence: Synthetic oligonucleotide
gauuuaguacucuuggcaa

SEQ ID NO: 3107748 - RNA, 19 nt, Artificial Sequence
  Description of Artificial Sequence: Synthetic oligonucleotide
auuaugaugguggugguga

SEQ ID NO: 3107749 - RNA, 19 nt, Artificial Sequence
  Description of Artificial Sequence: Synthetic oligonucleotide
agagcucgaagaugaagac

SEQ ID NO: 3107750 - RNA, 19 nt, Artificial Sequence
  Description of Artificial Sequence: Synthetic oligonucleotide
cuguaaaugagagugcuug

SEQ ID NO: 3107751 - RNA, 19 nt, Artificial Sequence
  Description of Artificial Sequence: Synthetic oligonucleotide
aauucaaggaagaggauuu

SEQ ID NO: 3107752 - RNA, 19 nt, Artificial Sequence
  Description of Artificial Sequence: Synthetic oligonucleotide
uaagucuugugugcuaagg

SEQ ID NO: 3107753 - RNA, 19 nt, Artificial Sequence
  Description of Artificial Sequence: Synthetic oligonucleotide
agucuugugugcuaaggug

SEQ ID NO: 3107754 - RNA, 19 nt, Artificial Sequence
  Description of Artificial Sequence: Synthetic oligonucleotide
aucacuuggccguuuguuc

SEQ ID NO: 3107755 - RNA, 19 nt, Artificial Sequence
  Description of Artificial Sequence: Synthetic oligonucleotide
ggaaauucaaggaagagga

SEQ ID NO: 3107756 - RNA, 19 nt, Artificial Sequence
  Description of Artificial Sequence: Synthetic oligonucleotide
gaucaaacacugcugcccc

SEQ ID NO: 3107757 - RNA, 19 nt, Artificial Sequence
  Description of Artificial Sequence: Synthetic oligonucleotide
gugaauggugauuaugaug

SEQ ID NO: 3107758 - RNA, 19 nt, Artificial Sequence
  Description of Artificial Sequence: Synthetic oligonucleotide
aguaccaacaggaagcugu

SEQ ID NO: 3107759 - RNA, 19 nt, Artificial Sequence
  Description of Artificial Sequence: Synthetic oligonucleotide
uagacaagcuauaagucuu

SEQ ID NO: 3107760 - RNA, 19 nt, Artificial Sequence
  Description of Artificial Sequence: Synthetic oligonucleotide
cuuggcuggaugaucaaac

SEQ ID NO: 3107761 - RNA, 19 nt, Artificial Sequence
  Description of Artificial Sequence: Synthetic oligonucleotide
aaucuuggcuggaugauca

SEQ ID NO: 3107762 - RNA, 19 nt, Artificial Sequence
  Description of Artificial Sequence: Synthetic oligonucleotide
aacacugcugccccugucu

SEQ ID NO: 3107763 - RNA, 19 nt, Artificial Sequence
  Description of Artificial Sequence: Synthetic oligonucleotide
caaaguauuagacaagcua

SEQ ID NO: 3107764 - RNA, 19 nt, Artificial Sequence
  Description of Artificial Sequence: Synthetic oligonucleotide
aagcuguaaaugagagugc

SEQ ID NO: 3107765 - RNA, 19 nt, Artificial Sequence
  Description of Artificial Sequence: Synthetic oligonucleotide
gggaaauucaaggaagagg

SEQ ID NO: 3107766 - RNA, 19 nt, Artificial Sequence
  Description of Artificial Sequence: Synthetic oligonucleotide
gaaggggaaauucaaggaa

SEQ ID NO: 3107767 - RNA, 19 nt, Artificial Sequence
  Description of Artificial Sequence: Synthetic oligonucleotide
guacucuuggcaaucuugg

SEQ ID NO: 3107768 - RNA, 19 nt, Artificial Sequence
  Description of Artificial Sequence: Synthetic oligonucleotide
uucaaggaagaggauuuag

SEQ ID NO: 3107769 - RNA, 19 nt, Artificial Sequence
  Description of Artificial Sequence: Synthetic oligonucleotide
ugugugaauggugauuaug

SEQ ID NO: 3107770 - RNA, 19 nt, Artificial Sequence
  Description of Artificial Sequence: Synthetic oligonucleotide
cuauguuuuggaucacuug

SEQ ID NO: 3107771 - RNA, 19 nt, Artificial Sequence
  Description of Artificial Sequence: Synthetic oligonucleotide
caagcuauaagucuugugu

SEQ ID NO: 3107772 - RNA, 19 nt, Artificial Sequence
  Description of Artificial Sequence: Synthetic oligonucleotide
guucacaguaccaacagga

SEQ ID NO: 3107773 - RNA, 19 nt, Artificial Sequence
  Description of Artificial Sequence: Synthetic oligonucleotide
uguaaaugagagugcuugu

SEQ ID NO: 3107774 - RNA, 19 nt, Artificial Sequence
  Description of Artificial Sequence: Synthetic oligonucleotide
aagaggauuuaguacucuu

SEQ ID NO: 3107775 - RNA, 19 nt, Artificial Sequence
  Description of Artificial Sequence: Synthetic oligonucleotide
ggauuuaguacucuuggca

SEQ ID NO: 3107776 - RNA, 19 nt, Artificial Sequence
  Description of Artificial Sequence: Synthetic oligonucleotide
cucgaagaugaagacaaag

SEQ ID NO: 3107777 - RNA, 19 nt, Artificial Sequence
  Description of Artificial Sequence: Synthetic oligonucleotide
aaggugcugcugcucuggc

SEQ ID NO: 3107778 - RNA, 19 nt, Artificial Sequence
  Description of Artificial Sequence: Synthetic oligonucleotide
ucuugugugcuaaggugcu

SEQ ID NO: 3107779 - RNA, 19 nt, Artificial Sequence
  Description of Artificial Sequence: Synthetic oligonucleotide
uauaagucuugugugcuaa

SEQ ID NO: 3107780 - RNA, 19 nt, Artificial Sequence
  Description of Artificial Sequence: Synthetic oligonucleotide
gcugcuauguuuuggauca

SEQ ID NO: 3107781 - RNA, 19 nt, Artificial Sequence
  Description of Artificial Sequence: Synthetic oligonucleotide
agagugcuugugugaaugg

SEQ ID NO: 3107782 - RNA, 19 nt, Artificial Sequence
  Description of Artificial Sequence: Synthetic oligonucleotide
gagagugcuugugugaaug

SEQ ID NO: 3107783 - RNA, 19 nt, Artificial Sequence
  Description of Artificial Sequence: Synthetic oligonucleotide
guaaaugagagugcuugug

SEQ ID NO: 3107784 - RNA, 19 nt, Artificial Sequence
  Description of Artificial Sequence: Synthetic oligonucleotide
guuuguucacaguaccaac

SEQ ID NO: 3107785 - RNA, 19 nt, Artificial Sequence
  Description of Artificial Sequence: Synthetic oligonucleotide
uuuaguacucuuggcaauc

SEQ ID NO: 3107786 - RNA, 19 nt, Artificial Sequence
  Description of Artificial Sequence: Synthetic oligonucleotide
uucacaguaccaacaggaa

SEQ ID NO: 3107787 - RNA, 19 nt, Artificial Sequence
  Description of Artificial Sequence: Synthetic oligonucleotide
uggcuggaugaucaaacac

SEQ ID NO: 3107788 - RNA, 19 nt, Artificial Sequence
  Description of Artificial Sequence: Synthetic oligonucleotide
acaagcuauaagucuugug

SEQ ID NO: 3107789 - RNA, 19 nt, Artificial Sequence
  Description of Artificial Sequence: Synthetic oligonucleotide
ucuggcugcuauguuuugg

SEQ ID NO: 3107790 - RNA, 19 nt, Artificial Sequence
  Description of Artificial Sequence: Synthetic oligonucleotide
aaacacugcugccccuguc

SEQ ID NO: 3107791 - RNA, 19 nt, Artificial Sequence
  Description of Artificial Sequence: Synthetic oligonucleotide
ugugaauggugauuaugau

SEQ ID NO: 3107792 - RNA, 19 nt, Artificial Sequence
  Description of Artificial Sequence: Synthetic oligonucleotide
accaacaggaagcuguaaa

SEQ ID NO: 3107793 - RNA, 19 nt, Artificial Sequence
  Description of Artificial Sequence: Synthetic oligonucleotide
auuuaguacucuuggcaau

SEQ ID NO: 3107794 - RNA, 19 nt, Artificial Sequence
  Description of Artificial Sequence: Synthetic oligonucleotide
uggugauugggacggguga

SEQ ID NO: 3107795 - RNA, 19 nt, Artificial Sequence
  Description of Artificial Sequence: Synthetic oligonucleotide
agcucgaagaugaagacaa

SEQ ID NO: 3107796 - RNA, 19 nt, Artificial Sequence
  Description of Artificial Sequence: Synthetic oligonucleotide
gucuugugugcuaaggugc

SEQ ID NO: 3107797 - RNA, 19 nt, Artificial Sequence
  Description of Artificial Sequence: Synthetic oligonucleotide
gugguggugauugggacgg

SEQ ID NO: 3107798 - RNA, 19 nt, Artificial Sequence
  Description of Artificial Sequence: Synthetic oligonucleotide
aguauuagacaagcuauaa

SEQ ID NO: 3107799 - RNA, 19 nt, Artificial Sequence
  Description of Artificial Sequence: Synthetic oligonucleotide
aguacucuuggcaaucuug

SEQ ID NO: 3107800 - RNA, 19 nt, Artificial Sequence
  Description of Artificial Sequence: Synthetic oligonucleotide
aggaagcuguaaaugagag

SEQ ID NO: 3107801 - RNA, 19 nt, Artificial Sequence
  Description of Artificial Sequence: Synthetic oligonucleotide
uaaggugcugcugcucugg

SEQ ID NO: 3107802 - RNA, 19 nt, Artificial Sequence
  Description of Artificial Sequence: Synthetic oligonucleotide
uugugugcuaaggugcugc

SEQ ID NO: 3107803 - RNA, 19 nt, Artificial Sequence
  Description of Artificial Sequence: Synthetic oligonucleotide
gugugaauggugauuauga

SEQ ID NO: 3107804 - RNA, 19 nt, Artificial Sequence
  Description of Artificial Sequence: Synthetic oligonucleotide
uuggcuggaugaucaaaca

SEQ ID NO: 3107805 - RNA, 19 nt, Artificial Sequence
  Description of Artificial Sequence: Synthetic oligonucleotide
uggccguuuguucacagua

SEQ ID NO: 3107806 - RNA, 19 nt, Artificial Sequence
  Description of Artificial Sequence: Synthetic oligonucleotide
agaggauuuaguacucuug

SEQ ID NO: 3107807 - RNA, 19 nt, Artificial Sequence
  Description of Artificial Sequence: Synthetic oligonucleotide
gaagaugaagacaaaguau

SEQ ID NO: 3107808 - RNA, 19 nt, Artificial Sequence
  Description of Artificial Sequence: Synthetic oligonucleotide
caaggaagaggauuuagua

SEQ ID NO: 3107809 - RNA, 19 nt, Artificial Sequence
  Description of Artificial Sequence: Synthetic oligonucleotide
auaagucuugugugcuaag

SEQ ID NO: 3107810 - RNA, 19 nt, Artificial Sequence
  Description of Artificial Sequence: Synthetic oligonucleotide
caacaggaagcuguaaaug

SEQ ID NO: 3107811 - RNA, 19 nt, Artificial Sequence
  Description of Artificial Sequence: Synthetic oligonucleotide
gauuaugauggugguggug

SEQ ID NO: 3107812 - RNA, 19 nt, Artificial Sequence
  Description of Artificial Sequence: Synthetic oligonucleotide
uacucuuggcaaucuuggc

SEQ ID NO: 3107813 - RNA, 19 nt, Artificial Sequence
  Description of Artificial Sequence: Synthetic oligonucleotide
agcuguaaaugagagugcu

SEQ ID NO: 3107814 - RNA, 19 nt, Artificial Sequence
  Description of Artificial Sequence: Synthetic oligonucleotide
ucaaacacugcugccccug

SEQ ID NO: 3107815 - RNA, 19 nt, Artificial Sequence
  Description of Artificial Sequence: Synthetic oligonucleotide
guagagcucgaagaugaag

SEQ ID NO: 3107816 - RNA, 19 nt, Artificial Sequence
  Description of Artificial Sequence: Synthetic oligonucleotide
agacaaaguauuagacaag

SEQ ID NO: 3107817 - RNA, 19 nt, Artificial Sequence
  Description of Artificial Sequence: Synthetic oligonucleotide
agugcuugugugaauggug

SEQ ID NO: 3107818 - RNA, 19 nt, Artificial Sequence
  Description of Artificial Sequence: Synthetic oligonucleotide
aaguauuagacaagcuaua

SEQ ID NO: 3107819 - RNA, 19 nt, Artificial Sequence
  Description of Artificial Sequence: Synthetic oligonucleotide
ggugguggugauugggacg

SEQ ID NO: 3107820 - RNA, 19 nt, Artificial Sequence
  Description of Artificial Sequence: Synthetic oligonucleotide
uggcaaucuuggcuggaug

SEQ ID NO: 3107821 - RNA, 19 nt, Artificial Sequence
  Description of Artificial Sequence: Synthetic oligonucleotide
uggugauuaugaugguggu

SEQ ID NO: 3107822 - RNA, 19 nt, Artificial Sequence
  Description of Artificial Sequence: Synthetic oligonucleotide
cuggaugaucaaacacugc

SEQ ID NO: 3107823 - RNA, 19 nt, Artificial Sequence
  Description of Artificial Sequence: Synthetic oligonucleotide
ugauuaugauggugguggu

SEQ ID NO: 3107824 - RNA, 19 nt, Artificial Sequence
  Description of Artificial Sequence: Synthetic oligonucleotide
acguguagagcucgaagau

SEQ ID NO: 3107825 - RNA, 19 nt, Artificial Sequence
  Description of Artificial Sequence: Synthetic oligonucleotide
ggaaggggaaauucaagga

SEQ ID NO: 3107826 - RNA, 19 nt, Artificial Sequence
  Description of Artificial Sequence: Synthetic oligonucleotide
uuaguacucuuggcaaucu

SEQ ID NO: 3107827 - RNA, 19 nt, Artificial Sequence
  Description of Artificial Sequence: Synthetic oligonucleotide
ucuuacguguagagcucga

SEQ ID NO: 3107828 - RNA, 19 nt, Artificial Sequence
  Description of Artificial Sequence: Synthetic oligonucleotide
accccucuuacguguagag

SEQ ID NO: 3107829 - RNA, 19 nt, Artificial Sequence
  Description of Artificial Sequence: Synthetic oligonucleotide
cucuuacguguagagcucg

SEQ ID NO: 3107830 - RNA, 19 nt, Artificial Sequence
  Description of Artificial Sequence: Synthetic oligonucleotide
acacugcugccccugucuc

SEQ ID NO: 3107831 - RNA, 19 nt, Artificial Sequence
  Description of Artificial Sequence: Synthetic oligonucleotide
ugcucuggcugcuauguuu

SEQ ID NO: 3107832 - RNA, 19 nt, Artificial Sequence
  Description of Artificial Sequence: Synthetic oligonucleotide
uggugguggugauugggac

SEQ ID NO: 3107833 - RNA, 19 nt, Artificial Sequence
  Description of Artificial Sequence: Synthetic oligonucleotide
cuugugugaauggugauua

SEQ ID NO: 3107834 - RNA, 19 nt, Artificial Sequence
  Description of Artificial Sequence: Synthetic oligonucleotide
acaaaguauuagacaagcu

SEQ ID NO: 3107835 - RNA, 19 nt, Artificial Sequence
  Description of Artificial Sequence: Synthetic oligonucleotide
ugcuauguuuuggaucacu

SEQ ID NO: 3107836 - RNA, 19 nt, Artificial Sequence
  Description of Artificial Sequence: Synthetic oligonucleotide
gcuggaugaucaaacacug

SEQ ID NO: 3107837 - RNA, 19 nt, Artificial Sequence
  Description of Artificial Sequence: Synthetic oligonucleotide
ugugugcuaaggugcugcu

SEQ ID NO: 3107838 - RNA, 19 nt, Artificial Sequence
  Description of Artificial Sequence: Synthetic oligonucleotide
ggaugaucaaacacugcug

SEQ ID NO: 3107839 - RNA, 19 nt, Artificial Sequence
  Description of Artificial Sequence: Synthetic oligonucleotide
acaguaccaacaggaagcu

SEQ ID NO: 3107840 - RNA, 19 nt, Artificial Sequence
  Description of Artificial Sequence: Synthetic oligonucleotide
cuuggccguuuguucacag

SEQ ID NO: 3107841 - RNA, 19 nt, Artificial Sequence
  Description of Artificial Sequence: Synthetic oligonucleotide
ggcaaucuuggcuggauga

SEQ ID NO: 3107842 - RNA, 19 nt, Artificial Sequence
  Description of Artificial Sequence: Synthetic oligonucleotide
augagagugcuugugugaa

SEQ ID NO: 3107843 - RNA, 19 nt, Artificial Sequence
  Description of Artificial Sequence: Synthetic oligonucleotide
uuaugauggugguggugau

SEQ ID NO: 3107844 - RNA, 19 nt, Artificial Sequence
  Description of Artificial Sequence: Synthetic oligonucleotide
cuggcugcuauguuuugga

SEQ ID NO: 3107845 - RNA, 19 nt, Artificial Sequence
  Description of Artificial Sequence: Synthetic oligonucleotide
agacaagcuauaagucuug

SEQ ID NO: 3107846 - RNA, 19 nt, Artificial Sequence
  Description of Artificial Sequence: Synthetic oligonucleotide
aggggaaauucaaggaaga

SEQ ID NO: 3107847 - RNA, 19 nt, Artificial Sequence
  Description of Artificial Sequence: Synthetic oligonucleotide
gccguuuguucacaguacc

SEQ ID NO: 3107848 - RNA, 19 nt, Artificial Sequence
  Description of Artificial Sequence: Synthetic oligonucleotide
ucuuggcuggaugaucaaa

SEQ ID NO: 3107849 - RNA, 19 nt, Artificial Sequence
  Description of Artificial Sequence: Synthetic oligonucleotide
cuaaggugcugcugcucug

SEQ ID NO: 3107850 - RNA, 19 nt, Artificial Sequence
  Description of Artificial Sequence: Synthetic oligonucleotide
gugcuugugugaaugguga

SEQ ID NO: 3107851 - RNA, 19 nt, Artificial Sequence
  Description of Artificial Sequence: Synthetic oligonucleotide
caaucuuggcuggaugauc

SEQ ID NO: 3107852 - RNA, 19 nt, Artificial Sequence
  Description of Artificial Sequence: Synthetic oligonucleotide
ggcugcuauguuuuggauc

SEQ ID NO: 3107853 - RNA, 19 nt, Artificial Sequence
  Description of Artificial Sequence: Synthetic oligonucleotide
agaugaagacaaaguauua

SEQ ID NO: 3107854 - RNA, 19 nt, Artificial Sequence
  Description of Artificial Sequence: Synthetic oligonucleotide
gagcucgaagaugaagaca

SEQ ID NO: 3107855 - RNA, 19 nt, Artificial Sequence
  Description of Artificial Sequence: Synthetic oligonucleotide
uuggccguuuguucacagu

SEQ ID NO: 3107856 - RNA, 19 nt, Artificial Sequence
  Description of Artificial Sequence: Synthetic oligonucleotide
aucaaacacugcugccccu

SEQ ID NO: 3107857 - RNA, 19 nt, Artificial Sequence
  Description of Artificial Sequence: Synthetic oligonucleotide
cugccccugucucuucugg

SEQ ID NO: 3107858 - RNA, 19 nt, Artificial Sequence
  Description of Artificial Sequence: Synthetic oligonucleotide
ggggaaauucaaggaagag

SEQ ID NO: 3107859 - RNA, 19 nt, Artificial Sequence
  Description of Artificial Sequence: Synthetic oligonucleotide
ugcuugugugaauggugau

SEQ ID NO: 3107860 - RNA, 19 nt, Artificial Sequence
  Description of Artificial Sequence: Synthetic oligonucleotide
ggugauuaugaugguggug

SEQ ID NO: 3107861 - RNA, 19 nt, Artificial Sequence
  Description of Artificial Sequence: Synthetic oligonucleotide
cacuuggccguuuguucac

SEQ ID NO: 3107862 - RNA, 19 nt, Artificial Sequence
  Description of Artificial Sequence: Synthetic oligonucleotide
ggugauugggacgggugag

SEQ ID NO: 3107863 - RNA, 19 nt, Artificial Sequence
  Description of Artificial Sequence: Synthetic oligonucleotide
guggugauugggacgggug

SEQ ID NO: 3107864 - RNA, 19 nt, Artificial Sequence
  Description of Artificial Sequence: Synthetic oligonucleotide
ugagagugcuugugugaau

SEQ ID NO: 3107865 - RNA, 19 nt, Artificial Sequence
  Description of Artificial Sequence: Synthetic oligonucleotide
ugcugcucuggcugcuaug

SEQ ID NO: 3107866 - RNA, 19 nt, Artificial Sequence
  Description of Artificial Sequence: Synthetic oligonucleotide
uugugugaauggugauuau

SEQ ID NO: 3107867 - RNA, 19 nt, Artificial Sequence
  Description of Artificial Sequence: Synthetic oligonucleotide
uuggcaaucuuggcuggau

SEQ ID NO: 3107868 - RNA, 19 nt, Artificial Sequence
  Description of Artificial Sequence: Synthetic oligonucleotide
gccccugucucuucugggg

SEQ ID NO: 3107869 - RNA, 19 nt, Artificial Sequence
  Description of Artificial Sequence: Synthetic oligonucleotide
cuauaagucuugugugcua

SEQ ID NO: 3107870 - RNA, 19 nt, Artificial Sequence
  Description of Artificial Sequence: Synthetic oligonucleotide
uggcugcuauguuuuggau

SEQ ID NO: 3107871 - RNA, 19 nt, Artificial Sequence
  Description of Artificial Sequence: Synthetic oligonucleotide
gaagaggauuuaguacucu

SEQ ID NO: 3107872 - RNA, 19 nt, Artificial Sequence
  Description of Artificial Sequence: Synthetic oligonucleotide
cgaagaugaagacaaagua

SEQ ID NO: 3107873 - RNA, 19 nt, Artificial Sequence
  Description of Artificial Sequence: Synthetic oligonucleotide
auucaaggaagaggauuua

SEQ ID NO: 3107874 - RNA, 19 nt, Artificial Sequence
  Description of Artificial Sequence: Synthetic oligonucleotide
cccucuuacguguagagcu

SEQ ID NO: 3107875 - RNA, 19 nt, Artificial Sequence
  Description of Artificial Sequence: Synthetic oligonucleotide
gaauggugauuaugauggu

SEQ ID NO: 3107876 - RNA, 19 nt, Artificial Sequence
  Description of Artificial Sequence: Synthetic oligonucleotide
cuugugugcuaaggugcug

SEQ ID NO: 3107877 - RNA, 19 nt, Artificial Sequence
  Description of Artificial Sequence: Synthetic oligonucleotide
ggaagaggauuuaguacuc

SEQ ID NO: 3107878 - RNA, 19 nt, Artificial Sequence
  Description of Artificial Sequence: Synthetic oligonucleotide
ggcuggaugaucaaacacu

SEQ ID NO: 3107879 - RNA, 19 nt, Artificial Sequence
  Description of Artificial Sequence: Synthetic oligonucleotide
ugcuaaggugcugcugcuc

SEQ ID NO: 3107880 - RNA, 19 nt, Artificial Sequence
  Description of Artificial Sequence: Synthetic oligonucleotide
aucuuggcuggaugaucaa

SEQ ID NO: 3107881 - RNA, 19 nt, Artificial Sequence
  Description of Artificial Sequence: Synthetic oligonucleotide
acugcugccccugucucuu

SEQ ID NO: 3107882 - RNA, 19 nt, Artificial Sequence
  Description of Artificial Sequence: Synthetic oligonucleotide
gaucacuuggccguuuguu

SEQ ID NO: 3107883 - RNA, 19 nt, Artificial Sequence
  Description of Artificial Sequence: Synthetic oligonucleotide
cucuggcugcuauguuuug

SEQ ID NO: 3107884 - RNA, 19 nt, Artificial Sequence
  Description of Artificial Sequence: Synthetic oligonucleotide
gugugcuaaggugcugcug

SEQ ID NO: 3107885 - RNA, 19 nt, Artificial Sequence
  Description of Artificial Sequence: Synthetic oligonucleotide
gagugcuugugugaauggu

SEQ ID NO: 3107886 - RNA, 19 nt, Artificial Sequence
  Description of Artificial Sequence: Synthetic oligonucleotide
gaccccucuuacguguaga

SEQ ID NO: 3107887 - RNA, 19 nt, Artificial Sequence
  Description of Artificial Sequence: Synthetic oligonucleotide
gcuaaggugcugcugcucu

SEQ ID NO: 3107888 - RNA, 19 nt, Artificial Sequence
  Description of Artificial Sequence: Synthetic oligonucleotide
uaccaacaggaagcuguaa

SEQ ID NO: 3107889 - RNA, 19 nt, Artificial Sequence
  Description of Artificial Sequence: Synthetic oligonucleotide
cuuacguguagagcucgaa

SEQ ID NO: 3107890 - RNA, 19 nt, Artificial Sequence
  Description of Artificial Sequence: Synthetic oligonucleotide
gcuauaagucuugugugcu

SEQ ID NO: 3107891 - RNA, 19 nt, Artificial Sequence
  Description of Artificial Sequence: Synthetic oligonucleotide
ggaagcuguaaaugagagu

SEQ ID NO: 3107892 - RNA, 19 nt, Artificial Sequence
  Description of Artificial Sequence: Synthetic oligonucleotide
ccucuuacguguagagcuc

SEQ ID NO: 3107893 - RNA, 19 nt, Artificial Sequence
  Description of Artificial Sequence: Synthetic oligonucleotide
acuuggccguuuguucaca

SEQ ID NO: 3107894 - RNA, 19 nt, Artificial Sequence
  Description of Artificial Sequence: Synthetic oligonucleotide
ugguggugauugggacggg

SEQ ID NO: 3107895 - RNA, 19 nt, Artificial Sequence
  Description of Artificial Sequence: Synthetic oligonucleotide
caguaccaacaggaagcug

SEQ ID NO: 3107896 - RNA, 19 nt, Artificial Sequence
  Description of Artificial Sequence: Synthetic oligonucleotide
guaccaacaggaagcugua

SEQ ID NO: 3107897 - RNA, 19 nt, Artificial Sequence
  Description of Artificial Sequence: Synthetic oligonucleotide
ggaccccucuuacguguag

SEQ ID NO: 3107898 - RNA, 19 nt, Artificial Sequence
  Description of Artificial Sequence: Synthetic oligonucleotide
ggccguuuguucacaguac

SEQ ID NO: 3107899 - RNA, 19 nt, Artificial Sequence
  Description of Artificial Sequence: Synthetic oligonucleotide
ccguuuguucacaguacca

SEQ ID NO: 3107900 - RNA, 19 nt, Artificial Sequence
  Description of Artificial Sequence: Synthetic oligonucleotide
ccaacaggaagcuguaaau

SEQ ID NO: 3107901 - RNA, 19 nt, Artificial Sequence
  Description of Artificial Sequence: Synthetic oligonucleotide
cugcuauguuuuggaucac

SEQ ID NO: 3107902 - RNA, 19 nt, Artificial Sequence
  Description of Artificial Sequence: Synthetic oligonucleotide
ccccucuuacguguagagc

SEQ ID NO: 3107903 - RNA, 19 nt, Artificial Sequence
  Description of Artificial Sequence: Synthetic oligonucleotide
cguuuguucacaguaccaa

SEQ ID NO: 3107904 - RNA, 19 nt, Artificial Sequence
  Description of Artificial Sequence: Synthetic oligonucleotide
gugcuaaggugcugcugcu

SEQ ID NO: 3107905 - RNA, 19 nt, Artificial Sequence
  Description of Artificial Sequence: Synthetic oligonucleotide
ggggaccccucuuacgugu

SEQ ID NO: 3107906 - RNA, 19 nt, Artificial Sequence
  Description of Artificial Sequence: Synthetic oligonucleotide
gcugcucuggcugcuaugu

SEQ ID NO: 3107907 - RNA, 19 nt, Artificial Sequence
  Description of Artificial Sequence: Synthetic oligonucleotide
gcuauguuuuggaucacuu

SEQ ID NO: 3107908 - RNA, 19 nt, Artificial Sequence
  Description of Artificial Sequence: Synthetic oligonucleotide
caaacacugcugccccugu

SEQ ID NO: 3107909 - RNA, 19 nt, Artificial Sequence
  Description of Artificial Sequence: Synthetic oligonucleotide
ggaucacuuggccguuugu

SEQ ID NO: 3107910 - RNA, 19 nt, Artificial Sequence
  Description of Artificial Sequence: Synthetic oligonucleotide
cugcugccccugucucuuc

SEQ ID NO: 3107911 - RNA, 19 nt, Artificial Sequence
  Description of Artificial Sequence: Synthetic oligonucleotide
gcuugugugaauggugauu

SEQ ID NO: 3107912 - RNA, 19 nt, Artificial Sequence
  Description of Artificial Sequence: Synthetic oligonucleotide
gcaaucuuggcuggaugau

SEQ ID NO: 3107913 - RNA, 19 nt, Artificial Sequence
  Description of Artificial Sequence: Synthetic oligonucleotide
gguggugauugggacgggu

SEQ ID NO: 3107914 - RNA, 19 nt, Artificial Sequence
  Description of Artificial Sequence: Synthetic oligonucleotide
gcucuggcugcuauguuuu

SEQ ID NO: 3107915 - RNA, 19 nt, Artificial Sequence
  Description of Artificial Sequence: Synthetic oligonucleotide
gcucgaagaugaagacaaa

SEQ ID NO: 3107916 - RNA, 19 nt, Artificial Sequence
  Description of Artificial Sequence: Synthetic oligonucleotide
gcuguaaaugagagugcuu

SEQ ID NO: 3107917 - RNA, 19 nt, Artificial Sequence
  Description of Artificial Sequence: Synthetic oligonucleotide
cugcugcucuggcugcuau

SEQ ID NO: 3107918 - RNA, 19 nt, Artificial Sequence
  Description of Artificial Sequence: Synthetic oligonucleotide
cugcucuggcugcuauguu

SEQ ID NO: 3107919 - RNA, 19 nt, Artificial Sequence
  Description of Artificial Sequence: Synthetic oligonucleotide
gggaccccucuuacgugua

SEQ ID NO: 3107920 - RNA, 19 nt, Artificial Sequence
  Description of Artificial Sequence: Synthetic oligonucleotide
uaauaaaacauuuaaaagg

SEQ ID NO: 3107921 - RNA, 19 nt, Artificial Sequence
  Description of Artificial Sequence: Synthetic oligonucleotide
aacacauggggcuagaugc

SEQ ID NO: 3107922 - RNA, 19 nt, Artificial Sequence
  Description of Artificial Sequence: Synthetic oligonucleotide
uuaaaagggagauaaaugg

SEQ ID NO: 3107923 - RNA, 19 nt, Artificial Sequence
  Description of Artificial Sequence: Synthetic oligonucleotide
aauaaaacauuuaaaaggg

SEQ ID NO: 3107924 - RNA, 19 nt, Artificial Sequence
  Description of Artificial Sequence: Synthetic oligonucleotide
uaaaacauuuaaaagggag

SEQ ID NO: 3107925 - RNA, 19 nt, Artificial Sequence
  Description of Artificial Sequence: Synthetic oligonucleotide
auucacugacuauagaucc

SEQ ID NO: 3107926 - RNA, 19 nt, Artificial Sequence
  Description of Artificial Sequence: Synthetic oligonucleotide
uauagauccauaauaaaac

SEQ ID NO: 3107927 - RNA, 19 nt, Artificial Sequence
  Description of Artificial Sequence: Synthetic oligonucleotide
uuuaaaagggagauaaaug

SEQ ID NO: 3107928 - RNA, 19 nt, Artificial Sequence
  Description of Artificial Sequence: Synthetic oligonucleotide
auuugucagaaacacaugg

SEQ ID NO: 3107929 - RNA, 19 nt, Artificial Sequence
  Description of Artificial Sequence: Synthetic oligonucleotide
ucuuuuagaaguuaaucca

SEQ ID NO: 3107930 - RNA, 19 nt, Artificial Sequence
  Description of Artificial Sequence: Synthetic oligonucleotide
uccauaauaaaacauuuaa

SEQ ID NO: 3107931 - RNA, 19 nt, Artificial Sequence
  Description of Artificial Sequence: Synthetic oligonucleotide
uugucagaaacacaugggg

SEQ ID NO: 3107932 - RNA, 19 nt, Artificial Sequence
  Description of Artificial Sequence: Synthetic oligonucleotide
acugacaacagcaacaggg

SEQ ID NO: 3107933 - RNA, 19 nt, Artificial Sequence
  Description of Artificial Sequence: Synthetic oligonucleotide
auucuagucuuuuagaagu

SEQ ID NO: 3107934 - RNA, 19 nt, Artificial Sequence
  Description of Artificial Sequence: Synthetic oligonucleotide
uuugucagaaacacauggg

SEQ ID NO: 3107935 - RNA, 19 nt, Artificial Sequence
  Description of Artificial Sequence: Synthetic oligonucleotide
ucagacuuaaguuuauggc

SEQ ID NO: 3107936 - RNA, 19 nt, Artificial Sequence
  Description of Artificial Sequence: Synthetic oligonucleotide
uuuauggcaauucacugac

SEQ ID NO: 3107937 - RNA, 19 nt, Artificial Sequence
  Description of Artificial Sequence: Synthetic oligonucleotide
gucuuuuagaaguuaaucc

SEQ ID NO: 3107938 - RNA, 19 nt, Artificial Sequence
  Description of Artificial Sequence: Synthetic oligonucleotide
ugguuuuaggacuagauuc

SEQ ID NO: 3107939 - RNA, 19 nt, Artificial Sequence
  Description of Artificial Sequence: Synthetic oligonucleotide
aauucacugacuauagauc

SEQ ID NO: 3107940 - RNA, 19 nt, Artificial Sequence
  Description of Artificial Sequence: Synthetic oligonucleotide
uuaaguuuauggcaauuca

SEQ ID NO: 3107941 - RNA, 19 nt, Artificial Sequence
  Description of Artificial Sequence: Synthetic oligonucleotide
auaaauggugguuuuagga

SEQ ID NO: 3107942 - RNA, 19 nt, Artificial Sequence
  Description of Artificial Sequence: Synthetic oligonucleotide
aaguuaauccaugcaagac

SEQ ID NO: 3107943 - RNA, 19 nt, Artificial Sequence
  Description of Artificial Sequence: Synthetic oligonucleotide
gauucuagucuuuuagaag

SEQ ID NO: 3107944 - RNA, 19 nt, Artificial Sequence
  Description of Artificial Sequence: Synthetic oligonucleotide
aaauggugguuuuaggacu

SEQ ID NO: 3107945 - RNA, 19 nt, Artificial Sequence
  Description of Artificial Sequence: Synthetic oligonucleotide
aaauaugccauuugucaga

SEQ ID NO: 3107946 - RNA, 19 nt, Artificial Sequence
  Description of Artificial Sequence: Synthetic oligonucleotide
gauaaauggugguuuuagg

SEQ ID NO: 3107947 - RNA, 19 nt, Artificial Sequence
  Description of Artificial Sequence: Synthetic oligonucleotide
aaagggagauaaauggugg

SEQ ID NO: 3107948 - RNA, 19 nt, Artificial Sequence
  Description of Artificial Sequence: Synthetic oligonucleotide
uaaauggugguuuuaggac

SEQ ID NO: 3107949 - RNA, 19 nt, Artificial Sequence
  Description of Artificial Sequence: Synthetic oligonucleotide
ugacuauagauccauaaua

SEQ ID NO: 3107950 - RNA, 19 nt, Artificial Sequence
  Description of Artificial Sequence: Synthetic oligonucleotide
uuuuagaaguuaauccaug

SEQ ID NO: 3107951 - RNA, 19 nt, Artificial Sequence
  Description of Artificial Sequence: Synthetic oligonucleotide
aaaagggagauaaauggug

SEQ ID NO: 3107952 - RNA, 19 nt, Artificial Sequence
  Description of Artificial Sequence: Synthetic oligonucleotide
aaaacauuuaaaagggaga

SEQ ID NO: 3107953 - RNA, 19 nt, Artificial Sequence
  Description of Artificial Sequence: Synthetic oligonucleotide
cuagauucuagucuuuuag

SEQ ID NO: 3107954 - RNA, 19 nt, Artificial Sequence
  Description of Artificial Sequence: Synthetic oligonucleotide
cucagacuuaaguuuaugg

SEQ ID NO: 3107955 - RNA, 19 nt, Artificial Sequence
  Description of Artificial Sequence: Synthetic oligonucleotide
uuagaaguuaauccaugca

SEQ ID NO: 3107956 - RNA, 19 nt, Artificial Sequence
  Description of Artificial Sequence: Synthetic oligonucleotide
aaacauuuaaaagggagau

SEQ ID NO: 3107957 - RNA, 19 nt, Artificial Sequence
  Description of Artificial Sequence: Synthetic oligonucleotide
uaaguuuauggcaauucac

SEQ ID NO: 3107958 - RNA, 19 nt, Artificial Sequence
  Description of Artificial Sequence: Synthetic oligonucleotide
uuuaggacuagauucuagu

SEQ ID NO: 3107959 - RNA, 19 nt, Artificial Sequence
  Description of Artificial Sequence: Synthetic oligonucleotide
ugucagaaacacauggggc

SEQ ID NO: 3107960 - RNA, 19 nt, Artificial Sequence
  Description of Artificial Sequence: Synthetic oligonucleotide
uaaaagggagauaaauggu

SEQ ID NO: 3107961 - RNA, 19 nt, Artificial Sequence
  Description of Artificial Sequence: Synthetic oligonucleotide
caaauaugccauuugucag

SEQ ID NO: 3107962 - RNA, 19 nt, Artificial Sequence
  Description of Artificial Sequence: Synthetic oligonucleotide
agucuuuuagaaguuaauc

SEQ ID NO: 3107963 - RNA, 19 nt, Artificial Sequence
  Description of Artificial Sequence: Synthetic oligonucleotide
aaacacauggggcuagaug

SEQ ID NO: 3107964 - RNA, 19 nt, Artificial Sequence
  Description of Artificial Sequence: Synthetic oligonucleotide
uaggacuagauucuagucu

SEQ ID NO: 3107965 - RNA, 19 nt, Artificial Sequence
  Description of Artificial Sequence: Synthetic oligonucleotide
auagauccauaauaaaaca

SEQ ID NO: 3107966 - RNA, 19 nt, Artificial Sequence
  Description of Artificial Sequence: Synthetic oligonucleotide
aguuuauggcaauucacug

SEQ ID NO: 3107967 - RNA, 19 nt, Artificial Sequence
  Description of Artificial Sequence: Synthetic oligonucleotide
uuuuaggacuagauucuag

SEQ ID NO: 3107968 - RNA, 19 nt, Artificial Sequence
  Description of Artificial Sequence: Synthetic oligonucleotide
cuauagauccauaauaaaa

SEQ ID NO: 3107969 - RNA, 19 nt, Artificial Sequence
  Description of Artificial Sequence: Synthetic oligonucleotide
aaguuuauggcaauucacu

SEQ ID NO: 3107970 - RNA, 19 nt, Artificial Sequence
  Description of Artificial Sequence: Synthetic oligonucleotide
auuuaaaagggagauaaau

SEQ ID NO: 3107971 - RNA, 19 nt, Artificial Sequence
  Description of Artificial Sequence: Synthetic oligonucleotide
acuggguguggcuaacugc

SEQ ID NO: 3107972 - RNA, 19 nt, Artificial Sequence
  Description of Artificial Sequence: Synthetic oligonucleotide
accaagugcaaauaugcca

SEQ ID NO: 3107973 - RNA, 19 nt, Artificial Sequence
  Description of Artificial Sequence: Synthetic oligonucleotide
uagauccauaauaaaacau

SEQ ID NO: 3107974 - RNA, 19 nt, Artificial Sequence
  Description of Artificial Sequence: Synthetic oligonucleotide
agauaaauggugguuuuag

SEQ ID NO: 3107975 - RNA, 19 nt, Artificial Sequence
  Description of Artificial Sequence: Synthetic oligonucleotide
agauucuagucuuuuagaa

SEQ ID NO: 3107976 - RNA, 19 nt, Artificial Sequence
  Description of Artificial Sequence: Synthetic oligonucleotide
acaacagcaacagggcacc

SEQ ID NO: 3107977 - RNA, 19 nt, Artificial Sequence
  Description of Artificial Sequence: Synthetic oligonucleotide
aacauggucuagccugagg

SEQ ID NO: 3107978 - RNA, 19 nt, Artificial Sequence
  Description of Artificial Sequence: Synthetic oligonucleotide
ugcaaauaugccauuuguc

SEQ ID NO: 3107979 - RNA, 19 nt, Artificial Sequence
  Description of Artificial Sequence: Synthetic oligonucleotide
uagauucuagucuuuuaga

SEQ ID NO: 3107980 - RNA, 19 nt, Artificial Sequence
  Description of Artificial Sequence: Synthetic oligonucleotide
gaaguuaauccaugcaaga

SEQ ID NO: 3107981 - RNA, 19 nt, Artificial Sequence
  Description of Artificial Sequence: Synthetic oligonucleotide
cagacuuaaguuuauggca

SEQ ID NO: 3107982 - RNA, 19 nt, Artificial Sequence
  Description of Artificial Sequence: Synthetic oligonucleotide
aacagggcacccucuaaug

SEQ ID NO: 3107983 - RNA, 19 nt, Artificial Sequence
  Description of Artificial Sequence: Synthetic oligonucleotide
uaauccaugcaagaccacc

SEQ ID NO: 3107984 - RNA, 19 nt, Artificial Sequence
  Description of Artificial Sequence: Synthetic oligonucleotide
acugacuauagauccauaa

SEQ ID NO: 3107985 - RNA, 19 nt, Artificial Sequence
  Description of Artificial Sequence: Synthetic oligonucleotide
agugcaaauaugccauuug

SEQ ID NO: 3107986 - RNA, 19 nt, Artificial Sequence
  Description of Artificial Sequence: Synthetic oligonucleotide
acagcaacagggcacccuc

SEQ ID NO: 3107987 - RNA, 19 nt, Artificial Sequence
  Description of Artificial Sequence: Synthetic oligonucleotide
gcaaauaugccauuuguca

SEQ ID NO: 3107988 - RNA, 19 nt, Artificial Sequence
  Description of Artificial Sequence: Synthetic oligonucleotide
aagggagauaaaugguggu

SEQ ID NO: 3107989 - RNA, 19 nt, Artificial Sequence
  Description of Artificial Sequence: Synthetic oligonucleotide
uuaggacuagauucuaguc

SEQ ID NO: 3107990 - RNA, 19 nt, Artificial Sequence
  Description of Artificial Sequence: Synthetic oligonucleotide
guuaauccaugcaagacca

SEQ ID NO: 3107991 - RNA, 19 nt, Artificial Sequence
  Description of Artificial Sequence: Synthetic oligonucleotide
gacuauagauccauaauaa

SEQ ID NO: 3107992 - RNA, 19 nt, Artificial Sequence
  Description of Artificial Sequence: Synthetic oligonucleotide
uaacugcagaggcagguca

SEQ ID NO: 3107993 - RNA, 19 nt, Artificial Sequence
  Description of Artificial Sequence: Synthetic oligonucleotide
guuuauggcaauucacuga

SEQ ID NO: 3107994 - RNA, 19 nt, Artificial Sequence
  Description of Artificial Sequence: Synthetic oligonucleotide
cuuaaguuuauggcaauuc

SEQ ID NO: 3107995 - RNA, 19 nt, Artificial Sequence
  Description of Artificial Sequence: Synthetic oligonucleotide
acuauagauccauaauaaa

SEQ ID NO: 3107996 - RNA, 19 nt, Artificial Sequence
  Description of Artificial Sequence: Synthetic oligonucleotide
ugcuaaguuguccuuuuaa

SEQ ID NO: 3107997 - RNA, 19 nt, Artificial Sequence
  Description of Artificial Sequence: Synthetic oligonucleotide
uuacuuugcuaaguugucc

SEQ ID NO: 3107998 - RNA, 19 nt, Artificial Sequence
  Description of Artificial Sequence: Synthetic oligonucleotide
acagggcacccucuaaugg

SEQ ID NO: 3107999 - RNA, 19 nt, Artificial Sequence
  Description of Artificial Sequence: Synthetic oligonucleotide
ugacucagacuuaaguuua

SEQ ID NO: 3108000 - RNA, 19 nt, Artificial Sequence
  Description of Artificial Sequence: Synthetic oligonucleotide
ugccauuugucagaaacac

SEQ ID NO: 3108001 - RNA, 19 nt, Artificial Sequence
  Description of Artificial Sequence: Synthetic oligonucleotide
aggacuagauucuagucuu

SEQ ID NO: 3108002 - RNA, 19 nt, Artificial Sequence
  Description of Artificial Sequence: Synthetic oligonucleotide
cuaaguuguccuuuuaaaa

SEQ ID NO: 3108003 - RNA, 19 nt, Artificial Sequence
  Description of Artificial Sequence: Synthetic oligonucleotide
aauccaugcaagaccacca

SEQ ID NO: 3108004 - RNA, 19 nt, Artificial Sequence
  Description of Artificial Sequence: Synthetic oligonucleotide
uucacugacuauagaucca

SEQ ID NO: 3108005 - RNA, 19 nt, Artificial Sequence
  Description of Artificial Sequence: Synthetic oligonucleotide
aggugacucagacuuaagu

SEQ ID NO: 3108006 - RNA, 19 nt, Artificial Sequence
  Description of Artificial Sequence: Synthetic oligonucleotide
agccugaggugacucagac

SEQ ID NO: 3108007 - RNA, 19 nt, Artificial Sequence
  Description of Artificial Sequence: Synthetic oligonucleotide
gacaacagcaacagggcac

SEQ ID NO: 3108008 - RNA, 19 nt, Artificial Sequence
  Description of Artificial Sequence: Synthetic oligonucleotide
aauaugccauuugucagaa

SEQ ID NO: 3108009 - RNA, 19 nt, Artificial Sequence
  Description of Artificial Sequence: Synthetic oligonucleotide
agauccauaauaaaacauu

SEQ ID NO: 3108010 - RNA, 19 nt, Artificial Sequence
  Description of Artificial Sequence: Synthetic oligonucleotide
cagggcacccucuaauggg

SEQ ID NO: 3108011 - RNA, 19 nt, Artificial Sequence
  Description of Artificial Sequence: Synthetic oligonucleotide
uagucuuuuagaaguuaau

SEQ ID NO: 3108012 - RNA, 19 nt, Artificial Sequence
  Description of Artificial Sequence: Synthetic oligonucleotide
caggucacugacaacagca

SEQ ID NO: 3108013 - RNA, 19 nt, Artificial Sequence
  Description of Artificial Sequence: Synthetic oligonucleotide
aaaacauggucuagccuga

SEQ ID NO: 3108014 - RNA, 19 nt, Artificial Sequence
  Description of Artificial Sequence: Synthetic oligonucleotide
caccaagugcaaauaugcc

SEQ ID NO: 3108015 - RNA, 19 nt, Artificial Sequence
  Description of Artificial Sequence: Synthetic oligonucleotide
aggcaggucacugacaaca

SEQ ID NO: 3108016 - RNA, 19 nt, Artificial Sequence
  Description of Artificial Sequence: Synthetic oligonucleotide
aacugcagaggcaggucac

SEQ ID NO: 3108017 - RNA, 19 nt, Artificial Sequence
  Description of Artificial Sequence: Synthetic oligonucleotide
cauuugucagaaacacaug

SEQ ID NO: 3108018 - RNA, 19 nt, Artificial Sequence
  Description of Artificial Sequence: Synthetic oligonucleotide
uuugcuaaguuguccuuuu

SEQ ID NO: 3108019 - RNA, 19 nt, Artificial Sequence
  Description of Artificial Sequence: Synthetic oligonucleotide
gucagaaacacauggggcu

SEQ ID NO: 3108020 - RNA, 19 nt, Artificial Sequence
  Description of Artificial Sequence: Synthetic oligonucleotide
auaaaacauuuaaaaggga

SEQ ID NO: 3108021 - RNA, 19 nt, Artificial Sequence
  Description of Artificial Sequence: Synthetic oligonucleotide
uggcaauucacugacuaua

SEQ ID NO: 3108022 - RNA, 19 nt, Artificial Sequence
  Description of Artificial Sequence: Synthetic oligonucleotide
agacuuaaguuuauggcaa

SEQ ID NO: 3108023 - RNA, 19 nt, Artificial Sequence
  Description of Artificial Sequence: Synthetic oligonucleotide
uggggcuagaugcccacug

SEQ ID NO: 3108024 - RNA, 19 nt, Artificial Sequence
  Description of Artificial Sequence: Synthetic oligonucleotide
cuagucuuuuagaaguuaa

SEQ ID NO: 3108025 - RNA, 19 nt, Artificial Sequence
  Description of Artificial Sequence: Synthetic oligonucleotide
aacauuuaaaagggagaua

SEQ ID NO: 3108026 - RNA, 19 nt, Artificial Sequence
  Description of Artificial Sequence: Synthetic oligonucleotide
gguguggcuaacugcagag

SEQ ID NO: 3108027 - RNA, 19 nt, Artificial Sequence
  Description of Artificial Sequence: Synthetic oligonucleotide
caauucacugacuauagau

SEQ ID NO: 3108028 - RNA, 19 nt, Artificial Sequence
  Description of Artificial Sequence: Synthetic oligonucleotide
cuggguguggcuaacugca

SEQ ID NO: 3108029 - RNA, 19 nt, Artificial Sequence
  Description of Artificial Sequence: Synthetic oligonucleotide
acuagauucuagucuuuua

SEQ ID NO: 3108030 - RNA, 19 nt, Artificial Sequence
  Description of Artificial Sequence: Synthetic oligonucleotide
ugaggugacucagacuuaa

SEQ ID NO: 3108031 - RNA, 19 nt, Artificial Sequence
  Description of Artificial Sequence: Synthetic oligonucleotide
ucuagccugaggugacuca

SEQ ID NO: 3108032 - RNA, 19 nt, Artificial Sequence
  Description of Artificial Sequence: Synthetic oligonucleotide
acacauggggcuagaugcc

SEQ ID NO: 3108033 - RNA, 19 nt, Artificial Sequence
  Description of Artificial Sequence: Synthetic oligonucleotide
cauggucuagccugaggug

SEQ ID NO: 3108034 - RNA, 19 nt, Artificial Sequence
  Description of Artificial Sequence: Synthetic oligonucleotide
uuaauccaugcaagaccac

SEQ ID NO: 3108035 - RNA, 19 nt, Artificial Sequence
  Description of Artificial Sequence: Synthetic oligonucleotide
auggucuagccugagguga

SEQ ID NO: 3108036 - RNA, 19 nt, Artificial Sequence
  Description of Artificial Sequence: Synthetic oligonucleotide
ucuagucuuuuagaaguua

SEQ ID NO: 3108037 - RNA, 19 nt, Artificial Sequence
  Description of Artificial Sequence: Synthetic oligonucleotide
uucuagucuuuuagaaguu

SEQ ID NO: 3108038 - RNA, 19 nt, Artificial Sequence
  Description of Artificial Sequence: Synthetic oligonucleotide
ucacugacuauagauccau

SEQ ID NO: 3108039 - RNA, 19 nt, Artificial Sequence
  Description of Artificial Sequence: Synthetic oligonucleotide
aagugcaaauaugccauuu

SEQ ID NO: 3108040 - RNA, 19 nt, Artificial Sequence
  Description of Artificial Sequence: Synthetic oligonucleotide
aauggugguuuuaggacua

SEQ ID NO: 3108041 - RNA, 19 nt, Artificial Sequence
  Description of Artificial Sequence: Synthetic oligonucleotide
aacagcaacagggcacccu

SEQ ID NO: 3108042 - RNA, 19 nt, Artificial Sequence
  Description of Artificial Sequence: Synthetic oligonucleotide
ugcagaggcaggucacuga

SEQ ID NO: 3108043 - RNA, 19 nt, Artificial Sequence
  Description of Artificial Sequence: Synthetic oligonucleotide
gauccauaauaaaacauuu

SEQ ID NO: 3108044 - RNA, 19 nt, Artificial Sequence
  Description of Artificial Sequence: Synthetic oligonucleotide
accaccaagugcaaauaug

SEQ ID NO: 3108045 - RNA, 19 nt, Artificial Sequence
  Description of Artificial Sequence: Synthetic oligonucleotide
cuagccugaggugacucag

SEQ ID NO: 3108046 - RNA, 19 nt, Artificial Sequence
  Description of Artificial Sequence: Synthetic oligonucleotide
gcuagaugcccacugggug

SEQ ID NO: 3108047 - RNA, 19 nt, Artificial Sequence
  Description of Artificial Sequence: Synthetic oligonucleotide
uuauggcaauucacugacu

SEQ ID NO: 3108048 - RNA, 19 nt, Artificial Sequence
  Description of Artificial Sequence: Synthetic oligonucleotide
cuuuuagaaguuaauccau

SEQ ID NO: 3108049 - RNA, 19 nt, Artificial Sequence
  Description of Artificial Sequence: Synthetic oligonucleotide
auggcaauucacugacuau

SEQ ID NO: 3108050 - RNA, 19 nt, Artificial Sequence
  Description of Artificial Sequence: Synthetic oligonucleotide
ucagaaacacauggggcua

SEQ ID NO: 3108051 - RNA, 19 nt, Artificial Sequence
  Description of Artificial Sequence: Synthetic oligonucleotide
aaacauggucuagccugag

SEQ ID NO: 3108052 - RNA, 19 nt, Artificial Sequence
  Description of Artificial Sequence: Synthetic oligonucleotide
uggucuagccugaggugac

SEQ ID NO: 3108053 - RNA, 19 nt, Artificial Sequence
  Description of Artificial Sequence: Synthetic oligonucleotide
uggguguggcuaacugcag

SEQ ID NO: 3108054 - RNA, 19 nt, Artificial Sequence
  Description of Artificial Sequence: Synthetic oligonucleotide
gcuaaguuguccuuuuaaa

SEQ ID NO: 3108055 - RNA, 19 nt, Artificial Sequence
  Description of Artificial Sequence: Synthetic oligonucleotide
ccauaauaaaacauuuaaa

SEQ ID NO: 3108056 - RNA, 19 nt, Artificial Sequence
  Description of Artificial Sequence: Synthetic oligonucleotide
gugcaaauaugccauuugu

SEQ ID NO: 3108057 - RNA, 19 nt, Artificial Sequence
  Description of Artificial Sequence: Synthetic oligonucleotide
agggcacccucuaaugggg

SEQ ID NO: 3108058 - RNA, 19 nt, Artificial Sequence
  Description of Artificial Sequence: Synthetic oligonucleotide
acucagacuuaaguuuaug

SEQ ID NO: 3108059 - RNA, 19 nt, Artificial Sequence
  Description of Artificial Sequence: Synthetic oligonucleotide
uagaugcccacugggugug

SEQ ID NO: 3108060 - RNA, 19 nt, Artificial Sequence
  Description of Artificial Sequence: Synthetic oligonucleotide
cauuuaaaagggagauaaa

SEQ ID NO: 3108061 - RNA, 19 nt, Artificial Sequence
  Description of Artificial Sequence: Synthetic oligonucleotide
auccauaauaaaacauuua

SEQ ID NO: 3108062 - RNA, 19 nt, Artificial Sequence
  Description of Artificial Sequence: Synthetic oligonucleotide
gggcuagaugcccacuggg

SEQ ID NO: 3108063 - RNA, 19 nt, Artificial Sequence
  Description of Artificial Sequence: Synthetic oligonucleotide
augccauuugucagaaaca

SEQ ID NO: 3108064 - RNA, 19 nt, Artificial Sequence
  Description of Artificial Sequence: Synthetic oligonucleotide
cacuggguguggcuaacug

SEQ ID NO: 3108065 - RNA, 19 nt, Artificial Sequence
  Description of Artificial Sequence: Synthetic oligonucleotide
auccaugcaagaccaccaa

SEQ ID NO: 3108066 - RNA, 19 nt, Artificial Sequence
  Description of Artificial Sequence: Synthetic oligonucleotide
cacccucuaauggggagcc

SEQ ID NO: 3108067 - RNA, 19 nt, Artificial Sequence
  Description of Artificial Sequence: Synthetic oligonucleotide
ggucacugacaacagcaac

SEQ ID NO: 3108068 - RNA, 19 nt, Artificial Sequence
  Description of Artificial Sequence: Synthetic oligonucleotide
acuuaaguuuauggcaauu

SEQ ID NO: 3108069 - RNA, 19 nt, Artificial Sequence
  Description of Artificial Sequence: Synthetic oligonucleotide
cacauggggcuagaugccc

SEQ ID NO: 3108070 - RNA, 19 nt, Artificial Sequence
  Description of Artificial Sequence: Synthetic oligonucleotide
ccauuugucagaaacacau

SEQ ID NO: 3108071 - RNA, 19 nt, Artificial Sequence
  Description of Artificial Sequence: Synthetic oligonucleotide
guguggcuaacugcagagg

SEQ ID NO: 3108072 - RNA, 19 nt, Artificial Sequence
  Description of Artificial Sequence: Synthetic oligonucleotide
cagaaacacauggggcuag

SEQ ID NO: 3108073 - RNA, 19 nt, Artificial Sequence
  Description of Artificial Sequence: Synthetic oligonucleotide
cauggggcuagaugcccac

SEQ ID NO: 3108074 - RNA, 19 nt, Artificial Sequence
  Description of Artificial Sequence: Synthetic oligonucleotide
cuaacugcagaggcagguc

SEQ ID NO: 3108075 - RNA, 19 nt, Artificial Sequence
  Description of Artificial Sequence: Synthetic oligonucleotide
agggagauaaauggugguu

SEQ ID NO: 3108076 - RNA, 19 nt, Artificial Sequence
  Description of Artificial Sequence: Synthetic oligonucleotide
uugcuaaguuguccuuuua

SEQ ID NO: 3108077 - RNA, 19 nt, Artificial Sequence
  Description of Artificial Sequence: Synthetic oligonucleotide
cuagaugcccacugggugu

SEQ ID NO: 3108078 - RNA, 19 nt, Artificial Sequence
  Description of Artificial Sequence: Synthetic oligonucleotide
ggugacucagacuuaaguu

SEQ ID NO: 3108079 - RNA, 19 nt, Artificial Sequence
  Description of Artificial Sequence: Synthetic oligonucleotide
ggggcuagaugcccacugg

SEQ ID NO: 3108080 - RNA, 19 nt, Artificial Sequence
  Description of Artificial Sequence: Synthetic oligonucleotide
cugacuauagauccauaau

SEQ ID NO: 3108081 - RNA, 19 nt, Artificial Sequence
  Description of Artificial Sequence: Synthetic oligonucleotide
gcagaggcaggucacugac

SEQ ID NO: 3108082 - RNA, 19 nt, Artificial Sequence
  Description of Artificial Sequence: Synthetic oligonucleotide
uggugguuuuaggacuaga

SEQ ID NO: 3108083 - RNA, 19 nt, Artificial Sequence
  Description of Artificial Sequence: Synthetic oligonucleotide
agcaacagggcacccucua

SEQ ID NO: 3108084 - RNA, 19 nt, Artificial Sequence
  Description of Artificial Sequence: Synthetic oligonucleotide
gagauaaauggugguuuua

SEQ ID NO: 3108085 - RNA, 19 nt, Artificial Sequence
  Description of Artificial Sequence: Synthetic oligonucleotide
gaugcccacuggguguggc

SEQ ID NO: 3108086 - RNA, 19 nt, Artificial Sequence
  Description of Artificial Sequence: Synthetic oligonucleotide
gaggugacucagacuuaag

SEQ ID NO: 3108087 - RNA, 19 nt, Artificial Sequence
  Description of Artificial Sequence: Synthetic oligonucleotide
gguuuuaggacuagauucu

SEQ ID NO: 3108088 - RNA, 19 nt, Artificial Sequence
  Description of Artificial Sequence: Synthetic oligonucleotide
gugguuuuaggacuagauu

SEQ ID NO: 3108089 - RNA, 19 nt, Artificial Sequence
  Description of Artificial Sequence: Synthetic oligonucleotide
agaaacacauggggcuaga

SEQ ID NO: 3108090 - RNA, 19 nt, Artificial Sequence
  Description of Artificial Sequence: Synthetic oligonucleotide
ggcacccucuaauggggag

SEQ ID NO: 3108091 - RNA, 19 nt, Artificial Sequence
  Description of Artificial Sequence: Synthetic oligonucleotide
gacuuaaguuuauggcaau

SEQ ID NO: 3108092 - RNA, 19 nt, Artificial Sequence
  Description of Artificial Sequence: Synthetic oligonucleotide
ccugaggugacucagacuu

SEQ ID NO: 3108093 - RNA, 19 nt, Artificial Sequence
  Description of Artificial Sequence: Synthetic oligonucleotide
acugcagaggcaggucacu

SEQ ID NO: 3108094 - RNA, 19 nt, Artificial Sequence
  Description of Artificial Sequence: Synthetic oligonucleotide
gaggcaggucacugacaac

SEQ ID NO: 3108095 - RNA, 19 nt, Artificial Sequence
  Description of Artificial Sequence: Synthetic oligonucleotide
guggcuaacugcagaggca

SEQ ID NO: 3108096 - RNA, 19 nt, Artificial Sequence
  Description of Artificial Sequence: Synthetic oligonucleotide
gcaggucacugacaacagc

SEQ ID NO: 3108097 - RNA, 19 nt, Artificial Sequence
  Description of Artificial Sequence: Synthetic oligonucleotide
guuuuaggacuagauucua

SEQ ID NO: 3108098 - RNA, 19 nt, Artificial Sequence
  Description of Artificial Sequence: Synthetic oligonucleotide
auggugguuuuaggacuag

SEQ ID NO: 3108099 - RNA, 19 nt, Artificial Sequence
  Description of Artificial Sequence: Synthetic oligonucleotide
gaccaccaagugcaaauau

SEQ ID NO: 3108100 - RNA, 19 nt, Artificial Sequence
  Description of Artificial Sequence: Synthetic oligonucleotide
gcaauucacugacuauaga

SEQ ID NO: 3108101 - RNA, 19 nt, Artificial Sequence
  Description of Artificial Sequence: Synthetic oligonucleotide
cugcagaggcaggucacug

SEQ ID NO: 3108102 - RNA, 19 nt, Artificial Sequence
  Description of Artificial Sequence: Synthetic oligonucleotide
ccaagugcaaauaugccau

SEQ ID NO: 3108103 - RNA, 19 nt, Artificial Sequence
  Description of Artificial Sequence: Synthetic oligonucleotide
augcccacuggguguggcu

SEQ ID NO: 3108104 - RNA, 19 nt, Artificial Sequence
  Description of Artificial Sequence: Synthetic oligonucleotide
agaccaccaagugcaaaua

SEQ ID NO: 3108105 - RNA, 19 nt, Artificial Sequence
  Description of Artificial Sequence: Synthetic oligonucleotide
acauggggcuagaugccca

SEQ ID NO: 3108106 - RNA, 19 nt, Artificial Sequence
  Description of Artificial Sequence: Synthetic oligonucleotide
auaugccauuugucagaaa

SEQ ID NO: 3108107 - RNA, 19 nt, Artificial Sequence
  Description of Artificial Sequence: Synthetic oligonucleotide
gucuagccugaggugacuc

SEQ ID NO: 3108108 - RNA, 19 nt, Artificial Sequence
  Description of Artificial Sequence: Synthetic oligonucleotide
ggcaggucacugacaacag

SEQ ID NO: 3108109 - RNA, 19 nt, Artificial Sequence
  Description of Artificial Sequence: Synthetic oligonucleotide
gacuagauucuagucuuuu

SEQ ID NO: 3108110 - RNA, 19 nt, Artificial Sequence
  Description of Artificial Sequence: Synthetic oligonucleotide
ggguguggcuaacugcaga

SEQ ID NO: 3108111 - RNA, 19 nt, Artificial Sequence
  Description of Artificial Sequence: Synthetic oligonucleotide
ggugguuuuaggacuagau

SEQ ID NO: 3108112 - RNA, 19 nt, Artificial Sequence
  Description of Artificial Sequence: Synthetic oligonucleotide
gcacccucuaauggggagc

SEQ ID NO: 3108113 - RNA, 19 nt, Artificial Sequence
  Description of Artificial Sequence: Synthetic oligonucleotide
ggagauaaauggugguuuu

SEQ ID NO: 3108114 - RNA, 19 nt, Artificial Sequence
  Description of Artificial Sequence: Synthetic oligonucleotide
agaugcccacugggugugg

SEQ ID NO: 3108115 - RNA, 19 nt, Artificial Sequence
  Description of Artificial Sequence: Synthetic oligonucleotide
caacagcaacagggcaccc

SEQ ID NO: 3108116 - RNA, 19 nt, Artificial Sequence
  Description of Artificial Sequence: Synthetic oligonucleotide
caacagggcacccucuaau

SEQ ID NO: 3108117 - RNA, 19 nt, Artificial Sequence
  Description of Artificial Sequence: Synthetic oligonucleotide
ggcuaacugcagaggcagg

SEQ ID NO: 3108118 - RNA, 19 nt, Artificial Sequence
  Description of Artificial Sequence: Synthetic oligonucleotide
gccauuugucagaaacaca

SEQ ID NO: 3108119 - RNA, 19 nt, Artificial Sequence
  Description of Artificial Sequence: Synthetic oligonucleotide
gaaacacauggggcuagau

SEQ ID NO: 3108120 - RNA, 19 nt, Artificial Sequence
  Description of Artificial Sequence: Synthetic oligonucleotide
gggagauaaauggugguuu

SEQ ID NO: 3108121 - RNA, 19 nt, Artificial Sequence
  Description of Artificial Sequence: Synthetic oligonucleotide
gcuaacugcagaggcaggu

SEQ ID NO: 3108122 - RNA, 19 nt, Artificial Sequence
  Description of Artificial Sequence: Synthetic oligonucleotide
cacugacuauagauccaua

SEQ ID NO: 3108123 - RNA, 19 nt, Artificial Sequence
  Description of Artificial Sequence: Synthetic oligonucleotide
auggggcuagaugcccacu

SEQ ID NO: 3108124 - RNA, 19 nt, Artificial Sequence
  Description of Artificial Sequence: Synthetic oligonucleotide
gacucagacuuaaguuuau

SEQ ID NO: 3108125 - RNA, 19 nt, Artificial Sequence
  Description of Artificial Sequence: Synthetic oligonucleotide
cugaggugacucagacuua

SEQ ID NO: 3108126 - RNA, 19 nt, Artificial Sequence
  Description of Artificial Sequence: Synthetic oligonucleotide
gcaacagggcacccucuaa

SEQ ID NO: 3108127 - RNA, 19 nt, Artificial Sequence
  Description of Artificial Sequence: Synthetic oligonucleotide
caagugcaaauaugccauu

SEQ ID NO: 3108128 - RNA, 19 nt, Artificial Sequence
  Description of Artificial Sequence: Synthetic oligonucleotide
ggcuagaugcccacugggu

SEQ ID NO: 3108129 - RNA, 19 nt, Artificial Sequence
  Description of Artificial Sequence: Synthetic oligonucleotide
cagcaacagggcacccucu

SEQ ID NO: 3108130 - RNA, 19 nt, Artificial Sequence
  Description of Artificial Sequence: Synthetic oligonucleotide
gcccacuggguguggcuaa

SEQ ID NO: 3108131 - RNA, 19 nt, Artificial Sequence
  Description of Artificial Sequence: Synthetic oligonucleotide
gggcacccucuaaugggga

SEQ ID NO: 3108132 - RNA, 19 nt, Artificial Sequence
  Description of Artificial Sequence: Synthetic oligonucleotide
cccacuggguguggcuaac

SEQ ID NO: 3108133 - RNA, 19 nt, Artificial Sequence
  Description of Artificial Sequence: Synthetic oligonucleotide
ggucuagccugaggugacu

SEQ ID NO: 3108134 - RNA, 19 nt, Artificial Sequence
  Description of Artificial Sequence: Synthetic oligonucleotide
ccacuggguguggcuaacu

SEQ ID NO: 3108135 - RNA, 19 nt, Artificial Sequence
  Description of Artificial Sequence: Synthetic oligonucleotide
gauaucacuguucagaaag

SEQ ID NO: 3108136 - RNA, 19 nt, Artificial Sequence
  Description of Artificial Sequence: Synthetic oligonucleotide
aauguucaaauccagcauc

SEQ ID NO: 3108137 - RNA, 19 nt, Artificial Sequence
  Description of Artificial Sequence: Synthetic oligonucleotide
uauuucaucaucuuccugc

SEQ ID NO: 3108138 - RNA, 19 nt, Artificial Sequence
  Description of Artificial Sequence: Synthetic oligonucleotide
caugcuaauguucaaaucc

SEQ ID NO: 3108139 - RNA, 19 nt, Artificial Sequence
  Description of Artificial Sequence: Synthetic oligonucleotide
uucaaauccagcaucaggu

SEQ ID NO: 3108140 - RNA, 19 nt, Artificial Sequence
  Description of Artificial Sequence: Synthetic oligonucleotide
ucacuguucagaaaggggc

SEQ ID NO: 3108141 - RNA, 19 nt, Artificial Sequence
  Description of Artificial Sequence: Synthetic oligonucleotide
ucaaacaugacgauaucac

SEQ ID NO: 3108142 - RNA, 19 nt, Artificial Sequence
  Description of Artificial Sequence: Synthetic oligonucleotide
caguauuucaucaucuucc

SEQ ID NO: 3108143 - RNA, 19 nt, Artificial Sequence
  Description of Artificial Sequence: Synthetic oligonucleotide
aaauccagcaucagguacc

SEQ ID NO: 3108144 - RNA, 19 nt, Artificial Sequence
  Description of Artificial Sequence: Synthetic oligonucleotide
uccaaaauuccacucuccg

SEQ ID NO: 3108145 - RNA, 19 nt, Artificial Sequence
  Description of Artificial Sequence: Synthetic oligonucleotide
aaacaugacgauaucacug

SEQ ID NO: 3108146 - RNA, 19 nt, Artificial Sequence
  Description of Artificial Sequence: Synthetic oligonucleotide
aacaugacgauaucacugu

SEQ ID NO: 3108147 - RNA, 19 nt, Artificial Sequence
  Description of Artificial Sequence: Synthetic oligonucleotide
aucaucuuccugcuuagcg

SEQ ID NO: 3108148 - RNA, 19 nt, Artificial Sequence
  Description of Artificial Sequence: Synthetic oligonucleotide
aaaguuagcccaguauuuc

SEQ ID NO: 3108149 - RNA, 19 nt, Artificial Sequence
  Description of Artificial Sequence: Synthetic oligonucleotide
ucguagacuggccacagag

SEQ ID NO: 3108150 - RNA, 19 nt, Artificial Sequence
  Description of Artificial Sequence: Synthetic oligonucleotide
aaaauuccacucuccgauc

SEQ ID NO: 3108151 - RNA, 19 nt, Artificial Sequence
  Description of Artificial Sequence: Synthetic oligonucleotide
cuaauguucaaauccagca

SEQ ID NO: 3108152 - RNA, 19 nt, Artificial Sequence
  Description of Artificial Sequence: Synthetic oligonucleotide
gaucuuucagucucugucc

SEQ ID NO: 3108153 - RNA, 19 nt, Artificial Sequence
  Description of Artificial Sequence: Synthetic oligonucleotide
uccucaaacaugacgauau

SEQ ID NO: 3108154 - RNA, 19 nt, Artificial Sequence
  Description of Artificial Sequence: Synthetic oligonucleotide
guucaaauccagcaucagg

SEQ ID NO: 3108155 - RNA, 19 nt, Artificial Sequence
  Description of Artificial Sequence: Synthetic oligonucleotide
aucuuucagucucuguccc

SEQ ID NO: 3108156 - RNA, 19 nt, Artificial Sequence
  Description of Artificial Sequence: Synthetic oligonucleotide
aaauuccacucuccgaucu

SEQ ID NO: 3108157 - RNA, 19 nt, Artificial Sequence
  Description of Artificial Sequence: Synthetic oligonucleotide
ugucccaugcuaauguuca

SEQ ID NO: 3108158 - RNA, 19 nt, Artificial Sequence
  Description of Artificial Sequence: Synthetic oligonucleotide
augacgauaucacuguuca

SEQ ID NO: 3108159 - RNA, 19 nt, Artificial Sequence
  Description of Artificial Sequence: Synthetic oligonucleotide
agacaaagcggauuucauc

SEQ ID NO: 3108160 - RNA, 19 nt, Artificial Sequence
  Description of Artificial Sequence: Synthetic oligonucleotide
guagacuggccacagaggc

SEQ ID NO: 3108161 - RNA, 19 nt, Artificial Sequence
  Description of Artificial Sequence: Synthetic oligonucleotide
uaucacuguucagaaaggg

SEQ ID NO: 3108162 - RNA, 19 nt, Artificial Sequence
  Description of Artificial Sequence: Synthetic oligonucleotide
uuagcccaguauuucauca

SEQ ID NO: 3108163 - RNA, 19 nt, Artificial Sequence
  Description of Artificial Sequence: Synthetic oligonucleotide
gacaaagcggauuucaucu

SEQ ID NO: 3108164 - RNA, 19 nt, Artificial Sequence
  Description of Artificial Sequence: Synthetic oligonucleotide
gacgauaucacuguucaga

SEQ ID NO: 3108165 - RNA, 19 nt, Artificial Sequence
  Description of Artificial Sequence: Synthetic oligonucleotide
aaguuagcccaguauuuca

SEQ ID NO: 3108166 - RNA, 19 nt, Artificial Sequence
  Description of Artificial Sequence: Synthetic oligonucleotide
ucuccgaucuuucagucuc

SEQ ID NO: 3108167 - RNA, 19 nt, Artificial Sequence
  Description of Artificial Sequence: Synthetic oligonucleotide
uauccguccaaaauuccac

SEQ ID NO: 3108168 - RNA, 19 nt, Artificial Sequence
  Description of Artificial Sequence: Synthetic oligonucleotide
ugcuaauguucaaauccag

SEQ ID NO: 3108169 - RNA, 19 nt, Artificial Sequence
  Description of Artificial Sequence: Synthetic oligonucleotide
aguauuucaucaucuuccu

SEQ ID NO: 3108170 - RNA, 19 nt, Artificial Sequence
  Description of Artificial Sequence: Synthetic oligonucleotide
gaaaggggccuccaaagac

SEQ ID NO: 3108171 - RNA, 19 nt, Artificial Sequence
  Description of Artificial Sequence: Synthetic oligonucleotide
uucagucucugucccaugc

SEQ ID NO: 3108172 - RNA, 19 nt, Artificial Sequence
  Description of Artificial Sequence: Synthetic oligonucleotide
uccccauuaggauugccgc

SEQ ID NO: 3108173 - RNA, 19 nt, Artificial Sequence
  Description of Artificial Sequence: Synthetic oligonucleotide
aauccagcaucagguaccg

SEQ ID NO: 3108174 - RNA, 19 nt, Artificial Sequence
  Description of Artificial Sequence: Synthetic oligonucleotide
auuucaucuguguggucag

SEQ ID NO: 3108175 - RNA, 19 nt, Artificial Sequence
  Description of Artificial Sequence: Synthetic oligonucleotide
ucagaaaggggccuccaaa

SEQ ID NO: 3108176 - RNA, 19 nt, Artificial Sequence
  Description of Artificial Sequence: Synthetic oligonucleotide
auuucaucaucuuccugcu

SEQ ID NO: 3108177 - RNA, 19 nt, Artificial Sequence
  Description of Artificial Sequence: Synthetic oligonucleotide
cagaaaggggccuccaaag

SEQ ID NO: 3108178 - RNA, 19 nt, Artificial Sequence
  Description of Artificial Sequence: Synthetic oligonucleotide
ucagguaccgcucguccug

SEQ ID NO: 3108179 - RNA, 19 nt, Artificial Sequence
  Description of Artificial Sequence: Synthetic oligonucleotide
ucguccuggucguagacug

SEQ ID NO: 3108180 - RNA, 19 nt, Artificial Sequence
  Description of Artificial Sequence: Synthetic oligonucleotide
caaauccagcaucagguac

SEQ ID NO: 3108181 - RNA, 19 nt, Artificial Sequence
  Description of Artificial Sequence: Synthetic oligonucleotide
aucacuguucagaaagggg

SEQ ID NO: 3108182 - RNA, 19 nt, Artificial Sequence
  Description of Artificial Sequence: Synthetic oligonucleotide
gcggauuucaucugugugg

SEQ ID NO: 3108183 - RNA, 19 nt, Artificial Sequence
  Description of Artificial Sequence: Synthetic oligonucleotide
guaccgcucguccuggucg

SEQ ID NO: 3108184 - RNA, 19 nt, Artificial Sequence
  Description of Artificial Sequence: Synthetic oligonucleotide
cacuguucagaaaggggcc

SEQ ID NO: 3108185 - RNA, 19 nt, Artificial Sequence
  Description of Artificial Sequence: Synthetic oligonucleotide
gacuccucuuccucagugg

SEQ ID NO: 3108186 - RNA, 19 nt, Artificial Sequence
  Description of Artificial Sequence: Synthetic oligonucleotide
agcggauuucaucugugug

SEQ ID NO: 3108187 - RNA, 19 nt, Artificial Sequence
  Description of Artificial Sequence: Synthetic oligonucleotide
aggguauccguccaaaauu

SEQ ID NO: 3108188 - RNA, 19 nt, Artificial Sequence
  Description of Artificial Sequence: Synthetic oligonucleotide
caucuuccugcuuagcgac

SEQ ID NO: 3108189 - RNA, 19 nt, Artificial Sequence
  Description of Artificial Sequence: Synthetic oligonucleotide
caugacgauaucacuguuc

SEQ ID NO: 3108190 - RNA, 19 nt, Artificial Sequence
  Description of Artificial Sequence: Synthetic oligonucleotide
acucuccgaucuuucaguc

SEQ ID NO: 3108191 - RNA, 19 nt, Artificial Sequence
  Description of Artificial Sequence: Synthetic oligonucleotide
agacuggccacagaggcag

SEQ ID NO: 3108192 - RNA, 19 nt, Artificial Sequence
  Description of Artificial Sequence: Synthetic oligonucleotide
uuagcgacuccucuuccuc

SEQ ID NO: 3108193 - RNA, 19 nt, Artificial Sequence
  Description of Artificial Sequence: Synthetic oligonucleotide
cucaguggcuuccucaaac

SEQ ID NO: 3108194 - RNA, 19 nt, Artificial Sequence
  Description of Artificial Sequence: Synthetic oligonucleotide
acgauaucacuguucagaa

SEQ ID NO: 3108195 - RNA, 19 nt, Artificial Sequence
  Description of Artificial Sequence: Synthetic oligonucleotide
uucaucuguguggucagcc

SEQ ID NO: 3108196 - RNA, 19 nt, Artificial Sequence
  Description of Artificial Sequence: Synthetic oligonucleotide
aagcggauuucaucugugu

SEQ ID NO: 3108197 - RNA, 19 nt, Artificial Sequence
  Description of Artificial Sequence: Synthetic oligonucleotide
ucaguggcuuccucaaaca

SEQ ID NO: 3108198 - RNA, 19 nt, Artificial Sequence
  Description of Artificial Sequence: Synthetic oligonucleotide
ggcuuccucaaacaugacg

SEQ ID NO: 3108199 - RNA, 19 nt, Artificial Sequence
  Description of Artificial Sequence: Synthetic oligonucleotide
auaucacuguucagaaagg

SEQ ID NO: 3108200 - RNA, 19 nt, Artificial Sequence
  Description of Artificial Sequence: Synthetic oligonucleotide
ugcuuagcgacuccucuuc

SEQ ID NO: 3108201 - RNA, 19 nt, Artificial Sequence
  Description of Artificial Sequence: Synthetic oligonucleotide
cuccuggcaaaguuagccc

SEQ ID NO: 3108202 - RNA, 19 nt, Artificial Sequence
  Description of Artificial Sequence: Synthetic oligonucleotide
aaagcggauuucaucugug

SEQ ID NO: 3108203 - RNA, 19 nt, Artificial Sequence
  Description of Artificial Sequence: Synthetic oligonucleotide
acaaagcggauuucaucug

SEQ ID NO: 3108204 - RNA, 19 nt, Artificial Sequence
  Description of Artificial Sequence: Synthetic oligonucleotide
guggcuuccucaaacauga

SEQ ID NO: 3108205 - RNA, 19 nt, Artificial Sequence
  Description of Artificial Sequence: Synthetic oligonucleotide
caucagguaccgcucgucc

SEQ ID NO: 3108206 - RNA, 19 nt, Artificial Sequence
  Description of Artificial Sequence: Synthetic oligonucleotide
guccccauuaggauugccg

SEQ ID NO: 3108207 - RNA, 19 nt, Artificial Sequence
  Description of Artificial Sequence: Synthetic oligonucleotide
aggauugccgcuccuggca

SEQ ID NO: 3108208 - RNA, 19 nt, Artificial Sequence
  Description of Artificial Sequence: Synthetic oligonucleotide
caaaauuccacucuccgau

SEQ ID NO: 3108209 - RNA, 19 nt, Artificial Sequence
  Description of Artificial Sequence: Synthetic oligonucleotide
auuaggauugccgcuccug

SEQ ID NO: 3108210 - RNA, 19 nt, Artificial Sequence
  Description of Artificial Sequence: Synthetic oligonucleotide
gcuuccucaaacaugacga

SEQ ID NO: 3108211 - RNA, 19 nt, Artificial Sequence
  Description of Artificial Sequence: Synthetic oligonucleotide
uagacuggccacagaggca

SEQ ID NO: 3108212 - RNA, 19 nt, Artificial Sequence
  Description of Artificial Sequence: Synthetic oligonucleotide
augcuaauguucaaaucca

SEQ ID NO: 3108213 - RNA, 19 nt, Artificial Sequence
  Description of Artificial Sequence: Synthetic oligonucleotide
ucagucucugucccaugcu

SEQ ID NO: 3108214 - RNA, 19 nt, Artificial Sequence
  Description of Artificial Sequence: Synthetic oligonucleotide
ggccuccaaagacaaagcg

SEQ ID NO: 3108215 - RNA, 19 nt, Artificial Sequence
  Description of Artificial Sequence: Synthetic oligonucleotide
aguggcuuccucaaacaug

SEQ ID NO: 3108216 - RNA, 19 nt, Artificial Sequence
  Description of Artificial Sequence: Synthetic oligonucleotide
guauuucaucaucuuccug

SEQ ID NO: 3108217 - RNA, 19 nt, Artificial Sequence
  Description of Artificial Sequence: Synthetic oligonucleotide
uccguccaaaauuccacuc

SEQ ID NO: 3108218 - RNA, 19 nt, Artificial Sequence
  Description of Artificial Sequence: Synthetic oligonucleotide
uguucagaaaggggccucc

SEQ ID NO: 3108219 - RNA, 19 nt, Artificial Sequence
  Description of Artificial Sequence: Synthetic oligonucleotide
uaggauugccgcuccuggc

SEQ ID NO: 3108220 - RNA, 19 nt, Artificial Sequence
  Description of Artificial Sequence: Synthetic oligonucleotide
cucaaacaugacgauauca

SEQ ID NO: 3108221 - RNA, 19 nt, Artificial Sequence
  Description of Artificial Sequence: Synthetic oligonucleotide
ugacgauaucacuguucag

SEQ ID NO: 3108222 - RNA, 19 nt, Artificial Sequence
  Description of Artificial Sequence: Synthetic oligonucleotide
uccaaagacaaagcggauu

SEQ ID NO: 3108223 - RNA, 19 nt, Artificial Sequence
  Description of Artificial Sequence: Synthetic oligonucleotide
aagacaaagcggauuucau

SEQ ID NO: 3108224 - RNA, 19 nt, Artificial Sequence
  Description of Artificial Sequence: Synthetic oligonucleotide
auccguccaaaauuccacu

SEQ ID NO: 3108225 - RNA, 19 nt, Artificial Sequence
  Description of Artificial Sequence: Synthetic oligonucleotide
auguucaaauccagcauca

SEQ ID NO: 3108226 - RNA, 19 nt, Artificial Sequence
  Description of Artificial Sequence: Synthetic oligonucleotide
ucuuucagucucuguccca

SEQ ID NO: 3108227 - RNA, 19 nt, Artificial Sequence
  Description of Artificial Sequence: Synthetic oligonucleotide
uccacucuccgaucuuuca

SEQ ID NO: 3108228 - RNA, 19 nt, Artificial Sequence
  Description of Artificial Sequence: Synthetic oligonucleotide
aauuccacucuccgaucuu

SEQ ID NO: 3108229 - RNA, 19 nt, Artificial Sequence
  Description of Artificial Sequence: Synthetic oligonucleotide
ggggccuccaaagacaaag

SEQ ID NO: 3108230 - RNA, 19 nt, Artificial Sequence
  Description of Artificial Sequence: Synthetic oligonucleotide
gccuccaaagacaaagcgg

SEQ ID NO: 3108231 - RNA, 19 nt, Artificial Sequence
  Description of Artificial Sequence: Synthetic oligonucleotide
gcuaauguucaaauccagc

SEQ ID NO: 3108232 - RNA, 19 nt, Artificial Sequence
  Description of Artificial Sequence: Synthetic oligonucleotide
aucagguaccgcucguccu

SEQ ID NO: 3108233 - RNA, 19 nt, Artificial Sequence
  Description of Artificial Sequence: Synthetic oligonucleotide
ucucugucccaugcuaaug

SEQ ID NO: 3108234 - RNA, 19 nt, Artificial Sequence
  Description of Artificial Sequence: Synthetic oligonucleotide
guuagcccaguauuucauc

SEQ ID NO: 3108235 - RNA, 19 nt, Artificial Sequence
  Description of Artificial Sequence: Synthetic oligonucleotide
cugucccaugcuaauguuc

SEQ ID NO: 3108236 - RNA, 19 nt, Artificial Sequence
  Description of Artificial Sequence: Synthetic oligonucleotide
cuggucguagacuggccac

SEQ ID NO: 3108237 - RNA, 19 nt, Artificial Sequence
  Description of Artificial Sequence: Synthetic oligonucleotide
guauccguccaaaauucca

SEQ ID NO: 3108238 - RNA, 19 nt, Artificial Sequence
  Description of Artificial Sequence: Synthetic oligonucleotide
gcuccuggcaaaguuagcc

SEQ ID NO: 3108239 - RNA, 19 nt, Artificial Sequence
  Description of Artificial Sequence: Synthetic oligonucleotide
caaacaugacgauaucacu

SEQ ID NO: 3108240 - RNA, 19 nt, Artificial Sequence
  Description of Artificial Sequence: Synthetic oligonucleotide
uuucagucucugucccaug

SEQ ID NO: 3108241 - RNA, 19 nt, Artificial Sequence
  Description of Artificial Sequence: Synthetic oligonucleotide
ucccaugcuaauguucaaa

SEQ ID NO: 3108242 - RNA, 19 nt, Artificial Sequence
  Description of Artificial Sequence: Synthetic oligonucleotide
caggcgguccccauuagga

SEQ ID NO: 3108243 - RNA, 19 nt, Artificial Sequence
  Description of Artificial Sequence: Synthetic oligonucleotide
acuguucagaaaggggccu

SEQ ID NO: 3108244 - RNA, 19 nt, Artificial Sequence
  Description of Artificial Sequence: Synthetic oligonucleotide
guccaaaauuccacucucc

SEQ ID NO: 3108245 - RNA, 19 nt, Artificial Sequence
  Description of Artificial Sequence: Synthetic oligonucleotide
uuccucaaacaugacgaua

SEQ ID NO: 3108246 - RNA, 19 nt, Artificial Sequence
  Description of Artificial Sequence: Synthetic oligonucleotide
uccuggucguagacuggcc

SEQ ID NO: 3108247 - RNA, 19 nt, Artificial Sequence
  Description of Artificial Sequence: Synthetic oligonucleotide
gaggguauccguccaaaau

SEQ ID NO: 3108248 - RNA, 19 nt, Artificial Sequence
  Description of Artificial Sequence: Synthetic oligonucleotide
uagcccaguauuucaucau

SEQ ID NO: 3108249 - RNA, 19 nt, Artificial Sequence
  Description of Artificial Sequence: Synthetic oligonucleotide
uuccacucuccgaucuuuc

SEQ ID NO: 3108250 - RNA, 19 nt, Artificial Sequence
  Description of Artificial Sequence: Synthetic oligonucleotide
auugccgcuccuggcaaag

SEQ ID NO: 3108251 - RNA, 19 nt, Artificial Sequence
  Description of Artificial Sequence: Synthetic oligonucleotide
cgaucuuucagucucuguc

SEQ ID NO: 3108252 - RNA, 19 nt, Artificial Sequence
  Description of Artificial Sequence: Synthetic oligonucleotide
ucugucccaugcuaauguu

SEQ ID NO: 3108253 - RNA, 19 nt, Artificial Sequence
  Description of Artificial Sequence: Synthetic oligonucleotide
uccgaucuuucagucucug

SEQ ID NO: 3108254 - RNA, 19 nt, Artificial Sequence
  Description of Artificial Sequence: Synthetic oligonucleotide
aaggggccuccaaagacaa

SEQ ID NO: 3108255 - RNA, 19 nt, Artificial Sequence
  Description of Artificial Sequence: Synthetic oligonucleotide
aguuagcccaguauuucau

SEQ ID NO: 3108256 - RNA, 19 nt, Artificial Sequence
  Description of Artificial Sequence: Synthetic oligonucleotide
uccugcuuagcgacuccuc

SEQ ID NO: 3108257 - RNA, 19 nt, Artificial Sequence
  Description of Artificial Sequence: Synthetic oligonucleotide
caaaguuagcccaguauuu

SEQ ID NO: 3108258 - RNA, 19 nt, Artificial Sequence
  Description of Artificial Sequence: Synthetic oligonucleotide
guccuggucguagacuggc

SEQ ID NO: 3108259 - RNA, 19 nt, Artificial Sequence
  Description of Artificial Sequence: Synthetic oligonucleotide
uggcaaaguuagcccagua

SEQ ID NO: 3108260 - RNA, 19 nt, Artificial Sequence
  Description of Artificial Sequence: Synthetic oligonucleotide
agcaucagguaccgcucgu

SEQ ID NO: 3108261 - RNA, 19 nt, Artificial Sequence
  Description of Artificial Sequence: Synthetic oligonucleotide
gcaaaguuagcccaguauu

SEQ ID NO: 3108262 - RNA, 19 nt, Artificial Sequence
  Description of Artificial Sequence: Synthetic oligonucleotide
acaugacgauaucacuguu

SEQ ID NO: 3108263 - RNA, 19 nt, Artificial Sequence
  Description of Artificial Sequence: Synthetic oligonucleotide
ugccgcuccuggcaaaguu

SEQ ID NO: 3108264 - RNA, 19 nt, Artificial Sequence
  Description of Artificial Sequence: Synthetic oligonucleotide
ggguauccguccaaaauuc

SEQ ID NO: 3108265 - RNA, 19 nt, Artificial Sequence
  Description of Artificial Sequence: Synthetic oligonucleotide
gguauccguccaaaauucc

SEQ ID NO: 3108266 - RNA, 19 nt, Artificial Sequence
  Description of Artificial Sequence: Synthetic oligonucleotide
ccaugcuaauguucaaauc

SEQ ID NO: 3108267 - RNA, 19 nt, Artificial Sequence
  Description of Artificial Sequence: Synthetic oligonucleotide
auuccacucuccgaucuuu

SEQ ID NO: 3108268 - RNA, 19 nt, Artificial Sequence
  Description of Artificial Sequence: Synthetic oligonucleotide
cucugucccaugcuaaugu

SEQ ID NO: 3108269 - RNA, 19 nt, Artificial Sequence
  Description of Artificial Sequence: Synthetic oligonucleotide
uaccgcucguccuggucgu

SEQ ID NO: 3108270 - RNA, 19 nt, Artificial Sequence
  Description of Artificial Sequence: Synthetic oligonucleotide
cguagacuggccacagagg

SEQ ID NO: 3108271 - RNA, 19 nt, Artificial Sequence
  Description of Artificial Sequence: Synthetic oligonucleotide
ccaaaauuccacucuccga

SEQ ID NO: 3108272 - RNA, 19 nt, Artificial Sequence
  Description of Artificial Sequence: Synthetic oligonucleotide
caaagcggauuucaucugu

SEQ ID NO: 3108273 - RNA, 19 nt, Artificial Sequence
  Description of Artificial Sequence: Synthetic oligonucleotide
ccacucuccgaucuuucag

SEQ ID NO: 3108274 - RNA, 19 nt, Artificial Sequence
  Description of Artificial Sequence: Synthetic oligonucleotide
gcaggcgguccccauuagg

SEQ ID NO: 3108275 - RNA, 19 nt, Artificial Sequence
  Description of Artificial Sequence: Synthetic oligonucleotide
aggcgguccccauuaggau

SEQ ID NO: 3108276 - RNA, 19 nt, Artificial Sequence
  Description of Artificial Sequence: Synthetic oligonucleotide
cuguucagaaaggggccuc

SEQ ID NO: 3108277 - RNA, 19 nt, Artificial Sequence
  Description of Artificial Sequence: Synthetic oligonucleotide
cagguaccgcucguccugg

SEQ ID NO: 3108278 - RNA, 19 nt, Artificial Sequence
  Description of Artificial Sequence: Synthetic oligonucleotide
cacucuccgaucuuucagu

SEQ ID NO: 3108279 - RNA, 19 nt, Artificial Sequence
  Description of Artificial Sequence: Synthetic oligonucleotide
aggcaggcgguccccauua

SEQ ID NO: 3108280 - RNA, 19 nt, Artificial Sequence
  Description of Artificial Sequence: Synthetic oligonucleotide
cuuagcgacuccucuuccu

SEQ ID NO: 3108281 - RNA, 19 nt, Artificial Sequence
  Description of Artificial Sequence: Synthetic oligonucleotide
ccgcuccuggcaaaguuag

SEQ ID NO: 3108282 - RNA, 19 nt, Artificial Sequence
  Description of Artificial Sequence: Synthetic oligonucleotide
gcuuagcgacuccucuucc

SEQ ID NO: 3108283 - RNA, 19 nt, Artificial Sequence
  Description of Artificial Sequence: Synthetic oligonucleotide
ccauuaggauugccgcucc

SEQ ID NO: 3108284 - RNA, 19 nt, Artificial Sequence
  Description of Artificial Sequence: Synthetic oligonucleotide
ccagcaucagguaccgcuc

SEQ ID NO: 3108285 - RNA, 19 nt, Artificial Sequence
  Description of Artificial Sequence: Synthetic oligonucleotide
gauugccgcuccuggcaaa

SEQ ID NO: 3108286 - RNA, 19 nt, Artificial Sequence
  Description of Artificial Sequence: Synthetic oligonucleotide
uggcuuccucaaacaugac

SEQ ID NO: 3108287 - RNA, 19 nt, Artificial Sequence
  Description of Artificial Sequence: Synthetic oligonucleotide
ggucguagacuggccacag

SEQ ID NO: 3108288 - RNA, 19 nt, Artificial Sequence
  Description of Artificial Sequence: Synthetic oligonucleotide
auccagcaucagguaccgc

SEQ ID NO: 3108289 - RNA, 19 nt, Artificial Sequence
  Description of Artificial Sequence: Synthetic oligonucleotide
cguccaaaauuccacucuc

SEQ ID NO: 3108290 - RNA, 19 nt, Artificial Sequence
  Description of Artificial Sequence: Synthetic oligonucleotide
gcgguccccauuaggauug

SEQ ID NO: 3108291 - RNA, 19 nt, Artificial Sequence
  Description of Artificial Sequence: Synthetic oligonucleotide
cccauuaggauugccgcuc

SEQ ID NO: 3108292 - RNA, 19 nt, Artificial Sequence
  Description of Artificial Sequence: Synthetic oligonucleotide
cuuucagucucugucccau

SEQ ID NO: 3108293 - RNA, 19 nt, Artificial Sequence
  Description of Artificial Sequence: Synthetic oligonucleotide
ccaaagacaaagcggauuu

SEQ ID NO: 3108294 - RNA, 19 nt, Artificial Sequence
  Description of Artificial Sequence: Synthetic oligonucleotide
agaggcaggcgguccccau

SEQ ID NO: 3108295 - RNA, 19 nt, Artificial Sequence
  Description of Artificial Sequence: Synthetic oligonucleotide
gucguagacuggccacaga

SEQ ID NO: 3108296 - RNA, 19 nt, Artificial Sequence
  Description of Artificial Sequence: Synthetic oligonucleotide
gggccuccaaagacaaagc

SEQ ID NO: 3108297 - RNA, 19 nt, Artificial Sequence
  Description of Artificial Sequence: Synthetic oligonucleotide
cuuccucaaacaugacgau

SEQ ID NO: 3108298 - RNA, 19 nt, Artificial Sequence
  Description of Artificial Sequence: Synthetic oligonucleotide
gguaccgcucguccugguc

SEQ ID NO: 3108299 - RNA, 19 nt, Artificial Sequence
  Description of Artificial Sequence: Synthetic oligonucleotide
ggaggguauccguccaaaa

SEQ ID NO: 3108300 - RNA, 19 nt, Artificial Sequence
  Description of Artificial Sequence: Synthetic oligonucleotide
ccucaaacaugacgauauc

SEQ ID NO: 3108301 - RNA, 19 nt, Artificial Sequence
  Description of Artificial Sequence: Synthetic oligonucleotide
cucuccgaucuuucagucu

SEQ ID NO: 3108302 - RNA, 19 nt, Artificial Sequence
  Description of Artificial Sequence: Synthetic oligonucleotide
ggauugccgcuccuggcaa

SEQ ID NO: 3108303 - RNA, 19 nt, Artificial Sequence
  Description of Artificial Sequence: Synthetic oligonucleotide
ccuggucguagacuggcca

SEQ ID NO: 3108304 - RNA, 19 nt, Artificial Sequence
  Description of Artificial Sequence: Synthetic oligonucleotide
agguaccgcucguccuggu

SEQ ID NO: 3108305 - RNA, 19 nt, Artificial Sequence
  Description of Artificial Sequence: Synthetic oligonucleotide
gcucguccuggucguagac

SEQ ID NO: 3108306 - RNA, 19 nt, Artificial Sequence
  Description of Artificial Sequence: Synthetic oligonucleotide
uugccgcuccuggcaaagu

SEQ ID NO: 3108307 - RNA, 19 nt, Artificial Sequence
  Description of Artificial Sequence: Synthetic oligonucleotide
caguggcuuccucaaacau

SEQ ID NO: 3108308 - RNA, 19 nt, Artificial Sequence
  Description of Artificial Sequence: Synthetic oligonucleotide
cccaugcuaauguucaaau

SEQ ID NO: 3108309 - RNA, 19 nt, Artificial Sequence
  Description of Artificial Sequence: Synthetic oligonucleotide
cuccaaagacaaagcggau

SEQ ID NO: 3108310 - RNA, 19 nt, Artificial Sequence
  Description of Artificial Sequence: Synthetic oligonucleotide
ggcaggcgguccccauuag

SEQ ID NO: 3108311 - RNA, 19 nt, Artificial Sequence
  Description of Artificial Sequence: Synthetic oligonucleotide
gcaucagguaccgcucguc

SEQ ID NO: 3108312 - RNA, 19 nt, Artificial Sequence
  Description of Artificial Sequence: Synthetic oligonucleotide
cugcuuagcgacuccucuu

SEQ ID NO: 3108313 - RNA, 19 nt, Artificial Sequence
  Description of Artificial Sequence: Synthetic oligonucleotide
cauuaggauugccgcuccu

SEQ ID NO: 3108314 - RNA, 19 nt, Artificial Sequence
  Description of Artificial Sequence: Synthetic oligonucleotide
cguccuggucguagacugg

SEQ ID NO: 3108315 - RNA, 19 nt, Artificial Sequence
  Description of Artificial Sequence: Synthetic oligonucleotide
gcccaguauuucaucaucu

SEQ ID NO: 3108316 - RNA, 19 nt, Artificial Sequence
  Description of Artificial Sequence: Synthetic oligonucleotide
ccugcuuagcgacuccucu

SEQ ID NO: 3108317 - RNA, 19 nt, Artificial Sequence
  Description of Artificial Sequence: Synthetic oligonucleotide
gguccccauuaggauugcc

SEQ ID NO: 3108318 - RNA, 19 nt, Artificial Sequence
  Description of Artificial Sequence: Synthetic oligonucleotide
cuccgaucuuucagucucu

SEQ ID NO: 3108319 - RNA, 19 nt, Artificial Sequence
  Description of Artificial Sequence: Synthetic oligonucleotide
ccguccaaaauuccacucu

SEQ ID NO: 3108320 - RNA, 19 nt, Artificial Sequence
  Description of Artificial Sequence: Synthetic oligonucleotide
gggaggguauccguccaaa

SEQ ID NO: 3108321 - RNA, 19 nt, Artificial Sequence
  Description of Artificial Sequence: Synthetic oligonucleotide
cucguccuggucguagacu

SEQ ID NO: 3108322 - RNA, 19 nt, Artificial Sequence
  Description of Artificial Sequence: Synthetic oligonucleotide
ggcgguccccauuaggauu

SEQ ID NO: 3108323 - RNA, 19 nt, Artificial Sequence
  Description of Artificial Sequence: Synthetic oligonucleotide
gaggcaggcgguccccauu

SEQ ID NO: 3108324 - RNA, 19 nt, Artificial Sequence
  Description of Artificial Sequence: Synthetic oligonucleotide
gccacagaggcaggcgguc

SEQ ID NO: 3108325 - RNA, 19 nt, Artificial Sequence
  Description of Artificial Sequence: Synthetic oligonucleotide
ggggaggguauccguccaa

SEQ ID NO: 3108326 - RNA, 19 nt, Artificial Sequence
  Description of Artificial Sequence: Synthetic oligonucleotide
cgauaucacuguucagaaa

SEQ ID NO: 3108327 - RNA, 19 nt, Artificial Sequence
  Description of Artificial Sequence: Synthetic oligonucleotide
ccucuuccucaguggcuuc

SEQ ID NO: 3108328 - RNA, 19 nt, Artificial Sequence
  Description of Artificial Sequence: Synthetic oligonucleotide
cgcuccuggcaaaguuagc

SEQ ID NO: 3108329 - RNA, 19 nt, Artificial Sequence
  Description of Artificial Sequence: Synthetic oligonucleotide
gccgcuccuggcaaaguua

SEQ ID NO: 3108330 - RNA, 19 nt, Artificial Sequence
  Description of Artificial Sequence: Synthetic oligonucleotide
ccgcucguccuggucguag

SEQ ID NO: 3108331 - RNA, 19 nt, Artificial Sequence
  Description of Artificial Sequence: Synthetic oligonucleotide
cccaguauuucaucaucuu

SEQ ID NO: 3108332 - RNA, 19 nt, Artificial Sequence
  Description of Artificial Sequence: Synthetic oligonucleotide
cggauuucaucuguguggu

SEQ ID NO: 3108333 - RNA, 19 nt, Artificial Sequence
  Description of Artificial Sequence: Synthetic oligonucleotide
ccccauuaggauugccgcu

SEQ ID NO: 3108334 - RNA, 19 nt, Artificial Sequence
  Description of Artificial Sequence: Synthetic oligonucleotide
aggggccuccaaagacaaa

SEQ ID NO: 3108335 - RNA, 19 nt, Artificial Sequence
  Description of Artificial Sequence: Synthetic oligonucleotide
ccgaucuuucagucucugu

SEQ ID NO: 3108336 - RNA, 19 nt, Artificial Sequence
  Description of Artificial Sequence: Synthetic oligonucleotide
ggccacagaggcaggcggu

SEQ ID NO: 3108337 - RNA, 19 nt, Artificial Sequence
  Description of Artificial Sequence: Synthetic oligonucleotide
accgcucguccuggucgua

SEQ ID NO: 3108338 - RNA, 19 nt, Artificial Sequence
  Description of Artificial Sequence: Synthetic oligonucleotide
gcgacuccucuuccucagu

SEQ ID NO: 3108339 - RNA, 19 nt, Artificial Sequence
  Description of Artificial Sequence: Synthetic oligonucleotide
cgguccccauuaggauugc

SEQ ID NO: 3108340 - RNA, 19 nt, Artificial Sequence
  Description of Artificial Sequence: Synthetic oligonucleotide
aacucagugaaucuacucc

SEQ ID NO: 3108341 - RNA, 19 nt, Artificial Sequence
  Description of Artificial Sequence: Synthetic oligonucleotide
aaagucauaauacucuguc

SEQ ID NO: 3108342 - RNA, 19 nt, Artificial Sequence
  Description of Artificial Sequence: Synthetic oligonucleotide
aagucauaauacucugucc

SEQ ID NO: 3108343 - RNA, 19 nt, Artificial Sequence
  Description of Artificial Sequence: Synthetic oligonucleotide
uugaaagucauaauacucu

SEQ ID NO: 3108344 - RNA, 19 nt, Artificial Sequence
  Description of Artificial Sequence: Synthetic oligonucleotide
uccaagacuguccugaagc

SEQ ID NO: 3108345 - RNA, 19 nt, Artificial Sequence
  Description of Artificial Sequence: Synthetic oligonucleotide
acucagugaaucuacuccc

SEQ ID NO: 3108346 - RNA, 19 nt, Artificial Sequence
  Description of Artificial Sequence: Synthetic oligonucleotide
auagacugugagcaguucc

SEQ ID NO: 3108347 - RNA, 19 nt, Artificial Sequence
  Description of Artificial Sequence: Synthetic oligonucleotide
agucauaauacucugucca

SEQ ID NO: 3108348 - RNA, 19 nt, Artificial Sequence
  Description of Artificial Sequence: Synthetic oligonucleotide
acugugagcaguuccaggg

SEQ ID NO: 3108349 - RNA, 19 nt, Artificial Sequence
  Description of Artificial Sequence: Synthetic oligonucleotide
uguccaguagauucgaagc

SEQ ID NO: 3108350 - RNA, 19 nt, Artificial Sequence
  Description of Artificial Sequence: Synthetic oligonucleotide
ugacugugcagguaguugg

SEQ ID NO: 3108351 - RNA, 19 nt, Artificial Sequence
  Description of Artificial Sequence: Synthetic oligonucleotide
uaauacucuguccaguaga

SEQ ID NO: 3108352 - RNA, 19 nt, Artificial Sequence
  Description of Artificial Sequence: Synthetic oligonucleotide
cuugaaagucauaauacuc

SEQ ID NO: 3108353 - RNA, 19 nt, Artificial Sequence
  Description of Artificial Sequence: Synthetic oligonucleotide
agacccuucagcuugguug

SEQ ID NO: 3108354 - RNA, 19 nt, Artificial Sequence
  Description of Artificial Sequence: Synthetic oligonucleotide
ugaaagucauaauacucug

SEQ ID NO: 3108355 - RNA, 19 nt, Artificial Sequence
  Description of Artificial Sequence: Synthetic oligonucleotide
ucuugaaagucauaauacu

SEQ ID NO: 3108356 - RNA, 19 nt, Artificial Sequence
  Description of Artificial Sequence: Synthetic oligonucleotide
ucagcuugguuguacgacg

SEQ ID NO: 3108357 - RNA, 19 nt, Artificial Sequence
  Description of Artificial Sequence: Synthetic oligonucleotide
gaucagacccuucagcuug

SEQ ID NO: 3108358 - RNA, 19 nt, Artificial Sequence
  Description of Artificial Sequence: Synthetic oligonucleotide
ugaaucuacucccacguuc

SEQ ID NO: 3108359 - RNA, 19 nt, Artificial Sequence
  Description of Artificial Sequence: Synthetic oligonucleotide
agugaaucuacucccacgu

SEQ ID NO: 3108360 - RNA, 19 nt, Artificial Sequence
  Description of Artificial Sequence: Synthetic oligonucleotide
uacacaguugguaccagug

SEQ ID NO: 3108361 - RNA, 19 nt, Artificial Sequence
  Description of Artificial Sequence: Synthetic oligonucleotide
guagauucgaagcugccug

SEQ ID NO: 3108362 - RNA, 19 nt, Artificial Sequence
  Description of Artificial Sequence: Synthetic oligonucleotide
uuggugaccaguuccaaga

SEQ ID NO: 3108363 - RNA, 19 nt, Artificial Sequence
  Description of Artificial Sequence: Synthetic oligonucleotide
cuucuccuuacacaguugg

SEQ ID NO: 3108364 - RNA, 19 nt, Artificial Sequence
  Description of Artificial Sequence: Synthetic oligonucleotide
acacaguugguaccagugc

SEQ ID NO: 3108365 - RNA, 19 nt, Artificial Sequence
  Description of Artificial Sequence: Synthetic oligonucleotide
uugaacucagugaaucuac

SEQ ID NO: 3108366 - RNA, 19 nt, Artificial Sequence
  Description of Artificial Sequence: Synthetic oligonucleotide
guaguuggagaccuccugg

SEQ ID NO: 3108367 - RNA, 19 nt, Artificial Sequence
  Description of Artificial Sequence: Synthetic oligonucleotide
aguuccagggcauacugug

SEQ ID NO: 3108368 - RNA, 19 nt, Artificial Sequence
  Description of Artificial Sequence: Synthetic oligonucleotide
aaucuacucccacguuccc

SEQ ID NO: 3108369 - RNA, 19 nt, Artificial Sequence
  Description of Artificial Sequence: Synthetic oligonucleotide
ugcuugaccaggcggauca

SEQ ID NO: 3108370 - RNA, 19 nt, Artificial Sequence
  Description of Artificial Sequence: Synthetic oligonucleotide
cauacuguggaggcaaugg

SEQ ID NO: 3108371 - RNA, 19 nt, Artificial Sequence
  Description of Artificial Sequence: Synthetic oligonucleotide
gaccuccuggucuugaaag

SEQ ID NO: 3108372 - RNA, 19 nt, Artificial Sequence
  Description of Artificial Sequence: Synthetic oligonucleotide
uagacugugagcaguucca

SEQ ID NO: 3108373 - RNA, 19 nt, Artificial Sequence
  Description of Artificial Sequence: Synthetic oligonucleotide
auaauacucuguccaguag

SEQ ID NO: 3108374 - RNA, 19 nt, Artificial Sequence
  Description of Artificial Sequence: Synthetic oligonucleotide
gaaucuacucccacguucc

SEQ ID NO: 3108375 - RNA, 19 nt, Artificial Sequence
  Description of Artificial Sequence: Synthetic oligonucleotide
gucuugaaagucauaauac

SEQ ID NO: 3108376 - RNA, 19 nt, Artificial Sequence
  Description of Artificial Sequence: Synthetic oligonucleotide
accaguuccaagacugucc

SEQ ID NO: 3108377 - RNA, 19 nt, Artificial Sequence
  Description of Artificial Sequence: Synthetic oligonucleotide
uguccugaagcccucggcu

SEQ ID NO: 3108378 - RNA, 19 nt, Artificial Sequence
  Description of Artificial Sequence: Synthetic oligonucleotide
gucauaauacucuguccag

SEQ ID NO: 3108379 - RNA, 19 nt, Artificial Sequence
  Description of Artificial Sequence: Synthetic oligonucleotide
gagcugacugugcagguag

SEQ ID NO: 3108380 - RNA, 19 nt, Artificial Sequence
  Description of Artificial Sequence: Synthetic oligonucleotide
uguugaacucagugaaucu

SEQ ID NO: 3108381 - RNA, 19 nt, Artificial Sequence
  Description of Artificial Sequence: Synthetic oligonucleotide
cuguccaguagauucgaag

SEQ ID NO: 3108382 - RNA, 19 nt, Artificial Sequence
  Description of Artificial Sequence: Synthetic oligonucleotide
aagacuguccugaagcccu

SEQ ID NO: 3108383 - RNA, 19 nt, Artificial Sequence
  Description of Artificial Sequence: Synthetic oligonucleotide
cuccuuacacaguugguac

SEQ ID NO: 3108384 - RNA, 19 nt, Artificial Sequence
  Description of Artificial Sequence: Synthetic oligonucleotide
ucggcuguguugaacucag

SEQ ID NO: 3108385 - RNA, 19 nt, Artificial Sequence
  Description of Artificial Sequence: Synthetic oligonucleotide
cagugaaucuacucccacg

SEQ ID NO: 3108386 - RNA, 19 nt, Artificial Sequence
  Description of Artificial Sequence: Synthetic oligonucleotide
gauucgaagcugccuguag

SEQ ID NO: 3108387 - RNA, 19 nt, Artificial Sequence
  Description of Artificial Sequence: Synthetic oligonucleotide
gaggcaaugguuccccagc

SEQ ID NO: 3108388 - RNA, 19 nt, Artificial Sequence
  Description of Artificial Sequence: Synthetic oligonucleotide
gugaccaguuccaagacug

SEQ ID NO: 3108389 - RNA, 19 nt, Artificial Sequence
  Description of Artificial Sequence: Synthetic oligonucleotide
uugaccaggcggaucagac

SEQ ID NO: 3108390 - RNA, 19 nt, Artificial Sequence
  Description of Artificial Sequence: Synthetic oligonucleotide
ugaacucagugaaucuacu

SEQ ID NO: 3108391 - RNA, 19 nt, Artificial Sequence
  Description of Artificial Sequence: Synthetic oligonucleotide
aaugguuccccagcuucuc

SEQ ID NO: 3108392 - RNA, 19 nt, Artificial Sequence
  Description of Artificial Sequence: Synthetic oligonucleotide
uccaguagauucgaagcug

SEQ ID NO: 3108393 - RNA, 19 nt, Artificial Sequence
  Description of Artificial Sequence: Synthetic oligonucleotide
uaguuggugaccaguucca

SEQ ID NO: 3108394 - RNA, 19 nt, Artificial Sequence
  Description of Artificial Sequence: Synthetic oligonucleotide
ucauaauacucuguccagu

SEQ ID NO: 3108395 - RNA, 19 nt, Artificial Sequence
  Description of Artificial Sequence: Synthetic oligonucleotide
ucagugaaucuacucccac

SEQ ID NO: 3108396 - RNA, 19 nt, Artificial Sequence
  Description of Artificial Sequence: Synthetic oligonucleotide
aauacucuguccaguagau

SEQ ID NO: 3108397 - RNA, 19 nt, Artificial Sequence
  Description of Artificial Sequence: Synthetic oligonucleotide
uccuuacacaguugguacc

SEQ ID NO: 3108398 - RNA, 19 nt, Artificial Sequence
  Description of Artificial Sequence: Synthetic oligonucleotide
auucgaagcugccuguagu

SEQ ID NO: 3108399 - RNA, 19 nt, Artificial Sequence
  Description of Artificial Sequence: Synthetic oligonucleotide
aguuggagaccuccugguc

SEQ ID NO: 3108400 - RNA, 19 nt, Artificial Sequence
  Description of Artificial Sequence: Synthetic oligonucleotide
caggcauagacugugagca

SEQ ID NO: 3108401 - RNA, 19 nt, Artificial Sequence
  Description of Artificial Sequence: Synthetic oligonucleotide
cuugguuguacgacgcuuc

SEQ ID NO: 3108402 - RNA, 19 nt, Artificial Sequence
  Description of Artificial Sequence: Synthetic oligonucleotide
gaacucagugaaucuacuc

SEQ ID NO: 3108403 - RNA, 19 nt, Artificial Sequence
  Description of Artificial Sequence: Synthetic oligonucleotide
guuggugaccaguuccaag

SEQ ID NO: 3108404 - RNA, 19 nt, Artificial Sequence
  Description of Artificial Sequence: Synthetic oligonucleotide
augguuccccagcuucucc

SEQ ID NO: 3108405 - RNA, 19 nt, Artificial Sequence
  Description of Artificial Sequence: Synthetic oligonucleotide
ucuccuuacacaguuggua

SEQ ID NO: 3108406 - RNA, 19 nt, Artificial Sequence
  Description of Artificial Sequence: Synthetic oligonucleotide
uuccaagacuguccugaag

SEQ ID NO: 3108407 - RNA, 19 nt, Artificial Sequence
  Description of Artificial Sequence: Synthetic oligonucleotide
uucagcuugguuguacgac

SEQ ID NO: 3108408 - RNA, 19 nt, Artificial Sequence
  Description of Artificial Sequence: Synthetic oligonucleotide
cagggcauacuguggaggc

SEQ ID NO: 3108409 - RNA, 19 nt, Artificial Sequence
  Description of Artificial Sequence: Synthetic oligonucleotide
cacguucccaggcauagac

SEQ ID NO: 3108410 - RNA, 19 nt, Artificial Sequence
  Description of Artificial Sequence: Synthetic oligonucleotide
cuguguugaacucagugaa

SEQ ID NO: 3108411 - RNA, 19 nt, Artificial Sequence
  Description of Artificial Sequence: Synthetic oligonucleotide
auacuguggaggcaauggu

SEQ ID NO: 3108412 - RNA, 19 nt, Artificial Sequence
  Description of Artificial Sequence: Synthetic oligonucleotide
aguagauucgaagcugccu

SEQ ID NO: 3108413 - RNA, 19 nt, Artificial Sequence
  Description of Artificial Sequence: Synthetic oligonucleotide
ggucuugaaagucauaaua

SEQ ID NO: 3108414 - RNA, 19 nt, Artificial Sequence
  Description of Artificial Sequence: Synthetic oligonucleotide
uguguugaacucagugaau

SEQ ID NO: 3108415 - RNA, 19 nt, Artificial Sequence
  Description of Artificial Sequence: Synthetic oligonucleotide
uugguuguacgacgcuuca

SEQ ID NO: 3108416 - RNA, 19 nt, Artificial Sequence
  Description of Artificial Sequence: Synthetic oligonucleotide
guaccagugcuugaccagg

SEQ ID NO: 3108417 - RNA, 19 nt, Artificial Sequence
  Description of Artificial Sequence: Synthetic oligonucleotide
uuacacaguugguaccagu

SEQ ID NO: 3108418 - RNA, 19 nt, Artificial Sequence
  Description of Artificial Sequence: Synthetic oligonucleotide
uaguuggagaccuccuggu

SEQ ID NO: 3108419 - RNA, 19 nt, Artificial Sequence
  Description of Artificial Sequence: Synthetic oligonucleotide
uacucccacguucccaggc

SEQ ID NO: 3108420 - RNA, 19 nt, Artificial Sequence
  Description of Artificial Sequence: Synthetic oligonucleotide
acucuguccaguagauucg

SEQ ID NO: 3108421 - RNA, 19 nt, Artificial Sequence
  Description of Artificial Sequence: Synthetic oligonucleotide
guguugaacucagugaauc

SEQ ID NO: 3108422 - RNA, 19 nt, Artificial Sequence
  Description of Artificial Sequence: Synthetic oligonucleotide
guugguaccagugcuugac

SEQ ID NO: 3108423 - RNA, 19 nt, Artificial Sequence
  Description of Artificial Sequence: Synthetic oligonucleotide
ggcuguguugaacucagug

SEQ ID NO: 3108424 - RNA, 19 nt, Artificial Sequence
  Description of Artificial Sequence: Synthetic oligonucleotide
agcuucuccuuacacaguu

SEQ ID NO: 3108425 - RNA, 19 nt, Artificial Sequence
  Description of Artificial Sequence: Synthetic oligonucleotide
uagauucgaagcugccugu

SEQ ID NO: 3108426 - RNA, 19 nt, Artificial Sequence
  Description of Artificial Sequence: Synthetic oligonucleotide
uucuccuuacacaguuggu

SEQ ID NO: 3108427 - RNA, 19 nt, Artificial Sequence
  Description of Artificial Sequence: Synthetic oligonucleotide
aagcccucggcuguguuga

SEQ ID NO: 3108428 - RNA, 19 nt, Artificial Sequence
  Description of Artificial Sequence: Synthetic oligonucleotide
uucccaggcauagacugug

SEQ ID NO: 3108429 - RNA, 19 nt, Artificial Sequence
  Description of Artificial Sequence: Synthetic oligonucleotide
gaagcccucggcuguguug

SEQ ID NO: 3108430 - RNA, 19 nt, Artificial Sequence
  Description of Artificial Sequence: Synthetic oligonucleotide
caagacuguccugaagccc

SEQ ID NO: 3108431 - RNA, 19 nt, Artificial Sequence
  Description of Artificial Sequence: Synthetic oligonucleotide
ugaccaggcggaucagacc

SEQ ID NO: 3108432 - RNA, 19 nt, Artificial Sequence
  Description of Artificial Sequence: Synthetic oligonucleotide
uucgaagcugccuguaguu

SEQ ID NO: 3108433 - RNA, 19 nt, Artificial Sequence
  Description of Artificial Sequence: Synthetic oligonucleotide
accagugcuugaccaggcg

SEQ ID NO: 3108434 - RNA, 19 nt, Artificial Sequence
  Description of Artificial Sequence: Synthetic oligonucleotide
cagguaguuggagaccucc

SEQ ID NO: 3108435 - RNA, 19 nt, Artificial Sequence
  Description of Artificial Sequence: Synthetic oligonucleotide
cuggucuugaaagucauaa

SEQ ID NO: 3108436 - RNA, 19 nt, Artificial Sequence
  Description of Artificial Sequence: Synthetic oligonucleotide
uccugaagcccucggcugu

SEQ ID NO: 3108437 - RNA, 19 nt, Artificial Sequence
  Description of Artificial Sequence: Synthetic oligonucleotide
uggugaccaguuccaagac

SEQ ID NO: 3108438 - RNA, 19 nt, Artificial Sequence
  Description of Artificial Sequence: Synthetic oligonucleotide
cagcuugguuguacgacgc

SEQ ID NO: 3108439 - RNA, 19 nt, Artificial Sequence
  Description of Artificial Sequence: Synthetic oligonucleotide
caguagauucgaagcugcc

SEQ ID NO: 3108440 - RNA, 19 nt, Artificial Sequence
  Description of Artificial Sequence: Synthetic oligonucleotide
gcuguguugaacucaguga

SEQ ID NO: 3108441 - RNA, 19 nt, Artificial Sequence
  Description of Artificial Sequence: Synthetic oligonucleotide
uggucuugaaagucauaau

SEQ ID NO: 3108442 - RNA, 19 nt, Artificial Sequence
  Description of Artificial Sequence: Synthetic oligonucleotide
uccuggucuugaaagucau

SEQ ID NO: 3108443 - RNA, 19 nt, Artificial Sequence
  Description of Artificial Sequence: Synthetic oligonucleotide
gguaguuggagaccuccug

SEQ ID NO: 3108444 - RNA, 19 nt, Artificial Sequence
  Description of Artificial Sequence: Synthetic oligonucleotide
cugugagcaguuccagggc

SEQ ID NO: 3108445 - RNA, 19 nt, Artificial Sequence
  Description of Artificial Sequence: Synthetic oligonucleotide
ccaguagauucgaagcugc

SEQ ID NO: 3108446 - RNA, 19 nt, Artificial Sequence
  Description of Artificial Sequence: Synthetic oligonucleotide
ugaccaguuccaagacugu

SEQ ID NO: 3108447 - RNA, 19 nt, Artificial Sequence
  Description of Artificial Sequence: Synthetic oligonucleotide
ucgaagcugccuguaguug

SEQ ID NO: 3108448 - RNA, 19 nt, Artificial Sequence
  Description of Artificial Sequence: Synthetic oligonucleotide
ugguuccccagcuucuccu

SEQ ID NO: 3108449 - RNA, 19 nt, Artificial Sequence
  Description of Artificial Sequence: Synthetic oligonucleotide
aggcggaucagacccuuca

SEQ ID NO: 3108450 - RNA, 19 nt, Artificial Sequence
  Description of Artificial Sequence: Synthetic oligonucleotide
guuggagaccuccuggucu

SEQ ID NO: 3108451 - RNA, 19 nt, Artificial Sequence
  Description of Artificial Sequence: Synthetic oligonucleotide
cugacugugcagguaguug

SEQ ID NO: 3108452 - RNA, 19 nt, Artificial Sequence
  Description of Artificial Sequence: Synthetic oligonucleotide
guuccagggcauacugugg

SEQ ID NO: 3108453 - RNA, 19 nt, Artificial Sequence
  Description of Artificial Sequence: Synthetic oligonucleotide
ugccuguaguuggugacca

SEQ ID NO: 3108454 - RNA, 19 nt, Artificial Sequence
  Description of Artificial Sequence: Synthetic oligonucleotide
gcaaugguuccccagcuuc

SEQ ID NO: 3108455 - RNA, 19 nt, Artificial Sequence
  Description of Artificial Sequence: Synthetic oligonucleotide
guccugaagcccucggcug

SEQ ID NO: 3108456 - RNA, 19 nt, Artificial Sequence
  Description of Artificial Sequence: Synthetic oligonucleotide
uuggagaccuccuggucuu

SEQ ID NO: 3108457 - RNA, 19 nt, Artificial Sequence
  Description of Artificial Sequence: Synthetic oligonucleotide
aggcaaugguuccccagcu

SEQ ID NO: 3108458 - RNA, 19 nt, Artificial Sequence
  Description of Artificial Sequence: Synthetic oligonucleotide
agacugugagcaguuccag

SEQ ID NO: 3108459 - RNA, 19 nt, Artificial Sequence
  Description of Artificial Sequence: Synthetic oligonucleotide
agcugccuguaguugguga

SEQ ID NO: 3108460 - RNA, 19 nt, Artificial Sequence
  Description of Artificial Sequence: Synthetic oligonucleotide
acugugcagguaguuggag

SEQ ID NO: 3108461 - RNA, 19 nt, Artificial Sequence
  Description of Artificial Sequence: Synthetic oligonucleotide
ugguuguacgacgcuucag

SEQ ID NO: 3108462 - RNA, 19 nt, Artificial Sequence
  Description of Artificial Sequence: Synthetic oligonucleotide
ccuucagcuugguuguacg

SEQ ID NO: 3108463 - RNA, 19 nt, Artificial Sequence
  Description of Artificial Sequence: Synthetic oligonucleotide
caguugguaccagugcuug

SEQ ID NO: 3108464 - RNA, 19 nt, Artificial Sequence
  Description of Artificial Sequence: Synthetic oligonucleotide
uuccccagcuucuccuuac

SEQ ID NO: 3108465 - RNA, 19 nt, Artificial Sequence
  Description of Artificial Sequence: Synthetic oligonucleotide
cucagugaaucuacuccca

SEQ ID NO: 3108466 - RNA, 19 nt, Artificial Sequence
  Description of Artificial Sequence: Synthetic oligonucleotide
ucuguccaguagauucgaa

SEQ ID NO: 3108467 - RNA, 19 nt, Artificial Sequence
  Description of Artificial Sequence: Synthetic oligonucleotide
aguugguaccagugcuuga

SEQ ID NO: 3108468 - RNA, 19 nt, Artificial Sequence
  Description of Artificial Sequence: Synthetic oligonucleotide
gaaagucauaauacucugu

SEQ ID NO: 3108469 - RNA, 19 nt, Artificial Sequence
  Description of Artificial Sequence: Synthetic oligonucleotide
ccaagacuguccugaagcc

SEQ ID NO: 3108470 - RNA, 19 nt, Artificial Sequence
  Description of Artificial Sequence: Synthetic oligonucleotide
acucccacguucccaggca

SEQ ID NO: 3108471 - RNA, 19 nt, Artificial Sequence
  Description of Artificial Sequence: Synthetic oligonucleotide
gacccuucagcuugguugu

SEQ ID NO: 3108472 - RNA, 19 nt, Artificial Sequence
  Description of Artificial Sequence: Synthetic oligonucleotide
cuuacacaguugguaccag

SEQ ID NO: 3108473 - RNA, 19 nt, Artificial Sequence
  Description of Artificial Sequence: Synthetic oligonucleotide
ccagugcuugaccaggcgg

SEQ ID NO: 3108474 - RNA, 19 nt, Artificial Sequence
  Description of Artificial Sequence: Synthetic oligonucleotide
cuccuggucuugaaaguca

SEQ ID NO: 3108475 - RNA, 19 nt, Artificial Sequence
  Description of Artificial Sequence: Synthetic oligonucleotide
gaccaguuccaagacuguc

SEQ ID NO: 3108476 - RNA, 19 nt, Artificial Sequence
  Description of Artificial Sequence: Synthetic oligonucleotide
cguucccaggcauagacug

SEQ ID NO: 3108477 - RNA, 19 nt, Artificial Sequence
  Description of Artificial Sequence: Synthetic oligonucleotide
cugccuguaguuggugacc

SEQ ID NO: 3108478 - RNA, 19 nt, Artificial Sequence
  Description of Artificial Sequence: Synthetic oligonucleotide
guggaggcaaugguucccc

SEQ ID NO: 3108479 - RNA, 19 nt, Artificial Sequence
  Description of Artificial Sequence: Synthetic oligonucleotide
agaccuccuggucuugaaa

SEQ ID NO: 3108480 - RNA, 19 nt, Artificial Sequence
  Description of Artificial Sequence: Synthetic oligonucleotide
cuucagcuugguuguacga

SEQ ID NO: 3108481 - RNA, 19 nt, Artificial Sequence
  Description of Artificial Sequence: Synthetic oligonucleotide
guccaguagauucgaagcu

SEQ ID NO: 3108482 - RNA, 19 nt, Artificial Sequence
  Description of Artificial Sequence: Synthetic oligonucleotide
gacuguccugaagcccucg

SEQ ID NO: 3108483 - RNA, 19 nt, Artificial Sequence
  Description of Artificial Sequence: Synthetic oligonucleotide
agcuugguuguacgacgcu

SEQ ID NO: 3108484 - RNA, 19 nt, Artificial Sequence
  Description of Artificial Sequence: Synthetic oligonucleotide
cacaguugguaccagugcu

SEQ ID NO: 3108485 - RNA, 19 nt, Artificial Sequence
  Description of Artificial Sequence: Synthetic oligonucleotide
gcggaucagacccuucagc

SEQ ID NO: 3108486 - RNA, 19 nt, Artificial Sequence
  Description of Artificial Sequence: Synthetic oligonucleotide
agcaguuccagggcauacu

SEQ ID NO: 3108487 - RNA, 19 nt, Artificial Sequence
  Description of Artificial Sequence: Synthetic oligonucleotide
ucccaggcauagacuguga

SEQ ID NO: 3108488 - RNA, 19 nt, Artificial Sequence
  Description of Artificial Sequence: Synthetic oligonucleotide
uccccagcuucuccuuaca

SEQ ID NO: 3108489 - RNA, 19 nt, Artificial Sequence
  Description of Artificial Sequence: Synthetic oligonucleotide
cuacucccacguucccagg

SEQ ID NO: 3108490 - RNA, 19 nt, Artificial Sequence
  Description of Artificial Sequence: Synthetic oligonucleotide
aucagacccuucagcuugg

SEQ ID NO: 3108491 - RNA, 19 nt, Artificial Sequence
  Description of Artificial Sequence: Synthetic oligonucleotide
ugagcugacugugcaggua

SEQ ID NO: 3108492 - RNA, 19 nt, Artificial Sequence
  Description of Artificial Sequence: Synthetic oligonucleotide
gcugccuguaguuggugac

SEQ ID NO: 3108493 - RNA, 19 nt, Artificial Sequence
  Description of Artificial Sequence: Synthetic oligonucleotide
aagcugccuguaguuggug

SEQ ID NO: 3108494 - RNA, 19 nt, Artificial Sequence
  Description of Artificial Sequence: Synthetic oligonucleotide
cauagacugugagcaguuc

SEQ ID NO: 3108495 - RNA, 19 nt, Artificial Sequence
  Description of Artificial Sequence: Synthetic oligonucleotide
gagcaguuccagggcauac

SEQ ID NO: 3108496 - RNA, 19 nt, Artificial Sequence
  Description of Artificial Sequence: Synthetic oligonucleotide
gacugugcagguaguugga

SEQ ID NO: 3108497 - RNA, 19 nt, Artificial Sequence
  Description of Artificial Sequence: Synthetic oligonucleotide
ggcggaucagacccuucag

SEQ ID NO: 3108498 - RNA, 19 nt, Artificial Sequence
  Description of Artificial Sequence: Synthetic oligonucleotide
ugagcaguuccagggcaua

SEQ ID NO: 3108499 - RNA, 19 nt, Artificial Sequence
  Description of Artificial Sequence: Synthetic oligonucleotide
gugcagguaguuggagacc

SEQ ID NO: 3108500 - RNA, 19 nt, Artificial Sequence
  Description of Artificial Sequence: Synthetic oligonucleotide
gagaccuccuggucuugaa

SEQ ID NO: 3108501 - RNA, 19 nt, Artificial Sequence
  Description of Artificial Sequence: Synthetic oligonucleotide
ccagggcauacuguggagg

SEQ ID NO: 3108502 - RNA, 19 nt, Artificial Sequence
  Description of Artificial Sequence: Synthetic oligonucleotide
ugaagcccucggcuguguu

SEQ ID NO: 3108503 - RNA, 19 nt, Artificial Sequence
  Description of Artificial Sequence: Synthetic oligonucleotide
aguuggugaccaguuccaa

SEQ ID NO: 3108504 - RNA, 19 nt, Artificial Sequence
  Description of Artificial Sequence: Synthetic oligonucleotide
agguaguuggagaccuccu

SEQ ID NO: 3108505 - RNA, 19 nt, Artificial Sequence
  Description of Artificial Sequence: Synthetic oligonucleotide
ucccacguucccaggcaua

SEQ ID NO: 3108506 - RNA, 19 nt, Artificial Sequence
  Description of Artificial Sequence: Synthetic oligonucleotide
agacuguccugaagcccuc

SEQ ID NO: 3108507 - RNA, 19 nt, Artificial Sequence
  Description of Artificial Sequence: Synthetic oligonucleotide
agauucgaagcugccugua

SEQ ID NO: 3108508 - RNA, 19 nt, Artificial Sequence
  Description of Artificial Sequence: Synthetic oligonucleotide
cucggcuguguugaacuca

SEQ ID NO: 3108509 - RNA, 19 nt, Artificial Sequence
  Description of Artificial Sequence: Synthetic oligonucleotide
agggcauacuguggaggca

SEQ ID NO: 3108510 - RNA, 19 nt, Artificial Sequence
  Description of Artificial Sequence: Synthetic oligonucleotide
caaugguuccccagcuucu

SEQ ID NO: 3108511 - RNA, 19 nt, Artificial Sequence
  Description of Artificial Sequence: Synthetic oligonucleotide
cccaggcauagacugugag

SEQ ID NO: 3108512 - RNA, 19 nt, Artificial Sequence
  Description of Artificial Sequence: Synthetic oligonucleotide
gaagcugccuguaguuggu

SEQ ID NO: 3108513 - RNA, 19 nt, Artificial Sequence
  Description of Artificial Sequence: Synthetic oligonucleotide
cuugaccaggcggaucaga

SEQ ID NO: 3108514 - RNA, 19 nt, Artificial Sequence
  Description of Artificial Sequence: Synthetic oligonucleotide
acguucccaggcauagacu

SEQ ID NO: 3108515 - RNA, 19 nt, Artificial Sequence
  Description of Artificial Sequence: Synthetic oligonucleotide
cucuguccaguagauucga

SEQ ID NO: 3108516 - RNA, 19 nt, Artificial Sequence
  Description of Artificial Sequence: Synthetic oligonucleotide
ccuuacacaguugguacca

SEQ ID NO: 3108517 - RNA, 19 nt, Artificial Sequence
  Description of Artificial Sequence: Synthetic oligonucleotide
auacucuguccaguagauu

SEQ ID NO: 3108518 - RNA, 19 nt, Artificial Sequence
  Description of Artificial Sequence: Synthetic oligonucleotide
cuguaguuggugaccaguu

SEQ ID NO: 3108519 - RNA, 19 nt, Artificial Sequence
  Description of Artificial Sequence: Synthetic oligonucleotide
cccacguucccaggcauag

SEQ ID NO: 3108520 - RNA, 19 nt, Artificial Sequence
  Description of Artificial Sequence: Synthetic oligonucleotide
gcauacuguggaggcaaug

SEQ ID NO: 3108521 - RNA, 19 nt, Artificial Sequence
  Description of Artificial Sequence: Synthetic oligonucleotide
ucagacccuucagcuuggu

SEQ ID NO: 3108522 - RNA, 19 nt, Artificial Sequence
  Description of Artificial Sequence: Synthetic oligonucleotide
ggugaccaguuccaagacu

SEQ ID NO: 3108523 - RNA, 19 nt, Artificial Sequence
  Description of Artificial Sequence: Synthetic oligonucleotide
ccuccuggucuugaaaguc

SEQ ID NO: 3108524 - RNA, 19 nt, Artificial Sequence
  Description of Artificial Sequence: Synthetic oligonucleotide
gggcauacuguggaggcaa

SEQ ID NO: 3108525 - RNA, 19 nt, Artificial Sequence
  Description of Artificial Sequence: Synthetic oligonucleotide
gcuucuccuuacacaguug

SEQ ID NO: 3108526 - RNA, 19 nt, Artificial Sequence
  Description of Artificial Sequence: Synthetic oligonucleotide
agcugacugugcagguagu

SEQ ID NO: 3108527 - RNA, 19 nt, Artificial Sequence
  Description of Artificial Sequence: Synthetic oligonucleotide
caggcggaucagacccuuc

SEQ ID NO: 3108528 - RNA, 19 nt, Artificial Sequence
  Description of Artificial Sequence: Synthetic oligonucleotide
gugaaucuacucccacguu

SEQ ID NO: 3108529 - RNA, 19 nt, Artificial Sequence
  Description of Artificial Sequence: Synthetic oligonucleotide
accaggcggaucagacccu

SEQ ID NO: 3108530 - RNA, 19 nt, Artificial Sequence
  Description of Artificial Sequence: Synthetic oligonucleotide
ggaucagacccuucagcuu

SEQ ID NO: 3108531 - RNA, 19 nt, Artificial Sequence
  Description of Artificial Sequence: Synthetic oligonucleotide
cccuucagcuugguuguac

SEQ ID NO: 3108532 - RNA, 19 nt, Artificial Sequence
  Description of Artificial Sequence: Synthetic oligonucleotide
ccccagcuucuccuuacac

SEQ ID NO: 3108533 - RNA, 19 nt, Artificial Sequence
  Description of Artificial Sequence: Synthetic oligonucleotide
guucccaggcauagacugu

SEQ ID NO: 3108534 - RNA, 19 nt, Artificial Sequence
  Description of Artificial Sequence: Synthetic oligonucleotide
cggaucagacccuucagcu

SEQ ID NO: 3108535 - RNA, 19 nt, Artificial Sequence
  Description of Artificial Sequence: Synthetic oligonucleotide
ggagaccuccuggucuuga

SEQ ID NO: 3108536 - RNA, 19 nt, Artificial Sequence
  Description of Artificial Sequence: Synthetic oligonucleotide
ccucggcuguguugaacuc

SEQ ID NO: 3108537 - RNA, 19 nt, Artificial Sequence
  Description of Artificial Sequence: Synthetic oligonucleotide
cccucggcuguguugaacu

SEQ ID NO: 3108538 - RNA, 19 nt, Artificial Sequence
  Description of Artificial Sequence: Synthetic oligonucleotide
gcuugaccaggcggaucag

SEQ ID NO: 3108539 - RNA, 19 nt, Artificial Sequence
  Description of Artificial Sequence: Synthetic oligonucleotide
gugagcaguuccagggcau

SEQ ID NO: 3108540 - RNA, 19 nt, Artificial Sequence
  Description of Artificial Sequence: Synthetic oligonucleotide
cagcuucuccuuacacagu

SEQ ID NO: 3108541 - RNA, 19 nt, Artificial Sequence
  Description of Artificial Sequence: Synthetic oligonucleotide
ccugaagcccucggcugug

SEQ ID NO: 3108542 - RNA, 19 nt, Artificial Sequence
  Description of Artificial Sequence: Synthetic oligonucleotide
gcuugguuguacgacgcuu

SEQ ID NO: 3108543 - RNA, 19 nt, Artificial Sequence
  Description of Artificial Sequence: Synthetic oligonucleotide
agcccucggcuguguugaa

SEQ ID NO: 3108544 - RNA, 19 nt, Artificial Sequence
  Description of Artificial Sequence: Synthetic oligonucleotide
cucccacguucccaggcau

SEQ ID NO: 3108545 - RNA, 19 nt, Artificial Sequence
  Description of Artificial Sequence: Synthetic oligonucleotide
gcauagacugugagcaguu

SEQ ID NO: 3108546 - RNA, 19 nt, Artificial Sequence
  Description of Artificial Sequence: Synthetic oligonucleotide
ggcaaugguuccccagcuu

SEQ ID NO: 3108547 - RNA, 19 nt, Artificial Sequence
  Description of Artificial Sequence: Synthetic oligonucleotide
ccuggucuugaaagucaua

SEQ ID NO: 3108548 - RNA, 19 nt, Artificial Sequence
  Description of Artificial Sequence: Synthetic oligonucleotide
gcccucggcuguguugaac

SEQ ID NO: 3108549 - RNA, 19 nt, Artificial Sequence
  Description of Artificial Sequence: Synthetic oligonucleotide
gguuccccagcuucuccuu

SEQ ID NO: 3108550 - RNA, 19 nt, Artificial Sequence
  Description of Artificial Sequence: Synthetic oligonucleotide
acccuucagcuugguugua

SEQ ID NO: 3108551 - RNA, 19 nt, Artificial Sequence
  Description of Artificial Sequence: Synthetic oligonucleotide
cagacccuucagcuugguu

SEQ ID NO: 3108552 - RNA, 19 nt, Artificial Sequence
  Description of Artificial Sequence: Synthetic oligonucleotide
gcugacugugcagguaguu

SEQ ID NO: 3108553 - RNA, 19 nt, Artificial Sequence
  Description of Artificial Sequence: Synthetic oligonucleotide
cugaagcccucggcugugu

SEQ ID NO: 3108554 - RNA, 19 nt, Artificial Sequence
  Description of Artificial Sequence: Synthetic oligonucleotide
ggcauacuguggaggcaau

SEQ ID NO: 3108555 - RNA, 19 nt, Artificial Sequence
  Description of Artificial Sequence: Synthetic oligonucleotide
ccacguucccaggcauaga

SEQ ID NO: 3108556 - RNA, 19 nt, Artificial Sequence
  Description of Artificial Sequence: Synthetic oligonucleotide
ccaggcggaucagacccuu

SEQ ID NO: 3108557 - RNA, 19 nt, Artificial Sequence
  Description of Artificial Sequence: Synthetic oligonucleotide
cggcuguguugaacucagu

SEQ ID NO: 3108558 - RNA, 19 nt, Artificial Sequence
  Description of Artificial Sequence: Synthetic oligonucleotide
accuucacgaucuuuaugc

SEQ ID NO: 3108559 - RNA, 19 nt, Artificial Sequence
  Description of Artificial Sequence: Synthetic oligonucleotide
uugaacucggucuucaggg

SEQ ID NO: 3108560 - RNA, 19 nt, Artificial Sequence
  Description of Artificial Sequence: Synthetic oligonucleotide
uucacgaucuuuaugcugc

SEQ ID NO: 3108561 - RNA, 19 nt, Artificial Sequence
  Description of Artificial Sequence: Synthetic oligonucleotide
acgaucuuuaugcugcucc

SEQ ID NO: 3108562 - RNA, 19 nt, Artificial Sequence
  Description of Artificial Sequence: Synthetic oligonucleotide
acugccuucgcacagaucu

SEQ ID NO: 3108563 - RNA, 19 nt, Artificial Sequence
  Description of Artificial Sequence: Synthetic oligonucleotide
ucagcguuggccuugaacu

SEQ ID NO: 3108564 - RNA, 19 nt, Artificial Sequence
  Description of Artificial Sequence: Synthetic oligonucleotide
aaccggauauagcugaguc

SEQ ID NO: 3108565 - RNA, 19 nt, Artificial Sequence
  Description of Artificial Sequence: Synthetic oligonucleotide
aaggcucagcaguucaugc

SEQ ID NO: 3108566 - RNA, 19 nt, Artificial Sequence
  Description of Artificial Sequence: Synthetic oligonucleotide
ucaugcuucagucaggguc

SEQ ID NO: 3108567 - RNA, 19 nt, Artificial Sequence
  Description of Artificial Sequence: Synthetic oligonucleotide
ucagagucgccucagccgg

SEQ ID NO: 3108568 - RNA, 19 nt, Artificial Sequence
  Description of Artificial Sequence: Synthetic oligonucleotide
uuaugcugcucccagaagu

SEQ ID NO: 3108569 - RNA, 19 nt, Artificial Sequence
  Description of Artificial Sequence: Synthetic oligonucleotide
agcaguucaugcuucaguc

SEQ ID NO: 3108570 - RNA, 19 nt, Artificial Sequence
  Description of Artificial Sequence: Synthetic oligonucleotide
caugcuucagucagggucg

SEQ ID NO: 3108571 - RNA, 19 nt, Artificial Sequence
  Description of Artificial Sequence: Synthetic oligonucleotide
uucagagucgccucagccg

SEQ ID NO: 3108572 - RNA, 19 nt, Artificial Sequence
  Description of Artificial Sequence: Synthetic oligonucleotide
ucaccuucaaggcucagca

SEQ ID NO: 3108573 - RNA, 19 nt, Artificial Sequence
  Description of Artificial Sequence: Synthetic oligonucleotide
uuucagagucgccucagcc

SEQ ID NO: 3108574 - RNA, 19 nt, Artificial Sequence
  Description of Artificial Sequence: Synthetic oligonucleotide
accggauauagcugagucc

SEQ ID NO: 3108575 - RNA, 19 nt, Artificial Sequence
  Description of Artificial Sequence: Synthetic oligonucleotide
uucaccuucacgaucuuua

SEQ ID NO: 3108576 - RNA, 19 nt, Artificial Sequence
  Description of Artificial Sequence: Synthetic oligonucleotide
agucuucucagcguuggcc

SEQ ID NO: 3108577 - RNA, 19 nt, Artificial Sequence
  Description of Artificial Sequence: Synthetic oligonucleotide
cuugaacucggucuucagg

SEQ ID NO: 3108578 - RNA, 19 nt, Artificial Sequence
  Description of Artificial Sequence: Synthetic oligonucleotide
gauauagcugaguccggcc

SEQ ID NO: 3108579 - RNA, 19 nt, Artificial Sequence
  Description of Artificial Sequence: Synthetic oligonucleotide
cuucgcacagaucugggag

SEQ ID NO: 3108580 - RNA, 19 nt, Artificial Sequence
  Description of Artificial Sequence: Synthetic oligonucleotide
uucagggcaucccucacug

SEQ ID NO: 3108581 - RNA, 19 nt, Artificial Sequence
  Description of Artificial Sequence: Synthetic oligonucleotide
aucuuuaugcugcucccag

SEQ ID NO: 3108582 - RNA, 19 nt, Artificial Sequence
  Description of Artificial Sequence: Synthetic oligonucleotide
caguucaugcuucagucag

SEQ ID NO: 3108583 - RNA, 19 nt, Artificial Sequence
  Description of Artificial Sequence: Synthetic oligonucleotide
gaagucuucucagcguugg

SEQ ID NO: 3108584 - RNA, 19 nt, Artificial Sequence
  Description of Artificial Sequence: Synthetic oligonucleotide
accuucaaggcucagcagu

SEQ ID NO: 3108585 - RNA, 19 nt, Artificial Sequence
  Description of Artificial Sequence: Synthetic oligonucleotide
aagucuucucagcguuggc

SEQ ID NO: 3108586 - RNA, 19 nt, Artificial Sequence
  Description of Artificial Sequence: Synthetic oligonucleotide
uucaaggcucagcaguuca

SEQ ID NO: 3108587 - RNA, 19 nt, Artificial Sequence
  Description of Artificial Sequence: Synthetic oligonucleotide
uuuaugcugcucccagaag

SEQ ID NO: 3108588 - RNA, 19 nt, Artificial Sequence
  Description of Artificial Sequence: Synthetic oligonucleotide
gagaaccggauauagcuga

SEQ ID NO: 3108589 - RNA, 19 nt, Artificial Sequence
  Description of Artificial Sequence: Synthetic oligonucleotide
uauagcugaguccggccug

SEQ ID NO: 3108590 - RNA, 19 nt, Artificial Sequence
  Description of Artificial Sequence: Synthetic oligonucleotide
guucaugcuucagucaggg

SEQ ID NO: 3108591 - RNA, 19 nt, Artificial Sequence
  Description of Artificial Sequence: Synthetic oligonucleotide
auauagcugaguccggccu

SEQ ID NO: 3108592 - RNA, 19 nt, Artificial Sequence
  Description of Artificial Sequence: Synthetic oligonucleotide
agucgccucagccgggacc

SEQ ID NO: 3108593 - RNA, 19 nt, Artificial Sequence
  Description of Artificial Sequence: Synthetic oligonucleotide
uaugcugcucccagaaguc

SEQ ID NO: 3108594 - RNA, 19 nt, Artificial Sequence
  Description of Artificial Sequence: Synthetic oligonucleotide
cuucacgaucuuuaugcug

SEQ ID NO: 3108595 - RNA, 19 nt, Artificial Sequence
  Description of Artificial Sequence: Synthetic oligonucleotide
cacagaucugggagaaccg

SEQ ID NO: 3108596 - RNA, 19 nt, Artificial Sequence
  Description of Artificial Sequence: Synthetic oligonucleotide
acagaucugggagaaccgg

SEQ ID NO: 3108597 - RNA, 19 nt, Artificial Sequence
  Description of Artificial Sequence: Synthetic oligonucleotide
uacgccaccauggugucgc

SEQ ID NO: 3108598 - RNA, 19 nt, Artificial Sequence
  Description of Artificial Sequence: Synthetic oligonucleotide
cagggcaucccucacugcc

SEQ ID NO: 3108599 - RNA, 19 nt, Artificial Sequence
  Description of Artificial Sequence: Synthetic oligonucleotide
cauggugucgcgagcgcgg

SEQ ID NO: 3108600 - RNA, 19 nt, Artificial Sequence
  Description of Artificial Sequence: Synthetic oligonucleotide
aucugggagaaccggauau

SEQ ID NO: 3108601 - RNA, 19 nt, Artificial Sequence
  Description of Artificial Sequence: Synthetic oligonucleotide
ugaacucggucuucagggc

SEQ ID NO: 3108602 - RNA, 19 nt, Artificial Sequence
  Description of Artificial Sequence: Synthetic oligonucleotide
ugggagaaccggauauagc

SEQ ID NO: 3108603 - RNA, 19 nt, Artificial Sequence
  Description of Artificial Sequence: Synthetic oligonucleotide
uucgcacagaucugggaga

SEQ ID NO: 3108604 - RNA, 19 nt, Artificial Sequence
  Description of Artificial Sequence: Synthetic oligonucleotide
ccggauauagcugaguccg

SEQ ID NO: 3108605 - RNA, 19 nt, Artificial Sequence
  Description of Artificial Sequence: Synthetic oligonucleotide
ucgacuacuccuucuucac

SEQ ID NO: 3108606 - RNA, 19 nt, Artificial Sequence
  Description of Artificial Sequence: Synthetic oligonucleotide
ucuuuaugcugcucccaga

SEQ ID NO: 3108607 - RNA, 19 nt, Artificial Sequence
  Description of Artificial Sequence: Synthetic oligonucleotide
ucagucagggucgacuacu

SEQ ID NO: 3108608 - RNA, 19 nt, Artificial Sequence
  Description of Artificial Sequence: Synthetic oligonucleotide
ugccuucgcacagaucugg

SEQ ID NO: 3108609 - RNA, 19 nt, Artificial Sequence
  Description of Artificial Sequence: Synthetic oligonucleotide
uucaccuucaaggcucagc

SEQ ID NO: 3108610 - RNA, 19 nt, Artificial Sequence
  Description of Artificial Sequence: Synthetic oligonucleotide
gacuacuccuucuucaccu

SEQ ID NO: 3108611 - RNA, 19 nt, Artificial Sequence
  Description of Artificial Sequence: Synthetic oligonucleotide
agcguuggccuugaacucg

SEQ ID NO: 3108612 - RNA, 19 nt, Artificial Sequence
  Description of Artificial Sequence: Synthetic oligonucleotide
aguacgccaccaugguguc

SEQ ID NO: 3108613 - RNA, 19 nt, Artificial Sequence
  Description of Artificial Sequence: Synthetic oligonucleotide
accauggugucgcgagcgc

SEQ ID NO: 3108614 - RNA, 19 nt, Artificial Sequence
  Description of Artificial Sequence: Synthetic oligonucleotide
gucgacuacuccuucuuca

SEQ ID NO: 3108615 - RNA, 19 nt, Artificial Sequence
  Description of Artificial Sequence: Synthetic oligonucleotide
cuuuaugcugcucccagaa

SEQ ID NO: 3108616 - RNA, 19 nt, Artificial Sequence
  Description of Artificial Sequence: Synthetic oligonucleotide
ucccagaagucuucucagc

SEQ ID NO: 3108617 - RNA, 19 nt, Artificial Sequence
  Description of Artificial Sequence: Synthetic oligonucleotide
gaacucggucuucagggca

SEQ ID NO: 3108618 - RNA, 19 nt, Artificial Sequence
  Description of Artificial Sequence: Synthetic oligonucleotide
ucccucacugccuucgcac

SEQ ID NO: 3108619 - RNA, 19 nt, Artificial Sequence
  Description of Artificial Sequence: Synthetic oligonucleotide
cugggagaaccggauauag

SEQ ID NO: 3108620 - RNA, 19 nt, Artificial Sequence
  Description of Artificial Sequence: Synthetic oligonucleotide
cucagcguuggccuugaac

SEQ ID NO: 3108621 - RNA, 19 nt, Artificial Sequence
  Description of Artificial Sequence: Synthetic oligonucleotide
ucagggucgacuacuccuu

SEQ ID NO: 3108622 - RNA, 19 nt, Artificial Sequence
  Description of Artificial Sequence: Synthetic oligonucleotide
gggagaaccggauauagcu

SEQ ID NO: 3108623 - RNA, 19 nt, Artificial Sequence
  Description of Artificial Sequence: Synthetic oligonucleotide
uucagucagggucgacuac

SEQ ID NO: 3108624 - RNA, 19 nt, Artificial Sequence
  Description of Artificial Sequence: Synthetic oligonucleotide
aguucaugcuucagucagg

SEQ ID NO: 3108625 - RNA, 19 nt, Artificial Sequence
  Description of Artificial Sequence: Synthetic oligonucleotide
gucgccucagccgggaccg

SEQ ID NO: 3108626 - RNA, 19 nt, Artificial Sequence
  Description of Artificial Sequence: Synthetic oligonucleotide
cuuucagagucgccucagc

SEQ ID NO: 3108627 - RNA, 19 nt, Artificial Sequence
  Description of Artificial Sequence: Synthetic oligonucleotide
ucaaggcucagcaguucau

SEQ ID NO: 3108628 - RNA, 19 nt, Artificial Sequence
  Description of Artificial Sequence: Synthetic oligonucleotide
gcacagaucugggagaacc

SEQ ID NO: 3108629 - RNA, 19 nt, Artificial Sequence
  Description of Artificial Sequence: Synthetic oligonucleotide
ucgggcaggaccgcugggg

SEQ ID NO: 3108630 - RNA, 19 nt, Artificial Sequence
  Description of Artificial Sequence: Synthetic oligonucleotide
aggcucagcaguucaugcu

SEQ ID NO: 3108631 - RNA, 19 nt, Artificial Sequence
  Description of Artificial Sequence: Synthetic oligonucleotide
caccauggugucgcgagcg

SEQ ID NO: 3108632 - RNA, 19 nt, Artificial Sequence
  Description of Artificial Sequence: Synthetic oligonucleotide
ucaccuucacgaucuuuau

SEQ ID NO: 3108633 - RNA, 19 nt, Artificial Sequence
  Description of Artificial Sequence: Synthetic oligonucleotide
caguacgccaccauggugu

SEQ ID NO: 3108634 - RNA, 19 nt, Artificial Sequence
  Description of Artificial Sequence: Synthetic oligonucleotide
agcugaguccggccugccg

SEQ ID NO: 3108635 - RNA, 19 nt, Artificial Sequence
  Description of Artificial Sequence: Synthetic oligonucleotide
gaucuuuaugcugcuccca

SEQ ID NO: 3108636 - RNA, 19 nt, Artificial Sequence
  Description of Artificial Sequence: Synthetic oligonucleotide
ucagccgggaccggccgcg

SEQ ID NO: 3108637 - RNA, 19 nt, Artificial Sequence
  Description of Artificial Sequence: Synthetic oligonucleotide
ggauauagcugaguccggc

SEQ ID NO: 3108638 - RNA, 19 nt, Artificial Sequence
  Description of Artificial Sequence: Synthetic oligonucleotide
caaggcucagcaguucaug

SEQ ID NO: 3108639 - RNA, 19 nt, Artificial Sequence
  Description of Artificial Sequence: Synthetic oligonucleotide
gucagggucgacuacuccu

SEQ ID NO: 3108640 - RNA, 19 nt, Artificial Sequence
  Description of Artificial Sequence: Synthetic oligonucleotide
ucacgaucuuuaugcugcu

SEQ ID NO: 3108641 - RNA, 19 nt, Artificial Sequence
  Description of Artificial Sequence: Synthetic oligonucleotide
gccaccauggugucgcgag

SEQ ID NO: 3108642 - RNA, 19 nt, Artificial Sequence
  Description of Artificial Sequence: Synthetic oligonucleotide
caccuucacgaucuuuaug

SEQ ID NO: 3108643 - RNA, 19 nt, Artificial Sequence
  Description of Artificial Sequence: Synthetic oligonucleotide
ucggucuucagggcauccc

SEQ ID NO: 3108644 - RNA, 19 nt, Artificial Sequence
  Description of Artificial Sequence: Synthetic oligonucleotide
auggugucgcgagcgcggc

SEQ ID NO: 3108645 - RNA, 19 nt, Artificial Sequence
  Description of Artificial Sequence: Synthetic oligonucleotide
guuggccuugaacucgguc

SEQ ID NO: 3108646 - RNA, 19 nt, Artificial Sequence
  Description of Artificial Sequence: Synthetic oligonucleotide
agggucgacuacuccuucu

SEQ ID NO: 3108647 - RNA, 19 nt, Artificial Sequence
  Description of Artificial Sequence: Synthetic oligonucleotide
ucacugccuucgcacagau

SEQ ID NO: 3108648 - RNA, 19 nt, Artificial Sequence
  Description of Artificial Sequence: Synthetic oligonucleotide
aacucggucuucagggcau

SEQ ID NO: 3108649 - RNA, 19 nt, Artificial Sequence
  Description of Artificial Sequence: Synthetic oligonucleotide
cagaucugggagaaccgga

SEQ ID NO: 3108650 - RNA, 19 nt, Artificial Sequence
  Description of Artificial Sequence: Synthetic oligonucleotide
cugaguccggccugccgcc

SEQ ID NO: 3108651 - RNA, 19 nt, Artificial Sequence
  Description of Artificial Sequence: Synthetic oligonucleotide
gucuucucagcguuggccu

SEQ ID NO: 3108652 - RNA, 19 nt, Artificial Sequence
  Description of Artificial Sequence: Synthetic oligonucleotide
cuucagucagggucgacua

SEQ ID NO: 3108653 - RNA, 19 nt, Artificial Sequence
  Description of Artificial Sequence: Synthetic oligonucleotide
agaaccggauauagcugag

SEQ ID NO: 3108654 - RNA, 19 nt, Artificial Sequence
  Description of Artificial Sequence: Synthetic oligonucleotide
uucaugcuucagucagggu

SEQ ID NO: 3108655 - RNA, 19 nt, Artificial Sequence
  Description of Artificial Sequence: Synthetic oligonucleotide
ggagaaccggauauagcug

SEQ ID NO: 3108656 - RNA, 19 nt, Artificial Sequence
  Description of Artificial Sequence: Synthetic oligonucleotide
ucugggagaaccggauaua

SEQ ID NO: 3108657 - RNA, 19 nt, Artificial Sequence
  Description of Artificial Sequence: Synthetic oligonucleotide
caccuucaaggcucagcag

SEQ ID NO: 3108658 - RNA, 19 nt, Artificial Sequence
  Description of Artificial Sequence: Synthetic oligonucleotide
agaagucuucucagcguug

SEQ ID NO: 3108659 - RNA, 19 nt, Artificial Sequence
  Description of Artificial Sequence: Synthetic oligonucleotide
ucagggcaucccucacugc

SEQ ID NO: 3108660 - RNA, 19 nt, Artificial Sequence
  Description of Artificial Sequence: Synthetic oligonucleotide
agaucugggagaaccggau

SEQ ID NO: 3108661 - RNA, 19 nt, Artificial Sequence
  Description of Artificial Sequence: Synthetic oligonucleotide
uggugucgcgagcgcggcg

SEQ ID NO: 3108662 - RNA, 19 nt, Artificial Sequence
  Description of Artificial Sequence: Synthetic oligonucleotide
ucgcacagaucugggagaa

SEQ ID NO: 3108663 - RNA, 19 nt, Artificial Sequence
  Description of Artificial Sequence: Synthetic oligonucleotide
acuacuccuucuucaccuu

SEQ ID NO: 3108664 - RNA, 19 nt, Artificial Sequence
  Description of Artificial Sequence: Synthetic oligonucleotide
cagcguuggccuugaacuc

SEQ ID NO: 3108665 - RNA, 19 nt, Artificial Sequence
  Description of Artificial Sequence: Synthetic oligonucleotide
gaucugggagaaccggaua

SEQ ID NO: 3108666 - RNA, 19 nt, Artificial Sequence
  Description of Artificial Sequence: Synthetic oligonucleotide
ucuucucagcguuggccuu

SEQ ID NO: 3108667 - RNA, 19 nt, Artificial Sequence
  Description of Artificial Sequence: Synthetic oligonucleotide
cuucucagcguuggccuug

SEQ ID NO: 3108668 - RNA, 19 nt, Artificial Sequence
  Description of Artificial Sequence: Synthetic oligonucleotide
cagucagggucgacuacuc

SEQ ID NO: 3108669 - RNA, 19 nt, Artificial Sequence
  Description of Artificial Sequence: Synthetic oligonucleotide
aucccucacugccuucgca

SEQ ID NO: 3108670 - RNA, 19 nt, Artificial Sequence
  Description of Artificial Sequence: Synthetic oligonucleotide
gcaucccucacugccuucg

SEQ ID NO: 3108671 - RNA, 19 nt, Artificial Sequence
  Description of Artificial Sequence: Synthetic oligonucleotide
cucagcaguucaugcuuca

SEQ ID NO: 3108672 - RNA, 19 nt, Artificial Sequence
  Description of Artificial Sequence: Synthetic oligonucleotide
ggcgcgucgggcaggaccg

SEQ ID NO: 3108673 - RNA, 19 nt, Artificial Sequence
  Description of Artificial Sequence: Synthetic oligonucleotide
cugccuucgcacagaucug

SEQ ID NO: 3108674 - RNA, 19 nt, Artificial Sequence
  Description of Artificial Sequence: Synthetic oligonucleotide
cgaucuuuaugcugcuccc

SEQ ID NO: 3108675 - RNA, 19 nt, Artificial Sequence
  Description of Artificial Sequence: Synthetic oligonucleotide
cagagucgccucagccggg

SEQ ID NO: 3108676 - RNA, 19 nt, Artificial Sequence
  Description of Artificial Sequence: Synthetic oligonucleotide
caucccucacugccuucgc

SEQ ID NO: 3108677 - RNA, 19 nt, Artificial Sequence
  Description of Artificial Sequence: Synthetic oligonucleotide
gcaguucaugcuucaguca

SEQ ID NO: 3108678 - RNA, 19 nt, Artificial Sequence
  Description of Artificial Sequence: Synthetic oligonucleotide
agcgcggcgcgucgggcag

SEQ ID NO: 3108679 - RNA, 19 nt, Artificial Sequence
  Description of Artificial Sequence: Synthetic oligonucleotide
ucgcgagcgcggcgcgucg

SEQ ID NO: 3108680 - RNA, 19 nt, Artificial Sequence
  Description of Artificial Sequence: Synthetic oligonucleotide
ugcucccagaagucuucuc

SEQ ID NO: 3108681 - RNA, 19 nt, Artificial Sequence
  Description of Artificial Sequence: Synthetic oligonucleotide
cgccaguacgccaccaugg

SEQ ID NO: 3108682 - RNA, 19 nt, Artificial Sequence
  Description of Artificial Sequence: Synthetic oligonucleotide
uucucagcguuggccuuga

SEQ ID NO: 3108683 - RNA, 19 nt, Artificial Sequence
  Description of Artificial Sequence: Synthetic oligonucleotide
ccugccgccaguacgccac

SEQ ID NO: 3108684 - RNA, 19 nt, Artificial Sequence
  Description of Artificial Sequence: Synthetic oligonucleotide
gaguccggccugccgccag

SEQ ID NO: 3108685 - RNA, 19 nt, Artificial Sequence
  Description of Artificial Sequence: Synthetic oligonucleotide
ggugucgcgagcgcggcgc

SEQ ID NO: 3108686 - RNA, 19 nt, Artificial Sequence
  Description of Artificial Sequence: Synthetic oligonucleotide
acucggucuucagggcauc

SEQ ID NO: 3108687 - RNA, 19 nt, Artificial Sequence
  Description of Artificial Sequence: Synthetic oligonucleotide
cucggucuucagggcaucc

SEQ ID NO: 3108688 - RNA, 19 nt, Artificial Sequence
  Description of Artificial Sequence: Synthetic oligonucleotide
agagucgccucagccggga

SEQ ID NO: 3108689 - RNA, 19 nt, Artificial Sequence
  Description of Artificial Sequence: Synthetic oligonucleotide
agggcaucccucacugccu

SEQ ID NO: 3108690 - RNA, 19 nt, Artificial Sequence
  Description of Artificial Sequence: Synthetic oligonucleotide
ggucgacuacuccuucuuc

SEQ ID NO: 3108691 - RNA, 19 nt, Artificial Sequence
  Description of Artificial Sequence: Synthetic oligonucleotide
gucgggcaggaccgcuggg

SEQ ID NO: 3108692 - RNA, 19 nt, Artificial Sequence
  Description of Artificial Sequence: Synthetic oligonucleotide
guacgccaccauggugucg

SEQ ID NO: 3108693 - RNA, 19 nt, Artificial Sequence
  Description of Artificial Sequence: Synthetic oligonucleotide
cagcaguucaugcuucagu

SEQ ID NO: 3108694 - RNA, 19 nt, Artificial Sequence
  Description of Artificial Sequence: Synthetic oligonucleotide
cucagccgggaccggccgc

SEQ ID NO: 3108695 - RNA, 19 nt, Artificial Sequence
  Description of Artificial Sequence: Synthetic oligonucleotide
ccggccugccgccaguacg

SEQ ID NO: 3108696 - RNA, 19 nt, Artificial Sequence
  Description of Artificial Sequence: Synthetic oligonucleotide
cagggucgacuacuccuuc

SEQ ID NO: 3108697 - RNA, 19 nt, Artificial Sequence
  Description of Artificial Sequence: Synthetic oligonucleotide
gugucgcgagcgcggcgcg

SEQ ID NO: 3108698 - RNA, 19 nt, Artificial Sequence
  Description of Artificial Sequence: Synthetic oligonucleotide
ggcuuucagagucgccuca

SEQ ID NO: 3108699 - RNA, 19 nt, Artificial Sequence
  Description of Artificial Sequence: Synthetic oligonucleotide
cacgaucuuuaugcugcuc

SEQ ID NO: 3108700 - RNA, 19 nt, Artificial Sequence
  Description of Artificial Sequence: Synthetic oligonucleotide
uccggccugccgccaguac

SEQ ID NO: 3108701 - RNA, 19 nt, Artificial Sequence
  Description of Artificial Sequence: Synthetic oligonucleotide
gaaccggauauagcugagu

SEQ ID NO: 3108702 - RNA, 19 nt, Artificial Sequence
  Description of Artificial Sequence: Synthetic oligonucleotide
ccucacugccuucgcacag

SEQ ID NO: 3108703 - RNA, 19 nt, Artificial Sequence
  Description of Artificial Sequence: Synthetic oligonucleotide
gagcgcggcgcgucgggca

SEQ ID NO: 3108704 - RNA, 19 nt, Artificial Sequence
  Description of Artificial Sequence: Synthetic oligonucleotide
ggggcuuucagagucgccu

SEQ ID NO: 3108705 - RNA, 19 nt, Artificial Sequence
  Description of Artificial Sequence: Synthetic oligonucleotide
gggcuuucagagucgccuc

SEQ ID NO: 3108706 - RNA, 19 nt, Artificial Sequence
  Description of Artificial Sequence: Synthetic oligonucleotide
agccgggaccggccgcggg

SEQ ID NO: 3108707 - RNA, 19 nt, Artificial Sequence
  Description of Artificial Sequence: Synthetic oligonucleotide
ccaguacgccaccauggug

SEQ ID NO: 3108708 - RNA, 19 nt, Artificial Sequence
  Description of Artificial Sequence: Synthetic oligonucleotide
ccauggugucgcgagcgcg

SEQ ID NO: 3108709 - RNA, 19 nt, Artificial Sequence
  Description of Artificial Sequence: Synthetic oligonucleotide
acgccaccauggugucgcg

SEQ ID NO: 3108710 - RNA, 19 nt, Artificial Sequence
  Description of Artificial Sequence: Synthetic oligonucleotide
aguccggccugccgccagu

SEQ ID NO: 3108711 - RNA, 19 nt, Artificial Sequence
  Description of Artificial Sequence: Synthetic oligonucleotide
cuucagggcaucccucacu

SEQ ID NO: 3108712 - RNA, 19 nt, Artificial Sequence
  Description of Artificial Sequence: Synthetic oligonucleotide
cucacugccuucgcacaga

SEQ ID NO: 3108713 - RNA, 19 nt, Artificial Sequence
  Description of Artificial Sequence: Synthetic oligonucleotide
gggaccggccgcgggaagg

SEQ ID NO: 3108714 - RNA, 19 nt, Artificial Sequence
  Description of Artificial Sequence: Synthetic oligonucleotide
ugaguccggccugccgcca

SEQ ID NO: 3108715 - RNA, 19 nt, Artificial Sequence
  Description of Artificial Sequence: Synthetic oligonucleotide
gccuucgcacagaucuggg

SEQ ID NO: 3108716 - RNA, 19 nt, Artificial Sequence
  Description of Artificial Sequence: Synthetic oligonucleotide
cgacuacuccuucuucacc

SEQ ID NO: 3108717 - RNA, 19 nt, Artificial Sequence
  Description of Artificial Sequence: Synthetic oligonucleotide
gagucgccucagccgggac

SEQ ID NO: 3108718 - RNA, 19 nt, Artificial Sequence
  Description of Artificial Sequence: Synthetic oligonucleotide
gcuucagucagggucgacu

SEQ ID NO: 3108719 - RNA, 19 nt, Artificial Sequence
  Description of Artificial Sequence: Synthetic oligonucleotide
cuucaccuucaaggcucag

SEQ ID NO: 3108720 - RNA, 19 nt, Artificial Sequence
  Description of Artificial Sequence: Synthetic oligonucleotide
cacugccuucgcacagauc

SEQ ID NO: 3108721 - RNA, 19 nt, Artificial Sequence
  Description of Artificial Sequence: Synthetic oligonucleotide
accggccgcgggaagguca

SEQ ID NO: 3108722 - RNA, 19 nt, Artificial Sequence
  Description of Artificial Sequence: Synthetic oligonucleotide
cggauauagcugaguccgg

SEQ ID NO: 3108723 - RNA, 19 nt, Artificial Sequence
  Description of Artificial Sequence: Synthetic oligonucleotide
ugcuucagucagggucgac

SEQ ID NO: 3108724 - RNA, 19 nt, Artificial Sequence
  Description of Artificial Sequence: Synthetic oligonucleotide
ggcucagcaguucaugcuu

SEQ ID NO: 3108725 - RNA, 19 nt, Artificial Sequence
  Description of Artificial Sequence: Synthetic oligonucleotide
ggucuucagggcaucccuc

SEQ ID NO: 3108726 - RNA, 19 nt, Artificial Sequence
  Description of Artificial Sequence: Synthetic oligonucleotide
augcuucagucagggucga

SEQ ID NO: 3108727 - RNA, 19 nt, Artificial Sequence
  Description of Artificial Sequence: Synthetic oligonucleotide
cugccgccaguacgccacc

SEQ ID NO: 3108728 - RNA, 19 nt, Artificial Sequence
  Description of Artificial Sequence: Synthetic oligonucleotide
ccuucgcacagaucuggga

SEQ ID NO: 3108729 - RNA, 19 nt, Artificial Sequence
  Description of Artificial Sequence: Synthetic oligonucleotide
gcugcucccagaagucuuc

SEQ ID NO: 3108730 - RNA, 19 nt, Artificial Sequence
  Description of Artificial Sequence: Synthetic oligonucleotide
ugccgccaguacgccacca

SEQ ID NO: 3108731 - RNA, 19 nt, Artificial Sequence
  Description of Artificial Sequence: Synthetic oligonucleotide
gccuugaacucggucuuca

SEQ ID NO: 3108732 - RNA, 19 nt, Artificial Sequence
  Description of Artificial Sequence: Synthetic oligonucleotide
ucucagcguuggccuugaa

SEQ ID NO: 3108733 - RNA, 19 nt, Artificial Sequence
  Description of Artificial Sequence: Synthetic oligonucleotide
ccgccaguacgccaccaug

SEQ ID NO: 3108734 - RNA, 19 nt, Artificial Sequence
  Description of Artificial Sequence: Synthetic oligonucleotide
ccaccauggugucgcgagc

SEQ ID NO: 3108735 - RNA, 19 nt, Artificial Sequence
  Description of Artificial Sequence: Synthetic oligonucleotide
ccucagccgggaccggccg

SEQ ID NO: 3108736 - RNA, 19 nt, Artificial Sequence
  Description of Artificial Sequence: Synthetic oligonucleotide
cggccugccgccaguacgc

SEQ ID NO: 3108737 - RNA, 19 nt, Artificial Sequence
  Description of Artificial Sequence: Synthetic oligonucleotide
gucgcgagcgcggcgcguc

SEQ ID NO: 3108738 - RNA, 19 nt, Artificial Sequence
  Description of Artificial Sequence: Synthetic oligonucleotide
ccagaagucuucucagcgu

SEQ ID NO: 3108739 - RNA, 19 nt, Artificial Sequence
  Description of Artificial Sequence: Synthetic oligonucleotide
ugucgcgagcgcggcgcgu

SEQ ID NO: 3108740 - RNA, 19 nt, Artificial Sequence
  Description of Artificial Sequence: Synthetic oligonucleotide
cgucgggcaggaccgcugg

SEQ ID NO: 3108741 - RNA, 19 nt, Artificial Sequence
  Description of Artificial Sequence: Synthetic oligonucleotide
gcgagcgcggcgcgucggg

SEQ ID NO: 3108742 - RNA, 19 nt, Artificial Sequence
  Description of Artificial Sequence: Synthetic oligonucleotide
ucgccucagccgggaccgg

SEQ ID NO: 3108743 - RNA, 19 nt, Artificial Sequence
  Description of Artificial Sequence: Synthetic oligonucleotide
gccaguacgccaccauggu

SEQ ID NO: 3108744 - RNA, 19 nt, Artificial Sequence
  Description of Artificial Sequence: Synthetic oligonucleotide
cggcgcgucgggcaggacc

SEQ ID NO: 3108745 - RNA, 19 nt, Artificial Sequence
  Description of Artificial Sequence: Synthetic oligonucleotide
ccuucacgaucuuuaugcu

SEQ ID NO: 3108746 - RNA, 19 nt, Artificial Sequence
  Description of Artificial Sequence: Synthetic oligonucleotide
gccucagccgggaccggcc

SEQ ID NO: 3108747 - RNA, 19 nt, Artificial Sequence
  Description of Artificial Sequence: Synthetic oligonucleotide
cccucacugccuucgcaca

SEQ ID NO: 3108748 - RNA, 19 nt, Artificial Sequence
  Description of Artificial Sequence: Synthetic oligonucleotide
ggcaucccucacugccuuc

SEQ ID NO: 3108749 - RNA, 19 nt, Artificial Sequence
  Description of Artificial Sequence: Synthetic oligonucleotide
ccuucaaggcucagcaguu

SEQ ID NO: 3108750 - RNA, 19 nt, Artificial Sequence
  Description of Artificial Sequence: Synthetic oligonucleotide
cuucaccuucacgaucuuu

SEQ ID NO: 3108751 - RNA, 19 nt, Artificial Sequence
  Description of Artificial Sequence: Synthetic oligonucleotide
gccgggaccggccgcggga

SEQ ID NO: 3108752 - RNA, 19 nt, Artificial Sequence
  Description of Artificial Sequence: Synthetic oligonucleotide
ggccuugaacucggucuuc

SEQ ID NO: 3108753 - RNA, 19 nt, Artificial Sequence
  Description of Artificial Sequence: Synthetic oligonucleotide
cagccgggaccggccgcgg

SEQ ID NO: 3108754 - RNA, 19 nt, Artificial Sequence
  Description of Artificial Sequence: Synthetic oligonucleotide
gaccggccgcgggaagguc

SEQ ID NO: 3108755 - RNA, 19 nt, Artificial Sequence
  Description of Artificial Sequence: Synthetic oligonucleotide
gcgucgggcaggaccgcug

SEQ ID NO: 3108756 - RNA, 19 nt, Artificial Sequence
  Description of Artificial Sequence: Synthetic oligonucleotide
gccugccgccaguacgcca

SEQ ID NO: 3108757 - RNA, 19 nt, Artificial Sequence
  Description of Artificial Sequence: Synthetic oligonucleotide
cugcucccagaagucuucu

SEQ ID NO: 3108758 - RNA, 19 nt, Artificial Sequence
  Description of Artificial Sequence: Synthetic oligonucleotide
ggccugccgccaguacgcc

SEQ ID NO: 3108759 - RNA, 19 nt, Artificial Sequence
  Description of Artificial Sequence: Synthetic oligonucleotide
gggcaucccucacugccuu

SEQ ID NO: 3108760 - RNA, 19 nt, Artificial Sequence
  Description of Artificial Sequence: Synthetic oligonucleotide
cggucuucagggcaucccu

SEQ ID NO: 3108761 - RNA, 19 nt, Artificial Sequence
  Description of Artificial Sequence: Synthetic oligonucleotide
guccggccugccgccagua

SEQ ID NO: 3108762 - RNA, 19 nt, Artificial Sequence
  Description of Artificial Sequence: Synthetic oligonucleotide
gccgccaguacgccaccau

SEQ ID NO: 3108763 - RNA, 19 nt, Artificial Sequence
  Description of Artificial Sequence: Synthetic oligonucleotide
ggaccggccgcgggaaggu

SEQ ID NO: 3108764 - RNA, 19 nt, Artificial Sequence
  Description of Artificial Sequence: Synthetic oligonucleotide
cgcacagaucugggagaac

SEQ ID NO: 3108765 - RNA, 19 nt, Artificial Sequence
  Description of Artificial Sequence: Synthetic oligonucleotide
cgccucagccgggaccggc

SEQ ID NO: 3108766 - RNA, 19 nt, Artificial Sequence
  Description of Artificial Sequence: Synthetic oligonucleotide
cgagcgcggcgcgucgggc

SEQ ID NO: 3108767 - RNA, 19 nt, Artificial Sequence
  Description of Artificial Sequence: Synthetic oligonucleotide
gcgcggcgcgucgggcagg

SEQ ID NO: 3108768 - RNA, 19 nt, Artificial Sequence
  Description of Artificial Sequence: Synthetic oligonucleotide
cgcgagcgcggcgcgucgg

SEQ ID NO: 3108769 - RNA, 19 nt, Artificial Sequence
  Description of Artificial Sequence: Synthetic oligonucleotide
gcgcgucgggcaggaccgc

SEQ ID NO: 3108770 - RNA, 19 nt, Artificial Sequence
  Description of Artificial Sequence: Synthetic oligonucleotide
cgggaccggccgcgggaag

SEQ ID NO: 3108771 - RNA, 19 nt, Artificial Sequence
  Description of Artificial Sequence: Synthetic oligonucleotide
ccgggaccggccgcgggaa

SEQ ID NO: 3108772 - RNA, 19 nt, Artificial Sequence
  Description of Artificial Sequence: Synthetic oligonucleotide
cgccaccauggugucgcga

SEQ ID NO: 3108773 - RNA, 19 nt, Artificial Sequence
  Description of Artificial Sequence: Synthetic oligonucleotide
cgcggcgcgucgggcagga

SEQ ID NO: 3108774 - RNA, 19 nt, Artificial Sequence
  Description of Artificial Sequence: Synthetic oligonucleotide
gcggcgcgucgggcaggac

SEQ ID NO: 3108775 - RNA, 19 nt, Artificial Sequence
  Description of Artificial Sequence: Synthetic oligonucleotide
cgcgucgggcaggaccgcu

SEQ ID NO: 3108776 - RNA, 19 nt, Artificial Sequence
  Description of Artificial Sequence: Synthetic oligonucleotide
uuuagcauaaucuuccgcc

SEQ ID NO: 3108777 - RNA, 19 nt, Artificial Sequence
  Description of Artificial Sequence: Synthetic oligonucleotide
uuuaacucggaccaaaacu

SEQ ID NO: 3108778 - RNA, 19 nt, Artificial Sequence
  Description of Artificial Sequence: Synthetic oligonucleotide
aagucuuuaacucggacca

SEQ ID NO: 3108779 - RNA, 19 nt, Artificial Sequence
  Description of Artificial Sequence: Synthetic oligonucleotide
uucuuuagcauaaucuucc

SEQ ID NO: 3108780 - RNA, 19 nt, Artificial Sequence
  Description of Artificial Sequence: Synthetic oligonucleotide
uguaugaacucuugcacgg

SEQ ID NO: 3108781 - RNA, 19 nt, Artificial Sequence
  Description of Artificial Sequence: Synthetic oligonucleotide
uugggauuguaucauagag

SEQ ID NO: 3108782 - RNA, 19 nt, Artificial Sequence
  Description of Artificial Sequence: Synthetic oligonucleotide
gauuguaucauagaggaca

SEQ ID NO: 3108783 - RNA, 19 nt, Artificial Sequence
  Description of Artificial Sequence: Synthetic oligonucleotide
ugucaagucuuuaacucgg

SEQ ID NO: 3108784 - RNA, 19 nt, Artificial Sequence
  Description of Artificial Sequence: Synthetic oligonucleotide
uguaucauagaggacaccc

SEQ ID NO: 3108785 - RNA, 19 nt, Artificial Sequence
  Description of Artificial Sequence: Synthetic oligonucleotide
aucaucagccuuuuguuac

SEQ ID NO: 3108786 - RNA, 19 nt, Artificial Sequence
  Description of Artificial Sequence: Synthetic oligonucleotide
ugggauuguaucauagagg

SEQ ID NO: 3108787 - RNA, 19 nt, Artificial Sequence
  Description of Artificial Sequence: Synthetic oligonucleotide
uuguaugaacucuugcacg

SEQ ID NO: 3108788 - RNA, 19 nt, Artificial Sequence
  Description of Artificial Sequence: Synthetic oligonucleotide
uuuucuuugggauuguauc

SEQ ID NO: 3108789 - RNA, 19 nt, Artificial Sequence
  Description of Artificial Sequence: Synthetic oligonucleotide
uuagcauaaucuuccgccg

SEQ ID NO: 3108790 - RNA, 19 nt, Artificial Sequence
  Description of Artificial Sequence: Synthetic oligonucleotide
uuaacucggaccaaaacua

SEQ ID NO: 3108791 - RNA, 19 nt, Artificial Sequence
  Description of Artificial Sequence: Synthetic oligonucleotide
aaaacuacugucugguuuu

SEQ ID NO: 3108792 - RNA, 19 nt, Artificial Sequence
  Description of Artificial Sequence: Synthetic oligonucleotide
uagaggacaccccauaucu

SEQ ID NO: 3108793 - RNA, 19 nt, Artificial Sequence
  Description of Artificial Sequence: Synthetic oligonucleotide
auaaucuuccgccgcgucc

SEQ ID NO: 3108794 - RNA, 19 nt, Artificial Sequence
  Description of Artificial Sequence: Synthetic oligonucleotide
uaucauagaggacacccca

SEQ ID NO: 3108795 - RNA, 19 nt, Artificial Sequence
  Description of Artificial Sequence: Synthetic oligonucleotide
uuucuuugggauuguauca

SEQ ID NO: 3108796 - RNA, 19 nt, Artificial Sequence
  Description of Artificial Sequence: Synthetic oligonucleotide
cuuguaugaacucuugcac

SEQ ID NO: 3108797 - RNA, 19 nt, Artificial Sequence
  Description of Artificial Sequence: Synthetic oligonucleotide
uuucuuuagcauaaucuuc

SEQ ID NO: 3108798 - RNA, 19 nt, Artificial Sequence
  Description of Artificial Sequence: Synthetic oligonucleotide
ugaacucuugcacggaccc

SEQ ID NO: 3108799 - RNA, 19 nt, Artificial Sequence
  Description of Artificial Sequence: Synthetic oligonucleotide
cugucaagucuuuaacucg

SEQ ID NO: 3108800 - RNA, 19 nt, Artificial Sequence
  Description of Artificial Sequence: Synthetic oligonucleotide
ucuuuagcauaaucuuccg

SEQ ID NO: 3108801 - RNA, 19 nt, Artificial Sequence
  Description of Artificial Sequence: Synthetic oligonucleotide
gacccaaacaacaucauca

SEQ ID NO: 3108802 - RNA, 19 nt, Artificial Sequence
  Description of Artificial Sequence: Synthetic oligonucleotide
ugcacggacccaaacaaca

SEQ ID NO: 3108803 - RNA, 19 nt, Artificial Sequence
  Description of Artificial Sequence: Synthetic oligonucleotide
cuuugggauuguaucauag

SEQ ID NO: 3108804 - RNA, 19 nt, Artificial Sequence
  Description of Artificial Sequence: Synthetic oligonucleotide
ucuugcacggacccaaaca

SEQ ID NO: 3108805 - RNA, 19 nt, Artificial Sequence
  Description of Artificial Sequence: Synthetic oligonucleotide
auagaggacaccccauauc

SEQ ID NO: 3108806 - RNA, 19 nt, Artificial Sequence
  Description of Artificial Sequence: Synthetic oligonucleotide
ugcucugcuuguaugaacu

SEQ ID NO: 3108807 - RNA, 19 nt, Artificial Sequence
  Description of Artificial Sequence: Synthetic oligonucleotide
agcauaaucuuccgccgcg

SEQ ID NO: 3108808 - RNA, 19 nt, Artificial Sequence
  Description of Artificial Sequence: Synthetic oligonucleotide
gaccaaaacuacugucugg

SEQ ID NO: 3108809 - RNA, 19 nt, Artificial Sequence
  Description of Artificial Sequence: Synthetic oligonucleotide
gggauuguaucauagagga

SEQ ID NO: 3108810 - RNA, 19 nt, Artificial Sequence
  Description of Artificial Sequence: Synthetic oligonucleotide
auuguaucauagaggacac

SEQ ID NO: 3108811 - RNA, 19 nt, Artificial Sequence
  Description of Artificial Sequence: Synthetic oligonucleotide
uacugucaagucuuuaacu

SEQ ID NO: 3108812 - RNA, 19 nt, Artificial Sequence
  Description of Artificial Sequence: Synthetic oligonucleotide
uuugggauuguaucauaga

SEQ ID NO: 3108813 - RNA, 19 nt, Artificial Sequence
  Description of Artificial Sequence: Synthetic oligonucleotide
uaugaacucuugcacggac

SEQ ID NO: 3108814 - RNA, 19 nt, Artificial Sequence
  Description of Artificial Sequence: Synthetic oligonucleotide
acccaaacaacaucaucag

SEQ ID NO: 3108815 - RNA, 19 nt, Artificial Sequence
  Description of Artificial Sequence: Synthetic oligonucleotide
ugcuuguaugaacucuugc

SEQ ID NO: 3108816 - RNA, 19 nt, Artificial Sequence
  Description of Artificial Sequence: Synthetic oligonucleotide
cuuuagcauaaucuuccgc

SEQ ID NO: 3108817 - RNA, 19 nt, Artificial Sequence
  Description of Artificial Sequence: Synthetic oligonucleotide
ucaagucuuuaacucggac

SEQ ID NO: 3108818 - RNA, 19 nt, Artificial Sequence
  Description of Artificial Sequence: Synthetic oligonucleotide
guuacugucaagucuuuaa

SEQ ID NO: 3108819 - RNA, 19 nt, Artificial Sequence
  Description of Artificial Sequence: Synthetic oligonucleotide
cuuuaacucggaccaaaac

SEQ ID NO: 3108820 - RNA, 19 nt, Artificial Sequence
  Description of Artificial Sequence: Synthetic oligonucleotide
cuuuuguuacugucaaguc

SEQ ID NO: 3108821 - RNA, 19 nt, Artificial Sequence
  Description of Artificial Sequence: Synthetic oligonucleotide
ucugcuuguaugaacucuu

SEQ ID NO: 3108822 - RNA, 19 nt, Artificial Sequence
  Description of Artificial Sequence: Synthetic oligonucleotide
ucagccuuuuguuacuguc

SEQ ID NO: 3108823 - RNA, 19 nt, Artificial Sequence
  Description of Artificial Sequence: Synthetic oligonucleotide
accaaaacuacugucuggu

SEQ ID NO: 3108824 - RNA, 19 nt, Artificial Sequence
  Description of Artificial Sequence: Synthetic oligonucleotide
uagcauaaucuuccgccgc

SEQ ID NO: 3108825 - RNA, 19 nt, Artificial Sequence
  Description of Artificial Sequence: Synthetic oligonucleotide
ucuuuaacucggaccaaaa

SEQ ID NO: 3108826 - RNA, 19 nt, Artificial Sequence
  Description of Artificial Sequence: Synthetic oligonucleotide
aguggaugccacccucccc

SEQ ID NO: 3108827 - RNA, 19 nt, Artificial Sequence
  Description of Artificial Sequence: Synthetic oligonucleotide
cuuuugcucugcuuguaug

SEQ ID NO: 3108828 - RNA, 19 nt, Artificial Sequence
  Description of Artificial Sequence: Synthetic oligonucleotide
cauaucuuucuuuagcaua

SEQ ID NO: 3108829 - RNA, 19 nt, Artificial Sequence
  Description of Artificial Sequence: Synthetic oligonucleotide
uuggcgcugggcaucgggg

SEQ ID NO: 3108830 - RNA, 19 nt, Artificial Sequence
  Description of Artificial Sequence: Synthetic oligonucleotide
uaacucggaccaaaacuac

SEQ ID NO: 3108831 - RNA, 19 nt, Artificial Sequence
  Description of Artificial Sequence: Synthetic oligonucleotide
uaaucuuccgccgcgucca

SEQ ID NO: 3108832 - RNA, 19 nt, Artificial Sequence
  Description of Artificial Sequence: Synthetic oligonucleotide
ucauagaggacaccccaua

SEQ ID NO: 3108833 - RNA, 19 nt, Artificial Sequence
  Description of Artificial Sequence: Synthetic oligonucleotide
gcuuguaugaacucuugca

SEQ ID NO: 3108834 - RNA, 19 nt, Artificial Sequence
  Description of Artificial Sequence: Synthetic oligonucleotide
aacucuugcacggacccaa

SEQ ID NO: 3108835 - RNA, 19 nt, Artificial Sequence
  Description of Artificial Sequence: Synthetic oligonucleotide
uccacgaucucccgcggcu

SEQ ID NO: 3108836 - RNA, 19 nt, Artificial Sequence
  Description of Artificial Sequence: Synthetic oligonucleotide
ucggaccaaaacuacuguc

SEQ ID NO: 3108837 - RNA, 19 nt, Artificial Sequence
  Description of Artificial Sequence: Synthetic oligonucleotide
ucuuccgccgcguccacga

SEQ ID NO: 3108838 - RNA, 19 nt, Artificial Sequence
  Description of Artificial Sequence: Synthetic oligonucleotide
uccgccgcguccacgaucu

SEQ ID NO: 3108839 - RNA, 19 nt, Artificial Sequence
  Description of Artificial Sequence: Synthetic oligonucleotide
acucggaccaaaacuacug

SEQ ID NO: 3108840 - RNA, 19 nt, Artificial Sequence
  Description of Artificial Sequence: Synthetic oligonucleotide
gaugccacccuccccucgc

SEQ ID NO: 3108841 - RNA, 19 nt, Artificial Sequence
  Description of Artificial Sequence: Synthetic oligonucleotide
cuugcacggacccaaacaa

SEQ ID NO: 3108842 - RNA, 19 nt, Artificial Sequence
  Description of Artificial Sequence: Synthetic oligonucleotide
agccuuuuguuacugucaa

SEQ ID NO: 3108843 - RNA, 19 nt, Artificial Sequence
  Description of Artificial Sequence: Synthetic oligonucleotide
guaucauagaggacacccc

SEQ ID NO: 3108844 - RNA, 19 nt, Artificial Sequence
  Description of Artificial Sequence: Synthetic oligonucleotide
uucuuugggauuguaucau

SEQ ID NO: 3108845 - RNA, 19 nt, Artificial Sequence
  Description of Artificial Sequence: Synthetic oligonucleotide
acggacccaaacaacauca

SEQ ID NO: 3108846 - RNA, 19 nt, Artificial Sequence
  Description of Artificial Sequence: Synthetic oligonucleotide
aaucuuccgccgcguccac

SEQ ID NO: 3108847 - RNA, 19 nt, Artificial Sequence
  Description of Artificial Sequence: Synthetic oligonucleotide
aacucggaccaaaacuacu

SEQ ID NO: 3108848 - RNA, 19 nt, Artificial Sequence
  Description of Artificial Sequence: Synthetic oligonucleotide
ggaccaaaacuacugucug

SEQ ID NO: 3108849 - RNA, 19 nt, Artificial Sequence
  Description of Artificial Sequence: Synthetic oligonucleotide
ugacccuugcggcuggcgu

SEQ ID NO: 3108850 - RNA, 19 nt, Artificial Sequence
  Description of Artificial Sequence: Synthetic oligonucleotide
guuggcgcugggcaucggg

SEQ ID NO: 3108851 - RNA, 19 nt, Artificial Sequence
  Description of Artificial Sequence: Synthetic oligonucleotide
uggggaguggaugccaccc

SEQ ID NO: 3108852 - RNA, 19 nt, Artificial Sequence
  Description of Artificial Sequence: Synthetic oligonucleotide
caggcuuccguacggcggg

SEQ ID NO: 3108853 - RNA, 19 nt, Artificial Sequence
  Description of Artificial Sequence: Synthetic oligonucleotide
ugggcaucggggcaccgga

SEQ ID NO: 3108854 - RNA, 19 nt, Artificial Sequence
  Description of Artificial Sequence: Synthetic oligonucleotide
gaguggaugccacccuccc

SEQ ID NO: 3108855 - RNA, 19 nt, Artificial Sequence
  Description of Artificial Sequence: Synthetic oligonucleotide
ucuccugacccuugcggcu

SEQ ID NO: 3108856 - RNA, 19 nt, Artificial Sequence
  Description of Artificial Sequence: Synthetic oligonucleotide
uugcacggacccaaacaac

SEQ ID NO: 3108857 - RNA, 19 nt, Artificial Sequence
  Description of Artificial Sequence: Synthetic oligonucleotide
uuugcucugcuuguaugaa

SEQ ID NO: 3108858 - RNA, 19 nt, Artificial Sequence
  Description of Artificial Sequence: Synthetic oligonucleotide
uugcucugcuuguaugaac

SEQ ID NO: 3108859 - RNA, 19 nt, Artificial Sequence
  Description of Artificial Sequence: Synthetic oligonucleotide
ucuuugggauuguaucaua

SEQ ID NO: 3108860 - RNA, 19 nt, Artificial Sequence
  Description of Artificial Sequence: Synthetic oligonucleotide
accccauaucuuucuuuag

SEQ ID NO: 3108861 - RNA, 19 nt, Artificial Sequence
  Description of Artificial Sequence: Synthetic oligonucleotide
cuuggggaguggaugccac

SEQ ID NO: 3108862 - RNA, 19 nt, Artificial Sequence
  Description of Artificial Sequence: Synthetic oligonucleotide
cucgcaggcuuccguacgg

SEQ ID NO: 3108863 - RNA, 19 nt, Artificial Sequence
  Description of Artificial Sequence: Synthetic oligonucleotide
ggacuuggggaguggaugc

SEQ ID NO: 3108864 - RNA, 19 nt, Artificial Sequence
  Description of Artificial Sequence: Synthetic oligonucleotide
caaacaacaucaucagccu

SEQ ID NO: 3108865 - RNA, 19 nt, Artificial Sequence
  Description of Artificial Sequence: Synthetic oligonucleotide
cugcuuguaugaacucuug

SEQ ID NO: 3108866 - RNA, 19 nt, Artificial Sequence
  Description of Artificial Sequence: Synthetic oligonucleotide
ucucccgcggcuucuccug

SEQ ID NO: 3108867 - RNA, 19 nt, Artificial Sequence
  Description of Artificial Sequence: Synthetic oligonucleotide
ccccauaucuuucuuuagc

SEQ ID NO: 3108868 - RNA, 19 nt, Artificial Sequence
  Description of Artificial Sequence: Synthetic oligonucleotide
cagccuuuuguuacuguca

SEQ ID NO: 3108869 - RNA, 19 nt, Artificial Sequence
  Description of Artificial Sequence: Synthetic oligonucleotide
aggacaccccauaucuuuc

SEQ ID NO: 3108870 - RNA, 19 nt, Artificial Sequence
  Description of Artificial Sequence: Synthetic oligonucleotide
uuguaucauagaggacacc

SEQ ID NO: 3108871 - RNA, 19 nt, Artificial Sequence
  Description of Artificial Sequence: Synthetic oligonucleotide
cauaaucuuccgccgcguc

SEQ ID NO: 3108872 - RNA, 19 nt, Artificial Sequence
  Description of Artificial Sequence: Synthetic oligonucleotide
gcguccacgaucucccgcg

SEQ ID NO: 3108873 - RNA, 19 nt, Artificial Sequence
  Description of Artificial Sequence: Synthetic oligonucleotide
cacggacccaaacaacauc

SEQ ID NO: 3108874 - RNA, 19 nt, Artificial Sequence
  Description of Artificial Sequence: Synthetic oligonucleotide
uuggggaguggaugccacc

SEQ ID NO: 3108875 - RNA, 19 nt, Artificial Sequence
  Description of Artificial Sequence: Synthetic oligonucleotide
caaaacuacugucugguuu

SEQ ID NO: 3108876 - RNA, 19 nt, Artificial Sequence
  Description of Artificial Sequence: Synthetic oligonucleotide
uccugacccuugcggcugg

SEQ ID NO: 3108877 - RNA, 19 nt, Artificial Sequence
  Description of Artificial Sequence: Synthetic oligonucleotide
gaggacaccccauaucuuu

SEQ ID NO: 3108878 - RNA, 19 nt, Artificial Sequence
  Description of Artificial Sequence: Synthetic oligonucleotide
cuggcguuggcgcugggca

SEQ ID NO: 3108879 - RNA, 19 nt, Artificial Sequence
  Description of Artificial Sequence: Synthetic oligonucleotide
uguuacugucaagucuuua

SEQ ID NO: 3108880 - RNA, 19 nt, Artificial Sequence
  Description of Artificial Sequence: Synthetic oligonucleotide
guggaugccacccuccccu

SEQ ID NO: 3108881 - RNA, 19 nt, Artificial Sequence
  Description of Artificial Sequence: Synthetic oligonucleotide
acaccccauaucuuucuuu

SEQ ID NO: 3108882 - RNA, 19 nt, Artificial Sequence
  Description of Artificial Sequence: Synthetic oligonucleotide
caucaucagccuuuuguua

SEQ ID NO: 3108883 - RNA, 19 nt, Artificial Sequence
  Description of Artificial Sequence: Synthetic oligonucleotide
caccccauaucuuucuuua

SEQ ID NO: 3108884 - RNA, 19 nt, Artificial Sequence
  Description of Artificial Sequence: Synthetic oligonucleotide
uuguuacugucaagucuuu

SEQ ID NO: 3108885 - RNA, 19 nt, Artificial Sequence
  Description of Artificial Sequence: Synthetic oligonucleotide
aucggggcaccggacuugg

SEQ ID NO: 3108886 - RNA, 19 nt, Artificial Sequence
  Description of Artificial Sequence: Synthetic oligonucleotide
gacuuggggaguggaugcc

SEQ ID NO: 3108887 - RNA, 19 nt, Artificial Sequence
  Description of Artificial Sequence: Synthetic oligonucleotide
gaucucccgcggcuucucc

SEQ ID NO: 3108888 - RNA, 19 nt, Artificial Sequence
  Description of Artificial Sequence: Synthetic oligonucleotide
cucuugcacggacccaaac

SEQ ID NO: 3108889 - RNA, 19 nt, Artificial Sequence
  Description of Artificial Sequence: Synthetic oligonucleotide
ggacccaaacaacaucauc

SEQ ID NO: 3108890 - RNA, 19 nt, Artificial Sequence
  Description of Artificial Sequence: Synthetic oligonucleotide
gucuuuaacucggaccaaa

SEQ ID NO: 3108891 - RNA, 19 nt, Artificial Sequence
  Description of Artificial Sequence: Synthetic oligonucleotide
uaucuuucuuuagcauaau

SEQ ID NO: 3108892 - RNA, 19 nt, Artificial Sequence
  Description of Artificial Sequence: Synthetic oligonucleotide
acuuggggaguggaugcca

SEQ ID NO: 3108893 - RNA, 19 nt, Artificial Sequence
  Description of Artificial Sequence: Synthetic oligonucleotide
cccaaacaacaucaucagc

SEQ ID NO: 3108894 - RNA, 19 nt, Artificial Sequence
  Description of Artificial Sequence: Synthetic oligonucleotide
aucucccgcggcuucuccu

SEQ ID NO: 3108895 - RNA, 19 nt, Artificial Sequence
  Description of Artificial Sequence: Synthetic oligonucleotide
ugccacccuccccucgcag

SEQ ID NO: 3108896 - RNA, 19 nt, Artificial Sequence
  Description of Artificial Sequence: Synthetic oligonucleotide
aucauagaggacaccccau

SEQ ID NO: 3108897 - RNA, 19 nt, Artificial Sequence
  Description of Artificial Sequence: Synthetic oligonucleotide
gcaggcuuccguacggcgg

SEQ ID NO: 3108898 - RNA, 19 nt, Artificial Sequence
  Description of Artificial Sequence: Synthetic oligonucleotide
uccccucgcaggcuuccgu

SEQ ID NO: 3108899 - RNA, 19 nt, Artificial Sequence
  Description of Artificial Sequence: Synthetic oligonucleotide
guaugaacucuugcacgga

SEQ ID NO: 3108900 - RNA, 19 nt, Artificial Sequence
  Description of Artificial Sequence: Synthetic oligonucleotide
uuccgccgcguccacgauc

SEQ ID NO: 3108901 - RNA, 19 nt, Artificial Sequence
  Description of Artificial Sequence: Synthetic oligonucleotide
ccuuuuguuacugucaagu

SEQ ID NO: 3108902 - RNA, 19 nt, Artificial Sequence
  Description of Artificial Sequence: Synthetic oligonucleotide
ugcggcuggcguuggcgcu

SEQ ID NO: 3108903 - RNA, 19 nt, Artificial Sequence
  Description of Artificial Sequence: Synthetic oligonucleotide
cugggcaucggggcaccgg

SEQ ID NO: 3108904 - RNA, 19 nt, Artificial Sequence
  Description of Artificial Sequence: Synthetic oligonucleotide
cauagaggacaccccauau

SEQ ID NO: 3108905 - RNA, 19 nt, Artificial Sequence
  Description of Artificial Sequence: Synthetic oligonucleotide
gccuuuuguuacugucaag

SEQ ID NO: 3108906 - RNA, 19 nt, Artificial Sequence
  Description of Artificial Sequence: Synthetic oligonucleotide
caacaucaucagccuuuug

SEQ ID NO: 3108907 - RNA, 19 nt, Artificial Sequence
  Description of Artificial Sequence: Synthetic oligonucleotide
guccacgaucucccgcggc

SEQ ID NO: 3108908 - RNA, 19 nt, Artificial Sequence
  Description of Artificial Sequence: Synthetic oligonucleotide
ggaugccacccuccccucg

SEQ ID NO: 3108909 - RNA, 19 nt, Artificial Sequence
  Description of Artificial Sequence: Synthetic oligonucleotide
ggaguggaugccacccucc

SEQ ID NO: 3108910 - RNA, 19 nt, Artificial Sequence
  Description of Artificial Sequence: Synthetic oligonucleotide
gucaagucuuuaacucgga

SEQ ID NO: 3108911 - RNA, 19 nt, Artificial Sequence
  Description of Artificial Sequence: Synthetic oligonucleotide
cuccugacccuugcggcug

SEQ ID NO: 3108912 - RNA, 19 nt, Artificial Sequence
  Description of Artificial Sequence: Synthetic oligonucleotide
gaacucuugcacggaccca

SEQ ID NO: 3108913 - RNA, 19 nt, Artificial Sequence
  Description of Artificial Sequence: Synthetic oligonucleotide
gccacccuccccucgcagg

SEQ ID NO: 3108914 - RNA, 19 nt, Artificial Sequence
  Description of Artificial Sequence: Synthetic oligonucleotide
ucgcaggcuuccguacggc

SEQ ID NO: 3108915 - RNA, 19 nt, Artificial Sequence
  Description of Artificial Sequence: Synthetic oligonucleotide
aucuuccgccgcguccacg

SEQ ID NO: 3108916 - RNA, 19 nt, Artificial Sequence
  Description of Artificial Sequence: Synthetic oligonucleotide
cacgaucucccgcggcuuc

SEQ ID NO: 3108917 - RNA, 19 nt, Artificial Sequence
  Description of Artificial Sequence: Synthetic oligonucleotide
agucuuuaacucggaccaa

SEQ ID NO: 3108918 - RNA, 19 nt, Artificial Sequence
  Description of Artificial Sequence: Synthetic oligonucleotide
acccuugcggcuggcguug

SEQ ID NO: 3108919 - RNA, 19 nt, Artificial Sequence
  Description of Artificial Sequence: Synthetic oligonucleotide
ggggcaccggacuugggga

SEQ ID NO: 3108920 - RNA, 19 nt, Artificial Sequence
  Description of Artificial Sequence: Synthetic oligonucleotide
ucggggcaccggacuuggg

SEQ ID NO: 3108921 - RNA, 19 nt, Artificial Sequence
  Description of Artificial Sequence: Synthetic oligonucleotide
ggauuguaucauagaggac

SEQ ID NO: 3108922 - RNA, 19 nt, Artificial Sequence
  Description of Artificial Sequence: Synthetic oligonucleotide
uggcguuggcgcugggcau

SEQ ID NO: 3108923 - RNA, 19 nt, Artificial Sequence
  Description of Artificial Sequence: Synthetic oligonucleotide
gggaguggaugccacccuc

SEQ ID NO: 3108924 - RNA, 19 nt, Artificial Sequence
  Description of Artificial Sequence: Synthetic oligonucleotide
cucggaccaaaacuacugu

SEQ ID NO: 3108925 - RNA, 19 nt, Artificial Sequence
  Description of Artificial Sequence: Synthetic oligonucleotide
gggcaccggacuuggggag

SEQ ID NO: 3108926 - RNA, 19 nt, Artificial Sequence
  Description of Artificial Sequence: Synthetic oligonucleotide
uggaugccacccuccccuc

SEQ ID NO: 3108927 - RNA, 19 nt, Artificial Sequence
  Description of Artificial Sequence: Synthetic oligonucleotide
caucggggcaccggacuug

SEQ ID NO: 3108928 - RNA, 19 nt, Artificial Sequence
  Description of Artificial Sequence: Synthetic oligonucleotide
ccucgcaggcuuccguacg

SEQ ID NO: 3108929 - RNA, 19 nt, Artificial Sequence
  Description of Artificial Sequence: Synthetic oligonucleotide
accggacuuggggagugga

SEQ ID NO: 3108930 - RNA, 19 nt, Artificial Sequence
  Description of Artificial Sequence: Synthetic oligonucleotide
aggcuuccguacggcgggc

SEQ ID NO: 3108931 - RNA, 19 nt, Artificial Sequence
  Description of Artificial Sequence: Synthetic oligonucleotide
gccgcguccacgaucuccc

SEQ ID NO: 3108932 - RNA, 19 nt, Artificial Sequence
  Description of Artificial Sequence: Synthetic oligonucleotide
agaggacaccccauaucuu

SEQ ID NO: 3108933 - RNA, 19 nt, Artificial Sequence
  Description of Artificial Sequence: Synthetic oligonucleotide
augccacccuccccucgca

SEQ ID NO: 3108934 - RNA, 19 nt, Artificial Sequence
  Description of Artificial Sequence: Synthetic oligonucleotide
gcucugcuuguaugaacuc

SEQ ID NO: 3108935 - RNA, 19 nt, Artificial Sequence
  Description of Artificial Sequence: Synthetic oligonucleotide
ccacccuccccucgcaggc

SEQ ID NO: 3108936 - RNA, 19 nt, Artificial Sequence
  Description of Artificial Sequence: Synthetic oligonucleotide
cggggcaccggacuugggg

SEQ ID NO: 3108937 - RNA, 19 nt, Artificial Sequence
  Description of Artificial Sequence: Synthetic oligonucleotide
gacaccccauaucuuucuu

SEQ ID NO: 3108938 - RNA, 19 nt, Artificial Sequence
  Description of Artificial Sequence: Synthetic oligonucleotide
cuuccguacggcgggcuaa

SEQ ID NO: 3108939 - RNA, 19 nt, Artificial Sequence
  Description of Artificial Sequence: Synthetic oligonucleotide
cggacuuggggaguggaug

SEQ ID NO: 3108940 - RNA, 19 nt, Artificial Sequence
  Description of Artificial Sequence: Synthetic oligonucleotide
cggaccaaaacuacugucu

SEQ ID NO: 3108941 - RNA, 19 nt, Artificial Sequence
  Description of Artificial Sequence: Synthetic oligonucleotide
gacccuugcggcuggcguu

SEQ ID NO: 3108942 - RNA, 19 nt, Artificial Sequence
  Description of Artificial Sequence: Synthetic oligonucleotide
cgcaggcuuccguacggcg

SEQ ID NO: 3108943 - RNA, 19 nt, Artificial Sequence
  Description of Artificial Sequence: Synthetic oligonucleotide
acccuccccucgcaggcuu

SEQ ID NO: 3108944 - RNA, 19 nt, Artificial Sequence
  Description of Artificial Sequence: Synthetic oligonucleotide
caccggacuuggggagugg

SEQ ID NO: 3108945 - RNA, 19 nt, Artificial Sequence
  Description of Artificial Sequence: Synthetic oligonucleotide
ggacaccccauaucuuucu

SEQ ID NO: 3108946 - RNA, 19 nt, Artificial Sequence
  Description of Artificial Sequence: Synthetic oligonucleotide
ggcgcugggcaucggggca

SEQ ID NO: 3108947 - RNA, 19 nt, Artificial Sequence
  Description of Artificial Sequence: Synthetic oligonucleotide
cuccccucgcaggcuuccg

SEQ ID NO: 3108948 - RNA, 19 nt, Artificial Sequence
  Description of Artificial Sequence: Synthetic oligonucleotide
gcuggcguuggcgcugggc

SEQ ID NO: 3108949 - RNA, 19 nt, Artificial Sequence
  Description of Artificial Sequence: Synthetic oligonucleotide
acucuugcacggacccaaa

SEQ ID NO: 3108950 - RNA, 19 nt, Artificial Sequence
  Description of Artificial Sequence: Synthetic oligonucleotide
cccucgcaggcuuccguac

SEQ ID NO: 3108951 - RNA, 19 nt, Artificial Sequence
  Description of Artificial Sequence: Synthetic oligonucleotide
gcguuggcgcugggcaucg

SEQ ID NO: 3108952 - RNA, 19 nt, Artificial Sequence
  Description of Artificial Sequence: Synthetic oligonucleotide
ggcaucggggcaccggacu

SEQ ID NO: 3108953 - RNA, 19 nt, Artificial Sequence
  Description of Artificial Sequence: Synthetic oligonucleotide
ggcguuggcgcugggcauc

SEQ ID NO: 3108954 - RNA, 19 nt, Artificial Sequence
  Description of Artificial Sequence: Synthetic oligonucleotide
gcaccggacuuggggagug

SEQ ID NO: 3108955 - RNA, 19 nt, Artificial Sequence
  Description of Artificial Sequence: Synthetic oligonucleotide
cucccgcggcuucuccuga

SEQ ID NO: 3108956 - RNA, 19 nt, Artificial Sequence
  Description of Artificial Sequence: Synthetic oligonucleotide
cgcguccacgaucucccgc

SEQ ID NO: 3108957 - RNA, 19 nt, Artificial Sequence
  Description of Artificial Sequence: Synthetic oligonucleotide
gcuuccguacggcgggcua

SEQ ID NO: 3108958 - RNA, 19 nt, Artificial Sequence
  Description of Artificial Sequence: Synthetic oligonucleotide
cguccacgaucucccgcgg

SEQ ID NO: 3108959 - RNA, 19 nt, Artificial Sequence
  Description of Artificial Sequence: Synthetic oligonucleotide
gcauaaucuuccgccgcgu

SEQ ID NO: 3108960 - RNA, 19 nt, Artificial Sequence
  Description of Artificial Sequence: Synthetic oligonucleotide
ggggaguggaugccacccu

SEQ ID NO: 3108961 - RNA, 19 nt, Artificial Sequence
  Description of Artificial Sequence: Synthetic oligonucleotide
ccgcguccacgaucucccg

SEQ ID NO: 3108962 - RNA, 19 nt, Artificial Sequence
  Description of Artificial Sequence: Synthetic oligonucleotide
cgccgcguccacgaucucc

SEQ ID NO: 3108963 - RNA, 19 nt, Artificial Sequence
  Description of Artificial Sequence: Synthetic oligonucleotide
gcugggcaucggggcaccg

SEQ ID NO: 3108964 - RNA, 19 nt, Artificial Sequence
  Description of Artificial Sequence: Synthetic oligonucleotide
gcgcugggcaucggggcac

SEQ ID NO: 3108965 - RNA, 19 nt, Artificial Sequence
  Description of Artificial Sequence: Synthetic oligonucleotide
gcacggacccaaacaacau

SEQ ID NO: 3108966 - RNA, 19 nt, Artificial Sequence
  Description of Artificial Sequence: Synthetic oligonucleotide
gggcaucggggcaccggac

SEQ ID NO: 3108967 - RNA, 19 nt, Artificial Sequence
  Description of Artificial Sequence: Synthetic oligonucleotide
gcaucggggcaccggacuu

SEQ ID NO: 3108968 - RNA, 19 nt, Artificial Sequence
  Description of Artificial Sequence: Synthetic oligonucleotide
ccaaaacuacugucugguu

SEQ ID NO: 3108969 - RNA, 19 nt, Artificial Sequence
  Description of Artificial Sequence: Synthetic oligonucleotide
ggcuggcguuggcgcuggg

SEQ ID NO: 3108970 - RNA, 19 nt, Artificial Sequence
  Description of Artificial Sequence: Synthetic oligonucleotide
ccccucgcaggcuuccgua

SEQ ID NO: 3108971 - RNA, 19 nt, Artificial Sequence
  Description of Artificial Sequence: Synthetic oligonucleotide
ggcaccggacuuggggagu

SEQ ID NO: 3108972 - RNA, 19 nt, Artificial Sequence
  Description of Artificial Sequence: Synthetic oligonucleotide
cggcuucuccugacccuug

SEQ ID NO: 3108973 - RNA, 19 nt, Artificial Sequence
  Description of Artificial Sequence: Synthetic oligonucleotide
ccugacccuugcggcuggc

SEQ ID NO: 3108974 - RNA, 19 nt, Artificial Sequence
  Description of Artificial Sequence: Synthetic oligonucleotide
cccuccccucgcaggcuuc

SEQ ID NO: 3108975 - RNA, 19 nt, Artificial Sequence
  Description of Artificial Sequence: Synthetic oligonucleotide
cccuugcggcuggcguugg

SEQ ID NO: 3108976 - RNA, 19 nt, Artificial Sequence
  Description of Artificial Sequence: Synthetic oligonucleotide
cuuccgccgcguccacgau

SEQ ID NO: 3108977 - RNA, 19 nt, Artificial Sequence
  Description of Artificial Sequence: Synthetic oligonucleotide
ccggacuuggggaguggau

SEQ ID NO: 3108978 - RNA, 19 nt, Artificial Sequence
  Description of Artificial Sequence: Synthetic oligonucleotide
cgaucucccgcggcuucuc

SEQ ID NO: 3108979 - RNA, 19 nt, Artificial Sequence
  Description of Artificial Sequence: Synthetic oligonucleotide
ggcuuccguacggcgggcu

SEQ ID NO: 3108980 - RNA, 19 nt, Artificial Sequence
  Description of Artificial Sequence: Synthetic oligonucleotide
cggcuggcguuggcgcugg

SEQ ID NO: 3108981 - RNA, 19 nt, Artificial Sequence
  Description of Artificial Sequence: Synthetic oligonucleotide
cacccuccccucgcaggcu

SEQ ID NO: 3108982 - RNA, 19 nt, Artificial Sequence
  Description of Artificial Sequence: Synthetic oligonucleotide
cggacccaaacaacaucau

SEQ ID NO: 3108983 - RNA, 19 nt, Artificial Sequence
  Description of Artificial Sequence: Synthetic oligonucleotide
cguuggcgcugggcaucgg

SEQ ID NO: 3108984 - RNA, 19 nt, Artificial Sequence
  Description of Artificial Sequence: Synthetic oligonucleotide
ccacgaucucccgcggcuu

SEQ ID NO: 3108985 - RNA, 19 nt, Artificial Sequence
  Description of Artificial Sequence: Synthetic oligonucleotide
ccgccgcguccacgaucuc

SEQ ID NO: 3108986 - RNA, 19 nt, Artificial Sequence
  Description of Artificial Sequence: Synthetic oligonucleotide
aauucuugauccuauacac

SEQ ID NO: 3108987 - RNA, 19 nt, Artificial Sequence
  Description of Artificial Sequence: Synthetic oligonucleotide
aauuuuguaauccuucuuc

SEQ ID NO: 3108988 - RNA, 19 nt, Artificial Sequence
  Description of Artificial Sequence: Synthetic oligonucleotide
auuuaguaaaaucugaucu

SEQ ID NO: 3108989 - RNA, 19 nt, Artificial Sequence
  Description of Artificial Sequence: Synthetic oligonucleotide
uguaauuucaaacucugug

SEQ ID NO: 3108990 - RNA, 19 nt, Artificial Sequence
  Description of Artificial Sequence: Synthetic oligonucleotide
aauccauucauacuucagg

SEQ ID NO: 3108991 - RNA, 19 nt, Artificial Sequence
  Description of Artificial Sequence: Synthetic oligonucleotide
uuuccauuuaguaaaaucu

SEQ ID NO: 3108992 - RNA, 19 nt, Artificial Sequence
  Description of Artificial Sequence: Synthetic oligonucleotide
auuauuuccauuuaguaaa

SEQ ID NO: 3108993 - RNA, 19 nt, Artificial Sequence
  Description of Artificial Sequence: Synthetic oligonucleotide
aacaauuucuuuaucacuc

SEQ ID NO: 3108994 - RNA, 19 nt, Artificial Sequence
  Description of Artificial Sequence: Synthetic oligonucleotide
uuauauuauuuccauuuag

SEQ ID NO: 3108995 - RNA, 19 nt, Artificial Sequence
  Description of Artificial Sequence: Synthetic oligonucleotide
uauauuauuuccauuuagu

SEQ ID NO: 3108996 - RNA, 19 nt, Artificial Sequence
  Description of Artificial Sequence: Synthetic oligonucleotide
caaugugaauucuugaucc

SEQ ID NO: 3108997 - RNA, 19 nt, Artificial Sequence
  Description of Artificial Sequence: Synthetic oligonucleotide
uccaacaccauauugacaa

SEQ ID NO: 3108998 - RNA, 19 nt, Artificial Sequence
  Description of Artificial Sequence: Synthetic oligonucleotide
ucuuccaacaccauauuga

SEQ ID NO: 3108999 - RNA, 19 nt, Artificial Sequence
  Description of Artificial Sequence: Synthetic oligonucleotide
aaagucaucaaauccuaga

SEQ ID NO: 3109000 - RNA, 19 nt, Artificial Sequence
  Description of Artificial Sequence: Synthetic oligonucleotide
uauuauuuccauuuaguaa

SEQ ID NO: 3109001 - RNA, 19 nt, Artificial Sequence
  Description of Artificial Sequence: Synthetic oligonucleotide
ucuuuaucacucuucauca

SEQ ID NO: 3109002 - RNA, 19 nt, Artificial Sequence
  Description of Artificial Sequence: Synthetic oligonucleotide
ucuaauuuuguaauccuuc

SEQ ID NO: 3109003 - RNA, 19 nt, Artificial Sequence
  Description of Artificial Sequence: Synthetic oligonucleotide
ugugacaucuuccaacacc

SEQ ID NO: 3109004 - RNA, 19 nt, Artificial Sequence
  Description of Artificial Sequence: Synthetic oligonucleotide
ucugguguaauuucaaacu

SEQ ID NO: 3109005 - RNA, 19 nt, Artificial Sequence
  Description of Artificial Sequence: Synthetic oligonucleotide
acaaugugaauucuugauc

SEQ ID NO: 3109006 - RNA, 19 nt, Artificial Sequence
  Description of Artificial Sequence: Synthetic oligonucleotide
ugauccuauacacuugucc

SEQ ID NO: 3109007 - RNA, 19 nt, Artificial Sequence
  Description of Artificial Sequence: Synthetic oligonucleotide
uaauuucaaacucugugac

SEQ ID NO: 3109008 - RNA, 19 nt, Artificial Sequence
  Description of Artificial Sequence: Synthetic oligonucleotide
uuguccacgagcucuagcg

SEQ ID NO: 3109009 - RNA, 19 nt, Artificial Sequence
  Description of Artificial Sequence: Synthetic oligonucleotide
ugaucuaauuuuguaaucc

SEQ ID NO: 3109010 - RNA, 19 nt, Artificial Sequence
  Description of Artificial Sequence: Synthetic oligonucleotide
uguaccaacaauuucuuua

SEQ ID NO: 3109011 - RNA, 19 nt, Artificial Sequence
  Description of Artificial Sequence: Synthetic oligonucleotide
uuuaucacucuucaucaca

SEQ ID NO: 3109012 - RNA, 19 nt, Artificial Sequence
  Description of Artificial Sequence: Synthetic oligonucleotide
aaauccuagaaguguacca

SEQ ID NO: 3109013 - RNA, 19 nt, Artificial Sequence
  Description of Artificial Sequence: Synthetic oligonucleotide
aauuucuuuaucacucuuc

SEQ ID NO: 3109014 - RNA, 19 nt, Artificial Sequence
  Description of Artificial Sequence: Synthetic oligonucleotide
uuccauuuaguaaaaucug

SEQ ID NO: 3109015 - RNA, 19 nt, Artificial Sequence
  Description of Artificial Sequence: Synthetic oligonucleotide
agcaucguuauauuauuuc

SEQ ID NO: 3109016 - RNA, 19 nt, Artificial Sequence
  Description of Artificial Sequence: Synthetic oligonucleotide
uauacacuuguccacgagc

SEQ ID NO: 3109017 - RNA, 19 nt, Artificial Sequence
  Description of Artificial Sequence: Synthetic oligonucleotide
aaguguaccaacaauuucu

SEQ ID NO: 3109018 - RNA, 19 nt, Artificial Sequence
  Description of Artificial Sequence: Synthetic oligonucleotide
ucugaucuaauuuuguaau

SEQ ID NO: 3109019 - RNA, 19 nt, Artificial Sequence
  Description of Artificial Sequence: Synthetic oligonucleotide
uccauuuaguaaaaucuga

SEQ ID NO: 3109020 - RNA, 19 nt, Artificial Sequence
  Description of Artificial Sequence: Synthetic oligonucleotide
aaaaucugaucuaauuuug

SEQ ID NO: 3109021 - RNA, 19 nt, Artificial Sequence
  Description of Artificial Sequence: Synthetic oligonucleotide
aagucaucaaauccuagaa

SEQ ID NO: 3109022 - RNA, 19 nt, Artificial Sequence
  Description of Artificial Sequence: Synthetic oligonucleotide
ucacucuucaucacaaugu

SEQ ID NO: 3109023 - RNA, 19 nt, Artificial Sequence
  Description of Artificial Sequence: Synthetic oligonucleotide
ugaauucuugauccuauac

SEQ ID NO: 3109024 - RNA, 19 nt, Artificial Sequence
  Description of Artificial Sequence: Synthetic oligonucleotide
aacucugugacaucuucca

SEQ ID NO: 3109025 - RNA, 19 nt, Artificial Sequence
  Description of Artificial Sequence: Synthetic oligonucleotide
gauccuauacacuugucca

SEQ ID NO: 3109026 - RNA, 19 nt, Artificial Sequence
  Description of Artificial Sequence: Synthetic oligonucleotide
accaacaauuucuuuauca

SEQ ID NO: 3109027 - RNA, 19 nt, Artificial Sequence
  Description of Artificial Sequence: Synthetic oligonucleotide
uuuaguaaaaucugaucua

SEQ ID NO: 3109028 - RNA, 19 nt, Artificial Sequence
  Description of Artificial Sequence: Synthetic oligonucleotide
guaauuucaaacucuguga

SEQ ID NO: 3109029 - RNA, 19 nt, Artificial Sequence
  Description of Artificial Sequence: Synthetic oligonucleotide
ucaucaaauccuagaagug

SEQ ID NO: 3109030 - RNA, 19 nt, Artificial Sequence
  Description of Artificial Sequence: Synthetic oligonucleotide
aguaaaaucugaucuaauu

SEQ ID NO: 3109031 - RNA, 19 nt, Artificial Sequence
  Description of Artificial Sequence: Synthetic oligonucleotide
uagaaguguaccaacaauu

SEQ ID NO: 3109032 - RNA, 19 nt, Artificial Sequence
  Description of Artificial Sequence: Synthetic oligonucleotide
auacuucaggcccuucucc

SEQ ID NO: 3109033 - RNA, 19 nt, Artificial Sequence
  Description of Artificial Sequence: Synthetic oligonucleotide
aaacucugugacaucuucc

SEQ ID NO: 3109034 - RNA, 19 nt, Artificial Sequence
  Description of Artificial Sequence: Synthetic oligonucleotide
auauuauuuccauuuagua

SEQ ID NO: 3109035 - RNA, 19 nt, Artificial Sequence
  Description of Artificial Sequence: Synthetic oligonucleotide
ucugugacaucuuccaaca

SEQ ID NO: 3109036 - RNA, 19 nt, Artificial Sequence
  Description of Artificial Sequence: Synthetic oligonucleotide
uucaucacaaugugaauuc

SEQ ID NO: 3109037 - RNA, 19 nt, Artificial Sequence
  Description of Artificial Sequence: Synthetic oligonucleotide
acaccauauugacaaaguc

SEQ ID NO: 3109038 - RNA, 19 nt, Artificial Sequence
  Description of Artificial Sequence: Synthetic oligonucleotide
uucugguguaauuucaaac

SEQ ID NO: 3109039 - RNA, 19 nt, Artificial Sequence
  Description of Artificial Sequence: Synthetic oligonucleotide
cauauugacaaagucauca

SEQ ID NO: 3109040 - RNA, 19 nt, Artificial Sequence
  Description of Artificial Sequence: Synthetic oligonucleotide
agucaucaaauccuagaag

SEQ ID NO: 3109041 - RNA, 19 nt, Artificial Sequence
  Description of Artificial Sequence: Synthetic oligonucleotide
cauuuaguaaaaucugauc

SEQ ID NO: 3109042 - RNA, 19 nt, Artificial Sequence
  Description of Artificial Sequence: Synthetic oligonucleotide
uuuguaauccuucuuccuu

SEQ ID NO: 3109043 - RNA, 19 nt, Artificial Sequence
  Description of Artificial Sequence: Synthetic oligonucleotide
aaucugaucuaauuuugua

SEQ ID NO: 3109044 - RNA, 19 nt, Artificial Sequence
  Description of Artificial Sequence: Synthetic oligonucleotide
auuucaaacucugugacau

SEQ ID NO: 3109045 - RNA, 19 nt, Artificial Sequence
  Description of Artificial Sequence: Synthetic oligonucleotide
uuaguaaaaucugaucuaa

SEQ ID NO: 3109046 - RNA, 19 nt, Artificial Sequence
  Description of Artificial Sequence: Synthetic oligonucleotide
uuaucacucuucaucacaa

SEQ ID NO: 3109047 - RNA, 19 nt, Artificial Sequence
  Description of Artificial Sequence: Synthetic oligonucleotide
uugacaaagucaucaaauc

SEQ ID NO: 3109048 - RNA, 19 nt, Artificial Sequence
  Description of Artificial Sequence: Synthetic oligonucleotide
aaugugaauucuugauccu

SEQ ID NO: 3109049 - RNA, 19 nt, Artificial Sequence
  Description of Artificial Sequence: Synthetic oligonucleotide
uucuugauccuauacacuu

SEQ ID NO: 3109050 - RNA, 19 nt, Artificial Sequence
  Description of Artificial Sequence: Synthetic oligonucleotide
aucacucuucaucacaaug

SEQ ID NO: 3109051 - RNA, 19 nt, Artificial Sequence
  Description of Artificial Sequence: Synthetic oligonucleotide
auccuauacacuuguccac

SEQ ID NO: 3109052 - RNA, 19 nt, Artificial Sequence
  Description of Artificial Sequence: Synthetic oligonucleotide
uugguggucgcguuagccg

SEQ ID NO: 3109053 - RNA, 19 nt, Artificial Sequence
  Description of Artificial Sequence: Synthetic oligonucleotide
ugguguaauuucaaacucu

SEQ ID NO: 3109054 - RNA, 19 nt, Artificial Sequence
  Description of Artificial Sequence: Synthetic oligonucleotide
cuuccaacaccauauugac

SEQ ID NO: 3109055 - RNA, 19 nt, Artificial Sequence
  Description of Artificial Sequence: Synthetic oligonucleotide
uccuucuuccuucuggugu

SEQ ID NO: 3109056 - RNA, 19 nt, Artificial Sequence
  Description of Artificial Sequence: Synthetic oligonucleotide
aucugaucuaauuuuguaa

SEQ ID NO: 3109057 - RNA, 19 nt, Artificial Sequence
  Description of Artificial Sequence: Synthetic oligonucleotide
uccuauacacuuguccacg

SEQ ID NO: 3109058 - RNA, 19 nt, Artificial Sequence
  Description of Artificial Sequence: Synthetic oligonucleotide
uuuuguaauccuucuuccu

SEQ ID NO: 3109059 - RNA, 19 nt, Artificial Sequence
  Description of Artificial Sequence: Synthetic oligonucleotide
ugugaauucuugauccuau

SEQ ID NO: 3109060 - RNA, 19 nt, Artificial Sequence
  Description of Artificial Sequence: Synthetic oligonucleotide
uucaaacucugugacaucu

SEQ ID NO: 3109061 - RNA, 19 nt, Artificial Sequence
  Description of Artificial Sequence: Synthetic oligonucleotide
gucaucaaauccuagaagu

SEQ ID NO: 3109062 - RNA, 19 nt, Artificial Sequence
  Description of Artificial Sequence: Synthetic oligonucleotide
auugacaaagucaucaaau

SEQ ID NO: 3109063 - RNA, 19 nt, Artificial Sequence
  Description of Artificial Sequence: Synthetic oligonucleotide
auccuagaaguguaccaac

SEQ ID NO: 3109064 - RNA, 19 nt, Artificial Sequence
  Description of Artificial Sequence: Synthetic oligonucleotide
uccauucauacuucaggcc

SEQ ID NO: 3109065 - RNA, 19 nt, Artificial Sequence
  Description of Artificial Sequence: Synthetic oligonucleotide
ucuugauccuauacacuug

SEQ ID NO: 3109066 - RNA, 19 nt, Artificial Sequence
  Description of Artificial Sequence: Synthetic oligonucleotide
aucguuauauuauuuccau

SEQ ID NO: 3109067 - RNA, 19 nt, Artificial Sequence
  Description of Artificial Sequence: Synthetic oligonucleotide
uccuagaaguguaccaaca

SEQ ID NO: 3109068 - RNA, 19 nt, Artificial Sequence
  Description of Artificial Sequence: Synthetic oligonucleotide
ucaaauccuagaaguguac

SEQ ID NO: 3109069 - RNA, 19 nt, Artificial Sequence
  Description of Artificial Sequence: Synthetic oligonucleotide
caccauauugacaaaguca

SEQ ID NO: 3109070 - RNA, 19 nt, Artificial Sequence
  Description of Artificial Sequence: Synthetic oligonucleotide
aauccuagaaguguaccaa

SEQ ID NO: 3109071 - RNA, 19 nt, Artificial Sequence
  Description of Artificial Sequence: Synthetic oligonucleotide
cucugugacaucuuccaac

SEQ ID NO: 3109072 - RNA, 19 nt, Artificial Sequence
  Description of Artificial Sequence: Synthetic oligonucleotide
cucuucaucacaaugugaa

SEQ ID NO: 3109073 - RNA, 19 nt, Artificial Sequence
  Description of Artificial Sequence: Synthetic oligonucleotide
gaaguguaccaacaauuuc

SEQ ID NO: 3109074 - RNA, 19 nt, Artificial Sequence
  Description of Artificial Sequence: Synthetic oligonucleotide
aaaucugaucuaauuuugu

SEQ ID NO: 3109075 - RNA, 19 nt, Artificial Sequence
  Description of Artificial Sequence: Synthetic oligonucleotide
uuguaauccuucuuccuuc

SEQ ID NO: 3109076 - RNA, 19 nt, Artificial Sequence
  Description of Artificial Sequence: Synthetic oligonucleotide
uguccacgagcucuagcgg

SEQ ID NO: 3109077 - RNA, 19 nt, Artificial Sequence
  Description of Artificial Sequence: Synthetic oligonucleotide
aucacaaugugaauucuug

SEQ ID NO: 3109078 - RNA, 19 nt, Artificial Sequence
  Description of Artificial Sequence: Synthetic oligonucleotide
aacaccauauugacaaagu

SEQ ID NO: 3109079 - RNA, 19 nt, Artificial Sequence
  Description of Artificial Sequence: Synthetic oligonucleotide
gcaucguuauauuauuucc

SEQ ID NO: 3109080 - RNA, 19 nt, Artificial Sequence
  Description of Artificial Sequence: Synthetic oligonucleotide
aucuuccaacaccauauug

SEQ ID NO: 3109081 - RNA, 19 nt, Artificial Sequence
  Description of Artificial Sequence: Synthetic oligonucleotide
uaauuuuguaauccuucuu

SEQ ID NO: 3109082 - RNA, 19 nt, Artificial Sequence
  Description of Artificial Sequence: Synthetic oligonucleotide
cugguguaauuucaaacuc

SEQ ID NO: 3109083 - RNA, 19 nt, Artificial Sequence
  Description of Artificial Sequence: Synthetic oligonucleotide
ccauucauacuucaggccc

SEQ ID NO: 3109084 - RNA, 19 nt, Artificial Sequence
  Description of Artificial Sequence: Synthetic oligonucleotide
auauugacaaagucaucaa

SEQ ID NO: 3109085 - RNA, 19 nt, Artificial Sequence
  Description of Artificial Sequence: Synthetic oligonucleotide
caucguuauauuauuucca

SEQ ID NO: 3109086 - RNA, 19 nt, Artificial Sequence
  Description of Artificial Sequence: Synthetic oligonucleotide
acaucuuccaacaccauau

SEQ ID NO: 3109087 - RNA, 19 nt, Artificial Sequence
  Description of Artificial Sequence: Synthetic oligonucleotide
caaauccuagaaguguacc

SEQ ID NO: 3109088 - RNA, 19 nt, Artificial Sequence
  Description of Artificial Sequence: Synthetic oligonucleotide
caaagucaucaaauccuag

SEQ ID NO: 3109089 - RNA, 19 nt, Artificial Sequence
  Description of Artificial Sequence: Synthetic oligonucleotide
cugaucuaauuuuguaauc

SEQ ID NO: 3109090 - RNA, 19 nt, Artificial Sequence
  Description of Artificial Sequence: Synthetic oligonucleotide
ugagacggguugguggucg

SEQ ID NO: 3109091 - RNA, 19 nt, Artificial Sequence
  Description of Artificial Sequence: Synthetic oligonucleotide
cacucuucaucacaaugug

SEQ ID NO: 3109092 - RNA, 19 nt, Artificial Sequence
  Description of Artificial Sequence: Synthetic oligonucleotide
agcggcaggagcugagacg

SEQ ID NO: 3109093 - RNA, 19 nt, Artificial Sequence
  Description of Artificial Sequence: Synthetic oligonucleotide
caaacucugugacaucuuc

SEQ ID NO: 3109094 - RNA, 19 nt, Artificial Sequence
  Description of Artificial Sequence: Synthetic oligonucleotide
gaucuaauuuuguaauccu

SEQ ID NO: 3109095 - RNA, 19 nt, Artificial Sequence
  Description of Artificial Sequence: Synthetic oligonucleotide
caacaccauauugacaaag

SEQ ID NO: 3109096 - RNA, 19 nt, Artificial Sequence
  Description of Artificial Sequence: Synthetic oligonucleotide
uaguaaaaucugaucuaau

SEQ ID NO: 3109097 - RNA, 19 nt, Artificial Sequence
  Description of Artificial Sequence: Synthetic oligonucleotide
cuuuaucacucuucaucac

SEQ ID NO: 3109098 - RNA, 19 nt, Artificial Sequence
  Description of Artificial Sequence: Synthetic oligonucleotide
guuauauuauuuccauuua

SEQ ID NO: 3109099 - RNA, 19 nt, Artificial Sequence
  Description of Artificial Sequence: Synthetic oligonucleotide
gguguaauuucaaacucug

SEQ ID NO: 3109100 - RNA, 19 nt, Artificial Sequence
  Description of Artificial Sequence: Synthetic oligonucleotide
ugguggucgcguuagccgc

SEQ ID NO: 3109101 - RNA, 19 nt, Artificial Sequence
  Description of Artificial Sequence: Synthetic oligonucleotide
uacuucaggcccuucuccu

SEQ ID NO: 3109102 - RNA, 19 nt, Artificial Sequence
  Description of Artificial Sequence: Synthetic oligonucleotide
ucuagcggcaggagcugag

SEQ ID NO: 3109103 - RNA, 19 nt, Artificial Sequence
  Description of Artificial Sequence: Synthetic oligonucleotide
gugacaucuuccaacacca

SEQ ID NO: 3109104 - RNA, 19 nt, Artificial Sequence
  Description of Artificial Sequence: Synthetic oligonucleotide
aaccagcaucguuauauua

SEQ ID NO: 3109105 - RNA, 19 nt, Artificial Sequence
  Description of Artificial Sequence: Synthetic oligonucleotide
acacuuguccacgagcucu

SEQ ID NO: 3109106 - RNA, 19 nt, Artificial Sequence
  Description of Artificial Sequence: Synthetic oligonucleotide
cuauacacuuguccacgag

SEQ ID NO: 3109107 - RNA, 19 nt, Artificial Sequence
  Description of Artificial Sequence: Synthetic oligonucleotide
cuucaggcccuucuccucc

SEQ ID NO: 3109108 - RNA, 19 nt, Artificial Sequence
  Description of Artificial Sequence: Synthetic oligonucleotide
cuaauuuuguaauccuucu

SEQ ID NO: 3109109 - RNA, 19 nt, Artificial Sequence
  Description of Artificial Sequence: Synthetic oligonucleotide
ucuucaucacaaugugaau

SEQ ID NO: 3109110 - RNA, 19 nt, Artificial Sequence
  Description of Artificial Sequence: Synthetic oligonucleotide
uccacgagcucuagcggca

SEQ ID NO: 3109111 - RNA, 19 nt, Artificial Sequence
  Description of Artificial Sequence: Synthetic oligonucleotide
uuucuuuaucacucuucau

SEQ ID NO: 3109112 - RNA, 19 nt, Artificial Sequence
  Description of Artificial Sequence: Synthetic oligonucleotide
gacaucuuccaacaccaua

SEQ ID NO: 3109113 - RNA, 19 nt, Artificial Sequence
  Description of Artificial Sequence: Synthetic oligonucleotide
agaaguguaccaacaauuu

SEQ ID NO: 3109114 - RNA, 19 nt, Artificial Sequence
  Description of Artificial Sequence: Synthetic oligonucleotide
ucaucacaaugugaauucu

SEQ ID NO: 3109115 - RNA, 19 nt, Artificial Sequence
  Description of Artificial Sequence: Synthetic oligonucleotide
guccacgagcucuagcggc

SEQ ID NO: 3109116 - RNA, 19 nt, Artificial Sequence
  Description of Artificial Sequence: Synthetic oligonucleotide
accagcaucguuauauuau

SEQ ID NO: 3109117 - RNA, 19 nt, Artificial Sequence
  Description of Artificial Sequence: Synthetic oligonucleotide
gagcucuagcggcaggagc

SEQ ID NO: 3109118 - RNA, 19 nt, Artificial Sequence
  Description of Artificial Sequence: Synthetic oligonucleotide
ucguuauauuauuuccauu

SEQ ID NO: 3109119 - RNA, 19 nt, Artificial Sequence
  Description of Artificial Sequence: Synthetic oligonucleotide
ccuccaggaaccagcaucg

SEQ ID NO: 3109120 - RNA, 19 nt, Artificial Sequence
  Description of Artificial Sequence: Synthetic oligonucleotide
guugguggucgcguuagcc

SEQ ID NO: 3109121 - RNA, 19 nt, Artificial Sequence
  Description of Artificial Sequence: Synthetic oligonucleotide
agcucuagcggcaggagcu

SEQ ID NO: 3109122 - RNA, 19 nt, Artificial Sequence
  Description of Artificial Sequence: Synthetic oligonucleotide
aucaaauccuagaagugua

SEQ ID NO: 3109123 - RNA, 19 nt, Artificial Sequence
  Description of Artificial Sequence: Synthetic oligonucleotide
auucuugauccuauacacu

SEQ ID NO: 3109124 - RNA, 19 nt, Artificial Sequence
  Description of Artificial Sequence: Synthetic oligonucleotide
uuucaaacucugugacauc

SEQ ID NO: 3109125 - RNA, 19 nt, Artificial Sequence
  Description of Artificial Sequence: Synthetic oligonucleotide
cuuguccacgagcucuagc

SEQ ID NO: 3109126 - RNA, 19 nt, Artificial Sequence
  Description of Artificial Sequence: Synthetic oligonucleotide
guaccaacaauuucuuuau

SEQ ID NO: 3109127 - RNA, 19 nt, Artificial Sequence
  Description of Artificial Sequence: Synthetic oligonucleotide
uaccaacaauuucuuuauc

SEQ ID NO: 3109128 - RNA, 19 nt, Artificial Sequence
  Description of Artificial Sequence: Synthetic oligonucleotide
uccaggaaccagcaucguu

SEQ ID NO: 3109129 - RNA, 19 nt, Artificial Sequence
  Description of Artificial Sequence: Synthetic oligonucleotide
uugauccuauacacuuguc

SEQ ID NO: 3109130 - RNA, 19 nt, Artificial Sequence
  Description of Artificial Sequence: Synthetic oligonucleotide
uauuuccauuuaguaaaau

SEQ ID NO: 3109131 - RNA, 19 nt, Artificial Sequence
  Description of Artificial Sequence: Synthetic oligonucleotide
uacacuuguccacgagcuc

SEQ ID NO: 3109132 - RNA, 19 nt, Artificial Sequence
  Description of Artificial Sequence: Synthetic oligonucleotide
gcggcaggagcugagacgg

SEQ ID NO: 3109133 - RNA, 19 nt, Artificial Sequence
  Description of Artificial Sequence: Synthetic oligonucleotide
cuugauccuauacacuugu

SEQ ID NO: 3109134 - RNA, 19 nt, Artificial Sequence
  Description of Artificial Sequence: Synthetic oligonucleotide
cacaaugugaauucuugau

SEQ ID NO: 3109135 - RNA, 19 nt, Artificial Sequence
  Description of Artificial Sequence: Synthetic oligonucleotide
aucuaauuuuguaauccuu

SEQ ID NO: 3109136 - RNA, 19 nt, Artificial Sequence
  Description of Artificial Sequence: Synthetic oligonucleotide
uagcggcaggagcugagac

SEQ ID NO: 3109137 - RNA, 19 nt, Artificial Sequence
  Description of Artificial Sequence: Synthetic oligonucleotide
uaucacucuucaucacaau

SEQ ID NO: 3109138 - RNA, 19 nt, Artificial Sequence
  Description of Artificial Sequence: Synthetic oligonucleotide
aggagcugagacggguugg

SEQ ID NO: 3109139 - RNA, 19 nt, Artificial Sequence
  Description of Artificial Sequence: Synthetic oligonucleotide
guaauccuucuuccuucug

SEQ ID NO: 3109140 - RNA, 19 nt, Artificial Sequence
  Description of Artificial Sequence: Synthetic oligonucleotide
caucaaauccuagaagugu

SEQ ID NO: 3109141 - RNA, 19 nt, Artificial Sequence
  Description of Artificial Sequence: Synthetic oligonucleotide
caggagcugagacggguug

SEQ ID NO: 3109142 - RNA, 19 nt, Artificial Sequence
  Description of Artificial Sequence: Synthetic oligonucleotide
cuucugguguaauuucaaa

SEQ ID NO: 3109143 - RNA, 19 nt, Artificial Sequence
  Description of Artificial Sequence: Synthetic oligonucleotide
aguguaccaacaauuucuu

SEQ ID NO: 3109144 - RNA, 19 nt, Artificial Sequence
  Description of Artificial Sequence: Synthetic oligonucleotide
augugaauucuugauccua

SEQ ID NO: 3109145 - RNA, 19 nt, Artificial Sequence
  Description of Artificial Sequence: Synthetic oligonucleotide
acucugugacaucuuccaa

SEQ ID NO: 3109146 - RNA, 19 nt, Artificial Sequence
  Description of Artificial Sequence: Synthetic oligonucleotide
acucuucaucacaauguga

SEQ ID NO: 3109147 - RNA, 19 nt, Artificial Sequence
  Description of Artificial Sequence: Synthetic oligonucleotide
cuagaaguguaccaacaau

SEQ ID NO: 3109148 - RNA, 19 nt, Artificial Sequence
  Description of Artificial Sequence: Synthetic oligonucleotide
ggaaccagcaucguuauau

SEQ ID NO: 3109149 - RNA, 19 nt, Artificial Sequence
  Description of Artificial Sequence: Synthetic oligonucleotide
cuucaucacaaugugaauu

SEQ ID NO: 3109150 - RNA, 19 nt, Artificial Sequence
  Description of Artificial Sequence: Synthetic oligonucleotide
gagacggguugguggucgc

SEQ ID NO: 3109151 - RNA, 19 nt, Artificial Sequence
  Description of Artificial Sequence: Synthetic oligonucleotide
gugaauucuugauccuaua

SEQ ID NO: 3109152 - RNA, 19 nt, Artificial Sequence
  Description of Artificial Sequence: Synthetic oligonucleotide
ccaggaaccagcaucguua

SEQ ID NO: 3109153 - RNA, 19 nt, Artificial Sequence
  Description of Artificial Sequence: Synthetic oligonucleotide
cguuauauuauuuccauuu

SEQ ID NO: 3109154 - RNA, 19 nt, Artificial Sequence
  Description of Artificial Sequence: Synthetic oligonucleotide
acgagcucuagcggcagga

SEQ ID NO: 3109155 - RNA, 19 nt, Artificial Sequence
  Description of Artificial Sequence: Synthetic oligonucleotide
agacggguugguggucgcg

SEQ ID NO: 3109156 - RNA, 19 nt, Artificial Sequence
  Description of Artificial Sequence: Synthetic oligonucleotide
cacgagcucuagcggcagg

SEQ ID NO: 3109157 - RNA, 19 nt, Artificial Sequence
  Description of Artificial Sequence: Synthetic oligonucleotide
cuucuccuccaggaaccag

SEQ ID NO: 3109158 - RNA, 19 nt, Artificial Sequence
  Description of Artificial Sequence: Synthetic oligonucleotide
acuuguccacgagcucuag

SEQ ID NO: 3109159 - RNA, 19 nt, Artificial Sequence
  Description of Artificial Sequence: Synthetic oligonucleotide
gagcugagacggguuggug

SEQ ID NO: 3109160 - RNA, 19 nt, Artificial Sequence
  Description of Artificial Sequence: Synthetic oligonucleotide
ggguugguggucgcguuag

SEQ ID NO: 3109161 - RNA, 19 nt, Artificial Sequence
  Description of Artificial Sequence: Synthetic oligonucleotide
gaaccagcaucguuauauu

SEQ ID NO: 3109162 - RNA, 19 nt, Artificial Sequence
  Description of Artificial Sequence: Synthetic oligonucleotide
auucauacuucaggcccuu

SEQ ID NO: 3109163 - RNA, 19 nt, Artificial Sequence
  Description of Artificial Sequence: Synthetic oligonucleotide
gcccuucuccuccaggaac

SEQ ID NO: 3109164 - RNA, 19 nt, Artificial Sequence
  Description of Artificial Sequence: Synthetic oligonucleotide
caucacaaugugaauucuu

SEQ ID NO: 3109165 - RNA, 19 nt, Artificial Sequence
  Description of Artificial Sequence: Synthetic oligonucleotide
ccauauugacaaagucauc

SEQ ID NO: 3109166 - RNA, 19 nt, Artificial Sequence
  Description of Artificial Sequence: Synthetic oligonucleotide
ccauuuaguaaaaucugau

SEQ ID NO: 3109167 - RNA, 19 nt, Artificial Sequence
  Description of Artificial Sequence: Synthetic oligonucleotide
ccuagaaguguaccaacaa

SEQ ID NO: 3109168 - RNA, 19 nt, Artificial Sequence
  Description of Artificial Sequence: Synthetic oligonucleotide
uucauacuucaggcccuuc

SEQ ID NO: 3109169 - RNA, 19 nt, Artificial Sequence
  Description of Artificial Sequence: Synthetic oligonucleotide
guguaauuucaaacucugu

SEQ ID NO: 3109170 - RNA, 19 nt, Artificial Sequence
  Description of Artificial Sequence: Synthetic oligonucleotide
caauuucuuuaucacucuu

SEQ ID NO: 3109171 - RNA, 19 nt, Artificial Sequence
  Description of Artificial Sequence: Synthetic oligonucleotide
gcugagacggguugguggu

SEQ ID NO: 3109172 - RNA, 19 nt, Artificial Sequence
  Description of Artificial Sequence: Synthetic oligonucleotide
ccuauacacuuguccacga

SEQ ID NO: 3109173 - RNA, 19 nt, Artificial Sequence
  Description of Artificial Sequence: Synthetic oligonucleotide
cacuuguccacgagcucua

SEQ ID NO: 3109174 - RNA, 19 nt, Artificial Sequence
  Description of Artificial Sequence: Synthetic oligonucleotide
ccuucugguguaauuucaa

SEQ ID NO: 3109175 - RNA, 19 nt, Artificial Sequence
  Description of Artificial Sequence: Synthetic oligonucleotide
acggguugguggucgcguu

SEQ ID NO: 3109176 - RNA, 19 nt, Artificial Sequence
  Description of Artificial Sequence: Synthetic oligonucleotide
gguugguggucgcguuagc

SEQ ID NO: 3109177 - RNA, 19 nt, Artificial Sequence
  Description of Artificial Sequence: Synthetic oligonucleotide
cuagcggcaggagcugaga

SEQ ID NO: 3109178 - RNA, 19 nt, Artificial Sequence
  Description of Artificial Sequence: Synthetic oligonucleotide
aggaaccagcaucguuaua

SEQ ID NO: 3109179 - RNA, 19 nt, Artificial Sequence
  Description of Artificial Sequence: Synthetic oligonucleotide
gacggguugguggucgcgu

SEQ ID NO: 3109180 - RNA, 19 nt, Artificial Sequence
  Description of Artificial Sequence: Synthetic oligonucleotide
caggaaccagcaucguuau

SEQ ID NO: 3109181 - RNA, 19 nt, Artificial Sequence
  Description of Artificial Sequence: Synthetic oligonucleotide
gguggucgcguuagccgcc

SEQ ID NO: 3109182 - RNA, 19 nt, Artificial Sequence
  Description of Artificial Sequence: Synthetic oligonucleotide
cagcaucguuauauuauuu

SEQ ID NO: 3109183 - RNA, 19 nt, Artificial Sequence
  Description of Artificial Sequence: Synthetic oligonucleotide
cugagacggguuggugguc

SEQ ID NO: 3109184 - RNA, 19 nt, Artificial Sequence
  Description of Artificial Sequence: Synthetic oligonucleotide
guguaccaacaauuucuuu

SEQ ID NO: 3109185 - RNA, 19 nt, Artificial Sequence
  Description of Artificial Sequence: Synthetic oligonucleotide
cucuagcggcaggagcuga

SEQ ID NO: 3109186 - RNA, 19 nt, Artificial Sequence
  Description of Artificial Sequence: Synthetic oligonucleotide
caucuuccaacaccauauu

SEQ ID NO: 3109187 - RNA, 19 nt, Artificial Sequence
  Description of Artificial Sequence: Synthetic oligonucleotide
gcucuagcggcaggagcug

SEQ ID NO: 3109188 - RNA, 19 nt, Artificial Sequence
  Description of Artificial Sequence: Synthetic oligonucleotide
ccagcaucguuauauuauu

SEQ ID NO: 3109189 - RNA, 19 nt, Artificial Sequence
  Description of Artificial Sequence: Synthetic oligonucleotide
uggucgcguuagccgccau

SEQ ID NO: 3109190 - RNA, 19 nt, Artificial Sequence
  Description of Artificial Sequence: Synthetic oligonucleotide
guggucgcguuagccgcca

SEQ ID NO: 3109191 - RNA, 19 nt, Artificial Sequence
  Description of Artificial Sequence: Synthetic oligonucleotide
ccaacaccauauugacaaa

SEQ ID NO: 3109192 - RNA, 19 nt, Artificial Sequence
  Description of Artificial Sequence: Synthetic oligonucleotide
ggcaggagcugagacgggu

SEQ ID NO: 3109193 - RNA, 19 nt, Artificial Sequence
  Description of Artificial Sequence: Synthetic oligonucleotide
ggagcugagacggguuggu

SEQ ID NO: 3109194 - RNA, 19 nt, Artificial Sequence
  Description of Artificial Sequence: Synthetic oligonucleotide
ccacgagcucuagcggcag

SEQ ID NO: 3109195 - RNA, 19 nt, Artificial Sequence
  Description of Artificial Sequence: Synthetic oligonucleotide
cgagcucuagcggcaggag

SEQ ID NO: 3109196 - RNA, 19 nt, Artificial Sequence
  Description of Artificial Sequence: Synthetic oligonucleotide
cggcaggagcugagacggg

SEQ ID NO: 3109197 - RNA, 19 nt, Artificial Sequence
  Description of Artificial Sequence: Synthetic oligonucleotide
cuccaggaaccagcaucgu

SEQ ID NO: 3109198 - RNA, 19 nt, Artificial Sequence
  Description of Artificial Sequence: Synthetic oligonucleotide
gcaggagcugagacggguu

SEQ ID NO: 3109199 - RNA, 19 nt, Artificial Sequence
  Description of Artificial Sequence: Synthetic oligonucleotide
cggguugguggucgcguua

SEQ ID NO: 3109200 - RNA, 19 nt, Artificial Sequence
  Description of Artificial Sequence: Synthetic oligonucleotide
agucccuuaaccugaaugc

SEQ ID NO: 3109201 - RNA, 19 nt, Artificial Sequence
  Description of Artificial Sequence: Synthetic oligonucleotide
uaaagugccuggcacacag

SEQ ID NO: 3109202 - RNA, 19 nt, Artificial Sequence
  Description of Artificial Sequence: Synthetic oligonucleotide
aaucacagauccuugcuga

SEQ ID NO: 3109203 - RNA, 19 nt, Artificial Sequence
  Description of Artificial Sequence: Synthetic oligonucleotide
uucccuaaccagcauauag

SEQ ID NO: 3109204 - RNA, 19 nt, Artificial Sequence
  Description of Artificial Sequence: Synthetic oligonucleotide
uauaaucacagauccuugc

SEQ ID NO: 3109205 - RNA, 19 nt, Artificial Sequence
  Description of Artificial Sequence: Synthetic oligonucleotide
aaugccucacugucagccc

SEQ ID NO: 3109206 - RNA, 19 nt, Artificial Sequence
  Description of Artificial Sequence: Synthetic oligonucleotide
ucuauaaucacagauccuu

SEQ ID NO: 3109207 - RNA, 19 nt, Artificial Sequence
  Description of Artificial Sequence: Synthetic oligonucleotide
uuagaguccccacugcacc

SEQ ID NO: 3109208 - RNA, 19 nt, Artificial Sequence
  Description of Artificial Sequence: Synthetic oligonucleotide
ggucuauaaucacagaucc

SEQ ID NO: 3109209 - RNA, 19 nt, Artificial Sequence
  Description of Artificial Sequence: Synthetic oligonucleotide
uaaucacagauccuugcug

SEQ ID NO: 3109210 - RNA, 19 nt, Artificial Sequence
  Description of Artificial Sequence: Synthetic oligonucleotide
uggucuauaaucacagauc

SEQ ID NO: 3109211 - RNA, 19 nt, Artificial Sequence
  Description of Artificial Sequence: Synthetic oligonucleotide
ugcugaauucccuaaccag

SEQ ID NO: 3109212 - RNA, 19 nt, Artificial Sequence
  Description of Artificial Sequence: Synthetic oligonucleotide
uaaccugaaugccucacug

SEQ ID NO: 3109213 - RNA, 19 nt, Artificial Sequence
  Description of Artificial Sequence: Synthetic oligonucleotide
ugugagucccuuaaccuga

SEQ ID NO: 3109214 - RNA, 19 nt, Artificial Sequence
  Description of Artificial Sequence: Synthetic oligonucleotide
ucccuaaccagcauauagc

SEQ ID NO: 3109215 - RNA, 19 nt, Artificial Sequence
  Description of Artificial Sequence: Synthetic oligonucleotide
uccgcugugggcaugugag

SEQ ID NO: 3109216 - RNA, 19 nt, Artificial Sequence
  Description of Artificial Sequence: Synthetic oligonucleotide
ugggcauggucuauaauca

SEQ ID NO: 3109217 - RNA, 19 nt, Artificial Sequence
  Description of Artificial Sequence: Synthetic oligonucleotide
auggucuauaaucacagau

SEQ ID NO: 3109218 - RNA, 19 nt, Artificial Sequence
  Description of Artificial Sequence: Synthetic oligonucleotide
cucucucucucuuagaguc

SEQ ID NO: 3109219 - RNA, 19 nt, Artificial Sequence
  Description of Artificial Sequence: Synthetic oligonucleotide
gagucccuuaaccugaaug

SEQ ID NO: 3109220 - RNA, 19 nt, Artificial Sequence
  Description of Artificial Sequence: Synthetic oligonucleotide
acuggauagacacgcgggg

SEQ ID NO: 3109221 - RNA, 19 nt, Artificial Sequence
  Description of Artificial Sequence: Synthetic oligonucleotide
auaaucacagauccuugcu

SEQ ID NO: 3109222 - RNA, 19 nt, Artificial Sequence
  Description of Artificial Sequence: Synthetic oligonucleotide
gaaugccucacugucagcc

SEQ ID NO: 3109223 - RNA, 19 nt, Artificial Sequence
  Description of Artificial Sequence: Synthetic oligonucleotide
uggauagacacgcggggag

SEQ ID NO: 3109224 - RNA, 19 nt, Artificial Sequence
  Description of Artificial Sequence: Synthetic oligonucleotide
cuugcugaauucccuaacc

SEQ ID NO: 3109225 - RNA, 19 nt, Artificial Sequence
  Description of Artificial Sequence: Synthetic oligonucleotide
agacuggauagacacgcgg

SEQ ID NO: 3109226 - RNA, 19 nt, Artificial Sequence
  Description of Artificial Sequence: Synthetic oligonucleotide
ucuuagaguccccacugca

SEQ ID NO: 3109227 - RNA, 19 nt, Artificial Sequence
  Description of Artificial Sequence: Synthetic oligonucleotide
ucacugucagcccagcaga

SEQ ID NO: 3109228 - RNA, 19 nt, Artificial Sequence
  Description of Artificial Sequence: Synthetic oligonucleotide
gugggcauggucuauaauc

SEQ ID NO: 3109229 - RNA, 19 nt, Artificial Sequence
  Description of Artificial Sequence: Synthetic oligonucleotide
ggagguauaaagugccugg

SEQ ID NO: 3109230 - RNA, 19 nt, Artificial Sequence
  Description of Artificial Sequence: Synthetic oligonucleotide
uugcugaauucccuaacca

SEQ ID NO: 3109231 - RNA, 19 nt, Artificial Sequence
  Description of Artificial Sequence: Synthetic oligonucleotide
uauaaagugccuggcacac

SEQ ID NO: 3109232 - RNA, 19 nt, Artificial Sequence
  Description of Artificial Sequence: Synthetic oligonucleotide
cuauaaucacagauccuug

SEQ ID NO: 3109233 - RNA, 19 nt, Artificial Sequence
  Description of Artificial Sequence: Synthetic oligonucleotide
cugaaugccucacugucag

SEQ ID NO: 3109234 - RNA, 19 nt, Artificial Sequence
  Description of Artificial Sequence: Synthetic oligonucleotide
agauccuugcugaauuccc

SEQ ID NO: 3109235 - RNA, 19 nt, Artificial Sequence
  Description of Artificial Sequence: Synthetic oligonucleotide
augugagucccuuaaccug

SEQ ID NO: 3109236 - RNA, 19 nt, Artificial Sequence
  Description of Artificial Sequence: Synthetic oligonucleotide
gacuggauagacacgcggg

SEQ ID NO: 3109237 - RNA, 19 nt, Artificial Sequence
  Description of Artificial Sequence: Synthetic oligonucleotide
gguauaaagugccuggcac

SEQ ID NO: 3109238 - RNA, 19 nt, Artificial Sequence
  Description of Artificial Sequence: Synthetic oligonucleotide
cucucucucucucuuagag

SEQ ID NO: 3109239 - RNA, 19 nt, Artificial Sequence
  Description of Artificial Sequence: Synthetic oligonucleotide
uuaaccugaaugccucacu

SEQ ID NO: 3109240 - RNA, 19 nt, Artificial Sequence
  Description of Artificial Sequence: Synthetic oligonucleotide
cucacugucagcccagcag

SEQ ID NO: 3109241 - RNA, 19 nt, Artificial Sequence
  Description of Artificial Sequence: Synthetic oligonucleotide
cacugcaccugguaggucc

SEQ ID NO: 3109242 - RNA, 19 nt, Artificial Sequence
  Description of Artificial Sequence: Synthetic oligonucleotide
uccccagugggcauggucu

SEQ ID NO: 3109243 - RNA, 19 nt, Artificial Sequence
  Description of Artificial Sequence: Synthetic oligonucleotide
aauucccuaaccagcauau

SEQ ID NO: 3109244 - RNA, 19 nt, Artificial Sequence
  Description of Artificial Sequence: Synthetic oligonucleotide
agcccagcagacuggauag

SEQ ID NO: 3109245 - RNA, 19 nt, Artificial Sequence
  Description of Artificial Sequence: Synthetic oligonucleotide
cuuagaguccccacugcac

SEQ ID NO: 3109246 - RNA, 19 nt, Artificial Sequence
  Description of Artificial Sequence: Synthetic oligonucleotide
ucccuuaaccugaaugccu

SEQ ID NO: 3109247 - RNA, 19 nt, Artificial Sequence
  Description of Artificial Sequence: Synthetic oligonucleotide
acagauccuugcugaauuc

SEQ ID NO: 3109248 - RNA, 19 nt, Artificial Sequence
  Description of Artificial Sequence: Synthetic oligonucleotide
aaccugaaugccucacugu

SEQ ID NO: 3109249 - RNA, 19 nt, Artificial Sequence
  Description of Artificial Sequence: Synthetic oligonucleotide
acaguaggugcuccugagg

SEQ ID NO: 3109250 - RNA, 19 nt, Artificial Sequence
  Description of Artificial Sequence: Synthetic oligonucleotide
guauaaagugccuggcaca

SEQ ID NO: 3109251 - RNA, 19 nt, Artificial Sequence
  Description of Artificial Sequence: Synthetic oligonucleotide
aagugccuggcacacagua

SEQ ID NO: 3109252 - RNA, 19 nt, Artificial Sequence
  Description of Artificial Sequence: Synthetic oligonucleotide
ugucagcccagcagacugg

SEQ ID NO: 3109253 - RNA, 19 nt, Artificial Sequence
  Description of Artificial Sequence: Synthetic oligonucleotide
guaggugcuccugaggugc

SEQ ID NO: 3109254 - RNA, 19 nt, Artificial Sequence
  Description of Artificial Sequence: Synthetic oligonucleotide
agguauaaagugccuggca

SEQ ID NO: 3109255 - RNA, 19 nt, Artificial Sequence
  Description of Artificial Sequence: Synthetic oligonucleotide
cugaauucccuaaccagca

SEQ ID NO: 3109256 - RNA, 19 nt, Artificial Sequence
  Description of Artificial Sequence: Synthetic oligonucleotide
uccccacugcaccugguag

SEQ ID NO: 3109257 - RNA, 19 nt, Artificial Sequence
  Description of Artificial Sequence: Synthetic oligonucleotide
cugucagcccagcagacug

SEQ ID NO: 3109258 - RNA, 19 nt, Artificial Sequence
  Description of Artificial Sequence: Synthetic oligonucleotide
ucucucucucuuagagucc

SEQ ID NO: 3109259 - RNA, 19 nt, Artificial Sequence
  Description of Artificial Sequence: Synthetic oligonucleotide
gcaugugagucccuuaacc

SEQ ID NO: 3109260 - RNA, 19 nt, Artificial Sequence
  Description of Artificial Sequence: Synthetic oligonucleotide
cucucucucucucucuuag

SEQ ID NO: 3109261 - RNA, 19 nt, Artificial Sequence
  Description of Artificial Sequence: Synthetic oligonucleotide
ggggaggagguauaaagug

SEQ ID NO: 3109262 - RNA, 19 nt, Artificial Sequence
  Description of Artificial Sequence: Synthetic oligonucleotide
gagguauaaagugccuggc

SEQ ID NO: 3109263 - RNA, 19 nt, Artificial Sequence
  Description of Artificial Sequence: Synthetic oligonucleotide
ucucucucucucuuagagu

SEQ ID NO: 3109264 - RNA, 19 nt, Artificial Sequence
  Description of Artificial Sequence: Synthetic oligonucleotide
aguaggugcuccugaggug

SEQ ID NO: 3109265 - RNA, 19 nt, Artificial Sequence
  Description of Artificial Sequence: Synthetic oligonucleotide
uagacacgcggggaggagg

SEQ ID NO: 3109266 - RNA, 19 nt, Artificial Sequence
  Description of Artificial Sequence: Synthetic oligonucleotide
ggaggagguauaaagugcc

SEQ ID NO: 3109267 - RNA, 19 nt, Artificial Sequence
  Description of Artificial Sequence: Synthetic oligonucleotide
aggagguauaaagugccug

SEQ ID NO: 3109268 - RNA, 19 nt, Artificial Sequence
  Description of Artificial Sequence: Synthetic oligonucleotide
gaauucccuaaccagcaua

SEQ ID NO: 3109269 - RNA, 19 nt, Artificial Sequence
  Description of Artificial Sequence: Synthetic oligonucleotide
cacaguaggugcuccugag

SEQ ID NO: 3109270 - RNA, 19 nt, Artificial Sequence
  Description of Artificial Sequence: Synthetic oligonucleotide
gcauggucuauaaucacag

SEQ ID NO: 3109271 - RNA, 19 nt, Artificial Sequence
  Description of Artificial Sequence: Synthetic oligonucleotide
cccuaaccagcauauagcc

SEQ ID NO: 3109272 - RNA, 19 nt, Artificial Sequence
  Description of Artificial Sequence: Synthetic oligonucleotide
cucucucucuuagaguccc

SEQ ID NO: 3109273 - RNA, 19 nt, Artificial Sequence
  Description of Artificial Sequence: Synthetic oligonucleotide
gcagacuggauagacacgc

SEQ ID NO: 3109274 - RNA, 19 nt, Artificial Sequence
  Description of Artificial Sequence: Synthetic oligonucleotide
cagauccuugcugaauucc

SEQ ID NO: 3109275 - RNA, 19 nt, Artificial Sequence
  Description of Artificial Sequence: Synthetic oligonucleotide
ccuggcacacaguaggugc

SEQ ID NO: 3109276 - RNA, 19 nt, Artificial Sequence
  Description of Artificial Sequence: Synthetic oligonucleotide
gcggggaggagguauaaag

SEQ ID NO: 3109277 - RNA, 19 nt, Artificial Sequence
  Description of Artificial Sequence: Synthetic oligonucleotide
cuuaaccugaaugccucac

SEQ ID NO: 3109278 - RNA, 19 nt, Artificial Sequence
  Description of Artificial Sequence: Synthetic oligonucleotide
ucucucuuagaguccccac

SEQ ID NO: 3109279 - RNA, 19 nt, Artificial Sequence
  Description of Artificial Sequence: Synthetic oligonucleotide
ugaauucccuaaccagcau

SEQ ID NO: 3109280 - RNA, 19 nt, Artificial Sequence
  Description of Artificial Sequence: Synthetic oligonucleotide
acacaguaggugcuccuga

SEQ ID NO: 3109281 - RNA, 19 nt, Artificial Sequence
  Description of Artificial Sequence: Synthetic oligonucleotide
cucuuagaguccccacugc

SEQ ID NO: 3109282 - RNA, 19 nt, Artificial Sequence
  Description of Artificial Sequence: Synthetic oligonucleotide
cagacuggauagacacgcg

SEQ ID NO: 3109283 - RNA, 19 nt, Artificial Sequence
  Description of Artificial Sequence: Synthetic oligonucleotide
uccuugcugaauucccuaa

SEQ ID NO: 3109284 - RNA, 19 nt, Artificial Sequence
  Description of Artificial Sequence: Synthetic oligonucleotide
gucccuuaaccugaaugcc

SEQ ID NO: 3109285 - RNA, 19 nt, Artificial Sequence
  Description of Artificial Sequence: Synthetic oligonucleotide
uagaguccccacugcaccu

SEQ ID NO: 3109286 - RNA, 19 nt, Artificial Sequence
  Description of Artificial Sequence: Synthetic oligonucleotide
caugugagucccuuaaccu

SEQ ID NO: 3109287 - RNA, 19 nt, Artificial Sequence
  Description of Artificial Sequence: Synthetic oligonucleotide
gaguccccacugcaccugg

SEQ ID NO: 3109288 - RNA, 19 nt, Artificial Sequence
  Description of Artificial Sequence: Synthetic oligonucleotide
gcuccugaggugcuggucc

SEQ ID NO: 3109289 - RNA, 19 nt, Artificial Sequence
  Description of Artificial Sequence: Synthetic oligonucleotide
ucucucucucucucucucu

SEQ ID NO: 3109290 - RNA, 19 nt, Artificial Sequence
  Description of Artificial Sequence: Synthetic oligonucleotide
ugccucacugucagcccag

SEQ ID NO: 3109291 - RNA, 19 nt, Artificial Sequence
  Description of Artificial Sequence: Synthetic oligonucleotide
ucucucucucucucuuaga

SEQ ID NO: 3109292 - RNA, 19 nt, Artificial Sequence
  Description of Artificial Sequence: Synthetic oligonucleotide
gauagacacgcggggagga

SEQ ID NO: 3109293 - RNA, 19 nt, Artificial Sequence
  Description of Artificial Sequence: Synthetic oligonucleotide
augccucacugucagccca

SEQ ID NO: 3109294 - RNA, 19 nt, Artificial Sequence
  Description of Artificial Sequence: Synthetic oligonucleotide
ugaaugccucacugucagc

SEQ ID NO: 3109295 - RNA, 19 nt, Artificial Sequence
  Description of Artificial Sequence: Synthetic oligonucleotide
cucucucucucucucucuc

SEQ ID NO: 3109296 - RNA, 19 nt, Artificial Sequence
  Description of Artificial Sequence: Synthetic oligonucleotide
agcagacuggauagacacg

SEQ ID NO: 3109297 - RNA, 19 nt, Artificial Sequence
  Description of Artificial Sequence: Synthetic oligonucleotide
uaaccagcauauagcccau

SEQ ID NO: 3109298 - RNA, 19 nt, Artificial Sequence
  Description of Artificial Sequence: Synthetic oligonucleotide
aucacagauccuugcugaa

SEQ ID NO: 3109299 - RNA, 19 nt, Artificial Sequence
  Description of Artificial Sequence: Synthetic oligonucleotide
ucucucucuuagagucccc

SEQ ID NO: 3109300 - RNA, 19 nt, Artificial Sequence
  Description of Artificial Sequence: Synthetic oligonucleotide
cugugggcaugugaguccc

SEQ ID NO: 3109301 - RNA, 19 nt, Artificial Sequence
  Description of Artificial Sequence: Synthetic oligonucleotide
ucacagauccuugcugaau

SEQ ID NO: 3109302 - RNA, 19 nt, Artificial Sequence
  Description of Artificial Sequence: Synthetic oligonucleotide
gguagguccgcugugggca

SEQ ID NO: 3109303 - RNA, 19 nt, Artificial Sequence
  Description of Artificial Sequence: Synthetic oligonucleotide
auccuugcugaauucccua

SEQ ID NO: 3109304 - RNA, 19 nt, Artificial Sequence
  Description of Artificial Sequence: Synthetic oligonucleotide
cuccugaggugcugguccc

SEQ ID NO: 3109305 - RNA, 19 nt, Artificial Sequence
  Description of Artificial Sequence: Synthetic oligonucleotide
ugccuggcacacaguaggu

SEQ ID NO: 3109306 - RNA, 19 nt, Artificial Sequence
  Description of Artificial Sequence: Synthetic oligonucleotide
ggauagacacgcggggagg

SEQ ID NO: 3109307 - RNA, 19 nt, Artificial Sequence
  Description of Artificial Sequence: Synthetic oligonucleotide
acugcaccugguagguccg

SEQ ID NO: 3109308 - RNA, 19 nt, Artificial Sequence
  Description of Artificial Sequence: Synthetic oligonucleotide
cauggucuauaaucacaga

SEQ ID NO: 3109309 - RNA, 19 nt, Artificial Sequence
  Description of Artificial Sequence: Synthetic oligonucleotide
auagacacgcggggaggag

SEQ ID NO: 3109310 - RNA, 19 nt, Artificial Sequence
  Description of Artificial Sequence: Synthetic oligonucleotide
caguaggugcuccugaggu

SEQ ID NO: 3109311 - RNA, 19 nt, Artificial Sequence
  Description of Artificial Sequence: Synthetic oligonucleotide
ucucucucucucucucuua

SEQ ID NO: 3109312 - RNA, 19 nt, Artificial Sequence
  Description of Artificial Sequence: Synthetic oligonucleotide
gcugugggcaugugagucc

SEQ ID NO: 3109313 - RNA, 19 nt, Artificial Sequence
  Description of Artificial Sequence: Synthetic oligonucleotide
agugggcauggucuauaau

SEQ ID NO: 3109314 - RNA, 19 nt, Artificial Sequence
  Description of Artificial Sequence: Synthetic oligonucleotide
cccuuaaccugaaugccuc

SEQ ID NO: 3109315 - RNA, 19 nt, Artificial Sequence
  Description of Artificial Sequence: Synthetic oligonucleotide
ggugcuccugaggugcugg

SEQ ID NO: 3109316 - RNA, 19 nt, Artificial Sequence
  Description of Artificial Sequence: Synthetic oligonucleotide
acugucagcccagcagacu

SEQ ID NO: 3109317 - RNA, 19 nt, Artificial Sequence
  Description of Artificial Sequence: Synthetic oligonucleotide
auaaagugccuggcacaca

SEQ ID NO: 3109318 - RNA, 19 nt, Artificial Sequence
  Description of Artificial Sequence: Synthetic oligonucleotide
aaagugccuggcacacagu

SEQ ID NO: 3109319 - RNA, 19 nt, Artificial Sequence
  Description of Artificial Sequence: Synthetic oligonucleotide
uaggugcuccugaggugcu

SEQ ID NO: 3109320 - RNA, 19 nt, Artificial Sequence
  Description of Artificial Sequence: Synthetic oligonucleotide
gauccuugcugaauucccu

SEQ ID NO: 3109321 - RNA, 19 nt, Artificial Sequence
  Description of Artificial Sequence: Synthetic oligonucleotide
agaguccccacugcaccug

SEQ ID NO: 3109322 - RNA, 19 nt, Artificial Sequence
  Description of Artificial Sequence: Synthetic oligonucleotide
cucucuuagaguccccacu

SEQ ID NO: 3109323 - RNA, 19 nt, Artificial Sequence
  Description of Artificial Sequence: Synthetic oligonucleotide
ugagucccuuaaccugaau

SEQ ID NO: 3109324 - RNA, 19 nt, Artificial Sequence
  Description of Artificial Sequence: Synthetic oligonucleotide
cuggauagacacgcgggga

SEQ ID NO: 3109325 - RNA, 19 nt, Artificial Sequence
  Description of Artificial Sequence: Synthetic oligonucleotide
cuccccagugggcaugguc

SEQ ID NO: 3109326 - RNA, 19 nt, Artificial Sequence
  Description of Artificial Sequence: Synthetic oligonucleotide
ugggcaugugagucccuua

SEQ ID NO: 3109327 - RNA, 19 nt, Artificial Sequence
  Description of Artificial Sequence: Synthetic oligonucleotide
cagcccagcagacuggaua

SEQ ID NO: 3109328 - RNA, 19 nt, Artificial Sequence
  Description of Artificial Sequence: Synthetic oligonucleotide
ugcaccugguagguccgcu

SEQ ID NO: 3109329 - RNA, 19 nt, Artificial Sequence
  Description of Artificial Sequence: Synthetic oligonucleotide
agacacgcggggaggaggu

SEQ ID NO: 3109330 - RNA, 19 nt, Artificial Sequence
  Description of Artificial Sequence: Synthetic oligonucleotide
ccuugcugaauucccuaac

SEQ ID NO: 3109331 - RNA, 19 nt, Artificial Sequence
  Description of Artificial Sequence: Synthetic oligonucleotide
cacagauccuugcugaauu

SEQ ID NO: 3109332 - RNA, 19 nt, Artificial Sequence
  Description of Artificial Sequence: Synthetic oligonucleotide
cucucucuuagagucccca

SEQ ID NO: 3109333 - RNA, 19 nt, Artificial Sequence
  Description of Artificial Sequence: Synthetic oligonucleotide
ggcaugugagucccuuaac

SEQ ID NO: 3109334 - RNA, 19 nt, Artificial Sequence
  Description of Artificial Sequence: Synthetic oligonucleotide
gggcauggucuauaaucac

SEQ ID NO: 3109335 - RNA, 19 nt, Artificial Sequence
  Description of Artificial Sequence: Synthetic oligonucleotide
ugugggcaugugagucccu

SEQ ID NO: 3109336 - RNA, 19 nt, Artificial Sequence
  Description of Artificial Sequence: Synthetic oligonucleotide
cucuccccagugggcaugg

SEQ ID NO: 3109337 - RNA, 19 nt, Artificial Sequence
  Description of Artificial Sequence: Synthetic oligonucleotide
uccugaggugcuggucccc

SEQ ID NO: 3109338 - RNA, 19 nt, Artificial Sequence
  Description of Artificial Sequence: Synthetic oligonucleotide
gggcaugugagucccuuaa

SEQ ID NO: 3109339 - RNA, 19 nt, Artificial Sequence
  Description of Artificial Sequence: Synthetic oligonucleotide
uggcacacaguaggugcuc

SEQ ID NO: 3109340 - RNA, 19 nt, Artificial Sequence
  Description of Artificial Sequence: Synthetic oligonucleotide
ucagcccagcagacuggau

SEQ ID NO: 3109341 - RNA, 19 nt, Artificial Sequence
  Description of Artificial Sequence: Synthetic oligonucleotide
ugcuccugaggugcugguc

SEQ ID NO: 3109342 - RNA, 19 nt, Artificial Sequence
  Description of Artificial Sequence: Synthetic oligonucleotide
acacgcggggaggagguau

SEQ ID NO: 3109343 - RNA, 19 nt, Artificial Sequence
  Description of Artificial Sequence: Synthetic oligonucleotide
ccugaaugccucacuguca

SEQ ID NO: 3109344 - RNA, 19 nt, Artificial Sequence
  Description of Artificial Sequence: Synthetic oligonucleotide
guccgcugugggcauguga

SEQ ID NO: 3109345 - RNA, 19 nt, Artificial Sequence
  Description of Artificial Sequence: Synthetic oligonucleotide
ggcacacaguaggugcucc

SEQ ID NO: 3109346 - RNA, 19 nt, Artificial Sequence
  Description of Artificial Sequence: Synthetic oligonucleotide
gucuauaaucacagauccu

SEQ ID NO: 3109347 - RNA, 19 nt, Artificial Sequence
  Description of Artificial Sequence: Synthetic oligonucleotide
cuggcacacaguaggugcu

SEQ ID NO: 3109348 - RNA, 19 nt, Artificial Sequence
  Description of Artificial Sequence: Synthetic oligonucleotide
gaggagguauaaagugccu

SEQ ID NO: 3109349 - RNA, 19 nt, Artificial Sequence
  Description of Artificial Sequence: Synthetic oligonucleotide
cccagcagacuggauagac

SEQ ID NO: 3109350 - RNA, 19 nt, Artificial Sequence
  Description of Artificial Sequence: Synthetic oligonucleotide
cagugggcauggucuauaa

SEQ ID NO: 3109351 - RNA, 19 nt, Artificial Sequence
  Description of Artificial Sequence: Synthetic oligonucleotide
gcaccugguagguccgcug

SEQ ID NO: 3109352 - RNA, 19 nt, Artificial Sequence
  Description of Artificial Sequence: Synthetic oligonucleotide
auucccuaaccagcauaua

SEQ ID NO: 3109353 - RNA, 19 nt, Artificial Sequence
  Description of Artificial Sequence: Synthetic oligonucleotide
agguccgcugugggcaugu

SEQ ID NO: 3109354 - RNA, 19 nt, Artificial Sequence
  Description of Artificial Sequence: Synthetic oligonucleotide
guccccacugcaccuggua

SEQ ID NO: 3109355 - RNA, 19 nt, Artificial Sequence
  Description of Artificial Sequence: Synthetic oligonucleotide
aggugcuccugaggugcug

SEQ ID NO: 3109356 - RNA, 19 nt, Artificial Sequence
  Description of Artificial Sequence: Synthetic oligonucleotide
uagguccgcugugggcaug

SEQ ID NO: 3109357 - RNA, 19 nt, Artificial Sequence
  Description of Artificial Sequence: Synthetic oligonucleotide
gccuggcacacaguaggug

SEQ ID NO: 3109358 - RNA, 19 nt, Artificial Sequence
  Description of Artificial Sequence: Synthetic oligonucleotide
caccugguagguccgcugu

SEQ ID NO: 3109359 - RNA, 19 nt, Artificial Sequence
  Description of Artificial Sequence: Synthetic oligonucleotide
ccuuaaccugaaugccuca

SEQ ID NO: 3109360 - RNA, 19 nt, Artificial Sequence
  Description of Artificial Sequence: Synthetic oligonucleotide
cugcaccugguagguccgc

SEQ ID NO: 3109361 - RNA, 19 nt, Artificial Sequence
  Description of Artificial Sequence: Synthetic oligonucleotide
cgccccucuccccaguggg

SEQ ID NO: 3109362 - RNA, 19 nt, Artificial Sequence
  Description of Artificial Sequence: Synthetic oligonucleotide
cucucucucucucucucuu

SEQ ID NO: 3109363 - RNA, 19 nt, Artificial Sequence
  Description of Artificial Sequence: Synthetic oligonucleotide
gugagucccuuaaccugaa

SEQ ID NO: 3109364 - RNA, 19 nt, Artificial Sequence
  Description of Artificial Sequence: Synthetic oligonucleotide
cacgcggggaggagguaua

SEQ ID NO: 3109365 - RNA, 19 nt, Artificial Sequence
  Description of Artificial Sequence: Synthetic oligonucleotide
cgcugugggcaugugaguc

SEQ ID NO: 3109366 - RNA, 19 nt, Artificial Sequence
  Description of Artificial Sequence: Synthetic oligonucleotide
aguccccacugcaccuggu

SEQ ID NO: 3109367 - RNA, 19 nt, Artificial Sequence
  Description of Artificial Sequence: Synthetic oligonucleotide
guagguccgcugugggcau

SEQ ID NO: 3109368 - RNA, 19 nt, Artificial Sequence
  Description of Artificial Sequence: Synthetic oligonucleotide
acgcggggaggagguauaa

SEQ ID NO: 3109369 - RNA, 19 nt, Artificial Sequence
  Description of Artificial Sequence: Synthetic oligonucleotide
gcacacaguaggugcuccu

SEQ ID NO: 3109370 - RNA, 19 nt, Artificial Sequence
  Description of Artificial Sequence: Synthetic oligonucleotide
gugggcaugugagucccuu

SEQ ID NO: 3109371 - RNA, 19 nt, Artificial Sequence
  Description of Artificial Sequence: Synthetic oligonucleotide
gugcuccugaggugcuggu

SEQ ID NO: 3109372 - RNA, 19 nt, Artificial Sequence
  Description of Artificial Sequence: Synthetic oligonucleotide
gccucacugucagcccagc

SEQ ID NO: 3109373 - RNA, 19 nt, Artificial Sequence
  Description of Artificial Sequence: Synthetic oligonucleotide
ccucacugucagcccagca

SEQ ID NO: 3109374 - RNA, 19 nt, Artificial Sequence
  Description of Artificial Sequence: Synthetic oligonucleotide
cggggaggagguauaaagu

SEQ ID NO: 3109375 - RNA, 19 nt, Artificial Sequence
  Description of Artificial Sequence: Synthetic oligonucleotide
ccucuccccagugggcaug

SEQ ID NO: 3109376 - RNA, 19 nt, Artificial Sequence
  Description of Artificial Sequence: Synthetic oligonucleotide
gacacgcggggaggaggua

SEQ ID NO: 3109377 - RNA, 19 nt, Artificial Sequence
  Description of Artificial Sequence: Synthetic oligonucleotide
gccccucuccccagugggc

SEQ ID NO: 3109378 - RNA, 19 nt, Artificial Sequence
  Description of Artificial Sequence: Synthetic oligonucleotide
ccccucuccccagugggca

SEQ ID NO: 3109379 - RNA, 19 nt, Artificial Sequence
  Description of Artificial Sequence: Synthetic oligonucleotide
ccagugggcauggucuaua

SEQ ID NO: 3109380 - RNA, 19 nt, Artificial Sequence
  Description of Artificial Sequence: Synthetic oligonucleotide
cccgccccucuccccagug

SEQ ID NO: 3109381 - RNA, 19 nt, Artificial Sequence
  Description of Artificial Sequence: Synthetic oligonucleotide
gguccgcugugggcaugug

SEQ ID NO: 3109382 - RNA, 19 nt, Artificial Sequence
  Description of Artificial Sequence: Synthetic oligonucleotide
cccacugcaccugguaggu

SEQ ID NO: 3109383 - RNA, 19 nt, Artificial Sequence
  Description of Artificial Sequence: Synthetic oligonucleotide
gcccagcagacuggauaga

SEQ ID NO: 3109384 - RNA, 19 nt, Artificial Sequence
  Description of Artificial Sequence: Synthetic oligonucleotide
ccccagugggcauggucua

SEQ ID NO: 3109385 - RNA, 19 nt, Artificial Sequence
  Description of Artificial Sequence: Synthetic oligonucleotide
ccacugcaccugguagguc

SEQ ID NO: 3109386 - RNA, 19 nt, Artificial Sequence
  Description of Artificial Sequence: Synthetic oligonucleotide
ccgcugugggcaugugagu

SEQ ID NO: 3109387 - RNA, 19 nt, Artificial Sequence
  Description of Artificial Sequence: Synthetic oligonucleotide
cgcggggaggagguauaaa

SEQ ID NO: 3109388 - RNA, 19 nt, Artificial Sequence
  Description of Artificial Sequence: Synthetic oligonucleotide
cccucuccccagugggcau

SEQ ID NO: 3109389 - RNA, 19 nt, Artificial Sequence
  Description of Artificial Sequence: Synthetic oligonucleotide
cccagugggcauggucuau

SEQ ID NO: 3109390 - RNA, 19 nt, Artificial Sequence
  Description of Artificial Sequence: Synthetic oligonucleotide
ccccgccccucuccccagu

SEQ ID NO: 3109391 - RNA, 19 nt, Artificial Sequence
  Description of Artificial Sequence: Synthetic oligonucleotide
  modified_base (16)..(16): a, c, u, g, unknown or other
acagaagaacuucuunucc

SEQ ID NO: 3109392 - RNA, 19 nt, Artificial Sequence
  Description of Artificial Sequence: Synthetic oligonucleotide
aagucaucaggucugcugc

SEQ ID NO: 3109393 - RNA, 19 nt, Artificial Sequence
  Description of Artificial Sequence: Synthetic oligonucleotide
aaucuuaagcuguuccacc

SEQ ID NO: 3109394 - RNA, 19 nt, Artificial Sequence
  Description of Artificial Sequence: Synthetic oligonucleotide
aucacaguaagucaucagg

SEQ ID NO: 3109395 - RNA, 19 nt, Artificial Sequence
  Description of Artificial Sequence: Synthetic oligonucleotide
uuggccaauacucauagug

SEQ ID NO: 3109396 - RNA, 19 nt, Artificial Sequence
  Description of Artificial Sequence: Synthetic oligonucleotide
  modified_base (14)..(14): a, c, u, g, unknown or other
agaagaacuucuunucccg

SEQ ID NO: 3109397 - RNA, 19 nt, Artificial Sequence
  Description of Artificial Sequence: Synthetic oligonucleotide
  modified_base (9)..(9): a, c, u, g, unknown or other
aacuucuunucccggaagg

SEQ ID NO: 3109398 - RNA, 19 nt, Artificial Sequence
  Description of Artificial Sequence: Synthetic oligonucleotide
accuuuauccggcacaagc

SEQ ID NO: 3109399 - RNA, 19 nt, Artificial Sequence
  Description of Artificial Sequence: Synthetic oligonucleotide
cauagugcuguucacaggg

SEQ ID NO: 3109400 - RNA, 19 nt, Artificial Sequence
  Description of Artificial Sequence: Synthetic oligonucleotide
uguuccaccaucuugcgug

SEQ ID NO: 3109401 - RNA, 19 nt, Artificial Sequence
  Description of Artificial Sequence: Synthetic oligonucleotide
uuuauccggcacaagcugg

SEQ ID NO: 3109402 - RNA, 19 nt, Artificial Sequence
  Description of Artificial Sequence: Synthetic oligonucleotide
uccccuuucauccugaaau

SEQ ID NO: 3109403 - RNA, 19 nt, Artificial Sequence
  Description of Artificial Sequence: Synthetic oligonucleotide
aauacucauagugcuguuc

SEQ ID NO: 3109404 - RNA, 19 nt, Artificial Sequence
  Description of Artificial Sequence: Synthetic oligonucleotide
acaguaagucaucaggucu

SEQ ID NO: 3109405 - RNA, 19 nt, Artificial Sequence
  Description of Artificial Sequence: Synthetic oligonucleotide
ucaaucuuaagcuguucca

SEQ ID NO: 3109406 - RNA, 19 nt, Artificial Sequence
  Description of Artificial Sequence: Synthetic oligonucleotide
cucaaucuuaagcuguucc

SEQ ID NO: 3109407 - RNA, 19 nt, Artificial Sequence
  Description of Artificial Sequence: Synthetic oligonucleotide
uucauccugaaauggcagg

SEQ ID NO: 3109408 - RNA, 19 nt, Artificial Sequence
  Description of Artificial Sequence: Synthetic oligonucleotide
  modified_base (15)..(15): a, c, u, g, unknown or other
cagaagaacuucuunuccc

SEQ ID NO: 3109409 - RNA, 19 nt, Artificial Sequence
  Description of Artificial Sequence: Synthetic oligonucleotide
uggccaauacucauagugc

SEQ ID NO: 3109410 - RNA, 19 nt, Artificial Sequence
  Description of Artificial Sequence: Synthetic oligonucleotide
auacucauagugcuguuca

SEQ ID NO: 3109411 - RNA, 19 nt, Artificial Sequence
  Description of Artificial Sequence: Synthetic oligonucleotide
cucauagugcuguucacag

SEQ ID NO: 3109412 - RNA, 19 nt, Artificial Sequence
  Description of Artificial Sequence: Synthetic oligonucleotide
uguagggucaguggggagg

SEQ ID NO: 3109413 - RNA, 19 nt, Artificial Sequence
  Description of Artificial Sequence: Synthetic oligonucleotide
  modified_base (12)..(12): a, c, u, g, unknown or other
aagaacuucuunucccgga

SEQ ID NO: 3109414 - RNA, 19 nt, Artificial Sequence
  Description of Artificial Sequence: Synthetic oligonucleotide
uuggacaccuuuauccggc

SEQ ID NO: 3109415 - RNA, 19 nt, Artificial Sequence
  Description of Artificial Sequence: Synthetic oligonucleotide
aagggguuuuccgaagugg

SEQ ID NO: 3109416 - RNA, 19 nt, Artificial Sequence
  Description of Artificial Sequence: Synthetic oligonucleotide
ugaaauggcaggcggcagc

SEQ ID NO: 3109417 - RNA, 19 nt, Artificial Sequence
  Description of Artificial Sequence: Synthetic oligonucleotide
uuaagcuguuccaccaucu

SEQ ID NO: 3109418 - RNA, 19 nt, Artificial Sequence
  Description of Artificial Sequence: Synthetic oligonucleotide
  modified_base (7)..(7): a, c, u, g, unknown or other
cuucuunucccggaagggg

SEQ ID NO: 3109419 - RNA, 19 nt, Artificial Sequence
  Description of Artificial Sequence: Synthetic oligonucleotide
  modified_base (6)..(6): a, c, u, g, unknown or other
uucuunucccggaaggggu

SEQ ID NO: 3109420 - RNA, 19 nt, Artificial Sequence
  Description of Artificial Sequence: Synthetic oligonucleotide
ugggauguagggucagugg

SEQ ID NO: 3109421 - RNA, 19 nt, Artificial Sequence
  Description of Artificial Sequence: Synthetic oligonucleotide
aauggcaggcggcagccug

SEQ ID NO: 3109422 - RNA, 19 nt, Artificial Sequence
  Description of Artificial Sequence: Synthetic oligonucleotide
auccugaaauggcaggcgg

SEQ ID NO: 3109423 - RNA, 19 nt, Artificial Sequence
  Description of Artificial Sequence: Synthetic oligonucleotide
ucauagugcuguucacagg

SEQ ID NO: 3109424 - RNA, 19 nt, Artificial Sequence
  Description of Artificial Sequence: Synthetic oligonucleotide
  modified_base (13)..(13): a, c, u, g, unknown or other
gaagaacuucuunucccgg

SEQ ID NO: 3109425 - RNA, 19 nt, Artificial Sequence
  Description of Artificial Sequence: Synthetic oligonucleotide
  modified_base (17)..(17): a, c, u, g, unknown or other
cacagaagaacuucuunuc

SEQ ID NO: 3109426 - RNA, 19 nt, Artificial Sequence
  Description of Artificial Sequence: Synthetic oligonucleotide
uucagaggagggcacagaa

SEQ ID NO: 3109427 - RNA, 19 nt, Artificial Sequence
  Description of Artificial Sequence: Synthetic oligonucleotide
aucuuaagcuguuccacca

SEQ ID NO: 3109428 - RNA, 19 nt, Artificial Sequence
  Description of Artificial Sequence: Synthetic oligonucleotide
uccgaagugggcacaggag

SEQ ID NO: 3109429 - RNA, 19 nt, Artificial Sequence
  Description of Artificial Sequence: Synthetic oligonucleotide
cuuuauccggcacaagcug

SEQ ID NO: 3109430 - RNA, 19 nt, Artificial Sequence
  Description of Artificial Sequence: Synthetic oligonucleotide
uuauccggcacaagcuggc

SEQ ID NO: 3109431 - RNA, 19 nt, Artificial Sequence
  Description of Artificial Sequence: Synthetic oligonucleotide
aguaagucaucaggucugc

SEQ ID NO: 3109432 - RNA, 19 nt, Artificial Sequence
  Description of Artificial Sequence: Synthetic oligonucleotide
caguaagucaucaggucug

SEQ ID NO: 3109433 - RNA, 19 nt, Artificial Sequence
  Description of Artificial Sequence: Synthetic oligonucleotide
ucagaggagggcacagaag

SEQ ID NO: 3109434 - RNA, 19 nt, Artificial Sequence
  Description of Artificial Sequence: Synthetic oligonucleotide
cuuucauccugaaauggca

SEQ ID NO: 3109435 - RNA, 19 nt, Artificial Sequence
  Description of Artificial Sequence: Synthetic oligonucleotide
acaagcgugggcaucacag

SEQ ID NO: 3109436 - RNA, 19 nt, Artificial Sequence
  Description of Artificial Sequence: Synthetic oligonucleotide
ucauccugaaauggcaggc

SEQ ID NO: 3109437 - RNA, 19 nt, Artificial Sequence
  Description of Artificial Sequence: Synthetic oligonucleotide
gggauguagggucaguggg

SEQ ID NO: 3109438 - RNA, 19 nt, Artificial Sequence
  Description of Artificial Sequence: Synthetic oligonucleotide
  modified_base (8)..(8): a, c, u, g, unknown or other
acuucuunucccggaaggg

SEQ ID NO: 3109439 - RNA, 19 nt, Artificial Sequence
  Description of Artificial Sequence: Synthetic oligonucleotide
uuccgaagugggcacagga

SEQ ID NO: 3109440 - RNA, 19 nt, Artificial Sequence
  Description of Artificial Sequence: Synthetic oligonucleotide
ucaucaggucugcugcugc

SEQ ID NO: 3109441 - RNA, 19 nt, Artificial Sequence
  Description of Artificial Sequence: Synthetic oligonucleotide
caaucuuaagcuguuccac

SEQ ID NO: 3109442 - RNA, 19 nt, Artificial Sequence
  Description of Artificial Sequence: Synthetic oligonucleotide
gacaccuuuauccggcaca

SEQ ID NO: 3109443 - RNA, 19 nt, Artificial Sequence
  Description of Artificial Sequence: Synthetic oligonucleotide
uccugaaauggcaggcggc

SEQ ID NO: 3109444 - RNA, 19 nt, Artificial Sequence
  Description of Artificial Sequence: Synthetic oligonucleotide
cagaggagggcacagaaga

SEQ ID NO: 3109445 - RNA, 19 nt, Artificial Sequence
  Description of Artificial Sequence: Synthetic oligonucleotide
gugggcaucacaguaaguc

SEQ ID NO: 3109446 - RNA, 19 nt, Artificial Sequence
  Description of Artificial Sequence: Synthetic oligonucleotide
uagugcuguucacaggggu

SEQ ID NO: 3109447 - RNA, 19 nt, Artificial Sequence
  Description of Artificial Sequence: Synthetic oligonucleotide
gaagggguuuuccgaagug

SEQ ID NO: 3109448 - RNA, 19 nt, Artificial Sequence
  Description of Artificial Sequence: Synthetic oligonucleotide
cacaguaagucaucagguc

SEQ ID NO: 3109449 - RNA, 19 nt, Artificial Sequence
  Description of Artificial Sequence: Synthetic oligonucleotide
gaaauggcaggcggcagcc

SEQ ID NO: 3109450 - RNA, 19 nt, Artificial Sequence
  Description of Artificial Sequence: Synthetic oligonucleotide
  modified_base (11)..(11): a, c, u, g, unknown or other
agaacuucuunucccggaa

SEQ ID NO: 3109451 - RNA, 19 nt, Artificial Sequence
  Description of Artificial Sequence: Synthetic oligonucleotide
ucccggaagggguuuuccg

SEQ ID NO: 3109452 - RNA, 19 nt, Artificial Sequence
  Description of Artificial Sequence: Synthetic oligonucleotide
caucacaguaagucaucag

SEQ ID NO: 3109453 - RNA, 19 nt, Artificial Sequence
  Description of Artificial Sequence: Synthetic oligonucleotide
aagcgugggcaucacagua

SEQ ID NO: 3109454 - RNA, 19 nt, Artificial Sequence
  Description of Artificial Sequence: Synthetic oligonucleotide
agggguuuuccgaaguggg

SEQ ID NO: 3109455 - RNA, 19 nt, Artificial Sequence
  Description of Artificial Sequence: Synthetic oligonucleotide
gcuggccucaaucuuaagc

SEQ ID NO: 3109456 - RNA, 19 nt, Artificial Sequence
  Description of Artificial Sequence: Synthetic oligonucleotide
ggcacaggagugaugaggg

SEQ ID NO: 3109457 - RNA, 19 nt, Artificial Sequence
  Description of Artificial Sequence: Synthetic oligonucleotide
uuuuccgaagugggcacag

SEQ ID NO: 3109458 - RNA, 19 nt, Artificial Sequence
  Description of Artificial Sequence: Synthetic oligonucleotide
ucuucagaggagggcacag

SEQ ID NO: 3109459 - RNA, 19 nt, Artificial Sequence
  Description of Artificial Sequence: Synthetic oligonucleotide
ggggucuccccuuucaucc

SEQ ID NO: 3109460 - RNA, 19 nt, Artificial Sequence
  Description of Artificial Sequence: Synthetic oligonucleotide
ucuuaagcuguuccaccau

SEQ ID NO: 3109461 - RNA, 19 nt, Artificial Sequence
  Description of Artificial Sequence: Synthetic oligonucleotide
uggccucaaucuuaagcug

SEQ ID NO: 3109462 - RNA, 19 nt, Artificial Sequence
  Description of Artificial Sequence: Synthetic oligonucleotide
gcuuggccaauacucauag

SEQ ID NO: 3109463 - RNA, 19 nt, Artificial Sequence
  Description of Artificial Sequence: Synthetic oligonucleotide
agugcuguucacagggguc

SEQ ID NO: 3109464 - RNA, 19 nt, Artificial Sequence
  Description of Artificial Sequence: Synthetic oligonucleotide
aggggucuccccuuucauc

SEQ ID NO: 3109465 - RNA, 19 nt, Artificial Sequence
  Description of Artificial Sequence: Synthetic oligonucleotide
ccuuucauccugaaauggc

SEQ ID NO: 3109466 - RNA, 19 nt, Artificial Sequence
  Description of Artificial Sequence: Synthetic oligonucleotide
cagccugggauguaggguc

SEQ ID NO: 3109467 - RNA, 19 nt, Artificial Sequence
  Description of Artificial Sequence: Synthetic oligonucleotide
gaggagggcacagaagaac

SEQ ID NO: 3109468 - RNA, 19 nt, Artificial Sequence
  Description of Artificial Sequence: Synthetic oligonucleotide
cauccugaaauggcaggcg

SEQ ID NO: 3109469 - RNA, 19 nt, Artificial Sequence
  Description of Artificial Sequence: Synthetic oligonucleotide
acucauagugcuguucaca

SEQ ID NO: 3109470 - RNA, 19 nt, Artificial Sequence
  Description of Artificial Sequence: Synthetic oligonucleotide
gauguagggucagugggga

SEQ ID NO: 3109471 - RNA, 19 nt, Artificial Sequence
  Description of Artificial Sequence: Synthetic oligonucleotide
accaucuugcgugcuuggc

SEQ ID NO: 3109472 - RNA, 19 nt, Artificial Sequence
  Description of Artificial Sequence: Synthetic oligonucleotide
  modified_base (5)..(5): a, c, u, g, unknown or other
ucuunucccggaagggguu

SEQ ID NO: 3109473 - RNA, 19 nt, Artificial Sequence
  Description of Artificial Sequence: Synthetic oligonucleotide
guagggucaguggggaggg

SEQ ID NO: 3109474 - RNA, 19 nt, Artificial Sequence
  Description of Artificial Sequence: Synthetic oligonucleotide
uacucauagugcuguucac

SEQ ID NO: 3109475 - RNA, 19 nt, Artificial Sequence
  Description of Artificial Sequence: Synthetic oligonucleotide
caucaggucugcugcugcc

SEQ ID NO: 3109476 - RNA, 19 nt, Artificial Sequence
  Description of Artificial Sequence: Synthetic oligonucleotide
gugggcacaggagugauga

SEQ ID NO: 3109477 - RNA, 19 nt, Artificial Sequence
  Description of Artificial Sequence: Synthetic oligonucleotide
ugcuuggccaauacucaua

SEQ ID NO: 3109478 - RNA, 19 nt, Artificial Sequence
  Description of Artificial Sequence: Synthetic oligonucleotide
ugcgugcuuggccaauacu

SEQ ID NO: 3109479 - RNA, 19 nt, Artificial Sequence
  Description of Artificial Sequence: Synthetic oligonucleotide
uaagcuguuccaccaucuu

SEQ ID NO: 3109480 - RNA, 19 nt, Artificial Sequence
  Description of Artificial Sequence: Synthetic oligonucleotide
uccggcacaagcuggccuc

SEQ ID NO: 3109481 - RNA, 19 nt, Artificial Sequence
  Description of Artificial Sequence: Synthetic oligonucleotide
uguucacaggggucucccc

SEQ ID NO: 3109482 - RNA, 19 nt, Artificial Sequence
  Description of Artificial Sequence: Synthetic oligonucleotide
acaagcuggccucaaucuu

SEQ ID NO: 3109483 - RNA, 19 nt, Artificial Sequence
  Description of Artificial Sequence: Synthetic oligonucleotide
ggauguagggucagugggg

SEQ ID NO: 3109484 - RNA, 19 nt, Artificial Sequence
  Description of Artificial Sequence: Synthetic oligonucleotide
aggagggcacagaagaacu

SEQ ID NO: 3109485 - RNA, 19 nt, Artificial Sequence
  Description of Artificial Sequence: Synthetic oligonucleotide
auagugcuguucacagggg

SEQ ID NO: 3109486 - RNA, 19 nt, Artificial Sequence
  Description of Artificial Sequence: Synthetic oligonucleotide
uuuccgaagugggcacagg

SEQ ID NO: 3109487 - RNA, 19 nt, Artificial Sequence
  Description of Artificial Sequence: Synthetic oligonucleotide
acaggggucuccccuuuca

SEQ ID NO: 3109488 - RNA, 19 nt, Artificial Sequence
  Description of Artificial Sequence: Synthetic oligonucleotide
agucaucaggucugcugcu

SEQ ID NO: 3109489 - RNA, 19 nt, Artificial Sequence
  Description of Artificial Sequence: Synthetic oligonucleotide
guccucacaagcgugggca

SEQ ID NO: 3109490 - RNA, 19 nt, Artificial Sequence
  Description of Artificial Sequence: Synthetic oligonucleotide
cugggauguagggucagug

SEQ ID NO: 3109491 - RNA, 19 nt, Artificial Sequence
  Description of Artificial Sequence: Synthetic oligonucleotide
ugccuuggacaccuuuauc

SEQ ID NO: 3109492 - RNA, 19 nt, Artificial Sequence
  Description of Artificial Sequence: Synthetic oligonucleotide
uugcgugcuuggccaauac

SEQ ID NO: 3109493 - RNA, 19 nt, Artificial Sequence
  Description of Artificial Sequence: Synthetic oligonucleotide
gaagugggcacaggaguga

SEQ ID NO: 3109494 - RNA, 19 nt, Artificial Sequence
  Description of Artificial Sequence: Synthetic oligonucleotide
cuguucacaggggucuccc

SEQ ID NO: 3109495 - RNA, 19 nt, Artificial Sequence
  Description of Artificial Sequence: Synthetic oligonucleotide
gguuuuccgaagugggcac

SEQ ID NO: 3109496 - RNA, 19 nt, Artificial Sequence
  Description of Artificial Sequence: Synthetic oligonucleotide
caagcuggccucaaucuua

SEQ ID NO: 3109497 - RNA, 19 nt, Artificial Sequence
  Description of Artificial Sequence: Synthetic oligonucleotide
auguagggucaguggggag

SEQ ID NO: 3109498 - RNA, 19 nt, Artificial Sequence
  Description of Artificial Sequence: Synthetic oligonucleotide
uggacaccuuuauccggca

SEQ ID NO: 3109499 - RNA, 19 nt, Artificial Sequence
  Description of Artificial Sequence: Synthetic oligonucleotide
uucacaggggucuccccuu

SEQ ID NO: 3109500 - RNA, 19 nt, Artificial Sequence
  Description of Artificial Sequence: Synthetic oligonucleotide
auccggcacaagcuggccu

SEQ ID NO: 3109501 - RNA, 19 nt, Artificial Sequence
  Description of Artificial Sequence: Synthetic oligonucleotide
acaccuuuauccggcacaa

SEQ ID NO: 3109502 - RNA, 19 nt, Artificial Sequence
  Description of Artificial Sequence: Synthetic oligonucleotide
agggcacagaagaacuucu

SEQ ID NO: 3109503 - RNA, 19 nt, Artificial Sequence
  Description of Artificial Sequence: Synthetic oligonucleotide
gcuguuccaccaucuugcg

SEQ ID NO: 3109504 - RNA, 19 nt, Artificial Sequence
  Description of Artificial Sequence: Synthetic oligonucleotide
cugaaauggcaggcggcag

SEQ ID NO: 3109505 - RNA, 19 nt, Artificial Sequence
  Description of Artificial Sequence: Synthetic oligonucleotide
aagugggcacaggagugau

SEQ ID NO: 3109506 - RNA, 19 nt, Artificial Sequence
  Description of Artificial Sequence: Synthetic oligonucleotide
cacaagcuggccucaaucu

SEQ ID NO: 3109507 - RNA, 19 nt, Artificial Sequence
  Description of Artificial Sequence: Synthetic oligonucleotide
uauccggcacaagcuggcc

SEQ ID NO: 3109508 - RNA, 19 nt, Artificial Sequence
  Description of Artificial Sequence: Synthetic oligonucleotide
gucaucaggucugcugcug

SEQ ID NO: 3109509 - RNA, 19 nt, Artificial Sequence
  Description of Artificial Sequence: Synthetic oligonucleotide
ugggcacaggagugaugag

SEQ ID NO: 3109510 - RNA, 19 nt, Artificial Sequence
  Description of Artificial Sequence: Synthetic oligonucleotide
cucacaagcgugggcauca

SEQ ID NO: 3109511 - RNA, 19 nt, Artificial Sequence
  Description of Artificial Sequence: Synthetic oligonucleotide
aagcuggccucaaucuuaa

SEQ ID NO: 3109512 - RNA, 19 nt, Artificial Sequence
  Description of Artificial Sequence: Synthetic oligonucleotide
cccuuucauccugaaaugg

SEQ ID NO: 3109513 - RNA, 19 nt, Artificial Sequence
  Description of Artificial Sequence: Synthetic oligonucleotide
gcacaagcuggccucaauc

SEQ ID NO: 3109514 - RNA, 19 nt, Artificial Sequence
  Description of Artificial Sequence: Synthetic oligonucleotide
  modified_base (18)..(18): a, c, u, g, unknown or other
gcacagaagaacuucuunu

SEQ ID NO: 3109515 - RNA, 19 nt, Artificial Sequence
  Description of Artificial Sequence: Synthetic oligonucleotide
ugcugccuuggacaccuuu

SEQ ID NO: 3109516 - RNA, 19 nt, Artificial Sequence
  Description of Artificial Sequence: Synthetic oligonucleotide
gcgugcuuggccaauacuc

SEQ ID NO: 3109517 - RNA, 19 nt, Artificial Sequence
  Description of Artificial Sequence: Synthetic oligonucleotide
  modified_base (19)..(19): a, c, u, g, unknown or other
ggcacagaagaacuucuun

SEQ ID NO: 3109518 - RNA, 19 nt, Artificial Sequence
  Description of Artificial Sequence: Synthetic oligonucleotide
ggccaauacucauagugcu

SEQ ID NO: 3109519 - RNA, 19 nt, Artificial Sequence
  Description of Artificial Sequence: Synthetic oligonucleotide
gcgugggcaucacaguaag

SEQ ID NO: 3109520 - RNA, 19 nt, Artificial Sequence
  Description of Artificial Sequence: Synthetic oligonucleotide
aucaggucugcugcugccu

SEQ ID NO: 3109521 - RNA, 19 nt, Artificial Sequence
  Description of Artificial Sequence: Synthetic oligonucleotide
auggcaggcggcagccugg

SEQ ID NO: 3109522 - RNA, 19 nt, Artificial Sequence
  Description of Artificial Sequence: Synthetic oligonucleotide
uccucacaagcgugggcau

SEQ ID NO: 3109523 - RNA, 19 nt, Artificial Sequence
  Description of Artificial Sequence: Synthetic oligonucleotide
aaauggcaggcggcagccu

SEQ ID NO: 3109524 - RNA, 19 nt, Artificial Sequence
  Description of Artificial Sequence: Synthetic oligonucleotide
gggguccucacaagcgugg

SEQ ID NO: 3109525 - RNA, 19 nt, Artificial Sequence
  Description of Artificial Sequence: Synthetic oligonucleotide
caggucugcugcugccuug

SEQ ID NO: 3109526 - RNA, 19 nt, Artificial Sequence
  Description of Artificial Sequence: Synthetic oligonucleotide
ucacaggggucuccccuuu

SEQ ID NO: 3109527 - RNA, 19 nt, Artificial Sequence
  Description of Artificial Sequence: Synthetic oligonucleotide
uggcaggcggcagccuggg

SEQ ID NO: 3109528 - RNA, 19 nt, Artificial Sequence
  Description of Artificial Sequence: Synthetic oligonucleotide
ucuccccuuucauccugaa

SEQ ID NO: 3109529 - RNA, 19 nt, Artificial Sequence
  Description of Artificial Sequence: Synthetic oligonucleotide
ccccuuucauccugaaaug

SEQ ID NO: 3109530 - RNA, 19 nt, Artificial Sequence
  Description of Artificial Sequence: Synthetic oligonucleotide
gguccucacaagcgugggc

SEQ ID NO: 3109531 - RNA, 19 nt, Artificial Sequence
  Description of Artificial Sequence: Synthetic oligonucleotide
agaggagggcacagaagaa

SEQ ID NO: 3109532 - RNA, 19 nt, Artificial Sequence
  Description of Artificial Sequence: Synthetic oligonucleotide
  modified_base (2)..(2): a, c, u, g, unknown or other
unucccggaagggguuuuc

SEQ ID NO: 3109533 - RNA, 19 nt, Artificial Sequence
  Description of Artificial Sequence: Synthetic oligonucleotide
agcgugggcaucacaguaa

SEQ ID NO: 3109534 - RNA, 19 nt, Artificial Sequence
  Description of Artificial Sequence: Synthetic oligonucleotide
gggguuuuccgaagugggc

SEQ ID NO: 3109535 - RNA, 19 nt, Artificial Sequence
  Description of Artificial Sequence: Synthetic oligonucleotide
ggucuccccuuucauccug

SEQ ID NO: 3109536 - RNA, 19 nt, Artificial Sequence
  Description of Artificial Sequence: Synthetic oligonucleotide
agcuggccucaaucuuaag

SEQ ID NO: 3109537 - RNA, 19 nt, Artificial Sequence
  Description of Artificial Sequence: Synthetic oligonucleotide
  modified_base (3)..(3): a, c, u, g, unknown or other
uunucccggaagggguuuu

SEQ ID NO: 3109538 - RNA, 19 nt, Artificial Sequence
  Description of Artificial Sequence: Synthetic oligonucleotide
aucuugcgugcuuggccaa

SEQ ID NO: 3109539 - RNA, 19 nt, Artificial Sequence
  Description of Artificial Sequence: Synthetic oligonucleotide
ucuugcgugcuuggccaau

SEQ ID NO: 3109540 - RNA, 19 nt, Artificial Sequence
  Description of Artificial Sequence: Synthetic oligonucleotide
uagggucaguggggagggg

SEQ ID NO: 3109541 - RNA, 19 nt, Artificial Sequence
  Description of Artificial Sequence: Synthetic oligonucleotide
gugcuguucacaggggucu

SEQ ID NO: 3109542 - RNA, 19 nt, Artificial Sequence
  Description of Artificial Sequence: Synthetic oligonucleotide
ugcuguucacaggggucuc

SEQ ID NO: 3109543 - RNA, 19 nt, Artificial Sequence
  Description of Artificial Sequence: Synthetic oligonucleotide
ggcaucacaguaagucauc

SEQ ID NO: 3109544 - RNA, 19 nt, Artificial Sequence
  Description of Artificial Sequence: Synthetic oligonucleotide
ucacaagcgugggcaucac

SEQ ID NO: 3109545 - RNA, 19 nt, Artificial Sequence
  Description of Artificial Sequence: Synthetic oligonucleotide
ggacaccuuuauccggcac

SEQ ID NO: 3109546 - RNA, 19 nt, Artificial Sequence
  Description of Artificial Sequence: Synthetic oligonucleotide
cuucagaggagggcacaga

SEQ ID NO: 3109547 - RNA, 19 nt, Artificial Sequence
  Description of Artificial Sequence: Synthetic oligonucleotide
ggguccucacaagcguggg

SEQ ID NO: 3109548 - RNA, 19 nt, Artificial Sequence
  Description of Artificial Sequence: Synthetic oligonucleotide
ccugaaauggcaggcggca

SEQ ID NO: 3109549 - RNA, 19 nt, Artificial Sequence
  Description of Artificial Sequence: Synthetic oligonucleotide
caagcgugggcaucacagu

SEQ ID NO: 3109550 - RNA, 19 nt, Artificial Sequence
  Description of Artificial Sequence: Synthetic oligonucleotide
caccuuuauccggcacaag

SEQ ID NO: 3109551 - RNA, 19 nt, Artificial Sequence
  Description of Artificial Sequence: Synthetic oligonucleotide
ccaauacucauagugcugu

SEQ ID NO: 3109552 - RNA, 19 nt, Artificial Sequence
  Description of Artificial Sequence: Synthetic oligonucleotide
cacaagcgugggcaucaca

SEQ ID NO: 3109553 - RNA, 19 nt, Artificial Sequence
  Description of Artificial Sequence: Synthetic oligonucleotide
uuccaccaucuugcgugcu

SEQ ID NO: 3109554 - RNA, 19 nt, Artificial Sequence
  Description of Artificial Sequence: Synthetic oligonucleotide
cacaggggucuccccuuuc

SEQ ID NO: 3109555 - RNA, 19 nt, Artificial Sequence
  Description of Artificial Sequence: Synthetic oligonucleotide
gugcuuggccaauacucau

SEQ ID NO: 3109556 - RNA, 19 nt, Artificial Sequence
  Description of Artificial Sequence: Synthetic oligonucleotide
gcuguucacaggggucucc

SEQ ID NO: 3109557 - RNA, 19 nt, Artificial Sequence
  Description of Artificial Sequence: Synthetic oligonucleotide
cccggaagggguuuuccga

SEQ ID NO: 3109558 - RNA, 19 nt, Artificial Sequence
  Description of Artificial Sequence: Synthetic oligonucleotide
ccaccaucuugcgugcuug

SEQ ID NO: 3109559 - RNA, 19 nt, Artificial Sequence
  Description of Artificial Sequence: Synthetic oligonucleotide
gcggcagccugggauguag

SEQ ID NO: 3109560 - RNA, 19 nt, Artificial Sequence
  Description of Artificial Sequence: Synthetic oligonucleotide
ggccucaaucuuaagcugu

SEQ ID NO: 3109561 - RNA, 19 nt, Artificial Sequence
  Description of Artificial Sequence: Synthetic oligonucleotide
cugccuuggacaccuuuau

SEQ ID NO: 3109562 - RNA, 19 nt, Artificial Sequence
  Description of Artificial Sequence: Synthetic oligonucleotide
gucuccccuuucauccuga

SEQ ID NO: 3109563 - RNA, 19 nt, Artificial Sequence
  Description of Artificial Sequence: Synthetic oligonucleotide
cuuggccaauacucauagu

SEQ ID NO: 3109564 - RNA, 19 nt, Artificial Sequence
  Description of Artificial Sequence: Synthetic oligonucleotide
cggaagggguuuuccgaag

SEQ ID NO: 3109565 - RNA, 19 nt, Artificial Sequence
  Description of Artificial Sequence: Synthetic oligonucleotide
ccgaagugggcacaggagu

SEQ ID NO: 3109566 - RNA, 19 nt, Artificial Sequence
  Description of Artificial Sequence: Synthetic oligonucleotide
guaagucaucaggucugcu

SEQ ID NO: 3109567 - RNA, 19 nt, Artificial Sequence
  Description of Artificial Sequence: Synthetic oligonucleotide
cuugcgugcuuggccaaua

SEQ ID NO: 3109568 - RNA, 19 nt, Artificial Sequence
  Description of Artificial Sequence: Synthetic oligonucleotide
gcugccuuggacaccuuua

SEQ ID NO: 3109569 - RNA, 19 nt, Artificial Sequence
  Description of Artificial Sequence: Synthetic oligonucleotide
cuguuccaccaucuugcgu

SEQ ID NO: 3109570 - RNA, 19 nt, Artificial Sequence
  Description of Artificial Sequence: Synthetic oligonucleotide
aggcggcagccugggaugu

SEQ ID NO: 3109571 - RNA, 19 nt, Artificial Sequence
  Description of Artificial Sequence: Synthetic oligonucleotide
ccggaagggguuuuccgaa

SEQ ID NO: 3109572 - RNA, 19 nt, Artificial Sequence
  Description of Artificial Sequence: Synthetic oligonucleotide
caauacucauagugcuguu

SEQ ID NO: 3109573 - RNA, 19 nt, Artificial Sequence
  Description of Artificial Sequence: Synthetic oligonucleotide
  modified_base (4)..(4): a, c, u, g, unknown or other
cuunucccggaagggguuu

SEQ ID NO: 3109574 - RNA, 19 nt, Artificial Sequence
  Description of Artificial Sequence: Synthetic oligonucleotide
ccucacaagcgugggcauc

SEQ ID NO: 3109575 - RNA, 19 nt, Artificial Sequence
  Description of Artificial Sequence: Synthetic oligonucleotide
cggcagccugggauguagg

SEQ ID NO: 3109576 - RNA, 19 nt, Artificial Sequence
  Description of Artificial Sequence: Synthetic oligonucleotide
caggggucuccccuuucau

SEQ ID NO: 3109577 - RNA, 19 nt, Artificial Sequence
  Description of Artificial Sequence: Synthetic oligonucleotide
gggucuccccuuucauccu

SEQ ID NO: 3109578 - RNA, 19 nt, Artificial Sequence
  Description of Artificial Sequence: Synthetic oligonucleotide
ggcacaagcuggccucaau

SEQ ID NO: 3109579 - RNA, 19 nt, Artificial Sequence
  Description of Artificial Sequence: Synthetic oligonucleotide
gggcacagaagaacuucuu

SEQ ID NO: 3109580 - RNA, 19 nt, Artificial Sequence
  Description of Artificial Sequence: Synthetic oligonucleotide
ggcaggcggcagccuggga

SEQ ID NO: 3109581 - RNA, 19 nt, Artificial Sequence
  Description of Artificial Sequence: Synthetic oligonucleotide
ccggcacaagcuggccuca

SEQ ID NO: 3109582 - RNA, 19 nt, Artificial Sequence
  Description of Artificial Sequence: Synthetic oligonucleotide
ccugggauguagggucagu

SEQ ID NO: 3109583 - RNA, 19 nt, Artificial Sequence
  Description of Artificial Sequence: Synthetic oligonucleotide
cgugggcaucacaguaagu

SEQ ID NO: 3109584 - RNA, 19 nt, Artificial Sequence
  Description of Artificial Sequence: Synthetic oligonucleotide
ggcggcagccugggaugua

SEQ ID NO: 3109585 - RNA, 19 nt, Artificial Sequence
  Description of Artificial Sequence: Synthetic oligonucleotide
cggcacaagcuggccucaa

SEQ ID NO: 3109586 - RNA, 19 nt, Artificial Sequence
  Description of Artificial Sequence: Synthetic oligonucleotide
  modified_base (1)..(1): a, c, u, g, unknown or other
nucccggaagggguuuucc

SEQ ID NO: 3109587 - RNA, 19 nt, Artificial Sequence
  Description of Artificial Sequence: Synthetic oligonucleotide
aacaacuucucauggaccc

SEQ ID NO: 3109588 - RNA, 19 nt, Artificial Sequence
  Description of Artificial Sequence: Synthetic oligonucleotide
uaaaucaugagaaugggga

SEQ ID NO: 3109589 - RNA, 19 nt, Artificial Sequence
  Description of Artificial Sequence: Synthetic oligonucleotide
uggaugaugauguaaauca

SEQ ID NO: 3109590 - RNA, 19 nt, Artificial Sequence
  Description of Artificial Sequence: Synthetic oligonucleotide
gaaguuaucuacuaggaca

SEQ ID NO: 3109591 - RNA, 19 nt, Artificial Sequence
  Description of Artificial Sequence: Synthetic oligonucleotide
gaugauguaaaucaugaga

SEQ ID NO: 3109592 - RNA, 19 nt, Artificial Sequence
  Description of Artificial Sequence: Synthetic oligonucleotide
aauagggugaauagggugg

SEQ ID NO: 3109593 - RNA, 19 nt, Artificial Sequence
  Description of Artificial Sequence: Synthetic oligonucleotide
gauguaaaucaugagaaug

SEQ ID NO: 3109594 - RNA, 19 nt, Artificial Sequence
  Description of Artificial Sequence: Synthetic oligonucleotide
aauaggguggugaagaugu

SEQ ID NO: 3109595 - RNA, 19 nt, Artificial Sequence
  Description of Artificial Sequence: Synthetic oligonucleotide
auggggaugauauaccagg

SEQ ID NO: 3109596 - RNA, 19 nt, Artificial Sequence
  Description of Artificial Sequence: Synthetic oligonucleotide
cuggaaguuaucuacuagg

SEQ ID NO: 3109597 - RNA, 19 nt, Artificial Sequence
  Description of Artificial Sequence: Synthetic oligonucleotide
ucauccaaagugagcaugg

SEQ ID NO: 3109598 - RNA, 19 nt, Artificial Sequence
  Description of Artificial Sequence: Synthetic oligonucleotide
uaggccuuugagaagagcc

SEQ ID NO: 3109599 - RNA, 19 nt, Artificial Sequence
  Description of Artificial Sequence: Synthetic oligonucleotide
uugaggaagaugaaguacu

SEQ ID NO: 3109600 - RNA, 19 nt, Artificial Sequence
  Description of Artificial Sequence: Synthetic oligonucleotide
ucuacuaggacagcaauca

SEQ ID NO: 3109601 - RNA, 19 nt, Artificial Sequence
  Description of Artificial Sequence: Synthetic oligonucleotide
agagucauccaacaacuuc

SEQ ID NO: 3109602 - RNA, 19 nt, Artificial Sequence
  Description of Artificial Sequence: Synthetic oligonucleotide
uguaaaucaugagaauggg

SEQ ID NO: 3109603 - RNA, 19 nt, Artificial Sequence
  Description of Artificial Sequence: Synthetic oligonucleotide
gugaauagggugaauaggg

SEQ ID NO: 3109604 - RNA, 19 nt, Artificial Sequence
  Description of Artificial Sequence: Synthetic oligonucleotide
aaguuaucuacuaggacag

SEQ ID NO: 3109605 - RNA, 19 nt, Artificial Sequence
  Description of Artificial Sequence: Synthetic oligonucleotide
auguaaaucaugagaaugg

SEQ ID NO: 3109606 - RNA, 19 nt, Artificial Sequence
  Description of Artificial Sequence: Synthetic oligonucleotide
cuguccauguagaugaggg

SEQ ID NO: 3109607 - RNA, 19 nt, Artificial Sequence
  Description of Artificial Sequence: Synthetic oligonucleotide
uucucuaggccuuugagaa

SEQ ID NO: 3109608 - RNA, 19 nt, Artificial Sequence
  Description of Artificial Sequence: Synthetic oligonucleotide
uacuaggacagcaaucacc

SEQ ID NO: 3109609 - RNA, 19 nt, Artificial Sequence
  Description of Artificial Sequence: Synthetic oligonucleotide
gaauagggugaauagggug

SEQ ID NO: 3109610 - RNA, 19 nt, Artificial Sequence
  Description of Artificial Sequence: Synthetic oligonucleotide
uucucauggacccgggccg

SEQ ID NO: 3109611 - RNA, 19 nt, Artificial Sequence
  Description of Artificial Sequence: Synthetic oligonucleotide
ucuggaaguuaucuacuag

SEQ ID NO: 3109612 - RNA, 19 nt, Artificial Sequence
  Description of Artificial Sequence: Synthetic oligonucleotide
ucuagcuucacuuucucua

SEQ ID NO: 3109613 - RNA, 19 nt, Artificial Sequence
  Description of Artificial Sequence: Synthetic oligonucleotide
guugagcucugucagagag

SEQ ID NO: 3109614 - RNA, 19 nt, Artificial Sequence
  Description of Artificial Sequence: Synthetic oligonucleotide
uggaaguuaucuacuagga

SEQ ID NO: 3109615 - RNA, 19 nt, Artificial Sequence
  Description of Artificial Sequence: Synthetic oligonucleotide
agcuucacuuucucuaggc

SEQ ID NO: 3109616 - RNA, 19 nt, Artificial Sequence
  Description of Artificial Sequence: Synthetic oligonucleotide
aaguacuggaugaugaugu

SEQ ID NO: 3109617 - RNA, 19 nt, Artificial Sequence
  Description of Artificial Sequence: Synthetic oligonucleotide
gugagcauggugaauaggg

SEQ ID NO: 3109618 - RNA, 19 nt, Artificial Sequence
  Description of Artificial Sequence: Synthetic oligonucleotide
gacagcaaucaccagguug

SEQ ID NO: 3109619 - RNA, 19 nt, Artificial Sequence
  Description of Artificial Sequence: Synthetic oligonucleotide
aaucaugagaauggggaug

SEQ ID NO: 3109620 - RNA, 19 nt, Artificial Sequence
  Description of Artificial Sequence: Synthetic oligonucleotide
aaaucaugagaauggggau

SEQ ID NO: 3109621 - RNA, 19 nt, Artificial Sequence
  Description of Artificial Sequence: Synthetic oligonucleotide
gagaauggggaugauauac

SEQ ID NO: 3109622 - RNA, 19 nt, Artificial Sequence
  Description of Artificial Sequence: Synthetic oligonucleotide
uggugaauagggugaauag

SEQ ID NO: 3109623 - RNA, 19 nt, Artificial Sequence
  Description of Artificial Sequence: Synthetic oligonucleotide
ucauccaacaacuucucau

SEQ ID NO: 3109624 - RNA, 19 nt, Artificial Sequence
  Description of Artificial Sequence: Synthetic oligonucleotide
cuugguugagcucugucag

SEQ ID NO: 3109625 - RNA, 19 nt, Artificial Sequence
  Description of Artificial Sequence: Synthetic oligonucleotide
aaagugagcauggugaaua

SEQ ID NO: 3109626 - RNA, 19 nt, Artificial Sequence
  Description of Artificial Sequence: Synthetic oligonucleotide
uuucucuaggccuuugaga

SEQ ID NO: 3109627 - RNA, 19 nt, Artificial Sequence
  Description of Artificial Sequence: Synthetic oligonucleotide
ugaugauguaaaucaugag

SEQ ID NO: 3109628 - RNA, 19 nt, Artificial Sequence
  Description of Artificial Sequence: Synthetic oligonucleotide
augauguaaaucaugagaa

SEQ ID NO: 3109629 - RNA, 19 nt, Artificial Sequence
  Description of Artificial Sequence: Synthetic oligonucleotide
ugagggaccagucauccaa

SEQ ID NO: 3109630 - RNA, 19 nt, Artificial Sequence
  Description of Artificial Sequence: Synthetic oligonucleotide
uccauguagaugagggacc

SEQ ID NO: 3109631 - RNA, 19 nt, Artificial Sequence
  Description of Artificial Sequence: Synthetic oligonucleotide
agaauggggaugauauacc

SEQ ID NO: 3109632 - RNA, 19 nt, Artificial Sequence
  Description of Artificial Sequence: Synthetic oligonucleotide
ggaccagucauccaaagug

SEQ ID NO: 3109633 - RNA, 19 nt, Artificial Sequence
  Description of Artificial Sequence: Synthetic oligonucleotide
uuaucuacuaggacagcaa

SEQ ID NO: 3109634 - RNA, 19 nt, Artificial Sequence
  Description of Artificial Sequence: Synthetic oligonucleotide
auccaacaacuucucaugg

SEQ ID NO: 3109635 - RNA, 19 nt, Artificial Sequence
  Description of Artificial Sequence: Synthetic oligonucleotide
guaaaucaugagaaugggg

SEQ ID NO: 3109636 - RNA, 19 nt, Artificial Sequence
  Description of Artificial Sequence: Synthetic oligonucleotide
uagaugagggaccagucau

SEQ ID NO: 3109637 - RNA, 19 nt, Artificial Sequence
  Description of Artificial Sequence: Synthetic oligonucleotide
cauccaacaacuucucaug

SEQ ID NO: 3109638 - RNA, 19 nt, Artificial Sequence
  Description of Artificial Sequence: Synthetic oligonucleotide
ugaauagggugaauagggu

SEQ ID NO: 3109639 - RNA, 19 nt, Artificial Sequence
  Description of Artificial Sequence: Synthetic oligonucleotide
ugaggaagaugaaguacug

SEQ ID NO: 3109640 - RNA, 19 nt, Artificial Sequence
  Description of Artificial Sequence: Synthetic oligonucleotide
gagcauggugaauagggug

SEQ ID NO: 3109641 - RNA, 19 nt, Artificial Sequence
  Description of Artificial Sequence: Synthetic oligonucleotide
aagugagcauggugaauag

SEQ ID NO: 3109642 - RNA, 19 nt, Artificial Sequence
  Description of Artificial Sequence: Synthetic oligonucleotide
cuucucauggacccgggcc

SEQ ID NO: 3109643 - RNA, 19 nt, Artificial Sequence
  Description of Artificial Sequence: Synthetic oligonucleotide
acuaggacagcaaucacca

SEQ ID NO: 3109644 - RNA, 19 nt, Artificial Sequence
  Description of Artificial Sequence: Synthetic oligonucleotide
cuagcuucacuuucucuag

SEQ ID NO: 3109645 - RNA, 19 nt, Artificial Sequence
  Description of Artificial Sequence: Synthetic oligonucleotide
augagaauggggaugauau

SEQ ID NO: 3109646 - RNA, 19 nt, Artificial Sequence
  Description of Artificial Sequence: Synthetic oligonucleotide
uuucucuagcuucacuuuc

SEQ ID NO: 3109647 - RNA, 19 nt, Artificial Sequence
  Description of Artificial Sequence: Synthetic oligonucleotide
gggaugauauaccaggccc

SEQ ID NO: 3109648 - RNA, 19 nt, Artificial Sequence
  Description of Artificial Sequence: Synthetic oligonucleotide
ugucagagagucauccaac

SEQ ID NO: 3109649 - RNA, 19 nt, Artificial Sequence
  Description of Artificial Sequence: Synthetic oligonucleotide
ugcccugcuguccauguag

SEQ ID NO: 3109650 - RNA, 19 nt, Artificial Sequence
  Description of Artificial Sequence: Synthetic oligonucleotide
gaauggggaugauauacca

SEQ ID NO: 3109651 - RNA, 19 nt, Artificial Sequence
  Description of Artificial Sequence: Synthetic oligonucleotide
gcaaucaccagguugagga

SEQ ID NO: 3109652 - RNA, 19 nt, Artificial Sequence
  Description of Artificial Sequence: Synthetic oligonucleotide
aauggggaugauauaccag

SEQ ID NO: 3109653 - RNA, 19 nt, Artificial Sequence
  Description of Artificial Sequence: Synthetic oligonucleotide
gaugaaguacuggaugaug

SEQ ID NO: 3109654 - RNA, 19 nt, Artificial Sequence
  Description of Artificial Sequence: Synthetic oligonucleotide
acagcaaucaccagguuga

SEQ ID NO: 3109655 - RNA, 19 nt, Artificial Sequence
  Description of Artificial Sequence: Synthetic oligonucleotide
gaugagggaccagucaucc

SEQ ID NO: 3109656 - RNA, 19 nt, Artificial Sequence
  Description of Artificial Sequence: Synthetic oligonucleotide
cuuucucuaggccuuugag

SEQ ID NO: 3109657 - RNA, 19 nt, Artificial Sequence
  Description of Artificial Sequence: Synthetic oligonucleotide
uguagaugagggaccaguc

SEQ ID NO: 3109658 - RNA, 19 nt, Artificial Sequence
  Description of Artificial Sequence: Synthetic oligonucleotide
uucucuagcuucacuuucu

SEQ ID NO: 3109659 - RNA, 19 nt, Artificial Sequence
  Description of Artificial Sequence: Synthetic oligonucleotide
cugcuguccauguagauga

SEQ ID NO: 3109660 - RNA, 19 nt, Artificial Sequence
  Description of Artificial Sequence: Synthetic oligonucleotide
caacaacuucucauggacc

SEQ ID NO: 3109661 - RNA, 19 nt, Artificial Sequence
  Description of Artificial Sequence: Synthetic oligonucleotide
ugagcauggugaauagggu

SEQ ID NO: 3109662 - RNA, 19 nt, Artificial Sequence
  Description of Artificial Sequence: Synthetic oligonucleotide
gaggaagaugaaguacugg

SEQ ID NO: 3109663 - RNA, 19 nt, Artificial Sequence
  Description of Artificial Sequence: Synthetic oligonucleotide
ugagcucugucagagaguc

SEQ ID NO: 3109664 - RNA, 19 nt, Artificial Sequence
  Description of Artificial Sequence: Synthetic oligonucleotide
ugguugagcucugucagag

SEQ ID NO: 3109665 - RNA, 19 nt, Artificial Sequence
  Description of Artificial Sequence: Synthetic oligonucleotide
uggggaugauauaccaggc

SEQ ID NO: 3109666 - RNA, 19 nt, Artificial Sequence
  Description of Artificial Sequence: Synthetic oligonucleotide
ugauguaaaucaugagaau

SEQ ID NO: 3109667 - RNA, 19 nt, Artificial Sequence
  Description of Artificial Sequence: Synthetic oligonucleotide
uccaacaacuucucaugga

SEQ ID NO: 3109668 - RNA, 19 nt, Artificial Sequence
  Description of Artificial Sequence: Synthetic oligonucleotide
ggugaauagggugaauagg

SEQ ID NO: 3109669 - RNA, 19 nt, Artificial Sequence
  Description of Artificial Sequence: Synthetic oligonucleotide
augaaguacuggaugauga

SEQ ID NO: 3109670 - RNA, 19 nt, Artificial Sequence
  Description of Artificial Sequence: Synthetic oligonucleotide
auccaaagugagcauggug

SEQ ID NO: 3109671 - RNA, 19 nt, Artificial Sequence
  Description of Artificial Sequence: Synthetic oligonucleotide
gugaauaggguggugaaga

SEQ ID NO: 3109672 - RNA, 19 nt, Artificial Sequence
  Description of Artificial Sequence: Synthetic oligonucleotide
cucugucagagagucaucc

SEQ ID NO: 3109673 - RNA, 19 nt, Artificial Sequence
  Description of Artificial Sequence: Synthetic oligonucleotide
aucaugagaauggggauga

SEQ ID NO: 3109674 - RNA, 19 nt, Artificial Sequence
  Description of Artificial Sequence: Synthetic oligonucleotide
agguugaggaagaugaagu

SEQ ID NO: 3109675 - RNA, 19 nt, Artificial Sequence
  Description of Artificial Sequence: Synthetic oligonucleotide
guuaucuacuaggacagca

SEQ ID NO: 3109676 - RNA, 19 nt, Artificial Sequence
  Description of Artificial Sequence: Synthetic oligonucleotide
cagucauccaaagugagca

SEQ ID NO: 3109677 - RNA, 19 nt, Artificial Sequence
  Description of Artificial Sequence: Synthetic oligonucleotide
guccauguagaugagggac

SEQ ID NO: 3109678 - RNA, 19 nt, Artificial Sequence
  Description of Artificial Sequence: Synthetic oligonucleotide
aucuacuaggacagcaauc

SEQ ID NO: 3109679 - RNA, 19 nt, Artificial Sequence
  Description of Artificial Sequence: Synthetic oligonucleotide
gaauaggguggugaagaug

SEQ ID NO: 3109680 - RNA, 19 nt, Artificial Sequence
  Description of Artificial Sequence: Synthetic oligonucleotide
ucugucagagagucaucca

SEQ ID NO: 3109681 - RNA, 19 nt, Artificial Sequence
  Description of Artificial Sequence: Synthetic oligonucleotide
uguccauguagaugaggga

SEQ ID NO: 3109682 - RNA, 19 nt, Artificial Sequence
  Description of Artificial Sequence: Synthetic oligonucleotide
ccaucuggaaguuaucuac

SEQ ID NO: 3109683 - RNA, 19 nt, Artificial Sequence
  Description of Artificial Sequence: Synthetic oligonucleotide
auguagaugagggaccagu

SEQ ID NO: 3109684 - RNA, 19 nt, Artificial Sequence
  Description of Artificial Sequence: Synthetic oligonucleotide
agcauggugaauaggguga

SEQ ID NO: 3109685 - RNA, 19 nt, Artificial Sequence
  Description of Artificial Sequence: Synthetic oligonucleotide
ucucuaggccuuugagaag

SEQ ID NO: 3109686 - RNA, 19 nt, Artificial Sequence
  Description of Artificial Sequence: Synthetic oligonucleotide
gagucauccaacaacuucu

SEQ ID NO: 3109687 - RNA, 19 nt, Artificial Sequence
  Description of Artificial Sequence: Synthetic oligonucleotide
agcucugucagagagucau

SEQ ID NO: 3109688 - RNA, 19 nt, Artificial Sequence
  Description of Artificial Sequence: Synthetic oligonucleotide
guagaugagggaccaguca

SEQ ID NO: 3109689 - RNA, 19 nt, Artificial Sequence
  Description of Artificial Sequence: Synthetic oligonucleotide
caacuucucauggacccgg

SEQ ID NO: 3109690 - RNA, 19 nt, Artificial Sequence
  Description of Artificial Sequence: Synthetic oligonucleotide
ccaacaacuucucauggac

SEQ ID NO: 3109691 - RNA, 19 nt, Artificial Sequence
  Description of Artificial Sequence: Synthetic oligonucleotide
aggacagcaaucaccaggu

SEQ ID NO: 3109692 - RNA, 19 nt, Artificial Sequence
  Description of Artificial Sequence: Synthetic oligonucleotide
agugagcauggugaauagg

SEQ ID NO: 3109693 - RNA, 19 nt, Artificial Sequence
  Description of Artificial Sequence: Synthetic oligonucleotide
ggaaguuaucuacuaggac

SEQ ID NO: 3109694 - RNA, 19 nt, Artificial Sequence
  Description of Artificial Sequence: Synthetic oligonucleotide
gucagagagucauccaaca

SEQ ID NO: 3109695 - RNA, 19 nt, Artificial Sequence
  Description of Artificial Sequence: Synthetic oligonucleotide
ugaauaggguggugaagau

SEQ ID NO: 3109696 - RNA, 19 nt, Artificial Sequence
  Description of Artificial Sequence: Synthetic oligonucleotide
acaacuucucauggacccg

SEQ ID NO: 3109697 - RNA, 19 nt, Artificial Sequence
  Description of Artificial Sequence: Synthetic oligonucleotide
agagccaucuggaaguuau

SEQ ID NO: 3109698 - RNA, 19 nt, Artificial Sequence
  Description of Artificial Sequence: Synthetic oligonucleotide
acuuucucuaggccuuuga

SEQ ID NO: 3109699 - RNA, 19 nt, Artificial Sequence
  Description of Artificial Sequence: Synthetic oligonucleotide
auggugaauagggugaaua

SEQ ID NO: 3109700 - RNA, 19 nt, Artificial Sequence
  Description of Artificial Sequence: Synthetic oligonucleotide
aucuggaaguuaucuacua

SEQ ID NO: 3109701 - RNA, 19 nt, Artificial Sequence
  Description of Artificial Sequence: Synthetic oligonucleotide
agucauccaacaacuucuc

SEQ ID NO: 3109702 - RNA, 19 nt, Artificial Sequence
  Description of Artificial Sequence: Synthetic oligonucleotide
uugguugagcucugucaga

SEQ ID NO: 3109703 - RNA, 19 nt, Artificial Sequence
  Description of Artificial Sequence: Synthetic oligonucleotide
ugagaauggggaugauaua

SEQ ID NO: 3109704 - RNA, 19 nt, Artificial Sequence
  Description of Artificial Sequence: Synthetic oligonucleotide
gaccagucauccaaaguga

SEQ ID NO: 3109705 - RNA, 19 nt, Artificial Sequence
  Description of Artificial Sequence: Synthetic oligonucleotide
agaugagggaccagucauc

SEQ ID NO: 3109706 - RNA, 19 nt, Artificial Sequence
  Description of Artificial Sequence: Synthetic oligonucleotide
agggaccagucauccaaag

SEQ ID NO: 3109707 - RNA, 19 nt, Artificial Sequence
  Description of Artificial Sequence: Synthetic oligonucleotide
agcaaucaccagguugagg

SEQ ID NO: 3109708 - RNA, 19 nt, Artificial Sequence
  Description of Artificial Sequence: Synthetic oligonucleotide
cucuaggccuuugagaaga

SEQ ID NO: 3109709 - RNA, 19 nt, Artificial Sequence
  Description of Artificial Sequence: Synthetic oligonucleotide
cuuugagaagagccaucug

SEQ ID NO: 3109710 - RNA, 19 nt, Artificial Sequence
  Description of Artificial Sequence: Synthetic oligonucleotide
ugugcccugcuguccaugu

SEQ ID NO: 3109711 - RNA, 19 nt, Artificial Sequence
  Description of Artificial Sequence: Synthetic oligonucleotide
ggaugauauaccaggcccc

SEQ ID NO: 3109712 - RNA, 19 nt, Artificial Sequence
  Description of Artificial Sequence: Synthetic oligonucleotide
ugcuugguugagcucuguc

SEQ ID NO: 3109713 - RNA, 19 nt, Artificial Sequence
  Description of Artificial Sequence: Synthetic oligonucleotide
accagucauccaaagugag

SEQ ID NO: 3109714 - RNA, 19 nt, Artificial Sequence
  Description of Artificial Sequence: Synthetic oligonucleotide
ggggaugauauaccaggcc

SEQ ID NO: 3109715 - RNA, 19 nt, Artificial Sequence
  Description of Artificial Sequence: Synthetic oligonucleotide
cugucagagagucauccaa

SEQ ID NO: 3109716 - RNA, 19 nt, Artificial Sequence
  Description of Artificial Sequence: Synthetic oligonucleotide
cuacuaggacagcaaucac

SEQ ID NO: 3109717 - RNA, 19 nt, Artificial Sequence
  Description of Artificial Sequence: Synthetic oligonucleotide
gcuugguugagcucuguca

SEQ ID NO: 3109718 - RNA, 19 nt, Artificial Sequence
  Description of Artificial Sequence: Synthetic oligonucleotide
gcuucacuuucucuaggcc

SEQ ID NO: 3109719 - RNA, 19 nt, Artificial Sequence
  Description of Artificial Sequence: Synthetic oligonucleotide
ugcuguccauguagaugag

SEQ ID NO: 3109720 - RNA, 19 nt, Artificial Sequence
  Description of Artificial Sequence: Synthetic oligonucleotide
auagggugaauaggguggu

SEQ ID NO: 3109721 - RNA, 19 nt, Artificial Sequence
  Description of Artificial Sequence: Synthetic oligonucleotide
cuaggacagcaaucaccag

SEQ ID NO: 3109722 - RNA, 19 nt, Artificial Sequence
  Description of Artificial Sequence: Synthetic oligonucleotide
agucauccaaagugagcau

SEQ ID NO: 3109723 - RNA, 19 nt, Artificial Sequence
  Description of Artificial Sequence: Synthetic oligonucleotide
agaugaaguacuggaugau

SEQ ID NO: 3109724 - RNA, 19 nt, Artificial Sequence
  Description of Artificial Sequence: Synthetic oligonucleotide
aucaccagguugaggaaga

SEQ ID NO: 3109725 - RNA, 19 nt, Artificial Sequence
  Description of Artificial Sequence: Synthetic oligonucleotide
ggugaauaggguggugaag

SEQ ID NO: 3109726 - RNA, 19 nt, Artificial Sequence
  Description of Artificial Sequence: Synthetic oligonucleotide
ccagucauccaaagugagc

SEQ ID NO: 3109727 - RNA, 19 nt, Artificial Sequence
  Description of Artificial Sequence: Synthetic oligonucleotide
cuaggccuuugagaagagc

SEQ ID NO: 3109728 - RNA, 19 nt, Artificial Sequence
  Description of Artificial Sequence: Synthetic oligonucleotide
ucucauggacccgggccgc

SEQ ID NO: 3109729 - RNA, 19 nt, Artificial Sequence
  Description of Artificial Sequence: Synthetic oligonucleotide
aggccuuugagaagagcca

SEQ ID NO: 3109730 - RNA, 19 nt, Artificial Sequence
  Description of Artificial Sequence: Synthetic oligonucleotide
gguugaggaagaugaagua

SEQ ID NO: 3109731 - RNA, 19 nt, Artificial Sequence
  Description of Artificial Sequence: Synthetic oligonucleotide
augagggaccagucaucca

SEQ ID NO: 3109732 - RNA, 19 nt, Artificial Sequence
  Description of Artificial Sequence: Synthetic oligonucleotide
caucuggaaguuaucuacu

SEQ ID NO: 3109733 - RNA, 19 nt, Artificial Sequence
  Description of Artificial Sequence: Synthetic oligonucleotide
auggacccgggccgcuuuc

SEQ ID NO: 3109734 - RNA, 19 nt, Artificial Sequence
  Description of Artificial Sequence: Synthetic oligonucleotide
cauguagaugagggaccag

SEQ ID NO: 3109735 - RNA, 19 nt, Artificial Sequence
  Description of Artificial Sequence: Synthetic oligonucleotide
gcuguccauguagaugagg

SEQ ID NO: 3109736 - RNA, 19 nt, Artificial Sequence
  Description of Artificial Sequence: Synthetic oligonucleotide
ggccgcuuucucuagcuuc

SEQ ID NO: 3109737 - RNA, 19 nt, Artificial Sequence
  Description of Artificial Sequence: Synthetic oligonucleotide
caugagaauggggaugaua

SEQ ID NO: 3109738 - RNA, 19 nt, Artificial Sequence
  Description of Artificial Sequence: Synthetic oligonucleotide
gcuuucucuagcuucacuu

SEQ ID NO: 3109739 - RNA, 19 nt, Artificial Sequence
  Description of Artificial Sequence: Synthetic oligonucleotide
ccugcuguccauguagaug

SEQ ID NO: 3109740 - RNA, 19 nt, Artificial Sequence
  Description of Artificial Sequence: Synthetic oligonucleotide
cuuucucuagcuucacuuu

SEQ ID NO: 3109741 - RNA, 19 nt, Artificial Sequence
  Description of Artificial Sequence: Synthetic oligonucleotide
caaucaccagguugaggaa

SEQ ID NO: 3109742 - RNA, 19 nt, Artificial Sequence
  Description of Artificial Sequence: Synthetic oligonucleotide
aagagccaucuggaaguua

SEQ ID NO: 3109743 - RNA, 19 nt, Artificial Sequence
  Description of Artificial Sequence: Synthetic oligonucleotide
gggugaauaggguggugaa

SEQ ID NO: 3109744 - RNA, 19 nt, Artificial Sequence
  Description of Artificial Sequence: Synthetic oligonucleotide
cagcaaucaccagguugag

SEQ ID NO: 3109745 - RNA, 19 nt, Artificial Sequence
  Description of Artificial Sequence: Synthetic oligonucleotide
gagggaccagucauccaaa

SEQ ID NO: 3109746 - RNA, 19 nt, Artificial Sequence
  Description of Artificial Sequence: Synthetic oligonucleotide
gagccaucuggaaguuauc

SEQ ID NO: 3109747 - RNA, 19 nt, Artificial Sequence
  Description of Artificial Sequence: Synthetic oligonucleotide
ccaaagugagcauggugaa

SEQ ID NO: 3109748 - RNA, 19 nt, Artificial Sequence
  Description of Artificial Sequence: Synthetic oligonucleotide
gccaucuggaaguuaucua

SEQ ID NO: 3109749 - RNA, 19 nt, Artificial Sequence
  Description of Artificial Sequence: Synthetic oligonucleotide
cacuuucucuaggccuuug

SEQ ID NO: 3109750 - RNA, 19 nt, Artificial Sequence
  Description of Artificial Sequence: Synthetic oligonucleotide
ucaugagaauggggaugau

SEQ ID NO: 3109751 - RNA, 19 nt, Artificial Sequence
  Description of Artificial Sequence: Synthetic oligonucleotide
ucacuuucucuaggccuuu

SEQ ID NO: 3109752 - RNA, 19 nt, Artificial Sequence
  Description of Artificial Sequence: Synthetic oligonucleotide
gguugagcucugucagaga

SEQ ID NO: 3109753 - RNA, 19 nt, Artificial Sequence
  Description of Artificial Sequence: Synthetic oligonucleotide
uggacccgggccgcuuucu

SEQ ID NO: 3109754 - RNA, 19 nt, Artificial Sequence
  Description of Artificial Sequence: Synthetic oligonucleotide
gacccgggccgcuuucucu

SEQ ID NO: 3109755 - RNA, 19 nt, Artificial Sequence
  Description of Artificial Sequence: Synthetic oligonucleotide
gccgcuuucucuagcuuca

SEQ ID NO: 3109756 - RNA, 19 nt, Artificial Sequence
  Description of Artificial Sequence: Synthetic oligonucleotide
ccauguagaugagggacca

SEQ ID NO: 3109757 - RNA, 19 nt, Artificial Sequence
  Description of Artificial Sequence: Synthetic oligonucleotide
cugugcccugcuguccaug

SEQ ID NO: 3109758 - RNA, 19 nt, Artificial Sequence
  Description of Artificial Sequence: Synthetic oligonucleotide
gggaccagucauccaaagu

SEQ ID NO: 3109759 - RNA, 19 nt, Artificial Sequence
  Description of Artificial Sequence: Synthetic oligonucleotide
ggaugaugauguaaaucau

SEQ ID NO: 3109760 - RNA, 19 nt, Artificial Sequence
  Description of Artificial Sequence: Synthetic oligonucleotide
ucauggacccgggccgcuu

SEQ ID NO: 3109761 - RNA, 19 nt, Artificial Sequence
  Description of Artificial Sequence: Synthetic oligonucleotide
gagagucauccaacaacuu

SEQ ID NO: 3109762 - RNA, 19 nt, Artificial Sequence
  Description of Artificial Sequence: Synthetic oligonucleotide
gagcucugucagagaguca

SEQ ID NO: 3109763 - RNA, 19 nt, Artificial Sequence
  Description of Artificial Sequence: Synthetic oligonucleotide
gccuuugagaagagccauc

SEQ ID NO: 3109764 - RNA, 19 nt, Artificial Sequence
  Description of Artificial Sequence: Synthetic oligonucleotide
caaagugagcauggugaau

SEQ ID NO: 3109765 - RNA, 19 nt, Artificial Sequence
  Description of Artificial Sequence: Synthetic oligonucleotide
gcauggugaauagggugaa

SEQ ID NO: 3109766 - RNA, 19 nt, Artificial Sequence
  Description of Artificial Sequence: Synthetic oligonucleotide
cauccaaagugagcauggu

SEQ ID NO: 3109767 - RNA, 19 nt, Artificial Sequence
  Description of Artificial Sequence: Synthetic oligonucleotide
ggccuuugagaagagccau

SEQ ID NO: 3109768 - RNA, 19 nt, Artificial Sequence
  Description of Artificial Sequence: Synthetic oligonucleotide
cccugugcccugcugucca

SEQ ID NO: 3109769 - RNA, 19 nt, Artificial Sequence
  Description of Artificial Sequence: Synthetic oligonucleotide
gugcccugcuguccaugua

SEQ ID NO: 3109770 - RNA, 19 nt, Artificial Sequence
  Description of Artificial Sequence: Synthetic oligonucleotide
gcccugcuguccauguaga

SEQ ID NO: 3109771 - RNA, 19 nt, Artificial Sequence
  Description of Artificial Sequence: Synthetic oligonucleotide
cauggugaauagggugaau

SEQ ID NO: 3109772 - RNA, 19 nt, Artificial Sequence
  Description of Artificial Sequence: Synthetic oligonucleotide
ccgggccgcuuucucuagc

SEQ ID NO: 3109773 - RNA, 19 nt, Artificial Sequence
  Description of Artificial Sequence: Synthetic oligonucleotide
cccgggccgcuuucucuag

SEQ ID NO: 3109774 - RNA, 19 nt, Artificial Sequence
  Description of Artificial Sequence: Synthetic oligonucleotide
ccccugugcccugcugucc

SEQ ID NO: 3109775 - RNA, 19 nt, Artificial Sequence
  Description of Artificial Sequence: Synthetic oligonucleotide
cauggacccgggccgcuuu

SEQ ID NO: 3109776 - RNA, 19 nt, Artificial Sequence
  Description of Artificial Sequence: Synthetic oligonucleotide
ccgcuuucucuagcuucac

SEQ ID NO: 3109777 - RNA, 19 nt, Artificial Sequence
  Description of Artificial Sequence: Synthetic oligonucleotide
cucauggacccgggccgcu

SEQ ID NO: 3109778 - RNA, 19 nt, Artificial Sequence
  Description of Artificial Sequence: Synthetic oligonucleotide
cugcuugguugagcucugu

SEQ ID NO: 3109779 - RNA, 19 nt, Artificial Sequence
  Description of Artificial Sequence: Synthetic oligonucleotide
ggacagcaaucaccagguu

SEQ ID NO: 3109780 - RNA, 19 nt, Artificial Sequence
  Description of Artificial Sequence: Synthetic oligonucleotide
gggccgcuuucucuagcuu

SEQ ID NO: 3109781 - RNA, 19 nt, Artificial Sequence
  Description of Artificial Sequence: Synthetic oligonucleotide
cgcuuucucuagcuucacu

SEQ ID NO: 3109782 - RNA, 19 nt, Artificial Sequence
  Description of Artificial Sequence: Synthetic oligonucleotide
cccugcuguccauguagau

SEQ ID NO: 3109783 - RNA, 19 nt, Artificial Sequence
  Description of Artificial Sequence: Synthetic oligonucleotide
cgggccgcuuucucuagcu

SEQ ID NO: 3109784 - RNA, 19 nt, Artificial Sequence
  Description of Artificial Sequence: Synthetic oligonucleotide
uguacaaucaacaugacaa

SEQ ID NO: 3109785 - RNA, 19 nt, Artificial Sequence
  Description of Artificial Sequence: Synthetic oligonucleotide
cauguugccacuuucaugg

SEQ ID NO: 3109786 - RNA, 19 nt, Artificial Sequence
  Description of Artificial Sequence: Synthetic oligonucleotide
aaaaucugccucuucaguc

SEQ ID NO: 3109787 - RNA, 19 nt, Artificial Sequence
  Description of Artificial Sequence: Synthetic oligonucleotide
aaaucugccucuucagucc

SEQ ID NO: 3109788 - RNA, 19 nt, Artificial Sequence
  Description of Artificial Sequence: Synthetic oligonucleotide
aacaugacaaugcugucag

SEQ ID NO: 3109789 - RNA, 19 nt, Artificial Sequence
  Description of Artificial Sequence: Synthetic oligonucleotide
gauaacgucauggaguuag

SEQ ID NO: 3109790 - RNA, 19 nt, Artificial Sequence
  Description of Artificial Sequence: Synthetic oligonucleotide
acaaucaacaugacaaugc

SEQ ID NO: 3109791 - RNA, 19 nt, Artificial Sequence
  Description of Artificial Sequence: Synthetic oligonucleotide
aggcuuuaucacuaggucc

SEQ ID NO: 3109792 - RNA, 19 nt, Artificial Sequence
  Description of Artificial Sequence: Synthetic oligonucleotide
aauguucucuuguagcaug

SEQ ID NO: 3109793 - RNA, 19 nt, Artificial Sequence
  Description of Artificial Sequence: Synthetic oligonucleotide
uucucuuguagcauguugc

SEQ ID NO: 3109794 - RNA, 19 nt, Artificial Sequence
  Description of Artificial Sequence: Synthetic oligonucleotide
uucaccuucagguuccagg

SEQ ID NO: 3109795 - RNA, 19 nt, Artificial Sequence
  Description of Artificial Sequence: Synthetic oligonucleotide
cauggaguuagucaggggc

SEQ ID NO: 3109796 - RNA, 19 nt, Artificial Sequence
  Description of Artificial Sequence: Synthetic oligonucleotide
aacgucauggaguuaguca

SEQ ID NO: 3109797 - RNA, 19 nt, Artificial Sequence
  Description of Artificial Sequence: Synthetic oligonucleotide
aauucuguacaaucaacau

SEQ ID NO: 3109798 - RNA, 19 nt, Artificial Sequence
  Description of Artificial Sequence: Synthetic oligonucleotide
uggaaaaucugccucuuca

SEQ ID NO: 3109799 - RNA, 19 nt, Artificial Sequence
  Description of Artificial Sequence: Synthetic oligonucleotide
aaagcuggaacaccagucu

SEQ ID NO: 3109800 - RNA, 19 nt, Artificial Sequence
  Description of Artificial Sequence: Synthetic oligonucleotide
ucuuguagcauguugccac

SEQ ID NO: 3109801 - RNA, 19 nt, Artificial Sequence
  Description of Artificial Sequence: Synthetic oligonucleotide
aaucugccucuucaguccc

SEQ ID NO: 3109802 - RNA, 19 nt, Artificial Sequence
  Description of Artificial Sequence: Synthetic oligonucleotide
agucuuguggaaaaucugc

SEQ ID NO: 3109803 - RNA, 19 nt, Artificial Sequence
  Description of Artificial Sequence: Synthetic oligonucleotide
aucaacaugacaaugcugu

SEQ ID NO: 3109804 - RNA, 19 nt, Artificial Sequence
  Description of Artificial Sequence: Synthetic oligonucleotide
caugacaaugcugucaggg

SEQ ID NO: 3109805 - RNA, 19 nt, Artificial Sequence
  Description of Artificial Sequence: Synthetic oligonucleotide
acgucauggaguuagucag

SEQ ID NO: 3109806 - RNA, 19 nt, Artificial Sequence
  Description of Artificial Sequence: Synthetic oligonucleotide
uguaggcuuuaucacuagg

SEQ ID NO: 3109807 - RNA, 19 nt, Artificial Sequence
  Description of Artificial Sequence: Synthetic oligonucleotide
ucuucagucccgauaacgu

SEQ ID NO: 3109808 - RNA, 19 nt, Artificial Sequence
  Description of Artificial Sequence: Synthetic oligonucleotide
guugcaauucuguacaauc

SEQ ID NO: 3109809 - RNA, 19 nt, Artificial Sequence
  Description of Artificial Sequence: Synthetic oligonucleotide
uucagucccgauaacguca

SEQ ID NO: 3109810 - RNA, 19 nt, Artificial Sequence
  Description of Artificial Sequence: Synthetic oligonucleotide
uugcaauucuguacaauca

SEQ ID NO: 3109811 - RNA, 19 nt, Artificial Sequence
  Description of Artificial Sequence: Synthetic oligonucleotide
acuuucaugggccaagcgu

SEQ ID NO: 3109812 - RNA, 19 nt, Artificial Sequence
  Description of Artificial Sequence: Synthetic oligonucleotide
uuuaucacuagguccccug

SEQ ID NO: 3109813 - RNA, 19 nt, Artificial Sequence
  Description of Artificial Sequence: Synthetic oligonucleotide
uuagucaggggcaccagga

SEQ ID NO: 3109814 - RNA, 19 nt, Artificial Sequence
  Description of Artificial Sequence: Synthetic oligonucleotide
uucagguuccaggucaugg

SEQ ID NO: 3109815 - RNA, 19 nt, Artificial Sequence
  Description of Artificial Sequence: Synthetic oligonucleotide
ugcaauucuguacaaucaa

SEQ ID NO: 3109816 - RNA, 19 nt, Artificial Sequence
  Description of Artificial Sequence: Synthetic oligonucleotide
uacaaucaacaugacaaug

SEQ ID NO: 3109817 - RNA, 19 nt, Artificial Sequence
  Description of Artificial Sequence: Synthetic oligonucleotide
cuuguggaaaaucugccuc

SEQ ID NO: 3109818 - RNA, 19 nt, Artificial Sequence
  Description of Artificial Sequence: Synthetic oligonucleotide
caauucuguacaaucaaca

SEQ ID NO: 3109819 - RNA, 19 nt, Artificial Sequence
  Description of Artificial Sequence: Synthetic oligonucleotide
agucccgauaacgucaugg

SEQ ID NO: 3109820 - RNA, 19 nt, Artificial Sequence
  Description of Artificial Sequence: Synthetic oligonucleotide
uaggcuuuaucacuagguc

SEQ ID NO: 3109821 - RNA, 19 nt, Artificial Sequence
  Description of Artificial Sequence: Synthetic oligonucleotide
guugcuggaaagcuggaac

SEQ ID NO: 3109822 - RNA, 19 nt, Artificial Sequence
  Description of Artificial Sequence: Synthetic oligonucleotide
ucuuguggaaaaucugccu

SEQ ID NO: 3109823 - RNA, 19 nt, Artificial Sequence
  Description of Artificial Sequence: Synthetic oligonucleotide
ucucuuguagcauguugcc

SEQ ID NO: 3109824 - RNA, 19 nt, Artificial Sequence
  Description of Artificial Sequence: Synthetic oligonucleotide
ucaccuucagguuccaggu

SEQ ID NO: 3109825 - RNA, 19 nt, Artificial Sequence
  Description of Artificial Sequence: Synthetic oligonucleotide
uugcuggaaagcuggaaca

SEQ ID NO: 3109826 - RNA, 19 nt, Artificial Sequence
  Description of Artificial Sequence: Synthetic oligonucleotide
uccaggucauggcuguagg

SEQ ID NO: 3109827 - RNA, 19 nt, Artificial Sequence
  Description of Artificial Sequence: Synthetic oligonucleotide
aaucaacaugacaaugcug

SEQ ID NO: 3109828 - RNA, 19 nt, Artificial Sequence
  Description of Artificial Sequence: Synthetic oligonucleotide
uuguggaaaaucugccucu

SEQ ID NO: 3109829 - RNA, 19 nt, Artificial Sequence
  Description of Artificial Sequence: Synthetic oligonucleotide
gaugcucaaaggguguugc

SEQ ID NO: 3109830 - RNA, 19 nt, Artificial Sequence
  Description of Artificial Sequence: Synthetic oligonucleotide
ucccgauaacgucauggag

SEQ ID NO: 3109831 - RNA, 19 nt, Artificial Sequence
  Description of Artificial Sequence: Synthetic oligonucleotide
uguugccacuuucaugggc

SEQ ID NO: 3109832 - RNA, 19 nt, Artificial Sequence
  Description of Artificial Sequence: Synthetic oligonucleotide
accuucagguuccagguca

SEQ ID NO: 3109833 - RNA, 19 nt, Artificial Sequence
  Description of Artificial Sequence: Synthetic oligonucleotide
gguguugcaauucuguaca

SEQ ID NO: 3109834 - RNA, 19 nt, Artificial Sequence
  Description of Artificial Sequence: Synthetic oligonucleotide
guuagucaggggcaccagg

SEQ ID NO: 3109835 - RNA, 19 nt, Artificial Sequence
  Description of Artificial Sequence: Synthetic oligonucleotide
gaaagcuggaacaccaguc

SEQ ID NO: 3109836 - RNA, 19 nt, Artificial Sequence
  Description of Artificial Sequence: Synthetic oligonucleotide
cucuucagucccgauaacg

SEQ ID NO: 3109837 - RNA, 19 nt, Artificial Sequence
  Description of Artificial Sequence: Synthetic oligonucleotide
guucucuuguagcauguug

SEQ ID NO: 3109838 - RNA, 19 nt, Artificial Sequence
  Description of Artificial Sequence: Synthetic oligonucleotide
guugccacuuucaugggcc

SEQ ID NO: 3109839 - RNA, 19 nt, Artificial Sequence
  Description of Artificial Sequence: Synthetic oligonucleotide
ggcaauguucucuuguagc

SEQ ID NO: 3109840 - RNA, 19 nt, Artificial Sequence
  Description of Artificial Sequence: Synthetic oligonucleotide
uagcauguugccacuuuca

SEQ ID NO: 3109841 - RNA, 19 nt, Artificial Sequence
  Description of Artificial Sequence: Synthetic oligonucleotide
agcguugcuggaaagcugg

SEQ ID NO: 3109842 - RNA, 19 nt, Artificial Sequence
  Description of Artificial Sequence: Synthetic oligonucleotide
uuucaugggccaagcguug

SEQ ID NO: 3109843 - RNA, 19 nt, Artificial Sequence
  Description of Artificial Sequence: Synthetic oligonucleotide
aaggguguugcaauucugu

SEQ ID NO: 3109844 - RNA, 19 nt, Artificial Sequence
  Description of Artificial Sequence: Synthetic oligonucleotide
gucauggaguuagucaggg

SEQ ID NO: 3109845 - RNA, 19 nt, Artificial Sequence
  Description of Artificial Sequence: Synthetic oligonucleotide
uggaaagcuggaacaccag

SEQ ID NO: 3109846 - RNA, 19 nt, Artificial Sequence
  Description of Artificial Sequence: Synthetic oligonucleotide
ggaaaaucugccucuucag

SEQ ID NO: 3109847 - RNA, 19 nt, Artificial Sequence
  Description of Artificial Sequence: Synthetic oligonucleotide
ggcuuuaucacuagguccc

SEQ ID NO: 3109848 - RNA, 19 nt, Artificial Sequence
  Description of Artificial Sequence: Synthetic oligonucleotide
ucauggaguuagucagggg

SEQ ID NO: 3109849 - RNA, 19 nt, Artificial Sequence
  Description of Artificial Sequence: Synthetic oligonucleotide
augcugucagggcccaggc

SEQ ID NO: 3109850 - RNA, 19 nt, Artificial Sequence
  Description of Artificial Sequence: Synthetic oligonucleotide
accagucuuguggaaaauc

SEQ ID NO: 3109851 - RNA, 19 nt, Artificial Sequence
  Description of Artificial Sequence: Synthetic oligonucleotide
cuggaaagcuggaacacca

SEQ ID NO: 3109852 - RNA, 19 nt, Artificial Sequence
  Description of Artificial Sequence: Synthetic oligonucleotide
aacaccagucuuguggaaa

SEQ ID NO: 3109853 - RNA, 19 nt, Artificial Sequence
  Description of Artificial Sequence: Synthetic oligonucleotide
cagucuuguggaaaaucug

SEQ ID NO: 3109854 - RNA, 19 nt, Artificial Sequence
  Description of Artificial Sequence: Synthetic oligonucleotide
aaaggguguugcaauucug

SEQ ID NO: 3109855 - RNA, 19 nt, Artificial Sequence
  Description of Artificial Sequence: Synthetic oligonucleotide
gucuuguggaaaaucugcc

SEQ ID NO: 3109856 - RNA, 19 nt, Artificial Sequence
  Description of Artificial Sequence: Synthetic oligonucleotide
gaaaaucugccucuucagu

SEQ ID NO: 3109857 - RNA, 19 nt, Artificial Sequence
  Description of Artificial Sequence: Synthetic oligonucleotide
cuucagucccgauaacguc

SEQ ID NO: 3109858 - RNA, 19 nt, Artificial Sequence
  Description of Artificial Sequence: Synthetic oligonucleotide
ucuguacaaucaacaugac

SEQ ID NO: 3109859 - RNA, 19 nt, Artificial Sequence
  Description of Artificial Sequence: Synthetic oligonucleotide
ucaacaugacaaugcuguc

SEQ ID NO: 3109860 - RNA, 19 nt, Artificial Sequence
  Description of Artificial Sequence: Synthetic oligonucleotide
ugcucaaaggguguugcaa

SEQ ID NO: 3109861 - RNA, 19 nt, Artificial Sequence
  Description of Artificial Sequence: Synthetic oligonucleotide
uguagcauguugccacuuu

SEQ ID NO: 3109862 - RNA, 19 nt, Artificial Sequence
  Description of Artificial Sequence: Synthetic oligonucleotide
agcauguugccacuuucau

SEQ ID NO: 3109863 - RNA, 19 nt, Artificial Sequence
  Description of Artificial Sequence: Synthetic oligonucleotide
guagcauguugccacuuuc

SEQ ID NO: 3109864 - RNA, 19 nt, Artificial Sequence
  Description of Artificial Sequence: Synthetic oligonucleotide
aagcuggaacaccagucuu

SEQ ID NO: 3109865 - RNA, 19 nt, Artificial Sequence
  Description of Artificial Sequence: Synthetic oligonucleotide
gcaauguucucuuguagca

SEQ ID NO: 3109866 - RNA, 19 nt, Artificial Sequence
  Description of Artificial Sequence: Synthetic oligonucleotide
accaggaugcucaaagggu

SEQ ID NO: 3109867 - RNA, 19 nt, Artificial Sequence
  Description of Artificial Sequence: Synthetic oligonucleotide
acaccagucuuguggaaaa

SEQ ID NO: 3109868 - RNA, 19 nt, Artificial Sequence
  Description of Artificial Sequence: Synthetic oligonucleotide
acaugacaaugcugucagg

SEQ ID NO: 3109869 - RNA, 19 nt, Artificial Sequence
  Description of Artificial Sequence: Synthetic oligonucleotide
ugcuggaaagcuggaacac

SEQ ID NO: 3109870 - RNA, 19 nt, Artificial Sequence
  Description of Artificial Sequence: Synthetic oligonucleotide
ucagucccgauaacgucau

SEQ ID NO: 3109871 - RNA, 19 nt, Artificial Sequence
  Description of Artificial Sequence: Synthetic oligonucleotide
cugaugagggcaauguucu

SEQ ID NO: 3109872 - RNA, 19 nt, Artificial Sequence
  Description of Artificial Sequence: Synthetic oligonucleotide
uggcugaugagggcaaugu

SEQ ID NO: 3109873 - RNA, 19 nt, Artificial Sequence
  Description of Artificial Sequence: Synthetic oligonucleotide
ggguguugcaauucuguac

SEQ ID NO: 3109874 - RNA, 19 nt, Artificial Sequence
  Description of Artificial Sequence: Synthetic oligonucleotide
uguugcaauucuguacaau

SEQ ID NO: 3109875 - RNA, 19 nt, Artificial Sequence
  Description of Artificial Sequence: Synthetic oligonucleotide
ucaugggccaagcguugcu

SEQ ID NO: 3109876 - RNA, 19 nt, Artificial Sequence
  Description of Artificial Sequence: Synthetic oligonucleotide
cacuuucaugggccaagcg

SEQ ID NO: 3109877 - RNA, 19 nt, Artificial Sequence
  Description of Artificial Sequence: Synthetic oligonucleotide
ggaacaccagucuugugga

SEQ ID NO: 3109878 - RNA, 19 nt, Artificial Sequence
  Description of Artificial Sequence: Synthetic oligonucleotide
gaugagggcaauguucucu

SEQ ID NO: 3109879 - RNA, 19 nt, Artificial Sequence
  Description of Artificial Sequence: Synthetic oligonucleotide
ugccucuucagucccgaua

SEQ ID NO: 3109880 - RNA, 19 nt, Artificial Sequence
  Description of Artificial Sequence: Synthetic oligonucleotide
auggaguuagucaggggca

SEQ ID NO: 3109881 - RNA, 19 nt, Artificial Sequence
  Description of Artificial Sequence: Synthetic oligonucleotide
auguugccacuuucauggg

SEQ ID NO: 3109882 - RNA, 19 nt, Artificial Sequence
  Description of Artificial Sequence: Synthetic oligonucleotide
caacaugacaaugcuguca

SEQ ID NO: 3109883 - RNA, 19 nt, Artificial Sequence
  Description of Artificial Sequence: Synthetic oligonucleotide
ggcaccaggaacucgucac

SEQ ID NO: 3109884 - RNA, 19 nt, Artificial Sequence
  Description of Artificial Sequence: Synthetic oligonucleotide
augagggcaauguucucuu

SEQ ID NO: 3109885 - RNA, 19 nt, Artificial Sequence
  Description of Artificial Sequence: Synthetic oligonucleotide
ccaggaugcucaaagggug

SEQ ID NO: 3109886 - RNA, 19 nt, Artificial Sequence
  Description of Artificial Sequence: Synthetic oligonucleotide
aagcguugcuggaaagcug

SEQ ID NO: 3109887 - RNA, 19 nt, Artificial Sequence
  Description of Artificial Sequence: Synthetic oligonucleotide
caaucaacaugacaaugcu

SEQ ID NO: 3109888 - RNA, 19 nt, Artificial Sequence
  Description of Artificial Sequence: Synthetic oligonucleotide
cuguaggcuuuaucacuag

SEQ ID NO: 3109889 - RNA, 19 nt, Artificial Sequence
  Description of Artificial Sequence: Synthetic oligonucleotide
gaguuagucaggggcacca

SEQ ID NO: 3109890 - RNA, 19 nt, Artificial Sequence
  Description of Artificial Sequence: Synthetic oligonucleotide
agcuggaacaccagucuug

SEQ ID NO: 3109891 - RNA, 19 nt, Artificial Sequence
  Description of Artificial Sequence: Synthetic oligonucleotide
uucaugggccaagcguugc

SEQ ID NO: 3109892 - RNA, 19 nt, Artificial Sequence
  Description of Artificial Sequence: Synthetic oligonucleotide
agggcaauguucucuugua

SEQ ID NO: 3109893 - RNA, 19 nt, Artificial Sequence
  Description of Artificial Sequence: Synthetic oligonucleotide
uggaguuagucaggggcac

SEQ ID NO: 3109894 - RNA, 19 nt, Artificial Sequence
  Description of Artificial Sequence: Synthetic oligonucleotide
uaacgucauggaguuaguc

SEQ ID NO: 3109895 - RNA, 19 nt, Artificial Sequence
  Description of Artificial Sequence: Synthetic oligonucleotide
gcugaugagggcaauguuc

SEQ ID NO: 3109896 - RNA, 19 nt, Artificial Sequence
  Description of Artificial Sequence: Synthetic oligonucleotide
ugagggcaauguucucuug

SEQ ID NO: 3109897 - RNA, 19 nt, Artificial Sequence
  Description of Artificial Sequence: Synthetic oligonucleotide
aggucauggcuguaggcuu

SEQ ID NO: 3109898 - RNA, 19 nt, Artificial Sequence
  Description of Artificial Sequence: Synthetic oligonucleotide
gcauguugccacuuucaug

SEQ ID NO: 3109899 - RNA, 19 nt, Artificial Sequence
  Description of Artificial Sequence: Synthetic oligonucleotide
guaggcuuuaucacuaggu

SEQ ID NO: 3109900 - RNA, 19 nt, Artificial Sequence
  Description of Artificial Sequence: Synthetic oligonucleotide
gucccgauaacgucaugga

SEQ ID NO: 3109901 - RNA, 19 nt, Artificial Sequence
  Description of Artificial Sequence: Synthetic oligonucleotide
cuuucaugggccaagcguu

SEQ ID NO: 3109902 - RNA, 19 nt, Artificial Sequence
  Description of Artificial Sequence: Synthetic oligonucleotide
aggguguugcaauucugua

SEQ ID NO: 3109903 - RNA, 19 nt, Artificial Sequence
  Description of Artificial Sequence: Synthetic oligonucleotide
gggcaauguucucuuguag

SEQ ID NO: 3109904 - RNA, 19 nt, Artificial Sequence
  Description of Artificial Sequence: Synthetic oligonucleotide
gagggcaauguucucuugu

SEQ ID NO: 3109905 - RNA, 19 nt, Artificial Sequence
  Description of Artificial Sequence: Synthetic oligonucleotide
ucugccucuucagucccga

SEQ ID NO: 3109906 - RNA, 19 nt, Artificial Sequence
  Description of Artificial Sequence: Synthetic oligonucleotide
uugccacuuucaugggcca

SEQ ID NO: 3109907 - RNA, 19 nt, Artificial Sequence
  Description of Artificial Sequence: Synthetic oligonucleotide
uguggaaaaucugccucuu

SEQ ID NO: 3109908 - RNA, 19 nt, Artificial Sequence
  Description of Artificial Sequence: Synthetic oligonucleotide
ugggccaagcguugcugga

SEQ ID NO: 3109909 - RNA, 19 nt, Artificial Sequence
  Description of Artificial Sequence: Synthetic oligonucleotide
augcucaaaggguguugca

SEQ ID NO: 3109910 - RNA, 19 nt, Artificial Sequence
  Description of Artificial Sequence: Synthetic oligonucleotide
aguuagucaggggcaccag

SEQ ID NO: 3109911 - RNA, 19 nt, Artificial Sequence
  Description of Artificial Sequence: Synthetic oligonucleotide
ugaugagggcaauguucuc

SEQ ID NO: 3109912 - RNA, 19 nt, Artificial Sequence
  Description of Artificial Sequence: Synthetic oligonucleotide
guacaaucaacaugacaau

SEQ ID NO: 3109913 - RNA, 19 nt, Artificial Sequence
  Description of Artificial Sequence: Synthetic oligonucleotide
gccucuucagucccgauaa

SEQ ID NO: 3109914 - RNA, 19 nt, Artificial Sequence
  Description of Artificial Sequence: Synthetic oligonucleotide
auguucucuuguagcaugu

SEQ ID NO: 3109915 - RNA, 19 nt, Artificial Sequence
  Description of Artificial Sequence: Synthetic oligonucleotide
aggggcaccaggaacucgu

SEQ ID NO: 3109916 - RNA, 19 nt, Artificial Sequence
  Description of Artificial Sequence: Synthetic oligonucleotide
caugggccaagcguugcug

SEQ ID NO: 3109917 - RNA, 19 nt, Artificial Sequence
  Description of Artificial Sequence: Synthetic oligonucleotide
guggaaaaucugccucuuc

SEQ ID NO: 3109918 - RNA, 19 nt, Artificial Sequence
  Description of Artificial Sequence: Synthetic oligonucleotide
gcuggaaagcuggaacacc

SEQ ID NO: 3109919 - RNA, 19 nt, Artificial Sequence
  Description of Artificial Sequence: Synthetic oligonucleotide
auaacgucauggaguuagu

SEQ ID NO: 3109920 - RNA, 19 nt, Artificial Sequence
  Description of Artificial Sequence: Synthetic oligonucleotide
cucuuguagcauguugcca

SEQ ID NO: 3109921 - RNA, 19 nt, Artificial Sequence
  Description of Artificial Sequence: Synthetic oligonucleotide
ccaagcguugcuggaaagc

SEQ ID NO: 3109922 - RNA, 19 nt, Artificial Sequence
  Description of Artificial Sequence: Synthetic oligonucleotide
uguucucuuguagcauguu

SEQ ID NO: 3109923 - RNA, 19 nt, Artificial Sequence
  Description of Artificial Sequence: Synthetic oligonucleotide
cccgauaacgucauggagu

SEQ ID NO: 3109924 - RNA, 19 nt, Artificial Sequence
  Description of Artificial Sequence: Synthetic oligonucleotide
caagcguugcuggaaagcu

SEQ ID NO: 3109925 - RNA, 19 nt, Artificial Sequence
  Description of Artificial Sequence: Synthetic oligonucleotide
ccaggucauggcuguaggc

SEQ ID NO: 3109926 - RNA, 19 nt, Artificial Sequence
  Description of Artificial Sequence: Synthetic oligonucleotide
ggaaagcuggaacaccagu

SEQ ID NO: 3109927 - RNA, 19 nt, Artificial Sequence
  Description of Artificial Sequence: Synthetic oligonucleotide
ucaggggcaccaggaacuc

SEQ ID NO: 3109928 - RNA, 19 nt, Artificial Sequence
  Description of Artificial Sequence: Synthetic oligonucleotide
ggaugcucaaaggguguug

SEQ ID NO: 3109929 - RNA, 19 nt, Artificial Sequence
  Description of Artificial Sequence: Synthetic oligonucleotide
ccagucuuguggaaaaucu

SEQ ID NO: 3109930 - RNA, 19 nt, Artificial Sequence
  Description of Artificial Sequence: Synthetic oligonucleotide
caggucauggcuguaggcu

SEQ ID NO: 3109931 - RNA, 19 nt, Artificial Sequence
  Description of Artificial Sequence: Synthetic oligonucleotide
cuuguagcauguugccacu

SEQ ID NO: 3109932 - RNA, 19 nt, Artificial Sequence
  Description of Artificial Sequence: Synthetic oligonucleotide
cgucauggaguuagucagg

SEQ ID NO: 3109933 - RNA, 19 nt, Artificial Sequence
  Description of Artificial Sequence: Synthetic oligonucleotide
ucuucaccuucagguucca

SEQ ID NO: 3109934 - RNA, 19 nt, Artificial Sequence
  Description of Artificial Sequence: Synthetic oligonucleotide
guguugcaauucuguacaa

SEQ ID NO: 3109935 - RNA, 19 nt, Artificial Sequence
  Description of Artificial Sequence: Synthetic oligonucleotide
gccaagcguugcuggaaag

SEQ ID NO: 3109936 - RNA, 19 nt, Artificial Sequence
  Description of Artificial Sequence: Synthetic oligonucleotide
uuguagcauguugccacuu

SEQ ID NO: 3109937 - RNA, 19 nt, Artificial Sequence
  Description of Artificial Sequence: Synthetic oligonucleotide
cuucaccuucagguuccag

SEQ ID NO: 3109938 - RNA, 19 nt, Artificial Sequence
  Description of Artificial Sequence: Synthetic oligonucleotide
cuucagguuccaggucaug

SEQ ID NO: 3109939 - RNA, 19 nt, Artificial Sequence
  Description of Artificial Sequence: Synthetic oligonucleotide
gcuguaggcuuuaucacua

SEQ ID NO: 3109940 - RNA, 19 nt, Artificial Sequence
  Description of Artificial Sequence: Synthetic oligonucleotide
ggaguuagucaggggcacc

SEQ ID NO: 3109941 - RNA, 19 nt, Artificial Sequence
  Description of Artificial Sequence: Synthetic oligonucleotide
cagguuccaggucauggcu

SEQ ID NO: 3109942 - RNA, 19 nt, Artificial Sequence
  Description of Artificial Sequence: Synthetic oligonucleotide
caggggcaccaggaacucg

SEQ ID NO: 3109943 - RNA, 19 nt, Artificial Sequence
  Description of Artificial Sequence: Synthetic oligonucleotide
gcuuuaucacuaggucccc

SEQ ID NO: 3109944 - RNA, 19 nt, Artificial Sequence
  Description of Artificial Sequence: Synthetic oligonucleotide
caggaugcucaaagggugu

SEQ ID NO: 3109945 - RNA, 19 nt, Artificial Sequence
  Description of Artificial Sequence: Synthetic oligonucleotide
cucaaaggguguugcaauu

SEQ ID NO: 3109946 - RNA, 19 nt, Artificial Sequence
  Description of Artificial Sequence: Synthetic oligonucleotide
gcucaaaggguguugcaau

SEQ ID NO: 3109947 - RNA, 19 nt, Artificial Sequence
  Description of Artificial Sequence: Synthetic oligonucleotide
gucagggcccaggcccugg

SEQ ID NO: 3109948 - RNA, 19 nt, Artificial Sequence
  Description of Artificial Sequence: Synthetic oligonucleotide
ugucagggcccaggcccug

SEQ ID NO: 3109949 - RNA, 19 nt, Artificial Sequence
  Description of Artificial Sequence: Synthetic oligonucleotide
ccacuuucaugggccaagc

SEQ ID NO: 3109950 - RNA, 19 nt, Artificial Sequence
  Description of Artificial Sequence: Synthetic oligonucleotide
caauguucucuuguagcau

SEQ ID NO: 3109951 - RNA, 19 nt, Artificial Sequence
  Description of Artificial Sequence: Synthetic oligonucleotide
ggccaagcguugcuggaaa

SEQ ID NO: 3109952 - RNA, 19 nt, Artificial Sequence
  Description of Artificial Sequence: Synthetic oligonucleotide
ggcccuggcugaugagggc

SEQ ID NO: 3109953 - RNA, 19 nt, Artificial Sequence
  Description of Artificial Sequence: Synthetic oligonucleotide
gggcaccaggaacucguca

SEQ ID NO: 3109954 - RNA, 19 nt, Artificial Sequence
  Description of Artificial Sequence: Synthetic oligonucleotide
cuuuaucacuagguccccu

SEQ ID NO: 3109955 - RNA, 19 nt, Artificial Sequence
  Description of Artificial Sequence: Synthetic oligonucleotide
gcuggaacaccagucuugu

SEQ ID NO: 3109956 - RNA, 19 nt, Artificial Sequence
  Description of Artificial Sequence: Synthetic oligonucleotide
gcaucuucaccuucagguu

SEQ ID NO: 3109957 - RNA, 19 nt, Artificial Sequence
  Description of Artificial Sequence: Synthetic oligonucleotide
ccgauaacgucauggaguu

SEQ ID NO: 3109958 - RNA, 19 nt, Artificial Sequence
  Description of Artificial Sequence: Synthetic oligonucleotide
cagucccgauaacgucaug

SEQ ID NO: 3109959 - RNA, 19 nt, Artificial Sequence
  Description of Artificial Sequence: Synthetic oligonucleotide
cugucagggcccaggcccu

SEQ ID NO: 3109960 - RNA, 19 nt, Artificial Sequence
  Description of Artificial Sequence: Synthetic oligonucleotide
gucauggcuguaggcuuua

SEQ ID NO: 3109961 - RNA, 19 nt, Artificial Sequence
  Description of Artificial Sequence: Synthetic oligonucleotide
ccucuucagucccgauaac

SEQ ID NO: 3109962 - RNA, 19 nt, Artificial Sequence
  Description of Artificial Sequence: Synthetic oligonucleotide
ccaggcccuggcugaugag

SEQ ID NO: 3109963 - RNA, 19 nt, Artificial Sequence
  Description of Artificial Sequence: Synthetic oligonucleotide
gggccaagcguugcuggaa

SEQ ID NO: 3109964 - RNA, 19 nt, Artificial Sequence
  Description of Artificial Sequence: Synthetic oligonucleotide
guuccaggucauggcugua

SEQ ID NO: 3109965 - RNA, 19 nt, Artificial Sequence
  Description of Artificial Sequence: Synthetic oligonucleotide
ggucauggcuguaggcuuu

SEQ ID NO: 3109966 - RNA, 19 nt, Artificial Sequence
  Description of Artificial Sequence: Synthetic oligonucleotide
ggggcaccaggaacucguc

SEQ ID NO: 3109967 - RNA, 19 nt, Artificial Sequence
  Description of Artificial Sequence: Synthetic oligonucleotide
cccuggcugaugagggcaa

SEQ ID NO: 3109968 - RNA, 19 nt, Artificial Sequence
  Description of Artificial Sequence: Synthetic oligonucleotide
gcguugcuggaaagcugga

SEQ ID NO: 3109969 - RNA, 19 nt, Artificial Sequence
  Description of Artificial Sequence: Synthetic oligonucleotide
caccagucuuguggaaaau

SEQ ID NO: 3109970 - RNA, 19 nt, Artificial Sequence
  Description of Artificial Sequence: Synthetic oligonucleotide
cguugcuggaaagcuggaa

SEQ ID NO: 3109971 - RNA, 19 nt, Artificial Sequence
  Description of Artificial Sequence: Synthetic oligonucleotide
cugccucuucagucccgau

SEQ ID NO: 3109972 - RNA, 19 nt, Artificial Sequence
  Description of Artificial Sequence: Synthetic oligonucleotide
gcccaggcccuggcugaug

SEQ ID NO: 3109973 - RNA, 19 nt, Artificial Sequence
  Description of Artificial Sequence: Synthetic oligonucleotide
cgauaacgucauggaguua

SEQ ID NO: 3109974 - RNA, 19 nt, Artificial Sequence
  Description of Artificial Sequence: Synthetic oligonucleotide
ggcccaggcccuggcugau

SEQ ID NO: 3109975 - RNA, 19 nt, Artificial Sequence
  Description of Artificial Sequence: Synthetic oligonucleotide
aaauucuucucccacaccg

SEQ ID NO: 3109976 - RNA, 19 nt, Artificial Sequence
  Description of Artificial Sequence: Synthetic oligonucleotide
aaaaguugaguugacuucc

SEQ ID NO: 3109977 - RNA, 19 nt, Artificial Sequence
  Description of Artificial Sequence: Synthetic oligonucleotide
aaucaugucucauauaccu

SEQ ID NO: 3109978 - RNA, 19 nt, Artificial Sequence
  Description of Artificial Sequence: Synthetic oligonucleotide
ucaacauccaaacuggaac

SEQ ID NO: 3109979 - RNA, 19 nt, Artificial Sequence
  Description of Artificial Sequence: Synthetic oligonucleotide
ucaugucucauauaccugg

SEQ ID NO: 3109980 - RNA, 19 nt, Artificial Sequence
  Description of Artificial Sequence: Synthetic oligonucleotide
uauuguaaaaguugaguug

SEQ ID NO: 3109981 - RNA, 19 nt, Artificial Sequence
  Description of Artificial Sequence: Synthetic oligonucleotide
uuuaaaauucuucucccac

SEQ ID NO: 3109982 - RNA, 19 nt, Artificial Sequence
  Description of Artificial Sequence: Synthetic oligonucleotide
cauucaacauccaaacugg

SEQ ID NO: 3109983 - RNA, 19 nt, Artificial Sequence
  Description of Artificial Sequence: Synthetic oligonucleotide
agcucaaucauuuuaaaau

SEQ ID NO: 3109984 - RNA, 19 nt, Artificial Sequence
  Description of Artificial Sequence: Synthetic oligonucleotide
guugaguugacuuccaagc

SEQ ID NO: 3109985 - RNA, 19 nt, Artificial Sequence
  Description of Artificial Sequence: Synthetic oligonucleotide
ucaaucauuuuaaaauucu

SEQ ID NO: 3109986 - RNA, 19 nt, Artificial Sequence
  Description of Artificial Sequence: Synthetic oligonucleotide
uugucuuccauucaugcca

SEQ ID NO: 3109987 - RNA, 19 nt, Artificial Sequence
  Description of Artificial Sequence: Synthetic oligonucleotide
aaaauucuucucccacacc

SEQ ID NO: 3109988 - RNA, 19 nt, Artificial Sequence
  Description of Artificial Sequence: Synthetic oligonucleotide
cagauuuucuucauucucg

SEQ ID NO: 3109989 - RNA, 19 nt, Artificial Sequence
  Description of Artificial Sequence: Synthetic oligonucleotide
uuuugucuuccauucaugc

SEQ ID NO: 3109990 - RNA, 19 nt, Artificial Sequence
  Description of Artificial Sequence: Synthetic oligonucleotide
gaaccuaguauuguaaaag

SEQ ID NO: 3109991 - RNA, 19 nt, Artificial Sequence
  Description of Artificial Sequence: Synthetic oligonucleotide
ugaguugacuuccaagcag

SEQ ID NO: 3109992 - RNA, 19 nt, Artificial Sequence
  Description of Artificial Sequence: Synthetic oligonucleotide
auuguaaaaguugaguuga

SEQ ID NO: 3109993 - RNA, 19 nt, Artificial Sequence
  Description of Artificial Sequence: Synthetic oligonucleotide
caaaggacauucauugucc

SEQ ID NO: 3109994 - RNA, 19 nt, Artificial Sequence
  Description of Artificial Sequence: Synthetic oligonucleotide
aaccuaguauuguaaaagu

SEQ ID NO: 3109995 - RNA, 19 nt, Artificial Sequence
  Description of Artificial Sequence: Synthetic oligonucleotide
caccaaaggacauucauug

SEQ ID NO: 3109996 - RNA, 19 nt, Artificial Sequence
  Description of Artificial Sequence: Synthetic oligonucleotide
acauucauuguccauggug

SEQ ID NO: 3109997 - RNA, 19 nt, Artificial Sequence
  Description of Artificial Sequence: Synthetic oligonucleotide
uaaaaguugaguugacuuc

SEQ ID NO: 3109998 - RNA, 19 nt, Artificial Sequence
  Description of Artificial Sequence: Synthetic oligonucleotide
agaacagcaaucaugucuc

SEQ ID NO: 3109999 - RNA, 19 nt, Artificial Sequence
  Description of Artificial Sequence: Synthetic oligonucleotide
uuuuaaaauucuucuccca

SEQ ID NO: 3110000 - RNA, 19 nt, Artificial Sequence
  Description of Artificial Sequence: Synthetic oligonucleotide
cauguuuugucuuccauuc

SEQ ID NO: 3110001 - RNA, 19 nt, Artificial Sequence
  Description of Artificial Sequence: Synthetic oligonucleotide
aguauuguaaaaguugagu

SEQ ID NO: 3110002 - RNA, 19 nt, Artificial Sequence
  Description of Artificial Sequence: Synthetic oligonucleotide
uauguuuucccauguuuug

SEQ ID NO: 3110003 - RNA, 19 nt, Artificial Sequence
  Description of Artificial Sequence: Synthetic oligonucleotide
cuaguauuguaaaaguuga

SEQ ID NO: 3110004 - RNA, 19 nt, Artificial Sequence
  Description of Artificial Sequence: Synthetic oligonucleotide
ucagauuuucuucauucuc

SEQ ID NO: 3110005 - RNA, 19 nt, Artificial Sequence
  Description of Artificial Sequence: Synthetic oligonucleotide
aguugaguugacuuccaag

SEQ ID NO: 3110006 - RNA, 19 nt, Artificial Sequence
  Description of Artificial Sequence: Synthetic oligonucleotide
gcaaucaugucucauauac

SEQ ID NO: 3110007 - RNA, 19 nt, Artificial Sequence
  Description of Artificial Sequence: Synthetic oligonucleotide
auucucgucauauguuuuc

SEQ ID NO: 3110008 - RNA, 19 nt, Artificial Sequence
  Description of Artificial Sequence: Synthetic oligonucleotide
aauucuucucccacaccgc

SEQ ID NO: 3110009 - RNA, 19 nt, Artificial Sequence
  Description of Artificial Sequence: Synthetic oligonucleotide
uucccaguuaugcagcuca

SEQ ID NO: 3110010 - RNA, 19 nt, Artificial Sequence
  Description of Artificial Sequence: Synthetic oligonucleotide
uagguauucccaguuaugc

SEQ ID NO: 3110011 - RNA, 19 nt, Artificial Sequence
  Description of Artificial Sequence: Synthetic oligonucleotide
uguuuugucuuccauucau

SEQ ID NO: 3110012 - RNA, 19 nt, Artificial Sequence
  Description of Artificial Sequence: Synthetic oligonucleotide
gguauucccaguuaugcag

SEQ ID NO: 3110013 - RNA, 19 nt, Artificial Sequence
  Description of Artificial Sequence: Synthetic oligonucleotide
uaguauuguaaaaguugag

SEQ ID NO: 3110014 - RNA, 19 nt, Artificial Sequence
  Description of Artificial Sequence: Synthetic oligonucleotide
ucucauauaccugggaugu

SEQ ID NO: 3110015 - RNA, 19 nt, Artificial Sequence
  Description of Artificial Sequence: Synthetic oligonucleotide
uguagguauucccaguuau

SEQ ID NO: 3110016 - RNA, 19 nt, Artificial Sequence
  Description of Artificial Sequence: Synthetic oligonucleotide
cucaaucauuuuaaaauuc

SEQ ID NO: 3110017 - RNA, 19 nt, Artificial Sequence
  Description of Artificial Sequence: Synthetic oligonucleotide
cauucauuguccaugguga

SEQ ID NO: 3110018 - RNA, 19 nt, Artificial Sequence
  Description of Artificial Sequence: Synthetic oligonucleotide
uuaugcagcucaaucauuu

SEQ ID NO: 3110019 - RNA, 19 nt, Artificial Sequence
  Description of Artificial Sequence: Synthetic oligonucleotide
ugucucauauaccugggau

SEQ ID NO: 3110020 - RNA, 19 nt, Artificial Sequence
  Description of Artificial Sequence: Synthetic oligonucleotide
ucauuguccauggugaagu

SEQ ID NO: 3110021 - RNA, 19 nt, Artificial Sequence
  Description of Artificial Sequence: Synthetic oligonucleotide
ccuaguauuguaaaaguug

SEQ ID NO: 3110022 - RNA, 19 nt, Artificial Sequence
  Description of Artificial Sequence: Synthetic oligonucleotide
ucuccucagauuuucuuca

SEQ ID NO: 3110023 - RNA, 19 nt, Artificial Sequence
  Description of Artificial Sequence: Synthetic oligonucleotide
auauaccugggaugucugc

SEQ ID NO: 3110024 - RNA, 19 nt, Artificial Sequence
  Description of Artificial Sequence: Synthetic oligonucleotide
gaugacuaggaggagaaca

SEQ ID NO: 3110025 - RNA, 19 nt, Artificial Sequence
  Description of Artificial Sequence: Synthetic oligonucleotide
aaaggacauucauugucca

SEQ ID NO: 3110026 - RNA, 19 nt, Artificial Sequence
  Description of Artificial Sequence: Synthetic oligonucleotide
uugaguugacuuccaagca

SEQ ID NO: 3110027 - RNA, 19 nt, Artificial Sequence
  Description of Artificial Sequence: Synthetic oligonucleotide
uuguccauggugaagucau

SEQ ID NO: 3110028 - RNA, 19 nt, Artificial Sequence
  Description of Artificial Sequence: Synthetic oligonucleotide
uucaacauccaaacuggaa

SEQ ID NO: 3110029 - RNA, 19 nt, Artificial Sequence
  Description of Artificial Sequence: Synthetic oligonucleotide
ucauauaccugggaugucu

SEQ ID NO: 3110030 - RNA, 19 nt, Artificial Sequence
  Description of Artificial Sequence: Synthetic oligonucleotide
aggagaacagcaaucaugu

SEQ ID NO: 3110031 - RNA, 19 nt, Artificial Sequence
  Description of Artificial Sequence: Synthetic oligonucleotide
cauccaaacuggaaccuag

SEQ ID NO: 3110032 - RNA, 19 nt, Artificial Sequence
  Description of Artificial Sequence: Synthetic oligonucleotide
agauuuucuucauucucgu

SEQ ID NO: 3110033 - RNA, 19 nt, Artificial Sequence
  Description of Artificial Sequence: Synthetic oligonucleotide
ccauucaacauccaaacug

SEQ ID NO: 3110034 - RNA, 19 nt, Artificial Sequence
  Description of Artificial Sequence: Synthetic oligonucleotide
aggacauucauuguccaug

SEQ ID NO: 3110035 - RNA, 19 nt, Artificial Sequence
  Description of Artificial Sequence: Synthetic oligonucleotide
uguaaaaguugaguugacu

SEQ ID NO: 3110036 - RNA, 19 nt, Artificial Sequence
  Description of Artificial Sequence: Synthetic oligonucleotide
ucuucauucucgucauaug

SEQ ID NO: 3110037 - RNA, 19 nt, Artificial Sequence
  Description of Artificial Sequence: Synthetic oligonucleotide
gucucauauaccugggaug

SEQ ID NO: 3110038 - RNA, 19 nt, Artificial Sequence
  Description of Artificial Sequence: Synthetic oligonucleotide
caaucaugucucauauacc

SEQ ID NO: 3110039 - RNA, 19 nt, Artificial Sequence
  Description of Artificial Sequence: Synthetic oligonucleotide
gcagaggaugacuaggagg

SEQ ID NO: 3110040 - RNA, 19 nt, Artificial Sequence
  Description of Artificial Sequence: Synthetic oligonucleotide
ucauucucgucauauguuu

SEQ ID NO: 3110041 - RNA, 19 nt, Artificial Sequence
  Description of Artificial Sequence: Synthetic oligonucleotide
uguuuucccauguuuuguc

SEQ ID NO: 3110042 - RNA, 19 nt, Artificial Sequence
  Description of Artificial Sequence: Synthetic oligonucleotide
caugucucauauaccuggg

SEQ ID NO: 3110043 - RNA, 19 nt, Artificial Sequence
  Description of Artificial Sequence: Synthetic oligonucleotide
ucaugcuuccccuguaggu

SEQ ID NO: 3110044 - RNA, 19 nt, Artificial Sequence
  Description of Artificial Sequence: Synthetic oligonucleotide
uaggaggagaacagcaauc

SEQ ID NO: 3110045 - RNA, 19 nt, Artificial Sequence
  Description of Artificial Sequence: Synthetic oligonucleotide
ggugaagucaugcuucccc

SEQ ID NO: 3110046 - RNA, 19 nt, Artificial Sequence
  Description of Artificial Sequence: Synthetic oligonucleotide
uucauucucgucauauguu

SEQ ID NO: 3110047 - RNA, 19 nt, Artificial Sequence
  Description of Artificial Sequence: Synthetic oligonucleotide
uccaagcagaggaugacua

SEQ ID NO: 3110048 - RNA, 19 nt, Artificial Sequence
  Description of Artificial Sequence: Synthetic oligonucleotide
ucaccaaaggacauucauu

SEQ ID NO: 3110049 - RNA, 19 nt, Artificial Sequence
  Description of Artificial Sequence: Synthetic oligonucleotide
ggacauucauuguccaugg

SEQ ID NO: 3110050 - RNA, 19 nt, Artificial Sequence
  Description of Artificial Sequence: Synthetic oligonucleotide
uccccuguagguauuccca

SEQ ID NO: 3110051 - RNA, 19 nt, Artificial Sequence
  Description of Artificial Sequence: Synthetic oligonucleotide
uggaaccuaguauuguaaa

SEQ ID NO: 3110052 - RNA, 19 nt, Artificial Sequence
  Description of Artificial Sequence: Synthetic oligonucleotide
augacuaggaggagaacag

SEQ ID NO: 3110053 - RNA, 19 nt, Artificial Sequence
  Description of Artificial Sequence: Synthetic oligonucleotide
guauuguaaaaguugaguu

SEQ ID NO: 3110054 - RNA, 19 nt, Artificial Sequence
  Description of Artificial Sequence: Synthetic oligonucleotide
aaacuggaaccuaguauug

SEQ ID NO: 3110055 - RNA, 19 nt, Artificial Sequence
  Description of Artificial Sequence: Synthetic oligonucleotide
guaaaaguugaguugacuu

SEQ ID NO: 3110056 - RNA, 19 nt, Artificial Sequence
  Description of Artificial Sequence: Synthetic oligonucleotide
uccauucaugccauucaac

SEQ ID NO: 3110057 - RNA, 19 nt, Artificial Sequence
  Description of Artificial Sequence: Synthetic oligonucleotide
uuccauucaugccauucaa

SEQ ID NO: 3110058 - RNA, 19 nt, Artificial Sequence
  Description of Artificial Sequence: Synthetic oligonucleotide
uucuucauucucgucauau

SEQ ID NO: 3110059 - RNA, 19 nt, Artificial Sequence
  Description of Artificial Sequence: Synthetic oligonucleotide
aacauccaaacuggaaccu

SEQ ID NO: 3110060 - RNA, 19 nt, Artificial Sequence
  Description of Artificial Sequence: Synthetic oligonucleotide
uauaccugggaugucugcu

SEQ ID NO: 3110061 - RNA, 19 nt, Artificial Sequence
  Description of Artificial Sequence: Synthetic oligonucleotide
caguuaugcagcucaauca

SEQ ID NO: 3110062 - RNA, 19 nt, Artificial Sequence
  Description of Artificial Sequence: Synthetic oligonucleotide
ucucgucauauguuuuccc

SEQ ID NO: 3110063 - RNA, 19 nt, Artificial Sequence
  Description of Artificial Sequence: Synthetic oligonucleotide
cugggaugucugcugaucc

SEQ ID NO: 3110064 - RNA, 19 nt, Artificial Sequence
  Description of Artificial Sequence: Synthetic oligonucleotide
uuucccauguuuugucuuc

SEQ ID NO: 3110065 - RNA, 19 nt, Artificial Sequence
  Description of Artificial Sequence: Synthetic oligonucleotide
uuguaaaaguugaguugac

SEQ ID NO: 3110066 - RNA, 19 nt, Artificial Sequence
  Description of Artificial Sequence: Synthetic oligonucleotide
agucaugcuuccccuguag

SEQ ID NO: 3110067 - RNA, 19 nt, Artificial Sequence
  Description of Artificial Sequence: Synthetic oligonucleotide
uucucgucauauguuuucc

SEQ ID NO: 3110068 - RNA, 19 nt, Artificial Sequence
  Description of Artificial Sequence: Synthetic oligonucleotide
aaggacauucauuguccau

SEQ ID NO: 3110069 - RNA, 19 nt, Artificial Sequence
  Description of Artificial Sequence: Synthetic oligonucleotide
uccaaacuggaaccuagua

SEQ ID NO: 3110070 - RNA, 19 nt, Artificial Sequence
  Description of Artificial Sequence: Synthetic oligonucleotide
ugaagucaugcuuccccug

SEQ ID NO: 3110071 - RNA, 19 nt, Artificial Sequence
  Description of Artificial Sequence: Synthetic oligonucleotide
uuccccuguagguauuccc

SEQ ID NO: 3110072 - RNA, 19 nt, Artificial Sequence
  Description of Artificial Sequence: Synthetic oligonucleotide
cauauaccugggaugucug

SEQ ID NO: 3110073 - RNA, 19 nt, Artificial Sequence
  Description of Artificial Sequence: Synthetic oligonucleotide
agguauucccaguuaugca

SEQ ID NO: 3110074 - RNA, 19 nt, Artificial Sequence
  Description of Artificial Sequence: Synthetic oligonucleotide
aacuggaaccuaguauugu

SEQ ID NO: 3110075 - RNA, 19 nt, Artificial Sequence
  Description of Artificial Sequence: Synthetic oligonucleotide
gacuaggaggagaacagca

SEQ ID NO: 3110076 - RNA, 19 nt, Artificial Sequence
  Description of Artificial Sequence: Synthetic oligonucleotide
acuggaaccuaguauugua

SEQ ID NO: 3110077 - RNA, 19 nt, Artificial Sequence
  Description of Artificial Sequence: Synthetic oligonucleotide
auaccugggaugucugcug

SEQ ID NO: 3110078 - RNA, 19 nt, Artificial Sequence
  Description of Artificial Sequence: Synthetic oligonucleotide
aggaggagaacagcaauca

SEQ ID NO: 3110079 - RNA, 19 nt, Artificial Sequence
  Description of Artificial Sequence: Synthetic oligonucleotide
caaacuggaaccuaguauu

SEQ ID NO: 3110080 - RNA, 19 nt, Artificial Sequence
  Description of Artificial Sequence: Synthetic oligonucleotide
auauguuuucccauguuuu

SEQ ID NO: 3110081 - RNA, 19 nt, Artificial Sequence
  Description of Artificial Sequence: Synthetic oligonucleotide
ucgucauauguuuucccau

SEQ ID NO: 3110082 - RNA, 19 nt, Artificial Sequence
  Description of Artificial Sequence: Synthetic oligonucleotide
uuuucccauguuuugucuu

SEQ ID NO: 3110083 - RNA, 19 nt, Artificial Sequence
  Description of Artificial Sequence: Synthetic oligonucleotide
gauuuucuucauucucguc

SEQ ID NO: 3110084 - RNA, 19 nt, Artificial Sequence
  Description of Artificial Sequence: Synthetic oligonucleotide
cucgucauauguuuuccca

SEQ ID NO: 3110085 - RNA, 19 nt, Artificial Sequence
  Description of Artificial Sequence: Synthetic oligonucleotide
uauucccaguuaugcagcu

SEQ ID NO: 3110086 - RNA, 19 nt, Artificial Sequence
  Description of Artificial Sequence: Synthetic oligonucleotide
aaguugaguugacuuccaa

SEQ ID NO: 3110087 - RNA, 19 nt, Artificial Sequence
  Description of Artificial Sequence: Synthetic oligonucleotide
ucauauguuuucccauguu

SEQ ID NO: 3110088 - RNA, 19 nt, Artificial Sequence
  Description of Artificial Sequence: Synthetic oligonucleotide
gaguugacuuccaagcaga

SEQ ID NO: 3110089 - RNA, 19 nt, Artificial Sequence
  Description of Artificial Sequence: Synthetic oligonucleotide
guauucccaguuaugcagc

SEQ ID NO: 3110090 - RNA, 19 nt, Artificial Sequence
  Description of Artificial Sequence: Synthetic oligonucleotide
ugucuuccauucaugccau

SEQ ID NO: 3110091 - RNA, 19 nt, Artificial Sequence
  Description of Artificial Sequence: Synthetic oligonucleotide
accaaaggacauucauugu

SEQ ID NO: 3110092 - RNA, 19 nt, Artificial Sequence
  Description of Artificial Sequence: Synthetic oligonucleotide
ccucagauuuucuucauuc

SEQ ID NO: 3110093 - RNA, 19 nt, Artificial Sequence
  Description of Artificial Sequence: Synthetic oligonucleotide
ccaaaggacauucauuguc

SEQ ID NO: 3110094 - RNA, 19 nt, Artificial Sequence
  Description of Artificial Sequence: Synthetic oligonucleotide
ugacuaggaggagaacagc

SEQ ID NO: 3110095 - RNA, 19 nt, Artificial Sequence
  Description of Artificial Sequence: Synthetic oligonucleotide
guuuugucuuccauucaug

SEQ ID NO: 3110096 - RNA, 19 nt, Artificial Sequence
  Description of Artificial Sequence: Synthetic oligonucleotide
gacuuccaagcagaggaug

SEQ ID NO: 3110097 - RNA, 19 nt, Artificial Sequence
  Description of Artificial Sequence: Synthetic oligonucleotide
aaaguugaguugacuucca

SEQ ID NO: 3110098 - RNA, 19 nt, Artificial Sequence
  Description of Artificial Sequence: Synthetic oligonucleotide
auguuuucccauguuuugu

SEQ ID NO: 3110099 - RNA, 19 nt, Artificial Sequence
  Description of Artificial Sequence: Synthetic oligonucleotide
aacagcaaucaugucucau

SEQ ID NO: 3110100 - RNA, 19 nt, Artificial Sequence
  Description of Artificial Sequence: Synthetic oligonucleotide
guagguauucccaguuaug

SEQ ID NO: 3110101 - RNA, 19 nt, Artificial Sequence
  Description of Artificial Sequence: Synthetic oligonucleotide
auucauuguccauggugaa

SEQ ID NO: 3110102 - RNA, 19 nt, Artificial Sequence
  Description of Artificial Sequence: Synthetic oligonucleotide
acuuccaagcagaggauga

SEQ ID NO: 3110103 - RNA, 19 nt, Artificial Sequence
  Description of Artificial Sequence: Synthetic oligonucleotide
gaggaugacuaggaggaga

SEQ ID NO: 3110104 - RNA, 19 nt, Artificial Sequence
  Description of Artificial Sequence: Synthetic oligonucleotide
ccauucaugccauucaaca

SEQ ID NO: 3110105 - RNA, 19 nt, Artificial Sequence
  Description of Artificial Sequence: Synthetic oligonucleotide
ugggaugucugcugauccu

SEQ ID NO: 3110106 - RNA, 19 nt, Artificial Sequence
  Description of Artificial Sequence: Synthetic oligonucleotide
auuguccauggugaaguca

SEQ ID NO: 3110107 - RNA, 19 nt, Artificial Sequence
  Description of Artificial Sequence: Synthetic oligonucleotide
uuccaagcagaggaugacu

SEQ ID NO: 3110108 - RNA, 19 nt, Artificial Sequence
  Description of Artificial Sequence: Synthetic oligonucleotide
ccaguuaugcagcucaauc

SEQ ID NO: 3110109 - RNA, 19 nt, Artificial Sequence
  Description of Artificial Sequence: Synthetic oligonucleotide
augucucauauaccuggga

SEQ ID NO: 3110110 - RNA, 19 nt, Artificial Sequence
  Description of Artificial Sequence: Synthetic oligonucleotide
uucccauguuuugucuucc

SEQ ID NO: 3110111 - RNA, 19 nt, Artificial Sequence
  Description of Artificial Sequence: Synthetic oligonucleotide
ugacuuccaagcagaggau

SEQ ID NO: 3110112 - RNA, 19 nt, Artificial Sequence
  Description of Artificial Sequence: Synthetic oligonucleotide
uaugcagcucaaucauuuu

SEQ ID NO: 3110113 - RNA, 19 nt, Artificial Sequence
  Description of Artificial Sequence: Synthetic oligonucleotide
gaagucaugcuuccccugu

SEQ ID NO: 3110114 - RNA, 19 nt, Artificial Sequence
  Description of Artificial Sequence: Synthetic oligonucleotide
caugccauucaacauccaa

SEQ ID NO: 3110115 - RNA, 19 nt, Artificial Sequence
  Description of Artificial Sequence: Synthetic oligonucleotide
uccucagauuuucuucauu

SEQ ID NO: 3110116 - RNA, 19 nt, Artificial Sequence
  Description of Artificial Sequence: Synthetic oligonucleotide
aagucaugcuuccccugua

SEQ ID NO: 3110117 - RNA, 19 nt, Artificial Sequence
  Description of Artificial Sequence: Synthetic oligonucleotide
cagcucaaucauuuuaaaa

SEQ ID NO: 3110118 - RNA, 19 nt, Artificial Sequence
  Description of Artificial Sequence: Synthetic oligonucleotide
aggaugacuaggaggagaa

SEQ ID NO: 3110119 - RNA, 19 nt, Artificial Sequence
  Description of Artificial Sequence: Synthetic oligonucleotide
cuggaaccuaguauuguaa

SEQ ID NO: 3110120 - RNA, 19 nt, Artificial Sequence
  Description of Artificial Sequence: Synthetic oligonucleotide
aguugacuuccaagcagag

SEQ ID NO: 3110121 - RNA, 19 nt, Artificial Sequence
  Description of Artificial Sequence: Synthetic oligonucleotide
ggaaccuaguauuguaaaa

SEQ ID NO: 3110122 - RNA, 19 nt, Artificial Sequence
  Description of Artificial Sequence: Synthetic oligonucleotide
cauauguuuucccauguuu

SEQ ID NO: 3110123 - RNA, 19 nt, Artificial Sequence
  Description of Artificial Sequence: Synthetic oligonucleotide
augcuuccccuguagguau

SEQ ID NO: 3110124 - RNA, 19 nt, Artificial Sequence
  Description of Artificial Sequence: Synthetic oligonucleotide
accuaguauuguaaaaguu

SEQ ID NO: 3110125 - RNA, 19 nt, Artificial Sequence
  Description of Artificial Sequence: Synthetic oligonucleotide
ucccauguuuugucuucca

SEQ ID NO: 3110126 - RNA, 19 nt, Artificial Sequence
  Description of Artificial Sequence: Synthetic oligonucleotide
acuaggaggagaacagcaa

SEQ ID NO: 3110127 - RNA, 19 nt, Artificial Sequence
  Description of Artificial Sequence: Synthetic oligonucleotide
auucccaguuaugcagcuc

SEQ ID NO: 3110128 - RNA, 19 nt, Artificial Sequence
  Description of Artificial Sequence: Synthetic oligonucleotide
gucauauguuuucccaugu

SEQ ID NO: 3110129 - RNA, 19 nt, Artificial Sequence
  Description of Artificial Sequence: Synthetic oligonucleotide
cauuguccauggugaaguc

SEQ ID NO: 3110130 - RNA, 19 nt, Artificial Sequence
  Description of Artificial Sequence: Synthetic oligonucleotide
guuuucccauguuuugucu

SEQ ID NO: 3110131 - RNA, 19 nt, Artificial Sequence
  Description of Artificial Sequence: Synthetic oligonucleotide
agcaaucaugucucauaua

SEQ ID NO: 3110132 - RNA, 19 nt, Artificial Sequence
  Description of Artificial Sequence: Synthetic oligonucleotide
gaacagcaaucaugucuca

SEQ ID NO: 3110133 - RNA, 19 nt, Artificial Sequence
  Description of Artificial Sequence: Synthetic oligonucleotide
uggugaagucaugcuuccc

SEQ ID NO: 3110134 - RNA, 19 nt, Artificial Sequence
  Description of Artificial Sequence: Synthetic oligonucleotide
ccaagcagaggaugacuag

SEQ ID NO: 3110135 - RNA, 19 nt, Artificial Sequence
  Description of Artificial Sequence: Synthetic oligonucleotide
cauucaugccauucaacau

SEQ ID NO: 3110136 - RNA, 19 nt, Artificial Sequence
  Description of Artificial Sequence: Synthetic oligonucleotide
gugaagucaugcuuccccu

SEQ ID NO: 3110137 - RNA, 19 nt, Artificial Sequence
  Description of Artificial Sequence: Synthetic oligonucleotide
ucccaguuaugcagcucaa

SEQ ID NO: 3110138 - RNA, 19 nt, Artificial Sequence
  Description of Artificial Sequence: Synthetic oligonucleotide
gcucaaucauuuuaaaauu

SEQ ID NO: 3110139 - RNA, 19 nt, Artificial Sequence
  Description of Artificial Sequence: Synthetic oligonucleotide
cgucauauguuuucccaug

SEQ ID NO: 3110140 - RNA, 19 nt, Artificial Sequence
  Description of Artificial Sequence: Synthetic oligonucleotide
cuaggaggagaacagcaau

SEQ ID NO: 3110141 - RNA, 19 nt, Artificial Sequence
  Description of Artificial Sequence: Synthetic oligonucleotide
cuuccccuguagguauucc

SEQ ID NO: 3110142 - RNA, 19 nt, Artificial Sequence
  Description of Artificial Sequence: Synthetic oligonucleotide
caugcuuccccuguaggua

SEQ ID NO: 3110143 - RNA, 19 nt, Artificial Sequence
  Description of Artificial Sequence: Synthetic oligonucleotide
auccaaacuggaaccuagu

SEQ ID NO: 3110144 - RNA, 19 nt, Artificial Sequence
  Description of Artificial Sequence: Synthetic oligonucleotide
acauccaaacuggaaccua

SEQ ID NO: 3110145 - RNA, 19 nt, Artificial Sequence
  Description of Artificial Sequence: Synthetic oligonucleotide
cagcaaucaugucucauau

SEQ ID NO: 3110146 - RNA, 19 nt, Artificial Sequence
  Description of Artificial Sequence: Synthetic oligonucleotide
cucauauaccugggauguc

SEQ ID NO: 3110147 - RNA, 19 nt, Artificial Sequence
  Description of Artificial Sequence: Synthetic oligonucleotide
cuguagguauucccaguua

SEQ ID NO: 3110148 - RNA, 19 nt, Artificial Sequence
  Description of Artificial Sequence: Synthetic oligonucleotide
gacauucauuguccauggu

SEQ ID NO: 3110149 - RNA, 19 nt, Artificial Sequence
  Description of Artificial Sequence: Synthetic oligonucleotide
ccccuguagguauucccag

SEQ ID NO: 3110150 - RNA, 19 nt, Artificial Sequence
  Description of Artificial Sequence: Synthetic oligonucleotide
gggaugucugcugauccuc

SEQ ID NO: 3110151 - RNA, 19 nt, Artificial Sequence
  Description of Artificial Sequence: Synthetic oligonucleotide
gcagcucaaucauuuuaaa

SEQ ID NO: 3110152 - RNA, 19 nt, Artificial Sequence
  Description of Artificial Sequence: Synthetic oligonucleotide
ggagaacagcaaucauguc

SEQ ID NO: 3110153 - RNA, 19 nt, Artificial Sequence
  Description of Artificial Sequence: Synthetic oligonucleotide
accugggaugucugcugau

SEQ ID NO: 3110154 - RNA, 19 nt, Artificial Sequence
  Description of Artificial Sequence: Synthetic oligonucleotide
ugcuuccccuguagguauu

SEQ ID NO: 3110155 - RNA, 19 nt, Artificial Sequence
  Description of Artificial Sequence: Synthetic oligonucleotide
cauucucgucauauguuuu

SEQ ID NO: 3110156 - RNA, 19 nt, Artificial Sequence
  Description of Artificial Sequence: Synthetic oligonucleotide
acaccgcucuccucagauu

SEQ ID NO: 3110157 - RNA, 19 nt, Artificial Sequence
  Description of Artificial Sequence: Synthetic oligonucleotide
ggaugucugcugauccuca

SEQ ID NO: 3110158 - RNA, 19 nt, Artificial Sequence
  Description of Artificial Sequence: Synthetic oligonucleotide
caccgcucuccucagauuu

SEQ ID NO: 3110159 - RNA, 19 nt, Artificial Sequence
  Description of Artificial Sequence: Synthetic oligonucleotide
cacaccgcucuccucagau

SEQ ID NO: 3110160 - RNA, 19 nt, Artificial Sequence
  Description of Artificial Sequence: Synthetic oligonucleotide
ggaugacuaggaggagaac

SEQ ID NO: 3110161 - RNA, 19 nt, Artificial Sequence
  Description of Artificial Sequence: Synthetic oligonucleotide
ccugggaugucugcugauc

SEQ ID NO: 3110162 - RNA, 19 nt, Artificial Sequence
  Description of Artificial Sequence: Synthetic oligonucleotide
ccauguuuugucuuccauu

SEQ ID NO: 3110163 - RNA, 19 nt, Artificial Sequence
  Description of Artificial Sequence: Synthetic oligonucleotide
ggaggagaacagcaaucau

SEQ ID NO: 3110164 - RNA, 19 nt, Artificial Sequence
  Description of Artificial Sequence: Synthetic oligonucleotide
cuccucagauuuucuucau

SEQ ID NO: 3110165 - RNA, 19 nt, Artificial Sequence
  Description of Artificial Sequence: Synthetic oligonucleotide
accgcucuccucagauuuu

SEQ ID NO: 3110166 - RNA, 19 nt, Artificial Sequence
  Description of Artificial Sequence: Synthetic oligonucleotide
gcucuccucagauuuucuu

SEQ ID NO: 3110167 - RNA, 19 nt, Artificial Sequence
  Description of Artificial Sequence: Synthetic oligonucleotide
gcuuccccuguagguauuc

SEQ ID NO: 3110168 - RNA, 19 nt, Artificial Sequence
  Description of Artificial Sequence: Synthetic oligonucleotide
ccuguagguauucccaguu

SEQ ID NO: 3110169 - RNA, 19 nt, Artificial Sequence
  Description of Artificial Sequence: Synthetic oligonucleotide
ccgcucuccucagauuuuc

SEQ ID NO: 3110170 - RNA, 19 nt, Artificial Sequence
  Description of Artificial Sequence: Synthetic oligonucleotide
cccuguagguauucccagu

SEQ ID NO: 3110171 - RNA, 19 nt, Artificial Sequence
  Description of Artificial Sequence: Synthetic oligonucleotide
cccauguuuugucuuccau

SEQ ID NO: 3110172 - RNA, 19 nt, Artificial Sequence
  Description of Artificial Sequence: Synthetic oligonucleotide
cccaguuaugcagcucaau

SEQ ID NO: 3110173 - RNA, 19 nt, Artificial Sequence
  Description of Artificial Sequence: Synthetic oligonucleotide
cgcucuccucagauuuucu

SEQ ID NO: 3110174 - RNA, 19 nt, Artificial Sequence
  Description of Artificial Sequence: Synthetic oligonucleotide
aaauacaucaugcaugacc

SEQ ID NO: 3110175 - RNA, 19 nt, Artificial Sequence
  Description of Artificial Sequence: Synthetic oligonucleotide
aauacaucaugcaugaccc

SEQ ID NO: 3110176 - RNA, 19 nt, Artificial Sequence
  Description of Artificial Sequence: Synthetic oligonucleotide
aacaugaccaggcagagga

SEQ ID NO: 3110177 - RNA, 19 nt, Artificial Sequence
  Description of Artificial Sequence: Synthetic oligonucleotide
aaguucacaagccaccugg

SEQ ID NO: 3110178 - RNA, 19 nt, Artificial Sequence
  Description of Artificial Sequence: Synthetic oligonucleotide
ucaugcaugacccacagga

SEQ ID NO: 3110179 - RNA, 19 nt, Artificial Sequence
  Description of Artificial Sequence: Synthetic oligonucleotide
uggcauaucuucuucaugg

SEQ ID NO: 3110180 - RNA, 19 nt, Artificial Sequence
  Description of Artificial Sequence: Synthetic oligonucleotide
uuaugccucacccucagag

SEQ ID NO: 3110181 - RNA, 19 nt, Artificial Sequence
  Description of Artificial Sequence: Synthetic oligonucleotide
uagauguagcccaacauug

SEQ ID NO: 3110182 - RNA, 19 nt, Artificial Sequence
  Description of Artificial Sequence: Synthetic oligonucleotide
aacauugggagacggauga

SEQ ID NO: 3110183 - RNA, 19 nt, Artificial Sequence
  Description of Artificial Sequence: Synthetic oligonucleotide
aaggccaccagguucagcu

SEQ ID NO: 3110184 - RNA, 19 nt, Artificial Sequence
  Description of Artificial Sequence: Synthetic oligonucleotide
uguagcccaacauugggag

SEQ ID NO: 3110185 - RNA, 19 nt, Artificial Sequence
  Description of Artificial Sequence: Synthetic oligonucleotide
uucacaagccaccugggcc

SEQ ID NO: 3110186 - RNA, 19 nt, Artificial Sequence
  Description of Artificial Sequence: Synthetic oligonucleotide
uugaaggagacacuggggu

SEQ ID NO: 3110187 - RNA, 19 nt, Artificial Sequence
  Description of Artificial Sequence: Synthetic oligonucleotide
gauguagcccaacauuggg

SEQ ID NO: 3110188 - RNA, 19 nt, Artificial Sequence
  Description of Artificial Sequence: Synthetic oligonucleotide
augccucacccucagagcc

SEQ ID NO: 3110189 - RNA, 19 nt, Artificial Sequence
  Description of Artificial Sequence: Synthetic oligonucleotide
gaaggcuugaaggagacac

SEQ ID NO: 3110190 - RNA, 19 nt, Artificial Sequence
  Description of Artificial Sequence: Synthetic oligonucleotide
auaucuucuucauggucac

SEQ ID NO: 3110191 - RNA, 19 nt, Artificial Sequence
  Description of Artificial Sequence: Synthetic oligonucleotide
acaggauaccccuaccagg

SEQ ID NO: 3110192 - RNA, 19 nt, Artificial Sequence
  Description of Artificial Sequence: Synthetic oligonucleotide
ucagagccagaucucauca

SEQ ID NO: 3110193 - RNA, 19 nt, Artificial Sequence
  Description of Artificial Sequence: Synthetic oligonucleotide
auugggagacggaugaagc

SEQ ID NO: 3110194 - RNA, 19 nt, Artificial Sequence
  Description of Artificial Sequence: Synthetic oligonucleotide
ucauggucacaacaugacc

SEQ ID NO: 3110195 - RNA, 19 nt, Artificial Sequence
  Description of Artificial Sequence: Synthetic oligonucleotide
gauaccccuaccaggaggg

SEQ ID NO: 3110196 - RNA, 19 nt, Artificial Sequence
  Description of Artificial Sequence: Synthetic oligonucleotide
ucacaacaugaccaggcag

SEQ ID NO: 3110197 - RNA, 19 nt, Artificial Sequence
  Description of Artificial Sequence: Synthetic oligonucleotide
ugcaugacccacaggauac

SEQ ID NO: 3110198 - RNA, 19 nt, Artificial Sequence
  Description of Artificial Sequence: Synthetic oligonucleotide
uucauggucacaacaugac

SEQ ID NO: 3110199 - RNA, 19 nt, Artificial Sequence
  Description of Artificial Sequence: Synthetic oligonucleotide
agacacugggguugggugc

SEQ ID NO: 3110200 - RNA, 19 nt, Artificial Sequence
  Description of Artificial Sequence: Synthetic oligonucleotide
cauggucacaacaugacca

SEQ ID NO: 3110201 - RNA, 19 nt, Artificial Sequence
  Description of Artificial Sequence: Synthetic oligonucleotide
uucuucauggucacaacau

SEQ ID NO: 3110202 - RNA, 19 nt, Artificial Sequence
  Description of Artificial Sequence: Synthetic oligonucleotide
acacucgguagauguagcc

SEQ ID NO: 3110203 - RNA, 19 nt, Artificial Sequence
  Description of Artificial Sequence: Synthetic oligonucleotide
cuugaaggagacacugggg

SEQ ID NO: 3110204 - RNA, 19 nt, Artificial Sequence
  Description of Artificial Sequence: Synthetic oligonucleotide
gcagaggaaggcuugaagg

SEQ ID NO: 3110205 - RNA, 19 nt, Artificial Sequence
  Description of Artificial Sequence: Synthetic oligonucleotide
agccagaucucaucacugc

SEQ ID NO: 3110206 - RNA, 19 nt, Artificial Sequence
  Description of Artificial Sequence: Synthetic oligonucleotide
uggugagaaggccaccagg

SEQ ID NO: 3110207 - RNA, 19 nt, Artificial Sequence
  Description of Artificial Sequence: Synthetic oligonucleotide
gacacuggacacucgguag

SEQ ID NO: 3110208 - RNA, 19 nt, Artificial Sequence
  Description of Artificial Sequence: Synthetic oligonucleotide
agacggaugaagccucggc

SEQ ID NO: 3110209 - RNA, 19 nt, Artificial Sequence
  Description of Artificial Sequence: Synthetic oligonucleotide
ucacugcugacacuggaca

SEQ ID NO: 3110210 - RNA, 19 nt, Artificial Sequence
  Description of Artificial Sequence: Synthetic oligonucleotide
ugggccuuaugccucaccc

SEQ ID NO: 3110211 - RNA, 19 nt, Artificial Sequence
  Description of Artificial Sequence: Synthetic oligonucleotide
agccaccugggccuuaugc

SEQ ID NO: 3110212 - RNA, 19 nt, Artificial Sequence
  Description of Artificial Sequence: Synthetic oligonucleotide
ugggaaguucacaagccac

SEQ ID NO: 3110213 - RNA, 19 nt, Artificial Sequence
  Description of Artificial Sequence: Synthetic oligonucleotide
accagguucagcuucuaga

SEQ ID NO: 3110214 - RNA, 19 nt, Artificial Sequence
  Description of Artificial Sequence: Synthetic oligonucleotide
gcuugaaggagacacuggg

SEQ ID NO: 3110215 - RNA, 19 nt, Artificial Sequence
  Description of Artificial Sequence: Synthetic oligonucleotide
auggucacaacaugaccag

SEQ ID NO: 3110216 - RNA, 19 nt, Artificial Sequence
  Description of Artificial Sequence: Synthetic oligonucleotide
ucacaagccaccugggccu

SEQ ID NO: 3110217 - RNA, 19 nt, Artificial Sequence
  Description of Artificial Sequence: Synthetic oligonucleotide
gaaggagacacugggguug

SEQ ID NO: 3110218 - RNA, 19 nt, Artificial Sequence
  Description of Artificial Sequence: Synthetic oligonucleotide
acucgguagauguagccca

SEQ ID NO: 3110219 - RNA, 19 nt, Artificial Sequence
  Description of Artificial Sequence: Synthetic oligonucleotide
agagccagaucucaucacu

SEQ ID NO: 3110220 - RNA, 19 nt, Artificial Sequence
  Description of Artificial Sequence: Synthetic oligonucleotide
uugggagacggaugaagcc

SEQ ID NO: 3110221 - RNA, 19 nt, Artificial Sequence
  Description of Artificial Sequence: Synthetic oligonucleotide
gagacacugggguugggug

SEQ ID NO: 3110222 - RNA, 19 nt, Artificial Sequence
  Description of Artificial Sequence: Synthetic oligonucleotide
uaugccucacccucagagc

SEQ ID NO: 3110223 - RNA, 19 nt, Artificial Sequence
  Description of Artificial Sequence: Synthetic oligonucleotide
uacaucaugcaugacccac

SEQ ID NO: 3110224 - RNA, 19 nt, Artificial Sequence
  Description of Artificial Sequence: Synthetic oligonucleotide
ugacccacaggauaccccu

SEQ ID NO: 3110225 - RNA, 19 nt, Artificial Sequence
  Description of Artificial Sequence: Synthetic oligonucleotide
cacaacaugaccaggcaga

SEQ ID NO: 3110226 - RNA, 19 nt, Artificial Sequence
  Description of Artificial Sequence: Synthetic oligonucleotide
acggaugaagccucggcug

SEQ ID NO: 3110227 - RNA, 19 nt, Artificial Sequence
  Description of Artificial Sequence: Synthetic oligonucleotide
gaucucaucacugcugaca

SEQ ID NO: 3110228 - RNA, 19 nt, Artificial Sequence
  Description of Artificial Sequence: Synthetic oligonucleotide
agaggaaggcuugaaggag

SEQ ID NO: 3110229 - RNA, 19 nt, Artificial Sequence
  Description of Artificial Sequence: Synthetic oligonucleotide
cacaggauaccccuaccag

SEQ ID NO: 3110230 - RNA, 19 nt, Artificial Sequence
  Description of Artificial Sequence: Synthetic oligonucleotide
ugacacuggacacucggua

SEQ ID NO: 3110231 - RNA, 19 nt, Artificial Sequence
  Description of Artificial Sequence: Synthetic oligonucleotide
guggcaguggcauaucuuc

SEQ ID NO: 3110232 - RNA, 19 nt, Artificial Sequence
  Description of Artificial Sequence: Synthetic oligonucleotide
ugaagccucggcuggugag

SEQ ID NO: 3110233 - RNA, 19 nt, Artificial Sequence
  Description of Artificial Sequence: Synthetic oligonucleotide
acccacaggauaccccuac

SEQ ID NO: 3110234 - RNA, 19 nt, Artificial Sequence
  Description of Artificial Sequence: Synthetic oligonucleotide
uagcccaacauugggagac

SEQ ID NO: 3110235 - RNA, 19 nt, Artificial Sequence
  Description of Artificial Sequence: Synthetic oligonucleotide
agauguagcccaacauugg

SEQ ID NO: 3110236 - RNA, 19 nt, Artificial Sequence
  Description of Artificial Sequence: Synthetic oligonucleotide
cauugggagacggaugaag

SEQ ID NO: 3110237 - RNA, 19 nt, Artificial Sequence
  Description of Artificial Sequence: Synthetic oligonucleotide
gaaguucacaagccaccug

SEQ ID NO: 3110238 - RNA, 19 nt, Artificial Sequence
  Description of Artificial Sequence: Synthetic oligonucleotide
aguggcauaucuucuucau

SEQ ID NO: 3110239 - RNA, 19 nt, Artificial Sequence
  Description of Artificial Sequence: Synthetic oligonucleotide
ugcccugggaaguucacaa

SEQ ID NO: 3110240 - RNA, 19 nt, Artificial Sequence
  Description of Artificial Sequence: Synthetic oligonucleotide
ugggagacggaugaagccu

SEQ ID NO: 3110241 - RNA, 19 nt, Artificial Sequence
  Description of Artificial Sequence: Synthetic oligonucleotide
gcugacacuggacacucgg

SEQ ID NO: 3110242 - RNA, 19 nt, Artificial Sequence
  Description of Artificial Sequence: Synthetic oligonucleotide
caacauugggagacggaug

SEQ ID NO: 3110243 - RNA, 19 nt, Artificial Sequence
  Description of Artificial Sequence: Synthetic oligonucleotide
ggauaccccuaccaggagg

SEQ ID NO: 3110244 - RNA, 19 nt, Artificial Sequence
  Description of Artificial Sequence: Synthetic oligonucleotide
ucuucuucauggucacaac

SEQ ID NO: 3110245 - RNA, 19 nt, Artificial Sequence
  Description of Artificial Sequence: Synthetic oligonucleotide
caugaccaggcagaggaag

SEQ ID NO: 3110246 - RNA, 19 nt, Artificial Sequence
  Description of Artificial Sequence: Synthetic oligonucleotide
cuucuucauggucacaaca

SEQ ID NO: 3110247 - RNA, 19 nt, Artificial Sequence
  Description of Artificial Sequence: Synthetic oligonucleotide
agaucucaucacugcugac

SEQ ID NO: 3110248 - RNA, 19 nt, Artificial Sequence
  Description of Artificial Sequence: Synthetic oligonucleotide
caggauaccccuaccagga

SEQ ID NO: 3110249 - RNA, 19 nt, Artificial Sequence
  Description of Artificial Sequence: Synthetic oligonucleotide
augacccacaggauacccc

SEQ ID NO: 3110250 - RNA, 19 nt, Artificial Sequence
  Description of Artificial Sequence: Synthetic oligonucleotide
cagaggaaggcuugaagga

SEQ ID NO: 3110251 - RNA, 19 nt, Artificial Sequence
  Description of Artificial Sequence: Synthetic oligonucleotide
augcaugacccacaggaua

SEQ ID NO: 3110252 - RNA, 19 nt, Artificial Sequence
  Description of Artificial Sequence: Synthetic oligonucleotide
cucagagccagaucucauc

SEQ ID NO: 3110253 - RNA, 19 nt, Artificial Sequence
  Description of Artificial Sequence: Synthetic oligonucleotide
aggcuugaaggagacacug

SEQ ID NO: 3110254 - RNA, 19 nt, Artificial Sequence
  Description of Artificial Sequence: Synthetic oligonucleotide
ugaaggagacacugggguu

SEQ ID NO: 3110255 - RNA, 19 nt, Artificial Sequence
  Description of Artificial Sequence: Synthetic oligonucleotide
cacucgguagauguagccc

SEQ ID NO: 3110256 - RNA, 19 nt, Artificial Sequence
  Description of Artificial Sequence: Synthetic oligonucleotide
guggcauaucuucuucaug

SEQ ID NO: 3110257 - RNA, 19 nt, Artificial Sequence
  Description of Artificial Sequence: Synthetic oligonucleotide
aucaugcaugacccacagg

SEQ ID NO: 3110258 - RNA, 19 nt, Artificial Sequence
  Description of Artificial Sequence: Synthetic oligonucleotide
uggucacaacaugaccagg

SEQ ID NO: 3110259 - RNA, 19 nt, Artificial Sequence
  Description of Artificial Sequence: Synthetic oligonucleotide
uguggcaguggcauaucuu

SEQ ID NO: 3110260 - RNA, 19 nt, Artificial Sequence
  Description of Artificial Sequence: Synthetic oligonucleotide
ggucacaacaugaccaggc

SEQ ID NO: 3110261 - RNA, 19 nt, Artificial Sequence
  Description of Artificial Sequence: Synthetic oligonucleotide
uggcaguggcauaucuucu

SEQ ID NO: 3110262 - RNA, 19 nt, Artificial Sequence
  Description of Artificial Sequence: Synthetic oligonucleotide
ugggguugggugcccuggg

SEQ ID NO: 3110263 - RNA, 19 nt, Artificial Sequence
  Description of Artificial Sequence: Synthetic oligonucleotide
guagauguagcccaacauu

SEQ ID NO: 3110264 - RNA, 19 nt, Artificial Sequence
  Description of Artificial Sequence: Synthetic oligonucleotide
gacacugggguugggugcc

SEQ ID NO: 3110265 - RNA, 19 nt, Artificial Sequence
  Description of Artificial Sequence: Synthetic oligonucleotide
gagccagaucucaucacug

SEQ ID NO: 3110266 - RNA, 19 nt, Artificial Sequence
  Description of Artificial Sequence: Synthetic oligonucleotide
aguucacaagccaccuggg

SEQ ID NO: 3110267 - RNA, 19 nt, Artificial Sequence
  Description of Artificial Sequence: Synthetic oligonucleotide
acugcugacacuggacacu

SEQ ID NO: 3110268 - RNA, 19 nt, Artificial Sequence
  Description of Artificial Sequence: Synthetic oligonucleotide
caugacccacaggauaccc

SEQ ID NO: 3110269 - RNA, 19 nt, Artificial Sequence
  Description of Artificial Sequence: Synthetic oligonucleotide
cacugcugacacuggacac

SEQ ID NO: 3110270 - RNA, 19 nt, Artificial Sequence
  Description of Artificial Sequence: Synthetic oligonucleotide
gacacucgguagauguagc

SEQ ID NO: 3110271 - RNA, 19 nt, Artificial Sequence
  Description of Artificial Sequence: Synthetic oligonucleotide
gaggaaggcuugaaggaga

SEQ ID NO: 3110272 - RNA, 19 nt, Artificial Sequence
  Description of Artificial Sequence: Synthetic oligonucleotide
ggcagaggaaggcuugaag

SEQ ID NO: 3110273 - RNA, 19 nt, Artificial Sequence
  Description of Artificial Sequence: Synthetic oligonucleotide
gacggaugaagccucggcu

SEQ ID NO: 3110274 - RNA, 19 nt, Artificial Sequence
  Description of Artificial Sequence: Synthetic oligonucleotide
auguggcaguggcauaucu

SEQ ID NO: 3110275 - RNA, 19 nt, Artificial Sequence
  Description of Artificial Sequence: Synthetic oligonucleotide
ugcugacacuggacacucg

SEQ ID NO: 3110276 - RNA, 19 nt, Artificial Sequence
  Description of Artificial Sequence: Synthetic oligonucleotide
aaggcuugaaggagacacu

SEQ ID NO: 3110277 - RNA, 19 nt, Artificial Sequence
  Description of Artificial Sequence: Synthetic oligonucleotide
uaccccuaccaggagggcc

SEQ ID NO: 3110278 - RNA, 19 nt, Artificial Sequence
  Description of Artificial Sequence: Synthetic oligonucleotide
auacaucaugcaugaccca

SEQ ID NO: 3110279 - RNA, 19 nt, Artificial Sequence
  Description of Artificial Sequence: Synthetic oligonucleotide
ggacacucgguagauguag

SEQ ID NO: 3110280 - RNA, 19 nt, Artificial Sequence
  Description of Artificial Sequence: Synthetic oligonucleotide
cuggacacucgguagaugu

SEQ ID NO: 3110281 - RNA, 19 nt, Artificial Sequence
  Description of Artificial Sequence: Synthetic oligonucleotide
gaugaagccucggcuggug

SEQ ID NO: 3110282 - RNA, 19 nt, Artificial Sequence
  Description of Artificial Sequence: Synthetic oligonucleotide
gggaaguucacaagccacc

SEQ ID NO: 3110283 - RNA, 19 nt, Artificial Sequence
  Description of Artificial Sequence: Synthetic oligonucleotide
aggauaccccuaccaggag

SEQ ID NO: 3110284 - RNA, 19 nt, Artificial Sequence
  Description of Artificial Sequence: Synthetic oligonucleotide
gagacggaugaagccucgg

SEQ ID NO: 3110285 - RNA, 19 nt, Artificial Sequence
  Description of Artificial Sequence: Synthetic oligonucleotide
auguagcccaacauuggga

SEQ ID NO: 3110286 - RNA, 19 nt, Artificial Sequence
  Description of Artificial Sequence: Synthetic oligonucleotide
cugggaaguucacaagcca

SEQ ID NO: 3110287 - RNA, 19 nt, Artificial Sequence
  Description of Artificial Sequence: Synthetic oligonucleotide
cuggugagaaggccaccag

SEQ ID NO: 3110288 - RNA, 19 nt, Artificial Sequence
  Description of Artificial Sequence: Synthetic oligonucleotide
ugccucacccucagagcca

SEQ ID NO: 3110289 - RNA, 19 nt, Artificial Sequence
  Description of Artificial Sequence: Synthetic oligonucleotide
gaaauacaucaugcaugac

SEQ ID NO: 3110290 - RNA, 19 nt, Artificial Sequence
  Description of Artificial Sequence: Synthetic oligonucleotide
ucucaucacugcugacacu

SEQ ID NO: 3110291 - RNA, 19 nt, Artificial Sequence
  Description of Artificial Sequence: Synthetic oligonucleotide
cagagccagaucucaucac

SEQ ID NO: 3110292 - RNA, 19 nt, Artificial Sequence
  Description of Artificial Sequence: Synthetic oligonucleotide
gccucggcuggugagaagg

SEQ ID NO: 3110293 - RNA, 19 nt, Artificial Sequence
  Description of Artificial Sequence: Synthetic oligonucleotide
acaucaugcaugacccaca

SEQ ID NO: 3110294 - RNA, 19 nt, Artificial Sequence
  Description of Artificial Sequence: Synthetic oligonucleotide
augaagccucggcugguga

SEQ ID NO: 3110295 - RNA, 19 nt, Artificial Sequence
  Description of Artificial Sequence: Synthetic oligonucleotide
gcauaucuucuucaugguc

SEQ ID NO: 3110296 - RNA, 19 nt, Artificial Sequence
  Description of Artificial Sequence: Synthetic oligonucleotide
uggacacucgguagaugua

SEQ ID NO: 3110297 - RNA, 19 nt, Artificial Sequence
  Description of Artificial Sequence: Synthetic oligonucleotide
gccaccugggccuuaugcc

SEQ ID NO: 3110298 - RNA, 19 nt, Artificial Sequence
  Description of Artificial Sequence: Synthetic oligonucleotide
ggccuuaugccucacccuc

SEQ ID NO: 3110299 - RNA, 19 nt, Artificial Sequence
  Description of Artificial Sequence: Synthetic oligonucleotide
ucacccucagagccagauc

SEQ ID NO: 3110300 - RNA, 19 nt, Artificial Sequence
  Description of Artificial Sequence: Synthetic oligonucleotide
caacaugaccaggcagagg

SEQ ID NO: 3110301 - RNA, 19 nt, Artificial Sequence
  Description of Artificial Sequence: Synthetic oligonucleotide
auaccccuaccaggagggc

SEQ ID NO: 3110302 - RNA, 19 nt, Artificial Sequence
  Description of Artificial Sequence: Synthetic oligonucleotide
caguggcauaucuucuuca

SEQ ID NO: 3110303 - RNA, 19 nt, Artificial Sequence
  Description of Artificial Sequence: Synthetic oligonucleotide
caccagguucagcuucuag

SEQ ID NO: 3110304 - RNA, 19 nt, Artificial Sequence
  Description of Artificial Sequence: Synthetic oligonucleotide
caucacugcugacacugga

SEQ ID NO: 3110305 - RNA, 19 nt, Artificial Sequence
  Description of Artificial Sequence: Synthetic oligonucleotide
cucggcuggugagaaggcc

SEQ ID NO: 3110306 - RNA, 19 nt, Artificial Sequence
  Description of Artificial Sequence: Synthetic oligonucleotide
gaagccucggcuggugaga

SEQ ID NO: 3110307 - RNA, 19 nt, Artificial Sequence
  Description of Artificial Sequence: Synthetic oligonucleotide
ggcuugaaggagacacugg

SEQ ID NO: 3110308 - RNA, 19 nt, Artificial Sequence
  Description of Artificial Sequence: Synthetic oligonucleotide
guagcccaacauugggaga

SEQ ID NO: 3110309 - RNA, 19 nt, Artificial Sequence
  Description of Artificial Sequence: Synthetic oligonucleotide
cugcugacacuggacacuc

SEQ ID NO: 3110310 - RNA, 19 nt, Artificial Sequence
  Description of Artificial Sequence: Synthetic oligonucleotide
acugggguugggugcccug

SEQ ID NO: 3110311 - RNA, 19 nt, Artificial Sequence
  Description of Artificial Sequence: Synthetic oligonucleotide
agcccaacauugggagacg

SEQ ID NO: 3110312 - RNA, 19 nt, Artificial Sequence
  Description of Artificial Sequence: Synthetic oligonucleotide
ccagguucagcuucuagaa

SEQ ID NO: 3110313 - RNA, 19 nt, Artificial Sequence
  Description of Artificial Sequence: Synthetic oligonucleotide
caccugggccuuaugccuc

SEQ ID NO: 3110314 - RNA, 19 nt, Artificial Sequence
  Description of Artificial Sequence: Synthetic oligonucleotide
accccuaccaggagggcca

SEQ ID NO: 3110315 - RNA, 19 nt, Artificial Sequence
  Description of Artificial Sequence: Synthetic oligonucleotide
acuggacacucgguagaug

SEQ ID NO: 3110316 - RNA, 19 nt, Artificial Sequence
  Description of Artificial Sequence: Synthetic oligonucleotide
aagccucggcuggugagaa

SEQ ID NO: 3110317 - RNA, 19 nt, Artificial Sequence
  Description of Artificial Sequence: Synthetic oligonucleotide
gcaguggcauaucuucuuc

SEQ ID NO: 3110318 - RNA, 19 nt, Artificial Sequence
  Description of Artificial Sequence: Synthetic oligonucleotide
ccuuaugccucacccucag

SEQ ID NO: 3110319 - RNA, 19 nt, Artificial Sequence
  Description of Artificial Sequence: Synthetic oligonucleotide
aagccaccugggccuuaug

SEQ ID NO: 3110320 - RNA, 19 nt, Artificial Sequence
  Description of Artificial Sequence: Synthetic oligonucleotide
ucgguagauguagcccaac

SEQ ID NO: 3110321 - RNA, 19 nt, Artificial Sequence
  Description of Artificial Sequence: Synthetic oligonucleotide
cugggccuuaugccucacc

SEQ ID NO: 3110322 - RNA, 19 nt, Artificial Sequence
  Description of Artificial Sequence: Synthetic oligonucleotide
cuaccaggagggccaugug

SEQ ID NO: 3110323 - RNA, 19 nt, Artificial Sequence
  Description of Artificial Sequence: Synthetic oligonucleotide
accugggccuuaugccuca

SEQ ID NO: 3110324 - RNA, 19 nt, Artificial Sequence
  Description of Artificial Sequence: Synthetic oligonucleotide
acccucagagccagaucuc

SEQ ID NO: 3110325 - RNA, 19 nt, Artificial Sequence
  Description of Artificial Sequence: Synthetic oligonucleotide
ggagacggaugaagccucg

SEQ ID NO: 3110326 - RNA, 19 nt, Artificial Sequence
  Description of Artificial Sequence: Synthetic oligonucleotide
ccaggcagaggaaggcuug

SEQ ID NO: 3110327 - RNA, 19 nt, Artificial Sequence
  Description of Artificial Sequence: Synthetic oligonucleotide
cggaugaagccucggcugg

SEQ ID NO: 3110328 - RNA, 19 nt, Artificial Sequence
  Description of Artificial Sequence: Synthetic oligonucleotide
ggccaccagguucagcuuc

SEQ ID NO: 3110329 - RNA, 19 nt, Artificial Sequence
  Description of Artificial Sequence: Synthetic oligonucleotide
accaggcagaggaaggcuu

SEQ ID NO: 3110330 - RNA, 19 nt, Artificial Sequence
  Description of Artificial Sequence: Synthetic oligonucleotide
gcuggugagaaggccacca

SEQ ID NO: 3110331 - RNA, 19 nt, Artificial Sequence
  Description of Artificial Sequence: Synthetic oligonucleotide
cucgguagauguagcccaa

SEQ ID NO: 3110332 - RNA, 19 nt, Artificial Sequence
  Description of Artificial Sequence: Synthetic oligonucleotide
cauguggcaguggcauauc

SEQ ID NO: 3110333 - RNA, 19 nt, Artificial Sequence
  Description of Artificial Sequence: Synthetic oligonucleotide
gcccugggaaguucacaag

SEQ ID NO: 3110334 - RNA, 19 nt, Artificial Sequence
  Description of Artificial Sequence: Synthetic oligonucleotide
agccucggcuggugagaag

SEQ ID NO: 3110335 - RNA, 19 nt, Artificial Sequence
  Description of Artificial Sequence: Synthetic oligonucleotide
gcccaacauugggagacgg

SEQ ID NO: 3110336 - RNA, 19 nt, Artificial Sequence
  Description of Artificial Sequence: Synthetic oligonucleotide
agaaggccaccagguucag

SEQ ID NO: 3110337 - RNA, 19 nt, Artificial Sequence
  Description of Artificial Sequence: Synthetic oligonucleotide
caugcaugacccacaggau

SEQ ID NO: 3110338 - RNA, 19 nt, Artificial Sequence
  Description of Artificial Sequence: Synthetic oligonucleotide
cuuaugccucacccucaga

SEQ ID NO: 3110339 - RNA, 19 nt, Artificial Sequence
  Description of Artificial Sequence: Synthetic oligonucleotide
ggaaguucacaagccaccu

SEQ ID NO: 3110340 - RNA, 19 nt, Artificial Sequence
  Description of Artificial Sequence: Synthetic oligonucleotide
ggcauaucuucuucauggu

SEQ ID NO: 3110341 - RNA, 19 nt, Artificial Sequence
  Description of Artificial Sequence: Synthetic oligonucleotide
ccacaggauaccccuacca

SEQ ID NO: 3110342 - RNA, 19 nt, Artificial Sequence
  Description of Artificial Sequence: Synthetic oligonucleotide
cugacacuggacacucggu

SEQ ID NO: 3110343 - RNA, 19 nt, Artificial Sequence
  Description of Artificial Sequence: Synthetic oligonucleotide
gggagacggaugaagccuc

SEQ ID NO: 3110344 - RNA, 19 nt, Artificial Sequence
  Description of Artificial Sequence: Synthetic oligonucleotide
acauugggagacggaugaa

SEQ ID NO: 3110345 - RNA, 19 nt, Artificial Sequence
  Description of Artificial Sequence: Synthetic oligonucleotide
guugggugcccugggaagu

SEQ ID NO: 3110346 - RNA, 19 nt, Artificial Sequence
  Description of Artificial Sequence: Synthetic oligonucleotide
uugggugcccugggaaguu

SEQ ID NO: 3110347 - RNA, 19 nt, Artificial Sequence
  Description of Artificial Sequence: Synthetic oligonucleotide
ggguugggugcccugggaa

SEQ ID NO: 3110348 - RNA, 19 nt, Artificial Sequence
  Description of Artificial Sequence: Synthetic oligonucleotide
cccacaggauaccccuacc

SEQ ID NO: 3110349 - RNA, 19 nt, Artificial Sequence
  Description of Artificial Sequence: Synthetic oligonucleotide
aggagacacugggguuggg

SEQ ID NO: 3110350 - RNA, 19 nt, Artificial Sequence
  Description of Artificial Sequence: Synthetic oligonucleotide
gccagaucucaucacugcu

SEQ ID NO: 3110351 - RNA, 19 nt, Artificial Sequence
  Description of Artificial Sequence: Synthetic oligonucleotide
ugggugcccugggaaguuc

SEQ ID NO: 3110352 - RNA, 19 nt, Artificial Sequence
  Description of Artificial Sequence: Synthetic oligonucleotide
gcaugacccacaggauacc

SEQ ID NO: 3110353 - RNA, 19 nt, Artificial Sequence
  Description of Artificial Sequence: Synthetic oligonucleotide
gccucacccucagagccag

SEQ ID NO: 3110354 - RNA, 19 nt, Artificial Sequence
  Description of Artificial Sequence: Synthetic oligonucleotide
acaugaccaggcagaggaa

SEQ ID NO: 3110355 - RNA, 19 nt, Artificial Sequence
  Description of Artificial Sequence: Synthetic oligonucleotide
aggcagaggaaggcuugaa

SEQ ID NO: 3110356 - RNA, 19 nt, Artificial Sequence
  Description of Artificial Sequence: Synthetic oligonucleotide
gugcccugggaaguucaca

SEQ ID NO: 3110357 - RNA, 19 nt, Artificial Sequence
  Description of Artificial Sequence: Synthetic oligonucleotide
ccucggcuggugagaaggc

SEQ ID NO: 3110358 - RNA, 19 nt, Artificial Sequence
  Description of Artificial Sequence: Synthetic oligonucleotide
caggcagaggaaggcuuga

SEQ ID NO: 3110359 - RNA, 19 nt, Artificial Sequence
  Description of Artificial Sequence: Synthetic oligonucleotide
ccaacauugggagacggau

SEQ ID NO: 3110360 - RNA, 19 nt, Artificial Sequence
  Description of Artificial Sequence: Synthetic oligonucleotide
cccaacauugggagacgga

SEQ ID NO: 3110361 - RNA, 19 nt, Artificial Sequence
  Description of Artificial Sequence: Synthetic oligonucleotide
ggcaguggcauaucuucuu

SEQ ID NO: 3110362 - RNA, 19 nt, Artificial Sequence
  Description of Artificial Sequence: Synthetic oligonucleotide
cucacccucagagccagau

SEQ ID NO: 3110363 - RNA, 19 nt, Artificial Sequence
  Description of Artificial Sequence: Synthetic oligonucleotide
ggagacacugggguugggu

SEQ ID NO: 3110364 - RNA, 19 nt, Artificial Sequence
  Description of Artificial Sequence: Synthetic oligonucleotide
ggccauguggcaguggcau

SEQ ID NO: 3110365 - RNA, 19 nt, Artificial Sequence
  Description of Artificial Sequence: Synthetic oligonucleotide
gggguugggugcccuggga

SEQ ID NO: 3110366 - RNA, 19 nt, Artificial Sequence
  Description of Artificial Sequence: Synthetic oligonucleotide
ggaaggcuugaaggagaca

SEQ ID NO: 3110367 - RNA, 19 nt, Artificial Sequence
  Description of Artificial Sequence: Synthetic oligonucleotide
ggugcccugggaaguucac

SEQ ID NO: 3110368 - RNA, 19 nt, Artificial Sequence
  Description of Artificial Sequence: Synthetic oligonucleotide
cgguagauguagcccaaca

SEQ ID NO: 3110369 - RNA, 19 nt, Artificial Sequence
  Description of Artificial Sequence: Synthetic oligonucleotide
ccaccugggccuuaugccu

SEQ ID NO: 3110370 - RNA, 19 nt, Artificial Sequence
  Description of Artificial Sequence: Synthetic oligonucleotide
gccuuaugccucacccuca

SEQ ID NO: 3110371 - RNA, 19 nt, Artificial Sequence
  Description of Artificial Sequence: Synthetic oligonucleotide
gacccacaggauaccccua

SEQ ID NO: 3110372 - RNA, 19 nt, Artificial Sequence
  Description of Artificial Sequence: Synthetic oligonucleotide
gggccuuaugccucacccu

SEQ ID NO: 3110373 - RNA, 19 nt, Artificial Sequence
  Description of Artificial Sequence: Synthetic oligonucleotide
ggcuggugagaaggccacc

SEQ ID NO: 3110374 - RNA, 19 nt, Artificial Sequence
  Description of Artificial Sequence: Synthetic oligonucleotide
cggcuggugagaaggccac

SEQ ID NO: 3110375 - RNA, 19 nt, Artificial Sequence
  Description of Artificial Sequence: Synthetic oligonucleotide
cccucagagccagaucuca

SEQ ID NO: 3110376 - RNA, 19 nt, Artificial Sequence
  Description of Artificial Sequence: Synthetic oligonucleotide
ccuaccaggagggccaugu

SEQ ID NO: 3110377 - RNA, 19 nt, Artificial Sequence
  Description of Artificial Sequence: Synthetic oligonucleotide
gggugcccugggaaguuca

SEQ ID NO: 3110378 - RNA, 19 nt, Artificial Sequence
  Description of Artificial Sequence: Synthetic oligonucleotide
ccaggagggccauguggca

SEQ ID NO: 3110379 - RNA, 19 nt, Artificial Sequence
  Description of Artificial Sequence: Synthetic oligonucleotide
acaagccaccugggccuua

SEQ ID NO: 3110380 - RNA, 19 nt, Artificial Sequence
  Description of Artificial Sequence: Synthetic oligonucleotide
gggccauguggcaguggca

SEQ ID NO: 3110381 - RNA, 19 nt, Artificial Sequence
  Description of Artificial Sequence: Synthetic oligonucleotide
ccauguggcaguggcauau

SEQ ID NO: 3110382 - RNA, 19 nt, Artificial Sequence
  Description of Artificial Sequence: Synthetic oligonucleotide
ggaugaagccucggcuggu

SEQ ID NO: 3110383 - RNA, 19 nt, Artificial Sequence
  Description of Artificial Sequence: Synthetic oligonucleotide
caagccaccugggccuuau

SEQ ID NO: 3110384 - RNA, 19 nt, Artificial Sequence
  Description of Artificial Sequence: Synthetic oligonucleotide
ccucagagccagaucucau

SEQ ID NO: 3110385 - RNA, 19 nt, Artificial Sequence
  Description of Artificial Sequence: Synthetic oligonucleotide
cacugggguugggugcccu

SEQ ID NO: 3110386 - RNA, 19 nt, Artificial Sequence
  Description of Artificial Sequence: Synthetic oligonucleotide
ccugggccuuaugccucac

SEQ ID NO: 3110387 - RNA, 19 nt, Artificial Sequence
  Description of Artificial Sequence: Synthetic oligonucleotide
cacaagccaccugggccuu

SEQ ID NO: 3110388 - RNA, 19 nt, Artificial Sequence
  Description of Artificial Sequence: Synthetic oligonucleotide
cccuaccaggagggccaug

SEQ ID NO: 3110389 - RNA, 19 nt, Artificial Sequence
  Description of Artificial Sequence: Synthetic oligonucleotide
ccccuaccaggagggccau

SEQ ID NO: 3110390 - RNA, 19 nt, Artificial Sequence
  Description of Artificial Sequence: Synthetic oligonucleotide
aauuucaagaaguucauuc

SEQ ID NO: 3110391 - RNA, 19 nt, Artificial Sequence
  Description of Artificial Sequence: Synthetic oligonucleotide
aaauaugagauauuagagg

SEQ ID NO: 3110392 - RNA, 19 nt, Artificial Sequence
  Description of Artificial Sequence: Synthetic oligonucleotide
aauaugagauauuagagga

SEQ ID NO: 3110393 - RNA, 19 nt, Artificial Sequence
  Description of Artificial Sequence: Synthetic oligonucleotide
aaaagagcaaauuaaauau

SEQ ID NO: 3110394 - RNA, 19 nt, Artificial Sequence
  Description of Artificial Sequence: Synthetic oligonucleotide
aaaguucaagaucaaagcg

SEQ ID NO: 3110395 - RNA, 19 nt, Artificial Sequence
  Description of Artificial Sequence: Synthetic oligonucleotide
uaauacauacaaaagagca

SEQ ID NO: 3110396 - RNA, 19 nt, Artificial Sequence
  Description of Artificial Sequence: Synthetic oligonucleotide
uaaauaugagauauuagag

SEQ ID NO: 3110397 - RNA, 19 nt, Artificial Sequence
  Description of Artificial Sequence: Synthetic oligonucleotide
aaaacuuucaauguugcuc

SEQ ID NO: 3110398 - RNA, 19 nt, Artificial Sequence
  Description of Artificial Sequence: Synthetic oligonucleotide
cauaauacauacaaaagag

SEQ ID NO: 3110399 - RNA, 19 nt, Artificial Sequence
  Description of Artificial Sequence: Synthetic oligonucleotide
uuuacaacauaauacauac

SEQ ID NO: 3110400 - RNA, 19 nt, Artificial Sequence
  Description of Artificial Sequence: Synthetic oligonucleotide
uagauuuacaacauaauac

SEQ ID NO: 3110401 - RNA, 19 nt, Artificial Sequence
  Description of Artificial Sequence: Synthetic oligonucleotide
aaagcgaacacaaucuucc

SEQ ID NO: 3110402 - RNA, 19 nt, Artificial Sequence
  Description of Artificial Sequence: Synthetic oligonucleotide
uguuguauaagcccuaaag

SEQ ID NO: 3110403 - RNA, 19 nt, Artificial Sequence
  Description of Artificial Sequence: Synthetic oligonucleotide
uacaacauaauacauacaa

SEQ ID NO: 3110404 - RNA, 19 nt, Artificial Sequence
  Description of Artificial Sequence: Synthetic oligonucleotide
acauaauagauuuacaaca

SEQ ID NO: 3110405 - RNA, 19 nt, Artificial Sequence
  Description of Artificial Sequence: Synthetic oligonucleotide
auucauguuguauaagccc

SEQ ID NO: 3110406 - RNA, 19 nt, Artificial Sequence
  Description of Artificial Sequence: Synthetic oligonucleotide
uaaacuguuacauaauaga

SEQ ID NO: 3110407 - RNA, 19 nt, Artificial Sequence
  Description of Artificial Sequence: Synthetic oligonucleotide
auugauaaaucuucacagc

SEQ ID NO: 3110408 - RNA, 19 nt, Artificial Sequence
  Description of Artificial Sequence: Synthetic oligonucleotide
aaucuucacagcuucauug

SEQ ID NO: 3110409 - RNA, 19 nt, Artificial Sequence
  Description of Artificial Sequence: Synthetic oligonucleotide
uaaaguucaagaucaaagc

SEQ ID NO: 3110410 - RNA, 19 nt, Artificial Sequence
  Description of Artificial Sequence: Synthetic oligonucleotide
uucauuguaaaguucaaga

SEQ ID NO: 3110411 - RNA, 19 nt, Artificial Sequence
  Description of Artificial Sequence: Synthetic oligonucleotide
cauugauaaaucuucacag

SEQ ID NO: 3110412 - RNA, 19 nt, Artificial Sequence
  Description of Artificial Sequence: Synthetic oligonucleotide
acauaauacauacaaaaga

SEQ ID NO: 3110413 - RNA, 19 nt, Artificial Sequence
  Description of Artificial Sequence: Synthetic oligonucleotide
aaacuuucaauguugcuca

SEQ ID NO: 3110414 - RNA, 19 nt, Artificial Sequence
  Description of Artificial Sequence: Synthetic oligonucleotide
agauuuacaacauaauaca

SEQ ID NO: 3110415 - RNA, 19 nt, Artificial Sequence
  Description of Artificial Sequence: Synthetic oligonucleotide
uaauagauuuacaacauaa

SEQ ID NO: 3110416 - RNA, 19 nt, Artificial Sequence
  Description of Artificial Sequence: Synthetic oligonucleotide
guuguauaagcccuaaagg

SEQ ID NO: 3110417 - RNA, 19 nt, Artificial Sequence
  Description of Artificial Sequence: Synthetic oligonucleotide
ucauugauaaaucuucaca

SEQ ID NO: 3110418 - RNA, 19 nt, Artificial Sequence
  Description of Artificial Sequence: Synthetic oligonucleotide
uuguauaagcccuaaagga

SEQ ID NO: 3110419 - RNA, 19 nt, Artificial Sequence
  Description of Artificial Sequence: Synthetic oligonucleotide
uuacauaauagauuuacaa

SEQ ID NO: 3110420 - RNA, 19 nt, Artificial Sequence
  Description of Artificial Sequence: Synthetic oligonucleotide
ugagguaacucauugauaa

SEQ ID NO: 3110421 - RNA, 19 nt, Artificial Sequence
  Description of Artificial Sequence: Synthetic oligonucleotide
ucauucauguuguauaagc

SEQ ID NO: 3110422 - RNA, 19 nt, Artificial Sequence
  Description of Artificial Sequence: Synthetic oligonucleotide
uacauaauagauuuacaac

SEQ ID NO: 3110423 - RNA, 19 nt, Artificial Sequence
  Description of Artificial Sequence: Synthetic oligonucleotide
uucaauguugcucacuggc

SEQ ID NO: 3110424 - RNA, 19 nt, Artificial Sequence
  Description of Artificial Sequence: Synthetic oligonucleotide
acuguuacauaauagauuu

SEQ ID NO: 3110425 - RNA, 19 nt, Artificial Sequence
  Description of Artificial Sequence: Synthetic oligonucleotide
guaaaguucaagaucaaag

SEQ ID NO: 3110426 - RNA, 19 nt, Artificial Sequence
  Description of Artificial Sequence: Synthetic oligonucleotide
auuguaaaguucaagauca

SEQ ID NO: 3110427 - RNA, 19 nt, Artificial Sequence
  Description of Artificial Sequence: Synthetic oligonucleotide
auaauacauacaaaagagc

SEQ ID NO: 3110428 - RNA, 19 nt, Artificial Sequence
  Description of Artificial Sequence: Synthetic oligonucleotide
cuaaacuggacauaagaug

SEQ ID NO: 3110429 - RNA, 19 nt, Artificial Sequence
  Description of Artificial Sequence: Synthetic oligonucleotide
uguuacauaauagauuuac

SEQ ID NO: 3110430 - RNA, 19 nt, Artificial Sequence
  Description of Artificial Sequence: Synthetic oligonucleotide
uucaagaucaaagcgaaca

SEQ ID NO: 3110431 - RNA, 19 nt, Artificial Sequence
  Description of Artificial Sequence: Synthetic oligonucleotide
uguauaagcccuaaaggaa

SEQ ID NO: 3110432 - RNA, 19 nt, Artificial Sequence
  Description of Artificial Sequence: Synthetic oligonucleotide
aaacugagguaacucauug

SEQ ID NO: 3110433 - RNA, 19 nt, Artificial Sequence
  Description of Artificial Sequence: Synthetic oligonucleotide
ucaagaaguucauucaugu

SEQ ID NO: 3110434 - RNA, 19 nt, Artificial Sequence
  Description of Artificial Sequence: Synthetic oligonucleotide
agcaaauuaaauaugagau

SEQ ID NO: 3110435 - RNA, 19 nt, Artificial Sequence
  Description of Artificial Sequence: Synthetic oligonucleotide
uccuaaacuggacauaaga

SEQ ID NO: 3110436 - RNA, 19 nt, Artificial Sequence
  Description of Artificial Sequence: Synthetic oligonucleotide
uucauguuguauaagcccu

SEQ ID NO: 3110437 - RNA, 19 nt, Artificial Sequence
  Description of Artificial Sequence: Synthetic oligonucleotide
uacaaaagagcaaauuaaa

SEQ ID NO: 3110438 - RNA, 19 nt, Artificial Sequence
  Description of Artificial Sequence: Synthetic oligonucleotide
gaucaaagcgaacacaauc

SEQ ID NO: 3110439 - RNA, 19 nt, Artificial Sequence
  Description of Artificial Sequence: Synthetic oligonucleotide
uauuagaggagucucucac

SEQ ID NO: 3110440 - RNA, 19 nt, Artificial Sequence
  Description of Artificial Sequence: Synthetic oligonucleotide
gagcaaauuaaauaugaga

SEQ ID NO: 3110441 - RNA, 19 nt, Artificial Sequence
  Description of Artificial Sequence: Synthetic oligonucleotide
guuguaaacuguuacauaa

SEQ ID NO: 3110442 - RNA, 19 nt, Artificial Sequence
  Description of Artificial Sequence: Synthetic oligonucleotide
aaucuuccuaaacuggaca

SEQ ID NO: 3110443 - RNA, 19 nt, Artificial Sequence
  Description of Artificial Sequence: Synthetic oligonucleotide
aagagcaaauuaaauauga

SEQ ID NO: 3110444 - RNA, 19 nt, Artificial Sequence
  Description of Artificial Sequence: Synthetic oligonucleotide
auuucaagaaguucauuca

SEQ ID NO: 3110445 - RNA, 19 nt, Artificial Sequence
  Description of Artificial Sequence: Synthetic oligonucleotide
cauucauguuguauaagcc

SEQ ID NO: 3110446 - RNA, 19 nt, Artificial Sequence
  Description of Artificial Sequence: Synthetic oligonucleotide
uucaagaaguucauucaug

SEQ ID NO: 3110447 - RNA, 19 nt, Artificial Sequence
  Description of Artificial Sequence: Synthetic oligonucleotide
uaugagauauuagaggagu

SEQ ID NO: 3110448 - RNA, 19 nt, Artificial Sequence
  Description of Artificial Sequence: Synthetic oligonucleotide
cauuguaaaguucaagauc

SEQ ID NO: 3110449 - RNA, 19 nt, Artificial Sequence
  Description of Artificial Sequence: Synthetic oligonucleotide
uguaaacuguuacauaaua

SEQ ID NO: 3110450 - RNA, 19 nt, Artificial Sequence
  Description of Artificial Sequence: Synthetic oligonucleotide
cuuucaauguugcucacug

SEQ ID NO: 3110451 - RNA, 19 nt, Artificial Sequence
  Description of Artificial Sequence: Synthetic oligonucleotide
aaguucaagaucaaagcga

SEQ ID NO: 3110452 - RNA, 19 nt, Artificial Sequence
  Description of Artificial Sequence: Synthetic oligonucleotide
ucaagaucaaagcgaacac

SEQ ID NO: 3110453 - RNA, 19 nt, Artificial Sequence
  Description of Artificial Sequence: Synthetic oligonucleotide
aguucauucauguuguaua

SEQ ID NO: 3110454 - RNA, 19 nt, Artificial Sequence
  Description of Artificial Sequence: Synthetic oligonucleotide
ucauuguaaaguucaagau

SEQ ID NO: 3110455 - RNA, 19 nt, Artificial Sequence
  Description of Artificial Sequence: Synthetic oligonucleotide
aaagagcaaauuaaauaug

SEQ ID NO: 3110456 - RNA, 19 nt, Artificial Sequence
  Description of Artificial Sequence: Synthetic oligonucleotide
cacaaucuuccuaaacugg

SEQ ID NO: 3110457 - RNA, 19 nt, Artificial Sequence
  Description of Artificial Sequence: Synthetic oligonucleotide
guaaacuguuacauaauag

SEQ ID NO: 3110458 - RNA, 19 nt, Artificial Sequence
  Description of Artificial Sequence: Synthetic oligonucleotide
aacuggacauaagaugcac

SEQ ID NO: 3110459 - RNA, 19 nt, Artificial Sequence
  Description of Artificial Sequence: Synthetic oligonucleotide
acugagguaacucauugau

SEQ ID NO: 3110460 - RNA, 19 nt, Artificial Sequence
  Description of Artificial Sequence: Synthetic oligonucleotide
aaacuguuacauaauagau

SEQ ID NO: 3110461 - RNA, 19 nt, Artificial Sequence
  Description of Artificial Sequence: Synthetic oligonucleotide
aagaucaaagcgaacacaa

SEQ ID NO: 3110462 - RNA, 19 nt, Artificial Sequence
  Description of Artificial Sequence: Synthetic oligonucleotide
ucucacuccaacugaagga

SEQ ID NO: 3110463 - RNA, 19 nt, Artificial Sequence
  Description of Artificial Sequence: Synthetic oligonucleotide
aacugaaggagucuucuuu

SEQ ID NO: 3110464 - RNA, 19 nt, Artificial Sequence
  Description of Artificial Sequence: Synthetic oligonucleotide
aauacauacaaaagagcaa

SEQ ID NO: 3110465 - RNA, 19 nt, Artificial Sequence
  Description of Artificial Sequence: Synthetic oligonucleotide
aauagauuuacaacauaau

SEQ ID NO: 3110466 - RNA, 19 nt, Artificial Sequence
  Description of Artificial Sequence: Synthetic oligonucleotide
auacauacaaaagagcaaa

SEQ ID NO: 3110467 - RNA, 19 nt, Artificial Sequence
  Description of Artificial Sequence: Synthetic oligonucleotide
gaaggagucuucuuuaaaa

SEQ ID NO: 3110468 - RNA, 19 nt, Artificial Sequence
  Description of Artificial Sequence: Synthetic oligonucleotide
cauacaaaagagcaaauua

SEQ ID NO: 3110469 - RNA, 19 nt, Artificial Sequence
  Description of Artificial Sequence: Synthetic oligonucleotide
ugagauauuagaggagucu

SEQ ID NO: 3110470 - RNA, 19 nt, Artificial Sequence
  Description of Artificial Sequence: Synthetic oligonucleotide
ucaauguugcucacuggca

SEQ ID NO: 3110471 - RNA, 19 nt, Artificial Sequence
  Description of Artificial Sequence: Synthetic oligonucleotide
gagucucucacuccaacug

SEQ ID NO: 3110472 - RNA, 19 nt, Artificial Sequence
  Description of Artificial Sequence: Synthetic oligonucleotide
cucucacuccaacugaagg

SEQ ID NO: 3110473 - RNA, 19 nt, Artificial Sequence
  Description of Artificial Sequence: Synthetic oligonucleotide
uuucaauguugcucacugg

SEQ ID NO: 3110474 - RNA, 19 nt, Artificial Sequence
  Description of Artificial Sequence: Synthetic oligonucleotide
aauguugcucacuggcagu

SEQ ID NO: 3110475 - RNA, 19 nt, Artificial Sequence
  Description of Artificial Sequence: Synthetic oligonucleotide
auacaaaagagcaaauuaa

SEQ ID NO: 3110476 - RNA, 19 nt, Artificial Sequence
  Description of Artificial Sequence: Synthetic oligonucleotide
aaaauuucaagaaguucau

SEQ ID NO: 3110477 - RNA, 19 nt, Artificial Sequence
  Description of Artificial Sequence: Synthetic oligonucleotide
aacuuucaauguugcucac

SEQ ID NO: 3110478 - RNA, 19 nt, Artificial Sequence
  Description of Artificial Sequence: Synthetic oligonucleotide
aucaaagcgaacacaaucu

SEQ ID NO: 3110479 - RNA, 19 nt, Artificial Sequence
  Description of Artificial Sequence: Synthetic oligonucleotide
caauguugcucacuggcag

SEQ ID NO: 3110480 - RNA, 19 nt, Artificial Sequence
  Description of Artificial Sequence: Synthetic oligonucleotide
aacugagguaacucauuga

SEQ ID NO: 3110481 - RNA, 19 nt, Artificial Sequence
  Description of Artificial Sequence: Synthetic oligonucleotide
cucauugauaaaucuucac

SEQ ID NO: 3110482 - RNA, 19 nt, Artificial Sequence
  Description of Artificial Sequence: Synthetic oligonucleotide
gauauuagaggagucucuc

SEQ ID NO: 3110483 - RNA, 19 nt, Artificial Sequence
  Description of Artificial Sequence: Synthetic oligonucleotide
uauaagcccuaaaggaaaa

SEQ ID NO: 3110484 - RNA, 19 nt, Artificial Sequence
  Description of Artificial Sequence: Synthetic oligonucleotide
agaaguucauucauguugu

SEQ ID NO: 3110485 - RNA, 19 nt, Artificial Sequence
  Description of Artificial Sequence: Synthetic oligonucleotide
aacuguuacauaauagauu

SEQ ID NO: 3110486 - RNA, 19 nt, Artificial Sequence
  Description of Artificial Sequence: Synthetic oligonucleotide
agaggagucucucacucca

SEQ ID NO: 3110487 - RNA, 19 nt, Artificial Sequence
  Description of Artificial Sequence: Synthetic oligonucleotide
gaacacaaucuuccuaaac

SEQ ID NO: 3110488 - RNA, 19 nt, Artificial Sequence
  Description of Artificial Sequence: Synthetic oligonucleotide
uucacagcuucauuguaaa

SEQ ID NO: 3110489 - RNA, 19 nt, Artificial Sequence
  Description of Artificial Sequence: Synthetic oligonucleotide
aaaucuucacagcuucauu

SEQ ID NO: 3110490 - RNA, 19 nt, Artificial Sequence
  Description of Artificial Sequence: Synthetic oligonucleotide
gagauauuagaggagucuc

SEQ ID NO: 3110491 - RNA, 19 nt, Artificial Sequence
  Description of Artificial Sequence: Synthetic oligonucleotide
uguaaaguucaagaucaaa

SEQ ID NO: 3110492 - RNA, 19 nt, Artificial Sequence
  Description of Artificial Sequence: Synthetic oligonucleotide
cucacuggcagucauaaaa

SEQ ID NO: 3110493 - RNA, 19 nt, Artificial Sequence
  Description of Artificial Sequence: Synthetic oligonucleotide
auuuacaacauaauacaua

SEQ ID NO: 3110494 - RNA, 19 nt, Artificial Sequence
  Description of Artificial Sequence: Synthetic oligonucleotide
agagcaaauuaaauaugag

SEQ ID NO: 3110495 - RNA, 19 nt, Artificial Sequence
  Description of Artificial Sequence: Synthetic oligonucleotide
auuagaggagucucucacu

SEQ ID NO: 3110496 - RNA, 19 nt, Artificial Sequence
  Description of Artificial Sequence: Synthetic oligonucleotide
caaagcgaacacaaucuuc

SEQ ID NO: 3110497 - RNA, 19 nt, Artificial Sequence
  Description of Artificial Sequence: Synthetic oligonucleotide
auaauagauuuacaacaua

SEQ ID NO: 3110498 - RNA, 19 nt, Artificial Sequence
  Description of Artificial Sequence: Synthetic oligonucleotide
aggagucucucacuccaac

SEQ ID NO: 3110499 - RNA, 19 nt, Artificial Sequence
  Description of Artificial Sequence: Synthetic oligonucleotide
cuucauuguaaaguucaag

SEQ ID NO: 3110500 - RNA, 19 nt, Artificial Sequence
  Description of Artificial Sequence: Synthetic oligonucleotide
uuguaaacuguuacauaau

SEQ ID NO: 3110501 - RNA, 19 nt, Artificial Sequence
  Description of Artificial Sequence: Synthetic oligonucleotide
auauuagaggagucucuca

SEQ ID NO: 3110502 - RNA, 19 nt, Artificial Sequence
  Description of Artificial Sequence: Synthetic oligonucleotide
uaaaucuucacagcuucau

SEQ ID NO: 3110503 - RNA, 19 nt, Artificial Sequence
  Description of Artificial Sequence: Synthetic oligonucleotide
caaucuuccuaaacuggac

SEQ ID NO: 3110504 - RNA, 19 nt, Artificial Sequence
  Description of Artificial Sequence: Synthetic oligonucleotide
ucucucacuccaacugaag

SEQ ID NO: 3110505 - RNA, 19 nt, Artificial Sequence
  Description of Artificial Sequence: Synthetic oligonucleotide
ugaaggagucuucuuuaaa

SEQ ID NO: 3110506 - RNA, 19 nt, Artificial Sequence
  Description of Artificial Sequence: Synthetic oligonucleotide
uucauucauguuguauaag

SEQ ID NO: 3110507 - RNA, 19 nt, Artificial Sequence
  Description of Artificial Sequence: Synthetic oligonucleotide
aaguucauucauguuguau

SEQ ID NO: 3110508 - RNA, 19 nt, Artificial Sequence
  Description of Artificial Sequence: Synthetic oligonucleotide
ucaaagcgaacacaaucuu

SEQ ID NO: 3110509 - RNA, 19 nt, Artificial Sequence
  Description of Artificial Sequence: Synthetic oligonucleotide
uacauacaaaagagcaaau

SEQ ID NO: 3110510 - RNA, 19 nt, Artificial Sequence
  Description of Artificial Sequence: Synthetic oligonucleotide
aucuuccuaaacuggacau

SEQ ID NO: 3110511 - RNA, 19 nt, Artificial Sequence
  Description of Artificial Sequence: Synthetic oligonucleotide
auaugagauauuagaggag

SEQ ID NO: 3110512 - RNA, 19 nt, Artificial Sequence
  Description of Artificial Sequence: Synthetic oligonucleotide
agguaacucauugauaaau

SEQ ID NO: 3110513 - RNA, 19 nt, Artificial Sequence
  Description of Artificial Sequence: Synthetic oligonucleotide
guaacucauugauaaaucu

SEQ ID NO: 3110514 - RNA, 19 nt, Artificial Sequence
  Description of Artificial Sequence: Synthetic oligonucleotide
aguucaagaucaaagcgaa

SEQ ID NO: 3110515 - RNA, 19 nt, Artificial Sequence
  Description of Artificial Sequence: Synthetic oligonucleotide
acugaaggagucuucuuua

SEQ ID NO: 3110516 - RNA, 19 nt, Artificial Sequence
  Description of Artificial Sequence: Synthetic oligonucleotide
acaaucuuccuaaacugga

SEQ ID NO: 3110517 - RNA, 19 nt, Artificial Sequence
  Description of Artificial Sequence: Synthetic oligonucleotide
uuccuaaacuggacauaag

SEQ ID NO: 3110518 - RNA, 19 nt, Artificial Sequence
  Description of Artificial Sequence: Synthetic oligonucleotide
aagcgaacacaaucuuccu

SEQ ID NO: 3110519 - RNA, 19 nt, Artificial Sequence
  Description of Artificial Sequence: Synthetic oligonucleotide
guucauucauguuguauaa

SEQ ID NO: 3110520 - RNA, 19 nt, Artificial Sequence
  Description of Artificial Sequence: Synthetic oligonucleotide
agucucucacuccaacuga

SEQ ID NO: 3110521 - RNA, 19 nt, Artificial Sequence
  Description of Artificial Sequence: Synthetic oligonucleotide
ucacagcuucauuguaaag

SEQ ID NO: 3110522 - RNA, 19 nt, Artificial Sequence
  Description of Artificial Sequence: Synthetic oligonucleotide
augagauauuagaggaguc

SEQ ID NO: 3110523 - RNA, 19 nt, Artificial Sequence
  Description of Artificial Sequence: Synthetic oligonucleotide
guuacauaauagauuuaca

SEQ ID NO: 3110524 - RNA, 19 nt, Artificial Sequence
  Description of Artificial Sequence: Synthetic oligonucleotide
cauaauagauuuacaacau

SEQ ID NO: 3110525 - RNA, 19 nt, Artificial Sequence
  Description of Artificial Sequence: Synthetic oligonucleotide
aaaacugagguaacucauu

SEQ ID NO: 3110526 - RNA, 19 nt, Artificial Sequence
  Description of Artificial Sequence: Synthetic oligonucleotide
uagaggagucucucacucc

SEQ ID NO: 3110527 - RNA, 19 nt, Artificial Sequence
  Description of Artificial Sequence: Synthetic oligonucleotide
cacuccaacugaaggaguc

SEQ ID NO: 3110528 - RNA, 19 nt, Artificial Sequence
  Description of Artificial Sequence: Synthetic oligonucleotide
guauaagcccuaaaggaaa

SEQ ID NO: 3110529 - RNA, 19 nt, Artificial Sequence
  Description of Artificial Sequence: Synthetic oligonucleotide
aaacuggacauaagaugca

SEQ ID NO: 3110530 - RNA, 19 nt, Artificial Sequence
  Description of Artificial Sequence: Synthetic oligonucleotide
agauauuagaggagucucu

SEQ ID NO: 3110531 - RNA, 19 nt, Artificial Sequence
  Description of Artificial Sequence: Synthetic oligonucleotide
auguugcucacuggcaguc

SEQ ID NO: 3110532 - RNA, 19 nt, Artificial Sequence
  Description of Artificial Sequence: Synthetic oligonucleotide
ucauguuguauaagcccua

SEQ ID NO: 3110533 - RNA, 19 nt, Artificial Sequence
  Description of Artificial Sequence: Synthetic oligonucleotide
acaacauaauacauacaaa

SEQ ID NO: 3110534 - RNA, 19 nt, Artificial Sequence
  Description of Artificial Sequence: Synthetic oligonucleotide
uuguaaaguucaagaucaa

SEQ ID NO: 3110535 - RNA, 19 nt, Artificial Sequence
  Description of Artificial Sequence: Synthetic oligonucleotide
ugcucacuggcagucauaa

SEQ ID NO: 3110536 - RNA, 19 nt, Artificial Sequence
  Description of Artificial Sequence: Synthetic oligonucleotide
acucauugauaaaucuuca

SEQ ID NO: 3110537 - RNA, 19 nt, Artificial Sequence
  Description of Artificial Sequence: Synthetic oligonucleotide
uccaacugaaggagucuuc

SEQ ID NO: 3110538 - RNA, 19 nt, Artificial Sequence
  Description of Artificial Sequence: Synthetic oligonucleotide
cuucacagcuucauuguaa

SEQ ID NO: 3110539 - RNA, 19 nt, Artificial Sequence
  Description of Artificial Sequence: Synthetic oligonucleotide
ucacuccaacugaaggagu

SEQ ID NO: 3110540 - RNA, 19 nt, Artificial Sequence
  Description of Artificial Sequence: Synthetic oligonucleotide
cuuccuaaacuggacauaa

SEQ ID NO: 3110541 - RNA, 19 nt, Artificial Sequence
  Description of Artificial Sequence: Synthetic oligonucleotide
gauuuacaacauaauacau

SEQ ID NO: 3110542 - RNA, 19 nt, Artificial Sequence
  Description of Artificial Sequence: Synthetic oligonucleotide
gguaacucauugauaaauc

SEQ ID NO: 3110543 - RNA, 19 nt, Artificial Sequence
  Description of Artificial Sequence: Synthetic oligonucleotide
gcgaacacaaucuuccuaa

SEQ ID NO: 3110544 - RNA, 19 nt, Artificial Sequence
  Description of Artificial Sequence: Synthetic oligonucleotide
caagaucaaagcgaacaca

SEQ ID NO: 3110545 - RNA, 19 nt, Artificial Sequence
  Description of Artificial Sequence: Synthetic oligonucleotide
agcgaacacaaucuuccua

SEQ ID NO: 3110546 - RNA, 19 nt, Artificial Sequence
  Description of Artificial Sequence: Synthetic oligonucleotide
ucuuccuaaacuggacaua

SEQ ID NO: 3110547 - RNA, 19 nt, Artificial Sequence
  Description of Artificial Sequence: Synthetic oligonucleotide
acuuucaauguugcucacu

SEQ ID NO: 3110548 - RNA, 19 nt, Artificial Sequence
  Description of Artificial Sequence: Synthetic oligonucleotide
gagguaacucauugauaaa

SEQ ID NO: 3110549 - RNA, 19 nt, Artificial Sequence
  Description of Artificial Sequence: Synthetic oligonucleotide
cagcuucauuguaaaguuc

SEQ ID NO: 3110550 - RNA, 19 nt, Artificial Sequence
  Description of Artificial Sequence: Synthetic oligonucleotide
auguuguauaagcccuaaa

SEQ ID NO: 3110551 - RNA, 19 nt, Artificial Sequence
  Description of Artificial Sequence: Synthetic oligonucleotide
uguugcucacuggcaguca

SEQ ID NO: 3110552 - RNA, 19 nt, Artificial Sequence
  Description of Artificial Sequence: Synthetic oligonucleotide
cugaaggagucuucuuuaa

SEQ ID NO: 3110553 - RNA, 19 nt, Artificial Sequence
  Description of Artificial Sequence: Synthetic oligonucleotide
cugagguaacucauugaua

SEQ ID NO: 3110554 - RNA, 19 nt, Artificial Sequence
  Description of Artificial Sequence: Synthetic oligonucleotide
agaucaaagcgaacacaau

SEQ ID NO: 3110555 - RNA, 19 nt, Artificial Sequence
  Description of Artificial Sequence: Synthetic oligonucleotide
gaaguucauucauguugua

SEQ ID NO: 3110556 - RNA, 19 nt, Artificial Sequence
  Description of Artificial Sequence: Synthetic oligonucleotide
guucaagaucaaagcgaac

SEQ ID NO: 3110557 - RNA, 19 nt, Artificial Sequence
  Description of Artificial Sequence: Synthetic oligonucleotide
uugcucacuggcagucaua

SEQ ID NO: 3110558 - RNA, 19 nt, Artificial Sequence
  Description of Artificial Sequence: Synthetic oligonucleotide
cauguuguauaagcccuaa

SEQ ID NO: 3110559 - RNA, 19 nt, Artificial Sequence
  Description of Artificial Sequence: Synthetic oligonucleotide
ccuaaacuggacauaagau

SEQ ID NO: 3110560 - RNA, 19 nt, Artificial Sequence
  Description of Artificial Sequence: Synthetic oligonucleotide
gucucucacuccaacugaa

SEQ ID NO: 3110561 - RNA, 19 nt, Artificial Sequence
  Description of Artificial Sequence: Synthetic oligonucleotide
ggagucucucacuccaacu

SEQ ID NO: 3110562 - RNA, 19 nt, Artificial Sequence
  Description of Artificial Sequence: Synthetic oligonucleotide
caagaaguucauucauguu

SEQ ID NO: 3110563 - RNA, 19 nt, Artificial Sequence
  Description of Artificial Sequence: Synthetic oligonucleotide
gaggagucucucacuccaa

SEQ ID NO: 3110564 - RNA, 19 nt, Artificial Sequence
  Description of Artificial Sequence: Synthetic oligonucleotide
gcuucauuguaaaguucaa

SEQ ID NO: 3110565 - RNA, 19 nt, Artificial Sequence
  Description of Artificial Sequence: Synthetic oligonucleotide
caacugaaggagucuucuu

SEQ ID NO: 3110566 - RNA, 19 nt, Artificial Sequence
  Description of Artificial Sequence: Synthetic oligonucleotide
ccaacugaaggagucuucu

SEQ ID NO: 3110567 - RNA, 19 nt, Artificial Sequence
  Description of Artificial Sequence: Synthetic oligonucleotide
cgaacacaaucuuccuaaa

SEQ ID NO: 3110568 - RNA, 19 nt, Artificial Sequence
  Description of Artificial Sequence: Synthetic oligonucleotide
gcucacuggcagucauaaa

SEQ ID NO: 3110569 - RNA, 19 nt, Artificial Sequence
  Description of Artificial Sequence: Synthetic oligonucleotide
aaaguauaguauuuaaacc

SEQ ID NO: 3110570 - RNA, 19 nt, Artificial Sequence
  Description of Artificial Sequence: Synthetic oligonucleotide
auuuaaaauaaacugaaag

SEQ ID NO: 3110571 - RNA, 19 nt, Artificial Sequence
  Description of Artificial Sequence: Synthetic oligonucleotide
uuugaauucacaaaugaca

SEQ ID NO: 3110572 - RNA, 19 nt, Artificial Sequence
  Description of Artificial Sequence: Synthetic oligonucleotide
aaguauaguauuuaaacca

SEQ ID NO: 3110573 - RNA, 19 nt, Artificial Sequence
  Description of Artificial Sequence: Synthetic oligonucleotide
uuuaaaauaaacugaaagu

SEQ ID NO: 3110574 - RNA, 19 nt, Artificial Sequence
  Description of Artificial Sequence: Synthetic oligonucleotide
gaaaguauaguauuuaaac

SEQ ID NO: 3110575 - RNA, 19 nt, Artificial Sequence
  Description of Artificial Sequence: Synthetic oligonucleotide
aagacuuggaugcaaggcc

SEQ ID NO: 3110576 - RNA, 19 nt, Artificial Sequence
  Description of Artificial Sequence: Synthetic oligonucleotide
aguauuuaaaccaugacag

SEQ ID NO: 3110577 - RNA, 19 nt, Artificial Sequence
  Description of Artificial Sequence: Synthetic oligonucleotide
ugaacaauuuaaaauaaac

SEQ ID NO: 3110578 - RNA, 19 nt, Artificial Sequence
  Description of Artificial Sequence: Synthetic oligonucleotide
uaguauuuaaaccaugaca

SEQ ID NO: 3110579 - RNA, 19 nt, Artificial Sequence
  Description of Artificial Sequence: Synthetic oligonucleotide
uauuauuauauauaaacuu

SEQ ID NO: 3110580 - RNA, 19 nt, Artificial Sequence
  Description of Artificial Sequence: Synthetic oligonucleotide
aaagacuuggaugcaaggc

SEQ ID NO: 3110581 - RNA, 19 nt, Artificial Sequence
  Description of Artificial Sequence: Synthetic oligonucleotide
uauaguauuuaaaccauga

SEQ ID NO: 3110582 - RNA, 19 nt, Artificial Sequence
  Description of Artificial Sequence: Synthetic oligonucleotide
uuaaaauaaacugaaagua

SEQ ID NO: 3110583 - RNA, 19 nt, Artificial Sequence
  Description of Artificial Sequence: Synthetic oligonucleotide
aacauggcauaauuccucc

SEQ ID NO: 3110584 - RNA, 19 nt, Artificial Sequence
  Description of Artificial Sequence: Synthetic oligonucleotide
uuaucauuuggcuacauuc

SEQ ID NO: 3110585 - RNA, 19 nt, Artificial Sequence
  Description of Artificial Sequence: Synthetic oligonucleotide
uuuaaaccaugacagaaca

SEQ ID NO: 3110586 - RNA, 19 nt, Artificial Sequence
  Description of Artificial Sequence: Synthetic oligonucleotide
uuuggcuacauucucagga

SEQ ID NO: 3110587 - RNA, 19 nt, Artificial Sequence
  Description of Artificial Sequence: Synthetic oligonucleotide
uaaacugaaaguauaguau

SEQ ID NO: 3110588 - RNA, 19 nt, Artificial Sequence
  Description of Artificial Sequence: Synthetic oligonucleotide
uaaaauaaacugaaaguau

SEQ ID NO: 3110589 - RNA, 19 nt, Artificial Sequence
  Description of Artificial Sequence: Synthetic oligonucleotide
cagaacauggcauaauucc

SEQ ID NO: 3110590 - RNA, 19 nt, Artificial Sequence
  Description of Artificial Sequence: Synthetic oligonucleotide
aaauaaacugaaaguauag

SEQ ID NO: 3110591 - RNA, 19 nt, Artificial Sequence
  Description of Artificial Sequence: Synthetic oligonucleotide
auaguauuuaaaccaugac

SEQ ID NO: 3110592 - RNA, 19 nt, Artificial Sequence
  Description of Artificial Sequence: Synthetic oligonucleotide
uaaaccaugacagaacaug

SEQ ID NO: 3110593 - RNA, 19 nt, Artificial Sequence
  Description of Artificial Sequence: Synthetic oligonucleotide
uugaauucacaaaugacau

SEQ ID NO: 3110594 - RNA, 19 nt, Artificial Sequence
  Description of Artificial Sequence: Synthetic oligonucleotide
ucacaaaugacaucucuug

SEQ ID NO: 3110595 - RNA, 19 nt, Artificial Sequence
  Description of Artificial Sequence: Synthetic oligonucleotide
ucuuacagaggcaggacag

SEQ ID NO: 3110596 - RNA, 19 nt, Artificial Sequence
  Description of Artificial Sequence: Synthetic oligonucleotide
auaaacugaaaguauagua

SEQ ID NO: 3110597 - RNA, 19 nt, Artificial Sequence
  Description of Artificial Sequence: Synthetic oligonucleotide
uaggugaacaauuuaaaau

SEQ ID NO: 3110598 - RNA, 19 nt, Artificial Sequence
  Description of Artificial Sequence: Synthetic oligonucleotide
aaacugaaaguauaguauu

SEQ ID NO: 3110599 - RNA, 19 nt, Artificial Sequence
  Description of Artificial Sequence: Synthetic oligonucleotide
ugaaaguauaguauuuaaa

SEQ ID NO: 3110600 - RNA, 19 nt, Artificial Sequence
  Description of Artificial Sequence: Synthetic oligonucleotide
uauuuaaaccaugacagaa

SEQ ID NO: 3110601 - RNA, 19 nt, Artificial Sequence
  Description of Artificial Sequence: Synthetic oligonucleotide
aaaccaugacagaacaugg

SEQ ID NO: 3110602 - RNA, 19 nt, Artificial Sequence
  Description of Artificial Sequence: Synthetic oligonucleotide
aauaaacugaaaguauagu

SEQ ID NO: 3110603 - RNA, 19 nt, Artificial Sequence
  Description of Artificial Sequence: Synthetic oligonucleotide
aaugacaucucuuggucaa

SEQ ID NO: 3110604 - RNA, 19 nt, Artificial Sequence
  Description of Artificial Sequence: Synthetic oligonucleotide
uaucauuuggcuacauucu

SEQ ID NO: 3110605 - RNA, 19 nt, Artificial Sequence
  Description of Artificial Sequence: Synthetic oligonucleotide
aggugaacaauuuaaaaua

SEQ ID NO: 3110606 - RNA, 19 nt, Artificial Sequence
  Description of Artificial Sequence: Synthetic oligonucleotide
aaaauaaacugaaaguaua

SEQ ID NO: 3110607 - RNA, 19 nt, Artificial Sequence
  Description of Artificial Sequence: Synthetic oligonucleotide
cuuugaauucacaaaugac

SEQ ID NO: 3110608 - RNA, 19 nt, Artificial Sequence
  Description of Artificial Sequence: Synthetic oligonucleotide
auuuaaaccaugacagaac

SEQ ID NO: 3110609 - RNA, 19 nt, Artificial Sequence
  Description of Artificial Sequence: Synthetic oligonucleotide
auggcauaauuccuccugc

SEQ ID NO: 3110610 - RNA, 19 nt, Artificial Sequence
  Description of Artificial Sequence: Synthetic oligonucleotide
ccuguaaagacuuggaugc

SEQ ID NO: 3110611 - RNA, 19 nt, Artificial Sequence
  Description of Artificial Sequence: Synthetic oligonucleotide
uaaagacuuggaugcaagg

SEQ ID NO: 3110612 - RNA, 19 nt, Artificial Sequence
  Description of Artificial Sequence: Synthetic oligonucleotide
aaaugacaucucuugguca

SEQ ID NO: 3110613 - RNA, 19 nt, Artificial Sequence
  Description of Artificial Sequence: Synthetic oligonucleotide
acaaaugacaucucuuggu

SEQ ID NO: 3110614 - RNA, 19 nt, Artificial Sequence
  Description of Artificial Sequence: Synthetic oligonucleotide
auuauuauauauaaacuuu

SEQ ID NO: 3110615 - RNA, 19 nt, Artificial Sequence
  Description of Artificial Sequence: Synthetic oligonucleotide
ucccuuaucauuuggcuac

SEQ ID NO: 3110616 - RNA, 19 nt, Artificial Sequence
  Description of Artificial Sequence: Synthetic oligonucleotide
gaauucacaaaugacaucu

SEQ ID NO: 3110617 - RNA, 19 nt, Artificial Sequence
  Description of Artificial Sequence: Synthetic oligonucleotide
uccuccugcucuuacagag

SEQ ID NO: 3110618 - RNA, 19 nt, Artificial Sequence
  Description of Artificial Sequence: Synthetic oligonucleotide
aucauuuggcuacauucuc

SEQ ID NO: 3110619 - RNA, 19 nt, Artificial Sequence
  Description of Artificial Sequence: Synthetic oligonucleotide
acaucucuuggucaaaugu

SEQ ID NO: 3110620 - RNA, 19 nt, Artificial Sequence
  Description of Artificial Sequence: Synthetic oligonucleotide
aaccaugacagaacauggc

SEQ ID NO: 3110621 - RNA, 19 nt, Artificial Sequence
  Description of Artificial Sequence: Synthetic oligonucleotide
uguucccuuaucauuuggc

SEQ ID NO: 3110622 - RNA, 19 nt, Artificial Sequence
  Description of Artificial Sequence: Synthetic oligonucleotide
ucauuuggcuacauucuca

SEQ ID NO: 3110623 - RNA, 19 nt, Artificial Sequence
  Description of Artificial Sequence: Synthetic oligonucleotide
auaggugaacaauuuaaaa

SEQ ID NO: 3110624 - RNA, 19 nt, Artificial Sequence
  Description of Artificial Sequence: Synthetic oligonucleotide
ucaaauguucccuuaucau

SEQ ID NO: 3110625 - RNA, 19 nt, Artificial Sequence
  Description of Artificial Sequence: Synthetic oligonucleotide
ucucuuggucaaauguucc

SEQ ID NO: 3110626 - RNA, 19 nt, Artificial Sequence
  Description of Artificial Sequence: Synthetic oligonucleotide
cauuuggcuacauucucag

SEQ ID NO: 3110627 - RNA, 19 nt, Artificial Sequence
  Description of Artificial Sequence: Synthetic oligonucleotide
auucacaaaugacaucucu

SEQ ID NO: 3110628 - RNA, 19 nt, Artificial Sequence
  Description of Artificial Sequence: Synthetic oligonucleotide
auggcuuugcccuguaaag

SEQ ID NO: 3110629 - RNA, 19 nt, Artificial Sequence
  Description of Artificial Sequence: Synthetic oligonucleotide
aauguucccuuaucauuug

SEQ ID NO: 3110630 - RNA, 19 nt, Artificial Sequence
  Description of Artificial Sequence: Synthetic oligonucleotide
accaugacagaacauggca

SEQ ID NO: 3110631 - RNA, 19 nt, Artificial Sequence
  Description of Artificial Sequence: Synthetic oligonucleotide
gaacaauuuaaaauaaacu

SEQ ID NO: 3110632 - RNA, 19 nt, Artificial Sequence
  Description of Artificial Sequence: Synthetic oligonucleotide
uuugagauaggugaacaau

SEQ ID NO: 3110633 - RNA, 19 nt, Artificial Sequence
  Description of Artificial Sequence: Synthetic oligonucleotide
auuccuccugcucuuacag

SEQ ID NO: 3110634 - RNA, 19 nt, Artificial Sequence
  Description of Artificial Sequence: Synthetic oligonucleotide
caaaugacaucucuugguc

SEQ ID NO: 3110635 - RNA, 19 nt, Artificial Sequence
  Description of Artificial Sequence: Synthetic oligonucleotide
ugagauaggugaacaauuu

SEQ ID NO: 3110636 - RNA, 19 nt, Artificial Sequence
  Description of Artificial Sequence: Synthetic oligonucleotide
uucacaaaugacaucucuu

SEQ ID NO: 3110637 - RNA, 19 nt, Artificial Sequence
  Description of Artificial Sequence: Synthetic oligonucleotide
aauuccuccugcucuuaca

SEQ ID NO: 3110638 - RNA, 19 nt, Artificial Sequence
  Description of Artificial Sequence: Synthetic oligonucleotide
gucaaauguucccuuauca

SEQ ID NO: 3110639 - RNA, 19 nt, Artificial Sequence
  Description of Artificial Sequence: Synthetic oligonucleotide
uacauucucaggauggcuu

SEQ ID NO: 3110640 - RNA, 19 nt, Artificial Sequence
  Description of Artificial Sequence: Synthetic oligonucleotide
aggacaggccuuugaauuc

SEQ ID NO: 3110641 - RNA, 19 nt, Artificial Sequence
  Description of Artificial Sequence: Synthetic oligonucleotide
uuuugagauaggugaacaa

SEQ ID NO: 3110642 - RNA, 19 nt, Artificial Sequence
  Description of Artificial Sequence: Synthetic oligonucleotide
cauggcauaauuccuccug

SEQ ID NO: 3110643 - RNA, 19 nt, Artificial Sequence
  Description of Artificial Sequence: Synthetic oligonucleotide
aucucuuggucaaauguuc

SEQ ID NO: 3110644 - RNA, 19 nt, Artificial Sequence
  Description of Artificial Sequence: Synthetic oligonucleotide
aaggccugcccucucucuc

SEQ ID NO: 3110645 - RNA, 19 nt, Artificial Sequence
  Description of Artificial Sequence: Synthetic oligonucleotide
aauucacaaaugacaucuc

SEQ ID NO: 3110646 - RNA, 19 nt, Artificial Sequence
  Description of Artificial Sequence: Synthetic oligonucleotide
agauaggugaacaauuuaa

SEQ ID NO: 3110647 - RNA, 19 nt, Artificial Sequence
  Description of Artificial Sequence: Synthetic oligonucleotide
acagaggcaggacaggccu

SEQ ID NO: 3110648 - RNA, 19 nt, Artificial Sequence
  Description of Artificial Sequence: Synthetic oligonucleotide
acagaacauggcauaauuc

SEQ ID NO: 3110649 - RNA, 19 nt, Artificial Sequence
  Description of Artificial Sequence: Synthetic oligonucleotide
uuggaugcaaggccugccc

SEQ ID NO: 3110650 - RNA, 19 nt, Artificial Sequence
  Description of Artificial Sequence: Synthetic oligonucleotide
ucucaggauggcuuugccc

SEQ ID NO: 3110651 - RNA, 19 nt, Artificial Sequence
  Description of Artificial Sequence: Synthetic oligonucleotide
ugaauucacaaaugacauc

SEQ ID NO: 3110652 - RNA, 19 nt, Artificial Sequence
  Description of Artificial Sequence: Synthetic oligonucleotide
cucuuggucaaauguuccc

SEQ ID NO: 3110653 - RNA, 19 nt, Artificial Sequence
  Description of Artificial Sequence: Synthetic oligonucleotide
guaaagacuuggaugcaag

SEQ ID NO: 3110654 - RNA, 19 nt, Artificial Sequence
  Description of Artificial Sequence: Synthetic oligonucleotide
aguauaguauuuaaaccau

SEQ ID NO: 3110655 - RNA, 19 nt, Artificial Sequence
  Description of Artificial Sequence: Synthetic oligonucleotide
auucucaggauggcuuugc

SEQ ID NO: 3110656 - RNA, 19 nt, Artificial Sequence
  Description of Artificial Sequence: Synthetic oligonucleotide
gauggcuuugcccuguaaa

SEQ ID NO: 3110657 - RNA, 19 nt, Artificial Sequence
  Description of Artificial Sequence: Synthetic oligonucleotide
uuacagaggcaggacaggc

SEQ ID NO: 3110658 - RNA, 19 nt, Artificial Sequence
  Description of Artificial Sequence: Synthetic oligonucleotide
uacagaggcaggacaggcc

SEQ ID NO: 3110659 - RNA, 19 nt, Artificial Sequence
  Description of Artificial Sequence: Synthetic oligonucleotide
uuaaaccaugacagaacau

SEQ ID NO: 3110660 - RNA, 19 nt, Artificial Sequence
  Description of Artificial Sequence: Synthetic oligonucleotide
gauaggugaacaauuuaaa

SEQ ID NO: 3110661 - RNA, 19 nt, Artificial Sequence
  Description of Artificial Sequence: Synthetic oligonucleotide
cucucucucagcagacugg

SEQ ID NO: 3110662 - RNA, 19 nt, Artificial Sequence
  Description of Artificial Sequence: Synthetic oligonucleotide
auuuggcuacauucucagg

SEQ ID NO: 3110663 - RNA, 19 nt, Artificial Sequence
  Description of Artificial Sequence: Synthetic oligonucleotide
uguaaagacuuggaugcaa

SEQ ID NO: 3110664 - RNA, 19 nt, Artificial Sequence
  Description of Artificial Sequence: Synthetic oligonucleotide
auguucccuuaucauuugg

SEQ ID NO: 3110665 - RNA, 19 nt, Artificial Sequence
  Description of Artificial Sequence: Synthetic oligonucleotide
guauuuaaaccaugacaga

SEQ ID NO: 3110666 - RNA, 19 nt, Artificial Sequence
  Description of Artificial Sequence: Synthetic oligonucleotide
cuccugcucuuacagaggc

SEQ ID NO: 3110667 - RNA, 19 nt, Artificial Sequence
  Description of Artificial Sequence: Synthetic oligonucleotide
ugcucuuacagaggcagga

SEQ ID NO: 3110668 - RNA, 19 nt, Artificial Sequence
  Description of Artificial Sequence: Synthetic oligonucleotide
guauaguauuuaaaccaug

SEQ ID NO: 3110669 - RNA, 19 nt, Artificial Sequence
  Description of Artificial Sequence: Synthetic oligonucleotide
uucccuuaucauuuggcua

SEQ ID NO: 3110670 - RNA, 19 nt, Artificial Sequence
  Description of Artificial Sequence: Synthetic oligonucleotide
agaacauggcauaauuccu

SEQ ID NO: 3110671 - RNA, 19 nt, Artificial Sequence
  Description of Artificial Sequence: Synthetic oligonucleotide
aacugaaaguauaguauuu

SEQ ID NO: 3110672 - RNA, 19 nt, Artificial Sequence
  Description of Artificial Sequence: Synthetic oligonucleotide
ucucucucagcagacuggc

SEQ ID NO: 3110673 - RNA, 19 nt, Artificial Sequence
  Description of Artificial Sequence: Synthetic oligonucleotide
cugaaaguauaguauuuaa

SEQ ID NO: 3110674 - RNA, 19 nt, Artificial Sequence
  Description of Artificial Sequence: Synthetic oligonucleotide
ugcccucucucucagcaga

SEQ ID NO: 3110675 - RNA, 19 nt, Artificial Sequence
  Description of Artificial Sequence: Synthetic oligonucleotide
acuuggaugcaaggccugc

SEQ ID NO: 3110676 - RNA, 19 nt, Artificial Sequence
  Description of Artificial Sequence: Synthetic oligonucleotide
uggcuacauucucaggaug

SEQ ID NO: 3110677 - RNA, 19 nt, Artificial Sequence
  Description of Artificial Sequence: Synthetic oligonucleotide
ugcccuguaaagacuugga

SEQ ID NO: 3110678 - RNA, 19 nt, Artificial Sequence
  Description of Artificial Sequence: Synthetic oligonucleotide
ggcuacauucucaggaugg

SEQ ID NO: 3110679 - RNA, 19 nt, Artificial Sequence
  Description of Artificial Sequence: Synthetic oligonucleotide
uucucaggauggcuuugcc

SEQ ID NO: 3110680 - RNA, 19 nt, Artificial Sequence
  Description of Artificial Sequence: Synthetic oligonucleotide
acugaaaguauaguauuua

SEQ ID NO: 3110681 - RNA, 19 nt, Artificial Sequence
  Description of Artificial Sequence: Synthetic oligonucleotide
uaauuccuccugcucuuac

SEQ ID NO: 3110682 - RNA, 19 nt, Artificial Sequence
  Description of Artificial Sequence: Synthetic oligonucleotide
cuuacagaggcaggacagg

SEQ ID NO: 3110683 - RNA, 19 nt, Artificial Sequence
  Description of Artificial Sequence: Synthetic oligonucleotide
uggucaaauguucccuuau

SEQ ID NO: 3110684 - RNA, 19 nt, Artificial Sequence
  Description of Artificial Sequence: Synthetic oligonucleotide
uuugcccuguaaagacuug

SEQ ID NO: 3110685 - RNA, 19 nt, Artificial Sequence
  Description of Artificial Sequence: Synthetic oligonucleotide
cccuguaaagacuuggaug

SEQ ID NO: 3110686 - RNA, 19 nt, Artificial Sequence
  Description of Artificial Sequence: Synthetic oligonucleotide
aggccuuugaauucacaaa

SEQ ID NO: 3110687 - RNA, 19 nt, Artificial Sequence
  Description of Artificial Sequence: Synthetic oligonucleotide
agcagacuggcuuccucag

SEQ ID NO: 3110688 - RNA, 19 nt, Artificial Sequence
  Description of Artificial Sequence: Synthetic oligonucleotide
gagauaggugaacaauuua

SEQ ID NO: 3110689 - RNA, 19 nt, Artificial Sequence
  Description of Artificial Sequence: Synthetic oligonucleotide
uggaugcaaggccugcccu

SEQ ID NO: 3110690 - RNA, 19 nt, Artificial Sequence
  Description of Artificial Sequence: Synthetic oligonucleotide
uggcauaauuccuccugcu

SEQ ID NO: 3110691 - RNA, 19 nt, Artificial Sequence
  Description of Artificial Sequence: Synthetic oligonucleotide
uggcuuugcccuguaaaga

SEQ ID NO: 3110692 - RNA, 19 nt, Artificial Sequence
  Description of Artificial Sequence: Synthetic oligonucleotide
caugacagaacauggcaua

SEQ ID NO: 3110693 - RNA, 19 nt, Artificial Sequence
  Description of Artificial Sequence: Synthetic oligonucleotide
cucucagcagacuggcuuc

SEQ ID NO: 3110694 - RNA, 19 nt, Artificial Sequence
  Description of Artificial Sequence: Synthetic oligonucleotide
ggcuuugcccuguaaagac

SEQ ID NO: 3110695 - RNA, 19 nt, Artificial Sequence
  Description of Artificial Sequence: Synthetic oligonucleotide
uuggucaaauguucccuua

SEQ ID NO: 3110696 - RNA, 19 nt, Artificial Sequence
  Description of Artificial Sequence: Synthetic oligonucleotide
agacuuggaugcaaggccu

SEQ ID NO: 3110697 - RNA, 19 nt, Artificial Sequence
  Description of Artificial Sequence: Synthetic oligonucleotide
caggccuuugaauucacaa

SEQ ID NO: 3110698 - RNA, 19 nt, Artificial Sequence
  Description of Artificial Sequence: Synthetic oligonucleotide
gacagaacauggcauaauu

SEQ ID NO: 3110699 - RNA, 19 nt, Artificial Sequence
  Description of Artificial Sequence: Synthetic oligonucleotide
acauucucaggauggcuuu

SEQ ID NO: 3110700 - RNA, 19 nt, Artificial Sequence
  Description of Artificial Sequence: Synthetic oligonucleotide
ccuuugaauucacaaauga

SEQ ID NO: 3110701 - RNA, 19 nt, Artificial Sequence
  Description of Artificial Sequence: Synthetic oligonucleotide
cuuggaugcaaggccugcc

SEQ ID NO: 3110702 - RNA, 19 nt, Artificial Sequence
  Description of Artificial Sequence: Synthetic oligonucleotide
guucccuuaucauuuggcu

SEQ ID NO: 3110703 - RNA, 19 nt, Artificial Sequence
  Description of Artificial Sequence: Synthetic oligonucleotide
ggugaacaauuuaaaauaa

SEQ ID NO: 3110704 - RNA, 19 nt, Artificial Sequence
  Description of Artificial Sequence: Synthetic oligonucleotide
gugaacaauuuaaaauaaa

SEQ ID NO: 3110705 - RNA, 19 nt, Artificial Sequence
  Description of Artificial Sequence: Synthetic oligonucleotide
acauggcauaauuccuccu

SEQ ID NO: 3110706 - RNA, 19 nt, Artificial Sequence
  Description of Artificial Sequence: Synthetic oligonucleotide
cugcucuuacagaggcagg

SEQ ID NO: 3110707 - RNA, 19 nt, Artificial Sequence
  Description of Artificial Sequence: Synthetic oligonucleotide
ugacaucucuuggucaaau

SEQ ID NO: 3110708 - RNA, 19 nt, Artificial Sequence
  Description of Artificial Sequence: Synthetic oligonucleotide
ccugcucuuacagaggcag

SEQ ID NO: 3110709 - RNA, 19 nt, Artificial Sequence
  Description of Artificial Sequence: Synthetic oligonucleotide
ucucagcagacuggcuucc

SEQ ID NO: 3110710 - RNA, 19 nt, Artificial Sequence
  Description of Artificial Sequence: Synthetic oligonucleotide
uuccuccugcucuuacaga

SEQ ID NO: 3110711 - RNA, 19 nt, Artificial Sequence
  Description of Artificial Sequence: Synthetic oligonucleotide
augacagaacauggcauaa

SEQ ID NO: 3110712 - RNA, 19 nt, Artificial Sequence
  Description of Artificial Sequence: Synthetic oligonucleotide
uccugcucuuacagaggca

SEQ ID NO: 3110713 - RNA, 19 nt, Artificial Sequence
  Description of Artificial Sequence: Synthetic oligonucleotide
gcauaauuccuccugcucu

SEQ ID NO: 3110714 - RNA, 19 nt, Artificial Sequence
  Description of Artificial Sequence: Synthetic oligonucleotide
ugacagaacauggcauaau

SEQ ID NO: 3110715 - RNA, 19 nt, Artificial Sequence
  Description of Artificial Sequence: Synthetic oligonucleotide
ggucaaauguucccuuauc

SEQ ID NO: 3110716 - RNA, 19 nt, Artificial Sequence
  Description of Artificial Sequence: Synthetic oligonucleotide
gacuuggaugcaaggccug

SEQ ID NO: 3110717 - RNA, 19 nt, Artificial Sequence
  Description of Artificial Sequence: Synthetic oligonucleotide
ggccuuugaauucacaaau

SEQ ID NO: 3110718 - RNA, 19 nt, Artificial Sequence
  Description of Artificial Sequence: Synthetic oligonucleotide
cauucucaggauggcuuug

SEQ ID NO: 3110719 - RNA, 19 nt, Artificial Sequence
  Description of Artificial Sequence: Synthetic oligonucleotide
caggacaggccuuugaauu

SEQ ID NO: 3110720 - RNA, 19 nt, Artificial Sequence
  Description of Artificial Sequence: Synthetic oligonucleotide
gcuacauucucaggauggc

SEQ ID NO: 3110721 - RNA, 19 nt, Artificial Sequence
  Description of Artificial Sequence: Synthetic oligonucleotide
aggccugcccucucucuca

SEQ ID NO: 3110722 - RNA, 19 nt, Artificial Sequence
  Description of Artificial Sequence: Synthetic oligonucleotide
aggcaggacaggccuuuga

SEQ ID NO: 3110723 - RNA, 19 nt, Artificial Sequence
  Description of Artificial Sequence: Synthetic oligonucleotide
ccucucucucagcagacug

SEQ ID NO: 3110724 - RNA, 19 nt, Artificial Sequence
  Description of Artificial Sequence: Synthetic oligonucleotide
cuuugcccuguaaagacuu

SEQ ID NO: 3110725 - RNA, 19 nt, Artificial Sequence
  Description of Artificial Sequence: Synthetic oligonucleotide
cugcccucucucucagcag

SEQ ID NO: 3110726 - RNA, 19 nt, Artificial Sequence
  Description of Artificial Sequence: Synthetic oligonucleotide
augcaaggccugcccucuc

SEQ ID NO: 3110727 - RNA, 19 nt, Artificial Sequence
  Description of Artificial Sequence: Synthetic oligonucleotide
gacuggcuuccucagcacu

SEQ ID NO: 3110728 - RNA, 19 nt, Artificial Sequence
  Description of Artificial Sequence: Synthetic oligonucleotide
cauaauuccuccugcucuu

SEQ ID NO: 3110729 - RNA, 19 nt, Artificial Sequence
  Description of Artificial Sequence: Synthetic oligonucleotide
gaugcaaggccugcccucu

SEQ ID NO: 3110730 - RNA, 19 nt, Artificial Sequence
  Description of Artificial Sequence: Synthetic oligonucleotide
ggaugcaaggccugcccuc

SEQ ID NO: 3110731 - RNA, 19 nt, Artificial Sequence
  Description of Artificial Sequence: Synthetic oligonucleotide
ccuccugcucuuacagagg

SEQ ID NO: 3110732 - RNA, 19 nt, Artificial Sequence
  Description of Artificial Sequence: Synthetic oligonucleotide
cuuaucauuuggcuacauu

SEQ ID NO: 3110733 - RNA, 19 nt, Artificial Sequence
  Description of Artificial Sequence: Synthetic oligonucleotide
ggcaggacaggccuuugaa

SEQ ID NO: 3110734 - RNA, 19 nt, Artificial Sequence
  Description of Artificial Sequence: Synthetic oligonucleotide
gacaggccuuugaauucac

SEQ ID NO: 3110735 - RNA, 19 nt, Artificial Sequence
  Description of Artificial Sequence: Synthetic oligonucleotide
agaggcaggacaggccuuu

SEQ ID NO: 3110736 - RNA, 19 nt, Artificial Sequence
  Description of Artificial Sequence: Synthetic oligonucleotide
cuguaaagacuuggaugca

SEQ ID NO: 3110737 - RNA, 19 nt, Artificial Sequence
  Description of Artificial Sequence: Synthetic oligonucleotide
cuuggucaaauguucccuu

SEQ ID NO: 3110738 - RNA, 19 nt, Artificial Sequence
  Description of Artificial Sequence: Synthetic oligonucleotide
gcagacuggcuuccucagc

SEQ ID NO: 3110739 - RNA, 19 nt, Artificial Sequence
  Description of Artificial Sequence: Synthetic oligonucleotide
augacaucucuuggucaaa

SEQ ID NO: 3110740 - RNA, 19 nt, Artificial Sequence
  Description of Artificial Sequence: Synthetic oligonucleotide
acaggccuuugaauucaca

SEQ ID NO: 3110741 - RNA, 19 nt, Artificial Sequence
  Description of Artificial Sequence: Synthetic oligonucleotide
cuacauucucaggauggcu

SEQ ID NO: 3110742 - RNA, 19 nt, Artificial Sequence
  Description of Artificial Sequence: Synthetic oligonucleotide
gcucuuacagaggcaggac

SEQ ID NO: 3110743 - RNA, 19 nt, Artificial Sequence
  Description of Artificial Sequence: Synthetic oligonucleotide
aggauggcuuugcccugua

SEQ ID NO: 3110744 - RNA, 19 nt, Artificial Sequence
  Description of Artificial Sequence: Synthetic oligonucleotide
ccaugacagaacauggcau

SEQ ID NO: 3110745 - RNA, 19 nt, Artificial Sequence
  Description of Artificial Sequence: Synthetic oligonucleotide
gcaaggccugcccucucuc

SEQ ID NO: 3110746 - RNA, 19 nt, Artificial Sequence
  Description of Artificial Sequence: Synthetic oligonucleotide
caaggccugcccucucucu

SEQ ID NO: 3110747 - RNA, 19 nt, Artificial Sequence
  Description of Artificial Sequence: Synthetic oligonucleotide
gcaggacaggccuuugaau

SEQ ID NO: 3110748 - RNA, 19 nt, Artificial Sequence
  Description of Artificial Sequence: Synthetic oligonucleotide
gcccuguaaagacuuggau

SEQ ID NO: 3110749 - RNA, 19 nt, Artificial Sequence
  Description of Artificial Sequence: Synthetic oligonucleotide
gcuuugcccuguaaagacu

SEQ ID NO: 3110750 - RNA, 19 nt, Artificial Sequence
  Description of Artificial Sequence: Synthetic oligonucleotide
gcccucucucucagcagac

SEQ ID NO: 3110751 - RNA, 19 nt, Artificial Sequence
  Description of Artificial Sequence: Synthetic oligonucleotide
caggauggcuuugcccugu

SEQ ID NO: 3110752 - RNA, 19 nt, Artificial Sequence
  Description of Artificial Sequence: Synthetic oligonucleotide
cucagcagacuggcuuccu

SEQ ID NO: 3110753 - RNA, 19 nt, Artificial Sequence
  Description of Artificial Sequence: Synthetic oligonucleotide
ccuuaucauuuggcuacau

SEQ ID NO: 3110754 - RNA, 19 nt, Artificial Sequence
  Description of Artificial Sequence: Synthetic oligonucleotide
cccucucucucagcagacu

SEQ ID NO: 3110755 - RNA, 19 nt, Artificial Sequence
  Description of Artificial Sequence: Synthetic oligonucleotide
aauuguuuagccuucuuuc

SEQ ID NO: 3110756 - RNA, 19 nt, Artificial Sequence
  Description of Artificial Sequence: Synthetic oligonucleotide
uucaauuggaucauaaaag

SEQ ID NO: 3110757 - RNA, 19 nt, Artificial Sequence
  Description of Artificial Sequence: Synthetic oligonucleotide
aacugucaaagacagaugg

SEQ ID NO: 3110758 - RNA, 19 nt, Artificial Sequence
  Description of Artificial Sequence: Synthetic oligonucleotide
aauuggaucauaaaaguag

SEQ ID NO: 3110759 - RNA, 19 nt, Artificial Sequence
  Description of Artificial Sequence: Synthetic oligonucleotide
ucaacuucauucauuagcc

SEQ ID NO: 3110760 - RNA, 19 nt, Artificial Sequence
  Description of Artificial Sequence: Synthetic oligonucleotide
ucuuucaaccacuucacgg

SEQ ID NO: 3110761 - RNA, 19 nt, Artificial Sequence
  Description of Artificial Sequence: Synthetic oligonucleotide
uuucaauuggaucauaaaa

SEQ ID NO: 3110762 - RNA, 19 nt, Artificial Sequence
  Description of Artificial Sequence: Synthetic oligonucleotide
uguguuaggaccacgaaac

SEQ ID NO: 3110763 - RNA, 19 nt, Artificial Sequence
  Description of Artificial Sequence: Synthetic oligonucleotide
cauucauuagccauggaag

SEQ ID NO: 3110764 - RNA, 19 nt, Artificial Sequence
  Description of Artificial Sequence: Synthetic oligonucleotide
uaaaaguagccacuguucc

SEQ ID NO: 3110765 - RNA, 19 nt, Artificial Sequence
  Description of Artificial Sequence: Synthetic oligonucleotide
uuccuuaugcucauaauug

SEQ ID NO: 3110766 - RNA, 19 nt, Artificial Sequence
  Description of Artificial Sequence: Synthetic oligonucleotide
aaagacagaugggagaagg

SEQ ID NO: 3110767 - RNA, 19 nt, Artificial Sequence
  Description of Artificial Sequence: Synthetic oligonucleotide
aauccuaucucaaugucuc

SEQ ID NO: 3110768 - RNA, 19 nt, Artificial Sequence
  Description of Artificial Sequence: Synthetic oligonucleotide
aaggaauccuaucucaaug

SEQ ID NO: 3110769 - RNA, 19 nt, Artificial Sequence
  Description of Artificial Sequence: Synthetic oligonucleotide
auucauuagccauggaagg

SEQ ID NO: 3110770 - RNA, 19 nt, Artificial Sequence
  Description of Artificial Sequence: Synthetic oligonucleotide
ucaauuggaucauaaaagu

SEQ ID NO: 3110771 - RNA, 19 nt, Artificial Sequence
  Description of Artificial Sequence: Synthetic oligonucleotide
cauccgaccucauagaggg

SEQ ID NO: 3110772 - RNA, 19 nt, Artificial Sequence
  Description of Artificial Sequence: Synthetic oligonucleotide
aaacacaucauccgaccuc

SEQ ID NO: 3110773 - RNA, 19 nt, Artificial Sequence
  Description of Artificial Sequence: Synthetic oligonucleotide
acaucauccgaccucauag

SEQ ID NO: 3110774 - RNA, 19 nt, Artificial Sequence
  Description of Artificial Sequence: Synthetic oligonucleotide
aggaccacgaaacacauca

SEQ ID NO: 3110775 - RNA, 19 nt, Artificial Sequence
  Description of Artificial Sequence: Synthetic oligonucleotide
ucauucauuagccauggaa

SEQ ID NO: 3110776 - RNA, 19 nt, Artificial Sequence
  Description of Artificial Sequence: Synthetic oligonucleotide
auuggaucauaaaaguagc

SEQ ID NO: 3110777 - RNA, 19 nt, Artificial Sequence
  Description of Artificial Sequence: Synthetic oligonucleotide
uuuucaacuucauucauua

SEQ ID NO: 3110778 - RNA, 19 nt, Artificial Sequence
  Description of Artificial Sequence: Synthetic oligonucleotide
ugugucuuccuuaugcuca

SEQ ID NO: 3110779 - RNA, 19 nt, Artificial Sequence
  Description of Artificial Sequence: Synthetic oligonucleotide
cugaaacugucaaagacag

SEQ ID NO: 3110780 - RNA, 19 nt, Artificial Sequence
  Description of Artificial Sequence: Synthetic oligonucleotide
aaccacuucacggaucagc

SEQ ID NO: 3110781 - RNA, 19 nt, Artificial Sequence
  Description of Artificial Sequence: Synthetic oligonucleotide
aacuucauucauuagccau

SEQ ID NO: 3110782 - RNA, 19 nt, Artificial Sequence
  Description of Artificial Sequence: Synthetic oligonucleotide
accacgaaacacaucaucc

SEQ ID NO: 3110783 - RNA, 19 nt, Artificial Sequence
  Description of Artificial Sequence: Synthetic oligonucleotide
uccugaaacugucaaagac

SEQ ID NO: 3110784 - RNA, 19 nt, Artificial Sequence
  Description of Artificial Sequence: Synthetic oligonucleotide
ugucaaagacagaugggag

SEQ ID NO: 3110785 - RNA, 19 nt, Artificial Sequence
  Description of Artificial Sequence: Synthetic oligonucleotide
ucaaccacuucacggauca

SEQ ID NO: 3110786 - RNA, 19 nt, Artificial Sequence
  Description of Artificial Sequence: Synthetic oligonucleotide
auaaaaguagccacuguuc

SEQ ID NO: 3110787 - RNA, 19 nt, Artificial Sequence
  Description of Artificial Sequence: Synthetic oligonucleotide
aguucuucccaccaugcag

SEQ ID NO: 3110788 - RNA, 19 nt, Artificial Sequence
  Description of Artificial Sequence: Synthetic oligonucleotide
aaaguagccacuguuccug

SEQ ID NO: 3110789 - RNA, 19 nt, Artificial Sequence
  Description of Artificial Sequence: Synthetic oligonucleotide
ucaagcacaguucuuccca

SEQ ID NO: 3110790 - RNA, 19 nt, Artificial Sequence
  Description of Artificial Sequence: Synthetic oligonucleotide
augcucauaauuguuuagc

SEQ ID NO: 3110791 - RNA, 19 nt, Artificial Sequence
  Description of Artificial Sequence: Synthetic oligonucleotide
ugcucauaauuguuuagcc

SEQ ID NO: 3110792 - RNA, 19 nt, Artificial Sequence
  Description of Artificial Sequence: Synthetic oligonucleotide
ucaaugucucuuucaauug

SEQ ID NO: 3110793 - RNA, 19 nt, Artificial Sequence
  Description of Artificial Sequence: Synthetic oligonucleotide
aaaaguagccacuguuccu

SEQ ID NO: 3110794 - RNA, 19 nt, Artificial Sequence
  Description of Artificial Sequence: Synthetic oligonucleotide
uuagccuucuuucaaccac

SEQ ID NO: 3110795 - RNA, 19 nt, Artificial Sequence
  Description of Artificial Sequence: Synthetic oligonucleotide
ucauccgaccucauagagg

SEQ ID NO: 3110796 - RNA, 19 nt, Artificial Sequence
  Description of Artificial Sequence: Synthetic oligonucleotide
guuccugaaacugucaaag

SEQ ID NO: 3110797 - RNA, 19 nt, Artificial Sequence
  Description of Artificial Sequence: Synthetic oligonucleotide
uggaucauaaaaguagcca

SEQ ID NO: 3110798 - RNA, 19 nt, Artificial Sequence
  Description of Artificial Sequence: Synthetic oligonucleotide
uuagccauggaaggaaucc

SEQ ID NO: 3110799 - RNA, 19 nt, Artificial Sequence
  Description of Artificial Sequence: Synthetic oligonucleotide
uuggaucauaaaaguagcc

SEQ ID NO: 3110800 - RNA, 19 nt, Artificial Sequence
  Description of Artificial Sequence: Synthetic oligonucleotide
uaugcucauaauuguuuag

SEQ ID NO: 3110801 - RNA, 19 nt, Artificial Sequence
  Description of Artificial Sequence: Synthetic oligonucleotide
ucacggaucagcaugucaa

SEQ ID NO: 3110802 - RNA, 19 nt, Artificial Sequence
  Description of Artificial Sequence: Synthetic oligonucleotide
ucuuucaauuggaucauaa

SEQ ID NO: 3110803 - RNA, 19 nt, Artificial Sequence
  Description of Artificial Sequence: Synthetic oligonucleotide
auggaaggaauccuaucuc

SEQ ID NO: 3110804 - RNA, 19 nt, Artificial Sequence
  Description of Artificial Sequence: Synthetic oligonucleotide
aagcacaguucuucccacc

SEQ ID NO: 3110805 - RNA, 19 nt, Artificial Sequence
  Description of Artificial Sequence: Synthetic oligonucleotide
uaauuguuuagccuucuuu

SEQ ID NO: 3110806 - RNA, 19 nt, Artificial Sequence
  Description of Artificial Sequence: Synthetic oligonucleotide
caaugucucuuucaauugg

SEQ ID NO: 3110807 - RNA, 19 nt, Artificial Sequence
  Description of Artificial Sequence: Synthetic oligonucleotide
auuguuuagccuucuuuca

SEQ ID NO: 3110808 - RNA, 19 nt, Artificial Sequence
  Description of Artificial Sequence: Synthetic oligonucleotide
uucuuucaaccacuucacg

SEQ ID NO: 3110809 - RNA, 19 nt, Artificial Sequence
  Description of Artificial Sequence: Synthetic oligonucleotide
uggaaggaauccuaucuca

SEQ ID NO: 3110810 - RNA, 19 nt, Artificial Sequence
  Description of Artificial Sequence: Synthetic oligonucleotide
gaaacugucaaagacagau

SEQ ID NO: 3110811 - RNA, 19 nt, Artificial Sequence
  Description of Artificial Sequence: Synthetic oligonucleotide
ucaaagacagaugggagaa

SEQ ID NO: 3110812 - RNA, 19 nt, Artificial Sequence
  Description of Artificial Sequence: Synthetic oligonucleotide
aacacaucauccgaccuca

SEQ ID NO: 3110813 - RNA, 19 nt, Artificial Sequence
  Description of Artificial Sequence: Synthetic oligonucleotide
augucaagcacaguucuuc

SEQ ID NO: 3110814 - RNA, 19 nt, Artificial Sequence
  Description of Artificial Sequence: Synthetic oligonucleotide
ggaucauaaaaguagccac

SEQ ID NO: 3110815 - RNA, 19 nt, Artificial Sequence
  Description of Artificial Sequence: Synthetic oligonucleotide
uguuuagccuucuuucaac

SEQ ID NO: 3110816 - RNA, 19 nt, Artificial Sequence
  Description of Artificial Sequence: Synthetic oligonucleotide
cuucuuucaaccacuucac

SEQ ID NO: 3110817 - RNA, 19 nt, Artificial Sequence
  Description of Artificial Sequence: Synthetic oligonucleotide
guuuagccuucuuucaacc

SEQ ID NO: 3110818 - RNA, 19 nt, Artificial Sequence
  Description of Artificial Sequence: Synthetic oligonucleotide
aggaauccuaucucaaugu

SEQ ID NO: 3110819 - RNA, 19 nt, Artificial Sequence
  Description of Artificial Sequence: Synthetic oligonucleotide
ucauaauuguuuagccuuc

SEQ ID NO: 3110820 - RNA, 19 nt, Artificial Sequence
  Description of Artificial Sequence: Synthetic oligonucleotide
uuaugcucauaauuguuua

SEQ ID NO: 3110821 - RNA, 19 nt, Artificial Sequence
  Description of Artificial Sequence: Synthetic oligonucleotide
aucauaaaaguagccacug

SEQ ID NO: 3110822 - RNA, 19 nt, Artificial Sequence
  Description of Artificial Sequence: Synthetic oligonucleotide
uccuuaugcucauaauugu

SEQ ID NO: 3110823 - RNA, 19 nt, Artificial Sequence
  Description of Artificial Sequence: Synthetic oligonucleotide
agacagaugggagaagguc

SEQ ID NO: 3110824 - RNA, 19 nt, Artificial Sequence
  Description of Artificial Sequence: Synthetic oligonucleotide
cuucauucauuagccaugg

SEQ ID NO: 3110825 - RNA, 19 nt, Artificial Sequence
  Description of Artificial Sequence: Synthetic oligonucleotide
uuuagccuucuuucaacca

SEQ ID NO: 3110826 - RNA, 19 nt, Artificial Sequence
  Description of Artificial Sequence: Synthetic oligonucleotide
uguuaggaccacgaaacac

SEQ ID NO: 3110827 - RNA, 19 nt, Artificial Sequence
  Description of Artificial Sequence: Synthetic oligonucleotide
ucauaaaaguagccacugu

SEQ ID NO: 3110828 - RNA, 19 nt, Artificial Sequence
  Description of Artificial Sequence: Synthetic oligonucleotide
ugucaagcacaguucuucc

SEQ ID NO: 3110829 - RNA, 19 nt, Artificial Sequence
  Description of Artificial Sequence: Synthetic oligonucleotide
uuguuuagccuucuuucaa

SEQ ID NO: 3110830 - RNA, 19 nt, Artificial Sequence
  Description of Artificial Sequence: Synthetic oligonucleotide
cacuucacggaucagcaug

SEQ ID NO: 3110831 - RNA, 19 nt, Artificial Sequence
  Description of Artificial Sequence: Synthetic oligonucleotide
ugcaguguuccauaguuuu

SEQ ID NO: 3110832 - RNA, 19 nt, Artificial Sequence
  Description of Artificial Sequence: Synthetic oligonucleotide
aaugucucuuucaauugga

SEQ ID NO: 3110833 - RNA, 19 nt, Artificial Sequence
  Description of Artificial Sequence: Synthetic oligonucleotide
ugucucuuucaauuggauc

SEQ ID NO: 3110834 - RNA, 19 nt, Artificial Sequence
  Description of Artificial Sequence: Synthetic oligonucleotide
ucugccacuguguuaggac

SEQ ID NO: 3110835 - RNA, 19 nt, Artificial Sequence
  Description of Artificial Sequence: Synthetic oligonucleotide
ugugugucuuccuuaugcu

SEQ ID NO: 3110836 - RNA, 19 nt, Artificial Sequence
  Description of Artificial Sequence: Synthetic oligonucleotide
acaguucuucccaccaugc

SEQ ID NO: 3110837 - RNA, 19 nt, Artificial Sequence
  Description of Artificial Sequence: Synthetic oligonucleotide
uucauuagccauggaagga

SEQ ID NO: 3110838 - RNA, 19 nt, Artificial Sequence
  Description of Artificial Sequence: Synthetic oligonucleotide
ggaucugccacuguguuag

SEQ ID NO: 3110839 - RNA, 19 nt, Artificial Sequence
  Description of Artificial Sequence: Synthetic oligonucleotide
guuaggaccacgaaacaca

SEQ ID NO: 3110840 - RNA, 19 nt, Artificial Sequence
  Description of Artificial Sequence: Synthetic oligonucleotide
uucacggaucagcauguca

SEQ ID NO: 3110841 - RNA, 19 nt, Artificial Sequence
  Description of Artificial Sequence: Synthetic oligonucleotide
gucaaagacagaugggaga

SEQ ID NO: 3110842 - RNA, 19 nt, Artificial Sequence
  Description of Artificial Sequence: Synthetic oligonucleotide
ucaccgagggaucugccac

SEQ ID NO: 3110843 - RNA, 19 nt, Artificial Sequence
  Description of Artificial Sequence: Synthetic oligonucleotide
uuaggaccacgaaacacau

SEQ ID NO: 3110844 - RNA, 19 nt, Artificial Sequence
  Description of Artificial Sequence: Synthetic oligonucleotide
acgaaacacaucauccgac

SEQ ID NO: 3110845 - RNA, 19 nt, Artificial Sequence
  Description of Artificial Sequence: Synthetic oligonucleotide
uagccacuguuccugaaac

SEQ ID NO: 3110846 - RNA, 19 nt, Artificial Sequence
  Description of Artificial Sequence: Synthetic oligonucleotide
ucauuagccauggaaggaa

SEQ ID NO: 3110847 - RNA, 19 nt, Artificial Sequence
  Description of Artificial Sequence: Synthetic oligonucleotide
gacagaugggagaagguca

SEQ ID NO: 3110848 - RNA, 19 nt, Artificial Sequence
  Description of Artificial Sequence: Synthetic oligonucleotide
acuucauucauuagccaug

SEQ ID NO: 3110849 - RNA, 19 nt, Artificial Sequence
  Description of Artificial Sequence: Synthetic oligonucleotide
ucauagagggcuguguguc

SEQ ID NO: 3110850 - RNA, 19 nt, Artificial Sequence
  Description of Artificial Sequence: Synthetic oligonucleotide
acggaucagcaugucaagc

SEQ ID NO: 3110851 - RNA, 19 nt, Artificial Sequence
  Description of Artificial Sequence: Synthetic oligonucleotide
aaacugucaaagacagaug

SEQ ID NO: 3110852 - RNA, 19 nt, Artificial Sequence
  Description of Artificial Sequence: Synthetic oligonucleotide
gaccacgaaacacaucauc

SEQ ID NO: 3110853 - RNA, 19 nt, Artificial Sequence
  Description of Artificial Sequence: Synthetic oligonucleotide
agcaugucaagcacaguuc

SEQ ID NO: 3110854 - RNA, 19 nt, Artificial Sequence
  Description of Artificial Sequence: Synthetic oligonucleotide
acugucaaagacagauggg

SEQ ID NO: 3110855 - RNA, 19 nt, Artificial Sequence
  Description of Artificial Sequence: Synthetic oligonucleotide
uuucaaccacuucacggau

SEQ ID NO: 3110856 - RNA, 19 nt, Artificial Sequence
  Description of Artificial Sequence: Synthetic oligonucleotide
uagccuucuuucaaccacu

SEQ ID NO: 3110857 - RNA, 19 nt, Artificial Sequence
  Description of Artificial Sequence: Synthetic oligonucleotide
uguuccugaaacugucaaa

SEQ ID NO: 3110858 - RNA, 19 nt, Artificial Sequence
  Description of Artificial Sequence: Synthetic oligonucleotide
agcacaguucuucccacca

SEQ ID NO: 3110859 - RNA, 19 nt, Artificial Sequence
  Description of Artificial Sequence: Synthetic oligonucleotide
uccgaccucauagagggcu

SEQ ID NO: 3110860 - RNA, 19 nt, Artificial Sequence
  Description of Artificial Sequence: Synthetic oligonucleotide
cugucaaagacagauggga

SEQ ID NO: 3110861 - RNA, 19 nt, Artificial Sequence
  Description of Artificial Sequence: Synthetic oligonucleotide
uuccugaaacugucaaaga

SEQ ID NO: 3110862 - RNA, 19 nt, Artificial Sequence
  Description of Artificial Sequence: Synthetic oligonucleotide
cucauaauuguuuagccuu

SEQ ID NO: 3110863 - RNA, 19 nt, Artificial Sequence
  Description of Artificial Sequence: Synthetic oligonucleotide
accaugcaguguuccauag

SEQ ID NO: 3110864 - RNA, 19 nt, Artificial Sequence
  Description of Artificial Sequence: Synthetic oligonucleotide
ugaaacugucaaagacaga

SEQ ID NO: 3110865 - RNA, 19 nt, Artificial Sequence
  Description of Artificial Sequence: Synthetic oligonucleotide
cauggaaggaauccuaucu

SEQ ID NO: 3110866 - RNA, 19 nt, Artificial Sequence
  Description of Artificial Sequence: Synthetic oligonucleotide
cuuucaauuggaucauaaa

SEQ ID NO: 3110867 - RNA, 19 nt, Artificial Sequence
  Description of Artificial Sequence: Synthetic oligonucleotide
gucaagcacaguucuuccc

SEQ ID NO: 3110868 - RNA, 19 nt, Artificial Sequence
  Description of Artificial Sequence: Synthetic oligonucleotide
auuagccauggaaggaauc

SEQ ID NO: 3110869 - RNA, 19 nt, Artificial Sequence
  Description of Artificial Sequence: Synthetic oligonucleotide
ucuuccuuaugcucauaau

SEQ ID NO: 3110870 - RNA, 19 nt, Artificial Sequence
  Description of Artificial Sequence: Synthetic oligonucleotide
acagaugggagaaggucag

SEQ ID NO: 3110871 - RNA, 19 nt, Artificial Sequence
  Description of Artificial Sequence: Synthetic oligonucleotide
cacuguuccugaaacuguc

SEQ ID NO: 3110872 - RNA, 19 nt, Artificial Sequence
  Description of Artificial Sequence: Synthetic oligonucleotide
cucaaugucucuuucaauu

SEQ ID NO: 3110873 - RNA, 19 nt, Artificial Sequence
  Description of Artificial Sequence: Synthetic oligonucleotide
caauuggaucauaaaagua

SEQ ID NO: 3110874 - RNA, 19 nt, Artificial Sequence
  Description of Artificial Sequence: Synthetic oligonucleotide
ucucaaugucucuuucaau

SEQ ID NO: 3110875 - RNA, 19 nt, Artificial Sequence
  Description of Artificial Sequence: Synthetic oligonucleotide
ccacgaaacacaucauccg

SEQ ID NO: 3110876 - RNA, 19 nt, Artificial Sequence
  Description of Artificial Sequence: Synthetic oligonucleotide
agagggcugugugucuucc

SEQ ID NO: 3110877 - RNA, 19 nt, Artificial Sequence
  Description of Artificial Sequence: Synthetic oligonucleotide
gaucauaaaaguagccacu

SEQ ID NO: 3110878 - RNA, 19 nt, Artificial Sequence
  Description of Artificial Sequence: Synthetic oligonucleotide
uucaaccacuucacggauc

SEQ ID NO: 3110879 - RNA, 19 nt, Artificial Sequence
  Description of Artificial Sequence: Synthetic oligonucleotide
cacgaaacacaucauccga

SEQ ID NO: 3110880 - RNA, 19 nt, Artificial Sequence
  Description of Artificial Sequence: Synthetic oligonucleotide
aaguagccacuguuccuga

SEQ ID NO: 3110881 - RNA, 19 nt, Artificial Sequence
  Description of Artificial Sequence: Synthetic oligonucleotide
aagacagaugggagaaggu

SEQ ID NO: 3110882 - RNA, 19 nt, Artificial Sequence
  Description of Artificial Sequence: Synthetic oligonucleotide
gaaacacaucauccgaccu

SEQ ID NO: 3110883 - RNA, 19 nt, Artificial Sequence
  Description of Artificial Sequence: Synthetic oligonucleotide
cauaaaaguagccacuguu

SEQ ID NO: 3110884 - RNA, 19 nt, Artificial Sequence
  Description of Artificial Sequence: Synthetic oligonucleotide
caagcacaguucuucccac

SEQ ID NO: 3110885 - RNA, 19 nt, Artificial Sequence
  Description of Artificial Sequence: Synthetic oligonucleotide
cacggaucagcaugucaag

SEQ ID NO: 3110886 - RNA, 19 nt, Artificial Sequence
  Description of Artificial Sequence: Synthetic oligonucleotide
auaauuguuuagccuucuu

SEQ ID NO: 3110887 - RNA, 19 nt, Artificial Sequence
  Description of Artificial Sequence: Synthetic oligonucleotide
accacuucacggaucagca

SEQ ID NO: 3110888 - RNA, 19 nt, Artificial Sequence
  Description of Artificial Sequence: Synthetic oligonucleotide
acuguguuaggaccacgaa

SEQ ID NO: 3110889 - RNA, 19 nt, Artificial Sequence
  Description of Artificial Sequence: Synthetic oligonucleotide
gaauccuaucucaaugucu

SEQ ID NO: 3110890 - RNA, 19 nt, Artificial Sequence
  Description of Artificial Sequence: Synthetic oligonucleotide
gaucagcaugucaagcaca

SEQ ID NO: 3110891 - RNA, 19 nt, Artificial Sequence
  Description of Artificial Sequence: Synthetic oligonucleotide
cuuaugcucauaauuguuu

SEQ ID NO: 3110892 - RNA, 19 nt, Artificial Sequence
  Description of Artificial Sequence: Synthetic oligonucleotide
cuguguuaggaccacgaaa

SEQ ID NO: 3110893 - RNA, 19 nt, Artificial Sequence
  Description of Artificial Sequence: Synthetic oligonucleotide
uccuaucucaaugucucuu

SEQ ID NO: 3110894 - RNA, 19 nt, Artificial Sequence
  Description of Artificial Sequence: Synthetic oligonucleotide
cacuguguuaggaccacga

SEQ ID NO: 3110895 - RNA, 19 nt, Artificial Sequence
  Description of Artificial Sequence: Synthetic oligonucleotide
gugugucuuccuuaugcuc

SEQ ID NO: 3110896 - RNA, 19 nt, Artificial Sequence
  Description of Artificial Sequence: Synthetic oligonucleotide
cuuccuuaugcucauaauu

SEQ ID NO: 3110897 - RNA, 19 nt, Artificial Sequence
  Description of Artificial Sequence: Synthetic oligonucleotide
uucauucauuagccaugga

SEQ ID NO: 3110898 - RNA, 19 nt, Artificial Sequence
  Description of Artificial Sequence: Synthetic oligonucleotide
gucuuccuuaugcucauaa

SEQ ID NO: 3110899 - RNA, 19 nt, Artificial Sequence
  Description of Artificial Sequence: Synthetic oligonucleotide
gaaggaauccuaucucaau

SEQ ID NO: 3110900 - RNA, 19 nt, Artificial Sequence
  Description of Artificial Sequence: Synthetic oligonucleotide
uagccauggaaggaauccu

SEQ ID NO: 3110901 - RNA, 19 nt, Artificial Sequence
  Description of Artificial Sequence: Synthetic oligonucleotide
ggaauccuaucucaauguc

SEQ ID NO: 3110902 - RNA, 19 nt, Artificial Sequence
  Description of Artificial Sequence: Synthetic oligonucleotide
acuucacggaucagcaugu

SEQ ID NO: 3110903 - RNA, 19 nt, Artificial Sequence
  Description of Artificial Sequence: Synthetic oligonucleotide
gccacuguuccugaaacug

SEQ ID NO: 3110904 - RNA, 19 nt, Artificial Sequence
  Description of Artificial Sequence: Synthetic oligonucleotide
cgaaacacaucauccgacc

SEQ ID NO: 3110905 - RNA, 19 nt, Artificial Sequence
  Description of Artificial Sequence: Synthetic oligonucleotide
caugcaguguuccauaguu

SEQ ID NO: 3110906 - RNA, 19 nt, Artificial Sequence
  Description of Artificial Sequence: Synthetic oligonucleotide
auccuaucucaaugucucu

SEQ ID NO: 3110907 - RNA, 19 nt, Artificial Sequence
  Description of Artificial Sequence: Synthetic oligonucleotide
guagccacuguuccugaaa

SEQ ID NO: 3110908 - RNA, 19 nt, Artificial Sequence
  Description of Artificial Sequence: Synthetic oligonucleotide
caacuucauucauuagcca

SEQ ID NO: 3110909 - RNA, 19 nt, Artificial Sequence
  Description of Artificial Sequence: Synthetic oligonucleotide
agccacuguuccugaaacu

SEQ ID NO: 3110910 - RNA, 19 nt, Artificial Sequence
  Description of Artificial Sequence: Synthetic oligonucleotide
agggaucugccacuguguu

SEQ ID NO: 3110911 - RNA, 19 nt, Artificial Sequence
  Description of Artificial Sequence: Synthetic oligonucleotide
gaucugccacuguguuagg

SEQ ID NO: 3110912 - RNA, 19 nt, Artificial Sequence
  Description of Artificial Sequence: Synthetic oligonucleotide
agggcugugugucuuccuu

SEQ ID NO: 3110913 - RNA, 19 nt, Artificial Sequence
  Description of Artificial Sequence: Synthetic oligonucleotide
cuguuccugaaacugucaa

SEQ ID NO: 3110914 - RNA, 19 nt, Artificial Sequence
  Description of Artificial Sequence: Synthetic oligonucleotide
guguuaggaccacgaaaca

SEQ ID NO: 3110915 - RNA, 19 nt, Artificial Sequence
  Description of Artificial Sequence: Synthetic oligonucleotide
ccucauagagggcugugug

SEQ ID NO: 3110916 - RNA, 19 nt, Artificial Sequence
  Description of Artificial Sequence: Synthetic oligonucleotide
uaggaccacgaaacacauc

SEQ ID NO: 3110917 - RNA, 19 nt, Artificial Sequence
  Description of Artificial Sequence: Synthetic oligonucleotide
acuguuccugaaacuguca

SEQ ID NO: 3110918 - RNA, 19 nt, Artificial Sequence
  Description of Artificial Sequence: Synthetic oligonucleotide
guucuucccaccaugcagu

SEQ ID NO: 3110919 - RNA, 19 nt, Artificial Sequence
  Description of Artificial Sequence: Synthetic oligonucleotide
aguagccacuguuccugaa

SEQ ID NO: 3110920 - RNA, 19 nt, Artificial Sequence
  Description of Artificial Sequence: Synthetic oligonucleotide
gcucauaauuguuuagccu

SEQ ID NO: 3110921 - RNA, 19 nt, Artificial Sequence
  Description of Artificial Sequence: Synthetic oligonucleotide
cuucccaccaugcaguguu

SEQ ID NO: 3110922 - RNA, 19 nt, Artificial Sequence
  Description of Artificial Sequence: Synthetic oligonucleotide
auagagggcugugugucuu

SEQ ID NO: 3110923 - RNA, 19 nt, Artificial Sequence
  Description of Artificial Sequence: Synthetic oligonucleotide
aucugccacuguguuagga

SEQ ID NO: 3110924 - RNA, 19 nt, Artificial Sequence
  Description of Artificial Sequence: Synthetic oligonucleotide
uagagggcugugugucuuc

SEQ ID NO: 3110925 - RNA, 19 nt, Artificial Sequence
  Description of Artificial Sequence: Synthetic oligonucleotide
augucucuuucaauuggau

SEQ ID NO: 3110926 - RNA, 19 nt, Artificial Sequence
  Description of Artificial Sequence: Synthetic oligonucleotide
cucauagagggcugugugu

SEQ ID NO: 3110927 - RNA, 19 nt, Artificial Sequence
  Description of Artificial Sequence: Synthetic oligonucleotide
gcaugucaagcacaguucu

SEQ ID NO: 3110928 - RNA, 19 nt, Artificial Sequence
  Description of Artificial Sequence: Synthetic oligonucleotide
accgagggaucugccacug

SEQ ID NO: 3110929 - RNA, 19 nt, Artificial Sequence
  Description of Artificial Sequence: Synthetic oligonucleotide
ccauggaaggaauccuauc

SEQ ID NO: 3110930 - RNA, 19 nt, Artificial Sequence
  Description of Artificial Sequence: Synthetic oligonucleotide
cagaugggagaaggucagc

SEQ ID NO: 3110931 - RNA, 19 nt, Artificial Sequence
  Description of Artificial Sequence: Synthetic oligonucleotide
agccauggaaggaauccua

SEQ ID NO: 3110932 - RNA, 19 nt, Artificial Sequence
  Description of Artificial Sequence: Synthetic oligonucleotide
cgagggaucugccacugug

SEQ ID NO: 3110933 - RNA, 19 nt, Artificial Sequence
  Description of Artificial Sequence: Synthetic oligonucleotide
auccgaccucauagagggc

SEQ ID NO: 3110934 - RNA, 19 nt, Artificial Sequence
  Description of Artificial Sequence: Synthetic oligonucleotide
cauaauuguuuagccuucu

SEQ ID NO: 3110935 - RNA, 19 nt, Artificial Sequence
  Description of Artificial Sequence: Synthetic oligonucleotide
cacaucauccgaccucaua

SEQ ID NO: 3110936 - RNA, 19 nt, Artificial Sequence
  Description of Artificial Sequence: Synthetic oligonucleotide
caccaugcaguguuccaua

SEQ ID NO: 3110937 - RNA, 19 nt, Artificial Sequence
  Description of Artificial Sequence: Synthetic oligonucleotide
gagggaucugccacugugu

SEQ ID NO: 3110938 - RNA, 19 nt, Artificial Sequence
  Description of Artificial Sequence: Synthetic oligonucleotide
cauuagccauggaaggaau

SEQ ID NO: 3110939 - RNA, 19 nt, Artificial Sequence
  Description of Artificial Sequence: Synthetic oligonucleotide
cggaucagcaugucaagca

SEQ ID NO: 3110940 - RNA, 19 nt, Artificial Sequence
  Description of Artificial Sequence: Synthetic oligonucleotide
augcaguguuccauaguuu

SEQ ID NO: 3110941 - RNA, 19 nt, Artificial Sequence
  Description of Artificial Sequence: Synthetic oligonucleotide
cauagagggcugugugucu

SEQ ID NO: 3110942 - RNA, 19 nt, Artificial Sequence
  Description of Artificial Sequence: Synthetic oligonucleotide
cuucacggaucagcauguc

SEQ ID NO: 3110943 - RNA, 19 nt, Artificial Sequence
  Description of Artificial Sequence: Synthetic oligonucleotide
caaccacuucacggaucag

SEQ ID NO: 3110944 - RNA, 19 nt, Artificial Sequence
  Description of Artificial Sequence: Synthetic oligonucleotide
gugucuuccuuaugcucau

SEQ ID NO: 3110945 - RNA, 19 nt, Artificial Sequence
  Description of Artificial Sequence: Synthetic oligonucleotide
ugucuuccuuaugcucaua

SEQ ID NO: 3110946 - RNA, 19 nt, Artificial Sequence
  Description of Artificial Sequence: Synthetic oligonucleotide
ccgaccucauagagggcug

SEQ ID NO: 3110947 - RNA, 19 nt, Artificial Sequence
  Description of Artificial Sequence: Synthetic oligonucleotide
gagggcugugugucuuccu

SEQ ID NO: 3110948 - RNA, 19 nt, Artificial Sequence
  Description of Artificial Sequence: Synthetic oligonucleotide
gggaucugccacuguguua

SEQ ID NO: 3110949 - RNA, 19 nt, Artificial Sequence
  Description of Artificial Sequence: Synthetic oligonucleotide
ggcugugugucuuccuuau

SEQ ID NO: 3110950 - RNA, 19 nt, Artificial Sequence
  Description of Artificial Sequence: Synthetic oligonucleotide
ccacuguguuaggaccacg

SEQ ID NO: 3110951 - RNA, 19 nt, Artificial Sequence
  Description of Artificial Sequence: Synthetic oligonucleotide
ccuuaugcucauaauuguu

SEQ ID NO: 3110952 - RNA, 19 nt, Artificial Sequence
  Description of Artificial Sequence: Synthetic oligonucleotide
cucuuucaauuggaucaua

SEQ ID NO: 3110953 - RNA, 19 nt, Artificial Sequence
  Description of Artificial Sequence: Synthetic oligonucleotide
gccacuguguuaggaccac

SEQ ID NO: 3110954 - RNA, 19 nt, Artificial Sequence
  Description of Artificial Sequence: Synthetic oligonucleotide
gggcugugugucuuccuua

SEQ ID NO: 3110955 - RNA, 19 nt, Artificial Sequence
  Description of Artificial Sequence: Synthetic oligonucleotide
caccgagggaucugccacu

SEQ ID NO: 3110956 - RNA, 19 nt, Artificial Sequence
  Description of Artificial Sequence: Synthetic oligonucleotide
acacaucauccgaccucau

SEQ ID NO: 3110957 - RNA, 19 nt, Artificial Sequence
  Description of Artificial Sequence: Synthetic oligonucleotide
gccauggaaggaauccuau

SEQ ID NO: 3110958 - RNA, 19 nt, Artificial Sequence
  Description of Artificial Sequence: Synthetic oligonucleotide
gcacaguucuucccaccau

SEQ ID NO: 3110959 - RNA, 19 nt, Artificial Sequence
  Description of Artificial Sequence: Synthetic oligonucleotide
ccaugcaguguuccauagu

SEQ ID NO: 3110960 - RNA, 19 nt, Artificial Sequence
  Description of Artificial Sequence: Synthetic oligonucleotide
ggaccacgaaacacaucau

SEQ ID NO: 3110961 - RNA, 19 nt, Artificial Sequence
  Description of Artificial Sequence: Synthetic oligonucleotide
ccaccaugcaguguuccau

SEQ ID NO: 3110962 - RNA, 19 nt, Artificial Sequence
  Description of Artificial Sequence: Synthetic oligonucleotide
ccgagggaucugccacugu

SEQ ID NO: 3110963 - RNA, 19 nt, Artificial Sequence
  Description of Artificial Sequence: Synthetic oligonucleotide
acaauuguaauuuagcagc

SEQ ID NO: 3110964 - RNA, 19 nt, Artificial Sequence
  Description of Artificial Sequence: Synthetic oligonucleotide
aacaauuguaauuuagcag

SEQ ID NO: 3110965 - RNA, 19 nt, Artificial Sequence
  Description of Artificial Sequence: Synthetic oligonucleotide
uguaaacucacuuauaacu

SEQ ID NO: 3110966 - RNA, 19 nt, Artificial Sequence
  Description of Artificial Sequence: Synthetic oligonucleotide
aacacuucucuuuggaagc

SEQ ID NO: 3110967 - RNA, 19 nt, Artificial Sequence
  Description of Artificial Sequence: Synthetic oligonucleotide
aauagcuaggaaugugucc

SEQ ID NO: 3110968 - RNA, 19 nt, Artificial Sequence
  Description of Artificial Sequence: Synthetic oligonucleotide
aaugucaaaagguuggaca

SEQ ID NO: 3110969 - RNA, 19 nt, Artificial Sequence
  Description of Artificial Sequence: Synthetic oligonucleotide
auaacuuucaguucucagg

SEQ ID NO: 3110970 - RNA, 19 nt, Artificial Sequence
  Description of Artificial Sequence: Synthetic oligonucleotide
aaacacuucucuuuggaag

SEQ ID NO: 3110971 - RNA, 19 nt, Artificial Sequence
  Description of Artificial Sequence: Synthetic oligonucleotide
aagacuaugacaccuccuc

SEQ ID NO: 3110972 - RNA, 19 nt, Artificial Sequence
  Description of Artificial Sequence: Synthetic oligonucleotide
auagcuaggaauguguccc

SEQ ID NO: 3110973 - RNA, 19 nt, Artificial Sequence
  Description of Artificial Sequence: Synthetic oligonucleotide
ucacuuauaacuuucaguu

SEQ ID NO: 3110974 - RNA, 19 nt, Artificial Sequence
  Description of Artificial Sequence: Synthetic oligonucleotide
acuuauaacuuucaguucu

SEQ ID NO: 3110975 - RNA, 19 nt, Artificial Sequence
  Description of Artificial Sequence: Synthetic oligonucleotide
uaacuuucaguucucaggc

SEQ ID NO: 3110976 - RNA, 19 nt, Artificial Sequence
  Description of Artificial Sequence: Synthetic oligonucleotide
uguuccaucucacagacaa

SEQ ID NO: 3110977 - RNA, 19 nt, Artificial Sequence
  Description of Artificial Sequence: Synthetic oligonucleotide
aaaacuguaaacucacuua

SEQ ID NO: 3110978 - RNA, 19 nt, Artificial Sequence
  Description of Artificial Sequence: Synthetic oligonucleotide
agcacaaaacuguaaacuc

SEQ ID NO: 3110979 - RNA, 19 nt, Artificial Sequence
  Description of Artificial Sequence: Synthetic oligonucleotide
cacaaugucaaaagguugg

SEQ ID NO: 3110980 - RNA, 19 nt, Artificial Sequence
  Description of Artificial Sequence: Synthetic oligonucleotide
aaacuguaaacucacuuau

SEQ ID NO: 3110981 - RNA, 19 nt, Artificial Sequence
  Description of Artificial Sequence: Synthetic oligonucleotide
ugccugaagacuaugacac

SEQ ID NO: 3110982 - RNA, 19 nt, Artificial Sequence
  Description of Artificial Sequence: Synthetic oligonucleotide
cucagaauagcuaggaaug

SEQ ID NO: 3110983 - RNA, 19 nt, Artificial Sequence
  Description of Artificial Sequence: Synthetic oligonucleotide
gaacaauuguaauuuagca

SEQ ID NO: 3110984 - RNA, 19 nt, Artificial Sequence
  Description of Artificial Sequence: Synthetic oligonucleotide
caugccucagaauagcuag

SEQ ID NO: 3110985 - RNA, 19 nt, Artificial Sequence
  Description of Artificial Sequence: Synthetic oligonucleotide
acuguaaacucacuuauaa

SEQ ID NO: 3110986 - RNA, 19 nt, Artificial Sequence
  Description of Artificial Sequence: Synthetic oligonucleotide
acuaugacaccuccucgcc

SEQ ID NO: 3110987 - RNA, 19 nt, Artificial Sequence
  Description of Artificial Sequence: Synthetic oligonucleotide
ucacaaugucaaaagguug

SEQ ID NO: 3110988 - RNA, 19 nt, Artificial Sequence
  Description of Artificial Sequence: Synthetic oligonucleotide
ugucccagcacaaaacugu

SEQ ID NO: 3110989 - RNA, 19 nt, Artificial Sequence
  Description of Artificial Sequence: Synthetic oligonucleotide
aaacucacuuauaacuuuc

SEQ ID NO: 3110990 - RNA, 19 nt, Artificial Sequence
  Description of Artificial Sequence: Synthetic oligonucleotide
caggcuucaagucacaaug

SEQ ID NO: 3110991 - RNA, 19 nt, Artificial Sequence
  Description of Artificial Sequence: Synthetic oligonucleotide
aaugugucccagcacaaaa

SEQ ID NO: 3110992 - RNA, 19 nt, Artificial Sequence
  Description of Artificial Sequence: Synthetic oligonucleotide
caucucacagacaaccugc

SEQ ID NO: 3110993 - RNA, 19 nt, Artificial Sequence
  Description of Artificial Sequence: Synthetic oligonucleotide
ugaggaacaauuguaauuu

SEQ ID NO: 3110994 - RNA, 19 nt, Artificial Sequence
  Description of Artificial Sequence: Synthetic oligonucleotide
ugaagacuaugacaccucc

SEQ ID NO: 3110995 - RNA, 19 nt, Artificial Sequence
  Description of Artificial Sequence: Synthetic oligonucleotide
ucacagacaaccugccagg

SEQ ID NO: 3110996 - RNA, 19 nt, Artificial Sequence
  Description of Artificial Sequence: Synthetic oligonucleotide
cacaaaacuguaaacucac

SEQ ID NO: 3110997 - RNA, 19 nt, Artificial Sequence
  Description of Artificial Sequence: Synthetic oligonucleotide
cucacagacaaccugccag

SEQ ID NO: 3110998 - RNA, 19 nt, Artificial Sequence
  Description of Artificial Sequence: Synthetic oligonucleotide
ucagagugaggaacaauug

SEQ ID NO: 3110999 - RNA, 19 nt, Artificial Sequence
  Description of Artificial Sequence: Synthetic oligonucleotide
uuggaagccaaguuccugc

SEQ ID NO: 3111000 - RNA, 19 nt, Artificial Sequence
  Description of Artificial Sequence: Synthetic oligonucleotide
aggaaugugucccagcaca

SEQ ID NO: 3111001 - RNA, 19 nt, Artificial Sequence
  Description of Artificial Sequence: Synthetic oligonucleotide
ucaguucucaggcuucaag

SEQ ID NO: 3111002 - RNA, 19 nt, Artificial Sequence
  Description of Artificial Sequence: Synthetic oligonucleotide
ugccaggcauauaugaacc

SEQ ID NO: 3111003 - RNA, 19 nt, Artificial Sequence
  Description of Artificial Sequence: Synthetic oligonucleotide
auauaugaaccauggcuug

SEQ ID NO: 3111004 - RNA, 19 nt, Artificial Sequence
  Description of Artificial Sequence: Synthetic oligonucleotide
gacuaugacaccuccucgc

SEQ ID NO: 3111005 - RNA, 19 nt, Artificial Sequence
  Description of Artificial Sequence: Synthetic oligonucleotide
ugcacaugccucagaauag

SEQ ID NO: 3111006 - RNA, 19 nt, Artificial Sequence
  Description of Artificial Sequence: Synthetic oligonucleotide
ugugucccagcacaaaacu

SEQ ID NO: 3111007 - RNA, 19 nt, Artificial Sequence
  Description of Artificial Sequence: Synthetic oligonucleotide
ugccucaucagagugagga

SEQ ID NO: 3111008 - RNA, 19 nt, Artificial Sequence
  Description of Artificial Sequence: Synthetic oligonucleotide
uaugacaccuccucgccca

SEQ ID NO: 3111009 - RNA, 19 nt, Artificial Sequence
  Description of Artificial Sequence: Synthetic oligonucleotide
uagcaaacacuucucuuug

SEQ ID NO: 3111010 - RNA, 19 nt, Artificial Sequence
  Description of Artificial Sequence: Synthetic oligonucleotide
augucaaaagguuggacau

SEQ ID NO: 3111011 - RNA, 19 nt, Artificial Sequence
  Description of Artificial Sequence: Synthetic oligonucleotide
agacuaugacaccuccucg

SEQ ID NO: 3111012 - RNA, 19 nt, Artificial Sequence
  Description of Artificial Sequence: Synthetic oligonucleotide
cuucaagucacaaugucaa

SEQ ID NO: 3111013 - RNA, 19 nt, Artificial Sequence
  Description of Artificial Sequence: Synthetic oligonucleotide
acucacuuauaacuuucag

SEQ ID NO: 3111014 - RNA, 19 nt, Artificial Sequence
  Description of Artificial Sequence: Synthetic oligonucleotide
uggacaugccugaagacua

SEQ ID NO: 3111015 - RNA, 19 nt, Artificial Sequence
  Description of Artificial Sequence: Synthetic oligonucleotide
aggcauauaugaaccaugg

SEQ ID NO: 3111016 - RNA, 19 nt, Artificial Sequence
  Description of Artificial Sequence: Synthetic oligonucleotide
augccugaagacuaugaca

SEQ ID NO: 3111017 - RNA, 19 nt, Artificial Sequence
  Description of Artificial Sequence: Synthetic oligonucleotide
uaaacucacuuauaacuuu

SEQ ID NO: 3111018 - RNA, 19 nt, Artificial Sequence
  Description of Artificial Sequence: Synthetic oligonucleotide
ggaacaauuguaauuuagc

SEQ ID NO: 3111019 - RNA, 19 nt, Artificial Sequence
  Description of Artificial Sequence: Synthetic oligonucleotide
cuguaaacucacuuauaac

SEQ ID NO: 3111020 - RNA, 19 nt, Artificial Sequence
  Description of Artificial Sequence: Synthetic oligonucleotide
uauaugaaccauggcuugc

SEQ ID NO: 3111021 - RNA, 19 nt, Artificial Sequence
  Description of Artificial Sequence: Synthetic oligonucleotide
agaauagcuaggaaugugu

SEQ ID NO: 3111022 - RNA, 19 nt, Artificial Sequence
  Description of Artificial Sequence: Synthetic oligonucleotide
auggcuugcaagcugcaca

SEQ ID NO: 3111023 - RNA, 19 nt, Artificial Sequence
  Description of Artificial Sequence: Synthetic oligonucleotide
aggaacaauuguaauuuag

SEQ ID NO: 3111024 - RNA, 19 nt, Artificial Sequence
  Description of Artificial Sequence: Synthetic oligonucleotide
uuggacaugccugaagacu

SEQ ID NO: 3111025 - RNA, 19 nt, Artificial Sequence
  Description of Artificial Sequence: Synthetic oligonucleotide
cuugcaagcugcacaugcc

SEQ ID NO: 3111026 - RNA, 19 nt, Artificial Sequence
  Description of Artificial Sequence: Synthetic oligonucleotide
augaaccauggcuugcaag

SEQ ID NO: 3111027 - RNA, 19 nt, Artificial Sequence
  Description of Artificial Sequence: Synthetic oligonucleotide
uccuguuccaucucacaga

SEQ ID NO: 3111028 - RNA, 19 nt, Artificial Sequence
  Description of Artificial Sequence: Synthetic oligonucleotide
gcauauaugaaccauggcu

SEQ ID NO: 3111029 - RNA, 19 nt, Artificial Sequence
  Description of Artificial Sequence: Synthetic oligonucleotide
uucucuuuggaagccaagu

SEQ ID NO: 3111030 - RNA, 19 nt, Artificial Sequence
  Description of Artificial Sequence: Synthetic oligonucleotide
cuuauaacuuucaguucuc

SEQ ID NO: 3111031 - RNA, 19 nt, Artificial Sequence
  Description of Artificial Sequence: Synthetic oligonucleotide
uugcaagcugcacaugccu

SEQ ID NO: 3111032 - RNA, 19 nt, Artificial Sequence
  Description of Artificial Sequence: Synthetic oligonucleotide
agugaggaacaauuguaau

SEQ ID NO: 3111033 - RNA, 19 nt, Artificial Sequence
  Description of Artificial Sequence: Synthetic oligonucleotide
cugccaggcauauaugaac

SEQ ID NO: 3111034 - RNA, 19 nt, Artificial Sequence
  Description of Artificial Sequence: Synthetic oligonucleotide
caggcauauaugaaccaug

SEQ ID NO: 3111035 - RNA, 19 nt, Artificial Sequence
  Description of Artificial Sequence: Synthetic oligonucleotide
caugccugaagacuaugac

SEQ ID NO: 3111036 - RNA, 19 nt, Artificial Sequence
  Description of Artificial Sequence: Synthetic oligonucleotide
cuccuguuccaucucacag

SEQ ID NO: 3111037 - RNA, 19 nt, Artificial Sequence
  Description of Artificial Sequence: Synthetic oligonucleotide
acuuucaguucucaggcuu

SEQ ID NO: 3111038 - RNA, 19 nt, Artificial Sequence
  Description of Artificial Sequence: Synthetic oligonucleotide
aacuuucaguucucaggcu

SEQ ID NO: 3111039 - RNA, 19 nt, Artificial Sequence
  Description of Artificial Sequence: Synthetic oligonucleotide
uuccugccucaucagagug

SEQ ID NO: 3111040 - RNA, 19 nt, Artificial Sequence
  Description of Artificial Sequence: Synthetic oligonucleotide
aguuccugccucaucagag

SEQ ID NO: 3111041 - RNA, 19 nt, Artificial Sequence
  Description of Artificial Sequence: Synthetic oligonucleotide
cuaggaaugugucccagca

SEQ ID NO: 3111042 - RNA, 19 nt, Artificial Sequence
  Description of Artificial Sequence: Synthetic oligonucleotide
cauauaugaaccauggcuu

SEQ ID NO: 3111043 - RNA, 19 nt, Artificial Sequence
  Description of Artificial Sequence: Synthetic oligonucleotide
ucagaauagcuaggaaugu

SEQ ID NO: 3111044 - RNA, 19 nt, Artificial Sequence
  Description of Artificial Sequence: Synthetic oligonucleotide
acacuucucuuuggaagcc

SEQ ID NO: 3111045 - RNA, 19 nt, Artificial Sequence
  Description of Artificial Sequence: Synthetic oligonucleotide
accugccaggcauauauga

SEQ ID NO: 3111046 - RNA, 19 nt, Artificial Sequence
  Description of Artificial Sequence: Synthetic oligonucleotide
aucagagugaggaacaauu

SEQ ID NO: 3111047 - RNA, 19 nt, Artificial Sequence
  Description of Artificial Sequence: Synthetic oligonucleotide
uccaucucacagacaaccu

SEQ ID NO: 3111048 - RNA, 19 nt, Artificial Sequence
  Description of Artificial Sequence: Synthetic oligonucleotide
cuuucaguucucaggcuuc

SEQ ID NO: 3111049 - RNA, 19 nt, Artificial Sequence
  Description of Artificial Sequence: Synthetic oligonucleotide
gaauagcuaggaauguguc

SEQ ID NO: 3111050 - RNA, 19 nt, Artificial Sequence
  Description of Artificial Sequence: Synthetic oligonucleotide
caauuguaauuuagcagca

SEQ ID NO: 3111051 - RNA, 19 nt, Artificial Sequence
  Description of Artificial Sequence: Synthetic oligonucleotide
cacuuauaacuuucaguuc

SEQ ID NO: 3111052 - RNA, 19 nt, Artificial Sequence
  Description of Artificial Sequence: Synthetic oligonucleotide
augugucccagcacaaaac

SEQ ID NO: 3111053 - RNA, 19 nt, Artificial Sequence
  Description of Artificial Sequence: Synthetic oligonucleotide
uggaagccaaguuccugcc

SEQ ID NO: 3111054 - RNA, 19 nt, Artificial Sequence
  Description of Artificial Sequence: Synthetic oligonucleotide
aucucacagacaaccugcc

SEQ ID NO: 3111055 - RNA, 19 nt, Artificial Sequence
  Description of Artificial Sequence: Synthetic oligonucleotide
uccguagcaaacacuucuc

SEQ ID NO: 3111056 - RNA, 19 nt, Artificial Sequence
  Description of Artificial Sequence: Synthetic oligonucleotide
gcuugcaagcugcacaugc

SEQ ID NO: 3111057 - RNA, 19 nt, Artificial Sequence
  Description of Artificial Sequence: Synthetic oligonucleotide
aacucacuuauaacuuuca

SEQ ID NO: 3111058 - RNA, 19 nt, Artificial Sequence
  Description of Artificial Sequence: Synthetic oligonucleotide
ucucacagacaaccugcca

SEQ ID NO: 3111059 - RNA, 19 nt, Artificial Sequence
  Description of Artificial Sequence: Synthetic oligonucleotide
cucacuuauaacuuucagu

SEQ ID NO: 3111060 - RNA, 19 nt, Artificial Sequence
  Description of Artificial Sequence: Synthetic oligonucleotide
ucaggcuucaagucacaau

SEQ ID NO: 3111061 - RNA, 19 nt, Artificial Sequence
  Description of Artificial Sequence: Synthetic oligonucleotide
gguuggacaugccugaaga

SEQ ID NO: 3111062 - RNA, 19 nt, Artificial Sequence
  Description of Artificial Sequence: Synthetic oligonucleotide
ucuccuguuccaucucaca

SEQ ID NO: 3111063 - RNA, 19 nt, Artificial Sequence
  Description of Artificial Sequence: Synthetic oligonucleotide
uaggaaugugucccagcac

SEQ ID NO: 3111064 - RNA, 19 nt, Artificial Sequence
  Description of Artificial Sequence: Synthetic oligonucleotide
auaugaaccauggcuugca

SEQ ID NO: 3111065 - RNA, 19 nt, Artificial Sequence
  Description of Artificial Sequence: Synthetic oligonucleotide
ugcaagcugcacaugccuc

SEQ ID NO: 3111066 - RNA, 19 nt, Artificial Sequence
  Description of Artificial Sequence: Synthetic oligonucleotide
cuaugacaccuccucgccc

SEQ ID NO: 3111067 - RNA, 19 nt, Artificial Sequence
  Description of Artificial Sequence: Synthetic oligonucleotide
cugcacaugccucagaaua

SEQ ID NO: 3111068 - RNA, 19 nt, Artificial Sequence
  Description of Artificial Sequence: Synthetic oligonucleotide
uaugaaccauggcuugcaa

SEQ ID NO: 3111069 - RNA, 19 nt, Artificial Sequence
  Description of Artificial Sequence: Synthetic oligonucleotide
agcugcacaugccucagaa

SEQ ID NO: 3111070 - RNA, 19 nt, Artificial Sequence
  Description of Artificial Sequence: Synthetic oligonucleotide
cugaagacuaugacaccuc

SEQ ID NO: 3111071 - RNA, 19 nt, Artificial Sequence
  Description of Artificial Sequence: Synthetic oligonucleotide
cagaauagcuaggaaugug

SEQ ID NO: 3111072 - RNA, 19 nt, Artificial Sequence
  Description of Artificial Sequence: Synthetic oligonucleotide
gacaccuccucgcccacug

SEQ ID NO: 3111073 - RNA, 19 nt, Artificial Sequence
  Description of Artificial Sequence: Synthetic oligonucleotide
cuucucuuuggaagccaag

SEQ ID NO: 3111074 - RNA, 19 nt, Artificial Sequence
  Description of Artificial Sequence: Synthetic oligonucleotide
acugccaguccguagcaaa

SEQ ID NO: 3111075 - RNA, 19 nt, Artificial Sequence
  Description of Artificial Sequence: Synthetic oligonucleotide
gagugaggaacaauuguaa

SEQ ID NO: 3111076 - RNA, 19 nt, Artificial Sequence
  Description of Artificial Sequence: Synthetic oligonucleotide
ugccucagaauagcuagga

SEQ ID NO: 3111077 - RNA, 19 nt, Artificial Sequence
  Description of Artificial Sequence: Synthetic oligonucleotide
uccugccucaucagaguga

SEQ ID NO: 3111078 - RNA, 19 nt, Artificial Sequence
  Description of Artificial Sequence: Synthetic oligonucleotide
uucaagucacaaugucaaa

SEQ ID NO: 3111079 - RNA, 19 nt, Artificial Sequence
  Description of Artificial Sequence: Synthetic oligonucleotide
guuggacaugccugaagac

SEQ ID NO: 3111080 - RNA, 19 nt, Artificial Sequence
  Description of Artificial Sequence: Synthetic oligonucleotide
guagcaaacacuucucuuu

SEQ ID NO: 3111081 - RNA, 19 nt, Artificial Sequence
  Description of Artificial Sequence: Synthetic oligonucleotide
uuucaguucucaggcuuca

SEQ ID NO: 3111082 - RNA, 19 nt, Artificial Sequence
  Description of Artificial Sequence: Synthetic oligonucleotide
caaguuccugccucaucag

SEQ ID NO: 3111083 - RNA, 19 nt, Artificial Sequence
  Description of Artificial Sequence: Synthetic oligonucleotide
acaaugucaaaagguugga

SEQ ID NO: 3111084 - RNA, 19 nt, Artificial Sequence
  Description of Artificial Sequence: Synthetic oligonucleotide
caaugucaaaagguuggac

SEQ ID NO: 3111085 - RNA, 19 nt, Artificial Sequence
  Description of Artificial Sequence: Synthetic oligonucleotide
acagacaaccugccaggca

SEQ ID NO: 3111086 - RNA, 19 nt, Artificial Sequence
  Description of Artificial Sequence: Synthetic oligonucleotide
guccguagcaaacacuucu

SEQ ID NO: 3111087 - RNA, 19 nt, Artificial Sequence
  Description of Artificial Sequence: Synthetic oligonucleotide
cucgcccacugccaguccg

SEQ ID NO: 3111088 - RNA, 19 nt, Artificial Sequence
  Description of Artificial Sequence: Synthetic oligonucleotide
caaacacuucucuuuggaa

SEQ ID NO: 3111089 - RNA, 19 nt, Artificial Sequence
  Description of Artificial Sequence: Synthetic oligonucleotide
caaaacuguaaacucacuu

SEQ ID NO: 3111090 - RNA, 19 nt, Artificial Sequence
  Description of Artificial Sequence: Synthetic oligonucleotide
aacuguaaacucacuuaua

SEQ ID NO: 3111091 - RNA, 19 nt, Artificial Sequence
  Description of Artificial Sequence: Synthetic oligonucleotide
cugccaguccguagcaaac

SEQ ID NO: 3111092 - RNA, 19 nt, Artificial Sequence
  Description of Artificial Sequence: Synthetic oligonucleotide
gugaggaacaauuguaauu

SEQ ID NO: 3111093 - RNA, 19 nt, Artificial Sequence
  Description of Artificial Sequence: Synthetic oligonucleotide
ggcauauaugaaccauggc

SEQ ID NO: 3111094 - RNA, 19 nt, Artificial Sequence
  Description of Artificial Sequence: Synthetic oligonucleotide
ccuguuccaucucacagac

SEQ ID NO: 3111095 - RNA, 19 nt, Artificial Sequence
  Description of Artificial Sequence: Synthetic oligonucleotide
gcaaacacuucucuuugga

SEQ ID NO: 3111096 - RNA, 19 nt, Artificial Sequence
  Description of Artificial Sequence: Synthetic oligonucleotide
uagcuaggaauguguccca

SEQ ID NO: 3111097 - RNA, 19 nt, Artificial Sequence
  Description of Artificial Sequence: Synthetic oligonucleotide
ucccagcacaaaacuguaa

SEQ ID NO: 3111098 - RNA, 19 nt, Artificial Sequence
  Description of Artificial Sequence: Synthetic oligonucleotide
acaccuccucgcccacugc

SEQ ID NO: 3111099 - RNA, 19 nt, Artificial Sequence
  Description of Artificial Sequence: Synthetic oligonucleotide
ugccaguccguagcaaaca

SEQ ID NO: 3111100 - RNA, 19 nt, Artificial Sequence
  Description of Artificial Sequence: Synthetic oligonucleotide
acaugccugaagacuauga

SEQ ID NO: 3111101 - RNA, 19 nt, Artificial Sequence
  Description of Artificial Sequence: Synthetic oligonucleotide
ucaucagagugaggaacaa

SEQ ID NO: 3111102 - RNA, 19 nt, Artificial Sequence
  Description of Artificial Sequence: Synthetic oligonucleotide
ccaaguuccugccucauca

SEQ ID NO: 3111103 - RNA, 19 nt, Artificial Sequence
  Description of Artificial Sequence: Synthetic oligonucleotide
ccagcacaaaacuguaaac

SEQ ID NO: 3111104 - RNA, 19 nt, Artificial Sequence
  Description of Artificial Sequence: Synthetic oligonucleotide
gacaugccugaagacuaug

SEQ ID NO: 3111105 - RNA, 19 nt, Artificial Sequence
  Description of Artificial Sequence: Synthetic oligonucleotide
augacaccuccucgcccac

SEQ ID NO: 3111106 - RNA, 19 nt, Artificial Sequence
  Description of Artificial Sequence: Synthetic oligonucleotide
gaggaacaauuguaauuua

SEQ ID NO: 3111107 - RNA, 19 nt, Artificial Sequence
  Description of Artificial Sequence: Synthetic oligonucleotide
gcacaaaacuguaaacuca

SEQ ID NO: 3111108 - RNA, 19 nt, Artificial Sequence
  Description of Artificial Sequence: Synthetic oligonucleotide
acaaaacuguaaacucacu

SEQ ID NO: 3111109 - RNA, 19 nt, Artificial Sequence
  Description of Artificial Sequence: Synthetic oligonucleotide
cagcacaaaacuguaaacu

SEQ ID NO: 3111110 - RNA, 19 nt, Artificial Sequence
  Description of Artificial Sequence: Synthetic oligonucleotide
caaccugccaggcauauau

SEQ ID NO: 3111111 - RNA, 19 nt, Artificial Sequence
  Description of Artificial Sequence: Synthetic oligonucleotide
gucacaaugucaaaagguu

SEQ ID NO: 3111112 - RNA, 19 nt, Artificial Sequence
  Description of Artificial Sequence: Synthetic oligonucleotide
ggcuucaagucacaauguc

SEQ ID NO: 3111113 - RNA, 19 nt, Artificial Sequence
  Description of Artificial Sequence: Synthetic oligonucleotide
gugucccagcacaaaacug

SEQ ID NO: 3111114 - RNA, 19 nt, Artificial Sequence
  Description of Artificial Sequence: Synthetic oligonucleotide
agcuaggaaugugucccag

SEQ ID NO: 3111115 - RNA, 19 nt, Artificial Sequence
  Description of Artificial Sequence: Synthetic oligonucleotide
gcuucaagucacaauguca

SEQ ID NO: 3111116 - RNA, 19 nt, Artificial Sequence
  Description of Artificial Sequence: Synthetic oligonucleotide
aguccguagcaaacacuuc

SEQ ID NO: 3111117 - RNA, 19 nt, Artificial Sequence
  Description of Artificial Sequence: Synthetic oligonucleotide
augccucagaauagcuagg

SEQ ID NO: 3111118 - RNA, 19 nt, Artificial Sequence
  Description of Artificial Sequence: Synthetic oligonucleotide
cccacugccaguccguagc

SEQ ID NO: 3111119 - RNA, 19 nt, Artificial Sequence
  Description of Artificial Sequence: Synthetic oligonucleotide
cacagacaaccugccaggc

SEQ ID NO: 3111120 - RNA, 19 nt, Artificial Sequence
  Description of Artificial Sequence: Synthetic oligonucleotide
gcuaggaaugugucccagc

SEQ ID NO: 3111121 - RNA, 19 nt, Artificial Sequence
  Description of Artificial Sequence: Synthetic oligonucleotide
ccaucucacagacaaccug

SEQ ID NO: 3111122 - RNA, 19 nt, Artificial Sequence
  Description of Artificial Sequence: Synthetic oligonucleotide
aaccugccaggcauauaug

SEQ ID NO: 3111123 - RNA, 19 nt, Artificial Sequence
  Description of Artificial Sequence: Synthetic oligonucleotide
cagacaaccugccaggcau

SEQ ID NO: 3111124 - RNA, 19 nt, Artificial Sequence
  Description of Artificial Sequence: Synthetic oligonucleotide
gaaugugucccagcacaaa

SEQ ID NO: 3111125 - RNA, 19 nt, Artificial Sequence
  Description of Artificial Sequence: Synthetic oligonucleotide
cauggcuugcaagcugcac

SEQ ID NO: 3111126 - RNA, 19 nt, Artificial Sequence
  Description of Artificial Sequence: Synthetic oligonucleotide
caguccguagcaaacacuu

SEQ ID NO: 3111127 - RNA, 19 nt, Artificial Sequence
  Description of Artificial Sequence: Synthetic oligonucleotide
acuucucuuuggaagccaa

SEQ ID NO: 3111128 - RNA, 19 nt, Artificial Sequence
  Description of Artificial Sequence: Synthetic oligonucleotide
aagguuggacaugccugaa

SEQ ID NO: 3111129 - RNA, 19 nt, Artificial Sequence
  Description of Artificial Sequence: Synthetic oligonucleotide
gaagacuaugacaccuccu

SEQ ID NO: 3111130 - RNA, 19 nt, Artificial Sequence
  Description of Artificial Sequence: Synthetic oligonucleotide
aggcuucaagucacaaugu

SEQ ID NO: 3111131 - RNA, 19 nt, Artificial Sequence
  Description of Artificial Sequence: Synthetic oligonucleotide
acaugccucagaauagcua

SEQ ID NO: 3111132 - RNA, 19 nt, Artificial Sequence
  Description of Artificial Sequence: Synthetic oligonucleotide
gcacaugccucagaauagc

SEQ ID NO: 3111133 - RNA, 19 nt, Artificial Sequence
  Description of Artificial Sequence: Synthetic oligonucleotide
ucgcccacugccaguccgu

SEQ ID NO: 3111134 - RNA, 19 nt, Artificial Sequence
  Description of Artificial Sequence: Synthetic oligonucleotide
uccucgcccacugccaguc

SEQ ID NO: 3111135 - RNA, 19 nt, Artificial Sequence
  Description of Artificial Sequence: Synthetic oligonucleotide
guuccugccucaucagagu

SEQ ID NO: 3111136 - RNA, 19 nt, Artificial Sequence
  Description of Artificial Sequence: Synthetic oligonucleotide
gucuccuguuccaucucac

SEQ ID NO: 3111137 - RNA, 19 nt, Artificial Sequence
  Description of Artificial Sequence: Synthetic oligonucleotide
ccucagaauagcuaggaau

SEQ ID NO: 3111138 - RNA, 19 nt, Artificial Sequence
  Description of Artificial Sequence: Synthetic oligonucleotide
uucaguucucaggcuucaa

SEQ ID NO: 3111139 - RNA, 19 nt, Artificial Sequence
  Description of Artificial Sequence: Synthetic oligonucleotide
gccaguccguagcaaacac

SEQ ID NO: 3111140 - RNA, 19 nt, Artificial Sequence
  Description of Artificial Sequence: Synthetic oligonucleotide
guuccaucucacagacaac

SEQ ID NO: 3111141 - RNA, 19 nt, Artificial Sequence
  Description of Artificial Sequence: Synthetic oligonucleotide
gccugaagacuaugacacc

SEQ ID NO: 3111142 - RNA, 19 nt, Artificial Sequence
  Description of Artificial Sequence: Synthetic oligonucleotide
cugccucaucagagugagg

SEQ ID NO: 3111143 - RNA, 19 nt, Artificial Sequence
  Description of Artificial Sequence: Synthetic oligonucleotide
cacaugccucagaauagcu

SEQ ID NO: 3111144 - RNA, 19 nt, Artificial Sequence
  Description of Artificial Sequence: Synthetic oligonucleotide
gccaggcauauaugaacca

SEQ ID NO: 3111145 - RNA, 19 nt, Artificial Sequence
  Description of Artificial Sequence: Synthetic oligonucleotide
ugacaccuccucgcccacu

SEQ ID NO: 3111146 - RNA, 19 nt, Artificial Sequence
  Description of Artificial Sequence: Synthetic oligonucleotide
ccugaagacuaugacaccu

SEQ ID NO: 3111147 - RNA, 19 nt, Artificial Sequence
  Description of Artificial Sequence: Synthetic oligonucleotide
ccugccaggcauauaugaa

SEQ ID NO: 3111148 - RNA, 19 nt, Artificial Sequence
  Description of Artificial Sequence: Synthetic oligonucleotide
cucaggcuucaagucacaa

SEQ ID NO: 3111149 - RNA, 19 nt, Artificial Sequence
  Description of Artificial Sequence: Synthetic oligonucleotide
ggaaugugucccagcacaa

SEQ ID NO: 3111150 - RNA, 19 nt, Artificial Sequence
  Description of Artificial Sequence: Synthetic oligonucleotide
cuguuccaucucacagaca

SEQ ID NO: 3111151 - RNA, 19 nt, Artificial Sequence
  Description of Artificial Sequence: Synthetic oligonucleotide
gucccagcacaaaacugua

SEQ ID NO: 3111152 - RNA, 19 nt, Artificial Sequence
  Description of Artificial Sequence: Synthetic oligonucleotide
gacaaccugccaggcauau

SEQ ID NO: 3111153 - RNA, 19 nt, Artificial Sequence
  Description of Artificial Sequence: Synthetic oligonucleotide
gccucagaauagcuaggaa

SEQ ID NO: 3111154 - RNA, 19 nt, Artificial Sequence
  Description of Artificial Sequence: Synthetic oligonucleotide
gccaaguuccugccucauc

SEQ ID NO: 3111155 - RNA, 19 nt, Artificial Sequence
  Description of Artificial Sequence: Synthetic oligonucleotide
ccuccucgcccacugccag

SEQ ID NO: 3111156 - RNA, 19 nt, Artificial Sequence
  Description of Artificial Sequence: Synthetic oligonucleotide
agccaaguuccugccucau

SEQ ID NO: 3111157 - RNA, 19 nt, Artificial Sequence
  Description of Artificial Sequence: Synthetic oligonucleotide
gcccacugccaguccguag

SEQ ID NO: 3111158 - RNA, 19 nt, Artificial Sequence
  Description of Artificial Sequence: Synthetic oligonucleotide
agacaaccugccaggcaua

SEQ ID NO: 3111159 - RNA, 19 nt, Artificial Sequence
  Description of Artificial Sequence: Synthetic oligonucleotide
acaaccugccaggcauaua

SEQ ID NO: 3111160 - RNA, 19 nt, Artificial Sequence
  Description of Artificial Sequence: Synthetic oligonucleotide
gccucaucagagugaggaa

SEQ ID NO: 3111161 - RNA, 19 nt, Artificial Sequence
  Description of Artificial Sequence: Synthetic oligonucleotide
ggaagccaaguuccugccu

SEQ ID NO: 3111162 - RNA, 19 nt, Artificial Sequence
  Description of Artificial Sequence: Synthetic oligonucleotide
caucagagugaggaacaau

SEQ ID NO: 3111163 - RNA, 19 nt, Artificial Sequence
  Description of Artificial Sequence: Synthetic oligonucleotide
ggcuugcaagcugcacaug

SEQ ID NO: 3111164 - RNA, 19 nt, Artificial Sequence
  Description of Artificial Sequence: Synthetic oligonucleotide
ccguagcaaacacuucucu

SEQ ID NO: 3111165 - RNA, 19 nt, Artificial Sequence
  Description of Artificial Sequence: Synthetic oligonucleotide
ccaguccguagcaaacacu

SEQ ID NO: 3111166 - RNA, 19 nt, Artificial Sequence
  Description of Artificial Sequence: Synthetic oligonucleotide
cgucuccuguuccaucuca

SEQ ID NO: 3111167 - RNA, 19 nt, Artificial Sequence
  Description of Artificial Sequence: Synthetic oligonucleotide
gcugcacaugccucagaau

SEQ ID NO: 3111168 - RNA, 19 nt, Artificial Sequence
  Description of Artificial Sequence: Synthetic oligonucleotide
cacugccaguccguagcaa

SEQ ID NO: 3111169 - RNA, 19 nt, Artificial Sequence
  Description of Artificial Sequence: Synthetic oligonucleotide
cguagcaaacacuucucuu

SEQ ID NO: 3111170 - RNA, 19 nt, Artificial Sequence
  Description of Artificial Sequence: Synthetic oligonucleotide
ccaggcauauaugaaccau

SEQ ID NO: 3111171 - RNA, 19 nt, Artificial Sequence
  Description of Artificial Sequence: Synthetic oligonucleotide
ccauggcuugcaagcugca

SEQ ID NO: 3111172 - RNA, 19 nt, Artificial Sequence
  Description of Artificial Sequence: Synthetic oligonucleotide
ccacugccaguccguagca

SEQ ID NO: 3111173 - RNA, 19 nt, Artificial Sequence
  Description of Artificial Sequence: Synthetic oligonucleotide
ccgucuccuguuccaucuc

SEQ ID NO: 3111174 - RNA, 19 nt, Artificial Sequence
  Description of Artificial Sequence: Synthetic oligonucleotide
cuccucgcccacugccagu

SEQ ID NO: 3111175 - RNA, 19 nt, Artificial Sequence
  Description of Artificial Sequence: Synthetic oligonucleotide
ccucgcccacugccagucc

SEQ ID NO: 3111176 - RNA, 19 nt, Artificial Sequence
  Description of Artificial Sequence: Synthetic oligonucleotide
ggacaugccugaagacuau

SEQ ID NO: 3111177 - RNA, 19 nt, Artificial Sequence
  Description of Artificial Sequence: Synthetic oligonucleotide
cgcccacugccaguccgua

SEQ ID NO: 3111178 - RNA, 19 nt, Artificial Sequence
  Description of Artificial Sequence: Synthetic oligonucleotide
uuaaucuucaccuucaugg

SEQ ID NO: 3111179 - RNA, 19 nt, Artificial Sequence
  Description of Artificial Sequence: Synthetic oligonucleotide
aacgccauccugcagaugc

SEQ ID NO: 3111180 - RNA, 19 nt, Artificial Sequence
  Description of Artificial Sequence: Synthetic oligonucleotide
ugaacuuccacucuugccg

SEQ ID NO: 3111181 - RNA, 19 nt, Artificial Sequence
  Description of Artificial Sequence: Synthetic oligonucleotide
gaugccacaguucucaucg

SEQ ID NO: 3111182 - RNA, 19 nt, Artificial Sequence
  Description of Artificial Sequence: Synthetic oligonucleotide
uguggaaacagugugagca

SEQ ID NO: 3111183 - RNA, 19 nt, Artificial Sequence
  Description of Artificial Sequence: Synthetic oligonucleotide
uuaaacgccauccugcaga

SEQ ID NO: 3111184 - RNA, 19 nt, Artificial Sequence
  Description of Artificial Sequence: Synthetic oligonucleotide
aacagugugagcacugccc

SEQ ID NO: 3111185 - RNA, 19 nt, Artificial Sequence
  Description of Artificial Sequence: Synthetic oligonucleotide
aaacagugugagcacugcc

SEQ ID NO: 3111186 - RNA, 19 nt, Artificial Sequence
  Description of Artificial Sequence: Synthetic oligonucleotide
acucuuugaacuuccacuc

SEQ ID NO: 3111187 - RNA, 19 nt, Artificial Sequence
  Description of Artificial Sequence: Synthetic oligonucleotide
ucguuggcuacccagagcc

SEQ ID NO: 3111188 - RNA, 19 nt, Artificial Sequence
  Description of Artificial Sequence: Synthetic oligonucleotide
gacagcagccauuaaacgc

SEQ ID NO: 3111189 - RNA, 19 nt, Artificial Sequence
  Description of Artificial Sequence: Synthetic oligonucleotide
ugcauguggaaacagugug

SEQ ID NO: 3111190 - RNA, 19 nt, Artificial Sequence
  Description of Artificial Sequence: Synthetic oligonucleotide
acagcagccauuaaacgcc

SEQ ID NO: 3111191 - RNA, 19 nt, Artificial Sequence
  Description of Artificial Sequence: Synthetic oligonucleotide
acagugugagcacugcccc

SEQ ID NO: 3111192 - RNA, 19 nt, Artificial Sequence
  Description of Artificial Sequence: Synthetic oligonucleotide
gaggaugcagugcaugugg

SEQ ID NO: 3111193 - RNA, 19 nt, Artificial Sequence
  Description of Artificial Sequence: Synthetic oligonucleotide
uggacagcagccauuaaac

SEQ ID NO: 3111194 - RNA, 19 nt, Artificial Sequence
  Description of Artificial Sequence: Synthetic oligonucleotide
uuacagucuggacagcagc

SEQ ID NO: 3111195 - RNA, 19 nt, Artificial Sequence
  Description of Artificial Sequence: Synthetic oligonucleotide
accauuccagcacuuaauc

SEQ ID NO: 3111196 - RNA, 19 nt, Artificial Sequence
  Description of Artificial Sequence: Synthetic oligonucleotide
aaucuucaccuucauggca

SEQ ID NO: 3111197 - RNA, 19 nt, Artificial Sequence
  Description of Artificial Sequence: Synthetic oligonucleotide
uuugaacuuccacucuugc

SEQ ID NO: 3111198 - RNA, 19 nt, Artificial Sequence
  Description of Artificial Sequence: Synthetic oligonucleotide
ugcgcguucagccacuuga

SEQ ID NO: 3111199 - RNA, 19 nt, Artificial Sequence
  Description of Artificial Sequence: Synthetic oligonucleotide
accugcugcgcguucagcc

SEQ ID NO: 3111200 - RNA, 19 nt, Artificial Sequence
  Description of Artificial Sequence: Synthetic oligonucleotide
augcagugcauguggaaac

SEQ ID NO: 3111201 - RNA, 19 nt, Artificial Sequence
  Description of Artificial Sequence: Synthetic oligonucleotide
caccuuacagucuggacag

SEQ ID NO: 3111202 - RNA, 19 nt, Artificial Sequence
  Description of Artificial Sequence: Synthetic oligonucleotide
uacagucuggacagcagcc

SEQ ID NO: 3111203 - RNA, 19 nt, Artificial Sequence
  Description of Artificial Sequence: Synthetic oligonucleotide
gaacuuccacucuugccgg

SEQ ID NO: 3111204 - RNA, 19 nt, Artificial Sequence
  Description of Artificial Sequence: Synthetic oligonucleotide
uugaacuuccacucuugcc

SEQ ID NO: 3111205 - RNA, 19 nt, Artificial Sequence
  Description of Artificial Sequence: Synthetic oligonucleotide
cauguggaaacagugugag

SEQ ID NO: 3111206 - RNA, 19 nt, Artificial Sequence
  Description of Artificial Sequence: Synthetic oligonucleotide
aacuuccacucuugccggc

SEQ ID NO: 3111207 - RNA, 19 nt, Artificial Sequence
  Description of Artificial Sequence: Synthetic oligonucleotide
cucaucguuggcuacccag

SEQ ID NO: 3111208 - RNA, 19 nt, Artificial Sequence
  Description of Artificial Sequence: Synthetic oligonucleotide
cacucuugccggcacaugg

SEQ ID NO: 3111209 - RNA, 19 nt, Artificial Sequence
  Description of Artificial Sequence: Synthetic oligonucleotide
ucaucguuggcuacccaga

SEQ ID NO: 3111210 - RNA, 19 nt, Artificial Sequence
  Description of Artificial Sequence: Synthetic oligonucleotide
ucuuugaacuuccacucuu

SEQ ID NO: 3111211 - RNA, 19 nt, Artificial Sequence
  Description of Artificial Sequence: Synthetic oligonucleotide
aucguuggcuacccagagc

SEQ ID NO: 3111212 - RNA, 19 nt, Artificial Sequence
  Description of Artificial Sequence: Synthetic oligonucleotide
agugcauguggaaacagug

SEQ ID NO: 3111213 - RNA, 19 nt, Artificial Sequence
  Description of Artificial Sequence: Synthetic oligonucleotide
ucaccuucauggcagcaga

SEQ ID NO: 3111214 - RNA, 19 nt, Artificial Sequence
  Description of Artificial Sequence: Synthetic oligonucleotide
uucauggcagcagagcgug

SEQ ID NO: 3111215 - RNA, 19 nt, Artificial Sequence
  Description of Artificial Sequence: Synthetic oligonucleotide
cuuaaucuucaccuucaug

SEQ ID NO: 3111216 - RNA, 19 nt, Artificial Sequence
  Description of Artificial Sequence: Synthetic oligonucleotide
ccauuaaacgccauccugc

SEQ ID NO: 3111217 - RNA, 19 nt, Artificial Sequence
  Description of Artificial Sequence: Synthetic oligonucleotide
uugaggaugcagugcaugu

SEQ ID NO: 3111218 - RNA, 19 nt, Artificial Sequence
  Description of Artificial Sequence: Synthetic oligonucleotide
ucacucuuugaacuuccac

SEQ ID NO: 3111219 - RNA, 19 nt, Artificial Sequence
  Description of Artificial Sequence: Synthetic oligonucleotide
cuuugaacuuccacucuug

SEQ ID NO: 3111220 - RNA, 19 nt, Artificial Sequence
  Description of Artificial Sequence: Synthetic oligonucleotide
auguggaaacagugugagc

SEQ ID NO: 3111221 - RNA, 19 nt, Artificial Sequence
  Description of Artificial Sequence: Synthetic oligonucleotide
cagccauuaaacgccaucc

SEQ ID NO: 3111222 - RNA, 19 nt, Artificial Sequence
  Description of Artificial Sequence: Synthetic oligonucleotide
uuggcuacccagagccacg

SEQ ID NO: 3111223 - RNA, 19 nt, Artificial Sequence
  Description of Artificial Sequence: Synthetic oligonucleotide
auuaaacgccauccugcag

SEQ ID NO: 3111224 - RNA, 19 nt, Artificial Sequence
  Description of Artificial Sequence: Synthetic oligonucleotide
uucaccuucauggcagcag

SEQ ID NO: 3111225 - RNA, 19 nt, Artificial Sequence
  Description of Artificial Sequence: Synthetic oligonucleotide
accuucauggcagcagagc

SEQ ID NO: 3111226 - RNA, 19 nt, Artificial Sequence
  Description of Artificial Sequence: Synthetic oligonucleotide
cuacccagagccacguggc

SEQ ID NO: 3111227 - RNA, 19 nt, Artificial Sequence
  Description of Artificial Sequence: Synthetic oligonucleotide
gucgccaggcaccuuacag

SEQ ID NO: 3111228 - RNA, 19 nt, Artificial Sequence
  Description of Artificial Sequence: Synthetic oligonucleotide
gaaacagugugagcacugc

SEQ ID NO: 3111229 - RNA, 19 nt, Artificial Sequence
  Description of Artificial Sequence: Synthetic oligonucleotide
gcuacccagagccacgugg

SEQ ID NO: 3111230 - RNA, 19 nt, Artificial Sequence
  Description of Artificial Sequence: Synthetic oligonucleotide
acaguucucaucguuggcu

SEQ ID NO: 3111231 - RNA, 19 nt, Artificial Sequence
  Description of Artificial Sequence: Synthetic oligonucleotide
agaugccacaguucucauc

SEQ ID NO: 3111232 - RNA, 19 nt, Artificial Sequence
  Description of Artificial Sequence: Synthetic oligonucleotide
uucagccacuugaggaugc

SEQ ID NO: 3111233 - RNA, 19 nt, Artificial Sequence
  Description of Artificial Sequence: Synthetic oligonucleotide
agagccacguggccacacc

SEQ ID NO: 3111234 - RNA, 19 nt, Artificial Sequence
  Description of Artificial Sequence: Synthetic oligonucleotide
ccuucauggcagcagagcg

SEQ ID NO: 3111235 - RNA, 19 nt, Artificial Sequence
  Description of Artificial Sequence: Synthetic oligonucleotide
cauggcagcagagcgugcg

SEQ ID NO: 3111236 - RNA, 19 nt, Artificial Sequence
  Description of Artificial Sequence: Synthetic oligonucleotide
gaugcagugcauguggaaa

SEQ ID NO: 3111237 - RNA, 19 nt, Artificial Sequence
  Description of Artificial Sequence: Synthetic oligonucleotide
cauuaaacgccauccugca

SEQ ID NO: 3111238 - RNA, 19 nt, Artificial Sequence
  Description of Artificial Sequence: Synthetic oligonucleotide
ucuugccggcacauggggc

SEQ ID NO: 3111239 - RNA, 19 nt, Artificial Sequence
  Description of Artificial Sequence: Synthetic oligonucleotide
cacuuaaucuucaccuuca

SEQ ID NO: 3111240 - RNA, 19 nt, Artificial Sequence
  Description of Artificial Sequence: Synthetic oligonucleotide
ggacagcagccauuaaacg

SEQ ID NO: 3111241 - RNA, 19 nt, Artificial Sequence
  Description of Artificial Sequence: Synthetic oligonucleotide
cacucuuugaacuuccacu

SEQ ID NO: 3111242 - RNA, 19 nt, Artificial Sequence
  Description of Artificial Sequence: Synthetic oligonucleotide
ugaggaugcagugcaugug

SEQ ID NO: 3111243 - RNA, 19 nt, Artificial Sequence
  Description of Artificial Sequence: Synthetic oligonucleotide
cuugaggaugcagugcaug

SEQ ID NO: 3111244 - RNA, 19 nt, Artificial Sequence
  Description of Artificial Sequence: Synthetic oligonucleotide
cacuugaggaugcagugca

SEQ ID NO: 3111245 - RNA, 19 nt, Artificial Sequence
  Description of Artificial Sequence: Synthetic oligonucleotide
gcaccuuacagucuggaca

SEQ ID NO: 3111246 - RNA, 19 nt, Artificial Sequence
  Description of Artificial Sequence: Synthetic oligonucleotide
guggccacaccauuccagc

SEQ ID NO: 3111247 - RNA, 19 nt, Artificial Sequence
  Description of Artificial Sequence: Synthetic oligonucleotide
cucuugccggcacaugggg

SEQ ID NO: 3111248 - RNA, 19 nt, Artificial Sequence
  Description of Artificial Sequence: Synthetic oligonucleotide
cagcacuuaaucuucaccu

SEQ ID NO: 3111249 - RNA, 19 nt, Artificial Sequence
  Description of Artificial Sequence: Synthetic oligonucleotide
acaccauuccagcacuuaa

SEQ ID NO: 3111250 - RNA, 19 nt, Artificial Sequence
  Description of Artificial Sequence: Synthetic oligonucleotide
ucgccaggcaccuuacagu

SEQ ID NO: 3111251 - RNA, 19 nt, Artificial Sequence
  Description of Artificial Sequence: Synthetic oligonucleotide
agccauuaaacgccauccu

SEQ ID NO: 3111252 - RNA, 19 nt, Artificial Sequence
  Description of Artificial Sequence: Synthetic oligonucleotide
cacguggccacaccauucc

SEQ ID NO: 3111253 - RNA, 19 nt, Artificial Sequence
  Description of Artificial Sequence: Synthetic oligonucleotide
caucguuggcuacccagag

SEQ ID NO: 3111254 - RNA, 19 nt, Artificial Sequence
  Description of Artificial Sequence: Synthetic oligonucleotide
gccauuaaacgccauccug

SEQ ID NO: 3111255 - RNA, 19 nt, Artificial Sequence
  Description of Artificial Sequence: Synthetic oligonucleotide
ucuucaccuucauggcagc

SEQ ID NO: 3111256 - RNA, 19 nt, Artificial Sequence
  Description of Artificial Sequence: Synthetic oligonucleotide
uaaacgccauccugcagau

SEQ ID NO: 3111257 - RNA, 19 nt, Artificial Sequence
  Description of Artificial Sequence: Synthetic oligonucleotide
uucucaucguuggcuaccc

SEQ ID NO: 3111258 - RNA, 19 nt, Artificial Sequence
  Description of Artificial Sequence: Synthetic oligonucleotide
uggaaacagugugagcacu

SEQ ID NO: 3111259 - RNA, 19 nt, Artificial Sequence
  Description of Artificial Sequence: Synthetic oligonucleotide
uuccagcacuuaaucuuca

SEQ ID NO: 3111260 - RNA, 19 nt, Artificial Sequence
  Description of Artificial Sequence: Synthetic oligonucleotide
agcacuuaaucuucaccuu

SEQ ID NO: 3111261 - RNA, 19 nt, Artificial Sequence
  Description of Artificial Sequence: Synthetic oligonucleotide
guggaaacagugugagcac

SEQ ID NO: 3111262 - RNA, 19 nt, Artificial Sequence
  Description of Artificial Sequence: Synthetic oligonucleotide
cuugccggcacauggggca

SEQ ID NO: 3111263 - RNA, 19 nt, Artificial Sequence
  Description of Artificial Sequence: Synthetic oligonucleotide
uccagcacuuaaucuucac

SEQ ID NO: 3111264 - RNA, 19 nt, Artificial Sequence
  Description of Artificial Sequence: Synthetic oligonucleotide
guucucaucguuggcuacc

SEQ ID NO: 3111265 - RNA, 19 nt, Artificial Sequence
  Description of Artificial Sequence: Synthetic oligonucleotide
cauuccagcacuuaaucuu

SEQ ID NO: 3111266 - RNA, 19 nt, Artificial Sequence
  Description of Artificial Sequence: Synthetic oligonucleotide
ccacaguucucaucguugg

SEQ ID NO: 3111267 - RNA, 19 nt, Artificial Sequence
  Description of Artificial Sequence: Synthetic oligonucleotide
cuggacagcagccauuaaa

SEQ ID NO: 3111268 - RNA, 19 nt, Artificial Sequence
  Description of Artificial Sequence: Synthetic oligonucleotide
cacaguucucaucguuggc

SEQ ID NO: 3111269 - RNA, 19 nt, Artificial Sequence
  Description of Artificial Sequence: Synthetic oligonucleotide
guuggcuacccagagccac

SEQ ID NO: 3111270 - RNA, 19 nt, Artificial Sequence
  Description of Artificial Sequence: Synthetic oligonucleotide
acucuugccggcacauggg

SEQ ID NO: 3111271 - RNA, 19 nt, Artificial Sequence
  Description of Artificial Sequence: Synthetic oligonucleotide
ccagcacuuaaucuucacc

SEQ ID NO: 3111272 - RNA, 19 nt, Artificial Sequence
  Description of Artificial Sequence: Synthetic oligonucleotide
uacccagagccacguggcc

SEQ ID NO: 3111273 - RNA, 19 nt, Artificial Sequence
  Description of Artificial Sequence: Synthetic oligonucleotide
gcacuuaaucuucaccuuc

SEQ ID NO: 3111274 - RNA, 19 nt, Artificial Sequence
  Description of Artificial Sequence: Synthetic oligonucleotide
ugccacaguucucaucguu

SEQ ID NO: 3111275 - RNA, 19 nt, Artificial Sequence
  Description of Artificial Sequence: Synthetic oligonucleotide
gcguucagccacuugagga

SEQ ID NO: 3111276 - RNA, 19 nt, Artificial Sequence
  Description of Artificial Sequence: Synthetic oligonucleotide
uggccacaccauuccagca

SEQ ID NO: 3111277 - RNA, 19 nt, Artificial Sequence
  Description of Artificial Sequence: Synthetic oligonucleotide
uuccacucuugccggcaca

SEQ ID NO: 3111278 - RNA, 19 nt, Artificial Sequence
  Description of Artificial Sequence: Synthetic oligonucleotide
caccuucauggcagcagag

SEQ ID NO: 3111279 - RNA, 19 nt, Artificial Sequence
  Description of Artificial Sequence: Synthetic oligonucleotide
gcagaugccacaguucuca

SEQ ID NO: 3111280 - RNA, 19 nt, Artificial Sequence
  Description of Artificial Sequence: Synthetic oligonucleotide
ggaaacagugugagcacug

SEQ ID NO: 3111281 - RNA, 19 nt, Artificial Sequence
  Description of Artificial Sequence: Synthetic oligonucleotide
cugcagaugccacaguucu

SEQ ID NO: 3111282 - RNA, 19 nt, Artificial Sequence
  Description of Artificial Sequence: Synthetic oligonucleotide
ucucaucguuggcuaccca

SEQ ID NO: 3111283 - RNA, 19 nt, Artificial Sequence
  Description of Artificial Sequence: Synthetic oligonucleotide
ccaggcaccuuacagucug

SEQ ID NO: 3111284 - RNA, 19 nt, Artificial Sequence
  Description of Artificial Sequence: Synthetic oligonucleotide
ugcugcaccugcugcgcgu

SEQ ID NO: 3111285 - RNA, 19 nt, Artificial Sequence
  Description of Artificial Sequence: Synthetic oligonucleotide
ugcaccugcugcgcguuca

SEQ ID NO: 3111286 - RNA, 19 nt, Artificial Sequence
  Description of Artificial Sequence: Synthetic oligonucleotide
ccucacucuuugaacuucc

SEQ ID NO: 3111287 - RNA, 19 nt, Artificial Sequence
  Description of Artificial Sequence: Synthetic oligonucleotide
ucauggcagcagagcgugc

SEQ ID NO: 3111288 - RNA, 19 nt, Artificial Sequence
  Description of Artificial Sequence: Synthetic oligonucleotide
accuuacagucuggacagc

SEQ ID NO: 3111289 - RNA, 19 nt, Artificial Sequence
  Description of Artificial Sequence: Synthetic oligonucleotide
cuuccacucuugccggcac

SEQ ID NO: 3111290 - RNA, 19 nt, Artificial Sequence
  Description of Artificial Sequence: Synthetic oligonucleotide
ggccacaccauuccagcac

SEQ ID NO: 3111291 - RNA, 19 nt, Artificial Sequence
  Description of Artificial Sequence: Synthetic oligonucleotide
acuuccacucuugccggca

SEQ ID NO: 3111292 - RNA, 19 nt, Artificial Sequence
  Description of Artificial Sequence: Synthetic oligonucleotide
acauggggcagugcugcug

SEQ ID NO: 3111293 - RNA, 19 nt, Artificial Sequence
  Description of Artificial Sequence: Synthetic oligonucleotide
gccacaguucucaucguug

SEQ ID NO: 3111294 - RNA, 19 nt, Artificial Sequence
  Description of Artificial Sequence: Synthetic oligonucleotide
uccacucuugccggcacau

SEQ ID NO: 3111295 - RNA, 19 nt, Artificial Sequence
  Description of Artificial Sequence: Synthetic oligonucleotide
caggcaccuuacagucugg

SEQ ID NO: 3111296 - RNA, 19 nt, Artificial Sequence
  Description of Artificial Sequence: Synthetic oligonucleotide
auggcagcagagcgugcga

SEQ ID NO: 3111297 - RNA, 19 nt, Artificial Sequence
  Description of Artificial Sequence: Synthetic oligonucleotide
ucagccacuugaggaugca

SEQ ID NO: 3111298 - RNA, 19 nt, Artificial Sequence
  Description of Artificial Sequence: Synthetic oligonucleotide
acgccauccugcagaugcc

SEQ ID NO: 3111299 - RNA, 19 nt, Artificial Sequence
  Description of Artificial Sequence: Synthetic oligonucleotide
gcagccauuaaacgccauc

SEQ ID NO: 3111300 - RNA, 19 nt, Artificial Sequence
  Description of Artificial Sequence: Synthetic oligonucleotide
gcacauggggcagugcugc

SEQ ID NO: 3111301 - RNA, 19 nt, Artificial Sequence
  Description of Artificial Sequence: Synthetic oligonucleotide
caguucucaucguuggcua

SEQ ID NO: 3111302 - RNA, 19 nt, Artificial Sequence
  Description of Artificial Sequence: Synthetic oligonucleotide
cugcugcgcguucagccac

SEQ ID NO: 3111303 - RNA, 19 nt, Artificial Sequence
  Description of Artificial Sequence: Synthetic oligonucleotide
uggcagcagagcgugcgac

SEQ ID NO: 3111304 - RNA, 19 nt, Artificial Sequence
  Description of Artificial Sequence: Synthetic oligonucleotide
ggcaccuuacagucuggac

SEQ ID NO: 3111305 - RNA, 19 nt, Artificial Sequence
  Description of Artificial Sequence: Synthetic oligonucleotide
cuucauggcagcagagcgu

SEQ ID NO: 3111306 - RNA, 19 nt, Artificial Sequence
  Description of Artificial Sequence: Synthetic oligonucleotide
acccagagccacguggcca

SEQ ID NO: 3111307 - RNA, 19 nt, Artificial Sequence
  Description of Artificial Sequence: Synthetic oligonucleotide
ucgucgccaggcaccuuac

SEQ ID NO: 3111308 - RNA, 19 nt, Artificial Sequence
  Description of Artificial Sequence: Synthetic oligonucleotide
cucacucuuugaacuucca

SEQ ID NO: 3111309 - RNA, 19 nt, Artificial Sequence
  Description of Artificial Sequence: Synthetic oligonucleotide
gucgucgccaggcaccuua

SEQ ID NO: 3111310 - RNA, 19 nt, Artificial Sequence
  Description of Artificial Sequence: Synthetic oligonucleotide
ggcagcagagcgugcgacc

SEQ ID NO: 3111311 - RNA, 19 nt, Artificial Sequence
  Description of Artificial Sequence: Synthetic oligonucleotide
cugcugcaccugcugcgcg

SEQ ID NO: 3111312 - RNA, 19 nt, Artificial Sequence
  Description of Artificial Sequence: Synthetic oligonucleotide
ugcugcgcguucagccacu

SEQ ID NO: 3111313 - RNA, 19 nt, Artificial Sequence
  Description of Artificial Sequence: Synthetic oligonucleotide
aaacgccauccugcagaug

SEQ ID NO: 3111314 - RNA, 19 nt, Artificial Sequence
  Description of Artificial Sequence: Synthetic oligonucleotide
aggaugcagugcaugugga

SEQ ID NO: 3111315 - RNA, 19 nt, Artificial Sequence
  Description of Artificial Sequence: Synthetic oligonucleotide
uggcuacccagagccacgu

SEQ ID NO: 3111316 - RNA, 19 nt, Artificial Sequence
  Description of Artificial Sequence: Synthetic oligonucleotide
acguggccacaccauucca

SEQ ID NO: 3111317 - RNA, 19 nt, Artificial Sequence
  Description of Artificial Sequence: Synthetic oligonucleotide
gcagucgucgccaggcacc

SEQ ID NO: 3111318 - RNA, 19 nt, Artificial Sequence
  Description of Artificial Sequence: Synthetic oligonucleotide
ggggcagucgucgccaggc

SEQ ID NO: 3111319 - RNA, 19 nt, Artificial Sequence
  Description of Artificial Sequence: Synthetic oligonucleotide
gucuggacagcagccauua

SEQ ID NO: 3111320 - RNA, 19 nt, Artificial Sequence
  Description of Artificial Sequence: Synthetic oligonucleotide
gcagugcauguggaaacag

SEQ ID NO: 3111321 - RNA, 19 nt, Artificial Sequence
  Description of Artificial Sequence: Synthetic oligonucleotide
aggcaccuuacagucugga

SEQ ID NO: 3111322 - RNA, 19 nt, Artificial Sequence
  Description of Artificial Sequence: Synthetic oligonucleotide
augccacaguucucaucgu

SEQ ID NO: 3111323 - RNA, 19 nt, Artificial Sequence
  Description of Artificial Sequence: Synthetic oligonucleotide
cagugcauguggaaacagu

SEQ ID NO: 3111324 - RNA, 19 nt, Artificial Sequence
  Description of Artificial Sequence: Synthetic oligonucleotide
gcagugcugcugcaccugc

SEQ ID NO: 3111325 - RNA, 19 nt, Artificial Sequence
  Description of Artificial Sequence: Synthetic oligonucleotide
cucuuugaacuuccacucu

SEQ ID NO: 3111326 - RNA, 19 nt, Artificial Sequence
  Description of Artificial Sequence: Synthetic oligonucleotide
cguggccacaccauuccag

SEQ ID NO: 3111327 - RNA, 19 nt, Artificial Sequence
  Description of Artificial Sequence: Synthetic oligonucleotide
gggccucacucuuugaacu

SEQ ID NO: 3111328 - RNA, 19 nt, Artificial Sequence
  Description of Artificial Sequence: Synthetic oligonucleotide
ccacuugaggaugcagugc

SEQ ID NO: 3111329 - RNA, 19 nt, Artificial Sequence
  Description of Artificial Sequence: Synthetic oligonucleotide
cagcagccauuaaacgcca

SEQ ID NO: 3111330 - RNA, 19 nt, Artificial Sequence
  Description of Artificial Sequence: Synthetic oligonucleotide
gugcauguggaaacagugu

SEQ ID NO: 3111331 - RNA, 19 nt, Artificial Sequence
  Description of Artificial Sequence: Synthetic oligonucleotide
ggcagucgucgccaggcac

SEQ ID NO: 3111332 - RNA, 19 nt, Artificial Sequence
  Description of Artificial Sequence: Synthetic oligonucleotide
cccagagccacguggccac

SEQ ID NO: 3111333 - RNA, 19 nt, Artificial Sequence
  Description of Artificial Sequence: Synthetic oligonucleotide
ggaugcagugcauguggaa

SEQ ID NO: 3111334 - RNA, 19 nt, Artificial Sequence
  Description of Artificial Sequence: Synthetic oligonucleotide
caccauuccagcacuuaau

SEQ ID NO: 3111335 - RNA, 19 nt, Artificial Sequence
  Description of Artificial Sequence: Synthetic oligonucleotide
ccacguggccacaccauuc

SEQ ID NO: 3111336 - RNA, 19 nt, Artificial Sequence
  Description of Artificial Sequence: Synthetic oligonucleotide
acuugaggaugcagugcau

SEQ ID NO: 3111337 - RNA, 19 nt, Artificial Sequence
  Description of Artificial Sequence: Synthetic oligonucleotide
agucuggacagcagccauu

SEQ ID NO: 3111338 - RNA, 19 nt, Artificial Sequence
  Description of Artificial Sequence: Synthetic oligonucleotide
ccuuacagucuggacagca

SEQ ID NO: 3111339 - RNA, 19 nt, Artificial Sequence
  Description of Artificial Sequence: Synthetic oligonucleotide
cuucaccuucauggcagca

SEQ ID NO: 3111340 - RNA, 19 nt, Artificial Sequence
  Description of Artificial Sequence: Synthetic oligonucleotide
cgccaggcaccuuacaguc

SEQ ID NO: 3111341 - RNA, 19 nt, Artificial Sequence
  Description of Artificial Sequence: Synthetic oligonucleotide
ggcagugcugcugcaccug

SEQ ID NO: 3111342 - RNA, 19 nt, Artificial Sequence
  Description of Artificial Sequence: Synthetic oligonucleotide
cgcguucagccacuugagg

SEQ ID NO: 3111343 - RNA, 19 nt, Artificial Sequence
  Description of Artificial Sequence: Synthetic oligonucleotide
gcgcguucagccacuugag

SEQ ID NO: 3111344 - RNA, 19 nt, Artificial Sequence
  Description of Artificial Sequence: Synthetic oligonucleotide
cacaccauuccagcacuua

SEQ ID NO: 3111345 - RNA, 19 nt, Artificial Sequence
  Description of Artificial Sequence: Synthetic oligonucleotide
ccauuccagcacuuaaucu

SEQ ID NO: 3111346 - RNA, 19 nt, Artificial Sequence
  Description of Artificial Sequence: Synthetic oligonucleotide
ccauccugcagaugccaca

SEQ ID NO: 3111347 - RNA, 19 nt, Artificial Sequence
  Description of Artificial Sequence: Synthetic oligonucleotide
gccucacucuuugaacuuc

SEQ ID NO: 3111348 - RNA, 19 nt, Artificial Sequence
  Description of Artificial Sequence: Synthetic oligonucleotide
cgggccucacucuuugaac

SEQ ID NO: 3111349 - RNA, 19 nt, Artificial Sequence
  Description of Artificial Sequence: Synthetic oligonucleotide
agccacguggccacaccau

SEQ ID NO: 3111350 - RNA, 19 nt, Artificial Sequence
  Description of Artificial Sequence: Synthetic oligonucleotide
cugcgcguucagccacuug

SEQ ID NO: 3111351 - RNA, 19 nt, Artificial Sequence
  Description of Artificial Sequence: Synthetic oligonucleotide
gccacaccauuccagcacu

SEQ ID NO: 3111352 - RNA, 19 nt, Artificial Sequence
  Description of Artificial Sequence: Synthetic oligonucleotide
ccugcugcgcguucagcca

SEQ ID NO: 3111353 - RNA, 19 nt, Artificial Sequence
  Description of Artificial Sequence: Synthetic oligonucleotide
cagucuggacagcagccau

SEQ ID NO: 3111354 - RNA, 19 nt, Artificial Sequence
  Description of Artificial Sequence: Synthetic oligonucleotide
gccauccugcagaugccac

SEQ ID NO: 3111355 - RNA, 19 nt, Artificial Sequence
  Description of Artificial Sequence: Synthetic oligonucleotide
agcagccauuaaacgccau

SEQ ID NO: 3111356 - RNA, 19 nt, Artificial Sequence
  Description of Artificial Sequence: Synthetic oligonucleotide
ggcuacccagagccacgug

SEQ ID NO: 3111357 - RNA, 19 nt, Artificial Sequence
  Description of Artificial Sequence: Synthetic oligonucleotide
ugccggcacauggggcagu

SEQ ID NO: 3111358 - RNA, 19 nt, Artificial Sequence
  Description of Artificial Sequence: Synthetic oligonucleotide
cagaugccacaguucucau

SEQ ID NO: 3111359 - RNA, 19 nt, Artificial Sequence
  Description of Artificial Sequence: Synthetic oligonucleotide
gggcagucgucgccaggca

SEQ ID NO: 3111360 - RNA, 19 nt, Artificial Sequence
  Description of Artificial Sequence: Synthetic oligonucleotide
cacauggggcagugcugcu

SEQ ID NO: 3111361 - RNA, 19 nt, Artificial Sequence
  Description of Artificial Sequence: Synthetic oligonucleotide
gggcagugcugcugcaccu

SEQ ID NO: 3111362 - RNA, 19 nt, Artificial Sequence
  Description of Artificial Sequence: Synthetic oligonucleotide
ggccucacucuuugaacuu

SEQ ID NO: 3111363 - RNA, 19 nt, Artificial Sequence
  Description of Artificial Sequence: Synthetic oligonucleotide
cagucgucgccaggcaccu

SEQ ID NO: 3111364 - RNA, 19 nt, Artificial Sequence
  Description of Artificial Sequence: Synthetic oligonucleotide
ccacucuugccggcacaug

SEQ ID NO: 3111365 - RNA, 19 nt, Artificial Sequence
  Description of Artificial Sequence: Synthetic oligonucleotide
gccacguggccacaccauu

SEQ ID NO: 3111366 - RNA, 19 nt, Artificial Sequence
  Description of Artificial Sequence: Synthetic oligonucleotide
cggcacauggggcagugcu

SEQ ID NO: 3111367 - RNA, 19 nt, Artificial Sequence
  Description of Artificial Sequence: Synthetic oligonucleotide
cguuggcuacccagagcca

SEQ ID NO: 3111368 - RNA, 19 nt, Artificial Sequence
  Description of Artificial Sequence: Synthetic oligonucleotide
ccggcacauggggcagugc

SEQ ID NO: 3111369 - RNA, 19 nt, Artificial Sequence
  Description of Artificial Sequence: Synthetic oligonucleotide
gccaggcaccuuacagucu

SEQ ID NO: 3111370 - RNA, 19 nt, Artificial Sequence
  Description of Artificial Sequence: Synthetic oligonucleotide
cgccauccugcagaugcca

SEQ ID NO: 3111371 - RNA, 19 nt, Artificial Sequence
  Description of Artificial Sequence: Synthetic oligonucleotide
gcugcaccugcugcgcguu

SEQ ID NO: 3111372 - RNA, 19 nt, Artificial Sequence
  Description of Artificial Sequence: Synthetic oligonucleotide
cgucgccaggcaccuuaca

SEQ ID NO: 3111373 - RNA, 19 nt, Artificial Sequence
  Description of Artificial Sequence: Synthetic oligonucleotide
ccacaccauuccagcacuu

SEQ ID NO: 3111374 - RNA, 19 nt, Artificial Sequence
  Description of Artificial Sequence: Synthetic oligonucleotide
gcugcgcguucagccacuu

SEQ ID NO: 3111375 - RNA, 19 nt, Artificial Sequence
  Description of Artificial Sequence: Synthetic oligonucleotide
uguugguucauucauaaag

SEQ ID NO: 3111376 - RNA, 19 nt, Artificial Sequence
  Description of Artificial Sequence: Synthetic oligonucleotide
auguauaaaauguugguuc

SEQ ID NO: 3111377 - RNA, 19 nt, Artificial Sequence
  Description of Artificial Sequence: Synthetic oligonucleotide
aucaauaucauccaaguau

SEQ ID NO: 3111378 - RNA, 19 nt, Artificial Sequence
  Description of Artificial Sequence: Synthetic oligonucleotide
ucaauaucauccaaguaug

SEQ ID NO: 3111379 - RNA, 19 nt, Artificial Sequence
  Description of Artificial Sequence: Synthetic oligonucleotide
ucagauguauaaaauguug

SEQ ID NO: 3111380 - RNA, 19 nt, Artificial Sequence
  Description of Artificial Sequence: Synthetic oligonucleotide
auaaaauguugguucauuc

SEQ ID NO: 3111381 - RNA, 19 nt, Artificial Sequence
  Description of Artificial Sequence: Synthetic oligonucleotide
aacaccaucagauguauaa

SEQ ID NO: 3111382 - RNA, 19 nt, Artificial Sequence
  Description of Artificial Sequence: Synthetic oligonucleotide
aaaauguugguucauucau

SEQ ID NO: 3111383 - RNA, 19 nt, Artificial Sequence
  Description of Artificial Sequence: Synthetic oligonucleotide
uucaaguaacuccugauac

SEQ ID NO: 3111384 - RNA, 19 nt, Artificial Sequence
  Description of Artificial Sequence: Synthetic oligonucleotide
agacguauaaacuuuaaaa

SEQ ID NO: 3111385 - RNA, 19 nt, Artificial Sequence
  Description of Artificial Sequence: Synthetic oligonucleotide
auaaaucuguuccauuuuc

SEQ ID NO: 3111386 - RNA, 19 nt, Artificial Sequence
  Description of Artificial Sequence: Synthetic oligonucleotide
caucucaucaucaauauca

SEQ ID NO: 3111387 - RNA, 19 nt, Artificial Sequence
  Description of Artificial Sequence: Synthetic oligonucleotide
cagauguauaaaauguugg

SEQ ID NO: 3111388 - RNA, 19 nt, Artificial Sequence
  Description of Artificial Sequence: Synthetic oligonucleotide
aaaauuuucauaagcuucu

SEQ ID NO: 3111389 - RNA, 19 nt, Artificial Sequence
  Description of Artificial Sequence: Synthetic oligonucleotide
uucuucauaaucuggaaaa

SEQ ID NO: 3111390 - RNA, 19 nt, Artificial Sequence
  Description of Artificial Sequence: Synthetic oligonucleotide
uguauaaaauguugguuca

SEQ ID NO: 3111391 - RNA, 19 nt, Artificial Sequence
  Description of Artificial Sequence: Synthetic oligonucleotide
ugcagugaaaggaacacca

SEQ ID NO: 3111392 - RNA, 19 nt, Artificial Sequence
  Description of Artificial Sequence: Synthetic oligonucleotide
ugguucauucauaaaguag

SEQ ID NO: 3111393 - RNA, 19 nt, Artificial Sequence
  Description of Artificial Sequence: Synthetic oligonucleotide
aaggaacaccaucagaugu

SEQ ID NO: 3111394 - RNA, 19 nt, Artificial Sequence
  Description of Artificial Sequence: Synthetic oligonucleotide
auaucauccaaguaugggu

SEQ ID NO: 3111395 - RNA, 19 nt, Artificial Sequence
  Description of Artificial Sequence: Synthetic oligonucleotide
ucucuuucaaguaacuccu

SEQ ID NO: 3111396 - RNA, 19 nt, Artificial Sequence
  Description of Artificial Sequence: Synthetic oligonucleotide
uaaaauguugguucauuca

SEQ ID NO: 3111397 - RNA, 19 nt, Artificial Sequence
  Description of Artificial Sequence: Synthetic oligonucleotide
aaaguccucucuuucaagu

SEQ ID NO: 3111398 - RNA, 19 nt, Artificial Sequence
  Description of Artificial Sequence: Synthetic oligonucleotide
uguuccauuuucuucauaa

SEQ ID NO: 3111399 - RNA, 19 nt, Artificial Sequence
  Description of Artificial Sequence: Synthetic oligonucleotide
ucaucaauaucauccaagu

SEQ ID NO: 3111400 - RNA, 19 nt, Artificial Sequence
  Description of Artificial Sequence: Synthetic oligonucleotide
uucauaagcuucuucaauc

SEQ ID NO: 3111401 - RNA, 19 nt, Artificial Sequence
  Description of Artificial Sequence: Synthetic oligonucleotide
aaaggaacaccaucagaug

SEQ ID NO: 3111402 - RNA, 19 nt, Artificial Sequence
  Description of Artificial Sequence: Synthetic oligonucleotide
cauucauaaaguaguuagg

SEQ ID NO: 3111403 - RNA, 19 nt, Artificial Sequence
  Description of Artificial Sequence: Synthetic oligonucleotide
aguaugggucaccagcccc

SEQ ID NO: 3111404 - RNA, 19 nt, Artificial Sequence
  Description of Artificial Sequence: Synthetic oligonucleotide
aaguaugggucaccagccc

SEQ ID NO: 3111405 - RNA, 19 nt, Artificial Sequence
  Description of Artificial Sequence: Synthetic oligonucleotide
agauguauaaaauguuggu

SEQ ID NO: 3111406 - RNA, 19 nt, Artificial Sequence
  Description of Artificial Sequence: Synthetic oligonucleotide
aaaaguccucucuuucaag

SEQ ID NO: 3111407 - RNA, 19 nt, Artificial Sequence
  Description of Artificial Sequence: Synthetic oligonucleotide
aguaacuccugauacuucu

SEQ ID NO: 3111408 - RNA, 19 nt, Artificial Sequence
  Description of Artificial Sequence: Synthetic oligonucleotide
uaucauccaaguauggguc

SEQ ID NO: 3111409 - RNA, 19 nt, Artificial Sequence
  Description of Artificial Sequence: Synthetic oligonucleotide
aaucucuggguccaucuca

SEQ ID NO: 3111410 - RNA, 19 nt, Artificial Sequence
  Description of Artificial Sequence: Synthetic oligonucleotide
cuucucuugguaaucuggg

SEQ ID NO: 3111411 - RNA, 19 nt, Artificial Sequence
  Description of Artificial Sequence: Synthetic oligonucleotide
uaaaucuguuccauuuucu

SEQ ID NO: 3111412 - RNA, 19 nt, Artificial Sequence
  Description of Artificial Sequence: Synthetic oligonucleotide
ucauaagcuucuucaaucu

SEQ ID NO: 3111413 - RNA, 19 nt, Artificial Sequence
  Description of Artificial Sequence: Synthetic oligonucleotide
ugaaaggaacaccaucaga

SEQ ID NO: 3111414 - RNA, 19 nt, Artificial Sequence
  Description of Artificial Sequence: Synthetic oligonucleotide
uuucauaagcuucuucaau

SEQ ID NO: 3111415 - RNA, 19 nt, Artificial Sequence
  Description of Artificial Sequence: Synthetic oligonucleotide
uuucaaguaacuccugaua

SEQ ID NO: 3111416 - RNA, 19 nt, Artificial Sequence
  Description of Artificial Sequence: Synthetic oligonucleotide
ucucuugguaaucuggguc

SEQ ID NO: 3111417 - RNA, 19 nt, Artificial Sequence
  Description of Artificial Sequence: Synthetic oligonucleotide
agugaaaggaacaccauca

SEQ ID NO: 3111418 - RNA, 19 nt, Artificial Sequence
  Description of Artificial Sequence: Synthetic oligonucleotide
caaguaugggucaccagcc

SEQ ID NO: 3111419 - RNA, 19 nt, Artificial Sequence
  Description of Artificial Sequence: Synthetic oligonucleotide
cagacacagacguauaaac

SEQ ID NO: 3111420 - RNA, 19 nt, Artificial Sequence
  Description of Artificial Sequence: Synthetic oligonucleotide
gguaaucugggucagcugc

SEQ ID NO: 3111421 - RNA, 19 nt, Artificial Sequence
  Description of Artificial Sequence: Synthetic oligonucleotide
auuuucuucauaaucugga

SEQ ID NO: 3111422 - RNA, 19 nt, Artificial Sequence
  Description of Artificial Sequence: Synthetic oligonucleotide
aucaucaauaucauccaag

SEQ ID NO: 3111423 - RNA, 19 nt, Artificial Sequence
  Description of Artificial Sequence: Synthetic oligonucleotide
uaagcagacacagacguau

SEQ ID NO: 3111424 - RNA, 19 nt, Artificial Sequence
  Description of Artificial Sequence: Synthetic oligonucleotide
caauaucauccaaguaugg

SEQ ID NO: 3111425 - RNA, 19 nt, Artificial Sequence
  Description of Artificial Sequence: Synthetic oligonucleotide
uucuucaaucucugggucc

SEQ ID NO: 3111426 - RNA, 19 nt, Artificial Sequence
  Description of Artificial Sequence: Synthetic oligonucleotide
ucagcugcagugaaaggaa

SEQ ID NO: 3111427 - RNA, 19 nt, Artificial Sequence
  Description of Artificial Sequence: Synthetic oligonucleotide
gaaaggaacaccaucagau

SEQ ID NO: 3111428 - RNA, 19 nt, Artificial Sequence
  Description of Artificial Sequence: Synthetic oligonucleotide
uaacuccugauacuucucu

SEQ ID NO: 3111429 - RNA, 19 nt, Artificial Sequence
  Description of Artificial Sequence: Synthetic oligonucleotide
ucaaucucuggguccaucu

SEQ ID NO: 3111430 - RNA, 19 nt, Artificial Sequence
  Description of Artificial Sequence: Synthetic oligonucleotide
auaagcuucuucaaucucu

SEQ ID NO: 3111431 - RNA, 19 nt, Artificial Sequence
  Description of Artificial Sequence: Synthetic oligonucleotide
acuucucuugguaaucugg

SEQ ID NO: 3111432 - RNA, 19 nt, Artificial Sequence
  Description of Artificial Sequence: Synthetic oligonucleotide
acuccugauacuucucuug

SEQ ID NO: 3111433 - RNA, 19 nt, Artificial Sequence
  Description of Artificial Sequence: Synthetic oligonucleotide
cuccugauacuucucuugg

SEQ ID NO: 3111434 - RNA, 19 nt, Artificial Sequence
  Description of Artificial Sequence: Synthetic oligonucleotide
caucagauguauaaaaugu

SEQ ID NO: 3111435 - RNA, 19 nt, Artificial Sequence
  Description of Artificial Sequence: Synthetic oligonucleotide
ucuucaaucucugggucca

SEQ ID NO: 3111436 - RNA, 19 nt, Artificial Sequence
  Description of Artificial Sequence: Synthetic oligonucleotide
aagcuucuucaaucucugg

SEQ ID NO: 3111437 - RNA, 19 nt, Artificial Sequence
  Description of Artificial Sequence: Synthetic oligonucleotide
uugguaaucugggucagcu

SEQ ID NO: 3111438 - RNA, 19 nt, Artificial Sequence
  Description of Artificial Sequence: Synthetic oligonucleotide
ccaaguaugggucaccagc

SEQ ID NO: 3111439 - RNA, 19 nt, Artificial Sequence
  Description of Artificial Sequence: Synthetic oligonucleotide
gugaaaggaacaccaucag

SEQ ID NO: 3111440 - RNA, 19 nt, Artificial Sequence
  Description of Artificial Sequence: Synthetic oligonucleotide
uccaucucaucaucaauau

SEQ ID NO: 3111441 - RNA, 19 nt, Artificial Sequence
  Description of Artificial Sequence: Synthetic oligonucleotide
aaguaacuccugauacuuc

SEQ ID NO: 3111442 - RNA, 19 nt, Artificial Sequence
  Description of Artificial Sequence: Synthetic oligonucleotide
gacacagacguauaaacuu

SEQ ID NO: 3111443 - RNA, 19 nt, Artificial Sequence
  Description of Artificial Sequence: Synthetic oligonucleotide
accagccccggauaaaucu

SEQ ID NO: 3111444 - RNA, 19 nt, Artificial Sequence
  Description of Artificial Sequence: Synthetic oligonucleotide
cucuugguaaucuggguca

SEQ ID NO: 3111445 - RNA, 19 nt, Artificial Sequence
  Description of Artificial Sequence: Synthetic oligonucleotide
ccaucagauguauaaaaug

SEQ ID NO: 3111446 - RNA, 19 nt, Artificial Sequence
  Description of Artificial Sequence: Synthetic oligonucleotide
gauacuucucuugguaauc

SEQ ID NO: 3111447 - RNA, 19 nt, Artificial Sequence
  Description of Artificial Sequence: Synthetic oligonucleotide
aguccucucuuucaaguaa

SEQ ID NO: 3111448 - RNA, 19 nt, Artificial Sequence
  Description of Artificial Sequence: Synthetic oligonucleotide
uacuucucuugguaaucug

SEQ ID NO: 3111449 - RNA, 19 nt, Artificial Sequence
  Description of Artificial Sequence: Synthetic oligonucleotide
uucauucauaaaguaguua

SEQ ID NO: 3111450 - RNA, 19 nt, Artificial Sequence
  Description of Artificial Sequence: Synthetic oligonucleotide
cuucuucaaucucuggguc

SEQ ID NO: 3111451 - RNA, 19 nt, Artificial Sequence
  Description of Artificial Sequence: Synthetic oligonucleotide
guaugggucaccagccccg

SEQ ID NO: 3111452 - RNA, 19 nt, Artificial Sequence
  Description of Artificial Sequence: Synthetic oligonucleotide
uucucuugguaaucugggu

SEQ ID NO: 3111453 - RNA, 19 nt, Artificial Sequence
  Description of Artificial Sequence: Synthetic oligonucleotide
aucauccaaguauggguca

SEQ ID NO: 3111454 - RNA, 19 nt, Artificial Sequence
  Description of Artificial Sequence: Synthetic oligonucleotide
gucagcugcagugaaagga

SEQ ID NO: 3111455 - RNA, 19 nt, Artificial Sequence
  Description of Artificial Sequence: Synthetic oligonucleotide
uggguccaucucaucauca

SEQ ID NO: 3111456 - RNA, 19 nt, Artificial Sequence
  Description of Artificial Sequence: Synthetic oligonucleotide
cauaagcuucuucaaucuc

SEQ ID NO: 3111457 - RNA, 19 nt, Artificial Sequence
  Description of Artificial Sequence: Synthetic oligonucleotide
agacacagacguauaaacu

SEQ ID NO: 3111458 - RNA, 19 nt, Artificial Sequence
  Description of Artificial Sequence: Synthetic oligonucleotide
gguucauucauaaaguagu

SEQ ID NO: 3111459 - RNA, 19 nt, Artificial Sequence
  Description of Artificial Sequence: Synthetic oligonucleotide
uccaaguaugggucaccag

SEQ ID NO: 3111460 - RNA, 19 nt, Artificial Sequence
  Description of Artificial Sequence: Synthetic oligonucleotide
gauguauaaaauguugguu

SEQ ID NO: 3111461 - RNA, 19 nt, Artificial Sequence
  Description of Artificial Sequence: Synthetic oligonucleotide
aaauguugguucauucaua

SEQ ID NO: 3111462 - RNA, 19 nt, Artificial Sequence
  Description of Artificial Sequence: Synthetic oligonucleotide
aaucugggucagcugcagu

SEQ ID NO: 3111463 - RNA, 19 nt, Artificial Sequence
  Description of Artificial Sequence: Synthetic oligonucleotide
uccucucuuucaaguaacu

SEQ ID NO: 3111464 - RNA, 19 nt, Artificial Sequence
  Description of Artificial Sequence: Synthetic oligonucleotide
ucuugguaaucugggucag

SEQ ID NO: 3111465 - RNA, 19 nt, Artificial Sequence
  Description of Artificial Sequence: Synthetic oligonucleotide
ccccggauaaaucuguucc

SEQ ID NO: 3111466 - RNA, 19 nt, Artificial Sequence
  Description of Artificial Sequence: Synthetic oligonucleotide
uaaucugggucagcugcag

SEQ ID NO: 3111467 - RNA, 19 nt, Artificial Sequence
  Description of Artificial Sequence: Synthetic oligonucleotide
auacuucucuugguaaucu

SEQ ID NO: 3111468 - RNA, 19 nt, Artificial Sequence
  Description of Artificial Sequence: Synthetic oligonucleotide
aaauuuucauaagcuucuu

SEQ ID NO: 3111469 - RNA, 19 nt, Artificial Sequence
  Description of Artificial Sequence: Synthetic oligonucleotide
ugguaaucugggucagcug

SEQ ID NO: 3111470 - RNA, 19 nt, Artificial Sequence
  Description of Artificial Sequence: Synthetic oligonucleotide
agcagacacagacguauaa

SEQ ID NO: 3111471 - RNA, 19 nt, Artificial Sequence
  Description of Artificial Sequence: Synthetic oligonucleotide
cucuggguccaucucauca

SEQ ID NO: 3111472 - RNA, 19 nt, Artificial Sequence
  Description of Artificial Sequence: Synthetic oligonucleotide
uccugauacuucucuuggu

SEQ ID NO: 3111473 - RNA, 19 nt, Artificial Sequence
  Description of Artificial Sequence: Synthetic oligonucleotide
gauaaaucuguuccauuuu

SEQ ID NO: 3111474 - RNA, 19 nt, Artificial Sequence
  Description of Artificial Sequence: Synthetic oligonucleotide
accaucagauguauaaaau

SEQ ID NO: 3111475 - RNA, 19 nt, Artificial Sequence
  Description of Artificial Sequence: Synthetic oligonucleotide
aucagauguauaaaauguu

SEQ ID NO: 3111476 - RNA, 19 nt, Artificial Sequence
  Description of Artificial Sequence: Synthetic oligonucleotide
ugggucaccagccccggau

SEQ ID NO: 3111477 - RNA, 19 nt, Artificial Sequence
  Description of Artificial Sequence: Synthetic oligonucleotide
caccaucagauguauaaaa

SEQ ID NO: 3111478 - RNA, 19 nt, Artificial Sequence
  Description of Artificial Sequence: Synthetic oligonucleotide
ucugggucagcugcaguga

SEQ ID NO: 3111479 - RNA, 19 nt, Artificial Sequence
  Description of Artificial Sequence: Synthetic oligonucleotide
ucauccaaguaugggucac

SEQ ID NO: 3111480 - RNA, 19 nt, Artificial Sequence
  Description of Artificial Sequence: Synthetic oligonucleotide
cugauacuucucuugguaa

SEQ ID NO: 3111481 - RNA, 19 nt, Artificial Sequence
  Description of Artificial Sequence: Synthetic oligonucleotide
uaugggucaccagccccgg

SEQ ID NO: 3111482 - RNA, 19 nt, Artificial Sequence
  Description of Artificial Sequence: Synthetic oligonucleotide
ucuguuccauuuucuucau

SEQ ID NO: 3111483 - RNA, 19 nt, Artificial Sequence
  Description of Artificial Sequence: Synthetic oligonucleotide
cugcagugaaaggaacacc

SEQ ID NO: 3111484 - RNA, 19 nt, Artificial Sequence
  Description of Artificial Sequence: Synthetic oligonucleotide
gggucagcugcagugaaag

SEQ ID NO: 3111485 - RNA, 19 nt, Artificial Sequence
  Description of Artificial Sequence: Synthetic oligonucleotide
cucuuucaaguaacuccug

SEQ ID NO: 3111486 - RNA, 19 nt, Artificial Sequence
  Description of Artificial Sequence: Synthetic oligonucleotide
cagacguauaaacuuuaaa

SEQ ID NO: 3111487 - RNA, 19 nt, Artificial Sequence
  Description of Artificial Sequence: Synthetic oligonucleotide
ggauaaaucuguuccauuu

SEQ ID NO: 3111488 - RNA, 19 nt, Artificial Sequence
  Description of Artificial Sequence: Synthetic oligonucleotide
auccaaguaugggucacca

SEQ ID NO: 3111489 - RNA, 19 nt, Artificial Sequence
  Description of Artificial Sequence: Synthetic oligonucleotide
ucaccagccccggauaaau

SEQ ID NO: 3111490 - RNA, 19 nt, Artificial Sequence
  Description of Artificial Sequence: Synthetic oligonucleotide
acacagacguauaaacuuu

SEQ ID NO: 3111491 - RNA, 19 nt, Artificial Sequence
  Description of Artificial Sequence: Synthetic oligonucleotide
caaucucuggguccaucuc

SEQ ID NO: 3111492 - RNA, 19 nt, Artificial Sequence
  Description of Artificial Sequence: Synthetic oligonucleotide
acaccaucagauguauaaa

SEQ ID NO: 3111493 - RNA, 19 nt, Artificial Sequence
  Description of Artificial Sequence: Synthetic oligonucleotide
agcugcagugaaaggaaca

SEQ ID NO: 3111494 - RNA, 19 nt, Artificial Sequence
  Description of Artificial Sequence: Synthetic oligonucleotide
cauccaaguaugggucacc

SEQ ID NO: 3111495 - RNA, 19 nt, Artificial Sequence
  Description of Artificial Sequence: Synthetic oligonucleotide
auguugguucauucauaaa

SEQ ID NO: 3111496 - RNA, 19 nt, Artificial Sequence
  Description of Artificial Sequence: Synthetic oligonucleotide
gcugcagugaaaggaacac

SEQ ID NO: 3111497 - RNA, 19 nt, Artificial Sequence
  Description of Artificial Sequence: Synthetic oligonucleotide
cuugguaaucugggucagc

SEQ ID NO: 3111498 - RNA, 19 nt, Artificial Sequence
  Description of Artificial Sequence: Synthetic oligonucleotide
uucaaucucuggguccauc

SEQ ID NO: 3111499 - RNA, 19 nt, Artificial Sequence
  Description of Artificial Sequence: Synthetic oligonucleotide
caucaauaucauccaagua

SEQ ID NO: 3111500 - RNA, 19 nt, Artificial Sequence
  Description of Artificial Sequence: Synthetic oligonucleotide
guccucucuuucaaguaac

SEQ ID NO: 3111501 - RNA, 19 nt, Artificial Sequence
  Description of Artificial Sequence: Synthetic oligonucleotide
ugggucagcugcagugaaa

SEQ ID NO: 3111502 - RNA, 19 nt, Artificial Sequence
  Description of Artificial Sequence: Synthetic oligonucleotide
aggaacaccaucagaugua

SEQ ID NO: 3111503 - RNA, 19 nt, Artificial Sequence
  Description of Artificial Sequence: Synthetic oligonucleotide
cacagacguauaaacuuua

SEQ ID NO: 3111504 - RNA, 19 nt, Artificial Sequence
  Description of Artificial Sequence: Synthetic oligonucleotide
ggucagcugcagugaaagg

SEQ ID NO: 3111505 - RNA, 19 nt, Artificial Sequence
  Description of Artificial Sequence: Synthetic oligonucleotide
guaaucugggucagcugca

SEQ ID NO: 3111506 - RNA, 19 nt, Artificial Sequence
  Description of Artificial Sequence: Synthetic oligonucleotide
acagacguauaaacuuuaa

SEQ ID NO: 3111507 - RNA, 19 nt, Artificial Sequence
  Description of Artificial Sequence: Synthetic oligonucleotide
guaacuccugauacuucuc

SEQ ID NO: 3111508 - RNA, 19 nt, Artificial Sequence
  Description of Artificial Sequence: Synthetic oligonucleotide
caaguaacuccugauacuu

SEQ ID NO: 3111509 - RNA, 19 nt, Artificial Sequence
  Description of Artificial Sequence: Synthetic oligonucleotide
ccugauacuucucuuggua

SEQ ID NO: 3111510 - RNA, 19 nt, Artificial Sequence
  Description of Artificial Sequence: Synthetic oligonucleotide
auaagcagacacagacgua

SEQ ID NO: 3111511 - RNA, 19 nt, Artificial Sequence
  Description of Artificial Sequence: Synthetic oligonucleotide
guucauucauaaaguaguu

SEQ ID NO: 3111512 - RNA, 19 nt, Artificial Sequence
  Description of Artificial Sequence: Synthetic oligonucleotide
caccagccccggauaaauc

SEQ ID NO: 3111513 - RNA, 19 nt, Artificial Sequence
  Description of Artificial Sequence: Synthetic oligonucleotide
ccagccccggauaaaucug

SEQ ID NO: 3111514 - RNA, 19 nt, Artificial Sequence
  Description of Artificial Sequence: Synthetic oligonucleotide
gcagacacagacguauaaa

SEQ ID NO: 3111515 - RNA, 19 nt, Artificial Sequence
  Description of Artificial Sequence: Synthetic oligonucleotide
ccaucucaucaucaauauc

SEQ ID NO: 3111516 - RNA, 19 nt, Artificial Sequence
  Description of Artificial Sequence: Synthetic oligonucleotide
ggguccaucucaucaucaa

SEQ ID NO: 3111517 - RNA, 19 nt, Artificial Sequence
  Description of Artificial Sequence: Synthetic oligonucleotide
ccucucuuucaaguaacuc

SEQ ID NO: 3111518 - RNA, 19 nt, Artificial Sequence
  Description of Artificial Sequence: Synthetic oligonucleotide
cccggauaaaucuguucca

SEQ ID NO: 3111519 - RNA, 19 nt, Artificial Sequence
  Description of Artificial Sequence: Synthetic oligonucleotide
cugggucagcugcagugaa

SEQ ID NO: 3111520 - RNA, 19 nt, Artificial Sequence
  Description of Artificial Sequence: Synthetic oligonucleotide
gaacaccaucagauguaua

SEQ ID NO: 3111521 - RNA, 19 nt, Artificial Sequence
  Description of Artificial Sequence: Synthetic oligonucleotide
augggucaccagccccgga

SEQ ID NO: 3111522 - RNA, 19 nt, Artificial Sequence
  Description of Artificial Sequence: Synthetic oligonucleotide
gccccggauaaaucuguuc

SEQ ID NO: 3111523 - RNA, 19 nt, Artificial Sequence
  Description of Artificial Sequence: Synthetic oligonucleotide
ggucaccagccccggauaa

SEQ ID NO: 3111524 - RNA, 19 nt, Artificial Sequence
  Description of Artificial Sequence: Synthetic oligonucleotide
cagccccggauaaaucugu

SEQ ID NO: 3111525 - RNA, 19 nt, Artificial Sequence
  Description of Artificial Sequence: Synthetic oligonucleotide
ggaacaccaucagauguau

SEQ ID NO: 3111526 - RNA, 19 nt, Artificial Sequence
  Description of Artificial Sequence: Synthetic oligonucleotide
cuguuccauuuucuucaua

SEQ ID NO: 3111527 - RNA, 19 nt, Artificial Sequence
  Description of Artificial Sequence: Synthetic oligonucleotide
gucaccagccccggauaaa

SEQ ID NO: 3111528 - RNA, 19 nt, Artificial Sequence
  Description of Artificial Sequence: Synthetic oligonucleotide
agccccggauaaaucuguu

SEQ ID NO: 3111529 - RNA, 19 nt, Artificial Sequence
  Description of Artificial Sequence: Synthetic oligonucleotide
gggucaccagccccggaua

SEQ ID NO: 3111530 - RNA, 19 nt, Artificial Sequence
  Description of Artificial Sequence: Synthetic oligonucleotide
gcagugaaaggaacaccau

SEQ ID NO: 3111531 - RNA, 19 nt, Artificial Sequence
  Description of Artificial Sequence: Synthetic oligonucleotide
ccggauaaaucuguuccau

SEQ ID NO: 3111532 - RNA, 19 nt, Artificial Sequence
  Description of Artificial Sequence: Synthetic oligonucleotide
cuucaaucucuggguccau

SEQ ID NO: 3111533 - RNA, 19 nt, Artificial Sequence
  Description of Artificial Sequence: Synthetic oligonucleotide
cggauaaaucuguuccauu

SEQ ID NO: 3111534 - RNA, 19 nt, Artificial Sequence
  Description of Artificial Sequence: Synthetic oligonucleotide
uauacaacaauauuuauag

SEQ ID NO: 3111535 - RNA, 19 nt, Artificial Sequence
  Description of Artificial Sequence: Synthetic oligonucleotide
uauugaaaagacuaaagag

SEQ ID NO: 3111536 - RNA, 19 nt, Artificial Sequence
  Description of Artificial Sequence: Synthetic oligonucleotide
uacaacaauauuuauaggc

SEQ ID NO: 3111537 - RNA, 19 nt, Artificial Sequence
  Description of Artificial Sequence: Synthetic oligonucleotide
uuuacaucagaauacauga

SEQ ID NO: 3111538 - RNA, 19 nt, Artificial Sequence
  Description of Artificial Sequence: Synthetic oligonucleotide
agaugguugacauuaauac

SEQ ID NO: 3111539 - RNA, 19 nt, Artificial Sequence
  Description of Artificial Sequence: Synthetic oligonucleotide
aauucuuugcuauugaaaa

SEQ ID NO: 3111540 - RNA, 19 nt, Artificial Sequence
  Description of Artificial Sequence: Synthetic oligonucleotide
uuugcuauugaaaagacua

SEQ ID NO: 3111541 - RNA, 19 nt, Artificial Sequence
  Description of Artificial Sequence: Synthetic oligonucleotide
aauccaaauguuucugacc

SEQ ID NO: 3111542 - RNA, 19 nt, Artificial Sequence
  Description of Artificial Sequence: Synthetic oligonucleotide
aaagacuaaagagaguugg

SEQ ID NO: 3111543 - RNA, 19 nt, Artificial Sequence
  Description of Artificial Sequence: Synthetic oligonucleotide
aagagaguugguuugcuac

SEQ ID NO: 3111544 - RNA, 19 nt, Artificial Sequence
  Description of Artificial Sequence: Synthetic oligonucleotide
aaagaaauuauacaacaau

SEQ ID NO: 3111545 - RNA, 19 nt, Artificial Sequence
  Description of Artificial Sequence: Synthetic oligonucleotide
uuuuacaucagaauacaug

SEQ ID NO: 3111546 - RNA, 19 nt, Artificial Sequence
  Description of Artificial Sequence: Synthetic oligonucleotide
aauacuguacauauuuuac

SEQ ID NO: 3111547 - RNA, 19 nt, Artificial Sequence
  Description of Artificial Sequence: Synthetic oligonucleotide
aaaguccugacuuagguga

SEQ ID NO: 3111548 - RNA, 19 nt, Artificial Sequence
  Description of Artificial Sequence: Synthetic oligonucleotide
uuauaggcuaacuuuaaag

SEQ ID NO: 3111549 - RNA, 19 nt, Artificial Sequence
  Description of Artificial Sequence: Synthetic oligonucleotide
uugacauuaauacuguaca

SEQ ID NO: 3111550 - RNA, 19 nt, Artificial Sequence
  Description of Artificial Sequence: Synthetic oligonucleotide
aauguuucugaccaaagaa

SEQ ID NO: 3111551 - RNA, 19 nt, Artificial Sequence
  Description of Artificial Sequence: Synthetic oligonucleotide
auuaauacuguacauauuu

SEQ ID NO: 3111552 - RNA, 19 nt, Artificial Sequence
  Description of Artificial Sequence: Synthetic oligonucleotide
aauauuuauaggcuaacuu

SEQ ID NO: 3111553 - RNA, 19 nt, Artificial Sequence
  Description of Artificial Sequence: Synthetic oligonucleotide
aaauuauacaacaauauuu

SEQ ID NO: 3111554 - RNA, 19 nt, Artificial Sequence
  Description of Artificial Sequence: Synthetic oligonucleotide
uacaucagaauacaugacc

SEQ ID NO: 3111555 - RNA, 19 nt, Artificial Sequence
  Description of Artificial Sequence: Synthetic oligonucleotide
aaaaugaagcuacauucug

SEQ ID NO: 3111556 - RNA, 19 nt, Artificial Sequence
  Description of Artificial Sequence: Synthetic oligonucleotide
uauaggcuaacuuuaaaga

SEQ ID NO: 3111557 - RNA, 19 nt, Artificial Sequence
  Description of Artificial Sequence: Synthetic oligonucleotide
aauacaugaccucuguaca

SEQ ID NO: 3111558 - RNA, 19 nt, Artificial Sequence
  Description of Artificial Sequence: Synthetic oligonucleotide
auauuuuacaucagaauac

SEQ ID NO: 3111559 - RNA, 19 nt, Artificial Sequence
  Description of Artificial Sequence: Synthetic oligonucleotide
ugcuacauggcacugaaga

SEQ ID NO: 3111560 - RNA, 19 nt, Artificial Sequence
  Description of Artificial Sequence: Synthetic oligonucleotide
gaauacaugaccucuguac

SEQ ID NO: 3111561 - RNA, 19 nt, Artificial Sequence
  Description of Artificial Sequence: Synthetic oligonucleotide
ucccagaagaguaaugggg

SEQ ID NO: 3111562 - RNA, 19 nt, Artificial Sequence
  Description of Artificial Sequence: Synthetic oligonucleotide
auaggcuaacuuuaaagag

SEQ ID NO: 3111563 - RNA, 19 nt, Artificial Sequence
  Description of Artificial Sequence: Synthetic oligonucleotide
gcuaacuuuaaagagaugg

SEQ ID NO: 3111564 - RNA, 19 nt, Artificial Sequence
  Description of Artificial Sequence: Synthetic oligonucleotide
aagaguaauggggagcccc

SEQ ID NO: 3111565 - RNA, 19 nt, Artificial Sequence
  Description of Artificial Sequence: Synthetic oligonucleotide
uuauacaacaauauuuaua

SEQ ID NO: 3111566 - RNA, 19 nt, Artificial Sequence
  Description of Artificial Sequence: Synthetic oligonucleotide
cauucuguaaauucuuugc

SEQ ID NO: 3111567 - RNA, 19 nt, Artificial Sequence
  Description of Artificial Sequence: Synthetic oligonucleotide
auugaaaagacuaaagaga

SEQ ID NO: 3111568 - RNA, 19 nt, Artificial Sequence
  Description of Artificial Sequence: Synthetic oligonucleotide
agcuacauucuguaaauuc

SEQ ID NO: 3111569 - RNA, 19 nt, Artificial Sequence
  Description of Artificial Sequence: Synthetic oligonucleotide
agaagaguaauggggagcc

SEQ ID NO: 3111570 - RNA, 19 nt, Artificial Sequence
  Description of Artificial Sequence: Synthetic oligonucleotide
auauuuauaggcuaacuuu

SEQ ID NO: 3111571 - RNA, 19 nt, Artificial Sequence
  Description of Artificial Sequence: Synthetic oligonucleotide
uauuuauaggcuaacuuua

SEQ ID NO: 3111572 - RNA, 19 nt, Artificial Sequence
  Description of Artificial Sequence: Synthetic oligonucleotide
aaauguuucugaccaaaga

SEQ ID NO: 3111573 - RNA, 19 nt, Artificial Sequence
  Description of Artificial Sequence: Synthetic oligonucleotide
aacuuuaaagagaugguug

SEQ ID NO: 3111574 - RNA, 19 nt, Artificial Sequence
  Description of Artificial Sequence: Synthetic oligonucleotide
cugaccaaagaaauuauac

SEQ ID NO: 3111575 - RNA, 19 nt, Artificial Sequence
  Description of Artificial Sequence: Synthetic oligonucleotide
acuaaagagaguugguuug

SEQ ID NO: 3111576 - RNA, 19 nt, Artificial Sequence
  Description of Artificial Sequence: Synthetic oligonucleotide
acauuaauacuguacauau

SEQ ID NO: 3111577 - RNA, 19 nt, Artificial Sequence
  Description of Artificial Sequence: Synthetic oligonucleotide
uacauggcacugaagaaag

SEQ ID NO: 3111578 - RNA, 19 nt, Artificial Sequence
  Description of Artificial Sequence: Synthetic oligonucleotide
uguaaauucuuugcuauug

SEQ ID NO: 3111579 - RNA, 19 nt, Artificial Sequence
  Description of Artificial Sequence: Synthetic oligonucleotide
ugaagcuacauucuguaaa

SEQ ID NO: 3111580 - RNA, 19 nt, Artificial Sequence
  Description of Artificial Sequence: Synthetic oligonucleotide
ugaccaaagaaauuauaca

SEQ ID NO: 3111581 - RNA, 19 nt, Artificial Sequence
  Description of Artificial Sequence: Synthetic oligonucleotide
auccaaauguuucugacca

SEQ ID NO: 3111582 - RNA, 19 nt, Artificial Sequence
  Description of Artificial Sequence: Synthetic oligonucleotide
uaggcuaacuuuaaagaga

SEQ ID NO: 3111583 - RNA, 19 nt, Artificial Sequence
  Description of Artificial Sequence: Synthetic oligonucleotide
gaccaaagaaauuauacaa

SEQ ID NO: 3111584 - RNA, 19 nt, Artificial Sequence
  Description of Artificial Sequence: Synthetic oligonucleotide
aaugaagcuacauucugua

SEQ ID NO: 3111585 - RNA, 19 nt, Artificial Sequence
  Description of Artificial Sequence: Synthetic oligonucleotide
uuaaagagaugguugacau

SEQ ID NO: 3111586 - RNA, 19 nt, Artificial Sequence
  Description of Artificial Sequence: Synthetic oligonucleotide
acuuuaaagagaugguuga

SEQ ID NO: 3111587 - RNA, 19 nt, Artificial Sequence
  Description of Artificial Sequence: Synthetic oligonucleotide
uguuucugaccaaagaaau

SEQ ID NO: 3111588 - RNA, 19 nt, Artificial Sequence
  Description of Artificial Sequence: Synthetic oligonucleotide
cauauuuuacaucagaaua

SEQ ID NO: 3111589 - RNA, 19 nt, Artificial Sequence
  Description of Artificial Sequence: Synthetic oligonucleotide
ucuguaaauucuuugcuau

SEQ ID NO: 3111590 - RNA, 19 nt, Artificial Sequence
  Description of Artificial Sequence: Synthetic oligonucleotide
uuuaaagagaugguugaca

SEQ ID NO: 3111591 - RNA, 19 nt, Artificial Sequence
  Description of Artificial Sequence: Synthetic oligonucleotide
uucuuugcuauugaaaaga

SEQ ID NO: 3111592 - RNA, 19 nt, Artificial Sequence
  Description of Artificial Sequence: Synthetic oligonucleotide
uauuuuacaucagaauaca

SEQ ID NO: 3111593 - RNA, 19 nt, Artificial Sequence
  Description of Artificial Sequence: Synthetic oligonucleotide
augguugacauuaauacug

SEQ ID NO: 3111594 - RNA, 19 nt, Artificial Sequence
  Description of Artificial Sequence: Synthetic oligonucleotide
uguacauauuuuacaucag

SEQ ID NO: 3111595 - RNA, 19 nt, Artificial Sequence
  Description of Artificial Sequence: Synthetic oligonucleotide
cuauugaaaagacuaaaga

SEQ ID NO: 3111596 - RNA, 19 nt, Artificial Sequence
  Description of Artificial Sequence: Synthetic oligonucleotide
accaaagaaauuauacaac

SEQ ID NO: 3111597 - RNA, 19 nt, Artificial Sequence
  Description of Artificial Sequence: Synthetic oligonucleotide
uaauacuguacauauuuua

SEQ ID NO: 3111598 - RNA, 19 nt, Artificial Sequence
  Description of Artificial Sequence: Synthetic oligonucleotide
uacuguacauauuuuacau

SEQ ID NO: 3111599 - RNA, 19 nt, Artificial Sequence
  Description of Artificial Sequence: Synthetic oligonucleotide
uuucugaccaaagaaauua

SEQ ID NO: 3111600 - RNA, 19 nt, Artificial Sequence
  Description of Artificial Sequence: Synthetic oligonucleotide
acuguacauauuuuacauc

SEQ ID NO: 3111601 - RNA, 19 nt, Artificial Sequence
  Description of Artificial Sequence: Synthetic oligonucleotide
auucuuugcuauugaaaag

SEQ ID NO: 3111602 - RNA, 19 nt, Artificial Sequence
  Description of Artificial Sequence: Synthetic oligonucleotide
uuaauccaaauguuucuga

SEQ ID NO: 3111603 - RNA, 19 nt, Artificial Sequence
  Description of Artificial Sequence: Synthetic oligonucleotide
auucuguaaauucuuugcu

SEQ ID NO: 3111604 - RNA, 19 nt, Artificial Sequence
  Description of Artificial Sequence: Synthetic oligonucleotide
agaaaguccugacuuaggu

SEQ ID NO: 3111605 - RNA, 19 nt, Artificial Sequence
  Description of Artificial Sequence: Synthetic oligonucleotide
uaauccaaauguuucugac

SEQ ID NO: 3111606 - RNA, 19 nt, Artificial Sequence
  Description of Artificial Sequence: Synthetic oligonucleotide
aggugaccuggcuuaaucc

SEQ ID NO: 3111607 - RNA, 19 nt, Artificial Sequence
  Description of Artificial Sequence: Synthetic oligonucleotide
auacuguacauauuuuaca

SEQ ID NO: 3111608 - RNA, 19 nt, Artificial Sequence
  Description of Artificial Sequence: Synthetic oligonucleotide
agaaauuauacaacaauau

SEQ ID NO: 3111609 - RNA, 19 nt, Artificial Sequence
  Description of Artificial Sequence: Synthetic oligonucleotide
ucagaauacaugaccucug

SEQ ID NO: 3111610 - RNA, 19 nt, Artificial Sequence
  Description of Artificial Sequence: Synthetic oligonucleotide
gaagaaaguccugacuuag

SEQ ID NO: 3111611 - RNA, 19 nt, Artificial Sequence
  Description of Artificial Sequence: Synthetic oligonucleotide
auacaacaauauuuauagg

SEQ ID NO: 3111612 - RNA, 19 nt, Artificial Sequence
  Description of Artificial Sequence: Synthetic oligonucleotide
acaacaauauuuauaggcu

SEQ ID NO: 3111613 - RNA, 19 nt, Artificial Sequence
  Description of Artificial Sequence: Synthetic oligonucleotide
uugguuugcuacauggcac

SEQ ID NO: 3111614 - RNA, 19 nt, Artificial Sequence
  Description of Artificial Sequence: Synthetic oligonucleotide
acaauauuuauaggcuaac

SEQ ID NO: 3111615 - RNA, 19 nt, Artificial Sequence
  Description of Artificial Sequence: Synthetic oligonucleotide
uuuauaggcuaacuuuaaa

SEQ ID NO: 3111616 - RNA, 19 nt, Artificial Sequence
  Description of Artificial Sequence: Synthetic oligonucleotide
ucuuugcuauugaaaagac

SEQ ID NO: 3111617 - RNA, 19 nt, Artificial Sequence
  Description of Artificial Sequence: Synthetic oligonucleotide
uuugcuacauggcacugaa

SEQ ID NO: 3111618 - RNA, 19 nt, Artificial Sequence
  Description of Artificial Sequence: Synthetic oligonucleotide
gaaaguccugacuuaggug

SEQ ID NO: 3111619 - RNA, 19 nt, Artificial Sequence
  Description of Artificial Sequence: Synthetic oligonucleotide
auggcacugaagaaagucc

SEQ ID NO: 3111620 - RNA, 19 nt, Artificial Sequence
  Description of Artificial Sequence: Synthetic oligonucleotide
guugacauuaauacuguac

SEQ ID NO: 3111621 - RNA, 19 nt, Artificial Sequence
  Description of Artificial Sequence: Synthetic oligonucleotide
aaaugaagcuacauucugu

SEQ ID NO: 3111622 - RNA, 19 nt, Artificial Sequence
  Description of Artificial Sequence: Synthetic oligonucleotide
aacaauauuuauaggcuaa

SEQ ID NO: 3111623 - RNA, 19 nt, Artificial Sequence
  Description of Artificial Sequence: Synthetic oligonucleotide
auuauacaacaauauuuau

SEQ ID NO: 3111624 - RNA, 19 nt, Artificial Sequence
  Description of Artificial Sequence: Synthetic oligonucleotide
gaaaagacuaaagagaguu

SEQ ID NO: 3111625 - RNA, 19 nt, Artificial Sequence
  Description of Artificial Sequence: Synthetic oligonucleotide
ugaaaagacuaaagagagu

SEQ ID NO: 3111626 - RNA, 19 nt, Artificial Sequence
  Description of Artificial Sequence: Synthetic oligonucleotide
aaaagacuaaagagaguug

SEQ ID NO: 3111627 - RNA, 19 nt, Artificial Sequence
  Description of Artificial Sequence: Synthetic oligonucleotide
caaauguuucugaccaaag

SEQ ID NO: 3111628 - RNA, 19 nt, Artificial Sequence
  Description of Artificial Sequence: Synthetic oligonucleotide
uucuguaaauucuuugcua

SEQ ID NO: 3111629 - RNA, 19 nt, Artificial Sequence
  Description of Artificial Sequence: Synthetic oligonucleotide
uuacaucagaauacaugac

SEQ ID NO: 3111630 - RNA, 19 nt, Artificial Sequence
  Description of Artificial Sequence: Synthetic oligonucleotide
cuuaauccaaauguuucug

SEQ ID NO: 3111631 - RNA, 19 nt, Artificial Sequence
  Description of Artificial Sequence: Synthetic oligonucleotide
guugguuugcuacauggca

SEQ ID NO: 3111632 - RNA, 19 nt, Artificial Sequence
  Description of Artificial Sequence: Synthetic oligonucleotide
aucagaauacaugaccucu

SEQ ID NO: 3111633 - RNA, 19 nt, Artificial Sequence
  Description of Artificial Sequence: Synthetic oligonucleotide
augaccucuguacaaagaa

SEQ ID NO: 3111634 - RNA, 19 nt, Artificial Sequence
  Description of Artificial Sequence: Synthetic oligonucleotide
guacauauuuuacaucaga

SEQ ID NO: 3111635 - RNA, 19 nt, Artificial Sequence
  Description of Artificial Sequence: Synthetic oligonucleotide
ucugggucccagaagagua

SEQ ID NO: 3111636 - RNA, 19 nt, Artificial Sequence
  Description of Artificial Sequence: Synthetic oligonucleotide
acaucagaauacaugaccu

SEQ ID NO: 3111637 - RNA, 19 nt, Artificial Sequence
  Description of Artificial Sequence: Synthetic oligonucleotide
aagaaaguccugacuuagg

SEQ ID NO: 3111638 - RNA, 19 nt, Artificial Sequence
  Description of Artificial Sequence: Synthetic oligonucleotide
ugguugacauuaauacugu

SEQ ID NO: 3111639 - RNA, 19 nt, Artificial Sequence
  Description of Artificial Sequence: Synthetic oligonucleotide
aguugguuugcuacauggc

SEQ ID NO: 3111640 - RNA, 19 nt, Artificial Sequence
  Description of Artificial Sequence: Synthetic oligonucleotide
ugacauuaauacuguacau

SEQ ID NO: 3111641 - RNA, 19 nt, Artificial Sequence
  Description of Artificial Sequence: Synthetic oligonucleotide
ucugaccaaagaaauuaua

SEQ ID NO: 3111642 - RNA, 19 nt, Artificial Sequence
  Description of Artificial Sequence: Synthetic oligonucleotide
uugcuauugaaaagacuaa

SEQ ID NO: 3111643 - RNA, 19 nt, Artificial Sequence
  Description of Artificial Sequence: Synthetic oligonucleotide
ugcuauugaaaagacuaaa

SEQ ID NO: 3111644 - RNA, 19 nt, Artificial Sequence
  Description of Artificial Sequence: Synthetic oligonucleotide
guaaauucuuugcuauuga

SEQ ID NO: 3111645 - RNA, 19 nt, Artificial Sequence
  Description of Artificial Sequence: Synthetic oligonucleotide
acuuaggugaccuggcuua

SEQ ID NO: 3111646 - RNA, 19 nt, Artificial Sequence
  Description of Artificial Sequence: Synthetic oligonucleotide
agagaguugguuugcuaca

SEQ ID NO: 3111647 - RNA, 19 nt, Artificial Sequence
  Description of Artificial Sequence: Synthetic oligonucleotide
ggucccagaagaguaaugg

SEQ ID NO: 3111648 - RNA, 19 nt, Artificial Sequence
  Description of Artificial Sequence: Synthetic oligonucleotide
aaagagaguugguuugcua

SEQ ID NO: 3111649 - RNA, 19 nt, Artificial Sequence
  Description of Artificial Sequence: Synthetic oligonucleotide
gucccagaagaguaauggg

SEQ ID NO: 3111650 - RNA, 19 nt, Artificial Sequence
  Description of Artificial Sequence: Synthetic oligonucleotide
gcuauugaaaagacuaaag

SEQ ID NO: 3111651 - RNA, 19 nt, Artificial Sequence
  Description of Artificial Sequence: Synthetic oligonucleotide
ugaagaaaguccugacuua

SEQ ID NO: 3111652 - RNA, 19 nt, Artificial Sequence
  Description of Artificial Sequence: Synthetic oligonucleotide
gacauuaauacuguacaua

SEQ ID NO: 3111653 - RNA, 19 nt, Artificial Sequence
  Description of Artificial Sequence: Synthetic oligonucleotide
acaugaccucuguacaaag

SEQ ID NO: 3111654 - RNA, 19 nt, Artificial Sequence
  Description of Artificial Sequence: Synthetic oligonucleotide
cuaaagagaguugguuugc

SEQ ID NO: 3111655 - RNA, 19 nt, Artificial Sequence
  Description of Artificial Sequence: Synthetic oligonucleotide
gaugguugacauuaauacu

SEQ ID NO: 3111656 - RNA, 19 nt, Artificial Sequence
  Description of Artificial Sequence: Synthetic oligonucleotide
caaagaaauuauacaacaa

SEQ ID NO: 3111657 - RNA, 19 nt, Artificial Sequence
  Description of Artificial Sequence: Synthetic oligonucleotide
ccaaagaaauuauacaaca

SEQ ID NO: 3111658 - RNA, 19 nt, Artificial Sequence
  Description of Artificial Sequence: Synthetic oligonucleotide
ugguuugcuacauggcacu

SEQ ID NO: 3111659 - RNA, 19 nt, Artificial Sequence
  Description of Artificial Sequence: Synthetic oligonucleotide
ugaccucuguacaaagaaa

SEQ ID NO: 3111660 - RNA, 19 nt, Artificial Sequence
  Description of Artificial Sequence: Synthetic oligonucleotide
uggcuuaauccaaauguuu

SEQ ID NO: 3111661 - RNA, 19 nt, Artificial Sequence
  Description of Artificial Sequence: Synthetic oligonucleotide
uaggugaccuggcuuaauc

SEQ ID NO: 3111662 - RNA, 19 nt, Artificial Sequence
  Description of Artificial Sequence: Synthetic oligonucleotide
uacauucuguaaauucuuu

SEQ ID NO: 3111663 - RNA, 19 nt, Artificial Sequence
  Description of Artificial Sequence: Synthetic oligonucleotide
aagacuaaagagaguuggu

SEQ ID NO: 3111664 - RNA, 19 nt, Artificial Sequence
  Description of Artificial Sequence: Synthetic oligonucleotide
cugacuuaggugaccuggc

SEQ ID NO: 3111665 - RNA, 19 nt, Artificial Sequence
  Description of Artificial Sequence: Synthetic oligonucleotide
auacaugaccucuguacaa

SEQ ID NO: 3111666 - RNA, 19 nt, Artificial Sequence
  Description of Artificial Sequence: Synthetic oligonucleotide
aaguccugacuuaggugac

SEQ ID NO: 3111667 - RNA, 19 nt, Artificial Sequence
  Description of Artificial Sequence: Synthetic oligonucleotide
cagaagaguaauggggagc

SEQ ID NO: 3111668 - RNA, 19 nt, Artificial Sequence
  Description of Artificial Sequence: Synthetic oligonucleotide
caucagaauacaugaccuc

SEQ ID NO: 3111669 - RNA, 19 nt, Artificial Sequence
  Description of Artificial Sequence: Synthetic oligonucleotide
gaagcuacauucuguaaau

SEQ ID NO: 3111670 - RNA, 19 nt, Artificial Sequence
  Description of Artificial Sequence: Synthetic oligonucleotide
cuuuaaagagaugguugac

SEQ ID NO: 3111671 - RNA, 19 nt, Artificial Sequence
  Description of Artificial Sequence: Synthetic oligonucleotide
ugacuuaggugaccuggcu

SEQ ID NO: 3111672 - RNA, 19 nt, Artificial Sequence
  Description of Artificial Sequence: Synthetic oligonucleotide
auguuucugaccaaagaaa

SEQ ID NO: 3111673 - RNA, 19 nt, Artificial Sequence
  Description of Artificial Sequence: Synthetic oligonucleotide
gacuaaagagaguugguuu

SEQ ID NO: 3111674 - RNA, 19 nt, Artificial Sequence
  Description of Artificial Sequence: Synthetic oligonucleotide
uaaagagaguugguuugcu

SEQ ID NO: 3111675 - RNA, 19 nt, Artificial Sequence
  Description of Artificial Sequence: Synthetic oligonucleotide
uacaugaccucuguacaaa

SEQ ID NO: 3111676 - RNA, 19 nt, Artificial Sequence
  Description of Artificial Sequence: Synthetic oligonucleotide
gagaugguugacauuaaua

SEQ ID NO: 3111677 - RNA, 19 nt, Artificial Sequence
  Description of Artificial Sequence: Synthetic oligonucleotide
caacaauauuuauaggcua

SEQ ID NO: 3111678 - RNA, 19 nt, Artificial Sequence
  Description of Artificial Sequence: Synthetic oligonucleotide
agagaugguugacauuaau

SEQ ID NO: 3111679 - RNA, 19 nt, Artificial Sequence
  Description of Artificial Sequence: Synthetic oligonucleotide
cuaacuuuaaagagauggu

SEQ ID NO: 3111680 - RNA, 19 nt, Artificial Sequence
  Description of Artificial Sequence: Synthetic oligonucleotide
aguccugacuuaggugacc

SEQ ID NO: 3111681 - RNA, 19 nt, Artificial Sequence
  Description of Artificial Sequence: Synthetic oligonucleotide
accuggcuuaauccaaaug

SEQ ID NO: 3111682 - RNA, 19 nt, Artificial Sequence
  Description of Artificial Sequence: Synthetic oligonucleotide
aggcuaacuuuaaagagau

SEQ ID NO: 3111683 - RNA, 19 nt, Artificial Sequence
  Description of Artificial Sequence: Synthetic oligonucleotide
agacuaaagagaguugguu

SEQ ID NO: 3111684 - RNA, 19 nt, Artificial Sequence
  Description of Artificial Sequence: Synthetic oligonucleotide
ugaccuggcuuaauccaaa

SEQ ID NO: 3111685 - RNA, 19 nt, Artificial Sequence
  Description of Artificial Sequence: Synthetic oligonucleotide
uaaagagaugguugacauu

SEQ ID NO: 3111686 - RNA, 19 nt, Artificial Sequence
  Description of Artificial Sequence: Synthetic oligonucleotide
auuuauaggcuaacuuuaa

SEQ ID NO: 3111687 - RNA, 19 nt, Artificial Sequence
  Description of Artificial Sequence: Synthetic oligonucleotide
agaauacaugaccucugua

SEQ ID NO: 3111688 - RNA, 19 nt, Artificial Sequence
  Description of Artificial Sequence: Synthetic oligonucleotide
ccugacuuaggugaccugg

SEQ ID NO: 3111689 - RNA, 19 nt, Artificial Sequence
  Description of Artificial Sequence: Synthetic oligonucleotide
ggcuuaauccaaauguuuc

SEQ ID NO: 3111690 - RNA, 19 nt, Artificial Sequence
  Description of Artificial Sequence: Synthetic oligonucleotide
augaagcuacauucuguaa

SEQ ID NO: 3111691 - RNA, 19 nt, Artificial Sequence
  Description of Artificial Sequence: Synthetic oligonucleotide
cuacauggcacugaagaaa

SEQ ID NO: 3111692 - RNA, 19 nt, Artificial Sequence
  Description of Artificial Sequence: Synthetic oligonucleotide
uugcuacauggcacugaag

SEQ ID NO: 3111693 - RNA, 19 nt, Artificial Sequence
  Description of Artificial Sequence: Synthetic oligonucleotide
ggugaccuggcuuaaucca

SEQ ID NO: 3111694 - RNA, 19 nt, Artificial Sequence
  Description of Artificial Sequence: Synthetic oligonucleotide
auuuuacaucagaauacau

SEQ ID NO: 3111695 - RNA, 19 nt, Artificial Sequence
  Description of Artificial Sequence: Synthetic oligonucleotide
caugaccucuguacaaaga

SEQ ID NO: 3111696 - RNA, 19 nt, Artificial Sequence
  Description of Artificial Sequence: Synthetic oligonucleotide
uccaaauguuucugaccaa

SEQ ID NO: 3111697 - RNA, 19 nt, Artificial Sequence
  Description of Artificial Sequence: Synthetic oligonucleotide
cuuugcuauugaaaagacu

SEQ ID NO: 3111698 - RNA, 19 nt, Artificial Sequence
  Description of Artificial Sequence: Synthetic oligonucleotide
gaagaguaauggggagccc

SEQ ID NO: 3111699 - RNA, 19 nt, Artificial Sequence
  Description of Artificial Sequence: Synthetic oligonucleotide
ccagaagaguaauggggag

SEQ ID NO: 3111700 - RNA, 19 nt, Artificial Sequence
  Description of Artificial Sequence: Synthetic oligonucleotide
ccuggcuuaauccaaaugu

SEQ ID NO: 3111701 - RNA, 19 nt, Artificial Sequence
  Description of Artificial Sequence: Synthetic oligonucleotide
gcuacauucuguaaauucu

SEQ ID NO: 3111702 - RNA, 19 nt, Artificial Sequence
  Description of Artificial Sequence: Synthetic oligonucleotide
gcuuaauccaaauguuucu

SEQ ID NO: 3111703 - RNA, 19 nt, Artificial Sequence
  Description of Artificial Sequence: Synthetic oligonucleotide
aagcuacauucuguaaauu

SEQ ID NO: 3111704 - RNA, 19 nt, Artificial Sequence
  Description of Artificial Sequence: Synthetic oligonucleotide
uccugacuuaggugaccug

SEQ ID NO: 3111705 - RNA, 19 nt, Artificial Sequence
  Description of Artificial Sequence: Synthetic oligonucleotide
aagagaugguugacauuaa

SEQ ID NO: 3111706 - RNA, 19 nt, Artificial Sequence
  Description of Artificial Sequence: Synthetic oligonucleotide
caauauuuauaggcuaacu

SEQ ID NO: 3111707 - RNA, 19 nt, Artificial Sequence
  Description of Artificial Sequence: Synthetic oligonucleotide
guuugcuacauggcacuga

SEQ ID NO: 3111708 - RNA, 19 nt, Artificial Sequence
  Description of Artificial Sequence: Synthetic oligonucleotide
cuacauucuguaaauucuu

SEQ ID NO: 3111709 - RNA, 19 nt, Artificial Sequence
  Description of Artificial Sequence: Synthetic oligonucleotide
ccccaggugaaauugaaaa

SEQ ID NO: 3111710 - RNA, 19 nt, Artificial Sequence
  Description of Artificial Sequence: Synthetic oligonucleotide
gcuacauggcacugaagaa

SEQ ID NO: 3111711 - RNA, 19 nt, Artificial Sequence
  Description of Artificial Sequence: Synthetic oligonucleotide
gacuuaggugaccuggcuu

SEQ ID NO: 3111712 - RNA, 19 nt, Artificial Sequence
  Description of Artificial Sequence: Synthetic oligonucleotide
cagaauacaugaccucugu

SEQ ID NO: 3111713 - RNA, 19 nt, Artificial Sequence
  Description of Artificial Sequence: Synthetic oligonucleotide
cuggcuuaauccaaauguu

SEQ ID NO: 3111714 - RNA, 19 nt, Artificial Sequence
  Description of Artificial Sequence: Synthetic oligonucleotide
uuaggugaccuggcuuaau

SEQ ID NO: 3111715 - RNA, 19 nt, Artificial Sequence
  Description of Artificial Sequence: Synthetic oligonucleotide
cauuaauacuguacauauu

SEQ ID NO: 3111716 - RNA, 19 nt, Artificial Sequence
  Description of Artificial Sequence: Synthetic oligonucleotide
gagaguugguuugcuacau

SEQ ID NO: 3111717 - RNA, 19 nt, Artificial Sequence
  Description of Artificial Sequence: Synthetic oligonucleotide
guuucugaccaaagaaauu

SEQ ID NO: 3111718 - RNA, 19 nt, Artificial Sequence
  Description of Artificial Sequence: Synthetic oligonucleotide
gguuugcuacauggcacug

SEQ ID NO: 3111719 - RNA, 19 nt, Artificial Sequence
  Description of Artificial Sequence: Synthetic oligonucleotide
gguugacauuaauacugua

SEQ ID NO: 3111720 - RNA, 19 nt, Artificial Sequence
  Description of Artificial Sequence: Synthetic oligonucleotide
ccaaauguuucugaccaaa

SEQ ID NO: 3111721 - RNA, 19 nt, Artificial Sequence
  Description of Artificial Sequence: Synthetic oligonucleotide
guccugacuuaggugaccu

SEQ ID NO: 3111722 - RNA, 19 nt, Artificial Sequence
  Description of Artificial Sequence: Synthetic oligonucleotide
gaccuggcuuaauccaaau

SEQ ID NO: 3111723 - RNA, 19 nt, Artificial Sequence
  Description of Artificial Sequence: Synthetic oligonucleotide
cuuaggugaccuggcuuaa

SEQ ID NO: 3111724 - RNA, 19 nt, Artificial Sequence
  Description of Artificial Sequence: Synthetic oligonucleotide
ggcuaacuuuaaagagaug

SEQ ID NO: 3111725 - RNA, 19 nt, Artificial Sequence
  Description of Artificial Sequence: Synthetic oligonucleotide
gggucccagaagaguaaug

SEQ ID NO: 3111726 - RNA, 19 nt, Artificial Sequence
  Description of Artificial Sequence: Synthetic oligonucleotide
uuuucuaaaaucuauuuug

SEQ ID NO: 3111727 - RNA, 19 nt, Artificial Sequence
  Description of Artificial Sequence: Synthetic oligonucleotide
uuuacuauaguuuguaacu

SEQ ID NO: 3111728 - RNA, 19 nt, Artificial Sequence
  Description of Artificial Sequence: Synthetic oligonucleotide
ucuaaaaucuauuuuguaa

SEQ ID NO: 3111729 - RNA, 19 nt, Artificial Sequence
  Description of Artificial Sequence: Synthetic oligonucleotide
uucuuugucaagaaggaca

SEQ ID NO: 3111730 - RNA, 19 nt, Artificial Sequence
  Description of Artificial Sequence: Synthetic oligonucleotide
augaagaggacccugaucu

SEQ ID NO: 3111731 - RNA, 19 nt, Artificial Sequence
  Description of Artificial Sequence: Synthetic oligonucleotide
caaagcauaccacaggugg

SEQ ID NO: 3111732 - RNA, 19 nt, Artificial Sequence
  Description of Artificial Sequence: Synthetic oligonucleotide
uauucaaagcauaccacag

SEQ ID NO: 3111733 - RNA, 19 nt, Artificial Sequence
  Description of Artificial Sequence: Synthetic oligonucleotide
uuuuacuauaguuuguaac

SEQ ID NO: 3111734 - RNA, 19 nt, Artificial Sequence
  Description of Artificial Sequence: Synthetic oligonucleotide
uauaguuuguaacuuauuu

SEQ ID NO: 3111735 - RNA, 19 nt, Artificial Sequence
  Description of Artificial Sequence: Synthetic oligonucleotide
uuugucaagaaggacauga

SEQ ID NO: 3111736 - RNA, 19 nt, Artificial Sequence
  Description of Artificial Sequence: Synthetic oligonucleotide
aacuuauuuucuaaaaucu

SEQ ID NO: 3111737 - RNA, 19 nt, Artificial Sequence
  Description of Artificial Sequence: Synthetic oligonucleotide
aaggaucuccuucccaagc

SEQ ID NO: 3111738 - RNA, 19 nt, Artificial Sequence
  Description of Artificial Sequence: Synthetic oligonucleotide
ucuguauccaugaaggauc

SEQ ID NO: 3111739 - RNA, 19 nt, Artificial Sequence
  Description of Artificial Sequence: Synthetic oligonucleotide
aaaucuauuuuguaacaau

SEQ ID NO: 3111740 - RNA, 19 nt, Artificial Sequence
  Description of Artificial Sequence: Synthetic oligonucleotide
gauaggcagauucuaaccc

SEQ ID NO: 3111741 - RNA, 19 nt, Artificial Sequence
  Description of Artificial Sequence: Synthetic oligonucleotide
uauuuuguaacaauuuauu

SEQ ID NO: 3111742 - RNA, 19 nt, Artificial Sequence
  Description of Artificial Sequence: Synthetic oligonucleotide
uuucuaaaaucuauuuugu

SEQ ID NO: 3111743 - RNA, 19 nt, Artificial Sequence
  Description of Artificial Sequence: Synthetic oligonucleotide
uucaaagcauaccacaggu

SEQ ID NO: 3111744 - RNA, 19 nt, Artificial Sequence
  Description of Artificial Sequence: Synthetic oligonucleotide
ucuauuuuguaacaauuua

SEQ ID NO: 3111745 - RNA, 19 nt, Artificial Sequence
  Description of Artificial Sequence: Synthetic oligonucleotide
aaggacaugauguagucuu

SEQ ID NO: 3111746 - RNA, 19 nt, Artificial Sequence
  Description of Artificial Sequence: Synthetic oligonucleotide
accguguucuuccagggcc

SEQ ID NO: 3111747 - RNA, 19 nt, Artificial Sequence
  Description of Artificial Sequence: Synthetic oligonucleotide
auauucaaagcauaccaca

SEQ ID NO: 3111748 - RNA, 19 nt, Artificial Sequence
  Description of Artificial Sequence: Synthetic oligonucleotide
uguaacuuauuuucuaaaa

SEQ ID NO: 3111749 - RNA, 19 nt, Artificial Sequence
  Description of Artificial Sequence: Synthetic oligonucleotide
uuugucaccguguucuucc

SEQ ID NO: 3111750 - RNA, 19 nt, Artificial Sequence
  Description of Artificial Sequence: Synthetic oligonucleotide
cagauucuaacccagggag

SEQ ID NO: 3111751 - RNA, 19 nt, Artificial Sequence
  Description of Artificial Sequence: Synthetic oligonucleotide
auucaaagcauaccacagg

SEQ ID NO: 3111752 - RNA, 19 nt, Artificial Sequence
  Description of Artificial Sequence: Synthetic oligonucleotide
cuucccaugaagaggaccc

SEQ ID NO: 3111753 - RNA, 19 nt, Artificial Sequence
  Description of Artificial Sequence: Synthetic oligonucleotide
uuuguaacuuauuuucuaa

SEQ ID NO: 3111754 - RNA, 19 nt, Artificial Sequence
  Description of Artificial Sequence: Synthetic oligonucleotide
gugucuguauccaugaagg

SEQ ID NO: 3111755 - RNA, 19 nt, Artificial Sequence
  Description of Artificial Sequence: Synthetic oligonucleotide
ugucaagaaggacaugaug

SEQ ID NO: 3111756 - RNA, 19 nt, Artificial Sequence
  Description of Artificial Sequence: Synthetic oligonucleotide
gauucuaacccagggagag

SEQ ID NO: 3111757 - RNA, 19 nt, Artificial Sequence
  Description of Artificial Sequence: Synthetic oligonucleotide
agaaggacaugauguaguc

SEQ ID NO: 3111758 - RNA, 19 nt, Artificial Sequence
  Description of Artificial Sequence: Synthetic oligonucleotide
agccuuuuacuauaguuug

SEQ ID NO: 3111759 - RNA, 19 nt, Artificial Sequence
  Description of Artificial Sequence: Synthetic oligonucleotide
gaagguugccuguggaagg

SEQ ID NO: 3111760 - RNA, 19 nt, Artificial Sequence
  Description of Artificial Sequence: Synthetic oligonucleotide
uguaacaauuuauuuuaaa

SEQ ID NO: 3111761 - RNA, 19 nt, Artificial Sequence
  Description of Artificial Sequence: Synthetic oligonucleotide
cauauucaaagcauaccac

SEQ ID NO: 3111762 - RNA, 19 nt, Artificial Sequence
  Description of Artificial Sequence: Synthetic oligonucleotide
aaaaucuauuuuguaacaa

SEQ ID NO: 3111763 - RNA, 19 nt, Artificial Sequence
  Description of Artificial Sequence: Synthetic oligonucleotide
aaagcauaccacagguggg

SEQ ID NO: 3111764 - RNA, 19 nt, Artificial Sequence
  Description of Artificial Sequence: Synthetic oligonucleotide
guauccaugaaggaucucc

SEQ ID NO: 3111765 - RNA, 19 nt, Artificial Sequence
  Description of Artificial Sequence: Synthetic oligonucleotide
cauaccacaggugggaagg

SEQ ID NO: 3111766 - RNA, 19 nt, Artificial Sequence
  Description of Artificial Sequence: Synthetic oligonucleotide
agucuucgugucuguaucc

SEQ ID NO: 3111767 - RNA, 19 nt, Artificial Sequence
  Description of Artificial Sequence: Synthetic oligonucleotide
augauguagucuucguguc

SEQ ID NO: 3111768 - RNA, 19 nt, Artificial Sequence
  Description of Artificial Sequence: Synthetic oligonucleotide
aaucuauuuuguaacaauu

SEQ ID NO: 3111769 - RNA, 19 nt, Artificial Sequence
  Description of Artificial Sequence: Synthetic oligonucleotide
ugaaggaucuccuucccaa

SEQ ID NO: 3111770 - RNA, 19 nt, Artificial Sequence
  Description of Artificial Sequence: Synthetic oligonucleotide
uucuaacccagggagaggc

SEQ ID NO: 3111771 - RNA, 19 nt, Artificial Sequence
  Description of Artificial Sequence: Synthetic oligonucleotide
uaggcagauucuaacccag

SEQ ID NO: 3111772 - RNA, 19 nt, Artificial Sequence
  Description of Artificial Sequence: Synthetic oligonucleotide
ucaaagcauaccacaggug

SEQ ID NO: 3111773 - RNA, 19 nt, Artificial Sequence
  Description of Artificial Sequence: Synthetic oligonucleotide
ugcugggauaggcagauuc

SEQ ID NO: 3111774 - RNA, 19 nt, Artificial Sequence
  Description of Artificial Sequence: Synthetic oligonucleotide
gauguagucuucgugucug

SEQ ID NO: 3111775 - RNA, 19 nt, Artificial Sequence
  Description of Artificial Sequence: Synthetic oligonucleotide
acaugauguagucuucgug

SEQ ID NO: 3111776 - RNA, 19 nt, Artificial Sequence
  Description of Artificial Sequence: Synthetic oligonucleotide
ugguuucuuugucaagaag

SEQ ID NO: 3111777 - RNA, 19 nt, Artificial Sequence
  Description of Artificial Sequence: Synthetic oligonucleotide
uauccaugaaggaucuccu

SEQ ID NO: 3111778 - RNA, 19 nt, Artificial Sequence
  Description of Artificial Sequence: Synthetic oligonucleotide
uuguaacuuauuuucuaaa

SEQ ID NO: 3111779 - RNA, 19 nt, Artificial Sequence
  Description of Artificial Sequence: Synthetic oligonucleotide
gcauauucaaagcauacca

SEQ ID NO: 3111780 - RNA, 19 nt, Artificial Sequence
  Description of Artificial Sequence: Synthetic oligonucleotide
auaggcagauucuaaccca

SEQ ID NO: 3111781 - RNA, 19 nt, Artificial Sequence
  Description of Artificial Sequence: Synthetic oligonucleotide
cuucccaagcuuuugucac

SEQ ID NO: 3111782 - RNA, 19 nt, Artificial Sequence
  Description of Artificial Sequence: Synthetic oligonucleotide
gagaggcauauucaaagca

SEQ ID NO: 3111783 - RNA, 19 nt, Artificial Sequence
  Description of Artificial Sequence: Synthetic oligonucleotide
uguucuuccagggccaggc

SEQ ID NO: 3111784 - RNA, 19 nt, Artificial Sequence
  Description of Artificial Sequence: Synthetic oligonucleotide
gucaccguguucuuccagg

SEQ ID NO: 3111785 - RNA, 19 nt, Artificial Sequence
  Description of Artificial Sequence: Synthetic oligonucleotide
uucgugucuguauccauga

SEQ ID NO: 3111786 - RNA, 19 nt, Artificial Sequence
  Description of Artificial Sequence: Synthetic oligonucleotide
uggaaggggagccuuuuac

SEQ ID NO: 3111787 - RNA, 19 nt, Artificial Sequence
  Description of Artificial Sequence: Synthetic oligonucleotide
ucaagaaggacaugaugua

SEQ ID NO: 3111788 - RNA, 19 nt, Artificial Sequence
  Description of Artificial Sequence: Synthetic oligonucleotide
uucuaaaaucuauuuugua

SEQ ID NO: 3111789 - RNA, 19 nt, Artificial Sequence
  Description of Artificial Sequence: Synthetic oligonucleotide
aagguugccuguggaaggg

SEQ ID NO: 3111790 - RNA, 19 nt, Artificial Sequence
  Description of Artificial Sequence: Synthetic oligonucleotide
ucaccguguucuuccaggg

SEQ ID NO: 3111791 - RNA, 19 nt, Artificial Sequence
  Description of Artificial Sequence: Synthetic oligonucleotide
uagucuucgugucuguauc

SEQ ID NO: 3111792 - RNA, 19 nt, Artificial Sequence
  Description of Artificial Sequence: Synthetic oligonucleotide
aggacccugaucugguuuc

SEQ ID NO: 3111793 - RNA, 19 nt, Artificial Sequence
  Description of Artificial Sequence: Synthetic oligonucleotide
gaaggaucuccuucccaag

SEQ ID NO: 3111794 - RNA, 19 nt, Artificial Sequence
  Description of Artificial Sequence: Synthetic oligonucleotide
uacuauaguuuguaacuua

SEQ ID NO: 3111795 - RNA, 19 nt, Artificial Sequence
  Description of Artificial Sequence: Synthetic oligonucleotide
gucaagaaggacaugaugu

SEQ ID NO: 3111796 - RNA, 19 nt, Artificial Sequence
  Description of Artificial Sequence: Synthetic oligonucleotide
aggcauauucaaagcauac

SEQ ID NO: 3111797 - RNA, 19 nt, Artificial Sequence
  Description of Artificial Sequence: Synthetic oligonucleotide
ugauguagucuucgugucu

SEQ ID NO: 3111798 - RNA, 19 nt, Artificial Sequence
  Description of Artificial Sequence: Synthetic oligonucleotide
ggauaggcagauucuaacc

SEQ ID NO: 3111799 - RNA, 19 nt, Artificial Sequence
  Description of Artificial Sequence: Synthetic oligonucleotide
aaggggagccuuuuacuau

SEQ ID NO: 3111800 - RNA, 19 nt, Artificial Sequence
  Description of Artificial Sequence: Synthetic oligonucleotide
uuguaacaauuuauuuuaa

SEQ ID NO: 3111801 - RNA, 19 nt, Artificial Sequence
  Description of Artificial Sequence: Synthetic oligonucleotide
caugauguagucuucgugu

SEQ ID NO: 3111802 - RNA, 19 nt, Artificial Sequence
  Description of Artificial Sequence: Synthetic oligonucleotide
ggcagauucuaacccaggg

SEQ ID NO: 3111803 - RNA, 19 nt, Artificial Sequence
  Description of Artificial Sequence: Synthetic oligonucleotide
cuucgugucuguauccaug

SEQ ID NO: 3111804 - RNA, 19 nt, Artificial Sequence
  Description of Artificial Sequence: Synthetic oligonucleotide
ucccaagcuuuugucaccg

SEQ ID NO: 3111805 - RNA, 19 nt, Artificial Sequence
  Description of Artificial Sequence: Synthetic oligonucleotide
aagcauaccacagguggga

SEQ ID NO: 3111806 - RNA, 19 nt, Artificial Sequence
  Description of Artificial Sequence: Synthetic oligonucleotide
guuuguaacuuauuuucua

SEQ ID NO: 3111807 - RNA, 19 nt, Artificial Sequence
  Description of Artificial Sequence: Synthetic oligonucleotide
guuucuuugucaagaagga

SEQ ID NO: 3111808 - RNA, 19 nt, Artificial Sequence
  Description of Artificial Sequence: Synthetic oligonucleotide
uuacuauaguuuguaacuu

SEQ ID NO: 3111809 - RNA, 19 nt, Artificial Sequence
  Description of Artificial Sequence: Synthetic oligonucleotide
ucuucccaugaagaggacc

SEQ ID NO: 3111810 - RNA, 19 nt, Artificial Sequence
  Description of Artificial Sequence: Synthetic oligonucleotide
acuauaguuuguaacuuau

SEQ ID NO: 3111811 - RNA, 19 nt, Artificial Sequence
  Description of Artificial Sequence: Synthetic oligonucleotide
gaucugguuucuuugucaa

SEQ ID NO: 3111812 - RNA, 19 nt, Artificial Sequence
  Description of Artificial Sequence: Synthetic oligonucleotide
uuucuuugucaagaaggac

SEQ ID NO: 3111813 - RNA, 19 nt, Artificial Sequence
  Description of Artificial Sequence: Synthetic oligonucleotide
ugucuguauccaugaagga

SEQ ID NO: 3111814 - RNA, 19 nt, Artificial Sequence
  Description of Artificial Sequence: Synthetic oligonucleotide
cuauuuuguaacaauuuau

SEQ ID NO: 3111815 - RNA, 19 nt, Artificial Sequence
  Description of Artificial Sequence: Synthetic oligonucleotide
ugggauaggcagauucuaa

SEQ ID NO: 3111816 - RNA, 19 nt, Artificial Sequence
  Description of Artificial Sequence: Synthetic oligonucleotide
aagcuuuugucaccguguu

SEQ ID NO: 3111817 - RNA, 19 nt, Artificial Sequence
  Description of Artificial Sequence: Synthetic oligonucleotide
caugaaggaucuccuuccc

SEQ ID NO: 3111818 - RNA, 19 nt, Artificial Sequence
  Description of Artificial Sequence: Synthetic oligonucleotide
uugucaagaaggacaugau

SEQ ID NO: 3111819 - RNA, 19 nt, Artificial Sequence
  Description of Artificial Sequence: Synthetic oligonucleotide
gaaggggagccuuuuacua

SEQ ID NO: 3111820 - RNA, 19 nt, Artificial Sequence
  Description of Artificial Sequence: Synthetic oligonucleotide
aggaucuccuucccaagcu

SEQ ID NO: 3111821 - RNA, 19 nt, Artificial Sequence
  Description of Artificial Sequence: Synthetic oligonucleotide
ugccacagugcugggauag

SEQ ID NO: 3111822 - RNA, 19 nt, Artificial Sequence
  Description of Artificial Sequence: Synthetic oligonucleotide
ugaagaggacccugaucug

SEQ ID NO: 3111823 - RNA, 19 nt, Artificial Sequence
  Description of Artificial Sequence: Synthetic oligonucleotide
aucuauuuuguaacaauuu

SEQ ID NO: 3111824 - RNA, 19 nt, Artificial Sequence
  Description of Artificial Sequence: Synthetic oligonucleotide
uucccaagcuuuugucacc

SEQ ID NO: 3111825 - RNA, 19 nt, Artificial Sequence
  Description of Artificial Sequence: Synthetic oligonucleotide
agcuuuugucaccguguuc

SEQ ID NO: 3111826 - RNA, 19 nt, Artificial Sequence
  Description of Artificial Sequence: Synthetic oligonucleotide
caugaagaggacccugauc

SEQ ID NO: 3111827 - RNA, 19 nt, Artificial Sequence
  Description of Artificial Sequence: Synthetic oligonucleotide
ugggaagguugccugugga

SEQ ID NO: 3111828 - RNA, 19 nt, Artificial Sequence
  Description of Artificial Sequence: Synthetic oligonucleotide
agaggcauauucaaagcau

SEQ ID NO: 3111829 - RNA, 19 nt, Artificial Sequence
  Description of Artificial Sequence: Synthetic oligonucleotide
ccaugaaggaucuccuucc

SEQ ID NO: 3111830 - RNA, 19 nt, Artificial Sequence
  Description of Artificial Sequence: Synthetic oligonucleotide
ggaagguugccuguggaag

SEQ ID NO: 3111831 - RNA, 19 nt, Artificial Sequence
  Description of Artificial Sequence: Synthetic oligonucleotide
ugucaccguguucuuccag

SEQ ID NO: 3111832 - RNA, 19 nt, Artificial Sequence
  Description of Artificial Sequence: Synthetic oligonucleotide
augaaggaucuccuuccca

SEQ ID NO: 3111833 - RNA, 19 nt, Artificial Sequence
  Description of Artificial Sequence: Synthetic oligonucleotide
cuuuuacuauaguuuguaa

SEQ ID NO: 3111834 - RNA, 19 nt, Artificial Sequence
  Description of Artificial Sequence: Synthetic oligonucleotide
ggcauauucaaagcauacc

SEQ ID NO: 3111835 - RNA, 19 nt, Artificial Sequence
  Description of Artificial Sequence: Synthetic oligonucleotide
ggacaugauguagucuucg

SEQ ID NO: 3111836 - RNA, 19 nt, Artificial Sequence
  Description of Artificial Sequence: Synthetic oligonucleotide
ucuaacccagggagaggca

SEQ ID NO: 3111837 - RNA, 19 nt, Artificial Sequence
  Description of Artificial Sequence: Synthetic oligonucleotide
aagaggacccugaucuggu

SEQ ID NO: 3111838 - RNA, 19 nt, Artificial Sequence
  Description of Artificial Sequence: Synthetic oligonucleotide
auucuaacccagggagagg

SEQ ID NO: 3111839 - RNA, 19 nt, Artificial Sequence
  Description of Artificial Sequence: Synthetic oligonucleotide
cugaucugguuucuuuguc

SEQ ID NO: 3111840 - RNA, 19 nt, Artificial Sequence
  Description of Artificial Sequence: Synthetic oligonucleotide
gugggaagguugccugugg

SEQ ID NO: 3111841 - RNA, 19 nt, Artificial Sequence
  Description of Artificial Sequence: Synthetic oligonucleotide
accacaggugggaagguug

SEQ ID NO: 3111842 - RNA, 19 nt, Artificial Sequence
  Description of Artificial Sequence: Synthetic oligonucleotide
uugccuguggaaggggagc

SEQ ID NO: 3111843 - RNA, 19 nt, Artificial Sequence
  Description of Artificial Sequence: Synthetic oligonucleotide
ucuucgugucuguauccau

SEQ ID NO: 3111844 - RNA, 19 nt, Artificial Sequence
  Description of Artificial Sequence: Synthetic oligonucleotide
uuuugucaccguguucuuc

SEQ ID NO: 3111845 - RNA, 19 nt, Artificial Sequence
  Description of Artificial Sequence: Synthetic oligonucleotide
agugcugggauaggcagau

SEQ ID NO: 3111846 - RNA, 19 nt, Artificial Sequence
  Description of Artificial Sequence: Synthetic oligonucleotide
ucccaugaagaggacccug

SEQ ID NO: 3111847 - RNA, 19 nt, Artificial Sequence
  Description of Artificial Sequence: Synthetic oligonucleotide
gaggcauauucaaagcaua

SEQ ID NO: 3111848 - RNA, 19 nt, Artificial Sequence
  Description of Artificial Sequence: Synthetic oligonucleotide
caagcuuuugucaccgugu

SEQ ID NO: 3111849 - RNA, 19 nt, Artificial Sequence
  Description of Artificial Sequence: Synthetic oligonucleotide
aggacaugauguagucuuc

SEQ ID NO: 3111850 - RNA, 19 nt, Artificial Sequence
  Description of Artificial Sequence: Synthetic oligonucleotide
guugccuguggaaggggag

SEQ ID NO: 3111851 - RNA, 19 nt, Artificial Sequence
  Description of Artificial Sequence: Synthetic oligonucleotide
aacccagggagaggcauau

SEQ ID NO: 3111852 - RNA, 19 nt, Artificial Sequence
  Description of Artificial Sequence: Synthetic oligonucleotide
gagccuuuuacuauaguuu

SEQ ID NO: 3111853 - RNA, 19 nt, Artificial Sequence
  Description of Artificial Sequence: Synthetic oligonucleotide
aggggagccuuuuacuaua

SEQ ID NO: 3111854 - RNA, 19 nt, Artificial Sequence
  Description of Artificial Sequence: Synthetic oligonucleotide
gcagauucuaacccaggga

SEQ ID NO: 3111855 - RNA, 19 nt, Artificial Sequence
  Description of Artificial Sequence: Synthetic oligonucleotide
gcuuuugucaccguguucu

SEQ ID NO: 3111856 - RNA, 19 nt, Artificial Sequence
  Description of Artificial Sequence: Synthetic oligonucleotide
gacaugauguagucuucgu

SEQ ID NO: 3111857 - RNA, 19 nt, Artificial Sequence
  Description of Artificial Sequence: Synthetic oligonucleotide
uaacccagggagaggcaua

SEQ ID NO: 3111858 - RNA, 19 nt, Artificial Sequence
  Description of Artificial Sequence: Synthetic oligonucleotide
cacagugcugggauaggca

SEQ ID NO: 3111859 - RNA, 19 nt, Artificial Sequence
  Description of Artificial Sequence: Synthetic oligonucleotide
cgugucuguauccaugaag

SEQ ID NO: 3111860 - RNA, 19 nt, Artificial Sequence
  Description of Artificial Sequence: Synthetic oligonucleotide
uugucaccguguucuucca

SEQ ID NO: 3111861 - RNA, 19 nt, Artificial Sequence
  Description of Artificial Sequence: Synthetic oligonucleotide
cagggagaggcauauucaa

SEQ ID NO: 3111862 - RNA, 19 nt, Artificial Sequence
  Description of Artificial Sequence: Synthetic oligonucleotide
uguagucuucgugucugua

SEQ ID NO: 3111863 - RNA, 19 nt, Artificial Sequence
  Description of Artificial Sequence: Synthetic oligonucleotide
auguagucuucgugucugu

SEQ ID NO: 3111864 - RNA, 19 nt, Artificial Sequence
  Description of Artificial Sequence: Synthetic oligonucleotide
ucgugucuguauccaugaa

SEQ ID NO: 3111865 - RNA, 19 nt, Artificial Sequence
  Description of Artificial Sequence: Synthetic oligonucleotide
ccaagcuuuugucaccgug

SEQ ID NO: 3111866 - RNA, 19 nt, Artificial Sequence
  Description of Artificial Sequence: Synthetic oligonucleotide
caccguguucuuccagggc

SEQ ID NO: 3111867 - RNA, 19 nt, Artificial Sequence
  Description of Artificial Sequence: Synthetic oligonucleotide
acccugaucugguuucuuu

SEQ ID NO: 3111868 - RNA, 19 nt, Artificial Sequence
  Description of Artificial Sequence: Synthetic oligonucleotide
auccaugaaggaucuccuu

SEQ ID NO: 3111869 - RNA, 19 nt, Artificial Sequence
  Description of Artificial Sequence: Synthetic oligonucleotide
aggcagauucuaacccagg

SEQ ID NO: 3111870 - RNA, 19 nt, Artificial Sequence
  Description of Artificial Sequence: Synthetic oligonucleotide
cccagggagaggcauauuc

SEQ ID NO: 3111871 - RNA, 19 nt, Artificial Sequence
  Description of Artificial Sequence: Synthetic oligonucleotide
gcauaccacaggugggaag

SEQ ID NO: 3111872 - RNA, 19 nt, Artificial Sequence
  Description of Artificial Sequence: Synthetic oligonucleotide
aggugggaagguugccugu

SEQ ID NO: 3111873 - RNA, 19 nt, Artificial Sequence
  Description of Artificial Sequence: Synthetic oligonucleotide
ggagccuuuuacuauaguu

SEQ ID NO: 3111874 - RNA, 19 nt, Artificial Sequence
  Description of Artificial Sequence: Synthetic oligonucleotide
guagucuucgugucuguau

SEQ ID NO: 3111875 - RNA, 19 nt, Artificial Sequence
  Description of Artificial Sequence: Synthetic oligonucleotide
gucuguauccaugaaggau

SEQ ID NO: 3111876 - RNA, 19 nt, Artificial Sequence
  Description of Artificial Sequence: Synthetic oligonucleotide
uguggaaggggagccuuuu

SEQ ID NO: 3111877 - RNA, 19 nt, Artificial Sequence
  Description of Artificial Sequence: Synthetic oligonucleotide
gaaggacaugauguagucu

SEQ ID NO: 3111878 - RNA, 19 nt, Artificial Sequence
  Description of Artificial Sequence: Synthetic oligonucleotide
uucccaugaagaggacccu

SEQ ID NO: 3111879 - RNA, 19 nt, Artificial Sequence
  Description of Artificial Sequence: Synthetic oligonucleotide
cccugaucugguuucuuug

SEQ ID NO: 3111880 - RNA, 19 nt, Artificial Sequence
  Description of Artificial Sequence: Synthetic oligonucleotide
gucuucgugucuguaucca

SEQ ID NO: 3111881 - RNA, 19 nt, Artificial Sequence
  Description of Artificial Sequence: Synthetic oligonucleotide
agguugccuguggaagggg

SEQ ID NO: 3111882 - RNA, 19 nt, Artificial Sequence
  Description of Artificial Sequence: Synthetic oligonucleotide
gccaggcucugccacagug

SEQ ID NO: 3111883 - RNA, 19 nt, Artificial Sequence
  Description of Artificial Sequence: Synthetic oligonucleotide
ccacaggugggaagguugc

SEQ ID NO: 3111884 - RNA, 19 nt, Artificial Sequence
  Description of Artificial Sequence: Synthetic oligonucleotide
cagggccaggcucugccac

SEQ ID NO: 3111885 - RNA, 19 nt, Artificial Sequence
  Description of Artificial Sequence: Synthetic oligonucleotide
cuguauccaugaaggaucu

SEQ ID NO: 3111886 - RNA, 19 nt, Artificial Sequence
  Description of Artificial Sequence: Synthetic oligonucleotide
agggagaggcauauucaaa

SEQ ID NO: 3111887 - RNA, 19 nt, Artificial Sequence
  Description of Artificial Sequence: Synthetic oligonucleotide
cacaggugggaagguugcc

SEQ ID NO: 3111888 - RNA, 19 nt, Artificial Sequence
  Description of Artificial Sequence: Synthetic oligonucleotide
agggccaggcucugccaca

SEQ ID NO: 3111889 - RNA, 19 nt, Artificial Sequence
  Description of Artificial Sequence: Synthetic oligonucleotide
ccuucccaagcuuuuguca

SEQ ID NO: 3111890 - RNA, 19 nt, Artificial Sequence
  Description of Artificial Sequence: Synthetic oligonucleotide
cuauaguuuguaacuuauu

SEQ ID NO: 3111891 - RNA, 19 nt, Artificial Sequence
  Description of Artificial Sequence: Synthetic oligonucleotide
ggaaggggagccuuuuacu

SEQ ID NO: 3111892 - RNA, 19 nt, Artificial Sequence
  Description of Artificial Sequence: Synthetic oligonucleotide
uguauccaugaaggaucuc

SEQ ID NO: 3111893 - RNA, 19 nt, Artificial Sequence
  Description of Artificial Sequence: Synthetic oligonucleotide
guguucuuccagggccagg

SEQ ID NO: 3111894 - RNA, 19 nt, Artificial Sequence
  Description of Artificial Sequence: Synthetic oligonucleotide
ggugggaagguugccugug

SEQ ID NO: 3111895 - RNA, 19 nt, Artificial Sequence
  Description of Artificial Sequence: Synthetic oligonucleotide
cucuucccaugaagaggac

SEQ ID NO: 3111896 - RNA, 19 nt, Artificial Sequence
  Description of Artificial Sequence: Synthetic oligonucleotide
ccagggagaggcauauuca

SEQ ID NO: 3111897 - RNA, 19 nt, Artificial Sequence
  Description of Artificial Sequence: Synthetic oligonucleotide
cagugcugggauaggcaga

SEQ ID NO: 3111898 - RNA, 19 nt, Artificial Sequence
  Description of Artificial Sequence: Synthetic oligonucleotide
agcauaccacaggugggaa

SEQ ID NO: 3111899 - RNA, 19 nt, Artificial Sequence
  Description of Artificial Sequence: Synthetic oligonucleotide
agaggacccugaucugguu

SEQ ID NO: 3111900 - RNA, 19 nt, Artificial Sequence
  Description of Artificial Sequence: Synthetic oligonucleotide
auaccacaggugggaaggu

SEQ ID NO: 3111901 - RNA, 19 nt, Artificial Sequence
  Description of Artificial Sequence: Synthetic oligonucleotide
gaggacccugaucugguuu

SEQ ID NO: 3111902 - RNA, 19 nt, Artificial Sequence
  Description of Artificial Sequence: Synthetic oligonucleotide
uaccacaggugggaagguu

SEQ ID NO: 3111903 - RNA, 19 nt, Artificial Sequence
  Description of Artificial Sequence: Synthetic oligonucleotide
ccuuuuacuauaguuugua

SEQ ID NO: 3111904 - RNA, 19 nt, Artificial Sequence
  Description of Artificial Sequence: Synthetic oligonucleotide
cugggauaggcagauucua

SEQ ID NO: 3111905 - RNA, 19 nt, Artificial Sequence
  Description of Artificial Sequence: Synthetic oligonucleotide
gggaagguugccuguggaa

SEQ ID NO: 3111906 - RNA, 19 nt, Artificial Sequence
  Description of Artificial Sequence: Synthetic oligonucleotide
ccacagugcugggauaggc

SEQ ID NO: 3111907 - RNA, 19 nt, Artificial Sequence
  Description of Artificial Sequence: Synthetic oligonucleotide
gaucuccuucccaagcuuu

SEQ ID NO: 3111908 - RNA, 19 nt, Artificial Sequence
  Description of Artificial Sequence: Synthetic oligonucleotide
ggggagccuuuuacuauag

SEQ ID NO: 3111909 - RNA, 19 nt, Artificial Sequence
  Description of Artificial Sequence: Synthetic oligonucleotide
cccaugaagaggacccuga

SEQ ID NO: 3111910 - RNA, 19 nt, Artificial Sequence
  Description of Artificial Sequence: Synthetic oligonucleotide
cuaacccagggagaggcau

SEQ ID NO: 3111911 - RNA, 19 nt, Artificial Sequence
  Description of Artificial Sequence: Synthetic oligonucleotide
uuccagggccaggcucugc

SEQ ID NO: 3111912 - RNA, 19 nt, Artificial Sequence
  Description of Artificial Sequence: Synthetic oligonucleotide
guggaaggggagccuuuua

SEQ ID NO: 3111913 - RNA, 19 nt, Artificial Sequence
  Description of Artificial Sequence: Synthetic oligonucleotide
cuuccagggccaggcucug

SEQ ID NO: 3111914 - RNA, 19 nt, Artificial Sequence
  Description of Artificial Sequence: Synthetic oligonucleotide
ccugaucugguuucuuugu

SEQ ID NO: 3111915 - RNA, 19 nt, Artificial Sequence
  Description of Artificial Sequence: Synthetic oligonucleotide
guucuuccagggccaggcu

SEQ ID NO: 3111916 - RNA, 19 nt, Artificial Sequence
  Description of Artificial Sequence: Synthetic oligonucleotide
gcugggauaggcagauucu

SEQ ID NO: 3111917 - RNA, 19 nt, Artificial Sequence
  Description of Artificial Sequence: Synthetic oligonucleotide
cuuuugucaccguguucuu

SEQ ID NO: 3111918 - RNA, 19 nt, Artificial Sequence
  Description of Artificial Sequence: Synthetic oligonucleotide
ccguguucuuccagggcca

SEQ ID NO: 3111919 - RNA, 19 nt, Artificial Sequence
  Description of Artificial Sequence: Synthetic oligonucleotide
ggaucuccuucccaagcuu

SEQ ID NO: 3111920 - RNA, 19 nt, Artificial Sequence
  Description of Artificial Sequence: Synthetic oligonucleotide
gccuuuuacuauaguuugu

SEQ ID NO: 3111921 - RNA, 19 nt, Artificial Sequence
  Description of Artificial Sequence: Synthetic oligonucleotide
gggagccuuuuacuauagu

SEQ ID NO: 3111922 - RNA, 19 nt, Artificial Sequence
  Description of Artificial Sequence: Synthetic oligonucleotide
ccagggccaggcucugcca

SEQ ID NO: 3111923 - RNA, 19 nt, Artificial Sequence
  Description of Artificial Sequence: Synthetic oligonucleotide
acccagggagaggcauauu

SEQ ID NO: 3111924 - RNA, 19 nt, Artificial Sequence
  Description of Artificial Sequence: Synthetic oligonucleotide
ggacccugaucugguuucu

SEQ ID NO: 3111925 - RNA, 19 nt, Artificial Sequence
  Description of Artificial Sequence: Synthetic oligonucleotide
ccuguggaaggggagccuu

SEQ ID NO: 3111926 - RNA, 19 nt, Artificial Sequence
  Description of Artificial Sequence: Synthetic oligonucleotide
gccuguggaaggggagccu

SEQ ID NO: 3111927 - RNA, 19 nt, Artificial Sequence
  Description of Artificial Sequence: Synthetic oligonucleotide
cccaagcuuuugucaccgu

SEQ ID NO: 3111928 - RNA, 19 nt, Artificial Sequence
  Description of Artificial Sequence: Synthetic oligonucleotide
ggccaggcucugccacagu

SEQ ID NO: 3111929 - RNA, 19 nt, Artificial Sequence
  Description of Artificial Sequence: Synthetic oligonucleotide
gugcugggauaggcagauu

SEQ ID NO: 3111930 - RNA, 19 nt, Artificial Sequence
  Description of Artificial Sequence: Synthetic oligonucleotide
agaaucugccucugcagcc

SEQ ID NO: 3111931 - RNA, 19 nt, Artificial Sequence
  Description of Artificial Sequence: Synthetic oligonucleotide
agcagcucucgguacaggc

SEQ ID NO: 3111932 - RNA, 19 nt, Artificial Sequence
  Description of Artificial Sequence: Synthetic oligonucleotide
uacagauacucgaugcgca

SEQ ID NO: 3111933 - RNA, 19 nt, Artificial Sequence
  Description of Artificial Sequence: Synthetic oligonucleotide
acgaagaugcccauggccg

SEQ ID NO: 3111934 - RNA, 19 nt, Artificial Sequence
  Description of Artificial Sequence: Synthetic oligonucleotide
auacucgaugcgcagcacg

SEQ ID NO: 3111935 - RNA, 19 nt, Artificial Sequence
  Description of Artificial Sequence: Synthetic oligonucleotide
uacaggcucagaaucugcc

SEQ ID NO: 3111936 - RNA, 19 nt, Artificial Sequence
  Description of Artificial Sequence: Synthetic oligonucleotide
ucgguacaggcucagaauc

SEQ ID NO: 3111937 - RNA, 19 nt, Artificial Sequence
  Description of Artificial Sequence: Synthetic oligonucleotide
ugcgcagcacgucggagcg

SEQ ID NO: 3111938 - RNA, 19 nt, Artificial Sequence
  Description of Artificial Sequence: Synthetic oligonucleotide
augcgcagcacgucggagc

SEQ ID NO: 3111939 - RNA, 19 nt, Artificial Sequence
  Description of Artificial Sequence: Synthetic oligonucleotide
cacgaagaugcccauggcc

SEQ ID NO: 3111940 - RNA, 19 nt, Artificial Sequence
  Description of Artificial Sequence: Synthetic oligonucleotide
gguacagauacucgaugcg

SEQ ID NO: 3111941 - RNA, 19 nt, Artificial Sequence
  Description of Artificial Sequence: Synthetic oligonucleotide
uccccggcgguacagauac

SEQ ID NO: 3111942 - RNA, 19 nt, Artificial Sequence
  Description of Artificial Sequence: Synthetic oligonucleotide
ucucgguacaggcucagaa

SEQ ID NO: 3111943 - RNA, 19 nt, Artificial Sequence
  Description of Artificial Sequence: Synthetic oligonucleotide
agauacucgaugcgcagca

SEQ ID NO: 3111944 - RNA, 19 nt, Artificial Sequence
  Description of Artificial Sequence: Synthetic oligonucleotide
cagaaucugccucugcagc

SEQ ID NO: 3111945 - RNA, 19 nt, Artificial Sequence
  Description of Artificial Sequence: Synthetic oligonucleotide
aaucugccucugcagccgg

SEQ ID NO: 3111946 - RNA, 19 nt, Artificial Sequence
  Description of Artificial Sequence: Synthetic oligonucleotide
acagauacucgaugcgcag

SEQ ID NO: 3111947 - RNA, 19 nt, Artificial Sequence
  Description of Artificial Sequence: Synthetic oligonucleotide
aaggccggcgugcugccgg

SEQ ID NO: 3111948 - RNA, 19 nt, Artificial Sequence
  Description of Artificial Sequence: Synthetic oligonucleotide
cucgaugcgcagcacgucg

SEQ ID NO: 3111949 - RNA, 19 nt, Artificial Sequence
  Description of Artificial Sequence: Synthetic oligonucleotide
gaaucugccucugcagccg

SEQ ID NO: 3111950 - RNA, 19 nt, Artificial Sequence
  Description of Artificial Sequence: Synthetic oligonucleotide
guacagauacucgaugcgc

SEQ ID NO: 3111951 - RNA, 19 nt, Artificial Sequence
  Description of Artificial Sequence: Synthetic oligonucleotide
uacucgaugcgcagcacgu

SEQ ID NO: 3111952 - RNA, 19 nt, Artificial Sequence
  Description of Artificial Sequence: Synthetic oligonucleotide
ucgaugcgcagcacgucgg

SEQ ID NO: 3111953 - RNA, 19 nt, Artificial Sequence
  Description of Artificial Sequence: Synthetic oligonucleotide
aagaugcccauggccgugg

SEQ ID NO: 3111954 - RNA, 19 nt, Artificial Sequence
  Description of Artificial Sequence: Synthetic oligonucleotide
cucagaaucugccucugca

SEQ ID NO: 3111955 - RNA, 19 nt, Artificial Sequence
  Description of Artificial Sequence: Synthetic oligonucleotide
cugggccgacucaugaccg

SEQ ID NO: 3111956 - RNA, 19 nt, Artificial Sequence
  Description of Artificial Sequence: Synthetic oligonucleotide
ucaugaccgcggccggucg

SEQ ID NO: 3111957 - RNA, 19 nt, Artificial Sequence
  Description of Artificial Sequence: Synthetic oligonucleotide
gcagcuggcgcuuuccccg

SEQ ID NO: 3111958 - RNA, 19 nt, Artificial Sequence
  Description of Artificial Sequence: Synthetic oligonucleotide
guggccggaacgcagcagc

SEQ ID NO: 3111959 - RNA, 19 nt, Artificial Sequence
  Description of Artificial Sequence: Synthetic oligonucleotide
ugcagcuggcgcuuucccc

SEQ ID NO: 3111960 - RNA, 19 nt, Artificial Sequence
  Description of Artificial Sequence: Synthetic oligonucleotide
aacgcagcagcugcagcug

SEQ ID NO: 3111961 - RNA, 19 nt, Artificial Sequence
  Description of Artificial Sequence: Synthetic oligonucleotide
caggcucagaaucugccuc

SEQ ID NO: 3111962 - RNA, 19 nt, Artificial Sequence
  Description of Artificial Sequence: Synthetic oligonucleotide
gacucaugaccgcggccgg

SEQ ID NO: 3111963 - RNA, 19 nt, Artificial Sequence
  Description of Artificial Sequence: Synthetic oligonucleotide
aggcucagaaucugccucu

SEQ ID NO: 3111964 - RNA, 19 nt, Artificial Sequence
  Description of Artificial Sequence: Synthetic oligonucleotide
gaacgcagcagcugcagcu

SEQ ID NO: 3111965 - RNA, 19 nt, Artificial Sequence
  Description of Artificial Sequence: Synthetic oligonucleotide
uccuccgucgggccccgcg

SEQ ID NO: 3111966 - RNA, 19 nt, Artificial Sequence
  Description of Artificial Sequence: Synthetic oligonucleotide
cacgucggagcgcggaagg

SEQ ID NO: 3111967 - RNA, 19 nt, Artificial Sequence
  Description of Artificial Sequence: Synthetic oligonucleotide
ugcugccggaacucggccc

SEQ ID NO: 3111968 - RNA, 19 nt, Artificial Sequence
  Description of Artificial Sequence: Synthetic oligonucleotide
cagcucucgguacaggcuc

SEQ ID NO: 3111969 - RNA, 19 nt, Artificial Sequence
  Description of Artificial Sequence: Synthetic oligonucleotide
cagauacucgaugcgcagc

SEQ ID NO: 3111970 - RNA, 19 nt, Artificial Sequence
  Description of Artificial Sequence: Synthetic oligonucleotide
gucggagcgcggaaggccg

SEQ ID NO: 3111971 - RNA, 19 nt, Artificial Sequence
  Description of Artificial Sequence: Synthetic oligonucleotide
gaagaugcccauggccgug

SEQ ID NO: 3111972 - RNA, 19 nt, Artificial Sequence
  Description of Artificial Sequence: Synthetic oligonucleotide
uggcguggccggaacgcag

SEQ ID NO: 3111973 - RNA, 19 nt, Artificial Sequence
  Description of Artificial Sequence: Synthetic oligonucleotide
gcugggccgacucaugacc

SEQ ID NO: 3111974 - RNA, 19 nt, Artificial Sequence
  Description of Artificial Sequence: Synthetic oligonucleotide
gaacucggcccgcacccgc

SEQ ID NO: 3111975 - RNA, 19 nt, Artificial Sequence
  Description of Artificial Sequence: Synthetic oligonucleotide
gaugcgcagcacgucggag

SEQ ID NO: 3111976 - RNA, 19 nt, Artificial Sequence
  Description of Artificial Sequence: Synthetic oligonucleotide
gcugccggaacucggcccg

SEQ ID NO: 3111977 - RNA, 19 nt, Artificial Sequence
  Description of Artificial Sequence: Synthetic oligonucleotide
acgcagcagcugcagcugg

SEQ ID NO: 3111978 - RNA, 19 nt, Artificial Sequence
  Description of Artificial Sequence: Synthetic oligonucleotide
aacucggcccgcacccgcg

SEQ ID NO: 3111979 - RNA, 19 nt, Artificial Sequence
  Description of Artificial Sequence: Synthetic oligonucleotide
gguacaggcucagaaucug

SEQ ID NO: 3111980 - RNA, 19 nt, Artificial Sequence
  Description of Artificial Sequence: Synthetic oligonucleotide
cgguacagauacucgaugc

SEQ ID NO: 3111981 - RNA, 19 nt, Artificial Sequence
  Description of Artificial Sequence: Synthetic oligonucleotide
guacaggcucagaaucugc

SEQ ID NO: 3111982 - RNA, 19 nt, Artificial Sequence
  Description of Artificial Sequence: Synthetic oligonucleotide
ucggagcgcggaaggccgg

SEQ ID NO: 3111983 - RNA, 19 nt, Artificial Sequence
  Description of Artificial Sequence: Synthetic oligonucleotide
uuuccccggcgguacagau

SEQ ID NO: 3111984 - RNA, 19 nt, Artificial Sequence
  Description of Artificial Sequence: Synthetic oligonucleotide
ucugccucugcagccggcu

SEQ ID NO: 3111985 - RNA, 19 nt, Artificial Sequence
  Description of Artificial Sequence: Synthetic oligonucleotide
acgucggagcgcggaaggc

SEQ ID NO: 3111986 - RNA, 19 nt, Artificial Sequence
  Description of Artificial Sequence: Synthetic oligonucleotide
gccggaacgcagcagcugc

SEQ ID NO: 3111987 - RNA, 19 nt, Artificial Sequence
  Description of Artificial Sequence: Synthetic oligonucleotide
gauacucgaugcgcagcac

SEQ ID NO: 3111988 - RNA, 19 nt, Artificial Sequence
  Description of Artificial Sequence: Synthetic oligonucleotide
ugggccgacucaugaccgc

SEQ ID NO: 3111989 - RNA, 19 nt, Artificial Sequence
  Description of Artificial Sequence: Synthetic oligonucleotide
acucgaugcgcagcacguc

SEQ ID NO: 3111990 - RNA, 19 nt, Artificial Sequence
  Description of Artificial Sequence: Synthetic oligonucleotide
augaccgcggccggucgcg

SEQ ID NO: 3111991 - RNA, 19 nt, Artificial Sequence
  Description of Artificial Sequence: Synthetic oligonucleotide
agcugcagcuggcgcuuuc

SEQ ID NO: 3111992 - RNA, 19 nt, Artificial Sequence
  Description of Artificial Sequence: Synthetic oligonucleotide
uggccggaacgcagcagcu

SEQ ID NO: 3111993 - RNA, 19 nt, Artificial Sequence
  Description of Artificial Sequence: Synthetic oligonucleotide
agcgcggaaggccggcgug

SEQ ID NO: 3111994 - RNA, 19 nt, Artificial Sequence
  Description of Artificial Sequence: Synthetic oligonucleotide
cauggccguggcguggccg

SEQ ID NO: 3111995 - RNA, 19 nt, Artificial Sequence
  Description of Artificial Sequence: Synthetic oligonucleotide
gcgguacagauacucgaug

SEQ ID NO: 3111996 - RNA, 19 nt, Artificial Sequence
  Description of Artificial Sequence: Synthetic oligonucleotide
cuggcgcuuuccccggcgg

SEQ ID NO: 3111997 - RNA, 19 nt, Artificial Sequence
  Description of Artificial Sequence: Synthetic oligonucleotide
cugcagcuggcgcuuuccc

SEQ ID NO: 3111998 - RNA, 19 nt, Artificial Sequence
  Description of Artificial Sequence: Synthetic oligonucleotide
agcuggcgcuuuccccggc

SEQ ID NO: 3111999 - RNA, 19 nt, Artificial Sequence
  Description of Artificial Sequence: Synthetic oligonucleotide
caugaccgcggccggucgc

SEQ ID NO: 3112000 - RNA, 19 nt, Artificial Sequence
  Description of Artificial Sequence: Synthetic oligonucleotide
cgacucaugaccgcggccg

SEQ ID NO: 3112001 - RNA, 19 nt, Artificial Sequence
  Description of Artificial Sequence: Synthetic oligonucleotide
ggaacgcagcagcugcagc

SEQ ID NO: 3112002 - RNA, 19 nt, Artificial Sequence
  Description of Artificial Sequence: Synthetic oligonucleotide
gugcugccggaacucggcc

SEQ ID NO: 3112003 - RNA, 19 nt, Artificial Sequence
  Description of Artificial Sequence: Synthetic oligonucleotide
cagcuggcgcuuuccccgg

SEQ ID NO: 3112004 - RNA, 19 nt, Artificial Sequence
  Description of Artificial Sequence: Synthetic oligonucleotide
cucaugaccgcggccgguc

SEQ ID NO: 3112005 - RNA, 19 nt, Artificial Sequence
  Description of Artificial Sequence: Synthetic oligonucleotide
uggcgcuuuccccggcggu

SEQ ID NO: 3112006 - RNA, 19 nt, Artificial Sequence
  Description of Artificial Sequence: Synthetic oligonucleotide
uuccccggcgguacagaua

SEQ ID NO: 3112007 - RNA, 19 nt, Artificial Sequence
  Description of Artificial Sequence: Synthetic oligonucleotide
ccggcgguacagauacucg

SEQ ID NO: 3112008 - RNA, 19 nt, Artificial Sequence
  Description of Artificial Sequence: Synthetic oligonucleotide
agcacgucggagcgcggaa

SEQ ID NO: 3112009 - RNA, 19 nt, Artificial Sequence
  Description of Artificial Sequence: Synthetic oligonucleotide
cgcgggcgcacgaagaugc

SEQ ID NO: 3112010 - RNA, 19 nt, Artificial Sequence
  Description of Artificial Sequence: Synthetic oligonucleotide
cucgguacaggcucagaau

SEQ ID NO: 3112011 - RNA, 19 nt, Artificial Sequence
  Description of Artificial Sequence: Synthetic oligonucleotide
gaaggccggcgugcugccg

SEQ ID NO: 3112012 - RNA, 19 nt, Artificial Sequence
  Description of Artificial Sequence: Synthetic oligonucleotide
ucggcccgcacccgcgccu

SEQ ID NO: 3112013 - RNA, 19 nt, Artificial Sequence
  Description of Artificial Sequence: Synthetic oligonucleotide
gcuggcgcuuuccccggcg

SEQ ID NO: 3112014 - RNA, 19 nt, Artificial Sequence
  Description of Artificial Sequence: Synthetic oligonucleotide
gggccgacucaugaccgcg

SEQ ID NO: 3112015 - RNA, 19 nt, Artificial Sequence
  Description of Artificial Sequence: Synthetic oligonucleotide
gcacgaagaugcccauggc

SEQ ID NO: 3112016 - RNA, 19 nt, Artificial Sequence
  Description of Artificial Sequence: Synthetic oligonucleotide
cgugcugccggaacucggc

SEQ ID NO: 3112017 - RNA, 19 nt, Artificial Sequence
  Description of Artificial Sequence: Synthetic oligonucleotide
cagcagcucucgguacagg

SEQ ID NO: 3112018 - RNA, 19 nt, Artificial Sequence
  Description of Artificial Sequence: Synthetic oligonucleotide
gccgacucaugaccgcggc

SEQ ID NO: 3112019 - RNA, 19 nt, Artificial Sequence
  Description of Artificial Sequence: Synthetic oligonucleotide
acucaugaccgcggccggu

SEQ ID NO: 3112020 - RNA, 19 nt, Artificial Sequence
  Description of Artificial Sequence: Synthetic oligonucleotide
cugccucugcagccggcug

SEQ ID NO: 3112021 - RNA, 19 nt, Artificial Sequence
  Description of Artificial Sequence: Synthetic oligonucleotide
gcagcagcucucgguacag

SEQ ID NO: 3112022 - RNA, 19 nt, Artificial Sequence
  Description of Artificial Sequence: Synthetic oligonucleotide
ggcgugcugccggaacucg

SEQ ID NO: 3112023 - RNA, 19 nt, Artificial Sequence
  Description of Artificial Sequence: Synthetic oligonucleotide
ggcugggccgacucaugac

SEQ ID NO: 3112024 - RNA, 19 nt, Artificial Sequence
  Description of Artificial Sequence: Synthetic oligonucleotide
agcucucgguacaggcuca

SEQ ID NO: 3112025 - RNA, 19 nt, Artificial Sequence
  Description of Artificial Sequence: Synthetic oligonucleotide
gggcgcacgaagaugccca

SEQ ID NO: 3112026 - RNA, 19 nt, Artificial Sequence
  Description of Artificial Sequence: Synthetic oligonucleotide
ggaaggccggcgugcugcc

SEQ ID NO: 3112027 - RNA, 19 nt, Artificial Sequence
  Description of Artificial Sequence: Synthetic oligonucleotide
ggccgacucaugaccgcgg

SEQ ID NO: 3112028 - RNA, 19 nt, Artificial Sequence
  Description of Artificial Sequence: Synthetic oligonucleotide
ccggaacucggcccgcacc

SEQ ID NO: 3112029 - RNA, 19 nt, Artificial Sequence
  Description of Artificial Sequence: Synthetic oligonucleotide
cagccggcugggccgacuc

SEQ ID NO: 3112030 - RNA, 19 nt, Artificial Sequence
  Description of Artificial Sequence: Synthetic oligonucleotide
cgcagcacgucggagcgcg

SEQ ID NO: 3112031 - RNA, 19 nt, Artificial Sequence
  Description of Artificial Sequence: Synthetic oligonucleotide
gccucugcagccggcuggg

SEQ ID NO: 3112032 - RNA, 19 nt, Artificial Sequence
  Description of Artificial Sequence: Synthetic oligonucleotide
cuucccgcgcccggcgcgc

SEQ ID NO: 3112033 - RNA, 19 nt, Artificial Sequence
  Description of Artificial Sequence: Synthetic oligonucleotide
ugccggaacucggcccgca

SEQ ID NO: 3112034 - RNA, 19 nt, Artificial Sequence
  Description of Artificial Sequence: Synthetic oligonucleotide
gcuuuccccggcgguacag

SEQ ID NO: 3112035 - RNA, 19 nt, Artificial Sequence
  Description of Artificial Sequence: Synthetic oligonucleotide
cccggcgguacagauacuc

SEQ ID NO: 3112036 - RNA, 19 nt, Artificial Sequence
  Description of Artificial Sequence: Synthetic oligonucleotide
ggcguggccggaacgcagc

SEQ ID NO: 3112037 - RNA, 19 nt, Artificial Sequence
  Description of Artificial Sequence: Synthetic oligonucleotide
cuuuccccggcgguacaga

SEQ ID NO: 3112038 - RNA, 19 nt, Artificial Sequence
  Description of Artificial Sequence: Synthetic oligonucleotide
cggaaggccggcgugcugc

SEQ ID NO: 3112039 - RNA, 19 nt, Artificial Sequence
  Description of Artificial Sequence: Synthetic oligonucleotide
agccggcugggccgacuca

SEQ ID NO: 3112040 - RNA, 19 nt, Artificial Sequence
  Description of Artificial Sequence: Synthetic oligonucleotide
ccgacucaugaccgcggcc

SEQ ID NO: 3112041 - RNA, 19 nt, Artificial Sequence
  Description of Artificial Sequence: Synthetic oligonucleotide
ggcgcgcagcagcucucgg

SEQ ID NO: 3112042 - RNA, 19 nt, Artificial Sequence
  Description of Artificial Sequence: Synthetic oligonucleotide
ucccgcgcccggcgcgcag

SEQ ID NO: 3112043 - RNA, 19 nt, Artificial Sequence
  Description of Artificial Sequence: Synthetic oligonucleotide
gcacgucggagcgcggaag

SEQ ID NO: 3112044 - RNA, 19 nt, Artificial Sequence
  Description of Artificial Sequence: Synthetic oligonucleotide
guggcguggccggaacgca

SEQ ID NO: 3112045 - RNA, 19 nt, Artificial Sequence
  Description of Artificial Sequence: Synthetic oligonucleotide
gcgugcugccggaacucgg

SEQ ID NO: 3112046 - RNA, 19 nt, Artificial Sequence
  Description of Artificial Sequence: Synthetic oligonucleotide
aggccggcgugcugccgga

SEQ ID NO: 3112047 - RNA, 19 nt, Artificial Sequence
  Description of Artificial Sequence: Synthetic oligonucleotide
cguggcguggccggaacgc

SEQ ID NO: 3112048 - RNA, 19 nt, Artificial Sequence
  Description of Artificial Sequence: Synthetic oligonucleotide
gcgcccggcgcgcagcagc

SEQ ID NO: 3112049 - RNA, 19 nt, Artificial Sequence
  Description of Artificial Sequence: Synthetic oligonucleotide
gcacccgcgccucggcgcc

SEQ ID NO: 3112050 - RNA, 19 nt, Artificial Sequence
  Description of Artificial Sequence: Synthetic oligonucleotide
gagcgcggaaggccggcgu

SEQ ID NO: 3112051 - RNA, 19 nt, Artificial Sequence
  Description of Artificial Sequence: Synthetic oligonucleotide
ggccggaacgcagcagcug

SEQ ID NO: 3112052 - RNA, 19 nt, Artificial Sequence
  Description of Artificial Sequence: Synthetic oligonucleotide
cagcacgucggagcgcgga

SEQ ID NO: 3112053 - RNA, 19 nt, Artificial Sequence
  Description of Artificial Sequence: Synthetic oligonucleotide
cgucggagcgcggaaggcc

SEQ ID NO: 3112054 - RNA, 19 nt, Artificial Sequence
  Description of Artificial Sequence: Synthetic oligonucleotide
gcucucgguacaggcucag

SEQ ID NO: 3112055 - RNA, 19 nt, Artificial Sequence
  Description of Artificial Sequence: Synthetic oligonucleotide
acccgcgccucggcgcccg

SEQ ID NO: 3112056 - RNA, 19 nt, Artificial Sequence
  Description of Artificial Sequence: Synthetic oligonucleotide
ggccuccuccgucgggccc

SEQ ID NO: 3112057 - RNA, 19 nt, Artificial Sequence
  Description of Artificial Sequence: Synthetic oligonucleotide
ccggccuccuccgucgggc

SEQ ID NO: 3112058 - RNA, 19 nt, Artificial Sequence
  Description of Artificial Sequence: Synthetic oligonucleotide
gccuccuccgucgggcccc

SEQ ID NO: 3112059 - RNA, 19 nt, Artificial Sequence
  Description of Artificial Sequence: Synthetic oligonucleotide
cggcgguacagauacucga

SEQ ID NO: 3112060 - RNA, 19 nt, Artificial Sequence
  Description of Artificial Sequence: Synthetic oligonucleotide
gcgcagcagcucucgguac

SEQ ID NO: 3112061 - RNA, 19 nt, Artificial Sequence
  Description of Artificial Sequence: Synthetic oligonucleotide
cugccggaacucggcccgc

SEQ ID NO: 3112062 - RNA, 19 nt, Artificial Sequence
  Description of Artificial Sequence: Synthetic oligonucleotide
ccguggcguggccggaacg

SEQ ID NO: 3112063 - RNA, 19 nt, Artificial Sequence
  Description of Artificial Sequence: Synthetic oligonucleotide
gcccauggccguggcgugg

SEQ ID NO: 3112064 - RNA, 19 nt, Artificial Sequence
  Description of Artificial Sequence: Synthetic oligonucleotide
cucucgguacaggcucaga

SEQ ID NO: 3112065 - RNA, 19 nt, Artificial Sequence
  Description of Artificial Sequence: Synthetic oligonucleotide
ggcgguacagauacucgau

SEQ ID NO: 3112066 - RNA, 19 nt, Artificial Sequence
  Description of Artificial Sequence: Synthetic oligonucleotide
cccauggccguggcguggc

SEQ ID NO: 3112067 - RNA, 19 nt, Artificial Sequence
  Description of Artificial Sequence: Synthetic oligonucleotide
gccggcgugcugccggaac

SEQ ID NO: 3112068 - RNA, 19 nt, Artificial Sequence
  Description of Artificial Sequence: Synthetic oligonucleotide
gcagcucucgguacaggcu

SEQ ID NO: 3112069 - RNA, 19 nt, Artificial Sequence
  Description of Artificial Sequence: Synthetic oligonucleotide
gccggccuccuccgucggg

SEQ ID NO: 3112070 - RNA, 19 nt, Artificial Sequence
  Description of Artificial Sequence: Synthetic oligonucleotide
gcgcuuuccccggcgguac

SEQ ID NO: 3112071 - RNA, 19 nt, Artificial Sequence
  Description of Artificial Sequence: Synthetic oligonucleotide
cggaacgcagcagcugcag

SEQ ID NO: 3112072 - RNA, 19 nt, Artificial Sequence
  Description of Artificial Sequence: Synthetic oligonucleotide
gccggaacucggcccgcac

SEQ ID NO: 3112073 - RNA, 19 nt, Artificial Sequence
  Description of Artificial Sequence: Synthetic oligonucleotide
gccguggcguggccggaac

SEQ ID NO: 3112074 - RNA, 19 nt, Artificial Sequence
  Description of Artificial Sequence: Synthetic oligonucleotide
gccccgcgggcgcacgaag

SEQ ID NO: 3112075 - RNA, 19 nt, Artificial Sequence
  Description of Artificial Sequence: Synthetic oligonucleotide
gcgcggaaggccggcgugc

SEQ ID NO: 3112076 - RNA, 19 nt, Artificial Sequence
  Description of Artificial Sequence: Synthetic oligonucleotide
gcggaaggccggcgugcug

SEQ ID NO: 3112077 - RNA, 19 nt, Artificial Sequence
  Description of Artificial Sequence: Synthetic oligonucleotide
gcgcccggcuucccgcgcc

SEQ ID NO: 3112078 - RNA, 19 nt, Artificial Sequence
  Description of Artificial Sequence: Synthetic oligonucleotide
uucccgcgcccggcgcgca

SEQ ID NO: 3112079 - RNA, 19 nt, Artificial Sequence
  Description of Artificial Sequence: Synthetic oligonucleotide
ggcgcuuuccccggcggua

SEQ ID NO: 3112080 - RNA, 19 nt, Artificial Sequence
  Description of Artificial Sequence: Synthetic oligonucleotide
cgggcgcacgaagaugccc

SEQ ID NO: 3112081 - RNA, 19 nt, Artificial Sequence
  Description of Artificial Sequence: Synthetic oligonucleotide
ccggcugggccgacucaug

SEQ ID NO: 3112082 - RNA, 19 nt, Artificial Sequence
  Description of Artificial Sequence: Synthetic oligonucleotide
cgcagcagcucucgguaca

SEQ ID NO: 3112083 - RNA, 19 nt, Artificial Sequence
  Description of Artificial Sequence: Synthetic oligonucleotide
ccggaacgcagcagcugca

SEQ ID NO: 3112084 - RNA, 19 nt, Artificial Sequence
  Description of Artificial Sequence: Synthetic oligonucleotide
ccgucgggccccgcgggcg

SEQ ID NO: 3112085 - RNA, 19 nt, Artificial Sequence
  Description of Artificial Sequence: Synthetic oligonucleotide
ggcgcccggcuucccgcgc

SEQ ID NO: 3112086 - RNA, 19 nt, Artificial Sequence
  Description of Artificial Sequence: Synthetic oligonucleotide
ggcccgcacccgcgccucg

SEQ ID NO: 3112087 - RNA, 19 nt, Artificial Sequence
  Description of Artificial Sequence: Synthetic oligonucleotide
cgguacaggcucagaaucu

SEQ ID NO: 3112088 - RNA, 19 nt, Artificial Sequence
  Description of Artificial Sequence: Synthetic oligonucleotide
gcagcacgucggagcgcgg

SEQ ID NO: 3112089 - RNA, 19 nt, Artificial Sequence
  Description of Artificial Sequence: Synthetic oligonucleotide
ccggcuucccgcgcccggc

SEQ ID NO: 3112090 - RNA, 19 nt, Artificial Sequence
  Description of Artificial Sequence: Synthetic oligonucleotide
cgaagaugcccauggccgu

SEQ ID NO: 3112091 - RNA, 19 nt, Artificial Sequence
  Description of Artificial Sequence: Synthetic oligonucleotide
gccucggcgcccggcuucc

SEQ ID NO: 3112092 - RNA, 19 nt, Artificial Sequence
  Description of Artificial Sequence: Synthetic oligonucleotide
cccgcacccgcgccucggc

SEQ ID NO: 3112093 - RNA, 19 nt, Artificial Sequence
  Description of Artificial Sequence: Synthetic oligonucleotide
gcgggcgcacgaagaugcc

SEQ ID NO: 3112094 - RNA, 19 nt, Artificial Sequence
  Description of Artificial Sequence: Synthetic oligonucleotide
ccauggccguggcguggcc

SEQ ID NO: 3112095 - RNA, 19 nt, Artificial Sequence
  Description of Artificial Sequence: Synthetic oligonucleotide
cguggccggaacgcagcag

SEQ ID NO: 3112096 - RNA, 19 nt, Artificial Sequence
  Description of Artificial Sequence: Synthetic oligonucleotide
ccgcgggcgcacgaagaug

SEQ ID NO: 3112097 - RNA, 19 nt, Artificial Sequence
  Description of Artificial Sequence: Synthetic oligonucleotide
cacccgcgccucggcgccc

SEQ ID NO: 3112098 - RNA, 19 nt, Artificial Sequence
  Description of Artificial Sequence: Synthetic oligonucleotide
ggcgcacgaagaugcccau

SEQ ID NO: 3112099 - RNA, 19 nt, Artificial Sequence
  Description of Artificial Sequence: Synthetic oligonucleotide
cgaugcgcagcacgucgga

SEQ ID NO: 3112100 - RNA, 19 nt, Artificial Sequence
  Description of Artificial Sequence: Synthetic oligonucleotide
ccccgcgggcgcacgaaga

SEQ ID NO: 3112101 - RNA, 19 nt, Artificial Sequence
  Description of Artificial Sequence: Synthetic oligonucleotide
cggccuccuccgucgggcc

SEQ ID NO: 3112102 - RNA, 19 nt, Artificial Sequence
  Description of Artificial Sequence: Synthetic oligonucleotide
gcccggcuucccgcgcccg

SEQ ID NO: 3112103 - RNA, 19 nt, Artificial Sequence
  Description of Artificial Sequence: Synthetic oligonucleotide
ccggcgcgcagcagcucuc

SEQ ID NO: 3112104 - RNA, 19 nt, Artificial Sequence
  Description of Artificial Sequence: Synthetic oligonucleotide
cggcgcccggcuucccgcg

SEQ ID NO: 3112105 - RNA, 19 nt, Artificial Sequence
  Description of Artificial Sequence: Synthetic oligonucleotide
gcgcagcacgucggagcgc

SEQ ID NO: 3112106 - RNA, 19 nt, Artificial Sequence
  Description of Artificial Sequence: Synthetic oligonucleotide
gucgggccccgcgggcgca

SEQ ID NO: 3112107 - RNA, 19 nt, Artificial Sequence
  Description of Artificial Sequence: Synthetic oligonucleotide
ccuccuccgucgggccccg

SEQ ID NO: 3112108 - RNA, 19 nt, Artificial Sequence
  Description of Artificial Sequence: Synthetic oligonucleotide
cggcgcgcagcagcucucg

SEQ ID NO: 3112109 - RNA, 19 nt, Artificial Sequence
  Description of Artificial Sequence: Synthetic oligonucleotide
ccggcgugcugccggaacu

SEQ ID NO: 3112110 - RNA, 19 nt, Artificial Sequence
  Description of Artificial Sequence: Synthetic oligonucleotide
cggagcgcggaaggccggc

SEQ ID NO: 3112111 - RNA, 19 nt, Artificial Sequence
  Description of Artificial Sequence: Synthetic oligonucleotide
cccggcgcgcagcagcucu

SEQ ID NO: 3112112 - RNA, 19 nt, Artificial Sequence
  Description of Artificial Sequence: Synthetic oligonucleotide
cccgcgcccggcgcgcagc

SEQ ID NO: 3112113 - RNA, 19 nt, Artificial Sequence
  Description of Artificial Sequence: Synthetic oligonucleotide
cuccuccgucgggccccgc

SEQ ID NO: 3112114 - RNA, 19 nt, Artificial Sequence
  Description of Artificial Sequence: Synthetic oligonucleotide
gccggcugggccgacucau

SEQ ID NO: 3112115 - RNA, 19 nt, Artificial Sequence
  Description of Artificial Sequence: Synthetic oligonucleotide
cggcgugcugccggaacuc

SEQ ID NO: 3112116 - RNA, 19 nt, Artificial Sequence
  Description of Artificial Sequence: Synthetic oligonucleotide
cgcccggcuucccgcgccc

SEQ ID NO: 3112117 - RNA, 19 nt, Artificial Sequence
  Description of Artificial Sequence: Synthetic oligonucleotide
ggccguggcguggccggaa

SEQ ID NO: 3112118 - RNA, 19 nt, Artificial Sequence
  Description of Artificial Sequence: Synthetic oligonucleotide
gggccccgcgggcgcacga

SEQ ID NO: 3112119 - RNA, 19 nt, Artificial Sequence
  Description of Artificial Sequence: Synthetic oligonucleotide
cgccggccuccuccgucgg

SEQ ID NO: 3112120 - RNA, 19 nt, Artificial Sequence
  Description of Artificial Sequence: Synthetic oligonucleotide
cccgcgggcgcacgaagau

SEQ ID NO: 3112121 - RNA, 19 nt, Artificial Sequence
  Description of Artificial Sequence: Synthetic oligonucleotide
ggccccgcgggcgcacgaa

SEQ ID NO: 3112122 - RNA, 19 nt, Artificial Sequence
  Description of Artificial Sequence: Synthetic oligonucleotide
cgcuuuccccggcgguaca

SEQ ID NO: 3112123 - RNA, 19 nt, Artificial Sequence
  Description of Artificial Sequence: Synthetic oligonucleotide
ccgcgccucggcgcccggc

SEQ ID NO: 3112124 - RNA, 19 nt, Artificial Sequence
  Description of Artificial Sequence: Synthetic oligonucleotide
ccucggcgcccggcuuccc

SEQ ID NO: 3112125 - RNA, 19 nt, Artificial Sequence
  Description of Artificial Sequence: Synthetic oligonucleotide
gcagccggcugggccgacu

SEQ ID NO: 3112126 - RNA, 19 nt, Artificial Sequence
  Description of Artificial Sequence: Synthetic oligonucleotide
ccgcgcccggcgcgcagca

SEQ ID NO: 3112127 - RNA, 19 nt, Artificial Sequence
  Description of Artificial Sequence: Synthetic oligonucleotide
gcccggcgcgcagcagcuc

SEQ ID NO: 3112128 - RNA, 19 nt, Artificial Sequence
  Description of Artificial Sequence: Synthetic oligonucleotide
ggccggcgugcugccggaa

SEQ ID NO: 3112129 - RNA, 19 nt, Artificial Sequence
  Description of Artificial Sequence: Synthetic oligonucleotide
cgggccccgcgggcgcacg

SEQ ID NO: 3112130 - RNA, 19 nt, Artificial Sequence
  Description of Artificial Sequence: Synthetic oligonucleotide
cggcccgcacccgcgccuc

SEQ ID NO: 3112131 - RNA, 19 nt, Artificial Sequence
  Description of Artificial Sequence: Synthetic oligonucleotide
cgcgccucggcgcccggcu

SEQ ID NO: 3112132 - RNA, 19 nt, Artificial Sequence
  Description of Artificial Sequence: Synthetic oligonucleotide
cgcccggcgcgcagcagcu

SEQ ID NO: 3112133 - RNA, 19 nt, Artificial Sequence
  Description of Artificial Sequence: Synthetic oligonucleotide
cagcugcagcuggcgcuuu

SEQ ID NO: 3112134 - RNA, 19 nt, Artificial Sequence
  Description of Artificial Sequence: Synthetic oligonucleotide
cgcgcccggcgcgcagcag

SEQ ID NO: 3112135 - RNA, 19 nt, Artificial Sequence
  Description of Artificial Sequence: Synthetic oligonucleotide
cgcggaaggccggcgugcu

SEQ ID NO: 3112136 - RNA, 19 nt, Artificial Sequence
  Description of Artificial Sequence: Synthetic oligonucleotide
gcgccucggcgcccggcuu

SEQ ID NO: 3112137 - RNA, 19 nt, Artificial Sequence
  Description of Artificial Sequence: Synthetic oligonucleotide
ccccggcgguacagauacu

SEQ ID NO: 3112138 - RNA, 19 nt, Artificial Sequence
  Description of Artificial Sequence: Synthetic oligonucleotide
aaaacauucacuuugacag

SEQ ID NO: 3112139 - RNA, 19 nt, Artificial Sequence
  Description of Artificial Sequence: Synthetic oligonucleotide
uuauaaaguaguuugaggg

SEQ ID NO: 3112140 - RNA, 19 nt, Artificial Sequence
  Description of Artificial Sequence: Synthetic oligonucleotide
uauauuauaaaguaguuug

SEQ ID NO: 3112141 - RNA, 19 nt, Artificial Sequence
  Description of Artificial Sequence: Synthetic oligonucleotide
gaaauuuugaguuuuauug

SEQ ID NO: 3112142 - RNA, 19 nt, Artificial Sequence
  Description of Artificial Sequence: Synthetic oligonucleotide
aauuuaacaaauuucaagu

SEQ ID NO: 3112143 - RNA, 19 nt, Artificial Sequence
  Description of Artificial Sequence: Synthetic oligonucleotide
aauuaagucauucuugcuc

SEQ ID NO: 3112144 - RNA, 19 nt, Artificial Sequence
  Description of Artificial Sequence: Synthetic oligonucleotide
uuuuauugaagucagacua

SEQ ID NO: 3112145 - RNA, 19 nt, Artificial Sequence
  Description of Artificial Sequence: Synthetic oligonucleotide
uuugagguauauuauaaag

SEQ ID NO: 3112146 - RNA, 19 nt, Artificial Sequence
  Description of Artificial Sequence: Synthetic oligonucleotide
uuuuaagaaauuuugaguu

SEQ ID NO: 3112147 - RNA, 19 nt, Artificial Sequence
  Description of Artificial Sequence: Synthetic oligonucleotide
ucuaauuaagucauucuug

SEQ ID NO: 3112148 - RNA, 19 nt, Artificial Sequence
  Description of Artificial Sequence: Synthetic oligonucleotide
uuuucuaaauuuaacaaau

SEQ ID NO: 3112149 - RNA, 19 nt, Artificial Sequence
  Description of Artificial Sequence: Synthetic oligonucleotide
auuauaaaguaguuugagg

SEQ ID NO: 3112150 - RNA, 19 nt, Artificial Sequence
  Description of Artificial Sequence: Synthetic oligonucleotide
acaaaagcaaaccaaaaca

SEQ ID NO: 3112151 - RNA, 19 nt, Artificial Sequence
  Description of Artificial Sequence: Synthetic oligonucleotide
aaauuuugaguuuuauuga

SEQ ID NO: 3112152 - RNA, 19 nt, Artificial Sequence
  Description of Artificial Sequence: Synthetic oligonucleotide
cuacauaacagauucagac

SEQ ID NO: 3112153 - RNA, 19 nt, Artificial Sequence
  Description of Artificial Sequence: Synthetic oligonucleotide
uaaucuuugagguauauua

SEQ ID NO: 3112154 - RNA, 19 nt, Artificial Sequence
  Description of Artificial Sequence: Synthetic oligonucleotide
uuaacaaauuucaaguuuc

SEQ ID NO: 3112155 - RNA, 19 nt, Artificial Sequence
  Description of Artificial Sequence: Synthetic oligonucleotide
cuaauuaagucauucuugc

SEQ ID NO: 3112156 - RNA, 19 nt, Artificial Sequence
  Description of Artificial Sequence: Synthetic oligonucleotide
uauuuagucuuuuaucugc

SEQ ID NO: 3112157 - RNA, 19 nt, Artificial Sequence
  Description of Artificial Sequence: Synthetic oligonucleotide
aacauugguaaucuuugag

SEQ ID NO: 3112158 - RNA, 19 nt, Artificial Sequence
  Description of Artificial Sequence: Synthetic oligonucleotide
acauugguaaucuuugagg

SEQ ID NO: 3112159 - RNA, 19 nt, Artificial Sequence
  Description of Artificial Sequence: Synthetic oligonucleotide
ugaguuuuauugaagucag

SEQ ID NO: 3112160 - RNA, 19 nt, Artificial Sequence
  Description of Artificial Sequence: Synthetic oligonucleotide
uauguccuuaacaaaagca

SEQ ID NO: 3112161 - RNA, 19 nt, Artificial Sequence
  Description of Artificial Sequence: Synthetic oligonucleotide
uucacuuugacaguuaaca

SEQ ID NO: 3112162 - RNA, 19 nt, Artificial Sequence
  Description of Artificial Sequence: Synthetic oligonucleotide
caaaagcaaaccaaaacag

SEQ ID NO: 3112163 - RNA, 19 nt, Artificial Sequence
  Description of Artificial Sequence: Synthetic oligonucleotide
aauuucaaguuucuaauua

SEQ ID NO: 3112164 - RNA, 19 nt, Artificial Sequence
  Description of Artificial Sequence: Synthetic oligonucleotide
agauucagacuauuaauuc

SEQ ID NO: 3112165 - RNA, 19 nt, Artificial Sequence
  Description of Artificial Sequence: Synthetic oligonucleotide
ucaaguuucuaauuaaguc

SEQ ID NO: 3112166 - RNA, 19 nt, Artificial Sequence
  Description of Artificial Sequence: Synthetic oligonucleotide
uuuaacaaauuucaaguuu

SEQ ID NO: 3112167 - RNA, 19 nt, Artificial Sequence
  Description of Artificial Sequence: Synthetic oligonucleotide
uauuauaaaguaguuugag

SEQ ID NO: 3112168 - RNA, 19 nt, Artificial Sequence
  Description of Artificial Sequence: Synthetic oligonucleotide
ugagguauauuauaaagua

SEQ ID NO: 3112169 - RNA, 19 nt, Artificial Sequence
  Description of Artificial Sequence: Synthetic oligonucleotide
ucuuuuaucugcaaagcaa

SEQ ID NO: 3112170 - RNA, 19 nt, Artificial Sequence
  Description of Artificial Sequence: Synthetic oligonucleotide
aauuuugaguuuuauugaa

SEQ ID NO: 3112171 - RNA, 19 nt, Artificial Sequence
  Description of Artificial Sequence: Synthetic oligonucleotide
aacagauucagacuauuaa

SEQ ID NO: 3112172 - RNA, 19 nt, Artificial Sequence
  Description of Artificial Sequence: Synthetic oligonucleotide
aagucauucuugcucacag

SEQ ID NO: 3112173 - RNA, 19 nt, Artificial Sequence
  Description of Artificial Sequence: Synthetic oligonucleotide
uagucuuuuaucugcaaag

SEQ ID NO: 3112174 - RNA, 19 nt, Artificial Sequence
  Description of Artificial Sequence: Synthetic oligonucleotide
auauguccuuaacaaaagc

SEQ ID NO: 3112175 - RNA, 19 nt, Artificial Sequence
  Description of Artificial Sequence: Synthetic oligonucleotide
uugagguauauuauaaagu

SEQ ID NO: 3112176 - RNA, 19 nt, Artificial Sequence
  Description of Artificial Sequence: Synthetic oligonucleotide
acaaauuucaaguuucuaa

SEQ ID NO: 3112177 - RNA, 19 nt, Artificial Sequence
  Description of Artificial Sequence: Synthetic oligonucleotide
ugcaaagcaacauugguaa

SEQ ID NO: 3112178 - RNA, 19 nt, Artificial Sequence
  Description of Artificial Sequence: Synthetic oligonucleotide
uucuaaauuuaacaaauuu

SEQ ID NO: 3112179 - RNA, 19 nt, Artificial Sequence
  Description of Artificial Sequence: Synthetic oligonucleotide
auuaauucugcauaccuau

SEQ ID NO: 3112180 - RNA, 19 nt, Artificial Sequence
  Description of Artificial Sequence: Synthetic oligonucleotide
auuaagucauucuugcuca

SEQ ID NO: 3112181 - RNA, 19 nt, Artificial Sequence
  Description of Artificial Sequence: Synthetic oligonucleotide
uauaaaguaguuugaggga

SEQ ID NO: 3112182 - RNA, 19 nt, Artificial Sequence
  Description of Artificial Sequence: Synthetic oligonucleotide
accuauuuagucuuuuauc

SEQ ID NO: 3112183 - RNA, 19 nt, Artificial Sequence
  Description of Artificial Sequence: Synthetic oligonucleotide
uaucugcaaagcaacauug

SEQ ID NO: 3112184 - RNA, 19 nt, Artificial Sequence
  Description of Artificial Sequence: Synthetic oligonucleotide
cagacuacauaacagauuc

SEQ ID NO: 3112185 - RNA, 19 nt, Artificial Sequence
  Description of Artificial Sequence: Synthetic oligonucleotide
aacuucauauguccuuaac

SEQ ID NO: 3112186 - RNA, 19 nt, Artificial Sequence
  Description of Artificial Sequence: Synthetic oligonucleotide
cuuuuaucugcaaagcaac

SEQ ID NO: 3112187 - RNA, 19 nt, Artificial Sequence
  Description of Artificial Sequence: Synthetic oligonucleotide
ucuuugagguauauuauaa

SEQ ID NO: 3112188 - RNA, 19 nt, Artificial Sequence
  Description of Artificial Sequence: Synthetic oligonucleotide
uucaaguuucuaauuaagu

SEQ ID NO: 3112189 - RNA, 19 nt, Artificial Sequence
  Description of Artificial Sequence: Synthetic oligonucleotide
gacuacauaacagauucag

SEQ ID NO: 3112190 - RNA, 19 nt, Artificial Sequence
  Description of Artificial Sequence: Synthetic oligonucleotide
caaguuucuaauuaaguca

SEQ ID NO: 3112191 - RNA, 19 nt, Artificial Sequence
  Description of Artificial Sequence: Synthetic oligonucleotide
aaaguaguuugagggaaac

SEQ ID NO: 3112192 - RNA, 19 nt, Artificial Sequence
  Description of Artificial Sequence: Synthetic oligonucleotide
uucuaauuaagucauucuu

SEQ ID NO: 3112193 - RNA, 19 nt, Artificial Sequence
  Description of Artificial Sequence: Synthetic oligonucleotide
uuuauugaagucagacuac

SEQ ID NO: 3112194 - RNA, 19 nt, Artificial Sequence
  Description of Artificial Sequence: Synthetic oligonucleotide
aguaguuugagggaaacca

SEQ ID NO: 3112195 - RNA, 19 nt, Artificial Sequence
  Description of Artificial Sequence: Synthetic oligonucleotide
aaagcaacauugguaaucu

SEQ ID NO: 3112196 - RNA, 19 nt, Artificial Sequence
  Description of Artificial Sequence: Synthetic oligonucleotide
acuucauauguccuuaaca

SEQ ID NO: 3112197 - RNA, 19 nt, Artificial Sequence
  Description of Artificial Sequence: Synthetic oligonucleotide
agucuuuuaucugcaaagc

SEQ ID NO: 3112198 - RNA, 19 nt, Artificial Sequence
  Description of Artificial Sequence: Synthetic oligonucleotide
uuucuaauuaagucauucu

SEQ ID NO: 3112199 - RNA, 19 nt, Artificial Sequence
  Description of Artificial Sequence: Synthetic oligonucleotide
acuauuaauucugcauacc

SEQ ID NO: 3112200 - RNA, 19 nt, Artificial Sequence
  Description of Artificial Sequence: Synthetic oligonucleotide
uacauaacagauucagacu

SEQ ID NO: 3112201 - RNA, 19 nt, Artificial Sequence
  Description of Artificial Sequence: Synthetic oligonucleotide
ucugcauaccuauuuaguc

SEQ ID NO: 3112202 - RNA, 19 nt, Artificial Sequence
  Description of Artificial Sequence: Synthetic oligonucleotide
acauaacagauucagacua

SEQ ID NO: 3112203 - RNA, 19 nt, Artificial Sequence
  Description of Artificial Sequence: Synthetic oligonucleotide
agguauauuauaaaguagu

SEQ ID NO: 3112204 - RNA, 19 nt, Artificial Sequence
  Description of Artificial Sequence: Synthetic oligonucleotide
ucugcaaagcaacauuggu

SEQ ID NO: 3112205 - RNA, 19 nt, Artificial Sequence
  Description of Artificial Sequence: Synthetic oligonucleotide
gacuauuaauucugcauac

SEQ ID NO: 3112206 - RNA, 19 nt, Artificial Sequence
  Description of Artificial Sequence: Synthetic oligonucleotide
aaguaguuugagggaaacc

SEQ ID NO: 3112207 - RNA, 19 nt, Artificial Sequence
  Description of Artificial Sequence: Synthetic oligonucleotide
agucagacuacauaacaga

SEQ ID NO: 3112208 - RNA, 19 nt, Artificial Sequence
  Description of Artificial Sequence: Synthetic oligonucleotide
aaauuucaaguuucuaauu

SEQ ID NO: 3112209 - RNA, 19 nt, Artificial Sequence
  Description of Artificial Sequence: Synthetic oligonucleotide
uccuuaacaaaagcaaacc

SEQ ID NO: 3112210 - RNA, 19 nt, Artificial Sequence
  Description of Artificial Sequence: Synthetic oligonucleotide
aaaagcaaaccaaaacaga

SEQ ID NO: 3112211 - RNA, 19 nt, Artificial Sequence
  Description of Artificial Sequence: Synthetic oligonucleotide
uuuuaucugcaaagcaaca

SEQ ID NO: 3112212 - RNA, 19 nt, Artificial Sequence
  Description of Artificial Sequence: Synthetic oligonucleotide
uauuaauucugcauaccua

SEQ ID NO: 3112213 - RNA, 19 nt, Artificial Sequence
  Description of Artificial Sequence: Synthetic oligonucleotide
aagucagacuacauaacag

SEQ ID NO: 3112214 - RNA, 19 nt, Artificial Sequence
  Description of Artificial Sequence: Synthetic oligonucleotide
acagauucagacuauuaau

SEQ ID NO: 3112215 - RNA, 19 nt, Artificial Sequence
  Description of Artificial Sequence: Synthetic oligonucleotide
cuucauauguccuuaacaa

SEQ ID NO: 3112216 - RNA, 19 nt, Artificial Sequence
  Description of Artificial Sequence: Synthetic oligonucleotide
aauucugcauaccuauuua

SEQ ID NO: 3112217 - RNA, 19 nt, Artificial Sequence
  Description of Artificial Sequence: Synthetic oligonucleotide
uguccuuaacaaaagcaaa

SEQ ID NO: 3112218 - RNA, 19 nt, Artificial Sequence
  Description of Artificial Sequence: Synthetic oligonucleotide
agacuauuaauucugcaua

SEQ ID NO: 3112219 - RNA, 19 nt, Artificial Sequence
  Description of Artificial Sequence: Synthetic oligonucleotide
auuucaaguuucuaauuaa

SEQ ID NO: 3112220 - RNA, 19 nt, Artificial Sequence
  Description of Artificial Sequence: Synthetic oligonucleotide
gagguauauuauaaaguag

SEQ ID NO: 3112221 - RNA, 19 nt, Artificial Sequence
  Description of Artificial Sequence: Synthetic oligonucleotide
uugguaaucuuugagguau

SEQ ID NO: 3112222 - RNA, 19 nt, Artificial Sequence
  Description of Artificial Sequence: Synthetic oligonucleotide
aaguuucuaauuaagucau

SEQ ID NO: 3112223 - RNA, 19 nt, Artificial Sequence
  Description of Artificial Sequence: Synthetic oligonucleotide
cuauuuagucuuuuaucug

SEQ ID NO: 3112224 - RNA, 19 nt, Artificial Sequence
  Description of Artificial Sequence: Synthetic oligonucleotide
uuuaagaaauuuugaguuu

SEQ ID NO: 3112225 - RNA, 19 nt, Artificial Sequence
  Description of Artificial Sequence: Synthetic oligonucleotide
auuuaacaaauuucaaguu

SEQ ID NO: 3112226 - RNA, 19 nt, Artificial Sequence
  Description of Artificial Sequence: Synthetic oligonucleotide
uucagacuauuaauucugc

SEQ ID NO: 3112227 - RNA, 19 nt, Artificial Sequence
  Description of Artificial Sequence: Synthetic oligonucleotide
uaauucugcauaccuauuu

SEQ ID NO: 3112228 - RNA, 19 nt, Artificial Sequence
  Description of Artificial Sequence: Synthetic oligonucleotide
uuaucugcaaagcaacauu

SEQ ID NO: 3112229 - RNA, 19 nt, Artificial Sequence
  Description of Artificial Sequence: Synthetic oligonucleotide
uuaagaaauuuugaguuuu

SEQ ID NO: 3112230 - RNA, 19 nt, Artificial Sequence
  Description of Artificial Sequence: Synthetic oligonucleotide
auugaagucagacuacaua

SEQ ID NO: 3112231 - RNA, 19 nt, Artificial Sequence
  Description of Artificial Sequence: Synthetic oligonucleotide
uaacaaauuucaaguuucu

SEQ ID NO: 3112232 - RNA, 19 nt, Artificial Sequence
  Description of Artificial Sequence: Synthetic oligonucleotide
uucugcauaccuauuuagu

SEQ ID NO: 3112233 - RNA, 19 nt, Artificial Sequence
  Description of Artificial Sequence: Synthetic oligonucleotide
agaaauuuugaguuuuauu

SEQ ID NO: 3112234 - RNA, 19 nt, Artificial Sequence
  Description of Artificial Sequence: Synthetic oligonucleotide
agucauucuugcucacagc

SEQ ID NO: 3112235 - RNA, 19 nt, Artificial Sequence
  Description of Artificial Sequence: Synthetic oligonucleotide
aaacauucacuuugacagu

SEQ ID NO: 3112236 - RNA, 19 nt, Artificial Sequence
  Description of Artificial Sequence: Synthetic oligonucleotide
uaccuauuuagucuuuuau

SEQ ID NO: 3112237 - RNA, 19 nt, Artificial Sequence
  Description of Artificial Sequence: Synthetic oligonucleotide
auucagacuauuaauucug

SEQ ID NO: 3112238 - RNA, 19 nt, Artificial Sequence
  Description of Artificial Sequence: Synthetic oligonucleotide
uuauugaagucagacuaca

SEQ ID NO: 3112239 - RNA, 19 nt, Artificial Sequence
  Description of Artificial Sequence: Synthetic oligonucleotide
aaaacuucauauguccuua

SEQ ID NO: 3112240 - RNA, 19 nt, Artificial Sequence
  Description of Artificial Sequence: Synthetic oligonucleotide
ucagacuauuaauucugca

SEQ ID NO: 3112241 - RNA, 19 nt, Artificial Sequence
  Description of Artificial Sequence: Synthetic oligonucleotide
gauucagacuauuaauucu

SEQ ID NO: 3112242 - RNA, 19 nt, Artificial Sequence
  Description of Artificial Sequence: Synthetic oligonucleotide
guuucuaauuaagucauuc

SEQ ID NO: 3112243 - RNA, 19 nt, Artificial Sequence
  Description of Artificial Sequence: Synthetic oligonucleotide
uuucuaaauuuaacaaauu

SEQ ID NO: 3112244 - RNA, 19 nt, Artificial Sequence
  Description of Artificial Sequence: Synthetic oligonucleotide
uaauuaagucauucuugcu

SEQ ID NO: 3112245 - RNA, 19 nt, Artificial Sequence
  Description of Artificial Sequence: Synthetic oligonucleotide
acuuugacaguuaacauuu

SEQ ID NO: 3112246 - RNA, 19 nt, Artificial Sequence
  Description of Artificial Sequence: Synthetic oligonucleotide
auaaaguaguuugagggaa

SEQ ID NO: 3112247 - RNA, 19 nt, Artificial Sequence
  Description of Artificial Sequence: Synthetic oligonucleotide
aaucuuugagguauauuau

SEQ ID NO: 3112248 - RNA, 19 nt, Artificial Sequence
  Description of Artificial Sequence: Synthetic oligonucleotide
aagaaauuuugaguuuuau

SEQ ID NO: 3112249 - RNA, 19 nt, Artificial Sequence
  Description of Artificial Sequence: Synthetic oligonucleotide
ucagacuacauaacagauu

SEQ ID NO: 3112250 - RNA, 19 nt, Artificial Sequence
  Description of Artificial Sequence: Synthetic oligonucleotide
caaagcaacauugguaauc

SEQ ID NO: 3112251 - RNA, 19 nt, Artificial Sequence
  Description of Artificial Sequence: Synthetic oligonucleotide
ugcauaccuauuuagucuu

SEQ ID NO: 3112252 - RNA, 19 nt, Artificial Sequence
  Description of Artificial Sequence: Synthetic oligonucleotide
auauuauaaaguaguuuga

SEQ ID NO: 3112253 - RNA, 19 nt, Artificial Sequence
  Description of Artificial Sequence: Synthetic oligonucleotide
aacauucacuuugacaguu

SEQ ID NO: 3112254 - RNA, 19 nt, Artificial Sequence
  Description of Artificial Sequence: Synthetic oligonucleotide
uaacagauucagacuauua

SEQ ID NO: 3112255 - RNA, 19 nt, Artificial Sequence
  Description of Artificial Sequence: Synthetic oligonucleotide
aucuuugagguauauuaua

SEQ ID NO: 3112256 - RNA, 19 nt, Artificial Sequence
  Description of Artificial Sequence: Synthetic oligonucleotide
ucacuuugacaguuaacau

SEQ ID NO: 3112257 - RNA, 19 nt, Artificial Sequence
  Description of Artificial Sequence: Synthetic oligonucleotide
uauugaagucagacuacau

SEQ ID NO: 3112258 - RNA, 19 nt, Artificial Sequence
  Description of Artificial Sequence: Synthetic oligonucleotide
gucuuuuaucugcaaagca

SEQ ID NO: 3112259 - RNA, 19 nt, Artificial Sequence
  Description of Artificial Sequence: Synthetic oligonucleotide
caaauuucaaguuucuaau

SEQ ID NO: 3112260 - RNA, 19 nt, Artificial Sequence
  Description of Artificial Sequence: Synthetic oligonucleotide
guccuuaacaaaagcaaac

SEQ ID NO: 3112261 - RNA, 19 nt, Artificial Sequence
  Description of Artificial Sequence: Synthetic oligonucleotide
cauugguaaucuuugaggu

SEQ ID NO: 3112262 - RNA, 19 nt, Artificial Sequence
  Description of Artificial Sequence: Synthetic oligonucleotide
auguccuuaacaaaagcaa

SEQ ID NO: 3112263 - RNA, 19 nt, Artificial Sequence
  Description of Artificial Sequence: Synthetic oligonucleotide
aaacuucauauguccuuaa

SEQ ID NO: 3112264 - RNA, 19 nt, Artificial Sequence
  Description of Artificial Sequence: Synthetic oligonucleotide
cuauuaauucugcauaccu

SEQ ID NO: 3112265 - RNA, 19 nt, Artificial Sequence
  Description of Artificial Sequence: Synthetic oligonucleotide
aacaaauuucaaguuucua

SEQ ID NO: 3112266 - RNA, 19 nt, Artificial Sequence
  Description of Artificial Sequence: Synthetic oligonucleotide
aucugcaaagcaacauugg

SEQ ID NO: 3112267 - RNA, 19 nt, Artificial Sequence
  Description of Artificial Sequence: Synthetic oligonucleotide
uuaauucugcauaccuauu

SEQ ID NO: 3112268 - RNA, 19 nt, Artificial Sequence
  Description of Artificial Sequence: Synthetic oligonucleotide
gcaacauugguaaucuuug

SEQ ID NO: 3112269 - RNA, 19 nt, Artificial Sequence
  Description of Artificial Sequence: Synthetic oligonucleotide
auugguaaucuuugaggua

SEQ ID NO: 3112270 - RNA, 19 nt, Artificial Sequence
  Description of Artificial Sequence: Synthetic oligonucleotide
cuuugagguauauuauaaa

SEQ ID NO: 3112271 - RNA, 19 nt, Artificial Sequence
  Description of Artificial Sequence: Synthetic oligonucleotide
uuaagucauucuugcucac

SEQ ID NO: 3112272 - RNA, 19 nt, Artificial Sequence
  Description of Artificial Sequence: Synthetic oligonucleotide
agcaacauugguaaucuuu

SEQ ID NO: 3112273 - RNA, 19 nt, Artificial Sequence
  Description of Artificial Sequence: Synthetic oligonucleotide
acuacauaacagauucaga

SEQ ID NO: 3112274 - RNA, 19 nt, Artificial Sequence
  Description of Artificial Sequence: Synthetic oligonucleotide
auaccuauuuagucuuuua

SEQ ID NO: 3112275 - RNA, 19 nt, Artificial Sequence
  Description of Artificial Sequence: Synthetic oligonucleotide
cugcaaagcaacauuggua

SEQ ID NO: 3112276 - RNA, 19 nt, Artificial Sequence
  Description of Artificial Sequence: Synthetic oligonucleotide
cagacuauuaauucugcau

SEQ ID NO: 3112277 - RNA, 19 nt, Artificial Sequence
  Description of Artificial Sequence: Synthetic oligonucleotide
uucuugcucacagccaaaa

SEQ ID NO: 3112278 - RNA, 19 nt, Artificial Sequence
  Description of Artificial Sequence: Synthetic oligonucleotide
cugcauaccuauuuagucu

SEQ ID NO: 3112279 - RNA, 19 nt, Artificial Sequence
  Description of Artificial Sequence: Synthetic oligonucleotide
auaacagauucagacuauu

SEQ ID NO: 3112280 - RNA, 19 nt, Artificial Sequence
  Description of Artificial Sequence: Synthetic oligonucleotide
guauauuauaaaguaguuu

SEQ ID NO: 3112281 - RNA, 19 nt, Artificial Sequence
  Description of Artificial Sequence: Synthetic oligonucleotide
cagauucagacuauuaauu

SEQ ID NO: 3112282 - RNA, 19 nt, Artificial Sequence
  Description of Artificial Sequence: Synthetic oligonucleotide
caacauugguaaucuuuga

SEQ ID NO: 3112283 - RNA, 19 nt, Artificial Sequence
  Description of Artificial Sequence: Synthetic oligonucleotide
ccuuaacaaaagcaaacca

SEQ ID NO: 3112284 - RNA, 19 nt, Artificial Sequence
  Description of Artificial Sequence: Synthetic oligonucleotide
guuugagggaaaccacaaa

SEQ ID NO: 3112285 - RNA, 19 nt, Artificial Sequence
  Description of Artificial Sequence: Synthetic oligonucleotide
cacuuugacaguuaacauu

SEQ ID NO: 3112286 - RNA, 19 nt, Artificial Sequence
  Description of Artificial Sequence: Synthetic oligonucleotide
ugguaaucuuugagguaua

SEQ ID NO: 3112287 - RNA, 19 nt, Artificial Sequence
  Description of Artificial Sequence: Synthetic oligonucleotide
aagcaacauugguaaucuu

SEQ ID NO: 3112288 - RNA, 19 nt, Artificial Sequence
  Description of Artificial Sequence: Synthetic oligonucleotide
gaguuuuauugaagucaga

SEQ ID NO: 3112289 - RNA, 19 nt, Artificial Sequence
  Description of Artificial Sequence: Synthetic oligonucleotide
agacuacauaacagauuca

SEQ ID NO: 3112290 - RNA, 19 nt, Artificial Sequence
  Description of Artificial Sequence: Synthetic oligonucleotide
gucagacuacauaacagau

SEQ ID NO: 3112291 - RNA, 19 nt, Artificial Sequence
  Description of Artificial Sequence: Synthetic oligonucleotide
cauaacagauucagacuau

SEQ ID NO: 3112292 - RNA, 19 nt, Artificial Sequence
  Description of Artificial Sequence: Synthetic oligonucleotide
gguauauuauaaaguaguu

SEQ ID NO: 3112293 - RNA, 19 nt, Artificial Sequence
  Description of Artificial Sequence: Synthetic oligonucleotide
aguuucuaauuaagucauu

SEQ ID NO: 3112294 - RNA, 19 nt, Artificial Sequence
  Description of Artificial Sequence: Synthetic oligonucleotide
guaaucuuugagguauauu

SEQ ID NO: 3112295 - RNA, 19 nt, Artificial Sequence
  Description of Artificial Sequence: Synthetic oligonucleotide
cauaccuauuuagucuuuu

SEQ ID NO: 3112296 - RNA, 19 nt, Artificial Sequence
  Description of Artificial Sequence: Synthetic oligonucleotide
gguaaucuuugagguauau

SEQ ID NO: 3112297 - RNA, 19 nt, Artificial Sequence
  Description of Artificial Sequence: Synthetic oligonucleotide
cuuugacaguuaacauuuu

SEQ ID NO: 3112298 - RNA, 19 nt, Artificial Sequence
  Description of Artificial Sequence: Synthetic oligonucleotide
gcaaagcaacauugguaau

SEQ ID NO: 3112299 - RNA, 19 nt, Artificial Sequence
  Description of Artificial Sequence: Synthetic oligonucleotide
gcauaccuauuuagucuuu

SEQ ID NO: 3112300 - RNA, 19 nt, Artificial Sequence
  Description of Artificial Sequence: Synthetic oligonucleotide
uauauuaauaucuccaaag

SEQ ID NO: 3112301 - RNA, 19 nt, Artificial Sequence
  Description of Artificial Sequence: Synthetic oligonucleotide
uguuugaugagauaaaccc

SEQ ID NO: 3112302 - RNA, 19 nt, Artificial Sequence
  Description of Artificial Sequence: Synthetic oligonucleotide
uuagguuuggcauugggcg

SEQ ID NO: 3112303 - RNA, 19 nt, Artificial Sequence
  Description of Artificial Sequence: Synthetic oligonucleotide
aaaauuguagugcccaagg

SEQ ID NO: 3112304 - RNA, 19 nt, Artificial Sequence
  Description of Artificial Sequence: Synthetic oligonucleotide
ucuuuuauacuccaaaaca

SEQ ID NO: 3112305 - RNA, 19 nt, Artificial Sequence
  Description of Artificial Sequence: Synthetic oligonucleotide
aauuguagugcccaagguc

SEQ ID NO: 3112306 - RNA, 19 nt, Artificial Sequence
  Description of Artificial Sequence: Synthetic oligonucleotide
ggacauagaacuuugaccg

SEQ ID NO: 3112307 - RNA, 19 nt, Artificial Sequence
  Description of Artificial Sequence: Synthetic oligonucleotide
agaacuuugaccguguugg

SEQ ID NO: 3112308 - RNA, 19 nt, Artificial Sequence
  Description of Artificial Sequence: Synthetic oligonucleotide
uuuauacuccaaaacaucu

SEQ ID NO: 3112309 - RNA, 19 nt, Artificial Sequence
  Description of Artificial Sequence: Synthetic oligonucleotide
acaggaaaauuguagugcc

SEQ ID NO: 3112310 - RNA, 19 nt, Artificial Sequence
  Description of Artificial Sequence: Synthetic oligonucleotide
uuugaugagauaaacccac

SEQ ID NO: 3112311 - RNA, 19 nt, Artificial Sequence
  Description of Artificial Sequence: Synthetic oligonucleotide
uuuauuccaauccauuucu

SEQ ID NO: 3112312 - RNA, 19 nt, Artificial Sequence
  Description of Artificial Sequence: Synthetic oligonucleotide
acuuugaccguguuggagc

SEQ ID NO: 3112313 - RNA, 19 nt, Artificial Sequence
  Description of Artificial Sequence: Synthetic oligonucleotide
augagauaaacccacagga

SEQ ID NO: 3112314 - RNA, 19 nt, Artificial Sequence
  Description of Artificial Sequence: Synthetic oligonucleotide
agacuauauuaauaucucc

SEQ ID NO: 3112315 - RNA, 19 nt, Artificial Sequence
  Description of Artificial Sequence: Synthetic oligonucleotide
acaaucaucauaugcagca

SEQ ID NO: 3112316 - RNA, 19 nt, Artificial Sequence
  Description of Artificial Sequence: Synthetic oligonucleotide
uaaacccacaggaaaauug

SEQ ID NO: 3112317 - RNA, 19 nt, Artificial Sequence
  Description of Artificial Sequence: Synthetic oligonucleotide
aucuucaucauguuguuug

SEQ ID NO: 3112318 - RNA, 19 nt, Artificial Sequence
  Description of Artificial Sequence: Synthetic oligonucleotide
auauuaauaucuccaaagu

SEQ ID NO: 3112319 - RNA, 19 nt, Artificial Sequence
  Description of Artificial Sequence: Synthetic oligonucleotide
uucuuuuauacuccaaaac

SEQ ID NO: 3112320 - RNA, 19 nt, Artificial Sequence
  Description of Artificial Sequence: Synthetic oligonucleotide
ucaucauguuguuugauga

SEQ ID NO: 3112321 - RNA, 19 nt, Artificial Sequence
  Description of Artificial Sequence: Synthetic oligonucleotide
uaugcagcagacuauauua

SEQ ID NO: 3112322 - RNA, 19 nt, Artificial Sequence
  Description of Artificial Sequence: Synthetic oligonucleotide
uuuuauacuccaaaacauc

SEQ ID NO: 3112323 - RNA, 19 nt, Artificial Sequence
  Description of Artificial Sequence: Synthetic oligonucleotide
cauuucuucuuuuauacuc

SEQ ID NO: 3112324 - RNA, 19 nt, Artificial Sequence
  Description of Artificial Sequence: Synthetic oligonucleotide
uuaauaucuccaaaguuua

SEQ ID NO: 3112325 - RNA, 19 nt, Artificial Sequence
  Description of Artificial Sequence: Synthetic oligonucleotide
uauacuccaaaacaucuuc

SEQ ID NO: 3112326 - RNA, 19 nt, Artificial Sequence
  Description of Artificial Sequence: Synthetic oligonucleotide
uuguuugaugagauaaacc

SEQ ID NO: 3112327 - RNA, 19 nt, Artificial Sequence
  Description of Artificial Sequence: Synthetic oligonucleotide
ugaugagauaaacccacag

SEQ ID NO: 3112328 - RNA, 19 nt, Artificial Sequence
  Description of Artificial Sequence: Synthetic oligonucleotide
ucuucuuuuauacuccaaa

SEQ ID NO: 3112329 - RNA, 19 nt, Artificial Sequence
  Description of Artificial Sequence: Synthetic oligonucleotide
uauuaauaucuccaaaguu

SEQ ID NO: 3112330 - RNA, 19 nt, Artificial Sequence
  Description of Artificial Sequence: Synthetic oligonucleotide
ugaauccagaagaauggcc

SEQ ID NO: 3112331 - RNA, 19 nt, Artificial Sequence
  Description of Artificial Sequence: Synthetic oligonucleotide
auuaauaucuccaaaguuu

SEQ ID NO: 3112332 - RNA, 19 nt, Artificial Sequence
  Description of Artificial Sequence: Synthetic oligonucleotide
cuccaaaacaucuucauca

SEQ ID NO: 3112333 - RNA, 19 nt, Artificial Sequence
  Description of Artificial Sequence: Synthetic oligonucleotide
auuccaauccauuucuucu

SEQ ID NO: 3112334 - RNA, 19 nt, Artificial Sequence
  Description of Artificial Sequence: Synthetic oligonucleotide
uucaucauguuguuugaug

SEQ ID NO: 3112335 - RNA, 19 nt, Artificial Sequence
  Description of Artificial Sequence: Synthetic oligonucleotide
gacuauauuaauaucucca

SEQ ID NO: 3112336 - RNA, 19 nt, Artificial Sequence
  Description of Artificial Sequence: Synthetic oligonucleotide
acuauauuaauaucuccaa

SEQ ID NO: 3112337 - RNA, 19 nt, Artificial Sequence
  Description of Artificial Sequence: Synthetic oligonucleotide
aaauuguagugcccaaggu

SEQ ID NO: 3112338 - RNA, 19 nt, Artificial Sequence
  Description of Artificial Sequence: Synthetic oligonucleotide
agaauggccacaaucauca

SEQ ID NO: 3112339 - RNA, 19 nt, Artificial Sequence
  Description of Artificial Sequence: Synthetic oligonucleotide
aucuccaaaguuuauucca

SEQ ID NO: 3112340 - RNA, 19 nt, Artificial Sequence
  Description of Artificial Sequence: Synthetic oligonucleotide
uaucuccaaaguuuauucc

SEQ ID NO: 3112341 - RNA, 19 nt, Artificial Sequence
  Description of Artificial Sequence: Synthetic oligonucleotide
aagaauggccacaaucauc

SEQ ID NO: 3112342 - RNA, 19 nt, Artificial Sequence
  Description of Artificial Sequence: Synthetic oligonucleotide
gagauaaacccacaggaaa

SEQ ID NO: 3112343 - RNA, 19 nt, Artificial Sequence
  Description of Artificial Sequence: Synthetic oligonucleotide
guuuauuccaauccauuuc

SEQ ID NO: 3112344 - RNA, 19 nt, Artificial Sequence
  Description of Artificial Sequence: Synthetic oligonucleotide
auuguagugcccaagguca

SEQ ID NO: 3112345 - RNA, 19 nt, Artificial Sequence
  Description of Artificial Sequence: Synthetic oligonucleotide
agcagacuauauuaauauc

SEQ ID NO: 3112346 - RNA, 19 nt, Artificial Sequence
  Description of Artificial Sequence: Synthetic oligonucleotide
ugagauaaacccacaggaa

SEQ ID NO: 3112347 - RNA, 19 nt, Artificial Sequence
  Description of Artificial Sequence: Synthetic oligonucleotide
cacaggaaaauuguagugc

SEQ ID NO: 3112348 - RNA, 19 nt, Artificial Sequence
  Description of Artificial Sequence: Synthetic oligonucleotide
gaauccagaagaauggcca

SEQ ID NO: 3112349 - RNA, 19 nt, Artificial Sequence
  Description of Artificial Sequence: Synthetic oligonucleotide
cagacuauauuaauaucuc

SEQ ID NO: 3112350 - RNA, 19 nt, Artificial Sequence
  Description of Artificial Sequence: Synthetic oligonucleotide
caaaacaucuucaucaugu

SEQ ID NO: 3112351 - RNA, 19 nt, Artificial Sequence
  Description of Artificial Sequence: Synthetic oligonucleotide
uagaacuuugaccguguug

SEQ ID NO: 3112352 - RNA, 19 nt, Artificial Sequence
  Description of Artificial Sequence: Synthetic oligonucleotide
aguuagguuuggcauuggg

SEQ ID NO: 3112353 - RNA, 19 nt, Artificial Sequence
  Description of Artificial Sequence: Synthetic oligonucleotide
uauuccaauccauuucuuc

SEQ ID NO: 3112354 - RNA, 19 nt, Artificial Sequence
  Description of Artificial Sequence: Synthetic oligonucleotide
ccaaaguuuauuccaaucc

SEQ ID NO: 3112355 - RNA, 19 nt, Artificial Sequence
  Description of Artificial Sequence: Synthetic oligonucleotide
ccaacuuccagccaguuag

SEQ ID NO: 3112356 - RNA, 19 nt, Artificial Sequence
  Description of Artificial Sequence: Synthetic oligonucleotide
aguuuauuccaauccauuu

SEQ ID NO: 3112357 - RNA, 19 nt, Artificial Sequence
  Description of Artificial Sequence: Synthetic oligonucleotide
ucauguuguuugaugagau

SEQ ID NO: 3112358 - RNA, 19 nt, Artificial Sequence
  Description of Artificial Sequence: Synthetic oligonucleotide
ggugaauccagaagaaugg

SEQ ID NO: 3112359 - RNA, 19 nt, Artificial Sequence
  Description of Artificial Sequence: Synthetic oligonucleotide
aucaucauaugcagcagac

SEQ ID NO: 3112360 - RNA, 19 nt, Artificial Sequence
  Description of Artificial Sequence: Synthetic oligonucleotide
cagaagaauggccacaauc

SEQ ID NO: 3112361 - RNA, 19 nt, Artificial Sequence
  Description of Artificial Sequence: Synthetic oligonucleotide
agagccgcgaaaacgagcg

SEQ ID NO: 3112362 - RNA, 19 nt, Artificial Sequence
  Description of Artificial Sequence: Synthetic oligonucleotide
uagguuuggcauugggcgg

SEQ ID NO: 3112363 - RNA, 19 nt, Artificial Sequence
  Description of Artificial Sequence: Synthetic oligonucleotide
uccaaaguuuauuccaauc

SEQ ID NO: 3112364 - RNA, 19 nt, Artificial Sequence
  Description of Artificial Sequence: Synthetic oligonucleotide
uguuguuugaugagauaaa

SEQ ID NO: 3112365 - RNA, 19 nt, Artificial Sequence
  Description of Artificial Sequence: Synthetic oligonucleotide
uuuggcauugggcggcucc

SEQ ID NO: 3112366 - RNA, 19 nt, Artificial Sequence
  Description of Artificial Sequence: Synthetic oligonucleotide
aaacccacaggaaaauugu

SEQ ID NO: 3112367 - RNA, 19 nt, Artificial Sequence
  Description of Artificial Sequence: Synthetic oligonucleotide
aaaguuuauuccaauccau

SEQ ID NO: 3112368 - RNA, 19 nt, Artificial Sequence
  Description of Artificial Sequence: Synthetic oligonucleotide
aacuuugaccguguuggag

SEQ ID NO: 3112369 - RNA, 19 nt, Artificial Sequence
  Description of Artificial Sequence: Synthetic oligonucleotide
uuucuucuuuuauacucca

SEQ ID NO: 3112370 - RNA, 19 nt, Artificial Sequence
  Description of Artificial Sequence: Synthetic oligonucleotide
aauggccacaaucaucaua

SEQ ID NO: 3112371 - RNA, 19 nt, Artificial Sequence
  Description of Artificial Sequence: Synthetic oligonucleotide
ucuccaaaguuuauuccaa

SEQ ID NO: 3112372 - RNA, 19 nt, Artificial Sequence
  Description of Artificial Sequence: Synthetic oligonucleotide
auguuguuugaugagauaa

SEQ ID NO: 3112373 - RNA, 19 nt, Artificial Sequence
  Description of Artificial Sequence: Synthetic oligonucleotide
cuuugaccguguuggagcg

SEQ ID NO: 3112374 - RNA, 19 nt, Artificial Sequence
  Description of Artificial Sequence: Synthetic oligonucleotide
aagagccgcgaaaacgagc

SEQ ID NO: 3112375 - RNA, 19 nt, Artificial Sequence
  Description of Artificial Sequence: Synthetic oligonucleotide
uuauacuccaaaacaucuu

SEQ ID NO: 3112376 - RNA, 19 nt, Artificial Sequence
  Description of Artificial Sequence: Synthetic oligonucleotide
aggaaaauuguagugccca

SEQ ID NO: 3112377 - RNA, 19 nt, Artificial Sequence
  Description of Artificial Sequence: Synthetic oligonucleotide
cacaaucaucauaugcagc

SEQ ID NO: 3112378 - RNA, 19 nt, Artificial Sequence
  Description of Artificial Sequence: Synthetic oligonucleotide
guuagguuuggcauugggc

SEQ ID NO: 3112379 - RNA, 19 nt, Artificial Sequence
  Description of Artificial Sequence: Synthetic oligonucleotide
uggagcgcagcucggaagc

SEQ ID NO: 3112380 - RNA, 19 nt, Artificial Sequence
  Description of Artificial Sequence: Synthetic oligonucleotide
caucauguuguuugaugag

SEQ ID NO: 3112381 - RNA, 19 nt, Artificial Sequence
  Description of Artificial Sequence: Synthetic oligonucleotide
caaggucagcccaacuucc

SEQ ID NO: 3112382 - RNA, 19 nt, Artificial Sequence
  Description of Artificial Sequence: Synthetic oligonucleotide
auggccacaaucaucauau

SEQ ID NO: 3112383 - RNA, 19 nt, Artificial Sequence
  Description of Artificial Sequence: Synthetic oligonucleotide
caucauaugcagcagacua

SEQ ID NO: 3112384 - RNA, 19 nt, Artificial Sequence
  Description of Artificial Sequence: Synthetic oligonucleotide
uacuccaaaacaucuucau

SEQ ID NO: 3112385 - RNA, 19 nt, Artificial Sequence
  Description of Artificial Sequence: Synthetic oligonucleotide
uccaaaacaucuucaucau

SEQ ID NO: 3112386 - RNA, 19 nt, Artificial Sequence
  Description of Artificial Sequence: Synthetic oligonucleotide
uugaugagauaaacccaca

SEQ ID NO: 3112387 - RNA, 19 nt, Artificial Sequence
  Description of Artificial Sequence: Synthetic oligonucleotide
acauagaacuuugaccgug

SEQ ID NO: 3112388 - RNA, 19 nt, Artificial Sequence
  Description of Artificial Sequence: Synthetic oligonucleotide
cuuuuauacuccaaaacau

SEQ ID NO: 3112389 - RNA, 19 nt, Artificial Sequence
  Description of Artificial Sequence: Synthetic oligonucleotide
gucagcccaacuuccagcc

SEQ ID NO: 3112390 - RNA, 19 nt, Artificial Sequence
  Description of Artificial Sequence: Synthetic oligonucleotide
auaugcagcagacuauauu

SEQ ID NO: 3112391 - RNA, 19 nt, Artificial Sequence
  Description of Artificial Sequence: Synthetic oligonucleotide
aucauguuguuugaugaga

SEQ ID NO: 3112392 - RNA, 19 nt, Artificial Sequence
  Description of Artificial Sequence: Synthetic oligonucleotide
agguuuggcauugggcggc

SEQ ID NO: 3112393 - RNA, 19 nt, Artificial Sequence
  Description of Artificial Sequence: Synthetic oligonucleotide
cuucuuuuauacuccaaaa

SEQ ID NO: 3112394 - RNA, 19 nt, Artificial Sequence
  Description of Artificial Sequence: Synthetic oligonucleotide
agccaguuagguuuggcau

SEQ ID NO: 3112395 - RNA, 19 nt, Artificial Sequence
  Description of Artificial Sequence: Synthetic oligonucleotide
uuguagugcccaaggucag

SEQ ID NO: 3112396 - RNA, 19 nt, Artificial Sequence
  Description of Artificial Sequence: Synthetic oligonucleotide
caggaaaauuguagugccc

SEQ ID NO: 3112397 - RNA, 19 nt, Artificial Sequence
  Description of Artificial Sequence: Synthetic oligonucleotide
agauaaacccacaggaaaa

SEQ ID NO: 3112398 - RNA, 19 nt, Artificial Sequence
  Description of Artificial Sequence: Synthetic oligonucleotide
cuauauuaauaucuccaaa

SEQ ID NO: 3112399 - RNA, 19 nt, Artificial Sequence
  Description of Artificial Sequence: Synthetic oligonucleotide
ucauaugcagcagacuaua

SEQ ID NO: 3112400 - RNA, 19 nt, Artificial Sequence
  Description of Artificial Sequence: Synthetic oligonucleotide
aaguuuauuccaauccauu

SEQ ID NO: 3112401 - RNA, 19 nt, Artificial Sequence
  Description of Artificial Sequence: Synthetic oligonucleotide
guuugaugagauaaaccca

SEQ ID NO: 3112402 - RNA, 19 nt, Artificial Sequence
  Description of Artificial Sequence: Synthetic oligonucleotide
ggccacaaucaucauaugc

SEQ ID NO: 3112403 - RNA, 19 nt, Artificial Sequence
  Description of Artificial Sequence: Synthetic oligonucleotide
acccacaggaaaauuguag

SEQ ID NO: 3112404 - RNA, 19 nt, Artificial Sequence
  Description of Artificial Sequence: Synthetic oligonucleotide
ugcagcagacuauauuaau

SEQ ID NO: 3112405 - RNA, 19 nt, Artificial Sequence
  Description of Artificial Sequence: Synthetic oligonucleotide
uuggagcgcagcucggaag

SEQ ID NO: 3112406 - RNA, 19 nt, Artificial Sequence
  Description of Artificial Sequence: Synthetic oligonucleotide
ucccggacauagaacuuug

SEQ ID NO: 3112407 - RNA, 19 nt, Artificial Sequence
  Description of Artificial Sequence: Synthetic oligonucleotide
uuccaauccauuucuucuu

SEQ ID NO: 3112408 - RNA, 19 nt, Artificial Sequence
  Description of Artificial Sequence: Synthetic oligonucleotide
cggacauagaacuuugacc

SEQ ID NO: 3112409 - RNA, 19 nt, Artificial Sequence
  Description of Artificial Sequence: Synthetic oligonucleotide
uugaccguguuggagcgca

SEQ ID NO: 3112410 - RNA, 19 nt, Artificial Sequence
  Description of Artificial Sequence: Synthetic oligonucleotide
uccaauccauuucuucuuu

SEQ ID NO: 3112411 - RNA, 19 nt, Artificial Sequence
  Description of Artificial Sequence: Synthetic oligonucleotide
cagcccaacuuccagccag

SEQ ID NO: 3112412 - RNA, 19 nt, Artificial Sequence
  Description of Artificial Sequence: Synthetic oligonucleotide
ucaucauaugcagcagacu

SEQ ID NO: 3112413 - RNA, 19 nt, Artificial Sequence
  Description of Artificial Sequence: Synthetic oligonucleotide
gugaauccagaagaauggc

SEQ ID NO: 3112414 - RNA, 19 nt, Artificial Sequence
  Description of Artificial Sequence: Synthetic oligonucleotide
ccacaaucaucauaugcag

SEQ ID NO: 3112415 - RNA, 19 nt, Artificial Sequence
  Description of Artificial Sequence: Synthetic oligonucleotide
aggucagcccaacuuccag

SEQ ID NO: 3112416 - RNA, 19 nt, Artificial Sequence
  Description of Artificial Sequence: Synthetic oligonucleotide
uuauuccaauccauuucuu

SEQ ID NO: 3112417 - RNA, 19 nt, Artificial Sequence
  Description of Artificial Sequence: Synthetic oligonucleotide
caaucaucauaugcagcag

SEQ ID NO: 3112418 - RNA, 19 nt, Artificial Sequence
  Description of Artificial Sequence: Synthetic oligonucleotide
cuuccagccaguuagguuu

SEQ ID NO: 3112419 - RNA, 19 nt, Artificial Sequence
  Description of Artificial Sequence: Synthetic oligonucleotide
gccaagagccgcgaaaacg

SEQ ID NO: 3112420 - RNA, 19 nt, Artificial Sequence
  Description of Artificial Sequence: Synthetic oligonucleotide
caagagccgcgaaaacgag

SEQ ID NO: 3112421 - RNA, 19 nt, Artificial Sequence
  Description of Artificial Sequence: Synthetic oligonucleotide
gcagacuauauuaauaucu

SEQ ID NO: 3112422 - RNA, 19 nt, Artificial Sequence
  Description of Artificial Sequence: Synthetic oligonucleotide
uuccagccaguuagguuug

SEQ ID NO: 3112423 - RNA, 19 nt, Artificial Sequence
  Description of Artificial Sequence: Synthetic oligonucleotide
auacuccaaaacaucuuca

SEQ ID NO: 3112424 - RNA, 19 nt, Artificial Sequence
  Description of Artificial Sequence: Synthetic oligonucleotide
gaagaauggccacaaucau

SEQ ID NO: 3112425 - RNA, 19 nt, Artificial Sequence
  Description of Artificial Sequence: Synthetic oligonucleotide
uguagugcccaaggucagc

SEQ ID NO: 3112426 - RNA, 19 nt, Artificial Sequence
  Description of Artificial Sequence: Synthetic oligonucleotide
acuuccagccaguuagguu

SEQ ID NO: 3112427 - RNA, 19 nt, Artificial Sequence
  Description of Artificial Sequence: Synthetic oligonucleotide
accguguuggagcgcagcu

SEQ ID NO: 3112428 - RNA, 19 nt, Artificial Sequence
  Description of Artificial Sequence: Synthetic oligonucleotide
cagcagacuauauuaauau

SEQ ID NO: 3112429 - RNA, 19 nt, Artificial Sequence
  Description of Artificial Sequence: Synthetic oligonucleotide
ccacaggaaaauuguagug

SEQ ID NO: 3112430 - RNA, 19 nt, Artificial Sequence
  Description of Artificial Sequence: Synthetic oligonucleotide
caauccauuucuucuuuua

SEQ ID NO: 3112431 - RNA, 19 nt, Artificial Sequence
  Description of Artificial Sequence: Synthetic oligonucleotide
uuggcauugggcggcuccc

SEQ ID NO: 3112432 - RNA, 19 nt, Artificial Sequence
  Description of Artificial Sequence: Synthetic oligonucleotide
aucauaugcagcagacuau

SEQ ID NO: 3112433 - RNA, 19 nt, Artificial Sequence
  Description of Artificial Sequence: Synthetic oligonucleotide
ggucagcccaacuuccagc

SEQ ID NO: 3112434 - RNA, 19 nt, Artificial Sequence
  Description of Artificial Sequence: Synthetic oligonucleotide
ucagcccaacuuccagcca

SEQ ID NO: 3112435 - RNA, 19 nt, Artificial Sequence
  Description of Artificial Sequence: Synthetic oligonucleotide
uguuggagcgcagcucgga

SEQ ID NO: 3112436 - RNA, 19 nt, Artificial Sequence
  Description of Artificial Sequence: Synthetic oligonucleotide
cagccaguuagguuuggca

SEQ ID NO: 3112437 - RNA, 19 nt, Artificial Sequence
  Description of Artificial Sequence: Synthetic oligonucleotide
gaacuuugaccguguugga

SEQ ID NO: 3112438 - RNA, 19 nt, Artificial Sequence
  Description of Artificial Sequence: Synthetic oligonucleotide
cauugggcggcucccggac

SEQ ID NO: 3112439 - RNA, 19 nt, Artificial Sequence
  Description of Artificial Sequence: Synthetic oligonucleotide
gagcgcagcucggaagccg

SEQ ID NO: 3112440 - RNA, 19 nt, Artificial Sequence
  Description of Artificial Sequence: Synthetic oligonucleotide
auaaacccacaggaaaauu

SEQ ID NO: 3112441 - RNA, 19 nt, Artificial Sequence
  Description of Artificial Sequence: Synthetic oligonucleotide
agccgcgaaaacgagcgca

SEQ ID NO: 3112442 - RNA, 19 nt, Artificial Sequence
  Description of Artificial Sequence: Synthetic oligonucleotide
auagaacuuugaccguguu

SEQ ID NO: 3112443 - RNA, 19 nt, Artificial Sequence
  Description of Artificial Sequence: Synthetic oligonucleotide
ccaagagccgcgaaaacga

SEQ ID NO: 3112444 - RNA, 19 nt, Artificial Sequence
  Description of Artificial Sequence: Synthetic oligonucleotide
aaggucagcccaacuucca

SEQ ID NO: 3112445 - RNA, 19 nt, Artificial Sequence
  Description of Artificial Sequence: Synthetic oligonucleotide
ccggacauagaacuuugac

SEQ ID NO: 3112446 - RNA, 19 nt, Artificial Sequence
  Description of Artificial Sequence: Synthetic oligonucleotide
gacauagaacuuugaccgu

SEQ ID NO: 3112447 - RNA, 19 nt, Artificial Sequence
  Description of Artificial Sequence: Synthetic oligonucleotide
uugggcggcucccggacau

SEQ ID NO: 3112448 - RNA, 19 nt, Artificial Sequence
  Description of Artificial Sequence: Synthetic oligonucleotide
cagcucggaagccgggcgg

SEQ ID NO: 3112449 - RNA, 19 nt, Artificial Sequence
  Description of Artificial Sequence: Synthetic oligonucleotide
agcgcagcucggaagccgg

SEQ ID NO: 3112450 - RNA, 19 nt, Artificial Sequence
  Description of Artificial Sequence: Synthetic oligonucleotide
gcagcucggaagccgggcg

SEQ ID NO: 3112451 - RNA, 19 nt, Artificial Sequence
  Description of Artificial Sequence: Synthetic oligonucleotide
cauagaacuuugaccgugu

SEQ ID NO: 3112452 - RNA, 19 nt, Artificial Sequence
  Description of Artificial Sequence: Synthetic oligonucleotide
agcucggaagccgggcggg

SEQ ID NO: 3112453 - RNA, 19 nt, Artificial Sequence
  Description of Artificial Sequence: Synthetic oligonucleotide
aacccacaggaaaauugua

SEQ ID NO: 3112454 - RNA, 19 nt, Artificial Sequence
  Description of Artificial Sequence: Synthetic oligonucleotide
uggcauugggcggcucccg

SEQ ID NO: 3112455 - RNA, 19 nt, Artificial Sequence
  Description of Artificial Sequence: Synthetic oligonucleotide
cauguuguuugaugagaua

SEQ ID NO: 3112456 - RNA, 19 nt, Artificial Sequence
  Description of Artificial Sequence: Synthetic oligonucleotide
uuugaccguguuggagcgc

SEQ ID NO: 3112457 - RNA, 19 nt, Artificial Sequence
  Description of Artificial Sequence: Synthetic oligonucleotide
gaccguguuggagcgcagc

SEQ ID NO: 3112458 - RNA, 19 nt, Artificial Sequence
  Description of Artificial Sequence: Synthetic oligonucleotide
ccaaaacaucuucaucaug

SEQ ID NO: 3112459 - RNA, 19 nt, Artificial Sequence
  Description of Artificial Sequence: Synthetic oligonucleotide
uggccacaaucaucauaug

SEQ ID NO: 3112460 - RNA, 19 nt, Artificial Sequence
  Description of Artificial Sequence: Synthetic oligonucleotide
augcagcagacuauauuaa

SEQ ID NO: 3112461 - RNA, 19 nt, Artificial Sequence
  Description of Artificial Sequence: Synthetic oligonucleotide
guuggagcgcagcucggaa

SEQ ID NO: 3112462 - RNA, 19 nt, Artificial Sequence
  Description of Artificial Sequence: Synthetic oligonucleotide
ggcauugggcggcucccgg

SEQ ID NO: 3112463 - RNA, 19 nt, Artificial Sequence
  Description of Artificial Sequence: Synthetic oligonucleotide
auugggcggcucccggaca

SEQ ID NO: 3112464 - RNA, 19 nt, Artificial Sequence
  Description of Artificial Sequence: Synthetic oligonucleotide
uccagccaguuagguuugg

SEQ ID NO: 3112465 - RNA, 19 nt, Artificial Sequence
  Description of Artificial Sequence: Synthetic oligonucleotide
ccaguuagguuuggcauug

SEQ ID NO: 3112466 - RNA, 19 nt, Artificial Sequence
  Description of Artificial Sequence: Synthetic oligonucleotide
gcagcagacuauauuaaua

SEQ ID NO: 3112467 - RNA, 19 nt, Artificial Sequence
  Description of Artificial Sequence: Synthetic oligonucleotide
gagccgcgaaaacgagcgc

SEQ ID NO: 3112468 - RNA, 19 nt, Artificial Sequence
  Description of Artificial Sequence: Synthetic oligonucleotide
caguuagguuuggcauugg

SEQ ID NO: 3112469 - RNA, 19 nt, Artificial Sequence
  Description of Artificial Sequence: Synthetic oligonucleotide
guguuggagcgcagcucgg

SEQ ID NO: 3112470 - RNA, 19 nt, Artificial Sequence
  Description of Artificial Sequence: Synthetic oligonucleotide
cccacaggaaaauuguagu

SEQ ID NO: 3112471 - RNA, 19 nt, Artificial Sequence
  Description of Artificial Sequence: Synthetic oligonucleotide
ugcccaaggucagcccaac

SEQ ID NO: 3112472 - RNA, 19 nt, Artificial Sequence
  Description of Artificial Sequence: Synthetic oligonucleotide
gccgcgaaaacgagcgcag

SEQ ID NO: 3112473 - RNA, 19 nt, Artificial Sequence
  Description of Artificial Sequence: Synthetic oligonucleotide
cauaugcagcagacuauau

SEQ ID NO: 3112474 - RNA, 19 nt, Artificial Sequence
  Description of Artificial Sequence: Synthetic oligonucleotide
gcggcucccggacauagaa

SEQ ID NO: 3112475 - RNA, 19 nt, Artificial Sequence
  Description of Artificial Sequence: Synthetic oligonucleotide
ggccaagagccgcgaaaac

SEQ ID NO: 3112476 - RNA, 19 nt, Artificial Sequence
  Description of Artificial Sequence: Synthetic oligonucleotide
ggggccaagagccgcgaaa

SEQ ID NO: 3112477 - RNA, 19 nt, Artificial Sequence
  Description of Artificial Sequence: Synthetic oligonucleotide
agcccaacuuccagccagu

SEQ ID NO: 3112478 - RNA, 19 nt, Artificial Sequence
  Description of Artificial Sequence: Synthetic oligonucleotide
gggccaagagccgcgaaaa

SEQ ID NO: 3112479 - RNA, 19 nt, Artificial Sequence
  Description of Artificial Sequence: Synthetic oligonucleotide
gaauggccacaaucaucau

SEQ ID NO: 3112480 - RNA, 19 nt, Artificial Sequence
  Description of Artificial Sequence: Synthetic oligonucleotide
ccagccaguuagguuuggc

SEQ ID NO: 3112481 - RNA, 19 nt, Artificial Sequence
  Description of Artificial Sequence: Synthetic oligonucleotide
gcauugggcggcucccgga

SEQ ID NO: 3112482 - RNA, 19 nt, Artificial Sequence
  Description of Artificial Sequence: Synthetic oligonucleotide
ggagcgcagcucggaagcc

SEQ ID NO: 3112483 - RNA, 19 nt, Artificial Sequence
  Description of Artificial Sequence: Synthetic oligonucleotide
gggcggcucccggacauag

SEQ ID NO: 3112484 - RNA, 19 nt, Artificial Sequence
  Description of Artificial Sequence: Synthetic oligonucleotide
gccaguuagguuuggcauu

SEQ ID NO: 3112485 - RNA, 19 nt, Artificial Sequence
  Description of Artificial Sequence: Synthetic oligonucleotide
gugcccaaggucagcccaa

SEQ ID NO: 3112486 - RNA, 19 nt, Artificial Sequence
  Description of Artificial Sequence: Synthetic oligonucleotide
cucccggacauagaacuuu

SEQ ID NO: 3112487 - RNA, 19 nt, Artificial Sequence
  Description of Artificial Sequence: Synthetic oligonucleotide
gcucggaagccgggcgggg

SEQ ID NO: 3112488 - RNA, 19 nt, Artificial Sequence
  Description of Artificial Sequence: Synthetic oligonucleotide
guuuggcauugggcggcuc

SEQ ID NO: 3112489 - RNA, 19 nt, Artificial Sequence
  Description of Artificial Sequence: Synthetic oligonucleotide
ccguguuggagcgcagcuc

SEQ ID NO: 3112490 - RNA, 19 nt, Artificial Sequence
  Description of Artificial Sequence: Synthetic oligonucleotide
cccggacauagaacuuuga

SEQ ID NO: 3112491 - RNA, 19 nt, Artificial Sequence
  Description of Artificial Sequence: Synthetic oligonucleotide
cccaacuuccagccaguua

SEQ ID NO: 3112492 - RNA, 19 nt, Artificial Sequence
  Description of Artificial Sequence: Synthetic oligonucleotide
ugggcggcucccggacaua

SEQ ID NO: 3112493 - RNA, 19 nt, Artificial Sequence
  Description of Artificial Sequence: Synthetic oligonucleotide
gcgcagcucggaagccggg

SEQ ID NO: 3112494 - RNA, 19 nt, Artificial Sequence
  Description of Artificial Sequence: Synthetic oligonucleotide
cggcucccggacauagaac

SEQ ID NO: 3112495 - RNA, 19 nt, Artificial Sequence
  Description of Artificial Sequence: Synthetic oligonucleotide
cgcagcucggaagccgggc

SEQ ID NO: 3112496 - RNA, 19 nt, Artificial Sequence
  Description of Artificial Sequence: Synthetic oligonucleotide
ccaauccauuucuucuuuu

SEQ ID NO: 3112497 - RNA, 19 nt, Artificial Sequence
  Description of Artificial Sequence: Synthetic oligonucleotide
gguuuggcauugggcggcu

SEQ ID NO: 3112498 - RNA, 19 nt, Artificial Sequence
  Description of Artificial Sequence: Synthetic oligonucleotide
ggcggcucccggacauaga

SEQ ID NO: 3112499 - RNA, 19 nt, Artificial Sequence
  Description of Artificial Sequence: Synthetic oligonucleotide
gcccaaggucagcccaacu

SEQ ID NO: 3112500 - RNA, 19 nt, Artificial Sequence
  Description of Artificial Sequence: Synthetic oligonucleotide
gcccaacuuccagccaguu

SEQ ID NO: 3112501 - RNA, 19 nt, Artificial Sequence
  Description of Artificial Sequence: Synthetic oligonucleotide
aagaaagauaccaagaagc

SEQ ID NO: 3112502 - RNA, 19 nt, Artificial Sequence
  Description of Artificial Sequence: Synthetic oligonucleotide
uauuucaaaagaaagauac

SEQ ID NO: 3112503 - RNA, 19 nt, Artificial Sequence
  Description of Artificial Sequence: Synthetic oligonucleotide
uuaaaaucagcaaagcugc

SEQ ID NO: 3112504 - RNA, 19 nt, Artificial Sequence
  Description of Artificial Sequence: Synthetic oligonucleotide
aaagccaaaagucacaagu

SEQ ID NO: 3112505 - RNA, 19 nt, Artificial Sequence
  Description of Artificial Sequence: Synthetic oligonucleotide
uuuuauuucaaaagaaaga

SEQ ID NO: 3112506 - RNA, 19 nt, Artificial Sequence
  Description of Artificial Sequence: Synthetic oligonucleotide
aaagucacaaguccaacuc

SEQ ID NO: 3112507 - RNA, 19 nt, Artificial Sequence
  Description of Artificial Sequence: Synthetic oligonucleotide
aaagccauuagugcaaacc

SEQ ID NO: 3112508 - RNA, 19 nt, Artificial Sequence
  Description of Artificial Sequence: Synthetic oligonucleotide
ugugcuuuuauuucaaaag

SEQ ID NO: 3112509 - RNA, 19 nt, Artificial Sequence
  Description of Artificial Sequence: Synthetic oligonucleotide
aaagcugcaaaguaggaga

SEQ ID NO: 3112510 - RNA, 19 nt, Artificial Sequence
  Description of Artificial Sequence: Synthetic oligonucleotide
aaaagaaagauaccaagaa

SEQ ID NO: 3112511 - RNA, 19 nt, Artificial Sequence
  Description of Artificial Sequence: Synthetic oligonucleotide
gauaccaagaagcagaaga

SEQ ID NO: 3112512 - RNA, 19 nt, Artificial Sequence
  Description of Artificial Sequence: Synthetic oligonucleotide
agaagcagaagaaugaagc

SEQ ID NO: 3112513 - RNA, 19 nt, Artificial Sequence
  Description of Artificial Sequence: Synthetic oligonucleotide
augacaaagccauuagugc

SEQ ID NO: 3112514 - RNA, 19 nt, Artificial Sequence
  Description of Artificial Sequence: Synthetic oligonucleotide
gaaugaagcaguuaaaauc

SEQ ID NO: 3112515 - RNA, 19 nt, Artificial Sequence
  Description of Artificial Sequence: Synthetic oligonucleotide
aaugaagcaguuaaaauca

SEQ ID NO: 3112516 - RNA, 19 nt, Artificial Sequence
  Description of Artificial Sequence: Synthetic oligonucleotide
uuucaaaagaaagauacca

SEQ ID NO: 3112517 - RNA, 19 nt, Artificial Sequence
  Description of Artificial Sequence: Synthetic oligonucleotide
uuuauuucaaaagaaagau

SEQ ID NO: 3112518 - RNA, 19 nt, Artificial Sequence
  Description of Artificial Sequence: Synthetic oligonucleotide
aacccugggguccaaaggc

SEQ ID NO: 3112519 - RNA, 19 nt, Artificial Sequence
  Description of Artificial Sequence: Synthetic oligonucleotide
aaagauaccaagaagcaga

SEQ ID NO: 3112520 - RNA, 19 nt, Artificial Sequence
  Description of Artificial Sequence: Synthetic oligonucleotide
aagucacaaguccaacucc

SEQ ID NO: 3112521 - RNA, 19 nt, Artificial Sequence
  Description of Artificial Sequence: Synthetic oligonucleotide
agaagaaugaagcaguuaa

SEQ ID NO: 3112522 - RNA, 19 nt, Artificial Sequence
  Description of Artificial Sequence: Synthetic oligonucleotide
agccaaaagucacaagucc

SEQ ID NO: 3112523 - RNA, 19 nt, Artificial Sequence
  Description of Artificial Sequence: Synthetic oligonucleotide
gaugacaaagccauuagug

SEQ ID NO: 3112524 - RNA, 19 nt, Artificial Sequence
  Description of Artificial Sequence: Synthetic oligonucleotide
auuagugcaaacccugggg

SEQ ID NO: 3112525 - RNA, 19 nt, Artificial Sequence
  Description of Artificial Sequence: Synthetic oligonucleotide
ugacccgucagcaaugggg

SEQ ID NO: 3112526 - RNA, 19 nt, Artificial Sequence
  Description of Artificial Sequence: Synthetic oligonucleotide
ucugauuggaugacaaagc

SEQ ID NO: 3112527 - RNA, 19 nt, Artificial Sequence
  Description of Artificial Sequence: Synthetic oligonucleotide
aaaagucacaaguccaacu

SEQ ID NO: 3112528 - RNA, 19 nt, Artificial Sequence
  Description of Artificial Sequence: Synthetic oligonucleotide
cuagcuuugcacauucugg

SEQ ID NO: 3112529 - RNA, 19 nt, Artificial Sequence
  Description of Artificial Sequence: Synthetic oligonucleotide
uaggagaggaagccgaagg

SEQ ID NO: 3112530 - RNA, 19 nt, Artificial Sequence
  Description of Artificial Sequence: Synthetic oligonucleotide
aggucaugcacauacaugu

SEQ ID NO: 3112531 - RNA, 19 nt, Artificial Sequence
  Description of Artificial Sequence: Synthetic oligonucleotide
aguuaaaaucagcaaagcu

SEQ ID NO: 3112532 - RNA, 19 nt, Artificial Sequence
  Description of Artificial Sequence: Synthetic oligonucleotide
ugacaaagccauuagugca

SEQ ID NO: 3112533 - RNA, 19 nt, Artificial Sequence
  Description of Artificial Sequence: Synthetic oligonucleotide
uucaaaagaaagauaccaa

SEQ ID NO: 3112534 - RNA, 19 nt, Artificial Sequence
  Description of Artificial Sequence: Synthetic oligonucleotide
aagcagaagaaugaagcag

SEQ ID NO: 3112535 - RNA, 19 nt, Artificial Sequence
  Description of Artificial Sequence: Synthetic oligonucleotide
agcaguuaaaaucagcaaa

SEQ ID NO: 3112536 - RNA, 19 nt, Artificial Sequence
  Description of Artificial Sequence: Synthetic oligonucleotide
ugcaaaguaggagaggaag

SEQ ID NO: 3112537 - RNA, 19 nt, Artificial Sequence
  Description of Artificial Sequence: Synthetic oligonucleotide
aaucagcaaagcugcaaag

SEQ ID NO: 3112538 - RNA, 19 nt, Artificial Sequence
  Description of Artificial Sequence: Synthetic oligonucleotide
gaagcaguuaaaaucagca

SEQ ID NO: 3112539 - RNA, 19 nt, Artificial Sequence
  Description of Artificial Sequence: Synthetic oligonucleotide
auuucaaaagaaagauacc

SEQ ID NO: 3112540 - RNA, 19 nt, Artificial Sequence
  Description of Artificial Sequence: Synthetic oligonucleotide
ucagcaauggggcucggcc

SEQ ID NO: 3112541 - RNA, 19 nt, Artificial Sequence
  Description of Artificial Sequence: Synthetic oligonucleotide
ucaugcacauacauguuac

SEQ ID NO: 3112542 - RNA, 19 nt, Artificial Sequence
  Description of Artificial Sequence: Synthetic oligonucleotide
aagaaugaagcaguuaaaa

SEQ ID NO: 3112543 - RNA, 19 nt, Artificial Sequence
  Description of Artificial Sequence: Synthetic oligonucleotide
aucugauuggaugacaaag

SEQ ID NO: 3112544 - RNA, 19 nt, Artificial Sequence
  Description of Artificial Sequence: Synthetic oligonucleotide
agacagaucugauuggaug

SEQ ID NO: 3112545 - RNA, 19 nt, Artificial Sequence
  Description of Artificial Sequence: Synthetic oligonucleotide
uuagugcaaacccuggggu

SEQ ID NO: 3112546 - RNA, 19 nt, Artificial Sequence
  Description of Artificial Sequence: Synthetic oligonucleotide
cugauuggaugacaaagcc

SEQ ID NO: 3112547 - RNA, 19 nt, Artificial Sequence
  Description of Artificial Sequence: Synthetic oligonucleotide
ugauuggaugacaaagcca

SEQ ID NO: 3112548 - RNA, 19 nt, Artificial Sequence
  Description of Artificial Sequence: Synthetic oligonucleotide
uuauuucaaaagaaagaua

SEQ ID NO: 3112549 - RNA, 19 nt, Artificial Sequence
  Description of Artificial Sequence: Synthetic oligonucleotide
gaaagauaccaagaagcag

SEQ ID NO: 3112550 - RNA, 19 nt, Artificial Sequence
  Description of Artificial Sequence: Synthetic oligonucleotide
cuuugcacauucuggacag

SEQ ID NO: 3112551 - RNA, 19 nt, Artificial Sequence
  Description of Artificial Sequence: Synthetic oligonucleotide
caaaagaaagauaccaaga

SEQ ID NO: 3112552 - RNA, 19 nt, Artificial Sequence
  Description of Artificial Sequence: Synthetic oligonucleotide
aagccaaaagucacaaguc

SEQ ID NO: 3112553 - RNA, 19 nt, Artificial Sequence
  Description of Artificial Sequence: Synthetic oligonucleotide
uggaugacaaagccauuag

SEQ ID NO: 3112554 - RNA, 19 nt, Artificial Sequence
  Description of Artificial Sequence: Synthetic oligonucleotide
agaaugaagcaguuaaaau

SEQ ID NO: 3112555 - RNA, 19 nt, Artificial Sequence
  Description of Artificial Sequence: Synthetic oligonucleotide
gacagaucugauuggauga

SEQ ID NO: 3112556 - RNA, 19 nt, Artificial Sequence
  Description of Artificial Sequence: Synthetic oligonucleotide
ucagcaaagcugcaaagua

SEQ ID NO: 3112557 - RNA, 19 nt, Artificial Sequence
  Description of Artificial Sequence: Synthetic oligonucleotide
aacuccggcagccuguuga

SEQ ID NO: 3112558 - RNA, 19 nt, Artificial Sequence
  Description of Artificial Sequence: Synthetic oligonucleotide
acaaguccaacuccggcag

SEQ ID NO: 3112559 - RNA, 19 nt, Artificial Sequence
  Description of Artificial Sequence: Synthetic oligonucleotide
agcaaagcugcaaaguagg

SEQ ID NO: 3112560 - RNA, 19 nt, Artificial Sequence
  Description of Artificial Sequence: Synthetic oligonucleotide
ugaguccuagcuuugcaca

SEQ ID NO: 3112561 - RNA, 19 nt, Artificial Sequence
  Description of Artificial Sequence: Synthetic oligonucleotide
uucuggacaggucaugcac

SEQ ID NO: 3112562 - RNA, 19 nt, Artificial Sequence
  Description of Artificial Sequence: Synthetic oligonucleotide
gaagcagaagaaugaagca

SEQ ID NO: 3112563 - RNA, 19 nt, Artificial Sequence
  Description of Artificial Sequence: Synthetic oligonucleotide
aagcaguuaaaaucagcaa

SEQ ID NO: 3112564 - RNA, 19 nt, Artificial Sequence
  Description of Artificial Sequence: Synthetic oligonucleotide
ucugcugaguccuagcuuu

SEQ ID NO: 3112565 - RNA, 19 nt, Artificial Sequence
  Description of Artificial Sequence: Synthetic oligonucleotide
uugugcuuuuauuucaaaa

SEQ ID NO: 3112566 - RNA, 19 nt, Artificial Sequence
  Description of Artificial Sequence: Synthetic oligonucleotide
gaagccgaaggggagacag

SEQ ID NO: 3112567 - RNA, 19 nt, Artificial Sequence
  Description of Artificial Sequence: Synthetic oligonucleotide
ucacaaguccaacuccggc

SEQ ID NO: 3112568 - RNA, 19 nt, Artificial Sequence
  Description of Artificial Sequence: Synthetic oligonucleotide
ggggagacagaucugauug

SEQ ID NO: 3112569 - RNA, 19 nt, Artificial Sequence
  Description of Artificial Sequence: Synthetic oligonucleotide
uuucugcugaguccuagcu

SEQ ID NO: 3112570 - RNA, 19 nt, Artificial Sequence
  Description of Artificial Sequence: Synthetic oligonucleotide
cauuagugcaaacccuggg

SEQ ID NO: 3112571 - RNA, 19 nt, Artificial Sequence
  Description of Artificial Sequence: Synthetic oligonucleotide
aaaaucagcaaagcugcaa

SEQ ID NO: 3112572 - RNA, 19 nt, Artificial Sequence
  Description of Artificial Sequence: Synthetic oligonucleotide
aggcugaaagccaaaaguc

SEQ ID NO: 3112573 - RNA, 19 nt, Artificial Sequence
  Description of Artificial Sequence: Synthetic oligonucleotide
accaagaagcagaagaaug

SEQ ID NO: 3112574 - RNA, 19 nt, Artificial Sequence
  Description of Artificial Sequence: Synthetic oligonucleotide
agcuuugcacauucuggac

SEQ ID NO: 3112575 - RNA, 19 nt, Artificial Sequence
  Description of Artificial Sequence: Synthetic oligonucleotide
uauugugcuuuuauuucaa

SEQ ID NO: 3112576 - RNA, 19 nt, Artificial Sequence
  Description of Artificial Sequence: Synthetic oligonucleotide
ucuggacaggucaugcaca

SEQ ID NO: 3112577 - RNA, 19 nt, Artificial Sequence
  Description of Artificial Sequence: Synthetic oligonucleotide
agucacaaguccaacuccg

SEQ ID NO: 3112578 - RNA, 19 nt, Artificial Sequence
  Description of Artificial Sequence: Synthetic oligonucleotide
agaaagauaccaagaagca

SEQ ID NO: 3112579 - RNA, 19 nt, Artificial Sequence
  Description of Artificial Sequence: Synthetic oligonucleotide
cagcaaagcugcaaaguag

SEQ ID NO: 3112580 - RNA, 19 nt, Artificial Sequence
  Description of Artificial Sequence: Synthetic oligonucleotide
gcaguuaaaaucagcaaag

SEQ ID NO: 3112581 - RNA, 19 nt, Artificial Sequence
  Description of Artificial Sequence: Synthetic oligonucleotide
agccuguugacccgucagc

SEQ ID NO: 3112582 - RNA, 19 nt, Artificial Sequence
  Description of Artificial Sequence: Synthetic oligonucleotide
ugaaagccaaaagucacaa

SEQ ID NO: 3112583 - RNA, 19 nt, Artificial Sequence
  Description of Artificial Sequence: Synthetic oligonucleotide
gguccaaaggcugaaagcc

SEQ ID NO: 3112584 - RNA, 19 nt, Artificial Sequence
  Description of Artificial Sequence: Synthetic oligonucleotide
caaagcugcaaaguaggag

SEQ ID NO: 3112585 - RNA, 19 nt, Artificial Sequence
  Description of Artificial Sequence: Synthetic oligonucleotide
uccggcagccuguugaccc

SEQ ID NO: 3112586 - RNA, 19 nt, Artificial Sequence
  Description of Artificial Sequence: Synthetic oligonucleotide
gauuggaugacaaagccau

SEQ ID NO: 3112587 - RNA, 19 nt, Artificial Sequence
  Description of Artificial Sequence: Synthetic oligonucleotide
gaaagccaaaagucacaag

SEQ ID NO: 3112588 - RNA, 19 nt, Artificial Sequence
  Description of Artificial Sequence: Synthetic oligonucleotide
uaaaaucagcaaagcugca

SEQ ID NO: 3112589 - RNA, 19 nt, Artificial Sequence
  Description of Artificial Sequence: Synthetic oligonucleotide
aaguaggagaggaagccga

SEQ ID NO: 3112590 - RNA, 19 nt, Artificial Sequence
  Description of Artificial Sequence: Synthetic oligonucleotide
ggacaggucaugcacauac

SEQ ID NO: 3112591 - RNA, 19 nt, Artificial Sequence
  Description of Artificial Sequence: Synthetic oligonucleotide
agcagaagaaugaagcagu

SEQ ID NO: 3112592 - RNA, 19 nt, Artificial Sequence
  Description of Artificial Sequence: Synthetic oligonucleotide
uguugacccgucagcaaug

SEQ ID NO: 3112593 - RNA, 19 nt, Artificial Sequence
  Description of Artificial Sequence: Synthetic oligonucleotide
acagaucugauuggaugac

SEQ ID NO: 3112594 - RNA, 19 nt, Artificial Sequence
  Description of Artificial Sequence: Synthetic oligonucleotide
uuggaugacaaagccauua

SEQ ID NO: 3112595 - RNA, 19 nt, Artificial Sequence
  Description of Artificial Sequence: Synthetic oligonucleotide
caguuaaaaucagcaaagc

SEQ ID NO: 3112596 - RNA, 19 nt, Artificial Sequence
  Description of Artificial Sequence: Synthetic oligonucleotide
cauucuggacaggucaugc

SEQ ID NO: 3112597 - RNA, 19 nt, Artificial Sequence
  Description of Artificial Sequence: Synthetic oligonucleotide
acaggucaugcacauacau

SEQ ID NO: 3112598 - RNA, 19 nt, Artificial Sequence
  Description of Artificial Sequence: Synthetic oligonucleotide
aagcugcaaaguaggagag

SEQ ID NO: 3112599 - RNA, 19 nt, Artificial Sequence
  Description of Artificial Sequence: Synthetic oligonucleotide
caggucaugcacauacaug

SEQ ID NO: 3112600 - RNA, 19 nt, Artificial Sequence
  Description of Artificial Sequence: Synthetic oligonucleotide
cugaguccuagcuuugcac

SEQ ID NO: 3112601 - RNA, 19 nt, Artificial Sequence
  Description of Artificial Sequence: Synthetic oligonucleotide
cuuucugcugaguccuagc

SEQ ID NO: 3112602 - RNA, 19 nt, Artificial Sequence
  Description of Artificial Sequence: Synthetic oligonucleotide
gaaggggagacagaucuga

SEQ ID NO: 3112603 - RNA, 19 nt, Artificial Sequence
  Description of Artificial Sequence: Synthetic oligonucleotide
aucagcaaagcugcaaagu

SEQ ID NO: 3112604 - RNA, 19 nt, Artificial Sequence
  Description of Artificial Sequence: Synthetic oligonucleotide
caaacccugggguccaaag

SEQ ID NO: 3112605 - RNA, 19 nt, Artificial Sequence
  Description of Artificial Sequence: Synthetic oligonucleotide
cacaaguccaacuccggca

SEQ ID NO: 3112606 - RNA, 19 nt, Artificial Sequence
  Description of Artificial Sequence: Synthetic oligonucleotide
aagauaccaagaagcagaa

SEQ ID NO: 3112607 - RNA, 19 nt, Artificial Sequence
  Description of Artificial Sequence: Synthetic oligonucleotide
uugcacauucuggacaggu

SEQ ID NO: 3112608 - RNA, 19 nt, Artificial Sequence
  Description of Artificial Sequence: Synthetic oligonucleotide
acuccggcagccuguugac

SEQ ID NO: 3112609 - RNA, 19 nt, Artificial Sequence
  Description of Artificial Sequence: Synthetic oligonucleotide
ugcacauucuggacagguc

SEQ ID NO: 3112610 - RNA, 19 nt, Artificial Sequence
  Description of Artificial Sequence: Synthetic oligonucleotide
aauggggcucggcccuuuc

SEQ ID NO: 3112611 - RNA, 19 nt, Artificial Sequence
  Description of Artificial Sequence: Synthetic oligonucleotide
cugaaagccaaaagucaca

SEQ ID NO: 3112612 - RNA, 19 nt, Artificial Sequence
  Description of Artificial Sequence: Synthetic oligonucleotide
caaaagucacaaguccaac

SEQ ID NO: 3112613 - RNA, 19 nt, Artificial Sequence
  Description of Artificial Sequence: Synthetic oligonucleotide
uggggcucggcccuuucug

SEQ ID NO: 3112614 - RNA, 19 nt, Artificial Sequence
  Description of Artificial Sequence: Synthetic oligonucleotide
uccaacuccggcagccugu

SEQ ID NO: 3112615 - RNA, 19 nt, Artificial Sequence
  Description of Artificial Sequence: Synthetic oligonucleotide
agcaauggggcucggcccu

SEQ ID NO: 3112616 - RNA, 19 nt, Artificial Sequence
  Description of Artificial Sequence: Synthetic oligonucleotide
uugacccgucagcaauggg

SEQ ID NO: 3112617 - RNA, 19 nt, Artificial Sequence
  Description of Artificial Sequence: Synthetic oligonucleotide
uagugcaaacccugggguc

SEQ ID NO: 3112618 - RNA, 19 nt, Artificial Sequence
  Description of Artificial Sequence: Synthetic oligonucleotide
gacaaagccauuagugcaa

SEQ ID NO: 3112619 - RNA, 19 nt, Artificial Sequence
  Description of Artificial Sequence: Synthetic oligonucleotide
cagcaauggggcucggccc

SEQ ID NO: 3112620 - RNA, 19 nt, Artificial Sequence
  Description of Artificial Sequence: Synthetic oligonucleotide
gaagaaugaagcaguuaaa

SEQ ID NO: 3112621 - RNA, 19 nt, Artificial Sequence
  Description of Artificial Sequence: Synthetic oligonucleotide
aggaagccgaaggggagac

SEQ ID NO: 3112622 - RNA, 19 nt, Artificial Sequence
  Description of Artificial Sequence: Synthetic oligonucleotide
uaccaagaagcagaagaau

SEQ ID NO: 3112623 - RNA, 19 nt, Artificial Sequence
  Description of Artificial Sequence: Synthetic oligonucleotide
agaucugauuggaugacaa

SEQ ID NO: 3112624 - RNA, 19 nt, Artificial Sequence
  Description of Artificial Sequence: Synthetic oligonucleotide
gcacauucuggacagguca

SEQ ID NO: 3112625 - RNA, 19 nt, Artificial Sequence
  Description of Artificial Sequence: Synthetic oligonucleotide
guugacccgucagcaaugg

SEQ ID NO: 3112626 - RNA, 19 nt, Artificial Sequence
  Description of Artificial Sequence: Synthetic oligonucleotide
uucugcugaguccuagcuu

SEQ ID NO: 3112627 - RNA, 19 nt, Artificial Sequence
  Description of Artificial Sequence: Synthetic oligonucleotide
gaucugauuggaugacaaa

SEQ ID NO: 3112628 - RNA, 19 nt, Artificial Sequence
  Description of Artificial Sequence: Synthetic oligonucleotide
gucaugcacauacauguua

SEQ ID NO: 3112629 - RNA, 19 nt, Artificial Sequence
  Description of Artificial Sequence: Synthetic oligonucleotide
gcugaaagccaaaagucac

SEQ ID NO: 3112630 - RNA, 19 nt, Artificial Sequence
  Description of Artificial Sequence: Synthetic oligonucleotide
ggguccaaaggcugaaagc

SEQ ID NO: 3112631 - RNA, 19 nt, Artificial Sequence
  Description of Artificial Sequence: Synthetic oligonucleotide
gucacaaguccaacuccgg

SEQ ID NO: 3112632 - RNA, 19 nt, Artificial Sequence
  Description of Artificial Sequence: Synthetic oligonucleotide
uuugcacauucuggacagg

SEQ ID NO: 3112633 - RNA, 19 nt, Artificial Sequence
  Description of Artificial Sequence: Synthetic oligonucleotide
ccaagaagcagaagaauga

SEQ ID NO: 3112634 - RNA, 19 nt, Artificial Sequence
  Description of Artificial Sequence: Synthetic oligonucleotide
augaagcaguuaaaaucag

SEQ ID NO: 3112635 - RNA, 19 nt, Artificial Sequence
  Description of Artificial Sequence: Synthetic oligonucleotide
gggagacagaucugauugg

SEQ ID NO: 3112636 - RNA, 19 nt, Artificial Sequence
  Description of Artificial Sequence: Synthetic oligonucleotide
gggguccaaaggcugaaag

SEQ ID NO: 3112637 - RNA, 19 nt, Artificial Sequence
  Description of Artificial Sequence: Synthetic oligonucleotide
agcugcaaaguaggagagg

SEQ ID NO: 3112638 - RNA, 19 nt, Artificial Sequence
  Description of Artificial Sequence: Synthetic oligonucleotide
ccuagcuuugcacauucug

SEQ ID NO: 3112639 - RNA, 19 nt, Artificial Sequence
  Description of Artificial Sequence: Synthetic oligonucleotide
gcugcaaaguaggagagga

SEQ ID NO: 3112640 - RNA, 19 nt, Artificial Sequence
  Description of Artificial Sequence: Synthetic oligonucleotide
guccuagcuuugcacauuc

SEQ ID NO: 3112641 - RNA, 19 nt, Artificial Sequence
  Description of Artificial Sequence: Synthetic oligonucleotide
ccauuagugcaaacccugg

SEQ ID NO: 3112642 - RNA, 19 nt, Artificial Sequence
  Description of Artificial Sequence: Synthetic oligonucleotide
guaggagaggaagccgaag

SEQ ID NO: 3112643 - RNA, 19 nt, Artificial Sequence
  Description of Artificial Sequence: Synthetic oligonucleotide
gccauuagugcaaacccug

SEQ ID NO: 3112644 - RNA, 19 nt, Artificial Sequence
  Description of Artificial Sequence: Synthetic oligonucleotide
caugcacauacauguuaca

SEQ ID NO: 3112645 - RNA, 19 nt, Artificial Sequence
  Description of Artificial Sequence: Synthetic oligonucleotide
agccauuagugcaaacccu

SEQ ID NO: 3112646 - RNA, 19 nt, Artificial Sequence
  Description of Artificial Sequence: Synthetic oligonucleotide
agauaccaagaagcagaag

SEQ ID NO: 3112647 - RNA, 19 nt, Artificial Sequence
  Description of Artificial Sequence: Synthetic oligonucleotide
acauucuggacaggucaug

SEQ ID NO: 3112648 - RNA, 19 nt, Artificial Sequence
  Description of Artificial Sequence: Synthetic oligonucleotide
aggggagacagaucugauu

SEQ ID NO: 3112649 - RNA, 19 nt, Artificial Sequence
  Description of Artificial Sequence: Synthetic oligonucleotide
caaagccauuagugcaaac

SEQ ID NO: 3112650 - RNA, 19 nt, Artificial Sequence
  Description of Artificial Sequence: Synthetic oligonucleotide
ggcugaaagccaaaaguca

SEQ ID NO: 3112651 - RNA, 19 nt, Artificial Sequence
  Description of Artificial Sequence: Synthetic oligonucleotide
uccuagcuuugcacauucu

SEQ ID NO: 3112652 - RNA, 19 nt, Artificial Sequence
  Description of Artificial Sequence: Synthetic oligonucleotide
agccgaaggggagacagau

SEQ ID NO: 3112653 - RNA, 19 nt, Artificial Sequence
  Description of Artificial Sequence: Synthetic oligonucleotide
ggcccuuucugcugagucc

SEQ ID NO: 3112654 - RNA, 19 nt, Artificial Sequence
  Description of Artificial Sequence: Synthetic oligonucleotide
caaguccaacuccggcagc

SEQ ID NO: 3112655 - RNA, 19 nt, Artificial Sequence
  Description of Artificial Sequence: Synthetic oligonucleotide
guccaacuccggcagccug

SEQ ID NO: 3112656 - RNA, 19 nt, Artificial Sequence
  Description of Artificial Sequence: Synthetic oligonucleotide
gaggaagccgaaggggaga

SEQ ID NO: 3112657 - RNA, 19 nt, Artificial Sequence
  Description of Artificial Sequence: Synthetic oligonucleotide
ggagacagaucugauugga

SEQ ID NO: 3112658 - RNA, 19 nt, Artificial Sequence
  Description of Artificial Sequence: Synthetic oligonucleotide
acaaagccauuagugcaaa

SEQ ID NO: 3112659 - RNA, 19 nt, Artificial Sequence
  Description of Artificial Sequence: Synthetic oligonucleotide
aaggggagacagaucugau

SEQ ID NO: 3112660 - RNA, 19 nt, Artificial Sequence
  Description of Artificial Sequence: Synthetic oligonucleotide
caaaggcugaaagccaaaa

SEQ ID NO: 3112661 - RNA, 19 nt, Artificial Sequence
  Description of Artificial Sequence: Synthetic oligonucleotide
gaguccuagcuuugcacau

SEQ ID NO: 3112662 - RNA, 19 nt, Artificial Sequence
  Description of Artificial Sequence: Synthetic oligonucleotide
aguaggagaggaagccgaa

SEQ ID NO: 3112663 - RNA, 19 nt, Artificial Sequence
  Description of Artificial Sequence: Synthetic oligonucleotide
auggggcucggcccuuucu

SEQ ID NO: 3112664 - RNA, 19 nt, Artificial Sequence
  Description of Artificial Sequence: Synthetic oligonucleotide
cagaucugauuggaugaca

SEQ ID NO: 3112665 - RNA, 19 nt, Artificial Sequence
  Description of Artificial Sequence: Synthetic oligonucleotide
ccgaaggggagacagaucu

SEQ ID NO: 3112666 - RNA, 19 nt, Artificial Sequence
  Description of Artificial Sequence: Synthetic oligonucleotide
gcugaguccuagcuuugca

SEQ ID NO: 3112667 - RNA, 19 nt, Artificial Sequence
  Description of Artificial Sequence: Synthetic oligonucleotide
cugcaaaguaggagaggaa

SEQ ID NO: 3112668 - RNA, 19 nt, Artificial Sequence
  Description of Artificial Sequence: Synthetic oligonucleotide
aagccgaaggggagacaga

SEQ ID NO: 3112669 - RNA, 19 nt, Artificial Sequence
  Description of Artificial Sequence: Synthetic oligonucleotide
cuguugacccgucagcaau

SEQ ID NO: 3112670 - RNA, 19 nt, Artificial Sequence
  Description of Artificial Sequence: Synthetic oligonucleotide
gucagcaauggggcucggc

SEQ ID NO: 3112671 - RNA, 19 nt, Artificial Sequence
  Description of Artificial Sequence: Synthetic oligonucleotide
acccgucagcaauggggcu

SEQ ID NO: 3112672 - RNA, 19 nt, Artificial Sequence
  Description of Artificial Sequence: Synthetic oligonucleotide
aguccuagcuuugcacauu

SEQ ID NO: 3112673 - RNA, 19 nt, Artificial Sequence
  Description of Artificial Sequence: Synthetic oligonucleotide
cagaagaaugaagcaguua

SEQ ID NO: 3112674 - RNA, 19 nt, Artificial Sequence
  Description of Artificial Sequence: Synthetic oligonucleotide
ggggcucggcccuuucugc

SEQ ID NO: 3112675 - RNA, 19 nt, Artificial Sequence
  Description of Artificial Sequence: Synthetic oligonucleotide
acccugggguccaaaggcu

SEQ ID NO: 3112676 - RNA, 19 nt, Artificial Sequence
  Description of Artificial Sequence: Synthetic oligonucleotide
gagacagaucugauuggau

SEQ ID NO: 3112677 - RNA, 19 nt, Artificial Sequence
  Description of Artificial Sequence: Synthetic oligonucleotide
auuggaugacaaagccauu

SEQ ID NO: 3112678 - RNA, 19 nt, Artificial Sequence
  Description of Artificial Sequence: Synthetic oligonucleotide
ugggguccaaaggcugaaa

SEQ ID NO: 3112679 - RNA, 19 nt, Artificial Sequence
  Description of Artificial Sequence: Synthetic oligonucleotide
cacauucuggacaggucau

SEQ ID NO: 3112680 - RNA, 19 nt, Artificial Sequence
  Description of Artificial Sequence: Synthetic oligonucleotide
ggcucggcccuuucugcug

SEQ ID NO: 3112681 - RNA, 19 nt, Artificial Sequence
  Description of Artificial Sequence: Synthetic oligonucleotide
ccuuucugcugaguccuag

SEQ ID NO: 3112682 - RNA, 19 nt, Artificial Sequence
  Description of Artificial Sequence: Synthetic oligonucleotide
gccuguugacccgucagca

SEQ ID NO: 3112683 - RNA, 19 nt, Artificial Sequence
  Description of Artificial Sequence: Synthetic oligonucleotide
gcaaagcugcaaaguagga

SEQ ID NO: 3112684 - RNA, 19 nt, Artificial Sequence
  Description of Artificial Sequence: Synthetic oligonucleotide
ccgucagcaauggggcucg

SEQ ID NO: 3112685 - RNA, 19 nt, Artificial Sequence
  Description of Artificial Sequence: Synthetic oligonucleotide
cucggcccuuucugcugag

SEQ ID NO: 3112686 - RNA, 19 nt, Artificial Sequence
  Description of Artificial Sequence: Synthetic oligonucleotide
uggacaggucaugcacaua

SEQ ID NO: 3112687 - RNA, 19 nt, Artificial Sequence
  Description of Artificial Sequence: Synthetic oligonucleotide
ccggcagccuguugacccg

SEQ ID NO: 3112688 - RNA, 19 nt, Artificial Sequence
  Description of Artificial Sequence: Synthetic oligonucleotide
ucggcccuuucugcugagu

SEQ ID NO: 3112689 - RNA, 19 nt, Artificial Sequence
  Description of Artificial Sequence: Synthetic oligonucleotide
gugcaaacccuggggucca

SEQ ID NO: 3112690 - RNA, 19 nt, Artificial Sequence
  Description of Artificial Sequence: Synthetic oligonucleotide
caacuccggcagccuguug

SEQ ID NO: 3112691 - RNA, 19 nt, Artificial Sequence
  Description of Artificial Sequence: Synthetic oligonucleotide
ccugggguccaaaggcuga

SEQ ID NO: 3112692 - RNA, 19 nt, Artificial Sequence
  Description of Artificial Sequence: Synthetic oligonucleotide
cccgucagcaauggggcuc

SEQ ID NO: 3112693 - RNA, 19 nt, Artificial Sequence
  Description of Artificial Sequence: Synthetic oligonucleotide
gcucggcccuuucugcuga

SEQ ID NO: 3112694 - RNA, 19 nt, Artificial Sequence
  Description of Artificial Sequence: Synthetic oligonucleotide
gcagccuguugacccguca

SEQ ID NO: 3112695 - RNA, 19 nt, Artificial Sequence
  Description of Artificial Sequence: Synthetic oligonucleotide
cgaaggggagacagaucug

SEQ ID NO: 3112696 - RNA, 19 nt, Artificial Sequence
  Description of Artificial Sequence: Synthetic oligonucleotide
ugcaaacccugggguccaa

SEQ ID NO: 3112697 - RNA, 19 nt, Artificial Sequence
  Description of Artificial Sequence: Synthetic oligonucleotide
cugggguccaaaggcugaa

SEQ ID NO: 3112698 - RNA, 19 nt, Artificial Sequence
  Description of Artificial Sequence: Synthetic oligonucleotide
ccuguugacccgucagcaa

SEQ ID NO: 3112699 - RNA, 19 nt, Artificial Sequence
  Description of Artificial Sequence: Synthetic oligonucleotide
cggcccuuucugcugaguc

SEQ ID NO: 3112700 - RNA, 19 nt, Artificial Sequence
  Description of Artificial Sequence: Synthetic oligonucleotide
gcagaagaaugaagcaguu

SEQ ID NO: 3112701 - RNA, 19 nt, Artificial Sequence
  Description of Artificial Sequence: Synthetic oligonucleotide
gccgaaggggagacagauc

SEQ ID NO: 3112702 - RNA, 19 nt, Artificial Sequence
  Description of Artificial Sequence: Synthetic oligonucleotide
ggaagccgaaggggagaca

SEQ ID NO: 3112703 - RNA, 19 nt, Artificial Sequence
  Description of Artificial Sequence: Synthetic oligonucleotide
gggcucggcccuuucugcu

SEQ ID NO: 3112704 - RNA, 19 nt, Artificial Sequence
  Description of Artificial Sequence: Synthetic oligonucleotide
ggucaugcacauacauguu

SEQ ID NO: 3112705 - RNA, 19 nt, Artificial Sequence
  Description of Artificial Sequence: Synthetic oligonucleotide
gcaaacccugggguccaaa

SEQ ID NO: 3112706 - RNA, 19 nt, Artificial Sequence
  Description of Artificial Sequence: Synthetic oligonucleotide
ggcagccuguugacccguc

SEQ ID NO: 3112707 - RNA, 19 nt, Artificial Sequence
  Description of Artificial Sequence: Synthetic oligonucleotide
caauggggcucggcccuuu

SEQ ID NO: 3112708 - RNA, 19 nt, Artificial Sequence
  Description of Artificial Sequence: Synthetic oligonucleotide
cgucagcaauggggcucgg

SEQ ID NO: 3112709 - RNA, 19 nt, Artificial Sequence
  Description of Artificial Sequence: Synthetic oligonucleotide
ccaacuccggcagccuguu

SEQ ID NO: 3112710 - RNA, 19 nt, Artificial Sequence
  Description of Artificial Sequence: Synthetic oligonucleotide
gcaauggggcucggcccuu

SEQ ID NO: 3112711 - RNA, 19 nt, Artificial Sequence
  Description of Artificial Sequence: Synthetic oligonucleotide
cggcagccuguugacccgu

SEQ ID NO: 3112712 - RNA, 19 nt, Artificial Sequence
  Description of Artificial Sequence: Synthetic oligonucleotide
aaccacagccuccagaccc

SEQ ID NO: 3112713 - RNA, 19 nt, Artificial Sequence
  Description of Artificial Sequence: Synthetic oligonucleotide
ugcuacagcauccagagcu

SEQ ID NO: 3112714 - RNA, 19 nt, Artificial Sequence
  Description of Artificial Sequence: Synthetic oligonucleotide
acugcuacagcauccagag

SEQ ID NO: 3112715 - RNA, 19 nt, Artificial Sequence
  Description of Artificial Sequence: Synthetic oligonucleotide
ucaggcagcagccaccacc

SEQ ID NO: 3112716 - RNA, 19 nt, Artificial Sequence
  Description of Artificial Sequence: Synthetic oligonucleotide
gacgaagagaucugcgggg

SEQ ID NO: 3112717 - RNA, 19 nt, Artificial Sequence
  Description of Artificial Sequence: Synthetic oligonucleotide
cagagcuggaaccacagcc

SEQ ID NO: 3112718 - RNA, 19 nt, Artificial Sequence
  Description of Artificial Sequence: Synthetic oligonucleotide
uuccacagcagccacugcu

SEQ ID NO: 3112719 - RNA, 19 nt, Artificial Sequence
  Description of Artificial Sequence: Synthetic oligonucleotide
agccuccagagcuggaacc

SEQ ID NO: 3112720 - RNA, 19 nt, Artificial Sequence
  Description of Artificial Sequence: Synthetic oligonucleotide
uccagagcuggaaccacag

SEQ ID NO: 3112721 - RNA, 19 nt, Artificial Sequence
  Description of Artificial Sequence: Synthetic oligonucleotide
agagcugugacgauggcga

SEQ ID NO: 3112722 - RNA, 19 nt, Artificial Sequence
  Description of Artificial Sequence: Synthetic oligonucleotide
ugugacgauggcgacgaag

SEQ ID NO: 3112723 - RNA, 19 nt, Artificial Sequence
  Description of Artificial Sequence: Synthetic oligonucleotide
acagccuccagaccccagg

SEQ ID NO: 3112724 - RNA, 19 nt, Artificial Sequence
  Description of Artificial Sequence: Synthetic oligonucleotide
ggaaccacagccuccagac

SEQ ID NO: 3112725 - RNA, 19 nt, Artificial Sequence
  Description of Artificial Sequence: Synthetic oligonucleotide
agcauccagagcugugacg

SEQ ID NO: 3112726 - RNA, 19 nt, Artificial Sequence
  Description of Artificial Sequence: Synthetic oligonucleotide
cagagcuggaaccacagca

SEQ ID NO: 3112727 - RNA, 19 nt, Artificial Sequence
  Description of Artificial Sequence: Synthetic oligonucleotide
uggaaccacagccuccaga

SEQ ID NO: 3112728 - RNA, 19 nt, Artificial Sequence
  Description of Artificial Sequence: Synthetic oligonucleotide
gauggcgacgaagagaucu

SEQ ID NO: 3112729 - RNA, 19 nt, Artificial Sequence
  Description of Artificial Sequence: Synthetic oligonucleotide
ugguggcucaggcagcagc

SEQ ID NO: 3112730 - RNA, 19 nt, Artificial Sequence
  Description of Artificial Sequence: Synthetic oligonucleotide
cacuuuggaggacacuuug

SEQ ID NO: 3112731 - RNA, 19 nt, Artificial Sequence
  Description of Artificial Sequence: Synthetic oligonucleotide
gaccccaggcugcagcacg

SEQ ID NO: 3112732 - RNA, 19 nt, Artificial Sequence
  Description of Artificial Sequence: Synthetic oligonucleotide
cacugcuuccacagcagcc

SEQ ID NO: 3112733 - RNA, 19 nt, Artificial Sequence
  Description of Artificial Sequence: Synthetic oligonucleotide
ugacgauggcgacgaagag

SEQ ID NO: 3112734 - RNA, 19 nt, Artificial Sequence
  Description of Artificial Sequence: Synthetic oligonucleotide
uacagcauccagagcugug

SEQ ID NO: 3112735 - RNA, 19 nt, Artificial Sequence
  Description of Artificial Sequence: Synthetic oligonucleotide
acgauggcgacgaagagau

SEQ ID NO: 3112736 - RNA, 19 nt, Artificial Sequence
  Description of Artificial Sequence: Synthetic oligonucleotide
acuuuggaggacacuuugg

SEQ ID NO: 3112737 - RNA, 19 nt, Artificial Sequence
  Description of Artificial Sequence: Synthetic oligonucleotide
gcgacgaagagaucugcgg

SEQ ID NO: 3112738 - RNA, 19 nt, Artificial Sequence
  Description of Artificial Sequence: Synthetic oligonucleotide
acugcuuccacagcagcca

SEQ ID NO: 3112739 - RNA, 19 nt, Artificial Sequence
  Description of Artificial Sequence: Synthetic oligonucleotide
ccugugguggcucaggcag

SEQ ID NO: 3112740 - RNA, 19 nt, Artificial Sequence
  Description of Artificial Sequence: Synthetic oligonucleotide
gugacgauggcgacgaaga

SEQ ID NO: 3112741 - RNA, 19 nt, Artificial Sequence
  Description of Artificial Sequence: Synthetic oligonucleotide
cagagcugugacgauggcg

SEQ ID NO: 3112742 - RNA, 19 nt, Artificial Sequence
  Description of Artificial Sequence: Synthetic oligonucleotide
caccacugcuacagcaucc

SEQ ID NO: 3112743 - RNA, 19 nt, Artificial Sequence
  Description of Artificial Sequence: Synthetic oligonucleotide
acagcauccagagcuguga

SEQ ID NO: 3112744 - RNA, 19 nt, Artificial Sequence
  Description of Artificial Sequence: Synthetic oligonucleotide
gacgauggcgacgaagaga

SEQ ID NO: 3112745 - RNA, 19 nt, Artificial Sequence
  Description of Artificial Sequence: Synthetic oligonucleotide
agagcuggaaccacagccu

SEQ ID NO: 3112746 - RNA, 19 nt, Artificial Sequence
  Description of Artificial Sequence: Synthetic oligonucleotide
cugccugccaccacugcug

SEQ ID NO: 3112747 - RNA, 19 nt, Artificial Sequence
  Description of Artificial Sequence: Synthetic oligonucleotide
agcuggaaccacagccucc

SEQ ID NO: 3112748 - RNA, 19 nt, Artificial Sequence
  Description of Artificial Sequence: Synthetic oligonucleotide
gcagcacgaugacacaggg

SEQ ID NO: 3112749 - RNA, 19 nt, Artificial Sequence
  Description of Artificial Sequence: Synthetic oligonucleotide
cacugcuacagcauccaga

SEQ ID NO: 3112750 - RNA, 19 nt, Artificial Sequence
  Description of Artificial Sequence: Synthetic oligonucleotide
gaaccacagccuccagacc

SEQ ID NO: 3112751 - RNA, 19 nt, Artificial Sequence
  Description of Artificial Sequence: Synthetic oligonucleotide
ugugguggcucaggcagca

SEQ ID NO: 3112752 - RNA, 19 nt, Artificial Sequence
  Description of Artificial Sequence: Synthetic oligonucleotide
cuggaaccacagcagcccc

SEQ ID NO: 3112753 - RNA, 19 nt, Artificial Sequence
  Description of Artificial Sequence: Synthetic oligonucleotide
agcugugacgauggcgacg

SEQ ID NO: 3112754 - RNA, 19 nt, Artificial Sequence
  Description of Artificial Sequence: Synthetic oligonucleotide
accacagccuccagacccc

SEQ ID NO: 3112755 - RNA, 19 nt, Artificial Sequence
  Description of Artificial Sequence: Synthetic oligonucleotide
gacacuuuggaggacacuu

SEQ ID NO: 3112756 - RNA, 19 nt, Artificial Sequence
  Description of Artificial Sequence: Synthetic oligonucleotide
cagcacgaugacacagggg

SEQ ID NO: 3112757 - RNA, 19 nt, Artificial Sequence
  Description of Artificial Sequence: Synthetic oligonucleotide
uggcucaggcagcagccac

SEQ ID NO: 3112758 - RNA, 19 nt, Artificial Sequence
  Description of Artificial Sequence: Synthetic oligonucleotide
auccagagcugugacgaug

SEQ ID NO: 3112759 - RNA, 19 nt, Artificial Sequence
  Description of Artificial Sequence: Synthetic oligonucleotide
gcauccagagcugugacga

SEQ ID NO: 3112760 - RNA, 19 nt, Artificial Sequence
  Description of Artificial Sequence: Synthetic oligonucleotide
accacugcugccacagcag

SEQ ID NO: 3112761 - RNA, 19 nt, Artificial Sequence
  Description of Artificial Sequence: Synthetic oligonucleotide
gcuggaaccacagcagccc

SEQ ID NO: 3112762 - RNA, 19 nt, Artificial Sequence
  Description of Artificial Sequence: Synthetic oligonucleotide
ugcuuccacagcagccacu

SEQ ID NO: 3112763 - RNA, 19 nt, Artificial Sequence
  Description of Artificial Sequence: Synthetic oligonucleotide
cgacgaagagaucugcggg

SEQ ID NO: 3112764 - RNA, 19 nt, Artificial Sequence
  Description of Artificial Sequence: Synthetic oligonucleotide
uggcgacgaagagaucugc

SEQ ID NO: 3112765 - RNA, 19 nt, Artificial Sequence
  Description of Artificial Sequence: Synthetic oligonucleotide
cugugguggcucaggcagc

SEQ ID NO: 3112766 - RNA, 19 nt, Artificial Sequence
  Description of Artificial Sequence: Synthetic oligonucleotide
cagccuccagaccccaggc

SEQ ID NO: 3112767 - RNA, 19 nt, Artificial Sequence
  Description of Artificial Sequence: Synthetic oligonucleotide
ggcgacgaagagaucugcg

SEQ ID NO: 3112768 - RNA, 19 nt, Artificial Sequence
  Description of Artificial Sequence: Synthetic oligonucleotide
caggcugcagcacgaugac

SEQ ID NO: 3112769 - RNA, 19 nt, Artificial Sequence
  Description of Artificial Sequence: Synthetic oligonucleotide
auggcgacgaagagaucug

SEQ ID NO: 3112770 - RNA, 19 nt, Artificial Sequence
  Description of Artificial Sequence: Synthetic oligonucleotide
gguggcucaggcagcagcc

SEQ ID NO: 3112771 - RNA, 19 nt, Artificial Sequence
  Description of Artificial Sequence: Synthetic oligonucleotide
ugcugccacagcagccacu

SEQ ID NO: 3112772 - RNA, 19 nt, Artificial Sequence
  Description of Artificial Sequence: Synthetic oligonucleotide
ccaggcugcagcacgauga

SEQ ID NO: 3112773 - RNA, 19 nt, Artificial Sequence
  Description of Artificial Sequence: Synthetic oligonucleotide
gagcugugacgauggcgac

SEQ ID NO: 3112774 - RNA, 19 nt, Artificial Sequence
  Description of Artificial Sequence: Synthetic oligonucleotide
gcugugacgauggcgacga

SEQ ID NO: 3112775 - RNA, 19 nt, Artificial Sequence
  Description of Artificial Sequence: Synthetic oligonucleotide
cugcuuccacagcagccac

SEQ ID NO: 3112776 - RNA, 19 nt, Artificial Sequence
  Description of Artificial Sequence: Synthetic oligonucleotide
gcugccacagcagccacug

SEQ ID NO: 3112777 - RNA, 19 nt, Artificial Sequence
  Description of Artificial Sequence: Synthetic oligonucleotide
cuccagagcuggaaccaca

SEQ ID NO: 3112778 - RNA, 19 nt, Artificial Sequence
  Description of Artificial Sequence: Synthetic oligonucleotide
cccagagcuggaaccacag

SEQ ID NO: 3112779 - RNA, 19 nt, Artificial Sequence
  Description of Artificial Sequence: Synthetic oligonucleotide
cugcuacagcauccagagc

SEQ ID NO: 3112780 - RNA, 19 nt, Artificial Sequence
  Description of Artificial Sequence: Synthetic oligonucleotide
gcuacagcauccagagcug

SEQ ID NO: 3112781 - RNA, 19 nt, Artificial Sequence
  Description of Artificial Sequence: Synthetic oligonucleotide
cagaccccaggcugcagca

SEQ ID NO: 3112782 - RNA, 19 nt, Artificial Sequence
  Description of Artificial Sequence: Synthetic oligonucleotide
ccuccagaccccaggcugc

SEQ ID NO: 3112783 - RNA, 19 nt, Artificial Sequence
  Description of Artificial Sequence: Synthetic oligonucleotide
ccagaccccaggcugcagc

SEQ ID NO: 3112784 - RNA, 19 nt, Artificial Sequence
  Description of Artificial Sequence: Synthetic oligonucleotide
ugcugccaccacugcuaca

SEQ ID NO: 3112785 - RNA, 19 nt, Artificial Sequence
  Description of Artificial Sequence: Synthetic oligonucleotide
acacuuuggaggacacuuu

SEQ ID NO: 3112786 - RNA, 19 nt, Artificial Sequence
  Description of Artificial Sequence: Synthetic oligonucleotide
cacagccuccagaccccag

SEQ ID NO: 3112787 - RNA, 19 nt, Artificial Sequence
  Description of Artificial Sequence: Synthetic oligonucleotide
uccagaccccaggcugcag

SEQ ID NO: 3112788 - RNA, 19 nt, Artificial Sequence
  Description of Artificial Sequence: Synthetic oligonucleotide
cugcugccacagcagccac

SEQ ID NO: 3112789 - RNA, 19 nt, Artificial Sequence
  Description of Artificial Sequence: Synthetic oligonucleotide
ccacagcagccacugcugc

SEQ ID NO: 3112790 - RNA, 19 nt, Artificial Sequence
  Description of Artificial Sequence: Synthetic oligonucleotide
gcagccacugcugccacca

SEQ ID NO: 3112791 - RNA, 19 nt, Artificial Sequence
  Description of Artificial Sequence: Synthetic oligonucleotide
ggcucaggcagcagccacc

SEQ ID NO: 3112792 - RNA, 19 nt, Artificial Sequence
  Description of Artificial Sequence: Synthetic oligonucleotide
ccaccacugcuacagcauc

SEQ ID NO: 3112793 - RNA, 19 nt, Artificial Sequence
  Description of Artificial Sequence: Synthetic oligonucleotide
gcccugugguggcucaggc

SEQ ID NO: 3112794 - RNA, 19 nt, Artificial Sequence
  Description of Artificial Sequence: Synthetic oligonucleotide
cagcagccacugcugccac

SEQ ID NO: 3112795 - RNA, 19 nt, Artificial Sequence
  Description of Artificial Sequence: Synthetic oligonucleotide
cugccacagcagccacugc

SEQ ID NO: 3112796 - RNA, 19 nt, Artificial Sequence
  Description of Artificial Sequence: Synthetic oligonucleotide
ggcccugugguggcucagg

SEQ ID NO: 3112797 - RNA, 19 nt, Artificial Sequence
  Description of Artificial Sequence: Synthetic oligonucleotide
ccacugcuacagcauccag

SEQ ID NO: 3112798 - RNA, 19 nt, Artificial Sequence
  Description of Artificial Sequence: Synthetic oligonucleotide
guggcucaggcagcagcca

SEQ ID NO: 3112799 - RNA, 19 nt, Artificial Sequence
  Description of Artificial Sequence: Synthetic oligonucleotide
cucaggcagcagccaccac

SEQ ID NO: 3112800 - RNA, 19 nt, Artificial Sequence
  Description of Artificial Sequence: Synthetic oligonucleotide
cuacagcauccagagcugu

SEQ ID NO: 3112801 - RNA, 19 nt, Artificial Sequence
  Description of Artificial Sequence: Synthetic oligonucleotide
cccaggcugcagcacgaug

SEQ ID NO: 3112802 - RNA, 19 nt, Artificial Sequence
  Description of Artificial Sequence: Synthetic oligonucleotide
ccuccagagcuggaaccac

SEQ ID NO: 3112803 - RNA, 19 nt, Artificial Sequence
  Description of Artificial Sequence: Synthetic oligonucleotide
ccccagagcuggaaccaca

SEQ ID NO: 3112804 - RNA, 19 nt, Artificial Sequence
  Description of Artificial Sequence: Synthetic oligonucleotide
cauccagagcugugacgau

SEQ ID NO: 3112805 - RNA, 19 nt, Artificial Sequence
  Description of Artificial Sequence: Synthetic oligonucleotide
gccugccaccacugcugcc

SEQ ID NO: 3112806 - RNA, 19 nt, Artificial Sequence
  Description of Artificial Sequence: Synthetic oligonucleotide
cccugugguggcucaggca

SEQ ID NO: 3112807 - RNA, 19 nt, Artificial Sequence
  Description of Artificial Sequence: Synthetic oligonucleotide
ggggcccugugguggcuca

SEQ ID NO: 3112808 - RNA, 19 nt, Artificial Sequence
  Description of Artificial Sequence: Synthetic oligonucleotide
gccaccacugcuacagcau

SEQ ID NO: 3112809 - RNA, 19 nt, Artificial Sequence
  Description of Artificial Sequence: Synthetic oligonucleotide
ggacacuuuggaggacacu

SEQ ID NO: 3112810 - RNA, 19 nt, Artificial Sequence
  Description of Artificial Sequence: Synthetic oligonucleotide
gggcccugugguggcucag

SEQ ID NO: 3112811 - RNA, 19 nt, Artificial Sequence
  Description of Artificial Sequence: Synthetic oligonucleotide
gccacagcagccacugcuu

SEQ ID NO: 3112812 - RNA, 19 nt, Artificial Sequence
  Description of Artificial Sequence: Synthetic oligonucleotide
cugugacgauggcgacgaa

SEQ ID NO: 3112813 - RNA, 19 nt, Artificial Sequence
  Description of Artificial Sequence: Synthetic oligonucleotide
cgauggcgacgaagagauc

SEQ ID NO: 3112814 - RNA, 19 nt, Artificial Sequence
  Description of Artificial Sequence: Synthetic oligonucleotide
ccccaggcugcagcacgau

SEQ ID NO: 3112815 - RNA, 19 nt, Artificial Sequence
  Description of Artificial Sequence: Synthetic oligonucleotide
uucaccaggauucaaagag

SEQ ID NO: 3112816 - RNA, 19 nt, Artificial Sequence
  Description of Artificial Sequence: Synthetic oligonucleotide
cacaaugucaccacgaugc

SEQ ID NO: 3112817 - RNA, 19 nt, Artificial Sequence
  Description of Artificial Sequence: Synthetic oligonucleotide
aaugacacaaugucaccac

SEQ ID NO: 3112818 - RNA, 19 nt, Artificial Sequence
  Description of Artificial Sequence: Synthetic oligonucleotide
aaggccuugaaguaucuuc

SEQ ID NO: 3112819 - RNA, 19 nt, Artificial Sequence
  Description of Artificial Sequence: Synthetic oligonucleotide
uuaggagacaccaaugaca

SEQ ID NO: 3112820 - RNA, 19 nt, Artificial Sequence
  Description of Artificial Sequence: Synthetic oligonucleotide
uuuacagaaggccuugaag

SEQ ID NO: 3112821 - RNA, 19 nt, Artificial Sequence
  Description of Artificial Sequence: Synthetic oligonucleotide
uuacagaaggccuugaagu

SEQ ID NO: 3112822 - RNA, 19 nt, Artificial Sequence
  Description of Artificial Sequence: Synthetic oligonucleotide
acaccaaugacacaauguc

SEQ ID NO: 3112823 - RNA, 19 nt, Artificial Sequence
  Description of Artificial Sequence: Synthetic oligonucleotide
aagagggcugcaucgacgc

SEQ ID NO: 3112824 - RNA, 19 nt, Artificial Sequence
  Description of Artificial Sequence: Synthetic oligonucleotide
aagaagccuuuacagaagg

SEQ ID NO: 3112825 - RNA, 19 nt, Artificial Sequence
  Description of Artificial Sequence: Synthetic oligonucleotide
uuuuaggagacaccaauga

SEQ ID NO: 3112826 - RNA, 19 nt, Artificial Sequence
  Description of Artificial Sequence: Synthetic oligonucleotide
uuuccagugguucaaaagu

SEQ ID NO: 3112827 - RNA, 19 nt, Artificial Sequence
  Description of Artificial Sequence: Synthetic oligonucleotide
uucaaagagggcugcaucg

SEQ ID NO: 3112828 - RNA, 19 nt, Artificial Sequence
  Description of Artificial Sequence: Synthetic oligonucleotide
gaaagugacugccacaggc

SEQ ID NO: 3112829 - RNA, 19 nt, Artificial Sequence
  Description of Artificial Sequence: Synthetic oligonucleotide
aagaaagugacugccacag

SEQ ID NO: 3112830 - RNA, 19 nt, Artificial Sequence
  Description of Artificial Sequence: Synthetic oligonucleotide
  modified_base (18)..(18): a, c, u, g, unknown or other
uuuaugaucuucuguucng

SEQ ID NO: 3112831 - RNA, 19 nt, Artificial Sequence
  Description of Artificial Sequence: Synthetic oligonucleotide
uugaaguaucuucucagcc

SEQ ID NO: 3112832 - RNA, 19 nt, Artificial Sequence
  Description of Artificial Sequence: Synthetic oligonucleotide
gaaguaucuucucagccag

SEQ ID NO: 3112833 - RNA, 19 nt, Artificial Sequence
  Description of Artificial Sequence: Synthetic oligonucleotide
accacgaugcacuucaaag

SEQ ID NO: 3112834 - RNA, 19 nt, Artificial Sequence
  Description of Artificial Sequence: Synthetic oligonucleotide
aagugacugccacaggcac

SEQ ID NO: 3112835 - RNA, 19 nt, Artificial Sequence
  Description of Artificial Sequence: Synthetic oligonucleotide
uucaaaaguaccacaucug

SEQ ID NO: 3112836 - RNA, 19 nt, Artificial Sequence
  Description of Artificial Sequence: Synthetic oligonucleotide
ugaaguaucuucucagcca

SEQ ID NO: 3112837 - RNA, 19 nt, Artificial Sequence
  Description of Artificial Sequence: Synthetic oligonucleotide
  modified_base (14)..(14): a, c, u, g, unknown or other
ugaucuucuguucngguuu

SEQ ID NO: 3112838 - RNA, 19 nt, Artificial Sequence
  Description of Artificial Sequence: Synthetic oligonucleotide
aaugucaccacgaugcacu

SEQ ID NO: 3112839 - RNA, 19 nt, Artificial Sequence
  Description of Artificial Sequence: Synthetic oligonucleotide
ugcacuucaaaguuccuca

SEQ ID NO: 3112840 - RNA, 19 nt, Artificial Sequence
  Description of Artificial Sequence: Synthetic oligonucleotide
ucaaaguuccucacuuucc

SEQ ID NO: 3112841 - RNA, 19 nt, Artificial Sequence
  Description of Artificial Sequence: Synthetic oligonucleotide
agagcaaucacucucuuua

SEQ ID NO: 3112842 - RNA, 19 nt, Artificial Sequence
  Description of Artificial Sequence: Synthetic oligonucleotide
cacgaagaagccuuuacag

SEQ ID NO: 3112843 - RNA, 19 nt, Artificial Sequence
  Description of Artificial Sequence: Synthetic oligonucleotide
gaagccuuuacagaaggcc

SEQ ID NO: 3112844 - RNA, 19 nt, Artificial Sequence
  Description of Artificial Sequence: Synthetic oligonucleotide
uuuaggagacaccaaugac

SEQ ID NO: 3112845 - RNA, 19 nt, Artificial Sequence
  Description of Artificial Sequence: Synthetic oligonucleotide
auucaaagagggcugcauc

SEQ ID NO: 3112846 - RNA, 19 nt, Artificial Sequence
  Description of Artificial Sequence: Synthetic oligonucleotide
aaguaccacaucugaggac

SEQ ID NO: 3112847 - RNA, 19 nt, Artificial Sequence
  Description of Artificial Sequence: Synthetic oligonucleotide
uucaaaguuccucacuuuc

SEQ ID NO: 3112848 - RNA, 19 nt, Artificial Sequence
  Description of Artificial Sequence: Synthetic oligonucleotide
ucaccaggauucaaagagg

SEQ ID NO: 3112849 - RNA, 19 nt, Artificial Sequence
  Description of Artificial Sequence: Synthetic oligonucleotide
ucaagagcaaucacucucu

SEQ ID NO: 3112850 - RNA, 19 nt, Artificial Sequence
  Description of Artificial Sequence: Synthetic oligonucleotide
agugguucaaaaguaccac

SEQ ID NO: 3112851 - RNA, 19 nt, Artificial Sequence
  Description of Artificial Sequence: Synthetic oligonucleotide
aaaguuccucacuuuccag

SEQ ID NO: 3112852 - RNA, 19 nt, Artificial Sequence
  Description of Artificial Sequence: Synthetic oligonucleotide
aaguuccucacuuuccagu

SEQ ID NO: 3112853 - RNA, 19 nt, Artificial Sequence
  Description of Artificial Sequence: Synthetic oligonucleotide
ucucuuuaugaucuucugu

SEQ ID NO: 3112854 - RNA, 19 nt, Artificial Sequence
  Description of Artificial Sequence: Synthetic oligonucleotide
caaaaguaccacaucugag

SEQ ID NO: 3112855 - RNA, 19 nt, Artificial Sequence
  Description of Artificial Sequence: Synthetic oligonucleotide
cuugaaguaucuucucagc

SEQ ID NO: 3112856 - RNA, 19 nt, Artificial Sequence
  Description of Artificial Sequence: Synthetic oligonucleotide
  modified_base (17)..(17): a, c, u, g, unknown or other
uuaugaucuucuguucngg

SEQ ID NO: 3112857 - RNA, 19 nt, Artificial Sequence
  Description of Artificial Sequence: Synthetic oligonucleotide
cuuuccagugguucaaaag

SEQ ID NO: 3112858 - RNA, 19 nt, Artificial Sequence
  Description of Artificial Sequence: Synthetic oligonucleotide
  modified_base (16)..(16): a, c, u, g, unknown or other
uaugaucuucuguucnggu

SEQ ID NO: 3112859 - RNA, 19 nt, Artificial Sequence
  Description of Artificial Sequence: Synthetic oligonucleotide
caccaggauucaaagaggg

SEQ ID NO: 3112860 - RNA, 19 nt, Artificial Sequence
  Description of Artificial Sequence: Synthetic oligonucleotide
aguaccacaucugaggacu

SEQ ID NO: 3112861 - RNA, 19 nt, Artificial Sequence
  Description of Artificial Sequence: Synthetic oligonucleotide
gauccaagaaagugacugc

SEQ ID NO: 3112862 - RNA, 19 nt, Artificial Sequence
  Description of Artificial Sequence: Synthetic oligonucleotide
ugguucaaaaguaccacau

SEQ ID NO: 3112863 - RNA, 19 nt, Artificial Sequence
  Description of Artificial Sequence: Synthetic oligonucleotide
ugacacaaugucaccacga

SEQ ID NO: 3112864 - RNA, 19 nt, Artificial Sequence
  Description of Artificial Sequence: Synthetic oligonucleotide
aaagagggcugcaucgacg

SEQ ID NO: 3112865 - RNA, 19 nt, Artificial Sequence
  Description of Artificial Sequence: Synthetic oligonucleotide
aucacucucuuuaugaucu

SEQ ID NO: 3112866 - RNA, 19 nt, Artificial Sequence
  Description of Artificial Sequence: Synthetic oligonucleotide
acuucaaaguuccucacuu

SEQ ID NO: 3112867 - RNA, 19 nt, Artificial Sequence
  Description of Artificial Sequence: Synthetic oligonucleotide
augacacaaugucaccacg

SEQ ID NO: 3112868 - RNA, 19 nt, Artificial Sequence
  Description of Artificial Sequence: Synthetic oligonucleotide
guucaaaaguaccacaucu

SEQ ID NO: 3112869 - RNA, 19 nt, Artificial Sequence
  Description of Artificial Sequence: Synthetic oligonucleotide
aguuccucacuuuccagug

SEQ ID NO: 3112870 - RNA, 19 nt, Artificial Sequence
  Description of Artificial Sequence: Synthetic oligonucleotide
uccagugguucaaaaguac

SEQ ID NO: 3112871 - RNA, 19 nt, Artificial Sequence
  Description of Artificial Sequence: Synthetic oligonucleotide
  modified_base (19)..(19): a, c, u, g, unknown or other
cuuuaugaucuucuguucn

SEQ ID NO: 3112872 - RNA, 19 nt, Artificial Sequence
  Description of Artificial Sequence: Synthetic oligonucleotide
ucuuuaugaucuucuguuc

SEQ ID NO: 3112873 - RNA, 19 nt, Artificial Sequence
  Description of Artificial Sequence: Synthetic oligonucleotide
ggcacugccacgaagaagc

SEQ ID NO: 3112874 - RNA, 19 nt, Artificial Sequence
  Description of Artificial Sequence: Synthetic oligonucleotide
acucgugccacgcaggcca

SEQ ID NO: 3112875 - RNA, 19 nt, Artificial Sequence
  Description of Artificial Sequence: Synthetic oligonucleotide
gaggacuggcuucaccagg

SEQ ID NO: 3112876 - RNA, 19 nt, Artificial Sequence
  Description of Artificial Sequence: Synthetic oligonucleotide
aagccuuuacagaaggccu

SEQ ID NO: 3112877 - RNA, 19 nt, Artificial Sequence
  Description of Artificial Sequence: Synthetic oligonucleotide
uuccacucgugccacgcag

SEQ ID NO: 3112878 - RNA, 19 nt, Artificial Sequence
  Description of Artificial Sequence: Synthetic oligonucleotide
gucaccacgaugcacuuca

SEQ ID NO: 3112879 - RNA, 19 nt, Artificial Sequence
  Description of Artificial Sequence: Synthetic oligonucleotide
aucgacgccccuuccacuc

SEQ ID NO: 3112880 - RNA, 19 nt, Artificial Sequence
  Description of Artificial Sequence: Synthetic oligonucleotide
aaagugacugccacaggca

SEQ ID NO: 3112881 - RNA, 19 nt, Artificial Sequence
  Description of Artificial Sequence: Synthetic oligonucleotide
agcaaucacucucuuuaug

SEQ ID NO: 3112882 - RNA, 19 nt, Artificial Sequence
  Description of Artificial Sequence: Synthetic oligonucleotide
uuccagugguucaaaagua

SEQ ID NO: 3112883 - RNA, 19 nt, Artificial Sequence
  Description of Artificial Sequence: Synthetic oligonucleotide
augcacuucaaaguuccuc

SEQ ID NO: 3112884 - RNA, 19 nt, Artificial Sequence
  Description of Artificial Sequence: Synthetic oligonucleotide
uacagaaggccuugaagua

SEQ ID NO: 3112885 - RNA, 19 nt, Artificial Sequence
  Description of Artificial Sequence: Synthetic oligonucleotide
acacaaugucaccacgaug

SEQ ID NO: 3112886 - RNA, 19 nt, Artificial Sequence
  Description of Artificial Sequence: Synthetic oligonucleotide
ugaggacuggcuucaccag

SEQ ID NO: 3112887 - RNA, 19 nt, Artificial Sequence
  Description of Artificial Sequence: Synthetic oligonucleotide
uccacucgugccacgcagg

SEQ ID NO: 3112888 - RNA, 19 nt, Artificial Sequence
  Description of Artificial Sequence: Synthetic oligonucleotide
agaaagugacugccacagg

SEQ ID NO: 3112889 - RNA, 19 nt, Artificial Sequence
  Description of Artificial Sequence: Synthetic oligonucleotide
aaguaucuucucagccagc

SEQ ID NO: 3112890 - RNA, 19 nt, Artificial Sequence
  Description of Artificial Sequence: Synthetic oligonucleotide
cugaggacuggcuucacca

SEQ ID NO: 3112891 - RNA, 19 nt, Artificial Sequence
  Description of Artificial Sequence: Synthetic oligonucleotide
cucucuuuaugaucuucug

SEQ ID NO: 3112892 - RNA, 19 nt, Artificial Sequence
  Description of Artificial Sequence: Synthetic oligonucleotide
ccuucaagagcaaucacuc

SEQ ID NO: 3112893 - RNA, 19 nt, Artificial Sequence
  Description of Artificial Sequence: Synthetic oligonucleotide
caaaguuccucacuuucca

SEQ ID NO: 3112894 - RNA, 19 nt, Artificial Sequence
  Description of Artificial Sequence: Synthetic oligonucleotide
aagagcaaucacucucuuu

SEQ ID NO: 3112895 - RNA, 19 nt, Artificial Sequence
  Description of Artificial Sequence: Synthetic oligonucleotide
ucaaagagggcugcaucga

SEQ ID NO: 3112896 - RNA, 19 nt, Artificial Sequence
  Description of Artificial Sequence: Synthetic oligonucleotide
cagugguucaaaaguacca

SEQ ID NO: 3112897 - RNA, 19 nt, Artificial Sequence
  Description of Artificial Sequence: Synthetic oligonucleotide
cacgcaggccacccgaucc

SEQ ID NO: 3112898 - RNA, 19 nt, Artificial Sequence
  Description of Artificial Sequence: Synthetic oligonucleotide
ugcaucgacgccccuucca

SEQ ID NO: 3112899 - RNA, 19 nt, Artificial Sequence
  Description of Artificial Sequence: Synthetic oligonucleotide
accaggauucaaagagggc

SEQ ID NO: 3112900 - RNA, 19 nt, Artificial Sequence
  Description of Artificial Sequence: Synthetic oligonucleotide
gagggcugcaucgacgccc

SEQ ID NO: 3112901 - RNA, 19 nt, Artificial Sequence
  Description of Artificial Sequence: Synthetic oligonucleotide
cucuuuaugaucuucuguu

SEQ ID NO: 3112902 - RNA, 19 nt, Artificial Sequence
  Description of Artificial Sequence: Synthetic oligonucleotide
gugguucaaaaguaccaca

SEQ ID NO: 3112903 - RNA, 19 nt, Artificial Sequence
  Description of Artificial Sequence: Synthetic oligonucleotide
  modified_base (15)..(15): a, c, u, g, unknown or other
augaucuucuguucngguu

SEQ ID NO: 3112904 - RNA, 19 nt, Artificial Sequence
  Description of Artificial Sequence: Synthetic oligonucleotide
cucacuuuccagugguuca

SEQ ID NO: 3112905 - RNA, 19 nt, Artificial Sequence
  Description of Artificial Sequence: Synthetic oligonucleotide
gugacugccacaggcacug

SEQ ID NO: 3112906 - RNA, 19 nt, Artificial Sequence
  Description of Artificial Sequence: Synthetic oligonucleotide
acucucuuuaugaucuucu

SEQ ID NO: 3112907 - RNA, 19 nt, Artificial Sequence
  Description of Artificial Sequence: Synthetic oligonucleotide
cacccgauccaagaaagug

SEQ ID NO: 3112908 - RNA, 19 nt, Artificial Sequence
  Description of Artificial Sequence: Synthetic oligonucleotide
uaccacaucugaggacugg

SEQ ID NO: 3112909 - RNA, 19 nt, Artificial Sequence
  Description of Artificial Sequence: Synthetic oligonucleotide
acaaugucaccacgaugca

SEQ ID NO: 3112910 - RNA, 19 nt, Artificial Sequence
  Description of Artificial Sequence: Synthetic oligonucleotide
acaggcacugccacgaaga

SEQ ID NO: 3112911 - RNA, 19 nt, Artificial Sequence
  Description of Artificial Sequence: Synthetic oligonucleotide
ccagugguucaaaaguacc

SEQ ID NO: 3112912 - RNA, 19 nt, Artificial Sequence
  Description of Artificial Sequence: Synthetic oligonucleotide
agagggcugcaucgacgcc

SEQ ID NO: 3112913 - RNA, 19 nt, Artificial Sequence
  Description of Artificial Sequence: Synthetic oligonucleotide
caaagagggcugcaucgac

SEQ ID NO: 3112914 - RNA, 19 nt, Artificial Sequence
  Description of Artificial Sequence: Synthetic oligonucleotide
acgaugcacuucaaaguuc

SEQ ID NO: 3112915 - RNA, 19 nt, Artificial Sequence
  Description of Artificial Sequence: Synthetic oligonucleotide
acugccacgaagaagccuu

SEQ ID NO: 3112916 - RNA, 19 nt, Artificial Sequence
  Description of Artificial Sequence: Synthetic oligonucleotide
gacaccaaugacacaaugu

SEQ ID NO: 3112917 - RNA, 19 nt, Artificial Sequence
  Description of Artificial Sequence: Synthetic oligonucleotide
caagaaagugacugccaca

SEQ ID NO: 3112918 - RNA, 19 nt, Artificial Sequence
  Description of Artificial Sequence: Synthetic oligonucleotide
cgaugcacuucaaaguucc

SEQ ID NO: 3112919 - RNA, 19 nt, Artificial Sequence
  Description of Artificial Sequence: Synthetic oligonucleotide
ucgacgccccuuccacucg

SEQ ID NO: 3112920 - RNA, 19 nt, Artificial Sequence
  Description of Artificial Sequence: Synthetic oligonucleotide
ugccacaggcacugccacg

SEQ ID NO: 3112921 - RNA, 19 nt, Artificial Sequence
  Description of Artificial Sequence: Synthetic oligonucleotide
ccaagaaagugacugccac

SEQ ID NO: 3112922 - RNA, 19 nt, Artificial Sequence
  Description of Artificial Sequence: Synthetic oligonucleotide
acagaaggccuugaaguau

SEQ ID NO: 3112923 - RNA, 19 nt, Artificial Sequence
  Description of Artificial Sequence: Synthetic oligonucleotide
acuuuccagugguucaaaa

SEQ ID NO: 3112924 - RNA, 19 nt, Artificial Sequence
  Description of Artificial Sequence: Synthetic oligonucleotide
cgauccaagaaagugacug

SEQ ID NO: 3112925 - RNA, 19 nt, Artificial Sequence
  Description of Artificial Sequence: Synthetic oligonucleotide
gguucaaaaguaccacauc

SEQ ID NO: 3112926 - RNA, 19 nt, Artificial Sequence
  Description of Artificial Sequence: Synthetic oligonucleotide
acgccccuuccacucgugc

SEQ ID NO: 3112927 - RNA, 19 nt, Artificial Sequence
  Description of Artificial Sequence: Synthetic oligonucleotide
acccgauccaagaaaguga

SEQ ID NO: 3112928 - RNA, 19 nt, Artificial Sequence
  Description of Artificial Sequence: Synthetic oligonucleotide
cuucaccaggauucaaaga

SEQ ID NO: 3112929 - RNA, 19 nt, Artificial Sequence
  Description of Artificial Sequence: Synthetic oligonucleotide
ucacuuuccagugguucaa

SEQ ID NO: 3112930 - RNA, 19 nt, Artificial Sequence
  Description of Artificial Sequence: Synthetic oligonucleotide
cccgauccaagaaagugac

SEQ ID NO: 3112931 - RNA, 19 nt, Artificial Sequence
  Description of Artificial Sequence: Synthetic oligonucleotide
caaugucaccacgaugcac

SEQ ID NO: 3112932 - RNA, 19 nt, Artificial Sequence
  Description of Artificial Sequence: Synthetic oligonucleotide
agggcugcaucgacgcccc

SEQ ID NO: 3112933 - RNA, 19 nt, Artificial Sequence
  Description of Artificial Sequence: Synthetic oligonucleotide
cuuuacagaaggccuugaa

SEQ ID NO: 3112934 - RNA, 19 nt, Artificial Sequence
  Description of Artificial Sequence: Synthetic oligonucleotide
gacacaaugucaccacgau

SEQ ID NO: 3112935 - RNA, 19 nt, Artificial Sequence
  Description of Artificial Sequence: Synthetic oligonucleotide
aggacuggcuucaccagga

SEQ ID NO: 3112936 - RNA, 19 nt, Artificial Sequence
  Description of Artificial Sequence: Synthetic oligonucleotide
cacucucuuuaugaucuuc

SEQ ID NO: 3112937 - RNA, 19 nt, Artificial Sequence
  Description of Artificial Sequence: Synthetic oligonucleotide
aggcacugccacgaagaag

SEQ ID NO: 3112938 - RNA, 19 nt, Artificial Sequence
  Description of Artificial Sequence: Synthetic oligonucleotide
gauucaaagagggcugcau

SEQ ID NO: 3112939 - RNA, 19 nt, Artificial Sequence
  Description of Artificial Sequence: Synthetic oligonucleotide
gccacccgauccaagaaag

SEQ ID NO: 3112940 - RNA, 19 nt, Artificial Sequence
  Description of Artificial Sequence: Synthetic oligonucleotide
gccacgaagaagccuuuac

SEQ ID NO: 3112941 - RNA, 19 nt, Artificial Sequence
  Description of Artificial Sequence: Synthetic oligonucleotide
caggccacccgauccaaga

SEQ ID NO: 3112942 - RNA, 19 nt, Artificial Sequence
  Description of Artificial Sequence: Synthetic oligonucleotide
agugacugccacaggcacu

SEQ ID NO: 3112943 - RNA, 19 nt, Artificial Sequence
  Description of Artificial Sequence: Synthetic oligonucleotide
cacgaugcacuucaaaguu

SEQ ID NO: 3112944 - RNA, 19 nt, Artificial Sequence
  Description of Artificial Sequence: Synthetic oligonucleotide
aggagacaccaaugacaca

SEQ ID NO: 3112945 - RNA, 19 nt, Artificial Sequence
  Description of Artificial Sequence: Synthetic oligonucleotide
caaucacucucuuuaugau

SEQ ID NO: 3112946 - RNA, 19 nt, Artificial Sequence
  Description of Artificial Sequence: Synthetic oligonucleotide
gcaucgacgccccuuccac

SEQ ID NO: 3112947 - RNA, 19 nt, Artificial Sequence
  Description of Artificial Sequence: Synthetic oligonucleotide
acgcaggccacccgaucca

SEQ ID NO: 3112948 - RNA, 19 nt, Artificial Sequence
  Description of Artificial Sequence: Synthetic oligonucleotide
cuucaagagcaaucacucu

SEQ ID NO: 3112949 - RNA, 19 nt, Artificial Sequence
  Description of Artificial Sequence: Synthetic oligonucleotide
agaaggccuugaaguaucu

SEQ ID NO: 3112950 - RNA, 19 nt, Artificial Sequence
  Description of Artificial Sequence: Synthetic oligonucleotide
aggccacccgauccaagaa

SEQ ID NO: 3112951 - RNA, 19 nt, Artificial Sequence
  Description of Artificial Sequence: Synthetic oligonucleotide
gcugcaucgacgccccuuc

SEQ ID NO: 3112952 - RNA, 19 nt, Artificial Sequence
  Description of Artificial Sequence: Synthetic oligonucleotide
aucugaggacuggcuucac

SEQ ID NO: 3112953 - RNA, 19 nt, Artificial Sequence
  Description of Artificial Sequence: Synthetic oligonucleotide
ucacucucuuuaugaucuu

SEQ ID NO: 3112954 - RNA, 19 nt, Artificial Sequence
  Description of Artificial Sequence: Synthetic oligonucleotide
agccuuuacagaaggccuu

SEQ ID NO: 3112955 - RNA, 19 nt, Artificial Sequence
  Description of Artificial Sequence: Synthetic oligonucleotide
gagcaaucacucucuuuau

SEQ ID NO: 3112956 - RNA, 19 nt, Artificial Sequence
  Description of Artificial Sequence: Synthetic oligonucleotide
ccacgaagaagccuuuaca

SEQ ID NO: 3112957 - RNA, 19 nt, Artificial Sequence
  Description of Artificial Sequence: Synthetic oligonucleotide
guaccacaucugaggacug

SEQ ID NO: 3112958 - RNA, 19 nt, Artificial Sequence
  Description of Artificial Sequence: Synthetic oligonucleotide
ugucaccacgaugcacuuc

SEQ ID NO: 3112959 - RNA, 19 nt, Artificial Sequence
  Description of Artificial Sequence: Synthetic oligonucleotide
ucaccacgaugcacuucaa

SEQ ID NO: 3112960 - RNA, 19 nt, Artificial Sequence
  Description of Artificial Sequence: Synthetic oligonucleotide
gccuuuacagaaggccuug

SEQ ID NO: 3112961 - RNA, 19 nt, Artificial Sequence
  Description of Artificial Sequence: Synthetic oligonucleotide
cugcaucgacgccccuucc

SEQ ID NO: 3112962 - RNA, 19 nt, Artificial Sequence
  Description of Artificial Sequence: Synthetic oligonucleotide
ggccuugaaguaucuucuc

SEQ ID NO: 3112963 - RNA, 19 nt, Artificial Sequence
  Description of Artificial Sequence: Synthetic oligonucleotide
cacucgugccacgcaggcc

SEQ ID NO: 3112964 - RNA, 19 nt, Artificial Sequence
  Description of Artificial Sequence: Synthetic oligonucleotide
gugccacgcaggccacccg

SEQ ID NO: 3112965 - RNA, 19 nt, Artificial Sequence
  Description of Artificial Sequence: Synthetic oligonucleotide
cuucaaaguuccucacuuu

SEQ ID NO: 3112966 - RNA, 19 nt, Artificial Sequence
  Description of Artificial Sequence: Synthetic oligonucleotide
ggcuucaccaggauucaaa

SEQ ID NO: 3112967 - RNA, 19 nt, Artificial Sequence
  Description of Artificial Sequence: Synthetic oligonucleotide
gccacaggcacugccacga

SEQ ID NO: 3112968 - RNA, 19 nt, Artificial Sequence
  Description of Artificial Sequence: Synthetic oligonucleotide
ccacucgugccacgcaggc

SEQ ID NO: 3112969 - RNA, 19 nt, Artificial Sequence
  Description of Artificial Sequence: Synthetic oligonucleotide
ccuuccacucgugccacgc

SEQ ID NO: 3112970 - RNA, 19 nt, Artificial Sequence
  Description of Artificial Sequence: Synthetic oligonucleotide
cacaucugaggacuggcuu

SEQ ID NO: 3112971 - RNA, 19 nt, Artificial Sequence
  Description of Artificial Sequence: Synthetic oligonucleotide
cuuccacucgugccacgca

SEQ ID NO: 3112972 - RNA, 19 nt, Artificial Sequence
  Description of Artificial Sequence: Synthetic oligonucleotide
gacuggcuucaccaggauu

SEQ ID NO: 3112973 - RNA, 19 nt, Artificial Sequence
  Description of Artificial Sequence: Synthetic oligonucleotide
caccacgaugcacuucaaa

SEQ ID NO: 3112974 - RNA, 19 nt, Artificial Sequence
  Description of Artificial Sequence: Synthetic oligonucleotide
ugccacgaagaagccuuua

SEQ ID NO: 3112975 - RNA, 19 nt, Artificial Sequence
  Description of Artificial Sequence: Synthetic oligonucleotide
cucgugccacgcaggccac

SEQ ID NO: 3112976 - RNA, 19 nt, Artificial Sequence
  Description of Artificial Sequence: Synthetic oligonucleotide
  modified_base (13)..(13): a, c, u, g, unknown or other
gaucuucuguucngguuuu

SEQ ID NO: 3112977 - RNA, 19 nt, Artificial Sequence
  Description of Artificial Sequence: Synthetic oligonucleotide
ccacgaugcacuucaaagu

SEQ ID NO: 3112978 - RNA, 19 nt, Artificial Sequence
  Description of Artificial Sequence: Synthetic oligonucleotide
uggcuucaccaggauucaa

SEQ ID NO: 3112979 - RNA, 19 nt, Artificial Sequence
  Description of Artificial Sequence: Synthetic oligonucleotide
gaugcacuucaaaguuccu

SEQ ID NO: 3112980 - RNA, 19 nt, Artificial Sequence
  Description of Artificial Sequence: Synthetic oligonucleotide
ggccacccgauccaagaaa

SEQ ID NO: 3112981 - RNA, 19 nt, Artificial Sequence
  Description of Artificial Sequence: Synthetic oligonucleotide
caggcacugccacgaagaa

SEQ ID NO: 3112982 - RNA, 19 nt, Artificial Sequence
  Description of Artificial Sequence: Synthetic oligonucleotide
ugacugccacaggcacugc

SEQ ID NO: 3112983 - RNA, 19 nt, Artificial Sequence
  Description of Artificial Sequence: Synthetic oligonucleotide
gacgccccuuccacucgug

SEQ ID NO: 3112984 - RNA, 19 nt, Artificial Sequence
  Description of Artificial Sequence: Synthetic oligonucleotide
ucgugccacgcaggccacc

SEQ ID NO: 3112985 - RNA, 19 nt, Artificial Sequence
  Description of Artificial Sequence: Synthetic oligonucleotide
gagacaccaaugacacaau

SEQ ID NO: 3112986 - RNA, 19 nt, Artificial Sequence
  Description of Artificial Sequence: Synthetic oligonucleotide
cgccccuuccacucgugcc

SEQ ID NO: 3112987 - RNA, 19 nt, Artificial Sequence
  Description of Artificial Sequence: Synthetic oligonucleotide
cacuuuccagugguucaaa

SEQ ID NO: 3112988 - RNA, 19 nt, Artificial Sequence
  Description of Artificial Sequence: Synthetic oligonucleotide
caucgacgccccuuccacu

SEQ ID NO: 3112989 - RNA, 19 nt, Artificial Sequence
  Description of Artificial Sequence: Synthetic oligonucleotide
gaaggccuugaaguaucuu

SEQ ID NO: 3112990 - RNA, 19 nt, Artificial Sequence
  Description of Artificial Sequence: Synthetic oligonucleotide
caagagcaaucacucucuu

SEQ ID NO: 3112991 - RNA, 19 nt, Artificial Sequence
  Description of Artificial Sequence: Synthetic oligonucleotide
gcacugccacgaagaagcc

SEQ ID NO: 3112992 - RNA, 19 nt, Artificial Sequence
  Description of Artificial Sequence: Synthetic oligonucleotide
cgugccacgcaggccaccc

SEQ ID NO: 3112993 - RNA, 19 nt, Artificial Sequence
  Description of Artificial Sequence: Synthetic oligonucleotide
gcaggccacccgauccaag

SEQ ID NO: 3112994 - RNA, 19 nt, Artificial Sequence
  Description of Artificial Sequence: Synthetic oligonucleotide
cccuuccacucgugccacg

SEQ ID NO: 3112995 - RNA, 19 nt, Artificial Sequence
  Description of Artificial Sequence: Synthetic oligonucleotide
ccacaucugaggacuggcu

SEQ ID NO: 3112996 - RNA, 19 nt, Artificial Sequence
  Description of Artificial Sequence: Synthetic oligonucleotide
ccacgcaggccacccgauc

SEQ ID NO: 3112997 - RNA, 19 nt, Artificial Sequence
  Description of Artificial Sequence: Synthetic oligonucleotide
ggacuggcuucaccaggau

SEQ ID NO: 3112998 - RNA, 19 nt, Artificial Sequence
  Description of Artificial Sequence: Synthetic oligonucleotide
cugccacgaagaagccuuu

SEQ ID NO: 3112999 - RNA, 19 nt, Artificial Sequence
  Description of Artificial Sequence: Synthetic oligonucleotide
ccacccgauccaagaaagu

SEQ ID NO: 3113000 - RNA, 19 nt, Artificial Sequence
  Description of Artificial Sequence: Synthetic oligonucleotide
ccgauccaagaaagugacu

SEQ ID NO: 3113001 - RNA, 19 nt, Artificial Sequence
  Description of Artificial Sequence: Synthetic oligonucleotide
ggcugcaucgacgccccuu

SEQ ID NO: 3113002 - RNA, 19 nt, Artificial Sequence
  Description of Artificial Sequence: Synthetic oligonucleotide
ccacaggcacugccacgaa

SEQ ID NO: 3113003 - RNA, 19 nt, Artificial Sequence
  Description of Artificial Sequence: Synthetic oligonucleotide
gccacgcaggccacccgau

SEQ ID NO: 3113004 - RNA, 19 nt, Artificial Sequence
  Description of Artificial Sequence: Synthetic oligonucleotide
cgcaggccacccgauccaa

SEQ ID NO: 3113005 - RNA, 19 nt, Artificial Sequence
  Description of Artificial Sequence: Synthetic oligonucleotide
cgacgccccuuccacucgu

SEQ ID NO: 3113006 - RNA, 19 nt, Artificial Sequence
  Description of Artificial Sequence: Synthetic oligonucleotide
gggcugcaucgacgccccu

SEQ ID NO: 3113007 - RNA, 19 nt, Artificial Sequence
  Description of Artificial Sequence: Synthetic oligonucleotide
aagcgaagcaggcacucgc

SEQ ID NO: 3113008 - RNA, 19 nt, Artificial Sequence
  Description of Artificial Sequence: Synthetic oligonucleotide
ugaagcaggguccagcggc

SEQ ID NO: 3113009 - RNA, 19 nt, Artificial Sequence
  Description of Artificial Sequence: Synthetic oligonucleotide
gagcccuggaucuacagcc

SEQ ID NO: 3113010 - RNA, 19 nt, Artificial Sequence
  Description of Artificial Sequence: Synthetic oligonucleotide
uggaucuacagccucuggc

SEQ ID NO: 3113011 - RNA, 19 nt, Artificial Sequence
  Description of Artificial Sequence: Synthetic oligonucleotide
aaaagcugggagcgggcgg

SEQ ID NO: 3113012 - RNA, 19 nt, Artificial Sequence
  Description of Artificial Sequence: Synthetic oligonucleotide
aaagcugggagcgggcggc

SEQ ID NO: 3113013 - RNA, 19 nt, Artificial Sequence
  Description of Artificial Sequence: Synthetic oligonucleotide
gaucuacagccucuggccg

SEQ ID NO: 3113014 - RNA, 19 nt, Artificial Sequence
  Description of Artificial Sequence: Synthetic oligonucleotide
gagaaaagcugggagcggg

SEQ ID NO: 3113015 - RNA, 19 nt, Artificial Sequence
  Description of Artificial Sequence: Synthetic oligonucleotide
ugcagcgcggagaaaagcu

SEQ ID NO: 3113016 - RNA, 19 nt, Artificial Sequence
  Description of Artificial Sequence: Synthetic oligonucleotide
gaaaagcugggagcgggcg

SEQ ID NO: 3113017 - RNA, 19 nt, Artificial Sequence
  Description of Artificial Sequence: Synthetic oligonucleotide
ggaucuacagccucuggcc

SEQ ID NO: 3113018 - RNA, 19 nt, Artificial Sequence
  Description of Artificial Sequence: Synthetic oligonucleotide
aaggccgccaagcgaagca

SEQ ID NO: 3113019 - RNA, 19 nt, Artificial Sequence
  Description of Artificial Sequence: Synthetic oligonucleotide
ggugaagcaggguccagcg

SEQ ID NO: 3113020 - RNA, 19 nt, Artificial Sequence
  Description of Artificial Sequence: Synthetic oligonucleotide
acagccucuggccggggcg

SEQ ID NO: 3113021 - RNA, 19 nt, Artificial Sequence
  Description of Artificial Sequence: Synthetic oligonucleotide
ucuacagccucuggccggg

SEQ ID NO: 3113022 - RNA, 19 nt, Artificial Sequence
  Description of Artificial Sequence: Synthetic oligonucleotide
cagcgcggagaaaagcugg

SEQ ID NO: 3113023 - RNA, 19 nt, Artificial Sequence
  Description of Artificial Sequence: Synthetic oligonucleotide
agaaaagcugggagcgggc

SEQ ID NO: 3113024 - RNA, 19 nt, Artificial Sequence
  Description of Artificial Sequence: Synthetic oligonucleotide
uuuggggcgccgguggccg

SEQ ID NO: 3113025 - RNA, 19 nt, Artificial Sequence
  Description of Artificial Sequence: Synthetic oligonucleotide
ugcugggagcccuggaucu

SEQ ID NO: 3113026 - RNA, 19 nt, Artificial Sequence
  Description of Artificial Sequence: Synthetic oligonucleotide
gaagcaggguccagcggcg

SEQ ID NO: 3113027 - RNA, 19 nt, Artificial Sequence
  Description of Artificial Sequence: Synthetic oligonucleotide
ugcgcgaaggccgccaagc

SEQ ID NO: 3113028 - RNA, 19 nt, Artificial Sequence
  Description of Artificial Sequence: Synthetic oligonucleotide
gaagcaggcacucgcggaa

SEQ ID NO: 3113029 - RNA, 19 nt, Artificial Sequence
  Description of Artificial Sequence: Synthetic oligonucleotide
gcggagaaaagcugggagc

SEQ ID NO: 3113030 - RNA, 19 nt, Artificial Sequence
  Description of Artificial Sequence: Synthetic oligonucleotide
gugaagcaggguccagcgg

SEQ ID NO: 3113031 - RNA, 19 nt, Artificial Sequence
  Description of Artificial Sequence: Synthetic oligonucleotide
ccaaggaugggugaagcag

SEQ ID NO: 3113032 - RNA, 19 nt, Artificial Sequence
  Description of Artificial Sequence: Synthetic oligonucleotide
agcaggguccagcggcggg

SEQ ID NO: 3113033 - RNA, 19 nt, Artificial Sequence
  Description of Artificial Sequence: Synthetic oligonucleotide
agcgaagcaggcacucgcg

SEQ ID NO: 3113034 - RNA, 19 nt, Artificial Sequence
  Description of Artificial Sequence: Synthetic oligonucleotide
cuggaucuacagccucugg

SEQ ID NO: 3113035 - RNA, 19 nt, Artificial Sequence
  Description of Artificial Sequence: Synthetic oligonucleotide
uacagccucuggccggggc

SEQ ID NO: 3113036 - RNA, 19 nt, Artificial Sequence
  Description of Artificial Sequence: Synthetic oligonucleotide
cuggcgucgugcgcgaagg

SEQ ID NO: 3113037 - RNA, 19 nt, Artificial Sequence
  Description of Artificial Sequence: Synthetic oligonucleotide
caagcgaagcaggcacucg

SEQ ID NO: 3113038 - RNA, 19 nt, Artificial Sequence
  Description of Artificial Sequence: Synthetic oligonucleotide
agcgcggagaaaagcuggg

SEQ ID NO: 3113039 - RNA, 19 nt, Artificial Sequence
  Description of Artificial Sequence: Synthetic oligonucleotide
aagcugggagcgggcggcc

SEQ ID NO: 3113040 - RNA, 19 nt, Artificial Sequence
  Description of Artificial Sequence: Synthetic oligonucleotide
cggagaaaagcugggagcg

SEQ ID NO: 3113041 - RNA, 19 nt, Artificial Sequence
  Description of Artificial Sequence: Synthetic oligonucleotide
aagcaggguccagcggcgg

SEQ ID NO: 3113042 - RNA, 19 nt, Artificial Sequence
  Description of Artificial Sequence: Synthetic oligonucleotide
uggggaccaagcgcagcgg

SEQ ID NO: 3113043 - RNA, 19 nt, Artificial Sequence
  Description of Artificial Sequence: Synthetic oligonucleotide
gggauggggaccaagcgca

SEQ ID NO: 3113044 - RNA, 19 nt, Artificial Sequence
  Description of Artificial Sequence: Synthetic oligonucleotide
ggggaccaagcgcagcggg

SEQ ID NO: 3113045 - RNA, 19 nt, Artificial Sequence
  Description of Artificial Sequence: Synthetic oligonucleotide
gaaggccgccaagcgaagc

SEQ ID NO: 3113046 - RNA, 19 nt, Artificial Sequence
  Description of Artificial Sequence: Synthetic oligonucleotide
ggagcagcgggauggggac

SEQ ID NO: 3113047 - RNA, 19 nt, Artificial Sequence
  Description of Artificial Sequence: Synthetic oligonucleotide
gcgggauggggaccaagcg

SEQ ID NO: 3113048 - RNA, 19 nt, Artificial Sequence
  Description of Artificial Sequence: Synthetic oligonucleotide
ggagaaaagcugggagcgg

SEQ ID NO: 3113049 - RNA, 19 nt, Artificial Sequence
  Description of Artificial Sequence: Synthetic oligonucleotide
gcgaagcaggcacucgcgg

SEQ ID NO: 3113050 - RNA, 19 nt, Artificial Sequence
  Description of Artificial Sequence: Synthetic oligonucleotide
gugcugggagcccuggauc

SEQ ID NO: 3113051 - RNA, 19 nt, Artificial Sequence
  Description of Artificial Sequence: Synthetic oligonucleotide
augggugaagcagggucca

SEQ ID NO: 3113052 - RNA, 19 nt, Artificial Sequence
  Description of Artificial Sequence: Synthetic oligonucleotide
ugggagcccuggaucuaca

SEQ ID NO: 3113053 - RNA, 19 nt, Artificial Sequence
  Description of Artificial Sequence: Synthetic oligonucleotide
agcagcgggauggggacca

SEQ ID NO: 3113054 - RNA, 19 nt, Artificial Sequence
  Description of Artificial Sequence: Synthetic oligonucleotide
ggggcgcuggugcagcgcg

SEQ ID NO: 3113055 - RNA, 19 nt, Artificial Sequence
  Description of Artificial Sequence: Synthetic oligonucleotide
gcuggugcagcgcggcggg

SEQ ID NO: 3113056 - RNA, 19 nt, Artificial Sequence
  Description of Artificial Sequence: Synthetic oligonucleotide
gugcagcgcggagaaaagc

SEQ ID NO: 3113057 - RNA, 19 nt, Artificial Sequence
  Description of Artificial Sequence: Synthetic oligonucleotide
uggccgugcagcgcggaga

SEQ ID NO: 3113058 - RNA, 19 nt, Artificial Sequence
  Description of Artificial Sequence: Synthetic oligonucleotide
aggccgccaagcgaagcag

SEQ ID NO: 3113059 - RNA, 19 nt, Artificial Sequence
  Description of Artificial Sequence: Synthetic oligonucleotide
aggguccagcggcgggcgc

SEQ ID NO: 3113060 - RNA, 19 nt, Artificial Sequence
  Description of Artificial Sequence: Synthetic oligonucleotide
agcgcggcggggccaagga

SEQ ID NO: 3113061 - RNA, 19 nt, Artificial Sequence
  Description of Artificial Sequence: Synthetic oligonucleotide
cgcggagaaaagcugggag

SEQ ID NO: 3113062 - RNA, 19 nt, Artificial Sequence
  Description of Artificial Sequence: Synthetic oligonucleotide
guuuggggcgccgguggcc

SEQ ID NO: 3113063 - RNA, 19 nt, Artificial Sequence
  Description of Artificial Sequence: Synthetic oligonucleotide
cugggagcccuggaucuac

SEQ ID NO: 3113064 - RNA, 19 nt, Artificial Sequence
  Description of Artificial Sequence: Synthetic oligonucleotide
gccggggcgguuuggggcg

SEQ ID NO: 3113065 - RNA, 19 nt, Artificial Sequence
  Description of Artificial Sequence: Synthetic oligonucleotide
uccagcggcgggcgcggug

SEQ ID NO: 3113066 - RNA, 19 nt, Artificial Sequence
  Description of Artificial Sequence: Synthetic oligonucleotide
ucuggccggggcgguuugg

SEQ ID NO: 3113067 - RNA, 19 nt, Artificial Sequence
  Description of Artificial Sequence: Synthetic oligonucleotide
ugggugaagcaggguccag

SEQ ID NO: 3113068 - RNA, 19 nt, Artificial Sequence
  Description of Artificial Sequence: Synthetic oligonucleotide
gggugaagcaggguccagc

SEQ ID NO: 3113069 - RNA, 19 nt, Artificial Sequence
  Description of Artificial Sequence: Synthetic oligonucleotide
uggcgucgugcgcgaaggc

SEQ ID NO: 3113070 - RNA, 19 nt, Artificial Sequence
  Description of Artificial Sequence: Synthetic oligonucleotide
gggagcccuggaucuacag

SEQ ID NO: 3113071 - RNA, 19 nt, Artificial Sequence
  Description of Artificial Sequence: Synthetic oligonucleotide
gagcgggcggccgggcugg

SEQ ID NO: 3113072 - RNA, 19 nt, Artificial Sequence
  Description of Artificial Sequence: Synthetic oligonucleotide
gggaccaagcgcagcgggg

SEQ ID NO: 3113073 - RNA, 19 nt, Artificial Sequence
  Description of Artificial Sequence: Synthetic oligonucleotide
ggccggggcgguuuggggc

SEQ ID NO: 3113074 - RNA, 19 nt, Artificial Sequence
  Description of Artificial Sequence: Synthetic oligonucleotide
cuggccggggcgguuuggg

SEQ ID NO: 3113075 - RNA, 19 nt, Artificial Sequence
  Description of Artificial Sequence: Synthetic oligonucleotide
ggccaaggaugggugaagc

SEQ ID NO: 3113076 - RNA, 19 nt, Artificial Sequence
  Description of Artificial Sequence: Synthetic oligonucleotide
cagccucuggccggggcgg

SEQ ID NO: 3113077 - RNA, 19 nt, Artificial Sequence
  Description of Artificial Sequence: Synthetic oligonucleotide
ccgguggccgugcagcgcg

SEQ ID NO: 3113078 - RNA, 19 nt, Artificial Sequence
  Description of Artificial Sequence: Synthetic oligonucleotide
accaagcgcagcggggacu

SEQ ID NO: 3113079 - RNA, 19 nt, Artificial Sequence
  Description of Artificial Sequence: Synthetic oligonucleotide
guggccgugcagcgcggag

SEQ ID NO: 3113080 - RNA, 19 nt, Artificial Sequence
  Description of Artificial Sequence: Synthetic oligonucleotide
cgggauggggaccaagcgc

SEQ ID NO: 3113081 - RNA, 19 nt, Artificial Sequence
  Description of Artificial Sequence: Synthetic oligonucleotide
ucgugcgcgaaggccgcca

SEQ ID NO: 3113082 - RNA, 19 nt, Artificial Sequence
  Description of Artificial Sequence: Synthetic oligonucleotide
gcagcgcggagaaaagcug

SEQ ID NO: 3113083 - RNA, 19 nt, Artificial Sequence
  Description of Artificial Sequence: Synthetic oligonucleotide
gcgcgaaggccgccaagcg

SEQ ID NO: 3113084 - RNA, 19 nt, Artificial Sequence
  Description of Artificial Sequence: Synthetic oligonucleotide
ggugcagcgcggcggggcc

SEQ ID NO: 3113085 - RNA, 19 nt, Artificial Sequence
  Description of Artificial Sequence: Synthetic oligonucleotide
gguuuggggcgccgguggc

SEQ ID NO: 3113086 - RNA, 19 nt, Artificial Sequence
  Description of Artificial Sequence: Synthetic oligonucleotide
gcuggcgucgugcgcgaag

SEQ ID NO: 3113087 - RNA, 19 nt, Artificial Sequence
  Description of Artificial Sequence: Synthetic oligonucleotide
cgccaagcgaagcaggcac

SEQ ID NO: 3113088 - RNA, 19 nt, Artificial Sequence
  Description of Artificial Sequence: Synthetic oligonucleotide
aggaugggugaagcagggu

SEQ ID NO: 3113089 - RNA, 19 nt, Artificial Sequence
  Description of Artificial Sequence: Synthetic oligonucleotide
gccaaggaugggugaagca

SEQ ID NO: 3113090 - RNA, 19 nt, Artificial Sequence
  Description of Artificial Sequence: Synthetic oligonucleotide
gcgaaggccgccaagcgaa

SEQ ID NO: 3113091 - RNA, 19 nt, Artificial Sequence
  Description of Artificial Sequence: Synthetic oligonucleotide
gggagcagcgggaugggga

SEQ ID NO: 3113092 - RNA, 19 nt, Artificial Sequence
  Description of Artificial Sequence: Synthetic oligonucleotide
gagcagcgggauggggacc

SEQ ID NO: 3113093 - RNA, 19 nt, Artificial Sequence
  Description of Artificial Sequence: Synthetic oligonucleotide
agcccuggaucuacagccu

SEQ ID NO: 3113094 - RNA, 19 nt, Artificial Sequence
  Description of Artificial Sequence: Synthetic oligonucleotide
gugcgcgaaggccgccaag

SEQ ID NO: 3113095 - RNA, 19 nt, Artificial Sequence
  Description of Artificial Sequence: Synthetic oligonucleotide
gcgggcgcggugcugggag

SEQ ID NO: 3113096 - RNA, 19 nt, Artificial Sequence
  Description of Artificial Sequence: Synthetic oligonucleotide
gcggcggggccaaggaugg

SEQ ID NO: 3113097 - RNA, 19 nt, Artificial Sequence
  Description of Artificial Sequence: Synthetic oligonucleotide
cugggagcgggcggccggg

SEQ ID NO: 3113098 - RNA, 19 nt, Artificial Sequence
  Description of Artificial Sequence: Synthetic oligonucleotide
ggccgccaagcgaagcagg

SEQ ID NO: 3113099 - RNA, 19 nt, Artificial Sequence
  Description of Artificial Sequence: Synthetic oligonucleotide
ccuggaucuacagccucug

SEQ ID NO: 3113100 - RNA, 19 nt, Artificial Sequence
  Description of Artificial Sequence: Synthetic oligonucleotide
ggguccagcggcgggcgcg

SEQ ID NO: 3113101 - RNA, 19 nt, Artificial Sequence
  Description of Artificial Sequence: Synthetic oligonucleotide
gccgggcuggcgucgugcg

SEQ ID NO: 3113102 - RNA, 19 nt, Artificial Sequence
  Description of Artificial Sequence: Synthetic oligonucleotide
gccgccaagcgaagcaggc

SEQ ID NO: 3113103 - RNA, 19 nt, Artificial Sequence
  Description of Artificial Sequence: Synthetic oligonucleotide
cgugcagcgcggagaaaag

SEQ ID NO: 3113104 - RNA, 19 nt, Artificial Sequence
  Description of Artificial Sequence: Synthetic oligonucleotide
cgguuuggggcgccggugg

SEQ ID NO: 3113105 - RNA, 19 nt, Artificial Sequence
  Description of Artificial Sequence: Synthetic oligonucleotide
ccaagcgaagcaggcacuc

SEQ ID NO: 3113106 - RNA, 19 nt, Artificial Sequence
  Description of Artificial Sequence: Synthetic oligonucleotide
ggauggggaccaagcgcag

SEQ ID NO: 3113107 - RNA, 19 nt, Artificial Sequence
  Description of Artificial Sequence: Synthetic oligonucleotide
cgcggcggggccaaggaug

SEQ ID NO: 3113108 - RNA, 19 nt, Artificial Sequence
  Description of Artificial Sequence: Synthetic oligonucleotide
cagcgggauggggaccaag

SEQ ID NO: 3113109 - RNA, 19 nt, Artificial Sequence
  Description of Artificial Sequence: Synthetic oligonucleotide
cucuggccggggcgguuug

SEQ ID NO: 3113110 - RNA, 19 nt, Artificial Sequence
  Description of Artificial Sequence: Synthetic oligonucleotide
ugcagcgcggcggggccaa

SEQ ID NO: 3113111 - RNA, 19 nt, Artificial Sequence
  Description of Artificial Sequence: Synthetic oligonucleotide
uggggcgccgguggccgug

SEQ ID NO: 3113112 - RNA, 19 nt, Artificial Sequence
  Description of Artificial Sequence: Synthetic oligonucleotide
gcgcagcggggacuagggg

SEQ ID NO: 3113113 - RNA, 19 nt, Artificial Sequence
  Description of Artificial Sequence: Synthetic oligonucleotide
cuacagccucuggccgggg

SEQ ID NO: 3113114 - RNA, 19 nt, Artificial Sequence
  Description of Artificial Sequence: Synthetic oligonucleotide
gguccagcggcgggcgcgg

SEQ ID NO: 3113115 - RNA, 19 nt, Artificial Sequence
  Description of Artificial Sequence: Synthetic oligonucleotide
gcggcgggcgcggugcugg

SEQ ID NO: 3113116 - RNA, 19 nt, Artificial Sequence
  Description of Artificial Sequence: Synthetic oligonucleotide
cagcgcggcggggccaagg

SEQ ID NO: 3113117 - RNA, 19 nt, Artificial Sequence
  Description of Artificial Sequence: Synthetic oligonucleotide
gcccuggaucuacagccuc

SEQ ID NO: 3113118 - RNA, 19 nt, Artificial Sequence
  Description of Artificial Sequence: Synthetic oligonucleotide
ggcgcuggugcagcgcggc

SEQ ID NO: 3113119 - RNA, 19 nt, Artificial Sequence
  Description of Artificial Sequence: Synthetic oligonucleotide
ggccgugcagcgcggagaa

SEQ ID NO: 3113120 - RNA, 19 nt, Artificial Sequence
  Description of Artificial Sequence: Synthetic oligonucleotide
cgggcuggcgucgugcgcg

SEQ ID NO: 3113121 - RNA, 19 nt, Artificial Sequence
  Description of Artificial Sequence: Synthetic oligonucleotide
ccagcggcgggcgcggugc

SEQ ID NO: 3113122 - RNA, 19 nt, Artificial Sequence
  Description of Artificial Sequence: Synthetic oligonucleotide
cgaagcaggcacucgcgga

SEQ ID NO: 3113123 - RNA, 19 nt, Artificial Sequence
  Description of Artificial Sequence: Synthetic oligonucleotide
cuggugcagcgcggcgggg

SEQ ID NO: 3113124 - RNA, 19 nt, Artificial Sequence
  Description of Artificial Sequence: Synthetic oligonucleotide
ugggagcgggcggccgggc

SEQ ID NO: 3113125 - RNA, 19 nt, Artificial Sequence
  Description of Artificial Sequence: Synthetic oligonucleotide
uuggggcgccgguggccgu

SEQ ID NO: 3113126 - RNA, 19 nt, Artificial Sequence
  Description of Artificial Sequence: Synthetic oligonucleotide
ccgugcagcgcggagaaaa

SEQ ID NO: 3113127 - RNA, 19 nt, Artificial Sequence
  Description of Artificial Sequence: Synthetic oligonucleotide
caagcgcagcggggacuag

SEQ ID NO: 3113128 - RNA, 19 nt, Artificial Sequence
  Description of Artificial Sequence: Synthetic oligonucleotide
ggggccaaggaugggugaa

SEQ ID NO: 3113129 - RNA, 19 nt, Artificial Sequence
  Description of Artificial Sequence: Synthetic oligonucleotide
gcgguuuggggcgccggug

SEQ ID NO: 3113130 - RNA, 19 nt, Artificial Sequence
  Description of Artificial Sequence: Synthetic oligonucleotide
gcgcuggugcagcgcggcg

SEQ ID NO: 3113131 - RNA, 19 nt, Artificial Sequence
  Description of Artificial Sequence: Synthetic oligonucleotide
gggcccuggugcacuuggg

SEQ ID NO: 3113132 - RNA, 19 nt, Artificial Sequence
  Description of Artificial Sequence: Synthetic oligonucleotide
gggcgcggugcugggagcc

SEQ ID NO: 3113133 - RNA, 19 nt, Artificial Sequence
  Description of Artificial Sequence: Synthetic oligonucleotide
gucgugcgcgaaggccgcc

SEQ ID NO: 3113134 - RNA, 19 nt, Artificial Sequence
  Description of Artificial Sequence: Synthetic oligonucleotide
ggccgggcuggcgucgugc

SEQ ID NO: 3113135 - RNA, 19 nt, Artificial Sequence
  Description of Artificial Sequence: Synthetic oligonucleotide
cgcuggugcagcgcggcgg

SEQ ID NO: 3113136 - RNA, 19 nt, Artificial Sequence
  Description of Artificial Sequence: Synthetic oligonucleotide
gggcgguuuggggcgccgg

SEQ ID NO: 3113137 - RNA, 19 nt, Artificial Sequence
  Description of Artificial Sequence: Synthetic oligonucleotide
gcggugcugggagcccugg

SEQ ID NO: 3113138 - RNA, 19 nt, Artificial Sequence
  Description of Artificial Sequence: Synthetic oligonucleotide
cgaaggccgccaagcgaag

SEQ ID NO: 3113139 - RNA, 19 nt, Artificial Sequence
  Description of Artificial Sequence: Synthetic oligonucleotide
gcgcggagaaaagcuggga

SEQ ID NO: 3113140 - RNA, 19 nt, Artificial Sequence
  Description of Artificial Sequence: Synthetic oligonucleotide
ggcggggccaaggaugggu

SEQ ID NO: 3113141 - RNA, 19 nt, Artificial Sequence
  Description of Artificial Sequence: Synthetic oligonucleotide
ggcggccgggcuggcgucg

SEQ ID NO: 3113142 - RNA, 19 nt, Artificial Sequence
  Description of Artificial Sequence: Synthetic oligonucleotide
ggggcgguuuggggcgccg

SEQ ID NO: 3113143 - RNA, 19 nt, Artificial Sequence
  Description of Artificial Sequence: Synthetic oligonucleotide
agcggcgggcgcggugcug

SEQ ID NO: 3113144 - RNA, 19 nt, Artificial Sequence
  Description of Artificial Sequence: Synthetic oligonucleotide
agccucuggccggggcggu

SEQ ID NO: 3113145 - RNA, 19 nt, Artificial Sequence
  Description of Artificial Sequence: Synthetic oligonucleotide
cccuggaucuacagccucu

SEQ ID NO: 3113146 - RNA, 19 nt, Artificial Sequence
  Description of Artificial Sequence: Synthetic oligonucleotide
cgcgaaggccgccaagcga

SEQ ID NO: 3113147 - RNA, 19 nt, Artificial Sequence
  Description of Artificial Sequence: Synthetic oligonucleotide
ggcgcggugcugggagccc

SEQ ID NO: 3113148 - RNA, 19 nt, Artificial Sequence
  Description of Artificial Sequence: Synthetic oligonucleotide
ggcgguuuggggcgccggu

SEQ ID NO: 3113149 - RNA, 19 nt, Artificial Sequence
  Description of Artificial Sequence: Synthetic oligonucleotide
gccgguggccgugcagcgc

SEQ ID NO: 3113150 - RNA, 19 nt, Artificial Sequence
  Description of Artificial Sequence: Synthetic oligonucleotide
ccgggcuggcgucgugcgc

SEQ ID NO: 3113151 - RNA, 19 nt, Artificial Sequence
  Description of Artificial Sequence: Synthetic oligonucleotide
ccaagcgcagcggggacua

SEQ ID NO: 3113152 - RNA, 19 nt, Artificial Sequence
  Description of Artificial Sequence: Synthetic oligonucleotide
gugcagcgcggcggggcca

SEQ ID NO: 3113153 - RNA, 19 nt, Artificial Sequence
  Description of Artificial Sequence: Synthetic oligonucleotide
gggcuggcgucgugcgcga

SEQ ID NO: 3113154 - RNA, 19 nt, Artificial Sequence
  Description of Artificial Sequence: Synthetic oligonucleotide
gguggccgugcagcgcgga

SEQ ID NO: 3113155 - RNA, 19 nt, Artificial Sequence
  Description of Artificial Sequence: Synthetic oligonucleotide
ccgccaagcgaagcaggca

SEQ ID NO: 3113156 - RNA, 19 nt, Artificial Sequence
  Description of Artificial Sequence: Synthetic oligonucleotide
gcugggagcccuggaucua

SEQ ID NO: 3113157 - RNA, 19 nt, Artificial Sequence
  Description of Artificial Sequence: Synthetic oligonucleotide
ggggcgccgguggccgugc

SEQ ID NO: 3113158 - RNA, 19 nt, Artificial Sequence
  Description of Artificial Sequence: Synthetic oligonucleotide
gggcggccgggcuggcguc

SEQ ID NO: 3113159 - RNA, 19 nt, Artificial Sequence
  Description of Artificial Sequence: Synthetic oligonucleotide
cgggcgcggugcugggagc

SEQ ID NO: 3113160 - RNA, 19 nt, Artificial Sequence
  Description of Artificial Sequence: Synthetic oligonucleotide
cgcggugcugggagcccug

SEQ ID NO: 3113161 - RNA, 19 nt, Artificial Sequence
  Description of Artificial Sequence: Synthetic oligonucleotide
cggggccaaggauggguga

SEQ ID NO: 3113162 - RNA, 19 nt, Artificial Sequence
  Description of Artificial Sequence: Synthetic oligonucleotide
cgguggccgugcagcgcgg

SEQ ID NO: 3113163 - RNA, 19 nt, Artificial Sequence
  Description of Artificial Sequence: Synthetic oligonucleotide
gggagcgggcggccgggcu

SEQ ID NO: 3113164 - RNA, 19 nt, Artificial Sequence
  Description of Artificial Sequence: Synthetic oligonucleotide
ggcgggcgcggugcuggga

SEQ ID NO: 3113165 - RNA, 19 nt, Artificial Sequence
  Description of Artificial Sequence: Synthetic oligonucleotide
cgugcgcgaaggccgccaa

SEQ ID NO: 3113166 - RNA, 19 nt, Artificial Sequence
  Description of Artificial Sequence: Synthetic oligonucleotide
cggcgggcgcggugcuggg

SEQ ID NO: 3113167 - RNA, 19 nt, Artificial Sequence
  Description of Artificial Sequence: Synthetic oligonucleotide
gcagcgcggcggggccaag

SEQ ID NO: 3113168 - RNA, 19 nt, Artificial Sequence
  Description of Artificial Sequence: Synthetic oligonucleotide
gggcgccgguggccgugca

SEQ ID NO: 3113169 - RNA, 19 nt, Artificial Sequence
  Description of Artificial Sequence: Synthetic oligonucleotide
gcagcgggauggggaccaa

SEQ ID NO: 3113170 - RNA, 19 nt, Artificial Sequence
  Description of Artificial Sequence: Synthetic oligonucleotide
cggugcugggagcccugga

SEQ ID NO: 3113171 - RNA, 19 nt, Artificial Sequence
  Description of Artificial Sequence: Synthetic oligonucleotide
gcgcggugcugggagcccu

SEQ ID NO: 3113172 - RNA, 19 nt, Artificial Sequence
  Description of Artificial Sequence: Synthetic oligonucleotide
gcgcggcggggccaaggau

SEQ ID NO: 3113173 - RNA, 19 nt, Artificial Sequence
  Description of Artificial Sequence: Synthetic oligonucleotide
cagcggcgggcgcggugcu

SEQ ID NO: 3113174 - RNA, 19 nt, Artificial Sequence
  Description of Artificial Sequence: Synthetic oligonucleotide
ggcuggcgucgugcgcgaa

SEQ ID NO: 3113175 - RNA, 19 nt, Artificial Sequence
  Description of Artificial Sequence: Synthetic oligonucleotide
cgggcggccgggcuggcgu

SEQ ID NO: 3113176 - RNA, 19 nt, Artificial Sequence
  Description of Artificial Sequence: Synthetic oligonucleotide
gccgugcagcgcggagaaa

SEQ ID NO: 3113177 - RNA, 19 nt, Artificial Sequence
  Description of Artificial Sequence: Synthetic oligonucleotide
cggcggggccaaggauggg

SEQ ID NO: 3113178 - RNA, 19 nt, Artificial Sequence
  Description of Artificial Sequence: Synthetic oligonucleotide
guccagcggcgggcgcggu

SEQ ID NO: 3113179 - RNA, 19 nt, Artificial Sequence
  Description of Artificial Sequence: Synthetic oligonucleotide
ccucuggccggggcgguuu

SEQ ID NO: 3113180 - RNA, 19 nt, Artificial Sequence
  Description of Artificial Sequence: Synthetic oligonucleotide
cggccgggcuggcgucgug

SEQ ID NO: 3113181 - RNA, 19 nt, Artificial Sequence
  Description of Artificial Sequence: Synthetic oligonucleotide
gcggccgggcuggcgucgu

SEQ ID NO: 3113182 - RNA, 19 nt, Artificial Sequence
  Description of Artificial Sequence: Synthetic oligonucleotide
aauacacacacacacacac

SEQ ID NO: 3113183 - RNA, 19 nt, Artificial Sequence
  Description of Artificial Sequence: Synthetic oligonucleotide
uguauggaaaaccaaacca

SEQ ID NO: 3113184 - RNA, 19 nt, Artificial Sequence
  Description of Artificial Sequence: Synthetic oligonucleotide
acaauacacacacacacac

SEQ ID NO: 3113185 - RNA, 19 nt, Artificial Sequence
  Description of Artificial Sequence: Synthetic oligonucleotide
gaacaauacacacacacac

SEQ ID NO: 3113186 - RNA, 19 nt, Artificial Sequence
  Description of Artificial Sequence: Synthetic oligonucleotide
uauagagcaaguucuagga

SEQ ID NO: 3113187 - RNA, 19 nt, Artificial Sequence
  Description of Artificial Sequence: Synthetic oligonucleotide
uggaaaaccaaaccaacca

SEQ ID NO: 3113188 - RNA, 19 nt, Artificial Sequence
  Description of Artificial Sequence: Synthetic oligonucleotide
acccgaacaauacacacac

SEQ ID NO: 3113189 - RNA, 19 nt, Artificial Sequence
  Description of Artificial Sequence: Synthetic oligonucleotide
gagagaaaccccuguaugg

SEQ ID NO: 3113190 - RNA, 19 nt, Artificial Sequence
  Description of Artificial Sequence: Synthetic oligonucleotide
gauggugcaucuuuagucc

SEQ ID NO: 3113191 - RNA, 19 nt, Artificial Sequence
  Description of Artificial Sequence: Synthetic oligonucleotide
cuauagagcaaguucuagg

SEQ ID NO: 3113192 - RNA, 19 nt, Artificial Sequence
  Description of Artificial Sequence: Synthetic oligonucleotide
uacacacacacacacacac

SEQ ID NO: 3113193 - RNA, 19 nt, Artificial Sequence
  Description of Artificial Sequence: Synthetic oligonucleotide
uauggaaaaccaaaccaac

SEQ ID NO: 3113194 - RNA, 19 nt, Artificial Sequence
  Description of Artificial Sequence: Synthetic oligonucleotide
aaccaaaccaaccaaccaa

SEQ ID NO: 3113195 - RNA, 19 nt, Artificial Sequence
  Description of Artificial Sequence: Synthetic oligonucleotide
ugcaucuuuagucccagca

SEQ ID NO: 3113196 - RNA, 19 nt, Artificial Sequence
  Description of Artificial Sequence: Synthetic oligonucleotide
aaccccuguauggaaaacc

SEQ ID NO: 3113197 - RNA, 19 nt, Artificial Sequence
  Description of Artificial Sequence: Synthetic oligonucleotide
ugauggugcaucuuuaguc

SEQ ID NO: 3113198 - RNA, 19 nt, Artificial Sequence
  Description of Artificial Sequence: Synthetic oligonucleotide
cacacacacacacacaccc

SEQ ID NO: 3113199 - RNA, 19 nt, Artificial Sequence
  Description of Artificial Sequence: Synthetic oligonucleotide
acacacacacacccuaccc

SEQ ID NO: 3113200 - RNA, 19 nt, Artificial Sequence
  Description of Artificial Sequence: Synthetic oligonucleotide
auagagcaaguucuaggac

SEQ ID NO: 3113201 - RNA, 19 nt, Artificial Sequence
  Description of Artificial Sequence: Synthetic oligonucleotide
auggaaaaccaaaccaacc

SEQ ID NO: 3113202 - RNA, 19 nt, Artificial Sequence
  Description of Artificial Sequence: Synthetic oligonucleotide
agagagaaaccccuguaug

SEQ ID NO: 3113203 - RNA, 19 nt, Artificial Sequence
  Description of Artificial Sequence: Synthetic oligonucleotide
cuguauggaaaaccaaacc

SEQ ID NO: 3113204 - RNA, 19 nt, Artificial Sequence
  Description of Artificial Sequence: Synthetic oligonucleotide
cacacacacccuaaaacgc

SEQ ID NO: 3113205 - RNA, 19 nt, Artificial Sequence
  Description of Artificial Sequence: Synthetic oligonucleotide
caggguuacagagagaaac

SEQ ID NO: 3113206 - RNA, 19 nt, Artificial Sequence
  Description of Artificial Sequence: Synthetic oligonucleotide
cacacacacacacacacac

SEQ ID NO: 3113207 - RNA, 19 nt, Artificial Sequence
  Description of Artificial Sequence: Synthetic oligonucleotide
ucuauagagcaaguucuag

SEQ ID NO: 3113208 - RNA, 19 nt, Artificial Sequence
  Description of Artificial Sequence: Synthetic oligonucleotide
auggugcaucuuuaguccc

SEQ ID NO: 3113209 - RNA, 19 nt, Artificial Sequence
  Description of Artificial Sequence: Synthetic oligonucleotide
agugauggugcaucuuuag

SEQ ID NO: 3113210 - RNA, 19 nt, Artificial Sequence
  Description of Artificial Sequence: Synthetic oligonucleotide
aggguuacagagagaaacc

SEQ ID NO: 3113211 - RNA, 19 nt, Artificial Sequence
  Description of Artificial Sequence: Synthetic oligonucleotide
accaaccaaacaaccaacc

SEQ ID NO: 3113212 - RNA, 19 nt, Artificial Sequence
  Description of Artificial Sequence: Synthetic oligonucleotide
uaaaacgcugggcagugau

SEQ ID NO: 3113213 - RNA, 19 nt, Artificial Sequence
  Description of Artificial Sequence: Synthetic oligonucleotide
uacagagagaaaccccugu

SEQ ID NO: 3113214 - RNA, 19 nt, Artificial Sequence
  Description of Artificial Sequence: Synthetic oligonucleotide
aacaauacacacacacaca

SEQ ID NO: 3113215 - RNA, 19 nt, Artificial Sequence
  Description of Artificial Sequence: Synthetic oligonucleotide
cuacccgaacaauacacac

SEQ ID NO: 3113216 - RNA, 19 nt, Artificial Sequence
  Description of Artificial Sequence: Synthetic oligonucleotide
cacacacacacccuacccg

SEQ ID NO: 3113217 - RNA, 19 nt, Artificial Sequence
  Description of Artificial Sequence: Synthetic oligonucleotide
uacccgaacaauacacaca

SEQ ID NO: 3113218 - RNA, 19 nt, Artificial Sequence
  Description of Artificial Sequence: Synthetic oligonucleotide
uuacagagagaaaccccug

SEQ ID NO: 3113219 - RNA, 19 nt, Artificial Sequence
  Description of Artificial Sequence: Synthetic oligonucleotide
acacccuaaaacgcugggc

SEQ ID NO: 3113220 - RNA, 19 nt, Artificial Sequence
  Description of Artificial Sequence: Synthetic oligonucleotide
ccgaacaauacacacacac

SEQ ID NO: 3113221 - RNA, 19 nt, Artificial Sequence
  Description of Artificial Sequence: Synthetic oligonucleotide
acacacacacccuacccga

SEQ ID NO: 3113222 - RNA, 19 nt, Artificial Sequence
  Description of Artificial Sequence: Synthetic oligonucleotide
aaaccccuguauggaaaac

SEQ ID NO: 3113223 - RNA, 19 nt, Artificial Sequence
  Description of Artificial Sequence: Synthetic oligonucleotide
guauggaaaaccaaaccaa

SEQ ID NO: 3113224 - RNA, 19 nt, Artificial Sequence
  Description of Artificial Sequence: Synthetic oligonucleotide
acacacacccuacccgaac

SEQ ID NO: 3113225 - RNA, 19 nt, Artificial Sequence
  Description of Artificial Sequence: Synthetic oligonucleotide
caaccaaacaaccaaccaa

SEQ ID NO: 3113226 - RNA, 19 nt, Artificial Sequence
  Description of Artificial Sequence: Synthetic oligonucleotide
agagaaaccccuguaugga

SEQ ID NO: 3113227 - RNA, 19 nt, Artificial Sequence
  Description of Artificial Sequence: Synthetic oligonucleotide
cacccuaaaacgcugggca

SEQ ID NO: 3113228 - RNA, 19 nt, Artificial Sequence
  Description of Artificial Sequence: Synthetic oligonucleotide
cacccuacccgaacaauac

SEQ ID NO: 3113229 - RNA, 19 nt, Artificial Sequence
  Description of Artificial Sequence: Synthetic oligonucleotide
acccuaaaacgcugggcag

SEQ ID NO: 3113230 - RNA, 19 nt, Artificial Sequence
  Description of Artificial Sequence: Synthetic oligonucleotide
aucuuuagucccagcacuc

SEQ ID NO: 3113231 - RNA, 19 nt, Artificial Sequence
  Description of Artificial Sequence: Synthetic oligonucleotide
acacacacacacacacacc

SEQ ID NO: 3113232 - RNA, 19 nt, Artificial Sequence
  Description of Artificial Sequence: Synthetic oligonucleotide
ccuguauggaaaaccaaac

SEQ ID NO: 3113233 - RNA, 19 nt, Artificial Sequence
  Description of Artificial Sequence: Synthetic oligonucleotide
uggugcaucuuuaguccca

SEQ ID NO: 3113234 - RNA, 19 nt, Artificial Sequence
  Description of Artificial Sequence: Synthetic oligonucleotide
guuacagagagaaaccccu

SEQ ID NO: 3113235 - RNA, 19 nt, Artificial Sequence
  Description of Artificial Sequence: Synthetic oligonucleotide
gaaaccccuguauggaaaa

SEQ ID NO: 3113236 - RNA, 19 nt, Artificial Sequence
  Description of Artificial Sequence: Synthetic oligonucleotide
cacacacccuaaaacgcug

SEQ ID NO: 3113237 - RNA, 19 nt, Artificial Sequence
  Description of Artificial Sequence: Synthetic oligonucleotide
cacacacacacacccuacc

SEQ ID NO: 3113238 - RNA, 19 nt, Artificial Sequence
  Description of Artificial Sequence: Synthetic oligonucleotide
acacacacacacccuaaaa

SEQ ID NO: 3113239 - RNA, 19 nt, Artificial Sequence
  Description of Artificial Sequence: Synthetic oligonucleotide
acagagagaaaccccugua

SEQ ID NO: 3113240 - RNA, 19 nt, Artificial Sequence
  Description of Artificial Sequence: Synthetic oligonucleotide
cacacccuaaaacgcuggg

SEQ ID NO: 3113241 - RNA, 19 nt, Artificial Sequence
  Description of Artificial Sequence: Synthetic oligonucleotide
gguuacagagagaaacccc

SEQ ID NO: 3113242 - RNA, 19 nt, Artificial Sequence
  Description of Artificial Sequence: Synthetic oligonucleotide
acacacacacacacccuac

SEQ ID NO: 3113243 - RNA, 19 nt, Artificial Sequence
  Description of Artificial Sequence: Synthetic oligonucleotide
caauacacacacacacaca

SEQ ID NO: 3113244 - RNA, 19 nt, Artificial Sequence
  Description of Artificial Sequence: Synthetic oligonucleotide
gagaaaccccuguauggaa

SEQ ID NO: 3113245 - RNA, 19 nt, Artificial Sequence
  Description of Artificial Sequence: Synthetic oligonucleotide
acacacacccuaaaacgcu

SEQ ID NO: 3113246 - RNA, 19 nt, Artificial Sequence
  Description of Artificial Sequence: Synthetic oligonucleotide
gcaucuuuagucccagcac

SEQ ID NO: 3113247 - RNA, 19 nt, Artificial Sequence
  Description of Artificial Sequence: Synthetic oligonucleotide
ggguuacagagagaaaccc

SEQ ID NO: 3113248 - RNA, 19 nt, Artificial Sequence
  Description of Artificial Sequence: Synthetic oligonucleotide
caucuuuagucccagcacu

SEQ ID NO: 3113249 - RNA, 19 nt, Artificial Sequence
  Description of Artificial Sequence: Synthetic oligonucleotide
acacacccuaaaacgcugg

SEQ ID NO: 3113250 - RNA, 19 nt, Artificial Sequence
  Description of Artificial Sequence: Synthetic oligonucleotide
ggucuauagagcaaguucu

SEQ ID NO: 3113251 - RNA, 19 nt, Artificial Sequence
  Description of Artificial Sequence: Synthetic oligonucleotide
aacgcugggcagugauggu

SEQ ID NO: 3113252 - RNA, 19 nt, Artificial Sequence
  Description of Artificial Sequence: Synthetic oligonucleotide
accccuguauggaaaacca

SEQ ID NO: 3113253 - RNA, 19 nt, Artificial Sequence
  Description of Artificial Sequence: Synthetic oligonucleotide
cccuacccgaacaauacac

SEQ ID NO: 3113254 - RNA, 19 nt, Artificial Sequence
  Description of Artificial Sequence: Synthetic oligonucleotide
agaaaccccuguauggaaa

SEQ ID NO: 3113255 - RNA, 19 nt, Artificial Sequence
  Description of Artificial Sequence: Synthetic oligonucleotide
acccuacccgaacaauaca

SEQ ID NO: 3113256 - RNA, 19 nt, Artificial Sequence
  Description of Artificial Sequence: Synthetic oligonucleotide
auacacacacacacacaca

SEQ ID NO: 3113257 - RNA, 19 nt, Artificial Sequence
  Description of Artificial Sequence: Synthetic oligonucleotide
cacacacccuacccgaaca

SEQ ID NO: 3113258 - RNA, 19 nt, Artificial Sequence
  Description of Artificial Sequence: Synthetic oligonucleotide
gccaggguuacagagagaa

SEQ ID NO: 3113259 - RNA, 19 nt, Artificial Sequence
  Description of Artificial Sequence: Synthetic oligonucleotide
acacacccuacccgaacaa

SEQ ID NO: 3113260 - RNA, 19 nt, Artificial Sequence
  Description of Artificial Sequence: Synthetic oligonucleotide
cacacacacacacacccua

SEQ ID NO: 3113261 - RNA, 19 nt, Artificial Sequence
  Description of Artificial Sequence: Synthetic oligonucleotide
acgcugggcagugauggug

SEQ ID NO: 3113262 - RNA, 19 nt, Artificial Sequence
  Description of Artificial Sequence: Synthetic oligonucleotide
ggugcaucuuuagucccag

SEQ ID NO: 3113263 - RNA, 19 nt, Artificial Sequence
  Description of Artificial Sequence: Synthetic oligonucleotide
acacccuacccgaacaaua

SEQ ID NO: 3113264 - RNA, 19 nt, Artificial Sequence
  Description of Artificial Sequence: Synthetic oligonucleotide
acacacacacacacacaca

SEQ ID NO: 3113265 - RNA, 19 nt, Artificial Sequence
  Description of Artificial Sequence: Synthetic oligonucleotide
acacacacacacacacccu

SEQ ID NO: 3113266 - RNA, 19 nt, Artificial Sequence
  Description of Artificial Sequence: Synthetic oligonucleotide
gucuauagagcaaguucua

SEQ ID NO: 3113267 - RNA, 19 nt, Artificial Sequence
  Description of Artificial Sequence: Synthetic oligonucleotide
cagagagaaaccccuguau

SEQ ID NO: 3113268 - RNA, 19 nt, Artificial Sequence
  Description of Artificial Sequence: Synthetic oligonucleotide
ccuaaaacgcugggcagug

SEQ ID NO: 3113269 - RNA, 19 nt, Artificial Sequence
  Description of Artificial Sequence: Synthetic oligonucleotide
cgaacaauacacacacaca

SEQ ID NO: 3113270 - RNA, 19 nt, Artificial Sequence
  Description of Artificial Sequence: Synthetic oligonucleotide
gugcaucuuuagucccagc

SEQ ID NO: 3113271 - RNA, 19 nt, Artificial Sequence
  Description of Artificial Sequence: Synthetic oligonucleotide
cacacacacacacccuaaa

SEQ ID NO: 3113272 - RNA, 19 nt, Artificial Sequence
  Description of Artificial Sequence: Synthetic oligonucleotide
acacacacacacacccuaa

SEQ ID NO: 3113273 - RNA, 19 nt, Artificial Sequence
  Description of Artificial Sequence: Synthetic oligonucleotide
cagugauggugcaucuuua

SEQ ID NO: 3113274 - RNA, 19 nt, Artificial Sequence
  Description of Artificial Sequence: Synthetic oligonucleotide
ccuacccgaacaauacaca

SEQ ID NO: 3113275 - RNA, 19 nt, Artificial Sequence
  Description of Artificial Sequence: Synthetic oligonucleotide
cgcugggcagugauggugc

SEQ ID NO: 3113276 - RNA, 19 nt, Artificial Sequence
  Description of Artificial Sequence: Synthetic oligonucleotide
cacacacacccuacccgaa

SEQ ID NO: 3113277 - RNA, 19 nt, Artificial Sequence
  Description of Artificial Sequence: Synthetic oligonucleotide
cuaaaacgcugggcaguga

SEQ ID NO: 3113278 - RNA, 19 nt, Artificial Sequence
  Description of Artificial Sequence: Synthetic oligonucleotide
gcugggcagugauggugca

SEQ ID NO: 3113279 - RNA, 19 nt, Artificial Sequence
  Description of Artificial Sequence: Synthetic oligonucleotide
ccccuguauggaaaaccaa

SEQ ID NO: 3113280 - RNA, 19 nt, Artificial Sequence
  Description of Artificial Sequence: Synthetic oligonucleotide
cccgaacaauacacacaca

SEQ ID NO: 3113281 - RNA, 19 nt, Artificial Sequence
  Description of Artificial Sequence: Synthetic oligonucleotide
cacacccuacccgaacaau

SEQ ID NO: 3113282 - RNA, 19 nt, Artificial Sequence
  Description of Artificial Sequence: Synthetic oligonucleotide
ccaggguuacagagagaaa

SEQ ID NO: 3113283 - RNA, 19 nt, Artificial Sequence
  Description of Artificial Sequence: Synthetic oligonucleotide
cccuaaaacgcugggcagu

SEQ ID NO: 3113284 - RNA, 19 nt, Artificial Sequence
  Description of Artificial Sequence: Synthetic oligonucleotide
uuuacacacacacacacac

SEQ ID NO: 3113285 - RNA, 19 nt, Artificial Sequence
  Description of Artificial Sequence: Synthetic oligonucleotide
gaagaaaaggaacgggugg

SEQ ID NO: 3113286 - RNA, 19 nt, Artificial Sequence
  Description of Artificial Sequence: Synthetic oligonucleotide
cagaugaagaaaaggaacg

SEQ ID NO: 3113287 - RNA, 19 nt, Artificial Sequence
  Description of Artificial Sequence: Synthetic oligonucleotide
guucuauucugcaagaccg

SEQ ID NO: 3113288 - RNA, 19 nt, Artificial Sequence
  Description of Artificial Sequence: Synthetic oligonucleotide
uuaugggcaaccuuggaca

SEQ ID NO: 3113289 - RNA, 19 nt, Artificial Sequence
  Description of Artificial Sequence: Synthetic oligonucleotide
uccacaaagcacuuauggg

SEQ ID NO: 3113290 - RNA, 19 nt, Artificial Sequence
  Description of Artificial Sequence: Synthetic oligonucleotide
aagagaaccugccacagaa

SEQ ID NO: 3113291 - RNA, 19 nt, Artificial Sequence
  Description of Artificial Sequence: Synthetic oligonucleotide
uacacacacacacacacac

SEQ ID NO: 3113292 - RNA, 19 nt, Artificial Sequence
  Description of Artificial Sequence: Synthetic oligonucleotide
cagaacaagaugcugcugg

SEQ ID NO: 3113293 - RNA, 19 nt, Artificial Sequence
  Description of Artificial Sequence: Synthetic oligonucleotide
cuugguucuauucugcaag

SEQ ID NO: 3113294 - RNA, 19 nt, Artificial Sequence
  Description of Artificial Sequence: Synthetic oligonucleotide
aaaaggaacggguggucag

SEQ ID NO: 3113295 - RNA, 19 nt, Artificial Sequence
  Description of Artificial Sequence: Synthetic oligonucleotide
uauucugcaagaccgggca

SEQ ID NO: 3113296 - RNA, 19 nt, Artificial Sequence
  Description of Artificial Sequence: Synthetic oligonucleotide
uauggagaagagaaccugc

SEQ ID NO: 3113297 - RNA, 19 nt, Artificial Sequence
  Description of Artificial Sequence: Synthetic oligonucleotide
guuuuacacacacacacac

SEQ ID NO: 3113298 - RNA, 19 nt, Artificial Sequence
  Description of Artificial Sequence: Synthetic oligonucleotide
aaagcacuuaugggcaacc

SEQ ID NO: 3113299 - RNA, 19 nt, Artificial Sequence
  Description of Artificial Sequence: Synthetic oligonucleotide
cugccacagaacaagaugc

SEQ ID NO: 3113300 - RNA, 19 nt, Artificial Sequence
  Description of Artificial Sequence: Synthetic oligonucleotide
ugugccuuccucauugacc

SEQ ID NO: 3113301 - RNA, 19 nt, Artificial Sequence
  Description of Artificial Sequence: Synthetic oligonucleotide
agaaccuugguucuauucu

SEQ ID NO: 3113302 - RNA, 19 nt, Artificial Sequence
  Description of Artificial Sequence: Synthetic oligonucleotide
aacaagaugcugcugguuu

SEQ ID NO: 3113303 - RNA, 19 nt, Artificial Sequence
  Description of Artificial Sequence: Synthetic oligonucleotide
aaaggaacggguggucagc

SEQ ID NO: 3113304 - RNA, 19 nt, Artificial Sequence
  Description of Artificial Sequence: Synthetic oligonucleotide
uucuauucugcaagaccgg

SEQ ID NO: 3113305 - RNA, 19 nt, Artificial Sequence
  Description of Artificial Sequence: Synthetic oligonucleotide
agaugaagaaaaggaacgg

SEQ ID NO: 3113306 - RNA, 19 nt, Artificial Sequence
  Description of Artificial Sequence: Synthetic oligonucleotide
acacacacacguuauggag

SEQ ID NO: 3113307 - RNA, 19 nt, Artificial Sequence
  Description of Artificial Sequence: Synthetic oligonucleotide
uccucauugaccuccacaa

SEQ ID NO: 3113308 - RNA, 19 nt, Artificial Sequence
  Description of Artificial Sequence: Synthetic oligonucleotide
uuuuacacacacacacaca

SEQ ID NO: 3113309 - RNA, 19 nt, Artificial Sequence
  Description of Artificial Sequence: Synthetic oligonucleotide
cacguuauggagaagagaa

SEQ ID NO: 3113310 - RNA, 19 nt, Artificial Sequence
  Description of Artificial Sequence: Synthetic oligonucleotide
cuuaugggcaaccuuggac

SEQ ID NO: 3113311 - RNA, 19 nt, Artificial Sequence
  Description of Artificial Sequence: Synthetic oligonucleotide
cugaucacggcaguggucg

SEQ ID NO: 3113312 - RNA, 19 nt, Artificial Sequence
  Description of Artificial Sequence: Synthetic oligonucleotide
ucuauucugcaagaccggg

SEQ ID NO: 3113313 - RNA, 19 nt, Artificial Sequence
  Description of Artificial Sequence: Synthetic oligonucleotide
cacacacacacacacacac

SEQ ID NO: 3113314 - RNA, 19 nt, Artificial Sequence
  Description of Artificial Sequence: Synthetic oligonucleotide
aagaaaaggaacggguggu

SEQ ID NO: 3113315 - RNA, 19 nt, Artificial Sequence
  Description of Artificial Sequence: Synthetic oligonucleotide
guuuuguggugccagauga

SEQ ID NO: 3113316 - RNA, 19 nt, Artificial Sequence
  Description of Artificial Sequence: Synthetic oligonucleotide
uuauggagaagagaaccug

SEQ ID NO: 3113317 - RNA, 19 nt, Artificial Sequence
  Description of Artificial Sequence: Synthetic oligonucleotide
gaaccuugguucuauucug

SEQ ID NO: 3113318 - RNA, 19 nt, Artificial Sequence
  Description of Artificial Sequence: Synthetic oligonucleotide
acacacacacacguuaugg

SEQ ID NO: 3113319 - RNA, 19 nt, Artificial Sequence
  Description of Artificial Sequence: Synthetic oligonucleotide
uuuguggugccagaugaag

SEQ ID NO: 3113320 - RNA, 19 nt, Artificial Sequence
  Description of Artificial Sequence: Synthetic oligonucleotide
aaccuugguucuauucugc

SEQ ID NO: 3113321 - RNA, 19 nt, Artificial Sequence
  Description of Artificial Sequence: Synthetic oligonucleotide
gaaccugccacagaacaag

SEQ ID NO: 3113322 - RNA, 19 nt, Artificial Sequence
  Description of Artificial Sequence: Synthetic oligonucleotide
uguggugccagaugaagaa

SEQ ID NO: 3113323 - RNA, 19 nt, Artificial Sequence
  Description of Artificial Sequence: Synthetic oligonucleotide
ugggcaaccuuggacaccg

SEQ ID NO: 3113324 - RNA, 19 nt, Artificial Sequence
  Description of Artificial Sequence: Synthetic oligonucleotide
gagaaccugccacagaaca

SEQ ID NO: 3113325 - RNA, 19 nt, Artificial Sequence
  Description of Artificial Sequence: Synthetic oligonucleotide
ccacaaagcacuuaugggc

SEQ ID NO: 3113326 - RNA, 19 nt, Artificial Sequence
  Description of Artificial Sequence: Synthetic oligonucleotide
cagcacagaaccuugguuc

SEQ ID NO: 3113327 - RNA, 19 nt, Artificial Sequence
  Description of Artificial Sequence: Synthetic oligonucleotide
auggagaagagaaccugcc

SEQ ID NO: 3113328 - RNA, 19 nt, Artificial Sequence
  Description of Artificial Sequence: Synthetic oligonucleotide
ugcaagaccgggcauuccu

SEQ ID NO: 3113329 - RNA, 19 nt, Artificial Sequence
  Description of Artificial Sequence: Synthetic oligonucleotide
gguucuauucugcaagacc

SEQ ID NO: 3113330 - RNA, 19 nt, Artificial Sequence
  Description of Artificial Sequence: Synthetic oligonucleotide
uuccugaucacggcagugg

SEQ ID NO: 3113331 - RNA, 19 nt, Artificial Sequence
  Description of Artificial Sequence: Synthetic oligonucleotide
ggcacauucuucuuaguug

SEQ ID NO: 3113332 - RNA, 19 nt, Artificial Sequence
  Description of Artificial Sequence: Synthetic oligonucleotide
cuauucugcaagaccgggc

SEQ ID NO: 3113333 - RNA, 19 nt, Artificial Sequence
  Description of Artificial Sequence: Synthetic oligonucleotide
uggugccagaugaagaaaa

SEQ ID NO: 3113334 - RNA, 19 nt, Artificial Sequence
  Description of Artificial Sequence: Synthetic oligonucleotide
uggagaagagaaccugcca

SEQ ID NO: 3113335 - RNA, 19 nt, Artificial Sequence
  Description of Artificial Sequence: Synthetic oligonucleotide
uuacacacacacacacaca

SEQ ID NO: 3113336 - RNA, 19 nt, Artificial Sequence
  Description of Artificial Sequence: Synthetic oligonucleotide
gagaagagaaccugccaca

SEQ ID NO: 3113337 - RNA, 19 nt, Artificial Sequence
  Description of Artificial Sequence: Synthetic oligonucleotide
acacacguuauggagaaga

SEQ ID NO: 3113338 - RNA, 19 nt, Artificial Sequence
  Description of Artificial Sequence: Synthetic oligonucleotide
accggcacauucuucuuag

SEQ ID NO: 3113339 - RNA, 19 nt, Artificial Sequence
  Description of Artificial Sequence: Synthetic oligonucleotide
ggagaagagaaccugccac

SEQ ID NO: 3113340 - RNA, 19 nt, Artificial Sequence
  Description of Artificial Sequence: Synthetic oligonucleotide
cacaaagcacuuaugggca

SEQ ID NO: 3113341 - RNA, 19 nt, Artificial Sequence
  Description of Artificial Sequence: Synthetic oligonucleotide
cacuuaugggcaaccuugg

SEQ ID NO: 3113342 - RNA, 19 nt, Artificial Sequence
  Description of Artificial Sequence: Synthetic oligonucleotide
uuggacaccggcacauucu

SEQ ID NO: 3113343 - RNA, 19 nt, Artificial Sequence
  Description of Artificial Sequence: Synthetic oligonucleotide
uugguucuauucugcaaga

SEQ ID NO: 3113344 - RNA, 19 nt, Artificial Sequence
  Description of Artificial Sequence: Synthetic oligonucleotide
agcacagaaccuugguucu

SEQ ID NO: 3113345 - RNA, 19 nt, Artificial Sequence
  Description of Artificial Sequence: Synthetic oligonucleotide
agaagagaaccugccacag

SEQ ID NO: 3113346 - RNA, 19 nt, Artificial Sequence
  Description of Artificial Sequence: Synthetic oligonucleotide
uggucagcacagaaccuug

SEQ ID NO: 3113347 - RNA, 19 nt, Artificial Sequence
  Description of Artificial Sequence: Synthetic oligonucleotide
ugcuucugugccuuccuca

SEQ ID NO: 3113348 - RNA, 19 nt, Artificial Sequence
  Description of Artificial Sequence: Synthetic oligonucleotide
ucagcacagaaccuugguu

SEQ ID NO: 3113349 - RNA, 19 nt, Artificial Sequence
  Description of Artificial Sequence: Synthetic oligonucleotide
agaaaaggaacgggugguc

SEQ ID NO: 3113350 - RNA, 19 nt, Artificial Sequence
  Description of Artificial Sequence: Synthetic oligonucleotide
agaacaagaugcugcuggu

SEQ ID NO: 3113351 - RNA, 19 nt, Artificial Sequence
  Description of Artificial Sequence: Synthetic oligonucleotide
gugccagaugaagaaaagg

SEQ ID NO: 3113352 - RNA, 19 nt, Artificial Sequence
  Description of Artificial Sequence: Synthetic oligonucleotide
accuccacaaagcacuuau

SEQ ID NO: 3113353 - RNA, 19 nt, Artificial Sequence
  Description of Artificial Sequence: Synthetic oligonucleotide
ccacagaacaagaugcugc

SEQ ID NO: 3113354 - RNA, 19 nt, Artificial Sequence
  Description of Artificial Sequence: Synthetic oligonucleotide
caaccuuggacaccggcac

SEQ ID NO: 3113355 - RNA, 19 nt, Artificial Sequence
  Description of Artificial Sequence: Synthetic oligonucleotide
acauucuucuuaguuguca

SEQ ID NO: 3113356 - RNA, 19 nt, Artificial Sequence
  Description of Artificial Sequence: Synthetic oligonucleotide
cacacguuauggagaagag

SEQ ID NO: 3113357 - RNA, 19 nt, Artificial Sequence
  Description of Artificial Sequence: Synthetic oligonucleotide
acacacacguuauggagaa

SEQ ID NO: 3113358 - RNA, 19 nt, Artificial Sequence
  Description of Artificial Sequence: Synthetic oligonucleotide
uaugggcaaccuuggacac

SEQ ID NO: 3113359 - RNA, 19 nt, Artificial Sequence
  Description of Artificial Sequence: Synthetic oligonucleotide
agaccgggcauuccugauc

SEQ ID NO: 3113360 - RNA, 19 nt, Artificial Sequence
  Description of Artificial Sequence: Synthetic oligonucleotide
gaaaaggaacgggugguca

SEQ ID NO: 3113361 - RNA, 19 nt, Artificial Sequence
  Description of Artificial Sequence: Synthetic oligonucleotide
uccugaucacggcaguggu

SEQ ID NO: 3113362 - RNA, 19 nt, Artificial Sequence
  Description of Artificial Sequence: Synthetic oligonucleotide
uuuuguggugccagaugaa

SEQ ID NO: 3113363 - RNA, 19 nt, Artificial Sequence
  Description of Artificial Sequence: Synthetic oligonucleotide
ugccacagaacaagaugcu

SEQ ID NO: 3113364 - RNA, 19 nt, Artificial Sequence
  Description of Artificial Sequence: Synthetic oligonucleotide
gucgcugcugcuucugugc

SEQ ID NO: 3113365 - RNA, 19 nt, Artificial Sequence
  Description of Artificial Sequence: Synthetic oligonucleotide
gaccgggcauuccugauca

SEQ ID NO: 3113366 - RNA, 19 nt, Artificial Sequence
  Description of Artificial Sequence: Synthetic oligonucleotide
cagaaccuugguucuauuc

SEQ ID NO: 3113367 - RNA, 19 nt, Artificial Sequence
  Description of Artificial Sequence: Synthetic oligonucleotide
gacaccggcacauucuucu

SEQ ID NO: 3113368 - RNA, 19 nt, Artificial Sequence
  Description of Artificial Sequence: Synthetic oligonucleotide
cacacacacguuauggaga

SEQ ID NO: 3113369 - RNA, 19 nt, Artificial Sequence
  Description of Artificial Sequence: Synthetic oligonucleotide
gaacggguggucagcacag

SEQ ID NO: 3113370 - RNA, 19 nt, Artificial Sequence
  Description of Artificial Sequence: Synthetic oligonucleotide
cguuauggagaagagaacc

SEQ ID NO: 3113371 - RNA, 19 nt, Artificial Sequence
  Description of Artificial Sequence: Synthetic oligonucleotide
acguuauggagaagagaac

SEQ ID NO: 3113372 - RNA, 19 nt, Artificial Sequence
  Description of Artificial Sequence: Synthetic oligonucleotide
gcacuuaugggcaaccuug

SEQ ID NO: 3113373 - RNA, 19 nt, Artificial Sequence
  Description of Artificial Sequence: Synthetic oligonucleotide
agaugcugcugguuuugug

SEQ ID NO: 3113374 - RNA, 19 nt, Artificial Sequence
  Description of Artificial Sequence: Synthetic oligonucleotide
cuuggacaccggcacauuc

SEQ ID NO: 3113375 - RNA, 19 nt, Artificial Sequence
  Description of Artificial Sequence: Synthetic oligonucleotide
aaccuuggacaccggcaca

SEQ ID NO: 3113376 - RNA, 19 nt, Artificial Sequence
  Description of Artificial Sequence: Synthetic oligonucleotide
accuugguucuauucugca

SEQ ID NO: 3113377 - RNA, 19 nt, Artificial Sequence
  Description of Artificial Sequence: Synthetic oligonucleotide
acuuaugggcaaccuugga

SEQ ID NO: 3113378 - RNA, 19 nt, Artificial Sequence
  Description of Artificial Sequence: Synthetic oligonucleotide
aaggaacggguggucagca

SEQ ID NO: 3113379 - RNA, 19 nt, Artificial Sequence
  Description of Artificial Sequence: Synthetic oligonucleotide
agagaaccugccacagaac

SEQ ID NO: 3113380 - RNA, 19 nt, Artificial Sequence
  Description of Artificial Sequence: Synthetic oligonucleotide
ucgcugcugcuucugugcc

SEQ ID NO: 3113381 - RNA, 19 nt, Artificial Sequence
  Description of Artificial Sequence: Synthetic oligonucleotide
gaagagaaccugccacaga

SEQ ID NO: 3113382 - RNA, 19 nt, Artificial Sequence
  Description of Artificial Sequence: Synthetic oligonucleotide
agcacuuaugggcaaccuu

SEQ ID NO: 3113383 - RNA, 19 nt, Artificial Sequence
  Description of Artificial Sequence: Synthetic oligonucleotide
acacacacacacacacacg

SEQ ID NO: 3113384 - RNA, 19 nt, Artificial Sequence
  Description of Artificial Sequence: Synthetic oligonucleotide
gguuuuguggugccagaug

SEQ ID NO: 3113385 - RNA, 19 nt, Artificial Sequence
  Description of Artificial Sequence: Synthetic oligonucleotide
cacacacacacguuaugga

SEQ ID NO: 3113386 - RNA, 19 nt, Artificial Sequence
  Description of Artificial Sequence: Synthetic oligonucleotide
aggaacggguggucagcac

SEQ ID NO: 3113387 - RNA, 19 nt, Artificial Sequence
  Description of Artificial Sequence: Synthetic oligonucleotide
aagaccgggcauuccugau

SEQ ID NO: 3113388 - RNA, 19 nt, Artificial Sequence
  Description of Artificial Sequence: Synthetic oligonucleotide
acacguuauggagaagaga

SEQ ID NO: 3113389 - RNA, 19 nt, Artificial Sequence
  Description of Artificial Sequence: Synthetic oligonucleotide
augggcaaccuuggacacc

SEQ ID NO: 3113390 - RNA, 19 nt, Artificial Sequence
  Description of Artificial Sequence: Synthetic oligonucleotide
cacacacacacacacacgu

SEQ ID NO: 3113391 - RNA, 19 nt, Artificial Sequence
  Description of Artificial Sequence: Synthetic oligonucleotide
aagcacuuaugggcaaccu

SEQ ID NO: 3113392 - RNA, 19 nt, Artificial Sequence
  Description of Artificial Sequence: Synthetic oligonucleotide
ugguucuauucugcaagac

SEQ ID NO: 3113393 - RNA, 19 nt, Artificial Sequence
  Description of Artificial Sequence: Synthetic oligonucleotide
uggacaccggcacauucuu

SEQ ID NO: 3113394 - RNA, 19 nt, Artificial Sequence
  Description of Artificial Sequence: Synthetic oligonucleotide
cacacacacacacacguua

SEQ ID NO: 3113395 - RNA, 19 nt, Artificial Sequence
  Description of Artificial Sequence: Synthetic oligonucleotide
acaaagcacuuaugggcaa

SEQ ID NO: 3113396 - RNA, 19 nt, Artificial Sequence
  Description of Artificial Sequence: Synthetic oligonucleotide
cacacacacacacguuaug

SEQ ID NO: 3113397 - RNA, 19 nt, Artificial Sequence
  Description of Artificial Sequence: Synthetic oligonucleotide
caaagcacuuaugggcaac

SEQ ID NO: 3113398 - RNA, 19 nt, Artificial Sequence
  Description of Artificial Sequence: Synthetic oligonucleotide
ucugugccuuccucauuga

SEQ ID NO: 3113399 - RNA, 19 nt, Artificial Sequence
  Description of Artificial Sequence: Synthetic oligonucleotide
auuccugaucacggcagug

SEQ ID NO: 3113400 - RNA, 19 nt, Artificial Sequence
  Description of Artificial Sequence: Synthetic oligonucleotide
guuauggagaagagaaccu

SEQ ID NO: 3113401 - RNA, 19 nt, Artificial Sequence
  Description of Artificial Sequence: Synthetic oligonucleotide
ggaacggguggucagcaca

SEQ ID NO: 3113402 - RNA, 19 nt, Artificial Sequence
  Description of Artificial Sequence: Synthetic oligonucleotide
acagaacaagaugcugcug

SEQ ID NO: 3113403 - RNA, 19 nt, Artificial Sequence
  Description of Artificial Sequence: Synthetic oligonucleotide
ggugccagaugaagaaaag

SEQ ID NO: 3113404 - RNA, 19 nt, Artificial Sequence
  Description of Artificial Sequence: Synthetic oligonucleotide
ugguuuuguggugccagau

SEQ ID NO: 3113405 - RNA, 19 nt, Artificial Sequence
  Description of Artificial Sequence: Synthetic oligonucleotide
gcugguuuuguggugccag

SEQ ID NO: 3113406 - RNA, 19 nt, Artificial Sequence
  Description of Artificial Sequence: Synthetic oligonucleotide
gcacauucuucuuaguugu

SEQ ID NO: 3113407 - RNA, 19 nt, Artificial Sequence
  Description of Artificial Sequence: Synthetic oligonucleotide
cacauucuucuuaguuguc

SEQ ID NO: 3113408 - RNA, 19 nt, Artificial Sequence
  Description of Artificial Sequence: Synthetic oligonucleotide
aaccugccacagaacaaga

SEQ ID NO: 3113409 - RNA, 19 nt, Artificial Sequence
  Description of Artificial Sequence: Synthetic oligonucleotide
cacagaacaagaugcugcu

SEQ ID NO: 3113410 - RNA, 19 nt, Artificial Sequence
  Description of Artificial Sequence: Synthetic oligonucleotide
ugaucacggcaguggucgc

SEQ ID NO: 3113411 - RNA, 19 nt, Artificial Sequence
  Description of Artificial Sequence: Synthetic oligonucleotide
aucacggcaguggucgcug

SEQ ID NO: 3113412 - RNA, 19 nt, Artificial Sequence
  Description of Artificial Sequence: Synthetic oligonucleotide
caagaccgggcauuccuga

SEQ ID NO: 3113413 - RNA, 19 nt, Artificial Sequence
  Description of Artificial Sequence: Synthetic oligonucleotide
ggcauuccugaucacggca

SEQ ID NO: 3113414 - RNA, 19 nt, Artificial Sequence
  Description of Artificial Sequence: Synthetic oligonucleotide
cugugccuuccucauugac

SEQ ID NO: 3113415 - RNA, 19 nt, Artificial Sequence
  Description of Artificial Sequence: Synthetic oligonucleotide
acggguggucagcacagaa

SEQ ID NO: 3113416 - RNA, 19 nt, Artificial Sequence
  Description of Artificial Sequence: Synthetic oligonucleotide
cgggcauuccugaucacgg

SEQ ID NO: 3113417 - RNA, 19 nt, Artificial Sequence
  Description of Artificial Sequence: Synthetic oligonucleotide
cugcugguuuuguggugcc

SEQ ID NO: 3113418 - RNA, 19 nt, Artificial Sequence
  Description of Artificial Sequence: Synthetic oligonucleotide
ggcaaccuuggacaccggc

SEQ ID NO: 3113419 - RNA, 19 nt, Artificial Sequence
  Description of Artificial Sequence: Synthetic oligonucleotide
agaaccugccacagaacaa

SEQ ID NO: 3113420 - RNA, 19 nt, Artificial Sequence
  Description of Artificial Sequence: Synthetic oligonucleotide
cauucuucuuaguugucau

SEQ ID NO: 3113421 - RNA, 19 nt, Artificial Sequence
  Description of Artificial Sequence: Synthetic oligonucleotide
auucugcaagaccgggcau

SEQ ID NO: 3113422 - RNA, 19 nt, Artificial Sequence
  Description of Artificial Sequence: Synthetic oligonucleotide
acacacacacacacguuau

SEQ ID NO: 3113423 - RNA, 19 nt, Artificial Sequence
  Description of Artificial Sequence: Synthetic oligonucleotide
aguggucgcugcugcuucu

SEQ ID NO: 3113424 - RNA, 19 nt, Artificial Sequence
  Description of Artificial Sequence: Synthetic oligonucleotide
gccuuccucauugaccucc

SEQ ID NO: 3113425 - RNA, 19 nt, Artificial Sequence
  Description of Artificial Sequence: Synthetic oligonucleotide
ggucagcacagaaccuugg

SEQ ID NO: 3113426 - RNA, 19 nt, Artificial Sequence
  Description of Artificial Sequence: Synthetic oligonucleotide
accuuggacaccggcacau

SEQ ID NO: 3113427 - RNA, 19 nt, Artificial Sequence
  Description of Artificial Sequence: Synthetic oligonucleotide
caguggucgcugcugcuuc

SEQ ID NO: 3113428 - RNA, 19 nt, Artificial Sequence
  Description of Artificial Sequence: Synthetic oligonucleotide
acacacacacacacacaca

SEQ ID NO: 3113429 - RNA, 19 nt, Artificial Sequence
  Description of Artificial Sequence: Synthetic oligonucleotide
gccacagaacaagaugcug

SEQ ID NO: 3113430 - RNA, 19 nt, Artificial Sequence
  Description of Artificial Sequence: Synthetic oligonucleotide
cugguuuuguggugccaga

SEQ ID NO: 3113431 - RNA, 19 nt, Artificial Sequence
  Description of Artificial Sequence: Synthetic oligonucleotide
ucacggcaguggucgcugc

SEQ ID NO: 3113432 - RNA, 19 nt, Artificial Sequence
  Description of Artificial Sequence: Synthetic oligonucleotide
acagaaccuugguucuauu

SEQ ID NO: 3113433 - RNA, 19 nt, Artificial Sequence
  Description of Artificial Sequence: Synthetic oligonucleotide
ggucgcugcugcuucugug

SEQ ID NO: 3113434 - RNA, 19 nt, Artificial Sequence
  Description of Artificial Sequence: Synthetic oligonucleotide
accgggcauuccugaucac

SEQ ID NO: 3113435 - RNA, 19 nt, Artificial Sequence
  Description of Artificial Sequence: Synthetic oligonucleotide
ugcugguuuuguggugcca

SEQ ID NO: 3113436 - RNA, 19 nt, Artificial Sequence
  Description of Artificial Sequence: Synthetic oligonucleotide
gucagcacagaaccuuggu

SEQ ID NO: 3113437 - RNA, 19 nt, Artificial Sequence
  Description of Artificial Sequence: Synthetic oligonucleotide
gggcauuccugaucacggc

SEQ ID NO: 3113438 - RNA, 19 nt, Artificial Sequence
  Description of Artificial Sequence: Synthetic oligonucleotide
aacggguggucagcacaga

SEQ ID NO: 3113439 - RNA, 19 nt, Artificial Sequence
  Description of Artificial Sequence: Synthetic oligonucleotide
gcaaccuuggacaccggca

SEQ ID NO: 3113440 - RNA, 19 nt, Artificial Sequence
  Description of Artificial Sequence: Synthetic oligonucleotide
cuuccucauugaccuccac

SEQ ID NO: 3113441 - RNA, 19 nt, Artificial Sequence
  Description of Artificial Sequence: Synthetic oligonucleotide
ccgggcauuccugaucacg

SEQ ID NO: 3113442 - RNA, 19 nt, Artificial Sequence
  Description of Artificial Sequence: Synthetic oligonucleotide
acaccggcacauucuucuu

SEQ ID NO: 3113443 - RNA, 19 nt, Artificial Sequence
  Description of Artificial Sequence: Synthetic oligonucleotide
accugccacagaacaagau

SEQ ID NO: 3113444 - RNA, 19 nt, Artificial Sequence
  Description of Artificial Sequence: Synthetic oligonucleotide
gcaagaccgggcauuccug

SEQ ID NO: 3113445 - RNA, 19 nt, Artificial Sequence
  Description of Artificial Sequence: Synthetic oligonucleotide
ccuccacaaagcacuuaug

SEQ ID NO: 3113446 - RNA, 19 nt, Artificial Sequence
  Description of Artificial Sequence: Synthetic oligonucleotide
cacacacguuauggagaag

SEQ ID NO: 3113447 - RNA, 19 nt, Artificial Sequence
  Description of Artificial Sequence: Synthetic oligonucleotide
acacacacacacacacguu

SEQ ID NO: 3113448 - RNA, 19 nt, Artificial Sequence
  Description of Artificial Sequence: Synthetic oligonucleotide
ccugaucacggcagugguc

SEQ ID NO: 3113449 - RNA, 19 nt, Artificial Sequence
  Description of Artificial Sequence: Synthetic oligonucleotide
guggugccagaugaagaaa

SEQ ID NO: 3113450 - RNA, 19 nt, Artificial Sequence
  Description of Artificial Sequence: Synthetic oligonucleotide
guggucgcugcugcuucug

SEQ ID NO: 3113451 - RNA, 19 nt, Artificial Sequence
  Description of Artificial Sequence: Synthetic oligonucleotide
guggucagcacagaaccuu

SEQ ID NO: 3113452 - RNA, 19 nt, Artificial Sequence
  Description of Artificial Sequence: Synthetic oligonucleotide
ugccuuccucauugaccuc

SEQ ID NO: 3113453 - RNA, 19 nt, Artificial Sequence
  Description of Artificial Sequence: Synthetic oligonucleotide
gaucacggcaguggucgcu

SEQ ID NO: 3113454 - RNA, 19 nt, Artificial Sequence
  Description of Artificial Sequence: Synthetic oligonucleotide
cauuccugaucacggcagu

SEQ ID NO: 3113455 - RNA, 19 nt, Artificial Sequence
  Description of Artificial Sequence: Synthetic oligonucleotide
ccuugguucuauucugcaa

SEQ ID NO: 3113456 - RNA, 19 nt, Artificial Sequence
  Description of Artificial Sequence: Synthetic oligonucleotide
caccggcacauucuucuua

SEQ ID NO: 3113457 - RNA, 19 nt, Artificial Sequence
  Description of Artificial Sequence: Synthetic oligonucleotide
gcuucugugccuuccucau

SEQ ID NO: 3113458 - RNA, 19 nt, Artificial Sequence
  Description of Artificial Sequence: Synthetic oligonucleotide
cacagaaccuugguucuau

SEQ ID NO: 3113459 - RNA, 19 nt, Artificial Sequence
  Description of Artificial Sequence: Synthetic oligonucleotide
gaccuccacaaagcacuua

SEQ ID NO: 3113460 - RNA, 19 nt, Artificial Sequence
  Description of Artificial Sequence: Synthetic oligonucleotide
ggacaccggcacauucuuc

SEQ ID NO: 3113461 - RNA, 19 nt, Artificial Sequence
  Description of Artificial Sequence: Synthetic oligonucleotide
ccucauugaccuccacaaa

SEQ ID NO: 3113462 - RNA, 19 nt, Artificial Sequence
  Description of Artificial Sequence: Synthetic oligonucleotide
gguggucagcacagaaccu

SEQ ID NO: 3113463 - RNA, 19 nt, Artificial Sequence
  Description of Artificial Sequence: Synthetic oligonucleotide
gggcaaccuuggacaccgg

SEQ ID NO: 3113464 - RNA, 19 nt, Artificial Sequence
  Description of Artificial Sequence: Synthetic oligonucleotide
gcacagaaccuugguucua

SEQ ID NO: 3113465 - RNA, 19 nt, Artificial Sequence
  Description of Artificial Sequence: Synthetic oligonucleotide
gcaguggucgcugcugcuu

SEQ ID NO: 3113466 - RNA, 19 nt, Artificial Sequence
  Description of Artificial Sequence: Synthetic oligonucleotide
cggcacauucuucuuaguu

SEQ ID NO: 3113467 - RNA, 19 nt, Artificial Sequence
  Description of Artificial Sequence: Synthetic oligonucleotide
ccggcacauucuucuuagu

SEQ ID NO: 3113468 - RNA, 19 nt, Artificial Sequence
  Description of Artificial Sequence: Synthetic oligonucleotide
ccuuggacaccggcacauu

SEQ ID NO: 3113469 - RNA, 19 nt, Artificial Sequence
  Description of Artificial Sequence: Synthetic oligonucleotide
agauguuaugucuugaagg

SEQ ID NO: 3113470 - RNA, 19 nt, Artificial Sequence
  Description of Artificial Sequence: Synthetic oligonucleotide
gauguuaugucuugaaggc

SEQ ID NO: 3113471 - RNA, 19 nt, Artificial Sequence
  Description of Artificial Sequence: Synthetic oligonucleotide
uguuaugucuugaaggccu

SEQ ID NO: 3113472 - RNA, 19 nt, Artificial Sequence
  Description of Artificial Sequence: Synthetic oligonucleotide
uucggaaaugcuuaaccag

SEQ ID NO: 3113473 - RNA, 19 nt, Artificial Sequence
  Description of Artificial Sequence: Synthetic oligonucleotide
cauuauuucccacacuggc

SEQ ID NO: 3113474 - RNA, 19 nt, Artificial Sequence
  Description of Artificial Sequence: Synthetic oligonucleotide
aggugaaaggcguuucucc

SEQ ID NO: 3113475 - RNA, 19 nt, Artificial Sequence
  Description of Artificial Sequence: Synthetic oligonucleotide
aguccauuauuucccacac

SEQ ID NO: 3113476 - RNA, 19 nt, Artificial Sequence
  Description of Artificial Sequence: Synthetic oligonucleotide
aaccaggaaggcuuucugg

SEQ ID NO: 3113477 - RNA, 19 nt, Artificial Sequence
  Description of Artificial Sequence: Synthetic oligonucleotide
ugugaauucggaaaugcuu

SEQ ID NO: 3113478 - RNA, 19 nt, Artificial Sequence
  Description of Artificial Sequence: Synthetic oligonucleotide
ucucccguguguaucaucc

SEQ ID NO: 3113479 - RNA, 19 nt, Artificial Sequence
  Description of Artificial Sequence: Synthetic oligonucleotide
ugaaggacaugccacacuc

SEQ ID NO: 3113480 - RNA, 19 nt, Artificial Sequence
  Description of Artificial Sequence: Synthetic oligonucleotide
aaccaggagauguuauguc

SEQ ID NO: 3113481 - RNA, 19 nt, Artificial Sequence
  Description of Artificial Sequence: Synthetic oligonucleotide
gagauguuaugucuugaag

SEQ ID NO: 3113482 - RNA, 19 nt, Artificial Sequence
  Description of Artificial Sequence: Synthetic oligonucleotide
guuuaguccauuauuuccc

SEQ ID NO: 3113483 - RNA, 19 nt, Artificial Sequence
  Description of Artificial Sequence: Synthetic oligonucleotide
gguuuaguccauuauuucc

SEQ ID NO: 3113484 - RNA, 19 nt, Artificial Sequence
  Description of Artificial Sequence: Synthetic oligonucleotide
auucggaaaugcuuaacca

SEQ ID NO: 3113485 - RNA, 19 nt, Artificial Sequence
  Description of Artificial Sequence: Synthetic oligonucleotide
agguuuaguccauuauuuc

SEQ ID NO: 3113486 - RNA, 19 nt, Artificial Sequence
  Description of Artificial Sequence: Synthetic oligonucleotide
ugcuuaaccaggaaggcuu

SEQ ID NO: 3113487 - RNA, 19 nt, Artificial Sequence
  Description of Artificial Sequence: Synthetic oligonucleotide
aaaggcguuucuccggugu

SEQ ID NO: 3113488 - RNA, 19 nt, Artificial Sequence
  Description of Artificial Sequence: Synthetic oligonucleotide
uaguccauuauuucccaca

SEQ ID NO: 3113489 - RNA, 19 nt, Artificial Sequence
  Description of Artificial Sequence: Synthetic oligonucleotide
uuuaguccauuauuuccca

SEQ ID NO: 3113490 - RNA, 19 nt, Artificial Sequence
  Description of Artificial Sequence: Synthetic oligonucleotide
gucuugaaggccuugccgc

SEQ ID NO: 3113491 - RNA, 19 nt, Artificial Sequence
  Description of Artificial Sequence: Synthetic oligonucleotide
ucccguguguaucauccgg

SEQ ID NO: 3113492 - RNA, 19 nt, Artificial Sequence
  Description of Artificial Sequence: Synthetic oligonucleotide
auguuaugucuugaaggcc

SEQ ID NO: 3113493 - RNA, 19 nt, Artificial Sequence
  Description of Artificial Sequence: Synthetic oligonucleotide
acuggcugcaggugaaagg

SEQ ID NO: 3113494 - RNA, 19 nt, Artificial Sequence
  Description of Artificial Sequence: Synthetic oligonucleotide
uuuucucccguguguauca

SEQ ID NO: 3113495 - RNA, 19 nt, Artificial Sequence
  Description of Artificial Sequence: Synthetic oligonucleotide
ggugaaaggcguuucuccg

SEQ ID NO: 3113496 - RNA, 19 nt, Artificial Sequence
  Description of Artificial Sequence: Synthetic oligonucleotide
accaggagauguuaugucu

SEQ ID NO: 3113497 - RNA, 19 nt, Artificial Sequence
  Description of Artificial Sequence: Synthetic oligonucleotide
ugaaaggcguuucuccggu

SEQ ID NO: 3113498 - RNA, 19 nt, Artificial Sequence
  Description of Artificial Sequence: Synthetic oligonucleotide
uaugucuugaaggccuugc

SEQ ID NO: 3113499 - RNA, 19 nt, Artificial Sequence
  Description of Artificial Sequence: Synthetic oligonucleotide
uaaccaggaaggcuuucug

SEQ ID NO: 3113500 - RNA, 19 nt, Artificial Sequence
  Description of Artificial Sequence: Synthetic oligonucleotide
accugaagggcccuccccg

SEQ ID NO: 3113501 - RNA, 19 nt, Artificial Sequence
  Description of Artificial Sequence: Synthetic oligonucleotide
gugaaaggcguuucuccgg

SEQ ID NO: 3113502 - RNA, 19 nt, Artificial Sequence
  Description of Artificial Sequence: Synthetic oligonucleotide
cuggcugcaggugaaaggc

SEQ ID NO: 3113503 - RNA, 19 nt, Artificial Sequence
  Description of Artificial Sequence: Synthetic oligonucleotide
ugaauucggaaaugcuuaa

SEQ ID NO: 3113504 - RNA, 19 nt, Artificial Sequence
  Description of Artificial Sequence: Synthetic oligonucleotide
uuaaccaggaaggcuuucu

SEQ ID NO: 3113505 - RNA, 19 nt, Artificial Sequence
  Description of Artificial Sequence: Synthetic oligonucleotide
auuauuucccacacuggcu

SEQ ID NO: 3113506 - RNA, 19 nt, Artificial Sequence
  Description of Artificial Sequence: Synthetic oligonucleotide
ucguggaaccaggagaugu

SEQ ID NO: 3113507 - RNA, 19 nt, Artificial Sequence
  Description of Artificial Sequence: Synthetic oligonucleotide
aaggcguuucuccggugug

SEQ ID NO: 3113508 - RNA, 19 nt, Artificial Sequence
  Description of Artificial Sequence: Synthetic oligonucleotide
acucgccgcaccugaaggg

SEQ ID NO: 3113509 - RNA, 19 nt, Artificial Sequence
  Description of Artificial Sequence: Synthetic oligonucleotide
ugugcacucguggaaccag

SEQ ID NO: 3113510 - RNA, 19 nt, Artificial Sequence
  Description of Artificial Sequence: Synthetic oligonucleotide
gaaggacaugccacacucg

SEQ ID NO: 3113511 - RNA, 19 nt, Artificial Sequence
  Description of Artificial Sequence: Synthetic oligonucleotide
uggcugcaggugaaaggcg

SEQ ID NO: 3113512 - RNA, 19 nt, Artificial Sequence
  Description of Artificial Sequence: Synthetic oligonucleotide
caggagauguuaugucuug

SEQ ID NO: 3113513 - RNA, 19 nt, Artificial Sequence
  Description of Artificial Sequence: Synthetic oligonucleotide
cacucguggaaccaggaga

SEQ ID NO: 3113514 - RNA, 19 nt, Artificial Sequence
  Description of Artificial Sequence: Synthetic oligonucleotide
uccggugugcacucgugga

SEQ ID NO: 3113515 - RNA, 19 nt, Artificial Sequence
  Description of Artificial Sequence: Synthetic oligonucleotide
gugaauucggaaaugcuua

SEQ ID NO: 3113516 - RNA, 19 nt, Artificial Sequence
  Description of Artificial Sequence: Synthetic oligonucleotide
uggaaccaggagauguuau

SEQ ID NO: 3113517 - RNA, 19 nt, Artificial Sequence
  Description of Artificial Sequence: Synthetic oligonucleotide
cacucgccgcaccugaagg

SEQ ID NO: 3113518 - RNA, 19 nt, Artificial Sequence
  Description of Artificial Sequence: Synthetic oligonucleotide
gacaugccacacucgcugc

SEQ ID NO: 3113519 - RNA, 19 nt, Artificial Sequence
  Description of Artificial Sequence: Synthetic oligonucleotide
gaauucggaaaugcuuaac

SEQ ID NO: 3113520 - RNA, 19 nt, Artificial Sequence
  Description of Artificial Sequence: Synthetic oligonucleotide
ggaaccaggagauguuaug

SEQ ID NO: 3113521 - RNA, 19 nt, Artificial Sequence
  Description of Artificial Sequence: Synthetic oligonucleotide
ugcacucguggaaccagga

SEQ ID NO: 3113522 - RNA, 19 nt, Artificial Sequence
  Description of Artificial Sequence: Synthetic oligonucleotide
ugaagggcccuccccggug

SEQ ID NO: 3113523 - RNA, 19 nt, Artificial Sequence
  Description of Artificial Sequence: Synthetic oligonucleotide
ccauuauuucccacacugg

SEQ ID NO: 3113524 - RNA, 19 nt, Artificial Sequence
  Description of Artificial Sequence: Synthetic oligonucleotide
aggcguuucuccggugugc

SEQ ID NO: 3113525 - RNA, 19 nt, Artificial Sequence
  Description of Artificial Sequence: Synthetic oligonucleotide
ucccacacuggcugcaggu

SEQ ID NO: 3113526 - RNA, 19 nt, Artificial Sequence
  Description of Artificial Sequence: Synthetic oligonucleotide
ucuccggugugcacucgug

SEQ ID NO: 3113527 - RNA, 19 nt, Artificial Sequence
  Description of Artificial Sequence: Synthetic oligonucleotide
gaaccaggagauguuaugu

SEQ ID NO: 3113528 - RNA, 19 nt, Artificial Sequence
  Description of Artificial Sequence: Synthetic oligonucleotide
uuaugucuugaaggccuug

SEQ ID NO: 3113529 - RNA, 19 nt, Artificial Sequence
  Description of Artificial Sequence: Synthetic oligonucleotide
cuccggugugcacucgugg

SEQ ID NO: 3113530 - RNA, 19 nt, Artificial Sequence
  Description of Artificial Sequence: Synthetic oligonucleotide
augcuuaaccaggaaggcu

SEQ ID NO: 3113531 - RNA, 19 nt, Artificial Sequence
  Description of Artificial Sequence: Synthetic oligonucleotide
acucguggaaccaggagau

SEQ ID NO: 3113532 - RNA, 19 nt, Artificial Sequence
  Description of Artificial Sequence: Synthetic oligonucleotide
gaaaggcguuucuccggug

SEQ ID NO: 3113533 - RNA, 19 nt, Artificial Sequence
  Description of Artificial Sequence: Synthetic oligonucleotide
cucccguguguaucauccg

SEQ ID NO: 3113534 - RNA, 19 nt, Artificial Sequence
  Description of Artificial Sequence: Synthetic oligonucleotide
acaugccacacucgcugca

SEQ ID NO: 3113535 - RNA, 19 nt, Artificial Sequence
  Description of Artificial Sequence: Synthetic oligonucleotide
ggagauguuaugucuugaa

SEQ ID NO: 3113536 - RNA, 19 nt, Artificial Sequence
  Description of Artificial Sequence: Synthetic oligonucleotide
cucgccgcaccugaagggc

SEQ ID NO: 3113537 - RNA, 19 nt, Artificial Sequence
  Description of Artificial Sequence: Synthetic oligonucleotide
aggagauguuaugucuuga

SEQ ID NO: 3113538 - RNA, 19 nt, Artificial Sequence
  Description of Artificial Sequence: Synthetic oligonucleotide
ugcaggugaaaggcguuuc

SEQ ID NO: 3113539 - RNA, 19 nt, Artificial Sequence
  Description of Artificial Sequence: Synthetic oligonucleotide
ggugugcacucguggaacc

SEQ ID NO: 3113540 - RNA, 19 nt, Artificial Sequence
  Description of Artificial Sequence: Synthetic oligonucleotide
caggugaaaggcguuucuc

SEQ ID NO: 3113541 - RNA, 19 nt, Artificial Sequence
  Description of Artificial Sequence: Synthetic oligonucleotide
caccugaagggcccucccc

SEQ ID NO: 3113542 - RNA, 19 nt, Artificial Sequence
  Description of Artificial Sequence: Synthetic oligonucleotide
gugcacucguggaaccagg

SEQ ID NO: 3113543 - RNA, 19 nt, Artificial Sequence
  Description of Artificial Sequence: Synthetic oligonucleotide
caugccacacucgcugcac

SEQ ID NO: 3113544 - RNA, 19 nt, Artificial Sequence
  Description of Artificial Sequence: Synthetic oligonucleotide
cacuggcugcaggugaaag

SEQ ID NO: 3113545 - RNA, 19 nt, Artificial Sequence
  Description of Artificial Sequence: Synthetic oligonucleotide
uucucccguguguaucauc

SEQ ID NO: 3113546 - RNA, 19 nt, Artificial Sequence
  Description of Artificial Sequence: Synthetic oligonucleotide
cuuucuggcugaaggacau

SEQ ID NO: 3113547 - RNA, 19 nt, Artificial Sequence
  Description of Artificial Sequence: Synthetic oligonucleotide
gcacucguggaaccaggag

SEQ ID NO: 3113548 - RNA, 19 nt, Artificial Sequence
  Description of Artificial Sequence: Synthetic oligonucleotide
aagggcccuccccggugug

SEQ ID NO: 3113549 - RNA, 19 nt, Artificial Sequence
  Description of Artificial Sequence: Synthetic oligonucleotide
ccugaagggcccuccccgg

SEQ ID NO: 3113550 - RNA, 19 nt, Artificial Sequence
  Description of Artificial Sequence: Synthetic oligonucleotide
uugccgcacucgccgcacc

SEQ ID NO: 3113551 - RNA, 19 nt, Artificial Sequence
  Description of Artificial Sequence: Synthetic oligonucleotide
gugugaauucggaaaugcu

SEQ ID NO: 3113552 - RNA, 19 nt, Artificial Sequence
  Description of Artificial Sequence: Synthetic oligonucleotide
ccguguguaucauccggug

SEQ ID NO: 3113553 - RNA, 19 nt, Artificial Sequence
  Description of Artificial Sequence: Synthetic oligonucleotide
gcacucgccgcaccugaag

SEQ ID NO: 3113554 - RNA, 19 nt, Artificial Sequence
  Description of Artificial Sequence: Synthetic oligonucleotide
uuucucccguguguaucau

SEQ ID NO: 3113555 - RNA, 19 nt, Artificial Sequence
  Description of Artificial Sequence: Synthetic oligonucleotide
gaagggcccuccccggugu

SEQ ID NO: 3113556 - RNA, 19 nt, Artificial Sequence
  Description of Artificial Sequence: Synthetic oligonucleotide
cucguggaaccaggagaug

SEQ ID NO: 3113557 - RNA, 19 nt, Artificial Sequence
  Description of Artificial Sequence: Synthetic oligonucleotide
gugugcacucguggaacca

SEQ ID NO: 3113558 - RNA, 19 nt, Artificial Sequence
  Description of Artificial Sequence: Synthetic oligonucleotide
gcaccugaagggcccuccc

SEQ ID NO: 3113559 - RNA, 19 nt, Artificial Sequence
  Description of Artificial Sequence: Synthetic oligonucleotide
ggcguuucuccggugugca

SEQ ID NO: 3113560 - RNA, 19 nt, Artificial Sequence
  Description of Artificial Sequence: Synthetic oligonucleotide
ccacacuggcugcagguga

SEQ ID NO: 3113561 - RNA, 19 nt, Artificial Sequence
  Description of Artificial Sequence: Synthetic oligonucleotide
gcaggugaaaggcguuucu

SEQ ID NO: 3113562 - RNA, 19 nt, Artificial Sequence
  Description of Artificial Sequence: Synthetic oligonucleotide
acacuggcugcaggugaaa

SEQ ID NO: 3113563 - RNA, 19 nt, Artificial Sequence
  Description of Artificial Sequence: Synthetic oligonucleotide
guuaugucuugaaggccuu

SEQ ID NO: 3113564 - RNA, 19 nt, Artificial Sequence
  Description of Artificial Sequence: Synthetic oligonucleotide
ggcugcaggugaaaggcgu

SEQ ID NO: 3113565 - RNA, 19 nt, Artificial Sequence
  Description of Artificial Sequence: Synthetic oligonucleotide
agggcccuccccgguguga

SEQ ID NO: 3113566 - RNA, 19 nt, Artificial Sequence
  Description of Artificial Sequence: Synthetic oligonucleotide
ccaggagauguuaugucuu

SEQ ID NO: 3113567 - RNA, 19 nt, Artificial Sequence
  Description of Artificial Sequence: Synthetic oligonucleotide
ccaggaaggcuuucuggcu

SEQ ID NO: 3113568 - RNA, 19 nt, Artificial Sequence
  Description of Artificial Sequence: Synthetic oligonucleotide
cggugugcacucguggaac

SEQ ID NO: 3113569 - RNA, 19 nt, Artificial Sequence
  Description of Artificial Sequence: Synthetic oligonucleotide
cugaagggcccuccccggu

SEQ ID NO: 3113570 - RNA, 19 nt, Artificial Sequence
  Description of Artificial Sequence: Synthetic oligonucleotide
ccggugugaauucggaaau

SEQ ID NO: 3113571 - RNA, 19 nt, Artificial Sequence
  Description of Artificial Sequence: Synthetic oligonucleotide
cgccgcaccugaagggccc

SEQ ID NO: 3113572 - RNA, 19 nt, Artificial Sequence
  Description of Artificial Sequence: Synthetic oligonucleotide
cccguguguaucauccggu

SEQ ID NO: 3113573 - RNA, 19 nt, Artificial Sequence
  Description of Artificial Sequence: Synthetic oligonucleotide
cggugugaauucggaaaug

SEQ ID NO: 3113574 - RNA, 19 nt, Artificial Sequence
  Description of Artificial Sequence: Synthetic oligonucleotide
cgcaccugaagggcccucc

SEQ ID NO: 3113575 - RNA, 19 nt, Artificial Sequence
  Description of Artificial Sequence: Synthetic oligonucleotide
ccggugugcacucguggaa

SEQ ID NO: 3113576 - RNA, 19 nt, Artificial Sequence
  Description of Artificial Sequence: Synthetic oligonucleotide
gccgcacucgccgcaccug

SEQ ID NO: 3113577 - RNA, 19 nt, Artificial Sequence
  Description of Artificial Sequence: Synthetic oligonucleotide
cugcaggugaaaggcguuu

SEQ ID NO: 3113578 - RNA, 19 nt, Artificial Sequence
  Description of Artificial Sequence: Synthetic oligonucleotide
ccgcacucgccgcaccuga

SEQ ID NO: 3113579 - RNA, 19 nt, Artificial Sequence
  Description of Artificial Sequence: Synthetic oligonucleotide
gcuuaaccaggaaggcuuu

SEQ ID NO: 3113580 - RNA, 19 nt, Artificial Sequence
  Description of Artificial Sequence: Synthetic oligonucleotide
cguggaaccaggagauguu

SEQ ID NO: 3113581 - RNA, 19 nt, Artificial Sequence
  Description of Artificial Sequence: Synthetic oligonucleotide
gcugcaggugaaaggcguu

SEQ ID NO: 3113582 - RNA, 19 nt, Artificial Sequence
  Description of Artificial Sequence: Synthetic oligonucleotide
gcccuccccggugugaauu

SEQ ID NO: 3113583 - RNA, 19 nt, Artificial Sequence
  Description of Artificial Sequence: Synthetic oligonucleotide
cgcacucgccgcaccugaa

SEQ ID NO: 3113584 - RNA, 19 nt, Artificial Sequence
  Description of Artificial Sequence: Synthetic oligonucleotide
ccgcaccugaagggcccuc

SEQ ID NO: 3113585 - RNA, 19 nt, Artificial Sequence
  Description of Artificial Sequence: Synthetic oligonucleotide
gccgcaccugaagggcccu

SEQ ID NO: 3113586 - RNA, 19 nt, Artificial Sequence
  Description of Artificial Sequence: Synthetic oligonucleotide
ggcccuccccggugugaau

SEQ ID NO: 3113587 - RNA, 19 nt, Artificial Sequence
  Description of Artificial Sequence: Synthetic oligonucleotide
auuaagauuuugcuaacgc

SEQ ID NO: 3113588 - RNA, 19 nt, Artificial Sequence
  Description of Artificial Sequence: Synthetic oligonucleotide
aaaaucuuucuguagagga

SEQ ID NO: 3113589 - RNA, 19 nt, Artificial Sequence
  Description of Artificial Sequence: Synthetic oligonucleotide
aauguuaugguuuccauua

SEQ ID NO: 3113590 - RNA, 19 nt, Artificial Sequence
  Description of Artificial Sequence: Synthetic oligonucleotide
uccauuaagauuuugcuaa

SEQ ID NO: 3113591 - RNA, 19 nt, Artificial Sequence
  Description of Artificial Sequence: Synthetic oligonucleotide
guaaucaucauucguauug

SEQ ID NO: 3113592 - RNA, 19 nt, Artificial Sequence
  Description of Artificial Sequence: Synthetic oligonucleotide
aaguguccuuucuaguucc

SEQ ID NO: 3113593 - RNA, 19 nt, Artificial Sequence
  Description of Artificial Sequence: Synthetic oligonucleotide
aguuccuuuagcugcauac

SEQ ID NO: 3113594 - RNA, 19 nt, Artificial Sequence
  Description of Artificial Sequence: Synthetic oligonucleotide
uaagauuuugcuaacgcaa

SEQ ID NO: 3113595 - RNA, 19 nt, Artificial Sequence
  Description of Artificial Sequence: Synthetic oligonucleotide
aaucuuucuguagaggagg

SEQ ID NO: 3113596 - RNA, 19 nt, Artificial Sequence
  Description of Artificial Sequence: Synthetic oligonucleotide
uucagugucagcaccgugg

SEQ ID NO: 3113597 - RNA, 19 nt, Artificial Sequence
  Description of Artificial Sequence: Synthetic oligonucleotide
uuugcuaacgcaagugucc

SEQ ID NO: 3113598 - RNA, 19 nt, Artificial Sequence
  Description of Artificial Sequence: Synthetic oligonucleotide
uauuguauccucuucugug

SEQ ID NO: 3113599 - RNA, 19 nt, Artificial Sequence
  Description of Artificial Sequence: Synthetic oligonucleotide
uucuaguuccuuuagcugc

SEQ ID NO: 3113600 - RNA, 19 nt, Artificial Sequence
  Description of Artificial Sequence: Synthetic oligonucleotide
ugaguaaucaucauucgua

SEQ ID NO: 3113601 - RNA, 19 nt, Artificial Sequence
  Description of Artificial Sequence: Synthetic oligonucleotide
uuuccauuaagauuuugcu

SEQ ID NO: 3113602 - RNA, 19 nt, Artificial Sequence
  Description of Artificial Sequence: Synthetic oligonucleotide
uugaauucuucccuggccc

SEQ ID NO: 3113603 - RNA, 19 nt, Artificial Sequence
  Description of Artificial Sequence: Synthetic oligonucleotide
uuaagauuuugcuaacgca

SEQ ID NO: 3113604 - RNA, 19 nt, Artificial Sequence
  Description of Artificial Sequence: Synthetic oligonucleotide
auuguauccucuucugugg

SEQ ID NO: 3113605 - RNA, 19 nt, Artificial Sequence
  Description of Artificial Sequence: Synthetic oligonucleotide
uuugaauucuucccuggcc

SEQ ID NO: 3113606 - RNA, 19 nt, Artificial Sequence
  Description of Artificial Sequence: Synthetic oligonucleotide
cuuggaacuugccuaaugg

SEQ ID NO: 3113607 - RNA, 19 nt, Artificial Sequence
  Description of Artificial Sequence: Synthetic oligonucleotide
gaggaggagaacuuguugc

SEQ ID NO: 3113608 - RNA, 19 nt, Artificial Sequence
  Description of Artificial Sequence: Synthetic oligonucleotide
ucaucauucguauuguauc

SEQ ID NO: 3113609 - RNA, 19 nt, Artificial Sequence
  Description of Artificial Sequence: Synthetic oligonucleotide
uucuguggcauuuuguucu

SEQ ID NO: 3113610 - RNA, 19 nt, Artificial Sequence
  Description of Artificial Sequence: Synthetic oligonucleotide
uucuuuugaauucuucccu

SEQ ID NO: 3113611 - RNA, 19 nt, Artificial Sequence
  Description of Artificial Sequence: Synthetic oligonucleotide
guucuuuugaauucuuccc

SEQ ID NO: 3113612 - RNA, 19 nt, Artificial Sequence
  Description of Artificial Sequence: Synthetic oligonucleotide
aggaggagaacuuguugcc

SEQ ID NO: 3113613 - RNA, 19 nt, Artificial Sequence
  Description of Artificial Sequence: Synthetic oligonucleotide
caucauucguauuguaucc

SEQ ID NO: 3113614 - RNA, 19 nt, Artificial Sequence
  Description of Artificial Sequence: Synthetic oligonucleotide
uuuugaauucuucccuggc

SEQ ID NO: 3113615 - RNA, 19 nt, Artificial Sequence
  Description of Artificial Sequence: Synthetic oligonucleotide
uaugguuuccauuaagauu

SEQ ID NO: 3113616 - RNA, 19 nt, Artificial Sequence
  Description of Artificial Sequence: Synthetic oligonucleotide
uugaguaaucaucauucgu

SEQ ID NO: 3113617 - RNA, 19 nt, Artificial Sequence
  Description of Artificial Sequence: Synthetic oligonucleotide
aaucgcuuggaacuugccu

SEQ ID NO: 3113618 - RNA, 19 nt, Artificial Sequence
  Description of Artificial Sequence: Synthetic oligonucleotide
cucaugaacugcuucagug

SEQ ID NO: 3113619 - RNA, 19 nt, Artificial Sequence
  Description of Artificial Sequence: Synthetic oligonucleotide
ucuuuugaauucuucccug

SEQ ID NO: 3113620 - RNA, 19 nt, Artificial Sequence
  Description of Artificial Sequence: Synthetic oligonucleotide
cuugaguaaucaucauucg

SEQ ID NO: 3113621 - RNA, 19 nt, Artificial Sequence
  Description of Artificial Sequence: Synthetic oligonucleotide
uuucuaguuccuuuagcug

SEQ ID NO: 3113622 - RNA, 19 nt, Artificial Sequence
  Description of Artificial Sequence: Synthetic oligonucleotide
gguacuuccggucagaauc

SEQ ID NO: 3113623 - RNA, 19 nt, Artificial Sequence
  Description of Artificial Sequence: Synthetic oligonucleotide
augguuuccauuaagauuu

SEQ ID NO: 3113624 - RNA, 19 nt, Artificial Sequence
  Description of Artificial Sequence: Synthetic oligonucleotide
ucagugucagcaccguggg

SEQ ID NO: 3113625 - RNA, 19 nt, Artificial Sequence
  Description of Artificial Sequence: Synthetic oligonucleotide
cuuuugaauucuucccugg

SEQ ID NO: 3113626 - RNA, 19 nt, Artificial Sequence
  Description of Artificial Sequence: Synthetic oligonucleotide
aaaucuuucuguagaggag

SEQ ID NO: 3113627 - RNA, 19 nt, Artificial Sequence
  Description of Artificial Sequence: Synthetic oligonucleotide
uuaugguuuccauuaagau

SEQ ID NO: 3113628 - RNA, 19 nt, Artificial Sequence
  Description of Artificial Sequence: Synthetic oligonucleotide
gaacuugccuaauggcucg

SEQ ID NO: 3113629 - RNA, 19 nt, Artificial Sequence
  Description of Artificial Sequence: Synthetic oligonucleotide
ucguauuguauccucuucu

SEQ ID NO: 3113630 - RNA, 19 nt, Artificial Sequence
  Description of Artificial Sequence: Synthetic oligonucleotide
aagauuuugcuaacgcaag

SEQ ID NO: 3113631 - RNA, 19 nt, Artificial Sequence
  Description of Artificial Sequence: Synthetic oligonucleotide
guuuccauuaagauuuugc

SEQ ID NO: 3113632 - RNA, 19 nt, Artificial Sequence
  Description of Artificial Sequence: Synthetic oligonucleotide
acugccuugaguaaucauc

SEQ ID NO: 3113633 - RNA, 19 nt, Artificial Sequence
  Description of Artificial Sequence: Synthetic oligonucleotide
uuuagcugcauacugccuu

SEQ ID NO: 3113634 - RNA, 19 nt, Artificial Sequence
  Description of Artificial Sequence: Synthetic oligonucleotide
gauuuugcuaacgcaagug

SEQ ID NO: 3113635 - RNA, 19 nt, Artificial Sequence
  Description of Artificial Sequence: Synthetic oligonucleotide
uuccuuuagcugcauacug

SEQ ID NO: 3113636 - RNA, 19 nt, Artificial Sequence
  Description of Artificial Sequence: Synthetic oligonucleotide
ucuguagaggaggagaacu

SEQ ID NO: 3113637 - RNA, 19 nt, Artificial Sequence
  Description of Artificial Sequence: Synthetic oligonucleotide
agugucagcaccgugggag

SEQ ID NO: 3113638 - RNA, 19 nt, Artificial Sequence
  Description of Artificial Sequence: Synthetic oligonucleotide
uggcauuuuguucuuuuga

SEQ ID NO: 3113639 - RNA, 19 nt, Artificial Sequence
  Description of Artificial Sequence: Synthetic oligonucleotide
uuggaacuugccuaauggc

SEQ ID NO: 3113640 - RNA, 19 nt, Artificial Sequence
  Description of Artificial Sequence: Synthetic oligonucleotide
aacuuguugccuucucaug

SEQ ID NO: 3113641 - RNA, 19 nt, Artificial Sequence
  Description of Artificial Sequence: Synthetic oligonucleotide
uuucuguagaggaggagaa

SEQ ID NO: 3113642 - RNA, 19 nt, Artificial Sequence
  Description of Artificial Sequence: Synthetic oligonucleotide
uguugccuucucaugaacu

SEQ ID NO: 3113643 - RNA, 19 nt, Artificial Sequence
  Description of Artificial Sequence: Synthetic oligonucleotide
ucuaguuccuuuagcugca

SEQ ID NO: 3113644 - RNA, 19 nt, Artificial Sequence
  Description of Artificial Sequence: Synthetic oligonucleotide
ucuucuguggcauuuuguu

SEQ ID NO: 3113645 - RNA, 19 nt, Artificial Sequence
  Description of Artificial Sequence: Synthetic oligonucleotide
uuccauuaagauuuugcua

SEQ ID NO: 3113646 - RNA, 19 nt, Artificial Sequence
  Description of Artificial Sequence: Synthetic oligonucleotide
ugaagguacuuccggucag

SEQ ID NO: 3113647 - RNA, 19 nt, Artificial Sequence
  Description of Artificial Sequence: Synthetic oligonucleotide
cauuaagauuuugcuaacg

SEQ ID NO: 3113648 - RNA, 19 nt, Artificial Sequence
  Description of Artificial Sequence: Synthetic oligonucleotide
ccuugaguaaucaucauuc

SEQ ID NO: 3113649 - RNA, 19 nt, Artificial Sequence
  Description of Artificial Sequence: Synthetic oligonucleotide
ucuucccuggcccaguccu

SEQ ID NO: 3113650 - RNA, 19 nt, Artificial Sequence
  Description of Artificial Sequence: Synthetic oligonucleotide
agaacuuguugccuucuca

SEQ ID NO: 3113651 - RNA, 19 nt, Artificial Sequence
  Description of Artificial Sequence: Synthetic oligonucleotide
gucagaaucgcuuggaacu

SEQ ID NO: 3113652 - RNA, 19 nt, Artificial Sequence
  Description of Artificial Sequence: Synthetic oligonucleotide
ucgcaaaaucuuucuguag

SEQ ID NO: 3113653 - RNA, 19 nt, Artificial Sequence
  Description of Artificial Sequence: Synthetic oligonucleotide
caguccugaagguacuucc

SEQ ID NO: 3113654 - RNA, 19 nt, Artificial Sequence
  Description of Artificial Sequence: Synthetic oligonucleotide
ugccuaauggcucgcaaaa

SEQ ID NO: 3113655 - RNA, 19 nt, Artificial Sequence
  Description of Artificial Sequence: Synthetic oligonucleotide
uccaauguuaugguuucca

SEQ ID NO: 3113656 - RNA, 19 nt, Artificial Sequence
  Description of Artificial Sequence: Synthetic oligonucleotide
uuagcugcauacugccuug

SEQ ID NO: 3113657 - RNA, 19 nt, Artificial Sequence
  Description of Artificial Sequence: Synthetic oligonucleotide
guuaugguuuccauuaaga

SEQ ID NO: 3113658 - RNA, 19 nt, Artificial Sequence
  Description of Artificial Sequence: Synthetic oligonucleotide
uaaucaucauucguauugu

SEQ ID NO: 3113659 - RNA, 19 nt, Artificial Sequence
  Description of Artificial Sequence: Synthetic oligonucleotide
aucgcuuggaacuugccua

SEQ ID NO: 3113660 - RNA, 19 nt, Artificial Sequence
  Description of Artificial Sequence: Synthetic oligonucleotide
acgcaaguguccuuucuag

SEQ ID NO: 3113661 - RNA, 19 nt, Artificial Sequence
  Description of Artificial Sequence: Synthetic oligonucleotide
agauuuugcuaacgcaagu

SEQ ID NO: 3113662 - RNA, 19 nt, Artificial Sequence
  Description of Artificial Sequence: Synthetic oligonucleotide
agaaucgcuuggaacuugc

SEQ ID NO: 3113663 - RNA, 19 nt, Artificial Sequence
  Description of Artificial Sequence: Synthetic oligonucleotide
uucguauuguauccucuuc

SEQ ID NO: 3113664 - RNA, 19 nt, Artificial Sequence
  Description of Artificial Sequence: Synthetic oligonucleotide
caugaacugcuucaguguc

SEQ ID NO: 3113665 - RNA, 19 nt, Artificial Sequence
  Description of Artificial Sequence: Synthetic oligonucleotide
cuuucuaguuccuuuagcu

SEQ ID NO: 3113666 - RNA, 19 nt, Artificial Sequence
  Description of Artificial Sequence: Synthetic oligonucleotide
uccggucagaaucgcuugg

SEQ ID NO: 3113667 - RNA, 19 nt, Artificial Sequence
  Description of Artificial Sequence: Synthetic oligonucleotide
cuucucaugaacugcuuca

SEQ ID NO: 3113668 - RNA, 19 nt, Artificial Sequence
  Description of Artificial Sequence: Synthetic oligonucleotide
uucucaugaacugcuucag

SEQ ID NO: 3113669 - RNA, 19 nt, Artificial Sequence
  Description of Artificial Sequence: Synthetic oligonucleotide
ucauucguauuguauccuc

SEQ ID NO: 3113670 - RNA, 19 nt, Artificial Sequence
  Description of Artificial Sequence: Synthetic oligonucleotide
gcaaaaucuuucuguagag

SEQ ID NO: 3113671 - RNA, 19 nt, Artificial Sequence
  Description of Artificial Sequence: Synthetic oligonucleotide
ugaauucuucccuggccca

SEQ ID NO: 3113672 - RNA, 19 nt, Artificial Sequence
  Description of Artificial Sequence: Synthetic oligonucleotide
aacgcaaguguccuuucua

SEQ ID NO: 3113673 - RNA, 19 nt, Artificial Sequence
  Description of Artificial Sequence: Synthetic oligonucleotide
ugccuucucaugaacugcu

SEQ ID NO: 3113674 - RNA, 19 nt, Artificial Sequence
  Description of Artificial Sequence: Synthetic oligonucleotide
aggagaacuuguugccuuc

SEQ ID NO: 3113675 - RNA, 19 nt, Artificial Sequence
  Description of Artificial Sequence: Synthetic oligonucleotide
guccugaagguacuuccgg

SEQ ID NO: 3113676 - RNA, 19 nt, Artificial Sequence
  Description of Artificial Sequence: Synthetic oligonucleotide
cugcauacugccuugagua

SEQ ID NO: 3113677 - RNA, 19 nt, Artificial Sequence
  Description of Artificial Sequence: Synthetic oligonucleotide
cauacugccuugaguaauc

SEQ ID NO: 3113678 - RNA, 19 nt, Artificial Sequence
  Description of Artificial Sequence: Synthetic oligonucleotide
caaguguccuuucuaguuc

SEQ ID NO: 3113679 - RNA, 19 nt, Artificial Sequence
  Description of Artificial Sequence: Synthetic oligonucleotide
acagcuccaauguuauggu

SEQ ID NO: 3113680 - RNA, 19 nt, Artificial Sequence
  Description of Artificial Sequence: Synthetic oligonucleotide
aaucaucauucguauugua

SEQ ID NO: 3113681 - RNA, 19 nt, Artificial Sequence
  Description of Artificial Sequence: Synthetic oligonucleotide
cuuucuguagaggaggaga

SEQ ID NO: 3113682 - RNA, 19 nt, Artificial Sequence
  Description of Artificial Sequence: Synthetic oligonucleotide
ucucaugaacugcuucagu

SEQ ID NO: 3113683 - RNA, 19 nt, Artificial Sequence
  Description of Artificial Sequence: Synthetic oligonucleotide
uguauccucuucuguggca

SEQ ID NO: 3113684 - RNA, 19 nt, Artificial Sequence
  Description of Artificial Sequence: Synthetic oligonucleotide
cugccuugaguaaucauca

SEQ ID NO: 3113685 - RNA, 19 nt, Artificial Sequence
  Description of Artificial Sequence: Synthetic oligonucleotide
uuuguucuuuugaauucuu

SEQ ID NO: 3113686 - RNA, 19 nt, Artificial Sequence
  Description of Artificial Sequence: Synthetic oligonucleotide
uccugaagguacuuccggu

SEQ ID NO: 3113687 - RNA, 19 nt, Artificial Sequence
  Description of Artificial Sequence: Synthetic oligonucleotide
uaacgcaaguguccuuucu

SEQ ID NO: 3113688 - RNA, 19 nt, Artificial Sequence
  Description of Artificial Sequence: Synthetic oligonucleotide
guacuuccggucagaaucg

SEQ ID NO: 3113689 - RNA, 19 nt, Artificial Sequence
  Description of Artificial Sequence: Synthetic oligonucleotide
cauuuuguucuuuugaauu

SEQ ID NO: 3113690 - RNA, 19 nt, Artificial Sequence
  Description of Artificial Sequence: Synthetic oligonucleotide
aacuugccuaauggcucgc

SEQ ID NO: 3113691 - RNA, 19 nt, Artificial Sequence
  Description of Artificial Sequence: Synthetic oligonucleotide
uguggcauuuuguucuuuu

SEQ ID NO: 3113692 - RNA, 19 nt, Artificial Sequence
  Description of Artificial Sequence: Synthetic oligonucleotide
uuccggucagaaucgcuug

SEQ ID NO: 3113693 - RNA, 19 nt, Artificial Sequence
  Description of Artificial Sequence: Synthetic oligonucleotide
auucguauuguauccucuu

SEQ ID NO: 3113694 - RNA, 19 nt, Artificial Sequence
  Description of Artificial Sequence: Synthetic oligonucleotide
ccuuuagcugcauacugcc

SEQ ID NO: 3113695 - RNA, 19 nt, Artificial Sequence
  Description of Artificial Sequence: Synthetic oligonucleotide
ucuuucuguagaggaggag

SEQ ID NO: 3113696 - RNA, 19 nt, Artificial Sequence
  Description of Artificial Sequence: Synthetic oligonucleotide
uugccuaauggcucgcaaa

SEQ ID NO: 3113697 - RNA, 19 nt, Artificial Sequence
  Description of Artificial Sequence: Synthetic oligonucleotide
cuaauggcucgcaaaaucu

SEQ ID NO: 3113698 - RNA, 19 nt, Artificial Sequence
  Description of Artificial Sequence: Synthetic oligonucleotide
aucaucauucguauuguau

SEQ ID NO: 3113699 - RNA, 19 nt, Artificial Sequence
  Description of Artificial Sequence: Synthetic oligonucleotide
uugccuucucaugaacugc

SEQ ID NO: 3113700 - RNA, 19 nt, Artificial Sequence
  Description of Artificial Sequence: Synthetic oligonucleotide
auggcucgcaaaaucuuuc

SEQ ID NO: 3113701 - RNA, 19 nt, Artificial Sequence
  Description of Artificial Sequence: Synthetic oligonucleotide
uuguugccuucucaugaac

SEQ ID NO: 3113702 - RNA, 19 nt, Artificial Sequence
  Description of Artificial Sequence: Synthetic oligonucleotide
aguccugaagguacuuccg

SEQ ID NO: 3113703 - RNA, 19 nt, Artificial Sequence
  Description of Artificial Sequence: Synthetic oligonucleotide
aguaaucaucauucguauu

SEQ ID NO: 3113704 - RNA, 19 nt, Artificial Sequence
  Description of Artificial Sequence: Synthetic oligonucleotide
gaguaaucaucauucguau

SEQ ID NO: 3113705 - RNA, 19 nt, Artificial Sequence
  Description of Artificial Sequence: Synthetic oligonucleotide
auucuucccuggcccaguc

SEQ ID NO: 3113706 - RNA, 19 nt, Artificial Sequence
  Description of Artificial Sequence: Synthetic oligonucleotide
gaauucuucccuggcccag

SEQ ID NO: 3113707 - RNA, 19 nt, Artificial Sequence
  Description of Artificial Sequence: Synthetic oligonucleotide
uagaggaggagaacuuguu

SEQ ID NO: 3113708 - RNA, 19 nt, Artificial Sequence
  Description of Artificial Sequence: Synthetic oligonucleotide
uugcuaacgcaaguguccu

SEQ ID NO: 3113709 - RNA, 19 nt, Artificial Sequence
  Description of Artificial Sequence: Synthetic oligonucleotide
ggucagaaucgcuuggaac

SEQ ID NO: 3113710 - RNA, 19 nt, Artificial Sequence
  Description of Artificial Sequence: Synthetic oligonucleotide
uggcucgcaaaaucuuucu

SEQ ID NO: 3113711 - RNA, 19 nt, Artificial Sequence
  Description of Artificial Sequence: Synthetic oligonucleotide
ugcauacugccuugaguaa

SEQ ID NO: 3113712 - RNA, 19 nt, Artificial Sequence
  Description of Artificial Sequence: Synthetic oligonucleotide
gugucagcaccgugggagg

SEQ ID NO: 3113713 - RNA, 19 nt, Artificial Sequence
  Description of Artificial Sequence: Synthetic oligonucleotide
cugaagguacuuccgguca

SEQ ID NO: 3113714 - RNA, 19 nt, Artificial Sequence
  Description of Artificial Sequence: Synthetic oligonucleotide
aauucuucccuggcccagu

SEQ ID NO: 3113715 - RNA, 19 nt, Artificial Sequence
  Description of Artificial Sequence: Synthetic oligonucleotide
gaacuuguugccuucucau

SEQ ID NO: 3113716 - RNA, 19 nt, Artificial Sequence
  Description of Artificial Sequence: Synthetic oligonucleotide
ggcauuuuguucuuuugaa

SEQ ID NO: 3113717 - RNA, 19 nt, Artificial Sequence
  Description of Artificial Sequence: Synthetic oligonucleotide
ccuaauggcucgcaaaauc

SEQ ID NO: 3113718 - RNA, 19 nt, Artificial Sequence
  Description of Artificial Sequence: Synthetic oligonucleotide
aucauucguauuguauccu

SEQ ID NO: 3113719 - RNA, 19 nt, Artificial Sequence
  Description of Artificial Sequence: Synthetic oligonucleotide
cucgcaaaaucuuucugua

SEQ ID NO: 3113720 - RNA, 19 nt, Artificial Sequence
  Description of Artificial Sequence: Synthetic oligonucleotide
ucgcuuggaacuugccuaa

SEQ ID NO: 3113721 - RNA, 19 nt, Artificial Sequence
  Description of Artificial Sequence: Synthetic oligonucleotide
agcugcauacugccuugag

SEQ ID NO: 3113722 - RNA, 19 nt, Artificial Sequence
  Description of Artificial Sequence: Synthetic oligonucleotide
agcuccaauguuaugguuu

SEQ ID NO: 3113723 - RNA, 19 nt, Artificial Sequence
  Description of Artificial Sequence: Synthetic oligonucleotide
ggaacuugccuaauggcuc

SEQ ID NO: 3113724 - RNA, 19 nt, Artificial Sequence
  Description of Artificial Sequence: Synthetic oligonucleotide
auguuaugguuuccauuaa

SEQ ID NO: 3113725 - RNA, 19 nt, Artificial Sequence
  Description of Artificial Sequence: Synthetic oligonucleotide
uucuguagaggaggagaac

SEQ ID NO: 3113726 - RNA, 19 nt, Artificial Sequence
  Description of Artificial Sequence: Synthetic oligonucleotide
gaaucgcuuggaacuugcc

SEQ ID NO: 3113727 - RNA, 19 nt, Artificial Sequence
  Description of Artificial Sequence: Synthetic oligonucleotide
cuaacgcaaguguccuuuc

SEQ ID NO: 3113728 - RNA, 19 nt, Artificial Sequence
  Description of Artificial Sequence: Synthetic oligonucleotide
aagguacuuccggucagaa

SEQ ID NO: 3113729 - RNA, 19 nt, Artificial Sequence
  Description of Artificial Sequence: Synthetic oligonucleotide
guauuguauccucuucugu

SEQ ID NO: 3113730 - RNA, 19 nt, Artificial Sequence
  Description of Artificial Sequence: Synthetic oligonucleotide
cuuguugccuucucaugaa

SEQ ID NO: 3113731 - RNA, 19 nt, Artificial Sequence
  Description of Artificial Sequence: Synthetic oligonucleotide
ccuggcccaguccugaagg

SEQ ID NO: 3113732 - RNA, 19 nt, Artificial Sequence
  Description of Artificial Sequence: Synthetic oligonucleotide
gcuccaauguuaugguuuc

SEQ ID NO: 3113733 - RNA, 19 nt, Artificial Sequence
  Description of Artificial Sequence: Synthetic oligonucleotide
cuucagugucagcaccgug

SEQ ID NO: 3113734 - RNA, 19 nt, Artificial Sequence
  Description of Artificial Sequence: Synthetic oligonucleotide
uacugccuugaguaaucau

SEQ ID NO: 3113735 - RNA, 19 nt, Artificial Sequence
  Description of Artificial Sequence: Synthetic oligonucleotide
gcuuggaacuugccuaaug

SEQ ID NO: 3113736 - RNA, 19 nt, Artificial Sequence
  Description of Artificial Sequence: Synthetic oligonucleotide
aucuuucuguagaggagga

SEQ ID NO: 3113737 - RNA, 19 nt, Artificial Sequence
  Description of Artificial Sequence: Synthetic oligonucleotide
ucuguggcauuuuguucuu

SEQ ID NO: 3113738 - RNA, 19 nt, Artificial Sequence
  Description of Artificial Sequence: Synthetic oligonucleotide
cguauuguauccucuucug

SEQ ID NO: 3113739 - RNA, 19 nt, Artificial Sequence
  Description of Artificial Sequence: Synthetic oligonucleotide
cauucguauuguauccucu

SEQ ID NO: 3113740 - RNA, 19 nt, Artificial Sequence
  Description of Artificial Sequence: Synthetic oligonucleotide
gaagguacuuccggucaga

SEQ ID NO: 3113741 - RNA, 19 nt, Artificial Sequence
  Description of Artificial Sequence: Synthetic oligonucleotide
guccuuucuaguuccuuua

SEQ ID NO: 3113742 - RNA, 19 nt, Artificial Sequence
  Description of Artificial Sequence: Synthetic oligonucleotide
ccauuaagauuuugcuaac

SEQ ID NO: 3113743 - RNA, 19 nt, Artificial Sequence
  Description of Artificial Sequence: Synthetic oligonucleotide
uaguuccuuuagcugcaua

SEQ ID NO: 3113744 - RNA, 19 nt, Artificial Sequence
  Description of Artificial Sequence: Synthetic oligonucleotide
ggcucgcaaaaucuuucug

SEQ ID NO: 3113745 - RNA, 19 nt, Artificial Sequence
  Description of Artificial Sequence: Synthetic oligonucleotide
ccugaagguacuuccgguc

SEQ ID NO: 3113746 - RNA, 19 nt, Artificial Sequence
  Description of Artificial Sequence: Synthetic oligonucleotide
auacugccuugaguaauca

SEQ ID NO: 3113747 - RNA, 19 nt, Artificial Sequence
  Description of Artificial Sequence: Synthetic oligonucleotide
ugccuugaguaaucaucau

SEQ ID NO: 3113748 - RNA, 19 nt, Artificial Sequence
  Description of Artificial Sequence: Synthetic oligonucleotide
cgcaaaaucuuucuguaga

SEQ ID NO: 3113749 - RNA, 19 nt, Artificial Sequence
  Description of Artificial Sequence: Synthetic oligonucleotide
agguacuuccggucagaau

SEQ ID NO: 3113750 - RNA, 19 nt, Artificial Sequence
  Description of Artificial Sequence: Synthetic oligonucleotide
gcucgcaaaaucuuucugu

SEQ ID NO: 3113751 - RNA, 19 nt, Artificial Sequence
  Description of Artificial Sequence: Synthetic oligonucleotide
uacuuccggucagaaucgc

SEQ ID NO: 3113752 - RNA, 19 nt, Artificial Sequence
  Description of Artificial Sequence: Synthetic oligonucleotide
gaggagaacuuguugccuu

SEQ ID NO: 3113753 - RNA, 19 nt, Artificial Sequence
  Description of Artificial Sequence: Synthetic oligonucleotide
caauguuaugguuuccauu

SEQ ID NO: 3113754 - RNA, 19 nt, Artificial Sequence
  Description of Artificial Sequence: Synthetic oligonucleotide
guagaggaggagaacuugu

SEQ ID NO: 3113755 - RNA, 19 nt, Artificial Sequence
  Description of Artificial Sequence: Synthetic oligonucleotide
cuugccuaauggcucgcaa

SEQ ID NO: 3113756 - RNA, 19 nt, Artificial Sequence
  Description of Artificial Sequence: Synthetic oligonucleotide
ccuucucaugaacugcuuc

SEQ ID NO: 3113757 - RNA, 19 nt, Artificial Sequence
  Description of Artificial Sequence: Synthetic oligonucleotide
guuccuuuagcugcauacu

SEQ ID NO: 3113758 - RNA, 19 nt, Artificial Sequence
  Description of Artificial Sequence: Synthetic oligonucleotide
ugguuuccauuaagauuuu

SEQ ID NO: 3113759 - RNA, 19 nt, Artificial Sequence
  Description of Artificial Sequence: Synthetic oligonucleotide
cuucccuggcccaguccug

SEQ ID NO: 3113760 - RNA, 19 nt, Artificial Sequence
  Description of Artificial Sequence: Synthetic oligonucleotide
cuuccggucagaaucgcuu

SEQ ID NO: 3113761 - RNA, 19 nt, Artificial Sequence
  Description of Artificial Sequence: Synthetic oligonucleotide
uauccucuucuguggcauu

SEQ ID NO: 3113762 - RNA, 19 nt, Artificial Sequence
  Description of Artificial Sequence: Synthetic oligonucleotide
gguuuccauuaagauuuug

SEQ ID NO: 3113763 - RNA, 19 nt, Artificial Sequence
  Description of Artificial Sequence: Synthetic oligonucleotide
ggcccaguccugaagguac

SEQ ID NO: 3113764 - RNA, 19 nt, Artificial Sequence
  Description of Artificial Sequence: Synthetic oligonucleotide
acuuccggucagaaucgcu

SEQ ID NO: 3113765 - RNA, 19 nt, Artificial Sequence
  Description of Artificial Sequence: Synthetic oligonucleotide
uagcugcauacugccuuga

SEQ ID NO: 3113766 - RNA, 19 nt, Artificial Sequence
  Description of Artificial Sequence: Synthetic oligonucleotide
ugcuaacgcaaguguccuu

SEQ ID NO: 3113767 - RNA, 19 nt, Artificial Sequence
  Description of Artificial Sequence: Synthetic oligonucleotide
cuuuagcugcauacugccu

SEQ ID NO: 3113768 - RNA, 19 nt, Artificial Sequence
  Description of Artificial Sequence: Synthetic oligonucleotide
gcaaguguccuuucuaguu

SEQ ID NO: 3113769 - RNA, 19 nt, Artificial Sequence
  Description of Artificial Sequence: Synthetic oligonucleotide
gcauuuuguucuuuugaau

SEQ ID NO: 3113770 - RNA, 19 nt, Artificial Sequence
  Description of Artificial Sequence: Synthetic oligonucleotide
uggcccaguccugaaggua

SEQ ID NO: 3113771 - RNA, 19 nt, Artificial Sequence
  Description of Artificial Sequence: Synthetic oligonucleotide
guauccucuucuguggcau

SEQ ID NO: 3113772 - RNA, 19 nt, Artificial Sequence
  Description of Artificial Sequence: Synthetic oligonucleotide
aguguccuuucuaguuccu

SEQ ID NO: 3113773 - RNA, 19 nt, Artificial Sequence
  Description of Artificial Sequence: Synthetic oligonucleotide
gcugcauacugccuugagu

SEQ ID NO: 3113774 - RNA, 19 nt, Artificial Sequence
  Description of Artificial Sequence: Synthetic oligonucleotide
ccucuucuguggcauuuug

SEQ ID NO: 3113775 - RNA, 19 nt, Artificial Sequence
  Description of Artificial Sequence: Synthetic oligonucleotide
ucccuggcccaguccugaa

SEQ ID NO: 3113776 - RNA, 19 nt, Artificial Sequence
  Description of Artificial Sequence: Synthetic oligonucleotide
gcuaacgcaaguguccuuu

SEQ ID NO: 3113777 - RNA, 19 nt, Artificial Sequence
  Description of Artificial Sequence: Synthetic oligonucleotide
ggaggagaacuuguugccu

SEQ ID NO: 3113778 - RNA, 19 nt, Artificial Sequence
  Description of Artificial Sequence: Synthetic oligonucleotide
cagugucagcaccguggga

SEQ ID NO: 3113779 - RNA, 19 nt, Artificial Sequence
  Description of Artificial Sequence: Synthetic oligonucleotide
gcauacugccuugaguaau

SEQ ID NO: 3113780 - RNA, 19 nt, Artificial Sequence
  Description of Artificial Sequence: Synthetic oligonucleotide
ccaauguuaugguuuccau

SEQ ID NO: 3113781 - RNA, 19 nt, Artificial Sequence
  Description of Artificial Sequence: Synthetic oligonucleotide
cuggcccaguccugaaggu

SEQ ID NO: 3113782 - RNA, 19 nt, Artificial Sequence
  Description of Artificial Sequence: Synthetic oligonucleotide
ggagaacuuguugccuucu

SEQ ID NO: 3113783 - RNA, 19 nt, Artificial Sequence
  Description of Artificial Sequence: Synthetic oligonucleotide
cagcuccaauguuaugguu

SEQ ID NO: 3113784 - RNA, 19 nt, Artificial Sequence
  Description of Artificial Sequence: Synthetic oligonucleotide
guguccuuucuaguuccuu

SEQ ID NO: 3113785 - RNA, 19 nt, Artificial Sequence
  Description of Artificial Sequence: Synthetic oligonucleotide
ccggucagaaucgcuugga

SEQ ID NO: 3113786 - RNA, 19 nt, Artificial Sequence
  Description of Artificial Sequence: Synthetic oligonucleotide
gcuucagugucagcaccgu

SEQ ID NO: 3113787 - RNA, 19 nt, Artificial Sequence
  Description of Artificial Sequence: Synthetic oligonucleotide
cgcaaguguccuuucuagu

SEQ ID NO: 3113788 - RNA, 19 nt, Artificial Sequence
  Description of Artificial Sequence: Synthetic oligonucleotide
gccuaauggcucgcaaaau

SEQ ID NO: 3113789 - RNA, 19 nt, Artificial Sequence
  Description of Artificial Sequence: Synthetic oligonucleotide
cggucagaaucgcuuggaa

SEQ ID NO: 3113790 - RNA, 19 nt, Artificial Sequence
  Description of Artificial Sequence: Synthetic oligonucleotide
cuguggcauuuuguucuuu

SEQ ID NO: 3113791 - RNA, 19 nt, Artificial Sequence
  Description of Artificial Sequence: Synthetic oligonucleotide
gccuucucaugaacugcuu

SEQ ID NO: 3113792 - RNA, 19 nt, Artificial Sequence
  Description of Artificial Sequence: Synthetic oligonucleotide
cgcuuggaacuugccuaau

SEQ ID NO: 3113793 - RNA, 19 nt, Artificial Sequence
  Description of Artificial Sequence: Synthetic oligonucleotide
uuuaauaaguauuugaagu

SEQ ID NO: 3113794 - RNA, 19 nt, Artificial Sequence
  Description of Artificial Sequence: Synthetic oligonucleotide
aaccagauaaagcuggucg

SEQ ID NO: 3113795 - RNA, 19 nt, Artificial Sequence
  Description of Artificial Sequence: Synthetic oligonucleotide
agugcgauggcccacacgc

SEQ ID NO: 3113796 - RNA, 19 nt, Artificial Sequence
  Description of Artificial Sequence: Synthetic oligonucleotide
uuaauaaguauuugaagug

SEQ ID NO: 3113797 - RNA, 19 nt, Artificial Sequence
  Description of Artificial Sequence: Synthetic oligonucleotide
ucagauuggaauuuaauaa

SEQ ID NO: 3113798 - RNA, 19 nt, Artificial Sequence
  Description of Artificial Sequence: Synthetic oligonucleotide
auuuaauaaguauuugaag

SEQ ID NO: 3113799 - RNA, 19 nt, Artificial Sequence
  Description of Artificial Sequence: Synthetic oligonucleotide
uaauaaguauuugaagugg

SEQ ID NO: 3113800 - RNA, 19 nt, Artificial Sequence
  Description of Artificial Sequence: Synthetic oligonucleotide
gaauuuaauaaguauuuga

SEQ ID NO: 3113801 - RNA, 19 nt, Artificial Sequence
  Description of Artificial Sequence: Synthetic oligonucleotide
aauuuaauaaguauuugaa

SEQ ID NO: 3113802 - RNA, 19 nt, Artificial Sequence
  Description of Artificial Sequence: Synthetic oligonucleotide
aaaccugugggcuagcugu

SEQ ID NO: 3113803 - RNA, 19 nt, Artificial Sequence
  Description of Artificial Sequence: Synthetic oligonucleotide
aauaaguauuugaaguggg

SEQ ID NO: 3113804 - RNA, 19 nt, Artificial Sequence
  Description of Artificial Sequence: Synthetic oligonucleotide
aaguauuugaaguggggca

SEQ ID NO: 3113805 - RNA, 19 nt, Artificial Sequence
  Description of Artificial Sequence: Synthetic oligonucleotide
ucugacguucuuuagacga

SEQ ID NO: 3113806 - RNA, 19 nt, Artificial Sequence
  Description of Artificial Sequence: Synthetic oligonucleotide
aaaggcaagugcgauggcc

SEQ ID NO: 3113807 - RNA, 19 nt, Artificial Sequence
  Description of Artificial Sequence: Synthetic oligonucleotide
uuggaauuuaauaaguauu

SEQ ID NO: 3113808 - RNA, 19 nt, Artificial Sequence
  Description of Artificial Sequence: Synthetic oligonucleotide
agauaaagcuggucguucc

SEQ ID NO: 3113809 - RNA, 19 nt, Artificial Sequence
  Description of Artificial Sequence: Synthetic oligonucleotide
uggaauuuaauaaguauuu

SEQ ID NO: 3113810 - RNA, 19 nt, Artificial Sequence
  Description of Artificial Sequence: Synthetic oligonucleotide
cagauuggaauuuaauaag

SEQ ID NO: 3113811 - RNA, 19 nt, Artificial Sequence
  Description of Artificial Sequence: Synthetic oligonucleotide
auuggaauuuaauaaguau

SEQ ID NO: 3113812 - RNA, 19 nt, Artificial Sequence
  Description of Artificial Sequence: Synthetic oligonucleotide
aguggagccacagaggugg

SEQ ID NO: 3113813 - RNA, 19 nt, Artificial Sequence
  Description of Artificial Sequence: Synthetic oligonucleotide
uaaguauuugaaguggggc

SEQ ID NO: 3113814 - RNA, 19 nt, Artificial Sequence
  Description of Artificial Sequence: Synthetic oligonucleotide
ucuuuagacgaagaguucc

SEQ ID NO: 3113815 - RNA, 19 nt, Artificial Sequence
  Description of Artificial Sequence: Synthetic oligonucleotide
aguuccaggaugcaaaccu

SEQ ID NO: 3113816 - RNA, 19 nt, Artificial Sequence
  Description of Artificial Sequence: Synthetic oligonucleotide
uuucugacguucuuuagac

SEQ ID NO: 3113817 - RNA, 19 nt, Artificial Sequence
  Description of Artificial Sequence: Synthetic oligonucleotide
uuagacgaagaguuccagg

SEQ ID NO: 3113818 - RNA, 19 nt, Artificial Sequence
  Description of Artificial Sequence: Synthetic oligonucleotide
aaagcuggucguuccaaag

SEQ ID NO: 3113819 - RNA, 19 nt, Artificial Sequence
  Description of Artificial Sequence: Synthetic oligonucleotide
aagcuggucguuccaaagg

SEQ ID NO: 3113820 - RNA, 19 nt, Artificial Sequence
  Description of Artificial Sequence: Synthetic oligonucleotide
agcuggucguuccaaaggc

SEQ ID NO: 3113821 - RNA, 19 nt, Artificial Sequence
  Description of Artificial Sequence: Synthetic oligonucleotide
aaggcaagugcgauggccc

SEQ ID NO: 3113822 - RNA, 19 nt, Artificial Sequence
  Description of Artificial Sequence: Synthetic oligonucleotide
caggaugcaaaccuguggg

SEQ ID NO: 3113823 - RNA, 19 nt, Artificial Sequence
  Description of Artificial Sequence: Synthetic oligonucleotide
ugucuugccguccucacca

SEQ ID NO: 3113824 - RNA, 19 nt, Artificial Sequence
  Description of Artificial Sequence: Synthetic oligonucleotide
uguggguuugccgaaacag

SEQ ID NO: 3113825 - RNA, 19 nt, Artificial Sequence
  Description of Artificial Sequence: Synthetic oligonucleotide
uggguuugccgaaacaggc

SEQ ID NO: 3113826 - RNA, 19 nt, Artificial Sequence
  Description of Artificial Sequence: Synthetic oligonucleotide
ugggcuagcugucuugccg

SEQ ID NO: 3113827 - RNA, 19 nt, Artificial Sequence
  Description of Artificial Sequence: Synthetic oligonucleotide
gacgagaacgcuguguggg

SEQ ID NO: 3113828 - RNA, 19 nt, Artificial Sequence
  Description of Artificial Sequence: Synthetic oligonucleotide
acaggcuuggccaugugcc

SEQ ID NO: 3113829 - RNA, 19 nt, Artificial Sequence
  Description of Artificial Sequence: Synthetic oligonucleotide
gacgaagaguuccaggaug

SEQ ID NO: 3113830 - RNA, 19 nt, Artificial Sequence
  Description of Artificial Sequence: Synthetic oligonucleotide
aguauuugaaguggggcag

SEQ ID NO: 3113831 - RNA, 19 nt, Artificial Sequence
  Description of Artificial Sequence: Synthetic oligonucleotide
aggagcucugacgagaacg

SEQ ID NO: 3113832 - RNA, 19 nt, Artificial Sequence
  Description of Artificial Sequence: Synthetic oligonucleotide
agaguuccaggaugcaaac

SEQ ID NO: 3113833 - RNA, 19 nt, Artificial Sequence
  Description of Artificial Sequence: Synthetic oligonucleotide
auaaguauuugaagugggg

SEQ ID NO: 3113834 - RNA, 19 nt, Artificial Sequence
  Description of Artificial Sequence: Synthetic oligonucleotide
ucagugugcggucugugca

SEQ ID NO: 3113835 - RNA, 19 nt, Artificial Sequence
  Description of Artificial Sequence: Synthetic oligonucleotide
aacgcuguguggguuugcc

SEQ ID NO: 3113836 - RNA, 19 nt, Artificial Sequence
  Description of Artificial Sequence: Synthetic oligonucleotide
aggaugcaaaccugugggc

SEQ ID NO: 3113837 - RNA, 19 nt, Artificial Sequence
  Description of Artificial Sequence: Synthetic oligonucleotide
acgaagaguuccaggaugc

SEQ ID NO: 3113838 - RNA, 19 nt, Artificial Sequence
  Description of Artificial Sequence: Synthetic oligonucleotide
ugccgaaacaggcuuggcc

SEQ ID NO: 3113839 - RNA, 19 nt, Artificial Sequence
  Description of Artificial Sequence: Synthetic oligonucleotide
uuugccgaaacaggcuugg

SEQ ID NO: 3113840 - RNA, 19 nt, Artificial Sequence
  Description of Artificial Sequence: Synthetic oligonucleotide
acguucuuuagacgaagag

SEQ ID NO: 3113841 - RNA, 19 nt, Artificial Sequence
  Description of Artificial Sequence: Synthetic oligonucleotide
gggaaguggagccacagag

SEQ ID NO: 3113842 - RNA, 19 nt, Artificial Sequence
  Description of Artificial Sequence: Synthetic oligonucleotide
ucucagauuggaauuuaau

SEQ ID NO: 3113843 - RNA, 19 nt, Artificial Sequence
  Description of Artificial Sequence: Synthetic oligonucleotide
uuggccaugugccuuucug

SEQ ID NO: 3113844 - RNA, 19 nt, Artificial Sequence
  Description of Artificial Sequence: Synthetic oligonucleotide
uuuagacgaagaguuccag

SEQ ID NO: 3113845 - RNA, 19 nt, Artificial Sequence
  Description of Artificial Sequence: Synthetic oligonucleotide
aagaguuccaggaugcaaa

SEQ ID NO: 3113846 - RNA, 19 nt, Artificial Sequence
  Description of Artificial Sequence: Synthetic oligonucleotide
cucagauuggaauuuaaua

SEQ ID NO: 3113847 - RNA, 19 nt, Artificial Sequence
  Description of Artificial Sequence: Synthetic oligonucleotide
uggggcaggagcucugacg

SEQ ID NO: 3113848 - RNA, 19 nt, Artificial Sequence
  Description of Artificial Sequence: Synthetic oligonucleotide
agauuggaauuuaauaagu

SEQ ID NO: 3113849 - RNA, 19 nt, Artificial Sequence
  Description of Artificial Sequence: Synthetic oligonucleotide
cugacgagaacgcugugug

SEQ ID NO: 3113850 - RNA, 19 nt, Artificial Sequence
  Description of Artificial Sequence: Synthetic oligonucleotide
uucugacguucuuuagacg

SEQ ID NO: 3113851 - RNA, 19 nt, Artificial Sequence
  Description of Artificial Sequence: Synthetic oligonucleotide
accagauaaagcuggucgu

SEQ ID NO: 3113852 - RNA, 19 nt, Artificial Sequence
  Description of Artificial Sequence: Synthetic oligonucleotide
ucguuccaaaggcaagugc

SEQ ID NO: 3113853 - RNA, 19 nt, Artificial Sequence
  Description of Artificial Sequence: Synthetic oligonucleotide
uucagugugcggucugugc

SEQ ID NO: 3113854 - RNA, 19 nt, Artificial Sequence
  Description of Artificial Sequence: Synthetic oligonucleotide
gaaguggagccacagaggu

SEQ ID NO: 3113855 - RNA, 19 nt, Artificial Sequence
  Description of Artificial Sequence: Synthetic oligonucleotide
uccaaaggcaagugcgaug

SEQ ID NO: 3113856 - RNA, 19 nt, Artificial Sequence
  Description of Artificial Sequence: Synthetic oligonucleotide
uuccaggaugcaaaccugu

SEQ ID NO: 3113857 - RNA, 19 nt, Artificial Sequence
  Description of Artificial Sequence: Synthetic oligonucleotide
cuuucugacguucuuuaga

SEQ ID NO: 3113858 - RNA, 19 nt, Artificial Sequence
  Description of Artificial Sequence: Synthetic oligonucleotide
ugacgagaacgcugugugg

SEQ ID NO: 3113859 - RNA, 19 nt, Artificial Sequence
  Description of Artificial Sequence: Synthetic oligonucleotide
uccaggaugcaaaccugug

SEQ ID NO: 3113860 - RNA, 19 nt, Artificial Sequence
  Description of Artificial Sequence: Synthetic oligonucleotide
aagugcgauggcccacacg

SEQ ID NO: 3113861 - RNA, 19 nt, Artificial Sequence
  Description of Artificial Sequence: Synthetic oligonucleotide
uucuuuagacgaagaguuc

SEQ ID NO: 3113862 - RNA, 19 nt, Artificial Sequence
  Description of Artificial Sequence: Synthetic oligonucleotide
uggcccacacgcuucagug

SEQ ID NO: 3113863 - RNA, 19 nt, Artificial Sequence
  Description of Artificial Sequence: Synthetic oligonucleotide
uggucguuccaaaggcaag

SEQ ID NO: 3113864 - RNA, 19 nt, Artificial Sequence
  Description of Artificial Sequence: Synthetic oligonucleotide
cguuccaaaggcaagugcg

SEQ ID NO: 3113865 - RNA, 19 nt, Artificial Sequence
  Description of Artificial Sequence: Synthetic oligonucleotide
ugugccuuucugacguucu

SEQ ID NO: 3113866 - RNA, 19 nt, Artificial Sequence
  Description of Artificial Sequence: Synthetic oligonucleotide
ugacguucuuuagacgaag

SEQ ID NO: 3113867 - RNA, 19 nt, Artificial Sequence
  Description of Artificial Sequence: Synthetic oligonucleotide
gauaaagcuggucguucca

SEQ ID NO: 3113868 - RNA, 19 nt, Artificial Sequence
  Description of Artificial Sequence: Synthetic oligonucleotide
gauuggaauuuaauaagua

SEQ ID NO: 3113869 - RNA, 19 nt, Artificial Sequence
  Description of Artificial Sequence: Synthetic oligonucleotide
ggaauuuaauaaguauuug

SEQ ID NO: 3113870 - RNA, 19 nt, Artificial Sequence
  Description of Artificial Sequence: Synthetic oligonucleotide
cccaaccagauaaagcugg

SEQ ID NO: 3113871 - RNA, 19 nt, Artificial Sequence
  Description of Artificial Sequence: Synthetic oligonucleotide
ccaaaggcaagugcgaugg

SEQ ID NO: 3113872 - RNA, 19 nt, Artificial Sequence
  Description of Artificial Sequence: Synthetic oligonucleotide
ucugacgagaacgcugugu

SEQ ID NO: 3113873 - RNA, 19 nt, Artificial Sequence
  Description of Artificial Sequence: Synthetic oligonucleotide
guggguuugccgaaacagg

SEQ ID NO: 3113874 - RNA, 19 nt, Artificial Sequence
  Description of Artificial Sequence: Synthetic oligonucleotide
cuuuagacgaagaguucca

SEQ ID NO: 3113875 - RNA, 19 nt, Artificial Sequence
  Description of Artificial Sequence: Synthetic oligonucleotide
ugccguccucaccaaaacc

SEQ ID NO: 3113876 - RNA, 19 nt, Artificial Sequence
  Description of Artificial Sequence: Synthetic oligonucleotide
guucuuuagacgaagaguu

SEQ ID NO: 3113877 - RNA, 19 nt, Artificial Sequence
  Description of Artificial Sequence: Synthetic oligonucleotide
guauuugaaguggggcagg

SEQ ID NO: 3113878 - RNA, 19 nt, Artificial Sequence
  Description of Artificial Sequence: Synthetic oligonucleotide
uguguggguuugccgaaac

SEQ ID NO: 3113879 - RNA, 19 nt, Artificial Sequence
  Description of Artificial Sequence: Synthetic oligonucleotide
ugugcggucugugcagggg

SEQ ID NO: 3113880 - RNA, 19 nt, Artificial Sequence
  Description of Artificial Sequence: Synthetic oligonucleotide
uauuugaaguggggcagga

SEQ ID NO: 3113881 - RNA, 19 nt, Artificial Sequence
  Description of Artificial Sequence: Synthetic oligonucleotide
ugugggcuagcugucuugc

SEQ ID NO: 3113882 - RNA, 19 nt, Artificial Sequence
  Description of Artificial Sequence: Synthetic oligonucleotide
uggccaugugccuuucuga

SEQ ID NO: 3113883 - RNA, 19 nt, Artificial Sequence
  Description of Artificial Sequence: Synthetic oligonucleotide
acacgcuucagugugcggu

SEQ ID NO: 3113884 - RNA, 19 nt, Artificial Sequence
  Description of Artificial Sequence: Synthetic oligonucleotide
gaugcaaaccugugggcua

SEQ ID NO: 3113885 - RNA, 19 nt, Artificial Sequence
  Description of Artificial Sequence: Synthetic oligonucleotide
uugccguccucaccaaaac

SEQ ID NO: 3113886 - RNA, 19 nt, Artificial Sequence
  Description of Artificial Sequence: Synthetic oligonucleotide
gugcaggggaaguggagcc

SEQ ID NO: 3113887 - RNA, 19 nt, Artificial Sequence
  Description of Artificial Sequence: Synthetic oligonucleotide
caaaccugugggcuagcug

SEQ ID NO: 3113888 - RNA, 19 nt, Artificial Sequence
  Description of Artificial Sequence: Synthetic oligonucleotide
gccgaaacaggcuuggcca

SEQ ID NO: 3113889 - RNA, 19 nt, Artificial Sequence
  Description of Artificial Sequence: Synthetic oligonucleotide
ggaaguggagccacagagg

SEQ ID NO: 3113890 - RNA, 19 nt, Artificial Sequence
  Description of Artificial Sequence: Synthetic oligonucleotide
agacgaagaguuccaggau

SEQ ID NO: 3113891 - RNA, 19 nt, Artificial Sequence
  Description of Artificial Sequence: Synthetic oligonucleotide
gaagaguuccaggaugcaa

SEQ ID NO: 3113892 - RNA, 19 nt, Artificial Sequence
  Description of Artificial Sequence: Synthetic oligonucleotide
ugcgauggcccacacgcuu

SEQ ID NO: 3113893 - RNA, 19 nt, Artificial Sequence
  Description of Artificial Sequence: Synthetic oligonucleotide
agcucugacgagaacgcug

SEQ ID NO: 3113894 - RNA, 19 nt, Artificial Sequence
  Description of Artificial Sequence: Synthetic oligonucleotide
auuugaaguggggcaggag

SEQ ID NO: 3113895 - RNA, 19 nt, Artificial Sequence
  Description of Artificial Sequence: Synthetic oligonucleotide
ccaggaugcaaaccugugg

SEQ ID NO: 3113896 - RNA, 19 nt, Artificial Sequence
  Description of Artificial Sequence: Synthetic oligonucleotide
cagauaaagcuggucguuc

SEQ ID NO: 3113897 - RNA, 19 nt, Artificial Sequence
  Description of Artificial Sequence: Synthetic oligonucleotide
aaacaggcuuggccaugug

SEQ ID NO: 3113898 - RNA, 19 nt, Artificial Sequence
  Description of Artificial Sequence: Synthetic oligonucleotide
cagugugcggucugugcag

SEQ ID NO: 3113899 - RNA, 19 nt, Artificial Sequence
  Description of Artificial Sequence: Synthetic oligonucleotide
acgcuguguggguuugccg

SEQ ID NO: 3113900 - RNA, 19 nt, Artificial Sequence
  Description of Artificial Sequence: Synthetic oligonucleotide
cacagagguggagacuugc

SEQ ID NO: 3113901 - RNA, 19 nt, Artificial Sequence
  Description of Artificial Sequence: Synthetic oligonucleotide
augcaaaccugugggcuag

SEQ ID NO: 3113902 - RNA, 19 nt, Artificial Sequence
  Description of Artificial Sequence: Synthetic oligonucleotide
augugccuuucugacguuc

SEQ ID NO: 3113903 - RNA, 19 nt, Artificial Sequence
  Description of Artificial Sequence: Synthetic oligonucleotide
agugugcggucugugcagg

SEQ ID NO: 3113904 - RNA, 19 nt, Artificial Sequence
  Description of Artificial Sequence: Synthetic oligonucleotide
gccguccucaccaaaaccc

SEQ ID NO: 3113905 - RNA, 19 nt, Artificial Sequence
  Description of Artificial Sequence: Synthetic oligonucleotide
gaguuccaggaugcaaacc

SEQ ID NO: 3113906 - RNA, 19 nt, Artificial Sequence
  Description of Artificial Sequence: Synthetic oligonucleotide
cuugccguccucaccaaaa

SEQ ID NO: 3113907 - RNA, 19 nt, Artificial Sequence
  Description of Artificial Sequence: Synthetic oligonucleotide
aaccugugggcuagcuguc

SEQ ID NO: 3113908 - RNA, 19 nt, Artificial Sequence
  Description of Artificial Sequence: Synthetic oligonucleotide
auaaagcuggucguuccaa

SEQ ID NO: 3113909 - RNA, 19 nt, Artificial Sequence
  Description of Artificial Sequence: Synthetic oligonucleotide
uuccaaaggcaagugcgau

SEQ ID NO: 3113910 - RNA, 19 nt, Artificial Sequence
  Description of Artificial Sequence: Synthetic oligonucleotide
cugugcaggggaaguggag

SEQ ID NO: 3113911 - RNA, 19 nt, Artificial Sequence
  Description of Artificial Sequence: Synthetic oligonucleotide
cugucuugccguccucacc

SEQ ID NO: 3113912 - RNA, 19 nt, Artificial Sequence
  Description of Artificial Sequence: Synthetic oligonucleotide
guuccaggaugcaaaccug

SEQ ID NO: 3113913 - RNA, 19 nt, Artificial Sequence
  Description of Artificial Sequence: Synthetic oligonucleotide
cuggucguuccaaaggcaa

SEQ ID NO: 3113914 - RNA, 19 nt, Artificial Sequence
  Description of Artificial Sequence: Synthetic oligonucleotide
ggggcaggagcucugacga

SEQ ID NO: 3113915 - RNA, 19 nt, Artificial Sequence
  Description of Artificial Sequence: Synthetic oligonucleotide
acgagaacgcugugugggu

SEQ ID NO: 3113916 - RNA, 19 nt, Artificial Sequence
  Description of Artificial Sequence: Synthetic oligonucleotide
aaguggagccacagaggug

SEQ ID NO: 3113917 - RNA, 19 nt, Artificial Sequence
  Description of Artificial Sequence: Synthetic oligonucleotide
guuccaaaggcaagugcga

SEQ ID NO: 3113918 - RNA, 19 nt, Artificial Sequence
  Description of Artificial Sequence: Synthetic oligonucleotide
gacguucuuuagacgaaga

SEQ ID NO: 3113919 - RNA, 19 nt, Artificial Sequence
  Description of Artificial Sequence: Synthetic oligonucleotide
gccaugugccuuucugacg

SEQ ID NO: 3113920 - RNA, 19 nt, Artificial Sequence
  Description of Artificial Sequence: Synthetic oligonucleotide
guuugccgaaacaggcuug

SEQ ID NO: 3113921 - RNA, 19 nt, Artificial Sequence
  Description of Artificial Sequence: Synthetic oligonucleotide
ggccaugugccuuucugac

SEQ ID NO: 3113922 - RNA, 19 nt, Artificial Sequence
  Description of Artificial Sequence: Synthetic oligonucleotide
ggagcucugacgagaacgc

SEQ ID NO: 3113923 - RNA, 19 nt, Artificial Sequence
  Description of Artificial Sequence: Synthetic oligonucleotide
aggggaaguggagccacag

SEQ ID NO: 3113924 - RNA, 19 nt, Artificial Sequence
  Description of Artificial Sequence: Synthetic oligonucleotide
cugugggcuagcugucuug

SEQ ID NO: 3113925 - RNA, 19 nt, Artificial Sequence
  Description of Artificial Sequence: Synthetic oligonucleotide
gucguuccaaaggcaagug

SEQ ID NO: 3113926 - RNA, 19 nt, Artificial Sequence
  Description of Artificial Sequence: Synthetic oligonucleotide
ucuugccguccucaccaaa

SEQ ID NO: 3113927 - RNA, 19 nt, Artificial Sequence
  Description of Artificial Sequence: Synthetic oligonucleotide
cacgcuucagugugcgguc

SEQ ID NO: 3113928 - RNA, 19 nt, Artificial Sequence
  Description of Artificial Sequence: Synthetic oligonucleotide
ugaaguggggcaggagcuc

SEQ ID NO: 3113929 - RNA, 19 nt, Artificial Sequence
  Description of Artificial Sequence: Synthetic oligonucleotide
aggcaagugcgauggccca

SEQ ID NO: 3113930 - RNA, 19 nt, Artificial Sequence
  Description of Artificial Sequence: Synthetic oligonucleotide
caaccagauaaagcugguc

SEQ ID NO: 3113931 - RNA, 19 nt, Artificial Sequence
  Description of Artificial Sequence: Synthetic oligonucleotide
gcccacacgcuucagugug

SEQ ID NO: 3113932 - RNA, 19 nt, Artificial Sequence
  Description of Artificial Sequence: Synthetic oligonucleotide
ugcaggggaaguggagcca

SEQ ID NO: 3113933 - RNA, 19 nt, Artificial Sequence
  Description of Artificial Sequence: Synthetic oligonucleotide
caaaggcaagugcgauggc

SEQ ID NO: 3113934 - RNA, 19 nt, Artificial Sequence
  Description of Artificial Sequence: Synthetic oligonucleotide
gugugcggucugugcaggg

SEQ ID NO: 3113935 - RNA, 19 nt, Artificial Sequence
  Description of Artificial Sequence: Synthetic oligonucleotide
ugccuuucugacguucuuu

SEQ ID NO: 3113936 - RNA, 19 nt, Artificial Sequence
  Description of Artificial Sequence: Synthetic oligonucleotide
cugacguucuuuagacgaa

SEQ ID NO: 3113937 - RNA, 19 nt, Artificial Sequence
  Description of Artificial Sequence: Synthetic oligonucleotide
cacacgcuucagugugcgg

SEQ ID NO: 3113938 - RNA, 19 nt, Artificial Sequence
  Description of Artificial Sequence: Synthetic oligonucleotide
ccuuucugacguucuuuag

SEQ ID NO: 3113939 - RNA, 19 nt, Artificial Sequence
  Description of Artificial Sequence: Synthetic oligonucleotide
gaaacaggcuuggccaugu

SEQ ID NO: 3113940 - RNA, 19 nt, Artificial Sequence
  Description of Artificial Sequence: Synthetic oligonucleotide
cuucagugugcggucugug

SEQ ID NO: 3113941 - RNA, 19 nt, Artificial Sequence
  Description of Artificial Sequence: Synthetic oligonucleotide
ccguccucaccaaaacccc

SEQ ID NO: 3113942 - RNA, 19 nt, Artificial Sequence
  Description of Artificial Sequence: Synthetic oligonucleotide
guguggguuugccgaaaca

SEQ ID NO: 3113943 - RNA, 19 nt, Artificial Sequence
  Description of Artificial Sequence: Synthetic oligonucleotide
gugcggucugugcagggga

SEQ ID NO: 3113944 - RNA, 19 nt, Artificial Sequence
  Description of Artificial Sequence: Synthetic oligonucleotide
uugccgaaacaggcuuggc

SEQ ID NO: 3113945 - RNA, 19 nt, Artificial Sequence
  Description of Artificial Sequence: Synthetic oligonucleotide
gaaguggggcaggagcucu

SEQ ID NO: 3113946 - RNA, 19 nt, Artificial Sequence
  Description of Artificial Sequence: Synthetic oligonucleotide
gauggcccacacgcuucag

SEQ ID NO: 3113947 - RNA, 19 nt, Artificial Sequence
  Description of Artificial Sequence: Synthetic oligonucleotide
cuagcugucuugccguccu

SEQ ID NO: 3113948 - RNA, 19 nt, Artificial Sequence
  Description of Artificial Sequence: Synthetic oligonucleotide
ccccaaccagauaaagcug

SEQ ID NO: 3113949 - RNA, 19 nt, Artificial Sequence
  Description of Artificial Sequence: Synthetic oligonucleotide
caagugcgauggcccacac

SEQ ID NO: 3113950 - RNA, 19 nt, Artificial Sequence
  Description of Artificial Sequence: Synthetic oligonucleotide
ggaugcaaaccugugggcu

SEQ ID NO: 3113951 - RNA, 19 nt, Artificial Sequence
  Description of Artificial Sequence: Synthetic oligonucleotide
ugcaaaccugugggcuagc

SEQ ID NO: 3113952 - RNA, 19 nt, Artificial Sequence
  Description of Artificial Sequence: Synthetic oligonucleotide
gaacgcuguguggguuugc

SEQ ID NO: 3113953 - RNA, 19 nt, Artificial Sequence
  Description of Artificial Sequence: Synthetic oligonucleotide
gagaacgcuguguggguuu

SEQ ID NO: 3113954 - RNA, 19 nt, Artificial Sequence
  Description of Artificial Sequence: Synthetic oligonucleotide
ggcaggagcucugacgaga

SEQ ID NO: 3113955 - RNA, 19 nt, Artificial Sequence
  Description of Artificial Sequence: Synthetic oligonucleotide
gcugucuugccguccucac

SEQ ID NO: 3113956 - RNA, 19 nt, Artificial Sequence
  Description of Artificial Sequence: Synthetic oligonucleotide
gguuugccgaaacaggcuu

SEQ ID NO: 3113957 - RNA, 19 nt, Artificial Sequence
  Description of Artificial Sequence: Synthetic oligonucleotide
ccaugugccuuucugacgu

SEQ ID NO: 3113958 - RNA, 19 nt, Artificial Sequence
  Description of Artificial Sequence: Synthetic oligonucleotide
caggagcucugacgagaac

SEQ ID NO: 3113959 - RNA, 19 nt, Artificial Sequence
  Description of Artificial Sequence: Synthetic oligonucleotide
cucugacgagaacgcugug

SEQ ID NO: 3113960 - RNA, 19 nt, Artificial Sequence
  Description of Artificial Sequence: Synthetic oligonucleotide
uagcugucuugccguccuc

SEQ ID NO: 3113961 - RNA, 19 nt, Artificial Sequence
  Description of Artificial Sequence: Synthetic oligonucleotide
ccacacgcuucagugugcg

SEQ ID NO: 3113962 - RNA, 19 nt, Artificial Sequence
  Description of Artificial Sequence: Synthetic oligonucleotide
accugugggcuagcugucu

SEQ ID NO: 3113963 - RNA, 19 nt, Artificial Sequence
  Description of Artificial Sequence: Synthetic oligonucleotide
gcuagcugucuugccgucc

SEQ ID NO: 3113964 - RNA, 19 nt, Artificial Sequence
  Description of Artificial Sequence: Synthetic oligonucleotide
ggucguuccaaaggcaagu

SEQ ID NO: 3113965 - RNA, 19 nt, Artificial Sequence
  Description of Artificial Sequence: Synthetic oligonucleotide
gcaggggaaguggagccac

SEQ ID NO: 3113966 - RNA, 19 nt, Artificial Sequence
  Description of Artificial Sequence: Synthetic oligonucleotide
acgcuucagugugcggucu

SEQ ID NO: 3113967 - RNA, 19 nt, Artificial Sequence
  Description of Artificial Sequence: Synthetic oligonucleotide
cgcuguguggguuugccga

SEQ ID NO: 3113968 - RNA, 19 nt, Artificial Sequence
  Description of Artificial Sequence: Synthetic oligonucleotide
aggcuuggccaugugccuu

SEQ ID NO: 3113969 - RNA, 19 nt, Artificial Sequence
  Description of Artificial Sequence: Synthetic oligonucleotide
cccacacgcuucagugugc

SEQ ID NO: 3113970 - RNA, 19 nt, Artificial Sequence
  Description of Artificial Sequence: Synthetic oligonucleotide
gcaagugcgauggcccaca

SEQ ID NO: 3113971 - RNA, 19 nt, Artificial Sequence
  Description of Artificial Sequence: Synthetic oligonucleotide
gggcaggagcucugacgag

SEQ ID NO: 3113972 - RNA, 19 nt, Artificial Sequence
  Description of Artificial Sequence: Synthetic oligonucleotide
gcuggucguuccaaaggca

SEQ ID NO: 3113973 - RNA, 19 nt, Artificial Sequence
  Description of Artificial Sequence: Synthetic oligonucleotide
gcuguguggguuugccgaa

SEQ ID NO: 3113974 - RNA, 19 nt, Artificial Sequence
  Description of Artificial Sequence: Synthetic oligonucleotide
cguucuuuagacgaagagu

SEQ ID NO: 3113975 - RNA, 19 nt, Artificial Sequence
  Description of Artificial Sequence: Synthetic oligonucleotide
gcucugacgagaacgcugu

SEQ ID NO: 3113976 - RNA, 19 nt, Artificial Sequence
  Description of Artificial Sequence: Synthetic oligonucleotide
caggggaaguggagccaca

SEQ ID NO: 3113977 - RNA, 19 nt, Artificial Sequence
  Description of Artificial Sequence: Synthetic oligonucleotide
gggcuagcugucuugccgu

SEQ ID NO: 3113978 - RNA, 19 nt, Artificial Sequence
  Description of Artificial Sequence: Synthetic oligonucleotide
caggcuuggccaugugccu

SEQ ID NO: 3113979 - RNA, 19 nt, Artificial Sequence
  Description of Artificial Sequence: Synthetic oligonucleotide
ggcaagugcgauggcccac

SEQ ID NO: 3113980 - RNA, 19 nt, Artificial Sequence
  Description of Artificial Sequence: Synthetic oligonucleotide
gagcucugacgagaacgcu

SEQ ID NO: 3113981 - RNA, 19 nt, Artificial Sequence
  Description of Artificial Sequence: Synthetic oligonucleotide
ggcuagcugucuugccguc

SEQ ID NO: 3113982 - RNA, 19 nt, Artificial Sequence
  Description of Artificial Sequence: Synthetic oligonucleotide
gucuugccguccucaccaa

SEQ ID NO: 3113983 - RNA, 19 nt, Artificial Sequence
  Description of Artificial Sequence: Synthetic oligonucleotide
ccacagagguggagacuug

SEQ ID NO: 3113984 - RNA, 19 nt, Artificial Sequence
  Description of Artificial Sequence: Synthetic oligonucleotide
gccacagagguggagacuu

SEQ ID NO: 3113985 - RNA, 19 nt, Artificial Sequence
  Description of Artificial Sequence: Synthetic oligonucleotide
gcggucugugcaggggaag

SEQ ID NO: 3113986 - RNA, 19 nt, Artificial Sequence
  Description of Artificial Sequence: Synthetic oligonucleotide
gcaggagcucugacgagaa

SEQ ID NO: 3113987 - RNA, 19 nt, Artificial Sequence
  Description of Artificial Sequence: Synthetic oligonucleotide
gcgauggcccacacgcuuc

SEQ ID NO: 3113988 - RNA, 19 nt, Artificial Sequence
  Description of Artificial Sequence: Synthetic oligonucleotide
cuguguggguuugccgaaa

SEQ ID NO: 3113989 - RNA, 19 nt, Artificial Sequence
  Description of Artificial Sequence: Synthetic oligonucleotide
cgaaacaggcuuggccaug

SEQ ID NO: 3113990 - RNA, 19 nt, Artificial Sequence
  Description of Artificial Sequence: Synthetic oligonucleotide
gugccuuucugacguucuu

SEQ ID NO: 3113991 - RNA, 19 nt, Artificial Sequence
  Description of Artificial Sequence: Synthetic oligonucleotide
ccaaccagauaaagcuggu

SEQ ID NO: 3113992 - RNA, 19 nt, Artificial Sequence
  Description of Artificial Sequence: Synthetic oligonucleotide
ggcccacacgcuucagugu

SEQ ID NO: 3113993 - RNA, 19 nt, Artificial Sequence
  Description of Artificial Sequence: Synthetic oligonucleotide
cgcuucagugugcggucug

SEQ ID NO: 3113994 - RNA, 19 nt, Artificial Sequence
  Description of Artificial Sequence: Synthetic oligonucleotide
gcuucagugugcggucugu

SEQ ID NO: 3113995 - RNA, 19 nt, Artificial Sequence
  Description of Artificial Sequence: Synthetic oligonucleotide
ggcuuggccaugugccuuu

SEQ ID NO: 3113996 - RNA, 19 nt, Artificial Sequence
  Description of Artificial Sequence: Synthetic oligonucleotide
ccagauaaagcuggucguu

SEQ ID NO: 3113997 - RNA, 19 nt, Artificial Sequence
  Description of Artificial Sequence: Synthetic oligonucleotide
caugugccuuucugacguu

SEQ ID NO: 3113998 - RNA, 19 nt, Artificial Sequence
  Description of Artificial Sequence: Synthetic oligonucleotide
ccgaaacaggcuuggccau

SEQ ID NO: 3113999 - RNA, 19 nt, Artificial Sequence
  Description of Artificial Sequence: Synthetic oligonucleotide
cgaagaguuccaggaugca

SEQ ID NO: 3114000 - RNA, 19 nt, Artificial Sequence
  Description of Artificial Sequence: Synthetic oligonucleotide
cgauggcccacacgcuuca

SEQ ID NO: 3114001 - RNA, 19 nt, Artificial Sequence
  Description of Artificial Sequence: Synthetic oligonucleotide
ccugugggcuagcugucuu

SEQ ID NO: 3114002 - RNA, 19 nt, Artificial Sequence
  Description of Artificial Sequence: Synthetic oligonucleotide
cgagaacgcuguguggguu

SEQ ID NO: 3114003 - RNA, 19 nt, Artificial Sequence
  Description of Artificial Sequence: Synthetic oligonucleotide
aagagcuucagccccaucc

SEQ ID NO: 3114004 - RNA, 19 nt, Artificial Sequence
  Description of Artificial Sequence: Synthetic oligonucleotide
ucuucaaagguauacagug

SEQ ID NO: 3114005 - RNA, 19 nt, Artificial Sequence
  Description of Artificial Sequence: Synthetic oligonucleotide
aagagcaggcuguagaaac

SEQ ID NO: 3114006 - RNA, 19 nt, Artificial Sequence
  Description of Artificial Sequence: Synthetic oligonucleotide
aagguauacagugucaagg

SEQ ID NO: 3114007 - RNA, 19 nt, Artificial Sequence
  Description of Artificial Sequence: Synthetic oligonucleotide
aacucgguuguuuucaaag

SEQ ID NO: 3114008 - RNA, 19 nt, Artificial Sequence
  Description of Artificial Sequence: Synthetic oligonucleotide
ugucugaagagcuucagcc

SEQ ID NO: 3114009 - RNA, 19 nt, Artificial Sequence
  Description of Artificial Sequence: Synthetic oligonucleotide
uacacuggcaccgugaccg

SEQ ID NO: 3114010 - RNA, 19 nt, Artificial Sequence
  Description of Artificial Sequence: Synthetic oligonucleotide
aggcuguagaaacacaggc

SEQ ID NO: 3114011 - RNA, 19 nt, Artificial Sequence
  Description of Artificial Sequence: Synthetic oligonucleotide
uauacagugucaaggaaac

SEQ ID NO: 3114012 - RNA, 19 nt, Artificial Sequence
  Description of Artificial Sequence: Synthetic oligonucleotide
aguagaacaggccugccag

SEQ ID NO: 3114013 - RNA, 19 nt, Artificial Sequence
  Description of Artificial Sequence: Synthetic oligonucleotide
uagaaacacaggcugcugg

SEQ ID NO: 3114014 - RNA, 19 nt, Artificial Sequence
  Description of Artificial Sequence: Synthetic oligonucleotide
agaaacacaggcugcuggc

SEQ ID NO: 3114015 - RNA, 19 nt, Artificial Sequence
  Description of Artificial Sequence: Synthetic oligonucleotide
ucugaagagcuucagcccc

SEQ ID NO: 3114016 - RNA, 19 nt, Artificial Sequence
  Description of Artificial Sequence: Synthetic oligonucleotide
aacacguacacuggcaccg

SEQ ID NO: 3114017 - RNA, 19 nt, Artificial Sequence
  Description of Artificial Sequence: Synthetic oligonucleotide
aaagguauacagugucaag

SEQ ID NO: 3114018 - RNA, 19 nt, Artificial Sequence
  Description of Artificial Sequence: Synthetic oligonucleotide
agaacacguacacuggcac

SEQ ID NO: 3114019 - RNA, 19 nt, Artificial Sequence
  Description of Artificial Sequence: Synthetic oligonucleotide
uucaaagguauacaguguc

SEQ ID NO: 3114020 - RNA, 19 nt, Artificial Sequence
  Description of Artificial Sequence: Synthetic oligonucleotide
uucagccccauccaggucc

SEQ ID NO: 3114021 - RNA, 19 nt, Artificial Sequence
  Description of Artificial Sequence: Synthetic oligonucleotide
cuucuucaaagguauacag

SEQ ID NO: 3114022 - RNA, 19 nt, Artificial Sequence
  Description of Artificial Sequence: Synthetic oligonucleotide
ugucaaggaaacucgguug

SEQ ID NO: 3114023 - RNA, 19 nt, Artificial Sequence
  Description of Artificial Sequence: Synthetic oligonucleotide
gacgggaacauccuucucc

SEQ ID NO: 3114024 - RNA, 19 nt, Artificial Sequence
  Description of Artificial Sequence: Synthetic oligonucleotide
acgggaacauccuucuccc

SEQ ID NO: 3114025 - RNA, 19 nt, Artificial Sequence
  Description of Artificial Sequence: Synthetic oligonucleotide
ucagggugggcagagacgg

SEQ ID NO: 3114026 - RNA, 19 nt, Artificial Sequence
  Description of Artificial Sequence: Synthetic oligonucleotide
gaugaggaccgucagggug

SEQ ID NO: 3114027 - RNA, 19 nt, Artificial Sequence
  Description of Artificial Sequence: Synthetic oligonucleotide
ucaaagguauacaguguca

SEQ ID NO: 3114028 - RNA, 19 nt, Artificial Sequence
  Description of Artificial Sequence: Synthetic oligonucleotide
uucuucaaagguauacagu

SEQ ID NO: 3114029 - RNA, 19 nt, Artificial Sequence
  Description of Artificial Sequence: Synthetic oligonucleotide
uacagugucaaggaaacuc

SEQ ID NO: 3114030 - RNA, 19 nt, Artificial Sequence
  Description of Artificial Sequence: Synthetic oligonucleotide
acaguggcggaguagaaca

SEQ ID NO: 3114031 - RNA, 19 nt, Artificial Sequence
  Description of Artificial Sequence: Synthetic oligonucleotide
gaagaacacguacacuggc

SEQ ID NO: 3114032 - RNA, 19 nt, Artificial Sequence
  Description of Artificial Sequence: Synthetic oligonucleotide
ugccagugagaccagcggg

SEQ ID NO: 3114033 - RNA, 19 nt, Artificial Sequence
  Description of Artificial Sequence: Synthetic oligonucleotide
acagugucaaggaaacucg

SEQ ID NO: 3114034 - RNA, 19 nt, Artificial Sequence
  Description of Artificial Sequence: Synthetic oligonucleotide
ucgguuguuuucaaaguuc

SEQ ID NO: 3114035 - RNA, 19 nt, Artificial Sequence
  Description of Artificial Sequence: Synthetic oligonucleotide
uuaugucugaagagcuuca

SEQ ID NO: 3114036 - RNA, 19 nt, Artificial Sequence
  Description of Artificial Sequence: Synthetic oligonucleotide
gaacaggccugccagugag

SEQ ID NO: 3114037 - RNA, 19 nt, Artificial Sequence
  Description of Artificial Sequence: Synthetic oligonucleotide
uguagaaacacaggcugcu

SEQ ID NO: 3114038 - RNA, 19 nt, Artificial Sequence
  Description of Artificial Sequence: Synthetic oligonucleotide
agugagaccagcgggauga

SEQ ID NO: 3114039 - RNA, 19 nt, Artificial Sequence
  Description of Artificial Sequence: Synthetic oligonucleotide
aaggaaacucgguuguuuu

SEQ ID NO: 3114040 - RNA, 19 nt, Artificial Sequence
  Description of Artificial Sequence: Synthetic oligonucleotide
cauccagguccacaggugg

SEQ ID NO: 3114041 - RNA, 19 nt, Artificial Sequence
  Description of Artificial Sequence: Synthetic oligonucleotide
auccuuccuccacaguggc

SEQ ID NO: 3114042 - RNA, 19 nt, Artificial Sequence
  Description of Artificial Sequence: Synthetic oligonucleotide
aggaaacucgguuguuuuc

SEQ ID NO: 3114043 - RNA, 19 nt, Artificial Sequence
  Description of Artificial Sequence: Synthetic oligonucleotide
uucucccuucuucaaaggu

SEQ ID NO: 3114044 - RNA, 19 nt, Artificial Sequence
  Description of Artificial Sequence: Synthetic oligonucleotide
ucucccuucuucaaaggua

SEQ ID NO: 3114045 - RNA, 19 nt, Artificial Sequence
  Description of Artificial Sequence: Synthetic oligonucleotide
cuguagaaacacaggcugc

SEQ ID NO: 3114046 - RNA, 19 nt, Artificial Sequence
  Description of Artificial Sequence: Synthetic oligonucleotide
agagacgggaacauccuuc

SEQ ID NO: 3114047 - RNA, 19 nt, Artificial Sequence
  Description of Artificial Sequence: Synthetic oligonucleotide
cugagggaauccuuccucc

SEQ ID NO: 3114048 - RNA, 19 nt, Artificial Sequence
  Description of Artificial Sequence: Synthetic oligonucleotide
gaacacguacacuggcacc

SEQ ID NO: 3114049 - RNA, 19 nt, Artificial Sequence
  Description of Artificial Sequence: Synthetic oligonucleotide
caggcuguagaaacacagg

SEQ ID NO: 3114050 - RNA, 19 nt, Artificial Sequence
  Description of Artificial Sequence: Synthetic oligonucleotide
gggaugaggaccgucaggg

SEQ ID NO: 3114051 - RNA, 19 nt, Artificial Sequence
  Description of Artificial Sequence: Synthetic oligonucleotide
gucugaagagcuucagccc

SEQ ID NO: 3114052 - RNA, 19 nt, Artificial Sequence
  Description of Artificial Sequence: Synthetic oligonucleotide
accgugaccggcaagagca

SEQ ID NO: 3114053 - RNA, 19 nt, Artificial Sequence
  Description of Artificial Sequence: Synthetic oligonucleotide
augaggaccgucagggugg

SEQ ID NO: 3114054 - RNA, 19 nt, Artificial Sequence
  Description of Artificial Sequence: Synthetic oligonucleotide
uccacaguggcggaguaga

SEQ ID NO: 3114055 - RNA, 19 nt, Artificial Sequence
  Description of Artificial Sequence: Synthetic oligonucleotide
uaugucugaagagcuucag

SEQ ID NO: 3114056 - RNA, 19 nt, Artificial Sequence
  Description of Artificial Sequence: Synthetic oligonucleotide
acucgguuguuuucaaagu

SEQ ID NO: 3114057 - RNA, 19 nt, Artificial Sequence
  Description of Artificial Sequence: Synthetic oligonucleotide
aggccugccagugagacca

SEQ ID NO: 3114058 - RNA, 19 nt, Artificial Sequence
  Description of Artificial Sequence: Synthetic oligonucleotide
cagugucaaggaaacucgg

SEQ ID NO: 3114059 - RNA, 19 nt, Artificial Sequence
  Description of Artificial Sequence: Synthetic oligonucleotide
agagcuucagccccaucca

SEQ ID NO: 3114060 - RNA, 19 nt, Artificial Sequence
  Description of Artificial Sequence: Synthetic oligonucleotide
gagaccagcgggaugagga

SEQ ID NO: 3114061 - RNA, 19 nt, Artificial Sequence
  Description of Artificial Sequence: Synthetic oligonucleotide
gguggaagaacacguacac

SEQ ID NO: 3114062 - RNA, 19 nt, Artificial Sequence
  Description of Artificial Sequence: Synthetic oligonucleotide
agaccagcgggaugaggac

SEQ ID NO: 3114063 - RNA, 19 nt, Artificial Sequence
  Description of Artificial Sequence: Synthetic oligonucleotide
guauacagugucaaggaaa

SEQ ID NO: 3114064 - RNA, 19 nt, Artificial Sequence
  Description of Artificial Sequence: Synthetic oligonucleotide
acaggccugccagugagac

SEQ ID NO: 3114065 - RNA, 19 nt, Artificial Sequence
  Description of Artificial Sequence: Synthetic oligonucleotide
cagguggaagaacacguac

SEQ ID NO: 3114066 - RNA, 19 nt, Artificial Sequence
  Description of Artificial Sequence: Synthetic oligonucleotide
cuucucccuucuucaaagg

SEQ ID NO: 3114067 - RNA, 19 nt, Artificial Sequence
  Description of Artificial Sequence: Synthetic oligonucleotide
uccacagguggaagaacac

SEQ ID NO: 3114068 - RNA, 19 nt, Artificial Sequence
  Description of Artificial Sequence: Synthetic oligonucleotide
ugagggaauccuuccucca

SEQ ID NO: 3114069 - RNA, 19 nt, Artificial Sequence
  Description of Artificial Sequence: Synthetic oligonucleotide
aaacucgguuguuuucaaa

SEQ ID NO: 3114070 - RNA, 19 nt, Artificial Sequence
  Description of Artificial Sequence: Synthetic oligonucleotide
gaguagaacaggccugcca

SEQ ID NO: 3114071 - RNA, 19 nt, Artificial Sequence
  Description of Artificial Sequence: Synthetic oligonucleotide
aguggcggaguagaacagg

SEQ ID NO: 3114072 - RNA, 19 nt, Artificial Sequence
  Description of Artificial Sequence: Synthetic oligonucleotide
ggaagaacacguacacugg

SEQ ID NO: 3114073 - RNA, 19 nt, Artificial Sequence
  Description of Artificial Sequence: Synthetic oligonucleotide
gagggaauccuuccuccac

SEQ ID NO: 3114074 - RNA, 19 nt, Artificial Sequence
  Description of Artificial Sequence: Synthetic oligonucleotide
cugccagugagaccagcgg

SEQ ID NO: 3114075 - RNA, 19 nt, Artificial Sequence
  Description of Artificial Sequence: Synthetic oligonucleotide
uccuuccuccacaguggcg

SEQ ID NO: 3114076 - RNA, 19 nt, Artificial Sequence
  Description of Artificial Sequence: Synthetic oligonucleotide
ggcagagacgggaacaucc

SEQ ID NO: 3114077 - RNA, 19 nt, Artificial Sequence
  Description of Artificial Sequence: Synthetic oligonucleotide
uggcggaguagaacaggcc

SEQ ID NO: 3114078 - RNA, 19 nt, Artificial Sequence
  Description of Artificial Sequence: Synthetic oligonucleotide
gcaggcuguagaaacacag

SEQ ID NO: 3114079 - RNA, 19 nt, Artificial Sequence
  Description of Artificial Sequence: Synthetic oligonucleotide
aggaccgucagggugggca

SEQ ID NO: 3114080 - RNA, 19 nt, Artificial Sequence
  Description of Artificial Sequence: Synthetic oligonucleotide
agcuucagccccauccagg

SEQ ID NO: 3114081 - RNA, 19 nt, Artificial Sequence
  Description of Artificial Sequence: Synthetic oligonucleotide
ccuuccuccacaguggcgg

SEQ ID NO: 3114082 - RNA, 19 nt, Artificial Sequence
  Description of Artificial Sequence: Synthetic oligonucleotide
ugagaccagcgggaugagg

SEQ ID NO: 3114083 - RNA, 19 nt, Artificial Sequence
  Description of Artificial Sequence: Synthetic oligonucleotide
caaagguauacagugucaa

SEQ ID NO: 3114084 - RNA, 19 nt, Artificial Sequence
  Description of Artificial Sequence: Synthetic oligonucleotide
agguggaagaacacguaca

SEQ ID NO: 3114085 - RNA, 19 nt, Artificial Sequence
  Description of Artificial Sequence: Synthetic oligonucleotide
gagcaggcuguagaaacac

SEQ ID NO: 3114086 - RNA, 19 nt, Artificial Sequence
  Description of Artificial Sequence: Synthetic oligonucleotide
agaacaggccugccaguga

SEQ ID NO: 3114087 - RNA, 19 nt, Artificial Sequence
  Description of Artificial Sequence: Synthetic oligonucleotide
gucaaggaaacucgguugu

SEQ ID NO: 3114088 - RNA, 19 nt, Artificial Sequence
  Description of Artificial Sequence: Synthetic oligonucleotide
agugucaaggaaacucggu

SEQ ID NO: 3114089 - RNA, 19 nt, Artificial Sequence
  Description of Artificial Sequence: Synthetic oligonucleotide
gaaacucgguuguuuucaa

SEQ ID NO: 3114090 - RNA, 19 nt, Artificial Sequence
  Description of Artificial Sequence: Synthetic oligonucleotide
gucagggugggcagagacg

SEQ ID NO: 3114091 - RNA, 19 nt, Artificial Sequence
  Description of Artificial Sequence: Synthetic oligonucleotide
guggcggaguagaacaggc

SEQ ID NO: 3114092 - RNA, 19 nt, Artificial Sequence
  Description of Artificial Sequence: Synthetic oligonucleotide
agacgggaacauccuucuc

SEQ ID NO: 3114093 - RNA, 19 nt, Artificial Sequence
  Description of Artificial Sequence: Synthetic oligonucleotide
guagaaacacaggcugcug

SEQ ID NO: 3114094 - RNA, 19 nt, Artificial Sequence
  Description of Artificial Sequence: Synthetic oligonucleotide
cacagguggaagaacacgu

SEQ ID NO: 3114095 - RNA, 19 nt, Artificial Sequence
  Description of Artificial Sequence: Synthetic oligonucleotide
agcccugagggaauccuuc

SEQ ID NO: 3114096 - RNA, 19 nt, Artificial Sequence
  Description of Artificial Sequence: Synthetic oligonucleotide
ggaaacucgguuguuuuca

SEQ ID NO: 3114097 - RNA, 19 nt, Artificial Sequence
  Description of Artificial Sequence: Synthetic oligonucleotide
ggaacauccuucucccuuc

SEQ ID NO: 3114098 - RNA, 19 nt, Artificial Sequence
  Description of Artificial Sequence: Synthetic oligonucleotide
guccacagguggaagaaca

SEQ ID NO: 3114099 - RNA, 19 nt, Artificial Sequence
  Description of Artificial Sequence: Synthetic oligonucleotide
gagacgggaacauccuucu

SEQ ID NO: 3114100 - RNA, 19 nt, Artificial Sequence
  Description of Artificial Sequence: Synthetic oligonucleotide
gggaauccuuccuccacag

SEQ ID NO: 3114101 - RNA, 19 nt, Artificial Sequence
  Description of Artificial Sequence: Synthetic oligonucleotide
gaccagcgggaugaggacc

SEQ ID NO: 3114102 - RNA, 19 nt, Artificial Sequence
  Description of Artificial Sequence: Synthetic oligonucleotide
gugaccggcaagagcaggc

SEQ ID NO: 3114103 - RNA, 19 nt, Artificial Sequence
  Description of Artificial Sequence: Synthetic oligonucleotide
cacaguggcggaguagaac

SEQ ID NO: 3114104 - RNA, 19 nt, Artificial Sequence
  Description of Artificial Sequence: Synthetic oligonucleotide
ccugccagugagaccagcg

SEQ ID NO: 3114105 - RNA, 19 nt, Artificial Sequence
  Description of Artificial Sequence: Synthetic oligonucleotide
gaccggcaagagcaggcug

SEQ ID NO: 3114106 - RNA, 19 nt, Artificial Sequence
  Description of Artificial Sequence: Synthetic oligonucleotide
cuucaaagguauacagugu

SEQ ID NO: 3114107 - RNA, 19 nt, Artificial Sequence
  Description of Artificial Sequence: Synthetic oligonucleotide
caguggcggaguagaacag

SEQ ID NO: 3114108 - RNA, 19 nt, Artificial Sequence
  Description of Artificial Sequence: Synthetic oligonucleotide
agagcaggcuguagaaaca

SEQ ID NO: 3114109 - RNA, 19 nt, Artificial Sequence
  Description of Artificial Sequence: Synthetic oligonucleotide
ugaggaccgucaggguggg

SEQ ID NO: 3114110 - RNA, 19 nt, Artificial Sequence
  Description of Artificial Sequence: Synthetic oligonucleotide
gguauacagugucaaggaa

SEQ ID NO: 3114111 - RNA, 19 nt, Artificial Sequence
  Description of Artificial Sequence: Synthetic oligonucleotide
guacacuggcaccgugacc

SEQ ID NO: 3114112 - RNA, 19 nt, Artificial Sequence
  Description of Artificial Sequence: Synthetic oligonucleotide
caccgugaccggcaagagc

SEQ ID NO: 3114113 - RNA, 19 nt, Artificial Sequence
  Description of Artificial Sequence: Synthetic oligonucleotide
agcgggaugaggaccguca

SEQ ID NO: 3114114 - RNA, 19 nt, Artificial Sequence
  Description of Artificial Sequence: Synthetic oligonucleotide
aacauccuucucccuucuu

SEQ ID NO: 3114115 - RNA, 19 nt, Artificial Sequence
  Description of Artificial Sequence: Synthetic oligonucleotide
gugucaaggaaacucgguu

SEQ ID NO: 3114116 - RNA, 19 nt, Artificial Sequence
  Description of Artificial Sequence: Synthetic oligonucleotide
acacuggcaccgugaccgg

SEQ ID NO: 3114117 - RNA, 19 nt, Artificial Sequence
  Description of Artificial Sequence: Synthetic oligonucleotide
accggcaagagcaggcugu

SEQ ID NO: 3114118 - RNA, 19 nt, Artificial Sequence
  Description of Artificial Sequence: Synthetic oligonucleotide
ugaccggcaagagcaggcu

SEQ ID NO: 3114119 - RNA, 19 nt, Artificial Sequence
  Description of Artificial Sequence: Synthetic oligonucleotide
agggugggcagagacggga

SEQ ID NO: 3114120 - RNA, 19 nt, Artificial Sequence
  Description of Artificial Sequence: Synthetic oligonucleotide
ugggcagagacgggaacau

SEQ ID NO: 3114121 - RNA, 19 nt, Artificial Sequence
  Description of Artificial Sequence: Synthetic oligonucleotide
cugaagagcuucagcccca

SEQ ID NO: 3114122 - RNA, 19 nt, Artificial Sequence
  Description of Artificial Sequence: Synthetic oligonucleotide
cucccuucuucaaagguau

SEQ ID NO: 3114123 - RNA, 19 nt, Artificial Sequence
  Description of Artificial Sequence: Synthetic oligonucleotide
auacagugucaaggaaacu

SEQ ID NO: 3114124 - RNA, 19 nt, Artificial Sequence
  Description of Artificial Sequence: Synthetic oligonucleotide
ccacagguggaagaacacg

SEQ ID NO: 3114125 - RNA, 19 nt, Artificial Sequence
  Description of Artificial Sequence: Synthetic oligonucleotide
ucaaggaaacucgguuguu

SEQ ID NO: 3114126 - RNA, 19 nt, Artificial Sequence
  Description of Artificial Sequence: Synthetic oligonucleotide
agguccacagguggaagaa

SEQ ID NO: 3114127 - RNA, 19 nt, Artificial Sequence
  Description of Artificial Sequence: Synthetic oligonucleotide
accgucagggugggcagag

SEQ ID NO: 3114128 - RNA, 19 nt, Artificial Sequence
  Description of Artificial Sequence: Synthetic oligonucleotide
uuccuccacaguggcggag

SEQ ID NO: 3114129 - RNA, 19 nt, Artificial Sequence
  Description of Artificial Sequence: Synthetic oligonucleotide
gugggcagagacgggaaca

SEQ ID NO: 3114130 - RNA, 19 nt, Artificial Sequence
  Description of Artificial Sequence: Synthetic oligonucleotide
acguacacuggcaccguga

SEQ ID NO: 3114131 - RNA, 19 nt, Artificial Sequence
  Description of Artificial Sequence: Synthetic oligonucleotide
acuggcaccgugaccggca

SEQ ID NO: 3114132 - RNA, 19 nt, Artificial Sequence
  Description of Artificial Sequence: Synthetic oligonucleotide
ccugagggaauccuuccuc

SEQ ID NO: 3114133 - RNA, 19 nt, Artificial Sequence
  Description of Artificial Sequence: Synthetic oligonucleotide
cacguacacuggcaccgug

SEQ ID NO: 3114134 - RNA, 19 nt, Artificial Sequence
  Description of Artificial Sequence: Synthetic oligonucleotide
caggccugccagugagacc

SEQ ID NO: 3114135 - RNA, 19 nt, Artificial Sequence
  Description of Artificial Sequence: Synthetic oligonucleotide
cagugagaccagcgggaug

SEQ ID NO: 3114136 - RNA, 19 nt, Artificial Sequence
  Description of Artificial Sequence: Synthetic oligonucleotide
ggaccgucagggugggcag

SEQ ID NO: 3114137 - RNA, 19 nt, Artificial Sequence
  Description of Artificial Sequence: Synthetic oligonucleotide
aacaggccugccagugaga

SEQ ID NO: 3114138 - RNA, 19 nt, Artificial Sequence
  Description of Artificial Sequence: Synthetic oligonucleotide
ugcagcccugagggaaucc

SEQ ID NO: 3114139 - RNA, 19 nt, Artificial Sequence
  Description of Artificial Sequence: Synthetic oligonucleotide
ucccuucuucaaagguaua

SEQ ID NO: 3114140 - RNA, 19 nt, Artificial Sequence
  Description of Artificial Sequence: Synthetic oligonucleotide
cagggugggcagagacggg

SEQ ID NO: 3114141 - RNA, 19 nt, Artificial Sequence
  Description of Artificial Sequence: Synthetic oligonucleotide
cucgguuguuuucaaaguu

SEQ ID NO: 3114142 - RNA, 19 nt, Artificial Sequence
  Description of Artificial Sequence: Synthetic oligonucleotide
uggcaccgugaccggcaag

SEQ ID NO: 3114143 - RNA, 19 nt, Artificial Sequence
  Description of Artificial Sequence: Synthetic oligonucleotide
gaagagcuucagccccauc

SEQ ID NO: 3114144 - RNA, 19 nt, Artificial Sequence
  Description of Artificial Sequence: Synthetic oligonucleotide
gaacauccuucucccuucu

SEQ ID NO: 3114145 - RNA, 19 nt, Artificial Sequence
  Description of Artificial Sequence: Synthetic oligonucleotide
acagguggaagaacacgua

SEQ ID NO: 3114146 - RNA, 19 nt, Artificial Sequence
  Description of Artificial Sequence: Synthetic oligonucleotide
cuccacaguggcggaguag

SEQ ID NO: 3114147 - RNA, 19 nt, Artificial Sequence
  Description of Artificial Sequence: Synthetic oligonucleotide
ggcaccgugaccggcaaga

SEQ ID NO: 3114148 - RNA, 19 nt, Artificial Sequence
  Description of Artificial Sequence: Synthetic oligonucleotide
ccauccagguccacaggug

SEQ ID NO: 3114149 - RNA, 19 nt, Artificial Sequence
  Description of Artificial Sequence: Synthetic oligonucleotide
ggugggcagagacgggaac

SEQ ID NO: 3114150 - RNA, 19 nt, Artificial Sequence
  Description of Artificial Sequence: Synthetic oligonucleotide
cuucagccccauccagguc

SEQ ID NO: 3114151 - RNA, 19 nt, Artificial Sequence
  Description of Artificial Sequence: Synthetic oligonucleotide
guagaacaggccugccagu

SEQ ID NO: 3114152 - RNA, 19 nt, Artificial Sequence
  Description of Artificial Sequence: Synthetic oligonucleotide
auccagguccacaggugga

SEQ ID NO: 3114153 - RNA, 19 nt, Artificial Sequence
  Description of Artificial Sequence: Synthetic oligonucleotide
caagagcaggcuguagaaa

SEQ ID NO: 3114154 - RNA, 19 nt, Artificial Sequence
  Description of Artificial Sequence: Synthetic oligonucleotide
agccccauccagguccaca

SEQ ID NO: 3114155 - RNA, 19 nt, Artificial Sequence
  Description of Artificial Sequence: Synthetic oligonucleotide
gcgggaugaggaccgucag

SEQ ID NO: 3114156 - RNA, 19 nt, Artificial Sequence
  Description of Artificial Sequence: Synthetic oligonucleotide
acacaggcugcuggcgcug

SEQ ID NO: 3114157 - RNA, 19 nt, Artificial Sequence
  Description of Artificial Sequence: Synthetic oligonucleotide
ggcuguagaaacacaggcu

SEQ ID NO: 3114158 - RNA, 19 nt, Artificial Sequence
  Description of Artificial Sequence: Synthetic oligonucleotide
acacguacacuggcaccgu

SEQ ID NO: 3114159 - RNA, 19 nt, Artificial Sequence
  Description of Artificial Sequence: Synthetic oligonucleotide
gcuucagccccauccaggu

SEQ ID NO: 3114160 - RNA, 19 nt, Artificial Sequence
  Description of Artificial Sequence: Synthetic oligonucleotide
cacuggcaccgugaccggc

SEQ ID NO: 3114161 - RNA, 19 nt, Artificial Sequence
  Description of Artificial Sequence: Synthetic oligonucleotide
cgucagggugggcagagac

SEQ ID NO: 3114162 - RNA, 19 nt, Artificial Sequence
  Description of Artificial Sequence: Synthetic oligonucleotide
cuuccuccacaguggcgga

SEQ ID NO: 3114163 - RNA, 19 nt, Artificial Sequence
  Description of Artificial Sequence: Synthetic oligonucleotide
guggaagaacacguacacu

SEQ ID NO: 3114164 - RNA, 19 nt, Artificial Sequence
  Description of Artificial Sequence: Synthetic oligonucleotide
ggaguagaacaggccugcc

SEQ ID NO: 3114165 - RNA, 19 nt, Artificial Sequence
  Description of Artificial Sequence: Synthetic oligonucleotide
uggcgcuggugcagcccug

SEQ ID NO: 3114166 - RNA, 19 nt, Artificial Sequence
  Description of Artificial Sequence: Synthetic oligonucleotide
gccagugagaccagcggga

SEQ ID NO: 3114167 - RNA, 19 nt, Artificial Sequence
  Description of Artificial Sequence: Synthetic oligonucleotide
gggaacauccuucucccuu

SEQ ID NO: 3114168 - RNA, 19 nt, Artificial Sequence
  Description of Artificial Sequence: Synthetic oligonucleotide
gugagaccagcgggaugag

SEQ ID NO: 3114169 - RNA, 19 nt, Artificial Sequence
  Description of Artificial Sequence: Synthetic oligonucleotide
caaggaaacucgguuguuu

SEQ ID NO: 3114170 - RNA, 19 nt, Artificial Sequence
  Description of Artificial Sequence: Synthetic oligonucleotide
gguccacagguggaagaac

SEQ ID NO: 3114171 - RNA, 19 nt, Artificial Sequence
  Description of Artificial Sequence: Synthetic oligonucleotide
cgggaugaggaccgucagg

SEQ ID NO: 3114172 - RNA, 19 nt, Artificial Sequence
  Description of Artificial Sequence: Synthetic oligonucleotide
cgcuggugcagcccugagg

SEQ ID NO: 3114173 - RNA, 19 nt, Artificial Sequence
  Description of Artificial Sequence: Synthetic oligonucleotide
ccagguccacagguggaag

SEQ ID NO: 3114174 - RNA, 19 nt, Artificial Sequence
  Description of Artificial Sequence: Synthetic oligonucleotide
gaccgucagggugggcaga

SEQ ID NO: 3114175 - RNA, 19 nt, Artificial Sequence
  Description of Artificial Sequence: Synthetic oligonucleotide
cgguuguuuucaaaguucu

SEQ ID NO: 3114176 - RNA, 19 nt, Artificial Sequence
  Description of Artificial Sequence: Synthetic oligonucleotide
cuggcgcuggugcagcccu

SEQ ID NO: 3114177 - RNA, 19 nt, Artificial Sequence
  Description of Artificial Sequence: Synthetic oligonucleotide
ccccauccagguccacagg

SEQ ID NO: 3114178 - RNA, 19 nt, Artificial Sequence
  Description of Artificial Sequence: Synthetic oligonucleotide
gcaccgugaccggcaagag

SEQ ID NO: 3114179 - RNA, 19 nt, Artificial Sequence
  Description of Artificial Sequence: Synthetic oligonucleotide
cgugaccggcaagagcagg

SEQ ID NO: 3114180 - RNA, 19 nt, Artificial Sequence
  Description of Artificial Sequence: Synthetic oligonucleotide
cagcgggaugaggaccguc

SEQ ID NO: 3114181 - RNA, 19 nt, Artificial Sequence
  Description of Artificial Sequence: Synthetic oligonucleotide
ggcugcuggcgcuggugca

SEQ ID NO: 3114182 - RNA, 19 nt, Artificial Sequence
  Description of Artificial Sequence: Synthetic oligonucleotide
ggaauccuuccuccacagu

SEQ ID NO: 3114183 - RNA, 19 nt, Artificial Sequence
  Description of Artificial Sequence: Synthetic oligonucleotide
cuggcaccgugaccggcaa

SEQ ID NO: 3114184 - RNA, 19 nt, Artificial Sequence
  Description of Artificial Sequence: Synthetic oligonucleotide
ccgugaccggcaagagcag

SEQ ID NO: 3114185 - RNA, 19 nt, Artificial Sequence
  Description of Artificial Sequence: Synthetic oligonucleotide
ggaugaggaccgucagggu

SEQ ID NO: 3114186 - RNA, 19 nt, Artificial Sequence
  Description of Artificial Sequence: Synthetic oligonucleotide
gugcagcccugagggaauc

SEQ ID NO: 3114187 - RNA, 19 nt, Artificial Sequence
  Description of Artificial Sequence: Synthetic oligonucleotide
cccauccagguccacaggu

SEQ ID NO: 3114188 - RNA, 19 nt, Artificial Sequence
  Description of Artificial Sequence: Synthetic oligonucleotide
gcagagacgggaacauccu

SEQ ID NO: 3114189 - RNA, 19 nt, Artificial Sequence
  Description of Artificial Sequence: Synthetic oligonucleotide
cagagacgggaacauccuu

SEQ ID NO: 3114190 - RNA, 19 nt, Artificial Sequence
  Description of Artificial Sequence: Synthetic oligonucleotide
gaggaccgucagggugggc

SEQ ID NO: 3114191 - RNA, 19 nt, Artificial Sequence
  Description of Artificial Sequence: Synthetic oligonucleotide
gcgcuggugcagcccugag

SEQ ID NO: 3114192 - RNA, 19 nt, Artificial Sequence
  Description of Artificial Sequence: Synthetic oligonucleotide
gggcagagacgggaacauc

SEQ ID NO: 3114193 - RNA, 19 nt, Artificial Sequence
  Description of Artificial Sequence: Synthetic oligonucleotide
ggcgcuggugcagcccuga

SEQ ID NO: 3114194 - RNA, 19 nt, Artificial Sequence
  Description of Artificial Sequence: Synthetic oligonucleotide
gccugccagugagaccagc

SEQ ID NO: 3114195 - RNA, 19 nt, Artificial Sequence
  Description of Artificial Sequence: Synthetic oligonucleotide
gggugggcagagacgggaa

SEQ ID NO: 3114196 - RNA, 19 nt, Artificial Sequence
  Description of Artificial Sequence: Synthetic oligonucleotide
cagcccugagggaauccuu

SEQ ID NO: 3114197 - RNA, 19 nt, Artificial Sequence
  Description of Artificial Sequence: Synthetic oligonucleotide
ccacaguggcggaguagaa

SEQ ID NO: 3114198 - RNA, 19 nt, Artificial Sequence
  Description of Artificial Sequence: Synthetic oligonucleotide
ggugcagcccugagggaau

SEQ ID NO: 3114199 - RNA, 19 nt, Artificial Sequence
  Description of Artificial Sequence: Synthetic oligonucleotide
cccugagggaauccuuccu

SEQ ID NO: 3114200 - RNA, 19 nt, Artificial Sequence
  Description of Artificial Sequence: Synthetic oligonucleotide
ggccugccagugagaccag

SEQ ID NO: 3114201 - RNA, 19 nt, Artificial Sequence
  Description of Artificial Sequence: Synthetic oligonucleotide
cggcaagagcaggcuguag

SEQ ID NO: 3114202 - RNA, 19 nt, Artificial Sequence
  Description of Artificial Sequence: Synthetic oligonucleotide
ccuccacaguggcggagua

SEQ ID NO: 3114203 - RNA, 19 nt, Artificial Sequence
  Description of Artificial Sequence: Synthetic oligonucleotide
ccagugagaccagcgggau

SEQ ID NO: 3114204 - RNA, 19 nt, Artificial Sequence
  Description of Artificial Sequence: Synthetic oligonucleotide
ccggcaagagcaggcugua

SEQ ID NO: 3114205 - RNA, 19 nt, Artificial Sequence
  Description of Artificial Sequence: Synthetic oligonucleotide
cgggaacauccuucucccu

SEQ ID NO: 3114206 - RNA, 19 nt, Artificial Sequence
  Description of Artificial Sequence: Synthetic oligonucleotide
ccgucagggugggcagaga

SEQ ID NO: 3114207 - RNA, 19 nt, Artificial Sequence
  Description of Artificial Sequence: Synthetic oligonucleotide
ccagcgggaugaggaccgu

SEQ ID NO: 3114208 - RNA, 19 nt, Artificial Sequence
  Description of Artificial Sequence: Synthetic oligonucleotide
aaggucaugaccuguguag

SEQ ID NO: 3114209 - RNA, 19 nt, Artificial Sequence
  Description of Artificial Sequence: Synthetic oligonucleotide
cuuaauguccaguguaugg

SEQ ID NO: 3114210 - RNA, 19 nt, Artificial Sequence
  Description of Artificial Sequence: Synthetic oligonucleotide
ugcugaaaaggucaugacc

SEQ ID NO: 3114211 - RNA, 19 nt, Artificial Sequence
  Description of Artificial Sequence: Synthetic oligonucleotide
ucucacacugucuuaaugu

SEQ ID NO: 3114212 - RNA, 19 nt, Artificial Sequence
  Description of Artificial Sequence: Synthetic oligonucleotide
caguguauggaucugugcc

SEQ ID NO: 3114213 - RNA, 19 nt, Artificial Sequence
  Description of Artificial Sequence: Synthetic oligonucleotide
agcagugcgcagcugaugg

SEQ ID NO: 3114214 - RNA, 19 nt, Artificial Sequence
  Description of Artificial Sequence: Synthetic oligonucleotide
ugucuuaauguccagugua

SEQ ID NO: 3114215 - RNA, 19 nt, Artificial Sequence
  Description of Artificial Sequence: Synthetic oligonucleotide
uuaauguccaguguaugga

SEQ ID NO: 3114216 - RNA, 19 nt, Artificial Sequence
  Description of Artificial Sequence: Synthetic oligonucleotide
auggaucugugccagguuc

SEQ ID NO: 3114217 - RNA, 19 nt, Artificial Sequence
  Description of Artificial Sequence: Synthetic oligonucleotide
ucacacugucuuaaugucc

SEQ ID NO: 3114218 - RNA, 19 nt, Artificial Sequence
  Description of Artificial Sequence: Synthetic oligonucleotide
aaaaggucaugaccugugu

SEQ ID NO: 3114219 - RNA, 19 nt, Artificial Sequence
  Description of Artificial Sequence: Synthetic oligonucleotide
aucugugccagguucuguc

SEQ ID NO: 3114220 - RNA, 19 nt, Artificial Sequence
  Description of Artificial Sequence: Synthetic oligonucleotide
aauguccaguguauggauc

SEQ ID NO: 3114221 - RNA, 19 nt, Artificial Sequence
  Description of Artificial Sequence: Synthetic oligonucleotide
ugcagcgugaaccgggacc

SEQ ID NO: 3114222 - RNA, 19 nt, Artificial Sequence
  Description of Artificial Sequence: Synthetic oligonucleotide
ggugaagcagcccuggcgg

SEQ ID NO: 3114223 - RNA, 19 nt, Artificial Sequence
  Description of Artificial Sequence: Synthetic oligonucleotide
aagagcugcagcagugcgc

SEQ ID NO: 3114224 - RNA, 19 nt, Artificial Sequence
  Description of Artificial Sequence: Synthetic oligonucleotide
aguguauggaucugugcca

SEQ ID NO: 3114225 - RNA, 19 nt, Artificial Sequence
  Description of Artificial Sequence: Synthetic oligonucleotide
aggugaagcagcccuggcg

SEQ ID NO: 3114226 - RNA, 19 nt, Artificial Sequence
  Description of Artificial Sequence: Synthetic oligonucleotide
gaaaaggucaugaccugug

SEQ ID NO: 3114227 - RNA, 19 nt, Artificial Sequence
  Description of Artificial Sequence: Synthetic oligonucleotide
auguccaguguauggaucu

SEQ ID NO: 3114228 - RNA, 19 nt, Artificial Sequence
  Description of Artificial Sequence: Synthetic oligonucleotide
ugcagcagugcgcagcuga

SEQ ID NO: 3114229 - RNA, 19 nt, Artificial Sequence
  Description of Artificial Sequence: Synthetic oligonucleotide
uccaguguauggaucugug

SEQ ID NO: 3114230 - RNA, 19 nt, Artificial Sequence
  Description of Artificial Sequence: Synthetic oligonucleotide
ucuuaauguccaguguaug

SEQ ID NO: 3114231 - RNA, 19 nt, Artificial Sequence
  Description of Artificial Sequence: Synthetic oligonucleotide
aaaggucaugaccugugua

SEQ ID NO: 3114232 - RNA, 19 nt, Artificial Sequence
  Description of Artificial Sequence: Synthetic oligonucleotide
ugaaccgggaccaggugaa

SEQ ID NO: 3114233 - RNA, 19 nt, Artificial Sequence
  Description of Artificial Sequence: Synthetic oligonucleotide
cucacacugucuuaauguc

SEQ ID NO: 3114234 - RNA, 19 nt, Artificial Sequence
  Description of Artificial Sequence: Synthetic oligonucleotide
cagguucugucucugggcc

SEQ ID NO: 3114235 - RNA, 19 nt, Artificial Sequence
  Description of Artificial Sequence: Synthetic oligonucleotide
ugaaaaggucaugaccugu

SEQ ID NO: 3114236 - RNA, 19 nt, Artificial Sequence
  Description of Artificial Sequence: Synthetic oligonucleotide
uaauguccaguguauggau

SEQ ID NO: 3114237 - RNA, 19 nt, Artificial Sequence
  Description of Artificial Sequence: Synthetic oligonucleotide
uggacacugcccacaguag

SEQ ID NO: 3114238 - RNA, 19 nt, Artificial Sequence
  Description of Artificial Sequence: Synthetic oligonucleotide
agugugggagcccugcgcu

SEQ ID NO: 3114239 - RNA, 19 nt, Artificial Sequence
  Description of Artificial Sequence: Synthetic oligonucleotide
accgggaccaggugaagag

SEQ ID NO: 3114240 - RNA, 19 nt, Artificial Sequence
  Description of Artificial Sequence: Synthetic oligonucleotide
uguauggaucugugccagg

SEQ ID NO: 3114241 - RNA, 19 nt, Artificial Sequence
  Description of Artificial Sequence: Synthetic oligonucleotide
ugugggagcccugcgcugg

SEQ ID NO: 3114242 - RNA, 19 nt, Artificial Sequence
  Description of Artificial Sequence: Synthetic oligonucleotide
cugcccacaguagucaccg

SEQ ID NO: 3114243 - RNA, 19 nt, Artificial Sequence
  Description of Artificial Sequence: Synthetic oligonucleotide
auggacaccagcaccagca

SEQ ID NO: 3114244 - RNA, 19 nt, Artificial Sequence
  Description of Artificial Sequence: Synthetic oligonucleotide
cugaaaaggucaugaccug

SEQ ID NO: 3114245 - RNA, 19 nt, Artificial Sequence
  Description of Artificial Sequence: Synthetic oligonucleotide
ugggccuugaccacgcgua

SEQ ID NO: 3114246 - RNA, 19 nt, Artificial Sequence
  Description of Artificial Sequence: Synthetic oligonucleotide
agagcugcagcagugcgca

SEQ ID NO: 3114247 - RNA, 19 nt, Artificial Sequence
  Description of Artificial Sequence: Synthetic oligonucleotide
uggacaccagcaccagcag

SEQ ID NO: 3114248 - RNA, 19 nt, Artificial Sequence
  Description of Artificial Sequence: Synthetic oligonucleotide
caggugaagagcugcagca

SEQ ID NO: 3114249 - RNA, 19 nt, Artificial Sequence
  Description of Artificial Sequence: Synthetic oligonucleotide
ugugccagguucugucucu

SEQ ID NO: 3114250 - RNA, 19 nt, Artificial Sequence
  Description of Artificial Sequence: Synthetic oligonucleotide
gagugugggagcccugcgc

SEQ ID NO: 3114251 - RNA, 19 nt, Artificial Sequence
  Description of Artificial Sequence: Synthetic oligonucleotide
guguauggaucugugccag

SEQ ID NO: 3114252 - RNA, 19 nt, Artificial Sequence
  Description of Artificial Sequence: Synthetic oligonucleotide
uugaccacgcguaggcguc

SEQ ID NO: 3114253 - RNA, 19 nt, Artificial Sequence
  Description of Artificial Sequence: Synthetic oligonucleotide
ucugugccagguucugucu

SEQ ID NO: 3114254 - RNA, 19 nt, Artificial Sequence
  Description of Artificial Sequence: Synthetic oligonucleotide
acugcccacaguagucacc

SEQ ID NO: 3114255 - RNA, 19 nt, Artificial Sequence
  Description of Artificial Sequence: Synthetic oligonucleotide
guaggcgucgcccgugcag

SEQ ID NO: 3114256 - RNA, 19 nt, Artificial Sequence
  Description of Artificial Sequence: Synthetic oligonucleotide
cacgcguaggcgucgcccg

SEQ ID NO: 3114257 - RNA, 19 nt, Artificial Sequence
  Description of Artificial Sequence: Synthetic oligonucleotide
cugcugaaaaggucaugac

SEQ ID NO: 3114258 - RNA, 19 nt, Artificial Sequence
  Description of Artificial Sequence: Synthetic oligonucleotide
gacacugcccacaguaguc

SEQ ID NO: 3114259 - RNA, 19 nt, Artificial Sequence
  Description of Artificial Sequence: Synthetic oligonucleotide
gugaaccgggaccagguga

SEQ ID NO: 3114260 - RNA, 19 nt, Artificial Sequence
  Description of Artificial Sequence: Synthetic oligonucleotide
cagcugauggacaccagca

SEQ ID NO: 3114261 - RNA, 19 nt, Artificial Sequence
  Description of Artificial Sequence: Synthetic oligonucleotide
cuggacacugcccacagua

SEQ ID NO: 3114262 - RNA, 19 nt, Artificial Sequence
  Description of Artificial Sequence: Synthetic oligonucleotide
uauggaucugugccagguu

SEQ ID NO: 3114263 - RNA, 19 nt, Artificial Sequence
  Description of Artificial Sequence: Synthetic oligonucleotide
ugccagguucugucucugg

SEQ ID NO: 3114264 - RNA, 19 nt, Artificial Sequence
  Description of Artificial Sequence: Synthetic oligonucleotide
gcugcugaaaaggucauga

SEQ ID NO: 3114265 - RNA, 19 nt, Artificial Sequence
  Description of Artificial Sequence: Synthetic oligonucleotide
gcccacaguagucaccggg

SEQ ID NO: 3114266 - RNA, 19 nt, Artificial Sequence
  Description of Artificial Sequence: Synthetic oligonucleotide
gacaccagcaccagcaggu

SEQ ID NO: 3114267 - RNA, 19 nt, Artificial Sequence
  Description of Artificial Sequence: Synthetic oligonucleotide
aaccgggaccaggugaaga

SEQ ID NO: 3114268 - RNA, 19 nt, Artificial Sequence
  Description of Artificial Sequence: Synthetic oligonucleotide
gcagcugauggacaccagc

SEQ ID NO: 3114269 - RNA, 19 nt, Artificial Sequence
  Description of Artificial Sequence: Synthetic oligonucleotide
cccacaguagucaccgggg

SEQ ID NO: 3114270 - RNA, 19 nt, Artificial Sequence
  Description of Artificial Sequence: Synthetic oligonucleotide
uaggcgucgcccgugcagc

SEQ ID NO: 3114271 - RNA, 19 nt, Artificial Sequence
  Description of Artificial Sequence: Synthetic oligonucleotide
agcgugaaccgggaccagg

SEQ ID NO: 3114272 - RNA, 19 nt, Artificial Sequence
  Description of Artificial Sequence: Synthetic oligonucleotide
cuggcgcuggcgcuggcgg

SEQ ID NO: 3114273 - RNA, 19 nt, Artificial Sequence
  Description of Artificial Sequence: Synthetic oligonucleotide
agcccuggcggaguguggg

SEQ ID NO: 3114274 - RNA, 19 nt, Artificial Sequence
  Description of Artificial Sequence: Synthetic oligonucleotide
ggacaccagcaccagcagg

SEQ ID NO: 3114275 - RNA, 19 nt, Artificial Sequence
  Description of Artificial Sequence: Synthetic oligonucleotide
uguccaguguauggaucug

SEQ ID NO: 3114276 - RNA, 19 nt, Artificial Sequence
  Description of Artificial Sequence: Synthetic oligonucleotide
ucugggccuugaccacgcg

SEQ ID NO: 3114277 - RNA, 19 nt, Artificial Sequence
  Description of Artificial Sequence: Synthetic oligonucleotide
gccuugaccacgcguaggc

SEQ ID NO: 3114278 - RNA, 19 nt, Artificial Sequence
  Description of Artificial Sequence: Synthetic oligonucleotide
aagcagcccuggcggagug

SEQ ID NO: 3114279 - RNA, 19 nt, Artificial Sequence
  Description of Artificial Sequence: Synthetic oligonucleotide
accaggugaagagcugcag

SEQ ID NO: 3114280 - RNA, 19 nt, Artificial Sequence
  Description of Artificial Sequence: Synthetic oligonucleotide
uggccauggcuggacacug

SEQ ID NO: 3114281 - RNA, 19 nt, Artificial Sequence
  Description of Artificial Sequence: Synthetic oligonucleotide
cagugcgcagcugauggac

SEQ ID NO: 3114282 - RNA, 19 nt, Artificial Sequence
  Description of Artificial Sequence: Synthetic oligonucleotide
ccaguguauggaucugugc

SEQ ID NO: 3114283 - RNA, 19 nt, Artificial Sequence
  Description of Artificial Sequence: Synthetic oligonucleotide
ccagguucugucucugggc

SEQ ID NO: 3114284 - RNA, 19 nt, Artificial Sequence
  Description of Artificial Sequence: Synthetic oligonucleotide
agguucugucucugggccu

SEQ ID NO: 3114285 - RNA, 19 nt, Artificial Sequence
  Description of Artificial Sequence: Synthetic oligonucleotide
cuugaccacgcguaggcgu

SEQ ID NO: 3114286 - RNA, 19 nt, Artificial Sequence
  Description of Artificial Sequence: Synthetic oligonucleotide
ugaccacgcguaggcgucg

SEQ ID NO: 3114287 - RNA, 19 nt, Artificial Sequence
  Description of Artificial Sequence: Synthetic oligonucleotide
gugcgcagcugauggacac

SEQ ID NO: 3114288 - RNA, 19 nt, Artificial Sequence
  Description of Artificial Sequence: Synthetic oligonucleotide
accacgcguaggcgucgcc

SEQ ID NO: 3114289 - RNA, 19 nt, Artificial Sequence
  Description of Artificial Sequence: Synthetic oligonucleotide
ggggcugcugaaaagguca

SEQ ID NO: 3114290 - RNA, 19 nt, Artificial Sequence
  Description of Artificial Sequence: Synthetic oligonucleotide
cuggcggagugugggagcc

SEQ ID NO: 3114291 - RNA, 19 nt, Artificial Sequence
  Description of Artificial Sequence: Synthetic oligonucleotide
accagcaccagcaggugaa

SEQ ID NO: 3114292 - RNA, 19 nt, Artificial Sequence
  Description of Artificial Sequence: Synthetic oligonucleotide
ggaccaggugaagagcugc

SEQ ID NO: 3114293 - RNA, 19 nt, Artificial Sequence
  Description of Artificial Sequence: Synthetic oligonucleotide
cacugcccacaguagucac

SEQ ID NO: 3114294 - RNA, 19 nt, Artificial Sequence
  Description of Artificial Sequence: Synthetic oligonucleotide
cugugccagguucugucuc

SEQ ID NO: 3114295 - RNA, 19 nt, Artificial Sequence
  Description of Artificial Sequence: Synthetic oligonucleotide
ggagugugggagcccugcg

SEQ ID NO: 3114296 - RNA, 19 nt, Artificial Sequence
  Description of Artificial Sequence: Synthetic oligonucleotide
gccauggcuggacacugcc

SEQ ID NO: 3114297 - RNA, 19 nt, Artificial Sequence
  Description of Artificial Sequence: Synthetic oligonucleotide
ugcgcagcugauggacacc

SEQ ID NO: 3114298 - RNA, 19 nt, Artificial Sequence
  Description of Artificial Sequence: Synthetic oligonucleotide
guauggaucugugccaggu

SEQ ID NO: 3114299 - RNA, 19 nt, Artificial Sequence
  Description of Artificial Sequence: Synthetic oligonucleotide
gucucugggccuugaccac

SEQ ID NO: 3114300 - RNA, 19 nt, Artificial Sequence
  Description of Artificial Sequence: Synthetic oligonucleotide
uggcuggacacugcccaca

SEQ ID NO: 3114301 - RNA, 19 nt, Artificial Sequence
  Description of Artificial Sequence: Synthetic oligonucleotide
gcaggugaagcagcccugg

SEQ ID NO: 3114302 - RNA, 19 nt, Artificial Sequence
  Description of Artificial Sequence: Synthetic oligonucleotide
agcaggugaagcagcccug

SEQ ID NO: 3114303 - RNA, 19 nt, Artificial Sequence
  Description of Artificial Sequence: Synthetic oligonucleotide
gcccgugcagcgugaaccg

SEQ ID NO: 3114304 - RNA, 19 nt, Artificial Sequence
  Description of Artificial Sequence: Synthetic oligonucleotide
ugcgcuggcgcuggcgcug

SEQ ID NO: 3114305 - RNA, 19 nt, Artificial Sequence
  Description of Artificial Sequence: Synthetic oligonucleotide
aggcgucgcccgugcagcg

SEQ ID NO: 3114306 - RNA, 19 nt, Artificial Sequence
  Description of Artificial Sequence: Synthetic oligonucleotide
ccgugcagcgugaaccggg

SEQ ID NO: 3114307 - RNA, 19 nt, Artificial Sequence
  Description of Artificial Sequence: Synthetic oligonucleotide
gaccaggugaagagcugca

SEQ ID NO: 3114308 - RNA, 19 nt, Artificial Sequence
  Description of Artificial Sequence: Synthetic oligonucleotide
agugcgcagcugauggaca

SEQ ID NO: 3114309 - RNA, 19 nt, Artificial Sequence
  Description of Artificial Sequence: Synthetic oligonucleotide
ggcgcuggcggcucuggcc

SEQ ID NO: 3114310 - RNA, 19 nt, Artificial Sequence
  Description of Artificial Sequence: Synthetic oligonucleotide
gaaccgggaccaggugaag

SEQ ID NO: 3114311 - RNA, 19 nt, Artificial Sequence
  Description of Artificial Sequence: Synthetic oligonucleotide
gucuuaauguccaguguau

SEQ ID NO: 3114312 - RNA, 19 nt, Artificial Sequence
  Description of Artificial Sequence: Synthetic oligonucleotide
cagcaggugaagcagcccu

SEQ ID NO: 3114313 - RNA, 19 nt, Artificial Sequence
  Description of Artificial Sequence: Synthetic oligonucleotide
cugucuuaauguccagugu

SEQ ID NO: 3114314 - RNA, 19 nt, Artificial Sequence
  Description of Artificial Sequence: Synthetic oligonucleotide
gugugggagcccugcgcug

SEQ ID NO: 3114315 - RNA, 19 nt, Artificial Sequence
  Description of Artificial Sequence: Synthetic oligonucleotide
gcagcgugaaccgggacca

SEQ ID NO: 3114316 - RNA, 19 nt, Artificial Sequence
  Description of Artificial Sequence: Synthetic oligonucleotide
gugaagcagcccuggcgga

SEQ ID NO: 3114317 - RNA, 19 nt, Artificial Sequence
  Description of Artificial Sequence: Synthetic oligonucleotide
cuggcggcucuggccaugg

SEQ ID NO: 3114318 - RNA, 19 nt, Artificial Sequence
  Description of Artificial Sequence: Synthetic oligonucleotide
uucugucucugggccuuga

SEQ ID NO: 3114319 - RNA, 19 nt, Artificial Sequence
  Description of Artificial Sequence: Synthetic oligonucleotide
ugggagcccugcgcuggcg

SEQ ID NO: 3114320 - RNA, 19 nt, Artificial Sequence
  Description of Artificial Sequence: Synthetic oligonucleotide
uggcgcuggcggcucuggc

SEQ ID NO: 3114321 - RNA, 19 nt, Artificial Sequence
  Description of Artificial Sequence: Synthetic oligonucleotide
agcccugcgcuggcgcugg

SEQ ID NO: 3114322 - RNA, 19 nt, Artificial Sequence
  Description of Artificial Sequence: Synthetic oligonucleotide
ggaucugugccagguucug

SEQ ID NO: 3114323 - RNA, 19 nt, Artificial Sequence
  Description of Artificial Sequence: Synthetic oligonucleotide
ccugcgcuggcgcuggcgc

SEQ ID NO: 3114324 - RNA, 19 nt, Artificial Sequence
  Description of Artificial Sequence: Synthetic oligonucleotide
ccauggcuggacacugccc

SEQ ID NO: 3114325 - RNA, 19 nt, Artificial Sequence
  Description of Artificial Sequence: Synthetic oligonucleotide
cagcccuggcggagugugg

SEQ ID NO: 3114326 - RNA, 19 nt, Artificial Sequence
  Description of Artificial Sequence: Synthetic oligonucleotide
ggccuugaccacgcguagg

SEQ ID NO: 3114327 - RNA, 19 nt, Artificial Sequence
  Description of Artificial Sequence: Synthetic oligonucleotide
gggccuugaccacgcguag

SEQ ID NO: 3114328 - RNA, 19 nt, Artificial Sequence
  Description of Artificial Sequence: Synthetic oligonucleotide
ucgcccgugcagcgugaac

SEQ ID NO: 3114329 - RNA, 19 nt, Artificial Sequence
  Description of Artificial Sequence: Synthetic oligonucleotide
ggacacugcccacaguagu

SEQ ID NO: 3114330 - RNA, 19 nt, Artificial Sequence
  Description of Artificial Sequence: Synthetic oligonucleotide
caccagcaccagcagguga

SEQ ID NO: 3114331 - RNA, 19 nt, Artificial Sequence
  Description of Artificial Sequence: Synthetic oligonucleotide
gaccacgcguaggcgucgc

SEQ ID NO: 3114332 - RNA, 19 nt, Artificial Sequence
  Description of Artificial Sequence: Synthetic oligonucleotide
cagcagugcgcagcugaug

SEQ ID NO: 3114333 - RNA, 19 nt, Artificial Sequence
  Description of Artificial Sequence: Synthetic oligonucleotide
gagcccugcgcuggcgcug

SEQ ID NO: 3114334 - RNA, 19 nt, Artificial Sequence
  Description of Artificial Sequence: Synthetic oligonucleotide
gggagcccugcgcuggcgc

SEQ ID NO: 3114335 - RNA, 19 nt, Artificial Sequence
  Description of Artificial Sequence: Synthetic oligonucleotide
acgcguaggcgucgcccgu

SEQ ID NO: 3114336 - RNA, 19 nt, Artificial Sequence
  Description of Artificial Sequence: Synthetic oligonucleotide
cgcccgugcagcgugaacc

SEQ ID NO: 3114337 - RNA, 19 nt, Artificial Sequence
  Description of Artificial Sequence: Synthetic oligonucleotide
cuggcgcuggcggcucugg

SEQ ID NO: 3114338 - RNA, 19 nt, Artificial Sequence
  Description of Artificial Sequence: Synthetic oligonucleotide
gcagcccuggcggagugug

SEQ ID NO: 3114339 - RNA, 19 nt, Artificial Sequence
  Description of Artificial Sequence: Synthetic oligonucleotide
gugggagcccugcgcuggc

SEQ ID NO: 3114340 - RNA, 19 nt, Artificial Sequence
  Description of Artificial Sequence: Synthetic oligonucleotide
gaagcagcccuggcggagu

SEQ ID NO: 3114341 - RNA, 19 nt, Artificial Sequence
  Description of Artificial Sequence: Synthetic oligonucleotide
gaucugugccagguucugu

SEQ ID NO: 3114342 - RNA, 19 nt, Artificial Sequence
  Description of Artificial Sequence: Synthetic oligonucleotide
gugcagcgugaaccgggac

SEQ ID NO: 3114343 - RNA, 19 nt, Artificial Sequence
  Description of Artificial Sequence: Synthetic oligonucleotide
guccaguguauggaucugu

SEQ ID NO: 3114344 - RNA, 19 nt, Artificial Sequence
  Description of Artificial Sequence: Synthetic oligonucleotide
gcgcuggcggcucuggcca

SEQ ID NO: 3114345 - RNA, 19 nt, Artificial Sequence
  Description of Artificial Sequence: Synthetic oligonucleotide
guucugucucugggccuug

SEQ ID NO: 3114346 - RNA, 19 nt, Artificial Sequence
  Description of Artificial Sequence: Synthetic oligonucleotide
ggcugcugaaaaggucaug

SEQ ID NO: 3114347 - RNA, 19 nt, Artificial Sequence
  Description of Artificial Sequence: Synthetic oligonucleotide
uggcggcucuggccauggc

SEQ ID NO: 3114348 - RNA, 19 nt, Artificial Sequence
  Description of Artificial Sequence: Synthetic oligonucleotide
ccacgcguaggcgucgccc

SEQ ID NO: 3114349 - RNA, 19 nt, Artificial Sequence
  Description of Artificial Sequence: Synthetic oligonucleotide
uggcggagugugggagccc

SEQ ID NO: 3114350 - RNA, 19 nt, Artificial Sequence
  Description of Artificial Sequence: Synthetic oligonucleotide
gcuggcgcuggcgcuggcg

SEQ ID NO: 3114351 - RNA, 19 nt, Artificial Sequence
  Description of Artificial Sequence: Synthetic oligonucleotide
gcgucgcccgugcagcgug

SEQ ID NO: 3114352 - RNA, 19 nt, Artificial Sequence
  Description of Artificial Sequence: Synthetic oligonucleotide
gcgcagcugauggacacca

SEQ ID NO: 3114353 - RNA, 19 nt, Artificial Sequence
  Description of Artificial Sequence: Synthetic oligonucleotide
ccagcaggugaagcagccc

SEQ ID NO: 3114354 - RNA, 19 nt, Artificial Sequence
  Description of Artificial Sequence: Synthetic oligonucleotide
gcguaggcgucgcccgugc

SEQ ID NO: 3114355 - RNA, 19 nt, Artificial Sequence
  Description of Artificial Sequence: Synthetic oligonucleotide
cugggccuugaccacgcgu

SEQ ID NO: 3114356 - RNA, 19 nt, Artificial Sequence
  Description of Artificial Sequence: Synthetic oligonucleotide
gcagugcgcagcugaugga

SEQ ID NO: 3114357 - RNA, 19 nt, Artificial Sequence
  Description of Artificial Sequence: Synthetic oligonucleotide
ccgggaccaggugaagagc

SEQ ID NO: 3114358 - RNA, 19 nt, Artificial Sequence
  Description of Artificial Sequence: Synthetic oligonucleotide
agcagcccuggcggagugu

SEQ ID NO: 3114359 - RNA, 19 nt, Artificial Sequence
  Description of Artificial Sequence: Synthetic oligonucleotide
cccuggcggagugugggag

SEQ ID NO: 3114360 - RNA, 19 nt, Artificial Sequence
  Description of Artificial Sequence: Synthetic oligonucleotide
gcucuggccauggcuggac

SEQ ID NO: 3114361 - RNA, 19 nt, Artificial Sequence
  Description of Artificial Sequence: Synthetic oligonucleotide
cagcgugaaccgggaccag

SEQ ID NO: 3114362 - RNA, 19 nt, Artificial Sequence
  Description of Artificial Sequence: Synthetic oligonucleotide
cgugaaccgggaccaggug

SEQ ID NO: 3114363 - RNA, 19 nt, Artificial Sequence
  Description of Artificial Sequence: Synthetic oligonucleotide
ccagcaccagcaggugaag

SEQ ID NO: 3114364 - RNA, 19 nt, Artificial Sequence
  Description of Artificial Sequence: Synthetic oligonucleotide
ggccauggcuggacacugc

SEQ ID NO: 3114365 - RNA, 19 nt, Artificial Sequence
  Description of Artificial Sequence: Synthetic oligonucleotide
cggagugugggagcccugc

SEQ ID NO: 3114366 - RNA, 19 nt, Artificial Sequence
  Description of Artificial Sequence: Synthetic oligonucleotide
gguucugucucugggccuu

SEQ ID NO: 3114367 - RNA, 19 nt, Artificial Sequence
  Description of Artificial Sequence: Synthetic oligonucleotide
cugcagcagugcgcagcug

SEQ ID NO: 3114368 - RNA, 19 nt, Artificial Sequence
  Description of Artificial Sequence: Synthetic oligonucleotide
cccgugcagcgugaaccgg

SEQ ID NO: 3114369 - RNA, 19 nt, Artificial Sequence
  Description of Artificial Sequence: Synthetic oligonucleotide
gcgugaaccgggaccaggu

SEQ ID NO: 3114370 - RNA, 19 nt, Artificial Sequence
  Description of Artificial Sequence: Synthetic oligonucleotide
cgugcagcgugaaccggga

SEQ ID NO: 3114371 - RNA, 19 nt, Artificial Sequence
  Description of Artificial Sequence: Synthetic oligonucleotide
ggcggagugugggagcccu

SEQ ID NO: 3114372 - RNA, 19 nt, Artificial Sequence
  Description of Artificial Sequence: Synthetic oligonucleotide
gcuggcggcucuggccaug

SEQ ID NO: 3114373 - RNA, 19 nt, Artificial Sequence
  Description of Artificial Sequence: Synthetic oligonucleotide
cccugcgcuggcgcuggcg

SEQ ID NO: 3114374 - RNA, 19 nt, Artificial Sequence
  Description of Artificial Sequence: Synthetic oligonucleotide
gcccuggcggaguguggga

SEQ ID NO: 3114375 - RNA, 19 nt, Artificial Sequence
  Description of Artificial Sequence: Synthetic oligonucleotide
gcgcuggcgcuggcgcugg

SEQ ID NO: 3114376 - RNA, 19 nt, Artificial Sequence
  Description of Artificial Sequence: Synthetic oligonucleotide
gucgcccgugcagcgugaa

SEQ ID NO: 3114377 - RNA, 19 nt, Artificial Sequence
  Description of Artificial Sequence: Synthetic oligonucleotide
gcuggacacugcccacagu

SEQ ID NO: 3114378 - RNA, 19 nt, Artificial Sequence
  Description of Artificial Sequence: Synthetic oligonucleotide
gcggagugugggagcccug

SEQ ID NO: 3114379 - RNA, 19 nt, Artificial Sequence
  Description of Artificial Sequence: Synthetic oligonucleotide
ggcgcuggcgcuggcggcu

SEQ ID NO: 3114380 - RNA, 19 nt, Artificial Sequence
  Description of Artificial Sequence: Synthetic oligonucleotide
gcagcagugcgcagcugau

SEQ ID NO: 3114381 - RNA, 19 nt, Artificial Sequence
  Description of Artificial Sequence: Synthetic oligonucleotide
gggcugcugaaaaggucau

SEQ ID NO: 3114382 - RNA, 19 nt, Artificial Sequence
  Description of Artificial Sequence: Synthetic oligonucleotide
cgcguaggcgucgcccgug

SEQ ID NO: 3114383 - RNA, 19 nt, Artificial Sequence
  Description of Artificial Sequence: Synthetic oligonucleotide
cguaggcgucgcccgugca

SEQ ID NO: 3114384 - RNA, 19 nt, Artificial Sequence
  Description of Artificial Sequence: Synthetic oligonucleotide
ggcgucgcccgugcagcgu

SEQ ID NO: 3114385 - RNA, 19 nt, Artificial Sequence
  Description of Artificial Sequence: Synthetic oligonucleotide
gcccugcgcuggcgcuggc

SEQ ID NO: 3114386 - RNA, 19 nt, Artificial Sequence
  Description of Artificial Sequence: Synthetic oligonucleotide
gcgcuggcgcuggcggcuc

SEQ ID NO: 3114387 - RNA, 19 nt, Artificial Sequence
  Description of Artificial Sequence: Synthetic oligonucleotide
cgucgcccgugcagcguga

SEQ ID NO: 3114388 - RNA, 19 nt, Artificial Sequence
  Description of Artificial Sequence: Synthetic oligonucleotide
cgcuggcgcuggcgcuggc

SEQ ID NO: 3114389 - RNA, 19 nt, Artificial Sequence
  Description of Artificial Sequence: Synthetic oligonucleotide
cgcuggcggcucuggccau

SEQ ID NO: 3114390 - RNA, 19 nt, Artificial Sequence
  Description of Artificial Sequence: Synthetic oligonucleotide
cgcuggcgcuggcggcucu

SEQ ID NO: 3114391 - RNA, 19 nt, Artificial Sequence
  Description of Artificial Sequence: Synthetic oligonucleotide
uuaaucaacucauuugucg

SEQ ID NO: 3114392 - RNA, 19 nt, Artificial Sequence
  Description of Artificial Sequence: Synthetic oligonucleotide
gaugcuucauaucuaagcg

SEQ ID NO: 3114393 - RNA, 19 nt, Artificial Sequence
  Description of Artificial Sequence: Synthetic oligonucleotide
aguauuagaagucaguagu

SEQ ID NO: 3114394 - RNA, 19 nt, Artificial Sequence
  Description of Artificial Sequence: Synthetic oligonucleotide
ugugguaucauauuaggga

SEQ ID NO: 3114395 - RNA, 19 nt, Artificial Sequence
  Description of Artificial Sequence: Synthetic oligonucleotide
aguaguuaggcuuuuaaca

SEQ ID NO: 3114396 - RNA, 19 nt, Artificial Sequence
  Description of Artificial Sequence: Synthetic oligonucleotide
uuagaagucaguaguuagg

SEQ ID NO: 3114397 - RNA, 19 nt, Artificial Sequence
  Description of Artificial Sequence: Synthetic oligonucleotide
cuuauuuugacguauuguc

SEQ ID NO: 3114398 - RNA, 19 nt, Artificial Sequence
  Description of Artificial Sequence: Synthetic oligonucleotide
ucuaauguugcucaacuuc

SEQ ID NO: 3114399 - RNA, 19 nt, Artificial Sequence
  Description of Artificial Sequence: Synthetic oligonucleotide
uuauuuugacguauugucc

SEQ ID NO: 3114400 - RNA, 19 nt, Artificial Sequence
  Description of Artificial Sequence: Synthetic oligonucleotide
uaggcuuuuaacaaucaug

SEQ ID NO: 3114401 - RNA, 19 nt, Artificial Sequence
  Description of Artificial Sequence: Synthetic oligonucleotide
auuagaagucaguaguuag

SEQ ID NO: 3114402 - RNA, 19 nt, Artificial Sequence
  Description of Artificial Sequence: Synthetic oligonucleotide
uaucuaagcggcuucuugg

SEQ ID NO: 3114403 - RNA, 19 nt, Artificial Sequence
  Description of Artificial Sequence: Synthetic oligonucleotide
aauguugcucaacuucuuc

SEQ ID NO: 3114404 - RNA, 19 nt, Artificial Sequence
  Description of Artificial Sequence: Synthetic oligonucleotide
ugcuucauaucuaagcggc

SEQ ID NO: 3114405 - RNA, 19 nt, Artificial Sequence
  Description of Artificial Sequence: Synthetic oligonucleotide
uugucgaugcuucauaucu

SEQ ID NO: 3114406 - RNA, 19 nt, Artificial Sequence
  Description of Artificial Sequence: Synthetic oligonucleotide
uauuuugacguauuguccu

SEQ ID NO: 3114407 - RNA, 19 nt, Artificial Sequence
  Description of Artificial Sequence: Synthetic oligonucleotide
aacaaucauggucuaaugu

SEQ ID NO: 3114408 - RNA, 19 nt, Artificial Sequence
  Description of Artificial Sequence: Synthetic oligonucleotide
aaagguacacaguauuaga

SEQ ID NO: 3114409 - RNA, 19 nt, Artificial Sequence
  Description of Artificial Sequence: Synthetic oligonucleotide
aggcuuuuaacaaucaugg

SEQ ID NO: 3114410 - RNA, 19 nt, Artificial Sequence
  Description of Artificial Sequence: Synthetic oligonucleotide
gauuggauacgcuauuccc

SEQ ID NO: 3114411 - RNA, 19 nt, Artificial Sequence
  Description of Artificial Sequence: Synthetic oligonucleotide
aaucauggucuaauguugc

SEQ ID NO: 3114412 - RNA, 19 nt, Artificial Sequence
  Description of Artificial Sequence: Synthetic oligonucleotide
gacguauuguccuugcugc

SEQ ID NO: 3114413 - RNA, 19 nt, Artificial Sequence
  Description of Artificial Sequence: Synthetic oligonucleotide
uaaagguacacaguauuag

SEQ ID NO: 3114414 - RNA, 19 nt, Artificial Sequence
  Description of Artificial Sequence: Synthetic oligonucleotide
uaaucaacucauuugucga

SEQ ID NO: 3114415 - RNA, 19 nt, Artificial Sequence
  Description of Artificial Sequence: Synthetic oligonucleotide
uucauuaaucaacucauuu

SEQ ID NO: 3114416 - RNA, 19 nt, Artificial Sequence
  Description of Artificial Sequence: Synthetic oligonucleotide
uugcuucuuauuuugacgu

SEQ ID NO: 3114417 - RNA, 19 nt, Artificial Sequence
  Description of Artificial Sequence: Synthetic oligonucleotide
cuuuuaacaaucauggucu

SEQ ID NO: 3114418 - RNA, 19 nt, Artificial Sequence
  Description of Artificial Sequence: Synthetic oligonucleotide
caacucuucauuaaucaac

SEQ ID NO: 3114419 - RNA, 19 nt, Artificial Sequence
  Description of Artificial Sequence: Synthetic oligonucleotide
ugacguauuguccuugcug

SEQ ID NO: 3114420 - RNA, 19 nt, Artificial Sequence
  Description of Artificial Sequence: Synthetic oligonucleotide
ugauuggauacgcuauucc

SEQ ID NO: 3114421 - RNA, 19 nt, Artificial Sequence
  Description of Artificial Sequence: Synthetic oligonucleotide
ucaaugauuggauacgcua

SEQ ID NO: 3114422 - RNA, 19 nt, Artificial Sequence
  Description of Artificial Sequence: Synthetic oligonucleotide
agguacacaguauuagaag

SEQ ID NO: 3114423 - RNA, 19 nt, Artificial Sequence
  Description of Artificial Sequence: Synthetic oligonucleotide
uuaacaaucauggucuaau

SEQ ID NO: 3114424 - RNA, 19 nt, Artificial Sequence
  Description of Artificial Sequence: Synthetic oligonucleotide
uaucauauuagggauccca

SEQ ID NO: 3114425 - RNA, 19 nt, Artificial Sequence
  Description of Artificial Sequence: Synthetic oligonucleotide
acaaucauggucuaauguu

SEQ ID NO: 3114426 - RNA, 19 nt, Artificial Sequence
  Description of Artificial Sequence: Synthetic oligonucleotide
caaucauggucuaauguug

SEQ ID NO: 3114427 - RNA, 19 nt, Artificial Sequence
  Description of Artificial Sequence: Synthetic oligonucleotide
uuaaagguacacaguauua

SEQ ID NO: 3114428 - RNA, 19 nt, Artificial Sequence
  Description of Artificial Sequence: Synthetic oligonucleotide
uucuuauuuugacguauug

SEQ ID NO: 3114429 - RNA, 19 nt, Artificial Sequence
  Description of Artificial Sequence: Synthetic oligonucleotide
uagaagucaguaguuaggc

SEQ ID NO: 3114430 - RNA, 19 nt, Artificial Sequence
  Description of Artificial Sequence: Synthetic oligonucleotide
aacucuucauuaaucaacu

SEQ ID NO: 3114431 - RNA, 19 nt, Artificial Sequence
  Description of Artificial Sequence: Synthetic oligonucleotide
ucuuauuuugacguauugu

SEQ ID NO: 3114432 - RNA, 19 nt, Artificial Sequence
  Description of Artificial Sequence: Synthetic oligonucleotide
augcuucauaucuaagcgg

SEQ ID NO: 3114433 - RNA, 19 nt, Artificial Sequence
  Description of Artificial Sequence: Synthetic oligonucleotide
cauauuagggaucccauca

SEQ ID NO: 3114434 - RNA, 19 nt, Artificial Sequence
  Description of Artificial Sequence: Synthetic oligonucleotide
gcuuuuaacaaucaugguc

SEQ ID NO: 3114435 - RNA, 19 nt, Artificial Sequence
  Description of Artificial Sequence: Synthetic oligonucleotide
ucaacucauuugucgaugc

SEQ ID NO: 3114436 - RNA, 19 nt, Artificial Sequence
  Description of Artificial Sequence: Synthetic oligonucleotide
caguauuagaagucaguag

SEQ ID NO: 3114437 - RNA, 19 nt, Artificial Sequence
  Description of Artificial Sequence: Synthetic oligonucleotide
uaagcggcuucuuggagag

SEQ ID NO: 3114438 - RNA, 19 nt, Artificial Sequence
  Description of Artificial Sequence: Synthetic oligonucleotide
cugugguaucauauuaggg

SEQ ID NO: 3114439 - RNA, 19 nt, Artificial Sequence
  Description of Artificial Sequence: Synthetic oligonucleotide
auaucuaagcggcuucuug

SEQ ID NO: 3114440 - RNA, 19 nt, Artificial Sequence
  Description of Artificial Sequence: Synthetic oligonucleotide
ucaguaguuaggcuuuuaa

SEQ ID NO: 3114441 - RNA, 19 nt, Artificial Sequence
  Description of Artificial Sequence: Synthetic oligonucleotide
uucuucuugcuucuuauuu

SEQ ID NO: 3114442 - RNA, 19 nt, Artificial Sequence
  Description of Artificial Sequence: Synthetic oligonucleotide
uacacaguauuagaaguca

SEQ ID NO: 3114443 - RNA, 19 nt, Artificial Sequence
  Description of Artificial Sequence: Synthetic oligonucleotide
aguuaggcuuuuaacaauc

SEQ ID NO: 3114444 - RNA, 19 nt, Artificial Sequence
  Description of Artificial Sequence: Synthetic oligonucleotide
uuggagagcgggcacacca

SEQ ID NO: 3114445 - RNA, 19 nt, Artificial Sequence
  Description of Artificial Sequence: Synthetic oligonucleotide
aaugauuggauacgcuauu

SEQ ID NO: 3114446 - RNA, 19 nt, Artificial Sequence
  Description of Artificial Sequence: Synthetic oligonucleotide
cucuucauuaaucaacuca

SEQ ID NO: 3114447 - RNA, 19 nt, Artificial Sequence
  Description of Artificial Sequence: Synthetic oligonucleotide
aaucaacucauuugucgau

SEQ ID NO: 3114448 - RNA, 19 nt, Artificial Sequence
  Description of Artificial Sequence: Synthetic oligonucleotide
uaacaaucauggucuaaug

SEQ ID NO: 3114449 - RNA, 19 nt, Artificial Sequence
  Description of Artificial Sequence: Synthetic oligonucleotide
auuaaucaacucauuuguc

SEQ ID NO: 3114450 - RNA, 19 nt, Artificial Sequence
  Description of Artificial Sequence: Synthetic oligonucleotide
acucauuugucgaugcuuc

SEQ ID NO: 3114451 - RNA, 19 nt, Artificial Sequence
  Description of Artificial Sequence: Synthetic oligonucleotide
uuugacguauuguccuugc

SEQ ID NO: 3114452 - RNA, 19 nt, Artificial Sequence
  Description of Artificial Sequence: Synthetic oligonucleotide
uucauaucuaagcggcuuc

SEQ ID NO: 3114453 - RNA, 19 nt, Artificial Sequence
  Description of Artificial Sequence: Synthetic oligonucleotide
cauuaaucaacucauuugu

SEQ ID NO: 3114454 - RNA, 19 nt, Artificial Sequence
  Description of Artificial Sequence: Synthetic oligonucleotide
ucuaagcggcuucuuggag

SEQ ID NO: 3114455 - RNA, 19 nt, Artificial Sequence
  Description of Artificial Sequence: Synthetic oligonucleotide
gguaucauauuagggaucc

SEQ ID NO: 3114456 - RNA, 19 nt, Artificial Sequence
  Description of Artificial Sequence: Synthetic oligonucleotide
auguugcucaacuucuucu

SEQ ID NO: 3114457 - RNA, 19 nt, Artificial Sequence
  Description of Artificial Sequence: Synthetic oligonucleotide
uuaggcuuuuaacaaucau

SEQ ID NO: 3114458 - RNA, 19 nt, Artificial Sequence
  Description of Artificial Sequence: Synthetic oligonucleotide
aagguacacaguauuagaa

SEQ ID NO: 3114459 - RNA, 19 nt, Artificial Sequence
  Description of Artificial Sequence: Synthetic oligonucleotide
caguaguuaggcuuuuaac

SEQ ID NO: 3114460 - RNA, 19 nt, Artificial Sequence
  Description of Artificial Sequence: Synthetic oligonucleotide
agcagcuccggguggaagg

SEQ ID NO: 3114461 - RNA, 19 nt, Artificial Sequence
  Description of Artificial Sequence: Synthetic oligonucleotide
uacgcuauucccaacucuu

SEQ ID NO: 3114462 - RNA, 19 nt, Artificial Sequence
  Description of Artificial Sequence: Synthetic oligonucleotide
uuggauacgcuauucccaa

SEQ ID NO: 3114463 - RNA, 19 nt, Artificial Sequence
  Description of Artificial Sequence: Synthetic oligonucleotide
cauggucuaauguugcuca

SEQ ID NO: 3114464 - RNA, 19 nt, Artificial Sequence
  Description of Artificial Sequence: Synthetic oligonucleotide
agcggcuucuuggagagcg

SEQ ID NO: 3114465 - RNA, 19 nt, Artificial Sequence
  Description of Artificial Sequence: Synthetic oligonucleotide
acguauuguccuugcugcc

SEQ ID NO: 3114466 - RNA, 19 nt, Artificial Sequence
  Description of Artificial Sequence: Synthetic oligonucleotide
uauuagggaucccaucaau

SEQ ID NO: 3114467 - RNA, 19 nt, Artificial Sequence
  Description of Artificial Sequence: Synthetic oligonucleotide
ucauauuagggaucccauc

SEQ ID NO: 3114468 - RNA, 19 nt, Artificial Sequence
  Description of Artificial Sequence: Synthetic oligonucleotide
uauuagaagucaguaguua

SEQ ID NO: 3114469 - RNA, 19 nt, Artificial Sequence
  Description of Artificial Sequence: Synthetic oligonucleotide
auuugucgaugcuucauau

SEQ ID NO: 3114470 - RNA, 19 nt, Artificial Sequence
  Description of Artificial Sequence: Synthetic oligonucleotide
uauucccaacucuucauua

SEQ ID NO: 3114471 - RNA, 19 nt, Artificial Sequence
  Description of Artificial Sequence: Synthetic oligonucleotide
uguccuugcugccuguggu

SEQ ID NO: 3114472 - RNA, 19 nt, Artificial Sequence
  Description of Artificial Sequence: Synthetic oligonucleotide
gaagucaguaguuaggcuu

SEQ ID NO: 3114473 - RNA, 19 nt, Artificial Sequence
  Description of Artificial Sequence: Synthetic oligonucleotide
augauuggauacgcuauuc

SEQ ID NO: 3114474 - RNA, 19 nt, Artificial Sequence
  Description of Artificial Sequence: Synthetic oligonucleotide
auuagggaucccaucaaug

SEQ ID NO: 3114475 - RNA, 19 nt, Artificial Sequence
  Description of Artificial Sequence: Synthetic oligonucleotide
auuggauacgcuauuccca

SEQ ID NO: 3114476 - RNA, 19 nt, Artificial Sequence
  Description of Artificial Sequence: Synthetic oligonucleotide
acaguauuagaagucagua

SEQ ID NO: 3114477 - RNA, 19 nt, Artificial Sequence
  Description of Artificial Sequence: Synthetic oligonucleotide
gaaggugcggggcuccucc

SEQ ID NO: 3114478 - RNA, 19 nt, Artificial Sequence
  Description of Artificial Sequence: Synthetic oligonucleotide
caucaaugauuggauacgc

SEQ ID NO: 3114479 - RNA, 19 nt, Artificial Sequence
  Description of Artificial Sequence: Synthetic oligonucleotide
aacucauuugucgaugcuu

SEQ ID NO: 3114480 - RNA, 19 nt, Artificial Sequence
  Description of Artificial Sequence: Synthetic oligonucleotide
ucgaugcuucauaucuaag

SEQ ID NO: 3114481 - RNA, 19 nt, Artificial Sequence
  Description of Artificial Sequence: Synthetic oligonucleotide
uuuugacguauuguccuug

SEQ ID NO: 3114482 - RNA, 19 nt, Artificial Sequence
  Description of Artificial Sequence: Synthetic oligonucleotide
gauacgcuauucccaacuc

SEQ ID NO: 3114483 - RNA, 19 nt, Artificial Sequence
  Description of Artificial Sequence: Synthetic oligonucleotide
ugguaucauauuagggauc

SEQ ID NO: 3114484 - RNA, 19 nt, Artificial Sequence
  Description of Artificial Sequence: Synthetic oligonucleotide
agaagucaguaguuaggcu

SEQ ID NO: 3114485 - RNA, 19 nt, Artificial Sequence
  Description of Artificial Sequence: Synthetic oligonucleotide
uuugucgaugcuucauauc

SEQ ID NO: 3114486 - RNA, 19 nt, Artificial Sequence
  Description of Artificial Sequence: Synthetic oligonucleotide
guugcucaacuucuucuug

SEQ ID NO: 3114487 - RNA, 19 nt, Artificial Sequence
  Description of Artificial Sequence: Synthetic oligonucleotide
auacgcuauucccaacucu

SEQ ID NO: 3114488 - RNA, 19 nt, Artificial Sequence
  Description of Artificial Sequence: Synthetic oligonucleotide
uucuugcuucuuauuuuga

SEQ ID NO: 3114489 - RNA, 19 nt, Artificial Sequence
  Description of Artificial Sequence: Synthetic oligonucleotide
uaguuaggcuuuuaacaau

SEQ ID NO: 3114490 - RNA, 19 nt, Artificial Sequence
  Description of Artificial Sequence: Synthetic oligonucleotide
uguugcucaacuucuucuu

SEQ ID NO: 3114491 - RNA, 19 nt, Artificial Sequence
  Description of Artificial Sequence: Synthetic oligonucleotide
cuaauguugcucaacuucu

SEQ ID NO: 3114492 - RNA, 19 nt, Artificial Sequence
  Description of Artificial Sequence: Synthetic oligonucleotide
aucuaagcggcuucuugga

SEQ ID NO: 3114493 - RNA, 19 nt, Artificial Sequence
  Description of Artificial Sequence: Synthetic oligonucleotide
uucccaacucuucauuaau

SEQ ID NO: 3114494 - RNA, 19 nt, Artificial Sequence
  Description of Artificial Sequence: Synthetic oligonucleotide
ugccugugguaucauauua

SEQ ID NO: 3114495 - RNA, 19 nt, Artificial Sequence
  Description of Artificial Sequence: Synthetic oligonucleotide
ccugugguaucauauuagg

SEQ ID NO: 3114496 - RNA, 19 nt, Artificial Sequence
  Description of Artificial Sequence: Synthetic oligonucleotide
guuaaagguacacaguauu

SEQ ID NO: 3114497 - RNA, 19 nt, Artificial Sequence
  Description of Artificial Sequence: Synthetic oligonucleotide
guauuguccuugcugccug

SEQ ID NO: 3114498 - RNA, 19 nt, Artificial Sequence
  Description of Artificial Sequence: Synthetic oligonucleotide
auauuagggaucccaucaa

SEQ ID NO: 3114499 - RNA, 19 nt, Artificial Sequence
  Description of Artificial Sequence: Synthetic oligonucleotide
aucaacucauuugucgaug

SEQ ID NO: 3114500 - RNA, 19 nt, Artificial Sequence
  Description of Artificial Sequence: Synthetic oligonucleotide
uuuaacaaucauggucuaa

SEQ ID NO: 3114501 - RNA, 19 nt, Artificial Sequence
  Description of Artificial Sequence: Synthetic oligonucleotide
auucccaacucuucauuaa

SEQ ID NO: 3114502 - RNA, 19 nt, Artificial Sequence
  Description of Artificial Sequence: Synthetic oligonucleotide
ucauggucuaauguugcuc

SEQ ID NO: 3114503 - RNA, 19 nt, Artificial Sequence
  Description of Artificial Sequence: Synthetic oligonucleotide
ucauaucuaagcggcuucu

SEQ ID NO: 3114504 - RNA, 19 nt, Artificial Sequence
  Description of Artificial Sequence: Synthetic oligonucleotide
uuuuaacaaucauggucua

SEQ ID NO: 3114505 - RNA, 19 nt, Artificial Sequence
  Description of Artificial Sequence: Synthetic oligonucleotide
cuaagcggcuucuuggaga

SEQ ID NO: 3114506 - RNA, 19 nt, Artificial Sequence
  Description of Artificial Sequence: Synthetic oligonucleotide
aucauggucuaauguugcu

SEQ ID NO: 3114507 - RNA, 19 nt, Artificial Sequence
  Description of Artificial Sequence: Synthetic oligonucleotide
cccaucaaugauuggauac

SEQ ID NO: 3114508 - RNA, 19 nt, Artificial Sequence
  Description of Artificial Sequence: Synthetic oligonucleotide
uggagagcgggcacaccag

SEQ ID NO: 3114509 - RNA, 19 nt, Artificial Sequence
  Description of Artificial Sequence: Synthetic oligonucleotide
gguacacaguauuagaagu

SEQ ID NO: 3114510 - RNA, 19 nt, Artificial Sequence
  Description of Artificial Sequence: Synthetic oligonucleotide
cgaugcuucauaucuaagc

SEQ ID NO: 3114511 - RNA, 19 nt, Artificial Sequence
  Description of Artificial Sequence: Synthetic oligonucleotide
guacacaguauuagaaguc

SEQ ID NO: 3114512 - RNA, 19 nt, Artificial Sequence
  Description of Artificial Sequence: Synthetic oligonucleotide
uugacguauuguccuugcu

SEQ ID NO: 3114513 - RNA, 19 nt, Artificial Sequence
  Description of Artificial Sequence: Synthetic oligonucleotide
uccggguggaaggugcggg

SEQ ID NO: 3114514 - RNA, 19 nt, Artificial Sequence
  Description of Artificial Sequence: Synthetic oligonucleotide
uaauguugcucaacuucuu

SEQ ID NO: 3114515 - RNA, 19 nt, Artificial Sequence
  Description of Artificial Sequence: Synthetic oligonucleotide
aagucaguaguuaggcuuu

SEQ ID NO: 3114516 - RNA, 19 nt, Artificial Sequence
  Description of Artificial Sequence: Synthetic oligonucleotide
ucauuugucgaugcuucau

SEQ ID NO: 3114517 - RNA, 19 nt, Artificial Sequence
  Description of Artificial Sequence: Synthetic oligonucleotide
agcuccggguggaaggugc

SEQ ID NO: 3114518 - RNA, 19 nt, Artificial Sequence
  Description of Artificial Sequence: Synthetic oligonucleotide
ugucgaugcuucauaucua

SEQ ID NO: 3114519 - RNA, 19 nt, Artificial Sequence
  Description of Artificial Sequence: Synthetic oligonucleotide
auuuugacguauuguccuu

SEQ ID NO: 3114520 - RNA, 19 nt, Artificial Sequence
  Description of Artificial Sequence: Synthetic oligonucleotide
ccaucaaugauuggauacg

SEQ ID NO: 3114521 - RNA, 19 nt, Artificial Sequence
  Description of Artificial Sequence: Synthetic oligonucleotide
gucgaugcuucauaucuaa

SEQ ID NO: 3114522 - RNA, 19 nt, Artificial Sequence
  Description of Artificial Sequence: Synthetic oligonucleotide
agagcgggcacaccaggca

SEQ ID NO: 3114523 - RNA, 19 nt, Artificial Sequence
  Description of Artificial Sequence: Synthetic oligonucleotide
acacaguauuagaagucag

SEQ ID NO: 3114524 - RNA, 19 nt, Artificial Sequence
  Description of Artificial Sequence: Synthetic oligonucleotide
aaggugcggggcuccuccg

SEQ ID NO: 3114525 - RNA, 19 nt, Artificial Sequence
  Description of Artificial Sequence: Synthetic oligonucleotide
gugguaucauauuagggau

SEQ ID NO: 3114526 - RNA, 19 nt, Artificial Sequence
  Description of Artificial Sequence: Synthetic oligonucleotide
aucauauuagggaucccau

SEQ ID NO: 3114527 - RNA, 19 nt, Artificial Sequence
  Description of Artificial Sequence: Synthetic oligonucleotide
uggucuaauguugcucaac

SEQ ID NO: 3114528 - RNA, 19 nt, Artificial Sequence
  Description of Artificial Sequence: Synthetic oligonucleotide
uucuuggagagcgggcaca

SEQ ID NO: 3114529 - RNA, 19 nt, Artificial Sequence
  Description of Artificial Sequence: Synthetic oligonucleotide
aggugcggggcuccuccgc

SEQ ID NO: 3114530 - RNA, 19 nt, Artificial Sequence
  Description of Artificial Sequence: Synthetic oligonucleotide
ucccaucaaugauuggaua

SEQ ID NO: 3114531 - RNA, 19 nt, Artificial Sequence
  Description of Artificial Sequence: Synthetic oligonucleotide
ugcuucuuauuuugacgua

SEQ ID NO: 3114532 - RNA, 19 nt, Artificial Sequence
  Description of Artificial Sequence: Synthetic oligonucleotide
aucaaugauuggauacgcu

SEQ ID NO: 3114533 - RNA, 19 nt, Artificial Sequence
  Description of Artificial Sequence: Synthetic oligonucleotide
caaugauuggauacgcuau

SEQ ID NO: 3114534 - RNA, 19 nt, Artificial Sequence
  Description of Artificial Sequence: Synthetic oligonucleotide
cuucuuggagagcgggcac

SEQ ID NO: 3114535 - RNA, 19 nt, Artificial Sequence
  Description of Artificial Sequence: Synthetic oligonucleotide
ucuuggagagcgggcacac

SEQ ID NO: 3114536 - RNA, 19 nt, Artificial Sequence
  Description of Artificial Sequence: Synthetic oligonucleotide
guuaggcuuuuaacaauca

SEQ ID NO: 3114537 - RNA, 19 nt, Artificial Sequence
  Description of Artificial Sequence: Synthetic oligonucleotide
gagcgggcacaccaggcac

SEQ ID NO: 3114538 - RNA, 19 nt, Artificial Sequence
  Description of Artificial Sequence: Synthetic oligonucleotide
gggaucccaucaaugauug

SEQ ID NO: 3114539 - RNA, 19 nt, Artificial Sequence
  Description of Artificial Sequence: Synthetic oligonucleotide
cacaguauuagaagucagu

SEQ ID NO: 3114540 - RNA, 19 nt, Artificial Sequence
  Description of Artificial Sequence: Synthetic oligonucleotide
ggucuaauguugcucaacu

SEQ ID NO: 3114541 - RNA, 19 nt, Artificial Sequence
  Description of Artificial Sequence: Synthetic oligonucleotide
aucccaucaaugauuggau

SEQ ID NO: 3114542 - RNA, 19 nt, Artificial Sequence
  Description of Artificial Sequence: Synthetic oligonucleotide
cauuugucgaugcuucaua

SEQ ID NO: 3114543 - RNA, 19 nt, Artificial Sequence
  Description of Artificial Sequence: Synthetic oligonucleotide
agcgggcacaccaggcacc

SEQ ID NO: 3114544 - RNA, 19 nt, Artificial Sequence
  Description of Artificial Sequence: Synthetic oligonucleotide
ggagagcgggcacaccagg

SEQ ID NO: 3114545 - RNA, 19 nt, Artificial Sequence
  Description of Artificial Sequence: Synthetic oligonucleotide
gagagcgggcacaccaggc

SEQ ID NO: 3114546 - RNA, 19 nt, Artificial Sequence
  Description of Artificial Sequence: Synthetic oligonucleotide
uggauacgcuauucccaac

SEQ ID NO: 3114547 - RNA, 19 nt, Artificial Sequence
  Description of Artificial Sequence: Synthetic oligonucleotide
acgcuauucccaacucuuc

SEQ ID NO: 3114548 - RNA, 19 nt, Artificial Sequence
  Description of Artificial Sequence: Synthetic oligonucleotide
cuugcugccugugguauca

SEQ ID NO: 3114549 - RNA, 19 nt, Artificial Sequence
  Description of Artificial Sequence: Synthetic oligonucleotide
cccaacucuucauuaauca

SEQ ID NO: 3114550 - RNA, 19 nt, Artificial Sequence
  Description of Artificial Sequence: Synthetic oligonucleotide
caggcaccgcagcagcucc

SEQ ID NO: 3114551 - RNA, 19 nt, Artificial Sequence
  Description of Artificial Sequence: Synthetic oligonucleotide
agggaucccaucaaugauu

SEQ ID NO: 3114552 - RNA, 19 nt, Artificial Sequence
  Description of Artificial Sequence: Synthetic oligonucleotide
cucauuugucgaugcuuca

SEQ ID NO: 3114553 - RNA, 19 nt, Artificial Sequence
  Description of Artificial Sequence: Synthetic oligonucleotide
gccugugguaucauauuag

SEQ ID NO: 3114554 - RNA, 19 nt, Artificial Sequence
  Description of Artificial Sequence: Synthetic oligonucleotide
auggucuaauguugcucaa

SEQ ID NO: 3114555 - RNA, 19 nt, Artificial Sequence
  Description of Artificial Sequence: Synthetic oligonucleotide
uccuugcugccugugguau

SEQ ID NO: 3114556 - RNA, 19 nt, Artificial Sequence
  Description of Artificial Sequence: Synthetic oligonucleotide
aagcggcuucuuggagagc

SEQ ID NO: 3114557 - RNA, 19 nt, Artificial Sequence
  Description of Artificial Sequence: Synthetic oligonucleotide
guaucauauuagggauccc

SEQ ID NO: 3114558 - RNA, 19 nt, Artificial Sequence
  Description of Artificial Sequence: Synthetic oligonucleotide
ggauacgcuauucccaacu

SEQ ID NO: 3114559 - RNA, 19 nt, Artificial Sequence
  Description of Artificial Sequence: Synthetic oligonucleotide
cacaccaggcaccgcagca

SEQ ID NO: 3114560 - RNA, 19 nt, Artificial Sequence
  Description of Artificial Sequence: Synthetic oligonucleotide
ggaucccaucaaugauugg

SEQ ID NO: 3114561 - RNA, 19 nt, Artificial Sequence
  Description of Artificial Sequence: Synthetic oligonucleotide
guauuagaagucaguaguu

SEQ ID NO: 3114562 - RNA, 19 nt, Artificial Sequence
  Description of Artificial Sequence: Synthetic oligonucleotide
gcuucuuggagagcgggca

SEQ ID NO: 3114563 - RNA, 19 nt, Artificial Sequence
  Description of Artificial Sequence: Synthetic oligonucleotide
cuuggagagcgggcacacc

SEQ ID NO: 3114564 - RNA, 19 nt, Artificial Sequence
  Description of Artificial Sequence: Synthetic oligonucleotide
ugcugccugugguaucaua

SEQ ID NO: 3114565 - RNA, 19 nt, Artificial Sequence
  Description of Artificial Sequence: Synthetic oligonucleotide
gggcacaccaggcaccgca

SEQ ID NO: 3114566 - RNA, 19 nt, Artificial Sequence
  Description of Artificial Sequence: Synthetic oligonucleotide
ggugcggggcuccuccgcc

SEQ ID NO: 3114567 - RNA, 19 nt, Artificial Sequence
  Description of Artificial Sequence: Synthetic oligonucleotide
ccaacucuucauuaaucaa

SEQ ID NO: 3114568 - RNA, 19 nt, Artificial Sequence
  Description of Artificial Sequence: Synthetic oligonucleotide
cuucauuaaucaacucauu

SEQ ID NO: 3114569 - RNA, 19 nt, Artificial Sequence
  Description of Artificial Sequence: Synthetic oligonucleotide
cuucauaucuaagcggcuu

SEQ ID NO: 3114570 - RNA, 19 nt, Artificial Sequence
  Description of Artificial Sequence: Synthetic oligonucleotide
guggaaggugcggggcucc

SEQ ID NO: 3114571 - RNA, 19 nt, Artificial Sequence
  Description of Artificial Sequence: Synthetic oligonucleotide
cuccggguggaaggugcgg

SEQ ID NO: 3114572 - RNA, 19 nt, Artificial Sequence
  Description of Artificial Sequence: Synthetic oligonucleotide
cuauucccaacucuucauu

SEQ ID NO: 3114573 - RNA, 19 nt, Artificial Sequence
  Description of Artificial Sequence: Synthetic oligonucleotide
gucuaauguugcucaacuu

SEQ ID NO: 3114574 - RNA, 19 nt, Artificial Sequence
  Description of Artificial Sequence: Synthetic oligonucleotide
ggcuucuuggagagcgggc

SEQ ID NO: 3114575 - RNA, 19 nt, Artificial Sequence
  Description of Artificial Sequence: Synthetic oligonucleotide
ggcuuuuaacaaucauggu

SEQ ID NO: 3114576 - RNA, 19 nt, Artificial Sequence
  Description of Artificial Sequence: Synthetic oligonucleotide
gcuauucccaacucuucau

SEQ ID NO: 3114577 - RNA, 19 nt, Artificial Sequence
  Description of Artificial Sequence: Synthetic oligonucleotide
ggcaccgcagcagcuccgg

SEQ ID NO: 3114578 - RNA, 19 nt, Artificial Sequence
  Description of Artificial Sequence: Synthetic oligonucleotide
gugcggggcuccuccgccc

SEQ ID NO: 3114579 - RNA, 19 nt, Artificial Sequence
  Description of Artificial Sequence: Synthetic oligonucleotide
agucaguaguuaggcuuuu

SEQ ID NO: 3114580 - RNA, 19 nt, Artificial Sequence
  Description of Artificial Sequence: Synthetic oligonucleotide
ccggguggaaggugcgggg

SEQ ID NO: 3114581 - RNA, 19 nt, Artificial Sequence
  Description of Artificial Sequence: Synthetic oligonucleotide
uggaaggugcggggcuccu

SEQ ID NO: 3114582 - RNA, 19 nt, Artificial Sequence
  Description of Artificial Sequence: Synthetic oligonucleotide
caacucauuugucgaugcu

SEQ ID NO: 3114583 - RNA, 19 nt, Artificial Sequence
  Description of Artificial Sequence: Synthetic oligonucleotide
gcgggcacaccaggcaccg

SEQ ID NO: 3114584 - RNA, 19 nt, Artificial Sequence
  Description of Artificial Sequence: Synthetic oligonucleotide
ggcacaccaggcaccgcag

SEQ ID NO: 3114585 - RNA, 19 nt, Artificial Sequence
  Description of Artificial Sequence: Synthetic oligonucleotide
gcacaccaggcaccgcagc

SEQ ID NO: 3114586 - RNA, 19 nt, Artificial Sequence
  Description of Artificial Sequence: Synthetic oligonucleotide
aggcaccgcagcagcuccg

SEQ ID NO: 3114587 - RNA, 19 nt, Artificial Sequence
  Description of Artificial Sequence: Synthetic oligonucleotide
gguggaaggugcggggcuc

SEQ ID NO: 3114588 - RNA, 19 nt, Artificial Sequence
  Description of Artificial Sequence: Synthetic oligonucleotide
cgcuauucccaacucuuca

SEQ ID NO: 3114589 - RNA, 19 nt, Artificial Sequence
  Description of Artificial Sequence: Synthetic oligonucleotide
gcugccugugguaucauau

SEQ ID NO: 3114590 - RNA, 19 nt, Artificial Sequence
  Description of Artificial Sequence: Synthetic oligonucleotide
gucaguaguuaggcuuuua

SEQ ID NO: 3114591 - RNA, 19 nt, Artificial Sequence
  Description of Artificial Sequence: Synthetic oligonucleotide
gcuccggguggaaggugcg

SEQ ID NO: 3114592 - RNA, 19 nt, Artificial Sequence
  Description of Artificial Sequence: Synthetic oligonucleotide
cugccugugguaucauauu

SEQ ID NO: 3114593 - RNA, 19 nt, Artificial Sequence
  Description of Artificial Sequence: Synthetic oligonucleotide
gcggcuucuuggagagcgg

SEQ ID NO: 3114594 - RNA, 19 nt, Artificial Sequence
  Description of Artificial Sequence: Synthetic oligonucleotide
ccuugcugccugugguauc

SEQ ID NO: 3114595 - RNA, 19 nt, Artificial Sequence
  Description of Artificial Sequence: Synthetic oligonucleotide
cagcuccggguggaaggug

SEQ ID NO: 3114596 - RNA, 19 nt, Artificial Sequence
  Description of Artificial Sequence: Synthetic oligonucleotide
cggcuucuuggagagcggg

SEQ ID NO: 3114597 - RNA, 19 nt, Artificial Sequence
  Description of Artificial Sequence: Synthetic oligonucleotide
uugcugccugugguaucau

SEQ ID NO: 3114598 - RNA, 19 nt, Artificial Sequence
  Description of Artificial Sequence: Synthetic oligonucleotide
cauaucuaagcggcuucuu

SEQ ID NO: 3114599 - RNA, 19 nt, Artificial Sequence
  Description of Artificial Sequence: Synthetic oligonucleotide
ggguggaaggugcggggcu

SEQ ID NO: 3114600 - RNA, 19 nt, Artificial Sequence
  Description of Artificial Sequence: Synthetic oligonucleotide
gcuucauaucuaagcggcu

SEQ ID NO: 3114601 - RNA, 19 nt, Artificial Sequence
  Description of Artificial Sequence: Synthetic oligonucleotide
ggaaggugcggggcuccuc

SEQ ID NO: 3114602 - RNA, 19 nt, Artificial Sequence
  Description of Artificial Sequence: Synthetic oligonucleotide
gcucaacuucuucuugcuu

SEQ ID NO: 3114603 - RNA, 19 nt, Artificial Sequence
  Description of Artificial Sequence: Synthetic oligonucleotide
cggguggaaggugcggggc

SEQ ID NO: 3114604 - RNA, 19 nt, Artificial Sequence
  Description of Artificial Sequence: Synthetic oligonucleotide
cguauuguccuugcugccu

SEQ ID NO: 3114605 - RNA, 19 nt, Artificial Sequence
  Description of Artificial Sequence: Synthetic oligonucleotide
gcagcuccggguggaaggu

SEQ ID NO: 3114606 - RNA, 19 nt, Artificial Sequence
  Description of Artificial Sequence: Synthetic oligonucleotide
cgggcacaccaggcaccgc

SEQ ID NO: 3114607 - RNA, 19 nt, Artificial Sequence
  Description of Artificial Sequence: Synthetic oligonucleotide
auccaaauccuccucacuc

SEQ ID NO: 3114608 - RNA, 19 nt, Artificial Sequence
  Description of Artificial Sequence: Synthetic oligonucleotide
ugggucuucgcucagggcc

SEQ ID NO: 3114609 - RNA, 19 nt, Artificial Sequence
  Description of Artificial Sequence: Synthetic oligonucleotide
aaggcgcucgaacacgucg

SEQ ID NO: 3114610 - RNA, 19 nt, Artificial Sequence
  Description of Artificial Sequence: Synthetic oligonucleotide
caccacaucagccacacgc

SEQ ID NO: 3114611 - RNA, 19 nt, Artificial Sequence
  Description of Artificial Sequence: Synthetic oligonucleotide
ucccugaccacccggaagg

SEQ ID NO: 3114612 - RNA, 19 nt, Artificial Sequence
  Description of Artificial Sequence: Synthetic oligonucleotide
cuucacauccaaauccucc

SEQ ID NO: 3114613 - RNA, 19 nt, Artificial Sequence
  Description of Artificial Sequence: Synthetic oligonucleotide
acacgcagaauccucuccc

SEQ ID NO: 3114614 - RNA, 19 nt, Artificial Sequence
  Description of Artificial Sequence: Synthetic oligonucleotide
aaauccuccucacuccuca

SEQ ID NO: 3114615 - RNA, 19 nt, Artificial Sequence
  Description of Artificial Sequence: Synthetic oligonucleotide
uccaccacgacgcucacgu

SEQ ID NO: 3114616 - RNA, 19 nt, Artificial Sequence
  Description of Artificial Sequence: Synthetic oligonucleotide
acgguguccaguccggugc

SEQ ID NO: 3114617 - RNA, 19 nt, Artificial Sequence
  Description of Artificial Sequence: Synthetic oligonucleotide
ucagccacacgcagaaucc

SEQ ID NO: 3114618 - RNA, 19 nt, Artificial Sequence
  Description of Artificial Sequence: Synthetic oligonucleotide
uucacauccaaauccuccu

SEQ ID NO: 3114619 - RNA, 19 nt, Artificial Sequence
  Description of Artificial Sequence: Synthetic oligonucleotide
acauccaaauccuccucac

SEQ ID NO: 3114620 - RNA, 19 nt, Artificial Sequence
  Description of Artificial Sequence: Synthetic oligonucleotide
uccaaauccuccucacucc

SEQ ID NO: 3114621 - RNA, 19 nt, Artificial Sequence
  Description of Artificial Sequence: Synthetic oligonucleotide
ucgccagccaccaccacgg

SEQ ID NO: 3114622 - RNA, 19 nt, Artificial Sequence
  Description of Artificial Sequence: Synthetic oligonucleotide
uccgugaccaggcaccacc

SEQ ID NO: 3114623 - RNA, 19 nt, Artificial Sequence
  Description of Artificial Sequence: Synthetic oligonucleotide
uccggugcccuccaccacg

SEQ ID NO: 3114624 - RNA, 19 nt, Artificial Sequence
  Description of Artificial Sequence: Synthetic oligonucleotide
aauccuccucacuccucac

SEQ ID NO: 3114625 - RNA, 19 nt, Artificial Sequence
  Description of Artificial Sequence: Synthetic oligonucleotide
uucgcucagggccugccag

SEQ ID NO: 3114626 - RNA, 19 nt, Artificial Sequence
  Description of Artificial Sequence: Synthetic oligonucleotide
ucacuccucacucuucccu

SEQ ID NO: 3114627 - RNA, 19 nt, Artificial Sequence
  Description of Artificial Sequence: Synthetic oligonucleotide
ugaccaggcaccaccacau

SEQ ID NO: 3114628 - RNA, 19 nt, Artificial Sequence
  Description of Artificial Sequence: Synthetic oligonucleotide
gaaggggucuccgugacca

SEQ ID NO: 3114629 - RNA, 19 nt, Artificial Sequence
  Description of Artificial Sequence: Synthetic oligonucleotide
caccacgacgcucacgucc

SEQ ID NO: 3114630 - RNA, 19 nt, Artificial Sequence
  Description of Artificial Sequence: Synthetic oligonucleotide
ucacucuucccugaccacc

SEQ ID NO: 3114631 - RNA, 19 nt, Artificial Sequence
  Description of Artificial Sequence: Synthetic oligonucleotide
ucuucccugaccacccgga

SEQ ID NO: 3114632 - RNA, 19 nt, Artificial Sequence
  Description of Artificial Sequence: Synthetic oligonucleotide
gucgccagccaccaccacg

SEQ ID NO: 3114633 - RNA, 19 nt, Artificial Sequence
  Description of Artificial Sequence: Synthetic oligonucleotide
uccuccucacuccucacuc

SEQ ID NO: 3114634 - RNA, 19 nt, Artificial Sequence
  Description of Artificial Sequence: Synthetic oligonucleotide
gaguccucguccccaaggc

SEQ ID NO: 3114635 - RNA, 19 nt, Artificial Sequence
  Description of Artificial Sequence: Synthetic oligonucleotide
aguccucguccccaaggcg

SEQ ID NO: 3114636 - RNA, 19 nt, Artificial Sequence
  Description of Artificial Sequence: Synthetic oligonucleotide
cacgucgccagccaccacc

SEQ ID NO: 3114637 - RNA, 19 nt, Artificial Sequence
  Description of Artificial Sequence: Synthetic oligonucleotide
uccccaaggcgcucgaaca

SEQ ID NO: 3114638 - RNA, 19 nt, Artificial Sequence
  Description of Artificial Sequence: Synthetic oligonucleotide
cacucuucccugaccaccc

SEQ ID NO: 3114639 - RNA, 19 nt, Artificial Sequence
  Description of Artificial Sequence: Synthetic oligonucleotide
ucuucacauccaaauccuc

SEQ ID NO: 3114640 - RNA, 19 nt, Artificial Sequence
  Description of Artificial Sequence: Synthetic oligonucleotide
cuugucuucacauccaaau

SEQ ID NO: 3114641 - RNA, 19 nt, Artificial Sequence
  Description of Artificial Sequence: Synthetic oligonucleotide
accacgacgcucacguccc

SEQ ID NO: 3114642 - RNA, 19 nt, Artificial Sequence
  Description of Artificial Sequence: Synthetic oligonucleotide
cacgcagaauccucucccg

SEQ ID NO: 3114643 - RNA, 19 nt, Artificial Sequence
  Description of Artificial Sequence: Synthetic oligonucleotide
ucgaacacgucgccagcca

SEQ ID NO: 3114644 - RNA, 19 nt, Artificial Sequence
  Description of Artificial Sequence: Synthetic oligonucleotide
aacacgucgccagccacca

SEQ ID NO: 3114645 - RNA, 19 nt, Artificial Sequence
  Description of Artificial Sequence: Synthetic oligonucleotide
caccacgguguccaguccg

SEQ ID NO: 3114646 - RNA, 19 nt, Artificial Sequence
  Description of Artificial Sequence: Synthetic oligonucleotide
cacacgcagaauccucucc

SEQ ID NO: 3114647 - RNA, 19 nt, Artificial Sequence
  Description of Artificial Sequence: Synthetic oligonucleotide
cugccaggaguccucgucc

SEQ ID NO: 3114648 - RNA, 19 nt, Artificial Sequence
  Description of Artificial Sequence: Synthetic oligonucleotide
gugcccuccaccacgacgc

SEQ ID NO: 3114649 - RNA, 19 nt, Artificial Sequence
  Description of Artificial Sequence: Synthetic oligonucleotide
ggaguccucguccccaagg

SEQ ID NO: 3114650 - RNA, 19 nt, Artificial Sequence
  Description of Artificial Sequence: Synthetic oligonucleotide
gaacacgucgccagccacc

SEQ ID NO: 3114651 - RNA, 19 nt, Artificial Sequence
  Description of Artificial Sequence: Synthetic oligonucleotide
ggugcccuccaccacgacg

SEQ ID NO: 3114652 - RNA, 19 nt, Artificial Sequence
  Description of Artificial Sequence: Synthetic oligonucleotide
gucuccgugaccaggcacc

SEQ ID NO: 3114653 - RNA, 19 nt, Artificial Sequence
  Description of Artificial Sequence: Synthetic oligonucleotide
ucgcucagggccugccagg

SEQ ID NO: 3114654 - RNA, 19 nt, Artificial Sequence
  Description of Artificial Sequence: Synthetic oligonucleotide
aggcgcucgaacacgucgc

SEQ ID NO: 3114655 - RNA, 19 nt, Artificial Sequence
  Description of Artificial Sequence: Synthetic oligonucleotide
cacuccucacucuucccug

SEQ ID NO: 3114656 - RNA, 19 nt, Artificial Sequence
  Description of Artificial Sequence: Synthetic oligonucleotide
ugccaggaguccucguccc

SEQ ID NO: 3114657 - RNA, 19 nt, Artificial Sequence
  Description of Artificial Sequence: Synthetic oligonucleotide
guccucguccccaaggcgc

SEQ ID NO: 3114658 - RNA, 19 nt, Artificial Sequence
  Description of Artificial Sequence: Synthetic oligonucleotide
cacauccaaauccuccuca

SEQ ID NO: 3114659 - RNA, 19 nt, Artificial Sequence
  Description of Artificial Sequence: Synthetic oligonucleotide
cucuucccugaccacccgg

SEQ ID NO: 3114660 - RNA, 19 nt, Artificial Sequence
  Description of Artificial Sequence: Synthetic oligonucleotide
gugaccaggcaccaccaca

SEQ ID NO: 3114661 - RNA, 19 nt, Artificial Sequence
  Description of Artificial Sequence: Synthetic oligonucleotide
aaggggucuccgugaccag

SEQ ID NO: 3114662 - RNA, 19 nt, Artificial Sequence
  Description of Artificial Sequence: Synthetic oligonucleotide
cucacuccucacucuuccc

SEQ ID NO: 3114663 - RNA, 19 nt, Artificial Sequence
  Description of Artificial Sequence: Synthetic oligonucleotide
acucuucccugaccacccg

SEQ ID NO: 3114664 - RNA, 19 nt, Artificial Sequence
  Description of Artificial Sequence: Synthetic oligonucleotide
cucgaacacgucgccagcc

SEQ ID NO: 3114665 - RNA, 19 nt, Artificial Sequence
  Description of Artificial Sequence: Synthetic oligonucleotide
uccucguccccaaggcgcu

SEQ ID NO: 3114666 - RNA, 19 nt, Artificial Sequence
  Description of Artificial Sequence: Synthetic oligonucleotide
cugagcuccugggucuucg

SEQ ID NO: 3114667 - RNA, 19 nt, Artificial Sequence
  Description of Artificial Sequence: Synthetic oligonucleotide
caaauccuccucacuccuc

SEQ ID NO: 3114668 - RNA, 19 nt, Artificial Sequence
  Description of Artificial Sequence: Synthetic oligonucleotide
cacaucagccacacgcaga

SEQ ID NO: 3114669 - RNA, 19 nt, Artificial Sequence
  Description of Artificial Sequence: Synthetic oligonucleotide
uccucucccggcuccgcug

SEQ ID NO: 3114670 - RNA, 19 nt, Artificial Sequence
  Description of Artificial Sequence: Synthetic oligonucleotide
guccccaaggcgcucgaac

SEQ ID NO: 3114671 - RNA, 19 nt, Artificial Sequence
  Description of Artificial Sequence: Synthetic oligonucleotide
accacaucagccacacgca

SEQ ID NO: 3114672 - RNA, 19 nt, Artificial Sequence
  Description of Artificial Sequence: Synthetic oligonucleotide
uccugggucuucgcucagg

SEQ ID NO: 3114673 - RNA, 19 nt, Artificial Sequence
  Description of Artificial Sequence: Synthetic oligonucleotide
agccacacgcagaauccuc

SEQ ID NO: 3114674 - RNA, 19 nt, Artificial Sequence
  Description of Artificial Sequence: Synthetic oligonucleotide
gcugcugagcuccuggguc

SEQ ID NO: 3114675 - RNA, 19 nt, Artificial Sequence
  Description of Artificial Sequence: Synthetic oligonucleotide
caguccggugcccuccacc

SEQ ID NO: 3114676 - RNA, 19 nt, Artificial Sequence
  Description of Artificial Sequence: Synthetic oligonucleotide
cacgguguccaguccggug

SEQ ID NO: 3114677 - RNA, 19 nt, Artificial Sequence
  Description of Artificial Sequence: Synthetic oligonucleotide
ucuucgcucagggccugcc

SEQ ID NO: 3114678 - RNA, 19 nt, Artificial Sequence
  Description of Artificial Sequence: Synthetic oligonucleotide
acgacgcucacgucccgcu

SEQ ID NO: 3114679 - RNA, 19 nt, Artificial Sequence
  Description of Artificial Sequence: Synthetic oligonucleotide
ugaccacccggaagggguc

SEQ ID NO: 3114680 - RNA, 19 nt, Artificial Sequence
  Description of Artificial Sequence: Synthetic oligonucleotide
cugggucuucgcucagggc

SEQ ID NO: 3114681 - RNA, 19 nt, Artificial Sequence
  Description of Artificial Sequence: Synthetic oligonucleotide
ccucacuccucacucuucc

SEQ ID NO: 3114682 - RNA, 19 nt, Artificial Sequence
  Description of Artificial Sequence: Synthetic oligonucleotide
ccugggucuucgcucaggg

SEQ ID NO: 3114683 - RNA, 19 nt, Artificial Sequence
  Description of Artificial Sequence: Synthetic oligonucleotide
acgcucacgucccgcuguc

SEQ ID NO: 3114684 - RNA, 19 nt, Artificial Sequence
  Description of Artificial Sequence: Synthetic oligonucleotide
accacgguguccaguccgg

SEQ ID NO: 3114685 - RNA, 19 nt, Artificial Sequence
  Description of Artificial Sequence: Synthetic oligonucleotide
cugaccacccggaaggggu

SEQ ID NO: 3114686 - RNA, 19 nt, Artificial Sequence
  Description of Artificial Sequence: Synthetic oligonucleotide
ucuccgugaccaggcacca

SEQ ID NO: 3114687 - RNA, 19 nt, Artificial Sequence
  Description of Artificial Sequence: Synthetic oligonucleotide
uccaguccggugcccucca

SEQ ID NO: 3114688 - RNA, 19 nt, Artificial Sequence
  Description of Artificial Sequence: Synthetic oligonucleotide
gcucacgucccgcuguccc

SEQ ID NO: 3114689 - RNA, 19 nt, Artificial Sequence
  Description of Artificial Sequence: Synthetic oligonucleotide
cucguccccaaggcgcucg

SEQ ID NO: 3114690 - RNA, 19 nt, Artificial Sequence
  Description of Artificial Sequence: Synthetic oligonucleotide
ggcuccgcugcugagcucc

SEQ ID NO: 3114691 - RNA, 19 nt, Artificial Sequence
  Description of Artificial Sequence: Synthetic oligonucleotide
aggaguccucguccccaag

SEQ ID NO: 3114692 - RNA, 19 nt, Artificial Sequence
  Description of Artificial Sequence: Synthetic oligonucleotide
uguccaguccggugcccuc

SEQ ID NO: 3114693 - RNA, 19 nt, Artificial Sequence
  Description of Artificial Sequence: Synthetic oligonucleotide
gacgcucacgucccgcugu

SEQ ID NO: 3114694 - RNA, 19 nt, Artificial Sequence
  Description of Artificial Sequence: Synthetic oligonucleotide
ggucuccgugaccaggcac

SEQ ID NO: 3114695 - RNA, 19 nt, Artificial Sequence
  Description of Artificial Sequence: Synthetic oligonucleotide
ccacaucagccacacgcag

SEQ ID NO: 3114696 - RNA, 19 nt, Artificial Sequence
  Description of Artificial Sequence: Synthetic oligonucleotide
acacgucgccagccaccac

SEQ ID NO: 3114697 - RNA, 19 nt, Artificial Sequence
  Description of Artificial Sequence: Synthetic oligonucleotide
cgcucgaacacgucgccag

SEQ ID NO: 3114698 - RNA, 19 nt, Artificial Sequence
  Description of Artificial Sequence: Synthetic oligonucleotide
cacgacgcucacgucccgc

SEQ ID NO: 3114699 - RNA, 19 nt, Artificial Sequence
  Description of Artificial Sequence: Synthetic oligonucleotide
guccaguccggugcccucc

SEQ ID NO: 3114700 - RNA, 19 nt, Artificial Sequence
  Description of Artificial Sequence: Synthetic oligonucleotide
gcuccugggucuucgcuca

SEQ ID NO: 3114701 - RNA, 19 nt, Artificial Sequence
  Description of Artificial Sequence: Synthetic oligonucleotide
caaggcgcucgaacacguc

SEQ ID NO: 3114702 - RNA, 19 nt, Artificial Sequence
  Description of Artificial Sequence: Synthetic oligonucleotide
gcaccaccacaucagccac

SEQ ID NO: 3114703 - RNA, 19 nt, Artificial Sequence
  Description of Artificial Sequence: Synthetic oligonucleotide
ucucccggcuccgcugcug

SEQ ID NO: 3114704 - RNA, 19 nt, Artificial Sequence
  Description of Artificial Sequence: Synthetic oligonucleotide
ucguccccaaggcgcucga

SEQ ID NO: 3114705 - RNA, 19 nt, Artificial Sequence
  Description of Artificial Sequence: Synthetic oligonucleotide
cacccggaaggggucuccg

SEQ ID NO: 3114706 - RNA, 19 nt, Artificial Sequence
  Description of Artificial Sequence: Synthetic oligonucleotide
ggaaggggucuccgugacc

SEQ ID NO: 3114707 - RNA, 19 nt, Artificial Sequence
  Description of Artificial Sequence: Synthetic oligonucleotide
acccggaaggggucuccgu

SEQ ID NO: 3114708 - RNA, 19 nt, Artificial Sequence
  Description of Artificial Sequence: Synthetic oligonucleotide
cccaaggcgcucgaacacg

SEQ ID NO: 3114709 - RNA, 19 nt, Artificial Sequence
  Description of Artificial Sequence: Synthetic oligonucleotide
cauccaaauccuccucacu

SEQ ID NO: 3114710 - RNA, 19 nt, Artificial Sequence
  Description of Artificial Sequence: Synthetic oligonucleotide
ggggucuccgugaccaggc

SEQ ID NO: 3114711 - RNA, 19 nt, Artificial Sequence
  Description of Artificial Sequence: Synthetic oligonucleotide
ccugccaggaguccucguc

SEQ ID NO: 3114712 - RNA, 19 nt, Artificial Sequence
  Description of Artificial Sequence: Synthetic oligonucleotide
gcucgaacacgucgccagc

SEQ ID NO: 3114713 - RNA, 19 nt, Artificial Sequence
  Description of Artificial Sequence: Synthetic oligonucleotide
ggcgcucgaacacgucgcc

SEQ ID NO: 3114714 - RNA, 19 nt, Artificial Sequence
  Description of Artificial Sequence: Synthetic oligonucleotide
accacccggaaggggucuc

SEQ ID NO: 3114715 - RNA, 19 nt, Artificial Sequence
  Description of Artificial Sequence: Synthetic oligonucleotide
cuccaccacgacgcucacg

SEQ ID NO: 3114716 - RNA, 19 nt, Artificial Sequence
  Description of Artificial Sequence: Synthetic oligonucleotide
ugcccuccaccacgacgcu

SEQ ID NO: 3114717 - RNA, 19 nt, Artificial Sequence
  Description of Artificial Sequence: Synthetic oligonucleotide
cccuccaccacgacgcuca

SEQ ID NO: 3114718 - RNA, 19 nt, Artificial Sequence
  Description of Artificial Sequence: Synthetic oligonucleotide
cuucgcucagggccugcca

SEQ ID NO: 3114719 - RNA, 19 nt, Artificial Sequence
  Description of Artificial Sequence: Synthetic oligonucleotide
cccggaaggggucuccgug

SEQ ID NO: 3114720 - RNA, 19 nt, Artificial Sequence
  Description of Artificial Sequence: Synthetic oligonucleotide
ucccggcuccgcugcugag

SEQ ID NO: 3114721 - RNA, 19 nt, Artificial Sequence
  Description of Artificial Sequence: Synthetic oligonucleotide
cugcugagcuccugggucu

SEQ ID NO: 3114722 - RNA, 19 nt, Artificial Sequence
  Description of Artificial Sequence: Synthetic oligonucleotide
acgucgccagccaccacca

SEQ ID NO: 3114723 - RNA, 19 nt, Artificial Sequence
  Description of Artificial Sequence: Synthetic oligonucleotide
cuucccugaccacccggaa

SEQ ID NO: 3114724 - RNA, 19 nt, Artificial Sequence
  Description of Artificial Sequence: Synthetic oligonucleotide
cuccugggucuucgcucag

SEQ ID NO: 3114725 - RNA, 19 nt, Artificial Sequence
  Description of Artificial Sequence: Synthetic oligonucleotide
ccccaaggcgcucgaacac

SEQ ID NO: 3114726 - RNA, 19 nt, Artificial Sequence
  Description of Artificial Sequence: Synthetic oligonucleotide
ccacacgcagaauccucuc

SEQ ID NO: 3114727 - RNA, 19 nt, Artificial Sequence
  Description of Artificial Sequence: Synthetic oligonucleotide
ccgcugcugagcuccuggg

SEQ ID NO: 3114728 - RNA, 19 nt, Artificial Sequence
  Description of Artificial Sequence: Synthetic oligonucleotide
guccggugcccuccaccac

SEQ ID NO: 3114729 - RNA, 19 nt, Artificial Sequence
  Description of Artificial Sequence: Synthetic oligonucleotide
caggaguccucguccccaa

SEQ ID NO: 3114730 - RNA, 19 nt, Artificial Sequence
  Description of Artificial Sequence: Synthetic oligonucleotide
cgaacacgucgccagccac

SEQ ID NO: 3114731 - RNA, 19 nt, Artificial Sequence
  Description of Artificial Sequence: Synthetic oligonucleotide
ccuugucuucacauccaaa

SEQ ID NO: 3114732 - RNA, 19 nt, Artificial Sequence
  Description of Artificial Sequence: Synthetic oligonucleotide
gcucagggccugccaggag

SEQ ID NO: 3114733 - RNA, 19 nt, Artificial Sequence
  Description of Artificial Sequence: Synthetic oligonucleotide
uggcccggcguagcccaca

SEQ ID NO: 3114734 - RNA, 19 nt, Artificial Sequence
  Description of Artificial Sequence: Synthetic oligonucleotide
cagccaccaccacgguguc

SEQ ID NO: 3114735 - RNA, 19 nt, Artificial Sequence
  Description of Artificial Sequence: Synthetic oligonucleotide
gucuucgcucagggccugc

SEQ ID NO: 3114736 - RNA, 19 nt, Artificial Sequence
  Description of Artificial Sequence: Synthetic oligonucleotide
ccggaaggggucuccguga

SEQ ID NO: 3114737 - RNA, 19 nt, Artificial Sequence
  Description of Artificial Sequence: Synthetic oligonucleotide
gguguccaguccggugccc

SEQ ID NO: 3114738 - RNA, 19 nt, Artificial Sequence
  Description of Artificial Sequence: Synthetic oligonucleotide
ccaaauccuccucacuccu

SEQ ID NO: 3114739 - RNA, 19 nt, Artificial Sequence
  Description of Artificial Sequence: Synthetic oligonucleotide
cuccucacuccucacucuu

SEQ ID NO: 3114740 - RNA, 19 nt, Artificial Sequence
  Description of Artificial Sequence: Synthetic oligonucleotide
cuccgugaccaggcaccac

SEQ ID NO: 3114741 - RNA, 19 nt, Artificial Sequence
  Description of Artificial Sequence: Synthetic oligonucleotide
ccaccacgguguccagucc

SEQ ID NO: 3114742 - RNA, 19 nt, Artificial Sequence
  Description of Artificial Sequence: Synthetic oligonucleotide
guguccaguccggugcccu

SEQ ID NO: 3114743 - RNA, 19 nt, Artificial Sequence
  Description of Artificial Sequence: Synthetic oligonucleotide
cggaaggggucuccgugac

SEQ ID NO: 3114744 - RNA, 19 nt, Artificial Sequence
  Description of Artificial Sequence: Synthetic oligonucleotide
gccacacgcagaauccucu

SEQ ID NO: 3114745 - RNA, 19 nt, Artificial Sequence
  Description of Artificial Sequence: Synthetic oligonucleotide
gggucuccgugaccaggca

SEQ ID NO: 3114746 - RNA, 19 nt, Artificial Sequence
  Description of Artificial Sequence: Synthetic oligonucleotide
ggucuucgcucagggccug

SEQ ID NO: 3114747 - RNA, 19 nt, Artificial Sequence
  Description of Artificial Sequence: Synthetic oligonucleotide
ccaggaguccucgucccca

SEQ ID NO: 3114748 - RNA, 19 nt, Artificial Sequence
  Description of Artificial Sequence: Synthetic oligonucleotide
cccggcuccgcugcugagc

SEQ ID NO: 3114749 - RNA, 19 nt, Artificial Sequence
  Description of Artificial Sequence: Synthetic oligonucleotide
gaccacccggaaggggucu

SEQ ID NO: 3114750 - RNA, 19 nt, Artificial Sequence
  Description of Artificial Sequence: Synthetic oligonucleotide
ggcccggcguagcccacac

SEQ ID NO: 3114751 - RNA, 19 nt, Artificial Sequence
  Description of Artificial Sequence: Synthetic oligonucleotide
cccugaccacccggaaggg

SEQ ID NO: 3114752 - RNA, 19 nt, Artificial Sequence
  Description of Artificial Sequence: Synthetic oligonucleotide
cccguggcccggcguagcc

SEQ ID NO: 3114753 - RNA, 19 nt, Artificial Sequence
  Description of Artificial Sequence: Synthetic oligonucleotide
gggucuucgcucagggccu

SEQ ID NO: 3114754 - RNA, 19 nt, Artificial Sequence
  Description of Artificial Sequence: Synthetic oligonucleotide
cgguguccaguccggugcc

SEQ ID NO: 3114755 - RNA, 19 nt, Artificial Sequence
  Description of Artificial Sequence: Synthetic oligonucleotide
ccaccacaucagccacacg

SEQ ID NO: 3114756 - RNA, 19 nt, Artificial Sequence
  Description of Artificial Sequence: Synthetic oligonucleotide
cagccacacgcagaauccu

SEQ ID NO: 3114757 - RNA, 19 nt, Artificial Sequence
  Description of Artificial Sequence: Synthetic oligonucleotide
ccaaggcgcucgaacacgu

SEQ ID NO: 3114758 - RNA, 19 nt, Artificial Sequence
  Description of Artificial Sequence: Synthetic oligonucleotide
ccacgacgcucacgucccg

SEQ ID NO: 3114759 - RNA, 19 nt, Artificial Sequence
  Description of Artificial Sequence: Synthetic oligonucleotide
ccacccggaaggggucucc

SEQ ID NO: 3114760 - RNA, 19 nt, Artificial Sequence
  Description of Artificial Sequence: Synthetic oligonucleotide
gcgcucgaacacgucgcca

SEQ ID NO: 3114761 - RNA, 19 nt, Artificial Sequence
  Description of Artificial Sequence: Synthetic oligonucleotide
ccguggcccggcguagccc

SEQ ID NO: 3114762 - RNA, 19 nt, Artificial Sequence
  Description of Artificial Sequence: Synthetic oligonucleotide
cgacgcucacgucccgcug

SEQ ID NO: 3114763 - RNA, 19 nt, Artificial Sequence
  Description of Artificial Sequence: Synthetic oligonucleotide
ccaccacgacgcucacguc

SEQ ID NO: 3114764 - RNA, 19 nt, Artificial Sequence
  Description of Artificial Sequence: Synthetic oligonucleotide
ccggugcccuccaccacga

SEQ ID NO: 3114765 - RNA, 19 nt, Artificial Sequence
  Description of Artificial Sequence: Synthetic oligonucleotide
ccuccucacuccucacucu

SEQ ID NO: 3114766 - RNA, 19 nt, Artificial Sequence
  Description of Artificial Sequence: Synthetic oligonucleotide
ccuccaccacgacgcucac

SEQ ID NO: 3114767 - RNA, 19 nt, Artificial Sequence
  Description of Artificial Sequence: Synthetic oligonucleotide
ccaguccggugcccuccac

SEQ ID NO: 3114768 - RNA, 19 nt, Artificial Sequence
  Description of Artificial Sequence: Synthetic oligonucleotide
ccggcuccgcugcugagcu

SEQ ID NO: 3114769 - RNA, 19 nt, Artificial Sequence
  Description of Artificial Sequence: Synthetic oligonucleotide
gcccuccaccacgacgcuc

SEQ ID NO: 3114770 - RNA, 19 nt, Artificial Sequence
  Description of Artificial Sequence: Synthetic oligonucleotide
ccccguggcccggcguagc

SEQ ID NO: 3114771 - RNA, 19 nt, Artificial Sequence
  Description of Artificial Sequence: Synthetic oligonucleotide
cgcucacgucccgcugucc

SEQ ID NO: 3114772 - RNA, 19 nt, Artificial Sequence
  Description of Artificial Sequence: Synthetic oligonucleotide
cgcucagggccugccagga

SEQ ID NO: 3114773 - RNA, 19 nt, Artificial Sequence
  Description of Artificial Sequence: Synthetic oligonucleotide
ccucguccccaaggcgcuc

SEQ ID NO: 3114774 - RNA, 19 nt, Artificial Sequence
  Description of Artificial Sequence: Synthetic oligonucleotide
cgucgccagccaccaccac

SEQ ID NO: 3114775 - RNA, 19 nt, Artificial Sequence
  Description of Artificial Sequence: Synthetic oligonucleotide
gccugccaggaguccucgu

SEQ ID NO: 3114776 - RNA, 19 nt, Artificial Sequence
  Description of Artificial Sequence: Synthetic oligonucleotide
cgcugcugagcuccugggu

SEQ ID NO: 3114777 - RNA, 19 nt, Artificial Sequence
  Description of Artificial Sequence: Synthetic oligonucleotide
ccacgguguccaguccggu

SEQ ID NO: 3114778 - RNA, 19 nt, Artificial Sequence
  Description of Artificial Sequence: Synthetic oligonucleotide
cggcuccgcugcugagcuc

SEQ ID NO: 3114779 - RNA, 19 nt, Artificial Sequence
  Description of Artificial Sequence: Synthetic oligonucleotide
gcuccgcugcugagcuccu

SEQ ID NO: 3114780 - RNA, 19 nt, Artificial Sequence
  Description of Artificial Sequence: Synthetic oligonucleotide
uuuaaacugaccauuaaag

SEQ ID NO: 3114781 - RNA, 19 nt, Artificial Sequence
  Description of Artificial Sequence: Synthetic oligonucleotide
aguucuuugagacaauucc

SEQ ID NO: 3114782 - RNA, 19 nt, Artificial Sequence
  Description of Artificial Sequence: Synthetic oligonucleotide
uaaacugaccauuaaagcg

SEQ ID NO: 3114783 - RNA, 19 nt, Artificial Sequence
  Description of Artificial Sequence: Synthetic oligonucleotide
auagguuuuaaacugacca

SEQ ID NO: 3114784 - RNA, 19 nt, Artificial Sequence
  Description of Artificial Sequence: Synthetic oligonucleotide
aaacugaccauuaaagcgg

SEQ ID NO: 3114785 - RNA, 19 nt, Artificial Sequence
  Description of Artificial Sequence: Synthetic oligonucleotide
uuaaacugaccauuaaagc

SEQ ID NO: 3114786 - RNA, 19 nt, Artificial Sequence
  Description of Artificial Sequence: Synthetic oligonucleotide
gauggcauagguuuuaaac

SEQ ID NO: 3114787 - RNA, 19 nt, Artificial Sequence
  Description of Artificial Sequence: Synthetic oligonucleotide
aauggaaucaucggacucg

SEQ ID NO: 3114788 - RNA, 19 nt, Artificial Sequence
  Description of Artificial Sequence: Synthetic oligonucleotide
ucggagaauggaaucaucg

SEQ ID NO: 3114789 - RNA, 19 nt, Artificial Sequence
  Description of Artificial Sequence: Synthetic oligonucleotide
ugagacaauuccaucagcc

SEQ ID NO: 3114790 - RNA, 19 nt, Artificial Sequence
  Description of Artificial Sequence: Synthetic oligonucleotide
uuugagacaauuccaucag

SEQ ID NO: 3114791 - RNA, 19 nt, Artificial Sequence
  Description of Artificial Sequence: Synthetic oligonucleotide
uggcauagguuuuaaacug

SEQ ID NO: 3114792 - RNA, 19 nt, Artificial Sequence
  Description of Artificial Sequence: Synthetic oligonucleotide
auggcauagguuuuaaacu

SEQ ID NO: 3114793 - RNA, 19 nt, Artificial Sequence
  Description of Artificial Sequence: Synthetic oligonucleotide
auuaaagcggcccgugcac

SEQ ID NO: 3114794 - RNA, 19 nt, Artificial Sequence
  Description of Artificial Sequence: Synthetic oligonucleotide
ugaccauuaaagcggcccg

SEQ ID NO: 3114795 - RNA, 19 nt, Artificial Sequence
  Description of Artificial Sequence: Synthetic oligonucleotide
aaugaugcgguugcucgcg

SEQ ID NO: 3114796 - RNA, 19 nt, Artificial Sequence
  Description of Artificial Sequence: Synthetic oligonucleotide
cuuugagacaauuccauca

SEQ ID NO: 3114797 - RNA, 19 nt, Artificial Sequence
  Description of Artificial Sequence: Synthetic oligonucleotide
cauucaucuggauggacgc

SEQ ID NO: 3114798 - RNA, 19 nt, Artificial Sequence
  Description of Artificial Sequence: Synthetic oligonucleotide
uccuuggcgccaaugaugc

SEQ ID NO: 3114799 - RNA, 19 nt, Artificial Sequence
  Description of Artificial Sequence: Synthetic oligonucleotide
aucagccuuagccagucgg

SEQ ID NO: 3114800 - RNA, 19 nt, Artificial Sequence
  Description of Artificial Sequence: Synthetic oligonucleotide
uucuuugagacaauuccau

SEQ ID NO: 3114801 - RNA, 19 nt, Artificial Sequence
  Description of Artificial Sequence: Synthetic oligonucleotide
aacugaccauuaaagcggc

SEQ ID NO: 3114802 - RNA, 19 nt, Artificial Sequence
  Description of Artificial Sequence: Synthetic oligonucleotide
accucggccacauucaucu

SEQ ID NO: 3114803 - RNA, 19 nt, Artificial Sequence
  Description of Artificial Sequence: Synthetic oligonucleotide
uuagccagucggagaaugg

SEQ ID NO: 3114804 - RNA, 19 nt, Artificial Sequence
  Description of Artificial Sequence: Synthetic oligonucleotide
aaguucuuugagacaauuc

SEQ ID NO: 3114805 - RNA, 19 nt, Artificial Sequence
  Description of Artificial Sequence: Synthetic oligonucleotide
gagaauggaaucaucggac

SEQ ID NO: 3114806 - RNA, 19 nt, Artificial Sequence
  Description of Artificial Sequence: Synthetic oligonucleotide
acauucaucuggauggacg

SEQ ID NO: 3114807 - RNA, 19 nt, Artificial Sequence
  Description of Artificial Sequence: Synthetic oligonucleotide
ugcaugucgagaccgugcc

SEQ ID NO: 3114808 - RNA, 19 nt, Artificial Sequence
  Description of Artificial Sequence: Synthetic oligonucleotide
ucaaccucggccacauuca

SEQ ID NO: 3114809 - RNA, 19 nt, Artificial Sequence
  Description of Artificial Sequence: Synthetic oligonucleotide
cauagguuuuaaacugacc

SEQ ID NO: 3114810 - RNA, 19 nt, Artificial Sequence
  Description of Artificial Sequence: Synthetic oligonucleotide
uuccaucagccuuagccag

SEQ ID NO: 3114811 - RNA, 19 nt, Artificial Sequence
  Description of Artificial Sequence: Synthetic oligonucleotide
cuuggcgccaaugaugcgg

SEQ ID NO: 3114812 - RNA, 19 nt, Artificial Sequence
  Description of Artificial Sequence: Synthetic oligonucleotide
ggaaucaucggacucgccc

SEQ ID NO: 3114813 - RNA, 19 nt, Artificial Sequence
  Description of Artificial Sequence: Synthetic oligonucleotide
acaggguccacgaacucgc

SEQ ID NO: 3114814 - RNA, 19 nt, Artificial Sequence
  Description of Artificial Sequence: Synthetic oligonucleotide
uugagacaauuccaucagc

SEQ ID NO: 3114815 - RNA, 19 nt, Artificial Sequence
  Description of Artificial Sequence: Synthetic oligonucleotide
gaaucaucggacucgccca

SEQ ID NO: 3114816 - RNA, 19 nt, Artificial Sequence
  Description of Artificial Sequence: Synthetic oligonucleotide
uagguuuuaaacugaccau

SEQ ID NO: 3114817 - RNA, 19 nt, Artificial Sequence
  Description of Artificial Sequence: Synthetic oligonucleotide
cugaccauuaaagcggccc

SEQ ID NO: 3114818 - RNA, 19 nt, Artificial Sequence
  Description of Artificial Sequence: Synthetic oligonucleotide
ucguucugcaugucgagac

SEQ ID NO: 3114819 - RNA, 19 nt, Artificial Sequence
  Description of Artificial Sequence: Synthetic oligonucleotide
agacaauuccaucagccuu

SEQ ID NO: 3114820 - RNA, 19 nt, Artificial Sequence
  Description of Artificial Sequence: Synthetic oligonucleotide
gaauggaaucaucggacuc

SEQ ID NO: 3114821 - RNA, 19 nt, Artificial Sequence
  Description of Artificial Sequence: Synthetic oligonucleotide
ucaucggacucgcccaucc

SEQ ID NO: 3114822 - RNA, 19 nt, Artificial Sequence
  Description of Artificial Sequence: Synthetic oligonucleotide
auggaaucaucggacucgc

SEQ ID NO: 3114823 - RNA, 19 nt, Artificial Sequence
  Description of Artificial Sequence: Synthetic oligonucleotide
ucuuugagacaauuccauc

SEQ ID NO: 3114824 - RNA, 19 nt, Artificial Sequence
  Description of Artificial Sequence: Synthetic oligonucleotide
ccaaugaugcgguugcucg

SEQ ID NO: 3114825 - RNA, 19 nt, Artificial Sequence
  Description of Artificial Sequence: Synthetic oligonucleotide
ugguccuuggcgccaauga

SEQ ID NO: 3114826 - RNA, 19 nt, Artificial Sequence
  Description of Artificial Sequence: Synthetic oligonucleotide
gucaaccucggccacauuc

SEQ ID NO: 3114827 - RNA, 19 nt, Artificial Sequence
  Description of Artificial Sequence: Synthetic oligonucleotide
cucggccacauucaucugg

SEQ ID NO: 3114828 - RNA, 19 nt, Artificial Sequence
  Description of Artificial Sequence: Synthetic oligonucleotide
gacgcgugguccuuggcgc

SEQ ID NO: 3114829 - RNA, 19 nt, Artificial Sequence
  Description of Artificial Sequence: Synthetic oligonucleotide
guucugcaugucgagaccg

SEQ ID NO: 3114830 - RNA, 19 nt, Artificial Sequence
  Description of Artificial Sequence: Synthetic oligonucleotide
ucgcccauccugcgaaugg

SEQ ID NO: 3114831 - RNA, 19 nt, Artificial Sequence
  Description of Artificial Sequence: Synthetic oligonucleotide
auuuccgcgggcacgguac

SEQ ID NO: 3114832 - RNA, 19 nt, Artificial Sequence
  Description of Artificial Sequence: Synthetic oligonucleotide
ugcucgcggagcauuuccg

SEQ ID NO: 3114833 - RNA, 19 nt, Artificial Sequence
  Description of Artificial Sequence: Synthetic oligonucleotide
ucgcggagcauuuccgcgg

SEQ ID NO: 3114834 - RNA, 19 nt, Artificial Sequence
  Description of Artificial Sequence: Synthetic oligonucleotide
ggagaauggaaucaucgga

SEQ ID NO: 3114835 - RNA, 19 nt, Artificial Sequence
  Description of Artificial Sequence: Synthetic oligonucleotide
ucggacucgcccauccugc

SEQ ID NO: 3114836 - RNA, 19 nt, Artificial Sequence
  Description of Artificial Sequence: Synthetic oligonucleotide
ucggccacauucaucugga

SEQ ID NO: 3114837 - RNA, 19 nt, Artificial Sequence
  Description of Artificial Sequence: Synthetic oligonucleotide
uugcucgcggagcauuucc

SEQ ID NO: 3114838 - RNA, 19 nt, Artificial Sequence
  Description of Artificial Sequence: Synthetic oligonucleotide
uucaucuggauggacgcgu

SEQ ID NO: 3114839 - RNA, 19 nt, Artificial Sequence
  Description of Artificial Sequence: Synthetic oligonucleotide
caugucgagaccgugccug

SEQ ID NO: 3114840 - RNA, 19 nt, Artificial Sequence
  Description of Artificial Sequence: Synthetic oligonucleotide
augucgagaccgugccugc

SEQ ID NO: 3114841 - RNA, 19 nt, Artificial Sequence
  Description of Artificial Sequence: Synthetic oligonucleotide
cucgcggagcauuuccgcg

SEQ ID NO: 3114842 - RNA, 19 nt, Artificial Sequence
  Description of Artificial Sequence: Synthetic oligonucleotide
agcauuuccgcgggcacgg

SEQ ID NO: 3114843 - RNA, 19 nt, Artificial Sequence
  Description of Artificial Sequence: Synthetic oligonucleotide
gcaccugucaaccucggcc

SEQ ID NO: 3114844 - RNA, 19 nt, Artificial Sequence
  Description of Artificial Sequence: Synthetic oligonucleotide
caaugaugcgguugcucgc

SEQ ID NO: 3114845 - RNA, 19 nt, Artificial Sequence
  Description of Artificial Sequence: Synthetic oligonucleotide
ucaucuggauggacgcgug

SEQ ID NO: 3114846 - RNA, 19 nt, Artificial Sequence
  Description of Artificial Sequence: Synthetic oligonucleotide
guucuuugagacaauucca

SEQ ID NO: 3114847 - RNA, 19 nt, Artificial Sequence
  Description of Artificial Sequence: Synthetic oligonucleotide
cugcaugucgagaccgugc

SEQ ID NO: 3114848 - RNA, 19 nt, Artificial Sequence
  Description of Artificial Sequence: Synthetic oligonucleotide
agguuuuaaacugaccauu

SEQ ID NO: 3114849 - RNA, 19 nt, Artificial Sequence
  Description of Artificial Sequence: Synthetic oligonucleotide
cauuaaagcggcccgugca

SEQ ID NO: 3114850 - RNA, 19 nt, Artificial Sequence
  Description of Artificial Sequence: Synthetic oligonucleotide
ggguccacgaacucgccgg

SEQ ID NO: 3114851 - RNA, 19 nt, Artificial Sequence
  Description of Artificial Sequence: Synthetic oligonucleotide
aaucaucggacucgcccau

SEQ ID NO: 3114852 - RNA, 19 nt, Artificial Sequence
  Description of Artificial Sequence: Synthetic oligonucleotide
uuaaagcggcccgugcacc

SEQ ID NO: 3114853 - RNA, 19 nt, Artificial Sequence
  Description of Artificial Sequence: Synthetic oligonucleotide
ugcgguugcucgcggagca

SEQ ID NO: 3114854 - RNA, 19 nt, Artificial Sequence
  Description of Artificial Sequence: Synthetic oligonucleotide
cuuagccagucggagaaug

SEQ ID NO: 3114855 - RNA, 19 nt, Artificial Sequence
  Description of Artificial Sequence: Synthetic oligonucleotide
guuuuaaacugaccauuaa

SEQ ID NO: 3114856 - RNA, 19 nt, Artificial Sequence
  Description of Artificial Sequence: Synthetic oligonucleotide
uccacgaacucgccggcgu

SEQ ID NO: 3114857 - RNA, 19 nt, Artificial Sequence
  Description of Artificial Sequence: Synthetic oligonucleotide
uuggcgccaaugaugcggu

SEQ ID NO: 3114858 - RNA, 19 nt, Artificial Sequence
  Description of Artificial Sequence: Synthetic oligonucleotide
aggguccacgaacucgccg

SEQ ID NO: 3114859 - RNA, 19 nt, Artificial Sequence
  Description of Artificial Sequence: Synthetic oligonucleotide
auucaucuggauggacgcg

SEQ ID NO: 3114860 - RNA, 19 nt, Artificial Sequence
  Description of Artificial Sequence: Synthetic oligonucleotide
gacaauuccaucagccuua

SEQ ID NO: 3114861 - RNA, 19 nt, Artificial Sequence
  Description of Artificial Sequence: Synthetic oligonucleotide
gagacaauuccaucagccu

SEQ ID NO: 3114862 - RNA, 19 nt, Artificial Sequence
  Description of Artificial Sequence: Synthetic oligonucleotide
gagcauuuccgcgggcacg

SEQ ID NO: 3114863 - RNA, 19 nt, Artificial Sequence
  Description of Artificial Sequence: Synthetic oligonucleotide
uaaagcggcccgugcaccu

SEQ ID NO: 3114864 - RNA, 19 nt, Artificial Sequence
  Description of Artificial Sequence: Synthetic oligonucleotide
ucugcaugucgagaccgug

SEQ ID NO: 3114865 - RNA, 19 nt, Artificial Sequence
  Description of Artificial Sequence: Synthetic oligonucleotide
ggacgcgugguccuuggcg

SEQ ID NO: 3114866 - RNA, 19 nt, Artificial Sequence
  Description of Artificial Sequence: Synthetic oligonucleotide
aacucgccggcgucguucu

SEQ ID NO: 3114867 - RNA, 19 nt, Artificial Sequence
  Description of Artificial Sequence: Synthetic oligonucleotide
cgaauggccccgcagaugg

SEQ ID NO: 3114868 - RNA, 19 nt, Artificial Sequence
  Description of Artificial Sequence: Synthetic oligonucleotide
cauccugcgaauggccccg

SEQ ID NO: 3114869 - RNA, 19 nt, Artificial Sequence
  Description of Artificial Sequence: Synthetic oligonucleotide
ggccacauucaucuggaug

SEQ ID NO: 3114870 - RNA, 19 nt, Artificial Sequence
  Description of Artificial Sequence: Synthetic oligonucleotide
guccuuggcgccaaugaug

SEQ ID NO: 3114871 - RNA, 19 nt, Artificial Sequence
  Description of Artificial Sequence: Synthetic oligonucleotide
uucugcaugucgagaccgu

SEQ ID NO: 3114872 - RNA, 19 nt, Artificial Sequence
  Description of Artificial Sequence: Synthetic oligonucleotide
ugcgaauggccccgcagau

SEQ ID NO: 3114873 - RNA, 19 nt, Artificial Sequence
  Description of Artificial Sequence: Synthetic oligonucleotide
aaccucggccacauucauc

SEQ ID NO: 3114874 - RNA, 19 nt, Artificial Sequence
  Description of Artificial Sequence: Synthetic oligonucleotide
auggacgcgugguccuugg

SEQ ID NO: 3114875 - RNA, 19 nt, Artificial Sequence
  Description of Artificial Sequence: Synthetic oligonucleotide
acgcgugguccuuggcgcc

SEQ ID NO: 3114876 - RNA, 19 nt, Artificial Sequence
  Description of Artificial Sequence: Synthetic oligonucleotide
ggcgucguucugcaugucg

SEQ ID NO: 3114877 - RNA, 19 nt, Artificial Sequence
  Description of Artificial Sequence: Synthetic oligonucleotide
caucuggauggacgcgugg

SEQ ID NO: 3114878 - RNA, 19 nt, Artificial Sequence
  Description of Artificial Sequence: Synthetic oligonucleotide
accugucaaccucggccac

SEQ ID NO: 3114879 - RNA, 19 nt, Artificial Sequence
  Description of Artificial Sequence: Synthetic oligonucleotide
acaauuccaucagccuuag

SEQ ID NO: 3114880 - RNA, 19 nt, Artificial Sequence
  Description of Artificial Sequence: Synthetic oligonucleotide
accauuaaagcggcccgug

SEQ ID NO: 3114881 - RNA, 19 nt, Artificial Sequence
  Description of Artificial Sequence: Synthetic oligonucleotide
aaaaguucuuugagacaau

SEQ ID NO: 3114882 - RNA, 19 nt, Artificial Sequence
  Description of Artificial Sequence: Synthetic oligonucleotide
uccgcgggcacgguacagg

SEQ ID NO: 3114883 - RNA, 19 nt, Artificial Sequence
  Description of Artificial Sequence: Synthetic oligonucleotide
augcgguugcucgcggagc

SEQ ID NO: 3114884 - RNA, 19 nt, Artificial Sequence
  Description of Artificial Sequence: Synthetic oligonucleotide
ugcaccugucaaccucggc

SEQ ID NO: 3114885 - RNA, 19 nt, Artificial Sequence
  Description of Artificial Sequence: Synthetic oligonucleotide
agccuuagccagucggaga

SEQ ID NO: 3114886 - RNA, 19 nt, Artificial Sequence
  Description of Artificial Sequence: Synthetic oligonucleotide
caccugucaaccucggcca

SEQ ID NO: 3114887 - RNA, 19 nt, Artificial Sequence
  Description of Artificial Sequence: Synthetic oligonucleotide
aucuggauggacgcguggu

SEQ ID NO: 3114888 - RNA, 19 nt, Artificial Sequence
  Description of Artificial Sequence: Synthetic oligonucleotide
cacgguacaggguccacga

SEQ ID NO: 3114889 - RNA, 19 nt, Artificial Sequence
  Description of Artificial Sequence: Synthetic oligonucleotide
acugaccauuaaagcggcc

SEQ ID NO: 3114890 - RNA, 19 nt, Artificial Sequence
  Description of Artificial Sequence: Synthetic oligonucleotide
uggaaucaucggacucgcc

SEQ ID NO: 3114891 - RNA, 19 nt, Artificial Sequence
  Description of Artificial Sequence: Synthetic oligonucleotide
gacucgcccauccugcgaa

SEQ ID NO: 3114892 - RNA, 19 nt, Artificial Sequence
  Description of Artificial Sequence: Synthetic oligonucleotide
agauggcauagguuuuaaa

SEQ ID NO: 3114893 - RNA, 19 nt, Artificial Sequence
  Description of Artificial Sequence: Synthetic oligonucleotide
cggagaauggaaucaucgg

SEQ ID NO: 3114894 - RNA, 19 nt, Artificial Sequence
  Description of Artificial Sequence: Synthetic oligonucleotide
cacgaacucgccggcgucg

SEQ ID NO: 3114895 - RNA, 19 nt, Artificial Sequence
  Description of Artificial Sequence: Synthetic oligonucleotide
uuuccgcgggcacgguaca

SEQ ID NO: 3114896 - RNA, 19 nt, Artificial Sequence
  Description of Artificial Sequence: Synthetic oligonucleotide
agucggagaauggaaucau

SEQ ID NO: 3114897 - RNA, 19 nt, Artificial Sequence
  Description of Artificial Sequence: Synthetic oligonucleotide
aaagcggcccgugcaccug

SEQ ID NO: 3114898 - RNA, 19 nt, Artificial Sequence
  Description of Artificial Sequence: Synthetic oligonucleotide
gaacucgccggcgucguuc

SEQ ID NO: 3114899 - RNA, 19 nt, Artificial Sequence
  Description of Artificial Sequence: Synthetic oligonucleotide
gcgccaaugaugcgguugc

SEQ ID NO: 3114900 - RNA, 19 nt, Artificial Sequence
  Description of Artificial Sequence: Synthetic oligonucleotide
aagcggcccgugcaccugu

SEQ ID NO: 3114901 - RNA, 19 nt, Artificial Sequence
  Description of Artificial Sequence: Synthetic oligonucleotide
cagccuuagccagucggag

SEQ ID NO: 3114902 - RNA, 19 nt, Artificial Sequence
  Description of Artificial Sequence: Synthetic oligonucleotide
gauggacgcgugguccuug

SEQ ID NO: 3114903 - RNA, 19 nt, Artificial Sequence
  Description of Artificial Sequence: Synthetic oligonucleotide
cugcgaauggccccgcaga

SEQ ID NO: 3114904 - RNA, 19 nt, Artificial Sequence
  Description of Artificial Sequence: Synthetic oligonucleotide
cagucggagaauggaauca

SEQ ID NO: 3114905 - RNA, 19 nt, Artificial Sequence
  Description of Artificial Sequence: Synthetic oligonucleotide
gcauagguuuuaaacugac

SEQ ID NO: 3114906 - RNA, 19 nt, Artificial Sequence
  Description of Artificial Sequence: Synthetic oligonucleotide
cacauucaucuggauggac

SEQ ID NO: 3114907 - RNA, 19 nt, Artificial Sequence
  Description of Artificial Sequence: Synthetic oligonucleotide
cgugcaccugucaaccucg

SEQ ID NO: 3114908 - RNA, 19 nt, Artificial Sequence
  Description of Artificial Sequence: Synthetic oligonucleotide
cucgccggcgucguucugc

SEQ ID NO: 3114909 - RNA, 19 nt, Artificial Sequence
  Description of Artificial Sequence: Synthetic oligonucleotide
caucagccuuagccagucg

SEQ ID NO: 3114910 - RNA, 19 nt, Artificial Sequence
  Description of Artificial Sequence: Synthetic oligonucleotide
gucgagaccgugccugcuc

SEQ ID NO: 3114911 - RNA, 19 nt, Artificial Sequence
  Description of Artificial Sequence: Synthetic oligonucleotide
gccggcgucguucugcaug

SEQ ID NO: 3114912 - RNA, 19 nt, Artificial Sequence
  Description of Artificial Sequence: Synthetic oligonucleotide
ccagucggagaauggaauc

SEQ ID NO: 3114913 - RNA, 19 nt, Artificial Sequence
  Description of Artificial Sequence: Synthetic oligonucleotide
gccuuagccagucggagaa

SEQ ID NO: 3114914 - RNA, 19 nt, Artificial Sequence
  Description of Artificial Sequence: Synthetic oligonucleotide
ccauuaaagcggcccgugc

SEQ ID NO: 3114915 - RNA, 19 nt, Artificial Sequence
  Description of Artificial Sequence: Synthetic oligonucleotide
aucaucggacucgcccauc

SEQ ID NO: 3114916 - RNA, 19 nt, Artificial Sequence
  Description of Artificial Sequence: Synthetic oligonucleotide
uggacgcgugguccuuggc

SEQ ID NO: 3114917 - RNA, 19 nt, Artificial Sequence
  Description of Artificial Sequence: Synthetic oligonucleotide
ccauccugcgaauggcccc

SEQ ID NO: 3114918 - RNA, 19 nt, Artificial Sequence
  Description of Artificial Sequence: Synthetic oligonucleotide
ggcauagguuuuaaacuga

SEQ ID NO: 3114919 - RNA, 19 nt, Artificial Sequence
  Description of Artificial Sequence: Synthetic oligonucleotide
ggagcauuuccgcgggcac

SEQ ID NO: 3114920 - RNA, 19 nt, Artificial Sequence
  Description of Artificial Sequence: Synthetic oligonucleotide
gcgggcacgguacaggguc

SEQ ID NO: 3114921 - RNA, 19 nt, Artificial Sequence
  Description of Artificial Sequence: Synthetic oligonucleotide
cccauccugcgaauggccc

SEQ ID NO: 3114922 - RNA, 19 nt, Artificial Sequence
  Description of Artificial Sequence: Synthetic oligonucleotide
ggcgccaaugaugcgguug

SEQ ID NO: 3114923 - RNA, 19 nt, Artificial Sequence
  Description of Artificial Sequence: Synthetic oligonucleotide
gucguucugcaugucgaga

SEQ ID NO: 3114924 - RNA, 19 nt, Artificial Sequence
  Description of Artificial Sequence: Synthetic oligonucleotide
caauuccaucagccuuagc

SEQ ID NO: 3114925 - RNA, 19 nt, Artificial Sequence
  Description of Artificial Sequence: Synthetic oligonucleotide
gucggagaauggaaucauc

SEQ ID NO: 3114926 - RNA, 19 nt, Artificial Sequence
  Description of Artificial Sequence: Synthetic oligonucleotide
caggguccacgaacucgcc

SEQ ID NO: 3114927 - RNA, 19 nt, Artificial Sequence
  Description of Artificial Sequence: Synthetic oligonucleotide
gcucgcggagcauuuccgc

SEQ ID NO: 3114928 - RNA, 19 nt, Artificial Sequence
  Description of Artificial Sequence: Synthetic oligonucleotide
gguacaggguccacgaacu

SEQ ID NO: 3114929 - RNA, 19 nt, Artificial Sequence
  Description of Artificial Sequence: Synthetic oligonucleotide
ugucgagaccgugccugcu

SEQ ID NO: 3114930 - RNA, 19 nt, Artificial Sequence
  Description of Artificial Sequence: Synthetic oligonucleotide
agccagucggagaauggaa

SEQ ID NO: 3114931 - RNA, 19 nt, Artificial Sequence
  Description of Artificial Sequence: Synthetic oligonucleotide
uccugcgaauggccccgca

SEQ ID NO: 3114932 - RNA, 19 nt, Artificial Sequence
  Description of Artificial Sequence: Synthetic oligonucleotide
guccacgaacucgccggcg

SEQ ID NO: 3114933 - RNA, 19 nt, Artificial Sequence
  Description of Artificial Sequence: Synthetic oligonucleotide
gcacgguacaggguccacg

SEQ ID NO: 3114934 - RNA, 19 nt, Artificial Sequence
  Description of Artificial Sequence: Synthetic oligonucleotide
uuccgcgggcacgguacag

SEQ ID NO: 3114935 - RNA, 19 nt, Artificial Sequence
  Description of Artificial Sequence: Synthetic oligonucleotide
ccugcgaauggccccgcag

SEQ ID NO: 3114936 - RNA, 19 nt, Artificial Sequence
  Description of Artificial Sequence: Synthetic oligonucleotide
gguccacgaacucgccggc

SEQ ID NO: 3114937 - RNA, 19 nt, Artificial Sequence
  Description of Artificial Sequence: Synthetic oligonucleotide
cucgcccauccugcgaaug

SEQ ID NO: 3114938 - RNA, 19 nt, Artificial Sequence
  Description of Artificial Sequence: Synthetic oligonucleotide
gaauggccccgcagauggc

SEQ ID NO: 3114939 - RNA, 19 nt, Artificial Sequence
  Description of Artificial Sequence: Synthetic oligonucleotide
auccugcgaauggccccgc

SEQ ID NO: 3114940 - RNA, 19 nt, Artificial Sequence
  Description of Artificial Sequence: Synthetic oligonucleotide
gugguccuuggcgccaaug

SEQ ID NO: 3114941 - RNA, 19 nt, Artificial Sequence
  Description of Artificial Sequence: Synthetic oligonucleotide
cgguacaggguccacgaac

SEQ ID NO: 3114942 - RNA, 19 nt, Artificial Sequence
  Description of Artificial Sequence: Synthetic oligonucleotide
gaccauuaaagcggcccgu

SEQ ID NO: 3114943 - RNA, 19 nt, Artificial Sequence
  Description of Artificial Sequence: Synthetic oligonucleotide
gugcaccugucaaccucgg

SEQ ID NO: 3114944 - RNA, 19 nt, Artificial Sequence
  Description of Artificial Sequence: Synthetic oligonucleotide
acgguacaggguccacgaa

SEQ ID NO: 3114945 - RNA, 19 nt, Artificial Sequence
  Description of Artificial Sequence: Synthetic oligonucleotide
gcccgugcaccugucaacc

SEQ ID NO: 3114946 - RNA, 19 nt, Artificial Sequence
  Description of Artificial Sequence: Synthetic oligonucleotide
cguucugcaugucgagacc

SEQ ID NO: 3114947 - RNA, 19 nt, Artificial Sequence
  Description of Artificial Sequence: Synthetic oligonucleotide
acgaacucgccggcgucgu

SEQ ID NO: 3114948 - RNA, 19 nt, Artificial Sequence
  Description of Artificial Sequence: Synthetic oligonucleotide
guugcucgcggagcauuuc

SEQ ID NO: 3114949 - RNA, 19 nt, Artificial Sequence
  Description of Artificial Sequence: Synthetic oligonucleotide
gccaaugaugcgguugcuc

SEQ ID NO: 3114950 - RNA, 19 nt, Artificial Sequence
  Description of Artificial Sequence: Synthetic oligonucleotide
ccgcgggcacgguacaggg

SEQ ID NO: 3114951 - RNA, 19 nt, Artificial Sequence
  Description of Artificial Sequence: Synthetic oligonucleotide
ggcccgugcaccugucaac

SEQ ID NO: 3114952 - RNA, 19 nt, Artificial Sequence
  Description of Artificial Sequence: Synthetic oligonucleotide
ggccccgcagauggcauag

SEQ ID NO: 3114953 - RNA, 19 nt, Artificial Sequence
  Description of Artificial Sequence: Synthetic oligonucleotide
gcgucguucugcaugucga

SEQ ID NO: 3114954 - RNA, 19 nt, Artificial Sequence
  Description of Artificial Sequence: Synthetic oligonucleotide
cgucguucugcaugucgag

SEQ ID NO: 3114955 - RNA, 19 nt, Artificial Sequence
  Description of Artificial Sequence: Synthetic oligonucleotide
acucgcccauccugcgaau

SEQ ID NO: 3114956 - RNA, 19 nt, Artificial Sequence
  Description of Artificial Sequence: Synthetic oligonucleotide
cagauggcauagguuuuaa

SEQ ID NO: 3114957 - RNA, 19 nt, Artificial Sequence
  Description of Artificial Sequence: Synthetic oligonucleotide
cauuuccgcgggcacggua

SEQ ID NO: 3114958 - RNA, 19 nt, Artificial Sequence
  Description of Artificial Sequence: Synthetic oligonucleotide
ccgugcaccugucaaccuc

SEQ ID NO: 3114959 - RNA, 19 nt, Artificial Sequence
  Description of Artificial Sequence: Synthetic oligonucleotide
uggccccgcagauggcaua

SEQ ID NO: 3114960 - RNA, 19 nt, Artificial Sequence
  Description of Artificial Sequence: Synthetic oligonucleotide
ccgcagauggcauagguuu

SEQ ID NO: 3114961 - RNA, 19 nt, Artificial Sequence
  Description of Artificial Sequence: Synthetic oligonucleotide
ccaucagccuuagccaguc

SEQ ID NO: 3114962 - RNA, 19 nt, Artificial Sequence
  Description of Artificial Sequence: Synthetic oligonucleotide
ugucaaccucggccacauu

SEQ ID NO: 3114963 - RNA, 19 nt, Artificial Sequence
  Description of Artificial Sequence: Synthetic oligonucleotide
gcccauccugcgaauggcc

SEQ ID NO: 3114964 - RNA, 19 nt, Artificial Sequence
  Description of Artificial Sequence: Synthetic oligonucleotide
gcgaauggccccgcagaug

SEQ ID NO: 3114965 - RNA, 19 nt, Artificial Sequence
  Description of Artificial Sequence: Synthetic oligonucleotide
gcagauggcauagguuuua

SEQ ID NO: 3114966 - RNA, 19 nt, Artificial Sequence
  Description of Artificial Sequence: Synthetic oligonucleotide
gguccuuggcgccaaugau

SEQ ID NO: 3114967 - RNA, 19 nt, Artificial Sequence
  Description of Artificial Sequence: Synthetic oligonucleotide
ggacucgcccauccugcga

SEQ ID NO: 3114968 - RNA, 19 nt, Artificial Sequence
  Description of Artificial Sequence: Synthetic oligonucleotide
ccuuggcgccaaugaugcg

SEQ ID NO: 3114969 - RNA, 19 nt, Artificial Sequence
  Description of Artificial Sequence: Synthetic oligonucleotide
cgcggagcauuuccgcggg

SEQ ID NO: 3114970 - RNA, 19 nt, Artificial Sequence
  Description of Artificial Sequence: Synthetic oligonucleotide
acucgccggcgucguucug

SEQ ID NO: 3114971 - RNA, 19 nt, Artificial Sequence
  Description of Artificial Sequence: Synthetic oligonucleotide
auggccccgcagauggcau

SEQ ID NO: 3114972 - RNA, 19 nt, Artificial Sequence
  Description of Artificial Sequence: Synthetic oligonucleotide
cggacucgcccauccugcg

SEQ ID NO: 3114973 - RNA, 19 nt, Artificial Sequence
  Description of Artificial Sequence: Synthetic oligonucleotide
cugucaaccucggccacau

SEQ ID NO: 3114974 - RNA, 19 nt, Artificial Sequence
  Description of Artificial Sequence: Synthetic oligonucleotide
agcggcccgugcaccuguc

SEQ ID NO: 3114975 - RNA, 19 nt, Artificial Sequence
  Description of Artificial Sequence: Synthetic oligonucleotide
ccacgaacucgccggcguc

SEQ ID NO: 3114976 - RNA, 19 nt, Artificial Sequence
  Description of Artificial Sequence: Synthetic oligonucleotide
gccagucggagaauggaau

SEQ ID NO: 3114977 - RNA, 19 nt, Artificial Sequence
  Description of Artificial Sequence: Synthetic oligonucleotide
caucggacucgcccauccu

SEQ ID NO: 3114978 - RNA, 19 nt, Artificial Sequence
  Description of Artificial Sequence: Synthetic oligonucleotide
uggcgccaaugaugcgguu

SEQ ID NO: 3114979 - RNA, 19 nt, Artificial Sequence
  Description of Artificial Sequence: Synthetic oligonucleotide
cgcccauccugcgaauggc

SEQ ID NO: 3114980 - RNA, 19 nt, Artificial Sequence
  Description of Artificial Sequence: Synthetic oligonucleotide
cgggcacgguacagggucc

SEQ ID NO: 3114981 - RNA, 19 nt, Artificial Sequence
  Description of Artificial Sequence: Synthetic oligonucleotide
gcggagcauuuccgcgggc

SEQ ID NO: 3114982 - RNA, 19 nt, Artificial Sequence
  Description of Artificial Sequence: Synthetic oligonucleotide
ccucggccacauucaucug

SEQ ID NO: 3114983 - RNA, 19 nt, Artificial Sequence
  Description of Artificial Sequence: Synthetic oligonucleotide
ggcacgguacaggguccac

SEQ ID NO: 3114984 - RNA, 19 nt, Artificial Sequence
  Description of Artificial Sequence: Synthetic oligonucleotide
gggcacgguacagggucca

SEQ ID NO: 3114985 - RNA, 19 nt, Artificial Sequence
  Description of Artificial Sequence: Synthetic oligonucleotide
ccugucaaccucggccaca

SEQ ID NO: 3114986 - RNA, 19 nt, Artificial Sequence
  Description of Artificial Sequence: Synthetic oligonucleotide
gcaugucgagaccgugccu

SEQ ID NO: 3114987 - RNA, 19 nt, Artificial Sequence
  Description of Artificial Sequence: Synthetic oligonucleotide
gccccgcagauggcauagg

SEQ ID NO: 3114988 - RNA, 19 nt, Artificial Sequence
  Description of Artificial Sequence: Synthetic oligonucleotide
cggagcauuuccgcgggca

SEQ ID NO: 3114989 - RNA, 19 nt, Artificial Sequence
  Description of Artificial Sequence: Synthetic oligonucleotide
ccggcgucguucugcaugu

SEQ ID NO: 3114990 - RNA, 19 nt, Artificial Sequence
  Description of Artificial Sequence: Synthetic oligonucleotide
gcggcccgugcaccuguca

SEQ ID NO: 3114991 - RNA, 19 nt, Artificial Sequence
  Description of Artificial Sequence: Synthetic oligonucleotide
gguugcucgcggagcauuu

SEQ ID NO: 3114992 - RNA, 19 nt, Artificial Sequence
  Description of Artificial Sequence: Synthetic oligonucleotide
cccgcagauggcauagguu

SEQ ID NO: 3114993 - RNA, 19 nt, Artificial Sequence
  Description of Artificial Sequence: Synthetic oligonucleotide
ccccgcagauggcauaggu

SEQ ID NO: 3114994 - RNA, 19 nt, Artificial Sequence
  Description of Artificial Sequence: Synthetic oligonucleotide
cggcccgugcaccugucaa

SEQ ID NO: 3114995 - RNA, 19 nt, Artificial Sequence
  Description of Artificial Sequence: Synthetic oligonucleotide
cgcagauggcauagguuuu

SEQ ID NO: 3114996 - RNA, 19 nt, Artificial Sequence
  Description of Artificial Sequence: Synthetic oligonucleotide
ggauggacgcgugguccuu

SEQ ID NO: 3114997 - RNA, 19 nt, Artificial Sequence
  Description of Artificial Sequence: Synthetic oligonucleotide
gcgugguccuuggcgccaa

SEQ ID NO: 3114998 - RNA, 19 nt, Artificial Sequence
  Description of Artificial Sequence: Synthetic oligonucleotide
cccgugcaccugucaaccu

SEQ ID NO: 3114999 - RNA, 19 nt, Artificial Sequence
  Description of Artificial Sequence: Synthetic oligonucleotide
cgcgugguccuuggcgcca

SEQ ID NO: 3115000 - RNA, 19 nt, Artificial Sequence
  Description of Artificial Sequence: Synthetic oligonucleotide
gcauuuccgcgggcacggu

SEQ ID NO: 3115001 - RNA, 19 nt, Artificial Sequence
  Description of Artificial Sequence: Synthetic oligonucleotide
ccuuagccagucggagaau

SEQ ID NO: 3115002 - RNA, 19 nt, Artificial Sequence
  Description of Artificial Sequence: Synthetic oligonucleotide
gcgguugcucgcggagcau

SEQ ID NO: 3115003 - RNA, 19 nt, Artificial Sequence
  Description of Artificial Sequence: Synthetic oligonucleotide
cgcgggcacgguacagggu

SEQ ID NO: 3115004 - RNA, 19 nt, Artificial Sequence
  Description of Artificial Sequence: Synthetic oligonucleotide
cgguugcucgcggagcauu

SEQ ID NO: 3115005 - RNA, 19 nt, Artificial Sequence
  Description of Artificial Sequence: Synthetic oligonucleotide
cggcgucguucugcauguc

SEQ ID NO: 3115006 - RNA, 19 nt, Artificial Sequence
  Description of Artificial Sequence: Synthetic oligonucleotide
cgccaaugaugcgguugcu

SEQ ID NO: 3115007 - RNA, 19 nt, Artificial Sequence
  Description of Artificial Sequence: Synthetic oligonucleotide
cgaacucgccggcgucguu

SEQ ID NO: 3115008 - RNA, 19 nt, Artificial Sequence
  Description of Artificial Sequence: Synthetic oligonucleotide
cgugguccuuggcgccaau
